(19) United States
(12) Patent Application Publication
(10) Pub. No.: US 2023/0033866 A1
(43) Pub. Date: Feb. 2, 2023

(54) COMPOSITIONS AND METHODS FOR THE TARGETING OF RHODOPSIN

(71) Applicant: Scribe Therapeutics Inc., Alameda, CA (US)

(72) Inventors: Benjamin OAKES, El Cerrito, CA (US); Hannah SPINNER, Boston, MA (US); Sarah DENNY, San Francisco, CA (US); Brett T. STAAHL, Tiburon, CA (US); Kian TAYLOR, Atlanta, GA (US); Katherine BANEY, Berkeley, CA (US); Isabel COLIN, Oakland, CA (US); Maroof ADIL, Davis, CA (US); Cole URNES, Los Alamitos, CA (US); Sean HIGGINS, Alameda, CA (US)

(21) Appl. No.: 17/780,945

(22) PCT Filed: Dec. 4, 2020
(86) PCT No.: PCT/US2020/063477

§ 371 Date: May 27, 2022

Related U.S. Application Data
(60) Provisional application No. 62/945,044, filed on Dec. 6, 2019.

(51) Int. Cl. A61K 48/00; C12N 9/22; C12N 15/11; C07K 14/705; A61P 27/02; C12N 15/86

(52) U.S. Cl. CPC A61K 48/0066; C12N 9/22; C12N 15/11; C07K 14/705; A61P 27/02; C12N 15/86; C12N 2310/20; C12N 2800/80; C07K 2319/09; C12N 2750/14043; C12N 2750/14071; C12N 2750/14023; C07K 2319/50

(57) ABSTRACT

Provided herein are Class 2 Type V CRISPR:gNA systems comprising Class 2 Type V CRISPR polypeptides (e.g. CasX), guide nucleic acids (gNA), and optionally donor template nucleic acids useful in the modification of a RHO gene. The systems are also useful for introduction into cells, for example eukaryotic cells having mutations in the rhodopsin protein. Also provided are methods of using such systems to modify cells having such mutations and utility in methods of treatment of a subject with a RHO-related disease, such as retinitis pigmentosa.

### CROSS REFERENCE TO RELATED APPLICATIONS

[0001] This application claims priority to U.S. provisional patent application No. 62/945,044, filed on Dec. 6, 2019, the contents of which are incorporated herein by reference in their entirety.

### INCORPORATION BY REFERENCE OF SEQUENCE LISTING

[0002] This application contains a Sequence Listing which has been submitted in ASCII format via EFS-WEB and is hereby incorporated by reference in its entirety. Said ASCII copy, created on Dec. 3, 2020 is named SCRB_018_01WO_SeqList_ST25.txt and is 6.76 MB in size.

### BACKGROUND

[0003] Retinitis pigmentosa (RP) is a progressive neurodegenerative disorder, which affects 1 in 3,000 individuals (Chinchore, Y. et al. Accumulation of Rhodopsin in Late Endosomes Triggers Photoreceptor Cell Degeneration. PLoS Genetics. 5(2): e1000377 (2009)). The disorder begins with death of rod photoreceptor cells, which are the only cells in the retina to express rhodopsin. The loss of rod photoreceptor cells in the retina eventually leads to loss of cone cells; the mainstay of human vision.

[0004] Rhodopsin is the visual pigment of photoreceptors in retinal rods. Rhodopsin is a G-coupled receptor, which comprises almost 50% of the total protein content of rod outer segments and 80% of that of discs (Hargrave Pa., et al. Rhodopsin and phototransduction: a model system for G protein-linked receptors. FASEB J. 6(6):2323 (1992)). Rhodopsin, which has 348-amino acids with 7 transmembrane domains, a luminal N-terminus and a cytoplasmic C-terminus, mediates vision in dim light and absorbs maximally at 495 nm. (Nathans, J., et al. Molecular genetics of inherited variation in human color vision. Science 232: 203 (1986)). Over 150 distinct mutations in the light-sensing molecule rhodopsin are known to cause autosomal dominant retinitis pigmentosa (adRP) and most are missense mutations affecting single amino acid residues in the rhodopsin protein (Athanasiou, D., et al. The molecular and cellular basis of rhodopsin retinitis pigmentosa reveals potential strategies for therapy. Prog Retin Eye Res. 62: 1 (2018)). Mutations in rhodopsin are also associated with dominant congenital stationary night blindness (adCSNB) and, less frequently, recessive RP (arRP). Recessive RP is usually associated with loss of rhodopsin function, whereas the dominant conditions are a consequence of gain of function and/or dominant negative activity. Several of these mutations are listed in Table 3. These mutations affect rhodopsin transport to the outer segments of rod photoreceptor cells, rhodopsin folding, and rhodopsin endocytosis. Mutations in the human rhodopsin that affect its folding, trafficking and activity are the most commonly encountered causes of retinal degeneration in patients afflicted with RP. Due to their improper folding, class II mutants are labeled with ubiquitin and are destined for degradation by the ubiquitin proteasome system (UPS). Because of the large protein load, the degradation machinery is overwhelmed, which results in a failure to clear other misfolded proteins and leads to cell toxicity. A single base-substitution mutation in position 23 of the rhodopsin gene (RHO), in which proline is changed to histidine (Pro23His or P23H), accounts for 25% to 40% of all cases of adRP in North America (Dejneka N S, Bennett J. Gene therapy and retinitis pigmentosa: advances and future challenges. BioEssays. 23:662 (2001)).

[0005] The advent of CRISPR/Cas systems and the programmable nature of these systems has facilitated their use as a versatile technology for genomic manipulation and engineering. Particular CRISPR proteins are particularly well suited for such manipulation. For example CasX, has a compact size, offering ease of delivery, and the nucleotide sequence encoding the protein is relatively short, an advantage for its incorporation into viral vectors for delivery into a cell.

[0006] As the treatment options for RP remain inadequate, there is a critical need for developing safe and permanent treatments for this disorder. Provided herein are compositions and methods for targeting rhodopsin mutations to the address this need.

### SUMMARY

[0007] The present disclosure provides compositions of modified Class 2, Type V CRISPR proteins and guide nucleic acids used in the editing of rhodopsin (RHO) gene target nucleic acid sequences having one or more mutations. The Class 2, Type V CRISPR proteins and guide nucleic acids can be modified for passive entry into target cells. The Class 2, Type V CRISPR proteins and guide nucleic acids are useful in a variety of methods for target nucleic acid modification, which methods are also provided.

[0008] In one aspect, the present disclosure relates to Class 2 Type V CRISPR protein and guide nucleic acid systems (e.g. CasX:gNA system) and methods used to alter a target nucleic acid comprising the RHO gene in cells. In some embodiments of the disclosure, the system has utility in modifying RHO target nucleic acid sequence in a population of cells to correct or compensate for the one or more mutations of the RHO gene in the cells of the population, including, but not limited to the mutations of Table 4A. In other embodiments, the system has utility in modifying RHO target nucleic acid sequence in a subject.

[0009] In some embodiments, the Class 2 Type V:gNA system gNA is a gRNA, or a gDNA, or a chimera of RNA and DNA, and may be a single-molecule gNA or a dual-molecule gNA. In other embodiments, the system gNA has a targeting sequence complementary to a target nucleic acid sequence comprising a region within the RHO gene or that comprises a sequence having at least about 50%, at least about 60%, at least about 70%, at least about 80%, at least about 85%, at least about 90%, or at least about 95%, or 100% sequence identity to a sequence selected from the group consisting of SEQ ID NOS:328-346, 367-376, 382-2100 and 2286-27274. In some embodiments the gNA has a targeting sequence consisting of a sequence selected from the group consisting of SEQ ID NOS: 328-346, 367-376, 382-2100 and 2286-27274. In some embodiments, the targeting sequence of the gNA is complementary to a sequence within or proximal to an exon of exons 1 to 5 of the RHO gene. In another embodiment, the targeting sequence of the gNA is complementary to a sequence within or proximal to an intron of the RHO gene. In another embodiment, the targeting sequence of the gNA is complementary to a sequence within or proximal to an intron-exon junction of the RHO gene. In another embodiment, the targeting sequence of the gNA is complementary to a sequence within or proximal to a regulatory element of the RHO gene. In another embodiment, the targeting sequence of the gNA is complementary to a sequence within or proximal to an intergenic region of the RHO gene. The gNA can comprise a targeting sequence comprising 14 to 30 consecutive nucleotides. In other embodiments, the targeting sequence of the gNA consists of 20 nucleotides. In other embodiments, the targeting sequence consists of 19 nucleotides. In other embodiments, the targeting sequence consists of 18 nucleotides. In other embodiments, the targeting sequence consists of 17 nucleotides. In other embodiments, the targeting sequence consists of 16 nucleotides. In other embodiments, the targeting sequence consists of 15 nucleotides. In a particular embodiment, the targeting sequence comprises a sequence of

(SEQ ID NO: 382)
AAGUGGCUGCGUACCACACC.

[0010] In some embodiments, the gNA has a scaffold comprising a sequence selected from the group consisting of sequences of SEQ ID NOS; 4-16, or a sequence having at least about 50%, at least about 60%, at least about 70%, at least about 80%, at least about 90%, at least about 95%, at least about 96%, at least about 97%, at least about 98%, or at least about 99% sequence identity thereto. In other embodiments, the CasX:gNA system gNA variant has a scaffold comprising a sequence selected from the group consisting of sequences of SEQ ID NOS: 2201-2285, or a sequence having at least about 50%, at least about 60%, at least about 70%, at least about 80%, at least about 90%, at least about 95%, at least about 96%, at least about 97%, at least about 98%, at least about 99% sequence identity thereto. In some embodiments, the CasX:gNA system gNA variant has a scaffold consisting of a sequence selected from the group consisting of sequences of SEQ ID NOS: 2201-2285.

[0011] In some embodiments, the Class 2 Type V CRISPR protein comprises a reference CasX sequence comprising any one of SEQ ID NOS: 1-3 or a CasX variant sequence SEQ ID NOS: 49-160, 237-239, 243-246, 251-263 or 273-281 as set forth in Tables 3, 6, 7, 8, and 10, or a sequence having at least about 50%, at least about 60%, at least about 70%, at least about 80%, or at least about 90%, or at least about 95%, or at least about 96%, or at least about 97%, or at least about 98%, or at least about 99% sequence identity thereto. In these embodiments, a CasX variant exhibits one or more improved characteristics relative to the reference CasX protein. In some embodiments, the CasX protein has binding affinity for a protospacer adjacent motif (PAM) sequence selected from the group consisting of TTC, ATC, GTC, and CTC. In some embodiments, the CasX protein has binding affinity for the PAM sequence that is at least 1.5-fold greater compared to the binding affinity of any one of the CasX proteins of SEQ ID NOS: 1-3 for the PAM sequences selected from the group consisting of TTC, ATC, GTC, and CTC.

[0012] In some embodiments of the Class 2 Type V CRISPR:gNA system, the CRISPR molecule and the gNA molecule are associated together in a ribonuclear protein complex (RNP). In a particular embodiment, the RNP comprising a CasX variant and the gNA variant exhibits greater editing efficiency and/or binding of a target sequence in the target DNA when any one of the PAM sequences TTC, ATC, GTC, or CTC is located 1 nucleotide 5′ to the non-target strand sequence having identity with the targeting sequence of the gNA in a cellular assay system compared to the editing efficiency and/or binding of an RNP comprising a reference CasX protein and a reference gNA in a comparable assay system.

[0013] In some embodiments, the system further comprises a donor template comprising a nucleic acid comprising at least a portion of a wild-type RHO gene sequence, wherein the RHO gene portion is selected from the group consisting of a RHO exon, a RHO intron, a RHO intron-exon junction, a RHO regulatory element, or combinations thereof, wherein the donor template is inserted by homology-directed repair (HDR) or homology-independent targeted integration (HITI) to correct or compensate for the mutation in the RHO gene, such that a functional rhodopsin protein can be expressed. In other embodiments, the donor template comprises a nucleic acid sequence having one or more mutations relative to the wild-type RHO gene sequence such that, upon insertion, the RHO gene is knocked-down or knocked-out. In some cases the donor sequence is a single-stranded DNA template or a single stranded RNA template. In other cases, the donor template is a double-stranded DNA template.

[0014] In another aspect, the disclosure relates to nucleic acids encoding the systems of any of the embodiments described herein, as well as vectors comprising the nucleic acids. In some embodiments, the vector is selected from the group consisting of a retroviral vector, a lentiviral vector, an adenoviral vector, an adeno-associated viral (AAV) vector, a herpes simplex virus (HSV) vector, a plasmid, a minicircle, a nanoplasmid, and an RNA vector. In other embodiments, the vector is a virus-like particle (VLP) comprising one or more components of a gag polyprotein and an RNP of a CasX and gNA of any of the embodiments described herein and, optionally, a donor template nucleic acid.

[0015] In another aspect, the disclosure provides a method of modifying a RHO target nucleic acid sequence in a population of cells, wherein said method comprises introducing into the cells of the population: a) a composition comprising the Class 2 Type V:gNA system of any of the embodiments disclosed herein; b) the nucleic acid of any of the embodiments disclosed herein; c) the vector of any of the embodiments disclosed herein; d) the VLP of any of the embodiments disclosed herein; or e) a combination of two or more of the foregoing wherein the RHO target nucleic acid sequence of the cells targeted by the first gNA is modified by the Class 2 Type V CRISPR protein (e.g. CasX). In some embodiments of the method, the method comprises introducing into the cells of the population a second gNA or a nucleic acid encoding the second gNA, wherein the second gNA has a targeting sequence complementary to a different or overlapping portion of the RHO target nucleic acid compared to the first gNA, resulting in an additional break in the RHO target nucleic acid of the cells of the population. In some embodiments of the method, the modifying comprises introducing an insertion, deletion, substitution, duplication, or inversion of one or more nucleotides in the target nucleic acid sequence as compared to the genomic sequence, wherein the modifying results in a correction of or compensation for the mutation of the RHO gene in the cells of the population. As used herein, “compensation” means that the sequence of the target nucleic acid is modified such that, while not being identical to a wild-type genomic sequence, a functional rhodopsin protein is nevertheless able to be expressed from the modified gene. In some cases, the method further comprises contacting the target nucleic acid with a donor template nucleic acid of any of the embodiments disclosed herein, wherein insertion of the donor template results in a correction of the RHO gene in the cells of the population such that a functional rhodopsin protein is expressed in the cells of the population. In some cases, the modification results in expression of a functional rhodopsin protein that is increased by at least about 10%, at least about 20%, at least about 30%, at least about 40%, at least about 50%, at least about 60%, at least about 70%, at least about 80%, or at least about 90% in comparison to a cell where the RHO gene has not been modified. The cells of the population to be modified by the methods of the embodiments are eukaryotic. In some embodiments of the method, the eukaryotic cells for modification are selected from the group consisting of rodent cells, mouse cells, rat cells, and non-human primate cells. In other embodiments of the method, the eukaryotic cells for modification are human cells. In some embodiments of the method, the eukaryotic cells for modification are selected from the group consisting of a rod photoreceptor cell, a retinal progenitor cell, a pluripotent stem cell (iPSC), fibroblasts, and Müller glial cells. In some embodiments of the method, the modifying of the RHO gene target nucleic acid sequence of the population of cells occurs in vitro or ex vivo. The present disclosure provided populations of such cells modified by the foregoing methods. In one embodiment, the modified cells of the population can be administered to one or both eyes of the subject having a RHO-related disease, using a therapeutically effective amount of the cells. In other embodiments of the method, the modifying of the RHO gene target nucleic acid sequence of the population of cells occurs in vivo in a subject, wherein the subject is selected from the group consisting of a rodent, a mouse, a rat, a non-human primate, and a human.

[0016] In other embodiments, the present disclosure provides methods of treating a RHO-related disease (e.g., retinitis pigmentosa) in a subject in need thereof, comprising modifying a RHO gene having one or more mutations in eye retinal cells of the subject, the modifying comprising contacting said cells with a therapeutically effective dose of: i) a composition comprising a CasX and gNA of any of the embodiments disclosed herein and, optionally, a donor template; ii) a nucleic acid encoding the composition of (i); a vector selected from the group consisting of a retroviral vector, a lentiviral vector, an adenoviral vector, an adeno-associated viral (AAV) vector, a herpes simplex virus (HSV) vector, a plasmid, a minicircle, a nanoplasmid, a DNA vector, and an RNA vector, and comprising a nucleic acid of (ii); iii) a VLP comprising the composition of (i); or iv) combinations of two or more of (i)-(iii), wherein the RHO gene of the cells targeted by the first gNA is modified by the CasX protein (and, optionally, the donor template) such that the mutation of the RHO gene is corrected or compensated for and a functional rhodopsin protein is expressed. In other embodiments of the method of treating a RHO-related disease in a subject, the RHO gene is knocked-down or knocked-out such that the expression of non-functional rhodopsin protein is reduced or eliminated. In some embodiments, the subject is selected from the group consisting of a rodent, a mouse, a rat, a non-human primate, and a human. In some embodiments, the therapeutically effective dose is administered to the subject by a route of administration selected from intraocular, intravitreal, subretinal, or suprachoroidal injection or implantation, or combinations thereof. In some embodiments, the method results in improvement in one or more clinically-relevant endpoints selected from the group consisting of mean change or mean rate of change in: 1) best corrected visual acuity (BCVA); 2) visual field sensitivity (including analysis of hill of vision volumes); 3) retinal sensitivity measured by full-field stimulus testing (FST); 4) multiluminance mobility tests; 5) electrophysiological measures of retinal function; 6) optical coherence tomography (OCT) documenting the rate of photoreceptor loss; and 7) hypo- or hyperfluorescent lesion size on fundus autofluorescence; 8) color vision; 9) contrast sensitivity; 10) gaze tracking; 11) light aversion; 12) macular sensitivity.

[0017] In another aspect, the present disclosure provides kits comprising the nucleic acids, vectors, Class 2 Type V CRISPR proteins, gNAs and gene editing pairs described herein.

[0018] In another aspect, provided herein are compositions comprising gene editing pairs, or compositions of vectors comprising or encoding gene editing pairs for use as a medicament for the treatment of a subject having a RHO-related disease.

[0019] In another aspect, provided herein are Class 2 Type V CRISPR:gNA systems, compositions comprising Class 2 Type V CRISPR:gNA systems, vectors comprising or encoding Class 2 Type V CRISPR:gNA systems, VLP comprising Class 2 Type V CRISPR:gNA systems, or populations of cells edited using the Class 2 Type V CRISPR:gNA systems for use as a medicament for the treatment of a RHO-related disease.

[0020] In another aspect, provided herein are Class 2 Type V CRISPR:gNA systems, composition comprising Class 2 Type V CRISPR:gNA systems, or vectors comprising or encoding Class 2 Type V CRISPR:gNA systems, VLP comprising Class 2 Type V CRISPR:gNA systems, populations of cells edited using the Class 2 Type V CRISPR:gNA systems, for use in a method of treatment of a RHO-related disease in a subject in need thereof.

### INCORPORATION BY REFERENCE

[0021] All publications, patents, and patent applications mentioned in this specification are herein incorporated by reference to the same extent as if each individual publication, patent, or patent application was specifically and individually indicated to be incorporated by reference. The contents of PCT/US2020/036505, filed on Jun. 5, 2020, and the contents of U.S. Provisional Patent Application No. 63/121,196, filed on Dec. 3, 2020, both which disclose CasX variants and gNA variants, are hereby incorporated by reference in their entireties.

### BRIEF DESCRIPTION OF THE DRAWINGS

[0022] The novel features of the invention are set forth with particularity in the appended claims. A better understanding of the features and advantages of the present invention will be obtained by reference to the following detailed description that sets forth illustrative embodiments, in which the principles of the invention are utilized, and the accompanying drawings of which:

[0023] FIG. 1 shows an SDS-PAGE gel of StX2 purification fractions visualized by colloidal Coomassie staining, as described in Example 1.

[0024] FIG. 2 shows the chromatogram from a size exclusion chromatography assay of the StX2, using of Superdex 200 16/600 pg Gel Filtration, as described in Example 1.

[0025] FIG. 3 shows an SDS-PAGE gel of StX2 purification fractions visualized by colloidal Coomassie staining, as described in Example 1.

[0026] FIG. 4 is a schematic showing the organization of the components in the pSTX34 plasmid used to assemble the CasX constructs, as described in Example 2.

[0027] FIG. 5 is a schematic showing the steps of generating the CasX 119 variant, as described in Example 1.

[0028] FIG. 6 shows an SDS-PAGE gel of purification samples, visualized on a Bio-Rad Stain-Free™ gel, as described in Example 2.

[0029] FIG. 7 shows the chromatogram of Superdex 200 16/600 pg Gel Filtration, as described in Example 2.

[0030] FIG. 8 shows an SDS-PAGE gel of gel filtration samples, stained with colloidal Coomassie, as described in Example 2.

[0031] FIG. 9 shows an SDS-PAGE gel of purification samples of CasX 438, visualized on a Bio-Rad Stain-Free™ gel, as described in Example 2.

[0032] FIG. 10 shows the chromatogram from a size exclusion chromatography assay of the CasX 438, using of Superdex 200 16/600 pg gel filtration, as described in Example 2.

[0033] FIG. 11 shows an SDS-PAGE gel of CasX 438 purification fractions visualized by colloidal Coomassie staining, as described in Example, as described in Example 2.

[0034] FIG. 12 shows an SDS-PAGE gel of purification samples of CasX 457, visualized on a Bio-Rad Stain-Free™ gel, as described in Example 2.

[0035] FIG. 13 shows the chromatogram from a size exclusion chromatography assay of the CasX 457, using of Superdex 200 16/600 pg gel filtration, as described in Example 2.

[0036] FIG. 14 shows an SDS-PAGE gel of CasX 457 purification fractions visualized by colloidal Coomassie staining, as described in Example 2.

[0037] FIG. 15 is a gel image from a T7E1 assay demonstrating allele-specific editing at the wild-type RHO p23 locus in HEK293T cells (arrows, center lane), while the construct targeting the P23H mutation (left lane) as well as a non-targeting negative control (right lane) show no evidence of editing, as described in Example 18.

[0038] FIG. 16 is a gel image from a T7E1 assay demonstrating allele-specific editing at the wild-type RHO p23 locus in HEK293T cells by CasX 119, guide 174 and spacer 11.1 (second lane), while the construct having the 11.2 spacer targeting the P23H mutation (third lane) shows no evidence of editing, as described in Example 18. Similarly, Cas9 constructs with appropriate WT spacers showed evidence of editing (lanes 5 and 6) while Cas9 constructs with spacers to the mutation show no evidence of editing (lanes 4 and 7).

[0039] FIG. 17 is a graph quantifying the results of the T7E1 assay.

[0040] FIG. 18 is a graph of the results of an assay for the quantification of active fractions of RNP formed by sgRNA174 and the CasX variants, as described in Example 11. Equimolar amounts of RNP and target were co-incubated and the amount of cleaved target was determined at the indicated timepoints. Mean and standard deviation of three independent replicates are shown for each timepoint. The biphasic fit of the combined replicates is shown. “2” refers to the reference CasX protein of SEQ ID NO:2.

[0041] FIG. 19 shows the quantification of active fractions of RNP formed by CasX2 (reference CasX protein of SEQ ID NO:2) and the modified sgRNAs, as described in Example 11. Equimolar amounts of RNP and target were co-incubated and the amount of cleaved target was determined at the indicated timepoints. Mean and standard deviation of three independent replicates are shown for each timepoint. The biphasic fit of the combined replicates is shown.

[0042] FIG. 20 shows the quantification of active fractions of RNP formed by CasX 491 and the modified sgRNAs under guide-limiting conditions, as described in Example 11. Equimolar amounts of RNP and target were co-incubated and the amount of cleaved target was determined at the indicated timepoints. The biphasic fit of the data is shown.

[0043] FIG. 21 shows the quantification of cleavage rates of RNP formed by sgRNA174 and the CasX variants, as described in Example 11. Target DNA was incubated with a 20-fold excess of the indicated RNP and the amount of cleaved target was determined at the indicated time points. Mean and standard deviation of three independent replicates are shown for each timepoint, except for 488 and 491 where a single replicate is shown. The monophasic fit of the combined replicates is shown.

[0044] FIG. 22 shows the quantification of cleavage rates of RNP formed by CasX2 and the sgRNA variants, as described in Example 11. Target DNA was incubated with a 20-fold excess of the indicated RNP and the amount of cleaved target was determined at the indicated time points. Mean and standard deviation of three independent replicates are shown for each timepoint. The monophasic fit of the combined replicates is shown.

[0045] FIG. 23 shows the quantification of initial velocities of RNP formed by CasX2 and the sgRNA variants, as described in Example 11. The first two time-points of the previous cleavage experiment were fit with a linear model to determine the initial cleavage velocity.

[0046] FIG. 24 shows the quantification of cleavage rates of RNP formed by CasX491 and the sgRNA variants, as described in Example 11. Target DNA was incubated with a 20-fold excess of the indicated RNP at 10° C. and the amount of cleaved target was determined at the indicated time points. The monophasic fit of the timepoints is shown.

[0047] FIG. 25 is a diagram and an example fluorescence activated cell sorting (FACS) plot illustrating an exemplary method for assaying the effectiveness of a reference CasX protein or single guide RNA (sgRNA), or variants thereof, as described in Example 14. A reporter (e.g., GFP reporter) coupled to a gRNA target sequence, complementary to the gRNA spacer, is integrated into a reporter cell line. Cells are transformed or transfected with a CasX protein and/or sgRNA variant, with the spacer motif of the sgRNA complementary to and targeting the gRNA target sequence of the reporter. Ability of the CasX:sgRNA ribonucleoprotein complex to cleave the target sequence is assayed by FACS. Cells that lose reporter expression indicate occurrence of CasX:sgRNA ribonucleoprotein complex-mediated cleavage and indel formation.

[0048] FIG. 26 shows results of gene editing in an EGFP disruption assay, as described in Example 16. Editing was measured by indel formation and GFP disruption in HEK293 cells carrying a GFP reporter. FIG. 26 shows the improvement in editing efficiency of a CasX sgRNA variant of SEQ ID NO:5 versus the reference of SEQ ID NO:4 across 10 targets. When averaged across 10 targets, the editing efficiency of sgRNA SEQ ID NO:5 improved 176% compared to SEQ ID NO:4.

[0049] FIG. 27 shows results of gene editing in an EGFP disruption assay where further editing improvements were obtained in the sgRNA scaffold of SEQ ID NO:5 by swapping the extended stem loop sequence (indicated in the X-axis) for additional sequences to generate the scaffolds whose sequences are shown in Table 2, as described in Example 17.

[0050] FIG. 28 is a graph showing the fold improvement of sgRNA variants generated by DME mutations normalized to SEQ ID NO:5 as the CasX reference sgRNA, as described in Example 17.

[0051] FIG. 29 is a graph showing the fold improvement normalized to the SEQ ID NO:5 reference CasX sgRNA of variants created by both combining (stacking) scaffold stem mutations showing improved cleavage, DME mutations showing improved cleavage, and using ribozyme appendages showing improved cleavage (the appendages and their sequences are listed in Table 13 in Example 17). The resulting sgRNA variants yield 2-fold or greater improvement in cleavage compared to SEQ ID NO:5 in this assay. EGFP editing assays were performed with spacer target sequences of E6 (TGTGGTCGGGGTAGCGGCTG (SEQ ID NO: 17)) and E7 (TCAAGTCCGCCATGCCCGAA (SEQ ID NO: 18)) described in Example 16.

[0052] FIG. 30 shows a gel image from the T7E1 assay demonstrating allele-specific editing by CasX variant 119 and scaffold 64 at the WT RHO P23 locus in HEK293T cells, as described in Example 18. Genomic DNA from HEK293T cells lipofected with CasX and guide constructs are: (from left to right in the gel) CasX 119 and guide scaffold 64 with spacer targeting mutant allele, CasX 119 and guide scaffold 64 with spacer targeting WT allele (demonstrating editing), CasX 119 and guide scaffold 64 with non-targeting spacer, CasX 2 and guide scaffold 2 with spacer targeting mutant allele, CasX 2 and guide scaffold 2 with spacer targeting WT allele, CasX 2 and guide scaffold 2 with non-targeting spacer) were assayed for editing at the RHO locus by a T7E1 assay.

[0053] FIG. 31 shows a gel image of the T7E1 assay results assessing editing by CasX, SaCas9 and SpyCa9 at the WT RHO P23 locus in HEK293T cells, as described in Example 18.

[0054] FIG. 32 is a graph with the quantification of the editing results of the gel in FIG. 31, as described in Example 18.

[0055] FIG. 33 shows results of an editing experiment in which CasX protein variants 119, 438, 488, and 491 with scaffold 174 were used to edit the RHO locus in ARPE19 dual reporter cells (WT.RHO-GFP P23H.RHO-mscarlet) cells in an allele-specific manner, as described in Example 19. ARPE19 dual reporter cells were transduced at MOI 300 with lentivirus packaging CasX constructs with spacer 11.1 targeting the WT.RHO allele, and editing was analyzed at the WT allele (GFP-cells, black bars) and the mutant allele (mscarlet-cells, gray bars) by flow cytometry 14 days post-transduction. Data are presented as average editing from n=3 replicates.

[0056] FIG. 34 shows results of an editing experiments in which CasX protein variants 119, 438, 488, and 491 with scaffold 174 edit the RHO locus in ARPE19 dual reporter cells (WT.RHO-GFP P23H.RHO-mscarlet) cells in an allele-specific manner, as described in Example 19. ARPE19 dual reporter cells were transduced at MOI 300 with lentivirus packaging CasX constructs with spacer 11.2 targeting the mut.RHO allele, and editing was analyzed at the WT allele (GFP-cells, black bars) and the mutant allele (mscarlet-cells, gray bars) by flow cytometry 14 days post-transduction. Data are presented as average editing from n=3 replicates.

[0057] FIG. 35 shows the results of an editing experiment in which CasX protein variants 438, 488, and 491 with scaffold 174 edit the RHO locus in HEK293T dual reporter cells (WT.RHO-GFP P23H.RHO-mscarlet) cells, as described in Example 20. HEK293T dual reporter cells were transduced at MOI 300 with lentivirus packaging CasX constructs targeting the RHO gene and editing was analyzed by flow cytometry 14 days post-transduction. Data are presented as violin plots where each individual data point represents average editing (from n=3 replicates) generated by a single spacer.

[0058] FIG. 36 shows results of editing in the HEK293 cell line, treated by transfection of p34.119.174.11.1 (or NT—last bar), assessing for indel formation, as described in Example 21.

[0059] FIG. 37 shows results of editing in the HEK293 cell line, treated by transfection of p34.119.174.11.2 (or NT—last bar), assessing for indel formation, as described in Example 21.

[0060] FIG. 38 shows results of editing in the ARPE cell line (with P23H dual reporter), treated by lentiviral delivery of p56.491.174.11.1 (or NT—last bar), assessing for indel formation, as described in Example 21.

[0061] FIG. 39 is an illustration of reference mRHO exon 1 locus (SEQ ID NOs: 27280 and 27281) and target amino acid residue P23 (CCC) sequence (highlighted in bold), showing spacer 11.30 target sequence and expected CasX-mediated cleavage, as described in Example 22. The most common predicted edits quantified in CRISPResso edits (substitution/deletions (SEQ ID NOs: 27282-27300)) are displayed under the reference genome).

[0062] FIG. 40 shows results of in vivo AAV CasX-mediated editing of the mRHO P23 locus in retinae in C57BL6J (n=6-8) mice, as described in Example 22. Retinae were harvested 3 weeks post-injection, gDNA extracted, amplified and indel rates analyzed via NGS and CRISPResso analysis. Left panel shows the quantification in % of total indels detected by NGS at the mouse P23 RHO locus in AAV-CasX or sham-injected retinae compared to the mouse reference genome. Right panel shows the fraction (%) of edits predicted to lead to frameshift mutations in RHO protein. Data are presented as average of NGS readouts of editing outcomes from the entire retina, from six to eight animals per experimental cohort.

[0063] FIG. 41 shows representative fluorescence imaging of retinas from AAV-CasX treated mice or negative controls and stained, as described in Example 22. Cell nuclei were counterstained with DAPI (top row; FIG. 41 a-c) to visualized retinal layers and stained with HA-tag (bottom row, FIG. 41 d-f) antibody to detect CasX expression in photoreceptors (ONL) and other retinal layers (INL; GCL). Legends: ONL=Outer nuclear layer; INL=Inner nuclear layer, GCL=Ganglion cell layer.

### DETAILED DESCRIPTION

[0064] While exemplary embodiments have been shown and described herein, it will be obvious to those skilled in the art that such embodiments are provided by way of example only. Numerous variations, changes, and substitutions will now occur to those skilled in the art without departing from the invention. It should be understood that various alternatives to the embodiments of the invention described herein may be employed in practicing the invention. It is intended that the following claims define the scope of the invention and that methods and structures within the scope of these claims and their equivalents be covered thereby.

[0065] Unless otherwise defined, all technical and scientific terms used herein have the same meaning as commonly understood by one of ordinary skill in the art to which this invention belongs. Although methods and materials similar or equivalent to those described herein can be used in the practice or testing of the present invention, suitable methods and materials are described below. In case of conflict, the patent specification, including definitions, will control. In addition, the materials, methods, and examples are illustrative only and not intended to be limiting. Numerous variations, changes, and substitutions will now occur to those skilled in the art without departing from the invention.

### Definitions

[0066] The terms “polynucleotide” and “nucleic acid,” used interchangeably herein, refer to a polymeric form of nucleotides of any length, either ribonucleotides or deoxyribonucleotides. Thus, terms “polynucleotide” and “nucleic acid” encompass single-stranded DNA; double-stranded DNA; multi-stranded DNA; single-stranded RNA; double-stranded RNA; multi-stranded RNA; genomic DNA; cDNA; DNA-RNA hybrids; and a polymer comprising purine and pyrimidine bases or other natural, chemically or biochemically modified, non-natural, or derivatized nucleotide bases.

[0067] “Hybridizable” or “complementary” are used interchangeably to mean that a nucleic acid (e.g., RNA, DNA) comprises a sequence of nucleotides that enables it to non-covalently bind, i.e., form Watson-Crick base pairs and/or G/U base pairs, “anneal”, or “hybridize,” to another nucleic acid in a sequence-specific, antiparallel, manner (i.e., a nucleic acid specifically binds to a complementary nucleic acid) under the appropriate in vitro and/or in vivo conditions of temperature and solution ionic strength. It is understood that the sequence of a polynucleotide need not be 100% complementary to that of its target nucleic acid sequence to be specifically hybridizable; it can have at least about 70%, at least about 80%, or at least about 90%, or at least about 95% sequence identity and still hybridize to the target nucleic acid sequence. Moreover, a polynucleotide may hybridize over one or more segments such that intervening or adjacent segments are not involved in the hybridization event (e.g., a loop structure or hairpin structure, a ‘bulge’, and the like).

[0068] A “gene,” for the purposes of the present disclosure, includes a DNA region encoding a gene product (e.g., a protein, RNA), as well as all DNA regions which regulate the production of the gene product, whether or not such regulatory sequences are adjacent to coding and/or transcribed sequences. Accordingly, a gene may include regulatory element sequences including, but not necessarily limited to, promoter sequences, terminators, translational regulatory sequences such as ribosome binding sites and internal ribosome entry sites, enhancers, silencers, insulators, boundary elements, replication origins, matrix attachment sites and locus control regions. Coding sequences encode a gene product upon transcription or transcription and translation; the coding sequences of the disclosure may comprise fragments and need not contain a full-length open reading frame. A gene can include both the strand that is transcribed as well as the complementary strand containing the anticodons.

[0069] The term “downstream” refers to a nucleotide sequence that is located 3′ to a reference nucleotide sequence. In certain embodiments, downstream nucleotide sequences relate to sequences that follow the starting point of transcription. For example, the translation initiation codon of a gene is located downstream of the start site of transcription.

[0070] The term “upstream” refers to a nucleotide sequence that is located 5′ to a reference nucleotide sequence. In certain embodiments, upstream nucleotide sequences relate to sequences that are located on the 5′ side of a coding region or starting point of transcription. For example, most promoters are located upstream of the start site of transcription.

[0071] The term “regulatory element” is used interchangeably herein with the term “regulatory sequence,” and is intended to include promoters, enhancers, and other expression regulatory elements (e.g. transcription termination signals, such as polyadenylation signals and poly-U sequences). Exemplary regulatory elements include a transcription promoter such as, but not limited to, CMV, CMV+intron A, SV40, RSV, HIV-Ltr, elongation factor 1 alpha (EF1α), MMLV-ltr, internal ribosome entry site (IRES) or P2A peptide to permit translation of multiple genes from a single transcript, metallothionein, a transcription enhancer element, a transcription termination signal, polyadenylation sequences, sequences for optimization of initiation of translation, and translation termination sequences. In the case of systems utilized for exon skipping, regulatory elements include exonic splicing enhancers. It will be understood that the choice of the appropriate regulatory element will depend on the encoded component to be expressed (e.g., protein or RNA) or whether the nucleic acid comprises multiple components that require different polymerases or are not intended to be expressed as a fusion protein.

[0072] The term “promoter” refers to a DNA sequence that contains an RNA polymerase binding site, transcription start site, TATA box, and/or B recognition element and assists or promotes the transcription and expression of an associated transcribable polynucleotide sequence and/or gene (or transgene). A promoter can be synthetically produced or can be derived from a known or naturally occurring promoter sequence or another promoter sequence. A promoter can be proximal or distal to the gene to be transcribed. A promoter can also include a chimeric promoter comprising a combination of two or more heterologous sequences to confer certain properties. A promoter of the present disclosure can include variants of promoter sequences that are similar in composition, but not identical to, other promoter sequence(s) known or provided herein. A promoter can be classified according to criteria relating to the pattern of expression of an associated coding or transcribable sequence or gene operably linked to the promoter, such as constitutive, developmental, tissue-specific, inducible, etc.

[0073] The term “enhancer” refers to regulatory DNA sequences that, when bound by specific proteins called transcription factors, regulate the expression of an associated gene. Enhancers may be located in the intron of the gene, or 5′ or 3′ of the coding sequence of the gene. Enhancers may be proximal to the gene (i.e., within a few tens or hundreds of base pairs (bp) of the promoter), or may be located distal to the gene (i.e., thousands of bp, hundreds of thousands of bp, or even millions of bp away from the promoter). A single gene may be regulated by more than one enhancer, all of which are envisaged as within the scope of the instant disclosure.

[0074] “Recombinant,” as used herein, means that a particular nucleic acid (DNA or RNA) is the product of various combinations of cloning, restriction, and/or ligation steps resulting in a construct having a structural coding or non-coding sequence distinguishable from endogenous nucleic acids found in natural systems. Generally, DNA sequences encoding the structural coding sequence can be assembled from cDNA fragments and short oligonucleotide linkers, or from a series of synthetic oligonucleotides, to provide a synthetic nucleic acid which is capable of being expressed from a recombinant transcriptional unit contained in a cell or in a cell-free transcription and translation system. Such sequences can be provided in the form of an open reading frame uninterrupted by internal non-translated sequences, or introns, which are typically present in eukaryotic genes. Genomic DNA comprising the relevant sequences can also be used in the formation of a recombinant gene or transcriptional unit. Sequences of non-translated DNA may be present 5′ or 3′ from the open reading frame, where such sequences do not interfere with manipulation or expression of the coding regions, and may indeed act to modulate production of a desired product by various mechanisms (see “enhancers” and “promoters”, above).

[0075] The term “recombinant polynucleotide” or “recombinant nucleic acid” refers to one which is not naturally occurring, e.g., is made by the artificial combination of two otherwise separated segments of sequence through human intervention. This artificial combination is often accomplished by either chemical synthesis means, or by the artificial manipulation of isolated segments of nucleic acids, e.g., by genetic engineering techniques. Such is usually done to replace a codon with a redundant codon encoding the same or a conservative amino acid, while typically introducing or removing a sequence recognition site. Alternatively, it is performed to join together nucleic acid segments of desired functions to generate a desired combination of functions. This artificial combination is often accomplished by either chemical synthesis means, or by the artificial manipulation of isolated segments of nucleic acids, e.g., by genetic engineering techniques.

[0076] Similarly, the term “recombinant” polypeptide refers to a polypeptide which is not naturally occurring, e.g., is made by the artificial combination of two otherwise separated segments of amino sequence through human intervention. Thus, e.g., a polypeptide that comprises a heterologous amino acid sequence is recombinant.

[0077] As used herein, the term “contacting” means establishing a physical connection between two or more entities. For example, contacting a target nucleic acid sequence with a guide nucleic acid means that the target nucleic acid sequence and the guide nucleic acid are made to share a physical connection; e.g., can hybridize if the sequences share sequence similarity.

[0078] “Dissociation constant”, or “K_{d}”, are used interchangeably and mean the affinity between a ligand “L” and a protein “P”; i.e., how tightly a ligand binds to a particular protein. It can be calculated using the formula K_{d}=[L] [P]/[LP], where [P], [L] and [LP] represent molar concentrations of the protein, ligand and complex, respectively.

[0079] The disclosure provides compositions and methods useful for editing a target nucleic acid sequence. As used herein “editing” is used interchangeably with “modifying” and includes but is not limited to cleaving, nicking, deleting, knocking in, knocking out, and the like.

[0080] The term “knock-out” refers to the elimination of a gene or the expression of a gene. For example, a gene can be knocked out by either a deletion or an addition of a nucleotide sequence that leads to a disruption of the reading frame. As another example, a gene may be knocked out by replacing a part of the gene with an irrelevant sequence. The term “knock-down” as used herein refers to reduction in the expression of a gene or its gene product(s). As a result of a gene knock-down, the protein activity or function may be attenuated or the protein levels may be reduced or eliminated.

[0081] As used herein, “homology-directed repair” (HDR) refers to the form of DNA repair that takes place during repair of double-strand breaks in cells. This process requires nucleotide sequence homology, and uses a donor template to repair or knock-out a target DNA, and leads to the transfer of genetic information from the donor to the target. Homology-directed repair can result in an alteration of the sequence of the target sequence by insertion, deletion, or mutation if the donor template differs from the target DNA sequence and part or all of the sequence of the donor template is incorporated into the target DNA.

[0082] As used herein, “non-homologous end joining” (NHEJ) refers to the repair of double-strand breaks in DNA by direct ligation of the break ends to one another without the need for a homologous template (in contrast to homology-directed repair, which requires a homologous sequence to guide repair). NHEJ often results in the loss (deletion) of nucleotide sequence near the site of the double-strand break.

[0083] As used herein “micro-homology mediated end joining” (MMEJ) refers to a mutagenic DSB repair mechanism, which always associates with deletions flanking the break sites without the need for a homologous template (in contrast to homology-directed repair, which requires a homologous sequence to guide repair). MMEJ often results in the loss (deletion) of nucleotide sequence near the site of the double-strand break.

[0084] A polynucleotide or polypeptide has a certain percent “sequence similarity” or “sequence identity” to another polynucleotide or polypeptide, meaning that, when aligned, that percentage of bases or amino acids are the same, and in the same relative position, when comparing the two sequences. Sequence similarity (sometimes referred to as percent similarity, percent identity, or homology) can be determined in a number of different manners. To determine sequence similarity, sequences can be aligned using the methods and computer programs that are known in the art, including BLAST, available over the world wide web at ncbi.nlm.nih.gov/BLAST. Percent complementarity between particular stretches of nucleic acid sequences within nucleic acids can be determined using any convenient method. Example methods include BLAST programs (basic local alignment search tools) and PowerBLAST programs (Altschul et al., J. Mol. Biol., 1990, 215, 403-410; Zhang and Madden, Genome Res., 1997, 7, 649-656) or by using the Gap program (Wisconsin Sequence Analysis Package, Version 8 for Unix, Genetics Computer Group, University Research Park, Madison Wis.), e.g., using default settings, which uses the algorithm of Smith and Waterman (Adv. Appl. Math., 1981, 2, 482-489).

[0085] The terms “polypeptide,” and “protein” are used interchangeably herein, and refer to a polymeric form of amino acids of any length, which can include coded and non-coded amino acids, chemically or biochemically modified or derivatized amino acids, and polypeptides having modified peptide backbones. The term includes fusion proteins, including, but not limited to, fusion proteins with a heterologous amino acid sequence.

[0086] A “vector” or “expression vector” is a replicon, such as plasmid, phage, virus, or cosmid, to which another DNA segment, i.e., an “insert”, may be attached so as to bring about the replication or expression of the attached segment in a cell.

[0087] The term “naturally-occurring” or “unmodified” or “wild type” as used herein as applied to a nucleic acid, a polypeptide, a cell, or an organism, refers to a nucleic acid, polypeptide, cell, or organism that is found in nature.

[0088] As used herein, a “mutation” refers to an insertion, deletion, substitution, duplication, or inversion of one or more amino acids or nucleotides as compared to a reference amino acid sequence or to a reference nucleotide sequence.

[0089] As used herein the term “isolated” is meant to describe a polynucleotide, a polypeptide, or a cell that is in an environment different from that in which the polynucleotide, the polypeptide, or the cell naturally occurs. An isolated genetically modified host cell may be present in a mixed population of genetically modified host cells.

[0090] A “host cell,” as used herein, denotes a eukaryotic cell, a prokaryotic cell, or a cell from a multicellular organism (e.g., in a cell line), which eukaryotic or prokaryotic cells are used as recipients for a nucleic acid (e.g., an expression vector), and include the progeny of the original cell which has been genetically modified by the nucleic acid. It is understood that the progeny of a single cell may not necessarily be completely identical in morphology or in genomic or total DNA complement as the original parent, due to natural, accidental, or deliberate mutation. A “recombinant host cell” (also referred to as a “genetically modified host cell”) is a host cell into which has been introduced a heterologous nucleic acid, e.g., an expression vector.

[0091] The term “conservative amino acid substitution” refers to the interchangeability in proteins of amino acid residues having similar side chains. For example, a group of amino acids having aliphatic side chains consists of glycine, alanine, valine, leucine, and isoleucine; a group of amino acids having aliphatic-hydroxyl side chains consists of serine and threonine; a group of amino acids having amide-containing side chains consists of asparagine and glutamine; a group of amino acids having aromatic side chains consists of phenylalanine, tyrosine, and tryptophan; a group of amino acids having basic side chains consists of lysine, arginine, and histidine; and a group of amino acids having sulfur-containing side chains consists of cysteine and methionine. Exemplary conservative amino acid substitution groups are: valine-leucine-isoleucine, phenylalanine-tyrosine, lysine-arginine, alanine-valine, and asparagine-glutamine.

[0092] The term “antibody,” as used herein, encompasses various antibody structures, including but not limited to monoclonal antibodies, polyclonal antibodies, multispecific antibodies (e.g., bispecific antibodies), nanobodies, single domain antibodies such as VHH antibodies, and antibody fragments so long as they exhibit the desired antigen-binding activity or immunological activity. Antibodies represent a large family of molecules that include several types of molecules, such as IgD, IgG, IgA, IgM and IgE.

[0093] As used herein, “treatment” or “treating,” are used interchangeably herein and refer to an approach for obtaining beneficial or desired results, including but not limited to a therapeutic benefit and/or a prophylactic benefit. By therapeutic benefit is meant eradication or amelioration of the underlying disorder or disease being treated. A therapeutic benefit can also be achieved with the eradication or amelioration of one or more of the symptoms or an improvement in one or more clinical parameters associated with the underlying disease such that an improvement is observed in the subject, notwithstanding that the subject may still be afflicted with the underlying disorder.

[0094] The terms “therapeutically effective amount” and “therapeutically effective dose”, as used herein, refer to an amount of a drug or a biologic, alone or as a part of a composition, that is capable of having any detectable, beneficial effect on any symptom, aspect, measured parameter or characteristics of a disease state or condition when administered in one or repeated doses to a subject such as a human or an experimental animal. Such effect need not be absolute to be beneficial.

[0095] As used herein, “administering” is meant a method of giving a dosage of a compound (e.g., a composition of the disclosure) or a composition (e.g., a pharmaceutical composition) to a subject.

[0096] A “subject” is a mammal. Mammals include, but are not limited to, domesticated animals, non-human primates, humans, rabbits, mice, rats and other rodents.

### I. General Methods

[0097] The practice of the present disclosure employs, unless otherwise indicated, conventional techniques of immunology, biochemistry, chemistry, molecular biology, microbiology, cell biology, genomics and recombinant DNA, which can be found in such standard textbooks as Molecular Cloning: A Laboratory Manual, 3rd Ed. (Sambrook et al., Harbor Laboratory Press 2001); Short Protocols in Molecular Biology, 4th Ed. (Ausubel et al. eds., John Wiley & Sons 1999); Protein Methods (Bollag et al., John Wiley & Sons 1996); Nonviral Vectors for Gene Therapy (Wagner et al. eds., Academic Press 1999); Viral Vectors (Kaplift & Loewy eds., Academic Press 1995); Immunology Methods Manual (I. Lefkovits ed., Academic Press 1997); and Cell and Tissue Culture: Laboratory Procedures in Biotechnology (Doyle & Griffiths, John Wiley & Sons 1998), the disclosures of which are incorporated herein by reference.

[0098] Where a range of values is provided, it is understood that endpoints are included, and that each intervening value, to the tenth of the unit of the lower limit unless the context clearly dictates otherwise, between the upper and lower limit of that range and any other stated or intervening value in that stated range, is encompassed. The upper and lower limits of these smaller ranges may independently be included in the smaller ranges, and are also encompassed, subject to any specifically excluded limit in the stated range. Where the stated range includes one or both of the limits, ranges excluding either or both of those included limits are also included.

[0099] Unless defined otherwise, all technical and scientific terms used herein have the same meaning as commonly understood by one of ordinary skill in the art to which this invention belongs. All publications mentioned herein are incorporated herein by reference to disclose and describe the methods and/or materials in connection with which the publications are cited.

[0100] It must be noted that as used herein and in the appended claims, the singular forms “a,” “an,” and “the” include plural referents unless the context clearly dictates otherwise.

[0101] It will be appreciated that certain features of the invention, which are, for clarity, described in the context of separate embodiments, may also be provided in combination in a single embodiment. In other cases, various features of the invention, which are, for brevity, described in the context of a single embodiment, may also be provided separately or in any suitable sub-combination. It is intended that all combinations of the embodiments pertaining to the invention are specifically embraced by the present invention and are disclosed herein just as if each and every combination was individually and explicitly disclosed. In addition, all sub-combinations of the various embodiments and elements thereof are also specifically embraced by the present invention and are disclosed herein just as if each and every such sub-combination was individually and explicitly disclosed herein.

### II. Systems for Genetic Editing of RHO Genes

[0102] In a first aspect, the present disclosure provides systems comprising a CRISPR nuclease protein and one or more guide nucleic acids (gNA) for use in modifying a RHO gene (referred to herein as the “target nucleic acid”). The RHO gene to be modified may comprise one or more mutations, including deletions, substitutions or duplications, in the gene region selected from the group consisting of a RHO intron, a RHO exon, a RHO intron-exon junction, a RHO regulatory element, and an intergenic region. The majority of known mutations are substitutions, resulting in defects such as post-Golgi trafficking and OS targeting, misfolding, ER retention and instability, disrupted vesicular traffic and endocytosis, and altered post-translational modifications and reduced stability (Athanasiou, et al. 2018). A non-limiting list of RHO mutations contemplated for editing by the design of the editing systems of the disclosure are presented in Table 4A.

[0103] The RHO locus spans 6,706 bp and has of 5 exons. The rhodopsin protein has a molecular weight of approximately 40 kD and spans the membrane of the rod cell or the eye. Rhodopsin absorbs light as it enters the retina and becomes photoexcited, causing it to undergo a change in molecular configuration, and dissociates from the opsin, initiating a process that eventually causes electrical impulses to be sent to the brain along the optic nerve. While more than 80 mutations in the rhodopsin gene have been identified that account for 30% of all Autosomal Dominant Retinitis Pigmentosa (ADRP) cases in humans (Dryja, T P, et al. Invest Opthalmol Vis Sci 41:3124 (2000)), the P23H mutation is the most common in the United States (Olsson, et al. Neuron 9:815)(1992)). Due to problems with protein folding, Pror23His (or P23H) rhodopsin only partially reconstitutes with retinal in vitro (Liu et al. Proc Nat'l Acad Sci 93:4554 (1996)), and mutant rhodopsin expressed in transgenics causes retinal degeneration (Goto, et al. Invest Opthalmol Vis Sci 36:62 (1995)).

[0104] The RHO gene is defined as the sequence that spans chr3: 129,528,639-129,535,344 of the human genome (GRCh38.p13) (the notation refers to the chromosome 3 (chr3), starting at the 129,528,639 bp of that chromosome, and extending to the 129,535,344 bp of that chromosome). The human RHO gene (HGNC:10012; see also GenBank Accession No. NM_000539.2) has five exons and encodes a protein having the sequence

(SEQ ID NO: 33)
MNGTEGPNFYVPFSNATGVVRSPFEYPQYYLAEPWQFSMLAAYMFLLIV
LGFPINFLTLYVTVQHKKLRTPLNYILLNLAVADLFMVLGGFTSTLYTS
LHGYFVFGPTGCNLEGFFATLGGEIALWSLVVLAIERYVVVCKPMSNFR
FGENHAIMGVAFTWMALACAAPPLAGWSRYIPEGLQCSCGIDYYTLKPE
VNNESFVIYMFVVHFTIPMIIIFFCYGQLVFTVKEAAAQQQESATTQKA
EKEVTRMVIIMVIAFLICWVPYASVAFYIFTHQGSNFGPIFMTIPAFFA
KSAAIYNPVIYIMMNKQFRNCMLTTICCGKNPLGDDEASATVSKTETSQ
VAPA.

Human rhodopsin contains 348 amino acids. (Nathans J. and Hogness, D, PNAS 81:4851 (1984)). The most frequent mutation leading to retinitis pigmentosa is P23H, resulting in the sequence

(SEQ ID NO: 34)
MNGTEGPNFYVPFSNATGVVRSHFEYPQYYLAEPWQFSMLAAYMFLLIV
LGFPINFLTLYVTVQHKKLRTPLNYILLNLAVADLFMVLGGFTSTLYTS
LHGYFVFGPTGCNLEGFFATLGGEIALWSLVVLAIERYVVVCKPMSNFR
FGENHAIMGVAFTWMALACAAPPLAGWSRYIPEGLQCSCGIDYYTLKPE
VNNESFVIYMFVVHFTIPMIIIFFCYGQLVFTVKEAAAQQQESATTQKA
EKEVTRMVIIMVIAFLICWPYASVAFYIFTHQGSNFGPIFMTIPAFFAK
SAAIYNPVIYIMMNKQFRNCMLTTICCGKNPLGDDEASATVSKTETSQV
APA.

[0105] In some embodiments, the disclosure provides systems specifically designed to modify the RHO gene in eukaryotic cells bearing one or more mutations. Generally, any portion of the RHO target nucleic acid can be targeted using the programmable compositions and methods provided herein. In some embodiments, the CRISPR nuclease is a Class 2, Type V nuclease. In some embodiments, the Class 2, Type V nuclease is selected from the group consisting of Cas12a, Cas12b, Cas12c, Cas12d (CasY), Cas12J, and CasX. In some embodiments, the disclosure provides systems comprising one or more CasX proteins and one or more guide nucleic acids (gNA) as a CasX:gNA system designed to target and edit specific locations in the RHO target nucleic acid sequence in order to correct or compensate for the one or more mutations. In other embodiments, the CasX:gNA systems of the disclosure comprise one or more CasX proteins, one or more guide nucleic acids (gNA) and one or more donor template nucleic acids comprising a nucleic acid encoding a portion of a RHO gene wherein the nucleic acid comprises a wild-type sequence, a cDNA sequence encoding a portion of a functional rhodopsin protein, a deletion, an insertion, or a mutation of one or more nucleotides in comparison to a genomic nucleic acid sequence encoding the mutant rhodopsin. The disclosure contemplates use of a donor template of sufficient length in the CasX:gNA system that may also be optimized to contain synthetic intron sequences of shortened length (relative to the genomic intron) between the exons in the donor template to ensure proper expression and processing of the RHO locus. In some embodiments, the donor polynucleotide comprises at least about 10, at least about 50, at least about 100, or at least about 200, or at least about 300, or at least about 400, or at least about 500, or at least about 600, or at least about 700, or at least about 800, or at least about 900, or at least about 1000, or at least about 10,000, or at least about 15,000 nucleotides. In other embodiments, the donor polynucleotide comprises at least about 10 to about 15,000 nucleotides, or at least about 100 to about 10,000 nucleotides, or at least about 400 to about 8,000 nucleotides, or at least about 600 to about 5000 nucleotides, or at least about 1000 to about 2000 nucleotides. In some embodiments, the donor template is a single stranded DNA template or a single stranded RNA template. In other embodiments, the donor template is a double stranded DNA template.

[0106] In some embodiments, the disclosure provides gene editing pairs of a CasX and a gNA of any of the embodiments described herein that are capable of being bound together prior to their use for gene editing and, thus, are “pre-complexed” as a ribonuclear protein complex (RNP). The use of a pre-complexed RNP confers advantages in the delivery of the system components to a cell or target nucleic acid sequence for editing of the target nucleic acid sequence. In some embodiments, the functional RNP can be delivered ex vivo to a cell by electrophoresis or by chemical means. In other embodiments, the functional RNP can be delivered either ex vivo or in vivo by a vector in their functional form. The gNA can provide target specificity to the complex by including a targeting sequence (or “spacer”) having a nucleotide sequence that is complementary to a sequence of the target nucleic acid sequence while the CasX protein of the pre-complexed CasX:gNA provides the site-specific activity such as cleavage or nicking of the target sequence that is guided to a target site (e.g., stabilized at a target site) within a target nucleic acid sequence by virtue of its association with the gNA. The CasX proteins and gNA components of the CasX:gNA systems and their sequences, features and functions are described more fully, below.

[0107] The CasX:gNA systems have utility in the treatment of a subject having retinitis pigmentosa. Each of the components of the CasX:gNA systems and their use in the editing of the target nucleic acids in cells is described more fully, below.

### III. Guide Nucleic Acids of the Systems for Genetic Editing

[0108] In another aspect, the disclosure relates to guide nucleic acids (gNA) comprising a targeting sequence complementary to a target nucleic acid sequence of a RHO gene, wherein the gNA is capable of forming a complex with a CRISPR protein that has specificity to a protospacer adjacent motif (PAM) sequence comprising a TC motif in the complementary non-target strand, and wherein the PAM sequence is located 1 nucleotide 5′ of the sequence in the non-target strand that is complementary to the target nucleic acid sequence in the target strand of the target nucleic acid. In some embodiments, the gNA is capable of forming a complex with a Class 2, Type V CRISPR nuclease. In a particular embodiment, the gNA is capable of forming a complex with a CasX nuclease.

[0109] In some embodiments, the disclosure provides gNAs utilized in the CasX:gNA systems that have utility in genome editing a RHO gene in a eukaryotic cell. The present disclosure provides specifically-designed gNAs wherein the targeting sequence (or spacer, described more fully, below) of the gNA is complementary to (and are therefore able to hybridize with) target nucleic acid sequences when used as a component of the gene editing CasX:gNA systems. Representative, but non-limiting examples of targeting sequences to the RHO target nucleic acid that can be utilized in the gNA of the embodiments are presented as SEQ ID NOs: SEQ ID NOS: 328-346, 367-376, 382-2100 and 2286-27274. In a particular embodiment, the disclosure provides the targeting sequences presented as SEQ ID NOS: 382-582, which are designed to target known mutations in the RHO gene when utilized in the CasX:gNA systems. In some embodiments, the gNA is a deoxyribonucleic acid molecule (“gDNA”); in some embodiments, the gNA is a ribonucleic acid molecule (“gRNA”); and in other embodiments, the gNA is a chimera, and comprises both DNA and RNA. As used herein, the terms gNA, gRNA, and gDNA cover naturally-occurring molecules, as well as sequence variants.

[0110] It is envisioned that in some embodiments, multiple gNAs are delivered in the methods for the modification of a target nucleic acid sequence by use of the CasX:gNA systems which is then edited by host cell repair mechanisms such as non-homologous end joining (NHEJ), homology-directed repair (HDR, which can include, for example, insertion of a donor template to replace all or a portion of the RHO exon), homology-independent targeted integration (HITI), micro-homology mediated end joining (MMEJ), single strand annealing (SSA) or base excision repair (BER). For example, when an editing event is designed to delete multiple nucleotides within an exon of the RHO gene is desired, a pair of gNAs can be used in order to bind and cleave at two different sites 5′ and 3′ of the exon(s) bearing the mutation(s) within the RHO gene. In the context of nucleic acids, cleavage refers to the breakage of the covalent backbone of a nucleic acid molecule; either DNA or RNA, by the nuclease. Both single-stranded cleavage and double-stranded cleavage are possible, and double-stranded cleavage can occur as a result of two distinct single-stranded cleavage events. In some embodiments, small indels introduced by the CasX:gNA systems of the embodiments described herein and cellular repair systems can restore the protein reading frame of the mutant RHO gene (“reframing” strategy). When the reframing strategy is used, the cells may be contacted with a single gNA. In other cases, when a deletion or a knock-down/knock-out of the RHO gene is desired, a pair of gNAs with targeting sequences to different or overlapping regions of the target nucleic acid sequence can be used in order to bind and the CasX to cleave at two different or overlapping sites within or proximal to the exon or regulatory element of the gene, which is then edited by non-homologous end joining (NHEJ), homology-directed repair (HDR, which can include, for example, insertion of a donor template to replace all or a portion of a RHO exon), homology-independent targeted integration (HITI), micro-homology mediated end joining (MMEJ), single strand annealing (SSA) or base excision repair (BER).

[0111] a. Reference gNA and gNA Variants

[0112] In some embodiments, a gNA of the present disclosure comprises a wild-type sequence of a naturally-occurring gNA (a “reference gNA”). In other cases, a reference gNA of the disclosure may be subjected to one or more mutagenesis methods, such as the mutagenesis methods described herein, which may include Deep Mutational Evolution (DME), deep mutational scanning (DMS), error prone PCR, cassette mutagenesis, random mutagenesis, staggered extension PCR, gene shuffling, or domain swapping, in order to generate one or more gNA variants with enhanced or varied properties relative to the reference gNA. gNA variants also include variants comprising one or more exogenous sequences, for example fused to either the 5′ or 3′ end, or inserted internally. The activity of reference gNAs may be used as a benchmark against which the activity of gNA variants are compared, thereby measuring improvements in function or other characteristics of the gNA variants. In other embodiments, a reference gNA may be subjected to one or more deliberate, specifically-targeted mutations in order to produce a gNA variant, for example a rationally designed variant.

[0113] The gNAs of the disclosure comprise two segments: a targeting sequence and a protein-binding segment. The targeting segment of a gNA includes a nucleotide sequence (referred to interchangeably as a guide sequence, a spacer, a targeter, or a targeting sequence) that is complementary to (and therefore hybridizes with) a specific sequence (a target site) within the target nucleic acid sequence (e.g., a target ssRNA, a target ssDNA, a strand of a double stranded target DNA, etc.), described more fully below. The targeting sequence of a gNA is capable of binding to a target nucleic acid sequence, including a coding sequence, a complement of a coding sequence, a non-coding sequence, and to regulatory elements. The protein-binding segment (or “activator” or “protein-binding sequence”) interacts with (e.g., binds to) a CasX protein as a complex, forming an RNP (described more fully, below). The protein-binding segment is alternatively referred to herein as a “scaffold”, which is comprised of several regions, described more fully, below.

[0114] In the case of a dual guide RNA (dgRNA), the targeter and the activator portions each have a duplex-forming segment, where the duplex forming segment of the targeter and the duplex-forming segment of the activator have complementarity with one another and hybridize to one another to form a double stranded duplex (dsRNA duplex for a gRNA). When the gNA is a gRNA, the term “targeter” or “targeter RNA” is used herein to refer to a crRNA-like molecule (crRNA: “CRISPR RNA”) of a CasX dual guide RNA (and therefore of a CasX single guide RNA when the “activator” and the “targeter” are linked together; e.g., by intervening nucleotides). The crRNA has a 5′ region that anneals with the tracrRNA followed by the nucleotides of the targeting sequence. Thus, for example, a guide RNA (dgRNA or sgRNA) comprises a guide sequence and a duplex-forming segment of a crRNA, which can also be referred to as a crRNA repeat. A corresponding tracrRNA-like molecule (activator) also comprises a duplex-forming stretch of nucleotides that forms the other half of the dsRNA duplex of the protein-binding segment of the guide RNA. Thus, a targeter and an activator, as a corresponding pair, hybridize to form a dual guide NA, referred to herein as a “dual guide NA”, a “dual-molecule gNA”, a “dgNA”, a “double-molecule guide NA”, or a “two-molecule guide NA”. Site-specific binding and/or cleavage of a target nucleic acid sequence (e.g., genomic DNA) by the CasX protein can occur at one or more locations (e.g., a sequence of a target nucleic acid) determined by base-pairing complementarity between the targeting sequence of the gNA and the target nucleic acid sequence. Thus, for example, the gNA of the disclosure have sequences complementarity to and therefore can hybridize with the target nucleic acid that is adjacent to a sequence complementary to a TC PAM motif or a PAM sequence, such as ATC, CTC, GTC, or TTC. Because the targeting sequence of a guide sequence hybridizes with a sequence of a target nucleic acid sequence, a targeter can be modified by a user to hybridize with a specific target nucleic acid sequence, so long as the location of the PAM sequence is considered. Thus, in some cases, the sequence of a targeter may be a non-naturally occurring sequence. In other cases, the sequence of a targeter may be a naturally-occurring sequence, derived from the gene to be edited. In other embodiments, the activator and targeter of the gNA are covalently linked to one another (rather than hybridizing to one another) and comprise a single molecule, referred to herein as a “single-molecule gNA,” “one-molecule guide NA,” “single guide NA”, “single guide RNA”, a “single-molecule guide RNA,” a “one-molecule guide RNA”, a “single guide DNA”, a “single-molecule DNA”, or a “one-molecule guide DNA”, (“sgNA”, “sgRNA”, or a “sgDNA”). In some embodiments, the sgNA includes an “activator” or a “targeter” and thus can be an “activator-RNA” and a “targeter-RNA,” respectively.

[0115] Collectively, the assembled gNAs of the disclosure comprise four distinct regions, or domains: the RNA triplex, the scaffold stem, the extended stem, and the targeting sequence that, in the embodiments of the disclosure is specific for a target nucleic acid and is located on the 3′ end of the gNA. The RNA triplex, the scaffold stem, and the extended stem, together, are referred to as the “scaffold” of the gNA.

[0116] b. RNA Triplex

[0117] In some embodiments of the guide NAs provided herein (including reference sgNAs), there is a RNA-triplex, and the RNA triplex comprises the sequence of a UUU—nX(˜4-15)—UUU stem loop (SEQ ID NO: 19) that ends with an AAAG after 2 intervening stem loops (the scaffold stem loop and the extended stem loop), forming a pseudoknot that may also extend past the triplex into a duplex pseudoknot. The UU-UUU-AAA sequence of the triplex forms as a nexus between the spacer, scaffold stem, and extended stem. In exemplary reference CasX sgNAs, the UUU-loop-UUU region is coded for first, then the scaffold stem loop, and then the extended stem loop, which is linked by the tetraloop, and then an AAAG closes off the triplex before becoming the spacer.

[0118] c. Scaffold Stem Loop

[0119] In some embodiments of sgNAs of the disclosure, the triplex region is followed by the scaffold stem loop. The scaffold stem loop is a region of the gNA that is bound by CasX protein (such as a reference or CasX variant protein). In some embodiments, the scaffold stem loop is a fairly short and stable stem loop. In some cases, the scaffold stem loop does not tolerate many changes, and requires some form of an RNA bubble. In some embodiments, the scaffold stem is necessary for CasX sgNA function. While it is perhaps analogous to the nexus stem of Cas9 as being a critical stem loop, the scaffold stem of a CasX sgNA, in some embodiments, has a necessary bulge (RNA bubble) that is different from many other stem loops found in CRISPR/Cas systems. In some embodiments, the presence of this bulge is conserved across sgNA that interact with different CasX proteins. An exemplary sequence of a scaffold stem loop sequence of a gNA comprises the sequence CCAGCGACUAUGUCGUAUGG (SEQ ID NO: 20). In other embodiments, the disclosure provides gNA variants wherein the scaffold stem loop is replaced with an RNA stem loop sequence from a heterologous RNA source with proximal 5′ and 3′ ends, such as, but not limited to stem loop sequences selected from MS2, Q β, U1 hairpin II, Uvsx, or PP7 stem loops. In some cases, the heterologous RNA stem loop of the gNA is capable of binding a protein, an RNA structure, a DNA sequence, or a small molecule.

[0120] d. Extended Stem Loop

[0121] In some embodiments of the CasX sgNAs of the disclosure, the scaffold stem loop is followed by the extended stem loop. In some embodiments, the extended stem comprises a synthetic tracr and crRNA fusion that is largely unbound by the CasX protein. In some embodiments, the extended stem loop can be highly malleable. In some embodiments, a single guide gRNA is made with a GAAA tetraloop linker or a GAGAAA linker between the tracr and crRNA in the extended stem loop. In some cases, the targeter and activator of a CasX sgNA are linked to one another by intervening nucleotides and the linker can have a length of from 3 to 20 nucleotides. In some embodiments of the CasX sgNAs of the disclosure, the extended stem is a large 32-bp loop that sits outside of the CasX protein in the ribonucleoprotein complex. An exemplary sequence of an extended stem loop sequence of a sgNA comprises the sequence GCGCUUAUUUAUCGGAGAGAAAUCCGAUAAAUAAGAAGC (SEQ ID NO: 21). In some embodiments, the extended stem loop comprises a GAGAAA spacer sequence. In some embodiments, the disclosure provides gNA variants wherein the extended stem loop is replaced with an RNA stem loop sequence from a heterologous RNA source with proximal 5′ and 3′ ends, such as, but not limited to stem loop sequences selected from MS2, Qβ, U1 hairpin II, Uvsx, or PP7 stem loops. In such cases, the heterologous RNA stem loop increases the stability of the gNA. In other embodiments, the disclosure provides gNA variants having an extended stem loop region comprising at least 10, at least 100, at least 500, at least 1000, or at least 10,000 nucleotides, or at least 10-10,000, at least 10-1000, or at least 10-100 nucleotides.

[0122] e. Targeting Sequence

[0123] In some embodiments of the gNAs of the disclosure, the extended stem loop is followed by a region that forms part of the triplex, and then the targeting sequence (or “spacer”) at the 3′ end of the gNA. The targeting sequence targets the CasX ribonucleoprotein holo complex to a specific region of the target nucleic acid sequence of the gene to be modified. Thus, for example, gNA targeting sequences of the disclosure have sequences complementarity to, and therefore can hybridize to, a portion of the RHO gene in a nucleic acid in a eukaryotic cell (e.g., a eukaryotic chromosome, chromosomal sequence, a eukaryotic RNA, etc.) as a component of the RNP when the TC PAM motif or any one of the PAM sequences TTC, ATC, GTC, or CTC is located 1 nucleotide 5′ to the non-target strand sequence complementary to the target sequence. The targeting sequence of a gNA can be modified so that the gNA can target a desired sequence of any desired target nucleic acid sequence, so long as the PAM sequence location is taken into consideration. In some embodiments, the gNA scaffold is 5′ of the targeting sequence, with the targeting sequence on the 3′ end of the gNA. In some embodiments, the PAM motif sequence recognized by the nuclease of the RNP is TC. In other embodiments, the PAM sequence recognized by the nuclease of the RNP is NTC.

[0124] In some embodiments, the targeting sequence of the gNA is complementary to a portion of a gene encoding a rhodopsin protein. In some embodiments, the targeting sequence of a gNA is complementary to a RHO exon selected from the group consisting of exons 1-5. In one embodiment, the targeting sequence of a gNA is complementary to RHO exon 1. In another embodiment, the targeting sequence of a gNA is complementary to RHO exon 2. In another embodiment, the targeting sequence of a gNA is complementary to RHO exon 3. In another embodiment, the targeting sequence of a gNA is complementary to RHO exon 4. In another embodiment, the targeting sequence of a gNA is complementary to RHO exon 5. In other embodiments, the targeting sequence of the gNA is complementary to a region within or proximal to an exon comprising a duplication. In other embodiments, the targeting sequence of a gNA is specific for a RHO intronic region, an intron-exon junction of the RHO gene, or an intergenic region. In some embodiments, the targeting sequence of the gNA is complementary to a sequence comprising one or more single nucleotide polymorphisms (SNPs) of the RHO gene or its complement. SNPs that are within a RHO coding sequence or within a RHO non-coding sequence are both within the scope of the instant disclosure. In some embodiments, the targeting sequence of the gNA is complementary to a sequence encoding or proximal to a mutation presented in Table 4A. In some embodiments, the targeting sequence of the gNA is complementary to a region within or proximal to (e.g., within 40 nucleotides of) an exon comprising a deletion. Representative targeting sequences to RHO mutations known or believed to be associated with retinitis pigmentosa that can be used in the editing systems of the disclosure are presented as SEQ ID NOS: 382-582.

[0125] In other embodiments, the targeting sequence of a gNA is specific for a junction of the exon, an intron, and/or a regulatory element of the gene. In those cases where the targeting sequence is specific for a regulatory element, such regulatory elements include, but are not limited to promoter regions, enhancer regions, intergenic regions, 5′ untranslated regions (5′ UTR), 3′ untranslated regions (3′ UTR), conserved elements, and regions comprising cis-regulatory elements. The promoter region is intended to encompass nucleotides within 5 kb of the initiation point of the encoding sequence or, in the case of gene enhancer elements or conserved elements, can be thousands of bp, hundreds of thousands of bp, or even millions of bp away from the encoding sequence of the gene of the target nucleic acid. In the foregoing, the targets are those in which the encoding gene of the target is intended to be knocked out or knocked down such that the targeted protein is not expressed or is expressed at a lower level in a cell.

[0126] In some embodiments, the targeting sequence of the gNA has between 14 and 35 consecutive nucleotides. In some embodiments, the targeting sequence has 14, 15, 16, 18, 18, 19, 20, 21, 22, 23 24, 25, 26, 27, 28, 29, 30, 31, 32, 33, 34 or 35 consecutive nucleotides. In some embodiments, the targeting sequence consists of 20 consecutive nucleotides. In some embodiments, the targeting sequence consists of 19 consecutive nucleotides. In some embodiments, the targeting sequence consists of 18 consecutive nucleotides. In some embodiments, the targeting sequence consists of 17 consecutive nucleotides. In some embodiments, the targeting sequence consists of 16 consecutive nucleotides. In some embodiments, the targeting sequence consists of 15 consecutive nucleotides. In some embodiments, the targeting sequence has 14, 15, 16, 17, 18, 19, 20, 21, 22, 23, 24, 25, 26, 27, 28, 29, 30, 31, 32, 33, 34 or 35 consecutive nucleotides and the targeting sequence can comprise 0 to 5, 0 to 4, 0 to 3, or 0 to 2 mismatches relative to the target nucleic acid sequence and retain sufficient binding specificity such that the RNP comprising the gNA comprising the targeting sequence can form a complementary bond with respect to the target nucleic acid.

[0127] Representative, but non-limiting examples of targeting sequences for inclusion in the gNA of the disclosure utilized with the CasX:gNA system for editing of the RHO gene are presented as SEQ ID NOs: 328-346, 367-376, 382-2100 and 2286-27274, representing targeting sequences for targeting a RHO target nucleic acid. In one embodiment, the targeting sequence of the gNA comprises a sequence having at least about 65%, at least about 75%, at least about 85%, or at least about 95% identity to a sequence selected from the group consisting of SEQ ID NOs: 328-346, 367-376, 382-2100 and 2286-27274. In one embodiment, the targeting sequence of the gNA comprises a sequence having at least about 65%, at least about 75%, at least about 85%, or at least about 95% identity to a sequence selected from the group consisting of SEQ ID NOs: 382-582. In another embodiment, the targeting sequence of the gNA consists of a sequence selected from the group consisting of SEQ ID NOs: 328-346, 367-376, 382-2100 and 2286-27274. In another embodiment, the targeting sequence of the gNA consists of a sequence selected from the group consisting of SEQ ID NOs: 382-582. In the foregoing embodiments, thymine (T) nucleotides can be substituted for one or more or all of the uracil (U) nucleotides in any of the targeting sequences such that the gNA can be a gDNA or a gRNA, or a chimera of RNA and DNA. In some embodiments, a targeting sequence of SEQ ID NOs: 328-346, 367-376, 382-2100 and 2286-27274 has at least 1, 2, 3, 4, 5, or 6 or more thymine nucleotides substituted for uracil nucleotides. In other embodiments, a gNA, gRNA, or gDNA of the disclosure comprises 1, 2, 3 or more targeting sequences of SEQ ID NOs: 328-346, 367-376, 382-2100 and 2286-27274, or targeting sequences that are at least 50% identical, at least 55% identical, at least 60% identical, at least 65% identical, at least 70% identical, at least 75% identical, at least 80% identical, at least 85% identical, at least 90% identical, at least 95% identical to one or more sequences of SEQ ID NOs: 328-346, 367-376, 382-2100 and 2286-27274. In some embodiments, a targeting sequence of SEQ ID NOs: 328-582 has at least 1, 2, 3, 4, 5, or 6 or more thymine nucleotides substituted for uracil nucleotides. In other embodiments, a gNA, gRNA, or gDNA of the disclosure comprises 1, 2, 3 or more targeting sequences of SEQ ID NOs: 328-582, or targeting sequences that are at least 50% identical, at least 55% identical, at least 60% identical, at least 65% identical, at least 70% identical, at least 75% identical, at least 80% identical, at least 85% identical, at least 90% identical, at least 95% identical to one or more sequences of SEQ ID NOs: 328-582.

[0128] In some embodiments, the CasX:gNA system comprises a first gNA and further comprises a second (and optionally a third, fourth, fifth, or more) gNA, wherein the second gNA or additional gNA has a targeting sequence complementary to a different or overlapping portion of the target nucleic acid sequence compared to the targeting sequence of the first gNA such that multiple points in the target nucleic acid are targeted, and, for example, multiple breaks are introduced in the target nucleic acid by the CasX. It will be understood that in such cases, the second or additional gNA is complexed with an additional copy of the CasX protein. By selection of the targeting sequences of the gNA, defined regions of the target nucleic acid sequence bracketing a particular location within the target nucleic acid can be modified or edited using the CasX:gNA systems described herein, including facilitating the insertion of a donor template or excision of a region or exon comprising a mutation of the RHO gene.

[0129] f. gNA Scaffolds

[0130] In some embodiments, a CasX reference gRNA comprises a sequence isolated or derived from Deltaproteobacter. In some embodiments, the sequence is a CasX tracrRNA sequence. Exemplary CasX reference tracrRNA sequences isolated or derived from Deltaproteobacter may include: ACAUCUGGCGCGUUUAUUCCAUUACUUUGGAGCCAGUCCCAGCGACUAUGUCGU AUGGACGAAGCGCUUAUUUAUCGGAGA (SEQ ID NO: 22) and ACAUCUGGCGCGUUUAUUCCAUUACUUUGGAGCCAGUCCCAGCGACUAUGUCGU AUGGACGAAGCGCUUAUUUAUCGG (SEQ ID NO: 23). Exemplary crRNA sequences isolated or derived from Deltaproteobacter may comprise a sequence of CCGAUAAGUAAAACGCAUCAAAG (SEQ ID NO: 24). In some embodiments, a CasX reference gNA comprises a sequence at least 60% identical, at least 65% identical, at least 70% identical, at least 75% identical, at least 80% identical, at least 81% identical, at least 82% identical, at least 83% identical, at least 84% identical, at least 85% identical, at least 86% identical, at least 86% identical, at least 87% identical, at least 88% identical, at least 89% identical, at least 89% identical, at least 90% identical, at least 91% identical, at least 92% identical, at least 93% identical, at least 94% identical, at least 95% identical, at least 96% identical, at least 97% identical, at least 98% identical, at least 99% identical, at least 99.5% identical or 100% identical to a sequence isolated or derived from Deltaproteobacter.

[0131] In some embodiments, a CasX reference guide RNA comprises a sequence isolated or derived from Planctomycetes. In some embodiments, the sequence is a CasX tracrRNA sequence. Exemplary CasX reference tracrRNA sequences isolated or derived from Planctomycetes may include: UACUGGCGCUUUUAUCUCAUUACUUUGAGAGCCAUCACCAGCGACUAUGUCGUA UGGGUAAAGCGCUUAUUUAUCGGAGA (SEQ ID NO: 25) and UACUGGCGCUUUUAUCUCAUUACUUUGAGAGCCAUCACCAGCGACUAUGUCGUA UGGGUAAAGCGCUUAUUUAUCGG (SEQ ID NO: 26). Exemplary crRNA sequences isolated or derived from Planctomycetes may comprise a sequence of UCUCCGAUAAAUAAGAAGCAUCAAAG (SEQ ID NO: 27). In some embodiments, a CasX reference gNA comprises a sequence at least 60% identical, at least 65% identical, at least 70% identical, at least 75% identical, at least 80% identical, at least 81% identical, at least 82% identical, at least 83% identical, at least 84% identical, at least 85% identical, at least 86% identical, at least 86% identical, at least 87% identical, at least 88% identical, at least 89% identical, at least 89% identical, at least 90% identical, at least 91% identical, at least 92% identical, at least 93% identical, at least 94% identical, at least 95% identical, at least 96% identical, at least 97% identical, at least 98% identical, at least 99% identical, at least 99.5% identical or 100% identical to a sequence isolated or derived from Planctomycetes.

[0132] In some embodiments, a CasX reference gNA comprises a sequence isolated or derived from Candidatus Sungbacteria. In some embodiments, the sequence is a CasX tracrRNA sequence. Exemplary CasX reference tracrRNA sequences isolated or derived from Candidatus Sungbacteria may comprise sequences of: GUUUACACACUCCCUCUCAUAGGGU (SEQ ID NO: 28), GUUUACACACUCCCUCUCAUGAGGU (SEQ ID NO: 29), UUUUACAUACCCCCUCUCAUGGGAU (SEQ ID NO: 30) and GUUUACACACUCCCUCUCAUGGGGG (SEQ ID NO: 31). In some embodiments, a CasX reference guide RNA comprises a sequence at least 60% identical, at least 65% identical, at least 70% identical, at least 75% identical, at least 80% identical, at least 81% identical, at least 82% identical, at least 83% identical, at least 84% identical, at least 85% identical, at least 86% identical, at least 86% identical, at least 87% identical, at least 88% identical, at least 89% identical, at least 89% identical, at least 90% identical, at least 91% identical, at least 92% identical, at least 93% identical, at least 94% identical, at least 95% identical, at least 96% identical, at least 97% identical, at least 98% identical, at least 99% identical, at least 99.5% identical or 100% identical to a sequence isolated or derived from Candidatus Sungbacteria.

[0133] Table 1 provides the sequences of reference gRNAs tracr and scaffold sequences. In some embodiments, the disclosure provides gNA sequences wherein the gNA has a scaffold comprising a sequence having at least one nucleotide modification relative to a reference gNA sequence having a sequence of any one of SEQ ID NOS:4-16 of Table 1. It will be understood that in those embodiments wherein a vector comprises a DNA encoding sequence for a gNA, or where a gNA is a gDNA or a chimera of RNA and DNA, that thymine (T) bases can be substituted for the uracil (U) bases of any of the gNA sequence embodiments described herein, including the sequences of Table 1 and Table 2.

TABLE 1
Reference gRNA sequences

| SEQ ID NO. | Nucleotide Sequence |
|---|---|
| 4 | ACAUCUGGCGCGUUUAUUCCAUUACUUUGGAGCCAGUCCCAGCGACUAUGUCG |
| | UAUGGACGAAGCGCUUAUUUAUCGGAGAGAAACCGAUAAGUAAAACGCAUCAAA |
| | G |
| 5 | UACUGGCGCUUUUAUCUCAUUACUUUGAGAGCCAUCACCAGCGACUAUGUCGU |
| | AUGGGUAAAGCGCUUAUUUAUCGGAGAGAAAUCCGAUAAAUAAGAAGCAUCAAA |
| | G |
| 6 | ACAUCUGGCGCGUUUAUUCCAUUACUUUGGAGCCAGUCCCAGCGACUAUGUCG |
| | UAUGGACGAAGCGCUUAUUUAUCGGAGA |
| 7 | ACAUCUGGCGCGUUUAUUCCAUUACUUUGGAGCCAGUCCCAGCGACUAUGUCG |
| | UAUGGACGAAGCGCUUAUUUAUCGG |
| 8 | UACUGGCGCUUUUAUCUCAUUACUUUGAGAGCCAUCACCAGCGACUAUGUCGU |
| | AUGGGUAAAGCGCUUAUUUAUCGGAGA |
| 9 | UACUGGCGCUUUUAUCUCAUUACUUUGAGAGCCAUCACCAGCGACUAUGUCGU |
| | AUGGGUAAAGCGCUUAUUUAUCGG |
| 10 | GUUUACACACUCCCUCUCAUAGGGU |
| 11 | GUUUACACACUCCCUCUCAUGAGGU |
| 12 | UUUUACAUACCCCCUCUCAUGGGAU |
| 13 | GUUUACACACUCCCUCUCAUGGGGG |
| 14 | CCAGCGACUAUGUCGUAUGG |
| 15 | GCGCUUAUUUAUCGGAGAGAAAUCCGAUAAAUAAGAAGC |
| 16 | GGCGCUUUUAUCUCAUUACUUUGAGAGCCAUCACCAGCGACUAUGUCGUAUGG |
| | GUAAAGCGCUUAUUUAUCGGA |

[0134] g. gNA Variants

[0135] In another aspect, the disclosure relates to guide nucleic acid variants (referred to herein alternatively as “gNA variant” ˜ or “gRNA variant”), which comprise one or more modifications relative to a reference gRNA scaffold. As used herein, “scaffold” refers to all parts to the gNA necessary for gNA function with the exception of the spacer sequence.

[0136] In some embodiments, a gNA variant comprises one or more nucleotide substitutions, insertions, deletions, or swapped or replaced regions relative to a reference gRNA sequence of the disclosure. In some embodiments, a mutation can occur in any region of a reference gRNA to produce a gNA variant. In some embodiments, the scaffold of the gNA variant sequence has at least 2000, at least 3000, at least 4000, at least 5000, at least 600%, or at least 7000, at least 8000, at least 8500, at least about 9000, at least about 9500, at least about 9600, at least about 9700, at least about 9800, or at least about 9900 identity to the sequence of SEQ ID NO:4 or SEQ ID NO:5.

[0137] In some embodiments, a gNA variant comprises one or more nucleotide changes within one or more regions of the reference gRNA that improve a characteristic of the reference gRNA. Exemplary regions include the RNA triplex, the pseudoknot, the scaffold stem loop, and the extended stem loop. In some cases, the variant scaffold stem further comprises a bubble. In other cases, the variant scaffold further comprises a triplex loop region. In still other cases, the variant scaffold further comprises a 5′ unstructured region. In one embodiment, the gNA variant scaffold comprises a scaffold stem loop having at least 60% sequence identity to SEQ ID NO:14. In another embodiment, the gNA variant comprises a scaffold stem loop having the sequence of CCAGCGACUAUGUCGUAGUGG (SEQ ID NO: 32). In another embodiment, the disclosure provides a gNA scaffold comprising, relative to SEQ ID NO:5, a C18G substitution, a G55 insertion, a U1 deletion, and a modified extended stem loop in which the original 6 nt loop and 13 most-loop-proximal base pairs (32 nucleotides total) are replaced by a Uvsx hairpin (4 nt loop and 5 loop-proximal base pairs; 14 nucleotides total) and the loop-distal base of the extended stem was converted to a fully base-paired stem contiguous with the new Uvsx hairpin by deletion of the A99 and substitution of G64U. In the foregoing embodiment, the gNA scaffold comprises the sequence

(SEQ ID NO: 2238)
ACUGGCGCUUUUAUCUGAUUACUUUGAGAGCCAUCACCAGCGACUAUGU
CGUAGUGGGUAAAGCUCCCUCUUCGGAGGGAGCAUCAAAG.

[0138] All gNA variants that have one or more improved functions or characteristics, or add one or more new functions when the variant gNA is compared to a reference gRNA described herein, are envisaged as within the scope of the disclosure. A representative example of such a gNA variant is guide 174 (SEQ ID NO:2238), the design of which is described in the Examples. In some embodiments, the gNA variant adds a new function to the RNP comprising the gNA variant. In some embodiments, the gNA variant has an improved characteristic selected from: improved stability; improved solubility; improved transcription of the gNA; improved resistance to nuclease activity; increased folding rate of the gNA; decreased side product formation during folding; increased productive folding; improved binding affinity to a CasX protein; improved binding affinity to a target DNA when complexed with a CasX protein; improved gene editing when complexed with a CasX protein; improved specificity of editing when complexed with a CasX protein; and improved ability to utilize a greater spectrum of one or more PAM sequences, including ATC, CTC, GTC, or TTC, in the editing of target DNA when complexed with a CasX protein, or any combination thereof. In some cases, the one or more of the improved characteristics of the gNA variant is at least about 1.1 to about 100,000-fold improved relative to the reference gNA of SEQ ID NO:4 or SEQ ID NO:5. In other cases, the one or more improved characteristics of the gNA variant is at least about 1.1, at least about 10, at least about 100, at least about 1000, at least about 10,000, at least about 100,000-fold or more improved relative to the reference gNA of SEQ ID NO:4 or SEQ ID NO:5. In other cases, the one or more of the improved characteristics of the gNA variant is about 1.1 to 100,00-fold, about 1.1 to 10,00-fold, about 1.1 to 1,000-fold, about 1.1 to 500-fold, about 1.1 to 100-fold, about 1.1 to 50-fold, about 1.1 to 20-fold, about 10 to 100,00-fold, about 10 to 10,00-fold, about 10 to 1,000-fold, about 10 to 500-fold, about 10 to 100-fold, about 10 to 50-fold, about 10 to 20-fold, about 2 to 70-fold, about 2 to 50-fold, about 2 to 30-fold, about 2 to 20-fold, about 2 to 10-fold, about 5 to 50-fold, about 5 to 30-fold, about 5 to 10-fold, about 100 to 100,00-fold, about 100 to 10,00-fold, about 100 to 1,000-fold, about 100 to 500-fold, about 500 to 100,00-fold, about 500 to 10,00-fold, about 500 to 1,000-fold, about 500 to 750-fold, about 1,000 to 100,00-fold, about 10,000 to 100,00-fold, about 20 to 500-fold, about 20 to 250-fold, about 20 to 200-fold, about 20 to 100-fold, about 20 to 50-fold, about 50 to 10,000-fold, about 50 to 1,000-fold, about 50 to 500-fold, about 50 to 200-fold, or about 50 to 100-fold, improved relative to the reference gNA of SEQ ID NO:4 or SEQ ID NO:5. In other cases, the one or more improved characteristics of the gNA variant is about 1.1-fold, 1.2-fold, 1.3-fold, 1.4-fold, 1.5-fold, 1.6-fold, 1.7-fold, 1.8-fold, 1.9-fold, 2-fold, 3-fold, 4-fold, 5-fold, 6-fold, 7-fold, 8-fold, 9-fold, 10-fold, 11-fold, 12-fold, 13-fold, 14-fold, 15-fold, 16-fold, 17-fold, 18-fold, 19-fold, 20-fold, 25-fold, 30-fold, 40-fold, 45-fold, 50-fold, 55-fold, 60-fold, 70-fold, 80-fold, 90-fold, 100-fold, 110-fold, 120-fold, 130-fold, 140-fold, 150-fold, 160-fold, 170-fold, 180-fold, 190-fold, 200-fold, 210-fold, 220-fold, 230-fold, 240-fold, 250-fold, 260-fold, 270-fold, 280-fold, 290-fold, 300-fold, 310-fold, 320-fold, 330-fold, 340-fold, 350-fold, 360-fold, 370-fold, 380-fold, 390-fold, 400-fold, 425-fold, 450-fold, 475-fold, or 500-fold improved relative to the reference gNA of SEQ ID NO:4 or SEQ ID NO:5.

[0139] In some embodiments, a gNA variant can be created by subjecting a reference gRNA to a one or more mutagenesis methods, such as the mutagenesis methods described herein, below, which may include Deep Mutational Evolution (DME), deep mutational scanning (DMS), error prone PCR, cassette mutagenesis, random mutagenesis, staggered extension PCR, gene shuffling, or domain swapping, in order to generate the gNA variants of the disclosure. The activity of reference gRNAs may be used as a benchmark against which the activity of gNA variants are compared, thereby measuring improvements in function of gNA variants. In other embodiments, a reference gRNA may be subjected to one or more deliberate, targeted mutations, substitutions, or domain swaps in order to produce a gNA variant, for example a rationally designed variant. Exemplary gRNA variants produced by such methods are described in the Examples and representative sequences of gNA scaffolds are presented in Table 2 as SEQ ID NOS: 2101-2285.

[0140] In some embodiments, the gNA variant comprises one or more modifications compared to a reference guide nucleic acid scaffold sequence, wherein the one or more modification is selected from: at least one nucleotide substitution in a region of the gNA variant; at least one nucleotide deletion in a region of the gNA variant; at least one nucleotide insertion in a region of the gNA variant; a substitution of all or a portion of a region of the gNA variant; a deletion of all or a portion of a region of the gNA variant; or any combination of the foregoing. In some cases, the modification is a substitution of 1 to 15 consecutive or non-consecutive nucleotides in the gNA variant in one or more regions. In other cases, the modification is a deletion of 1 to 10 consecutive or non-consecutive nucleotides in the gNA variant in one or more regions. In other cases, the modification is an insertion of 1 to 10 consecutive or non-consecutive nucleotides in the gNA variant in one or more regions. In other cases, the modification is a substitution of the scaffold stem loop or the extended stem loop with an RNA stem loop sequence from a heterologous RNA source with proximal 5′ and 3′ ends. In some cases, a gNA variant of the disclosure comprises two or more modifications in one region. In other cases, a gNA variant of the disclosure comprises modifications in two or more regions. In other cases, a gNA variant comprises any combination of the foregoing modifications described in this paragraph.

[0141] In some embodiments, a 5′ G is added to a gNA variant sequence for expression in vivo, as transcription from a U6 promoter is more efficient and more consistent with regard to the start site when the +1 nucleotide is a G. In other embodiments, two 5′ Gs are added to a gNA variant sequence for in vitro transcription to increase production efficiency, as T7 polymerase strongly prefers a Gin the +1 position and a purine in the +2 position. In some cases, the 5′ G bases are added to the reference scaffolds SEQ ID NOS: 4-16 as set forth in Table 1. In other cases, the 5′ G bases are added to the variant scaffolds of SEQ ID NOS: 2101-2285 as set forth in Table 2.

[0142] Table 2 provides exemplary gNA variant scaffold sequences. In Table 2, (−) indicates a deletion at the specified position(s) relative to the reference sequence of SEQ ID NO:5, (+) indicates an insertion of the specified base(s) at the position indicated relative to SEQ ID NO:5, (:) indicates the range of bases at the specified start:stop coordinates of a deletion or substitution relative to SEQ ID NO:5, and multiple insertions, deletions or substitutions are separated by commas; e.g., A14C, U17G. In some embodiments, the gNA variant scaffold comprises any one of the sequences listed in Table 2, SEQ ID NOS:2101-2285, or a sequence having at least about 5000, at least about 60% o, at least about 70% o, at least about 80% o, at least about 90% o, at least about 9500, at least about 9500 at least about 9600, at least about 9700 at least about 9800, at least about 9900 sequence identity thereto. It will be understood that in those embodiments wherein a vector comprises a DNA encoding sequence for a gNA, or where a gNA is a gDNA or a chimera of RNA and DNA, that thymine (T) bases can be substituted for the uracil (U) bases of any of the gNA sequence embodiments described herein.

TAB LE 2
Exemplary gNA Scaffold Sequences

| SEQ ID | NAME or | |
|---|---|---|
| NO: | Modification | NUCLEOTIDE SEQUENCE |
| 2101 | phage replication | UACUGGCGCUUUUAUCUCAUUACUUUGAGAGCCAUCACCAGCGACUA |
| | stable | UGUCGUAUGGGUAAAGCGCAGGUGGGACGACCUCUCGGUCGUCCUA |
| | | UCUGAAGCAUCAAAG |
| 2102 | Kissing loop_b1 | UACUGGCGCUUUUAUCUCAUUACUUUGAGAGCCAUCACCAGCGACUA |
| | | UGUCGUAUGGGUAAAGCGCUGCUCGACGCGUCCUCGAGCAGAAGCA |
| | | UCAAAG |
| 2103 | Kissing loop_a | UACUGGCGCUUUUAUCUCAUUACUUUGAGAGCCAUCACCAGCGACUA |
| | | UGUCGUAUGGGUAAAGCGCUGCUCGCUCCGUUCGAGCAGAAGCAUC |
| | | AAAG |
| 2104 | 32: uvsX hairpin | GUACUGGCGCUUUUAUCUCAUUACUUUGAGAGCCAUCACCAGCGACU |
| | | AUGUCGUAUGGGUAAAGCGCCCUCUUCGGAGGGAAGCAUCAAAG |
| 2105 | PP7 | UACUGGCGCUUUUAUCUCAUUACUUUGAGAGCCAUCACCAGCGACUA |
| | | UGUCGUAUGGGUAAAGCGCAGGAGUUUCUAUGGAAACCCUGAAGCA |
| | | UCAAAG |
| 2106 | 64: trip mut, | GUACUGGCGCCUUUAUCUCAUUACUUUGAGAGCCAUCACCAGCGACU |
| | extended stem | AUGUCGUAUGGGUAAAGCGCUUACGGACUUCGGUCCGUAAGAAGCA |
| | truncation | UCAAAG |
| 2107 | hyperstable | UACUGGCGCUUUUAUCUCAUUACUUUGAGAGCCAUCACCAGCGACUA |
| | tetraloop | UGUCGUAUGGGUAAAGCGCUGCGCUUGCGCAGAAGCAUCAAAG |
| 2108 | C18G | UACUGGCGCUUUUAUCUGAUUACUUUGAGAGCCAUCACCAGCGACUA |
| | | UGUCGUAUGGGUAAAGCGCUUAUUUAUCGGAGAGAAAUCCGAUAAAU |
| | | AAGAAGCAUCAAAG |
| 2109 | U17G | UACUGGCGCUUUUAUCGCAUUACUUUGAGAGCCAUCACCAGCGACUA |
| | | UGUCGUAUGGGUAAAGCGCUUAUUUAUCGGAGAGAAAUCCGAUAAAU |
| | | AAGAAGCAUCAAAG |
| 2110 | CUUCGG loop | UACUGGCGCUUUUAUCUCAUUACUUUGAGAGCCAUCACCAGCGACUA |
| | | UGUCGUAUGGGUAAAGCGCUUAUUUAUCGGAGACUUCGGUCCGAUA |
| | | AAUAAGAAGCAUCAAAG |
| 2111 | MS2 | UACUGGCGCUUUUAUCUCAUUACUUUGAGAGCCAUCACCAGCGACUA |
| | | UGUCGUAUGGGUAAAGCGCACAUGAGGAUUACCCAUGUGAAGCAUCA |
| | | AAG |
| 2112 | -1, A2G, -78, | GCUGGCGCUUUUAUCUCAUUACUUUGAGAGCCAUCACCAGCGACUAU |
| | G77U | GUCGUAUGGGUAAAGCGCUUAUUUAUCGUGAGAAAUCCGAUAAAUAA |
| | | GAAGCAUCAAAG |
| 2113 | QB | UACUGGCGCUUUUAUCUCAUUACUUUGAGAGCCAUCACCAGCGACUA |
| | | UGUCGUAUGGGUAAAGCGCUGCAUGUCUAAGACAGCAGAAGCAUCAA |
| | | AG |
| 2114 | 45 ,44 hairpin | UACUGGCGCUUUUAUCUCAUUACUUUGAGAGCCAUCACCAGCGACUA |
| | | UGUCGUAUGGGUAAAGCGCAGGGCUUCGGCCGAAGCAUCAAAG |
| 2115 | U1A | UACUGGCGCUUUUAUCUCAUUACUUUGAGAGCCAUCACCAGCGACUA |
| | | UGUCGUAUGGGUAAAGCGCAAUCCAUUGCACUCCGGAUUGAAGCAUC |
| | | AAAG |
| 2116 | A14C, U17G | UACUGGCGCUUUUCUCGCAUUACUUUGAGAGCCAUCACCAGCGACUA |
| | | UGUCGUAUGGGUAAAGCGCUUAUUUAUCGGAGAGAAAUCCGAUAAAU |
| | | AAGAAGCAUCAAAG |
| 2117 | CUUCGG loop | UACUGGCGCUUUUAUCUCAUUACUUUGAGAGCCAUCACCAGCGACUA |
| | modified | UGUCGUAUGGGUAAAGCGCUUAUUUAUCGGACUUCGGUCCGAUAAA |
| | | UAAGAAGCAUCAAAG |
| 2118 | Kissing loop_b2 | UACUGGCGCUUUUAUCUCAUUACUUUGAGAGCCAUCACCAGCGACUA |
| | | UGUCGUAUGGGUAAAGCGCUGCUCGUUUGCGGCUACGAGCAGAAGC |
| | | AUCAAAG |
| 2119 | -76:78, -83:87 | UACUGGCGCUUUUAUCUCAUUACUUUGAGAGCCAUCACCAGCGACUA |
| | | UGUCGUAUGGGUAAAGCGCUUAUUUAUCGAGAGAUAAAUAAGAAGCA |
| | | UCAAAG |
| 2120 | -4 | UACGGCGCUUUUAUCUCAUUACUUUGAGAGCCAUCACCAGCGACUAU |
| | | GUCGUAUGGGUAAAGCGCUUAUUUAUCGGAGAGAAAUCCGAUAAAUA |
| | | AGAAGCAUCAAAG |
| 2121 | extended stem | UACUGGCGCCUUUUAUCUCAUUACUUUGAGAGCCAUCACCAGCGACU |
| | truncation | AUGUCGUAUGGGUAAAGCGCUUACGGACUUCGGUCCGUAAGAAGCA |
| | | UCAAAG |
| 2122 | C55 | UACUGGCGCUUUUAUCUCAUUACUUUGAGAGCCAUCACCAGCGACUA |
| | | UGUCGUAUCGGUAAAGCGCUUAUUUAUCGGAGAGAAAUCCGAUAAAU |
| | | AAGAAGCAUCAAAG |
| 2123 | trip mut | UACUGGCGCCUUUAUCUCAUUACUUUGAGAGCCAUCACCAGCGACUA |
| | | UGUCGUAUGGGUAAAGCGCUUAUUUAUCGGACUUCGGUCCGAUAAA |
| | | UAAGAAGCAUCAAAG |
| 2124 | -76:78 | UACUGGCGCUUUUAUCUCAUUACUUUGAGAGCCAUCACCAGCGACUA |
| | | UGUCGUAUGGGUAAAGCGCUUAUUUAUCGAGAAAUCCGAUAAAUAAG |
| | | AAGCAUCAAAG |
| 2125 | -1:5 | GCGCUUUUAUCUCAUUACUUUGAGAGCCAUCACCAGCGACUAUGUCG |
| | | UAUGGGUAAAGCGCUUAUUUAUCGGAGAGAAAUCCGAUAAAUAAGAA |
| | | GCAUCAAAG |
| 2126 | -83:87 | UACUGGCGCUUUUAUCUCAUUACUUUGAGAGCCAUCACCAGCGACUA |
| | | UGUCGUAUGGGUAAAGCGCUUAUUUAUCGGAGAGAGAUAAAUAAGAA |
| | | GCAUCAAAG |
| 2127 | =+G28, A82U, | UACUGGCGCUUUUAUCUCAUUACUUUGGAGAGCCAUCACCAGCGACU |
| | -84, | AUGUCGUAUGGGUAAAGCGCUUAUUUAUCGGAGAGUAUCCGAUAAAU |
| | | AAGAAGCAUCAAAG |
| 2128 | =+51U | UACUGGCGCUUUUAUCUCAUUACUUUGAGAGCCAUCACCAGCGACUA |
| | | UGUUCGUAUGGGUAAAGCGCUUAUUUAUCGGAGAGAAAUCCGAUAAA |
| | | UAAGAAGCAUCAAAG |
| 2129 | -1:4, +G5A, | AGCGCUUUUAUCUCAUUACUUUGAGAGCCAUCACCAGCGACUAUGUC |
| | +G86, | GUAUGGGUAAAGCGCUUAUUUAUCGGAGAGAAAUGCCGAUAAAUAAG |
| | | AAGCAUCAAAG |
| 2130 | =+A94 | UACUGGCGCUUUUAUCUCAUUACUUUGAGAGCCAUCACCAGCGACUA |
| | | UGUCGUAUGGGUAAAGCGCUUAUUUAUCGGAGAGAAAUCCGAUAAAA |
| | | UAAGAAGCAUCAAAG |
| 2131 | =+G72 | UACUGGCGCUUUUAUCUCAUUACUUUGAGAGCCAUCACCAGCGACUA |
| | | UGUCGUAUGGGUAAAGCGCUUAUUGUAUCGGAGAGAAAUCCGAUAAA |
| | | UAAGAAGCAUCAAAG |
| 2132 | shorten front, | GCGCUUUUAUCUCAUUACUUUGAGAGCCAUCACCAGCGACUAUGUCG |
| | CUUCGG loop | UAUGGGUAAAGCGCUUAUUUAUCGGACUUCGGUCCGAUAAAUAAGCG |
| | modified, extend | CAUCAAAG |
| | extended | |
| 2133 | A14C | UACUGGCGCUUUUCUCUCAUUACUUUGAGAGCCAUCACCAGCGACUA |
| | | UGUCGUAUGGGUAAAGCGCUUAUUUAUCGGAGAGAAAUCCGAUAAAU |
| | | AAGAAGCAUCAAAG |
| 2134 | -1:3, +G3 | GUGGCGCUUUUAUCUCAUUACUUUGAGAGCCAUCACCAGCGACUAUG |
| | | UCGUAUGGGUAAAGCGCUUAUUUAUCGGAGAGAAAUCCGAUAAAUAA |
| | | GAAGCAUCAAAG |
| 2135 | =+C45, +U46 | UACUGGCGCUUUUAUCUCAUUACUUUGAGAGCCAUCACCAGCGACCU |
| | | UAUGUCGUAUGGGUAAAGCGCUUAUUUAUCGGAGAGAAAUCCGAUAA |
| | | AUAAGAAGCAUCAAAG |
| 2136 | CUUCGG loop | GAUGGCGCUUUUAUCUCAUUACUUUGAGAGCCAUCACCAGCGACUAU |
| | modified, fun | GUCGUAUGGGUAAAGCGCUUAUUUAUCGGACUUCGGUCCGAUAAAUA |
| | start | AGAAGCAUCAAAG |
| 2137 | -93:94 | UACUGGCGCUUUUAUCUCAUUACUUUGAGAGCCAUCACCAGCGACUA |
| | | UGUCGUAUGGGUAAAGCGCUUAUUUAUCGGAGAGAAAUCCGAUAAAA |
| | | GAAGCAUCAAAG |
| 2138 | =+U45 | UACUGGCGCUUUUAUCUCAUUACUUUGAGAGCCAUCACCAGCGAUCU |
| | | AUGUCGUAUGGGUAAAGCGCUUAUUUAUCGGAGAGAAAUCCGAUAAA |
| | | UAAGAAGCAUCAAAG |
| 2139 | -69, -94 | UACUGGCGCUUUUAUCUCAUUACUUUGAGAGCCAUCACCAGCGACUA |
| | | UGUCGUAUGGGUAAAGGCUUAUUUAUCGGAGAGAAAUCCGAUAAAAA |
| | | GAAGCAUCAAAG |
| 2140 | -94 | UACUGGCGCUUUUAUCUCAUUACUUUGAGAGCCAUCACCAGCGACUA |
| | | UGUCGUAUGGGUAAAGCGCUUAUUUAUCGGAGAGAAAUCCGAUAAAA |
| | | AGAAGCAUCAAAG |
| 2141 | modified | UACUGGCGCUUUAUCUCAUUACUUUGAGAGCCAUCACCAGCGACUAU |
| | CUUCGG, | GUCGUAUGGGUAAAGCGCUUAUUUAUCGGACUUCGGUCCGAUAAAUA |
| | minus U in 1st | AGAAGCAUCAAAG |
| | triplex | |
| 2142 | -1:4, +C4, A14C, | CGGCGCUUUUCUCGCAUUACUUUGAGAGCCAUCACCAGCGACUAUG |
| | U17G, +G72, | UCGUAUGGGUAAAGCGCUUAUUGUAUCGAGAGAUAAAUAAGAAGCAU |
| | -76:78, -83:87 | CAAAG |
| 2143 | U1C, -73 | CACUGGCGCUUUUAUCUCAUUACUUUGAGAGCCAUCACCAGCGACUA |
| | | UGUCGUAUGGGUAAAGCGCUUAUUUUCGGAGAGAAAUCCGAUAAAUA |
| | | AGAAGCAUCAAAG |
| 2144 | Scaffold uuCG, | UACUGGCGCUUUAUCUCAUUACUUUGAGAGCCAUCACCAGCGACUUC |
| | stemuuCG. Stem | GGUCGUAUGGGUAAAGCGCUUAUGUAUCGGCUUCGGCCGAUACAUA |
| | swap, t shorten | AGAAGCAUCAAAG |
| 2145 | Scaffold uuCG, | UACUGGCGCUUUUAUCUCAUUACUUUGAGAGCCAUCACCAGCGACUU |
| | stemuuCG. Stem | CGGUCGUAUGGGUAAAGCGCUUAUGUAUCGGCUUCGGCCGAUACAU |
| | swap | AAGAAGCAUCAAAG |
| 2146 | =+G60 | UACUGGCGCUUUUAUCUCAUUACUUUGAGAGCCAUCACCAGCGACUA |
| | | UGUCGUAUGGGUGAAAGCGCUUAUUUAUCGGAGAGAAAUCCGAUAAA |
| | | UAAGAAGCAUCAAAG |
| 2147 | no stem Scaffold | UACUGGCGCUUUUAUCUCAUUACUUUGAGAGCCAUCACCAGCGACUU |
| | uuCG | CGGUCGUAUGGGUAAAG |
| 2148 | no stem Scaffold | GAUGGGCUUUUAUCUCAUUACUUUGAGAGCCAUCACCAGCGACUUCG |
| | uuCG, fun start | GUCGUAUGGGUAAAG |
| 2149 | Scaffold uuCG, | GAUGGGCUUUUAUCUCAUUACUUUGAGAGCCAUCACCAGCGACUUCG |
| | stem uuCG, fun | GUCGUAUGGGUAAAGCGCUUAUUUAUCGGCUUCGGCCGAUAAAUAA |
| | start | GAAGCAUCAAAG |
| 2150 | Pseudoknots | UACUGGCGCUUUUAUCUCAUUACUUUGAGAGCCAUCACCAGCGACUA |
| | | UGUCGUAUGGGUAAAGCGCUACACUGGGAUCGCUGAAUUAGAGAUC |
| | | GGCGUCCUUUCAUUCUAUAUACUUUGGAGUUUUAAAAUGUCUCUAAG |
| | | UACAGAAGCAUCAAAG |
| 2151 | Scaffold uuCG, | GGCGCUUUUAUCUCAUUACUUUGAGAGCCAUCACCAGCGACUUCGG |
| | stem uuCG | UCGUAUGGGUAAAGCGCUUAUUUAUCGGCUUCGGCCGAUAAAUAAGA |
| | | AGCAUCAAAG |
| 2152 | Scaffold uuCG, | GCUGGCGCUUUUAUCUCAUUACUUUGAGAGCCAUCACCAGCGACUUC |
| | stem uuCG, no | GGUCGUAUGGGUAAAGCGCUUAUUUAUCGGCUUCGGCCGAUAAAUA |
| | start | AGAAGCAUCAAAG |
| 2153 | Scaffold uuCG | UACUGGCGCUUUUAUCUCAUUACUUUGAGAGCCAUCACCAGCGACUU |
| | | CGGUCGUAUGGGUAAAGCGCUUAUUUAUCGGAGAGAAAUCCGAUAAA |
| | | UAAGAAGCAUCAAAG |
| 2154 | =+GCUC36 | UACUGGCGCUUUUAUCUCAUUACUUUGAGAGCCAUGCUCCACCAGCG |
| | | ACUAUGUCGUAUGGGUAAAGCGCUUAUUUAUCGGAGAGAAAUCCGAU |
| | | AAAUAAGAAGCAUCAAAG |
| 2155 | G quadriplex | UACUGGCGCUUUUAUCUCAUUACUUUGAGAGCCAUCACCAGCGACUA |
| | telomere basket+ | UGUCGUAUGGGUAAAGCGGGGUUAGGGUUAGGGUUAGGGAAGCAUC |
| | ends | AAAG |
| 2156 | G quadriplex | UACUGGCGCUUUUAUCUCAUUACUUUGAGAGCCAUCACCAGCGACUA |
| | M3q | UGUCGUAUGGGUAAAGCGGAGGGAGGGAGGGAGAGGGAAAGCAUCA |
| | | AAG |
| 2157 | G quadriplex | UACUGGCGCUUUUAUCUCAUUACUUUGAGAGCCAUCACCAGCGACUA |
| | telomere basket | UGUCGUAUGGGUAAAGCGUUGGGUUAGGGUUAGGGUUAGGGAAAAG |
| | no ends | CAUCAAAG |
| 2158 | 45, 44 hairpin | UACUGGCGCUUUUAUCUCAUUACUUUGAGAGCCAUCACCAGCGACUA |
| | (old version) | UGUCGUAUGGGUAAAGCGC--------AGGGCUUCGGCCG--------- |
| | | GAAGCAUCAAAG |
| 2159 | Sarcin-ricin loop | UACUGGCGCUUUUAUCUCAUUACUUUGAGAGCCAUCACCAGCGACUA |
| | | UGUCGUAUGGGUAAAGCGCCUGCUCAGUACGAGAGGAACCGCAGGA |
| | | AGCAUCAAAG |
| 2160 | uvsX, C18G | UACUGGCGCUUUUAUCUGAUUACUUUGAGAGCCAUCACCAGCGACUA |
| | | UGUCGUAUGGGUAAAGCGCCCUCUUCGGAGGGAAGCAUCAAAG |
| 2161 | truncated stem | UACUGGCGCCUUUAUCUGAUUACUUUGAGAGCCAUCACCAGCGACUA |
| | loop, C18G, trip | UGUCGUAUGGGUAAAGCGCUUACGGACUUCGGUCCGUAAGAAGCAU |
| | mut (U10C) | CAAAG |
| 2162 | short phage rep, | UACUGGCGCUUUUAUCUGAUUACUUUGAGAGCCAUCACCAGCGACUA |
| | C18G | UGUCGUAUGGGUAAAGCGCGGACGACCUCUCGGUCGUCCGAAGCAU |
| | | CAAAG |
| 2163 | phage rep loop, | UACUGGCGCUUUUAUCUGAUUACUUUGAGAGCCAUCACCAGCGACUA |
| | C18G | UGUCGUAUGGGUAAAGCGCAGGUGGGACGACCUCUCGGUCGUCCUA |
| | | UCUGAAGCAUCAAAG |
| 2164 | =+G18, stacked | UACUGGCGCCUUUAUCUGCAUUACUUUGAGAGCCAUCACCAGCGACU |
| | onto 64 | AUGUCGUAUGGGUAAAGCGCUUACGGACUUCGGUCCGUAAGAAGCA |
| | | UCAAAG |
| 2165 | truncated stem | GCUGGCGCUUUUAUCUGAUUACUUUGAGAGCCAUCACCAGCGACUAU |
| | loop, C18G, -1 | GUCGUAUGGGUAAAGCGCUUACGGACUUCGGUCCGUAAGAAGCAUC |
| | A2G | AAAG |
| 2166 | phage rep loop, | UACUGGCGCCUUUAUCUGAUUACUUUGAGAGCCAUCACCAGCGACUA |
| | C18G, trip mut | UGUCGUAUGGGUAAAGCGCAGGUGGGACGACCUCUCGGUCGUCCUA |
| | (U10C) | UCUGAAGCAUCAAAG |
| 2167 | short phage rep, | UACUGGCGCCUUUAUCUGAUUACUUUGAGAGCCAUCACCAGCGACUA |
| | C18G, trip mut | UGUCGUAUGGGUAAAGCGCGGACGACCUCUCGGUCGUCCGAAGCAU |
| | (U10C) | CAAAG |
| 2168 | uvsX, trip mut | UACUGGCGCCUUUAUCUCAUUACUUUGAGAGCCAUCACCAGCGACUA |
| | (U10C) | UGUCGUAUGGGUAAAGCGCCCUCUUCGGAGGGAAGCAUCAAAG |
| 2169 | truncated stem | UACUGGCGCUUUUAUCUCAUUACUUUGAGAGCCAUCACCAGCGACUA |
| | loop | UGUCGUAUGGGUAAAGCGCUUACGGACUUCGGUCCGUAAGAAGCAU |
| | | CAAAG |
| 2170 | =+A17, stacked | UACUGGCGCCUUUAUCAUCAUUACUUUGAGAGCCAUCACCAGCGACU |
| | onto 64 | AUGUCGUAUGGGUAAAGCGCUUACGGACUUCGGUCCGUAAGAAGCA |
| | | UCAAAG |
| 2171 | 3′ HDV genomic | UACUGGCGCUUUUAUCUCAUUACUUUGAGAGCCAUCACCAGCGACUA |
| | ribozyme | UGUCGUAUGGGUAAAGCGCUUAUUUAUCGGAGAGAAAUCCGAUAAAU |
| | | AAGAAGCAUCAAAGGGCCGGCAUGGUCCCAGCCUCCUCGCUGGCGC |
| | | CGGCUGGGCAACAUUCCGAGGGGACCGUCCCCUCGGUAAUGGCGAA |
| | | UGGGACCC |
| 2172 | phage rep loop, | UACUGGCGCCUUUAUCUCAUUACUUUGAGAGCCAUCACCAGCGACUA |
| | trip mut (U10C) | UGUCGUAUGGGUAAAGCGCAGGUGGGACGACCUCUCGGUCGUCCUA |
| | | UCUGAAGCAUCAAAG |
| 2173 | -79:80 | UACUGGCGCUUUUAUCUCAUUACUUUGAGAGCCAUCACCAGCGACUA |
| | | UGUCGUAUGGGUAAAGCGCUUAUUUAUCGGAGAAAUCCGAUAAAUAA |
| | | GAAGCAUCAAAG |
| 2174 | short phage rep, | UACUGGCGCCUUUAUCUCAUUACUUUGAGAGCCAUCACCAGCGACUA |
| | trip mut (U10C) | UGUCGUAUGGGUAAAGCGCGGACGACCUCUCGGUCGUCCGAAGCAU |
| | | CAAAG |
| 2175 | extra truncated | UACUGGCGCUUUUAUCUCAUUACUUUGAGAGCCAUCACCAGCGACUA |
| | stem loop | UGUCGUAUGGGUAAAGCGCCGGACUUCGGUCCGGAAGCAUCAAAG |
| 2176 | U17G, C18G | UACUGGCGCUUUUAUCGGAUUACUUUGAGAGCCAUCACCAGCGACUA |
| | | UGUCGUAUGGGUAAAGCGCUUAUUUAUCGGAGAGAAAUCCGAUAAAU |
| | | AAGAAGCAUCAAAG |
| 2177 | short phage rep | UACUGGCGCUUUUAUCUCAUUACUUUGAGAGCCAUCACCAGCGACUA |
| | | UGUCGUAUGGGUAAAGCGCGGACGACCUCUCGGUCGUCCGAAGCAU |
| | | CAAAG |
| 2178 | uvsX, C18G, -1 | GCUGGCGCUUUUAUCUGAUUACUUUGAGAGCCAUCACCAGCGACUAU |
| | A2G | GUCGUAUGGGUAAAGCGCCCUCUUCGGAGGGAAGCAUCAAAG |
| 2179 | uvsX, C18G, trip | GCUGGCGCCUUUAUCUGAUUACUUUGAGAGCCAUCACCAGCGACUAU |
| | mut (U10C), -1 | GUCGUAUGGGUAAAGCUCCCUCUUCGGAGGGAGCAUCAAAG |
| | A2G, HDV -99 | |
| | G65U | |
| 2180 | 3′HDV | UACUGGCGCUUUUAUCUCAUUACUUUGAGAGCCAUCACCAGCGACUA |
| | antigenomic | UGUCGUAUGGGUAAAGCGCUUAUUUAUCGGAGAGAAAUCCGAUAAAU |
| | ribozyme | AAGAAGCAUCAAAGGGGUCGGCAUGGCAUCUCCACCUCCUCGCGGU |
| | | CCGACCUGGGCAUCCGAAGGAGGACGCACGUCCACUCGGAUGGCUA |
| | | AGGGAGAGCCA |
| 2181 | uvsX, C18G, trip | GCUGGCGCCUUUAUCUGAUUACUUUGAGAGCCAUCACCAGCGACUAU |
| | mut (U10C), -1 | GUCGUAUGGGUAAAGCGCCCUCUUCGGAGGGCGCAUCAAAG |
| | A2G, HDV | |
| | AA(98:99)C | |
| 2182 | 3′ HDV ribozyme | UACUGGCGCUUUUAUCUCAUUACUUUGAGAGCCAUCACCAGCGACUA |
| | (Lior Nissim, | UGUCGUAUGGGUAAAGCGCUUAUUUAUCGGAGAGAAAUCCGAUAAAU |
| | Timothy Lu) | AAGAAGCAUCAAAGUUUUGGCCGGCAUGGUCCCAGCCUCCUCGCUG |
| | | GCGCCGGCUGGGCAACAUGCUUCGGCAUGGCGAAUGGGACCCCGGG |
| 2183 | TAC(1:3)GA, | GAUGGCGCCUUUAUCUCAUUACUUUGAGAGCCAUCACCAGCGACUAU |
| | stacked onto 64 | GUCGUAUGGGUAAAGCGCUUACGGACUUCGGUCCGUAAGAAGCAUC |
| | | AAAG |
| 2184 | uvsX, -1 A2G | GCUGGCGCUUUUAUCUCAUUACUUUGAGAGCCAUCACCAGCGACUAU |
| | | GUCGUAUGGGUAAAGCGCCCUCUUCGGAGGGAAGCAUCAAAG |
| 2185 | truncated stem | GCUGGCGCCUUUAUCUGAUUACUUUGAGAGCCAUCACCAGCGACUAU |
| | loop, C18G, trip | GUCGUAUGGGUAAAGCUCUUACGGACUUCGGUCCGUAAGAGCAUCA |
| | mut (U10C), -1 | AAG |
| | A2G, HDV -99 | |
| | G65U | |
| 2186 | short phage rep, | GCUGGCGCCUUUAUCUGAUUACUUUGAGAGCCAUCACCAGCGACUAU |
| | C18G, trip mut | GUCGUAUGGGUAAAGCUCGGACGACCUCUCGGUCGUCCGAGCAUCA |
| | (U10C), -1 A2G, | AAG |
| | HDV -99 G65U | |
| 2187 | 3′sTRSV WT | UACUGGCGCUUUUAUCUCAUUACUUUGAGAGCCAUCACCAGCGACUA |
| | viral | UGUCGUAUGGGUAAAGCGCUUAUUUAUCGGAGAGAAAUCCGAUAAAU |
| | Hammerhead | AAGAAGCAUCAAAGCCUGUCACCGGAUGUGCUUUCCGGUCUGAUGA |
| | ribozyme | GUCCGUGAGGACGAAACAGG |
| 2188 | short phage rep, | GCUGGCGCUUUUAUCUGAUUACUUUGAGAGCCAUCACCAGCGACUAU |
| | C18G, -1 A2G | GUCGUAUGGGUAAAGCGCGGACGACCUCUCGGUCGUCCGAAGCAUC |
| | | AAAG |
| 2189 | short phage rep, | GCUGGCGCCUUUAUCUGAUUACUUUGAGAGCCAUCACCAGCGACUAU |
| | C18G, trip mut | GUCGUAUGGGUAAAGCGCGGACGACCUCUCGGUCGUCCGAAGCAUC |
| | (U10C), -1 A2G, | AAAG |
| | 3′ genomic HDV | |
| 2190 | phage rep loop, | GCUGGCGCCUUUAUCUGAUUACUUUGAGAGCCAUCACCAGCGACUAU |
| | C18G, trip mut | GUCGUAUGGGUAAAGCUCAGGUGGGACGACCUCUCGGUCGUCCUAU |
| | (U10C), -1 A2G, | CUGAGCAUCAAAG |
| | HDV -99 G65U | |
| 2191 | 3′ HDV ribozyme | UACUGGCGCUUUUAUCUCAUUACUUUGAGAGCCAUCACCAGCGACUA |
| | (Owen Ryan, | UGUCGUAUGGGUAAAGCGCUUAUUUAUCGGAGAGAAAUCCGAUAAAU |
| | Jamie Cate) | AAGAAGCAUCAAAGGAUGGCCGGCAUGGUCCCAGCCUCCUCGCUGG |
| | | CGCCGGCUGGGCAACACCUUCGGGUGGCGAAUGGGAC |
| 2192 | phage rep loop, | GCUGGCGCUUUUAUCUGAUUACUUUGAGAGCCAUCACCAGCGACUAU |
| | C18G, -1 A2G | GUCGUAUGGGUAAAGCGCAGGUGGGACGACCUCUCGGUCGUCCUAU |
| | | CUGAAGCAUCAAAG |
| 2193 | 0.14 | UACUGGCGCUUUUAUCUCAUUACUUUGAGAGCCAUCACCAGCGACUA |
| | | UGUCGUACUGGGUAAAGCGCUUAUUUAUCGGAGAGAAAUCCGAUAAA |
| | | UAAGAAGCAUCAAAG |
| 2194 | -78, G77U | UACUGGCGCUUUUAUCUCAUUACUUUGAGAGCCAUCACCAGCGACUA |
| | | UGUCGUAUGGGUAAAGCGCUUAUUUAUCGUGAGAAAUCCGAUAAAUA |
| | | AGAAGCAUCAAAG |
| 2195 | | GUACUGGCGCUUUUAUCUCAUUACUUUGAGAGCCAUCACCAGCGACU |
| | | AUGUCGUAUGGGUAAAGCGCUUAUUUAUCGGAGAGAAAUCCGAUAAA |
| | | UAAGAAGCAUCAAAG |
| 2196 | short phage rep, | GCUGGCGCUUUUAUCUCAUUACUUUGAGAGCCAUCACCAGCGACUAU |
| | -1 A2G | GUCGUAUGGGUAAAGCGCGGACGACCUCUCGGUCGUCCGAAGCAUC |
| | | AAAG |
| 2197 | truncated stem | GCUGGCGCCUUUAUCUGAUUACUUUGAGAGCCAUCACCAGCGACUAU |
| | loop, C18G, trip | GUCGUAUGGGUAAAGCGCUUACGGACUUCGGUCCGUAAGAAGCAUC |
| | mut (U10C), -1 | AAAG |
| | A2G | |
| 2198 | -1, A2G | GCUGGCGCUUUUAUCUCAUUACUUUGAGAGCCAUCACCAGCGACUAU |
| | | GUCGUAUGGGUAAAGCGCUUAUUUAUCGGAGAGAAAUCCGAUAAAUA |
| | | AGAAGCAUCAAAG |
| 2199 | truncated stem | GCUGGCGCCUUUAUCUCAUUACUUUGAGAGCCAUCACCAGCGACUAU |
| | loop, trip mut | GUCGUAUGGGUAAAGCGCUUACGGACUUCGGUCCGUAAGAAGCAUC |
| | (U10C), -1 A2G | AAAG |
| 2200 | uvsX, C18G, trip | GCUGGCGCCUUUAUCUGAUUACUUUGAGAGCCAUCACCAGCGACUAU |
| | mut (U10C), -1 | GUCGUAUGGGUAAAGCGCCCUCUUCGGAGGGAAGCAUCAAAG |
| | A2G | |
| 2201 | phage rep loop, | GCUGGCGCUUUUAUCUCAUUACUUUGAGAGCCAUCACCAGCGACUAU |
| | -1 A2G | GUCGUAUGGGUAAAGCGCAGGUGGGACGACCUCUCGGUCGUCCUAU |
| | | CUGAAGCAUCAAAG |
| 2202 | phage rep loop, | GCUGGCGCCUUUAUCUCAUUACUUUGAGAGCCAUCACCAGCGACUAU |
| | trip mut (U10C), | GUCGUAUGGGUAAAGCGCAGGUGGGACGACCUCUCGGUCGUCCUAU |
| | -1 A2G | CUGAAGCAUCAAAG |
| 2203 | phage rep loop, | GCUGGCGCCUUUAUCUGAUUACUUUGAGAGCCAUCACCAGCGACUAU |
| | C18G, trip mut | GUCGUAUGGGUAAAGCGCAGGUGGGACGACCUCUCGGUCGUCCUAU |
| | (U10C), -1 A2G | CUGAAGCAUCAAAG |
| 2204 | truncated stem | UACUGGCGCUUUUAUCUGAUUACUUUGAGAGCCAUCACCAGCGACUA |
| | loop, C18G | UGUCGUAUGGGUAAAGCGCUUACGGACUUCGGUCCGUAAGAAGCAU |
| | | CAAAG |
| 2205 | uvsX, trip mut | GCUGGCGCCUUUAUCUCAUUACUUUGAGAGCCAUCACCAGCGACUAU |
| | (U10C), -1 A2G | GUCGUAUGGGUAAAGCGCCCUCUUCGGAGGGAAGCAUCAAAG |
| 2206 | truncated stem | GCUGGCGCUUUUAUCUCAUUACUUUGAGAGCCAUCACCAGCGACUAU |
| | loop, -1 A2G | GUCGUAUGGGUAAAGCGCUUACGGACUUCGGUCCGUAAGAAGCAUC |
| | | AAAG |
| 2207 | short phage rep, | GCUGGCGCCUUUAUCUCAUUACUUUGAGAGCCAUCACCAGCGACUAU |
| | trip mut (U10C), | GUCGUAUGGGUAAAGCGCGGACGACCUCUCGGUCGUCCGAAGCAUC |
| | -1 A2G | AAAG |
| 2208 | 5′HDV ribozyme | GAUGGCCGGCAUGGUCCCAGCCUCCUCGCUGGCGCCGGCUGGGCAA |
| | (Owen Ryan, | CACCUUCGGGUGGCGAAUGGGACUACUGGCGCUUUUAUCUCAUUAC |
| | Jamie Cate) | UUUGAGAGCCAUCACCAGCGACUAUGUCGUAUGGGUAAAGCGCUUAU |
| | | UUAUCGGAGAGAAAUCCGAUAAAUAAGAAGCAUCAAAG |
| 2209 | 5′HDV genomic | GGCCGGCAUGGUCCCAGCCUCCUCGCUGGCGCCGGCUGGGCAACAU |
| | ribozyme | UCCGAGGGGACCGUCCCCUCGGUAAUGGCGAAUGGGACCCUACUGG |
| | | CGCUUUUAUCUCAUUACUUUGAGAGCCAUCACCAGCGACUAUGUCGU |
| | | AUGGGUAAAGCGCUUAUUUAUCGGAGAGAAAUCCGAUAAAUAAGAAG |
| | | CAUCAAAG |
| 2210 | truncated stem | GCUGGCGCCUUUAUCUGAUUACUUUGAGAGCCAUCACCAGCGACUAU |
| | loop, C18G, trip | GUCGUAUGGGUAAAGCGCUUACGGACUUCGGUCCGUAAGCGCAUCA |
| | mut (U10C), -1 | AAG |
| | A2G, HDV | |
| | AA(98:99)C | |
| 2211 | 5′env25 pistol | CGUGGUUAGGGCCACGUUAAAUAGUUGCUUAAGCCCUAAGCGUUGA |
| | ribozyme (with | UCUUCGGAUCAGGUGCAAUACUGGCGCUUUUAUCUCAUUACUUUGA |
| | an added | GAGCCAUCACCAGCGACUAUGUCGUAUGGGUAAAGCGCUUAUUUAUC |
| | CUUCGG loop) | GGAGAGAAAUCCGAUAAAUAAGAAGCAUCAAAG |
| 2212 | 5′HDV | GGGUCGGCAUGGCAUCUCCACCUCCUCGCGGUCCGACCUGGGCAUC |
| | antigenomic | CGAAGGAGGACGCACGUCCACUCGGAUGGCUAAGGGAGAGCCAUAC |
| | ribozyme | UGGCGCUUUUAUCUCAUUACUUUGAGAGCCAUCACCAGCGACUAUGU |
| | | CGUAUGGGUAAAGCGCUUAUUUAUCGGAGAGAAAUCCGAUAAAUAAG |
| | | AAGCAUCAAAG |
| 2213 | 3′ Hammerhead | UACUGGCGCUUUUAUCUCAUUACUUUGAGAGCCAUCACCAGCGACUA |
| | ribozyme (Lior | UGUCGUAUGGGUAAAGCGCUUAUUUAUCGGAGAGAAAUCCGAUAAAU |
| | Nissim, Timothy | AAGAAGCAUCAAAGCCAGUACUGAUGAGUCCGUGAGGACGAAACGAG |
| | Lu) guide | UAAGCUCGUCUACUGGCGCUUUUAUCUCAU |
| | scaffold scar | |
| 2214 | =+A27, stacked | UACUGGCGCCUUUAUCUCAUUACUUUAGAGAGCCAUCACCAGCGACU |
| | onto 64 | AUGUCGUAUGGGUAAAGCGCUUACGGACUUCGGUCCGUAAGAAGCA |
| | | UCAAAG |
| 2215 | 5′Hammerhead | CGACUACUGAUGAGUCCGUGAGGACGAAACGAGUAAGCUCGUCUAG |
| | ribozyme (Lior | UCGUACUGGCGCUUUUAUCUCAUUACUUUGAGAGCCAUCACCAGCGA |
| | Nissim, Timothy | CUAUGUCGUAUGGGUAAAGCGCUUAUUUAUCGGAGAGAAAUCCGAUA |
| | Lu) smaller scar | AAUAAGAAGCAUCAAAG |
| 2216 | phage rep loop, | GCUGGCGCCUUUAUCUGAUUACUUUGAGAGCCAUCACCAGCGACUAU |
| | C18G, trip mut | GUCGUAUGGGUAAAGCGCAGGUGGGACGACCUCUCGGUCGUCCUAU |
| | (U10C), -1 A2G, | CUGCGCAUCAAAG |
| | HDV | |
| | AA(98:99)C | |
| 2217 | -27, stacked onto | UACUGGCGCCUUUAUCUCAUUACUUUAGAGCCAUCACCAGCGACUAU |
| | 64 | GUCGUAUGGGUAAAGCGCUUACGGACUUCGGUCCGUAAGAAGCAUC |
| | | AAAG |
| 2218 | 3′ Hatchet | UACUGGCGCUUUUAUCUCAUUACUUUGAGAGCCAUCACCAGCGACUA |
| | | UGUCGUAUGGGUAAAGCGCUUAUUUAUCGGAGAGAAAUCCGAUAAAU |
| | | AAGAAGCAUCAAAGCAUUCCUCAGAAAAUGACAAACCUGUGGGGCGU |
| | | AAGUAGAUCUUCGGAUCUAUGAUCGUGCAGACGUUAAAAUCAGGU |
| 2219 | 3′ Hammerhead | UACUGGCGCUUUUAUCUCAUUACUUUGAGAGCCAUCACCAGCGACUA |
| | ribozyme (Lior | UGUCGUAUGGGUAAAGCGCUUAUUUAUCGGAGAGAAAUCCGAUAAAU |
| | Nissim, Timothy | AAGAAGCAUCAAAGCGACUACUGAUGAGUCCGUGAGGACGAAACGAG |
| | Lu) | UAAGCUCGUCUAGUCGCGUGUAGCGAAGCA |
| 2220 | 5′ Hatchet | CAUUCCUCAGAAAAUGACAAACCUGUGGGGCGUAAGUAGAUCUUCGG |
| | | AUCUAUGAUCGUGCAGACGUUAAAAUCAGGUUACUGGCGCUUUUAUC |
| | | UCAUUACUUUGAGAGCCAUCACCAGCGACUAUGUCGUAUGGGUAAAG |
| | | CGCUUAUUUAUCGGAGAGAAAUCCGAUAAAUAAGAAGCAUCAAAG |
| 2221 | 5′ HDV ribozyme | UUUUGGCCGGCAUGGUCCCAGCCUCCUCGCUGGCGCCGGCUGGGCA |
| | (Lior Nissim, | ACAUGCUUCGGCAUGGCGAAUGGGACCCCGGGUACUGGCGCUUUUA |
| | Timothy Lu) | UCUCAUUACUUUGAGAGCCAUCACCAGCGACUAUGUCGUAUGGGUAA |
| | | AGCGCUUAUUUAUCGGAGAGAAAUCCGAUAAAUAAGAAGCAUCAAAG |
| 2222 | 5′ Hammerhead | CGACUACUGAUGAGUCCGUGAGGACGAAACGAGUAAGCUCGUCUAG |
| | ribozyme (Lior | UCGCGUGUAGCGAAGCAUACUGGCGCUUUUAUCUCAUUACUUUGAG |
| | Nissim, Timothy | AGCCAUCACCAGCGACUAUGUCGUAUGGGUAAAGCGCUUAUUUAUCG |
| | Lu) | GAGAGAAAUCCGAUAAAUAAGAAGCAUCAAAG |
| 2223 | 3′HH15 Minimal | UACUGGCGCUUUUAUCUCAUUACUUUGAGAGCCAUCACCAGCGACUA |
| | Hammerhead | UGUCGUAUGGGUAAAGCGCUUAUUUAUCGGAGAGAAAUCCGAUAAAU |
| | ribozyme | AAGAAGCAUCAAAGGGGAGCCCCGCUGAUGAGGUCGGGGAGACCGA |
| | | AAGGGACUUCGGUCCCUACGGGGCUCCC |
| 2224 | 5′RBMX | CCACCCCCACCACCACCCCCACCCCCACCACCACCCUACUGGCGCUU |
| | recruiting motif | UUAUCUCAUUACUUUGAGAGCCAUCACCAGCGACUAUGUCGUAUGGG |
| | | UAAAGCGCUUAUUUAUCGGAGAGAAAUCCGAUAAAUAAGAAGCAUCA |
| | | AAG |
| 2225 | 3′ Hammerhead | UACUGGCGCUUUUAUCUCAUUACUUUGAGAGCCAUCACCAGCGACUA |
| | ribozyme (Lior | UGUCGUAUGGGUAAAGCGCUUAUUUAUCGGAGAGAAAUCCGAUAAAU |
| | Nissim, Timothy | AAGAAGCAUCAAAGCGACUACUGAUGAGUCCGUGAGGACGAAACGAG |
| | Lu) smaller scar | UAAGCUCGUCUAGUCG |
| 2226 | 3′ env25 pistol | UACUGGCGCUUUUAUCUCAUUACUUUGAGAGCCAUCACCAGCGACUA |
| | ribozyme (with | UGUCGUAUGGGUAAAGCGCUUAUUUAUCGGAGAGAAAUCCGAUAAAU |
| | an added | AAGAAGCAUCAAAGCGUGGUUAGGGCCACGUUAAAUAGUUGCUUAAG |
| | CUUCGG loop) | CCCUAAGCGUUGAUCUUCGGAUCAGGUGCAA |
| 2227 | 3′ Env-9 Twister | UACUGGCGCUUUUAUCUCAUUACUUUGAGAGCCAUCACCAGCGACUA |
| | | UGUCGUAUGGGUAAAGCGCUUAUUUAUCGGAGAGAAAUCCGAUAAAU |
| | | AAGAAGCAUCAAAGGGCAAUAAAGCGGUUACAAGCCCGCAAAAAUAG |
| | | CAGAGUAAUGUCGCGAUAGCGCGGCAUUAAUGCAGCUUUAUUG |
| 2228 | =+AUUAUCUC | UACUGGCGCUUUUAUCUCAUUACUAUUAUCUCAUUACUUUGAGAGCC |
| | AUUACU25 | AUCACCAGCGACUAUGUCGUAUGGGUAAAGCGCUUAUUUAUCGGAGA |
| | | GAAAUCCGAUAAAUAAGAAGCAUCAAAG |
| 2229 | 5′ Env-9 Twister | GGCAAUAAAGCGGUUACAAGCCCGCAAAAAUAGCAGAGUAAUGUCGC |
| | | GAUAGCGCGGCAUUAAUGCAGCUUUAUUGUACUGGCGCUUUUAUCU |
| | | CAUUACUUUGAGAGCCAUCACCAGCGACUAUGUCGUAUGGGUAAAGC |
| | | GCUUAUUUAUCGGAGAGAAAUCCGAUAAAUAAGAAGCAUCAAAG |
| 2230 | 3′ Twisted Sister | UACUGGCGCUUUUAUCUCAUUACUUUGAGAGCCAUCACCAGCGACUA |
| | 1 | UGUCGUAUGGGUAAAGCGCUUAUUUAUCGGAGAGAAAUCCGAUAAAU |
| | | AAGAAGCAUCAAAGACCCGCAAGGCCGACGGCAUCCGCCGCCGCUG |
| | | GUGCAAGUCCAGCCGCCCCUUCGGGGGCGGGCGCUCAUGGGUAAC |
| 2231 | no stem | UACUGGCGCUUUUAUCUCAUUACUUUGAGAGCCAUCACCAGCGACUA |
| | | UGUCGUAUGGGUAAAG |
| 2232 | 5′HH15 Minimal | GGGAGCCCCGCUGAUGAGGUCGGGGAGACCGAAAGGGACUUCGGUC |
| | Hammerhead | CCUACGGGGCUCCCUACUGGCGCUUUUAUCUCAUUACUUUGAGAGC |
| | ribozyme | CAUCACCAGCGACUAUGUCGUAUGGGUAAAGCGCUUAUUUAUCGGAG |
| | | AGAAAUCCGAUAAAUAAGAAGCAUCAAAG |
| 2233 | 5′ Hammerhead | CCAGUACUGAUGAGUCCGUGAGGACGAAACGAGUAAGCUCGUCUACU |
| | ribozyme (Lior | GGCGCUUUUAUCUCAUUACUGGCGCUUUUAUCUCAUUACUUUGAGA |
| | Nissim, Timothy | GCCAUCACCAGCGACUAUGUCGUAUGGGUAAAGCGCUUAUUUAUCG |
| | Lu) guide | GAGAGAAAUCCGAUAAAUAAGAAGCAUCAAAG |
| | scaffold scar | |
| 2234 | 5′ Twisted Sister | ACCCGCAAGGCCGACGGCAUCCGCCGCCGCUGGUGCAAGUCCAGCC |
| | 1 | GCCCCUUCGGGGGCGGGCGCUCAUGGGUAACUACUGGCGCUUUUAU |
| | | CUCAUUACUUUGAGAGCCAUCACCAGCGACUAUGUCGUAUGGGUAAA |
| | | GCGCUUAUUUAUCGGAGAGAAAUCCGAUAAAUAAGAAGCAUCAAAG |
| 2235 | 5′ sTRSV WT | CCUGUCACCGGAUGUGCUUUCCGGUCUGAUGAGUCCGUGAGGACGA |
| | viral | AACAGGUACUGGCGCUUUUAUCUCAUUACUUUGAGAGCCAUCACCAG |
| | Hammerhead | CGACUAUGUCGUAUGGGUAAAGCGCUUAUUUAUCGGAGAGAAAUCCG |
| | ribozyme | AUAAAUAAGAAGCAUCAAAG |
| 2236 | 148: =+G55, | GUACUGGCGCCUUUAUCUCAUUACUUUGAGAGCCAUCACCAGCGACU |
| | stacked onto 64 | AUGUCGUAGUGGGUAAAGCGCUUACGGACUUCGGUCCGUAAGAAGC |
| | | AUCAAAG |
| 2237 | 158: | GUACUGGCGCUUUUAUCUGAUUACUUUGAGAGCCAUCACCAGCGACU |
| | 103 + 148(+G55) | AUGUCGUAGUGGGUAAAGCUCCCUCUUCGGAGGGAGCAUCAAAG |
| | -99, G65U | |
| 2238 | 174: Uvsx | ACUGGCGCUUUUAUCUGAUUACUUUGAGAGCCAUCACCAGCGACUAU |
| | Extended stem | GUCGUAGUGGGUAAAGCUCCCUCUUCGGAGGGAGCAUCAAAG |
| | with [A99] | |
| | G65U), | |
| | C18G, ^G55, | |
| | [GU-1] | |
| 2239 | 175: extended | ACUGGCGCCUUUAUCUCAUUACUUUGAGAGCCAUCACCAGCGACUAU |
| | stem truncation, | GUCGUAUGGGUAAAGCGCUUACGGACUUCGGUCCGUAAGAAGCAUC |
| | U10C, [GU-1] | AAAG |
| 2240 | 176: 174 with | GCUGGCGCUUUUAUCUGAUUACUUUGAGAGCCAUCACCAGCGACUAU |
| | AIG substitution | GUCGUAGUGGGUAAAGCUCCCUCUUCGGAGGGAGCAUCAAAG |
| | for T7 | |
| | transcription | |
| 2241 | 177: 174 with | ACUGGCGCUUUUAUCUGAUUACUUUGAGAGCCAUCACCAGCGACUAU |
| | bubble (+G55) | GUCGUAUGGGUAAAGCUCCCUCUUCGGAGGGAGCAUCAAAG |
| | removed | |
| 2242 | 181: stem 42 | ACUGGCGCCUUUAUCUGAUUACUUUGAGAGCCAUCACCAGCGACUAU |
| | (truncated stem | GUCGUAUGGGUAAAGCGCUUACGGACUUCGGUCCGUAAGAAGCAUC |
| | loop); | AAAG |
| | U10C, C18G, [GU-1] | |
| | (95 + [GU-1]) | |
| 2243 | 182: stem 42 | ACUGGCGCUUUUAUCUGAUUACUUUGAGAGCCAUCACCAGCGACUAU |
| | (truncated stem | GUCGUAUGGGUAAAGCGCUUACGGACUUCGGUCCGUAAGAAGCAUC |
| | loop); | AAAG |
| | C18G, [GU-1] | |
| 2244 | 183: stem 42 | ACUGGCGCUUUUAUCUGAUUACUUUGAGAGCCAUCACCAGCGACUAU |
| | (truncated stem | GUCGUAGUGGGUAAAGCGCUUACGGACUUCGGUCCGUAAGAAGCAU |
| | loop); | CAAAG |
| | C18G, ^G55, | |
| | [GU-1] | |
| 2245 | 184: stem 48 | ACUGGCGCUUUUAUCUGAUUACUUUGAGAGCCAUCACCAGCGACUAU |
| | (uvsx, -99 g65t); | GUCGUAUUGGGUAAAGCUCCCUCUUCGGAGGGAGCAUCAAAG |
| | C18G, ^T55, | |
| | [GU-1] | |
| 2246 | 185: stem 42 | ACUGGCGCUUUUAUCUGAUUACUUUGAGAGCCAUCACCAGCGACUAU |
| | (truncated stem | GUCGUAUUGGGUAAAGCGCUUACGGACUUCGGUCCGUAAGAAGCAU |
| | loop); | CAAAG |
| | C18G, ^U55, | |
| | [GU-1] | |
| 2247 | 186: stem 42 | ACUGGCGCCUUUAUCAUCAUUACUUUGAGAGCCAUCACCAGCGACUA |
| | (truncated stem | UGUCGUAUGGGUAAAGCGCUUACGGACUUCGGUCCGUAAGAAGCAU |
| | loop); | CAAAG |
| | U10C, ^A17, | |
| | [GU-1] | |
| 2248 | 187: stem 46 | ACUGGCGCUUUUAUCUGAUUACUUUGAGAGCCAUCACCAGCGACUAU |
| | (uvsx); | GUCGUAGUGGGUAAAGCGCCCUCUUCGGAGGGAAGCAUCAAAG |
| | C18G, ^G55, | |
| | [GU-1] | |
| 2249 | 188: stem 50 | ACUGGCGCUUUUAUCUGAUUACUUUGAGAGCCAUCACCAGCGACUAU |
| | (ms2 U15C, -99, | GUCGUAGUGGGUAAAGCUCACAUGAGGAUCACCCAUGUGAGCAUCAA |
| | g65t); | AG |
| | C18G, ^G55, | |
| | [GU-1] | |
| 2250 | 189: 174 + | ACUGGCACUUUUACCUGAUUACUUUGAGAGCCAACACCAGCGACUAU |
| | G8A; U15C; U35A | GUCGUAGUGGGUAAAGCUCCCUCUUCGGAGGGAGCAUCAAAG |
| 2251 | 190: 174 + G8A | ACUGGCACUUUUAUCUGAUUACUUUGAGAGCCAUCACCAGCGACUAU |
| | | GUCGUAGUGGGUAAAGCUCCCUCUUCGGAGGGAGCAUCAAAG |
| 2252 | 191: 174 + G8C | ACUGGCCCUUUUAUCUGAUUACUUUGAGAGCCAUCACCAGCGACUAU |
| | | GUCGUAGUGGGUAAAGCUCCCUCUUCGGAGGGAGCAUCAAAG |
| 2253 | 192: 174 + U15C | ACUGGCGCUUUUACCUGAUUACUUUGAGAGCCAUCACCAGCGACUAU |
| | | GUCGUAGUGGGUAAAGCUCCCUCUUCGGAGGGAGCAUCAAAG |
| 2254 | 193, 174 + U35A | ACUGGCGCUUUUAUCUGAUUACUUUGAGAGCCAACACCAGCGACUAU |
| | | GUCGUAGUGGGUAAAGCUCCCUCUUCGGAGGGAGCAUCAAAG |
| 2255 | 195: 175 + C18G | ACUGGCACCUUUACCUGAUUACUUUGAGAGCCAACACCAGCGACUAU |
| | + | GUCGUAUGGGUAAAGCGCUUACGGACUUCGGUCCGUAAGAAGCAUC |
| | G8A; U15C; U35A | AAAG |
| 2256 | 196: 175 + C18G | ACUGGCACCUUUAUCUGAUUACUUUGAGAGCCAUCACCAGCGACUAU |
| | + G8A | GUCGUAUGGGUAAAGCGCUUACGGACUUCGGUCCGUAAGAAGCAUC |
| | | AAAG |
| 2257 | 197: 175 + C18G | ACUGGCCCCUUUAUCUGAUUACUUUGAGAGCCAUCACCAGCGACUAU |
| | + G8C | GUCGUAUGGGUAAAGCGCUUACGGACUUCGGUCCGUAAGAAGCAUC |
| | | AAAG |
| 2258 | 198: 175 + C18G | ACUGGCGCCUUUAUCUGAUUACUUUGAGAGCCAACACCAGCGACUAU |
| | + U35A | GUCGUAUGGGUAAAGCGCUUACGGACUUCGGUCCGUAAGAAGCAUC |
| | | AAAG |
| 2259 | 199: 174 + A2G | GCUGGCGCUUUUAUCUGAUUACUUUGAGAGCCAUCACCAGCGACUAU |
| | (test G | GUCGUAGUGGGUAAAGCUCCCUCUUCGGAGGGAGCAUCAAAG |
| | transcription at | |
| | start; ccGCT...) | |
| 2260 | 200: 174 + ^G1 | GACUGGCGCUUUUAUCUGAUUACUUUGAGAGCCAUCACCAGCGACUA |
| | (ccGACU...) | UGUCGUAGUGGGUAAAGCUCCCUCUUCGGAGGGAGCAUCAAAG |
| 2261 | 201: 174 + | ACUGGCGCCUUUAUCUGAUUACUUUGGAGAGCCAUCACCAGCGACUA |
| | U10C; ^G28 | UGUCGUAGUGGGUAAAGCUCCCUCUUCGGAGGGAGCAUCAAAG |
| 2262 | 202: 174 + | ACUGGCGCAUUUAUCUGAUUACUUUGUGAGCCAUCACCAGCGACUAU |
| | U10A; A28U | GUCGUAGUGGGUAAAGCUCCCUCUUCGGAGGGAGCAUCAAAG |
| 2263 | 203: 174 + U10C | ACUGGCGCCUUUAUCUGAUUACUUUGAGAGCCAUCACCAGCGACUAU |
| | | GUCGUAGUGGGUAAAGCUCCCUCUUCGGAGGGAGCAUCAAAG |
| 2264 | 204: 174 + ^G28 | ACUGGCGCUUUUAUCUGAUUACUUUGGAGAGCCAUCACCAGCGACUA |
| | | UGUCGUAGUGGGUAAAGCUCCCUCUUCGGAGGGAGCAUCAAAG |
| 2265 | 205: 174 + U10A | ACUGGCGCAUUUAUCUGAUUACUUUGAGAGCCAUCACCAGCGACUAU |
| | | GUCGUAGUGGGUAAAGCUCCCUCUUCGGAGGGAGCAUCAAAG |
| 2266 | 206, 174 + A28U | ACUGGCGCUUUUAUCUGAUUACUUUGUGAGCCAUCACCAGCGACUAU |
| | | GUCGUAGUGGGUAAAGCUCCCUCUUCGGAGGGAGCAUCAAAG |
| 2267 | 207: 174 + ^U15 | ACUGGCGCUUUUAUUCUGAUUACUUUGAGAGCCAUCACCAGCGACUA |
| | | UGUCGUAGUGGGUAAAGCUCCCUCUUCGGAGGGAGCAUCAAAG |
| 2268 | 208: 174 + [U4] | ACGGCGCUUUUAUCUGAUUACUUUGAGAGCCAUCACCAGCGACUAUG |
| | | UCGUAGUGGGUAAAGCUCCCUCUUCGGAGGGAGCAUCAAAG |
| 2269 | 209: 174 + C16A | ACUGGCGCUUUUAUAUGAUUACUUUGAGAGCCAUCACCAGCGACUAU |
| | | GUCGUAGUGGGUAAAGCUCCCUCUUCGGAGGGAGCAUCAAAG |
| 2270 | 210: 174 + ^U17 | ACUGGCGCUUUUAUCUUGAUUACUUUGAGAGCCAUCACCAGCGACUA |
| | | UGUCGUAGUGGGUAAAGCUCCCUCUUCGGAGGGAGCAUCAAAG |
| 2271 | 211: 174 + U35G | ACUGGCGCUUUUAUCUGAUUACUUUGAGAGCCAGCACCAGCGACUAU |
| | (compare with | GUCGUAGUGGGUAAAGCUCCCUCUUCGGAGGGAGCAUCAAAG |
| | 174 + U35A | |
| | above) | |
| 2272 | 212: 174 + UHG, | ACUGGCGCUGUUAUCUGAUUACUUCGAGAGCCAUCACCAGCGACUAU |
| | A105G (A86G), | GUCGUAGUGGGUAAAGCUCCCUCUUCGGAGGGAGCAUCGAAG |
| | U26C | |
| 2273 | 213: 174 + UHC, | ACUGGCGCUCUUAUCUGAUUACUUCGAGAGCCAUCACCAGCGACUAU |
| | A105G (A86G), | GUCGUAGUGGGUAAAGCUCCCUCUUCGGAGGGAGCAUCGAAG |
| | U26C | |
| 2274 | 214: 174 + U12G; | ACUGGCGCUUGUAUCUGAUUACUCUGAGAGCCAUCACCAGCGACUAU |
| | A106G (A87G), | GUCGUAGUGGGUAAAGCUCCCUCUUCGGAGGGAGCAUCAGAG |
| | U25C | |
| 2275 | 215: 174 + U12C; | ACUGGCGCUUCUAUCUGAUUACUCUGAGAGCCAUCACCAGCGACUAU |
| | A106G (A87G), | GUCGUAGUGGGUAAAGCUCCCUCUUCGGAGGGAGCAUCAGAG |
| | U25C | |
| 2276 | 216: | ACUGGCGCUUUGAUCUGAUUACCUUGAGAGCCAUCACCAGCGACUAU |
| | 174_tx_11.G, | GUCGUAGUGGGUAAAGCUCCCUCUUCGGAGGGAGCAUCAAGG |
| | 87.G, 22.C | |
| 2277 | 217: | ACUGGCGCUUUCAUCUGAUUACCUUGAGAGCCAUCACCAGCGACUAU |
| | 174_tx_11.C, | GUCGUAGUGGGUAAAGCUCCCUCUUCGGAGGGAGCAUCAAGG |
| | 87.G, 22.C | |
| 2278 | 218: 174 + UHG | ACUGGCGCUGUUAUCUGAUUACUUUGAGAGCCAUCACCAGCGACUAU |
| | | GUCGUAGUGGGUAAAGCUCCCUCUUCGGAGGGAGCAUCAAAG |
| 2279 | 219: 174 | ACUGGCGCUUUUAUCUGAUUACUUUGAGAGCCAUCACCAGCGACUAU |
| | +A105G (A86G) | GUCGUAGUGGGUAAAGCUCCCUCUUCGGAGGGAGCAUCGAAG |
| 2280 | 220: 174 + U26C | ACUGGCGCUUUUAUCUGAUUACUUCGAGAGCCAUCACCAGCGACUAU |
| | | GUCGUAGUGGGUAAAGCUCCCUCUUCGGAGGGAGCAUCAAAG |
| 2281 | 221: 182 + G8A | ACUGGCACUUCUAUCUGAUUACUCUGAGAGCCAUCACCAGCGACUAU |
| | (196) +215 | GUCGUAUGGGUAAAGCCGCUUACGGACUUCGGUCCGUAAGAGGCAU |
| | mutations + | CAGAG |
| | ^C63, A88G | |
| 2282 | 222: 174 + G8A | ACUGGCACUUCUAUCUGAUUACUCUGAGAGCCAUCACCAGCGACUAU |
| | (196) +215 | GUCGUAGUGGGUAAAGCUCCCUCUUCGGAGGGAGCAUCAGAG |
| | mutations | |
| 2283 | 223: 181 + G8A | ACUGGCACCUUUAUCUGAUUACUUUGAGAGCCAUCACCAGCGACUAU |
| | (196)+ ^C63, | GUCGUAUGGGUAAAGCCGCUUACGGACUUCGGUCCGUAAGAGGCAU |
| | A88G | CAAAG |
| 2284 | 224: 182 + G8A | ACUGGCACUUGUAUCUGAUUACUCUGAGAGCCAUCACCAGCGACUAU |
| | (196) +214 | GUCGUAUGGGUAAAGCCGCUUACGGACUUCGGUCCGUAAGAGGCAU |
| | mutations + | CAGAG |
| | ^C63, A88G | |
| 2285 | 225: 174 + G8A | ACUGGCACUUGUAUCUGAUUACUCUGAGAGCCAUCACCAGCGACUAU |
| | (196) +214 | GUCGUAGUGGGUAAAGCUCCCUCUUCGGAGGGAGCAUCAGAG |
| | mutations | |

[0143] In some embodiments, the gNA variant comprises a tracrRNA stem loop comprising the sequence -UUU-N4-25-UUU- (SEQ ID NO: 381). For example, the gNA variant comprises a scaffold stem loop or a replacement thereof, flanked by two triplet U motifs that contribute to the triplex region. In some embodiments, the scaffold stem loop or replacement thereof comprises at least 4 nucleotides, at least 5 nucleotides, at least 6 nucleotides, at least 7 nucleotides, at least 7 nucleotides, at least 8 nucleotides, at least 9 nucleotides, at least 10 nucleotides, at least 11 nucleotides, at least 12 nucleotides, at least 13 nucleotides, at least 14 nucleotides, at least 15 nucleotides, at least 16 nucleotides, at least 17 nucleotides, at least 18 nucleotides, at least 19 nucleotides, at least 20 nucleotides, at least 21 nucleotides, at least 22 nucleotides, at least 23 nucleotides, at least 24 nucleotides, or at least 25 nucleotides.

[0144] In some embodiments, the gNA variant comprises a crRNA sequence with -AAAG- in a location 5′ to the spacer region. In some embodiments, the -AAAG- sequence is immediately 5′ to the spacer region.

[0145] In some embodiments, the at least one nucleotide modification to a reference gNA to produce a gNA variant comprises at least one nucleotide deletion in the CasX variant gNA relative to the reference gRNA. In some embodiments, a gNA variant comprises a deletion of 1, 2, 3, 4, 5, 6, 7, 8, 9, 10, 11, 12, 13, 14, 15, 16, 17, 18, 19 or 20 consecutive or non-consecutive nucleotides relative to a reference gNA. In some embodiments, the at least one deletion comprises a deletion of 1, 2, 3, 4, 5, 6, 7, 8, 9, 10, 11, 12, 13, 14, 15, 16, 17, 18, 19 or 20 or more consecutive nucleotides relative to a reference gNA. In some embodiments, the gNA variant comprises 2, 3, 4, 5, 6, 7, 8, 9, 10, 11, 12, 13, 14, 15, 16, 17, 18, 19 or 20 or more nucleotide deletions relative to the reference gNA, and the deletions are not in consecutive nucleotides. In those embodiments where there are two or more non-consecutive deletions in the gNA variant relative to the reference gRNA, any length of deletions, and any combination of lengths of deletions, as described herein, are contemplated as within the scope of the disclosure. In some embodiments, a gNA variant comprises at least two deletions in different regions of the reference gRNA. In some embodiments, a gNA variant comprises at least two deletions in the same region of the reference gRNA. For example, the regions may be the extended stem loop, scaffold stem loop, scaffold stem bubble, triplex loop, pseudoknot, triplex, or a 5′ end of the gNA variant. The deletion of any nucleotide in a reference gRNA is contemplated as within the scope of the disclosure.

[0146] In some embodiments, the at least one nucleotide modification of a reference gRNA to generate a gNA variant comprises at least one nucleotide insertion. In some embodiments, a gNA variant comprises an insertion of 1, 2, 3, 4, 5, 6, 7, 8, 9 or 10 consecutive or non-consecutive nucleotides relative to a reference gRNA. In some embodiments, the at least one nucleotide insertion comprises an insertion of 1, 2, 3, 4, 5, 6, 7, 8, 9, 10, 11, 12, 13, 14, 15, 16, 17, 18, 19 or 20 or more consecutive nucleotides relative to a reference gRNA. In some embodiments, the gNA variant comprises 2 or more insertions relative to the reference gRNA, and the insertions are not consecutive. In those embodiments where there are two or more non-consecutive insertions in the gNA variant relative to the reference gRNA, any length of insertions, and any combination of lengths of insertions, as described herein, are contemplated as within the scope of the disclosure. For example, in some embodiments, a gNA variant may comprise a first insertion of one nucleotide, and a second insertion of two nucleotides and the two insertions are not consecutive. In some embodiments, a gNA variant comprises at least two insertions in different regions of the reference gRNA. In some embodiments, a gNA variant comprises at least two insertions in the same region of the reference gRNA. For example, the regions may be the extended stem loop, scaffold stem loop, scaffold stem bubble, triplex loop, pseudoknot, triplex, or a 5′ end of the gNA variant. Any insertion of A, G, C, U (or T, in the corresponding DNA) or combinations thereof at any location in the reference gRNA is contemplated as within the scope of the disclosure.

[0147] In some embodiments, the at least one nucleotide modification of a reference gRNA to generate a gNA variant comprises at least one nucleic acid substitution. In some embodiments, a gNA variant comprises 1, 2, 3, 4, 5, 6, 7, 8, 9, 10, 11, 12, 13, 14, 15, 16, 17, 18, 19 or 20 or more consecutive or non-consecutive substituted nucleotides relative to a reference gRNA. In some embodiments, a gNA variant comprises 1-4 nucleotide substitutions relative to a reference gRNA. In some embodiments, the at least one substitution comprises a substitution of 1, 2, 3, 4, 5, 6, 7, 8, 9, 10, 11, 12, 13, 14, 15, 16, 17, 18, 19 or 20 or more consecutive nucleotides relative to a reference gRNA. In some embodiments, the gNA variant comprises 2 or more substitutions relative to the reference gRNA, and the substitutions are not consecutive. In those embodiments where there are two or more non-consecutive substitutions in the gNA variant relative to the reference gRNA, any length of substituted nucleotides, and any combination of lengths of substituted nucleotides, as described herein, are contemplated as within the scope of the disclosure. For example, in some embodiments, a gNA variant may comprise a first substitution of one nucleotide, and a second substitution of two nucleotides and the two substitutions are not consecutive. In some embodiments, a gNA variant comprises at least two substitutions in different regions of the reference gRNA. In some embodiments, a gNA variant comprises at least two substitutions in the same region of the reference gRNA. For example, the regions may be the triplex, the extended stem loop, scaffold stem loop, scaffold stem bubble, triplex loop, pseudoknot, triplex, or a 5′ end of the gNA variant. Any substitution of A, G, C, U (or T, in the corresponding DNA) or combinations thereof at any location in the reference gRNA is contemplated as within the scope of the disclosure.

[0148] Any of the substitutions, insertions and deletions described herein can be combined to generate a gNA variant of the disclosure. For example, a gNA variant can comprise at least one substitution and at least one deletion relative to a reference gRNA, at least one substitution and at least one insertion relative to a reference gRNA, at least one insertion and at least one deletion relative to a reference gRNA, or at least one substitution, one insertion and one deletion relative to a reference gRNA.

[0149] In some embodiments, the gNA variant comprises a scaffold region at least 20% identical, at least 30% identical, at least 40% identical, at least 50% identical, at least 60% identical, at least 65% identical, at least 70% identical, at least 75% identical, at least 80% identical, at least 85% identical, at least 90% identical, at least 91% identical, at least 92% identical, at least 93% identical, at least 94% identical, at least 95% identical, at least 96% identical, at least 97% identical, at least 98% identical, or at least 99% identical to any one of SEQ ID NOS:4-16. In some embodiments, the gNA variant comprises a scaffold region at least 60% homologous (or identical) to any one of SEQ ID NOS:4-16.

[0150] In some embodiments, the gNA variant comprises a tracr stem loop at least 60% identical, at least 65% identical, at least 70% identical, at least 75% identical, at least 80% identical, at least 85% identical, at least 90% identical, or at least 95% identical to SEQ ID NO:14. In some embodiments, the gNA variant comprises a tracr stem loop at least 60% homologous (or identical) to SEQ ID NO: 14.

[0151] In some embodiments, the gNA variant comprises an extended stem loop at least 60% identical, at least 65% identical, at least 70% identical, at least 75% identical, at least 80% identical, at least 85% identical, at least 90% identical, or at least 95% identical to SEQ ID NO:15. In some embodiments, the gNA variant comprises an extended stem loop at least 60% homologous (or identical) to SEQ ID NO: 15.

[0152] In some embodiments, the gNA variant comprises an exogenous extended stem loop, with such differences from a reference gNA described as follows. In some embodiments, an exogenous extended stem loop has little or no identity to the reference stem loop regions disclosed herein (e.g., SEQ ID NO:15). In some embodiments, an exogenous stem loop is at least 10 bp, at least 20 bp, at least 30 bp, at least 40 bp, at least 50 bp, at least 60 bp, at least 70 bp, at least 80 bp, at least 90 bp, at least 100 bp, at least 200 bp, at least 300 bp, at least 400 bp, at least 500 bp, at least 600 bp, at least 700 bp, at least 800 bp, at least 900 bp, at least 1,000 bp, at least 2,000 bp, at least 3,000 bp, at least 4,000 bp, at least 5,000 bp, at least 6,000 bp, at least 7,000 bp, at least 8,000 bp, at least 9,000 bp, at least 10,000 bp, at least 12,000 bp, at least 15,000 bp or at least 20,000 bp. In some embodiments, the gNA variant comprises an extended stem loop region comprising at least 10, at least 100, at least 500, at least 1000, or at least 10,000 nucleotides. In some embodiments, the heterologous stem loop increases the stability of the gNA. In some embodiments, the heterologous RNA stem loop is capable of binding a protein, an RNA structure, a DNA sequence, or a small molecule. In some embodiments, an exogenous stem loop region replacing the stem loop comprises an RNA stem loop or hairpin in which the resulting gNA has increased stability and, depending on the choice of loop, can interact with certain cellular proteins or RNA. Such exogenous extended stem loops can comprise, for example a thermostable RNA such as MS2 (ACAUGAGGAUUACCCAUGU (SEQ ID NO: 35)), QP (UGCAUGUCUAAGACAGCA (SEQ ID NO: 36)), U1 hairpin II (AAUCCAUUGCACUCCGGAUU (SEQ ID NO: 37)), Uvsx (CCUCUUCGGAGG (SEQ ID NO: 38)), PP7 (AGGAGUUUCUAUGGAAACCCU (SEQ ID NO: 39)), Phage replication loop (AGGUGGGACGACCUCUCGGUCGUCCUAUCU (SEQ ID NO: 40)), Kissing loop_a (UGCUCGCUCCGUUCGAGCA (SEQ ID NO: 41)), Kissing loop_b1 (UGCUCGACGCGUCCUCGAGCA (SEQ ID NO: 42)), Kissing loop_b2 (UGCUCGUUUGCGGCUACGAGCA (SEQ ID NO: 43)), G quadriplex M3q (AGGGAGGGAGGGAGAGG (SEQ ID NO: 44)), G quadriplex telomere basket (GGUUAGGGUUAGGGUUAGG (SEQ ID NO: 45)), Sarcin-ricin loop (CUGCUCAGUACGAGAGGAACCGCAG (SEQ ID NO: 46)) or Pseudoknots (UACACUGGGAUCGCUGAAUUAGAGAUCGGCGUCCUUUCAUUCUAUAUACUUUGG AGUUUUAAAAUGUCUCUAAGUACA (SEQ ID NO: 47)). In some embodiments, an exogenous stem loop comprises a long non-coding RNA (lncRNA). As used herein, a lncRNA refers to a non-coding RNA that is longer than approximately 200 bp in length. In some embodiments, the 5′ and 3′ ends of the exogenous stem loop are base paired; i.e., interact to form a region of duplex RNA. In some embodiments, the 5′ and 3′ ends of the exogenous stem loop are base paired, and one or more regions between the 5′ and 3′ ends of the exogenous stem loop are not base paired. In some embodiments, the at least one nucleotide modification comprises: (a) substitution of 1 to 15 consecutive or non-consecutive nucleotides in the gNA variant in one or more regions; (b) a deletion of 1 to 10 consecutive or non-consecutive nucleotides in the gNA variant in one or more regions; (c) an insertion of 1 to 10 consecutive or non-consecutive nucleotides in the gNA variant in one or more regions; (d) a substitution of the scaffold stem loop or the extended stem loop with an RNA stem loop sequence from a heterologous RNA source with proximal 5′ and 3′ ends; or any combination of (a)-(d).

[0153] In some embodiments, the gNA variant comprises a scaffold stem loop sequence of CCAGCGACUAUGUCGUAGUGG (SEQ ID NO: 32). In some embodiments, the gNA variant comprises a scaffold stem loop sequence of CCAGCGACUAUGUCGUAGUGG (SEQ ID NO: 32) with at least 1, 2, 3, 4, or 5 mismatches thereto.

[0154] In some embodiments, the gNA variant comprises an extended stem loop region comprising less than 32 nucleotides, less than 31 nucleotides, less than 30 nucleotides, less than 29 nucleotides, less than 28 nucleotides, less than 27 nucleotides, less than 26 nucleotides, less than 25 nucleotides, less than 24 nucleotides, less than 23 nucleotides, less than 22 nucleotides, less than 21 nucleotides, or less than 20 nucleotides. In some embodiments, the gNA variant comprises an extended stem loop region comprising less than 32 nucleotides. In some embodiments, the gNA variant further comprises a thermostable stem loop.

[0155] In some embodiments, a sgRNA variant comprises a sequence of SEQ ID NO:2104, SEQ ID NO:2106, SEQ ID NO:2163, SEQ ID NO:2107, SEQ ID NO:2164, SEQ ID NO:2165, SEQ ID NO:2166, SEQ ID NO:2103, SEQ ID NO:2167, SEQ ID NO:2105, SEQ ID NO:2108, SEQ ID NO:2112, SEQ ID NO:2160, SEQ ID NO:2170, SEQ ID NO:2114, SEQ ID NO:2171, SEQ ID NO:2112, SEQ ID NO:2173, SEQ ID NO:2102, SEQ ID NO:2174, SEQ ID NO:2175, SEQ ID NO:2109, SEQ ID NO:2176, SEQ ID NO:2238, SEQ ID NO:2239, SEQ ID NO:2240, SEQ ID NO:2241, SEQ ID NO:2274, SEQ ID NO:2275, or 2279.

[0156] In some embodiments, the gNA variant comprises the sequence of any one of SEQ ID NOS:2236, 2237, 2238, 2241, 2244, 2248, 2249, or 2259-2285, or having at least about 80%, at least about 90%, at least about 95%, at least about 96%, at least about 97%, at least about 98%, at least about 99% identity thereto. In some embodiments, the gNA variant comprises one or more additional changes to a sequence of any one of SEQ ID NOs: 2201-2285. In some embodiments, the gNA variant comprises the sequence of any one of SEQ ID NOS:2236, 2237, 2238, 2241, 2244, 2248, 2249, or 2259-2285. In some embodiments, the gNA variant scaffold consists of the sequence of any one of SEQ ID NOS:2236, 2237, 2238, 2241, 2244, 2248, 2249, or 2259-2285, and further comprises a targeting sequence of any of the embodiments described herein.

[0157] In some embodiments, a sgRNA variant comprises one or more additional changes to a sequence of SEQ ID NO:2104, SEQ ID NO:2163, SEQ ID NO:2107, SEQ ID NO:2164, SEQ ID NO:2165, SEQ ID NO:2166, SEQ ID NO:2103, SEQ ID NO:2167, SEQ ID NO:2105, SEQ ID NO:2108, SEQ ID NO:2112, SEQ ID NO:2160, SEQ ID NO:2170, SEQ ID NO:2114, SEQ ID NO:2171, SEQ ID NO:2112, SEQ ID NO:2173, SEQ ID NO:2102, SEQ ID NO:2174, SEQ ID NO:2175, SEQ ID NO:2109, SEQ ID NO:2176, SEQ ID NO:2238, SEQ ID NO:2239, SEQ ID NO:2240, SEQ ID NO:2241, SEQ ID NO:2274, SEQ ID NO:2275, or 2279.

[0158] In some embodiments of the gNA variants of the disclosure, the gNA variant comprises at least one modification, wherein the at least one modification compared to the reference guide scaffold of SEQ ID NO:5 is selected from one or more of: (a) a C18G substitution in the triplex loop; (b) a G55 insertion in the stem bubble; (c) a U1 deletion; (d) a modification of the extended stem loop wherein (i) a 6 nt loop and 13 loop-proximal base pairs are replaced by a Uvsx hairpin; and (ii) a deletion of A99 and a substitution of G65U that results in a loop-distal base that is fully base-paired. In such embodiments, the gNA variant comprises the sequence of any one of SEQ ID NOS:2236, 2237, 2238, 2241, 2244, 2248, 2249, or 2259-2285.

[0159] In the embodiments of the gNA variants, the gNA variant further comprises a targeting sequence (or spacer) region located at the 3′ end of the gNA, described more fully, supra, which comprises at least 14 to about 35 nucleotides wherein the targeting sequence is designed with a sequence that is complementary to a target nucleic acid of the RHO gene, including wild-type and sequences having one or more mutations. In some embodiments, the gNA variant comprises a targeting sequence of at least 10 to 30 nucleotides complementary to a target nucleic acid. In some embodiments, the targeting sequence has 14, 15, 16, 17, 18, 19, 20, 21, 22, 23, 24, 25, 26, 27, 28, 29, 30, 31, 32, 33, 34 or 35 nucleotides. In some embodiments, the gNA variant comprises a targeting sequence having 20 nucleotides. In some embodiments, the targeting sequence has 25 nucleotides. In some embodiments, the targeting sequence has 24 nucleotides. In some embodiments, the targeting sequence has 23 nucleotides. In some embodiments, the targeting sequence has 22 nucleotides. In some embodiments, the targeting sequence has 21 nucleotides. In some embodiments, the targeting sequence has 19 nucleotides. In some embodiments, the targeting sequence has 18 nucleotides. In some embodiments, the targeting sequence has 17 nucleotides. In some embodiments, the targeting sequence has 16 nucleotides. In some embodiments, the targeting sequence has 15 nucleotides.

[0160] In some embodiments, the targeting sequence of a gNA is complementary to a RHO exon selected from the group consisting of exons 1-5. In other embodiments, the targeting sequence of a gNA is specific for a RHO intronic region, an intron-exon junction of the RHO gene, or an intergenic region. In some embodiments, the targeting sequence of the gNA is complementary to a sequence comprising one or more single nucleotide polymorphisms (SNPs) of the RHO gene or its complement. SNPs that are within a RHO coding sequence or within a RHO non-coding sequence are both within the scope of the instant disclosure. Representative targeting sequences to rhodopsin mutations known or believed to be associated with retinitis pigmentosa and related disorders and that are designed to be utilized in the CasX:gNA systems of the disclosure comprise a sequence of SEQ ID NOS: 382-582, or a sequence that is at least 50% identical, at least 55% identical, at least 60% identical, at least 65% identical, at least 70% identical, at least 75% identical, at least 80% identical, at least 85% identical, at least 90% identical, at least 95% identical thereto. In other embodiments, the disclosure provides targeting sequences for inclusion in the gNA variants of the disclosure comprising a sequence that is at least 50% identical, at least 55% identical, at least 60% identical, at least 65% identical, at least 70% identical, at least 75% identical, at least 80% identical, at least 85% identical, at least 90% identical, at least 95% identical, or 100% identical to a sequence of SEQ ID NOs: 328-346, 367-376, 382-2100 and 2286-27274. In some embodiments, the targeting sequence of the gNA variant comprises a sequence a sequence of SEQ ID NOs: 328-346, 367-376, 382-2100 and 2286-27274 with a single nucleotide removed from the 3′ end of the sequence. In other embodiments, the targeting sequence of the gNA variant comprises a sequence a sequence of SEQ ID NOs: 328-346, 367-376, 382-2100 and 2286-27274 with two nucleotides removed from the 3′ end of the sequence. In other embodiments, the targeting sequence of the gNA variant comprises a sequence a sequence of SEQ ID NOs: 328-346, 367-376, 382-2100 and 2286-27274 with three nucleotides removed from the 3′ end of the sequence. In other embodiments, the targeting sequence of the gNA variant comprises a sequence a sequence of SEQ ID NOs: 328-346, 367-376, 382-2100 and 2286-27274 with four nucleotides removed from the 3′ end of the sequence. In other embodiments, the targeting sequence of the gNA variant comprises a sequence a sequence of SEQ ID NOs: 328-346, 367-376, 382-2100 and 2286-27274 with five nucleotides removed from the 3′ end of the sequence. In some embodiments, the targeting sequence of the gNA variant comprises a sequence a sequence of SEQ ID NOs: 382-582 with a single nucleotide removed from the 3′ end of the sequence. In other embodiments, the targeting sequence of the gNA variant comprises a sequence a sequence of SEQ ID NOs: 382-582 with two nucleotides removed from the 3′ end of the sequence. In other embodiments, the targeting sequence of the gNA variant comprises a sequence a sequence of SEQ ID NOs: 382-582 with three nucleotides removed from the 3′ end of the sequence. In other embodiments, the targeting sequence of the gNA variant comprises a sequence a sequence of SEQ ID NOs: 382-582 with four nucleotides removed from the 3′ end of the sequence. In other embodiments, the targeting sequence of the gNA variant comprises a sequence a sequence of SEQ ID NOs: 382-582 with five nucleotides removed from the 3′ end of the sequence.

[0161] In some embodiments, the gNA variant further comprises a targeting sequence region located at the 3′ end of the gNA, wherein the targeting sequence is designed with a sequence that is complementary to a target nucleic acid. In some embodiments, the target nucleic acid comprises a PAM sequence located 5′ of the targeting sequence with at least a single nucleotide separating the PAM from the first nucleotide of the targeting sequence. In some embodiments, the PAM is located on the non-targeted strand of the target region, i.e. the strand that is complementary to the target nucleic acid. In some embodiments, the PAM sequence is ATC. In some embodiments, the targeting sequence for an ATC PAM comprises SEQ ID NOs: 583-2100 or 2286-5554, or a sequence that is at least 50% identical, at least 55% identical, at least 60% identical, at least 65% identical, at least 70% identical, at least 75% identical, at least 80% identical, at least 85% identical, at least 90% identical, at least 95% identical, or at least 99% identical to SEQ ID NOs: 583-2100 or 2286-5554. In some embodiments, the targeting sequence for an ATC PAM is selected from the group consisting of SEQ ID NOs: 583-2100 or 2286-5554. In some embodiments, the PAM sequence is CTC. In some embodiments, the targeting sequence for a CTC PAM comprises SEQ ID NOs: 367-369, 372, or 10487-19917 or a sequence that is at least 50% identical, at least 55% identical, at least 60% identical, at least 65% identical, at least 70% identical, at least 75% identical, at least 80% identical, at least 85% identical, at least 90% identical, at least 95% identical, or at least 99% identical to SEQ ID NOs: 367-369, 372, or 10487-19917. In some embodiments, the targeting sequence for a CTC PAM is selected from the group consisting of SEQ ID NOs: 367-369, 372, or 10487-19917. In some embodiments, the PAM sequence is GTC. In some embodiments, the targeting sequences for a GTC PAM comprises SEQ ID NOs: 5555-10486 or a sequence that is at least 50% identical, at least 55% identical, at least 60% identical, at least 65% identical, at least 70% identical, at least 75% identical, at least 80% identical, at least 85% identical, at least 90% identical, at least 95% identical, or at least 99% identical to SEQ ID NOs: 5555-10486. In some embodiments, the targeting sequence for a GTC PAM is selected from the group consisting of SEQ ID NOs: 5555-10486. In some embodiments, the PAM sequence is TTC. In some embodiments, a targeting sequences for a TTC PAM comprises SEQ ID NOs: 370-371, 373-376, 19918-27274, or a sequence that is at least 50% identical, at least 55% identical, at least 60% identical, at least 65% identical, at least 70% identical, at least 75% identical, at least 80% identical, at least 85% identical, at least 90% identical, at least 95% identical, or at least 99% identical to SEQ ID NOs: 370-371, 373-376, or 19918-27274. In some embodiments, a targeting sequence for a TTC PAM is selected from the group consisting of SEQ ID NOs: 370-371, 373-376, or 19918-27274.

[0162] In some embodiments, the scaffold of the gNA variant is part of an RNP with a CasX variant protein comprising any one of the sequences of SEQ ID NOS: 49-160, 237-239, 243-246, 251-263 or 273-281 as set forth in Tables 3, 6, 7, 8, or 10 or a sequence having at least about 50%, at least about 60%, at least about 70%, at least about 80%, at least about 85%, at least about 90%, at least about 91%, at least about 92%, at least about 93%, at least about 94%, at least about 95%, at least about 96%, at least about 97%, at least about 98%, or at least about 99% identity thereto. In the foregoing embodiments, the gNA further comprises a targeting sequence.

[0163] In some embodiments, the scaffold of the gNA variant is a variant comprising one or more additional changes to a sequence of a reference gRNA that comprises SEQ ID NO:4 or SEQ ID NO:5. In those embodiments where the scaffold of the reference gRNA is derived from SEQ ID NO:4 or SEQ ID NO:5, the one or more improved or added characteristics of the gNA variant are improved compared to the same characteristic in SEQ ID NO:4 or SEQ ID NO:5.

[0164] h. Complex Formation with CasX Protein

[0165] In some embodiments, a gNA variant has an improved ability to form a complex with a CasX protein (such as a reference CasX or a CasX variant protein) when compared to a reference gRNA. In some embodiments, a gNA variant has an improved affinity for a CasX protein (such as a reference or variant protein) when compared to a reference gRNA, thereby improving its ability to form a ribonucleoprotein (RNP) complex with the CasX protein, as described in the Examples. Improving ribonucleoprotein complex formation may, in some embodiments, improve the efficiency with which functional RNPs are assembled. In some embodiments, greater than 90%, greater than 93%, greater than 95%, greater than 96%, greater than 97%, greater than 98% or greater than 99% of RNPs comprising a gNA variant and its targeting sequence are competent for gene editing of a target nucleic acid.

[0166] Exemplary nucleotide changes that can improve the ability of gNA variants to form a complex with CasX protein may, in some embodiments, include replacing the scaffold stem with a thermostable stem loop. Without wishing to be bound by any theory, replacing the scaffold stem with a thermostable stem loop could increase the overall binding stability of the gNA variant with the CasX protein. Alternatively, or in addition, removing a large section of the stem loop could change the gNA variant folding kinetics and make a functional folded gNA easier and quicker to structurally-assemble, for example by lessening the degree to which the gNA variant can get “tangled” in itself. In some embodiments, choice of scaffold stem loop sequence could change with different targeting sequences that are utilized for the gNA. In some embodiments, scaffold sequence can be tailored to the targeting sequence and therefore the target sequence. Biochemical assays can be used to evaluate the binding affinity of CasX protein for the gNA variant to form the RNP, including the assays of the Examples. For example, a person of ordinary skill can measure changes in the amount of a fluorescently tagged gNA that is bound to an immobilized CasX protein, as a response to increasing concentrations of an additional unlabeled “cold competitor” gNA. Alternatively, or in addition, fluorescence signal can be monitored to or seeing how it changes as different amounts of fluorescently labeled gNA are flowed over immobilized CasX protein. Alternatively, the ability to form an RNP can be assessed using in vitro cleavage assays against a defined target nucleic acid sequence.

[0167] i. gNA Stability

[0168] In some embodiments, a gNA variant has improved stability when compared to a reference gRNA. Increased stability and efficient folding may, in some embodiments, increase the extent to which a gNA variant persists inside a target cell, which may thereby increase the chance of forming a functional RNP capable of carrying out CasX functions such as gene editing. Increased stability of gNA variants may also, in some embodiments, allow for a similar outcome with a lower amount of gNA delivered to a cell, which may in turn reduce the chance of off-target effects during gene editing. Guide RNA stability can be assessed in a variety of ways, including for example in vitro by assembling the guide, incubating for varying periods of time in a solution that mimics the intracellular environment, and then measuring functional activity via the in vitro cleavage assays described herein. Alternatively, or in addition, gNAs can be harvested from cells at varying time points after initial transfection/transduction of the gNA to determine how long gNA variants persist relative to reference gRNAs.

[0169] j. Solubility

[0170] In some embodiments, a gNA variant has improved solubility when compared to a reference gRNA. In some embodiments, a gNA variant has improved solubility of the CasX protein:gNA RNP when compared to a reference gRNA. In some embodiments, solubility of the CasX protein:gNA RNP is improved by the addition of a ribozyme sequence to a 5′ or 3′ end of the gNA variant, for example the 5′ or 3′ of a reference sgRNA. Some ribozymes, such as the M1 ribozyme, can increase solubility of proteins through RNA mediated protein folding. Increased solubility of CasX RNPs comprising a gNA variant as described herein can be evaluated through a variety of means known to one of skill in the art, such as by taking densitometry readings on a gel of the soluble fraction of lysed E. coli in which the CasX and gNA variants are expressed.

[0171] k. Resistance to Nuclease Activity

[0172] In some embodiments, a gNA variant has improved resistance to nuclease activity compared to a reference gRNA that may, for example, increase the persistence of a variant gNA in an intracellular environment, thereby improving gene editing. Resistance to nuclease activity may be evaluated through a variety of methods known to one of skill in the art. For example, in vitro methods of measuring resistance to nuclease activity may include for example contacting reference gNA and variants with one or more exemplary RNA nucleases and measuring degradation. Alternatively, or in addition, measuring persistence of a gNA variant in a cellular environment using the methods described herein can indicate the degree to which the gNA variant is nuclease resistant.

[0173] l. Binding Affinity to a Target DNA

[0174] In some embodiments, a gNA variant has improved affinity for the target DNA relative to a reference gRNA. In certain embodiments, a ribonucleoprotein complex comprising a gNA variant has improved affinity for the target DNA, relative to the affinity of an RNP comprising a reference gRNA. In some embodiments, the improved affinity of the RNP for the target DNA comprises improved affinity for the target sequence, improved affinity for the PAM sequence, improved ability of the RNP to search DNA for the target sequence, or any combinations thereof. In some embodiments, the improved affinity for the target DNA is the result of increased overall DNA binding affinity.

[0175] Without wishing to be bound by theory, it is possible that nucleotide changes in the gNA variant that affect the function of the OBD in the CasX protein may increase the affinity of CasX variant protein binding to the protospacer adjacent motif (PAM), as well as the ability to bind or utilize an increased spectrum of PAM sequences other than the canonical TTC PAM recognized by the reference CasX protein of SEQ ID NO:2, including PAM sequences selected from the group consisting of TTC, ATC, GTC, and CTC, thereby increasing the affinity and diversity of the CasX variant protein for target DNA sequences, resulting in a substantial increase in the target nucleic acid sequences that can be edited and/or bound, compared to a reference CasX. As described more fully, below, increasing the sequences of the target nucleic acid that can be edited, compared to a reference CasX, refers to both the PAM and the protospacer sequence and their directionality according to the orientation of the non-target strand. This does not imply that the PAM sequence of the non-target strand, rather than the target strand, is determinative of cleavage or mechanistically involved in target recognition. For example, when reference is to a TTC PAM, it may in fact be the complementary GAA sequence that is required for target cleavage, or it may be some combination of nucleotides from both strands. In the case of the CasX proteins disclosed herein, the PAM is located 5′ of the protospacer with at least a single nucleotide separating the PAM from the first nucleotide of the protospacer. Alternatively, or in addition, changes in the gNA that affect function of the helical I and/or helical II domains that increase the affinity of the CasX variant protein for the target DNA strand can increase the affinity of the CasX RNP comprising the variant gNA for target DNA.

[0176] m. Adding or Changing gNA Function

[0177] In some embodiments, gNA variants can comprise larger structural changes that change the topology of the gNA variant with respect to the reference gRNA, thereby allowing for different gNA functionality. For example, in some embodiments a gNA variant has swapped an endogenous stem loop of the reference gRNA scaffold with a previously identified stable RNA structure or a stem loop that can interact with a protein or RNA binding partner to recruit additional moieties to the CasX or to recruit CasX to a specific location, such as the inside of a viral capsid, that has the binding partner to the said RNA structure. In other scenarios the RNAs may be recruited to each other, as in Kissing loops, such that two CasX proteins can be co-localized for more effective gene editing at the target DNA sequence. Such RNA structures may include MS2, QP, U1 hairpin II, Uvsx, PP7, Phage replication loop, Kissing loop_a, Kissing loop_b1, Kissing loop_b2, G quadriplex M3q, G quadriplex telomere basket, Sarcin-ricin loop, or a Pseudoknot.

[0178] In some embodiments, a gNA variant comprises a terminal fusion partner. Exemplary terminal fusions may include fusion of the gRNA to a self-cleaving ribozyme or protein binding motif. As used herein, a “ribozyme” refers to an RNA or segment thereof with one or more catalytic activities similar to a protein enzyme. Exemplary ribozyme catalytic activities may include, for example, cleavage and/or ligation of RNA, cleavage and/or ligation of DNA, or peptide bond formation. In some embodiments, such fusions could either improve scaffold folding or recruit DNA repair machinery. For example, a gRNA may in some embodiments be fused to a hepatitis delta virus (HDV) antigenomic ribozyme, HDV genomic ribozyme, hatchet ribozyme (from metagenomic data), env25 pistol ribozyme (representative from Aliistipes putredinis), HH15 Minimal Hammerhead ribozyme, tobacco ringspot virus (TRSV) ribozyme, WT viral Hammerhead ribozyme (and rational variants), or Twisted Sister 1 or RBMX recruiting motif. Hammerhead ribozymes are RNA motifs that catalyze reversible cleavage and ligation reactions at a specific site within an RNA molecule. Hammerhead ribozymes include type I, type II and type III hammerhead ribozymes. The HDV, pistol, and hatchet ribozymes have self-cleaving activities. gNA variants comprising one or more ribozymes may allow for expanded gNA function as compared to a gRNA reference. For example, gNAs comprising self-cleaving ribozymes can, in some embodiments, be transcribed and processed into mature gNAs as part of polycistronic transcripts. Such fusions may occur at either the 5′ or the 3′ end of the gNA. In some embodiments, a gNA variant comprises a fusion at both the 5′ and the 3′ end, wherein each fusion is independently as described herein. In some embodiments, a gNA variant comprises a phage replication loop or a tetraloop. In some embodiments, a gNA comprises a hairpin loop that is capable of binding a protein. For example, in some embodiments the hairpin loop is an MS2, Qβ, U1 hairpin II, Uvsx, or PP7 hairpin loop.

[0179] In some embodiments, a gNA variant comprises one or more RNA aptamers. As used herein, an “RNA aptamer” refers to an RNA molecule that binds a target with high affinity and high specificity. In some embodiments, a gNA variant comprises one or more riboswitches. As used herein, a “riboswitch” refers to an RNA molecule that changes state upon binding a small molecule. In some embodiments, the gNA variant further comprises one or more protein binding motifs. Adding protein binding motifs to a reference gRNA or gNA variant of the disclosure may, in some embodiments, allow a CasX RNP to associate with additional proteins, which can, for example, add the functionality of those proteins to the CasX RNP.

[0180] n. Chemically Modified gNA

[0181] In some embodiments, the disclosure relates to chemically-modified gNA. In some embodiments, the present disclosure provides a chemically-modified gNA that has guide RNA functionality and has reduced susceptibility to cleavage by a nuclease. A gNA that comprises any nucleotide other than the four canonical ribonucleotides A, C, G, and U, or a deoxynucleotide, is a chemically modified gNA. In some cases, a chemically-modified gNA comprises any backbone or internucleotide linkage other than a natural phosphodiester internucleotide linkage. In certain embodiments, the retained functionality includes the ability of the modified gNA to bind to a CasX of any of the embodiments described herein. In certain embodiments, the retained functionality includes the ability of the modified gNA to bind to a target nucleic acid sequence. In certain embodiments, the retained functionality includes targeting a CasX protein or the ability of a pre-complexed CasX protein-gNA to bind to a target nucleic acid sequence. In certain embodiments, the retained functionality includes the ability to nick a target polynucleotide by a CasX-gNA. In certain embodiments, the retained functionality includes the ability to cleave a target nucleic acid sequence by a CasX-gNA. In certain embodiments, the retained functionality is any other known function of a gNA in a CasX system with a CasX protein of the embodiments of the disclosure.

[0182] In some embodiments, the disclosure provides a chemically-modified gNA in which a nucleotide sugar modification is incorporated into the gNA selected from the group consisting of 2′-O—C₁₋₄alkyl such as 2′-O-methyl (2′-OMe), 2′-deoxy (2′-H), 2′-O—C₁₋₃alkyl-O—C₁₋₃alkyl such as 2′-methoxyethyl (“2′-MOE”), 2′-fluoro (“2′-F”), 2′-amino (“2′-NH₂”), 2′-arabinosyl (“2′-arabino”) nucleotide, 2′-F-arabinosyl (“2′-F-arabino”) nucleotide, 2′-locked nucleic acid (“LNA”) nucleotide, 2′-unlocked nucleic acid (“ULNA”) nucleotide, a sugar in L form (“L-sugar”), and 4′-thioribosyl nucleotide. In other embodiments, an internucleotide linkage modification incorporated into the guide RNA is selected from the group consisting of: phosphorothioate “P(S)” (P(S)), phosphonocarboxylate (P(CH₂)ₙCOOR) such as phosphonoacetate “PACE” (P(CH₂COO—)), thiophosphonocarboxylate ((S)P(CH₂)ₙCOOR) such as thiophosphonoacetate “thioPACE” ((S)P(CH₂)ₙCOO—)), alkylphosphonate (P(C₁₋₃alkyl) such as methylphosphonate—P(CH₃), boranophosphonate (P(BH₃)), and phosphorodithioate (P(S)₂).

[0183] In certain embodiments, the disclosure provides a chemically-modified gNA in which a nucleobase (“base”) modification is incorporated into the gNA selected from the group consisting of: 2-thiouracil (“2-thioU”), 2-thiocytosine (“2-thioC”), 4-thiouracil (“4-thioU”), 6-thioguanine (“6-thioG”), 2-aminoadenine (“2-aminoA”), 2-aminopurine, pseudouracil, hypoxanthine, 7-deazaguanine, 7-deaza-8-azaguanine, 7-deazaadenine, 7-deaza-8-azaadenine, 5-methylcytosine (“5-methylC”), 5-methyluracil (“5-methylU”), 5-hydroxymethylcytosine, 5-hydroxymethyluracil, 5,6-dehydrouracil, 5-propynylcytosine, 5-propynyluracil, 5-ethynylcytosine, 5-ethynyluracil, 5-allyluracil (“5-allylU”), 5-allylcytosine (“5-allylC”), 5-aminoallyluracil (“5-aminoallylU”), 5-aminoallyl-cytosine (“5-aminoallylC”), an abasic nucleotide, Z base, P base, Unstructured Nucleic Acid (“UNA”), isoguanine (“isoG”), isocytosine (“isoC”), 5-methyl-2-pyrimidine, x(A,G,C,T) and y(A,G,C,T).

[0184] In other embodiments, the disclosure provides a chemically-modified gNA in which one or more isotopic modifications are introduced on the nucleotide sugar, the nucleobase, the phosphodiester linkage and/or the nucleotide phosphates, including nucleotides comprising one or more ¹⁵N, ¹³C, ¹⁴C, deuterium, ³H, ³²P, ¹²⁵I, ¹³¹I atoms or other atoms or elements used as tracers.

[0185] In some embodiments, an “end” modification incorporated into the gNA is selected from the group consisting of: PEG (polyethyleneglycol), hydrocarbon linkers (including: heteroatom (O,S,N)-substituted hydrocarbon spacers; halo-substituted hydrocarbon spacers; keto-, carboxyl-, amido-, thionyl-, carbamoyl-, thionocarbamaoyl-containing hydrocarbon spacers), spermine linkers, dyes including fluorescent dyes (for example fluoresceins, rhodamines, cyanines) attached to linkers such as for example 6-fluorescein-hexyl, quenchers (for example dabcyl, BHQ) and other labels (for example biotin, digoxigenin, acridine, streptavidin, avidin, peptides and/or proteins). In some embodiments, an “end” modification comprises a conjugation (or ligation) of the gNA to another molecule comprising an oligonucleotide of deoxynucleotides and/or ribonucleotides, a peptide, a protein, a sugar, an oligosaccharide, a steroid, a lipid, a folic acid, a vitamin and/or other molecule. In certain embodiments, the disclosure provides a chemically-modified gNA in which an “end” modification (described above) is located internally in the gNA sequence via a linker such as, for example, a 2-(4-butylamidofluorescein)propane-1,3-diol bis(phosphodiester) linker, which is incorporated as a phosphodiester linkage and can be incorporated anywhere between two nucleotides in the gNA.

[0186] In some embodiments, the disclosure provides a chemically-modified gNA having an end modification comprising a terminal functional group such as an amine, a thiol (or sulfhydryl), a hydroxyl, a carboxyl, carbonyl, thionyl, thiocarbonyl, a carbamoyl, a thiocarbamoyl, a phoshoryl, an alkene, an alkyne, an halogen or a functional group-terminated linker that can be subsequently conjugated to a desired moiety selected from the group consisting of a fluorescent dye, a non-fluorescent label, a tag (for ¹⁴C, example biotin, avidin, streptavidin, or moiety containing an isotopic label such as ¹⁵N, ¹³C, deuterium, ³H, ³²P, ¹²⁵I and the like), an oligonucleotide (comprising deoxynucleotides and/or ribonucleotides, including an aptamer), an amino acid, a peptide, a protein, a sugar, an oligosaccharide, a steroid, a lipid, a folic acid, and a vitamin. The conjugation employs standard chemistry well-known in the art, including but not limited to coupling via N-hydroxysuccinimide, isothiocyanate, DCC (or DCI), and/or any other standard method as described in “Bioconjugate Techniques” by Greg T. Hermanson, Publisher Eslsevier Science, 3^{rd}ed. (2013), the contents of which are incorporated herein by reference in its entirety.

### IV. Proteins for Modifying a Target Nucleic Acid

[0187] The present disclosure provides systems comprising a CRISPR nuclease that have utility in genome editing of eukaryotic cells. In some embodiments, the CRISPR nuclease employed in the genome editing systems is a Class 2, Type V nuclease. Although members of Class 2, Type V CRISPR-Cas systems have differences, they share some common characteristics that distinguish them from the Cas9 systems. Firstly, the Type V nucleases possess a single RNA-guided RuvC domain-containing effector but no HNH domain, and they recognize T-rich PAM 5′ upstream to the target region on the non-targeted strand, which is different from Cas9 systems that rely on G-rich PAM at 3′ side of target sequences. Type V nucleases generate staggered double-stranded breaks distal to the PAM sequence, unlike Cas9, which generates a blunt end in the proximal site close to the PAM. In addition, Type V nucleases degrade ssDNA in trans when activated by target dsDNA or ssDNA binding in cis. In some embodiments, the Type V nucleases of the embodiments recognize a 5′-TC PAM motif and produce staggered ends cleaved solely by the RuvC domain. In some embodiments, the Type V nuclease is selected from the group consisting of Cas12a, Cas12b, Cas12c, Cas12d (CasY), Cas12J, and CasX. In some embodiments, the present disclosure provides systems comprising a CasX protein and one or more gNA acids (CasX:gNA system) that are specifically designed to modify a target nucleic acid sequence in eukaryotic cells.

[0188] The term “CasX protein”, as used herein, refers to a family of proteins, and encompasses all naturally occurring CasX proteins, proteins that share at least 50% identity to naturally occurring CasX proteins, as well as CasX variants exhibiting one or more improved characteristics relative to a naturally-occurring reference CasX protein.

[0189] Exemplary improved characteristics of the CasX variant embodiments include, but are not limited to improved folding of the variant, improved binding affinity to the gNA, improved binding affinity to the target nucleic acid, improved ability to utilize a greater spectrum of PAM sequences in the editing and/or binding of target DNA, improved unwinding of the target DNA, increased editing activity, improved editing efficiency, improved editing specificity, increased percentage of a eukaryotic genome that can be efficiently edited, increased activity of the nuclease, increased target strand loading for double strand cleavage, decreased target strand loading for single strand nicking, decreased off-target cleavage, improved binding of the non-target strand of DNA, improved protein stability, improved protein:gNA (RNP) complex stability, improved protein solubility, improved protein:gNA (RNP) complex solubility, improved protein yield, improved protein expression, and improved fusion characteristics, as described more fully, below. In some embodiments, the RNP of the CasX variant and the gNA variant exhibit one or more of the improved characteristics that are at least about 1.1 to about 100,000-fold improved relative to an RNP of the reference CasX protein of SEQ ID NO:1, SEQ ID NO:2, or SEQ ID NO:3 and the gNA of Table 1, when assayed in a comparable fashion. In other cases, the one or more improved characteristics of an RNP of the CasX variant and the gNA variant are at least about 1.1, at least about 10, at least about 100, at least about 1000, at least about 10,000, at least about 100,000-fold or more improved relative to an RNP of the reference CasX protein of SEQ ID NO:1, SEQ ID NO:2, or SEQ ID NO:3 and the gNA of Table 1. In other cases, the one or more of the improved characteristics of an RNP of the CasX variant and the gNA variant are about 1.1 to 100,00-fold, about 1.1 to 10,00-fold, about 1.1 to 1,000-fold, about 1.1 to 500-fold, about 1.1 to 100-fold, about 1.1 to 50-fold, about 1.1 to 20-fold, about 10 to 100,00-fold, about 10 to 10,00-fold, about 10 to 1,000-fold, about 10 to 500-fold, about 10 to 100-fold, about 10 to 50-fold, about 10 to 20-fold, about 2 to 70-fold, about 2 to 50-fold, about 2 to 30-fold, about 2 to 20-fold, about 2 to 10-fold, about 5 to 50-fold, about 5 to 30-fold, about 5 to 10-fold, about 100 to 100,00-fold, about 100 to 10,00-fold, about 100 to 1,000-fold, about 100 to 500-fold, about 500 to 100,00-fold, about 500 to 10,00-fold, about 500 to 1,000-fold, about 500 to 750-fold, about 1,000 to 100,00-fold, about 10,000 to 100,00-fold, about 20 to 500-fold, about 20 to 250-fold, about 20 to 200-fold, about 20 to 100-fold, about 20 to 50-fold, about 50 to 10,000-fold, about 50 to 1,000-fold, about 50 to 500-fold, about 50 to 200-fold, or about 50 to 100-fold, improved relative to an RNP of the reference CasX protein of SEQ ID NO:1, SEQ ID NO:2, or SEQ ID NO:3 and the gNA of Table 1, when assayed in a comparable fashion. In other cases, the one or more improved characteristics of an RNP of the CasX variant and the gNA variant are about 1.1-fold, 1.2-fold, 1.3-fold, 1.4-fold, 1.5-fold, 1.6-fold, 1.7-fold, 1.8-fold, 1.9-fold, 2-fold, 3-fold, 4-fold, 5-fold, 6-fold, 7-fold, 8-fold, 9-fold, 10-fold, 11-fold, 12-fold, 13-fold, 14-fold, 15-fold, 16-fold, 17-fold, 18-fold, 19-fold, 20-fold, 25-fold, 30-fold, 40-fold, 45-fold, 50-fold, 55-fold, 60-fold, 70-fold, 80-fold, 90-fold, 100-fold, 110-fold, 120-fold, 130-fold, 140-fold, 150-fold, 160-fold, 170-fold, 180-fold, 190-fold, 200-fold, 210-fold, 220-fold, 230-fold, 240-fold, 250-fold, 260-fold, 270-fold, 280-fold, 290-fold, 300-fold, 310-fold, 320-fold, 330-fold, 340-fold, 350-fold, 360-fold, 370-fold, 380-fold, 390-fold, 400-fold, 425-fold, 450-fold, 475-fold, or 500-fold improved relative to an RNP of the reference CasX protein of SEQ ID NO:1, SEQ ID NO:2, or SEQ ID NO:3 and the gNA of Table 1, when assayed in a comparable fashion.

[0190] The term “CasX variant” is inclusive of variants that are fusion proteins; i.e., the CasX is “fused to” a heterologous sequence. This includes CasX variants comprising CasX variant sequences and N-terminal, C-terminal, or internal fusions of the CasX to a heterologous protein or domain thereof.

[0191] CasX proteins of the disclosure comprise at least one of the following domains: a non-target strand binding (NTSB) domain, a target strand loading (TSL) domain, a helical I domain, a helical II domain, an oligonucleotide binding domain (OBD), and a RuvC DNA cleavage domain (the last of which may be modified or deleted in a catalytically dead CasX variant), described more fully, below. Additionally, the CasX variant proteins of the disclosure have an enhanced ability to efficiently edit and/or bind target DNA, when complexed with a gNA as an RNP, utilizing PAM TC motif, including PAM sequences selected from TTC, ATC, GTC, or CTC, compared to an RNP of a reference CasX protein and reference gNA. In the foregoing, the PAM sequence is located at least 1 nucleotide 5′ to the non-target strand of the protospacer having identity with the targeting sequence of the gNA in a assay system compared to the editing efficiency and/or binding of an RNP comprising a reference CasX protein and reference gNA in a comparable assay system. In one embodiment, an RNP of a CasX variant and gNA variant exhibits greater editing efficiency and/or binding of a target sequence in the target DNA compared to an RNP comprising a reference CasX protein and a reference gNA in a comparable assay system, wherein the PAM sequence of the target DNA is TTC. In another embodiment, an RNP of a CasX variant and gNA variant exhibits greater editing efficiency and/or binding of a target sequence in the target DNA compared to an RNP comprising a reference CasX protein and a reference gNA in a comparable assay system, wherein the PAM sequence of the target DNA is ATC. In another embodiment, an RNP of a CasX variant and gNA variant exhibits greater editing efficiency and/or binding of a target sequence in the target DNA compared to an RNP comprising a reference CasX protein and a reference gNA in a comparable assay system, wherein the PAM sequence of the target DNA is CTC. In another embodiment, an RNP of a CasX variant and gNA variant exhibits greater editing efficiency and/or binding of a target sequence in the target DNA compared to an RNP comprising a reference CasX protein and a reference gNA in a comparable assay system, wherein the PAM sequence of the target DNA is GTC. In the foregoing embodiments, the increased editing efficiency and/or binding affinity for the one or more PAM sequences is at least 1.5-fold greater or more compared to the editing efficiency and/or binding affinity of an RNP of any one of the CasX proteins of SEQ ID NOS:1-3 and the gNA of Table 1 for the PAM sequences.

[0192] In some embodiments, a CasX protein can bind and/or modify (e.g., cleave, nick, methylate, demethylate, etc.) a target nucleic acid and/or a polypeptide associated with target nucleic acid (e.g., methylation or acetylation of a histone tail). In some embodiments, the CasX protein is catalytically dead (dCasX) but retains the ability to bind a target nucleic acid. An exemplary catalytically dead CasX protein comprises one or more mutations in the active site of the RuvC domain of the CasX protein. In some embodiments, a catalytically dead CasX protein comprises substitutions at residues 672, 769 and/or 935 of SEQ ID NO:1. In one embodiment, a catalytically dead CasX protein comprises substitutions of D672A, E769A and/or D935A in a reference CasX protein of SEQ ID NO:1. In other embodiments, a catalytically dead CasX protein comprises substitutions at amino acids 659, 756 and/or 922 in a reference CasX protein of SEQ ID NO:2. In some embodiments, a catalytically dead CasX protein comprises D659A, E756A and/or D922A substitutions in a reference CasX protein of SEQ ID NO:2. In further embodiments, a catalytically dead CasX protein comprises deletions of all or part of the RuvC domain of the CasX protein. It will be understood that the same foregoing substitutions can similarly be introduced into the CasX variants of the disclosure, resulting in a dCasX variant. In one embodiment, all or a portion of the RuvC domain is deleted from the CasX variant, resulting in a dCasX variant. Catalytically inactive dCasX variant proteins can, in some embodiments, be used for base editing or epigenetic modifications. With a higher affinity for DNA, in some embodiments, catalytically inactive dCasX variant proteins can, relative to catalytically active CasX, find their target nucleic acid faster, remain bound to target nucleic acid for longer periods of time, bind target nucleic acid in a more stable fashion, or a combination thereof, thereby improving these functions of the catalytically dead CasX variant protein compared to a CasX variant that retains its cleavage capability.

[0193] a. Non-Target Strand Binding Domain

[0194] The reference CasX proteins of the disclosure comprise a non-target strand binding domain (NTSBD). The NTSBD is a domain not previously found in any Cas proteins; for example this domain is not present in Cas proteins such as Cas9, Cas12a/Cpf1, Cas13, Cas14, CASCADE, CSM, or CSY. Without being bound to theory or mechanism, a NTSBD in a CasX allows for binding to the non-target DNA strand and may aid in unwinding of the non-target and target strands. The NTSBD is presumed to be responsible for the unwinding, or the capture, of a non-target DNA strand in the unwound state. The NTSBD is in direct contact with the non-target strand in CryoEM model structures derived to date and may contain a non-canonical zinc finger domain. The NTSBD may also play a role in stabilizing DNA during unwinding, guide RNA invasion and R-loop formation. In some embodiments, an exemplary NTSBD comprises amino acids 101-191 of SEQ ID NO:1 or amino acids 103-192 of SEQ ID NO:2. In some embodiments, the NTSBD of a reference CasX protein comprises a four-stranded beta sheet.

[0195] b. Target Strand Loading Domain

[0196] The reference CasX proteins of the disclosure comprise a Target Strand Loading (TSL) domain. The TSL domain is a domain not found in certain Cas proteins such as Cas9, CASCADE, CSM, or CSY. Without wishing to be bound by theory or mechanism, it is thought that the TSL domain is responsible for aiding the loading of the target DNA strand into the RuvC active site of a CasX protein. In some embodiments, the TSL acts to place or capture the target-strand in a folded state that places the scissile phosphate of the target strand DNA backbone in the RuvC active site. The TSL comprises a cys4 (CXXC, CXXC zinc finger/ribbon domain (SEQ ID NO: 48) that is separated by the bulk of the TSL. In some embodiments, an exemplary TSL comprises amino acids 825-934 of SEQ ID NO:1 or amino acids 813-921 of SEQ ID NO:2.

[0197] c. Helical I Domain

[0198] The reference CasX proteins of the disclosure comprise a helical I domain. Certain Cas proteins other than CasX have domains that may be named in a similar way. However, in some embodiments, the helical I domain of a CasX protein comprises one or more unique structural features, or comprises a unique sequence, or a combination thereof, compared to non-CasX proteins. For example, in some embodiments, the helical I domain of a CasX protein comprises one or more unique secondary structures compared to domains in other Cas proteins that may have a similar name. For example, in some embodiments the helical I domain in a CasX protein comprises one or more alpha helices of unique structure and sequence in arrangement, number and length compared to other CRISPR proteins. In certain embodiments, the helical I domain is responsible for interacting with the bound DNA and targeting sequence of the guide RNA. Without wishing to be bound by theory, it is thought that in some cases the helical I domain may contribute to binding of the protospacer adjacent motif (PAM). In some embodiments, an exemplary helical I domain comprises amino acids 57-100 and 192-332 of SEQ ID NO:1, or amino acids 59-102 and 193-333 of SEQ ID NO:2. In some embodiments, the helical I domain of a reference CasX protein comprises one or more alpha helices.

[0199] d. Helical II Domain

[0200] The reference CasX proteins of the disclosure comprise a helical II domain. Certain Cas proteins other than CasX have domains that may be named in a similar way. However, in some embodiments, the helical II domain of a CasX protein comprises one or more unique structural features, or a unique sequence, or a combination thereof, compared to domains in other Cas proteins that may have a similar name. For example, in some embodiments, the helical II domain comprises one or more unique structural alpha helical bundles that align along the target DNA:guide RNA channel. In some embodiments, in a CasX comprising a helical II domain, the target strand and guide RNA interact with helical II (and the helical I domain, in some embodiments) to allow RuvC domain access to the target DNA. The helical II domain is responsible for binding to the guide RNA scaffold stem loop as well as the bound DNA. In some embodiments, an exemplary helical II domain comprises amino acids 333-509 of SEQ ID NO:1, or amino acids 334-501 of SEQ ID NO:2.

[0201] e. Oligonucleotide Binding Domain

[0202] The reference CasX proteins of the disclosure comprise an Oligonucleotide Binding Domain (OBD). Certain Cas proteins other than CasX have domains that may be named in a similar way. However, in some embodiments, the OBD comprises one or more unique functional features, or comprises a sequence unique to a CasX protein, or a combination thereof. For example, in some embodiments the bridged helix (BH), helical I domain, helical II domain, and Oligonucleotide Binding Domain (OBD) together are responsible for binding of a CasX protein to the guide RNA. Thus, for example, in some embodiments the OBD is unique to a CasX protein in that it interacts functionally with a helical I domain, or a helical II domain, or both, each of which may be unique to a CasX protein as described herein. Specifically, in CasX the OBD largely binds the RNA triplex of the guide RNA scaffold. The OBD may also be responsible for binding to the protospacer adjacent motif (PAM). An exemplary OBD domain comprises amino acids 1-56 and 510-660 of SEQ ID NO:1, or amino acids 1-58 and 502-647 of SEQ ID NO:2.

[0203] f. RuvC DNA Cleavage Domain

[0204] The reference CasX proteins of the disclosure comprise a RuvC domain, that includes 2 partial RuvC domains (RuvC-I and RuvC-II). The RuvC domain is the ancestral domain of all Cas12 CRISPR proteins. The RuvC domain originates from a TNPB (transposase B) like transposase. Similar to other RuvC domains, the CasX RuvC domain has a DED catalytic triad that is responsible for coordinating a magnesium (Mg) ion and cleaving DNA. In some embodiments, the RuvC has a DED motif active site that is responsible for cleaving both strands of DNA (one by one, most likely the non-target strand first at 11-14 nucleotides (nt) into the targeted sequence and then the target strand next at 2-4 nucleotides after the target sequence). Specifically in CasX, the RuvC domain is unique in that it is also responsible for binding the guide RNA scaffold stem loop that is critical for CasX function. An exemplary RuvC domain comprises amino acids 661-824 and 935-986 of SEQ ID NO:1, or amino acids 648-812 and 922-978 of SEQ ID NO:2.

[0205] g. Reference CasX Proteins

[0206] The disclosure provides naturally-occurring CasX proteins (referred to herein as a “reference CasX protein”) that function as an endonuclease that catalyzes a double strand break at a specific sequence in a targeted double-stranded DNA (dsDNA). The sequence specificity is provided by the targeting sequence of the associated gNA to which it is complexed, which hybridizes to a target sequence within the target nucleic acid. For example, reference CasX proteins can be isolated from naturally occurring prokaryotes, such as Deltaproteobacteria, Planctomycetes, or Candidatus Sungbacteria species. A reference CasX protein (sometimes referred to herein as a reference CasX protein) is a Type V CRISPR/Cas endonuclease belonging to the CasX (sometimes referred to as Cas12e) family of proteins that is capable of interacting with a guide NA to form a ribonucleoprotein (RNP) complex. In some embodiments, the RNP complex comprising the reference CasX protein can be targeted to a particular site in a target nucleic acid via base pairing between the targeting sequence (or spacer) of the gNA and a target sequence in the target nucleic acid. In some embodiments, the RNP comprising the reference CasX protein is capable of cleaving target DNA. In some embodiments, the RNP comprising the reference CasX protein is capable of nicking target DNA. In some embodiments, the RNP comprising the reference CasX protein is capable of editing target DNA, for example in those embodiments where the reference CasX protein is capable of cleaving or nicking DNA, followed by non-homologous end joining (NHEJ), homology-directed repair (HDR), homology-independent targeted integration (HITI), micro-homology mediated end joining (MMEJ), single strand annealing (SSA) or base excision repair (BER). In some embodiments, the RNP comprising the CasX protein is a catalytically dead (is catalytically inactive or has substantially no cleavage activity) CasX protein (dCasX), but retains the ability to bind the target DNA, described more fully, supra.

[0207] In some cases, a Type V reference CasX protein is isolated or derived from Deltaproteobacteria. In some embodiments, a CasX protein comprises a sequence at least 50% identical, at least 60% identical, at least 65% identical, at least 70% identical, at least 75% identical, at least 80% identical, at least 81% identical, at least 82% identical, at least 83% identical, at least 84% identical, at least 85% identical, at least 86% identical, at least 86% identical, at least 87% identical, at least 88% identical, at least 89% identical, at least 89% identical, at least 90% identical, at least 91% identical, at least 92% identical, at least 93% identical, at least 94% identical, at least 95% identical, at least 96% identical, at least 97% identical, at least 98% identical, at least 99% identical, at least 99.5% identical or 100% identical to a sequence of.

| (SEQ ID NO: 1) | |
|---|---|
| 1 | MEKRINKIRK KLSADNATKP VSRSGPMKTL LVRVMTDDLK KRLEKRRKKP EVMPQVISNN |
| 61 | AANNLRMLLD DYTKMKEAIL QVYWQEFKDD HVGLMCKFAC PASKKIDONK LKPEMDEKGN |
| 121 | LTTAGFACSQ CGQPLFVYKL EQVSEKGKAY TNYFGRCNVA EHEKLILLAC LKPEKDSDEA |
| 181 | VTYSLGKFGQ RALDFYSIHV TKESTHPVKP LACIAGNRYA SGPVGKALSD ACMGTIASFL |
| 241 | SKYQDIIIEH QKVVKGNQKR LESLRELAGK ENLEYPSVTL PPCPHTKEGV DAYNEVIARV |
| 301 | RMWVNLNLWQ KLKLSRDDAK PLLRLKGFPS FPVVERRENE VDWWNTINEV KKLIDAKRDM |
| 361 | GRVFWSGVTA EKRNTILEGY NYLPNENDHK KREGSLENPK KPAKRCFGDL LLYLEKKYAG |
| 421 | DWGKVFDEAW ERIDKKIAGL TSHIEREEAR NAEDAQSKAV LTDWLRAKAS FVLERLKEMD |
| 481 | EKEFYACEIQ LQKWYGDLRG NPFAVEAENR VVDISGFSIG SDGHSICYRN LLAWKYLENG |
| 541 | KREFYLLMNY GKKGRIRFTD GTDIKKSGKW QGLLYGGGKA KVIDLTFDPD DECLIILPLA |
| 601 | FGTRQGREFI WNDLLSLETG LIKLANGRVI EKTIYNKKIG RDEPALFVAL TFERREVVDP |
| 661 | SNIKPVNLIG VDRGENIPAV IALTDPEGCP LPEFKDSSGG PTDILRIGEG YKEKQRAIQA |
| 721 | AKEVEQRRAG GYSRKFASKS RNLADDMVRN SARDLFYHAV THDAVLVFEN LSRGFGRCGK |
| 781 | RTFMTERQYT KMEDWLTAKL AYEGLTSKTY LSKTLACYTS KTCSNCGFTI TTADYDGMLV |
| 841 | RLKKTSDGWA TTLNNKELKA EGQITYYNRY KROTVEKELS AELDRLSEES GNNDISKWTK |
| 901 | GRRDEALFLL KKRFSHRPVQ EQFVCLDCGH EVHADEQAAL NIARSWLFLN SNSTEFKSYK |
| 961 | SGKQPFVGAW QAFYKRRLKE VWKPNA. |

[0208] In some cases, a Type V reference CasX protein is isolated or derived from Planctomycetes. In some embodiments, a CasX protein comprises a sequence at least 50% identical, at least 60% identical, at least 65% identical, at least 70% identical, at least 75% identical, at least 80% identical, at least 81% identical, at least 82% identical, at least 83% identical, at least 84% identical, at least 85% identical, at least 86% identical, at least 86% identical, at least 87% identical, at least 88% identical, at least 89% identical, at least 89% identical, at least 90% identical, at least 91% identical, at least 92% identical, at least 93% identical, at least 94% identical, at least 95% identical, at least 96% identical, at least 97% identical, at least 98% identical, at least 99% identical, at least 99.5% identical or 100% identical to a sequence of.

| (SEQ ID NO: 2) | |
|---|---|
| 1 | MQEIKRINKI RRRLVKDSNT KKAGKTGPMK TLLVRVMTPD LRERLENLRK KPENIPQPIS |
| 61 | NTSRANLNKL LTDYTEMKKA ILHVYWEEFQ KDPVGLMSRV AQPAPKNIDQ RKLIPVKDGN |
| 121 | ERLTSSGFAC SQCCQPLYVY KLEQVNDKGK PHTNYFGRCN VSEHERLILL SPHKPEANDE |
| 181 | LVTYSLGKFG QRALDFYSIH VTRESNHPVK PLEQIGGNSC ASGPVGKALS DACMGAVASF |
| 241 | LTKYQDIILE HQKVIKKNEK RLANLKDIAS ANGLAFPKIT LPPQPHTKEG IEAYNNVVAQ |
| 301 | IVIWVNLNLW QKLKIGRDEA KPLQRLKGFP SFPLVERQAN EVDWWDMVCN VKKLINEKKE |
| 361 | DGKVFWQNLA GYKRQEALLP YLSSEEDRKK GKKFARYQFG DLLLHLEKKH GEDWGKVYDE |
| 421 | AWERIDKKVE GLSKHIKLEE ERRSEDAQSK AALTDWLRAK ASFVIEGLKE ADKDEFCRCE |
| 481 | LKLQKWYGDL RGKPFAIEAE NSILDISGFS KQYNCAFIWQ KDGVKKLNLY LIINYFKGGK |
| 541 | LRFKKIKPEA FEANRFYTVI NKKSGEIVPM EVNFNFDDPN LIILPLAFGK RQGREFIWND |
| 601 | LLSLETGSLK LANGRVIEKT LYNRRTRQDE PALFVALTFE RREVLDSSNI KPMNLIGIDR |
| 661 | GENIPAVIAL TDPEGCPLSR FKDSLGNPTH ILRIGESYKE KQRTIQAAKE VEQRRAGGYS |
| 721 | RKYASKAKNL ADDMVRNTAR DLLYYAVTQD AMLIFENLSR GFGRQGKRTF MAERQYTRME |
| 781 | DWLTAKLAYE GLPSKTYLSK TLAQYTSKTC SNCGFTITSA DYDRVLEKLK KTATGWMTTI |
| 841 | NGKELKVEGQ ITYYNRYKRQ NVVKDLSVEL DRLSEESVNN DISSWTKGRS GEALSLLKKR |
| 901 | FSHRPVQEKF VCLNCGFETH ADEQAALNIA RSWLFLRSQE YKKYQTNKTT GNTDKRAFVE |
| 961 | TWQSFYRKKL KEVWKPAV. |

[0209] In some embodiments, the CasX protein comprises the sequence of SEQ ID NO:2, or at least 60% similarity thereto. In some embodiments, the CasX protein comprises the sequence of SEQ ID NO:2, or at least 80% similarity thereto. In some embodiments, the CasX protein comprises the sequence of SEQ ID NO:2, or at least 90% similarity thereto. In some embodiments, the CasX protein comprises the sequence of SEQ ID NO:2, or at least 95% similarity thereto. In some embodiments, the CasX protein consists of the sequence of SEQ ID NO:2. In some embodiments, the CasX protein comprises or consists of a sequence that has at least 1, at least 2, at least 3, at least 4, at least 5, at least 6, at least 7, at least 8, at least 9, at least 10, at least 20, at least 30, at least 40 or at least 50 mutations relative to the sequence of SEQ ID NO:2. These mutations can be insertions, deletions, amino acid substitutions, or any combinations thereof.

[0210] In some cases, a Type V reference CasX protein is isolated or derived from Candidatus Sungbacteria. In some embodiments, a CasX protein comprises a sequence at least 50% identical, at least 60% identical, at least 65% identical, at least 70% identical, at least 75% identical, at least 80% identical, at least 81% identical, at least 82% identical, at least 83% identical, at least 84% identical, at least 85% identical, at least 86% identical, at least 86% identical, at least 87% identical, at least 88% identical, at least 89% identical, at least 89% identical, at least 90% identical, at least 91% identical, at least 92% identical, at least 93% identical, at least 94% identical, at least 95% identical, at least 96% identical, at least 97% identical, at least 98% identical, at least 99% identical, at least 99.5% identical or 100% identical to a sequence of

| (SEQ ID NO: 3) | |
|---|---|
| 1 | MDNANKPSTK SLVNTTRISD HFGVTPGQVT RVFSFGIIPT KRQYAIIERW FAAVEAARER |
| 61 | LYGMLYAHFQ ENPPAYLKEK FSYETFFKGR PVLNGLRDID PTIMTSAVFT ALRHKAEGAM |
| 121 | AAFHTNHRRL FEEARKKMRE YAECLKANEA LLRGAADIDW DKIVNALRTR LNTCLAPEYD |
| 181 | AVIADFGALC AFRALIAETN ALKGAYNHAL NQMLPALVKV DEPEEAEESP RLRFFNGRIN |
| 241 | DLPKFPVAER ETPPDTETII RQLEDMARVI PDTAEILGYI HRIRHKAARR KPGSAVPLPQ |
| 301 | RVALYCAIRM ERNPEEDPST VAGHFLGEID RVCEKRRQGL VRTPFDSQIR ARYMDIISFR |
| 361 | ATLAHPDRWT EIQFLRSNAA SRRVRAETIS APFEGFSWTS NRTNPAPQYG MALAKDANAP |
| 421 | ADAPELCICL SPSSAAFSVR EKGGDLIYMR PTGGRRGKDN PGKEITWVPG SFDEYPASGV |
| 481 | ALKLRLYFGR SQARRMLTNK TWGLLSDNPR VFAANAELVG KKRNPQDRWK LFFHMVISGP |
| 541 | PPVEYLDFSS DVRSRARTVI GINRGEVNPL AYAVVSVEDG QVLEEGLLGK KEYIDQLIET |
| 601 | RRRISEYQSR EQTPPRDLRQ RVRHLQDTVL GSARAKIHSL IAFWKGILAI ERLDDQFHGR |
| 661 | EQKIIPKKTY LANKTGFMNA LSFSGAVRVD KKGNPWGGMI EIYPGGISRT CTQCGTVWLA |
| 721 | RRPKNPGHRD AMVVIPDIVD DAAATGFDNV DCDAGTVDYG ELFTLSREWV RLTPRYSRVM |
| 781 | RGTLGDLERA IRQGDDRKSR QMLELALEPQ PQWGQFFCHR CGFNGQSDVL AATNLARRAI |
| 841 | SLIRRLPDTD TPPTP. |

[0211] In some embodiments, the CasX protein comprises the sequence of SEQ ID NO:3, or at least 60% similarity thereto. In some embodiments, the CasX protein comprises the sequence of SEQ ID NO:3, or at least 80% similarity thereto. In some embodiments, the CasX protein comprises the sequence of SEQ ID NO:3, or at least 90% similarity thereto. In some embodiments, the CasX protein comprises the sequence of SEQ ID NO:3, or at least 95% similarity thereto. In some embodiments, the CasX protein consists of the sequence of SEQ ID NO:3. In some embodiments, the CasX protein comprises or consists of a sequence that has at least 1, at least 2, at least 3, at least 4, at least 5, at least 6, at least 7, at least 8, at least 9, at least 10, at least 20, at least 30, at least 40 or at least 50 mutations relative to the sequence of SEQ ID NO:3. These mutations can be insertions, deletions, amino acid substitutions, or any combinations thereof.

[0212] h. CasX Variant Proteins

[0213] The present disclosure provides variants of a reference CasX protein (interchangeably referred to herein as “CasX variant” or “CasX variant protein”), wherein the CasX variants comprise at least one modification in at least one domain of the reference CasX protein, including the sequences of SEQ ID NOS:1-3. In some embodiments, the CasX variant exhibits at least one improved characteristic compared to the reference CasX protein. All variants that improve one or more functions or characteristics of the CasX variant protein when compared to a reference CasX protein described herein are envisaged as being within the scope of the disclosure. In some embodiments, the modification is a mutation in one or more amino acids of the reference CasX. In other embodiments, the modification is a substitution of one or more domains of the reference CasX with one or more domains from a different CasX. In some embodiments, insertion includes the insertion of a part or all of a domain from a different CasX protein. Mutations can occur in any one or more domains of the reference CasX protein, and may include, for example, deletion of part or all of one or more domains, or one or more amino acid substitutions, deletions, or insertions in any domain of the reference CasX protein. The domains of CasX proteins include the non-target strand binding (NTSB) domain, the target strand loading (TSL) domain, the helical I domain, the helical II domain, the oligonucleotide binding domain (OBD), and the RuvC DNA cleavage domain. Any change in amino acid sequence of a reference CasX protein that leads to an improved characteristic of the CasX protein is considered a CasX variant protein of the disclosure. For example, CasX variants can comprise one or more amino acid substitutions, insertions, deletions, or swapped domains, or any combinations thereof, relative to a reference CasX protein sequence.

[0214] In some embodiments, the CasX variant protein comprises at least one modification in at least each of two domains of the reference CasX protein, including the sequences of SEQ ID NOS:1-3. In some embodiments, the CasX variant protein comprises at least one modification in at least 2 domains, in at least 3 domains, at least 4 domains or at least 5 domains of the reference CasX protein. In some embodiments, the CasX variant protein comprises two or more modifications in at least one domain of the reference CasX protein. In some embodiments, the CasX variant protein comprises at least two modifications in at least one domain of the reference CasX protein, at least three modifications in at least one domain of the reference CasX protein or at least four modifications in at least one domain of the reference CasX protein. In some embodiments, wherein the CasX variant comprises two or more modifications compared to a reference CasX protein, each modification is made in a domain independently selected from the group consisting of a NTSBD, TSLD, Helical I domain, Helical II domain, OBD, and RuvC DNA cleavage domain.

[0215] In some embodiments, the at least one modification of the CasX variant protein comprises a deletion of at least a portion of one domain of the reference CasX protein, including the sequences of SEQ ID NOS:1-3. In some embodiments, the deletion is in the NTSBD, TSLD, Helical I domain, Helical II domain, OBD, or RuvC DNA cleavage domain.

[0216] Suitable mutagenesis methods for generating CasX variant proteins of the disclosure may include, for example, Deep Mutational Evolution (DME), deep mutational scanning (DMS), error prone PCR, cassette mutagenesis, random mutagenesis, staggered extension PCR, gene shuffling, or domain swapping. In some embodiments, the CasX variants are designed, for example by selecting one or more desired mutations in a reference CasX. In certain embodiments, the activity of a reference CasX protein is used as a benchmark against which the activity of one or more CasX variants are compared, thereby measuring improvements in function of the CasX variants. Exemplary improvements of CasX variants include, but are not limited to, improved folding of the variant, improved binding affinity to the gNA, improved binding affinity to the target DNA, altered binding affinity to one or more PAM sequences, improved unwinding of the target DNA, increased activity, improved editing efficiency, improved editing specificity, increased activity of the nuclease, increased target strand loading for double strand cleavage, decreased target strand loading for single strand nicking, decreased off-target cleavage, improved binding of the non-target strand of DNA, improved protein stability, improved protein:gNA complex stability, improved protein solubility, improved protein:gNA complex solubility, improved protein yield, improved protein expression, and improved fusion characteristics, as described more fully, below.

[0217] In some embodiments of the CasX variants described herein, the at least one modification comprises: (a) a substitution of 1 to 100 consecutive or non-consecutive amino acids in the CasX variant compared to a reference CasX of SEQ ID NO:1, SEQ ID NO:2, or SEQ ID NO:3; (b) a deletion of 1 to 100 consecutive or non-consecutive amino acids in the CasX variant compared to a reference CasX; (c) an insertion of 1 to 100 consecutive or non-consecutive amino acids in the CasX compared to a reference CasX; or (d) any combination of (a)-(c). In some embodiments, the at least one modification comprises: (a) a substitution of 5-10 consecutive or non-consecutive amino acids in the CasX variant compared to a reference CasX of SEQ ID NO:1, SEQ ID NO:2, or SEQ ID NO:3; (b) a deletion of 1-5 consecutive or non-consecutive amino acids in the CasX variant compared to a reference CasX; (c) an insertion of 1-5 consecutive or non-consecutive amino acids in the CasX compared to a reference CasX; or (d) any combination of (a)-(c).

[0218] In some embodiments, the CasX variant protein comprises or consists of a sequence that has at least 1, at least 2, at least 3, at least 4, at least 5, at least 6, at least 7, at least 8, at least 9, at least 10, at least 20, at least 30, at least 40 or at least 50 mutations relative to the sequence of SEQ ID NO:1, SEQ ID NO:2, or SEQ ID NO:3. These mutations can be insertions, deletions, amino acid substitutions, or any combinations thereof.

[0219] In some embodiments, the CasX variant protein comprises at least one amino acid substitution in at least one domain of a reference CasX protein. In some embodiments, the CasX variant protein comprises at least about 1-4 amino acid substitutions, 1-10 amino acid substitutions, 1-20 amino acid substitutions, 1-30 amino acid substitutions, 1-40 amino acid substitutions, 1-50 amino acid substitutions, 1-60 amino acid substitutions, 1-70 amino acid substitutions, 1-80 amino acid substitutions, 1-90 amino acid substitutions, 1-100 amino acid substitutions, 2-10 amino acid substitutions, 2-20 amino acid substitutions, 2-30 amino acid substitutions, 3-10 amino acid substitutions, 3-20 amino acid substitutions, 3-30 amino acid substitutions, 4-10 amino acid substitutions, 4-20 amino acid substitutions, 3-300 amino acid substitutions, 5-10 amino acid substitutions, 5-20 amino acid substitutions, 5-30 amino acid substitutions, 10-50 amino acid substitutions, or 20-50 amino acid substitutions, relative to a reference CasX protein, which can be consecutive or non-consecutive, or in different domains. As used herein “consecutive amino acids” refer to amino acids that are contiguous in the primary sequence of a polypeptide. In some embodiments, the CasX variant protein comprises at least about 100 or more amino acid substitutions relative to a reference CasX protein. In some embodiments, the amino acid substitutions are conservative substitutions. In other embodiments, the substitutions are non-conservative; e.g., a polar amino acid is substituted for a non-polar amino acid, or vice versa.

[0220] Any amino acid can be substituted for any other amino acid in the substitutions described herein. The substitution can be a conservative substitution (e.g., a basic amino acid is substituted for another basic amino acid). The substitution can be a non-conservative substitution (e.g., a basic amino acid is substituted for an acidic amino acid or vice versa). For example, a proline in a reference CasX protein can be substituted for any of arginine, histidine, lysine, aspartic acid, glutamic acid, serine, threonine, asparagine, glutamine, cysteine, glycine, alanine, isoleucine, leucine, methionine, phenylalanine, tryptophan, tyrosine or valine to generate a CasX variant protein of the disclosure.

[0221] In some embodiments, a CasX variant protein comprises at least one amino acid deletion relative to a reference CasX protein. In some embodiments, a CasX variant protein comprises a deletion of 1-4 amino acids, 1-10 amino acids, 1-20 amino acids, 1-30 amino acids, 1-40 amino acids, 1-50 amino acids, 1-60 amino acids, 1-70 amino acids, 1-80 amino acids, 1-90 amino acids, 1-100 amino acids, 2-10 amino acids, 2-20 amino acids, 2-30 amino acids, 3-10 amino acids, 3-20 amino acids, 3-30 amino acids, 4-10 amino acids, 4-20 amino acids, 3-300 amino acids, 5-10 amino acids, 5-20 amino acids, 5-30 amino acids, 10-50 amino acids or 20-50 amino acids relative to a reference CasX protein. In some embodiments, a CasX protein comprises a deletion of at least about 100 consecutive amino acids relative to a reference CasX protein. In some embodiments, a CasX variant protein comprises a deletion of at least 1, 2, 3, 4, 5, 6, 7, 8, 9, 10, 20, 30, 40, 50 or 100 consecutive amino acids relative to a reference CasX protein. In some embodiments, a CasX variant protein comprises a deletion of 1, 2, 3, 4, 5, 6, 7, 8, 9 or 10 consecutive amino acids.

[0222] In some embodiments, a CasX variant protein comprises two or more deletions relative to a reference CasX protein, and the two or more deletions are not consecutive amino acids. For example, a first deletion may be in a first domain of the reference CasX protein, and a second deletion may be in a second domain of the reference CasX protein. In some embodiments, a CasX variant protein comprises 2, 3, 4, 5, 6, 7, 8, 9, 10, 11, 12, 13, 14, 15, 16, 17, 18, 19 or 20 non-consecutive deletions relative to a reference CasX protein. In some embodiments, a CasX variant protein comprises at least 20 non-consecutive deletions relative to a reference CasX protein. Each non-consecutive deletion may be of any length of amino acids described herein, e.g., 1-4 amino acids, 1-10 amino acids, and the like.

[0223] In some embodiments, the CasX variant protein comprises one or more amino acid insertions relative to the sequence of SEQ ID NOS:1, 2, or 3. In some embodiments, a CasX variant protein comprises an insertion of 1 amino acid, an insertion of 2-3 consecutive or non-consecutive amino acids, 2-4 consecutive or non-consecutive amino acids, 2-5 consecutive or non-consecutive amino acids, 2-6 consecutive or non-consecutive amino acids, 2-7 consecutive or non-consecutive amino acids, 2-8 consecutive or non-consecutive amino acids, 2-9 consecutive or non-consecutive amino acids, 2-10 consecutive or non-consecutive amino acids, 2-20 consecutive or non-consecutive amino acids, 2-30 consecutive or non-consecutive amino acids, 2-40 consecutive or non-consecutive amino acids, 2-50 consecutive or non-consecutive amino acids, 2-60 consecutive or non-consecutive amino acids, 2-70 consecutive or non-consecutive amino acids, 2-80 consecutive or non-consecutive amino acids, 2-90 consecutive or non-consecutive amino acids, 2-100 consecutive or non-consecutive amino acids, 3-10 consecutive or non-consecutive amino acids, 3-20 consecutive or non-consecutive amino acids, 3-30 consecutive or non-consecutive amino acids, 4-10 consecutive or non-consecutive amino acids, 4-20 consecutive or non-consecutive amino acids, 3-300 consecutive or non-consecutive amino acids, 5-10 consecutive or non-consecutive amino acids, 5-20 consecutive or non-consecutive amino acids, 5-30 consecutive or non-consecutive amino acids, 10-50 consecutive or non-consecutive amino acids or 20-50 consecutive or non-consecutive amino acids relative to a reference CasX protein. In some embodiments, the CasX variant protein comprises an insertion of 2, 3, 4, 5, 6, 7, 8, 9, 10, 11, 12, 13, 14, 15, 16, 17, 18, 19 or 20 consecutive or non-consecutive amino acids. In some embodiments, a CasX variant protein comprises an insertion of at least about 100 consecutive or non-consecutive amino acids. Any amino acid, or combination of amino acids, can be inserted in the insertions described herein to generate a CasX variant protein.

[0224] Any permutation of the substitution, insertion and deletion embodiments described herein can be combined to generate a CasX variant protein of the disclosure. For example, a CasX variant protein can comprise at least one substitution and at least one deletion relative to a reference CasX protein sequence, at least one substitution and at least one insertion relative to a reference CasX protein sequence, at least one insertion and at least one deletion relative to a reference CasX protein sequence, or at least one substitution, one insertion and one deletion relative to a reference CasX protein sequence.

[0225] In some embodiments, the CasX variant protein has at least about 60% sequence similarity to SEQ ID NO:2 or a portion thereof. In some embodiments, the CasX variant protein comprises a substitution of Y789T of SEQ ID NO:2, a deletion of P793 of SEQ ID NO:2, a substitution of Y789D of SEQ ID NO:2, a substitution of T72S of SEQ ID NO:2, a substitution of I546V of SEQ ID NO:2, a substitution of E552A of SEQ ID NO:2, a substitution of A636D of SEQ ID NO:2, a substitution of F536S of SEQ ID NO:2, a substitution of A708K of SEQ ID NO:2, a substitution of Y797L of SEQ ID NO:2, a substitution of L792G SEQ ID NO:2, a substitution of A739V of SEQ ID NO:2, a substitution of G791M of SEQ ID NO:2, an insertion of A at position 661 of SEQ ID NO:2, a substitution of A788W of SEQ ID NO:2, a substitution of K390R of SEQ ID NO:2, a substitution of A751S of SEQ ID NO:2, a substitution of E385A of SEQ ID NO:2, an insertion of P at position 696 of SEQ ID NO:2, an insertion of M at position 773 of SEQ ID NO:2, a substitution of G695H of SEQ ID NO:2, an insertion of AS at position 793 of SEQ ID NO:2, an insertion of AS at position 795 of SEQ ID NO:2, a substitution of C477R of SEQ ID NO:2, a substitution of C477K of SEQ ID NO:2, a substitution of C479A of SEQ ID NO:2, a substitution of C479L of SEQ ID NO:2, a substitution of I55F of SEQ ID NO:2, a substitution of K210R of SEQ ID NO:2, a substitution of C233S of SEQ ID NO:2, a substitution of D231N of SEQ ID NO:2, a substitution of Q338E of SEQ ID NO:2, a substitution of Q338R of SEQ ID NO:2, a substitution of L379R of SEQ ID NO:2, a substitution of K390R of SEQ ID NO:2, a substitution of L481Q of SEQ ID NO:2, a substitution of F495S of SEQ ID NO:2, a substitution of D600N of SEQ ID NO:2, a substitution of T886K of SEQ ID NO:2, a substitution of A739V of SEQ ID NO:2, a substitution of K460N of SEQ ID NO:2, a substitution of I199F of SEQ ID NO:2, a substitution of G492P of SEQ ID NO:2, a substitution of T153I of SEQ ID NO:2, a substitution of R591I of SEQ ID NO:2, an insertion of AS at position 795 of SEQ ID NO:2, an insertion of AS at position 796 of SEQ ID NO:2, an insertion of L at position 889 of SEQ ID NO:2, a substitution of E121D of SEQ ID NO:2, a substitution of S270W of SEQ ID NO:2, a substitution of E712Q of SEQ ID NO:2, a substitution of K942Q of SEQ ID NO:2, a substitution of E552K of SEQ ID NO:2, a substitution of K25Q of SEQ ID NO:2, a substitution of N47D of SEQ ID NO:2, an insertion of T at position 696 of SEQ ID NO:2, a substitution of L685I of SEQ ID NO:2, a substitution of N880D of SEQ ID NO:2, a substitution of Q102R of SEQ ID NO:2, a substitution of M734K of SEQ ID NO:2, a substitution of A724S of SEQ ID NO:2, a substitution of T704K of SEQ ID NO:2, a substitution of P224K of SEQ ID NO:2, a substitution of K25R of SEQ ID NO:2, a substitution of M29E of SEQ ID NO:2, a substitution of H152D of SEQ ID NO:2, a substitution of S219R of SEQ ID NO:2, a substitution of E475K of SEQ ID NO:2, a substitution of G226R of SEQ ID NO:2, a substitution of A377K of SEQ ID NO:2, a substitution of E480K of SEQ ID NO:2, a substitution of K416E of SEQ ID NO:2, a substitution of H164R of SEQ ID NO:2, a substitution of K767R of SEQ ID NO:2, a substitution of I7F of SEQ ID NO:2, a substitution of M29R of SEQ ID NO:2, a substitution of H435R of SEQ ID NO:2, a substitution of E385Q of SEQ ID NO:2, a substitution of E385K of SEQ ID NO:2, a substitution of I279F of SEQ ID NO:2, a substitution of D489S of SEQ ID NO:2, a substitution of D732N of SEQ ID NO:2, a substitution of A739T of SEQ ID NO:2, a substitution of W885R of SEQ ID NO:2, a substitution of E53K of SEQ ID NO:2, a substitution of A238T of SEQ ID NO:2, a substitution of P283Q of SEQ ID NO:2, a substitution of E292K of SEQ ID NO:2, a substitution of Q628E of SEQ ID NO:2, a substitution of R388Q of SEQ ID NO:2, a substitution of G791M of SEQ ID NO:2, a substitution of L792K of SEQ ID NO:2, a substitution of L792E of SEQ ID NO:2, a substitution of M779N of SEQ ID NO:2, a substitution of G27D of SEQ ID NO:2, a substitution of K955R of SEQ ID NO:2, a substitution of S867R of SEQ ID NO:2, a substitution of R693I of SEQ ID NO:2, a substitution of F189Y of SEQ ID NO:2, a substitution of V635M of SEQ ID NO:2, a substitution of F399L of SEQ ID NO:2, a substitution of E498K of SEQ ID NO:2, a substitution of E386R of SEQ ID NO:2, a substitution of V254G of SEQ ID NO:2, a substitution of P793S of SEQ ID NO:2, a substitution of K188E of SEQ ID NO:2, a substitution of QT945KI of SEQ ID NO:2, a substitution of T620P of SEQ ID NO:2, a substitution of T946P of SEQ ID NO:2, a substitution of TT949PP of SEQ ID NO:2, a substitution of N952T of SEQ ID NO:2, a substitution of K682E of SEQ ID NO:2, a substitution of K975R of SEQ ID NO:2, a substitution of L212P of SEQ ID NO:2, a substitution of E292R of SEQ ID NO:2, a substitution of 1303K of SEQ ID NO:2, a substitution of C349E of SEQ ID NO:2, a substitution of E385P of SEQ ID NO:2, a substitution of E386N of SEQ ID NO:2, a substitution of D387K of SEQ ID NO:2, a substitution of L404K of SEQ ID NO:2, a substitution of E466H of SEQ ID NO:2, a substitution of C477Q of SEQ ID NO:2, a substitution of C477H of SEQ ID NO:2, a substitution of C479A of SEQ ID NO:2, a substitution of D659H of SEQ ID NO:2, a substitution of T806V of SEQ ID NO:2, a substitution of K808S of SEQ ID NO:2, an insertion of AS at position 797 of SEQ ID NO:2, a substitution of V959M of SEQ ID NO:2, a substitution of K975Q of SEQ ID NO:2, a substitution of W974G of SEQ ID NO:2, a substitution of A708Q of SEQ ID NO:2, a substitution of V711K of SEQ ID NO:2, a substitution of D733T of SEQ ID NO:2, a substitution of L742W of SEQ ID NO:2, a substitution of V747K of SEQ ID NO:2, a substitution of F755M of SEQ ID NO:2, a substitution of M771A of SEQ ID NO:2, a substitution of M771Q of SEQ ID NO:2, a substitution of W782Q of SEQ ID NO:2, a substitution of G791F, of SEQ ID NO:2 a substitution of L792D of SEQ ID NO:2, a substitution of L792K of SEQ ID NO:2, a substitution of P793Q of SEQ ID NO:2, a substitution of P793G of SEQ ID NO:2, a substitution of Q804A of SEQ ID NO:2, a substitution of Y966N of SEQ ID NO:2, a substitution of Y723N of SEQ ID NO:2, a substitution of Y857R of SEQ ID NO:2, a substitution of S890R of SEQ ID NO:2, a substitution of S932M of SEQ ID NO:2, a substitution of L897M of SEQ ID NO:2, a substitution of R624G of SEQ ID NO:2, a substitution of S603G of SEQ ID NO:2, a substitution of N737S of SEQ ID NO:2, a substitution of L307K of SEQ ID NO:2, a substitution of I658V of SEQ ID NO:2, an insertion of PT at position 688 of SEQ ID NO:2, an insertion of SA at position 794 of SEQ ID NO:2, a substitution of S877R of SEQ ID NO:2, a substitution of N580T of SEQ ID NO:2, a substitution of V335G of SEQ ID NO:2, a substitution of T620S of SEQ ID NO:2, a substitution of W345G of SEQ ID NO:2, a substitution of T280S of SEQ ID NO:2, a substitution of L406P of SEQ ID NO:2, a substitution of A612D of SEQ ID NO:2, a substitution of A751S of SEQ ID NO:2, a substitution of E386R of SEQ ID NO:2, a substitution of V351M of SEQ ID NO:2, a substitution of K210N of SEQ ID NO:2, a substitution of D40A of SEQ ID NO:2, a substitution of E773G of SEQ ID NO:2, a substitution of H207L of SEQ ID NO:2, a substitution of T62A SEQ ID NO:2, a substitution of T287P of SEQ ID NO:2, a substitution of T832A of SEQ ID NO:2, a substitution of A893S of SEQ ID NO:2, an insertion of V at position 14 of SEQ ID NO:2, an insertion of AG at position 13 of SEQ ID NO:2, a substitution of R11V of SEQ ID NO:2, a substitution of R12N of SEQ ID NO:2, a substitution of R13H of SEQ ID NO:2, an insertion of Y at position 13 of SEQ ID NO:2, a substitution of R12L of SEQ ID NO:2, an insertion of Q at position 13 of SEQ ID NO:2, an substitution of V15S of SEQ ID NO:2, an insertion of D at position 17 of SEQ ID NO:2 or a combination thereof.

[0226] In some embodiments, the CasX variant comprises at least one modification in the NTSB domain.

[0227] In some embodiments, the CasX variant comprises at least one modification in the TSL domain. In some embodiments, the at least one modification in the TSL domain comprises an amino acid substitution of one or more of amino acids Y857, S890, or S932 of SEQ ID NO:2.

[0228] In some embodiments, the CasX variant comprises at least one modification in the helical I domain. In some embodiments, the at least one modification in the helical I domain comprises an amino acid substitution of one or more of amino acids S219, L249, E259, Q252, E292, L307, or D318 of SEQ ID NO:2.

[0229] In some embodiments, the CasX variant comprises at least one modification in the helical II domain. In some embodiments, the at least one modification in the helical II domain comprises an amino acid substitution of one or more of amino acids D361, L379, E385, E386, D387, F399, L404, R458, C477, or D489 of SEQ ID NO:2.

[0230] In some embodiments, the CasX variant comprises at least one modification in the OBD domain. In some embodiments, the at least one modification in the OBD comprises an amino acid substitution of one or more of amino acids F536, E552, T620, or 1658 of SEQ ID NO:2.

[0231] In some embodiments, the CasX variant comprises at least one modification in the RuvC DNA cleavage domain. In some embodiments, the at least one modification in the RuvC DNA cleavage domain comprises an amino acid substitution of one or more of amino acids K682, G695, A708, V711, D732, A739, D733, L742, V747, F755, M771, M779, W782, A788, G791, L792, P793, Y797, M799, Q804, S819, or Y857 or a deletion of amino acid P793 of SEQ ID NO:2.

[0232] In some embodiments, the CasX variant comprises at least one modification compared to the reference CasX sequence of SEQ ID NO:2 is selected from one or more of: (a) an amino acid substitution of L379R; (b) an amino acid substitution of A708K; (c) an amino acid substitution of T620P; (d) an amino acid substitution of E385P; (e) an amino acid substitution of Y857R; (f) an amino acid substitution of I658V; (g) an amino acid substitution of F399L; (h) an amino acid substitution of Q252K; (i) an amino acid substitution of L404K; (j) an amino acid substitution of G223Y; (k) an amino acid deletion of P793; and an insertion of R at position 26.

[0233] In some embodiments, a CasX variant comprises at least two amino acid changes to the sequence of a reference CasX variant protein selected from the group consisting of: a substitution of Y789T of SEQ ID NO:2, a deletion of P793 of SEQ ID NO:2, a substitution of Y789D of SEQ ID NO:2, a substitution of T72S of SEQ ID NO:2, a substitution of I546V of SEQ ID NO:2, a substitution of E552A of SEQ ID NO:2, a substitution of A636D of SEQ ID NO:2, a substitution of F536S of SEQ ID NO:2, a substitution of A708K of SEQ ID NO:2, a substitution of Y797L of SEQ ID NO:2, a substitution of L792G SEQ ID NO:2, a substitution of A739V of SEQ ID NO:2, a substitution of G791M of SEQ ID NO:2, an insertion of A at position 661 of SEQ ID NO:2, a substitution of A788W of SEQ ID NO:2, a substitution of K390R of SEQ ID NO:2, a substitution of A751S of SEQ ID NO:2, a substitution of E385A of SEQ ID NO:2, an insertion of P at position 696 of SEQ ID NO:2, an insertion of M at position 773 of SEQ ID NO:2, a substitution of G695H of SEQ ID NO:2, an insertion of AS at position 793 of SEQ ID NO:2, an insertion of AS at position 795 of SEQ ID NO:2, a substitution of C477R of SEQ ID NO:2, a substitution of C477K of SEQ ID NO:2, a substitution of C479A of SEQ ID NO:2, a substitution of C479L of SEQ ID NO:2, a substitution of I55F of SEQ ID NO:2, a substitution of K210R of SEQ ID NO:2, a substitution of C233S of SEQ ID NO:2, a substitution of D231N of SEQ ID NO:2, a substitution of Q338E of SEQ ID NO:2, a substitution of Q338R of SEQ ID NO:2, a substitution of L379R of SEQ ID NO:2, a substitution of K390R of SEQ ID NO:2, a substitution of L481Q of SEQ ID NO:2, a substitution of F495S of SEQ ID NO:2, a substitution of D600N of SEQ ID NO:2, a substitution of T886K of SEQ ID NO:2, a substitution of A739V of SEQ ID NO:2, a substitution of K460N of SEQ ID NO:2, a substitution of I199F of SEQ ID NO:2, a substitution of G492P of SEQ ID NO:2, a substitution of T153I of SEQ ID NO:2, a substitution of R591I of SEQ ID NO:2, an insertion of AS at position 795 of SEQ ID NO:2, an insertion of AS at position 796 of SEQ ID NO:2, an insertion of L at position 889 of SEQ ID NO:2, a substitution of E121D of SEQ ID NO:2, a substitution of S270W of SEQ ID NO:2, a substitution of E712Q of SEQ ID NO:2, a substitution of K942Q of SEQ ID NO:2, a substitution of E552K of SEQ ID NO:2, a substitution of K25Q of SEQ ID NO:2, a substitution of N47D of SEQ ID NO:2, an insertion of T at position 696 of SEQ ID NO:2, a substitution of L685I of SEQ ID NO:2, a substitution of N880D of SEQ ID NO:2, a substitution of Q102R of SEQ ID NO:2, a substitution of M734K of SEQ ID NO:2, a substitution of A724S of SEQ ID NO:2, a substitution of T704K of SEQ ID NO:2, a substitution of P224K of SEQ ID NO:2, a substitution of K25R of SEQ ID NO:2, a substitution of M29E of SEQ ID NO:2, a substitution of H152D of SEQ ID NO:2, a substitution of S219R of SEQ ID NO:2, a substitution of E475K of SEQ ID NO:2, a substitution of G226R of SEQ ID NO:2, a substitution of A377K of SEQ ID NO:2, a substitution of E480K of SEQ ID NO:2, a substitution of K416E of SEQ ID NO:2, a substitution of H164R of SEQ ID NO:2, a substitution of K767R of SEQ ID NO:2, a substitution of I7F of SEQ ID NO:2, a substitution of M29R of SEQ ID NO:2, a substitution of H435R of SEQ ID NO:2, a substitution of E385Q of SEQ ID NO:2, a substitution of E385K of SEQ ID NO:2, a substitution of I279F of SEQ ID NO:2, a substitution of D489S of SEQ ID NO:2, a substitution of D732N of SEQ ID NO:2, a substitution of A739T of SEQ ID NO:2, a substitution of W885R of SEQ ID NO:2, a substitution of E53K of SEQ ID NO:2, a substitution of A238T of SEQ ID NO:2, a substitution of P283Q of SEQ ID NO:2, a substitution of E292K of SEQ ID NO:2, a substitution of Q628E of SEQ ID NO:2, a substitution of R388Q of SEQ ID NO:2, a substitution of G791M of SEQ ID NO:2, a substitution of L792K of SEQ ID NO:2, a substitution of L792E of SEQ ID NO:2, a substitution of M779N of SEQ ID NO:2, a substitution of G27D of SEQ ID NO:2, a substitution of K955R of SEQ ID NO:2, a substitution of S867R of SEQ ID NO:2, a substitution of R693I of SEQ ID NO:2, a substitution of F189Y of SEQ ID NO:2, a substitution of V635M of SEQ ID NO:2, a substitution of F399L of SEQ ID NO:2, a substitution of E498K of SEQ ID NO:2, a substitution of E386R of SEQ ID NO:2, a substitution of V254G of SEQ ID NO:2, a substitution of P793S of SEQ ID NO:2, a substitution of K188E of SEQ ID NO:2, a substitution of QT945KI of SEQ ID NO:2, a substitution of T620P of SEQ ID NO:2, a substitution of T946P of SEQ ID NO:2, a substitution of TT949PP of SEQ ID NO:2, a substitution of N952T of SEQ ID NO:2, a substitution of K682E of SEQ ID NO:2, a substitution of K975R of SEQ ID NO:2, a substitution of L212P of SEQ ID NO:2, a substitution of E292R of SEQ ID NO:2, a substitution of 1303K of SEQ ID NO:2, a substitution of C349E of SEQ ID NO:2, a substitution of E385P of SEQ ID NO:2, a substitution of E386N of SEQ ID NO:2, a substitution of D387K of SEQ ID NO:2, a substitution of L404K of SEQ ID NO:2, a substitution of E466H of SEQ ID NO:2, a substitution of C477Q of SEQ ID NO:2, a substitution of C477H of SEQ ID NO:2, a substitution of C479A of SEQ ID NO:2, a substitution of D659H of SEQ ID NO:2, a substitution of T806V of SEQ ID NO:2, a substitution of K808S of SEQ ID NO:2, an insertion of AS at position 797 of SEQ ID NO:2, a substitution of V959M of SEQ ID NO:2, a substitution of K975Q of SEQ ID NO:2, a substitution of W974G of SEQ ID NO:2, a substitution of A708Q of SEQ ID NO:2, a substitution of V711K of SEQ ID NO:2, a substitution of D733T of SEQ ID NO:2, a substitution of L742W of SEQ ID NO:2, a substitution of V747K of SEQ ID NO:2, a substitution of F755M of SEQ ID NO:2, a substitution of M771A of SEQ ID NO:2, a substitution of M771Q of SEQ ID NO:2, a substitution of W782Q of SEQ ID NO:2, a substitution of G791F, of SEQ ID NO:2 a substitution of L792D of SEQ ID NO:2, a substitution of L792K of SEQ ID NO:2, a substitution of P793Q of SEQ ID NO:2, a substitution of P793G of SEQ ID NO:2, a substitution of Q804A of SEQ ID NO:2, a substitution of Y966N of SEQ ID NO:2, a substitution of Y723N of SEQ ID NO:2, a substitution of Y857R of SEQ ID NO:2, a substitution of S890R of SEQ ID NO:2, a substitution of S932M of SEQ ID NO:2, a substitution of L897M of SEQ ID NO:2, a substitution of R624G of SEQ ID NO:2, a substitution of S603G of SEQ ID NO:2, a substitution of N737S of SEQ ID NO:2, a substitution of L307K of SEQ ID NO:2, a substitution of I658V of SEQ ID NO:2, an insertion of PT at position 688 of SEQ ID NO:2, an insertion of SA at position 794 of SEQ ID NO:2, a substitution of S877R of SEQ ID NO:2, a substitution of N580T of SEQ ID NO:2, a substitution of V335G of SEQ ID NO:2, a substitution of T620S of SEQ ID NO:2, a substitution of W345G of SEQ ID NO:2, a substitution of T280S of SEQ ID NO:2, a substitution of L406P of SEQ ID NO:2, a substitution of A612D of SEQ ID NO:2, a substitution of A751S of SEQ ID NO:2, a substitution of E386R of SEQ ID NO:2, a substitution of V351M of SEQ ID NO:2, a substitution of K210N of SEQ ID NO:2, a substitution of D40A of SEQ ID NO:2, a substitution of E773G of SEQ ID NO:2, a substitution of H207L of SEQ ID NO:2, a substitution of T62A SEQ ID NO:2, a substitution of T287P of SEQ ID NO:2, a substitution of T832A of SEQ ID NO:2, a substitution of A893S of SEQ ID NO:2, an insertion of V at position 14 of SEQ ID NO:2, an insertion of AG at position 13 of SEQ ID NO:2, a substitution of R11V of SEQ ID NO:2, a substitution of R12N of SEQ ID NO:2, a substitution of R13H of SEQ ID NO:2, an insertion of Y at position 13 of SEQ ID NO:2, a substitution of R12L of SEQ ID NO:2, an insertion of Q at position 13 of SEQ ID NO:2, an substitution of V15S of SEQ ID NO:2 and an insertion of D at position 17 of SEQ ID NO:2. In some embodiments, the at least two amino acid changes to a reference CasX protein are selected from the amino acid changes disclosed in the sequences of Table 3. In some embodiments, a CasX variant comprises any combination of the foregoing embodiments of this paragraph.

[0234] In some embodiments, a CasX variant protein comprises more than one substitution, insertion and/or deletion of a reference CasX protein amino acid sequence. In some embodiments, a CasX variant protein comprises a substitution of S794R and a substitution of Y797L of SEQ ID NO:2. In some embodiments, a CasX variant protein comprises a substitution of K416E and a substitution of A708K of SEQ ID NO:2. In some embodiments, a CasX variant protein comprises a substitution of A708K and a deletion of P793 of SEQ ID NO:2. In some embodiments, a CasX variant protein comprises a deletion of P793 and an insertion of AS at position 795 SEQ ID NO:2. In some embodiments, a CasX variant protein comprises a substitution of Q367K and a substitution of I425S of SEQ ID NO:2. In some embodiments, a CasX variant protein comprises a substitution of A708K, a deletion of P position 793 and a substitution A793V of SEQ ID NO:2. In some embodiments, a CasX variant protein comprises a substitution of Q338R and a substitution of A339E of SEQ ID NO:2. In some embodiments, a CasX variant protein comprises a substitution of Q338R and a substitution of A339K of SEQ ID NO:2. In some embodiments, a CasX variant protein comprises a substitution of S507G and a substitution of G508R of SEQ ID NO:2. In some embodiments, a CasX variant protein comprises a substitution of L379R, a substitution of A708K and a deletion of P at position 793 of SEQ ID NO:2. In some embodiments, a CasX variant protein comprises a substitution of C477K, a substitution of A708K and a deletion of P at position 793 of SEQ ID NO:2. In some embodiments, a CasX variant protein comprises a substitution of L379R, a substitution of C477K, a substitution of A708K and a deletion of P at position of 793 of SEQ ID NO:2. In some embodiments, a CasX variant protein comprises a substitution of L379R, a substitution of A708K, a deletion of P at position 793 and a substitution A739V of SEQ ID NO:2. In some embodiments, a CasX variant protein comprises a substitution of C477K, a substitution of A708K, a deletion of P at position 793 and a substitution of A739V of SEQ ID NO:2. In some embodiments, a CasX variant protein comprises a substitution of L379R, a substitution of C477K, a substitution of A708K, a deletion of P at position 793 and a substitution of A739V of SEQ ID NO:2. In some embodiments, a CasX variant protein comprises a substitution of L379R, a substitution of A708K, a deletion of P at position 793 and a substitution of M779N of SEQ ID NO:2. In some embodiments, a CasX variant protein comprises a substitution of L379R, a substitution of A708K, a deletion of P at position 793 and a substitution of M771N of SEQ ID NO:2. In some embodiments, a CasX variant protein comprises a substitution of L379R, a substitution of 708K, a deletion of P at position 793 and a substitution of D489S of SEQ ID NO:2. In some embodiments, a CasX variant protein comprises a substitution of L379R, a substitution of A708K, a deletion of P at position 793 and a substitution of A739T of SEQ ID NO:2. In some embodiments, a CasX variant protein comprises a substitution of L379R, a substitution of A708K, a deletion of P at position 793 and a substitution of D732N of SEQ ID NO:2. In some embodiments, a CasX variant protein comprises a substitution of L379R, a substitution of A708K, a deletion of P at position 793 and a substitution of G791M of SEQ ID NO:2. In some embodiments, a CasX variant protein comprises a substitution of L379R, a substitution of 708K, a deletion of P at position 793 and a substitution of Y797L of SEQ ID NO:2. In some embodiments, a CasX variant protein comprises a substitution of L379R, a substitution of C477K, a substitution of A708K, a deletion of P at position 793 and a substitution of M779N of SEQ ID NO:2. In some embodiments, a CasX variant protein comprises a substitution of L379R, a substitution of C477K, a substitution of A708K, a deletion of P at position 793 and a substitution of M771N of SEQ ID NO:2. In some embodiments, a CasX variant protein comprises a substitution of L379R, a substitution of C477K, a substitution of A708K, a deletion of P at position 793 and a substitution of D489S of SEQ ID NO:2. In some embodiments, a CasX variant protein comprises a substitution of L379R, a substitution of C477K, a substitution of A708K, a deletion of P at position 793 and a substitution of A739T of SEQ ID NO:2. In some embodiments, a CasX variant protein comprises a substitution of L379R, a substitution of C477K, a substitution of A708K, a deletion of P at position 793 and a substitution of D732N of SEQ ID NO:2. In some embodiments, a CasX variant protein comprises a substitution of L379R, a substitution of C477K, a substitution of A708K, a deletion of P at position 793 and a substitution of G791M of SEQ ID NO:2. In some embodiments, a CasX variant protein comprises a substitution of L379R, a substitution of C477K, a substitution of A708K, a deletion of P at position 793 and a substitution of Y797L of SEQ ID NO:2. In some embodiments, a CasX variant protein comprises a substitution of L379R, a substitution of C477K, a substitution of A708K, a deletion of P at position 793 and a substitution of T620P of SEQ ID NO:2. In some embodiments, a CasX variant protein comprises a substitution of A708K, a deletion of P at position 793 and a substitution of E386S of SEQ ID NO:2. In some embodiments, a CasX variant protein comprises a substitution of E386R, a substitution of F399L and a deletion of P at position 793 of SEQ ID NO:2. In some embodiments, a CasX variant protein comprises a substitution of R581I and A739V of SEQ ID NO:2. In some embodiments, a CasX variant comprises any combination of the foregoing embodiments of this paragraph.

[0235] In some embodiments, a CasX variant protein comprises more than one substitution, insertion and/or deletion of a reference CasX protein amino acid sequence. In some embodiments, a CasX variant protein comprises a substitution of A708K, a deletion of P at position 793 and a substitution of A739V of SEQ ID NO:2. In some embodiments, a CasX variant protein comprises a substitution of L379R, a substitution of A708K and a deletion of P at position 793 of SEQ ID NO:2. In some embodiments, a CasX variant protein comprises a substitution of C477K, a substitution of A708K and a deletion of P at position 793 of SEQ ID NO:2. In some embodiments, a CasX variant protein comprises a substitution of L379R, a substitution of C477K, a substitution of A708K and a deletion of P at position 793 of SEQ ID NO:2. In some embodiments, a CasX variant protein comprises a substitution of L379R, a substitution of A708K, a deletion of P at position 793 and a substitution of A739V of SEQ ID NO:2. In some embodiments, a CasX variant protein comprises a substitution of C477K, a substitution of A708K, a deletion of P at position 793 and a substitution of A739 of SEQ ID NO:2. In some embodiments, a CasX variant protein comprises a substitution of L379R, a substitution of C477K, a substitution of A708K, a deletion of P at position 793 and a substitution of A739V of SEQ ID NO:2. In some embodiments, a CasX variant protein comprises a substitution of L379R, a substitution of C477K, a substitution of A708K, a deletion of P at position 793 and a substitution of T620P of SEQ ID NO:2. In some embodiments, a CasX variant protein comprises a substitution of M771A of SEQ ID NO:2. In some embodiments, a CasX variant protein comprises a substitution of L379R, a substitution of A708K, a deletion of P at position 793 and a substitution of D732N of SEQ ID NO:2. In some embodiments, a CasX variant comprises any combination of the foregoing embodiments of this paragraph.

[0236] In some embodiments, a CasX variant protein comprises a substitution of W782Q of SEQ ID NO:2. In some embodiments, a CasX variant protein comprises a substitution of M771Q of SEQ ID NO:2. In some embodiments, a CasX variant protein comprises a substitution of R458I and a substitution of A739V of SEQ ID NO:2. In some embodiments, a CasX variant protein comprises a substitution of L379R, a substitution of A708K, a deletion of P at position 793 and a substitution of M771N of SEQ ID NO:2. In some embodiments, a CasX variant protein comprises a substitution of L379R, a substitution of A708K, a deletion of P at position 793 and a substitution of A739T of SEQ ID NO:2. In some embodiments, a CasX variant protein comprises a substitution of L379R, a substitution of C477K, a substitution of A708K, a deletion of P at position 793 and a substitution of D489S of SEQ ID NO:2. In some embodiments, a CasX variant protein comprises a substitution of L379R, a substitution of C477K, a substitution of A708K, a deletion of P at position 793 and a substitution of D732N of SEQ ID NO:2. In some embodiments, a CasX variant protein comprises a substitution of V711K of SEQ ID NO:2. In some embodiments, a CasX variant protein comprises a substitution of L379R, a substitution of C477K, a substitution of A708K, a deletion of P at position 793 and a substitution of Y797L of SEQ ID NO:2. In some embodiments, a CasX variant protein comprises a substitution of L379R, a substitution of A708K and a deletion of P at position 793 of SEQ ID NO:2. In some embodiments, a CasX variant protein comprises a substitution of L379R, a substitution of C477K, a substitution of A708K, a deletion of P at position 793 and a substitution of M771N of SEQ ID NO:2. In some embodiments, a CasX variant protein comprises a substitution of A708K, a substitution of P at position 793 and a substitution of E386S of SEQ ID NO:2. In some embodiments, a CasX variant protein comprises a substitution of L379R, a substitution of C477K, a substitution of A708K and a deletion of P at position 793 of SEQ ID NO:2. In some embodiments, a CasX variant protein comprises a substitution of L792D of SEQ ID NO:2. In some embodiments, a CasX variant protein comprises a substitution of G791F of SEQ ID NO:2. In some embodiments, a CasX variant protein comprises a substitution of A708K, a deletion of P at position 793 and a substitution of A739V of SEQ ID NO:2. In some embodiments, a CasX variant protein comprises a substitution of L379R, a substitution of A708K, a deletion of P at position 793 and a substitution of A739V of SEQ ID NO:2. In some embodiments, a CasX variant protein comprises a substitution of C477K, a substitution of A708K and a substitution of P at position 793 of SEQ ID NO:2. In some embodiments, a CasX variant protein comprises a substitution of L249I and a substitution of M771N of SEQ ID NO:2. In some embodiments, a CasX variant protein comprises a substitution of V747K of SEQ ID NO:2. In some embodiments, a CasX variant protein comprises a substitution of L379R, a substitution of C477, a substitution of A708K, a deletion of P at position 793 and a substitution of M779N of SEQ ID NO:2. In some embodiments, a CasX variant protein comprises a substitution of F755M. In some embodiments, a CasX variant comprises any combination of the foregoing embodiments of this paragraph.

[0237] In some embodiments, a CasX variant protein comprises at least one modification compared to the reference CasX sequence of SEQ ID NO:2, wherein the at least one modification is selected from one or more of: an amino acid substitution of L379R; an amino acid substitution of A708K; an amino acid substitution of T620P; an amino acid substitution of E385P; an amino acid substitution of Y857R; an amino acid substitution of I658V; an amino acid substitution of F399L; an amino acid substitution of Q252K; and an amino acid deletion of [P793]. In some embodiments, a CasX variant protein comprises at least one modification compared to the reference CasX sequence of SEQ ID NO:2, wherein the at least one modification is selected from one or more of: an amino acid substitution of L379R; an amino acid substitution of A708K; an amino acid substitution of T620P; an amino acid substitution of E385P; an amino acid substitution of Y857R; an amino acid substitution of I658V; an amino acid substitution of F399L; an amino acid substitution of Q252K; an amino acid substitution of L404K; and an amino acid deletion of [P793]. In other embodiments, a CasX variant protein comprises any combination of the foregoing substitutions or deletions compared to the reference CasX sequence of SEQ ID NO:2. In other embodiments, the CasX variant protein can, in addition to the foregoing substitutions or deletions, further comprise a substitution of an NTSB and/or a helical 1b domain from the reference CasX of SEQ ID NO:1.

[0238] In some embodiments, the CasX variant protein comprises between 400 and 2000 amino acids, between 500 and 1500 amino acids, between 700 and 1200 amino acids, between 800 and 1100 amino acids, or between 900 and 1000 amino acids.

[0239] In some embodiments, the CasX variant protein comprises one or more modifications in a region of non-contiguous residues that form a channel in which gNA:target DNA complexing occurs. In some embodiments, the CasX variant protein comprises one or more modifications comprising a region of non-contiguous residues that form an interface which binds with the gNA. For example, in some embodiments of a reference CasX protein, the helical I, helical II and OBD domains all contact or are in proximity to the gNA:target DNA complex, and one or more modifications to non-contiguous residues within any of these domains may improve function of the CasX variant protein.

[0240] In some embodiments, the CasX variant protein comprises one or more modifications in a region of non-contiguous residues that form a channel which binds with the non-target strand DNA. For example, a CasX variant protein can comprise one or more modifications to non-contiguous residues of the NTSBD. In some embodiments, the CasX variant protein comprises one or more modifications in a region of non-contiguous residues that form an interface which binds with the PAM. For example, a CasX variant protein can comprise one or more modifications to non-contiguous residues of the helical I domain or OBD. In some embodiments, the CasX variant protein comprises one or more modifications comprising a region of non-contiguous surface-exposed residues. As used herein, “surface-exposed residues” refers to amino acids on the surface of the CasX protein, or amino acids in which at least a portion of the amino acid, such as the backbone or a part of the side chain is on the surface of the protein. Surface exposed residues of cellular proteins such as CasX, which are exposed to an aqueous intracellular environment, are frequently selected from positively charged hydrophilic amino acids, for example arginine, asparagine, aspartate, glutamine, glutamate, histidine, lysine, serine, and threonine. Thus, for example, in some embodiments of the variants provided herein, a region of surface exposed residues comprises one or more insertions, deletions, or substitutions compared to a reference CasX protein. In some embodiments, one or more positively charged residues are substituted for one or more other positively charged residues, or negatively charged residues, or uncharged residues, or any combinations thereof. In some embodiments, one or more amino acids residues for substitution are near bound nucleic acid, for example residues in the RuvC domain or helical I domain that contact target DNA, or residues in the OBD or helical II domain that bind the gNA, can be substituted for one or more positively charged or polar amino acids.

[0241] In some embodiments, the CasX variant protein comprises one or more modifications in a region of non-contiguous residues that form a core through hydrophobic packing in a domain of the reference CasX protein. Without wishing to be bound by any theory, regions that form cores through hydrophobic packing are rich in hydrophobic amino acids such as valine, isoleucine, leucine, methionine, phenylalanine, tryptophan, and cysteine. For example, in some reference CasX proteins, RuvC domains comprise a hydrophobic pocket adjacent to the active site. In some embodiments, between 2 to 15 residues of the region are charged, polar, or base-stacking. Charged amino acids (sometimes referred to herein as residues) may include, for example, arginine, lysine, aspartic acid, and glutamic acid, and the side chains of these amino acids may form salt bridges provided a bridge partner is also present. Polar amino acids may include, for example, glutamine, asparagine, histidine, serine, threonine, tyrosine, and cysteine. Polar amino acids can, in some embodiments, form hydrogen bonds as proton donors or acceptors, depending on the identity of their side chains. As used herein, “base-stacking” includes the interaction of aromatic side chains of an amino acid residue (such as tryptophan, tyrosine, phenylalanine, or histidine) with stacked nucleotide bases in a nucleic acid. Any modification to a region of non-contiguous amino acids that are in close spatial proximity to form a functional part of the CasX variant protein is envisaged as within the scope of the disclosure.

[0242] i. CasX Variant Proteins with Domains from Multiple Source Proteins

[0243] In certain embodiments, the disclosure provides a chimeric CasX protein comprising protein domains from two or more different CasX proteins, such as two or more reference CasX proteins, or two or more CasX variant protein sequences as described herein. As used herein, a “chimeric CasX protein” refers to a CasX containing at least two domains isolated or derived from different sources, such as two naturally occurring proteins, which may, in some embodiments, be isolated from different species. For example, in some embodiments, a chimeric CasX protein comprises a first domain from a first CasX protein and a second domain from a second, different CasX protein. In some embodiments, the first domain can be selected from the group consisting of the NTSB, TSL, Helical I, Helical II, OBD and RuvC domains. In some embodiments, the second domain is selected from the group consisting of the NTSB, TSL, Helical I, Helical II, OBD and RuvC domains with the second domain being different from the foregoing first domain. For example, a chimeric CasX protein may comprise an NTSB, TSL, Helical I, Helical II, OBD domains from a CasX protein of SEQ ID NO:2, and a RuvC domain from a CasX protein of SEQ ID NO:1, or vice versa. As a further example, a chimeric CasX protein may comprise an NTSB, TSL, Helical II, OBD and RuvC domain from CasX protein of SEQ ID NO:2, and a Helical I domain from a CasX protein of SEQ ID NO:1, or vice versa. Thus, in certain embodiments, a chimeric CasX protein may comprise an NTSB, TSL, Helical II, OBD and RuvC domain from a first CasX protein, and a Helical I domain from a second CasX protein. In some embodiments of the chimeric CasX proteins, the domains of the first CasX protein are derived from the sequences of SEQ ID NO:1, SEQ ID NO:2 or SEQ ID NO:3, and the domains of the second CasX protein are derived from the sequences of SEQ ID NO:1, SEQ ID NO:2 or SEQ ID NO:3, and the first and second CasX proteins are not the same. In some embodiments, domains of the first CasX protein comprise sequences derived from SEQ ID NO:1 and domains of the second CasX protein comprise sequences derived from SEQ ID NO:2. In some embodiments, domains of the first CasX protein comprise sequences derived from SEQ ID NO:1 and domains of the second CasX protein comprise sequences derived from SEQ ID NO:3. In some embodiments, domains of the first CasX protein comprise sequences derived from SEQ ID NO:2 and domains of the second CasX protein comprise sequences derived from SEQ ID NO:3. In some embodiments, the CasX variant is selected of group consisting of CasX variants comprising SEQ ID NOS: 49-160.

[0244] In some embodiments, a CasX variant protein comprises at least one chimeric domain comprising a first part from a first CasX protein and a second part from a second, different CasX protein. As used herein, a “chimeric domain” refers to a domain containing at least two parts isolated or derived from different sources, such as two naturally occurring proteins or portions of domains from two reference CasX proteins. The at least one chimeric domain can be any of the NTSB, TSL, helical I, helical II, OBD or RuvC domains as described herein. In some embodiments, the first portion of a CasX domain comprises a sequence of SEQ ID NO:1 and the second portion of a CasX domain comprises a sequence of SEQ ID NO:2. In some embodiments, the first portion of the CasX domain comprises a sequence of SEQ ID NO:1 and the second portion of the CasX domain comprises a sequence of SEQ ID NO:3. In some embodiments, the first portion of the CasX domain comprises a sequence of SEQ ID NO:2 and the second portion of the CasX domain comprises a sequence of SEQ ID NO:3. In some embodiments, the at least one chimeric domain comprises a chimeric RuvC domain. As an example of the foregoing, the chimeric RuvC domain comprises amino acids 661 to 824 of SEQ ID NO:1 and amino acids 922 to 978 of SEQ ID NO:2. As an alternative example of the foregoing, a chimeric RuvC domain comprises amino acids 648 to 812 of SEQ ID NO:2 and amino acids 935 to 986 of SEQ ID NO:1. In some embodiments, a CasX protein comprises a first domain from a first CasX protein and a second domain from a second CasX protein, and at least one chimeric domain comprising at least two parts isolated from different CasX proteins using the approach of the embodiments described in this paragraph. In the foregoing embodiments, the chimeric CasX proteins having domains or portions of domains derived from SEQ ID NOS:1, 2 and 3, can further comprise amino acid insertions, deletions, or substitutions of any of the embodiments disclosed herein.

[0245] In some embodiments, a CasX variant protein comprises a sequence of SEQ ID NOS: 49-160, 237-239, 243-246, 251-263 or 273-281 as set forth in Tables 3, 6, 7, 8, or 10. In some embodiments, a CasX variant protein consists of a sequence of SEQ ID NOS: 49-160 as set forth in Table 3. In other embodiments, a CasX variant protein comprises a sequence at least 60% identical, at least 65% identical, at least 70% identical, at least 75% identical, at least 80% identical, at least 81% identical, at least 82% identical, at least 83% identical, at least 84% identical, at least 85% identical, at least 86% identical, at least 86% identical, at least 87% identical, at least 88% identical, at least 89% identical, at least 89% identical, at least 90% identical, at least 91% identical, at least 92% identical, at least 93% identical, at least 94% identical, at least 95% identical, at least 96% identical, at least 97% identical, at least 98% identical, at least 99% identical, at least 99.5% identical to a sequence of SEQ ID NOS: 49-160, 237-239, 243-246, 251-263 or 273-281. In other embodiments, a CasX variant protein comprises a sequence of SEQ ID NOS: 49-160 as set forth in Table 3, and further comprises one or more NLS disclosed herein at or near either the N-terminus, the C-terminus, or both. It will be understood that in some cases, the N-terminal methionine of the CasX variants of the Tables is removed from the expressed CasX variant during post-translational modification.

TABLE 3
CasX Variant Sequences

| Description* | Amino Acid Sequence |
|---|---|
| TSL, Helical I, | MQEIKRINKIRRRLVKDSNTKKAGKTGPMKTLLVRVMTPDLRERLENLRKK |
| Helical II, | PENIPQPISNTSRANLNKLLTDYTEMKKAILHVYWEEFQKDPVGLMSRVAQ |
| OBD and | PASKKIDQNKLKPEMDEKGNLTTAGFACSQCGQPLFVYKLEQVSEKGKAYT |
| RuvC | NYFGRCNVAEHEKLILLAQLKPEKDSDEAVTYSLGKFGQRALDFYSIHVTR |
| domains | ESNHPVKPLEQIGGNSCASGPVGKALSDACMGAVASFLTKYQDIILEHQKV |
| from SEQ ID | IKKNEKRLANLKDIASANGLAFPKITLPPQPHTKEGIEAYNNVVAQIVIWV |
| NO: 2 and an | NLNLWQKLKIGRDEAKPLQRLKGFPSFPLVERQANEVDWWDMVCNVKKLIN |
| NTSB | EKKEDGKVFWQNLAGYKRQEALRPYLSSEEDRKKGKKFARYQFGDLLLHLE |
| domain from | KKHGEDWGKVYDEAWERIDKKVEGLSKHIKLEEERRSEDAQSKAALTDWLR |
| SEQ ID | AKASFVIEGLKEADKDEFCRCELKLQKWYGDLRGKPFAIEAENSILDISGF |
| NO: 1 | SKQYNCAFIWQKDGVKKLNLYLIINYFKGGKLRFKKIKPEAFEANRFYTVI |
| | NKKSGEIVPMEVNFNFDDPNLIILPLAFGKRQGREFIWNDLLSLETGSLKL |
| | ANGRVIEKTLYNRRTRQDEPALFVALTFERREVLDSSNIKPMNLIGIDRGE |
| | NIPAVIALTDPEGCPLSRFKDSLGNPTHILRIGESYKEKQRTIQAKKEVEQ |
| | RRAGGYSRKYASKAKNLADDMVRNTARDLLYYAVTQDAMLIFENLSRGFGR |
| | QGKRTFMAERQYTRMEDWLTAKLAYEGLSKTYLSKTLAQYTSKTCSNCGFT |
| | ITSADYDRVLEKLKKTATGWMTTINGKELKVEGQITYYNRYKRQNVVKDLS |
| | VELDRLSEESVNNDISSWTKGRSGEALSLLKKRFSHRPVQEKFVCLNCGFE |
| | THADEQAALNIARSWLFLRSQEYKKYQTNKTTGNTDKRAFVETWQSFYRKK |
| | LKEVWKPAV (SEQ ID NO: 49) |
| NTSB, | MQEIKRINKIRRRLVKDSNTKKAGKTGPMKTLLVRVMTPDLRERLENLRKK |
| Helical I, | PENIPQPISNTSRANLNKLLTDYTEMKKAILHVYWEEFQKDPVGLMSRVAQ |
| Helical II, | PAPKNIDQRKLIPVKDGNERLTSSGFACSQCCQPLYVYKLEQVNDKGKPHT |
| OBD and | NYFGRCNVSEHERLILLSPHKPEANDELVTYSLGKFGQRALDFYSIHVTRE |
| RuvC | SNHPVKPLEQIGGNSCASGPVGKALSDACMGAVASFLTKYQDIILEHQKVI |
| domains | KKNEKRLANLKDIASANGLAFPKITLPPQPHTKEGIEAYNNVVAQIVIWVN |
| from SEQ ID | LNLWQKLKIGRDEAKPLQRLKGFPSFPLVERQANEVDWWDMVCNVKKLINE |
| NO: 2 and a | KKEDGKVFWQNLAGYKRQEALRPYLSSEEDRKKGKKFARYQFGDLLLHLEK |
| TSL domain | KHGEDWGKVYDEAWERIDKKVEGLSKHIKLEEERRSEDAQSKAALTDWLRA |
| from SEQ ID | KASFVIEGLKEADKDEFCRCELKLQKWYGDLRGKPFAIEAENSILDISGFS |
| NO: 1. | KQYNCAFIWQKDGVKKLNLYLIINYFKGGKLRFKKIKPEAFEANRFYTVIN |
| | KKSGEIVPMEVNFNFDDPNLIILPLAFGKRQGREFIWNDLLSLETGSLKLA |
| | NGRVIEKTLYNRRTRQDEPALFVALTFERREVLDSSNIKPMNLIGIDRGEN |
| | IPAVIALTDPEGCPLSRFKDSLGNPTHILRIGESYKEKQRTIQAKKEVEQR |
| | RAGGYSRKYASKAKNLADDMVRNTARDLLYYAVTQDAMLIFENLSRGFGRQ |
| | GKRTFMAERQYTRMEDWLTAKLAYEGLSKTYLSKTLAQYTSKTCSNCGFTI |
| | TTADYDGMLVRLKKTSDGWATTLNNKELKAEGQITYYNRYKRQTVEKELSA |
| | ELDRLSEESGNNDISKWTKGRRDEALFLLKKRFSHRPVQEQFVCLDCGHEV |
| | HADEQAALNIARSWLFLRSQEYKKYQTNKTTGNTDKRAFVETWQSFYRKKL |
| | KEVWKPAV (SEQ ID NO: 50) |
| TSL, Helical I, | MEKRINKIRKKLSADNATKPVSRSGPMKTLLVRVMTDDLKKRLEKRRKKPE |
| Helical II, | VMPQVISNNAANNLRMLLDDYTKMKEAILQVYWQEFKDDHVGLMCKFAQPA |
| OBD and | PKNIDQRKLIPVKDGNERLTSSGFACSQCCQPLYVYKLEQVNDKGKPHTNY |
| RuvC | FGRCNVSEHERLILLSPHKPEANDELVTYSLGKFGQRALDFYSIHVTKEST |
| domains | HPVKPLAQIAGNRYASGPVGKALSDACMGTIASFLSKYQDIIIEHQKVVKG |
| from SEQ ID | NQKRLESLRELAGKENLEYPSVTLPPQPHTKEGVDAYNEVIARVRMWVNLN |
| NO: 1 and an | LWQKLKLSRDDAKPLLRLKGFPSFPVVERRENEVDWWNTINEVKKLIDAKR |
| NTSB | DMGRVFWSGVTAEKRNTILEGYNYLPNENDHKKREGSLENPKKPAKRQFGD |
| domain from | LLLYLEKKYAGDWGKVFDEAWERIDKKIAGLTSHIEREEARNAEDAQSKAV |
| SEQ ID | LTDWLRAKASFVLERLKEMDEKEFYACEIQLQKWYGDLRGNPFAVEAENRV |
| NO: 2 | VDISGFSIGSDGHSIQYRNLLAWKYLENGKREFYLLMNYGKKGRIRFTDGT |
| | DIKKSGKWQGLLYGGGKAKVIDLTFDPDDEQLIILPLAFGTRQGREFIWND |
| | LLSLETGLIKLANGRVIEKTIYNKKIGRDEPALFVALTFERREVVDPSNIK |
| | PVNLIGVDRGENIPAVIALTDPEGCPLPEFKDSSGGPTDILRIGEGYKEKQ |
| | RAIQAAKEVEQRRAGGYSRKFASKSRNLADDMVRNSARDLFYHAVTHDAVL |
| | VFENLSRGFGRQGKRTFMTERQYTKMEDWLTAKLAYEGLTSKTYLSKTLAQ |
| | YTSKTCSNCGFTITTADYDGMLVRLKKTSDGWATTLNNKELKAEGQITYYN |
| | RYKRQTVEKELSAELDRLSEESGNNDISKWTKGRRDEALFLLKKRFSHRPV |
| | QEQFVCLDCGHEVHADEQAALNIARSWLFLNSNSTEFKSYKSGKQPFVGAW |
| | QAFYKRRLKEVWKPNA (SEQ ID NO: 51) |
| NTSB, | MEKRINKIRKKLSADNATKPVSRSGPMKTLLVRVMTDDLKKRLEKRRKKPE |
| Helical I, | VMPQVISNNAANNLRMLLDDYTKMKEAILQVYWQEFKDDHVGLMCKFAQPA |
| Helical II, | SKKIDQNKLKPEMDEKGNLTTAGFACSQCGQPLFVYKLEQVSEKGKAYTNY |
| OBD and | FGRCNVAEHEKLILLAQLKPEKDSDEAVTYSLGKFGQRALDFYSIHVTKES |
| RuvC | THPVKPLAQIAGNRYASGPVGKALSDACMGTIASFLSKYQDIIIEHQKVVK |
| domains | GNQKRLESLRELAGKENLEYPSVTLPPQPHTKEGVDAYNEVIARVRMWVNL |
| from SEQ ID | NLWQKLKLSRDDAKPLLRLKGFPSFPVVERRENEVDWWNTINEVKKLIDAK |
| NO: 1 and an | RDMGRVFWSGVTAEKRNTILEGYNYLPNENDHKKREGSLENPKKPAKRQFG |
| TSL domain | DLLLYLEKKYAGDWGKVFDEAWERIDKKIAGLTSHIEREEARNAEDAQSKA |
| from SEQ ID | VLTDWLRAKASFVLERLKEMDEKEFYACEIQLQKWYGDLRGNPFAVEAENR |
| NO: 2. | VVDISGFSIGSDGHSIQYRNLLAWKYLENGKREFYLLMNYGKKGRIRFTDG |
| | TDIKKSGKWQGLLYGGGKAKVIDLTFDPDDEQLIILPLAFGTRQGREFIWN |
| | DLLSLETGLIKLANGRVIEKTIYNKKIGRDEPALFVALTFERREVVDPSNI |
| | KPVNLIGVDRGENIPAVIALTDPEGCPLPEFKDSSGGPTDILRIGEGYKEK |
| | QRAIQAAKEVEQRRAGGYSRKFASKSRNLADDMVRNSARDLFYHAVTHDAV |
| | LVFENLSRGFGRQGKRTFMTERQYTKMEDWLTAKLAYEGLTSKTYLSKTLA |
| | QYTSKTCSNCGFTITSADYDRVLEKLKKTATGWMTTINGKELKVEGQITYY |
| | NRYKRQNVVKDLSVELDRLSEESVNNDISSWTKGRSGEALSLLKKRFSHRP |
| | VQEKFVCLNCGFETHADEQAALNIARSWLFLNSNSTEFKSYKSGKQPFVGA |
| | WQAFYKRRLKEVWKPNA (SEQ ID NO: 52) |
| NTSB, TSL, | MQEIKRINKIRRRLVKDSNTKKAGKTGPMKTLLVRVMTPDLRERLENLRKK |
| Helical I, | PENIPQPISNTSRANLNKLLTDYTEMKKAILHVYWEEFQKDPVGLMSRVAQ |
| Helical II | PAPKNIDQRKLIPVKDGNERLTSSGFACSQCCQPLYVYKLEQVNDKGKPHT |
| and OBD | NYFGRCNVSEHERLILLSPHKPEANDELVTYSLGKFGQRALDFYSIHVTRE |
| domains | SNHPVKPLEQIGGNSCASGPVGKALSDACMGAVASFLTKYQDIILEHQKVI |
| SEQ ID | KKNEKRLANLKDIASANGLAFPKITLPPQPHTKEGIEAYNNVVAQIVIWVN |
| NO: 2 and an | LNLWQKLKIGRDEAKPLQRLKGFPSFPLVERQANEVDWWDMVCNVKKLINE |
| exogenous | KKEDGKVFWQNLAGYKRQEALRPYLSSEEDRKKGKKFARYQFGDLLLHLEK |
| RuvC | KHGEDWGKVYDEAWERIDKKVEGLSKHIKLEEERRSEDAQSKAALTDWLRA |
| domain or a | KASFVIEGLKEADKDEFCRCELKLQKWYGDLRGKPFAIEAENSILDISGFS |
| portion | KQYNCAFIWQKDGVKKLNLYLIINYFKGGKLRFKKIKPEAFEANRFYTVIN |
| thereof from | KKSGEIVPMEVNFNFDDPNLIILPLAFGKRQGREFIWNDLLSLETGSLKLA |
| a second | NGRVIEKTLYNRRTRQDEPALFVALTFERREVLDSSNIKPVNLIGVDRGEN |
| CasX | IPAVIALTDPEGCPLPEFKDSSGGPTDILRIGEGYKEKQRAIQAAKEVEQR |
| protein. | RAGGYSRKFASKSRNLADDMVRNSARDLFYHAVTHDAVLVFENLSRGFGRQ |
| | GKRTFMTERQYTKMEDWLTAKLAYEGLTSKTYLSKTLAQYTSKTCSNCGFT |
| | ITSADYDRVLEKLKKTATGWMTTINGKELKVEGQITYYNRYKRQNVVKDLS |
| | VELDRLSEESVNNDISSWTKGRSGEALSLLKKRFSHRPVQEKFVCLNCGFE |
| | THA (SEQ ID NO: 53) |
| | MQEIKRINKIRRRLVKDSNTKKAGKTGPMKTLLVRVMTPDLRERLENLRKK |
| | PENIPQPISNTSRANLNKLLTDYTEMKKAILHVYWEEFQKDPVGLMSRVAQ |
| | PAPKNIDQRKLIPVKDGNERLTSSGFACSQCCQPLYVYKLEQVNDKGKPHT |
| | NYFGRCNVSEHERLILLSPHKPEANDELVTYSLGKFGQRALDFYSIHVTRE |
| | SNHPVKPLEQIGGNSCASGPVGKALSDACMGAVASFLTKYQDIILEHQKVI |
| | KKNEKRLANLKDIASANGLAFPKITLPPQPHTKEGIEAYNNVVAQIVIWVN |
| | LNLWQKLKIGRDEAKPLQRLKGFPSFPLVERQANEVDWWDMVCNVKKLINE |
| | KKEDGKVFWQNLAGYKRQEALRPYLSSEEDRKKGKKFARYQFGDLLLHLEK |
| | KHGEDWGKVYDEAWERIDKKVEGLSKHIKLEEERRSEDAQSKAALTDWLRA |
| | KASFVIEGLKEADKDEFCRCELKLQKWYGDLRGKPFAIEAENSILDISGFS |
| | KQYNCAFIWQKDGVKKLNLYLIINYFKGGKLRFKKIKPEAFEANRFYTVIN |
| | KKSGEIVPMEVNFNFDDPNLIILPLAFGKRQGREFIWNDLLSLETGSLKLA |
| | NGRVIEKTLYNRRTRQDEPALFVALTFERREVLDSSNIKPMNLIGIDRGEN |
| | IPAVIALTDPEGCPLSRFKDSLGNPTHILRIGESYKEKQRTIQAKKEVEQR |
| | RAGGYSRKYASKAKNLADDMVRNTARDLLYYAVTQDAMLIFENLSRGFGRQ |
| | GKRTFMAERQYTRMEDWLTAKLAYEGLSKTYLSKTLAQYTSKTCSNCGFTI |
| | TSADYDRVLEKLKKTATGWMTTINGKELKVEGQITYYNRYKRONVVKDLSV |
| | ELDRLSEESVNNDISSWTKGRSGEALSLLKKRFSHRPVQEKFVCLNCGFET |
| | HA (SEQ ID NO: 54) |
| NTSB, TSL, | MQEIKRINKIRRRLVKDSNTKKAGKTGPMKTLLVRVMTPDLRERLENLRKK |
| Helical II, | PENIPQPISNNAANNLRMLLDDYTKMKEAILQVYWQEFKDDHVGLMCKFAQ |
| OBD and | PAPKNIDQRKLIPVKDGNERLTSSGFACSQCCQPLYVYKLEQVNDKGKPHT |
| RuvC | NYFGRCNVSEHERLILLSPHKPEANDELVTYSLGKFGQRALDFYSIHVTKE |
| domains | STHPVKPLAQIAGNRYASGPVGKALSDACMGTIASFLSKYQDIIIEHQKVV |
| from SEQ ID | KGNQKRLESLRELAGKENLEYPSVTLPPQPHTKEGVDAYNEVIARVRMWVN |
| NO: 2 and a | LNLWQKLKLSRDDAKPLLRLKGFPSFPLVERQANEVDWWDMVCNVKKLINE |
| Helical I | KKEDGKVFWQNLAGYKRQEALRPYLSSEEDRKKGKKFARYQFGDLLLHLEK |
| domain from | KHGEDWGKVYDEAWERIDKKVEGLSKHIKLEEERRSEDAQSKAALTDWLRA |
| SEQ ID | KASFVIEGLKEADKDEFCRCELKLQKWYGDLRGKPFAIEAENSILDISGFS |
| NO: 1 | KQYNCAFIWQKDGVKKLNLYLIINYFKGGKLRFKKIKPEAFEANRFYTVIN |
| | KKSGEIVPMEVNFNFDDPNLIILPLAFGKRQGREFIWNDLLSLETGSLKLA |
| | NGRVIEKTLYNRRTRQDEPALFVALTFERREVLDSSNIKPMNLIGIDRGEN |
| | IPAVIALTDPEGCPLSRFKDSLGNPTHILRIGESYKEKQRTIQAKKEVEQR |
| | RAGGYSRKYASKAKNLADDMVRNTARDLLYYAVTQDAMLIFENLSRGFGRQ |
| | GKRTFMAERQYTRMEDWLTAKLAYEGLSKTYLSKTLAQYTSKTCSNCGFTI |
| | TSADYDRVLEKLKKTATGWMTTINGKELKVEGQITYYNRYKRQNVVKDLSV |
| | ELDRLSEESVNNDISSWTKGRSGEALSLLKKRFSHRPVQEKFVCLNCGFET |
| | HADEQAALNIARSWLFLRSQEYKKYQTNKTTGNTDKRAFVETWQSFYRKKL |
| | KEVWKPAV (SEQ ID NO: 55) |
| NTSB, TSL, | MQEIKRINKIRRRLVKDSNTKKAGKTGPMKTLLVRVMTPDLRERLENLRKK |
| Helical I, | PENIPQPISNTSRANLNKLLTDYTEMKKAILHVYWEEFQKDPVGLMSRVAQ |
| OBD and | PAPKNIDQRKLIPVKDGNERLTSSGFACSQCCQPLYVYKLEQVNDKGKPHT |
| RuvC | NYFGRCNVSEHERLILLSPHKPEANDELVTYSLGKFGQRALDFYSIHVTRE |
| domains | SNHPVKPLEQIGGNSCASGPVGKALSDACMGAVASFLTKYQDIILEHQKVI |
| from SEQ ID | KKNEKRLANLKDIASANGLAFPKITLPPQPHTKEGIEAYNNVVAQIVIWVN |
| NO: 2 and a | LNLWQKLKIGRDEAKPLQRLKGFPSFPVVERRENEVDWWNTINEVKKLIDA |
| Helical II | KRDMGRVFWSGVTAEKRNTILEGYNYLPNENDHKKREGSLENPKKPAKRQF |
| domain from | GDLLLYLEKKYAGDWGKVFDEAWERIDKKIAGLTSHIEREEARNAEDAQSK |
| SEQ ID | AVLTDWLRAKASFVLERLKEMDEKEFYACEIQLQKWYGDLRGNPFAVEAEN |
| NO: 1 | SILDISGFSKQYNCAFIWQKDGVKKLNLYLIINYFKGGKLRFKKIKPEAFE |
| | ANRFYTVINKKSGEIVPMEVNFNFDDPNLIILPLAFGKRQGREFIWNDLLS |
| | LETGSLKLANGRVIEKTLYNRRTRQDEPALFVALTFERREVLDSSNIKPMN |
| | LIGIDRGENIPAVIALTDPEGCPLSRFKDSLGNPTHILRIGESYKEKQRTI |
| | QAKKEVEQRRAGGYSRKYASKAKNLADDMVRNTARDLLYYAVTQDAMLIFE |
| | NLSRGFGRQGKRTFMAERQYTRMEDWLTAKLAYEGLSKTYLSKTLAQYTSK |
| | TCSNCGFTITSADYDRVLEKLKKTATGWMTTINGKELKVEGQITYYNRYKR |
| | QNVVKDLSVELDRLSEESVNNDISSWTKGRSGEALSLLKKRFSHRPVQEKF |
| | VCLNCGFETHADEQAALNIARSWLFLRSQEYKKYQTNKTTGNTDKRAFVET |
| | WQSFYRKKLKEVWKPAV (SEQ ID NO: 56) |
| NTSB, TSL, | MISNTSRANLNKLLTDYTEMKKAILHVYWEEFQKDPVGLMSRVAQPAPKNI |
| Helical I, | DQRKLIPVKDGNERLTSSGFACSQCCQPLYVYKLEQVNDKGKPHTNYFGRC |
| Helical II | NVSEHERLILLSPHKPEANDELVTYSLGKFGQRALDFYSIHVTRESNHPVK |
| and RuvC | PLEQIGGNSCASGPVGKALSDACMGAVASFLTKYQDIILEHQKVIKKNEKR |
| domains | LANLKDIASANGLAFPKITLPPQPHTKEGIEAYNNVVAQIVIWVNLNLWQK |
| from a first | LKIGRDEAKPLQRLKGFPSFPLVERQANEVDWWDMVCNVKKLINEKKEDGK |
| CasX protein | VFWQNLAGYKRQEALRPYLSSEEDRKKGKKFARYQFGDLLLHLEKKHGEDW |
| and an | GKVYDEAWERIDKKVEGLSKHIKLEEERRSEDAQSKAALTDWLRAKASFVI |
| exogenous | EGLKEADKDEFCRCELKLQKWYGDLRGKPFAIEAENRVVDISGFSIGSDGH |
| OBD or a | SIQYRNLLAWKYLENGKREFYLLMNYGKKGRIRFTDGTDIKKSGKWQGLLY |
| part thereof | GGGKAKVIDLTFDPDDEQLIILPLAFGTRQGREFIWNDLLSLETGLIKLAN |
| from a | GRVIEKTIYNKKIGRDEPALFVALTFERREVVDPSNIKPMNLIGIDRGENI |
| second CasX | PAVIALTDPEGCPLSRFKDSLGNPTHILRIGESYKEKQRTIQAKKEVEQRR |
| protein | AGGYSRKYASKAKNLADDMVRNTARDLLYYAVTQDAMLIFENLSRGFGRQG |
| | KRTFMAERQYTRMEDWLTAKLAYEGLSKTYLSKTLAQYTSKTCSNCGFTIT |
| | SADYDRVLEKLKKTATGWMTTINGKELKVEGQITYYNRYKRQNVVKDLSVE |
| | LDRLSEESVNNDISSWTKGRSGEALSLLKKRFSHRPVQEKFVCLNCGFETH |
| | ADEQAALNIARSWLFLRSQEYKKYQTNKTTGNTDKRAFVETWQSFYRKKLK |
| | EVWKPAV (SEQ ID NO: 57) |
| | MEKRINKIRKKLSADNATKPVSRSGPMKTLLVRVMTDDLKKRLEKRRKKPE |
| | VMPQVISNTSRANLNKLLTDYTEMKKAILHVYWEEFQKDPVGLMSRVAQPA |
| | PKNIDQRKLIPVKDGNERLTSSGFACSQCCQPLYVYKLEQVNDKGKPHTNY |
| | FGRCNVSEHERLILLSPHKPEANDELVTYSLGKFGQRALDFYSIHVTRESN |
| | HPVKPLEQIGGNSCASGPVGKALSDACMGAVASFLTKYQDIILEHQKVIKK |
| | NEKRLANLKDIASANGLAFPKITLPPQPHTKEGIEAYNNVVAQIVIWVNLN |
| | LWQKLKIGRDEAKPLQRLKGFPSFPLVERQANEVDWWDMVCNVKKLINEKK |
| | EDGKVFWQNLAGYKRQEALRPYLSSEEDRKKGKKFARYQFGDLLLHLEKKH |
| | GEDWGKVYDEAWERIDKKVEGLSKHIKLEEERRSEDAQSKAALTDWLRAKA |
| | SFVIEGLKEADKDEFCRCELKLQKWYGDLRGKPFAIEAENSILDISGFSKQ |
| | YNCAFIWQKDGVKKLNLYLIINYFKGGKLRFKKIKPEAFEANRFYTVINKK |
| | SGEIVPMEVNFNFDDPNLIILPLAFGKRQGREFIWNDLLSLETGSLKLANG |
| | RVIEKTLYNRRTRQDEPALFVALTFERREVLDSSNIKPMNLIGIDRGENIP |
| | AVIALTDPEGCPLSRFKDSLGNPTHILRIGESYKEKQRTIQAKKEVEQRRA |
| | GGYSRKYASKAKNLADDMVRNTARDLLYYAVTQDAMLIFENLSRGFGRQGK |
| | RTFMAERQYTRMEDWLTAKLAYEGLSKTYLSKTLAQYTSKTCSNCGFTITS |
| | ADYDRVLEKLKKTATGWMTTINGKELKVEGQITYYNRYKRQNVVKDLSVEL |
| | DRLSEESVNNDISSWTKGRSGEALSLLKKRFSHRPVQEKFVCLNCGFETHA |
| | DEQAALNIARSWLFLRSQEYKKYQTNKTTGNTDKRAFVETWQSFYRKKLKE |
| | VWKPAV (SEQ ID NO: 58) |
| | MQEIKRINKIRRRLVKDSNTKKAGKTGPMKTLLVRVMTPDLRERLENLRKK |
| | PENIPQPISNTSRANLNKLLTDYTEMKKAILHVYWEEFQKDPVGLMSRVAQ |
| | PAPKNIDQRKLIPVKDGNERLTSSGFACSQCCQPLYVYKLEQVNDKGKPHT |
| | NYFGRCNVSEHERLILLSPHKPEANDELVTYSLGKFGQRALDFYSIHVTRE |
| | SNHPVKPLEQIGGNSCASGPVGKALSDACMGAVASFLTKYQDIILEHQKVI |
| | KKNEKRLANLKDIASANGLAFPKITLPPQPHTKEGIEAYNNVVAQIVIWVN |
| | LNLWQKLKIGRDEAKPLQRLKGFPSFPLVERQANEVDWWDMVCNVKKLINE |
| | KKEDGKVFWQNLAGYKRQEALRPYLSSEEDRKKGKKFARYQFGDLLLHLEK |
| | KHGEDWGKVYDEAWERIDKKVEGLSKHIKLEEERRSEDAQSKAALTDWLRA |
| | KASFVIEGLKEADKDEFCRCELKLQKWYGDLRGKPFAIEAENRVVDISGFS |
| | IGSDGHSIQYRNLLAWKYLENGKREFYLLMNYGKKGRIRFTDGTDIKKSGK |
| | WQGLLYGGGKAKVIDLTFDPDDEQLIILPLAFGTRQGREFIWNDLLSLETG |
| | LIKLANGRVIEKTIYNKKIGRDEPALFVALTFERREVVDPSNIKPMNLIGI |
| | DRGENIPAVIALTDPEGCPLSRFKDSLGNPTHILRIGESYKEKQRTIQAKK |
| | EVEQRRAGGYSRKYASKAKNLADDMVRNTARDLLYYAVTQDAMLIFENLSR |
| | GFGRQGKRTFMAERQYTRMEDWLTAKLAYEGLSKTYLSKTLAQYTSKTCSN |
| | CGFTITSADYDRVLEKLKKTATGWMTTINGKELKVEGQITYYNRYKRQNVV |
| | KDLSVELDRLSEESVNNDISSWTKGRSGEALSLLKKRFSHRPVQEKFVCLN |
| | CGFETHADEQAALNIARSWLFLRSQEYKKYQTNKTTGNTDKRAFVETWQSF |
| | YRKKLKEVWKPAV (SEQ ID NO: 59) |
| substitution | MQEIKRINKIRRRLVKDSNTKKAGKTGPMKTLLVRVMTPDLRERLENLRKK |
| of L379R, a | PENIPQPISNTSRANLNKLLTDYTEMKKAILHVYWEEFQKDPVGLMSRVAQ |
| substitution | PAPKNIDQRKLIPVKDGNERLTSSGFACSQCCQPLYVYKLEQVNDKGKPHT |
| of C477K, a | NYFGRCNVSEHERLILLSPHKPEANDELVTYSLGKFGQRALDFYSIHVTRE |
| substitution | SNHPVKPLEQIGGNSCASGPVGKALSDACMGAVASFLTKYQDIILEHQKVI |
| of A708K, a | KKNEKRLANLKDIASANGLAFPKITLPPQPHTKEGIEAYNNVVAQIVIWVN |
| deletion of P | LNLWQKLKIGRDEAKPLQRLKGFPSFPLVERQANEVDWWDMVCNVKKLINE |
| at position | KKEDGKVFWQNLAGYKRQEALRPYLSSEEDRKKGKKFARYQFGDLLLHLEK |
| 793 and a | KHGEDWGKVYDEAWERIDKKVEGLSKHIKLEEERRSEDAQSKAALTDWLRA |
| substitution | KASFVIEGLKEADKDEFKRCELKLQKWYGDLRGKPFAIEAENSILDISGFS |
| ofT620P of | KQYNCAFIWQKDGVKKLNLYLIINYFKGGKLRFKKIKPEAFEANRFYTVIN |
| SEQID | KKSGEIVPMEVNFNFDDPNLIILPLAFGKRQGREFIWNDLLSLETGSLKLA |
| NO:2 | NGRVIEKPLYNRRTRQDEPALFVALTFERREVLDSSNIKPMNLIGIDRGEN |
| | IPAVIALTDPEGCPLSRFKDSLGNPTHILRIGESYKEKQRTIQAKKEVEQR |
| | RAGGYSRKYASKAKNLADDMVRNTARDLLYYAVTQDAMLIFENLSRGFGRQ |
| | GKRTFMAERQYTRMEDWLTAKLAYEGLSKTYLSKTLAQYTSKTCSNCGFTI |
| | TSADYDRVLEKLKKTATGWMTTINGKELKVEGQITYYNRYKRQNVVKDLSV |
| | ELDRLSEESVNNDISSWTKGRSGEALSLLKKRFSHRPVQEKFVCLNCGFET |
| | HADEQAALNIARSWLFLRSQEYKKYQTNKTTGNTDKRAFVETWQSFYRKKL |
| | KEVWKPAV (SEQ ID NO: 60) |
| substitution | MQEIKRINKIRRRLVKDSNTKKAGKTGPMKTLLVRVMTPDLRERLENLRKK |
| of M771A of | PENIPQPISNTSRANLNKLLTDYTEMKKAILHVYWEEFQKDPVGLMSRVAQ |
| SEQ ID | PAPKNIDQRKLIPVKDGNERLTSSGFACSQCCQPLYVYKLEQVNDKGKPHT |
| NO: 2. | NYFGRCNVSEHERLILLSPHKPEANDELVTYSLGKFGQRALDFYSIHVTRE |
| | SNHPVKPLEQIGGNSCASGPVGKALSDACMGAVASFLTKYQDIILEHQKVI |
| | KKNEKRLANLKDIASANGLAFPKITLPPQPHTKEGIEAYNNVVAQIVIWVN |
| | LNLWQKLKIGRDEAKPLQRLKGFPSFPLVERQANEVDWWDMVCNVKKLINE |
| | KKEDGKVFWQNLAGYKRQEALLPYLSSEEDRKKGKKFARYQFGDLLLHLEK |
| | KHGEDWGKVYDEAWERIDKKVEGLSKHIKLEEERRSEDAQSKAALTDWLRA |
| | KASFVIEGLKEADKDEFCRCELKLQKWYGDLRGKPFAIEAENSILDISGFS |
| | KQYNCAFIWQKDGVKKLNLYLIINYFKGGKLREKKIKPEAFEANRFYTVIN |
| | KKSGEIVPMEVNFNFDDPNLIILPLAFGKRQGREFIWNDLLSLETGSLKLA |
| | NGRVIEKTLYNRRTRQDEPALFVALTFERREVLDSSNIKPMNLIGIDRGEN |
| | IPAVIALTDPEGCPLSRFKDSLGNPTHILRIGESYKEKQRTIQAAKEVEQR |
| | RAGGYSRKYASKAKNLADDMVRNTARDLLYYAVTQDAMLIFENLSRGFGRQ |
| | GKRTFAAERQYTRMEDWLTAKLAYEGLPSKTYLSKTLAQYTSKTCSNCGFT |
| | ITSADYDRVLEKLKKTATGWMTTINGKELKVEGQITYYNRYKRQNVVKDLS |
| | VELDRLSEESVNNDISSWTKGRSGEALSLLKKRFSHRPVQEKFVCLNCGFE |
| | THADEQAALNIARSWLFLRSQEYKKYQTNKTTGNTDKRAFVETWQSFYRKK |
| | LKEVWKPA (SEQ ID NO: 61) |
| substitution | MQEIKRINKIRRRLVKDSNTKKAGKTGPMKTLLVRVMTPDLRERLENLRKK |
| of L379R, a | PENIPQPISNTSRANLNKLLTDYTEMKKAILHVYWEEFQKDPVGLMSRVAQ |
| substitution | PAPKNIDQRKLIPVKDGNERLTSSGFACSQCCQPLYVYKLEQVNDKGKPHT |
| of A708K, a | NYFGRCNVSEHERLILLSPHKPEANDELVTYSLGKFGQRALDFYSIHVTRE |
| deletion of P | SNHPVKPLEQIGGNSCASGPVGKALSDACMGAVASFLTKYQDIILEHQKVI |
| at position | KKNEKRLANLKDIASANGLAFPKITLPPQPHTKEGIEAYNNVVAQIVIWVN |
| 793 and a | LNLWQKLKIGRDEAKPLQRLKGFPSFPLVERQANEVDWWDMVCNVKKLINE |
| substitution | KKEDGKVFWQNLAGYKRQEALRPYLSSEEDRKKGKKFARYQFGDLLLHLEK |
| of D732N of | KHGEDWGKVYDEAWERIDKKVEGLSKHIKLEEERRSEDAQSKAALTDWLRA |
| SEQ ID | KASFVIEGLKEADKDEFCRCELKLQKWYGDLRGKPFAIEAENSILDISGFS |
| NO: 2. | KQYNCAFIWQKDGVKKLNLYLIINYFKGGKLRFKKIKPEAFEANRFYTVIN |
| | KKSGEIVPMEVNFNFDDPNLIILPLAFGKRQGREFIWNDLLSLETGSLKLA |
| | NGRVIEKTLYNRRTRQDEPALFVALTFERREVLDSSNIKPMNLIGIDRGEN |
| | IPAVIALTDPEGCPLSRFKDSLGNPTHILRIGESYKEKQRTIQAKKEVEQR |
| | RAGGYSRKYASKAKNLANDMVRNTARDLLYYAVTQDAMLIFENLSRGFGRQ |
| | GKRTFMAERQYTRMEDWLTAKLAYEGLSKTYLSKTLAQYTSKTCSNCGFTI |
| | TSADYDRVLEKLKKTATGWMTTINGKELKVEGQITYYNRYKRQNVVKDLSV |
| | ELDRLSEESVNNDISSWTKGRSGEALSLLKKRFSHRPVQEKFVCLNCGFET |
| | HADEQAALNIARSWLFLRSQEYKKYQTNKTTGNTDKRAFVETWQSFYRKKL |
| | KEVWKPAV (SEQ ID NO: 62) |
| substitution | MQEIKRINKIRRRLVKDSNTKKAGKTGPMKTLLVRVMTPDLRERLENLRKK |
| of W782Q of | PENIPQPISNTSRANLNKLLTDYTEMKKAILHVYWEEFQKDPVGLMSRVAQ |
| SEQ ID | PAPKNIDQRKLIPVKDGNERLTSSGFACSQCCQPLYVYKLEQVNDKGKPHT |
| NO: 2. | NYFGRCNVSEHERLILLSPHKPEANDELVTYSLGKFGQRALDFYSIHVTRE |
| | SNHPVKPLEQIGGNSCASGPVGKALSDACMGAVASFLTKYQDIILEHQKVI |
| | KKNEKRLANLKDIASANGLAFPKITLPPQPHTKEGIEAYNNVVAQIVIWVN |
| | LNLWQKLKIGRDEAKPLQRLKGFPSFPLVERQANEVDWWDMVCNVKKLINE |
| | KKEDGKVFWQNLAGYKRQEALLPYLSSEEDRKKGKKFARYQFGDLLLHLEK |
| | KHGEDWGKVYDEAWERIDKKVEGLSKHIKLEEERRSEDAQSKAALTDWLRA |
| | KASFVIEGLKEADKDEFCRCELKLQKWYGDLRGKPFAIEAENSILDISGFS |
| | KQYNCAFIWQKDGVKKLNLYLIINYFKGGKLRFKKIKPEAFEANRFYTVIN |
| | KKSGEIVPMEVNFNFDDPNLIILPLAFGKRQGREFIWNDLLSLETGSLKLA |
| | NGRVIEKTLYNRRTRQDEPALFVALTFERREVLDSSNIKPMNLIGIDRGEN |
| | IPAVIALTDPEGCPLSRFKDSLGNPTHILRIGESYKEKQRTIQAAKEVEQR |
| | RAGGYSRKYASKAKNLADDMVRNTARDLLYYAVTQDAMLIFENLSRGFGRQ |
| | GKRTFMAERQYTRMEDQLTAKLAYEGLPSKTYLSKTLAQYTSKTCSNCGFT |
| | ITSADYDRVLEKLKKTATGWMTTINGKELKVEGQITYYNRYKRQNVVKDLS |
| | VELDRLSEESVNNDISSWTKGRSGEALSLLKKRFSHRPVQEKFVCLNCGFE |
| | THADEQAALNIARSWLFLRSQEYKKYQTNKTTGNTDKRAFVETWQSFYRKK |
| | LKEVWKPAV (SEQ ID NO: 63) |
| substitution | MQEIKRINKIRRRLVKDSNTKKAGKTGPMKTLLVRVMTPDLRERLENLRKK |
| of M771Q of | PENIPQPISNTSRANLNKLLTDYTEMKKAILHVYWEEFQKDPVGLMSRVAQ |
| SEQ ID | PAPKNIDQRKLIPVKDGNERLTSSGFACSQCCQPLYVYKLEQVNDKGKPHT |
| NO: 2 | NYFGRCNVSEHERLILLSPHKPEANDELVTYSLGKFGQRALDFYSIHVTRE |
| | SNHPVKPLEQIGGNSCASGPVGKALSDACMGAVASFLTKYQDIILEHQKVI |
| | KKNEKRLANLKDIASANGLAFPKITLPPQPHTKEGIEAYNNVVAQIVIWVN |
| | LNLWQKLKIGRDEAKPLQRLKGFPSFPLVERQANEVDWWDMVCNVKKLINE |
| | KKEDGKVFWQNLAGYKRQEALLPYLSSEEDRKKGKKFARYQFGDLLLHLEK |
| | KHGEDWGKVYDEAWERIDKKVEGLSKHIKLEEERRSEDAQSKAALTDWLRA |
| | KASFVIEGLKEADKDEFCRCELKLQKWYGDLRGKPFAIEAENSILDISGFS |
| | KQYNCAFIWQKDGVKKLNLYLIINYFKGGKLRFKKIKPEAFEANRFYTVIN |
| | KKSGEIVPMEVNFNFDDPNLIILPLAFGKRQGREFIWNDLLSLETGSLKLA |
| | NGRVIEKTLYNRRTRQDEPALFVALTFERREVLDSSNIKPMNLIGIDRGEN |
| | IPAVIALTDPEGCPLSRFKDSLGNPTHILRIGESYKEKQRTIQAAKEVEQR |
| | RAGGYSRKYASKAKNLADDMVRNTARDLLYYAVTQDAMLIFENLSRGFGRQ |
| | GKRTFQAERQYTRMEDWLTAKLAYEGLPSKTYLSKTLAQYTSKTCSNCGFT |
| | ITSADYDRVLEKLKKTATGWMTTINGKELKVEGQITYYNRYKRQNVVKDLS |
| | VELDRLSEESVNNDISSWTKGRSGEALSLLKKRFSHRPVQEKFVCLNCGFE |
| | THADEQAALNIARSWLFLRSQEYKKYQTNKTTGNTDKRAFVETWQSFYRKK |
| | LKEVWKPAV (SEQ ID NO: 64) |
| substitution | MQEIKRINKIRRRLVKDSNTKKAGKTGPMKTLLVRVMTPDLRERLENLRKK |
| of R458I and | PENIPQPISNTSRANLNKLLTDYTEMKKAILHVYWEEFQKDPVGLMSRVAQ |
| a substitution | PAPKNIDQRKLIPVKDGNERLTSSGFACSQCCQPLYVYKLEQVNDKGKPHT |
| of A739V of | NYFGRCNVSEHERLILLSPHKPEANDELVTYSLGKFGQRALDFYSIHVTRE |
| SEQ ID | SNHPVKPLEQIGGNSCASGPVGKALSDACMGAVASFLTKYQDIILEHQKVI |
| NO: 2. | KKNEKRLANLKDIASANGLAFPKITLPPQPHTKEGIEAYNNVVAQIVIWVN |
| | LNLWQKLKIGRDEAKPLQRLKGFPSFPLVERQANEVDWWDMVCNVKKLINE |
| | KKEDGKVFWQNLAGYKRQEALLPYLSSEEDRKKGKKFARYQFGDLLLHLEK |
| | KHGEDWGKVYDEAWERIDKKVEGLSKHIKLEEERRSEDAQSKAALTDWLIA |
| | KASFVIEGLKEADKDEFCRCELKLQKWYGDLRGKPFAIEAENSILDISGFS |
| | KQYNCAFIWQKDGVKKLNLYLIINYFKGGKLRFKKIKPEAFEANRFYTVIN |
| | KKSGEIVPMEVNFNFDDPNLIILPLAFGKRQGREFIWNDLLSLETGSLKLA |
| | NGRVIEKTLYNRRTRQDEPALFVALTFERREVLDSSNIKPMNLIGIDRGEN |
| | IPAVIALTDPEGCPLSRFKDSLGNPTHILRIGESYKEKQRTIQAAKEVEQR |
| | RAGGYSRKYASKAKNLADDMVRNTVRDLLYYAVTQDAMLIFENLSRGFGRQ |
| | GKRTFMAERQYTRMEDWLTAKLAYEGLPSKTYLSKTLAQYTSKTCSNCGFT |
| | ITSADYDRVLEKLKKTATGWMTTINGKELKVEGQITYYNRYKRQNVVKDLS |
| | VELDRLSEESVNNDISSWTKGRSGEALSLLKKRFSHRPVQEKFVCLNCGFE |
| | THADEQAALNIARSWLFLRSQEYKKYQTNKTTGNTDKRAFVETWQSFYRKK |
| | LKEVWKPAV (SEQ ID NO: 65) |
| L379R, a | MQEIKRINKIRRRLVKDSNTKKAGKTGPMKTLLVRVMTPDLRERLENLRKK |
| substitution | PENIPQPISNTSRANLNKLLTDYTEMKKAILHVYWEEFQKDPVGLMSRVAQ |
| of A708K, a | PAPKNIDQRKLIPVKDGNERLTSSGFACSQCCQPLYVYKLEQVNDKGKPHT |
| deletion of P | NYFGRCNVSEHERLILLSPHKPEANDELVTYSLGKFGQRALDFYSIHVTRE |
| at position | SNHPVKPLEQIGGNSCASGPVGKALSDACMGAVASFLTKYQDIILEHQKVI |
| 793 and a | KKNEKRLANLKDIASANGLAFPKITLPPQPHTKEGIEAYNNVVAQIVIWVN |
| substitution | LNLWQKLKIGRDEAKPLQRLKGFPSFPLVERQANEVDWWDMVCNVKKLINE |
| of M771N of | KKEDGKVFWQNLAGYKRQEALRPYLSSEEDRKKGKKFARYQFGDLLLHLEK |
| SEQ ID | KHGEDWGKVYDEAWERIDKKVEGLSKHIKLEEERRSEDAQSKAALTDWLRA |
| NO: 2 | KASFVIEGLKEADKDEFCRCELKLQKWYGDLRGKPFAIEAENSILDISGFS |
| | KQYNCAFIWQKDGVKKLNLYLIINYFKGGKLRFKKIKPEAFEANRFYTVIN |
| | KKSGEIVPMEVNFNFDDPNLIILPLAFGKRQGREFIWNDLLSLETGSLKLA |
| | NGRVIEKTLYNRRTRQDEPALFVALTFERREVLDSSNIKPMNLIGIDRGEN |
| | IPAVIALTDPEGCPLSRFKDSLGNPTHILRIGESYKEKQRTIQAKKEVEQR |
| | RAGGYSRKYASKAKNLADDMVRNTARDLLYYAVTQDAMLIFENLSRGFGRQ |
| | GKRTFNAERQYTRMEDWLTAKLAYEGLSKTYLSKTLAQYTSKTCSNCGFTI |
| | TSADYDRVLEKLKKTATGWMTTINGKELKVEGQITYYNRYKRQNVVKDLSV |
| | ELDRLSEESVNNDISSWTKGRSGEALSLLKKRFSHRPVQEKFVCLNCGFET |
| | HADEQAALNIARSWLFLRSQEYKKYQTNKTTGNTDKRAFVETWQSFYRKKL |
| | KEVWKPAV (SEQ ID NO: 66) |
| substitution | MQEIKRINKIRRRLVKDSNTKKAGKTGPMKTLLVRVMTPDLRERLENLRKK |
| of L379R, a | PENIPQPISNTSRANLNKLLTDYTEMKKAILHVYWEEFQKDPVGLMSRVAQ |
| substitution | PAPKNIDQRKLIPVKDGNERLTSSGFACSQCCQPLYVYKLEQVNDKGKPHT |
| of A708K, a | NYFGRCNVSEHERLILLSPHKPEANDELVTYSLGKFGQRALDFYSIHVTRE |
| deletion of P | SNHPVKPLEQIGGNSCASGPVGKALSDACMGAVASFLTKYQDIILEHQKVI |
| at position | KKNEKRLANLKDIASANGLAFPKITLPPQPHTKEGIEAYNNVVAQIVIWVN |
| 793 and a | LNLWQKLKIGRDEAKPLQRLKGFPSFPLVERQANEVDWWDMVCNVKKLINE |
| substitution | KKEDGKVFWQNLAGYKRQEALRPYLSSEEDRKKGKKFARYQFGDLLLHLEK |
| of A739T of | KHGEDWGKVYDEAWERIDKKVEGLSKHIKLEEERRSEDAQSKAALTDWLRA |
| SEQ ID | KASFVIEGLKEADKDEFCRCELKLQKWYGDLRGKPFAIEAENSILDISGFS |
| NO: 2 | KQYNCAFIWQKDGVKKLNLYLIINYFKGGKLRFKKIKPEAFEANRFYTVIN |
| | KKSGEIVPMEVNFNFDDPNLIILPLAFGKRQGREFIWNDLLSLETGSLKLA |
| | NGRVIEKTLYNRRTRQDEPALFVALTFERREVLDSSNIKPMNLIGIDRGEN |
| | IPAVIALTDPEGCPLSRFKDSLGNPTHILRIGESYKEKQRTIQAKKEVEQR |
| | RAGGYSRKYASKAKNLADDMVRNTTRDLLYYAVTQDAMLIFENLSRGFGRQ |
| | GKRTFMAERQYTRMEDWLTAKLAYEGLSKTYLSKTLAQYTSKTCSNCGFTI |
| | TSADYDRVLEKLKKTATGWMTTINGKELKVEGQITYYNRYKRQNVVKDLSV |
| | ELDRLSEESVNNDISSWTKGRSGEALSLLKKRFSHRPVQEKFVCLNCGFET |
| | HADEQAALNIARSWLFLRSQEYKKYQTNKTTGNTDKRAFVETWQSFYRKKL |
| | KEVWKPAV (SEQ ID NO: 67) |
| substitution | MQEIKRINKIRRRLVKDSNTKKAGKTGPMKTLLVRVMTPDLRERLENLRKK |
| of L379R, a | PENIPQPISNTSRANLNKLLTDYTEMKKAILHVYWEEFQKDPVGLMSRVAQ |
| substitution | PAPKNIDQRKLIPVKDGNERLTSSGFACSQCCQPLYVYKLEQVNDKGKPHT |
| of C477K, a | NYFGRCNVSEHERLILLSPHKPEANDELVTYSLGKFGQRALDFYSIHVTRE |
| substitution | SNHPVKPLEQIGGNSCASGPVGKALSDACMGAVASFLTKYQDIILEHQKVI |
| of A708K, a | KKNEKRLANLKDIASANGLAFPKITLPPQPHTKEGIEAYNNVVAQIVIWVN |
| deletion of P | LNLWQKLKIGRDEAKPLQRLKGFPSFPLVERQANEVDWWDMVCNVKKLINE |
| at position | KKEDGKVFWQNLAGYKRQEALRPYLSSEEDRKKGKKFARYQFGDLLLHLEK |
| 793 and a | KHGEDWGKVYDEAWERIDKKVEGLSKHIKLEEERRSEDAQSKAALTDWLRA |
| substitution | KASFVIEGLKEADKDEFKRCELKLQKWYGSLRGKPFAIEAENSILDISGFS |
| of D489S of | KQYNCAFIWQKDGVKKLNLYLIINYFKGGKLRFKKIKPEAFEANRFYTVIN |
| SEQ ID | KKSGEIVPMEVNFNFDDPNLIILPLAFGKRQGREFIWNDLLSLETGSLKLA |
| NO: 2. | NGRVIEKTLYNRRTRQDEPALFVALTFERREVLDSSNIKPMNLIGIDRGEN |
| | IPAVIALTDPEGCPLSRFKDSLGNPTHILRIGESYKEKQRTIQAKKEVEQR |
| | RAGGYSRKYASKAKNLADDMVRNTARDLLYYAVTQDAMLIFENLSRGFGRQ |
| | GKRTFMAERQYTRMEDWLTAKLAYEGLSKTYLSKTLAQYTSKTCSNCGFTI |
| | TSADYDRVLEKLKKTATGWMTTINGKELKVEGQITYYNRYKRQNVVKDLSV |
| | ELDRLSEESVNNDISSWTKGRSGEALSLLKKRFSHRPVQEKFVCLNCGFET |
| | HADEQAALNIARSWLFLRSQEYKKYQTNKTTGNTDKRAFVETWQSFYRKKL |
| | KEVWKPAV (SEQ ID NO: 68) |
| substitution | MQEIKRINKIRRRLVKDSNTKKAGKTGPMKTLLVRVMTPDLRERLENLRKK |
| of L379R, a | PENIPQPISNTSRANLNKLLTDYTEMKKAILHVYWEEFQKDPVGLMSRVAQ |
| substitution | PAPKNIDQRKLIPVKDGNERLTSSGFACSQCCQPLYVYKLEQVNDKGKPHT |
| of C477K, a | NYFGRCNVSEHERLILLSPHKPEANDELVTYSLGKFGQRALDFYSIHVTRE |
| substitution | SNHPVKPLEQIGGNSCASGPVGKALSDACMGAVASFLTKYQDIILEHQKVI |
| of A708K, a | KKNEKRLANLKDIASANGLAFPKITLPPQPHTKEGIEAYNNVVAQIVIWVN |
| deletion of P | LNLWQKLKIGRDEAKPLQRLKGFPSFPLVERQANEVDWWDMVCNVKKLINE |
| at position | KKEDGKVFWQNLAGYKRQEALRPYLSSEEDRKKGKKFARYQFGDLLLHLEK |
| 793 and a | KHGEDWGKVYDEAWERIDKKVEGLSKHIKLEEERRSEDAQSKAALTDWLRA |
| substitution | KASFVIEGLKEADKDEFKRCELKLQKWYGDLRGKPFAIEAENSILDISGFS |
| of D732N of | KQYNCAFIWQKDGVKKLNLYLIINYFKGGKLREKKIKPEAFEANRFYTVIN |
| SEQ ID | KKSGEIVPMEVNFNFDDPNLIILPLAFGKRQGREFIWNDLLSLETGSLKLA |
| NO: 2. | NGRVIEKTLYNRRTRQDEPALFVALTFERREVLDSSNIKPMNLIGIDRGEN |
| | IPAVIALTDPEGCPLSRFKDSLGNPTHILRIGESYKEKQRTIQAKKEVEQR |
| | RAGGYSRKYASKAKNLANDMVRNTARDLLYYAVTQDAMLIFENLSRGFGRQ |
| | GKRTFMAERQYTRMEDWLTAKLAYEGLSKTYLSKTLAQYTSKTCSNCGFTI |
| | TSADYDRVLEKLKKTATGWMTTINGKELKVEGQITYYNRYKRQNVVKDLSV |
| | ELDRLSEESVNNDISSWTKGRSGEALSLLKKRFSHRPVQEKFVCLNCGFET |
| | HADEQAALNIARSWLFLRSQEYKKYQTNKTTGNTDKRAFVETWQSFYRKKL |
| | KEVWKPAV (SEQ ID NO: 69) |
| substitution | MQEIKRINKIRRRLVKDSNTKKAGKTGPMKTLLVRVMTPDLRERLENLRKK |
| of V711K of | PENIPQPISNTSRANLNKLLTDYTEMKKAILHVYWEEFQKDPVGLMSRVAQ |
| SEQ ID | PAPKNIDQRKLIPVKDGNERLTSSGFACSQCCQPLYVYKLEQVNDKGKPHT |
| NO: 2. | NYFGRCNVSEHERLILLSPHKPEANDELVTYSLGKFGQRALDFYSIHVTRE |
| | SNHPVKPLEQIGGNSCASGPVGKALSDACMGAVASFLTKYQDIILEHQKVI |
| | KKNEKRLANLKDIASANGLAFPKITLPPQPHTKEGIEAYNNVVAQIVIWVN |
| | LNLWQKLKIGRDEAKPLQRLKGFPSFPLVERQANEVDWWDMVCNVKKLINE |
| | KKEDGKVFWQNLAGYKRQEALLPYLSSEEDRKKGKKFARYQFGDLLLHLEK |
| | KHGEDWGKVYDEAWERIDKKVEGLSKHIKLEEERRSEDAQSKAALTDWLRA |
| | KASFVIEGLKEADKDEFCRCELKLQKWYGDLRGKPFAIEAENSILDISGFS |
| | KQYNCAFIWQKDGVKKLNLYLIINYFKGGKLREKKIKPEAFEANRFYTVIN |
| | KKSGEIVPMEVNFNFDDPNLIILPLAFGKRQGREFIWNDLLSLETGSLKLA |
| | NGRVIEKTLYNRRTRQDEPALFVALTFERREVLDSSNIKPMNLIGIDRGEN |
| | IPAVIALTDPEGCPLSRFKDSLGNPTHILRIGESYKEKQRTIQAAKEKEQR |
| | RAGGYSRKYASKAKNLADDMVRNTARDLLYYAVTQDAMLIFENLSRGFGRQ |
| | GKRTFMAERQYTRMEDWLTAKLAYEGLPSKTYLSKTLAQYTSKTCSNCGFT |
| | ITSADYDRVLEKLKKTATGWMTTINGKELKVEGQITYYNRYKRONVVKDLS |
| | VELDRLSEESVNNDISSWTKGRSGEALSLLKKRFSHRPVQEKFVCLNCGFE |
| | THADEQAALNIARSWLFLRSQEYKKYQTNKTTGNTDKRAFVETWQSFYRKK |
| | LKEVWKPAV (SEQ ID NO: 70) |
| substitution | MQEIKRINKIRRRLVKDSNTKKAGKTGPMKTLLVRVMTPDLRERLENLRKK |
| of L379R, a | PENIPQPISNTSRANLNKLLTDYTEMKKAILHVYWEEFQKDPVGLMSRVAQ |
| substitution | PAPKNIDQRKLIPVKDGNERLTSSGFACSQCCQPLYVYKLEQVNDKGKPHT |
| of C477K, a | NYFGRCNVSEHERLILLSPHKPEANDELVTYSLGKFGQRALDFYSIHVTRE |
| substitution | SNHPVKPLEQIGGNSCASGPVGKALSDACMGAVASFLTKYQDIILEHQKVI |
| of A708K, a | KKNEKRLANLKDIASANGLAFPKITLPPQPHTKEGIEAYNNVVAQIVIWVN |
| deletion of P | LNLWQKLKIGRDEAKPLQRLKGFPSFPLVERQANEVDWWDMVCNVKKLINE |
| at position | KKEDGKVFWQNLAGYKRQEALRPYLSSEEDRKKGKKFARYQFGDLLLHLEK |
| 793 and a | KHGEDWGKVYDEAWERIDKKVEGLSKHIKLEEERRSEDAQSKAALTDWLRA |
| substitution | KASFVIEGLKEADKDEFKRCELKLQKWYGDLRGKPFAIEAENSILDISGFS |
| of Y797L of | KQYNCAFIWQKDGVKKLNLYLIINYFKGGKLRFKKIKPEAFEANRFYTVIN |
| SEQ ID | KKSGEIVPMEVNFNFDDPNLIILPLAFGKRQGREFIWNDLLSLETGSLKLA |
| NO: 2. | NGRVIEKTLYNRRTRQDEPALFVALTFERREVLDSSNIKPMNLIGIDRGEN |
| | IPAVIALTDPEGCPLSRFKDSLGNPTHILRIGESYKEKQRTIQAKKEVEQR |
| | RAGGYSRKYASKAKNLADDMVRNTARDLLYYAVTQDAMLIFENLSRGFGRQ |
| | GKRTFMAERQYTRMEDWLTAKLAYEGLSKTLLSKTLAQYTSKTCSNCGFTI |
| | TSADYDRVLEKLKKTATGWMTTINGKELKVEGQITYYNRYKRQNVVKDLSV |
| | ELDRLSEESVNNDISSWTKGRSGEALSLLKKRFSHRPVQEKFVCLNCGFET |
| | HADEQAALNIARSWLFLRSQEYKKYQTNKTTGNTDKRAFVETWQSFYRKKL |
| | KEVWKPAV (SEQ ID NO: 71) |
| 119: | MQEIKRINKIRRRLVKDSNTKKAGKTGPMKTLLVRVMTPDLRERLENLRKK |
| substitution | PENIPQPISNTSRANLNKLLTDYTEMKKAILHVYWEEFQKDPVGLMSRVAQ |
| of L379R, a | PAPKNIDQRKLIPVKDGNERLTSSGFACSQCCQPLYVYKLEQVNDKGKPHT |
| substitution | NYFGRCNVSEHERLILLSPHKPEANDELVTYSLGKFGQRALDFYSIHVTRE |
| of A708K | SNHPVKPLEQIGGNSCASGPVGKALSDACMGAVASFLTKYQDIILEHQKVI |
| and a | KKNEKRLANLKDIASANGLAFPKITLPPQPHTKEGIEAYNNVVAQIVIWVN |
| deletion of P | LNLWQKLKIGRDEAKPLQRLKGFPSFPLVERQANEVDWWDMVCNVKKLINE |
| at position | KKEDGKVFWQNLAGYKRQEALRPYLSSEEDRKKGKKFARYQFGDLLLHLEK |
| 793 of SEQ | KHGEDWGKVYDEAWERIDKKVEGLSKHIKLEEERRSEDAQSKAALTDWLRA |
| ID NO: 2. | KASFVIEGLKEADKDEFCRCELKLQKWYGDLRGKPFAIEAENSILDISGFS |
| | KQYNCAFIWQKDGVKKLNLYLIINYFKGGKLRFKKIKPEAFEANRFYTVIN |
| | KKSGEIVPMEVNFNFDDPNLIILPLAFGKRQGREFIWNDLLSLETGSLKLA |
| | NGRVIEKTLYNRRTRQDEPALFVALTFERREVLDSSNIKPMNLIGIDRGEN |
| | IPAVIALTDPEGCPLSRFKDSLGNPTHILRIGESYKEKQRTIQAKKEVEQR |
| | RAGGYSRKYASKAKNLADDMVRNTARDLLYYAVTQDAMLIFENLSRGFGRQ |
| | GKRTFMAERQYTRMEDWLTAKLAYEGLSKTYLSKTLAQYTSKTCSNCGFTI |
| | TSADYDRVLEKLKKTATGWMTTINGKELKVEGQITYYNRYKRQNVVKDLSV |
| | ELDRLSEESVNNDISSWTKGRSGEALSLLKKRFSHRPVQEKFVCLNCGFET |
| | HADEQAALNIARSWLFLRSQEYKKYQTNKTTGNTDKRAFVETWQSFYRKKL |
| | KEVWKPAV (SEQ ID NO: 72) |
| substitution | MQEIKRINKIRRRLVKDSNTKKAGKTGPMKTLLVRVMTPDLRERLENLRKK |
| of L379R, a | PENIPQPISNTSRANLNKLLTDYTEMKKAILHVYWEEFQKDPVGLMSRVAQ |
| substitution | PAPKNIDQRKLIPVKDGNERLTSSGFACSQCCQPLYVYKLEQVNDKGKPHT |
| of C477K, a | NYFGRCNVSEHERLILLSPHKPEANDELVTYSLGKFGQRALDFYSIHVTRE |
| substitution | SNHPVKPLEQIGGNSCASGPVGKALSDACMGAVASFLTKYQDIILEHQKVI |
| of A708K, a | KKNEKRLANLKDIASANGLAFPKITLPPQPHTKEGIEAYNNVVAQIVIWVN |
| deletion of P | LNLWQKLKIGRDEAKPLQRLKGFPSFPLVERQANEVDWWDMVCNVKKLINE |
| at position | KKEDGKVFWQNLAGYKRQEALRPYLSSEEDRKKGKKFARYQFGDLLLHLEK |
| 793 and a | KHGEDWGKVYDEAWERIDKKVEGLSKHIKLEEERRSEDAQSKAALTDWLRA |
| substitution | KASFVIEGLKEADKDEFKRCELKLQKWYGDLRGKPFAIEAENSILDISGFS |
| of M771N of | KQYNCAFIWQKDGVKKLNLYLIINYFKGGKLRFKKIKPEAFEANRFYTVIN |
| SEQ ID | KKSGEIVPMEVNFNFDDPNLIILPLAFGKRQGREFIWNDLLSLETGSLKLA |
| NO: 2. | NGRVIEKTLYNRRTRQDEPALFVALTFERREVLDSSNIKPMNLIGIDRGEN |
| | IPAVIALTDPEGCPLSRFKDSLGNPTHILRIGESYKEKQRTIQAKKEVEQR |
| | RAGGYSRKYASKAKNLADDMVRNTARDLLYYAVTQDAMLIFENLSRGFGRQ |
| | GKRTFNAERQYTRMEDWLTAKLAYEGLSKTYLSKTLAQYTSKTCSNCGFTI |
| | TSADYDRVLEKLKKTATGWMTTINGKELKVEGQITYYNRYKRQNVVKDLSV |
| | ELDRLSEESVNNDISSWTKGRSGEALSLLKKRFSHRPVQEKFVCLNCGFET |
| | HADEQAALNIARSWLFLRSQEYKKYQTNKTTGNTDKRAFVETWQSFYRKKL |
| | KEVWKPAV (SEQ ID NO: 73) |
| substitution | MQEIKRINKIRRRLVKDSNTKKAGKTGPMKTLLVRVMTPDLRERLENLRKK |
| of A708K, a | PENIPQPISNTSRANLNKLLTDYTEMKKAILHVYWEEFQKDPVGLMSRVAQ |
| deletion of P | PAPKNIDQRKLIPVKDGNERLTSSGFACSQCCQPLYVYKLEQVNDKGKPHT |
| at position | NYFGRCNVSEHERLILLSPHKPEANDELVTYSLGKFGQRALDFYSIHVTRE |
| 793 and a | SNHPVKPLEQIGGNSCASGPVGKALSDACMGAVASFLTKYQDIILEHQKVI |
| substitution | KKNEKRLANLKDIASANGLAFPKITLPPQPHTKEGIEAYNNVVAQIVIWVN |
| of E386S of | LNLWQKLKIGRDEAKPLQRLKGFPSFPLVERQANEVDWWDMVCNVKKLINE |
| SEQ ID | KKEDGKVFWQNLAGYKRQEALLPYLSSESDRKKGKKFARYQFGDLLLHLEK |
| NO: 2. | KHGEDWGKVYDEAWERIDKKVEGLSKHIKLEEERRSEDAQSKAALTDWLRA |
| | KASFVIEGLKEADKDEFCRCELKLQKWYGDLRGKPFAIEAENSILDISGFS |
| | KQYNCAFIWQKDGVKKLNLYLIINYFKGGKLRFKKIKPEAFEANRFYTVIN |
| | KKSGEIVPMEVNFNFDDPNLIILPLAFGKRQGREFIWNDLLSLETGSLKLA |
| | NGRVIEKTLYNRRTRQDEPALFVALTFERREVLDSSNIKPMNLIGIDRGEN |
| | IPAVIALTDPEGCPLSRFKDSLGNPTHILRIGESYKEKQRTIQAKKEVEQR |
| | RAGGYSRKYASKAKNLADDMVRNTARDLLYYAVTQDAMLIFENLSRGFGRQ |
| | GKRTFMAERQYTRMEDWLTAKLAYEGLSKTYLSKTLAQYTSKTCSNCGFTI |
| | TSADYDRVLEKLKKTATGWMTTINGKELKVEGQITYYNRYKRQNVVKDLSV |
| | ELDRLSEESVNNDISSWTKGRSGEALSLLKKRFSHRPVQEKFVCLNCGFET |
| | HADEQAALNIARSWLFLRSQEYKKYQTNKTTGNTDKRAFVETWQSFYRKKL |
| | KEVWKPAV (SEQ ID NO: 74) |
| substitution | MQEIKRINKIRRRLVKDSNTKKAGKTGPMKTLLVRVMTPDLRERLENLRKK |
| of L379R, a | PENIPQPISNTSRANLNKLLTDYTEMKKAILHVYWEEFQKDPVGLMSRVAQ |
| substitution | PAPKNIDQRKLIPVKDGNERLTSSGFACSQCCQPLYVYKLEQVNDKGKPHT |
| of C477K, a | NYFGRCNVSEHERLILLSPHKPEANDELVTYSLGKFGQRALDFYSIHVTRE |
| substitution | SNHPVKPLEQIGGNSCASGPVGKALSDACMGAVASFLTKYQDIILEHQKVI |
| of A708K | KKNEKRLANLKDIASANGLAFPKITLPPQPHTKEGIEAYNNVVAQIVIWVN |
| and a | LNLWQKLKIGRDEAKPLQRLKGFPSFPLVERQANEVDWWDMVCNVKKLINE |
| deletion of P | KKEDGKVFWQNLAGYKRQEALRPYLSSEEDRKKGKKFARYQFGDLLLHLEK |
| at position | KHGEDWGKVYDEAWERIDKKVEGLSKHIKLEEERRSEDAQSKAALTDWLRA |
| 793 of SEQ | KASFVIEGLKEADKDEFKRCELKLQKWYGDLRGKPFAIEAENSILDISGFS |
| ID NO: 2. | KQYNCAFIWQKDGVKKLNLYLIINYFKGGKLRFKKIKPEAFEANRFYTVIN |
| | KKSGEIVPMEVNFNFDDPNLIILPLAFGKRQGREFIWNDLLSLETGSLKLA |
| | NGRVIEKTLYNRRTRQDEPALFVALTFERREVLDSSNIKPMNLIGIDRGEN |
| | IPAVIALTDPEGCPLSRFKDSLGNPTHILRIGESYKEKQRTIQAKKEVEQR |
| | RAGGYSRKYASKAKNLADDMVRNTARDLLYYAVTQDAMLIFENLSRGFGRQ |
| | GKRTFMAERQYTRMEDWLTAKLAYEGLSKTYLSKTLAQYTSKTCSNCGFTI |
| | TSADYDRVLEKLKKTATGWMTTINGKELKVEGQITYYNRYKRQNVVKDLSV |
| | ELDRLSEESVNNDISSWTKGRSGEALSLLKKRFSHRPVQEKFVCLNCGFET |
| | HADEQAALNIARSWLFLRSQEYKKYQTNKTTGNTDKRAFVETWQSFYRKKL |
| | KEVWKPAV (SEQ ID NO: 75) |
| substitution | MQEIKRINKIRRRLVKDSNTKKAGKTGPMKTLLVRVMTPDLRERLENLRKK |
| of L792D of | PENIPQPISNTSRANLNKLLTDYTEMKKAILHVYWEEFQKDPVGLMSRVAQ |
| SEQ ID | PAPKNIDQRKLIPVKDGNERLTSSGFACSQCCQPLYVYKLEQVNDKGKPHT |
| NO: 2. | NYFGRCNVSEHERLILLSPHKPEANDELVTYSLGKFGQRALDFYSIHVTRE |
| | SNHPVKPLEQIGGNSCASGPVGKALSDACMGAVASFLTKYQDIILEHQKVI |
| | KKNEKRLANLKDIASANGLAFPKITLPPQPHTKEGIEAYNNVVAQIVIWVN |
| | LNLWQKLKIGRDEAKPLQRLKGFPSFPLVERQANEVDWWDMVCNVKKLINE |
| | KKEDGKVFWQNLAGYKRQEALLPYLSSEEDRKKGKKFARYQFGDLLLHLEK |
| | KHGEDWGKVYDEAWERIDKKVEGLSKHIKLEEERRSEDAQSKAALTDWLRA |
| | KASFVIEGLKEADKDEFCRCELKLQKWYGDLRGKPFAIEAENSILDISGFS |
| | KQYNCAFIWQKDGVKKLNLYLIINYFKGGKLRFKKIKPEAFEANRFYTVIN |
| | KKSGEIVPMEVNFNFDDPNLIILPLAFGKRQGREFIWNDLLSLETGSLKLA |
| | NGRVIEKTLYNRRTRQDEPALFVALTFERREVLDSSNIKPMNLIGIDRGEN |
| | IPAVIALTDPEGCPLSRFKDSLGNPTHILRIGESYKEKQRTIQAAKEVEQR |
| | RAGGYSRKYASKAKNLADDMVRNTARDLLYYAVTQDAMLIFENLSRGFGRQ |
| | GKRTFMAERQYTRMEDWLTAKLAYEGDPSKTYLSKTLAQYTSKTCSNCGFT |
| | ITSADYDRVLEKLKKTATGWMTTINGKELKVEGQITYYNRYKRQNVVKDLS |
| | VELDRLSEESVNNDISSWTKGRSGEALSLLKKRFSHRPVQEKFVCLNCGFE |
| | THADEQAALNIARSWLFLRSQEYKKYQTNKTTGNTDKRAFVETWQSFYRKK |
| | LKEVWKPAV (SEQ ID NO: 76) |
| substitution | MQEIKRINKIRRRLVKDSNTKKAGKTGPMKTLLVRVMTPDLRERLENLRKK |
| of G791F of | PENIPQPISNTSRANLNKLLTDYTEMKKAILHVYWEEFQKDPVGLMSRVAQ |
| SEQ ID | PAPKNIDQRKLIPVKDGNERLTSSGFACSQCCQPLYVYKLEQVNDKGKPHT |
| NO: 2. | NYFGRCNVSEHERLILLSPHKPEANDELVTYSLGKFGQRALDFYSIHVTRE |
| | SNHPVKPLEQIGGNSCASGPVGKALSDACMGAVASFLTKYQDIILEHQKVI |
| | KKNEKRLANLKDIASANGLAFPKITLPPQPHTKEGIEAYNNVVAQIVIWVN |
| | LNLWQKLKIGRDEAKPLQRLKGFPSFPLVERQANEVDWWDMVCNVKKLINE |
| | KKEDGKVFWQNLAGYKRQEALLPYLSSEEDRKKGKKFARYQFGDLLLHLEK |
| | KHGEDWGKVYDEAWERIDKKVEGLSKHIKLEEERRSEDAQSKAALTDWLRA |
| | KASFVIEGLKEADKDEFCRCELKLQKWYGDLRGKPFAIEAENSILDISGFS |
| | KQYNCAFIWQKDGVKKLNLYLIINYFKGGKLRFKKIKPEAFEANRFYTVIN |
| | KKSGEIVPMEVNFNFDDPNLIILPLAFGKRQGREFIWNDLLSLETGSLKLA |
| | NGRVIEKTLYNRRTRQDEPALFVALTFERREVLDSSNIKPMNLIGIDRGEN |
| | IPAVIALTDPEGCPLSRFKDSLGNPTHILRIGESYKEKQRTIQAAKEVEQR |
| | RAGGYSRKYASKAKNLADDMVRNTARDLLYYAVTQDAMLIFENLSRGFGRQ |
| | GKRTFMAERQYTRMEDWLTAKLAYEFLPSKTYLSKTLAQYTSKTCSNCGFT |
| | ITSADYDRVLEKLKKTATGWMTTINGKELKVEGQITYYNRYKRQNVVKDLS |
| | VELDRLSEESVNNDISSWTKGRSGEALSLLKKRFSHRPVQEKFVCLNCGFE |
| | THADEQAALNIARSWLFLRSQEYKKYQTNKTTGNTDKRAFVETWQSFYRKK |
| | LKEVWKPAV (SEQ ID NO: 77) |
| substitution | MQEIKRINKIRRRLVKDSNTKKAGKTGPMKTLLVRVMTPDLRERLENLRKK |
| of A708K, a | PENIPQPISNTSRANLNKLLTDYTEMKKAILHVYWEEFQKDPVGLMSRVAQ |
| deletion of P | PAPKNIDQRKLIPVKDGNERLTSSGFACSQCCQPLYVYKLEQVNDKGKPHT |
| at position | NYFGRCNVSEHERLILLSPHKPEANDELVTYSLGKFGQRALDFYSIHVTRE |
| 793 and a | SNHPVKPLEQIGGNSCASGPVGKALSDACMGAVASFLTKYQDIILEHQKVI |
| substitution | KKNEKRLANLKDIASANGLAFPKITLPPQPHTKEGIEAYNNVVAQIVIWVN |
| of A739V of | LNLWQKLKIGRDEAKPLQRLKGFPSFPLVERQANEVDWWDMVCNVKKLINE |
| SEQ ID | KKEDGKVFWQNLAGYKRQEALLPYLSSEEDRKKGKKFARYQFGDLLLHLEK |
| NO: 2. | KHGEDWGKVYDEAWERIDKKVEGLSKHIKLEEERRSEDAQSKAALTDWLRA |
| | KASFVIEGLKEADKDEFCRCELKLQKWYGDLRGKPFAIEAENSILDISGFS |
| | KQYNCAFIWQKDGVKKLNLYLIINYFKGGKLREKKIKPEAFEANRFYTVIN |
| | KKSGEIVPMEVNFNFDDPNLIILPLAFGKRQGREFIWNDLLSLETGSLKLA |
| | NGRVIEKTLYNRRTRQDEPALFVALTFERREVLDSSNIKPMNLIGIDRGEN |
| | IPAVIALTDPEGCPLSRFKDSLGNPTHILRIGESYKEKQRTIQAKKEVEQR |
| | RAGGYSRKYASKAKNLADDMVRNTVRDLLYYAVTQDAMLIFENLSRGFGRQ |
| | GKRTFMAERQYTRMEDWLTAKLAYEGLSKTYLSKTLAQYTSKTCSNCGFTI |
| | TSADYDRVLEKLKKTATGWMTTINGKELKVEGQITYYNRYKRQNVVKDLSV |
| | ELDRLSEESVNNDISSWTKGRSGEALSLLKKRFSHRPVQEKFVCLNCGFET |
| | HADEQAALNIARSWLFLRSQEYKKYQTNKTTGNTDKRAFVETWQSFYRKKL |
| | KEVWKPAV (SEQ ID NO: 78) |
| substitution | MQEIKRINKIRRRLVKDSNTKKAGKTGPMKTLLVRVMTPDLRERLENLRKK |
| of L379R, a | PENIPQPISNTSRANLNKLLTDYTEMKKAILHVYWEEFQKDPVGLMSRVAQ |
| substitution | PAPKNIDQRKLIPVKDGNERLTSSGFACSQCCQPLYVYKLEQVNDKGKPHT |
| of A708K, a | NYFGRCNVSEHERLILLSPHKPEANDELVTYSLGKFGQRALDFYSIHVTRE |
| deletion of P | SNHPVKPLEQIGGNSCASGPVGKALSDACMGAVASFLTKYQDIILEHQKVI |
| at position | KKNEKRLANLKDIASANGLAFPKITLPPQPHTKEGIEAYNNVVAQIVIWVN |
| 793 and a | LNLWQKLKIGRDEAKPLQRLKGFPSFPLVERQANEVDWWDMVCNVKKLINE |
| substitution | KKEDGKVFWQNLAGYKRQEALRPYLSSEEDRKKGKKFARYQFGDLLLHLEK |
| of A739V of | KHGEDWGKVYDEAWERIDKKVEGLSKHIKLEEERRSEDAQSKAALTDWLRA |
| SEQ ID | KASFVIEGLKEADKDEFCRCELKLQKWYGDLRGKPFAIEAENSILDISGFS |
| NO: 2. | KQYNCAFIWQKDGVKKLNLYLIINYFKGGKLREKKIKPEAFEANRFYTVIN |
| | KKSGEIVPMEVNFNFDDPNLIILPLAFGKRQGREFIWNDLLSLETGSLKLA |
| | NGRVIEKTLYNRRTRQDEPALFVALTFERREVLDSSNIKPMNLIGIDRGEN |
| | IPAVIALTDPEGCPLSRFKDSLGNPTHILRIGESYKEKQRTIQAKKEVEQR |
| | RAGGYSRKYASKAKNLADDMVRNTVRDLLYYAVTQDAMLIFENLSRGFGRQ |
| | GKRTFMAERQYTRMEDWLTAKLAYEGLSKTYLSKTLAQYTSKTCSNCGFTI |
| | TSADYDRVLEKLKKTATGWMTTINGKELKVEGQITYYNRYKRQNVVKDLSV |
| | ELDRLSEESVNNDISSWTKGRSGEALSLLKKRFSHRPVQEKFVCLNCGFET |
| | HADEQAALNIARSWLFLRSQEYKKYQTNKTTGNTDKRAFVETWQSFYRKKL |
| | KEVWKPAV (SEQ ID NO: 79) |
| substitution | MQEIKRINKIRRRLVKDSNTKKAGKTGPMKTLLVRVMTPDLRERLENLRKK |
| of C477K, a | PENIPQPISNTSRANLNKLLTDYTEMKKAILHVYWEEFQKDPVGLMSRVAQ |
| substitution | PAPKNIDQRKLIPVKDGNERLTSSGFACSQCCQPLYVYKLEQVNDKGKPHT |
| of A708K | NYFGRCNVSEHERLILLSPHKPEANDELVTYSLGKFGQRALDFYSIHVTRE |
| and a | SNHPVKPLEQIGGNSCASGPVGKALSDACMGAVASFLTKYQDIILEHQKVI |
| deletion of P | KKNEKRLANLKDIASANGLAFPKITLPPQPHTKEGIEAYNNVVAQIVIWVN |
| at position | LNLWQKLKIGRDEAKPLQRLKGFPSFPLVERQANEVDWWDMVCNVKKLINE |
| 793 of SEQ | KKEDGKVFWQNLAGYKRQEALLPYLSSEEDRKKGKKFARYQFGDLLLHLEK |
| ID NO: 2. | KHGEDWGKVYDEAWERIDKKVEGLSKHIKLEEERRSEDAQSKAALTDWLRA |
| | KASFVIEGLKEADKDEFKRCELKLQKWYGDLRGKPFAIEAENSILDISGFS |
| | KQYNCAFIWQKDGVKKLNLYLIINYFKGGKLRFKKIKPEAFEANRFYTVIN |
| | KKSGEIVPMEVNFNFDDPNLIILPLAFGKRQGREFIWNDLLSLETGSLKLA |
| | NGRVIEKTLYNRRTRQDEPALFVALTFERREVLDSSNIKPMNLIGIDRGEN |
| | IPAVIALTDPEGCPLSRFKDSLGNPTHILRIGESYKEKQRTIQAKKEVEQR |
| | RAGGYSRKYASKAKNLADDMVRNTARDLLYYAVTQDAMLIFENLSRGFGRQ |
| | GKRTFMAERQYTRMEDWLTAKLAYEGLSKTYLSKTLAQYTSKTCSNCGFTI |
| | TSADYDRVLEKLKKTATGWMTTINGKELKVEGQITYYNRYKRQNVVKDLSV |
| | ELDRLSEESVNNDISSWTKGRSGEALSLLKKRFSHRPVQEKFVCLNCGFET |
| | HADEQAALNIARSWLFLRSQEYKKYQTNKTTGNTDKRAFVETWQSFYRKKL |
| | KEVWKPAV (SEQ ID NO: 80) |
| substitution | MQEIKRINKIRRRLVKDSNTKKAGKTGPMKTLLVRVMTPDLRERLENLRKK |
| of L249I and | PENIPQPISNTSRANLNKLLTDYTEMKKAILHVYWEEFQKDPVGLMSRVAQ |
| a substitution | PAPKNIDQRKLIPVKDGNERLTSSGFACSQCCQPLYVYKLEQVNDKGKPHT |
| of M771N of | NYFGRCNVSEHERLILLSPHKPEANDELVTYSLGKFGQRALDFYSIHVTRE |
| SEQ ID | SNHPVKPLEQIGGNSCASGPVGKALSDACMGAVASFLTKYQDIIIEHQKVI |
| NO: 2. | KKNEKRLANLKDIASANGLAFPKITLPPQPHTKEGIEAYNNVVAQIVIWVN |
| | LNLWQKLKIGRDEAKPLQRLKGFPSFPLVERQANEVDWWDMVCNVKKLINE |
| | KKEDGKVFWQNLAGYKRQEALLPYLSSEEDRKKGKKFARYQFGDLLLHLEK |
| | KHGEDWGKVYDEAWERIDKKVEGLSKHIKLEEERRSEDAQSKAALTDWLRA |
| | KASFVIEGLKEADKDEFCRCELKLQKWYGDLRGKPFAIEAENSILDISGFS |
| | KQYNCAFIWQKDGVKKLNLYLIINYFKGGKLRFKKIKPEAFEANRFYTVIN |
| | KKSGEIVPMEVNFNFDDPNLIILPLAFGKRQGREFIWNDLLSLETGSLKLA |
| | NGRVIEKTLYNRRTRQDEPALFVALTFERREVLDSSNIKPMNLIGIDRGEN |
| | IPAVIALTDPEGCPLSRFKDSLGNPTHILRIGESYKEKQRTIQAAKEVEQR |
| | RAGGYSRKYASKAKNLADDMVRNTARDLLYYAVTQDAMLIFENLSRGFGRQ |
| | GKRTFNAERQYTRMEDWLTAKLAYEGLPSKTYLSKTLAQYTSKTCSNCGFT |
| | ITSADYDRVLEKLKKTATGWMTTINGKELKVEGQITYYNRYKRQNVVKDLS |
| | VELDRLSEESVNNDISSWTKGRSGEALSLLKKRFSHRPVQEKFVCLNCGFE |
| | THADEQAALNIARSWLFLRSQEYKKYQTNKTTGNTDKRAFVETWQSFYRKK |
| | LKEVWKPAV (SEQ ID NO: 81) |
| substitution | MQEIKRINKIRRRLVKDSNTKKAGKTGPMKTLLVRVMTPDLRERLENLRKK |
| of V747K of | PENIPQPISNTSRANLNKLLTDYTEMKKAILHVYWEEFQKDPVGLMSRVAQ |
| SEQ ID | PAPKNIDQRKLIPVKDGNERLTSSGFACSQCCQPLYVYKLEQVNDKGKPHT |
| NO: 2. | NYFGRCNVSEHERLILLSPHKPEANDELVTYSLGKFGQRALDFYSIHVTRE |
| | SNHPVKPLEQIGGNSCASGPVGKALSDACMGAVASFLTKYQDIILEHQKVI |
| | KKNEKRLANLKDIASANGLAFPKITLPPQPHTKEGIEAYNNVVAQIVIWVN |
| | LNLWQKLKIGRDEAKPLQRLKGFPSFPLVERQANEVDWWDMVCNVKKLINE |
| | KKEDGKVFWQNLAGYKRQEALLPYLSSEEDRKKGKKFARYQFGDLLLHLEK |
| | KHGEDWGKVYDEAWERIDKKVEGLSKHIKLEEERRSEDAQSKAALTDWLRA |
| | KASFVIEGLKEADKDEFCRCELKLQKWYGDLRGKPFAIEAENSILDISGES |
| | KQYNCAFIWQKDGVKKLNLYLIINYFKGGKLRFKKIKPEAFEANRFYTVIN |
| | KKSGEIVPMEVNFNFDDPNLIILPLAFGKRQGREFIWNDLLSLETGSLKLA |
| | NGRVIEKTLYNRRTRQDEPALFVALTFERREVLDSSNIKPMNLIGIDRGEN |
| | IPAVIALTDPEGCPLSRFKDSLGNPTHILRIGESYKEKQRTIQAAKEVEQR |
| | RAGGYSRKYASKAKNLADDMVRNTARDLLYYAKTQDAMLIFENLSRGFGRQ |
| | GKRTFMAERQYTRMEDWLTAKLAYEGLPSKTYLSKTLAQYTSKTCSNCGFT |
| | ITSADYDRVLEKLKKTATGWMTTINGKELKVEGQITYYNRYKRQNVVKDLS |
| | VELDRLSEESVNNDISSWTKGRSGEALSLLKKRFSHRPVQEKFVCLNCGFE |
| | THADEQAALNIARSWLFLRSQEYKKYQTNKTTGNTDKRAFVETWQSFYRKK |
| | LKEVWKPAV (SEQ ID NO: 82) |
| substitution | MQEIKRINKIRRRLVKDSNTKKAGKTGPMKTLLVRVMTPDLRERLENLRKK |
| of L379R, a | PENIPQPISNTSRANLNKLLTDYTEMKKAILHVYWEEFQKDPVGLMSRVAQ |
| substitution | PAPKNIDQRKLIPVKDGNERLTSSGFACSQCCQPLYVYKLEQVNDKGKPHT |
| of C477K, a | NYFGRCNVSEHERLILLSPHKPEANDELVTYSLGKFGQRALDFYSIHVTRE |
| substitution | SNHPVKPLEQIGGNSCASGPVGKALSDACMGAVASFLTKYQDIILEHQKVI |
| of A708K, a | KKNEKRLANLKDIASANGLAFPKITLPPQPHTKEGIEAYNNVVAQIVIWVN |
| deletion of P | LNLWQKLKIGRDEAKPLQRLKGFPSFPLVERQANEVDWWDMVCNVKKLINE |
| at position | KKEDGKVFWQNLAGYKRQEALRPYLSSEEDRKKGKKFARYQFGDLLLHLEK |
| 793 and a | KHGEDWGKVYDEAWERIDKKVEGLSKHIKLEEERRSEDAQSKAALTDWLRA |
| substitution | KASFVIEGLKEADKDEFKRCELKLQKWYGDLRGKPFAIEAENSILDISGES |
| of M779N of | KQYNCAFIWQKDGVKKLNLYLIINYFKGGKLRFKKIKPEAFEANRFYTVIN |
| SEQ ID | KKSGEIVPMEVNFNFDDPNLIILPLAFGKRQGREFIWNDLLSLETGSLKLA |
| NO: 2. | NGRVIEKTLYNRRTRQDEPALFVALTFERREVLDSSNIKPMNLIGIDRGEN |
| | IPAVIALTDPEGCPLSRFKDSLGNPTHILRIGESYKEKQRTIQAKKEVEQR |
| | RAGGYSRKYASKAKNLADDMVRNTARDLLYYAVTQDAMLIFENLSRGFGRQ |
| | GKRTFMAERQYTRNEDWLTAKLAYEGLSKTYLSKTLAQYTSKTCSNCGFTI |
| | TSADYDRVLEKLKKTATGWMTTINGKELKVEGQITYYNRYKRQNVVKDLSV |
| | ELDRLSEESVNNDISSWTKGRSGEALSLLKKRFSHRPVQEKFVCLNCGFET |
| | HADEQAALNIARSWLFLRSQEYKKYQTNKTTGNTDKRAFVETWQSFYRKKL |
| | KEVWKPAV (SEQ ID NO: 83) |
| L379R, | MQEIKRINKIRRRLVKDSNTKKAGKTGPMKTLLVRVMTPDLRERLENLRKK |
| F755M | PENIPQPISNTSRANLNKLLTDYTEMKKAILHVYWEEFQKDPVGLMSRVAQ |
| | PAPKNIDQRKLIPVKDGNERLTSSGFACSQCCQPLYVYKLEQVNDKGKPHT |
| | NYFGRCNVSEHERLILLSPHKPEANDELVTYSLGKFGQRALDFYSIHVTRE |
| | SNHPVKPLEQIGGNSCASGPVGKALSDACMGAVASFLTKYQDIILEHQKVI |
| | KKNEKRLANLKDIASANGLAFPKITLPPQPHTKEGIEAYNNVVAQIVIWVN |
| | LNLWQKLKIGRDEAKPLQRLKGFPSFPLVERQANEVDWWDMVCNVKKLINE |
| | KKEDGKVFWQNLAGYKRQEALLPYLSSEEDRKKGKKFARYQFGDLLLHLEK |
| | KHGEDWGKVYDEAWERIDKKVEGLSKHIKLEEERRSEDAQSKAALTDWLRA |
| | KASFVIEGLKEADKDEFCRCELKLQKWYGDLRGKPFAIEAENSILDISGFS |
| | KQYNCAFIWQKDGVKKLNLYLIINYFKGGKLRFKKIKPEAFEANRFYTVIN |
| | KKSGEIVPMEVNFNFDDPNLIILPLAFGKRQGREFIWNDLLSLETGSLKLA |
| | NGRVIEKTLYNRRTRQDEPALFVALTFERREVLDSSNIKPMNLIGIDRGEN |
| | IPAVIALTDPEGCPLSRFKDSLGNPTHILRIGESYKEKQRTIQAAKEVEQR |
| | RAGGYSRKYASKAKNLADDMVRNTARDLLYYAVTQDAMLIMENLSRGFGRQ |
| | GKRTFMAERQYTRMEDWLTAKLAYEGLPSKTYLSKTLAQYTSKTCSNCGFT |
| | ITSADYDRVLEKLKKTATGWMTTINGKELKVEGQITYYNRYKRQNVVKDLS |
| | VELDRLSEESVNNDISSWTKGRSGEALSLLKKRFSHRPVQEKFVCLNCGFE |
| | THADEQAALNIARSWLFLRSQEYKKYQTNKTTGNTDKRAFVETWQSFYRKK |
| | LKEVWKPAV (SEQ ID NO: 84) |
| 429: | MQEIKRINKIRRRLVKDSNTKKAGKTGPMKTLLVRVMTPDLRERLENLRKK |
| L379R, | PENIPQPISNTSRANLNKLLTDYTEMKKAILHVYWEEFQKDPVGLMSRVAQ |
| A708K, | PAPKNIDQRKLIPVKDGNERLTSSGFACSQCCQPLYVYKLEQVNDKGKPHT |
| P793_, | NYFGRCNVSEHERLILLSPHKPEANDELVTYSLGKFGQRALDFYSIHVTRE |
| Y857R | SNHPVKPLEQIGGNSCASGPVGKALSDACMGAVASFLTKYQDIILEHQKVI |
| | KKNEKRLANLKDIASANGLAFPKITLPPQPHTKEGIEAYNNVVAQIVIWVN |
| | LNLWQKLKIGRDEAKPLQRLKGFPSFPLVERQANEVDWWDMVCNVKKLINE |
| | KKEDGKVFWQNLAGYKRQEALRPYLSSEEDRKKGKKFARYQFGDLLLHLEK |
| | KHGEDWGKVYDEAWERIDKKVEGLSKHIKLEEERRSEDAQSKAALTDWLRA |
| | KASFVIEGLKEADKDEFCRCELKLQKWYGDLRGKPFAIEAENSILDISGFS |
| | KQYNCAFIWQKDGVKKLNLYLIINYFKGGKLRFKKIKPEAFEANRFYTVIN |
| | KKSGEIVPMEVNFNFDDPNLIILPLAFGKRQGREFIWNDLLSLETGSLKLA |
| | NGRVIEKTLYNRRTRQDEPALFVALTFERREVLDSSNIKPMNLIGIDRGEN |
| | IPAVIALTDPEGCPLSRFKDSLGNPTHILRIGESYKEKQRTIQAKKEVEQR |
| | RAGGYSRKYASKAKNLADDMVRNTARDLLYYAVTQDAMLIFENLSRGFGRQ |
| | GKRTFMAERQYTRMEDWLTAKLAYEGLSKTYLSKTLAQYTSKTCSNCGFTI |
| | TSADYDRVLEKLKKTATGWMTTINGKELKVEGQITYYNRRKRQNVVKDLSV |
| | ELDRLSEESVNNDISSWTKGRSGEALSLLKKRFSHRPVQEKFVCLNCGFET |
| | HADEQAALNIARSWLFLRSQEYKKYQTNKTTGNTDKRAFVETWQSFYRKKL |
| | KEVWKPAV (SEQ ID NO: 85) |
| 430: | MQEIKRINKIRRRLVKDSNTKKAGKTGPMKTLLVRVMTPDLRERLENLRKK |
| L379R, | PENIPQPISNTSRANLNKLLTDYTEMKKAILHVYWEEFQKDPVGLMSRVAQ |
| A708K, | PAPKNIDQRKLIPVKDGNERLTSSGFACSQCCQPLYVYKLEQVNDKGKPHT |
| P793_, | NYFGRCNVSEHERLILLSPHKPEANDELVTYSLGKFGQRALDFYSIHVTRE |
| Y857R, | SNHPVKPLEQIGGNSCASGPVGKALSDACMGAVASFLTKYQDIILEHQKVI |
| I658V | KKNEKRLANLKDIASANGLAFPKITLPPQPHTKEGIEAYNNVVAQIVIWVN |
| | LNLWQKLKIGRDEAKPLQRLKGFPSFPLVERQANEVDWWDMVCNVKKLINE |
| | KKEDGKVFWQNLAGYKRQEALRPYLSSEEDRKKGKKFARYQFGDLLLHLEK |
| | KHGEDWGKVYDEAWERIDKKVEGLSKHIKLEEERRSEDAQSKAALTDWLRA |
| | KASFVIEGLKEADKDEFCRCELKLQKWYGDLRGKPFAIEAENSILDISGFS |
| | KQYNCAFIWQKDGVKKLNLYLIINYFKGGKLRFKKIKPEAFEANRFYTVIN |
| | KKSGEIVPMEVNFNFDDPNLIILPLAFGKRQGREFIWNDLLSLETGSLKLA |
| | NGRVIEKTLYNRRTRQDEPALFVALTFERREVLDSSNIKPMNLIGVDRGEN |
| | IPAVIALTDPEGCPLSRFKDSLGNPTHILRIGESYKEKQRTIQAKKEVEQR |
| | RAGGYSRKYASKAKNLADDMVRNTARDLLYYAVTQDAMLIFENLSRGFGRQ |
| | GKRTFMAERQYTRMEDWLTAKLAYEGLSKTYLSKTLAQYTSKTCSNCGFTI |
| | TSADYDRVLEKLKKTATGWMTTINGKELKVEGQITYYNRRKRQNVVKDLSV |
| | ELDRLSEESVNNDISSWTKGRSGEALSLLKKRFSHRPVQEKFVCLNCGFET |
| | HADEQAALNIARSWLFLRSQEYKKYQTNKTTGNTDKRAFVETWQSFYRKKL |
| | KEVWKPAV (SEQ ID NO: 86) |
| 431: | MQEIKRINKIRRRLVKDSNTKKAGKTGPMKTLLVRVMTPDLRERLENLRKK |
| L379R, | PENIPQPISNTSRANLNKLLTDYTEMKKAILHVYWEEFQKDPVGLMSRVAQ |
| A708K, | PAPKNIDQRKLIPVKDGNERLTSSGFACSQCCQPLYVYKLEQVNDKGKPHT |
| P793_, | NYFGRCNVSEHERLILLSPHKPEANDELVTYSLGKFGQRALDFYSIHVTRE |
| Y857R, | SNHPVKPLEQIGGNSCASGPVGKALSDACMGAVASFLTKYQDIILEHQKVI |
| I658V, | KKNEKRLANLKDIASANGLAFPKITLPPQPHTKEGIEAYNNVVAQIVIWVN |
| E386N | LNLWQKLKIGRDEAKPLQRLKGFPSFPLVERQANEVDWWDMVCNVKKLINE |
| | KKEDGKVFWQNLAGYKRQEALRPYLSSENDRKKGKKFARYQFGDLLLHLEK |
| | KHGEDWGKVYDEAWERIDKKVEGLSKHIKLEEERRSEDAQSKAALTDWLRA |
| | KASFVIEGLKEADKDEFCRCELKLQKWYGDLRGKPFAIEAENSILDISGFS |
| | KQYNCAFIWQKDGVKKLNLYLIINYFKGGKLRFKKIKPEAFEANRFYTVIN |
| | KKSGEIVPMEVNFNFDDPNLIILPLAFGKRQGREFIWNDLLSLETGSLKLA |
| | NGRVIEKTLYNRRTRQDEPALFVALTFERREVLDSSNIKPMNLIGVDRGEN |
| | IPAVIALTDPEGCPLSRFKDSLGNPTHILRIGESYKEKQRTIQAKKEVEQR |
| | RAGGYSRKYASKAKNLADDMVRNTARDLLYYAVTQDAMLIFENLSRGFGRQ |
| | GKRTFMAERQYTRMEDWLTAKLAYEGLSKTYLSKTLAQYTSKTCSNCGFTI |
| | TSADYDRVLEKLKKTATGWMTTINGKELKVEGQITYYNRRKRQNVVKDLSV |
| | ELDRLSEESVNNDISSWTKGRSGEALSLLKKRFSHRPVQEKFVCLNCGFET |
| | HADEQAALNIARSWLFLRSQEYKKYQTNKTTGNTDKRAFVETWQSFYRKKL |
| | KEVWKPAV (SEQ ID NO: 87) |
| 432: | MQEIKRINKIRRRLVKDSNTKKAGKTGPMKTLLVRVMTPDLRERLENLRKK |
| L379R, | PENIPQPISNTSRANLNKLLTDYTEMKKAILHVYWEEFQKDPVGLMSRVAQ |
| A708K, | PAPKNIDQRKLIPVKDGNERLTSSGFACSQCCQPLYVYKLEQVNDKGKPHT |
| P793_, | NYFGRCNVSEHERLILLSPHKPEANDELVTYSLGKFGQRALDFYSIHVTRE |
| Y857R, | SNHPVKPLEQIGGNSCASGPVGKALSDACMGAVASFLTKYQDIILEHQKVI |
| I658V, | KKNEKRLANLKDIASANGLAFPKITLPPQPHTKEGIEAYNNVVAQIVIWVN |
| L404K | LNLWQKLKIGRDEAKPLQRLKGFPSFPLVERQANEVDWWDMVCNVKKLINE |
| | KKEDGKVFWQNLAGYKRQEALRPYLSSEEDRKKGKKFARYQFGDLLKHLEK |
| | KHGEDWGKVYDEAWERIDKKVEGLSKHIKLEEERRSEDAQSKAALTDWLRA |
| | KASFVIEGLKEADKDEFCRCELKLQKWYGDLRGKPFAIEAENSILDISGFS |
| | KQYNCAFIWQKDGVKKLNLYLIINYFKGGKLRFKKIKPEAFEANRFYTVIN |
| | KKSGEIVPMEVNFNFDDPNLIILPLAFGKRQGREFIWNDLLSLETGSLKLA |
| | NGRVIEKTLYNRRTRQDEPALFVALTFERREVLDSSNIKPMNLIGVDRGEN |
| | IPAVIALTDPEGCPLSRFKDSLGNPTHILRIGESYKEKQRTIQAKKEVEQR |
| | RAGGYSRKYASKAKNLADDMVRNTARDLLYYAVTQDAMLIFENLSRGFGRQ |
| | GKRTFMAERQYTRMEDWLTAKLAYEGLSKTYLSKTLAQYTSKTCSNCGFTI |
| | TSADYDRVLEKLKKTATGWMTTINGKELKVEGQITYYNRRKRQNVVKDLSV |
| | ELDRLSEESVNNDISSWTKGRSGEALSLLKKRFSHRPVQEKFVCLNCGFET |
| | HADEQAALNIARSWLFLRSQEYKKYQTNKTTGNTDKRAFVETWQSFYRKKL |
| | KEVWKPAV (SEQ ID NO: 88) |
| 433: | MQEIKRINKIRRRLVKDSNTKKAGKTGPMKTLLVRVMTPDLRERLENLRKK |
| L379R, | PENIPQPISNTSRANLNKLLTDYTEMKKAILHVYWEEFQKDPVGLMSRVAQ |
| A708K, | PAPKNIDQRKLIPVKDGNERLTSSGFACSQCCQPLYVYKLEQVNDKGKPHT |
| P793_, | NYFGRCNVSEHERLILLSPHKPEANDELVTYSLGKFGQVRALDFYSIHVTR |
| Y857R, | ESNHPVKPLEQIGGNSCASGPVGKALSDACMGAVASFLTKYQDIILEHQKV |
| I658V, | IKKNEKRLANLKDIASANGLAFPKITLPPQPHTKEGIEAYNNVVAQIVIWV |
| ^V192 | NLNLWQKLKIGRDEAKPLQRLKGFPSFPLVERQANEVDWWDMVCNVKKLIN |
| | EKKEDGKVFWQNLAGYKRQEALRPYLSSEEDRKKGKKFARYQFGDLLLHLE |
| | KKHGEDWGKVYDEAWERIDKKVEGLSKHIKLEEERRSEDAQSKAALTDWLR |
| | AKASFVIEGLKEADKDEFCRCELKLQKWYGDLRGKPFAIEAENSILDISGF |
| | SKQYNCAFIWQKDGVKKLNLYLIINYFKGGKLRFKKIKPEAFEANRFYTVI |
| | NKKSGEIVPMEVNFNFDDPNLIILPLAFGKRQGREFIWNDLLSLETGSLKL |
| | ANGRVIEKTLYNRRTRQDEPALFVALTFERREVLDSSNIKPMNLIGVDRGE |
| | NIPAVIALTDPEGCPLSRFKDSLGNPTHILRIGESYKEKQRTIQAKKEVEQ |
| | RRAGGYSRKYASKAKNLADDMVRNTARDLLYYAVTQDAMLIFENLSRGFGR |
| | QGKRTFMAERQYTRMEDWLTAKLAYEGLSKTYLSKTLAQYTSKTCSNCGFT |
| | ITSADYDRVLEKLKKTATGWMTTINGKELKVEGQITYYNRRKRQNVVKDLS |
| | VELDRLSEESVNNDISSWTKGRSGEALSLLKKRFSHRPVQEKFVCLNCGFE |
| | THADEQAALNIARSWLFLRSQEYKKYQTNKTTGNTDKRAFVETWQSFYRKK |
| | LKEVWKPAV (SEQ ID NO: 89) |
| 434: | MQEIKRINKIRRRLVKDSNTKKAGKTGPMKTLLVRVMTPDLRERLENLRKK |
| L379R, | PENIPQPISNTSRANLNKLLTDYTEMKKAILHVYWEEFQKDPVGLMSRVAQ |
| A708K, | PAPKNIDQRKLIPVKDGNERLTSSGFACSQCCQPLYVYKLEQVNDKGKPHT |
| P793_, | NYFGRCNVSEHERLILLSPHKPEANDELVTYSLGKFGQRALDFYSIHVTRE |
| Y857R, | SNHPVKPLEQIGGNSCASGPVGKALSDACMGAVASFLTKYQDIILEHQKVI |
| I658V, | KKNEKRLANLKDIASANGLAFPKITLPPQPHTKEGIEAYNNVVAQIVIWVN |
| L404K, | LNLWQKLKIGRDEAKPLQRLKGFPSFPLVERQANEVDWWDMVCNVKKLINE |
| E386N | KKEDGKVFWQNLAGYKRQEALRPYLSSENDRKKGKKFARYQFGDLLKHLEK |
| | KHGEDWGKVYDEAWERIDKKVEGLSKHIKLEEERRSEDAQSKAALTDWLRA |
| | KASFVIEGLKEADKDEFCRCELKLQKWYGDLRGKPFAIEAENSILDISGFS |
| | KQYNCAFIWQKDGVKKLNLYLIINYFKGGKLREKKIKPEAFEANRFYTVIN |
| | KKSGEIVPMEVNFNFDDPNLIILPLAFGKRQGREFIWNDLLSLETGSLKLA |
| | NGRVIEKTLYNRRTRQDEPALFVALTFERREVLDSSNIKPMNLIGVDRGEN |
| | IPAVIALTDPEGCPLSRFKDSLGNPTHILRIGESYKEKQRTIQAKKEVEQR |
| | RAGGYSRKYASKAKNLADDMVRNTARDLLYYAVTQDAMLIFENLSRGFGRQ |
| | GKRTFMAERQYTRMEDWLTAKLAYEGLSKTYLSKTLAQYTSKTCSNCGFTI |
| | TSADYDRVLEKLKKTATGWMTTINGKELKVEGQITYYNRRKRQNVVKDLSV |
| | ELDRLSEESVNNDISSWTKGRSGEALSLLKKRFSHRPVQEKFVCLNCGFET |
| | HADEQAALNIARSWLFLRSQEYKKYQTNKTTGNTDKRAFVETWQSFYRKKL |
| | KEVWKPAV (SEQ ID NO: 90) |
| 435: | MQEIKRINKIRRRLVKDSNTKKAGKTGPMKTLLVRVMTPDLRERLENLRKK |
| L379R, | PENIPQPISNTSRANLNKLLTDYTEMKKAILHVYWEEFQKDPVGLMSRVAQ |
| A708K, | PAPKNIDQRKLIPVKDGNERLTSSGFACSQCCQPLYVYKLEQVNDKGKPHT |
| P793_, | NYFGRCNVSEHERLILLSPHKPEANDELVTYSLGKFGQRALDFYSIHVTRE |
| Y857R, | SNHPVKPLEQIGGNSCASGPVGKALSDACMGAVASFLTKYQDIILEHQKVI |
| I658V, | KKNEKRLANLKDIASANGLAFPKITLPPQPHTKEGIEAYNNVVAQIVIWVN |
| F399L | LNLWQKLKIGRDEAKPLQRLKGFPSFPLVERQANEVDWWDMVCNVKKLINE |
| | KKEDGKVFWQNLAGYKRQEALRPYLSSEEDRKKGKKFARYQLGDLLLHLEK |
| | KHGEDWGKVYDEAWERIDKKVEGLSKHIKLEEERRSEDAQSKAALTDWLRA |
| | KASFVIEGLKEADKDEFCRCELKLQKWYGDLRGKPFAIEAENSILDISGFS |
| | KQYNCAFIWQKDGVKKLNLYLIINYFKGGKLRFKKIKPEAFEANRFYTVIN |
| | KKSGEIVPMEVNFNFDDPNLIILPLAFGKRQGREFIWNDLLSLETGSLKLA |
| | NGRVIEKTLYNRRTRQDEPALFVALTFERREVLDSSNIKPMNLIGVDRGEN |
| | IPAVIALTDPEGCPLSRFKDSLGNPTHILRIGESYKEKQRTIQAKKEVEQR |
| | RAGGYSRKYASKAKNLADDMVRNTARDLLYYAVTQDAMLIFENLSRGFGRQ |
| | GKRTFMAERQYTRMEDWLTAKLAYEGLSKTYLSKTLAQYTSKTCSNCGFTI |
| | TSADYDRVLEKLKKTATGWMTTINGKELKVEGQITYYNRRKRQNVVKDLSV |
| | ELDRLSEESVNNDISSWTKGRSGEALSLLKKRFSHRPVQEKFVCLNCGFET |
| | HADEQAALNIARSWLFLRSQEYKKYQTNKTTGNTDKRAFVETWQSFYRKKL |
| | KEVWKPAV (SEQ ID NO: 91) |
| 436: | MQEIKRINKIRRRLVKDSNTKKAGKTGPMKTLLVRVMTPDLRERLENLRKK |
| L379R, | PENIPQPISNTSRANLNKLLTDYTEMKKAILHVYWEEFQKDPVGLMSRVAQ |
| A708K, | PAPKNIDQRKLIPVKDGNERLTSSGFACSQCCQPLYVYKLEQVNDKGKPHT |
| P793_, | NYFGRCNVSEHERLILLSPHKPEANDELVTYSLGKFGQRALDFYSIHVTRE |
| Y857R, | SNHPVKPLEQIGGNSCASGPVGKALSDACMGAVASFLTKYQDIILEHQKVI |
| I658V, | KKNEKRLANLKDIASANGLAFPKITLPPQPHTKEGIEAYNNVVAQIVIWVN |
| F399L, | LNLWQKLKIGRDEAKPLQRLKGFPSFPLVERQANEVDWWDMVCNVKKLINE |
| E386N | KKEDGKVFWQNLAGYKRQEALRPYLSSENDRKKGKKFARYQLGDLLLHLEK |
| | KHGEDWGKVYDEAWERIDKKVEGLSKHIKLEEERRSEDAQSKAALTDWLRA |
| | KASFVIEGLKEADKDEFCRCELKLQKWYGDLRGKPFAIEAENSILDISGFS |
| | KQYNCAFIWQKDGVKKLNLYLIINYFKGGKLRFKKIKPEAFEANRFYTVIN |
| | KKSGEIVPMEVNFNFDDPNLIILPLAFGKRQGREFIWNDLLSLETGSLKLA |
| | NGRVIEKTLYNRRTRQDEPALFVALTFERREVLDSSNIKPMNLIGVDRGEN |
| | IPAVIALTDPEGCPLSRFKDSLGNPTHILRIGESYKEKQRTIQAKKEVEQR |
| | RAGGYSRKYASKAKNLADDMVRNTARDLLYYAVTQDAMLIFENLSRGFGRQ |
| | GKRTFMAERQYTRMEDWLTAKLAYEGLSKTYLSKTLAQYTSKTCSNCGFTI |
| | TSADYDRVLEKLKKTATGWMTTINGKELKVEGQITYYNRRKRQNVVKDLSV |
| | ELDRLSEESVNNDISSWTKGRSGEALSLLKKRFSHRPVQEKFVCLNCGFET |
| | HADEQAALNIARSWLFLRSQEYKKYQTNKTTGNTDKRAFVETWQSFYRKKL |
| | KEVWKPAV (SEQ ID NO: 92) |
| 437: | MQEIKRINKIRRRLVKDSNTKKAGKTGPMKTLLVRVMTPDLRERLENLRKK |
| L379R, | PENIPQPISNTSRANLNKLLTDYTEMKKAILHVYWEEFQKDPVGLMSRVAQ |
| A708K, | PAPKNIDQRKLIPVKDGNERLTSSGFACSQCCQPLYVYKLEQVNDKGKPHT |
| P793_, | NYFGRCNVSEHERLILLSPHKPEANDELVTYSLGKFGQRALDFYSIHVTRE |
| Y857R, | SNHPVKPLEQIGGNSCASGPVGKALSDACMGAVASFLTKYQDIILEHQKVI |
| I658V, | KKNEKRLANLKDIASANGLAFPKITLPPQPHTKEGIEAYNNVVAQIVIWVN |
| F399L, | LNLWQKLKIGRDEAKPLQRLKGFPSFPLVERQANEVDWWDMVCNVKKLINE |
| C477S | KKEDGKVFWQNLAGYKRQEALRPYLSSEEDRKKGKKFARYQLGDLLLHLEK |
| | KHGEDWGKVYDEAWERIDKKVEGLSKHIKLEEERRSEDAQSKAALTDWLRA |
| | KASFVIEGLKEADKDEFSRCELKLQKWYGDLRGKPFAIEAENSILDISGFS |
| | KQYNCAFIWQKDGVKKLNLYLIINYFKGGKLRFKKIKPEAFEANRFYTVIN |
| | KKSGEIVPMEVNFNFDDPNLIILPLAFGKRQGREFIWNDLLSLETGSLKLA |
| | NGRVIEKTLYNRRTRQDEPALFVALTFERREVLDSSNIKPMNLIGVDRGEN |
| | IPAVIALTDPEGCPLSRFKDSLGNPTHILRIGESYKEKQRTIQAKKEVEQR |
| | RAGGYSRKYASKAKNLADDMVRNTARDLLYYAVTQDAMLIFENLSRGFGRQ |
| | GKRTFMAERQYTRMEDWLTAKLAYEGLSKTYLSKTLAQYTSKTCSNCGFTI |
| | TSADYDRVLEKLKKTATGWMTTINGKELKVEGQITYYNRRKRQNVVKDLSV |
| | ELDRLSEESVNNDISSWTKGRSGEALSLLKKRFSHRPVQEKFVCLNCGFET |
| | HADEQAALNIARSWLFLRSQEYKKYQTNKTTGNTDKRAFVETWQSFYRKKL |
| | KEVWKPAV (SEQ ID NO: 93) |
| 438: | MQEIKRINKIRRRLVKDSNTKKAGKTGPMKTLLVRVMTPDLRERLENLRKK |
| L379R, | PENIPQPISNTSRANLNKLLTDYTEMKKAILHVYWEEFQKDPVGLMSRVAQ |
| A708K, | PAPKNIDQRKLIPVKDGNERLTSSGFACSQCCQPLYVYKLEQVNDKGKPHT |
| P793_, | NYFGRCNVSEHERLILLSPHKPEANDELVTYSLGKFGQRALDFYSIHVTRE |
| Y857R, | SNHPVKPLEQIGGNSCASGPVGKALSDACMGAVASFLTKYQDIILEHQKVI |
| I658V, | KKNEKRLANLKDIASANGLAFPKITLPPQPHTKEGIEAYNNVVAQIVIWVN |
| F399L, | LNLWQKLKIGRDEAKPLQRLKGFPSFPLVERQANEVDWWDMVCNVKKLINE |
| L404K | KKEDGKVFWQNLAGYKRQEALRPYLSSEEDRKKGKKFARYQLGDLLKHLEK |
| | KHGEDWGKVYDEAWERIDKKVEGLSKHIKLEEERRSEDAQSKAALTDWLRA |
| | KASFVIEGLKEADKDEFCRCELKLQKWYGDLRGKPFAIEAENSILDISGFS |
| | KQYNCAFIWQKDGVKKLNLYLIINYFKGGKLREKKIKPEAFEANRFYTVIN |
| | KKSGEIVPMEVNFNFDDPNLIILPLAFGKRQGREFIWNDLLSLETGSLKLA |
| | NGRVIEKTLYNRRTRQDEPALFVALTFERREVLDSSNIKPMNLIGVDRGEN |
| | IPAVIALTDPEGCPLSRFKDSLGNPTHILRIGESYKEKQRTIQAKKEVEQR |
| | RAGGYSRKYASKAKNLADDMVRNTARDLLYYAVTQDAMLIFENLSRGFGRQ |
| | GKRTFMAERQYTRMEDWLTAKLAYEGLSKTYLSKTLAQYTSKTCSNCGFTI |
| | TSADYDRVLEKLKKTATGWMTTINGKELKVEGQITYYNRRKRQNVVKDLSV |
| | ELDRLSEESVNNDISSWTKGRSGEALSLLKKRFSHRPVQEKFVCLNCGFET |
| | HADEQAALNIARSWLFLRSQEYKKYQTNKTTGNTDKRAFVETWQSFYRKKL |
| | KEVWKPAV (SEQ ID NO: 94) |
| 439: | MQEIKRINKIRRRLVKDSNTKKAGKTGPMKTLLVRVMTPDLRERLENLRKK |
| L379R, | PENIPQPISNTSRANLNKLLTDYTEMKKAILHVYWEEFQKDPVGLMSRVAQ |
| A708K, | PAPKNIDQRKLIPVKDGNERLTSSGFACSQCCQPLYVYKLEQVNDKGKPHT |
| P793_, | NYFGRCNVSEHERLILLSPHKPEANDELVTYSLGKFGQRALDFYSIHVTRE |
| Y857R, | SNHPVKPLEQIGGNSCASGPVGKALSDACMGAVASFLTKYQDIILEHQKVI |
| I658V, | KKNEKRLANLKDIASANGLAFPKITLPPQPHTKEGIEAYNNVVAQIVIWVN |
| F399L, | LNLWQKLKIGRDEAKPLQRLKGFPSFPLVERQANEVDWWDMVCNVKKLINE |
| E386N, | KKEDGKVFWQNLAGYKRQEALRPYLSSENDRKKGKKFARYQLGDLLKHLEK |
| C477S, | KHGEDWGKVYDEAWERIDKKVEGLSKHIKLEEERRSEDAQSKAALTDWLRA |
| L404K | KASFVIEGLKEADKDEFSRCELKLQKWYGDLRGKPFAIEAENSILDISGFS |
| | KQYNCAFIWQKDGVKKLNLYLIINYFKGGKLREKKIKPEAFEANRFYTVIN |
| | KKSGEIVPMEVNFNFDDPNLIILPLAFGKRQGREFIWNDLLSLETGSLKLA |
| | NGRVIEKTLYNRRTRQDEPALFVALTFERREVLDSSNIKPMNLIGVDRGEN |
| | IPAVIALTDPEGCPLSRFKDSLGNPTHILRIGESYKEKQRTIQAKKEVEQR |
| | RAGGYSRKYASKAKNLADDMVRNTARDLLYYAVTQDAMLIFENLSRGFGRQ |
| | GKRTFMAERQYTRMEDWLTAKLAYEGLSKTYLSKTLAQYTSKTCSNCGFTI |
| | TSADYDRVLEKLKKTATGWMTTINGKELKVEGQITYYNRRKRONVVKDLSV |
| | ELDRLSEESVNNDISSWTKGRSGEALSLLKKRFSHRPVQEKFVCLNCGFET |
| | HADEQAALNIARSWLFLRSQEYKKYQTNKTTGNTDKRAFVETWQSFYRKKL |
| | KEVWKPAV (SEQ ID NO: 95) |
| 440: | MQEIKRINKIRRRLVKDSNTKKAGKTGPMKTLLVRVMTPDLRERLENLRKK |
| L379R, | PENIPQPISNTSRANLNKLLTDYTEMKKAILHVYWEEFQKDPVGLMSRVAQ |
| A708K, | PAPKNIDQRKLIPVKDGNERLTSSGFACSQCCQPLYVYKLEQVNDKGKPHT |
| P793_, | NYFGRCNVSEHERLILLSPHKPEANDELVTYSLGKFGQRALDFYSIHVTRE |
| Y857R, | SNHPVKPLEQIGGNSCASGPVGKALSDACMGAVASFLTKYQDIILEHQKVI |
| I658V, | KKNEKRLANLKDIASANGLAFPKITLPPQPHTKEGIEAYNNVVAQIVIWVN |
| F399L, | LNLWQKLKIGRDEAKPLQRLKGFPSFPLVERQANEVDWWDMVCNVKKLINE |
| Y797L | KKEDGKVFWQNLAGYKRQEALRPYLSSEEDRKKGKKFARYQLGDLLLHLEK |
| | KHGEDWGKVYDEAWERIDKKVEGLSKHIKLEEERRSEDAQSKAALTDWLRA |
| | KASFVIEGLKEADKDEFCRCELKLQKWYGDLRGKPFAIEAENSILDISGFS |
| | KQYNCAFIWQKDGVKKLNLYLIINYFKGGKLREKKIKPEAFEANRFYTVIN |
| | KKSGEIVPMEVNFNFDDPNLIILPLAFGKRQGREFIWNDLLSLETGSLKLA |
| | NGRVIEKTLYNRRTRQDEPALFVALTFERREVLDSSNIKPMNLIGVDRGEN |
| | IPAVIALTDPEGCPLSRFKDSLGNPTHILRIGESYKEKQRTIQAKKEVEQR |
| | RAGGYSRKYASKAKNLADDMVRNTARDLLYYAVTQDAMLIFENLSRGFGRQ |
| | GKRTFMAERQYTRMEDWLTAKLAYEGLSKTLLSKTLAQYTSKTCSNCGFTI |
| | TSADYDRVLEKLKKTATGWMTTINGKELKVEGQITYYNRRKRQNVVKDLSV |
| | ELDRLSEESVNNDISSWTKGRSGEALSLLKKRFSHRPVQEKFVCLNCGFET |
| | HADEQAALNIARSWLFLRSQEYKKYQTNKTTGNTDKRAFVETWQSFYRKKL |
| | KEVWKPAV (SEQ ID NO: 96) |
| 441: | MQEIKRINKIRRRLVKDSNTKKAGKTGPMKTLLVRVMTPDLRERLENLRKK |
| L379R, | PENIPQPISNTSRANLNKLLTDYTEMKKAILHVYWEEFQKDPVGLMSRVAQ |
| A708K, | PAPKNIDQRKLIPVKDGNERLTSSGFACSQCCQPLYVYKLEQVNDKGKPHT |
| P793_, | NYFGRCNVSEHERLILLSPHKPEANDELVTYSLGKFGQRALDFYSIHVTRE |
| Y857R, | SNHPVKPLEQIGGNSCASGPVGKALSDACMGAVASFLTKYQDIILEHQKVI |
| I658V, | KKNEKRLANLKDIASANGLAFPKITLPPQPHTKEGIEAYNNVVAQIVIWVN |
| F399L, | LNLWQKLKIGRDEAKPLQRLKGFPSFPLVERQANEVDWWDMVCNVKKLINE |
| Y797L, | KKEDGKVFWQNLAGYKRQEALRPYLSSENDRKKGKKFARYQLGDLLLHLEK |
| E386N | KHGEDWGKVYDEAWERIDKKVEGLSKHIKLEEERRSEDAQSKAALTDWLRA |
| | KASFVIEGLKEADKDEFCRCELKLQKWYGDLRGKPFAIEAENSILDISGFS |
| | KQYNCAFIWQKDGVKKLNLYLIINYFKGGKLREKKIKPEAFEANRFYTVIN |
| | KKSGEIVPMEVNFNFDDPNLIILPLAFGKRQGREFIWNDLLSLETGSLKLA |
| | NGRVIEKTLYNRRTRQDEPALFVALTFERREVLDSSNIKPMNLIGVDRGEN |
| | IPAVIALTDPEGCPLSRFKDSLGNPTHILRIGESYKEKQRTIQAKKEVEQR |
| | RAGGYSRKYASKAKNLADDMVRNTARDLLYYAVTQDAMLIFENLSRGFGRQ |
| | GKRTFMAERQYTRMEDWLTAKLAYEGLSKTLLSKTLAQYTSKTCSNCGFTI |
| | TSADYDRVLEKLKKTATGWMTTINGKELKVEGQITYYNRRKRQNVVKDLSV |
| | ELDRLSEESVNNDISSWTKGRSGEALSLLKKRFSHRPVQEKFVCLNCGFET |
| | HADEQAALNIARSWLFLRSQEYKKYQTNKTTGNTDKRAFVETWQSFYRKKL |
| | KEVWKPAV (SEQ ID NO: 97) |
| 442: | MQEIKRINKIRRRLVKDSNTKKAGKTGPMKTLLVRVMTPDLRERLENLRKK |
| L379R, | PENIPQPISNTSRANLNKLLTDYTEMKKAILHVYWEEFQKDPVGLMSRVAQ |
| A708K, | PAPKNIDQRKLIPVKDGNERLTSSGFACSQCCQPLYVYKLEQVNDKGKPHT |
| P793_, | NYFGRCNVSEHERLILLSPHKPEANDELVTYSLGKFGQRALDFYSIHVTRE |
| Y857R, | SNHPVKPLEQIGGNSCASGPVGKALSDACMGAVASFLTKYQDIILEHQKVI |
| I658V, | KKNEKRLANLKDIASANGLAFPKITLPPQPHTKEGIEAYNNVVAQIVIWVN |
| F399L, | LNLWQKLKIGRDEAKPLQRLKGFPSFPLVERQANEVDWWDMVCNVKKLINE |
| Y797L, | KKEDGKVFWQNLAGYKRQEALRPYLSSENDRKKGKKFARYQLGDLLKHLEK |
| E386N, | KHGEDWGKVYDEAWERIDKKVEGLSKHIKLEEERRSEDAQSKAALTDWLRA |
| C477S, | KASFVIEGLKEADKDEFSRCELKLQKWYGDLRGKPFAIEAENSILDISGFS |
| L404K | KQYNCAFIWQKDGVKKLNLYLIINYFKGGKLRFKKIKPEAFEANRFYTVIN |
| | KKSGEIVPMEVNFNFDDPNLIILPLAFGKRQGREFIWNDLLSLETGSLKLA |
| | NGRVIEKTLYNRRTRQDEPALFVALTFERREVLDSSNIKPMNLIGVDRGEN |
| | IPAVIALTDPEGCPLSRFKDSLGNPTHILRIGESYKEKQRTIQAKKEVEQR |
| | RAGGYSRKYASKAKNLADDMVRNTARDLLYYAVTQDAMLIFENLSRGFGRQ |
| | GKRTFMAERQYTRMEDWLTAKLAYEGLSKTLLSKTLAQYTSKTCSNCGFTI |
| | TSADYDRVLEKLKKTATGWMTTINGKELKVEGQITYYNRRKRQNVVKDLSV |
| | ELDRLSEESVNNDISSWTKGRSGEALSLLKKRFSHRPVQEKFVCLNCGFET |
| | HADEQAALNIARSWLFLRSQEYKKYQTNKTTGNTDKRAFVETWQSFYRKKL |
| | KEVWKPAV (SEQ ID NO: 98) |
| 443: | MQEIKRINKIRRRLVKDSNTKKAGKTGPMKTLLVRVMTPDLRERLENLRKK |
| L379R, | PENIPQPISNTSRANLNKLLTDYTEMKKAILHVYWEEFQKDPVGLMSRVAQ |
| A708K, | PAPKNIDQRKLIPVKDGNERLTSSGFACSQCCQPLYVYKLEQVNDKGKPHT |
| P793_, | NYFGRCNVSEHERLILLSPHKPEANDELVTYSLGKFGQRALDFYSIHVTRE |
| Y857R, | SNHPVKPLEQIGGNSCASGPVGKALSDACMGAVASFLTKYQDIILEHQKVI |
| I658V, | KKNEKRLANLKDIASANGLAFPKITLPPQPHTKEGIEAYNNVVAQIVIWVN |
| Y797L | LNLWQKLKIGRDEAKPLQRLKGFPSFPLVERQANEVDWWDMVCNVKKLINE |
| | KKEDGKVFWQNLAGYKRQEALRPYLSSEEDRKKGKKFARYQFGDLLLHLEK |
| | KHGEDWGKVYDEAWERIDKKVEGLSKHIKLEEERRSEDAQSKAALTDWLRA |
| | KASFVIEGLKEADKDEFCRCELKLQKWYGDLRGKPFAIEAENSILDISGFS |
| | KQYNCAFIWQKDGVKKLNLYLIINYFKGGKLRFKKIKPEAFEANRFYTVIN |
| | KKSGEIVPMEVNFNFDDPNLIILPLAFGKRQGREFIWNDLLSLETGSLKLA |
| | NGRVIEKTLYNRRTRQDEPALFVALTFERREVLDSSNIKPMNLIGVDRGEN |
| | IPAVIALTDPEGCPLSRFKDSLGNPTHILRIGESYKEKQRTIQAKKEVEQR |
| | RAGGYSRKYASKAKNLADDMVRNTARDLLYYAVTQDAMLIFENLSRGFGRQ |
| | GKRTFMAERQYTRMEDWLTAKLAYEGLSKTLLSKTLAQYTSKTCSNCGFTI |
| | TSADYDRVLEKLKKTATGWMTTINGKELKVEGQITYYNRRKRQNVVKDLSV |
| | ELDRLSEESVNNDISSWTKGRSGEALSLLKKRFSHRPVQEKFVCLNCGFET |
| | HADEQAALNIARSWLFLRSQEYKKYQTNKTTGNTDKRAFVETWQSFYRKKL |
| | KEVWKPAV (SEQ ID NO: 99) |
| 444: | MQEIKRINKIRRRLVKDSNTKKAGKTGPMKTLLVRVMTPDLRERLENLRKK |
| L379R, | PENIPQPISNTSRANLNKLLTDYTEMKKAILHVYWEEFQKDPVGLMSRVAQ |
| A708K, | PAPKNIDQRKLIPVKDGNERLTSSGFACSQCCQPLYVYKLEQVNDKGKPHT |
| P793_, | NYFGRCNVSEHERLILLSPHKPEANDELVTYSLGKFGQRALDFYSIHVTRE |
| Y857R, | SNHPVKPLEQIGGNSCASGPVGKALSDACMGAVASFLTKYQDIILEHQKVI |
| I658V, | KKNEKRLANLKDIASANGLAFPKITLPPQPHTKEGIEAYNNVVAQIVIWVN |
| Y797L, | LNLWQKLKIGRDEAKPLQRLKGFPSFPLVERQANEVDWWDMVCNVKKLINE |
| L404K | KKEDGKVFWQNLAGYKRQEALRPYLSSEEDRKKGKKFARYQFGDLLKHLEK |
| | KHGEDWGKVYDEAWERIDKKVEGLSKHIKLEEERRSEDAQSKAALTDWLRA |
| | KASFVIEGLKEADKDEFCRCELKLQKWYGDLRGKPFAIEAENSILDISGFS |
| | KQYNCAFIWQKDGVKKLNLYLIINYFKGGKLRFKKIKPEAFEANRFYTVIN |
| | KKSGEIVPMEVNFNFDDPNLIILPLAFGKRQGREFIWNDLLSLETGSLKLA |
| | NGRVIEKTLYNRRTRQDEPALFVALTFERREVLDSSNIKPMNLIGVDRGEN |
| | IPAVIALTDPEGCPLSRFKDSLGNPTHILRIGESYKEKQRTIQAKKEVEQR |
| | RAGGYSRKYASKAKNLADDMVRNTARDLLYYAVTQDAMLIFENLSRGFGRQ |
| | GKRTFMAERQYTRMEDWLTAKLAYEGLSKTLLSKTLAQYTSKTCSNCGFTI |
| | TSADYDRVLEKLKKTATGWMTTINGKELKVEGQITYYNRRKRQNVVKDLSV |
| | ELDRLSEESVNNDISSWTKGRSGEALSLLKKRFSHRPVQEKFVCLNCGFET |
| | HADEQAALNIARSWLFLRSQEYKKYQTNKTTGNTDKRAFVETWQSFYRKKL |
| | KEVWKPAV (SEQ ID NO: 100) |
| 445: | MQEIKRINKIRRRLVKDSNTKKAGKTGPMKTLLVRVMTPDLRERLENLRKK |
| L379R, | PENIPQPISNTSRANLNKLLTDYTEMKKAILHVYWEEFQKDPVGLMSRVAQ |
| A708K, | PAPKNIDQRKLIPVKDGNERLTSSGFACSQCCQPLYVYKLEQVNDKGKPHT |
| P793_, | NYFGRCNVSEHERLILLSPHKPEANDELVTYSLGKFGQRALDFYSIHVTRE |
| Y857R, | SNHPVKPLEQIGGNSCASGPVGKALSDACMGAVASFLTKYQDIILEHQKVI |
| I658V, | KKNEKRLANLKDIASANGLAFPKITLPPQPHTKEGIEAYNNVVAQIVIWVN |
| Y797L, | LNLWQKLKIGRDEAKPLQRLKGFPSFPLVERQANEVDWWDMVCNVKKLINE |
| E386N | KKEDGKVFWQNLAGYKRQEALRPYLSSENDRKKGKKFARYQFGDLLLHLEK |
| | KHGEDWGKVYDEAWERIDKKVEGLSKHIKLEEERRSEDAQSKAALTDWLRA |
| | KASFVIEGLKEADKDEFCRCELKLQKWYGDLRGKPFAIEAENSILDISGFS |
| | KQYNCAFIWQKDGVKKLNLYLIINYFKGGKLRFKKIKPEAFEANRFYTVIN |
| | KKSGEIVPMEVNFNFDDPNLIILPLAFGKRQGREFIWNDLLSLETGSLKLA |
| | NGRVIEKTLYNRRTRQDEPALFVALTFERREVLDSSNIKPMNLIGVDRGEN |
| | IPAVIALTDPEGCPLSRFKDSLGNPTHILRIGESYKEKQRTIQAKKEVEQR |
| | RAGGYSRKYASKAKNLADDMVRNTARDLLYYAVTQDAMLIFENLSRGFGRQ |
| | GKRTFMAERQYTRMEDWLTAKLAYEGLSKTLLSKTLAQYTSKTCSNCGFTI |
| | TSADYDRVLEKLKKTATGWMTTINGKELKVEGQITYYNRRKRQNVVKDLSV |
| | ELDRLSEESVNNDISSWTKGRSGEALSLLKKRFSHRPVQEKFVCLNCGFET |
| | HADEQAALNIARSWLFLRSQEYKKYQTNKTTGNTDKRAFVETWQSFYRKKL |
| | KEVWKPAV (SEQ ID NO: 101) |
| 446: | MQEIKRINKIRRRLVKDSNTKKAGKTGPMKTLLVRVMTPDLRERLENLRKK |
| L379R, | PENIPQPISNTSRANLNKLLTDYTEMKKAILHVYWEEFQKDPVGLMSRVAQ |
| A708K, | PAPKNIDQRKLIPVKDGNERLTSSGFACSQCCQPLYVYKLEQVNDKGKPHT |
| P793_, | NYFGRCNVSEHERLILLSPHKPEANDELVTYSLGKFGQRALDFYSIHVTRE |
| Y857R, | SNHPVKPLEQIGGNSCASGPVGKALSDACMGAVASFLTKYQDIILEHQKVI |
| I658V, | KKNEKRLANLKDIASANGLAFPKITLPPQPHTKEGIEAYNNVVAQIVIWVN |
| Y797L, | LNLWQKLKIGRDEAKPLQRLKGFPSFPLVERQANEVDWWDMVCNVKKLINE |
| E386N, | KKEDGKVFWQNLAGYKRQEALRPYLSSENDRKKGKKFARYQFGDLLKHLEK |
| C477S, | KHGEDWGKVYDEAWERIDKKVEGLSKHIKLEEERRSEDAQSKAALTDWLRA |
| L404K | KASFVIEGLKEADKDEFSRCELKLQKWYGDLRGKPFAIEAENSILDISGFS |
| | KQYNCAFIWQKDGVKKLNLYLIINYFKGGKLRFKKIKPEAFEANRFYTVIN |
| | KKSGEIVPMEVNFNFDDPNLIILPLAFGKRQGREFIWNDLLSLETGSLKLA |
| | NGRVIEKTLYNRRTRQDEPALFVALTFERREVLDSSNIKPMNLIGVDRGEN |
| | IPAVIALTDPEGCPLSRFKDSLGNPTHILRIGESYKEKQRTIQAKKEVEQR |
| | RAGGYSRKYASKAKNLADDMVRNTARDLLYYAVTQDAMLIFENLSRGFGRQ |
| | GKRTFMAERQYTRMEDWLTAKLAYEGLSKTLLSKTLAQYTSKTCSNCGFTI |
| | TSADYDRVLEKLKKTATGWMTTINGKELKVEGQITYYNRRKRQNVVKDLSV |
| | ELDRLSEESVNNDISSWTKGRSGEALSLLKKRFSHRPVQEKFVCLNCGFET |
| | HADEQAALNIARSWLFLRSQEYKKYQTNKTTGNTDKRAFVETWQSFYRKKL |
| | KEVWKPAV (SEQ ID NO: 102) |
| 447: | MQEIKRINKIRRRLVKDSNTKKAGKTGPMKTLLVRVMTPDLRERLENLRKK |
| L379R, | PENIPQPISNTSRANLNKLLTDYTEMKKAILHVYWEEFQKDPVGLMSRVAQ |
| A708K, | PAPKNIDQRKLIPVKDGNERLTSSGFACSQCCQPLYVYKLEQVNDKGKPHT |
| P793_, | NYFGRCNVSEHERLILLSPHKPEANDELVTYSLGKFGQRALDFYSIHVTRE |
| Y857R, | SNHPVKPLEQIGGNSCASGPVGKALSDACMGAVASFLTKYQDIILEHQKVI |
| E386N | KKNEKRLANLKDIASANGLAFPKITLPPQPHTKEGIEAYNNVVAQIVIWVN |
| | LNLWQKLKIGRDEAKPLQRLKGFPSFPLVERQANEVDWWDMVCNVKKLINE |
| | KKEDGKVFWQNLAGYKRQEALRPYLSSENDRKKGKKFARYQFGDLLLHLEK |
| | KHGEDWGKVYDEAWERIDKKVEGLSKHIKLEEERRSEDAQSKAALTDWLRA |
| | KASFVIEGLKEADKDEFCRCELKLQKWYGDLRGKPFAIEAENSILDISGFS |
| | KQYNCAFIWQKDGVKKLNLYLIINYFKGGKLRFKKIKPEAFEANRFYTVIN |
| | KKSGEIVPMEVNFNFDDPNLIILPLAFGKRQGREFIWNDLLSLETGSLKLA |
| | NGRVIEKTLYNRRTRQDEPALFVALTFERREVLDSSNIKPMNLIGIDRGEN |
| | IPAVIALTDPEGCPLSRFKDSLGNPTHILRIGESYKEKQRTIQAKKEVEQR |
| | RAGGYSRKYASKAKNLADDMVRNTARDLLYYAVTQDAMLIFENLSRGFGRQ |
| | GKRTFMAERQYTRMEDWLTAKLAYEGLSKTYLSKTLAQYTSKTCSNCGFTI |
| | TSADYDRVLEKLKKTATGWMTTINGKELKVEGQITYYNRRKRQNVVKDLSV |
| | ELDRLSEESVNNDISSWTKGRSGEALSLLKKRFSHRPVQEKFVCLNCGFET |
| | HADEQAALNIARSWLFLRSQEYKKYQTNKTTGNTDKRAFVETWQSFYRKKL |
| | KEVWKPAV (SEQ ID NO: 103) |
| 448: | MQEIKRINKIRRRLVKDSNTKKAGKTGPMKTLLVRVMTPDLRERLENLRKK |
| L379R, | PENIPQPISNTSRANLNKLLTDYTEMKKAILHVYWEEFQKDPVGLMSRVAQ |
| A708K, | PAPKNIDQRKLIPVKDGNERLTSSGFACSQCCQPLYVYKLEQVNDKGKPHT |
| P793_, | NYFGRCNVSEHERLILLSPHKPEANDELVTYSLGKFGQRALDFYSIHVTRE |
| Y857R, | SNHPVKPLEQIGGNSCASGPVGKALSDACMGAVASFLTKYQDIILEHQKVI |
| E386N, | KKNEKRLANLKDIASANGLAFPKITLPPQPHTKEGIEAYNNVVAQIVIWVN |
| L404K | LNLWQKLKIGRDEAKPLQRLKGFPSFPLVERQANEVDWWDMVCNVKKLINE |
| | KKEDGKVFWQNLAGYKRQEALRPYLSSENDRKKGKKFARYQFGDLLKHLEK |
| | KHGEDWGKVYDEAWERIDKKVEGLSKHIKLEEERRSEDAQSKAALTDWLRA |
| | KASFVIEGLKEADKDEFCRCELKLQKWYGDLRGKPFAIEAENSILDISGFS |
| | KQYNCAFIWQKDGVKKLNLYLIINYFKGGKLRFKKIKPEAFEANRFYTVIN |
| | KKSGEIVPMEVNFNFDDPNLIILPLAFGKRQGREFIWNDLLSLETGSLKLA |
| | NGRVIEKTLYNRRTRQDEPALFVALTFERREVLDSSNIKPMNLIGIDRGEN |
| | IPAVIALTDPEGCPLSRFKDSLGNPTHILRIGESYKEKQRTIQAKKEVEQR |
| | RAGGYSRKYASKAKNLADDMVRNTARDLLYYAVTQDAMLIFENLSRGFGRQ |
| | GKRTFMAERQYTRMEDWLTAKLAYEGLSKTYLSKTLAQYTSKTCSNCGFTI |
| | TSADYDRVLEKLKKTATGWMTTINGKELKVEGQITYYNRRKRQNVVKDLSV |
| | ELDRLSEESVNNDISSWTKGRSGEALSLLKKRFSHRPVQEKFVCLNCGFET |
| | HADEQAALNIARSWLFLRSQEYKKYQTNKTTGNTDKRAFVETWQSFYRKKL |
| | KEVWKPAV (SEQ ID NO: 104) |
| 449: | MQEIKRINKIRRRLVKDSNTKKAGKTGPMKTLLVRVMTPDLRERLENLRKK |
| L379R, | PENIPQPISNTSRANLNKLLTDYTEMKKAILHVYWEEFQKDPVGLMSRVAQ |
| A708K, | PAPKNIDQRKLIPVKDGNERLTSSGFACSQCCQPLYVYKLEQVNDKGKPHT |
| P793_, | NYFGRCNVSEHERLILLSPHKPEANDELVTYSLGKFGQRALDFYSIHVTRE |
| D732N, | SNHPVKPLEQIGGNSCASGPVGKALSDACMGAVASFLTKYQDIILEHQKVI |
| E385P, | KKNEKRLANLKDIASANGLAFPKITLPPQPHTKEGIEAYNNVVAQIVIWVN |
| Y857R | LNLWQKLKIGRDEAKPLQRLKGFPSFPLVERQANEVDWWDMVCNVKKLINE |
| | KKEDGKVFWQNLAGYKRQEALRPYLSSPEDRKKGKKFARYQFGDLLLHLEK |
| | KHGEDWGKVYDEAWERIDKKVEGLSKHIKLEEERRSEDAQSKAALTDWLRA |
| | KASFVIEGLKEADKDEFCRCELKLQKWYGDLRGKPFAIEAENSILDISGFS |
| | KQYNCAFIWQKDGVKKLNLYLIINYFKGGKLRFKKIKPEAFEANRFYTVIN |
| | KKSGEIVPMEVNFNFDDPNLIILPLAFGKRQGREFIWNDLLSLETGSLKLA |
| | NGRVIEKTLYNRRTRQDEPALFVALTFERREVLDSSNIKPMNLIGIDRGEN |
| | IPAVIALTDPEGCPLSRFKDSLGNPTHILRIGESYKEKQRTIQAKKEVEQR |
| | RAGGYSRKYASKAKNLANDMVRNTARDLLYYAVTQDAMLIFENLSRGFGRQ |
| | GKRTFMAERQYTRMEDWLTAKLAYEGLSKTYLSKTLAQYTSKTCSNCGFTI |
| | TSADYDRVLEKLKKTATGWMTTINGKELKVEGQITYYNRRKRQNVVKDLSV |
| | ELDRLSEESVNNDISSWTKGRSGEALSLLKKRFSHRPVQEKFVCLNCGFET |
| | HADEQAALNIARSWLFLRSQEYKKYQTNKTTGNTDKRAFVETWQSFYRKKL |
| | KEVWKPAV (SEQ ID NO: 105) |
| 450: | MQEIKRINKIRRRLVKDSNTKKAGKTGPMKTLLVRVMTPDLRERLENLRKK |
| L379R, | PENIPQPISNTSRANLNKLLTDYTEMKKAILHVYWEEFQKDPVGLMSRVAQ |
| A708K, | PAPKNIDQRKLIPVKDGNERLTSSGFACSQCCQPLYVYKLEQVNDKGKPHT |
| P793_, | NYFGRCNVSEHERLILLSPHKPEANDELVTYSLGKFGQRALDFYSIHVTRE |
| D732N, | SNHPVKPLEQIGGNSCASGPVGKALSDACMGAVASFLTKYQDIILEHQKVI |
| E385P, | KKNEKRLANLKDIASANGLAFPKITLPPQPHTKEGIEAYNNVVAQIVIWVN |
| Y857R, | LNLWQKLKIGRDEAKPLQRLKGFPSFPLVERQANEVDWWDMVCNVKKLINE |
| I658V | KKEDGKVFWQNLAGYKRQEALRPYLSSPEDRKKGKKFARYQFGDLLLHLEK |
| | KHGEDWGKVYDEAWERIDKKVEGLSKHIKLEEERRSEDAQSKAALTDWLRA |
| | KASFVIEGLKEADKDEFCRCELKLQKWYGDLRGKPFAIEAENSILDISGFS |
| | KQYNCAFIWQKDGVKKLNLYLIINYFKGGKLRFKKIKPEAFEANRFYTVIN |
| | KKSGEIVPMEVNFNFDDPNLIILPLAFGKRQGREFIWNDLLSLETGSLKLA |
| | NGRVIEKTLYNRRTRQDEPALFVALTFERREVLDSSNIKPMNLIGVDRGEN |
| | IPAVIALTDPEGCPLSRFKDSLGNPTHILRIGESYKEKQRTIQAKKEVEQR |
| | RAGGYSRKYASKAKNLANDMVRNTARDLLYYAVTQDAMLIFENLSRGFGRQ |
| | GKRTFMAERQYTRMEDWLTAKLAYEGLSKTYLSKTLAQYTSKTCSNCGFTI |
| | TSADYDRVLEKLKKTATGWMTTINGKELKVEGQITYYNRRKRQNVVKDLSV |
| | ELDRLSEESVNNDISSWTKGRSGEALSLLKKRFSHRPVQEKFVCLNCGFET |
| | HADEQAALNIARSWLFLRSQEYKKYQTNKTTGNTDKRAFVETWQSFYRKKL |
| | KEVWKPAV (SEQ ID NO: 106) |
| 451: | MQEIKRINKIRRRLVKDSNTKKAGKTGPMKTLLVRVMTPDLRERLENLRKK |
| L379R, | PENIPQPISNTSRANLNKLLTDYTEMKKAILHVYWEEFQKDPVGLMSRVAQ |
| A708K, | PAPKNIDQRKLIPVKDGNERLTSSGFACSQCCQPLYVYKLEQVNDKGKPHT |
| P793_, | NYFGRCNVSEHERLILLSPHKPEANDELVTYSLGKFGQRALDFYSIHVTRE |
| D732N, | SNHPVKPLEQIGGNSCASGPVGKALSDACMGAVASFLTKYQDIILEHQKVI |
| E385P, | KKNEKRLANLKDIASANGLAFPKITLPPQPHTKEGIEAYNNVVAQIVIWVN |
| Y857R, | LNLWQKLKIGRDEAKPLQRLKGFPSFPLVERQANEVDWWDMVCNVKKLINE |
| I658V, | KKEDGKVFWQNLAGYKRQEALRPYLSSPEDRKKGKKFARYQLGDLLLHLEK |
| F399L | KHGEDWGKVYDEAWERIDKKVEGLSKHIKLEEERRSEDAQSKAALTDWLRA |
| | KASFVIEGLKEADKDEFCRCELKLQKWYGDLRGKPFAIEAENSILDISGFS |
| | KQYNCAFIWQKDGVKKLNLYLIINYFKGGKLRFKKIKPEAFEANRFYTVIN |
| | KKSGEIVPMEVNFNFDDPNLIILPLAFGKRQGREFIWNDLLSLETGSLKLA |
| | NGRVIEKTLYNRRTRQDEPALFVALTFERREVLDSSNIKPMNLIGVDRGEN |
| | IPAVIALTDPEGCPLSRFKDSLGNPTHILRIGESYKEKQRTIQAKKEVEQR |
| | RAGGYSRKYASKAKNLANDMVRNTARDLLYYAVTQDAMLIFENLSRGFGRQ |
| | GKRTFMAERQYTRMEDWLTAKLAYEGLSKTYLSKTLAQYTSKTCSNCGFTI |
| | TSADYDRVLEKLKKTATGWMTTINGKELKVEGQITYYNRRKRQNVVKDLSV |
| | ELDRLSEESVNNDISSWTKGRSGEALSLLKKRFSHRPVQEKFVCLNCGFET |
| | HADEQAALNIARSWLFLRSQEYKKYQTNKTTGNTDKRAFVETWQSFYRKKL |
| | KEVWKPAV (SEQ ID NO: 107) |
| 452: | MQEIKRINKIRRRLVKDSNTKKAGKTGPMKTLLVRVMTPDLRERLENLRKK |
| L379R, | PENIPQPISNTSRANLNKLLTDYTEMKKAILHVYWEEFQKDPVGLMSRVAQ |
| A708K, | PAPKNIDQRKLIPVKDGNERLTSSGFACSQCCQPLYVYKLEQVNDKGKPHT |
| P793_, | NYFGRCNVSEHERLILLSPHKPEANDELVTYSLGKFGQRALDFYSIHVTRE |
| D732N, | SNHPVKPLEQIGGNSCASGPVGKALSDACMGAVASFLTKYQDIILEHQKVI |
| E385P, | KKNEKRLANLKDIASANGLAFPKITLPPQPHTKEGIEAYNNVVAQIVIWVN |
| Y857R, | LNLWQKLKIGRDEAKPLQRLKGFPSFPLVERQANEVDWWDMVCNVKKLINE |
| I658V, | KKEDGKVFWQNLAGYKRQEALRPYLSSPNDRKKGKKFARYQFGDLLLHLEK |
| E386N | KHGEDWGKVYDEAWERIDKKVEGLSKHIKLEEERRSEDAQSKAALTDWLRA |
| | KASFVIEGLKEADKDEFCRCELKLQKWYGDLRGKPFAIEAENSILDISGFS |
| | KQYNCAFIWQKDGVKKLNLYLIINYFKGGKLRFKKIKPEAFEANRFYTVIN |
| | KKSGEIVPMEVNFNFDDPNLIILPLAFGKRQGREFIWNDLLSLETGSLKLA |
| | NGRVIEKTLYNRRTRQDEPALFVALTFERREVLDSSNIKPMNLIGVDRGEN |
| | IPAVIALTDPEGCPLSRFKDSLGNPTHILRIGESYKEKQRTIQAKKEVEQR |
| | RAGGYSRKYASKAKNLANDMVRNTARDLLYYAVTQDAMLIFENLSRGFGRQ |
| | GKRTFMAERQYTRMEDWLTAKLAYEGLSKTYLSKTLAQYTSKTCSNCGFTI |
| | TSADYDRVLEKLKKTATGWMTTINGKELKVEGQITYYNRRKRQNVVKDLSV |
| | ELDRLSEESVNNDISSWTKGRSGEALSLLKKRFSHRPVQEKFVCLNCGFET |
| | HADEQAALNIARSWLFLRSQEYKKYQTNKTTGNTDKRAFVETWQSFYRKKL |
| | KEVWKPAV (SEQ ID NO: 108) |
| 453: | MQEIKRINKIRRRLVKDSNTKKAGKTGPMKTLLVRVMTPDLRERLENLRKK |
| L379R, | PENIPQPISNTSRANLNKLLTDYTEMKKAILHVYWEEFQKDPVGLMSRVAQ |
| A708K, | PAPKNIDQRKLIPVKDGNERLTSSGFACSQCCQPLYVYKLEQVNDKGKPHT |
| P793_, | NYFGRCNVSEHERLILLSPHKPEANDELVTYSLGKFGQRALDFYSIHVTRE |
| D732N, | SNHPVKPLEQIGGNSCASGPVGKALSDACMGAVASFLTKYQDIILEHQKVI |
| E385P, | KKNEKRLANLKDIASANGLAFPKITLPPQPHTKEGIEAYNNVVAQIVIWVN |
| Y857R, | LNLWQKLKIGRDEAKPLQRLKGFPSFPLVERQANEVDWWDMVCNVKKLINE |
| I658V, | KKEDGKVFWQNLAGYKRQEALRPYLSSPEDRKKGKKFARYQFGDLLKHLEK |
| L404K | KHGEDWGKVYDEAWERIDKKVEGLSKHIKLEEERRSEDAQSKAALTDWLRA |
| | KASFVIEGLKEADKDEFCRCELKLQKWYGDLRGKPFAIEAENSILDISGFS |
| | KQYNCAFIWQKDGVKKLNLYLIINYFKGGKLRFKKIKPEAFEANRFYTVIN |
| | KKSGEIVPMEVNFNFDDPNLIILPLAFGKRQGREFIWNDLLSLETGSLKLA |
| | NGRVIEKTLYNRRTRQDEPALFVALTFERREVLDSSNIKPMNLIGVDRGEN |
| | IPAVIALTDPEGCPLSRFKDSLGNPTHILRIGESYKEKQRTIQAKKEVEQR |
| | RAGGYSRKYASKAKNLANDMVRNTARDLLYYAVTQDAMLIFENLSRGFGRQ |
| | GKRTFMAERQYTRMEDWLTAKLAYEGLSKTYLSKTLAQYTSKTCSNCGFTI |
| | TSADYDRVLEKLKKTATGWMTTINGKELKVEGQITYYNRRKRQNVVKDLSV |
| | ELDRLSEESVNNDISSWTKGRSGEALSLLKKRFSHRPVQEKFVCLNCGFET |
| | HADEQAALNIARSWLFLRSQEYKKYQTNKTTGNTDKRAFVETWQSFYRKKL |
| | KEVWKPAV (SEQ ID NO: 109) |
| 454: | MQEIKRINKIRRRLVKDSNTKKAGKTGPMKTLLVRVMTPDLRERLENLRKK |
| L379R, | PENIPQPISNTSRANLNKLLTDYTEMKKAILHVYWEEFQKDPVGLMSRVAQ |
| A708K, | PAPKNIDQRKLIPVKDGNERLTSSGFACSQCCQPLYVYKLEQVNDKGKPHT |
| P793_, | NYFGRCNVSEHERLILLSPHKPEANDELVTYSLGKFGQRALDFYSIHVTRE |
| T620P, | SNHPVKPLEQIGGNSCASGPVGKALSDACMGAVASFLTKYQDIILEHKKVI |
| E385P, | KKNEKRLANLKDIASANGLAFPKITLPPQPHTKEGIEAYNNVVAQIVIWVN |
| Y857R, | LNLWQKLKIGRDEAKPLQRLKGFPSFPLVERQANEVDWWDMVCNVKKLINE |
| Q252K | KKEDGKVFWQNLAGYKRQEALRPYLSSPEDRKKGKKFARYQFGDLLLHLEK |
| | KHGEDWGKVYDEAWERIDKKVEGLSKHIKLEEERRSEDAQSKAALTDWLRA |
| | KASFVIEGLKEADKDEFCRCELKLQKWYGDLRGKPFAIEAENSILDISGFS |
| | KQYNCAFIWQKDGVKKLNLYLIINYFKGGKLRFKKIKPEAFEANRFYTVIN |
| | KKSGEIVPMEVNFNFDDPNLIILPLAFGKRQGREFIWNDLLSLETGSLKLA |
| | NGRVIEKPLYNRRTRQDEPALFVALTFERREVLDSSNIKPMNLIGIDRGEN |
| | IPAVIALTDPEGCPLSRFKDSLGNPTHILRIGESYKEKQRTIQAKKEVEQR |
| | RAGGYSRKYASKAKNLADDMVRNTARDLLYYAVTQDAMLIFENLSRGFGRQ |
| | GKRTFMAERQYTRMEDWLTAKLAYEGLSKTYLSKTLAQYTSKTCSNCGFTI |
| | TSADYDRVLEKLKKTATGWMTTINGKELKVEGQITYYNRRKRQNVVKDLSV |
| | ELDRLSEESVNNDISSWTKGRSGEALSLLKKRFSHRPVQEKFVCLNCGFET |
| | HADEQAALNIARSWLFLRSQEYKKYQTNKTTGNTDKRAFVETWQSFYRKKL |
| | KEVWKPAV (SEQ ID NO: 110) |
| 455: | MQEIKRINKIRRRLVKDSNTKKAGKTGPMKTLLVRVMTPDLRERLENLRKK |
| L379R, | PENIPQPISNTSRANLNKLLTDYTEMKKAILHVYWEEFQKDPVGLMSRVAQ |
| A708K, | PAPKNIDQRKLIPVKDGNERLTSSGFACSQCCQPLYVYKLEQVNDKGKPHT |
| P793_, | NYFGRCNVSEHERLILLSPHKPEANDELVTYSLGKFGQRALDFYSIHVTRE |
| T620P, | SNHPVKPLEQIGGNSCASGPVGKALSDACMGAVASFLTKYQDIILEHKKVI |
| E385P, | KKNEKRLANLKDIASANGLAFPKITLPPQPHTKEGIEAYNNVVAQIVIWVN |
| Y857R, | LNLWQKLKIGRDEAKPLQRLKGFPSFPLVERQANEVDWWDMVCNVKKLINE |
| I658V, | KKEDGKVFWQNLAGYKRQEALRPYLSSPEDRKKGKKFARYQFGDLLLHLEK |
| Q252K | KHGEDWGKVYDEAWERIDKKVEGLSKHIKLEEERRSEDAQSKAALTDWLRA |
| | KASFVIEGLKEADKDEFCRCELKLQKWYGDLRGKPFAIEAENSILDISGFS |
| | KQYNCAFIWQKDGVKKLNLYLIINYFKGGKLRFKKIKPEAFEANRFYTVIN |
| | KKSGEIVPMEVNFNFDDPNLIILPLAFGKRQGREFIWNDLLSLETGSLKLA |
| | NGRVIEKPLYNRRTRQDEPALFVALTFERREVLDSSNIKPMNLIGVDRGEN |
| | IPAVIALTDPEGCPLSRFKDSLGNPTHILRIGESYKEKQRTIQAKKEVEQR |
| | RAGGYSRKYASKAKNLADDMVRNTARDLLYYAVTQDAMLIFENLSRGFGRQ |
| | GKRTFMAERQYTRMEDWLTAKLAYEGLSKTYLSKTLAQYTSKTCSNCGFTI |
| | TSADYDRVLEKLKKTATGWMTTINGKELKVEGQITYYNRRKRQNVVKDLSV |
| | ELDRLSEESVNNDISSWTKGRSGEALSLLKKRFSHRPVQEKFVCLNCGFET |
| | HADEQAALNIARSWLFLRSQEYKKYQTNKTTGNTDKRAFVETWQSFYRKKL |
| | KEVWKPAV (SEQ ID NO: 111) |
| 456: | MQEIKRINKIRRRLVKDSNTKKAGKTGPMKTLLVRVMTPDLRERLENLRKK |
| L379R, | PENIPQPISNTSRANLNKLLTDYTEMKKAILHVYWEEFQKDPVGLMSRVAQ |
| A708K, | PAPKNIDQRKLIPVKDGNERLTSSGFACSQCCQPLYVYKLEQVNDKGKPHT |
| P793_, | NYFGRCNVSEHERLILLSPHKPEANDELVTYSLGKFGQRALDFYSIHVTRE |
| T620P, | SNHPVKPLEQIGGNSCASGPVGKALSDACMGAVASFLTKYQDIILEHKKVI |
| E385P, | KKNEKRLANLKDIASANGLAFPKITLPPQPHTKEGIEAYNNVVAQIVIWVN |
| Y857R, | LNLWQKLKIGRDEAKPLQRLKGFPSFPLVERQANEVDWWDMVCNVKKLINE |
| I658V, | KKEDGKVFWQNLAGYKRQEALRPYLSSPNDRKKGKKFARYQFGDLLLHLEK |
| E386N, | KHGEDWGKVYDEAWERIDKKVEGLSKHIKLEEERRSEDAQSKAALTDWLRA |
| Q252K | KASFVIEGLKEADKDEFCRCELKLQKWYGDLRGKPFAIEAENSILDISGFS |
| | KQYNCAFIWQKDGVKKLNLYLIINYFKGGKLRFKKIKPEAFEANRFYTVIN |
| | KKSGEIVPMEVNFNFDDPNLIILPLAFGKRQGREFIWNDLLSLETGSLKLA |
| | NGRVIEKPLYNRRTRQDEPALFVALTFERREVLDSSNIKPMNLIGVDRGEN |
| | IPAVIALTDPEGCPLSRFKDSLGNPTHILRIGESYKEKQRTIQAKKEVEQR |
| | RAGGYSRKYASKAKNLADDMVRNTARDLLYYAVTQDAMLIFENLSRGFGRQ |
| | GKRTFMAERQYTRMEDWLTAKLAYEGLSKTYLSKTLAQYTSKTCSNCGFTI |
| | TSADYDRVLEKLKKTATGWMTTINGKELKVEGQITYYNRRKRQNVVKDLSV |
| | ELDRLSEESVNNDISSWTKGRSGEALSLLKKRFSHRPVQEKFVCLNCGFET |
| | HADEQAALNIARSWLFLRSQEYKKYQTNKTTGNTDKRAFVETWQSFYRKKL |
| | KEVWKPAV (SEQ ID NO: 112) |
| 457: | MQEIKRINKIRRRLVKDSNTKKAGKTGPMKTLLVRVMTPDLRERLENLRKK |
| L379R, | PENIPQPISNTSRANLNKLLTDYTEMKKAILHVYWEEFQKDPVGLMSRVAQ |
| A708K, | PAPKNIDQRKLIPVKDGNERLTSSGFACSQCCQPLYVYKLEQVNDKGKPHT |
| P793_, | NYFGRCNVSEHERLILLSPHKPEANDELVTYSLGKFGQRALDFYSIHVTRE |
| T620P, | SNHPVKPLEQIGGNSCASGPVGKALSDACMGAVASFLTKYQDIILEHKKVI |
| E385P, | KKNEKRLANLKDIASANGLAFPKITLPPQPHTKEGIEAYNNVVAQIVIWVN |
| Y857R, | LNLWQKLKIGRDEAKPLQRLKGFPSFPLVERQANEVDWWDMVCNVKKLINE |
| I658V, | KKEDGKVFWQNLAGYKRQEALRPYLSSPEDRKKGKKFARYQLGDLLLHLEK |
| F399L, | KHGEDWGKVYDEAWERIDKKVEGLSKHIKLEEERRSEDAQSKAALTDWLRA |
| Q252K | KASFVIEGLKEADKDEFCRCELKLQKWYGDLRGKPFAIEAENSILDISGFS |
| | KQYNCAFIWQKDGVKKLNLYLIINYFKGGKLRFKKIKPEAFEANRFYTVIN |
| | KKSGEIVPMEVNFNFDDPNLIILPLAFGKRQGREFIWNDLLSLETGSLKLA |
| | NGRVIEKPLYNRRTRQDEPALFVALTFERREVLDSSNIKPMNLIGVDRGEN |
| | IPAVIALTDPEGCPLSRFKDSLGNPTHILRIGESYKEKQRTIQAKKEVEQR |
| | RAGGYSRKYASKAKNLADDMVRNTARDLLYYAVTQDAMLIFENLSRGFGRQ |
| | GKRTFMAERQYTRMEDWLTAKLAYEGLSKTYLSKTLAQYTSKTCSNCGFTI |
| | TSADYDRVLEKLKKTATGWMTTINGKELKVEGQITYYNRRKRQNVVKDLSV |
| | ELDRLSEESVNNDISSWTKGRSGEALSLLKKRFSHRPVQEKFVCLNCGFET |
| | HADEQAALNIARSWLFLRSQEYKKYQTNKTTGNTDKRAFVETWQSFYRKKL |
| | KEVWKPAV (SEQ ID NO: 113) |
| 458: | MQEIKRINKIRRRLVKDSNTKKAGKTGPMKTLLVRVMTPDLRERLENLRKK |
| L379R, | PENIPQPISNTSRANLNKLLTDYTEMKKAILHVYWEEFQKDPVGLMSRVAQ |
| A708K, | PAPKNIDQRKLIPVKDGNERLTSSGFACSQCCQPLYVYKLEQVNDKGKPHT |
| P793_, | NYFGRCNVSEHERLILLSPHKPEANDELVTYSLGKFGQRALDFYSIHVTRE |
| T620P, | SNHPVKPLEQIGGNSCASGPVGKALSDACMGAVASFLTKYQDIILEHKKVI |
| E385P, | KKNEKRLANLKDIASANGLAFPKITLPPQPHTKEGIEAYNNVVAQIVIWVN |
| Y857R, | LNLWQKLKIGRDEAKPLQRLKGFPSFPLVERQANEVDWWDMVCNVKKLINE |
| I658V, | KKEDGKVFWQNLAGYKRQEALRPYLSSPEDRKKGKKFARYQFGDLLKHLEK |
| L404K, | KHGEDWGKVYDEAWERIDKKVEGLSKHIKLEEERRSEDAQSKAALTDWLRA |
| Q252K | KASFVIEGLKEADKDEFCRCELKLQKWYGDLRGKPFAIEAENSILDISGFS |
| | KQYNCAFIWQKDGVKKLNLYLIINYFKGGKLRFKKIKPEAFEANRFYTVIN |
| | KKSGEIVPMEVNFNFDDPNLIILPLAFGKRQGREFIWNDLLSLETGSLKLA |
| | NGRVIEKPLYNRRTRQDEPALFVALTFERREVLDSSNIKPMNLIGVDRGEN |
| | IPAVIALTDPEGCPLSRFKDSLGNPTHILRIGESYKEKQRTIQAKKEVEQR |
| | RAGGYSRKYASKAKNLADDMVRNTARDLLYYAVTQDAMLIFENLSRGFGRQ |
| | GKRTFMAERQYTRMEDWLTAKLAYEGLSKTYLSKTLAQYTSKTCSNCGFTI |
| | TSADYDRVLEKLKKTATGWMTTINGKELKVEGQITYYNRRKRQNVVKDLSV |
| | ELDRLSEESVNNDISSWTKGRSGEALSLLKKRFSHRPVQEKFVCLNCGFET |
| | HADEQAALNIARSWLFLRSQEYKKYQTNKTTGNTDKRAFVETWQSFYRKKL |
| | KEVWKPAV (SEQ ID NO: 114) |
| 459: | MQEIKRINKIRRRLVKDSNTKKAGKTGPMKTLLVRVMTPDLRERLENLRKK |
| L379R, | PENIPQPISNTSRANLNKLLTDYTEMKKAILHVYWEEFQKDPVGLMSRVAQ |
| A708K, | PAPKNIDQRKLIPVKDGNERLTSSGFACSQCCQPLYVYKLEQVNDKGKPHT |
| P793_, | NYFGRCNVSEHERLILLSPHKPEANDELVTYSLGKFGQRALDFYSIHVTRE |
| T620P, | SNHPVKPLEQIGGNSCASGPVGKALSDACMGAVASFLTKYQDIILEHQKVI |
| Y857R, | KKNEKRLANLKDIASANGLAFPKITLPPQPHTKEGIEAYNNVVAQIVIWVN |
| I658V, | LNLWQKLKIGRDEAKPLQRLKGFPSFPLVERQANEVDWWDMVCNVKKLINE |
| E386N | KKEDGKVFWQNLAGYKRQEALRPYLSSENDRKKGKKFARYQFGDLLLHLEK |
| | KHGEDWGKVYDEAWERIDKKVEGLSKHIKLEEERRSEDAQSKAALTDWLRA |
| | KASFVIEGLKEADKDEFCRCELKLQKWYGDLRGKPFAIEAENSILDISGFS |
| | KQYNCAFIWQKDGVKKLNLYLIINYFKGGKLRFKKIKPEAFEANRFYTVIN |
| | KKSGEIVPMEVNFNFDDPNLIILPLAFGKRQGREFIWNDLLSLETGSLKLA |
| | NGRVIEKPLYNRRTRQDEPALFVALTFERREVLDSSNIKPMNLIGVDRGEN |
| | IPAVIALTDPEGCPLSRFKDSLGNPTHILRIGESYKEKQRTIQAKKEVEQR |
| | RAGGYSRKYASKAKNLADDMVRNTARDLLYYAVTQDAMLIFENLSRGFGRQ |
| | GKRTFMAERQYTRMEDWLTAKLAYEGLSKTYLSKTLAQYTSKTCSNCGFTI |
| | TSADYDRVLEKLKKTATGWMTTINGKELKVEGQITYYNRRKRQNVVKDLSV |
| | ELDRLSEESVNNDISSWTKGRSGEALSLLKKRFSHRPVQEKFVCLNCGFET |
| | HADEQAALNIARSWLFLRSQEYKKYQTNKTTGNTDKRAFVETWQSFYRKKL |
| | KEVWKPAV (SEQ ID NO: 115) |
| 460: | MQEIKRINKIRRRLVKDSNTKKAGKTGPMKTLLVRVMTPDLRERLENLRKK |
| L379R, | PENIPQPISNTSRANLNKLLTDYTEMKKAILHVYWEEFQKDPVGLMSRVAQ |
| A708K, | PAPKNIDQRKLIPVKDGNERLTSSGFACSQCCQPLYVYKLEQVNDKGKPHT |
| P793_, | NYFGRCNVSEHERLILLSPHKPEANDELVTYSLGKFGQRALDFYSIHVTRE |
| T620P, | SNHPVKPLEQIGGNSCASGPVGKALSDACMGAVASFLTKYQDIILEHKKVI |
| E385P, | KKNEKRLANLKDIASANGLAFPKITLPPQPHTKEGIEAYNNVVAQIVIWVN |
| Q252K | LNLWQKLKIGRDEAKPLQRLKGFPSFPLVERQANEVDWWDMVCNVKKLINE |
| | KKEDGKVFWQNLAGYKRQEALRPYLSSPEDRKKGKKFARYQFGDLLLHLEK |
| | KHGEDWGKVYDEAWERIDKKVEGLSKHIKLEEERRSEDAQSKAALTDWLRA |
| | KASFVIEGLKEADKDEFCRCELKLQKWYGDLRGKPFAIEAENSILDISGFS |
| | KQYNCAFIWQKDGVKKLNLYLIINYFKGGKLRFKKIKPEAFEANRFYTVIN |
| | KKSGEIVPMEVNFNFDDPNLIILPLAFGKRQGREFIWNDLLSLETGSLKLA |
| | NGRVIEKPLYNRRTRQDEPALFVALTFERREVLDSSNIKPMNLIGIDRGEN |
| | IPAVIALTDPEGCPLSRFKDSLGNPTHILRIGESYKEKQRTIQAKKEVEQR |
| | RAGGYSRKYASKAKNLADDMVRNTARDLLYYAVTQDAMLIFENLSRGFGRQ |
| | GKRTFMAERQYTRMEDWLTAKLAYEGLSKTYLSKTLAQYTSKTCSNCGFTI |
| | TSADYDRVLEKLKKTATGWMTTINGKELKVEGQITYYNRYKRQNVVKDLSV |
| | ELDRLSEESVNNDISSWTKGRSGEALSLLKKRFSHRPVQEKFVCLNCGFET |
| | HADEQAALNIARSWLFLRSQEYKKYQTNKTTGNTDKRAFVETWQSFYRKKL |
| | KEVWKPAV (SEQ ID NO: 116) |
| 278 | QEIKRINKIRRRLVKDSNTKKAGKTGPMKTLLVRVMTPDLRERLENLRKKP |
| | ENIPQPISNTSRANLNKLLTDYTEMKKAILHVYWEEFQKDPVGLMSRVAQP |
| | APKNIDQRKLIPVKDGNERLTSSGFACSQCCQPLYVYKLEQVNDKGKPHTN |
| | YFGRCNVSEHERLILLSPHKPEANDELVTYSLGKFGQRALDFYSIHVTRES |
| | NHPVKPLEQIGGNSCASGPVGKALSDACMGAVASFLTKYQDIILEHQKVIK |
| | KNEKRLANLKDIASANGLAFPKITLPPQPHTKEGIEAYNNVVAQIVIWVNL |
| | NLWQKLKIGRDEAKPLQRLKGFPSFPLVERQANEVDWWDMVCNVKKLINEK |
| | KEDGKVFWQNLAGYKRQEALRPYLSSEEDRKKGKKFARYQFGDLLLHLEKK |
| | HGEDWGKVYDEAWERIDKKVEGLSKHIKLEEERRSEDAQSKAALTDWLRAK |
| | ASFVIEGLKEADKDEFCRCELKLQKWYGDLRGKPFAIEAENSILDISGFSK |
| | QYNCAFIWQKDGVKKLNLYLIINYFKGGKLRFKKIKPEAFEANRFYTVINK |
| | KSGEIVPMEVNFNFDDPNLIILPLAFGKRQGREFIWNDLLSLETGSLKLAN |
| | GRVIEKTLYNRRTRQDEPALFVALTFERREVLDSSNIKPMNLIGIDRGENI |
| | PAVIALTDPEGCPLSRFKDSLGNPTHILRIGESYKEKQRTIQAKKEVEQRR |
| | AGGYSRKYASKAKNLADDMVRNTARDLLYYAVTQDAMLIFENLSRGFGRQG |
| | KRTFMAERQYTRMEDWLTAKLAYEGLSKTYLSKTLAQYTSKTCSNCGFTIT |
| | SADYDRVLEKLKKTATGWMTTINGKELKVEGQITYYNRYKRQNVVKDLSVE |
| | LDRLSEESVNNDISSWTKGRSGEALSLLKKRFSHRPVQEKFVCLNCGFETH |
| | ADEQAALNIARSWLFLRSQEYKKYQTNKTTGNTDKRAFVETWQSFYRKKLK |
| | EVWKPAV (SEQ ID NO: 117) |
| 279 | MQEIKRINKIRRRLVKDSNTKKAGKTGPMKTLLVRVMTPDLRERLENLRKK |
| | PENIPQPISNTSRANLNKLLTDYTEMKKAILHVYWEEFQKDPVGLMSRVAQ |
| | PAPKNIDQRKLIPVKDGNERLTSSGFACSQCCQPLYVYKLEQVNDKGKPHT |
| | NYFGRCNVSEHERLILLSPHKPEANDELVTYSLGKFGQRALDFYSIHVTRE |
| | SNHPVKPLEQIGGNSCASGPVGKALSDACMGAVASFLTKYQDIILEHQKVI |
| | KKNEKRLANLKDIASANGLAFPKITLPPQPHTKEGIEAYNNVVAQIVIWVN |
| | LNLWQKLKIGRDEAKPLQRLKGFPSFPLVERQANEVDWWDMVCNVKKLINE |
| | KKEDGKVFWQNLAGYKRQEALRPYLSSEEDRKKGKKFARYQFGDLLLHLEK |
| | KHGEDWGKVYDEAWERIDKKVEGLSKHIKLEEERRSEDAQSKAALTDWLRA |
| | KASFVIEGLKEADKDEFCRCELKLQKWYGDLRGKPFAIEAENSILDISGFS |
| | KQYNCAFIWQKDGVKKLNLYLIINYFKGGKLRFKKIKPEAFEANRFYTVIN |
| | KKSGEIVPMEVNFNFDDPNLIILPLAFGKRQGREFIWNDLLSLETGSLKLA |
| | NGRVIEKTLYNRRTRQDEPALFVALTFERREVLDSSNIKPMNLIGIDRGEN |
| | IPAVIALTDPEGCPLSRFKDSLGNPTHILRIGESYKEKQRTIQAKKEVEQR |
| | RAGGYSRKYASKAKNLADDMVRNTARDLLYYAVTQDAMLIFENLSRGFGRQ |
| | GKRTFMAERQYTRMEDWLTAKLAYEGLSKTYLSKTLAQYTSKTCSNCGFTI |
| | TSADYDRVLEKLKKTATGWMTTINGKELKVEGQITYYNRYKRQNVVKDLSV |
| | ELDRLSEESVNNDISSWTKGRSGEALSLLKKRFSHRPVQEKFVCLNCGFET |
| | HADEQAALNIARSWLFLRSQEYKKYQTNKTTGNTDKRAFVETWQSFYRKKL |
| | KEVWKPAV (SEQ ID NO: 118) |
| 280 | MQEIKRINKIRRRLVKDSNTKKAGKTGPMKTLLVRVMTPDLRERLENLRKK |
| | PENIPQPISNTSRANLNKLLTDYTEMKKAILHVYWEEFQKDPVGLMSRVAQ |
| | PAPKNIDQRKLIPVKDGNERLTSSGFACSQCCQPLYVYKLEQVNDKGKPHT |
| | NYFGRCNVSEHERLILLSPHKPEANDELVTYSLGKFGQRALDFYSIHVTRE |
| | SNHPVKPLEQIGGNSCASGPVGKALSDACMGAVASFLTKYQDIILEHQKVI |
| | KKNEKRLANLKDIASANGLAFPKITLPPQPHTKEGIEAYNNVVAQIVIWVN |
| | LNLWQKLKIGRDEAKPLQRLKGFPSFPLVERQANEVDWWDMVCNVKKLINE |
| | KKEDGKVFWQNLAGYKRQEALRPYLSSEEDRKKGKKFARYQFGDLLLHLEK |
| | KHGEDWGKVYDEAWERIDKKVEGLSKHIKLEEERRSEDAQSKAALTDWLRA |
| | KASFVIEGLKEADKDEFCRCELKLQKWYGDLRGKPFAIEAENSILDISGFS |
| | KQYNCAFIWQKDGVKKLNLYLIINYFKGGKLRFKKIKPEAFEANRFYTVIN |
| | KKSGEIVPMEVNFNFDDPNLIILPLAFGKRQGREFIWNDLLSLETGSLKLA |
| | NGRVIEKTLYNRRTRQDEPALFVALTFERREVLDSSNIKPMNLIGIDRGEN |
| | IPAVIALTDPEGCPLSRFKDSLGNPTHILRIGESYKEKQRTIQAKKEVEQR |
| | RAGGYSRKYASKAKNLADDMVRNTARDLLYYAVTQDAMLIFENLSRGFGRQ |
| | GKRTFMAERQYTRMEDWLTAKLAYEGLSKTYLSKTLAQYTSKTCSNCGFTI |
| | TSADYDRVLEKLKKTATGWMTTINGKELKVEGQITYYNRYKRQNVVKDLSV |
| | ELDRLSEESVNNDISSWTKGRSGEALSLLKKRFSHRPVQEKFVCLNCGFET |
| | HADEQAALNIARSWLFLRSQEYKKYQTNKTTGNTDKRAFVETWQSFYRKKL |
| | KEVWKPAV (SEQ ID NO: 119) |
| 285 | MQEIKRINKIRRRLVKDSNTKKAGKTGPMKTLLVRVMTPDLRERLENLRKK |
| | PENIPQPISNTSRANLNKLLTDYTEMKKAILHVYWEEFQKDPVGLMSRVAQ |
| | PAPKNIDQRKLIPVKDGNERLTSSGFACSQCCQPLYVYKLEQVNDKGKPHT |
| | NYFGRCNVSEHERLILLSPHKPEANDELVTYSLGKFGQRALDFYSIHVTRE |
| | SNHPVKPLEQIGGNSCASGPVGKALSDACMGAVASFLTKYQDIILEHQKVI |
| | KKNEKRLANLKDIASANGLAFPKITLPPQPHTKEGIEAYNNVVAQIVIWVN |
| | LNLWQKLKIGRDEAKPLQRLKGFPSFPLVERQANEVDWWDMVCNVKKLINE |
| | KKEDGKVFWQNLAGYKRQEALRPYLSSEEDRKKGKKFARYQFGDLLLHLEK |
| | KHGEDWGKVYDEAWERIDKKVEGLSKHIKLEEERRSEDAQSKAALTDWLRA |
| | KASFVIEGLKEADKDEFCRCELKLQKWYGDLRGKPFAIEAENSILDISGFS |
| | KQYNCAFIWQKDGVKKLNLYLIINYFKGGKLREKKIKPEAFEANRFYTVIN |
| | KKSGEIVPMEVNFNFDDPNLIILPLAFGKRQGREFIWNDLLSLETGSLKLA |
| | NGRVIEKTLYNRRTRQDEPALFVALTFERREVLDSSNIKPMNLIGIDRGEN |
| | IPAVIALTDPEGCPLSRFKDSLGNPTHILRIGESYKEKQRTIQAKKEVEQR |
| | RAGGYSRKYASKAKNLADDMVRNTARDLLYYAVTQDAMLIFENLSRGFGRQ |
| | GKRTFMAERQYTRMEDWLTAKLAYEGLSKTYLSKTLAQYTSKTCSNCGFTI |
| | TSADYDRVLEKLKKTATGWMTTINGKELKVEGQITYYNRYKRONVVKDLSV |
| | ELDRLSEESVNNDISSWTKGRSGEALSLLKKRFSHRPVQEKFVCLNCGFET |
| | HADEQAALNIARSWLFLRSQEYKKYQTNKTTGNTDKRAFVETWQSFYRKKL |
| | KEVWKPAV (SEQ ID NO: 120) |
| 286 | MQEIKRINKIRRRLVKDSNTKKAGKTGPMKTLLVRVMTPDLRERLENLRKK |
| | PENIPQPISNTSRANLNKLLTDYTEMKKAILHVYWEEFQKDPVGLMSRVAQ |
| | PAPKNIDQRKLIPVKDGNERLTSSGFACSQCCQPLYVYKLEQVNDKGKPHT |
| | NYFGRCNVSEHERLILLSPHKPEANDELVTYSLGKFGQRALDFYSIHVTRE |
| | SNHPVKPLEQIGGNSCASGPVGKALSDACMGAVASFLTKYQDIILEHQKVI |
| | KKNEKRLANLKDIASANGLAFPKITLPPQPHTKEGIEAYNNVVAQIVIWVN |
| | LNLWQKLKIGRDEAKPLQRLKGFPSFPLVERQANEVDWWDMVCNVKKLINE |
| | KKEDGKVFWQNLAGYKRQEALRPYLSSEEDRKKGKKFARYQFGDLLLHLEK |
| | KHGEDWGKVYDEAWERIDKKVEGLSKHIKLEEERRSEDAQSKAALTDWLRA |
| | KASFVIEGLKEADKDEFCRCELKLQKWYGDLRGKPFAIEAENSILDISGFS |
| | KQYNCAFIWQKDGVKKLNLYLIINYFKGGKLRFKKIKPEAFEANRFYTVIN |
| | KKSGEIVPMEVNFNFDDPNLIILPLAFGKRQGREFIWNDLLSLETGSLKLA |
| | NGRVIEKTLYNRRTRQDEPALFVALTFERREVLDSSNIKPMNLIGIDRGEN |
| | IPAVIALTDPEGCPLSRFKDSLGNPTHILRIGESYKEKQRTIQAKKEVEQR |
| | RAGGYSRKYASKAKNLADDMVRNTARDLLYYAVTQDAMLIFENLSRGFGRQ |
| | GKRTFMAERQYTRMEDWLTAKLAYEGLSKTYLSKTLAQYTSKTCSNCGFTI |
| | TSADYDRVLEKLKKTATGWMTTINGKELKVEGQITYYNRYKRQNVVKDLSV |
| | ELDRLSEESVNNDISSWTKGRSGEALSLLKKRFSHRPVQEKFVCLNCGFET |
| | HADEQAALNIARSWLFLRSQEYKKYQTNKTTGNTDKRAFVETWQSFYRKKL |
| | KEVWKPAV (SEQ ID NO: 121) |
| 287 | MQEIKRINKIRRRLVKDSNTKKAGKTGPMKTLLVRVMTPDLRERLENLRKK |
| | PENIPQPISNTSRANLNKLLTDYTEMKKAILHVYWEEFQKDPVGLMSRVAQ |
| | PAPKNIDQRKLIPVKDGNERLTSSGFACSQCCQPLYVYKLEQVNDKGKPHT |
| | NYFGRCNVSEHERLILLSPHKPEANDELVTYSLGKFGQRALDFYSIHVTRE |
| | SNHPVKPLEQIGGNSCASGPVGKALSDACMGAVASFLTKYQDIILEHQKVI |
| | KKNEKRLANLKDIASANGLAFPKITLPPQPHTKEGIEAYNNVVAQIVIWVN |
| | LNLWQKLKIGRDEAKPLQRLKGFPSFPLVERQANEVDWWDMVCNVKKLINE |
| | KKEDGKVFWQNLAGYKRQEALRPYLSSEEDRKKGKKFARYQFGDLLLHLEK |
| | KHGEDWGKVYDEAWERIDKKVEGLSKHIKLEEERRSEDAQSKAALTDWLRA |
| | KASFVIEGLKEADKDEFCRCELKLQKWYGDLRGKPFAIEAENSILDISGFS |
| | KQYNCAFIWQKDGVKKLNLYLIINYFKGGKLRFKKIKPEAFEANRFYTVIN |
| | KKSGEIVPMEVNFNFDDPNLIILPLAFGKRQGREFIWNDLLSLETGSLKLA |
| | NGRVIEKTLYNRRTRQDEPALFVALTFERREVLDSSNIKPMNLIGIDRGEN |
| | IPAVIALTDPEGCPLSRFKDSLGNPTHILRIGESYKEKQRTIQAKKEVEQR |
| | RAGGYSRKYASKAKNLADDMVRNTARDLLYYAVTQDAMLIFENLSRGFGRQ |
| | GKRTFMAERQYTRMEDWLTAKLAYEGLSKTYLSKTLAQYTSKTCSNCGFTI |
| | TSADYDRVLEKLKKTATGWMTTINGKELKVEGQITYYNRYKRQNVVKDLSV |
| | ELDRLSEESVNNDISSWTKGRSGEALSLLKKRFSHRPVQEKFVCLNCGFET |
| | HADEQAALNIARSWLFLRSQEYKKYQTNKTTGNTDKRAFVETWQSFYRKKL |
| | KEVWKPAV (SEQ ID NO: 122) |
| 288 | MQEIKRINKIRRRLVKDSNTKKAGKTGPMKTLLVRVMTPDLRERLENLRKK |
| | PENIPQPISNTSRANLNKLLTDYTEMKKAILHVYWEEFQKDPVGLMSRVAQ |
| | PAPKNIDQRKLIPVKDGNERLTMSSGFACSQCCQPLYVYKLEQVNDKGKPH |
| | TNYFGRCNVSEHERLILLSPHKPEANDELVTYSLGKFGQRALDFYSIHVTR |
| | ESNHPVKPLEQIGGNSCASGPVGKALSDACMGAVASFLTKYQDIILEHQKV |
| | IKKNEKRLANLKDIASANGLAFPKITLPPQPHTKEGIEAYNNVVAQIVIWV |
| | NLNLWQKLKIGRDEAKPLQRLKGFPSFPLVERQANEVDWWDMVCNVKKLIN |
| | EKKEDGKVFWQNLAGYKRQEALRPYLSSEEDRKKGKKFARYQFGDLLLHLE |
| | KKHGEDWGKVYDEAWERIDKKVEGLSKHIKLEEERRSEDAQSKAALTDWLR |
| | AKASFVIEGLKEADKDEFCRCELKLQKWYGDLRGKPFAIEAENSILDISGF |
| | SKQYNCAFIWQKDGVKKLNLYLIINYFKGGKLRFKKIKPEAFEANRFYTVI |
| | NKKSGEIVPMEVNFNFDDPNLIILPLAFGKRQGREFIWNDLLSLETGSLKL |
| | ANGRVIEKTLYNRRTRQDEPALFVALTFERREVLDSSNIKPMNLIGIDRGE |
| | NIPAVIALTDPEGCPLSRFKDSLGNPTHILRIGESYKEKQRTIQAKKEVEQ |
| | RRAGGYSRKYASKAKNLADDMVRNTARDLLYYAVTQDAMLIFENLSRGFGR |
| | QGKRTFMAERQYTRMEDWLTAKLAYEGLSKTYLSKTLAQYTSKTCSNCGFT |
| | ITSADYDRVLEKLKKTATGWMTTINGKELKVEGQITYYNRYKRQNVVKDLS |
| | VELDRLSEESVNNDISSWTKGRSGEALSLLKKRFSHRPVQEKFVCLNCGFE |
| | THADEQAALNIARSWLFLRSQEYKKYQTNKTTGNTDKRAFVETWQSFYRKK |
| | LKEVWKPAV (SEQ ID NO: 123) |
| 290 | MQEIKRINKIRRRLVKDSNTKKAGKTGPMKTLLVRVMTPDLRERLENLRKK |
| | PENIPQPISNTSRANLNKLLTDYTEMKKAILHVYWEEFQKDPVGLMSRVAQ |
| | PAPKNIDQRKLIPVKDGNERLTSSGFACSQCCQPLYVYKLEQVNDKGKPHT |
| | NYFGRCNVSEHERLILLSPHKPEANDELVTYSLGKFGQRALDFYSIHVTRE |
| | SNHPVKPLEQIGGNSCASGPVGKALSDACMGAVASFLTKYQDIILEHQKVI |
| | KKNEKRLANLKDIASANGLAFPKITLPPQPHTKEGIEAYNNVVAQIVIWVN |
| | LNLWQKLKIGRDEAKPLQRLKGFPSFPLVERQANEVDWWDMVCNVKKLINE |
| | KKEDGKVFWQNLAGYKRQEALRPYLSSEEDRKKGKKFARYQFGDLLLHLEK |
| | KHGEDWGKVYDEAWERIDKKVEGLSKHIKLEEERRSEDAQSKAALTDWLRA |
| | KASFVIEGLKEADKDEFCRCELKLQKWYGDLRGKPFAIEAENSILDISGFS |
| | KQYNCAFIWQKDGVKKLNLYLIINYFKGGKLRFKKIKPEAFEANRFYTVIN |
| | KKSGEIVPMEVNFNFDDPNLIILPLAFGKRQGREFIWNDLLSLETGSLKLA |
| | NGRVIEKTLYNRRTRQDEPALFVALTFERREVLDSSNIKPMNLIGIDRGEN |
| | IPAVIALTDPEGCPLSRFKDSLGNPTHILRIGESYKEKQRTIQAKKEVEQR |
| | RAGGYSRKYASKAKNLADDMVRNTARDLLYYAVTQDAMLIFENLSRGFGRQ |
| | GKRTFMAERQYTRMEDWLTAKLAYEGLSKTYLSKTLAQYTSKTCSNCGFTI |
| | TSADYDRVLEKLKKTATGWMTTINGKELKVEGQITYYNRYKRQNVVKDLSV |
| | ELDRLSEESVNNDISSWTKGRSGEALSLLKKRFSHRPVQEKFVCLNCGFET |
| | HADEQAALNIARSWLFLRSQEYKKYQTNKTTGNTDKRAFVETWQSFYRKKL |
| | KEVWKPAV (SEQ ID NO: 124) |
| 291 | MQEIKRINKIRRRLVKDSNTKKAGKTGPMKTLLVRVMTPDLRERLENLRKK |
| | PENIPQPISNTSRANLNKLLTDYTEMKKAILHVYWEEFQKDPVGLMSRVAQ |
| | PAPKNIDQRKLIPVKDGNERLTSSGFACSQCCQPLYVYKLEQVNDKGKPHT |
| | NYFGRCNVSEHERLILLSPHKPEANDELVTYSLGKFGQRALDFYSIHVTRE |
| | SNHPVKPLEQIGGNSCASGPVGKALSDACMGAVASFLTKYQDIILEHQKVI |
| | KKNEKRLANLKDIASANGLAFPKITLPPQPHTKEGIEAYNNVVAQIVIWVN |
| | LNLWQKLKIGRDEAKPLQRLKGFPSFPLVERQANEVDWWDMVCNVKKLINE |
| | KKEDGKVFWQNLAGYKRQEALRPYLSSEEDRKKGKKFARYQFGDLLLHLEK |
| | KHGEDWGKVYDEAWERIDKKVEGLSKHIKLEEERRSEDAQSKAALTDWLRA |
| | KASFVIEGLKEADKDEFCRCELKLQKWYGDLRGKPFAIEAENSILDISGFS |
| | KQYNCAFIWQKDGVKKLNLYLIINYFKGGKLRFKKIKPEAFEANRFYTVIN |
| | KKSGEIVPMEVNFNFDDPNLIILPLAFGKRQGREFIWNDLLSLETGSLKLA |
| | NGRVIEKTLYNRRTRQDEPALFVALTFERREVLDSSNIKPMNLIGIDRGEN |
| | IPAVIALTDPEGCPLSRFKDSLGNPTHILRIGESYKEKQRTIQAKKEVEQR |
| | RAGGYSRKYASKAKNLADDMVRNTARDLLYYAVTQDAMLIFENLSRGFGRQ |
| | GKRTFMAERQYTRMEDWLTAKLAYEGLSKTYLSKTLAQYTSKTCSNCGFTI |
| | TSADYDRVLEKLKKTATGWMTTINGKELKVEGQITYYNRYKRQNVVKDLSV |
| | ELDRLSEESVNNDISSWTKGRSGEALSLLKKRFSHRPVQEKFVCLNCGFET |
| | HADEQAALNIARSWLFLRSQEYKKYQTNKTTGNTDKRAFVETWQSFYRKKL |
| | KEVWKPAV (SEQ ID NO: 125) |
| 293 | MQEIKRINKIRRRLVKDSNTKKAGKTGPMKTLLVRVMTPDLRERLENLRKK |
| | PENIPQPISNTSRANLNKLLTDYTEMKKAILHVYWEEFQKDPVGLMSRVAQ |
| | PAPKNIDQRKLIPVKDGNERLTSSGFACSQCCQPLYVYKLEQVNDKGKPHT |
| | NYFGRCNVSEHERLILLSPHKPEANDELVTYSLGKFGQRALDFYSIHVTRE |
| | SNHPVKPLEQIGGNSCASGPVGKALSDACMGAVASFLTKYQDIILEHQKVI |
| | KKNEKRLANLKDIASANGLAFPKITLPPQPHTKEGIEAYNNVVAQIVIWVN |
| | LNLWQKLKIGRDEAKPLQRLKGFPSFPLVERQANEVDWWDMVCNVKKLINE |
| | KKEDGKVFWQNLAGYKRQEALRPYLSSEEDRKKGKKFARYQFGDLLLHLEK |
| | KHGEDWGKVYDEAWERIDKKVEGLSKHIKLEEERRSEDAQSKAALTDWLRA |
| | KASFVIEGLKEADKDEFCRCELKLQKWYGDLRGKPFAIEAENSILDISGFS |
| | KQYNCAFIWQKDGVKKLNLYLIINYFKGGKLRFKKIKPEAFEANRFYTVIN |
| | KKSGEIVPMEVNFNFDDPNLIILPLAFGKRQGREFIWNDLLSLETGSLKLA |
| | NGRVIEKTLYNRRTRQDEPALFVALTFERREVLDSSNIKPMNLIGIDRGEN |
| | IPAVIALTDPEGCPLSRFKDSLGNPTHILRIGESYKEKQRTIQAKKEVEQR |
| | RAGGYSRKYASKAKNLADDMVRNTARDLLYYAVTQDAMLIFENLSRGFGRQ |
| | GKRTFMAERQYTRMEDWLTAKLAYEGLSKTYLSKTLAQYTSKTCSNCGFTI |
| | TSADYDRVLEKLKKTATGWMTTINGKELKVEGQITYYNRYKRQNVVKDLSV |
| | ELDRLSEESVNNDISSWTKGRSGEALSLLKKRFSHRPVQEKFVCLNCGFET |
| | HADEQAALNIARSWLFLRSQEYKKYQTNKTTGNTDKRAFVETWQSFYRKKL |
| | KEVWKPAV (SEQ ID NO: 126) |
| 300 | MQEIKRINKIRRRLVKDSNTKKAGKTGPMKTLLVRVMTPDLRERLENLRKK |
| | PENIPQPISNTSRANLNKLLTDYTEMKKAILHVYWEEFQKDPVGLMSRVAQ |
| | PAPKNIDQRKLIPVKDGNERLTSSGFACSQCCQPLYVYKLEQVNDKGKPHT |
| | NYFGRCNVSEHERLILLSPHKPEANDELVTYSLGKFGQRALDFYSIHVTRE |
| | SNHPVKPLEQIGGNSCASGPVGKALSDACMGAVASFLTKYQDIILEHQKVI |
| | KKNEKRLANLKDIASANGLAFPKITLPPQPHTKEGIEAYNNVVAQIVIWVN |
| | LNLWQKLKIGRDEAKPLQRLKGFPSFPLVERQANEVDWWDMVCNVKKLINE |
| | KKEDGKVFWQNLAGYKRQEALRPYLSSEEDRKKGKKFARYQFGDLLLHLEK |
| | KHGEDWGKVYDEAWERIDKKVEGLSKHIKLEEERRSEDAQSKAALTDWLRA |
| | KASFVIEGLKEADKDEFCRCELKLQKWYGDLRGKPFAIEAENSILDISGFS |
| | KQYNCAFIWQKDGVKKLNLYLIINYFKGGKLREKKIKPEAFEANRFYTVIN |
| | KKSGEIVPMEVNFNFDDPNLIILPLAFGKRQGREFIWNDLLSLETGSLKLA |
| | NGRVIEKTLYNRRTRQDEPALFVALTFERREVLDSSNIKPMNLIGIDRGEN |
| | IPAVIALTDPEGCPLSRFKDSLGNPTHILRIGESYKEKQRTIQAKKEVEQR |
| | RAGGYSRKYASKAKNLADDMVRNTARDLLYYAVTQDAMLIFENLSRGFGRQ |
| | GKRTFMAERQYTRMEDWLTAKLAYEGLSKTYLSKTLAQYTSKTCSNCGFTI |
| | TSADYDRVLEKLKKTATGWMTTINGKELKVEGQITYYNRYKRQNVVKDLSV |
| | ELDRLSEESVNNDISSWTKGRSGEALSLLKKRFSHRPVQEKFVCLNCGFET |
| | HADEQAALNIARSWLFLRSQEYKKYQTNKTTGNTDKRAFVETWQSFYRKKL |
| | KEVWKPAV (SEQ ID NO: 127) |
| 492 | MQEIKRINKIRRRLVKDSNTKKAGKTGPMKTLLVRVMTPDLRERLENLRKK |
| | PENIPQPISNTSRANLNKLLTDYTEMKKAILHVYWEEFQKDPVGLMSRVAQ |
| | PAPKNIDQRKLIPVKDGNERLTSSGFACSQCCQPLYVYKLEQVNDKGKPHT |
| | NYFGRCNVSEHERLILLSPHKPEANDELVTYSLGKFGQRALDFYSIHVTRE |
| | SNHPVKPLEQIGGNSCASGPVGKALSDACMGAVASFLTKYQDIILEHQKVI |
| | KKNEKRLANLKDIASANGLAFPKITLPPQPHTKEGIEAYNNVVAQIVIWVN |
| | LNLWQKLKIGRDEAKPLQRLKGFPSFPLVERQANEVDWWDMVCNVKKLINE |
| | KKEDGKVFWQNLAGYKRQEALRPYLSSEEDRKKGKKFARYQFGDLLLHLEK |
| | KHGEDWGKVYDEAWERIDKKVEGLSKHIKLEEERRSEDAQSKAALTDWLRA |
| | KASFVIEGLKEADKDEFCRCELKLQKWYGDLRGKPFAIEAENSILDISGFS |
| | KQYNCAFIWQKDGVKKLNLYLIINYFKGGKLRFKKIKPEAFEANRFYTVIN |
| | KKSGEIVPMEVNFNFDDPNLIILPLAFGKRQGREFIWNDLLSLETGSLKLA |
| | NGRVIEKTLYNRRTRQDEPALFVALTFERREVLDSSNIKPMNLIGIDRGEN |
| | IPAVIALTDPEGCPLSRFKDSLGNPTHILRIGESYKEKQRTIQAKKEVEQR |
| | RAGGYSRKYASKAKNLADDMVRNTARDLLYYAVTQDAMLIFENLSRGFGRQ |
| | GKRTFMAERQYTRMEDWLTAKLAYEGLSKTYLSKTLAQYTSKTCSNCGFTI |
| | TSADYDRVLEKLKKTATGWMTTINGKELKVEGQITYYNRYKRQNVVKDLSV |
| | ELDRLSEESVNNDISSWTKGRSGEALSLLKKRFSHRPVQEKFVCLNCGFET |
| | HADEQAALNIARSWLFLRSQEYKKYQTNKTTGNTDKRAFVETWQSFYRKKL |
| | KEVWKPAV (SEQ ID NO: 128) |
| 493 | MQEIKRINKIRRRLVKDSNTKKAGKTGPMKTLLVRVMTPDLRERLENLRKK |
| | PENIPQPISNTSRANLNKLLTDYTEMKKAILHVYWEEFQKDPVGLMSRVAQ |
| | PAPKNIDQRKLIPVKDGNERLTSSGFACSQCCQPLYVYKLEQVNDKGKPHT |
| | NYFGRCNVSEHERLILLSPHKPEANDELVTYSLGKFGQRALDFYSIHVTRE |
| | SNHPVKPLEQIGGNSCASGPVGKALSDACMGAVASFLTKYQDIILEHQKVI |
| | KKNEKRLANLKDIASANGLAFPKITLPPQPHTKEGIEAYNNVVAQIVIWVN |
| | LNLWQKLKIGRDEAKPLQRLKGFPSFPLVERQANEVDWWDMVCNVKKLINE |
| | KKEDGKVFWQNLAGYKRQEALRPYLSSEEDRKKGKKFARYQFGDLLLHLEK |
| | KHGEDWGKVYDEAWERIDKKVEGLSKHIKLEEERRSEDAQSKAALTDWLRA |
| | KASFVIEGLKEADKDEFCRCELKLQKWYGDLRGKPFAIEAENSILDISGFS |
| | KQYNCAFIWQKDGVKKLNLYLIINYFKGGKLREKKIKPEAFEANRFYTVIN |
| | KKSGEIVPMEVNFNFDDPNLIILPLAFGKRQGREFIWNDLLSLETGSLKLA |
| | NGRVIEKTLYNRRTRQDEPALFVALTFERREVLDSSNIKPMNLIGIDRGEN |
| | IPAVIALTDPEGCPLSRFKDSLGNPTHILRIGESYKEKQRTIQAKKEVEQR |
| | RAGGYSRKYASKAKNLADDMVRNTARDLLYYAVTQDAMLIFENLSRGFGRQ |
| | GKRTFMAERQYTRMEDWLTAKLAYEGLSKTYLSKTLAQYTSKTCSNCGFTI |
| | TSADYDRVLEKLKKTATGWMTTINGKELKVEGQITYYNRYKRQNVVKDLSV |
| | ELDRLSEESVNNDISSWTKGRSGEALSLLKKRFSHRPVQEKFVCLNCGFET |
| | HADEQAALNIARSWLFLRSQEYKKYQTNKTTGNTDKRAFVETWQSFYRKKL |
| | KEVWKPAV (SEQ ID NO: 129) |
| 387: | QEIKRINKIRRRLVKDSNTKKAGKTGPMKTLLVRVMTPDLRERLENLRKKP |
| NT SB swap | ENIPQPISNTSRANLNKLLTDYTEMKKAILHVYWEEFQKDPVGLMSRVAQP |
| from SEQ ID | ASKKIDQNKLKPEMDEKGNLTTAGFACSQCGQPLFVYKLEQVSEKGKAYTN |
| NO: 1 | YFGRCNVAEHEKLILLAQLKPEKDSDEAVTYSLGKFGQRALDFYSIHVTRE |
| | SNHPVKPLEQIGGNSCASGPVGKALSDACMGAVASFLTKYQDIILEHQKVI |
| | KKNEKRLANLKDIASANGLAFPKITLPPQPHTKEGIEAYNNVVAQIVIWVN |
| | LNLWQKLKIGRDEAKPLQRLKGFPSFPLVERQANEVDWWDMVCNVKKLINE |
| | KKEDGKVFWQNLAGYKRQEALRPYLSSEEDRKKGKKFARYQFGDLLLHLEK |
| | KHGEDWGKVYDEAWERIDKKVEGLSKHIKLEEERRSEDAQSKAALTDWLRA |
| | KASFVIEGLKEADKDEFCRCELKLQKWYGDLRGKPFAIEAENSILDISGFS |
| | KQYNCAFIWQKDGVKKLNLYLIINYFKGGKLRFKKIKPEAFEANRFYTVIN |
| | KKSGEIVPMEVNFNFDDPNLIILPLAFGKRQGREFIWNDLLSLETGSLKLA |
| | NGRVIEKTLYNRRTRQDEPALFVALTFERREVLDSSNIKPMNLIGIDRGEN |
| | IPAVIALTDPEGCPLSRFKDSLGNPTHILRIGESYKEKQRTIQAKKEVEQR |
| | RAGGYSRKYASKAKNLADDMVRNTARDLLYYAVTQDAMLIFENLSRGFGRQ |
| | GKRTFMAERQYTRMEDWLTAKLAYEGLSKTYLSKTLAQYTSKTCSNCGFTI |
| | TSADYDRVLEKLKKTATGWMTTINGKELKVEGQITYYNRYKRQNVVKDLSV |
| | ELDRLSEESVNNDISSWTKGRSGEALSLLKKRFSHRPVQEKFVCLNCGFET |
| | HADEQAALNIARSWLFLRSQEYKKYQTNKTTGNTDKRAFVETWQSFYRKKL |
| | KEVWKPAV (SEQ ID NO: 130) |
| 395: | QEIKRINKIRRRLVKDSNTKKAGKTGPMKTLLVRVMTPDLRERLENLRKKP |
| Helical 1B | ENIPQPISNTSRANLNKLLTDYTEMKKAILHVYWEEFQKDPVGLMSRVAQP |
| swap from | APKNIDQRKLIPVKDGNERLTSSGFACSQCCQPLYVYKLEQVNDKGKPHTN |
| SEQ ID | YFGRCNVSEHERLILLSPHKPEANDELVTYSLGKFGQRALDFYSIHVTKES |
| NO: 1 | THPVKPLAQIAGNRYASGPVGKALSDACMGTIASFLSKYQDIIIEHQKVVK |
| | GNQKRLESLRELAGKENLEYPSVTLPPQPHTKEGVDAYNEVIARVRMWVNL |
| | NLWQKLKLSRDDAKPLLRLKGFPSFPLVERQANEVDWWDMVCNVKKLINEK |
| | KEDGKVFWQNLAGYKRQEALRPYLSSEEDRKKGKKFARYQFGDLLLHLEKK |
| | HGEDWGKVYDEAWERIDKKVEGLSKHIKLEEERRSEDAQSKAALTDWLRAK |
| | ASFVIEGLKEADKDEFCRCELKLQKWYGDLRGKPFAIEAENSILDISGFSK |
| | QYNCAFIWQKDGVKKLNLYLIINYFKGGKLREKKIKPEAFEANRFYTVINK |
| | KSGEIVPMEVNFNFDDPNLIILPLAFGKRQGREFIWNDLLSLETGSLKLAN |
| | GRVIEKTLYNRRTRQDEPALFVALTFERREVLDSSNIKPMNLIGIDRGENI |
| | PAVIALTDPEGCPLSRFKDSLGNPTHILRIGESYKEKQRTIQAKKEVEQRR |
| | AGGYSRKYASKAKNLADDMVRNTARDLLYYAVTQDAMLIFENLSRGFGRQG |
| | KRTFMAERQYTRMEDWLTAKLAYEGLSKTYLSKTLAQYTSKTCSNCGFTIT |
| | SADYDRVLEKLKKTATGWMTTINGKELKVEGQITYYNRYKRQNVVKDLSVE |
| | LDRLSEESVNNDISSWTKGRSGEALSLLKKRFSHRPVQEKFVCLNCGFETH |
| | ADEQAALNIARSWLFLRSQEYKKYQTNKTTGNTDKRAFVETWQSFYRKKLK |
| | EVWKPAV (SEQ ID NO: 131) |
| 485: | QEIKRINKIRRRLVKDSNTKKAGKTGPMKTLLVRVMTPDLRERLENLRKKP |
| Helical 1B | ENIPQPISNTSRANLNKLLTDYTEMKKAILHVYWEEFQKDPVGLMSRVAQP |
| swap from | APKNIDQRKLIPVKDGNERLTSSGFACSQCCQPLYVYKLEQVNDKGKPHTN |
| SEQ ID | YFGRCNVSEHERLILLSPHKPEANDELVTYSLGKFGQRALDFYSIHVTKES |
| NO: 1 | THPVKPLAQIAGNRYASGPVGKALSDACMGTIASFLSKYQDIIIEHQKVVK |
| | GNQKRLESLRELAGKENLEYPSVTLPPQPHTKEGVDAYNEVIARVRMWVNL |
| | NLWQKLKLSRDDAKPLLRLKGFPSFPLVERQANEVDWWDMVCNVKKLINEK |
| | KEDGKVFWQNLAGYKRQEALRPYLSSEEDRKKGKKFARYQLGDLLLHLEKK |
| | HGEDWGKVYDEAWERIDKKVEGLSKHIKLEEERRSEDAQSKAALTDWLRAK |
| | ASFVIEGLKEADKDEFCRCELKLQKWYGDLRGKPFAIEAENSILDISGFSK |
| | QYNCAFIWQKDGVKKLNLYLIINYFKGGKLRFKKIKPEAFEANRFYTVINK |
| | KSGEIVPMEVNFNFDDPNLIILPLAFGKRQGREFIWNDLLSLETGSLKLAN |
| | GRVIEKTLYNRRTRQDEPALFVALTFERREVLDSSNIKPMNLIGVDRGENI |
| | PAVIALTDPEGCPLSRFKDSLGNPTHILRIGESYKEKQRTIQAKKEVEQRR |
| | AGGYSRKYASKAKNLADDMVRNTARDLLYYAVTQDAMLIFENLSRGFGRQG |
| | KRTFMAERQYTRMEDWLTAKLAYEGLSKTYLSKTLAQYTSKTCSNCGFTIT |
| | SADYDRVLEKLKKTATGWMTTINGKELKVEGQITYYNRRKRQNVVKDLSVE |
| | LDRLSEESVNNDISSWTKGRSGEALSLLKKRFSHRPVQEKFVCLNCGFETH |
| | ADEQAALNIARSWLFLRSQEYKKYQTNKTTGNTDKRAFVETWQSFYRKKLK |
| | EVWKPAV (SEQ ID NO: 132) |
| 486: | QEIKRINKIRRRLVKDSNTKKAGKTGPMKTLLVRVMTPDLRERLENLRKKP |
| Helical 1B | ENIPQPISNTSRANLNKLLTDYTEMKKAILHVYWEEFQKDPVGLMSRVAQP |
| swap from | APKNIDQRKLIPVKDGNERLTSSGFACSQCCQPLYVYKLEQVNDKGKPHTN |
| SEQ ID | YFGRCNVSEHERLILLSPHKPEANDELVTYSLGKFGQRALDFYSIHVTKES |
| NO: 1 | THPVKPLAQIAGNRYASGPVGKALSDACMGTIASFLSKYQDIIIEHQKVVK |
| | GNQKRLESLRELAGKENLEYPSVTLPPQPHTKEGVDAYNEVIARVRMWVNL |
| | NLWQKLKLSRDDAKPLLRLKGFPSFPLVERQANEVDWWDMVCNVKKLINEK |
| | KEDGKVFWQNLAGYKRQEALRPYLSSEEDRKKGKKFARYQLGDLLKHLEKK |
| | HGEDWGKVYDEAWERIDKKVEGLSKHIKLEEERRSEDAQSKAALTDWLRAK |
| | ASFVIEGLKEADKDEFCRCELKLQKWYGDLRGKPFAIEAENSILDISGFSK |
| | QYNCAFIWQKDGVKKLNLYLIINYFKGGKLRFKKIKPEAFEANRFYTVINK |
| | KSGEIVPMEVNFNFDDPNLIILPLAFGKRQGREFIWNDLLSLETGSLKLAN |
| | GRVIEKTLYNRRTRQDEPALFVALTFERREVLDSSNIKPMNLIGVDRGENI |
| | PAVIALTDPEGCPLSRFKDSLGNPTHILRIGESYKEKQRTIQAKKEVEQRR |
| | AGGYSRKYASKAKNLADDMVRNTARDLLYYAVTQDAMLIFENLSRGFGRQG |
| | KRTFMAERQYTRMEDWLTAKLAYEGLSKTYLSKTLAQYTSKTCSNCGFTIT |
| | SADYDRVLEKLKKTATGWMTTINGKELKVEGQITYYNRRKRQNVVKDLSVE |
| | LDRLSEESVNNDISSWTKGRSGEALSLLKKRFSHRPVQEKFVCLNCGFETH |
| | ADEQAALNIARSWLFLRSQEYKKYQTNKTTGNTDKRAFVETWQSFYRKKLK |
| | EVWKPAV (SEQ ID NO: 133) |
| 487: | QEIKRINKIRRRLVKDSNTKKAGKTGPMKTLLVRVMTPDLRERLENLRKKP |
| Helical 1B | ENIPQPISNTSRANLNKLLTDYTEMKKAILHVYWEEFQKDPVGLMSRVAQP |
| swap from | APKNIDQRKLIPVKDGNERLTSSGFACSQCCQPLYVYKLEQVNDKGKPHTN |
| SEQ ID | YFGRCNVSEHERLILLSPHKPEANDELVTYSLGKFGQRALDFYSIHVTKES |
| NO: 1 | THPVKPLAQIAGNRYASGPVGKALSDACMGTIASFLSKYQDIIIEHQKVVK |
| | GNQKRLESLRELAGKENLEYPSVTLPPQPHTKEGVDAYNEVIARVRMWVNL |
| | NLWQKLKLSRDDAKPLLRLKGFPSFPLVERQANEVDWWDMVCNVKKLINEK |
| | KEDGKVFWQNLAGYKRQEALRPYLSSEEDRKKGKKFARYQLGDLLLHLEKK |
| | HGEDWGKVYDEAWERIDKKVEGLSKHIKLEEERRSEDAQSKAALTDWLRAK |
| | ASFVIEGLKEADKDEFCRCELKLQKWYGDLRGKPFAIEAENSILDISGFSK |
| | QYNCAFIWQKDGVKKLNLYLIINYFKGGKLRFKKIKPEAFEANRFYTVINK |
| | KSGEIVPMEVNFNFDDPNLIILPLAFGKRQGREFIWNDLLSLETGSLKLAN |
| | GRVIEKTLYNRRTRQDEPALFVALTFERREVLDSSNIKPMNLIGVDRGENI |
| | PAVIALTDPEGCPLSRFKDSLGNPTHILRIGESYKEKQRTIQAKKEVEQRR |
| | AGGYSRKYASKAKNLADDMVRNTARDLLYYAVTQDAMLIFENLSRGFGRQG |
| | KRTFMAERQYTRMEDWLTAKLAYEGLSKTYLSKTLAQYTSKTCSNCGFTIT |
| | SADYDRVLEKLKKTATGWMTTINGKELKVEGQITYYNRYKRQNVVKDLSVE |
| | LDRLSEESVNNDISSWTKGRSGEALSLLKKRFSHRPVQEKFVCLNCGFETH |
| | ADEQAALNIARSWLFLRSQEYKKYQTNKTTGNTDKRAFVETWQSFYRKKLK |
| | EVWKPAV (SEQ ID NO: 134) |
| 488: | QEIKRINKIRRRLVKDSNTKKAGKTGPMKTLLVRVMTPDLRERLENLRKKP |
| NTSB and | ENIPQPISNTSRANLNKLLTDYTEMKKAILHVYWEEFQKDPVGLMSRVAQP |
| Helical 1B | ASKKIDQNKLKPEMDEKGNLTTAGFACSQCGQPLFVYKLEQVSEKGKAYTN |
| swap from | YFGRCNVAEHEKLILLAQLKPEKDSDEAVTYSLGKFGQRALDFYSIHVTKE |
| SEQ ID | STHPVKPLAQIAGNRYASGPVGKALSDACMGTIASFLSKYQDIIIEHQKVV |
| NO: 1 | KGNQKRLESLRELAGKENLEYPSVTLPPQPHTKEGVDAYNEVIARVRMWVN |
| | LNLWQKLKLSRDDAKPLLRLKGFPSFPLVERQANEVDWWDMVCNVKKLINE |
| | KKEDGKVFWQNLAGYKRQEALRPYLSSEEDRKKGKKFARYQFGDLLLHLEK |
| | KHGEDWGKVYDEAWERIDKKVEGLSKHIKLEEERRSEDAQSKAALTDWLRA |
| | KASFVIEGLKEADKDEFCRCELKLQKWYGDLRGKPFAIEAENSILDISGFS |
| | KQYNCAFIWQKDGVKKLNLYLIINYFKGGKLRFKKIKPEAFEANRFYTVIN |
| | KKSGEIVPMEVNFNFDDPNLIILPLAFGKRQGREFIWNDLLSLETGSLKLA |
| | NGRVIEKTLYNRRTRQDEPALFVALTFERREVLDSSNIKPMNLIGIDRGEN |
| | IPAVIALTDPEGCPLSRFKDSLGNPTHILRIGESYKEKQRTIQAKKEVEQR |
| | RAGGYSRKYASKAKNLADDMVRNTARDLLYYAVTQDAMLIFENLSRGFGRQ |
| | GKRTFMAERQYTRMEDWLTAKLAYEGLSKTYLSKTLAQYTSKTCSNCGFTI |
| | TSADYDRVLEKLKKTATGWMTTINGKELKVEGQITYYNRYKRQNVVKDLSV |
| | ELDRLSEESVNNDISSWTKGRSGEALSLLKKRFSHRPVQEKFVCLNCGFET |
| | HADEQAALNIARSWLFLRSQEYKKYQTNKTTGNTDKRAFVETWQSFYRKKL |
| | KEVWKPAV (SEQ ID NO: 135) |
| 489: | QEIKRINKIRRRLVKDSNTKKAGKTGPMKTLLVRVMTPDLRERLENLRKKP |
| NTSB and | ENIPQPISNTSRANLNKLLTDYTEMKKAILHVYWEEFQKDPVGLMSRVAQP |
| Helical 1B | ASKKIDQNKLKPEMDEKGNLTTAGFACSQCGQPLFVYKLEQVSEKGKAYTN |
| swap from | YFGRCNVAEHEKLILLAQLKPEKDSDEAVTYSLGKFGQRALDFYSIHVTKE |
| SEQ ID | STHPVKPLAQIAGNRYASGPVGKALSDACMGTIASFLSKYQDIIIEHQKVV |
| NO: 1 | KGNQKRLESLRELAGKENLEYPSVTLPPQPHTKEGVDAYNEVIARVRMWVN |
| | LNLWQKLKLSRDDAKPLLRLKGFPSFPLVERQANEVDWWDMVCNVKKLINE |
| | KKEDGKVFWQNLAGYKRQEALRPYLSSEEDRKKGKKFARYQLGDLLLHLEK |
| | KHGEDWGKVYDEAWERIDKKVEGLSKHIKLEEERRSEDAQSKAALTDWLRA |
| | KASFVIEGLKEADKDEFCRCELKLQKWYGDLRGKPFAIEAENSILDISGFS |
| | KQYNCAFIWQKDGVKKLNLYLIINYFKGGKLRFKKIKPEAFEANRFYTVIN |
| | KKSGEIVPMEVNFNFDDPNLIILPLAFGKRQGREFIWNDLLSLETGSLKLA |
| | NGRVIEKTLYNRRTRQDEPALFVALTFERREVLDSSNIKPMNLIGVDRGEN |
| | IPAVIALTDPEGCPLSRFKDSLGNPTHILRIGESYKEKQRTIQAKKEVEQR |
| | RAGGYSRKYASKAKNLADDMVRNTARDLLYYAVTQDAMLIFENLSRGFGRQ |
| | GKRTFMAERQYTRMEDWLTAKLAYEGLSKTYLSKTLAQYTSKTCSNCGFTI |
| | TSADYDRVLEKLKKTATGWMTTINGKELKVEGQITYYNRRKRQNVVKDLSV |
| | ELDRLSEESVNNDISSWTKGRSGEALSLLKKRFSHRPVQEKFVCLNCGFET |
| | HADEQAALNIARSWLFLRSQEYKKYQTNKTTGNTDKRAFVETWQSFYRKKL |
| | KEVWKPAV (SEQ ID NO: 136) |
| 490: | QEIKRINKIRRRLVKDSNTKKAGKTGPMKTLLVRVMTPDLRERLENLRKKP |
| NTSB and | ENIPQPISNTSRANLNKLLTDYTEMKKAILHVYWEEFQKDPVGLMSRVAQP |
| Helical 1B | ASKKIDQNKLKPEMDEKGNLTTAGFACSQCGQPLFVYKLEQVSEKGKAYTN |
| swap from | YFGRCNVAEHEKLILLAQLKPEKDSDEAVTYSLGKFGQRALDFYSIHVTKE |
| SEQ ID | STHPVKPLAQIAGNRYASGPVGKALSDACMGTIASFLSKYQDIIIEHQKVV |
| NO: 1 | KGNQKRLESLRELAGKENLEYPSVTLPPQPHTKEGVDAYNEVIARVRMWVN |
| | LNLWQKLKLSRDDAKPLLRLKGFPSFPLVERQANEVDWWDMVCNVKKLINE |
| | KKEDGKVFWQNLAGYKRQEALRPYLSSEEDRKKGKKFARYQLGDLLKHLEK |
| | KHGEDWGKVYDEAWERIDKKVEGLSKHIKLEEERRSEDAQSKAALTDWLRA |
| | KASFVIEGLKEADKDEFCRCELKLQKWYGDLRGKPFAIEAENSILDISGFS |
| | KQYNCAFIWQKDGVKKLNLYLIINYFKGGKLRFKKIKPEAFEANRFYTVIN |
| | KKSGEIVPMEVNFNFDDPNLIILPLAFGKRQGREFIWNDLLSLETGSLKLA |
| | NGRVIEKTLYNRRTRQDEPALFVALTFERREVLDSSNIKPMNLIGVDRGEN |
| | IPAVIALTDPEGCPLSRFKDSLGNPTHILRIGESYKEKQRTIQAKKEVEQR |
| | RAGGYSRKYASKAKNLADDMVRNTARDLLYYAVTQDAMLIFENLSRGFGRQ |
| | GKRTFMAERQYTRMEDWLTAKLAYEGLSKTYLSKTLAQYTSKTCSNCGFTI |
| | TSADYDRVLEKLKKTATGWMTTINGKELKVEGQITYYNRRKRQNVVKDLSV |
| | ELDRLSEESVNNDISSWTKGRSGEALSLLKKRFSHRPVQEKFVCLNCGFET |
| | HADEQAALNIARSWLFLRSQEYKKYQTNKTTGNTDKRAFVETWQSFYRKKL |
| | KEVWKPAV (SEQ ID NO: 137) |
| 491: | QEIKRINKIRRRLVKDSNTKKAGKTGPMKTLLVRVMTPDLRERLENLRKKP |
| NTSB and | ENIPQPISNTSRANLNKLLTDYTEMKKAILHVYWEEFQKDPVGLMSRVAQP |
| Helical 1B | ASKKIDQNKLKPEMDEKGNLTTAGFACSQCGQPLFVYKLEQVSEKGKAYTN |
| swap from | YFGRCNVAEHEKLILLAQLKPEKDSDEAVTYSLGKFGQRALDFYSIHVTKE |
| SEQ ID | STHPVKPLAQIAGNRYASGPVGKALSDACMGTIASFLSKYQDIIIEHQKVV |
| NO: 1 | KGNQKRLESLRELAGKENLEYPSVTLPPQPHTKEGVDAYNEVIARVRMWVN |
| | LNLWQKLKLSRDDAKPLLRLKGFPSFPLVERQANEVDWWDMVCNVKKLINE |
| | KKEDGKVFWQNLAGYKRQEALRPYLSSEEDRKKGKKFARYQLGDLLLHLEK |
| | KHGEDWGKVYDEAWERIDKKVEGLSKHIKLEEERRSEDAQSKAALTDWLRA |
| | KASFVIEGLKEADKDEFCRCELKLQKWYGDLRGKPFAIEAENSILDISGFS |
| | KQYNCAFIWQKDGVKKLNLYLIINYFKGGKLREKKIKPEAFEANRFYTVIN |
| | KKSGEIVPMEVNFNFDDPNLIILPLAFGKRQGREFIWNDLLSLETGSLKLA |
| | NGRVIEKTLYNRRTRQDEPALFVALTFERREVLDSSNIKPMNLIGVDRGEN |
| | IPAVIALTDPEGCPLSRFKDSLGNPTHILRIGESYKEKQRTIQAKKEVEQR |
| | RAGGYSRKYASKAKNLADDMVRNTARDLLYYAVTQDAMLIFENLSRGFGRQ |
| | GKRTFMAERQYTRMEDWLTAKLAYEGLSKTYLSKTLAQYTSKTCSNCGFTI |
| | TSADYDRVLEKLKKTATGWMTTINGKELKVEGQITYYNRYKRQNVVKDLSV |
| | ELDRLSEESVNNDISSWTKGRSGEALSLLKKRFSHRPVQEKFVCLNCGFET |
| | HADEQAALNIARSWLFLRSQEYKKYQTNKTTGNTDKRAFVETWQSFYRKKL |
| | KEVWKPAV (SEQ ID NO: 138) |
| 494: | QEIKRINKIRRRLVKDSNTKKAGKTGPMKTLLVRVMTPDLRERLENLRKKP |
| NT SB swap | ENIPQPISNTSRANLNKLLTDYTEMKKAILHVYWEEFQKDPVGLMSRVAQP |
| from SEQ ID | ASKKIDQNKLKPEMDEKGNLTTAGFACSQCGQPLFVYKLEQVSEKGKAYTN |
| NO: 1 | YFGRCNVAEHEKLILLAQLKPEKDSDEAVTYSLGKFGQRALDFYSIHVTRE |
| | SNHPVKPLEQIGGNSCASGPVGKALSDACMGAVASFLTKYQDIILEHQKVI |
| | KKNEKRLANLKDIASANGLAFPKITLPPQPHTKEGIEAYNNVVAQIVIWVN |
| | LNLWQKLKIGRDEAKPLQRLKGFPSFPLVERQANEVDWWDMVCNVKKLINE |
| | KKEDGKVFWQNLAGYKRQEALRPYLSSEEDRKKGKKFARYQLGDLLLHLEK |
| | KHGEDWGKVYDEAWERIDKKVEGLSKHIKLEEERRSEDAQSKAALTDWLRA |
| | KASFVIEGLKEADKDEFCRCELKLQKWYGDLRGKPFAIEAENSILDISGFS |
| | KQYNCAFIWQKDGVKKLNLYLIINYFKGGKLRFKKIKPEAFEANRFYTVIN |
| | KKSGEIVPMEVNFNFDDPNLIILPLAFGKRQGREFIWNDLLSLETGSLKLA |
| | NGRVIEKTLYNRRTRQDEPALFVALTFERREVLDSSNIKPMNLIGVDRGEN |
| | IPAVIALTDPEGCPLSRFKDSLGNPTHILRIGESYKEKQRTIQAKKEVEQR |
| | RAGGYSRKYASKAKNLADDMVRNTARDLLYYAVTQDAMLIFENLSRGFGRQ |
| | GKRTFMAERQYTRMEDWLTAKLAYEGLSKTYLSKTLAQYTSKTCSNCGFTI |
| | TSADYDRVLEKLKKTATGWMTTINGKELKVEGQITYYNRYKRQNVVKDLSV |
| | ELDRLSEESVNNDISSWTKGRSGEALSLLKKRFSHRPVQEKFVCLNCGFET |
| | HADEQAALNIARSWLFLRSQEYKKYQTNKTTGNTDKRAFVETWQSFYRKKL |
| | KEVWKPAV (SEQ ID NO: 139) |
| 328: S867G | MQEIKRINKIRRRLVKDSNTKKAGKTGPMKTLLVRVMTPDLRERLENLRKK |
| | PENIPQPISNTSRANLNKLLTDYTEMKKAILHVYWEEFQKDPVGLMSRVAQ |
| | PAPKNIDQRKLIPVKDGNERLTSSGFACSQCCQPLYVYKLEQVNDKGKPHT |
| | NYFGRCNVSEHERLILLSPHKPEANDELVTYSLGKFGQRALDFYSIHVTRE |
| | SNHPVKPLEQIGGNSCASGPVGKALSDACMGAVASFLTKYQDIILEHQKVI |
| | KKNEKRLANLKDIASANGLAFPKITLPPQPHTKEGIEAYNNVVAQIVIWVN |
| | LNLWQKLKIGRDEAKPLQRLKGFPSFPLVERQANEVDWWDMVCNVKKLINE |
| | KKEDGKVFWQNLAGYKRQEALLPYLSSEEDRKKGKKFARYQFGDLLLHLEK |
| | KHGEDWGKVYDEAWERIDKKVEGLSKHIKLEEERRSEDAQSKAALTDWLRA |
| | KASFVIEGLKEADKDEFCRCELKLQKWYGDLRGKPFAIEAENSILDISGFS |
| | KQYNCAFIWQKDGVKKLNLYLIINYFKGGKLRFKKIKPEAFEANRFYTVIN |
| | KKSGEIVPMEVNFNFDDPNLIILPLAFGKRQGREFIWNDLLSLETGSLKLA |
| | NGRVIEKTLYNRRTRQDEPALFVALTFERREVLDSSNIKPMNLIGIDRGEN |
| | IPAVIALTDPEGCPLSRFKDSLGNPTHILRIGESYKEKQRTIQAAKEVEQR |
| | RAGGYSRKYASKAKNLADDMVRNTARDLLYYAVTQDAMLIFENLSRGFGRQ |
| | GKRTFMAERQYTRMEDWLTAKLAYEGLPSKTYLSKTLAQYTSKTCSNCGFT |
| | ITSADYDRVLEKLKKTATGWMTTINGKELKVEGQITYYNRYKRQNVVKDLG |
| | VELDRLSEESVNNDISSWTKGRSGEALSLLKKRFSHRPVQEKFVCLNCGFE |
| | THADEQAALNIARSWLFLRSQEYKKYQTNKTTGNTDKRAFVETWQSFYRKK |
| | LKEVWKPAV (SEQ ID NO: 140) |
| 388: | MQEIKRINKIRRRLVKDSNTKKAGKTGPMKTLLVRVMTPDLRERLENLRKK |
| L379R + A708K+ | PENIPQPISNTSRANLNKLLTDYTEMKKAILHVYWEEFQKDPVGLMSRVAQ |
| [P793] + X1 | PAPKNIDQRKLIPVKDGNERLTSSGFACSQCCQPLYVYKLEQVNDKGKPHT |
| Helical2 | NYFGRCNVSEHERLILLSPHKPEANDELVTYSLGKFGQRALDFYSIHVTRE |
| swap | SNHPVKPLEQIGGNSCASGPVGKALSDACMGAVASFLTKYQDIILEHQKVI |
| | KKNEKRLANLKDIASANGLAFPKITLPPQPHTKEGIEAYNNVVAQIVIWVN |
| | LNLWQKLKIGRDEAKPLQRLKGFPSFPVVERRENEVDWWNTINEVKKLIDA |
| | KRDMGRVFWSGVTAEKRNTILEGYNYLPNENDHKKREGSLENPKKPAKRQF |
| | GDLLLYLEKKYAGDWGKVFDEAWERIDKKIAGLTSHIEREEARNAEDAQSK |
| | AVLTDWLRAKASFVLERLKEMDEKEFYACEIQLQKWYGDLRGNPFAVEAEN |
| | SILDISGFSKQYNCAFIWQKDGVKKLNLYLIINYFKGGKLRFKKIKPEAFE |
| | ANRFYTVINKKSGEIVPMEVNFNFDDPNLIILPLAFGKRQGREFIWNDLLS |
| | LETGSLKLANGRVIEKTLYNRRTRQDEPALFVALTFERREVLDSSNIKPMN |
| | LIGIDRGENIPAVIALTDPEGCPLSRFKDSLGNPTHILRIGESYKEKQRTI |
| | QAKKEVEQRRAGGYSRKYASKAKNLADDMVRNTARDLLYYAVTQDAMLIFE |
| | NLSRGFGRQGKRTFMAERQYTRMEDWLTAKLAYEGLSKTYLSKTLAQYTSK |
| | TCSNCGFTITSADYDRVLEKLKKTATGWMTTINGKELKVEGQITYYNRYKR |
| | QNVVKDLSVELDRLSEESVNNDISSWTKGRSGEALSLLKKRFSHRPVQEKF |
| | VCLNCGFETHADEQAALNIARSWLFLRSQEYKKYQTNKTTGNTDKRAFVET |
| | WQSFYRKKLKEVWKPAV (SEQ ID NO: 141) |
| 389: | MQEIKRINKIRRRLVKDSNTKKAGKTGPMKTLLVRVMTPDLRERLENLRKK |
| L379R +A708K + | PENIPQPISNTSRANLNKLLTDYTEMKKAILHVYWEEFQKDPVGLMSRVAQ |
| [P793] + X1 | PAPKNIDQRKLIPVKDGNERLTSSGFACSQCCQPLYVYKLEQVNDKGKPHT |
| RuvC1 | NYFGRCNVSEHERLILLSPHKPEANDELVTYSLGKFGQRALDFYSIHVTRE |
| swap | SNHPVKPLEQIGGNSCASGPVGKALSDACMGAVASFLTKYQDIILEHQKVI |
| | KKNEKRLANLKDIASANGLAFPKITLPPQPHTKEGIEAYNNVVAQIVIWVN |
| | LNLWQKLKIGRDEAKPLQRLKGFPSFPLVERQANEVDWWDMVCNVKKLINE |
| | KKEDGKVFWQNLAGYKRQEALRPYLSSEEDRKKGKKFARYQFGDLLLHLEK |
| | KHGEDWGKVYDEAWERIDKKVEGLSKHIKLEEERRSEDAQSKAALTDWLRA |
| | KASFVIEGLKEADKDEFCRCELKLQKWYGDLRGKPFAIEAENSILDISGFS |
| | KQYNCAFIWQKDGVKKLNLYLIINYFKGGKLRFKKIKPEAFEANRFYTVIN |
| | KKSGEIVPMEVNFNFDDPNLIILPLAFGKRQGREFIWNDLLSLETGSLKLA |
| | NGRVIEKTLYNRRTRQDEPALFVALTFERREVLDSSNIKPVNLIGVDRGEN |
| | IPAVIALTDPEGCPLPEFKDSSGGPTDILRIGEGYKEKQRAIQAAKEVEQR |
| | RAGGYSRKFASKSRNLADDMVRNSARDLFYHAVTHDAVLVFENLSRGFGRQ |
| | GKRTFMTERQYTKMEDWLTAKLAYEGLTSKTYLSKTLAQYTSKTCSNCGFT |
| | ITSADYDRVLEKLKKTATGWMTTINGKELKVEGQITYYNRYKRQNVVKDLS |
| | VELDRLSEESVNNDISSWTKGRSGEALSLLKKRFSHRPVQEKFVCLNCGFE |
| | THADEQAALNIARSWLFLRSQEYKKYQTNKTTGNTDKRAFVETWQSFYRKK |
| | LKEVWKPAV (SEQ ID NO: 142) |
| 390: | MQEIKRINKIRRRLVKDSNTKKAGKTGPMKTLLVRVMTPDLRERLENLRKK |
| L379R + A708K + | PENIPQPISNTSRANLNKLLTDYTEMKKAILHVYWEEFQKDPVGLMSRVAQ |
| [P793] + X1 | PAPKNIDQRKLIPVKDGNERLTSSGFACSQCCQPLYVYKLEQVNDKGKPHT |
| RuvC2 | NYFGRCNVSEHERLILLSPHKPEANDELVTYSLGKFGQRALDFYSIHVTRE |
| swap | SNHPVKPLEQIGGNSCASGPVGKALSDACMGAVASFLTKYQDIILEHQKVI |
| | KKNEKRLANLKDIASANGLAFPKITLPPQPHTKEGIEAYNNVVAQIVIWVN |
| | LNLWQKLKIGRDEAKPLQRLKGFPSFPLVERQANEVDWWDMVCNVKKLINE |
| | KKEDGKVFWQNLAGYKRQEALRPYLSSEEDRKKGKKFARYQFGDLLLHLEK |
| | KHGEDWGKVYDEAWERIDKKVEGLSKHIKLEEERRSEDAQSKAALTDWLRA |
| | KASFVIEGLKEADKDEFCRCELKLQKWYGDLRGKPFAIEAENSILDISGFS |
| | KQYNCAFIWQKDGVKKLNLYLIINYFKGGKLREKKIKPEAFEANRFYTVIN |
| | KKSGEIVPMEVNFNFDDPNLIILPLAFGKRQGREFIWNDLLSLETGSLKLA |
| | NGRVIEKTLYNRRTRQDEPALFVALTFERREVLDSSNIKPMNLIGIDRGEN |
| | IPAVIALTDPEGCPLSRFKDSLGNPTHILRIGESYKEKQRTIQAKKEVEQR |
| | RAGGYSRKYASKAKNLADDMVRNTARDLLYYAVTQDAMLIFENLSRGFGRQ |
| | GKRTFMAERQYTRMEDWLTAKLAYEGLSKTYLSKTLAQYTSKTCSNCGFTI |
| | TSADYDRVLEKLKKTATGWMTTINGKELKVEGQITYYNRYKRQNVVKDLSV |
| | ELDRLSEESVNNDISSWTKGRSGEALSLLKKRFSHRPVQEKFVCLNCGFET |
| | HADEQAALNIARSWLFLNSNSTEFKSYKSGKQPFVGAWQAFYKRRLKEVWK |
| | PNA (SEQ ID NO: 143) |
| 514: | QEIKRINKIRRRLVKDSNTKKAGKTGPMKTLLVRVMTPDLRERLENLRKKP |
| ^H817 in | ENIPQPISNTSRANLNKLLTDYTEMKKAILHVYWEEFQKDPVGLMSRVAQP |
| 491 | ASKKIDQNKLKPEMDEKGNLTTAGFACSQCGQPLFVYKLEQVSEKGKAYTN |
| | YFGRCNVAEHEKLILLAQLKPEKDSDEAVTYSLGKFGQRALDFYSIHVTKE |
| | STHPVKPLAQIAGNRYASGPVGKALSDACMGTIASFLSKYQDIIIEHQKVV |
| | KGNQKRLESLRELAGKENLEYPSVTLPPQPHTKEGVDAYNEVIARVRMWVN |
| | LNLWQKLKLSRDDAKPLLRLKGFPSFPLVERQANEVDWWDMVCNVKKLINE |
| | KKEDGKVFWQNLAGYKRQEALRPYLSSEEDRKKGKKFARYQLGDLLLHLEK |
| | KHGEDWGKVYDEAWERIDKKVEGLSKHIKLEEERRSEDAQSKAALTDWLRA |
| | KASFVIEGLKEADKDEFCRCELKLQKWYGDLRGKPFAIEAENSILDISGFS |
| | KQYNCAFIWQKDGVKKLNLYLIINYFKGGKLRFKKIKPEAFEANRFYTVIN |
| | KKSGEIVPMEVNFNFDDPNLIILPLAFGKRQGREFIWNDLLSLETGSLKLA |
| | NGRVIEKTLYNRRTRQDEPALFVALTFERREVLDSSNIKPMNLIGVDRGEN |
| | IPAVIALTDPEGCPLSRFKDSLGNPTHILRIGESYKEKQRTIQAKKEVEQR |
| | RAGGYSRKYASKAKNLADDMVRNTARDLLYYAVTQDAMLIFENLSRGFGRQ |
| | GKRTFMAERQYTRMEDWLTAKLAYEGLSKTYLSKTLAQYTSKTCSNCGFTI |
| | HTSADYDRVLEKLKKTATGWMTTINGKELKVEGQITYYNRYKRQNVVKDLS |
| | VELDRLSEESVNNDISSWTKGRSGEALSLLKKRFSHRPVQEKFVCLNCGFE |
| | THADEQAALNIARSWLFLRSQEYKKYQTNKTTGNTDKRAFVETWQSFYRKK |
| | LKEVWKPAV (SEQ ID NO: 144) |
| 515: | QEIKRINKIRRRLVKDSNTKKAGKTGPMKTLLVRVMTPDLRERLENLRKKP |
| ^P793 in 491 | ENIPQPISNTSRANLNKLLTDYTEMKKAILHVYWEEFQKDPVGLMSRVAQP |
| | ASKKIDQNKLKPEMDEKGNLTTAGFACSQCGQPLFVYKLEQVSEKGKAYTN |
| | YFGRCNVAEHEKLILLAQLKPEKDSDEAVTYSLGKFGQRALDFYSIHVTKE |
| | STHPVKPLAQIAGNRYASGPVGKALSDACMGTIASFLSKYQDIIIEHQKVV |
| | KGNQKRLESLRELAGKENLEYPSVTLPPQPHTKEGVDAYNEVIARVRMWVN |
| | LNLWQKLKLSRDDAKPLLRLKGFPSFPLVERQANEVDWWDMVCNVKKLINE |
| | KKEDGKVFWQNLAGYKRQEALRPYLSSEEDRKKGKKFARYQLGDLLLHLEK |
| | KHGEDWGKVYDEAWERIDKKVEGLSKHIKLEEERRSEDAQSKAALTDWLRA |
| | KASFVIEGLKEADKDEFCRCELKLQKWYGDLRGKPFAIEAENSILDISGFS |
| | KQYNCAFIWQKDGVKKLNLYLIINYFKGGKLRFKKIKPEAFEANRFYTVIN |
| | KKSGEIVPMEVNFNFDDPNLIILPLAFGKRQGREFIWNDLLSLETGSLKLA |
| | NGRVIEKTLYNRRTRQDEPALFVALTFERREVLDSSNIKPMNLIGVDRGEN |
| | IPAVIALTDPEGCPLSRFKDSLGNPTHILRIGESYKEKQRTIQAKKEVEQR |
| | RAGGYSRKYASKAKNLADDMVRNTARDLLYYAVTQDAMLIFENLSRGFGRQ |
| | GKRTFMAERQYTRMEDWLTAKLAYEGLPSKTYLSKTLAQYTSKTCSNCGFT |
| | ITSADYDRVLEKLKKTATGWMTTINGKELKVEGQITYYNRYKRQNVVKDLS |
| | VELDRLSEESVNNDISSWTKGRSGEALSLLKKRFSHRPVQEKFVCLNCGFE |
| | THADEQAALNIARSWLFLRSQEYKKYQTNKTTGNTDKRAFVETWQSFYRKK |
| | LKEVWKPAV (SEQ ID NO: 145) |
| 516: | QEIKRINKIRRRLVKDSNTKKAGKTGPMKTLLVRVMTPDLRERLENLRKKP |
| L307H in | ENIPQPISNTSRANLNKLLTDYTEMKKAILHVYWEEFQKDPVGLMSRVAQP |
| 491 | ASKKIDQNKLKPEMDEKGNLTTAGFACSQCGQPLFVYKLEQVSEKGKAYTN |
| | YFGRCNVAEHEKLILLAQLKPEKDSDEAVTYSLGKFGQRALDFYSIHVTKE |
| | STHPVKPLAQIAGNRYASGPVGKALSDACMGTIASFLSKYQDIIIEHQKVV |
| | KGNQKRLESLRELAGKENLEYPSVTLPPQPHTKEGVDAYNEVIARVRMWVN |
| | HNLWQKLKLSRDDAKPLLRLKGFPSFPLVERQANEVDWWDMVCNVKKLINE |
| | KKEDGKVFWQNLAGYKRQEALRPYLSSEEDRKKGKKFARYQLGDLLLHLEK |
| | KHGEDWGKVYDEAWERIDKKVEGLSKHIKLEEERRSEDAQSKAALTDWLRA |
| | KASFVIEGLKEADKDEFCRCELKLQKWYGDLRGKPFAIEAENSILDISGFS |
| | KQYNCAFIWQKDGVKKLNLYLIINYFKGGKLRFKKIKPEAFEANRFYTVIN |
| | KKSGEIVPMEVNFNFDDPNLIILPLAFGKRQGREFIWNDLLSLETGSLKLA |
| | NGRVIEKTLYNRRTRQDEPALFVALTFERREVLDSSNIKPMNLIGVDRGEN |
| | IPAVIALTDPEGCPLSRFKDSLGNPTHILRIGESYKEKQRTIQAKKEVEQR |
| | RAGGYSRKYASKAKNLADDMVRNTARDLLYYAVTQDAMLIFENLSRGFGRQ |
| | GKRTFMAERQYTRMEDWLTAKLAYEGLSKTYLSKTLAQYTSKTCSNCGFTI |
| | TSADYDRVLEKLKKTATGWMTTINGKELKVEGQITYYNRYKRQNVVKDLSV |
| | ELDRLSEESVNNDISSWTKGRSGEALSLLKKRFSHRPVQEKFVCLNCGFET |
| | HADEQAALNIARSWLFLRSQEYKKYQTNKTTGNTDKRAFVETWQSFYRKKL |
| | KEVWKPAV (SEQ UD BI: 146) |
| 517: | QEIKRINKIRRRLVKDSNTKKAGKTGPMKTLLVRVMTPDLRERLENLRKKP |
| ^A224 in | ENIPQPISNTSRANLNKLLTDYTEMKKAILHVYWEEFQKDPVGLMSRVAQP |
| 491 | ASKKIDQNKLKPEMDEKGNLTTAGFACSQCGQPLFVYKLEQVSEKGKAYTN |
| | YFGRCNVAEHEKLILLAQLKPEKDSDEAVTYSLGKFGQRALDFYSIHVTKE |
| | STHPVKPLAQIAGNRYASGAPVGKALSDACMGTIASFLSKYQDIIIEHQKV |
| | VKGNQKRLESLRELAGKENLEYPSVTLPPQPHTKEGVDAYNEVIARVRMWV |
| | NLNLWQKLKLSRDDAKPLLRLKGFPSFPLVERQANEVDWWDMVCNVKKLIN |
| | EKKEDGKVFWQNLAGYKRQEALRPYLSSEEDRKKGKKFARYQLGDLLLHLE |
| | KKHGEDWGKVYDEAWERIDKKVEGLSKHIKLEEERRSEDAQSKAALTDWLR |
| | AKASFVIEGLKEADKDEFCRCELKLQKWYGDLRGKPFAIEAENSILDISGF |
| | SKQYNCAFIWQKDGVKKLNLYLIINYFKGGKLRFKKIKPEAFEANRFYTVI |
| | NKKSGEIVPMEVNFNFDDPNLIILPLAFGKRQGREFIWNDLLSLETGSLKL |
| | ANGRVIEKTLYNRRTRQDEPALFVALTFERREVLDSSNIKPMNLIGVDRGE |
| | NIPAVIALTDPEGCPLSRFKDSLGNPTHILRIGESYKEKQRTIQAKKEVEQ |
| | RRAGGYSRKYASKAKNLADDMVRNTARDLLYYAVTQDAMLIFENLSRGFGR |
| | QGKRTFMAERQYTRMEDWLTAKLAYEGLSKTYLSKTLAQYTSKTCSNCGFT |
| | ITSADYDRVLEKLKKTATGWMTTINGKELKVEGQITYYNRYKRQNVVKDLS |
| | VELDRLSEESVNNDISSWTKGRSGEALSLLKKRFSHRPVQEKFVCLNCGFE |
| | THADEQAALNIARSWLFLRSQEYKKYQTNKTTGNTDKRAFVETWQSFYRKK |
| | LKEVWKPAV (SEQ ID NO: 147) |
| 518: | RQEIKRINKIRRRLVKDSNTKKAGKTGPMKTLLVRVMTPDLRERLENLRKK |
| ^R1 in 491 | PENIPQPISNTSRANLNKLLTDYTEMKKAILHVYWEEFQKDPVGLMSRVAQ |
| | PASKKIDQNKLKPEMDEKGNLTTAGFACSQCGQPLFVYKLEQVSEKGKAYT |
| | NYFGRCNVAEHEKLILLAQLKPEKDSDEAVTYSLGKFGQRALDFYSIHVTK |
| | ESTHPVKPLAQIAGNRYASGAPVGKALSDACMGTIASFLSKYQDIIIEHQK |
| | VVKGNQKRLESLRELAGKENLEYPSVTLPPQPHTKEGVDAYNEVIARVRMW |
| | VNLNLWQKLKLSRDDAKPLLRLKGFPSFPLVERQANEVDWWDMVCNVKKLI |
| | NEKKEDGKVFWQNLAGYKRQEALRPYLSSEEDRKKGKKFARYQLGDLLLHL |
| | EKKHGEDWGKVYDEAWERIDKKVEGLSKHIKLEEERRSEDAQSKAALTDWL |
| | RAKASFVIEGLKEADKDEFCRCELKLQKWYGDLRGKPFAIEAENSILDISG |
| | FSKQYNCAFIWQKDGVKKLNLYLIINYFKGGKLRFKKIKPEAFEANRFYTV |
| | INKKSGEIVPMEVNFNFDDPNLIILPLAFGKRQGREFIWNDLLSLETGSLK |
| | LANGRVIEKTLYNRRTRQDEPALFVALTFERREVLDSSNIKPMNLIGVDRG |
| | ENIPAVIALTDPEGCPLSRFKDSLGNPTHILRIGESYKEKQRTIQAKKEVE |
| | QRRAGGYSRKYASKAKNLADDMVRNTARDLLYYAVTQDAMLIFENLSRGFG |
| | RQGKRTFMAERQYTRMEDWLTAKLAYEGLSKTYLSKTLAQYTSKTCSNCGF |
| | TITSADYDRVLEKLKKTATGWMTTINGKELKVEGQITYYNRYKRQNVVKDL |
| | SVELDRLSEESVNNDISSWTKGRSGEALSLLKKRFSHRPVQEKFVCLNCGF |
| | ETHADEQAALNIARSWLFLRSQEYKKYQTNKTTGNTDKRAFVETWQSFYRK |
| | KLKEVWKPAV (SEQ ID NO: 148) |
| 519: | QEIKRINKIRRRLVKDSNTKKAGKTGPMKTLLVRVMTPDLRERLENLRKKP |
| ^Q692 in | ENIPQPISNTSRANLNKLLTDYTEMKKAILHVYWEEFQKDPVGLMSRVAQP |
| 491 | ASKKIDQNKLKPEMDEKGNLTTAGFACSQCGQPLFVYKLEQVSEKGKAYTN |
| | YFGRCNVAEHEKLILLAQLKPEKDSDEAVTYSLGKFGQRALDFYSIHVTKE |
| | STHPVKPLAQIAGNRYASGPVGKALSDACMGTIASFLSKYQDIIIEHQKVV |
| | KGNQKRLESLRELAGKENLEYPSVTLPPQPHTKEGVDAYNEVIARVRMWVN |
| | LNLWQKLKLSRDDAKPLLRLKGFPSFPLVERQANEVDWWDMVCNVKKLINE |
| | KKEDGKVFWQNLAGYKRQEALRPYLSSEEDRKKGKKFARYQLGDLLLHLEK |
| | KHGEDWGKVYDEAWERIDKKVEGLSKHIKLEEERRSEDAQSKAALTDWLRA |
| | KASFVIEGLKEADKDEFCRCELKLQKWYGDLRGKPFAIEAENSILDISGFS |
| | KQYNCAFIWQKDGVKKLNLYLIINYFKGGKLRFKKIKPEAFEANRFYTVIN |
| | KKSGEIVPMEVNFNFDDPNLIILPLAFGKRQGREFIWNDLLSLETGSLKLA |
| | NGRVIEKTLYNRRTRQDEPALFVALTFERREVLDSSNIKPMNLIGVDRGEN |
| | IPAVIALTDPEGCPLSRFKDSLGNPTHIQLRIGESYKEKQRTIQAKKEVEQ |
| | RRAGGYSRKYASKAKNLADDMVRNTARDLLYYAVTQDAMLIFENLSRGFGR |
| | QGKRTFMAERQYTRMEDWLTAKLAYEGLSKTYLSKTLAQYTSKTCSNCGFT |
| | ITSADYDRVLEKLKKTATGWMTTINGKELKVEGQITYYNRYKRQNVVKDLS |
| | VELDRLSEESVNNDISSWTKGRSGEALSLLKKRFSHRPVQEKFVCLNCGFE |
| | THADEQAALNIARSWLFLRSQEYKKYQTNKTTGNTDKRAFVETWQSFYRKK |
| | LKEVWKPAV (SEQ ID NO: 148) |
| 520: | QEIKRINKIRRRLVKDSNTKKAGKTGPMKTLLVRVMTPDLRERLENLRKKP |
| I705T in 491 | ENIPQPISNTSRANLNKLLTDYTEMKKAILHVYWEEFQKDPVGLMSRVAQP |
| | ASKKIDQNKLKPEMDEKGNLTTAGFACSQCGQPLFVYKLEQVSEKGKAYTN |
| | YFGRCNVAEHEKLILLAQLKPEKDSDEAVTYSLGKFGQRALDFYSIHVTKE |
| | STHPVKPLAQIAGNRYASGPVGKALSDACMGTIASFLSKYQDIIIEHQKVV |
| | KGNQKRLESLRELAGKENLEYPSVTLPPQPHTKEGVDAYNEVIARVRMWVN |
| | LNLWQKLKLSRDDAKPLLRLKGFPSFPLVERQANEVDWWDMVCNVKKLINE |
| | KKEDGKVFWQNLAGYKRQEALRPYLSSEEDRKKGKKFARYQLGDLLLHLEK |
| | KHGEDWGKVYDEAWERIDKKVEGLSKHIKLEEERRSEDAQSKAALTDWLRA |
| | KASFVIEGLKEADKDEFCRCELKLQKWYGDLRGKPFAIEAENSILDISGFS |
| | KQYNCAFIWQKDGVKKLNLYLIINYFKGGKLRFKKIKPEAFEANRFYTVIN |
| | KKSGEIVPMEVNFNFDDPNLIILPLAFGKRQGREFIWNDLLSLETGSLKLA |
| | NGRVIEKTLYNRRTRQDEPALFVALTFERREVLDSSNIKPMNLIGVDRGEN |
| | IPAVIALTDPEGCPLSRFKDSLGNPTHILRIGESYKEKQRTTQAKKEVEQR |
| | RAGGYSRKYASKAKNLADDMVRNTARDLLYYAVTQDAMLIFENLSRGFGRQ |
| | GKRTFMAERQYTRMEDWLTAKLAYEGLSKTYLSKTLAQYTSKTCSNCGFTI |
| | TSADYDRVLEKLKKTATGWMTTINGKELKVEGQITYYNRYKRQNVVKDLSV |
| | ELDRLSEESVNNDISSWTKGRSGEALSLLKKRFSHRPVQEKFVCLNCGFET |
| | HADEQAALNIARSWLFLRSQEYKKYQTNKTTGNTDKRAFVETWQSFYRKKL |
| | KEVWKPAV (SEQ ID NO: 150) |
| 522: | QEIKRINKIRRRLVKDSNTKKAGKTGPMKTLLVRVMTPDLRERLENLRKKP |
| D683R in | ENIPQPISNTSRANLNKLLTDYTEMKKAILHVYWEEFQKDPVGLMSRVAQP |
| 491 | ASKKIDQNKLKPEMDEKGNLTTAGFACSQCGQPLFVYKLEQVSEKGKAYTN |
| | YFGRCNVAEHEKLILLAQLKPEKDSDEAVTYSLGKFGQRALDFYSIHVTKE |
| | STHPVKPLAQIAGNRYASGPVGKALSDACMGTIASFLSKYQDIIIEHQKVV |
| | KGNQKRLESLRELAGKENLEYPSVTLPPQPHTKEGVDAYNEVIARVRMWVN |
| | LNLWQKLKLSRDDAKPLLRLKGFPSFPLVERQANEVDWWDMVCNVKKLINE |
| | KKEDGKVFWQNLAGYKRQEALRPYLSSEEDRKKGKKFARYQLGDLLLHLEK |
| | KHGEDWGKVYDEAWERIDKKVEGLSKHIKLEEERRSEDAQSKAALTDWLRA |
| | KASFVIEGLKEADKDEFCRCELKLQKWYGDLRGKPFAIEAENSILDISGFS |
| | KQYNCAFIWQKDGVKKLNLYLIINYFKGGKLRFKKIKPEAFEANRFYTVIN |
| | KKSGEIVPMEVNFNFDDPNLIILPLAFGKRQGREFIWNDLLSLETGSLKLA |
| | NGRVIEKTLYNRRTRQDEPALFVALTFERREVLDSSNIKPMNLIGVDRGEN |
| | IPAVIALTDPEGCPLSRFKRSLGNPTHILRIGESYKEKQRTIQAKKEVEQR |
| | RAGGYSRKYASKAKNLADDMVRNTARDLLYYAVTQDAMLIFENLSRGFGRQ |
| | GKRTFMAERQYTRMEDWLTAKLAYEGLSKTYLSKTLAQYTSKTCSNCGFTI |
| | TSADYDRVLEKLKKTATGWMTTINGKELKVEGQITYYNRYKRQNVVKDLSV |
| | ELDRLSEESVNNDISSWTKGRSGEALSLLKKRFSHRPVQEKFVCLNCGFET |
| | HADEQAALNIARSWLFLRSQEYKKYQTNKTTGNTDKRAFVETWQSFYRKKL |
| | KEVWKPAV (SEQ ID NO: 151) |
| 523: | QEIKRINKIRRRLVKDSNTKKAGKTYPMKTLLVRVMTPDLRERLENLRKKP |
| G26Y in 491 | ENIPQPISNTSRANLNKLLTDYTEMKKAILHVYWEEFQKDPVGLMSRVAQP |
| | ASKKIDQNKLKPEMDEKGNLTTAGFACSQCGQPLFVYKLEQVSEKGKAYTN |
| | YFGRCNVAEHEKLILLAQLKPEKDSDEAVTYSLGKFGQRALDFYSIHVTKE |
| | STHPVKPLAQIAGNRYASGPVGKALSDACMGTIASFLSKYQDIIIEHQKVV |
| | KGNQKRLESLRELAGKENLEYPSVTLPPQPHTKEGVDAYNEVIARVRMWVN |
| | LNLWQKLKLSRDDAKPLLRLKGFPSFPLVERQANEVDWWDMVCNVKKLINE |
| | KKEDGKVFWQNLAGYKRQEALRPYLSSEEDRKKGKKFARYQLGDLLLHLEK |
| | KHGEDWGKVYDEAWERIDKKVEGLSKHIKLEEERRSEDAQSKAALTDWLRA |
| | KASFVIEGLKEADKDEFCRCELKLQKWYGDLRGKPFAIEAENSILDISGFS |
| | KQYNCAFIWQKDGVKKLNLYLIINYFKGGKLRFKKIKPEAFEANRFYTVIN |
| | KKSGEIVPMEVNFNFDDPNLIILPLAFGKRQGREFIWNDLLSLETGSLKLA |
| | NGRVIEKTLYNRRTRQDEPALFVALTFERREVLDSSNIKPMNLIGVDRGEN |
| | IPAVIALTDPEGCPLSRFKDSLGNPTHILRIGESYKEKQRTIQAKKEVEQR |
| | RAGGYSRKYASKAKNLADDMVRNTARDLLYYAVTQDAMLIFENLSRGFGRQ |
| | GKRTFMAERQYTRMEDWLTAKLAYEGLSKTYLSKTLAQYTSKTCSNCGFTI |
| | TSADYDRVLEKLKKTATGWMTTINGKELKVEGQITYYNRYKRQNVVKDLSV |
| | ELDRLSEESVNNDISSWTKGRSGEALSLLKKRFSHRPVQEKFVCLNCGFET |
| | HADEQAALNIARSWLFLRSQEYKKYQTNKTTGNTDKRAFVETWQSFYRKKL |
| | KEVWKPAV (SEQ ID NO: 152) |
| 524: | QEIKRINKIRRRLVKDSNTKKAGKTGPMKTLLVRVMTPDLRERLENLRKKP |
| T817H in | ENIPQPISNTSRANLNKLLTDYTEMKKAILHVYWEEFQKDPVGLMSRVAQP |
| 491 | ASKKIDQNKLKPEMDEKGNLTTAGFACSQCGQPLFVYKLEQVSEKGKAYTN |
| | YFGRCNVAEHEKLILLAQLKPEKDSDEAVTYSLGKFGQRALDFYSIHVTKE |
| | STHPVKPLAQIAGNRYASGPVGKALSDACMGTIASFLSKYQDIIIEHQKVV |
| | KGNQKRLESLRELAGKENLEYPSVTLPPQPHTKEGVDAYNEVIARVRMWVN |
| | LNLWQKLKLSRDDAKPLLRLKGFPSFPLVERQANEVDWWDMVCNVKKLINE |
| | KKEDGKVFWQNLAGYKRQEALRPYLSSEEDRKKGKKFARYQLGDLLLHLEK |
| | KHGEDWGKVYDEAWERIDKKVEGLSKHIKLEEERRSEDAQSKAALTDWLRA |
| | KASFVIEGLKEADKDEFCRCELKLQKWYGDLRGKPFAIEAENSILDISGFS |
| | KQYNCAFIWQKDGVKKLNLYLIINYFKGGKLRFKKIKPEAFEANRFYTVIN |
| | KKSGEIVPMEVNFNFDDPNLIILPLAFGKRQGREFIWNDLLSLETGSLKLA |
| | NGRVIEKTLYNRRTRQDEPALFVALTFERREVLDSSNIKPMNLIGVDRGEN |
| | IPAVIALTDPEGCPLSRFKDSLGNPTHILRIGESYKEKQRTIQAKKEVEQR |
| | RAGGYSRKYASKAKNLADDMVRNTARDLLYYAVTQDAMLIFENLSRGFGRQ |
| | GKRTFMAERQYTRMEDWLTAKLAYEGLSKTYLSKTLAQYTSKTCSNCGFTI |
| | HSADYDRVLEKLKKTATGWMTTINGKELKVEGQITYYNRYKRQNVVKDLSV |
| | ELDRLSEESVNNDISSWTKGRSGEALSLLKKRFSHRPVQEKFVCLNCGFET |
| | HADEQAALNIARSWLFLRSQEYKKYQTNKTTGNTDKRAFVETWQSFYRKKL |
| | KEVWKPAV (SEQ ID NO: 153) |
| 525; | QEIKRINKIRRRLVKDSNTKKAGKTGPMKTLLVRVMTPDLRERLENLRKKP |
| V746A in | ENIPQPISNTSRANLNKLLTDYTEMKKAILHVYWEEFQKDPVGLMSRVAQP |
| 491 | ASKKIDQNKLKPEMDEKGNLTTAGFACSQCGQPLFVYKLEQVSEKGKAYTN |
| | YFGRCNVAEHEKLILLAQLKPEKDSDEAVTYSLGKFGQRALDFYSIHVTKE |
| | STHPVKPLAQIAGNRYASGPVGKALSDACMGTIASFLSKYQDIIIEHQKVV |
| | KGNQKRLESLRELAGKENLEYPSVTLPPQPHTKEGVDAYNEVIARVRMWVN |
| | LNLWQKLKLSRDDAKPLLRLKGFPSFPLVERQANEVDWWDMVCNVKKLINE |
| | KKEDGKVFWQNLAGYKRQEALRPYLSSEEDRKKGKKFARYQLGDLLLHLEK |
| | KHGEDWGKVYDEAWERIDKKVEGLSKHIKLEEERRSEDAQSKAALTDWLRA |
| | KASFVIEGLKEADKDEFCRCELKLQKWYGDLRGKPFAIEAENSILDISGFS |
| | KQYNCAFIWQKDGVKKLNLYLIINYFKGGKLRFKKIKPEAFEANRFYTVIN |
| | KKSGEIVPMEVNFNFDDPNLIILPLAFGKRQGREFIWNDLLSLETGSLKLA |
| | NGRVIEKTLYNRRTRQDEPALFVALTFERREVLDSSNIKPMNLIGVDRGEN |
| | IPAVIALTDPEGCPLSRFKDSLGNPTHILRIGESYKEKQRTIQAKKEVEQR |
| | RAGGYSRKYASKAKNLADDMVRNTARDLLYYAATQDAMLIFENLSRGFGRQ |
| | GKRTFMAERQYTRMEDWLTAKLAYEGLSKTYLSKTLAQYTSKTCSNCGFTI |
| | TSADYDRVLEKLKKTATGWMTTINGKELKVEGQITYYNRYKRQNVVKDLSV |
| | ELDRLSEESVNNDISSWTKGRSGEALSLLKKRFSHRPVQEKFVCLNCGFET |
| | HADEQAALNIARSWLFLRSQEYKKYQTNKTTGNTDKRAFVETWQSFYRKKL |
| | KEVWKPAV (SEQ ID NO: 154) |
| 526: | QEIKRINKIRRRLVKDSNTKKAGKTGPMKTLLVRVMTPDLRERLENLRKKP |
| K708A in | ENIPQPISNTSRANLNKLLTDYTEMKKAILHVYWEEFQKDPVGLMSRVAQP |
| 491 | ASKKIDQNKLKPEMDEKGNLTTAGFACSQCGQPLFVYKLEQVSEKGKAYTN |
| | YFGRCNVAEHEKLILLAQLKPEKDSDEAVTYSLGKFGQRALDFYSIHVTKE |
| | STHPVKPLAQIAGNRYASGPVGKALSDACMGTIASFLSKYQDIIIEHQKVV |
| | KGNQKRLESLRELAGKENLEYPSVTLPPQPHTKEGVDAYNEVIARVRMWVN |
| | LNLWQKLKLSRDDAKPLLRLKGFPSFPLVERQANEVDWWDMVCNVKKLINE |
| | KKEDGKVFWQNLAGYKRQEALRPYLSSEEDRKKGKKFARYQLGDLLLHLEK |
| | KHGEDWGKVYDEAWERIDKKVEGLSKHIKLEEERRSEDAQSKAALTDWLRA |
| | KASFVIEGLKEADKDEFCRCELKLQKWYGDLRGKPFAIEAENSILDISGFS |
| | KQYNCAFIWQKDGVKKLNLYLIINYFKGGKLRFKKIKPEAFEANRFYTVIN |
| | KKSGEIVPMEVNFNFDDPNLIILPLAFGKRQGREFIWNDLLSLETGSLKLA |
| | NGRVIEKTLYNRRTRQDEPALFVALTFERREVLDSSNIKPMNLIGVDRGEN |
| | IPAVIALTDPEGCPLSRFKDSLGNPTHILRIGESYKEKQRTIQAAKEVEQR |
| | RAGGYSRKYASKAKNLADDMVRNTARDLLYYAVTQDAMLIFENLSRGFGRQ |
| | GKRTFMAERQYTRMEDWLTAKLAYEGLSKTYLSKTLAQYTSKTCSNCGFTI |
| | TSADYDRVLEKLKKTATGWMTTINGKELKVEGQITYYNRYKRQNVVKDLSV |
| | ELDRLSEESVNNDISSWTKGRSGEALSLLKKRFSHRPVQEKFVCLNCGFET |
| | HADEQAALNIARSWLFLRSQEYKKYQTNKTTGNTDKRAFVETWQSFYRKKL |
| | KEVWKPAV (SEQ ID NO: 155) |
| 527: | QEIKRINKIRRRLVKDSNTKKAGKTRGPMKTLLVRVMTPDLRERLENLRKK |
| ^R26 in 491 | PENIPQPISNTSRANLNKLLTDYTEMKKAILHVYWEEFQKDPVGLMSRVAQ |
| | PASKKIDQNKLKPEMDEKGNLTTAGFACSQCGQPLFVYKLEQVSEKGKAYT |
| | NYFGRCNVAEHEKLILLAQLKPEKDSDEAVTYSLGKFGQRALDFYSIHVTK |
| | ESTHPVKPLAQIAGNRYASGPVGKALSDACMGTIASFLSKYQDIIIEHQKV |
| | VKGNQKRLESLRELAGKENLEYPSVTLPPQPHTKEGVDAYNEVIARVRMWV |
| | NLNLWQKLKLSRDDAKPLLRLKGFPSFPLVERQANEVDWWDMVCNVKKLIN |
| | EKKEDGKVFWQNLAGYKRQEALRPYLSSEEDRKKGKKFARYQLGDLLLHLE |
| | KKHGEDWGKVYDEAWERIDKKVEGLSKHIKLEEERRSEDAQSKAALTDWLR |
| | AKASFVIEGLKEADKDEFCRCELKLQKWYGDLRGKPFAIEAENSILDISGF |
| | SKQYNCAFIWQKDGVKKLNLYLIINYFKGGKLRFKKIKPEAFEANRFYTVI |
| | NKKSGEIVPMEVNFNFDDPNLIILPLAFGKRQGREFIWNDLLSLETGSLKL |
| | ANGRVIEKTLYNRRTRQDEPALFVALTFERREVLDSSNIKPMNLIGVDRGE |
| | NIPAVIALTDPEGCPLSRFKDSLGNPTHILRIGESYKEKQRTIQAKKEVEQ |
| | RRAGGYSRKYASKAKNLADDMVRNTARDLLYYAVTQDAMLIFENLSRGFGR |
| | QGKRTFMAERQYTRMEDWLTAKLAYEGLSKTYLSKTLAQYTSKTCSNCGFT |
| | ITSADYDRVLEKLKKTATGWMTTINGKELKVEGQITYYNRYKRQNVVKDLS |
| | VELDRLSEESVNNDISSWTKGRSGEALSLLKKRFSHRPVQEKFVCLNCGFE |
| | THADEQAALNIARSWLFLRSQEYKKYQTNKTTGNTDKRAFVETWQSFYRKK |
| | LKEVWKPAV (SEQ ID NO: 156) |
| 528: | QEIKRINKIRRRLVKDSNTKKAGKTGPMKTLLVRVMTPDLRERLENLRKKP |
| G223Y in | ENIPQPISNTSRANLNKLLTDYTEMKKAILHVYWEEFQKDPVGLMSRVAQP |
| 515 | ASKKIDQNKLKPEMDEKGNLTTAGFACSQCGQPLFVYKLEQVSEKGKAYTN |
| | YFGRCNVAEHEKLILLAQLKPEKDSDEAVTYSLGKFGQRALDFYSIHVTKE |
| | STHPVKPLAQIAGNRYASYPVGKALSDACMGTIASFLSKYQDIIIEHQKVV |
| | KGNQKRLESLRELAGKENLEYPSVTLPPQPHTKEGVDAYNEVIARVRMWVN |
| | LNLWQKLKLSRDDAKPLLRLKGFPSFPLVERQANEVDWWDMVCNVKKLINE |
| | KKEDGKVFWQNLAGYKRQEALRPYLSSEEDRKKGKKFARYQLGDLLLHLEK |
| | KHGEDWGKVYDEAWERIDKKVEGLSKHIKLEEERRSEDAQSKAALTDWLRA |
| | KASFVIEGLKEADKDEFCRCELKLQKWYGDLRGKPFAIEAENSILDISGFS |
| | KQYNCAFIWQKDGVKKLNLYLIINYFKGGKLRFKKIKPEAFEANRFYTVIN |
| | KKSGEIVPMEVNFNFDDPNLIILPLAFGKRQGREFIWNDLLSLETGSLKLA |
| | NGRVIEKTLYNRRTRQDEPALFVALTFERREVLDSSNIKPMNLIGVDRGEN |
| | IPAVIALTDPEGCPLSRFKDSLGNPTHILRIGESYKEKQRTIQAKKEVEQR |
| | RAGGYSRKYASKAKNLADDMVRNTARDLLYYAVTQDAMLIFENLSRGFGRQ |
| | GKRTFMAERQYTRMEDWLTAKLAYEGLPSKTYLSKTLAQYTSKTCSNCGFT |
| | ITSADYDRVLEKLKKTATGWMTTINGKELKVEGQITYYNRYKRQNVVKDLS |
| | VELDRLSEESVNNDISSWTKGRSGEALSLLKKRFSHRPVQEKFVCLNCGFE |
| | THADEQAALNIARSWLFLRSQEYKKYQTNKTTGNTDKRAFVETWQSFYRKK |
| | LKEVWKPAV (SEQ ID NO: 157) |
| 529: | QEIKRINKIRRRLVKDSNTKKAGKTGPMKTLLVRVMTPDLRERLENLRKKP |
| G223N in | ENIPQPISNTSRANLNKLLTDYTEMKKAILHVYWEEFQKDPVGLMSRVAQP |
| 515 | ASKKIDQNKLKPEMDEKGNLTTAGFACSQCGQPLFVYKLEQVSEKGKAYTN |
| | YFGRCNVAEHEKLILLAQLKPEKDSDEAVTYSLGKFGQRALDFYSIHVTKE |
| | STHPVKPLAQIAGNRYASNPVGKALSDACMGTIASFLSKYQDIIIEHQKVV |
| | KGNQKRLESLRELAGKENLEYPSVTLPPQPHTKEGVDAYNEVIARVRMWVN |
| | LNLWQKLKLSRDDAKPLLRLKGFPSFPLVERQANEVDWWDMVCNVKKLINE |
| | KKEDGKVFWQNLAGYKRQEALRPYLSSEEDRKKGKKFARYQLGDLLLHLEK |
| | KHGEDWGKVYDEAWERIDKKVEGLSKHIKLEEERRSEDAQSKAALTDWLRA |
| | KASFVIEGLKEADKDEFCRCELKLQKWYGDLRGKPFAIEAENSILDISGFS |
| | KQYNCAFIWQKDGVKKLNLYLIINYFKGGKLRFKKIKPEAFEANRFYTVIN |
| | KKSGEIVPMEVNFNFDDPNLIILPLAFGKRQGREFIWNDLLSLETGSLKLA |
| | NGRVIEKTLYNRRTRQDEPALFVALTFERREVLDSSNIKPMNLIGVDRGEN |
| | IPAVIALTDPEGCPLSRFKDSLGNPTHILRIGESYKEKQRTIQAKKEVEQR |
| | RAGGYSRKYASKAKNLADDMVRNTARDLLYYAVTQDAMLIFENLSRGFGRQ |
| | GKRTFMAERQYTRMEDWLTAKLAYEGLPSKTYLSKTLAQYTSKTCSNCGFT |
| | ITSADYDRVLEKLKKTATGWMTTINGKELKVEGQITYYNRYKRQNVVKDLS |
| | VELDRLSEESVNNDISSWTKGRSGEALSLLKKRFSHRPVQEKFVCLNCGFE |
| | THADEQAALNIARSWLFLRSQEYKKYQTNKTTGNTDKRAFVETWQSFYRKK |
| | LKEVWKPAV (SEQ ID NO: 158) |
| 530: | QEIKRINKIRRRLVKDSNTKKAGKTGPMKTLLVRVMTPDLRERLENLRKKP |
| ^W539 in | ENIPQPISNTSRANLNKLLTDYTEMKKAILHVYWEEFQKDPVGLMSRVAQP |
| 515 | ASKKIDQNKLKPEMDEKGNLTTAGFACSQCGQPLFVYKLEQVSEKGKAYTN |
| | YFGRCNVAEHEKLILLAQLKPEKDSDEAVTYSLGKFGQRALDFYSIHVTKE |
| | STHPVKPLAQIAGNRYASGPVGKALSDACMGTIASFLSKYQDIIIEHQKVV |
| | KGNQKRLESLRELAGKENLEYPSVTLPPQPHTKEGVDAYNEVIARVRMWVN |
| | LNLWQKLKLSRDDAKPLLRLKGFPSFPLVERQANEVDWWDMVCNVKKLINE |
| | KKEDGKVFWQNLAGYKRQEALRPYLSSEEDRKKGKKFARYQLGDLLLHLEK |
| | KHGEDWGKVYDEAWERIDKKVEGLSKHIKLEEERRSEDAQSKAALTDWLRA |
| | KASFVIEGLKEADKDEFCRCELKLQKWYGDLRGKPFAIEAENSILDISGFS |
| | KQYNCAFIWQKDGVKKLNLYLIINYFKGWGKLRFKKIKPEAFEANRFYTVI |
| | NKKSGEIVPMEVNFNFDDPNLIILPLAFGKRQGREFIWNDLLSLETGSLKL |
| | ANGRVIEKTLYNRRTRQDEPALFVALTFERREVLDSSNIKPMNLIGVDRGE |
| | NIPAVIALTDPEGCPLSRFKDSLGNPTHILRIGESYKEKQRTIQAKKEVEQ |
| | RRAGGYSRKYASKAKNLADDMVRNTARDLLYYAVTQDAMLIFENLSRGFGR |
| | QGKRTFMAERQYTRMEDWLTAKLAYEGLPSKTYLSKTLAQYTSKTCSNCGF |
| | TITSADYDRVLEKLKKTATGWMTTINGKELKVEGQITYYNRYKRQNVVKDL |
| | SVELDRLSEESVNNDISSWTKGRSGEALSLLKKRFSHRPVQEKFVCLNCGF |
| | ETHADEQAALNIARSWLFLRSQEYKKYQTNKTTGNTDKRAFVETWQSFYRK |
| | KLKEVWKPAV (SEQ ID NO: 159) |
| 531: | QEIKRINKIRRRLVKDSNTKKAGKTGPMKTLLVRVMTPDLRERLENLRKKP |
| ^Y539 in | ENIPQPISNTSRANLNKLLTDYTEMKKAILHVYWEEFQKDPVGLMSRVAQP |
| 515 | ASKKIDQNKLKPEMDEKGNLTTAGFACSQCGQPLFVYKLEQVSEKGKAYTN |
| | YFGRCNVAEHEKLILLAQLKPEKDSDEAVTYSLGKFGQRALDFYSIHVTKE |
| | STHPVKPLAQIAGNRYASGPVGKALSDACMGTIASFLSKYQDIIIEHQKVV |
| | KGNQKRLESLRELAGKENLEYPSVTLPPQPHTKEGVDAYNEVIARVRMWVN |
| | LNLWQKLKLSRDDAKPLLRLKGFPSFPLVERQANEVDWWDMVCNVKKLINE |
| | KKEDGKVFWQNLAGYKRQEALRPYLSSEEDRKKGKKFARYQLGDLLLHLEK |
| | KHGEDWGKVYDEAWERIDKKVEGLSKHIKLEEERRSEDAQSKAALTDWLRA |
| | KASFVIEGLKEADKDEFCRCELKLQKWYGDLRGKPFAIEAENSILDISGFS |
| | KQYNCAFIWQKDGVKKLNLYLIINYFKGYGKLRFKKIKPEAFEANRFYTVI |
| | NKKSGEIVPMEVNFNFDDPNLIILPLAFGKRQGREFIWNDLLSLETGSLKL |
| | ANGRVIEKTLYNRRTRQDEPALFVALTFERREVLDSSNIKPMNLIGVDRGE |
| | NIPAVIALTDPEGCPLSRFKDSLGNPTHILRIGESYKEKQRTIQAKKEVEQ |
| | RRAGGYSRKYASKAKNLADDMVRNTARDLLYYAVTQDAMLIFENLSRGFGR |
| | QGKRTFMAERQYTRMEDWLTAKLAYEGLPSKTYLSKTLAQYTSKTCSNCGF |
| | TITSADYDRVLEKLKKTATGWMTTINGKELKVEGQITYYNRYKRQNVVKDL |
| | SVELDRLSEESVNNDISSWTKGRSGEALSLLKKRFSHRPVQEKFVCLNCGF |
| | ETHADEQAALNIARSWLFLRSQEYKKYQTNKTTGNTDKRAFVETWQSFYRK |
| | KLKEVWKPAV (SEQ ID NO: 160) |

[0246] In some embodiments, the CasX variant protein comprises a sequence selected from the group consisting of SEQ ID NOs: 49-160, 237-239, 243-246, 251-263 or 273-281, or a sequence having at least about 50%, at least about 60%, at least about 70%, at least about 80%, at least about 90%, or at least about 95%, or at least about 95%, or at least about 96%, or at least about 97%, or at least about 98%, or at least about 99% sequence identity thereto. In some embodiments, the CasX variant protein comprises a sequence selected from the group consisting of SEQ ID NOs: 49-160, 237-239, 243-246, 251-263 or 273-281.

[0247] In some embodiments, the CasX variant protein has one or more improved characteristic of the CasX protein when compared to a reference CasX protein, for example a reference protein of SEQ ID NO:1, SEQ ID NO:2 or SEQ ID NO:3. In some embodiments, the at least one improved characteristic of the CasX variant is at least about 1.1 to about 100,000-fold improved relative to the reference protein. In some embodiments, the at least one improved characteristic of the CasX variant is at least about 1.1 to about 10,000-fold improved, at least about 1.1 to about 1,000-fold improved, at least about 1.1 to about 500-fold improved, at least about 1.1 to about 400-fold improved, at least about 1.1 to about 300-fold improved, at least about 1.1 to about 200-fold improved, at least about 1.1 to about 100-fold improved, at least about 1.1 to about 50-fold improved, at least about 1.1 to about 40-fold improved, at least about 1.1 to about 30-fold improved, at least about 1.1 to about 20-fold improved, at least about 1.1 to about 10-fold improved, at least about 1.1 to about 9-fold improved, at least about 1.1 to about 8-fold improved, at least about 1.1 to about 7-fold improved, at least about 1.1 to about 6-fold improved, at least about 1.1 to about 5-fold improved, at least about 1.1 to about 4-fold improved, at least about 1.1 to about 3-fold improved, at least about 1.1 to about 2-fold improved, at least about 1.1 to about 1.5-fold improved, at least about 1.5 to about 3-fold improved, at least about 1.5 to about 4-fold improved, at least about 1.5 to about 5-fold improved, at least about 1.5 to about 10-fold improved, at least about 5 to about 10-fold improved, at least about 10 to about 20-fold improved, at least 10 to about 30-fold improved, at least 10 to about 50-fold improved or at least 10 to about 100-fold improved than the reference CasX protein. In some embodiments, the at least one improved characteristic of the CasX variant is at least about 10 to about 1000-fold improved relative to the reference CasX protein.

[0248] In some embodiments, the one or more improved characteristics of the CasX variant protein is at least about 1.1, at least about 5, at least about 10, at least about 20, at least about 30, at least about 40, at least about 50, at least about 60, at least about 70, at least about 80, at least about 90, at least about 100, at least about 250, at least about 500, or at least about 1000, at least about 5,000, at least about 10,000, or at least about 100,000-fold improved relative to a reference CasX protein of SEQ ID NO:1, SEQ ID NO:2 or SEQ ID NO:3. In other cases, the one or more improved characteristics of the CasX variant is about 1.1 to 100,00-fold, about 1.1 to 10,00-fold, about 1.1 to 1,000-fold, about 1.1 to 500-fold, about 1.1 to 100-fold, about 1.1 to 50-fold, about 1.1 to 20-fold, about 10 to 100,00-fold, about 10 to 10,00-fold, about 10 to 1,000-fold, about 10 to 500-fold, about 10 to 100-fold, about 10 to 50-fold, about 10 to 20-fold, about 2 to 70-fold, about 2 to 50-fold, about 2 to 30-fold, about 2 to 20-fold, about 2 to 10-fold, about 5 to 50-fold, about 5 to 30-fold, about 5 to 10-fold, about 100 to 100,00-fold, about 100 to 10,00-fold, about 100 to 1,000-fold, about 100 to 500-fold, about 500 to 100,00-fold, about 500 to 10,00-fold, about 500 to 1,000-fold, about 500 to 750-fold, about 1,000 to 100,00-fold, about 10,000 to 100,00-fold, about 20 to 500-fold, about 20 to 250-fold, about 20 to 200-fold, about 20 to 100-fold, about 20 to 50-fold, about 50 to 10,000-fold, about 50 to 1,000-fold, about 50 to 500-fold, about 50 to 200-fold, or about 50 to 100-fold, improved relative to the reference CasX of SEQ ID NO:1, SEQ ID NO:2 or SEQ ID NO:3. In other cases, the one or more improved characteristics of the CasX variant is about 1.1-fold, 1.2-fold, 1.3-fold, 1.4-fold, 1.5-fold, 1.6-fold, 1.7-fold, 1.8-fold, 1.9-fold, 2-fold, 3-fold, 4-fold, 5-fold, 6-fold, 7-fold, 8-fold, 9-fold, 10-fold, 11-fold, 12-fold, 13-fold, 14-fold, 15-fold, 16-fold, 17-fold, 18-fold, 19-fold, 20-fold, 25-fold, 30-fold, 40-fold, 45-fold, 50-fold, 55-fold, 60-fold, 70-fold, 80-fold, 90-fold, 100-fold, 110-fold, 120-fold, 130-fold, 140-fold, 150-fold, 160-fold, 170-fold, 180-fold, 190-fold, 200-fold, 210-fold, 220-fold, 230-fold, 240-fold, 250-fold, 260-fold, 270-fold, 280-fold, 290-fold, 300-fold, 310-fold, 320-fold, 330-fold, 340-fold, 350-fold, 360-fold, 370-fold, 380-fold, 390-fold, 400-fold, 425-fold, 450-fold, 475-fold, or 500-fold or more improved relative to the reference CasX of SEQ ID NO: 1, SEQ ID NO: 2 or SEQ ID NO: 3. Exemplary characteristics that can be improved in CasX variant proteins relative to the same characteristics in reference CasX proteins include, but are not limited to, improved folding of the variant, improved binding affinity to the gNA, improved binding affinity to the target DNA, improved ability to utilize a greater spectrum of PAM sequences in the editing and/or binding of target DNA, improved unwinding of the target DNA, increased editing activity, improved editing efficiency, improved editing specificity, increased activity of the nuclease, increased target strand loading for double strand cleavage, decreased target strand loading for single strand nicking, decreased off-target cleavage, improved binding of the non-target strand of DNA, improved protein stability, improved CasX:gNA RNA complex stability, improved protein solubility, improved CasX:gNA RNP complex solubility, improved ability to form cleavage-competent RNP with a gNA, improved protein yield, improved protein expression, and improved fusion characteristics. In some embodiments, the variant comprises at least one improved characteristic. In other embodiments, the variant comprises at least two improved characteristics. In further embodiments, the variant comprises at least three improved characteristics. In some embodiments, the variant comprises at least four improved characteristics. In still further embodiments, the variant comprises at least five, at least six, at least seven, at least eight, at least nine, at least ten, at least eleven, at least twelve, at least thirteen, or more improved characteristics.

[0249] Exemplary improved characteristic include, as one example, improved editing efficiency. The CasX variants of the embodiments described herein have the ability to form an RNP complex with the gNA disclosed herein. In some embodiments, an RNP comprising the CasX variant protein and a gNA of the disclosure, at a concentration of 20 pM or less, is capable of cleaving a double stranded DNA target with an efficiency of at least 80%. In some embodiments, the RNP at a concentration of 20 pM or less, is capable of cleaving a double stranded DNA target with an efficiency of at least 40%, at least 50%, at least 60%, at least 70%, at least 80%, at least 85%, at least 90% or at least 95%. In some embodiments, the RNP at a concentration of 50 pM or less, 40 pM or less, 30 pM or less, 20 pM or less, 10 pM or less, or 5 pM or less, is capable of cleaving a double stranded DNA target with an efficiency of at least 40%, at least 50%, at least 60%, at least 70%, at least 80%, at least 85%, at least 90% or at least 95%.

[0250] These improved characteristics are described in more detail below.

[0251] j. Protein Stability

[0252] In some embodiments, the disclosure provides a CasX variant protein with improved stability relative to a reference CasX protein. In some embodiments, improved stability of the CasX variant protein results in expression of a higher steady state of protein, which improves editing efficiency. In some embodiments, improved stability of the CasX variant protein results in a larger fraction of CasX protein that remains folded in a functional conformation and improves editing efficiency or improves purifiability for manufacturing purposes. As used herein, a “functional conformation” refers to a CasX protein that is in a conformation where the protein is capable of binding a gNA and target DNA. In embodiments wherein the CasX variant does not carry one or more mutations rendering it catalytically dead, the CasX variant is capable of cleaving, nicking, or otherwise modifying the target DNA. For example, a functional CasX variant can, in some embodiments, be used for gene-editing, and a functional conformation refers to an “editing-competent” conformation. In some exemplary embodiments, including those embodiments where the CasX variant protein results in a larger fraction of CasX protein that remains folded in a functional conformation, a lower concentration of CasX variant is needed for applications such as gene editing compared to a reference CasX protein. Thus, in some embodiments, the CasX variant with improved stability has improved efficiency compared to a reference CasX in one or more gene editing contexts. Improved stability and efficiency of nuclease activity may be evaluated through a variety of methods known to one of skill in the art.

[0253] In some embodiments, the disclosure provides a CasX variant protein having improved thermostability relative to a reference CasX protein. In some embodiments, the CasX variant protein has improved thermostability of the CasX variant protein at a particular temperature range. Without wishing to be bound by any theory, some reference CasX proteins natively function in organisms with niches in groundwater and sediment; thus, some reference CasX proteins may have evolved to exhibit optimal function at lower or higher temperatures that may be desirable for certain applications. For example, one application of CasX variant proteins is gene editing of mammalian cells, which is typically carried out at about 37° C. In some embodiments, a CasX variant protein as described herein has improved thermostability compared to a reference CasX protein at a temperature of at least 16° C., at least 18° C., at least 20° C., at least 22° C., at least 24° C., at least 26° C., at least 28° C., at least 30° C., at least 32° C., at least 34° C., at least 35° C., at least 36° C., at least 37° C., at least 38° C., at least 39° C., at least 40° C., at least 41° C., at least 42° C., at least 44° C., at least 46° C., at least 48° C., at least 50° C., at least 52° C., or greater. In some embodiments, a CasX variant protein has improved thermostability and functionality compared to a reference CasX protein that results in improved gene editing functionality, such as mammalian gene editing applications, which may include human gene editing applications. Improved thermostability of the nuclease may be evaluated through a variety of methods known to one of skill in the art.

[0254] In some embodiments, the disclosure provides a CasX variant protein having improved stability of the CasX variant protein:gNA complex relative to the reference CasX protein:gNA complex such that the RNP remains in a functional form. Stability improvements can include increased thermostability, resistance to proteolytic degradation, enhanced pharmacokinetic properties, stability across a range of pH conditions, salt conditions, and tonicity. Improved stability of the complex may, in some embodiments, lead to improved editing efficiency. In some embodiments, the RNP of the CasX variant and gNA variant has at least a 5%, at least a 10%, at least a 15%, or at least a 20%, or at least a 5-20% higher percentage of cleavage-competent RNP compared to an RNP of the reference CasX of SEQ ID NOS: 1-3 and the gNA of any one of SEQ ID NOS:4-16 of Table 1. Exemplary data of increased cleavage-competent RNP are provided in the Examples.

[0255] In some embodiments, the disclosure provides a CasX variant protein having improved thermostability of the CasX variant protein:gNA complex relative to the reference CasX protein:gNA complex. In some embodiments, a CasX variant protein has improved thermostability relative to a reference CasX protein. In some embodiments, the CasX variant protein:gNA complex has improved thermostability relative to a complex comprising a reference CasX protein at temperatures of at least 16° C., at least 18° C., at least 20° C., at least 22° C., at least 24° C., at least 26° C., at least 28° C., at least 30° C., at least 32° C., at least 34° C., at least 35° C., at least 36° C., at least 37° C., at least 38° C., at least 39° C., at least 40° C., at least 41° C., at least 42° C., at least 44° C., at least 46° C., at least 48° C., at least 50° C., at least 52° C., or greater. In some embodiments, a CasX variant protein has improved thermostability of the CasX variant protein:gNA complex compared to a reference CasX protein:gNA complex, which results in improved function for gene editing applications, such as mammalian gene editing applications, which may include human gene editing applications. Improved thermostability of the RNP may be evaluated through a variety of methods known to one of skill in the art.

[0256] In some embodiments, the improved stability and/or thermostability of the CasX variant protein comprises faster folding kinetics of the CasX variant protein relative to a reference CasX protein, slower unfolding kinetics of the CasX variant protein relative to a reference CasX protein, a larger free energy release upon folding of the CasX variant protein relative to a reference CasX protein, a higher temperature at which 50% of the CasX variant protein is unfolded (Tm) relative to a reference CasX protein, or any combination thereof. These characteristics may be improved by a wide range of values; for example, at least 1.1, at least 1.5, at least 10, at least 50, at least 100, at least 500, at least 1,000, at least 5,000, or at least a 10,000-fold improved, as compared to a reference CasX protein. In some embodiments, improved thermostability of the CasX variant protein comprises a higher Tm of the CasX variant protein relative to a reference CasX protein. In some embodiments, the Tm of the CasX variant protein is between about 20° C. to about 30° C., between about 30° C. to about 40° C., between about 40° C. to about 50° C., between about 50° C. to about 60° C., between about 60° C. to about 70° C., between about 70° C. to about 80° C., between about 80° C. to about 90° C. or between about 90° C. to about 100° C. Thermal stability is determined by measuring the “melting temperature” (Tm), which is defined as the temperature at which half of the molecules are denatured. Methods of measuring characteristics of protein stability such as Tm and the free energy of unfolding are known to persons of ordinary skill in the art, and can be measured using standard biochemical techniques in vitro. For example, Tm may be measured using Differential Scanning Calorimetry, a thermo-analytical technique in which the difference in the amount of heat required to increase the temperature of a sample and a reference is measured as a function of temperature (Chen et al (2003) Pharm Res 20:1952-60; Ghirlando et al (1999) Immunol Lett 68:47-52). Alternatively, or in addition, CasX variant protein Tm may be measured using commercially available methods such as the ThermoFisher Protein Thermal Shift system. Alternatively, or in addition, circular dichroism may be used to measure the kinetics of folding and unfolding, as well as the Tm (Murray et al. (2002) J. Chromatogr Sci 40:343-9). Circular dichroism (CD) relies on the unequal absorption of left-handed and right-handed circularly polarized light by asymmetric molecules such as proteins. Certain structures of proteins, for example alpha-helices and beta-sheets, have characteristic CD spectra. Accordingly, in some embodiments, CD may be used to determine the secondary structure of a CasX variant protein.

[0257] In some embodiments, improved stability and/or thermostability of the CasX variant protein comprises improved folding kinetics of the CasX variant protein relative to a reference CasX protein. In some embodiments, folding kinetics of the CasX variant protein are improved relative to a reference CasX protein by at least about 5, at least about 10, at least about 50, at least about 100, at least about 500, at least about 1,000, at least about 2,000, at least about 3,000, at least about 4,000, at least about 5,000, or at least about a 10,000-fold improvement. In some embodiments, folding kinetics of the CasX variant protein are improved relative to a reference CasX protein by at least about 1 kJ/mol, at least about 5 kJ/mol, at least about 10 kJ/mol, at least about 20 kJ/mol, at least about 30 kJ/mol, at least about 40 kJ/mol, at least about 50 kJ/mol, at least about 60 kJ/mol, at least about 70 kJ/mol, at least about 80 kJ/mol, at least about 90 kJ/mol, at least about 100 kJ/mol, at least about 150 kJ/mol, at least about 200 kJ/mol, at least about 250 kJ/mol, at least about 300 kJ/mol, at least about 350 kJ/mol, at least about 400 kJ/mol, at least about 450 kJ/mol, or at least about 500 kJ/mol.

[0258] Exemplary amino acid changes that can increase the stability of a CasX variant protein relative to a reference CasX protein may include, but are not limited to, amino acid changes that increase the number of hydrogen bonds within the CasX variant protein, increase the number of disulfide bridges within the CasX variant protein, increase the number of salt bridges within the CasX variant protein, strengthen interactions between parts of the CasX variant protein, increase the buried hydrophobic surface area of the CasX variant protein, or any combinations thereof.

[0259] k. Protein Yield

[0260] In some embodiments, the disclosure provides a CasX variant protein having improved yield during expression and purification relative to a reference CasX protein. In some embodiments, the yield of CasX variant proteins purified from bacterial or eukaryotic host cells is improved relative to a reference CasX protein. In some embodiments, the bacterial host cells are Escherichia coli cells. In some embodiments, the eukaryotic cells are yeast, plant (e.g. tobacco), insect (e.g. Spodoptera frugiperda sf9 cells), mouse, rat, hamster, guinea pig, monkey, or human cells. In some embodiments, the eukaryotic host cells are mammalian cells, including, but not limited to human embryonic kidney 293 (HEK293) cells, HEK292T cells, baby hamster kidney (BHK) cells, NS0 cells, SP2/0 cells, YO myeloma cells, P3X63 mouse myeloma cells, PER cells, PER.C6 cells, hybridoma cells, NIH3T3 cells, COS, HeLa, or Chinese hamster ovary (CHO) cells.

[0261] In some embodiments, improved yield of the CasX variant protein is achieved through codon optimization. Cells use 64 different codons, 61 of which encode the 20 standard amino acids, while another 3 function as stop codons. In some cases, a single amino acid is encoded by more than one codon. Different organisms exhibit bias towards use of different codons for the same naturally occurring amino acid. Therefore, the choice of codons in a protein, and matching codon choice to the organism in which the protein will be expressed, can, in some cases, significantly affect protein translation and therefore protein expression levels. In some embodiments, the CasX variant protein is encoded by a nucleic acid that has been codon optimized. In some embodiments, the nucleic acid encoding the CasX variant protein has been codon optimized for expression in a bacterial cell, a yeast cell, an insect cell, a plant cell, or a mammalian cell. In some embodiments, the mammal cell is a mouse, a rat, a hamster, a guinea pig, a monkey, or a human. In some embodiments, the CasX variant protein is encoded by a nucleic acid that has been codon optimized for expression in a human cell. In some embodiments, the CasX variant protein is encoded by a nucleic acid from which nucleotide sequences that reduce translation rates in prokaryotes and eukaryotes have been removed. For example, runs of greater than three thymine residues in a row can reduce translation rates in certain organisms or internal polyadenylation signals can reduce translation.

[0262] Improved protein yield during expression and purification can be evaluated by methods known in the art. For example, the amount of CasX variant protein can be determined by running the protein on an SDS-page gel, and comparing the CasX variant protein to a either a control whose amount or concentration is known in advance to determine an absolute level of protein. Alternatively, or in addition, a purified CasX variant protein can be run on an SDS-page gel next to a reference CasX protein undergoing the same purification process to determine relative improvements in CasX variant protein yield. Alternatively, or in addition, levels of protein can be measured using immunohistochemical methods such as Western blot or ELISA with an antibody to CasX, or by HPLC. For proteins in solution, concentration can be determined by measuring of the protein's intrinsic UV absorbance, or by methods which use protein-dependent color changes such as the Lowry assay, the Smith copper/bicinchoninic assay or the Bradford dye assay. Such methods can be used to calculate the total protein (such as, for example, total soluble protein) yield obtained by expression under certain conditions. This can be compared, for example, to the protein yield of a reference CasX protein under similar expression conditions.

[0263] l. Protein Solubility

[0264] In some embodiments, a CasX variant protein has improved solubility relative to a reference CasX protein. In some embodiments, a CasX variant protein has improved solubility of the CasX:gNA ribonucleoprotein complex variant relative to a ribonucleoprotein complex comprising a reference CasX protein.

[0265] In some embodiments, an improvement in protein solubility leads to higher yield of protein from protein purification techniques such as purification from E. coli. Improved solubility of CasX variant proteins may, in some embodiments, enable more efficient activity in cells, as a more soluble protein may be less likely to aggregate in cells. Protein aggregates can in certain embodiments be toxic or burdensome on cells, and, without wishing to be bound by any theory, increased solubility of a CasX variant protein may ameliorate this result of protein aggregation. Further, improved solubility of CasX variant proteins may allow for enhanced formulations permitting the delivery of a higher effective dose of functional protein, for example in a desired gene editing application. In some embodiments, improved solubility of a CasX variant protein relative to a reference CasX protein results in improved yield of the CasX variant protein during purification of at least about 5, at least about 10, at least about 20, at least about 30, at least about 40, at least about 50, at least about 60, at least about 70, at least about 80, at least about 90, at least about 100, at least about 250, at least about 500, or at least about 1000-fold greater yield. In some embodiments, improved solubility of a CasX variant protein relative to a reference CasX protein improves activity of the CasX variant protein in cells by at least about 1.1, at least about 1.2, at least about 1.3, at least about 1.4, at least about 1.5, at least about 1.6, at least about 1.7, at least about 1.8, at least about 1.9, at least about 2, at least about 2.1, at least about 2.2, at least about 2.3, at least about 2.4, at least about 2.5, at least about 2.6, at least about 2.7, at least about 2.8, at least about 2.9, at least about 3, at least about 3.5, at least about 4, at least about 4.5, at least about 5, at least about 5.5, at least about 6, at least about 6.5, at least about 7.0, at least about 7.5, at least about 8, at least about 8.5, at least about 9, at least about 9.5, at least about 10, at least about 11, at least about 12, at least about 13, at least about 14, or at least about 15-fold greater activity. Improved solubility of the nuclease may be evaluated through a variety of methods known to one of skill in the art, including by taking densitometry readings on a gel of the soluble fraction of lysed E. coli. Alternatively, or addition, improvements in CasX variant protein solubility can be measured by measuring the maintenance of soluble protein product through the course of a full protein purification. For example, soluble protein product can be measured at one or more steps of gel affinity purification, tag cleavage, cation exchange purification, running the protein on a sizing column. In some embodiments, the densitometry of every band of protein on a gel is read after each step in the purification process. CasX variant proteins with improved solubility may, in some embodiments, maintain a higher concentration at one or more steps in the protein purification process when compared to the reference CasX protein, while an insoluble protein variant may be lost at one or more steps due to buffer exchanges, filtration steps, interactions with a purification column, and the like.

[0266] In some embodiments, improving the solubility of CasX variant proteins results in a higher yield in terms of mg/L of protein during protein purification when compared to a reference CasX protein.

[0267] In some embodiments, improving the solubility of CasX variant proteins enables a greater amount of editing events compared to a less soluble protein when assessed in editing assays such as the EGFP disruption assays described herein.

[0268] m. Protein Affinity for the gNA

[0269] In some embodiments, a CasX variant protein has improved affinity for the gNA relative to a reference CasX protein, leading to the formation of the ribonucleoprotein complex. Increased affinity of the CasX variant protein for the gNA may, for example, result in a lower K_{d} for the generation of a RNP complex, which can, in some cases, result in a more stable ribonucleoprotein complex formation. In some embodiments, increased affinity of the CasX variant protein for the gNA results in increased stability of the ribonucleoprotein complex when delivered to human cells. This increased stability can affect the function and utility of the complex in the cells of a subject, as well as result in improved pharmacokinetic properties in blood, when delivered to a subject. In some embodiments, increased affinity of the CasX variant protein, and the resulting increased stability of the ribonucleoprotein complex, allows for a lower dose of the CasX variant protein to be delivered to the subject or cells while still having the desired activity, for example in vivo or in vitro gene editing.

[0270] In some embodiments, a higher affinity (tighter binding) of a CasX variant protein to a gNA allows for a greater amount of editing events when both the CasX variant protein and the gNA remain in an RNP complex. Increased editing events can be assessed using editing assays such as the EGFP disruption assay described herein.

[0271] In some embodiments, the K_{d} of a CasX variant protein for a gNA is increased relative to a reference CasX protein by a factor of at least about 1.1, at least about 1.2, at least about 1.3, at least about 1.4, at least about 1.5, at least about 1.6, at least about 1.7, at least about 1.8, at least about 1.9, at least about 2, at least about 3, at least about 4, at least about 5, at least about 6, at least about 7, at least about 8, at least about 9, at least about 10, at least about 15, at least about 20, at least about 25, at least about 30, at least about 35, at least about 40, at least about 45, at least about 50, at least about 60, at least about 70, at least about 80, at least about 90, or at least about 100. In some embodiments, the CasX variant has about 1.1 to about 10-fold increased binding affinity to the gNA compared to the reference CasX protein of SEQ ID NO:2.

[0272] Without wishing to be bound by theory, in some embodiments amino acid changes in the Helical I domain can increase the binding affinity of the CasX variant protein with the gNA targeting sequence, while changes in the Helical II domain can increase the binding affinity of the CasX variant protein with the gNA scaffold stem loop, and changes in the oligonucleotide binding domain (OBD) increase the binding affinity of the CasX variant protein with the gRNA triplex.

[0273] Methods of measuring CasX protein binding affinity for a gNA include in vitro methods using purified CasX protein and gNA. The binding affinity for reference CasX and variant proteins can be measured by fluorescence polarization if the gNA or CasX protein is tagged with a fluorophore. Alternatively, or in addition, binding affinity can be measured by biolayer interferometry, electrophoretic mobility shift assays (EMSAs), or filter binding. Additional standard techniques to quantify absolute affinities of RNA binding proteins such as the reference CasX and variant proteins of the disclosure for specific gNAs such as reference gNAs and variants thereof include, but are not limited to, isothermal calorimetry (ITC), and surface plasmon resonance (SPR), as well as the methods of the Examples.

[0274] n. Affinity for Target DNA

[0275] In some embodiments, a CasX variant protein has improved binding affinity for a target nucleic acid relative to the affinity of a reference CasX protein for a target nucleic acid. In some embodiments, the improved affinity for the target nucleic acid comprises improved affinity for the target nucleic acid sequence, improved affinity for the PAM sequence, an improved ability to search DNA for the target nucleic acid sequence, or any combinations thereof. Without wishing to be bound by theory, it is thought that CRISPR/Cas system proteins such as CasX may find their target nucleic acid sequences by one-dimension diffusion along a DNA molecule. The process is thought to include (1) binding of the ribonucleoprotein to the DNA molecule followed by (2) stalling at the target nucleic acid sequence, either of which may be, in some embodiments, affected by improved affinity of CasX proteins for a target nucleic acid sequence, thereby improving function of the CasX variant protein compared to a reference CasX protein.

[0276] In some embodiments, a CasX variant protein with improved target nucleic acid affinity has increased overall affinity for DNA. In some embodiments, a CasX variant protein with improved target nucleic acid affinity has increased affinity for specific PAM sequences other than the canonical TTC PAM recognized by the reference CasX protein of SEQ ID NO:2, including binding affinity for PAM sequences selected from the group consisting of TTC, ATC, GTC, and CTC. Without wishing to be bound by theory, it is possible that these protein variants will interact more strongly with DNA overall and will have an increased ability to access and edit sequences within the target DNA due to the ability to bind additional PAM sequences beyond those of wild-type Cas X, thereby allowing for a more efficient search process of the CasX protein for the target sequence. A higher overall affinity for DNA also, in some embodiments, can increase the frequency at which a CasX protein can effectively start and finish a binding and unwinding step, thereby facilitating target strand invasion and R-loop formation, and ultimately the cleavage of a target nucleic acid sequence.

[0277] Without wishing to be bound by theory, it is possible that amino acid changes in the NTSBD that increase the efficiency of unwinding, or capture, of a non-target DNA strand in the unwound state, can increase the affinity of CasX variant proteins for target DNA. Alternatively, or in addition, amino acid changes in the NTSBD that increase the ability of the NTSBD to stabilize DNA during unwinding can increase the affinity of CasX variant proteins for target DNA. Alternatively, or in addition, amino acid changes in the OBD may increase the affinity of CasX variant protein binding to the protospacer adjacent motif (PAM), thereby increasing affinity of the CasX variant protein for target nucleic acid. Alternatively, or in addition, amino acid changes in the Helical I and/or II, RuvC and TSL domains that increase the affinity of the CasX variant protein for the target nucleic acid strand can increase the affinity of the CasX variant protein for target nucleic acid.

[0278] In some embodiments, the CasX variant protein has increased binding affinity to the target nucleic acid sequence compared to the reference protein of SEQ ID NO:1, SEQ ID NO:2, or SEQ ID NO:3. In some embodiments, affinity of a CasX variant protein of the disclosure for a target nucleic acid molecule is increased relative to a reference CasX protein by a factor of at least about 1.1, at least about 1.2, at least about 1.3, at least about 1.4, at least about 1.5, at least about 1.6, at least about 1.7, at least about 1.8, at least about 1.9, at least about 2, at least about 3, at least about 4, at least about 5, at least about 6, at least about 7, at least about 8, at least about 9, at least about 10, at least about 15, at least about 20, at least about 25, at least about 30, at least about 35, at least about 40, at least about 45, at least about 50, at least about 60, at least about 70, at least about 80, at least about 90, or at least about 100.

[0279] In some embodiments, a CasX variant protein has improved binding affinity for the non-target strand of the target nucleic acid. As used herein, the term “non-target strand” refers to the strand of the DNA target nucleic acid sequence that does not form Watson and Crick base pairs with the targeting sequence in the gNA, and is complementary to the target strand.

[0280] Methods of measuring CasX protein (such as reference or variant) affinity for a target nucleic acid molecule may include electrophoretic mobility shift assays (EMSAs), filter binding, isothermal calorimetry (ITC), and surface plasmon resonance (SPR), fluorescence polarization and biolayer interferometry (BLI). Further methods of measuring CasX protein affinity for a target include in vitro biochemical assays that measure DNA cleavage events over time.

[0281] CasX variant proteins with higher affinity for their target nucleic acid may, in some embodiments, cleave the target nucleic acid sequence more rapidly than a reference CasX protein that does not have increased affinity for the target nucleic acid.

[0282] In some embodiments, the CasX variant protein is catalytically dead (dCasX). In some embodiments, the disclosure provides RNP comprising a catalytically-dead CasX protein that retains the ability to bind target DNA. An exemplary catalytically-dead CasX variant protein comprises one or more mutations in the active site of the RuvC domain of the CasX protein. In some embodiments, a catalytically-dead CasX variant protein comprises substitutions at residues 672, 769 and/or 935 of SEQ ID NO:1. In some embodiments, a catalytically-dead CasX variant protein comprises substitutions of D672A, E769A and/or D935A in the reference CasX protein of SEQ ID NO:1. In some embodiments, a catalytically-dead CasX protein comprises substitutions at amino acids 659, 765 and/or 922 of SEQ ID NO:2. In some embodiments, a catalytically-dead CasX protein comprises D659A, E756A and/or D922A substitutions in a reference CasX protein of SEQ ID NO:2. In further embodiments, a catalytically-dead CasX variant protein comprises deletions of all or part of the RuvC domain of the reference CasX protein.

[0283] In some embodiments, improved affinity for DNA of a CasX variant protein also improves the function of catalytically inactive versions of the CasX variant protein. In some embodiments, the catalytically inactive version of the CasX variant protein comprises one or mutations in the DED motif in the RuvC. Catalytically dead CasX variant proteins can, in some embodiments, be used for base editing or epigenetic modifications. With a higher affinity for DNA, in some embodiments, catalytically dead CasX variant proteins can, relative to catalytically active CasX, find their target DNA faster, remain bound to target DNA for longer periods of time, bind target DNA in a more stable fashion, or a combination thereof, thereby improving the function of the catalytically dead CasX variant protein.

[0284] o. Improved Specificity for a Target Site

[0285] In some embodiments, a CasX variant protein has improved specificity for a target DNA sequence relative to a reference CasX protein. As used herein, “specificity,” sometimes referred to as “target specificity,” refers to the degree to which a CRISPR/Cas system ribonucleoprotein complex cleaves off-target sequences that are similar, but not identical to the target DNA sequence; e.g., a CasX variant RNP with a higher degree of specificity would exhibit reduced off-target cleavage of sequences relative to a reference CasX protein. The specificity, and the reduction of potentially deleterious off-target effects, of CRISPR/Cas system proteins can be vitally important in order to achieve an acceptable therapeutic index for use in mammalian subjects.

[0286] In some embodiments, a CasX variant protein has improved specificity for a target site within the target sequence that is complementary to the targeting sequence of the gNA.

[0287] Without wishing to be bound by theory, it is possible that amino acid changes in the Helical I and II domains that increase the specificity of the CasX variant protein for the target DNA strand can increase the specificity of the CasX variant protein for the target DNA overall. In some embodiments, amino acid changes that increase specificity of CasX variant proteins for target DNA may also result in decreased affinity of CasX variant proteins for DNA.

[0288] Methods of testing CasX protein (such as variant or reference) target specificity may include guide and Circularization for In vitro Reporting of Cleavage Effects by Sequencing (CTRCLE-seq), or similar methods. In brief, in CIRCLE-seq techniques, genomic DNA is sheared and circularized by ligation of stem-loop adapters, which are nicked in the stem-loop regions to expose 4 nucleotide palindromic overhangs. This is followed by intramolecular ligation and degradation of remaining linear DNA. Circular DNA molecules containing a CasX cleavage site are subsequently linearized with CasX, and adapter adapters are ligated to the exposed ends followed by high-throughput sequencing to generate paired end reads that contain information about the off-target site. Additional assays that can be used to detect off-target events, and therefore CasX protein specificity include assays used to detect and quantify indels (insertions and deletions) formed at those selected off-target sites such as mismatch-detection nuclease assays and next generation sequencing (NGS). Exemplary mismatch-detection assays include nuclease assays, in which genomic DNA from cells treated with CasX and sgNA is PCR amplified, denatured and rehybridized to form hetero-duplex DNA, containing one wild type strand and one strand with an indel. Mismatches are recognized and cleaved by mismatch detection nucleases, such as Surveyor nuclease or T7 endonuclease I.

[0289] p. Unwinding of DNA

[0290] In some embodiments, a CasX variant protein has improved ability of unwinding DNA relative to a reference CasX protein. In some embodiments, a CasX variant protein has enhanced DNA unwinding characteristics. Poor dsDNA unwinding has been shown previously to impair or prevent the ability of CRISPR/Cas system proteins anaCas9 or Cas14s to cleave DNA. Therefore, without wishing to be bound by any theory, it is likely that increased DNA cleavage activity by some CasX variant proteins is due at least in part to an increased ability to find and unwind the dsDNA at a target site.

[0291] Without wishing to be bound by theory, it is thought that amino acid changes in the NTSB domain may produce CasX variant proteins with increased DNA unwinding characteristics. Alternatively, or in addition, amino acid changes in the OBD or the helical domain regions that interact with the PAM may also produce CasX variant proteins with increased DNA unwinding characteristics.

[0292] Methods of measuring the ability of CasX proteins (such as variant or reference) to unwind DNA include, but are not limited to, in vitro assays that observe increased on rates of dsDNA targets in fluorescence polarization or biolayer interferometry.

[0293] q. Catalytic Activity

[0294] The ribonucleoprotein complex of the CasX:gNA systems disclosed herein comprise a reference CasX protein or variant thereof that bind to a target nucleic acid sequence and cleaves the target nucleic acid sequence. In some embodiments, a CasX variant protein has improved catalytic activity relative to a reference CasX protein. Without wishing to be bound by theory, it is thought that in some cases cleavage of the target strand can be a limiting factor for Cas12-like molecules in creating a dsDNA break. In some embodiments, CasX variant proteins improve bending of the target strand of DNA and cleavage of this strand, resulting in an improvement in the overall efficiency of dsDNA cleavage by the CasX ribonucleoprotein complex.

[0295] In some embodiments, a CasX variant protein has increased nuclease activity compared to a reference CasX protein. Variants with increased nuclease activity can be generated, for example, through amino acid changes in the RuvC nuclease domain. In one embodiment, the CasX variant comprises a nuclease domain having nickase activity. In the foregoing embodiment, the CasX nickase of a CasX:gNA system generates a single-stranded break within 10-18 nucleotides 3′ of a PAM site in the non-target strand. In another embodiment, the CasX variant comprises a nuclease domain having double-stranded cleavage activity. In the foregoing embodiment, the CasX of the CasX:gNA system generates a double-stranded break within 18-26 nucleotides 5′ of a PAM site on the target strand and 10-18 nucleotides 3′ on the non-target strand. Nuclease activity can be assayed by a variety of methods, including those of the Examples. In one embodiment, a CasX variant has a Kcleave constant that is at least 2-fold, or at least 3-fold, or at least 4-fold, or at least 5-fold, or at least 6-fold, or at least 7-fold, or at least 8-fold, or at least 9-fold, or at least 10-fold greater compared to a reference wild-type CasX.

[0296] In some embodiments, a CasX variant protein has the improved characteristic of forming RNP with gNA that result in a higher percentage of cleavage-competent RNP compared to an RNP of a reference CasX protein of SEQ ID NO: 1, SEQ ID NO: 2, or SEQ ID NO: 3 and the gNA, as described in the Examples. By cleavage competent, it is meant that the RNP that is formed has the ability to cleave the target nucleic acid. In some embodiments, the RNP of the CasX variant and the gNA exhibit at least a 2% to at least 30%, or at least a 5% to at least a 20%, or at least a 10% to at least a 15% higher percentage of cleavage-competent RNP compared to an RNP of the reference CasX of SEQ ID NO: 1, SEQ ID NO: 2, or SEQ ID NO: 3 and the gNA of Table 1.

[0297] In some embodiments, a CasX variant protein has increased target strand loading for double strand cleavage. Variants with increased target strand loading activity can be generated, for example, through amino acid changes in the TLS domain.

[0298] Without wishing to be bound by theory, amino acid changes in the TSL domain may result in CasX variant proteins with improved catalytic activity. Alternatively, or in addition, amino acid changes around the binding channel for the RNA:DNA duplex may also improve catalytic activity of the CasX variant protein.

[0299] In some embodiments, a CasX variant protein has increased collateral cleavage activity compared to a reference CasX protein. As used herein, “collateral cleavage activity” refers to additional, non-targeted cleavage of nucleic acids following recognition and cleavage of a target nucleic acid sequence. In some embodiments, a CasX variant protein has decreased collateral cleavage activity compared to a reference CasX protein.

[0300] In some embodiments, for example those embodiments encompassing applications where target DNA cleavage is not a desired outcome, improving the catalytic activity of a CasX variant protein comprises altering, reducing, or abolishing the catalytic activity of the CasX variant protein. In some embodiments, a ribonucleoprotein complex comprising a CasX variant protein binds to a target DNA and does not cleave the target DNA.

[0301] In some embodiments, the CasX ribonucleoprotein complex comprising a CasX variant protein binds a target DNA but generates a single stranded nick in the target DNA. In some embodiments, particularly those embodiments wherein the CasX protein is a nickase, a CasX variant protein has decreased target strand loading for single strand nicking. Variants with decreased target strand loading may be generated, for example, through amino acid changes in the TSL domain.

[0302] Exemplary methods for characterizing the catalytic activity of CasX proteins may include, but are not limited to, in vitro cleavage assays. In some embodiments, electrophoresis of DNA products on agarose gels can interrogate the kinetics of strand cleavage.

[0303] r. Affinity for Target RNA

[0304] In some embodiments, variants of a reference CasX protein increase the specificity of the CasX variant protein for a target RHO RNA, and increase the activity of the CasX variant protein with respect to a target RNA when compared to the reference CasX protein. For example, CasX variant proteins can display increased binding affinity for target RNAs, or increased cleavage of target RNAs, when compared to reference CasX proteins. In some embodiments, a ribonucleoprotein complex comprising a CasX variant protein binds to a target RNA and/or cleaves the target RNA. In one embodiment, a CasX variant has at least about two-fold to about 10-fold increased binding affinity to the target nucleic acid sequence compared to the reference protein of SEQ ID NO:1, SEQ ID NO:2, or SEQ ID NO:3.

[0305] s. Combinations of Mutations

[0306] In some embodiments, the present disclosure provides variants that are a combination of mutations from separate CasX variant proteins. In some embodiments, any variant to any domain described herein can be combined with other variants described herein. In some embodiments, any variant within any domain described herein can be combined with other variants described herein, in the same domain. Combinations of different amino acid changes may in some embodiments produce new optimized variants whose function is further improved by the combination of amino acid changes. In some embodiments, the effect of combining amino acid changes on CasX protein function is linear. As used herein, a combination that is linear refers to a combination whose effect on function is equal to the sum of the effects of each individual amino acid change when assayed in isolation. In some embodiments, the effect of combining amino acid changes on CasX protein function is synergistic. As used herein, a combination of variants that is synergistic refers to a combination whose effect on function is greater than the sum of the effects of each individual amino acid change when assayed in isolation. In some embodiments, combining amino acid changes produces CasX variant proteins in which more than one function of the CasX protein has been improved relative to the reference CasX protein.

[0307] t. CasX Fusion Proteins

[0308] In some embodiments, the disclosure provides CasX proteins comprising a heterologous protein fused to the CasX. In some cases, the CasX is a reference CasX protein. In other cases, the CasX is a CasX variant of any of the embodiments described herein.

[0309] In some embodiments, the CasX variant protein is fused to one or more proteins or domains thereof that has a different activity of interest (i.e., is part of a fusion protein). For example, in some embodiments, the CasX variant protein is fused to a protein (or domain thereof) that inhibits transcription, modifies a target nucleic acid sequence, or modifies a polypeptide associated with a nucleic acid (e.g., histone modification).

[0310] In some embodiments, a heterologous polypeptide (or heterologous amino acid such as a cysteine residue or a non-natural amino acid) can be inserted at one or more positions within a CasX protein to generate a CasX fusion protein. In other embodiments, a cysteine residue can be inserted at one or more positions within a CasX protein followed by conjugation of a heterologous polypeptide described below. In some alternative embodiments, a heterologous polypeptide or heterologous amino acid can be added at the N- or C-terminus of the reference or CasX variant protein. In other embodiments, a heterologous polypeptide or heterologous amino acid can be inserted internally within the sequence of the CasX protein.

[0311] In some embodiments, the reference CasX or variant fusion protein retains RNA-guided sequence specific target nucleic acid binding and cleavage activity. In some cases, the reference CasX or variant fusion protein has (retains) 50% or more of the activity (e.g., cleavage and/or binding activity) of the corresponding reference CasX or variant protein that does not have the insertion of the heterologous protein. In some cases, the reference CasX or variant fusion protein retains at least about 60%, or at least about 70% or more, at least about 80%, or at least about 90%, or at least about 92%, or at least about 95%, or at least about 98%, or at least about 100% of the activity (e.g., cleavage and/or binding activity) of the corresponding CasX protein that does not have the insertion of the heterologous protein.

[0312] In some cases, the reference CasX or variant fusion polypeptide retains (has) target nucleic acid binding activity relative to the activity of the CasX protein without the inserted heterologous amino acid or heterologous polypeptide. For example, in some cases, the reference CasX or variant fusion polypeptide has (retains) 50% or more of the binding activity of the corresponding CasX protein (the CasX protein that does not have the insertion). For example, in some cases, the reference CasX or variant fusion polypeptide has (retains) 60% or more (70% or more, 80% or more, 90% or more, 92% or more, 95% or more, 98% or more, or 100%) of the binding activity of the corresponding parent CasX protein (the CasX protein that does not have the insertion).

[0313] In some cases, the reference CasX or variant fusion polypeptide retains (has) target nucleic acid binding and/or cleavage activity relative to the activity of the parent CasX protein without the inserted heterologous amino acid or heterologous polypeptide. For example, in some cases, the reference CasX or variant fusion polypeptide has (retains) 50% or more of the binding and/or cleavage activity of the corresponding parent CasX protein (the CasX protein that does not have the insertion). For example, in some cases, the reference CasX or variant fusion polypeptide has (retains) 60% or more (70% or more, 80% or more, 90% or more, 92% or more, 95% or more, 98% or more, or 100%) of the binding and/or cleavage activity of the corresponding CasX parent polypeptide (the CasX protein that does not have the insertion). Methods of measuring cleaving and/or binding activity of a CasX protein and/or a CasX fusion polypeptide will be known to one of ordinary skill in the art and any convenient method can be used.

[0314] A variety of heterologous polypeptides are suitable for inclusion in a reference CasX or CasX variant fusion protein of the disclosure. In some cases, the fusion partner can modulate transcription (e.g., inhibit transcription, increase transcription) of a target DNA. For example, in some cases the fusion partner is a protein (or a domain from a protein) that inhibits transcription (e.g., a transcriptional repressor, a protein that functions via recruitment of transcription inhibitor proteins, modification of target DNA such as methylation, recruitment of a DNA modifier, modulation of histones associated with target DNA, recruitment of a histone modifier such as those that modify acetylation and/or methylation of histones, and the like). In some cases the fusion partner is a protein (or a domain from a protein) that increases transcription (e.g., a transcription activator, a protein that acts via recruitment of transcription activator proteins, modification of target DNA such as demethylation, recruitment of a DNA modifier, modulation of histones associated with target DNA, recruitment of a histone modifier such as those that modify acetylation and/or methylation of histones, and the like).

[0315] In some cases, a fusion partner has enzymatic activity that modifies a target nucleic acid sequence (e.g., nuclease activity, methyltransferase activity, demethylase activity, DNA repair activity, DNA damage activity, deamination activity, dismutase activity, alkylation activity, depurination activity, oxidation activity, pyrimidine dimer forming activity, integrase activity, transposase activity, recombinase activity, polymerase activity, ligase activity, helicase activity, photolyase activity or glycosylase activity).

[0316] In some cases, a fusion partner has enzymatic activity that modifies a polypeptide (e.g., a histone) associated with a target nucleic acid (e.g., methyltransferase activity, demethylase activity, acetyltransferase activity, deacetylase activity, kinase activity, phosphatase activity, ubiquitin ligase activity, deubiquitinating activity, adenylation activity, deadenylation activity, SUMOylating activity, deSUMOylating activity, ribosylation activity, deribosylation activity, myristoylation activity or demyristoylation activity).

[0317] Examples of proteins (or fragments thereof) that can be used as a fusion partner to increase transcription include but are not limited to: transcriptional activators such as VP16, VP64, VP48, VP160, p65 subdomain (e.g., from NFkB), and activation domain of EDLL and/or TAL activation domain (e.g., for activity in plants); histone lysine methyltransferases such as SET domain containing 1A, histone lysine methyltransferase (SET1A), SET domain containing 1B, histone lysine methyltransferase (SET1B), lysine methyltransferase 2A (MLL1 to 5, ASCL1 (ASH1) achaete-scute family bHLH transcription factor 1 (ASH1), SET and MYND domain containing 2 (SYMD2), nuclear receptor binding SET domain protein 1 (NSD1), and the like; histone lysine demethylases such as lysine demethylase 3A (JHDM2a)/Lysine-specific demethylase 3B (JHDM2b), lysine demethylase 6A (UTX), lysine demethylase 6B (JMJD3), and the like; histone acetyltransferases such as lysine acetyltransferase 2A (GCN5), lysine acetyltransferase 2B (PCAF), CREB binding protein (CBP), E1A binding protein p300 (p300), TATA-box binding protein associated factor 1 (TAF1), lysine acetyltransferase 5 (TIP60/PLIP), lysine acetyltransferase 6A (MOZ/MYST3), lysine acetyltransferase 6B (MORF/MYST4), SRC proto-oncogene, non-receptor tyrosine kinase (SRC1), nuclear receptor coactivator 3 (ACTR), MYB binding protein 1a (P160), clock circadian regulator (CLOCK), and the like; and DNA demethylases such as Ten-Eleven Translocation (TET) dioxygenase 1 (TET1CD), tet methylcytosine dioxygenase 1 (TET1), demeter (DME), demeter-like 1 (DML1), demeter-like 2 (DML2), protein ROS1 (ROS1), and the like.

[0318] Examples of proteins (or fragments thereof) that can be used as a fusion partner to decrease transcription include but are not limited to: transcriptional repressors such as the Kruppel associated box (KRAB or SKD); KOX1 repression domain; the Mad mSIN3 interaction domain (SID); the ERF repressor domain (ERD), the SRDX repression domain (e.g., for repression in plants), and the like; histone lysine methyltransferases such as PR/SET domain containing protein (Pr-SET7/8), lysine methyltransferase 5B (SUV4-20H1), PR/SET domain 2 (RIZ1), and the like; histone lysine demethylases such as lysine demethylase 4A (JMJD2A/JHDM3A), lysine demethylase 4B (JMJD2B), lysine demethylase 4C (JMJD2C/GASC1), lysine demethylase 4D (JMJD2D), lysine demethylase 5A (JARID1A/RBP2), lysine demethylase 5B (JARID1B/PLU-1), lysine demethylase 5C (JARID 1C/SMCX), lysine demethylase 5D (JARID1D/SMCY), and the like; histone lysine deacetylases such as histone deacetylase 1 (HDAC1), HDAC2, HDAC3, HDAC8, HDAC4, HDAC5, HDAC7, HDAC9, sirtuin 1 (SIRT1), SIRT2, HDAC11, and the like; DNA methylases such as HhaI DNA m5c-methyltransferase (M.HhaI), DNA methyltransferase 1 (DNMT1), DNA methyltransferase 3a (DNMT3a), DNA methyltransferase 3b (DNMT3b), methyltransferase 1 (MET1), S-adenosyl-L-methionine-dependent methyltransferases superfamily protein (DRM3) (plants), DNA cytosine methyltransferase MET2a (ZMET2), chromomethylase 1 (CMT1), chromomethylase 2 (CMT2) (plants), and the like; and periphery recruitment elements such as Lamin A, Lamin B, and the like.

[0319] In some cases the fusion partner has enzymatic activity that modifies the target nucleic acid sequence (e.g., ssRNA, dsRNA, ssDNA, dsDNA). Examples of enzymatic activity that can be provided by the fusion partner include but are not limited to: nuclease activity such as that provided by a restriction enzyme (e.g., FokI nuclease), methyltransferase activity such as that provided by a methyltransferase (e.g., Hhal DNA m5c-methyltransferase (M.Hhal), DNA methyltransferase 1 (DNMT1), DNA methyltransferase 3a (DNMT3a), DNA methyltransferase 3b (DNMT3b), METI, DRM3 (plants), ZMET2, CMT1, CMT2 (plants), and the like); demethylase activity such as that provided by a demethylase (e.g., Ten-Eleven Translocation (TET) dioxygenase 1 (TET 1 CD), TET1, DME, DML1, DML2, ROS1, and the like), DNA repair activity, DNA damage activity, deamination activity such as that provided by a deaminase (e.g., a cytosine deaminase enzyme, e.g., an APOBEC protein such as rat APOBEC1), dismutase activity, alkylation activity, depurination activity, oxidation activity, pyrimidine dimer forming activity, integrase activity such as that provided by an integrase and/or resolvase (e.g., Gin invertase such as the hyperactive mutant of the Gin invertase, GinH106Y; human immunodeficiency virus type 1 integrase (IN); Tn3 resolvase; and the like), transposase activity, recombinase activity such as that provided by a recombinase (e.g., catalytic domain of Gin recombinase), polymerase activity, ligase activity, helicase activity, photolyase activity, and glycosylase activity).

[0320] In some cases, a reference CasX or Cas X variant protein of the present disclosure is fused to a polypeptide selected from: a domain for increasing transcription (e.g., a VP16 domain, a VP64 domain), a domain for decreasing transcription (e.g., a KRAB domain, e.g., from the Kox1 protein), a core catalytic domain of a histone acetyltransferase (e.g., histone acetyltransferase p300), a protein/domain that provides a detectable signal (e.g., a fluorescent protein such as GFP), a nuclease domain (e.g., a Fokl nuclease), and a base editor (e.g., cytidine deaminase such as APOBEC1).

[0321] In some cases, the fusion partner has enzymatic activity that modifies a protein associated with the target nucleic acid sequence (e.g., ssRNA, dsRNA, ssDNA, dsDNA) (e.g., a histone, an RNA binding protein, a DNA binding protein, and the like). Examples of enzymatic activity (that modifies a protein associated with a target nucleic acid) that can be provided by the fusion partner include but are not limited to: methyltransferase activity such as that provided by a histone methyltransferase (HMT) (e.g., suppressor of variegation 3-9 homolog 1 (SUV39H1, also known as KMT1A), euchromatic histone lysine methyltransferase 2 (G9A, also known as KMT1C and EHMT2), SUV39H2, ESET/SETDB 1, and the like, SET1A, SET1B, MLL1 to 5, ASH1, SYMD2, NSD1, DOT1L, Pr-SET7/8, SUV4-20H1, EZH2, RIZ1), demethylase activity such as that provided by a histone demethylase (e.g., Lysine Demethylase 1A (KDM1A also known as LSD1), JHDM2a/b, JMJD2A/JHDM3A, JMJD2B, JMJD2C/GASC1, JMJD2D, JARID1A/RBP2, JARID1B/PLU-1, JARID1C/SMCX, JARID1D/SMCY, UTX, JMJD3, and the like), acetyltransferase activity such as that provided by a histone acetylase transferase (e.g., catalytic core/fragment of the human acetyltransferase p300, GCN5, PCAF, CBP, TAF1, TIP60/PLIP, MOZ/MYST3, MORF/MYST4, HB01/MYST2, HMOF/MYST1, SRC1, ACTR, P160, CLOCK, and the like), deacetylase activity such as that provided by a histone deacetylase (e.g., HDAC1, HDAC2, HDAC3, HDAC8, HDAC4, HDAC5, HDAC7, HDAC9, SIRT1, SIRT2, HDAC11, and the like), kinase activity, phosphatase activity, ubiquitin ligase activity, deubiquitinating activity, adenylation activity, deadenylation activity, SUMOylating activity, deSUMOylating activity, ribosylation activity, deribosylation activity, myristoylation activity, and demyristoylation activity.

[0322] Additional examples of suitable fusion partners are (i) a dihydrofolate reductase (DHFR) destabilization domain to generate a chemically controllable subject RNA-guided polypeptide or a conditionally active RNA-guided polypeptide, and (ii) a chloroplast transit peptide.

[0323] Suitable chloroplast transit peptides include, but are not limited to:

(SEQ ID NO: 161)
MASMISSSAVTTVSRASRGQSAAMAPFGGLKSMTGFPVRKVNTDITSITS
NGGRVKCMQVWPPIGKKKFETLSYLPPLTRDSRA;
(SEQ ID NO: 162)
MASMISSSAVTTVSRASRGQSAAMAPFGGLKSMTGFPVRKVNTDITSITS
NGGRVKS;
(SEQ ID NO: 163)
MASSMLSSATMVASPAQATMVAPFNGLKSSAAFPATRKANNDITSITSNG
GRVNCMQVWPPIEKKKFETLSYLPDLTDSGGRVNC;
(SEQ ID NO: 164)
MAQVSRICNGVQNPSLISNLSKSSQRKSPLSVSLKTQQHPRAYPISSSWG
LKKSGMTLIGSELRPLKVMSSVSTAC;
(SEQ ID NO: 165)
MAQVSRICNGVWNPSLISNLSKSSQRKSPLSVSLKTQQHPRAYPISSSWG
LKKSGMTLIGSELRPLKVMSSVSTAC;
(SEQ ID NO: 166)
MAQINNMAQGIQTLNPNSNFHKPQVPKSSSFLVFGSKKLKNSANSMLVLK
KDSIFMQLFCSFRISASVATAC;
(SEQ ID NO: 167)
MAALVTSQLATSGTVLSVTDRFRRPGFQGLRPRNPADAALGMRTVGASAA
PKQSRKPHRFDRRCLSMW;
(SEQ ID NO: 168)
MAALTTSQLATSATGFGIADRSAPSSLLRHGFQGLKPRSPAGGDATSLSV
TTSARATPKQQRSVQRGSRRFPSVVVC;
(SEQ ID NO: 169)
MASSVLSSAAVATRSNVAQANMVAPFTGLKSAASFPVSRKQNLDITSIAS
NGGRVQC;
(SEQ ID NO: 170)
MESLAATSVFAPSRVAVPAARALVRAGTVVPTRRTSSTSGTSGVKCSAAV
TPQASPVISRSAAAA;
and
(SEQ ID NO: 171)
MGAAATSMQSLKFSNRLVPPSRRLSPVPNNVTCNNLPKSAAPVRTVKCCA
SSWNSTINGAAATTNGASAASS.

[0324] In some cases, a reference CasX or variant polypeptide of the present disclosure can include an endosomal escape peptide. In some cases, an endosomal escape polypeptide comprises the amino acid sequence GLFXALLXLLXSLWXLLLXA (SEQ ID NO: 172), wherein each X is independently selected from lysine, histidine, and arginine. In some cases, an endosomal escape polypeptide comprises the amino acid sequence

(SEQ ID NO: 173)
GLFHALLHLLHSLWHLLLHA,
or
(SEQ ID NO: 174)
HHHHHHHHH.

[0325] Non-limiting examples of fusion partners for use when targeting ssRNA target nucleic acid sequences include (but are not limited to): splicing factors (e.g., RS domains); protein translation components (e.g., translation initiation, elongation, and/or release factors; e.g., eIF4G); RNA methylases; RNA editing enzymes (e.g., RNA deaminases, e.g., adenosine deaminase acting on RNA (ADAR), including A to I and/or C to U editing enzymes); helicases; RNA-binding proteins; and the like. It is understood that a heterologous polypeptide can include the entire protein or in some cases can include a fragment of the protein (e.g., a functional domain).

[0326] A fusion partner can be any domain capable of interacting with ssRNA (which, for the purposes of this disclosure, includes intramolecular and/or intermolecular secondary structures, e.g., double-stranded RNA duplexes such as hairpins, stem-loops, etc.), whether transiently or irreversibly, directly or indirectly, including but not limited to an effector domain selected from the group comprising; Endonucleases (for example RNase III, the CRR22 DYW domain, Dicer, and PIN (PilT N-terminus) domains from proteins such as SMG5 and SMG6); proteins and protein domains responsible for stimulating RNA cleavage (for example CPSF, CstF, CFIm and CFIIm); Exonucleases (for example XRN-1 or Exonuclease T); Deadenylases (for example HNT3); proteins and protein domains responsible for nonsense mediated RNA decay (for example UPF1, UPF2, UPF3, UPF3b, RNP SI, Y14, DEK, REF2, and SRm160); proteins and protein domains responsible for stabilizing RNA (for example PABP); proteins and protein domains responsible for repressing translation (for example Ago2 and Ago4); proteins and protein domains responsible for stimulating translation (for example Staufen); proteins and protein domains responsible for (e.g., capable of) modulating translation (e.g., translation factors such as initiation factors, elongation factors, release factors, etc., e.g., eIF4G); proteins and protein domains responsible for polyadenylation of RNA (for example PAP1, GLD-2, and Star-PAP); proteins and protein domains responsible for polyuridinylation of RNA (for example CI Dl and terminal uridylate transferase); proteins and protein domains responsible for RNA localization (for example from IMP1, ZBP1, She2p, She3p, and Bicaudal-D); proteins and protein domains responsible for nuclear retention of RNA (for example Rrp6); proteins and protein domains responsible for nuclear export of RNA (for example TAP, NXF1, THO, TREX, REF, and Aly); proteins and protein domains responsible for repression of RNA splicing (for example PTB, Sam68, and hnRNP Al); proteins and protein domains responsible for stimulation of RNA splicing (for example Serine/Arginine-rich (SR) domains); proteins and protein domains responsible for reducing the efficiency of transcription (for example FUS (TLS)); and proteins and protein domains responsible for stimulating transcription (for example CDK7 and HIV Tat). Alternatively, the effector domain may be selected from the group comprising Endonucleases; proteins and protein domains capable of stimulating RNA cleavage; Exonucleases; Deadenylases; proteins and protein domains having nonsense mediated RNA decay activity; proteins and protein domains capable of stabilizing RNA; proteins and protein domains capable of repressing translation; proteins and protein domains capable of stimulating translation; proteins and protein domains capable of modulating translation (e.g., translation factors such as initiation factors, elongation factors, release factors, etc., e.g., eIF4G); proteins and protein domains capable of polyadenylation of RNA; proteins and protein domains capable of polyuridinylation of RNA; proteins and protein domains having RNA localization activity; proteins and protein domains capable of nuclear retention of RNA; proteins and protein domains having RNA nuclear export activity; proteins and protein domains capable of repression of RNA splicing; proteins and protein domains capable of stimulation of RNA splicing; proteins and protein domains capable of reducing the efficiency of transcription; and proteins and protein domains capable of stimulating transcription. Another suitable heterologous polypeptide is a PUF RNA-binding domain, which is described in more detail in WO2012068627, which is hereby incorporated by reference in its entirety.

[0327] Some RNA splicing factors that can be used (in whole or as fragments thereof) as a fusion partner have modular organization, with separate sequence-specific RNA binding modules and splicing effector domains. For example, members of the serine/arginine-rich (SR) protein family contain N-terminal RNA recognition motifs (RRMs) that bind to exonic splicing enhancers (ESEs) in pre-mRNAs and C-terminal RS domains that promote exon inclusion. As another example, the hnRNP protein hnRNP Al binds to exonic splicing silencers (ESSs) through its RRM domains and inhibits exon inclusion through a C-terminal Glycine-rich domain. Some splicing factors can regulate alternative use of splice site (ss) by binding to regulatory sequences between the two alternative sites. For example, ASF/SF2 can recognize ESEs and promote the use of intron proximal sites, whereas hnRNP Al can bind to ESSs and shift splicing towards the use of intron distal sites. One application for such factors is to generate ESFs that modulate alternative splicing of endogenous genes, particularly disease associated genes. For example, Bcl-x pre-mRNA produces two splicing isoforms with two alternative 5′ splice sites to encode proteins of opposite functions. The long splicing isoform Bcl-xL is a potent apoptosis inhibitor expressed in long-lived post mitotic cells and is up-regulated in many cancer cells, protecting cells against apoptotic signals. The short isoform Bcl-xS is a pro-apoptotic isoform and expressed at high levels in cells with a high turnover rate (e.g., developing lymphocytes). The ratio of the two Bcl-x splicing isoforms is regulated by multiple cc-elements that are located in either the core exon region or the exon extension region (i.e., between the two alternative 5′ splice sites). For more examples, see WO2010075303, which is hereby incorporated by reference in its entirety.

[0328] Further suitable fusion partners include, but are not limited to proteins (or fragments thereof) that are boundary elements (e.g., CTCF), proteins and fragments thereof that provide periphery recruitment (e.g., Lamin A, Lamin B, etc.), protein docking elements (e.g., FKBP/FRB, Pill/Abyl, etc.).

[0329] In some cases, a heterologous polypeptide (a fusion partner) provides for subcellular localization, i.e., the heterologous polypeptide contains a subcellular localization sequence (e.g., a nuclear localization signal (NLS) for targeting to the nucleus, a sequence to keep the fusion protein out of the nucleus, e.g., a nuclear export sequence (NES), a sequence to keep the fusion protein retained in the cytoplasm, a mitochondrial localization signal for targeting to the mitochondria, a chloroplast localization signal for targeting to a chloroplast, an ER retention signal, and the like). In some embodiments, a subject RNA-guided polypeptide or a conditionally active RNA-guided polypeptide and/or subject CasX fusion polypeptide does not include a NLS so that the protein is not targeted to the nucleus (which can be advantageous, e.g., when the target nucleic acid sequence is an RNA that is present in the cytosol). In some embodiments, a fusion partner can provide a tag (i.e., the heterologous polypeptide is a detectable label) for ease of tracking and/or purification (e.g., a fluorescent protein, e.g., green fluorescent protein (GFP), yellow fluorescent protein (YFP), red fluorescent protein (RFP), cyan fluorescent protein (CFP), mCherry, tdTomato, and the like; a histidine tag, e.g., a 6×His tag; a hemagglutinin (HA) tag; a FLAG tag; a Myc tag; and the like).

[0330] In some cases a reference or CasX variant polypeptide includes (is fused to) a nuclear localization signal (NLS) (e.g., in some cases 2 or more, 3 or more, 4 or more, or 5 or more 6 or more, 7 or more, 8 or more NLSs). Thus, in some cases, a reference or CasX variant polypeptide includes one or more NLSs (e.g., 2 or more, 3 or more, 4 or more, or 5 or more NLSs). In some cases, one or more NLSs (2 or more, 3 or more, 4 or more, or 5 or more NLSs) are positioned at or near (e.g., within 50 amino acids of) the N-terminus and/or the C-terminus. In some cases, one or more NLSs (2 or more, 3 or more, 4 or more, or 5 or more NLSs) are positioned at or near (e.g., within 50 amino acids of) the N-terminus. In some cases, one or more NLSs (2 or more, 3 or more, 4 or more, or 5 or more NLSs) are positioned at or near (e.g., within 50 amino acids of) the C-terminus. In some cases, one or more NLSs (3 or more, 4 or more, or 5 or more NLSs) are positioned at or near (e.g., within 50 amino acids of) both the N-terminus and the C-terminus. In some cases, an NLS is positioned at the N-terminus and an NLS is positioned at the C-terminus. In some cases a reference or CasX variant polypeptide includes (is fused to) between 1 and 10 NLSs (e.g., 1-9, 1-8, 1-7, 1-6, 1-5, 2-10, 2-9, 2-8, 2-7, 2-6, or 2-5 NLSs). In some cases a reference or CasX variant polypeptide includes (is fused to) between 2 and 5 NLSs (e.g., 2-4, or 2-3 NLSs).

[0331] Non-limiting examples of NLSs include sequences derived from: the NLS of the SV40 virus large T-antigen, having the amino acid sequence PKKKRKV (SEQ ID NO: 176); the NLS from nucleoplasmin (e.g., the nucleoplasmin bipartite NLS with the sequence KRPAATKKAGQAKKKK (SEQ ID NO: 177); the c-myc NLS having the amino acid sequence PAAKRVKLD (SEQ ID NO: 178) or RQRRNELKRSP (SEQ ID NO: 179); the hRNPAl M9 NLS having the sequence NQSSNFGPMKGGNFGGRSSGPYGGGGQYFAKPRNQGGY (SEQ ID NO: 180); the sequence RMRIZFKNKGKDTAELRRRRVEVSVELRKAKKDEQILKRRNV (SEQ ID NO: 181) of the IBB domain from importin-alpha; the sequences VSRKRPRP (SEQ ID NO: 182) and PPKKARED (SEQ ID NO: 183) of the myoma T protein; the sequence PQPKKKPL (SEQ ID NO: 184) of human p53; the sequence SALIKKKKKMAP (SEQ ID NO: 185) of mouse c-abl IV; the sequences DRLRR (SEQ ID NO: 186) and PKQKKRK (SEQ ID NO: 187) of the influenza virus NS1; the sequence RKLKKKIKKL (SEQ ID NO: 188) of the Hepatitis virus delta antigen; the sequence REKKKFLKRR (SEQ ID NO: 189) of the mouse Mxl protein; the sequence KRKGDEVDGVDEVAKKKSKK (SEQ ID NO: 190) of the human poly(ADP-ribose) polymerase; the sequence RKCLQAGMNLEARKTKK (SEQ ID NO: 191) of the steroid hormone receptors (human) glucocorticoid; the sequence PRPRKIPR (SEQ ID NO: 192) of Borna disease virus P protein (BDV-P1); the sequence PPRKKRTVV (SEQ ID NO: 193) of hepatitis C virus nonstructural protein (HCV-NS5A); the sequence NLSKKKKRKREK (SEQ ID NO: 194) of LEF1; the sequence RRPSRPFRKP (SEQ ID NO: 195) of ORF57 simirae; the sequence KRPRSPSS (SEQ ID NO: 196) of EBV LANA; the sequence KRGINDRNFWRGENERKTR (SEQ ID NO: 197) of Influenza A protein; the sequence PRPPKMARYDN (SEQ ID NO: 198) of human RNA helicase A (RHA); the sequence KRSFSKAF (SEQ ID NO: 199) of nucleolar RNA helicase II; the sequence KLKIKRPVK (SEQ ID NO: 200) of TUS-protein; the sequence PKKKRKVPPPPAAKRVKLD (SEQ ID NO: 201) associated with importin-alpha; the sequence PKTRRRPRRSQRKRPPT (SEQ ID NO: 202) from the Rex protein in HTLV-1; the sequence MSRRRKANPTKLSENAKKLAKEVEN (SEQ ID NO: 203) from the EGL-13 protein of Caenorhabditis elegans; and the sequences

(SEQ ID NO: 204)
KTRRRPRRSQRKRPPT,
(SEQ ID NO: 205)
RRKKRRPRRKKRR,
(SEQ ID NO: 206)
PKKKSRKPKKKSRK,
(SEQ ID NO: 207)
HKKKHPDASVNFSEFSK,
(SEQ ID NO: 208)
QRPGPYDRPQRPGPYDRP,
(SEQ ID NO: 209)
LSPSLSPLLSPSLSPL,
(SEQ ID NO: 210)
RGKGGKGLGKGGAKRHRK,
(SEQ ID NO: 211)
PKRGRGRPKRGRGR,
(SEQ ID NO: 212)
PKKKRKVPPPPAAKRVKLD,
and
(SEQ ID NO: 213)
PKKKRKVPPPPKKKRKV.

In general, NLS (or multiple NLSs) are of sufficient strength to drive accumulation of a reference or CasX variant fusion protein in the nucleus of a eukaryotic cell. Detection of accumulation in the nucleus may be performed by any suitable technique. For example, a detectable marker may be fused to a reference or CasX variant fusion protein such that location within a cell may be visualized. Cell nuclei may also be isolated from cells, the contents of which may then be analyzed by any suitable process for detecting protein, such as immunohistochemistry, Western blot, or enzyme activity assay. Accumulation in the nucleus may also be determined.

[0332] In some cases, a reference or CasX variant fusion protein includes a “Protein Transduction Domain” or PTD (also known as a CPP—cell penetrating peptide), which refers to a protein, polynucleotide, carbohydrate, or organic or inorganic compound that facilitates traversing a lipid bilayer, micelle, cell membrane, organelle membrane, or vesicle membrane. A PTD attached to another molecule, which can range from a small polar molecule to a large macromolecule and/or a nanoparticle, facilitates the molecule traversing a membrane, for example going from an extracellular space to an intracellular space, or from the cytosol to within an organelle. In some embodiments, a PTD is covalently linked to the amino terminus of a reference or CasX variant fusion protein. In some embodiments, a PTD is covalently linked to the carboxyl terminus of a reference or CasX variant fusion protein. In some cases, the PTD is inserted internally in the sequence of a reference or CasX variant fusion protein at a suitable insertion site. In some cases, a reference or CasX variant fusion protein includes (is conjugated to, is fused to) one or more PTDs (e.g., two or more, three or more, four or more PTDs). In some cases, a PTD includes one or more nuclear localization signals (NLS). Examples of PTDs include but are not limited to peptide transduction domain of IV TAT comprising YGRKKRRQRRR (SEQ ID NO: 214), RKKRRQRR (SEQ ID NO: 215); YARAAARQARA (SEQ ID NO: 216); THRLPRRRRRR (SEQ ID NO: 217); and GGRRARRRRRR (SEQ ID NO: 218); a polyarginine sequence comprising a number of arginines sufficient to direct entry into a cell (e.g., 3, 4, 5, 6, 7, 8, 9, 10, or 10-50 arginines (SEQ ID NO: 219)); a VP22 domain (Zender et al. (2002) Cancer Gene Ther. 9(6):489-96); an Drosophila antennapedia protein transduction domain (Noguchi et al. (2003) Diabetes 52(7): 1732-1737); a truncated human calcitonin peptide (Trehin et al. (2004) Pharm. Research 21:1248-1256); polylysine (Wender et al. (2000) Proc. Natl. Acad. Sci. USA 97: 13003-13008); RRQRRTSKLMKR (SEQ ID NO: 220); Transportan GWTLNSAGYLLGKINLKALAALAKKIL (SEQ ID NO: 221); KALAWEAKLAKALAKALAKHLAKALAKALKCEA (SEQ ID NO: 222); and RQIKIWFQNRRMKWKK (SEQ ID NO: 223). In some embodiments, the PTD is an activatable CPP (ACPP) (Aguilera et al. (2009) Integr Biol (Camb) June; 1(5-6): 371-381). ACPPs comprise a polycationic CPP (e.g., Arg9 or “R9”) connected via a cleavable linker to a matching polyanion (e.g., Glu9 or “E9”), which reduces the net charge to nearly zero and thereby inhibits adhesion and uptake into cells. Upon cleavage of the linker, the polyanion is released, locally unmasking the polyarginine and its inherent adhesiveness, thus “activating” the ACPP to traverse the membrane.

[0333] In some embodiments, a reference or CasX variant fusion protein can include a CasX protein that is linked to an internally inserted heterologous amino acid or heterologous polypeptide (a heterologous amino acid sequence) via a linker polypeptide (e.g., one or more linker polypeptides). In some embodiments, a reference or CasX variant fusion protein can be linked at the C-terminal and/or N-terminal end to a heterologous polypeptide (fusion partner) via a linker polypeptide (e.g., one or more linker polypeptides) The linker polypeptide may have any of a variety of amino acid sequences. Proteins can be joined by a spacer peptide, generally of a flexible nature, although other chemical linkages are not excluded. Suitable linkers include polypeptides of between 4 amino acids and 40 amino acids in length, or between 4 amino acids and 25 amino acids in length. These linkers are generally produced by using synthetic, linker-encoding oligonucleotides to couple the proteins. Peptide linkers with a degree of flexibility can be used. The linking peptides may have virtually any amino acid sequence, bearing in mind that the preferred linkers will have a sequence that results in a generally flexible peptide. The use of small amino acids, such as glycine and alanine, are of use in creating a flexible peptide. The creation of such sequences is routine to those of skill in the art. A variety of different linkers are commercially available and are considered suitable for use. Example linker polypeptides include glycine polymers (G)n, glycine-serine polymer (including, for example, (GS)n, GSGGSn (SEQ ID NO: 224), GGSGGSn (SEQ ID NO: 225), and GGGSn (SEQ ID NO: 226), where n is an integer of at least one), glycine-alanine polymers, alanine-serine polymers, glycine-proline polymers, proline polymers and proline-alanine polymers. Example linkers can comprise amino acid sequences including, but not limited to, GGSG (SEQ ID NO: 227), GGSGG (SEQ ID NO: 228), GSGSG (SEQ ID NO: 229), GSGGG (SEQ ID NO: 230), GGGSG (SEQ ID NO: 231), GSSSG (SEQ ID NO: 232), GPGP (SEQ ID NO: 233), GGP, PPP, PPAPPA (SEQ ID NO: 234), PPPGPPP (SEQ ID NO: 235) and the like. The ordinarily skilled artisan will recognize that design of a peptide conjugated to any elements described above can include linkers that are all or partially flexible, such that the linker can include a flexible linker as well as one or more portions that confer less flexible structure.

### V. Systems and Methods for Modification of RHO Nucleic Acids

[0334] The CRISPR proteins, guide nucleic acids, and variants thereof provided herein are useful for various applications, including as therapeutics, diagnostics, and for research. To effect the methods of the disclosure for gene editing, resulting in modification of the RHO gene, provided herein are programmable Class 2, Type V CRISPR systems. The programmable nature of the systems provided herein allows for the precise targeting to achieve the desired effect at one or more regions of predetermined interest in the target nucleic acid sequence of the RHO gene. A variety of strategies and methods can be employed to modify the target nucleic acid sequence in a cell using the systems provided herein. As used herein “modifying” includes, but is not limited to, cleaving, nicking, editing, deleting, knocking out, knocking down, mutating, correcting, exon-skipping and the like. Depending on the system components utilized, the editing event may be a cleavage event followed by introducing random insertions or deletions (indels) or other mutations (e.g., a substitution, duplication, or inversion of one or more nucleotides), for example by utilizing the imprecise non-homologous DNA end joining (NHEJ) repair pathway, which may generate, for example, a frame shift mutation. Alternatively, the editing event may be a cleavage event followed by homology-directed repair (HDR), homology-independent targeted integration (HITI), micro-homology mediated end joining (MMEJ), single strand annealing (SSA) or base excision repair (BER), resulting in modification of the target nucleic acid sequence.

[0335] In some embodiments, the present disclosure provides methods for the modification of RHO target nucleic acid in a cell having one or more mutations wherein the target nucleic acid is modified to correct or compensate for the one or more mutations such that wild-type rhodopsin (SEQ ID NO:33 or 34) or a functional rhodopsin protein is expressed. In other embodiments, the present disclosure provides methods for the modification of RHO target nucleic acid in a cell having one or more mutations wherein the target nucleic acid is modified to knock-down or knock-out the RHO gene such that expression of the mutant rhodopsin is reduced or eliminated. Non-limiting examples of known mutations of rhodopsin (SEQ ID NO:33) contemplated for modification using the methods and systems of the disclosure are presented in Table 4A.

TABLE 4A
Mutations of rhodopsin relative
to SEQ ID NO: 33

| Amino Acid Mutations | Functional Features |
|---|---|
| L328P, T342M, | Post-Golgi |
| Q344R/P/ter, | trafficking |
| V345L/M, A346P, | and OS targeting |
| P347A/R/Q/L/S/T, | |
| Ter349/Q/E | |
| N15S, T17M, V20G, | Misfolding, |
| P23A/H/L, Q28H, | ER retention |
| G51R/V, P53R, | and instability |
| T58R/M, V87D, | |
| G89D, G106R/W, | |
| C110F/R/S/Y, | |
| E113K, L125R, | |
| W161R, A164E/V, | |
| C167R/W, P171Q/L/S, | |
| Y178N/D/C, E181K, | |
| G182S/V, C185R, | |
| C187G/Y, G188R/E, | |
| D190N/G/Y, H211R/P, | |
| C222R, P267R/L, | |
| S270R, K296N/E/M | |
| R135G/L/P/W | Disrupted vesicular |
| | traffic and |
| | endocytosis |
| T4K, T17M, M39R, | Altered post- |
| N55K, G90V | translational |
| | modifications and |
| | reduced stability |
| M44T, V137M | Altered transducin |
| | activation |
| G90D, T94I, | Constitutive |
| A292E, A295V | activation |
| F45L, V209M, | Dimerization |
| F220C | deficiency |
| P12R, R21C, | No observed |
| Q28H, L40R, | biochemical |
| L46R, L47R, | or cellular |
| F52Y, F56Y, L57R, | defect or |
| Y60ter, Q64ter, | not studied |
| R69H, N78I, L79P, | in detail |
| V87L, L88P, T92I, | |
| T97I, V104F, G109R, | |
| G114D/V, E122G, | |
| W126L/ter, S127F, | |
| L131P, Y136ter, | |
| CMOS, T160T, M163T, | |
| A169P, P170H/R, | |
| S176F, P180A/S, | |
| Q184P, S186P/W, | |
| Y191C, T193M, | |
| M207R/K, V210F, | |
| I214N, P215L/T, | |
| M216R/L/K, R252P, | |
| T289P, S297R, A298D, | |
| K311E, N315ter, | |
| E341K, S343C | |

[0336] Table 4B sets forth targeting sequences specific to Rho mutants. The ClinVar designation (www.ncbi.nlm.nih.gov/clinvar/) is shown in the left hand column.

TABLE 4B
Targeting sequences directed to RHO mutants

| | | SEQ |
|---|---|---|
| ClinVar | | ID |
| Designation | Sequence | NO: |
| VCV000013013 | AAGUGGCUGCGUACCACACC | 382 |
| VCV000013014 | UAGGCAGGUCUUAGGCCAGG | 383 |
| VCV000013014 | UAGGCCAGGGCCACCUGGCU | 384 |
| VCV000013015 | UAGGCCGAGGCCACCUGGCU | 385 |
| VCV000013015 | GCCUAAGACCUGCCUAGGAC | 386 |
| VCV000013016 | ACUUCCUCAGGCUCUACGUC | 387 |
| VCV000013016 | GGCUCUACGUCACCGUCCAG | 388 |
| VCV000013016 | CCAUCAACUUCCUCAGGCUC | 389 |
| VCV000013016 | UCAGGCUCUACGUCACCGUC | 390 |
| VCV000013018 | CCAAUGCGAUGGGUGUGGUA | 391 |
| VCV000013018 | AAUGCGAUGGGUGUGGUACG | 392 |
| VCV000013019 | GCAGAAGCAUGUAGGCGGCC | 393 |
| VCV000013020 | UGGACCUAGGUGGCUUCACC | 394 |
| VCV000013020 | UCAUGGACCUAGGUGGCUUC | 395 |
| VCV000013020 | AUGAAGAGGUCAGCCACGGC | 396 |
| VCV000013021 | UCAUGGUCCUAGAUGGCUUC | 397 |
| VCV000013021 | UAGAUGGCUUCACCAGCACC | 398 |
| VCV000013021 | UGGUCCUAGAUGGCUUCACC | 399 |
| VCV000013021 | AGGACCAUGAAGAGGUCAGC | 400 |
| VCV000013022 | UCUUCUGGCCCACAGGAUGC | 401 |
| VCV000013022 | UGUGGGCCAGAAGACGAAGU | 402 |
| VCV000013022 | UCUGGCCCACAGGAUGCAAU | 403 |
| VCV000013023 | UGUGGAAUCAACUACUACAC | 404 |
| VCV000013024 | UGGCCAUCGAGCUGUACGUG | 405 |
| VCV000013024 | AGCUGUACGUGGUGGUGUGU | 406 |
| VCV000013025 | GGGAUGCACCUGAGGACAGG | 407 |
| VCV000013025 | UCAGGUGCAUCCCCGAGGGC | 408 |
| VCV000013025 | GGUGCAUCCCCGAGGGCCUG | 409 |
| VCV000013026 | UGUGGAAUCGGCUACUACAC | 410 |
| VCV000013026 | GCUACUACACGCUCAAGCCG | 411 |
| VCV000013027 | CCUUCACCAUCCCCAUGAUU | 412 |
| VCV000013027 | ACAUGUUCGUGGUCCCCUUC | 413 |
| VCV000013027 | UGGUCCCCUUCACCAUCCCC | 414 |
| VCV000013027 | UGGGGAUGGUGAAGGGGACC | 415 |
| VCV000013028 | UGGCCAUCGAGUGGUACGUG | 416 |
| VCV000013028 | AGUGGUACGUGGUGGUGUGU | 417 |
| VCV000013029 | AAGACGGAGACGAGCUAGGU | 418 |
| VCV000013029 | UAGGCCGGGGCCACCUAGCU | 419 |
| VCV000013030 | CAGCGUUCUUUGCCGAGAGC | 420 |
| VCV000013030 | GCAAAGAACGCUGGGAUGGU | 421 |
| VCV000013030 | CGGCAAAGAACGCUGGGAUG | 422 |
| VCV000013030 | UUGCCGAGAGCGCCGCCAUC | 423 |
| VCV000013032 | UAGGCCCGGGCCACCUGGCU | 424 |
| VCV000013032 | UAGGCAGGUCUUAGGCCCGG | 425 |
| VCV000013033 | CCGAGAGCCUGCAGUGCUCG | 426 |
| VCV000013033 | ACACGAGCACUGCAGGCUCU | 427 |
| VCV000013033 | UCAGGUACAUCCCCGAGAGC | 428 |
| VCV000013033 | CGGGGAUGUACCUGAGGACA | 429 |
| VCV000013033 | GGUACAUCCCCGAGAGCCUG | 430 |
| VCV000013034 | GCUGGGUGCUCUACGCCAGC | 431 |
| VCV000013034 | UGAUCUGCUGGGUGCUCUAC | 432 |
| VCV000013034 | ACGCCAGCGUGGCAUUCUAC | 433 |
| VCV000013035 | AAAUUGUAUCCUGUGGGCCC | 434 |
| VCV000013035 | UCGGGCCCACAGGAUACAAU | 435 |
| VCV000013035 | GGCCCACAGGAUACAAUUUG | 436 |
| VCV000013037 | UGCUGGGCUUCCGCAUCAAC | 437 |
| VCV000013037 | GCAUCAACUUCCUCACGCUC | 438 |
| VCV000013038 | UCAGGCCCACAGGAUGCAAU | 439 |
| VCV000013038 | UCUUCAGGCCCACAGGAUGC | 440 |
| VCV000013038 | UGUGGGCCUGAAGACGAAGU | 441 |
| VCV000013040 | UGUGGAAUCUACUACUACAC | 442 |
| VCV000013042 | ACGUGCCCUUCUCCAGUGCG | 443 |
| VCV000013042 | CACUGGAGAAGGGCACGUAG | 444 |
| VCV000013042 | CCAGUGCGACGGGUGUGGUA | 445 |
| VCV000013042 | AGUGCGACGGGUGUGGUACG | 446 |
| VCV000013043 | ACAGGUUCGUGGUCCACUUC | 447 |
| VCV000013043 | UCUACAGGUUCGUGGUCCAC | 448 |
| VCV000013043 | UUUGUCAUCUACAGGUUCGU | 449 |
| VCV000013044 | UGACCAUCCCAGAGUUCUUU | 450 |
| VCV000013044 | GGGAUGGUCAUGAAGAUGGG | 451 |
| VCV000013044 | UGGCAAAGAACUCUGGGAUG | 452 |
| VCV000013044 | CAGAGUUCUUUGCCAAGAGC | 453 |
| VCV000013044 | UCAUGACCAUCCCAGAGUUC | 454 |
| VCV000013045 | CCUAGGACCAUGAAGAGGUC | 455 |
| VCV000013045 | UAGGUGACUUCACCAGCACC | 456 |
| VCV000013045 | UCAUGGUCCUAGGUGACUUC | 457 |
| VCV000013045 | UGGUCCUAGGUGACUUCACC | 458 |
| VCV000013046 | GCUUCGGGAAGAACCAUGCC | 459 |
| VCV000013046 | CGAAGCGGAAGUUGCUCAUG | 460 |
| VCV000013046 | UCCCGAAGCGGAAGUUGCUC | 461 |
| VCV000013046 | GGAAGAACCAUGCCAUCAUG | 462 |
| VCV000013047 | UGCUGCGCUUCCCCAUCAAC | 463 |
| VCV000013047 | GCUGAUCGUGCUGCGCUUCC | 464 |
| VCV000013048 | UCCAAAUUGCAUCCUGUGGG | 465 |
| VCV000013049 | AUGACCCAGGUGAAGGCAAC | 466 |
| VCV000013049 | UGGAGCUGGCCUGCGCCGCA | 467 |
| VCV000013049 | CCUGGGUCAUGGAGCUGGCC | 468 |
| VCV000013050 | CUCGCCGGCUGGUCCAGGUA | 469 |
| VCV000013051 | UGAUCUGGGUGCCCUACGCC | 470 |
| VCV000013051 | CUUUCCUGAUCUGGGUGCCC | 471 |
| VCV000013051 | UCGCUUUCCUGAUCUGGGUG | 472 |
| VCV000013051 | GGGUGCCCUACGCCAGCGUG | 473 |
| VCV000013052 | UAGGCCGGGGCCAGCUGGCU | 474 |
| VCV000013053 | UAGGCCUGGGCCACCUGGCU | 475 |
| VCV000013053 | UAGGCAGGUCUUAGGCCUGG | 476 |
| VCV000013054 | CCAGCAUCCUCUACACCUCU | 477 |
| VCV000013054 | UCUACACCUCUCUGCAUGGA | 478 |
| VCV000013055 | AAGGCGCUGCGUACCACACC | 479 |
| VCV000013056 | GGCUCGUCUCCGUCUUGGAC | 480 |
| VCV000013056 | UAGGCCGGGGCCAUCUGGCU | 481 |
| VCV000029875 | CCUAGGUCAUGGCGCUGGCC | 482 |
| VCVOOO143079 | ACUUCCUCACGCUCUAAGUC | 483 |
| VCV000143079 | CGCUCUAAGUCACCGUCCAG | 484 |
| VCVOOO143079 | AAGUCACCGUCCAGCACAAG | 485 |
| VCV000143079 | UGUGCUGGACGGUGACUUAG | 486 |
| VCV000143079 | UCACGCUCUAAGUCACCGUC | 487 |
| VCV000143080 | CCAGCUGGUCCAGGUAAUGG | 488 |
| VCV000143081 | AUUCUACACGAGCACUGCAG | 489 |
| VCV000143081 | UGUAGAAUCGACUACUACAC | 490 |
| VCV000143083 | UCACCCAGUUCUUGCCGCAG | 491 |
| VCV000143083 | GCUGCGGCAAGAACUGGGUG | 492 |
| VCV000143083 | CCCAGUUCUUGCCGCAGCAG | 493 |
| VCV000143083 | UCGUCACCCAGUUCUUGCCG | 494 |
| VCVOOO196282 | GGUACAUCCCCAAGGGCCUG | 495 |
| VCV000196282 | UCAGGUACAUCCCCAAGGGC | 496 |
| VCVOOO196282 | CCAAGGGCCUGCAGUGCUCG | 497 |
| VCV000279882 | AGCUUUACGUGGUGGUGUGU | 498 |
| VCV000279882 | UGGCCAUCGAGCUUUACGUG | 499 |
| VCV000373094 | UUGCCACCCUGGCGGUAUGA | 500 |
| VCV000373094 | UACCGCCAGGGUGGCAAAGA | 501 |
| VCV000381626 | UGGUCCCAGGUGGCUUCACC | 502 |
| VCV000381626 | UCAUGGUCCCAGGUGGCUUC | 503 |
| VCV000381626 | CAGGUGGCUUCACCAGCACC | 504 |
| VCV000417867 | CCUGGGUCAUGGUGCUGGCC | 505 |
| VCV000417867 | UGGUGCUGGCCUGCGCCGCA | 506 |
| VCV000419250 | GGAACGCAUGCUCACCACCA | 507 |
| VCV000419250 | AGUUCCGGAACGCAUGCUCA | 508 |
| VCV000437998 | GCCAGGUAGUACCGUGGGUA | 509 |
| VCV000437998 | AGUACCCACGGUACUACCUG | 510 |
| VCV000493373 | CGGCCAUCGAGCGGUACGUG | 511 |
| VCV000493373 | AUGGCCGGGACCACCAAGGA | 512 |
| VCV000493373 | UUGGUGGUCCCGGCCAUCGA | 513 |
| VCV000523376 | UUGCCAAGAGGGCCGCCAUC | 514 |
| VCV000590911 | ACACGAGCACUGCCAGGCCC | 515 |
| VCV000590911 | CCGAGGGCCUGGCAGUGCUC | 516 |
| VCV000625297 | AAUGCGACGGAUGUGGUACG | 517 |
| VCV000625297 | CCAAUGCGACGGAUGUGGUA | 518 |
| VCV000625297 | GUCGCAUUGGAGAAGGGCAC | 519 |
| VCV000625301 | ACACCUCUCUGCAUGUAUAC | 520 |
| VCV000625301 | CUGCAUGUAUACUUCGUCUU | 521 |
| VCV000625301 | GCAUGUAUACUUCGUCUUCG | 522 |
| VCV000625303 | GUGAUGUACCUGAGGACAGG | 523 |
| VCV000625303 | GGUACAUCACCGAGGGCCUG | 524 |
| VCV000625303 | UCAGGUACAUCACCGAGGGC | 525 |
| VCV000635082 | UGGCCAUCGAGCGGUAAGUG | 526 |
| VCV000635082 | AGCGGUAAGUGGUGGUGUGU | 527 |
| VCV000635416 | UCGGGCCCACAGGAGGCAAU | 528 |
| VCV000635416 | AAAUUGCCUCCUGUGGGCCC | 529 |
| VCV000635416 | UCUUCGGGCCCACAGGAGGC | 530 |
| VCV000635416 | GGCCCACAGGAGGCAAUUUG | 531 |
| VCV000636081 | UAGGCCGGGGCCAACUGGCU | 532 |
| VCV000636082 | AGCACAAGAAGCGGCGCACG | 533 |
| VCV000636083 | UGGUCCUACGUGGCUUCACC | 534 |
| VCV000636083 | UCAUGGUCCUACGUGGCUUC | 535 |
| VCV000636083 | UACGUGGCUUCACCAGCACC | 536 |
| VCV000636084 | GGCGUAGGGCACCCAGCAGA | 537 |
| VCV000636085 | ACAACCGUGUCAUCUAUAUC | 538 |
| VCV000636085 | UCAUGAUAUAGAUGACACGG | 539 |
| VCV000636085 | UGAUAUAGAUGACACGGUUG | 540 |
| VCV000636086 | AUAUCAUGAUGAACAAGUAG | 541 |
| VCV000636086 | UGAUGAACAAGUAGGUGCCU | 542 |
| VCV000802004 | AAGGCGACGGGUGUGGUACG | 543 |
| VCV000802004 | CCAAGGCGACGGGUGUGGUA | 544 |
| VCV000802004 | CCUUGGAGAAGGGCACGUAG | 545 |
| VCV000802004 | ACGUGCCCUUCUCCAAGGCG | 546 |
| VCV000802005 | UGCCCACAGGAUGCAAUUUG | 547 |
| VCV000802005 | UCUUCGUGCCCACAGGAUGC | 548 |
| VCV000802005 | UCGUGCCCACAGGAUGCAAU | 549 |
| VCV000802005 | UGUGGGCACGAAGACGAAGU | 550 |
| VCV000802006 | ACACCAGCACUGCAGGCCCU | 551 |
| VCV000802006 | AUUCCACACCAGCACUGCAG | 552 |
| VCV000802007 | AGCCUCUUGCCUUCCUGUUC | 553 |
| VCV000802007 | GGAACAGGAAGGCAAGAGGC | 554 |
| VCV000802007 | UGUUCCGGAACUGGAUGCUC | 555 |
| VCV000802007 | UGCCUUCCUGUUCCGGAACU | 556 |
| VCV000802008 | UAGGCCGGGGCCGCCUGGCU | 557 |
| VCV000810718 | CCCAGUGUUCUUGCCGCAGC | 558 |
| VCV000810718 | GCUGCGGCAAGAACACUGGG | 559 |
| VCV000810718 | UCGUCACCCAGUGUUCUUGC | 560 |
| VCV000810718 | UCACCCAGUGUUCUUGCCGC | 561 |
| VCV000811432 | UGUGAAAUCGACUACUACAC | 562 |
| VCV000811432 | AUUUCACACGAGCACUGCAG | 563 |
| VCV000811432 | CACGAGCACUGCAGGCCCUC | 564 |
| VCV000812395 | UGGCGCUGGUCUGCGCCGCA | 565 |
| VCV000812395 | GCGCCGCACCCCCACUCGCC | 566 |
| VCV000812396 | GGCUUGAGCGUGUAGUAGUC | 567 |
| VCV000812396 | CUGCAGUGCUCGUGUGGAAU | 568 |
| VCV000812396 | UUGUUGACCUCCGGCUUGAG | 569 |
| VCV000812396 | ACACGAGCACUGCAGUGAAG | 570 |
| VCV000812396 | ACUUCACUGCAGUGCUCGUG | 571 |
| VCV000812396 | ACUACUACACGCUCAAGCCG | 572 |
| VCV000812396 | UGGUCCACUUCACUGCAGUG | 573 |
| VCV000812396 | AGCCGGAGGUCAACAACGAG | 574 |
| VCV000812396 | UCUACAUGUUCGUGGUCCAC | 575 |
| VCV000812396 | ACAACGAGUCUUUUGUCAUC | 576 |
| VCV000812396 | ACAUGUUCGUGGUCCACUUC | 577 |
| VCV000812396 | UGUGGAAUCGACUACUACAC | 578 |
| VCV000812396 | UUUGUCAUCUACAUGUUCGU | 579 |
| VCV000812397 | UAUGGAAUCGACUACUACAC | 580 |
| VCV000812397 | AUUCCAUACGAGCACUGCAG | 581 |
| VCV000812397 | AUACGAGCACUGCAGGCCCU | 582 |

[0337] Additional targeting sequences to the RHO locus are set forth in Table 4C. Targeting sequences in Table 4C are specific to ATC, TTC, CTC and GTC PAM sites, as indicated in the Table.

TABLE 4C
Additional Rho targeting sequences

| PAM | |
|---|---|
| Sequence | Targeting Sequence SEQ ID NO |
| ATCN | 583-2100, 2286-5554 |
| TTCN | 370-371, 373-376, 19918-27274 |
| CTCN | 367-369, 372, 10487-19917 |
| GTCN | 5555-10486 |

[0338] In some embodiments, the disclosure provides methods of modifying a RHO target nucleic acid in a cell, the method comprising introducing into the cell a Class 2, Type V CRISPR system. In some embodiments, the disclosure provides methods of modifying a RHO target nucleic acid in a cell, the method comprising introducing into the cell: i) a CasX:gNA system comprising a CasX and a gNA of any one of the embodiments described herein; ii) a CasX:gNA system comprising a CasX, a gNA, and a donor template of any one of the embodiments described herein; iii) one or more nucleic acids encoding the CasX and the gNA, and optionally comprising the donor template; iv) a vector comprising the nucleic acid of (iii), above; v) a VLP comprising the CasX:gNA system of any one of the embodiments described herein; or vi) combinations of two or more of (i) to (v), wherein the target nucleic acid sequence of the cells is modified by the CasX protein and, optionally, the donor template. In some embodiments, the disclosure provides CasX:gNA systems for use in the methods of modifying the RHO gene in a cell, wherein the system comprises a CasX variant of SEQ ID NOs: 49-160, 237-239, 243-246, 251-263 or 273-281 as set forth in Tables 3, 6, 7, 8, or 10, or a variant sequence at least 60% identical, at least 70% identical, at least 80% identical, at least 81% identical, at least 82% identical, at least 83% identical, at least 84% identical, at least 85% identical, at least 86% identical, at least 86% identical, at least 87% identical, at least 88% identical, at least 89% identical, at least 89% identical, at least 90% identical, at least 91% identical, at least 92% identical, at least 93% identical, at least 94% identical, at least 95% identical, at least 96% identical, at least 97% identical, at least 98% identical, at least 99% identical, or at least 99.5% identical thereto, the gNA scaffold comprises a sequence of SEQ ID NOS: 2101-2285 as set forth in Table 2 or a sequence at least 65% identical, at least 70% identical, at least 75% identical, at least 80% identical, at least 81% identical, at least 82% identical, at least 83% identical, at least 84% identical, at least 85% identical, at least 86% identical, at least 86% identical, at least 87% identical, at least 88% identical, at least 89% identical, at least 89% identical, at least 90% identical, at least 91% identical, at least 92% identical, at least 93% identical, at least 94% identical, at least 95% identical, at least 96% identical, at least 97% identical, at least 98% identical, at least 99% identical, at least 99.5% identical thereto, and the gNA comprises a targeting sequence selected from the group consisting of SEQ ID NOS: 328-346, 367-376, 382-2100 and 2286-27274 or a sequence at least 65% identical, at least 70% identical, at least 75% identical, at least 80% identical, at least 85% identical, at least 90% identical, or at least 95% identical thereto, and having between 15 and 30 amino acids. In some embodiments, the disclosure provides CasX:gNA systems for use in the methods of modifying the RHO gene in a cell, wherein the system comprises a CasX variant of SEQ ID NOs: 49-160, 237-239, 243-246, 251-263 or 273-281 as set forth in Tables 3, 6, 7, 8, or 10, or a variant sequence at least 60% identical, at least 70% identical, at least 80% identical, at least 81% identical, at least 82% identical, at least 83% identical, at least 84% identical, at least 85% identical, at least 86% identical, at least 86% identical, at least 87% identical, at least 88% identical, at least 89% identical, at least 89% identical, at least 90% identical, at least 91% identical, at least 92% identical, at least 93% identical, at least 94% identical, at least 95% identical, at least 96% identical, at least 97% identical, at least 98% identical, at least 99% identical, or at least 99.5% identical thereto, the gNA scaffold comprises a sequence of SEQ ID NOS: 2101-2285 as set forth in Table 2 or a sequence at least 65% identical, at least 70% identical, at least 75% identical, at least 80% identical, at least 81% identical, at least 82% identical, at least 83% identical, at least 84% identical, at least 85% identical, at least 86% identical, at least 86% identical, at least 87% identical, at least 88% identical, at least 89% identical, at least 89% identical, at least 90% identical, at least 91% identical, at least 92% identical, at least 93% identical, at least 94% identical, at least 95% identical, at least 96% identical, at least 97% identical, at least 98% identical, at least 99% identical, at least 99.5% identical thereto, and the gNA comprises a targeting sequence selected from the group consisting of SEQ ID NOS: 382-582, or a sequence at least 65% identical, at least 70% identical, at least 75% identical, at least 80% identical, at least 85% identical, at least 90% identical, or at least 95% identical thereto, and having between 15 and 30 amino acids.

[0339] In those cases where the CasX is delivered to the cell in the protein form and the gNA is delivered in the RNA form, the CasX and gNA can be pre-complexed and delivered as an RNP. Upon hybridization with the target nucleic acid by the CasX and the gNA, the CasX introduces one or more single-strand breaks or double-strand breaks within or near the RHO gene that result in a modification of the target nucleic acid such as a permanent indel (deletion or insertion) or other mutation (a base change, inversion or rearrangement with respect to the genomic sequence) in the target nucleic acid, as described herein. In some embodiments of the method, the RHO target nucleic acid of at least 10% of the cells of the population is modified. In some cases of the foregoing, the modification results in a correction or compensation of the mutation occurs, thereby creating an edited cell such that expression of functional rhodopsin can occur. In other embodiments of the method, the modification comprises altering or suppressing expression of the rhodopsin protein comprising the mutation(s) by a knock-down or knock-out of the gene. In some embodiments, the mutation is a gain of function mutation. In other embodiments, the mutation is a loss of function mutation.

[0340] In other embodiments, the method comprises contacting the target nucleic acid sequence with a plurality of gNAs targeted to different or overlapping portions of the RHO gene wherein the CasX protein introduces multiple breaks in the target nucleic acid sequence that result in a permanent indel (deletion or insertion) or other mutation in the target nucleic acid, as described herein. In some cases for the foregoing, the method results in correction of the mutation, thereby creating an edited cell such that expression of wild-type rhodopsin can occur. In other cases of the foregoing, the method results in the knock-down or knock-out the RHO gene such that the expression of the non-functional rhodopsin is reduced or eliminated. In some embodiments of the methods, the RNP are delivered to the in vitro cell directly by electroporation, injection, nucleofection, delivery via liposomes, delivery by nanoparticles, by encapsidation in a VLP (embodiments of which are described herein), or using a protein transduction domain (PTD) conjugated to one or more components of the CasX:gNA

[0341] In some cases, the CasX:gNA system for use in the methods of modifying the RHO gene further comprises a donor template nucleic acid of any of the embodiments disclosed herein, wherein the donor template can be inserted by the homology-directed repair (HDR) or homology-independent targeted integration (HITI) repair mechanisms of the host cell. The donor template can be a short single-stranded or double-stranded oligonucleotide, or a long single-stranded or double-stranded oligonucleotide. The donor template may contain one or more single base changes, insertions, deletions, inversions or rearrangements with respect to the genomic sequence, provided that there is sufficient homology with the target nucleic acid sequence to support its integration into the target nucleic acid, which can result in a frame-shift or other mutation, or a replacement of the mutated sequence with wild-type sequence, with a corresponding correction of the mutation such that expression of wild-type or functional rhodopsin can occur. In some embodiments, the donor template sequence comprises a non-homologous sequence flanked by two regions of homology 5′ and 3′ to the break sites of the target nucleic acid (i.e., homologous arms), facilitating insertion of the non-homologous sequence at the target region which can be mediated by HDR or HITI. The exogenous donor template inserted by HITI can be any length, for example, a relatively short sequence of between 1 and 50 nucleotides in length, or a longer sequence of about 50-1000 nucleotides in length. The lack of homology can be, for example, having no more than 20-50% sequence identity and/or lacking in specific hybridization at low stringency. In other cases, the lack of homology can further include a criterion of having no more than 5, 6, 7, 8, or 9 bp identity. In such cases, the use of homologous arms facilitates the insertion of the non-homologous sequence at the break site(s) introduced by the nuclease. In some embodiments, the donor template polynucleotide comprises at least about 10, at least about 50, at least about 100, or at least about 200, or at least about 300, or at least about 400, or at least about 500, or at least about 600, or at least about 700, or at least about 800, or at least about 900, or at least about 1000, or at least about 10,000, or at least about 15,000 nucleotides. In other embodiments, the donor template comprises at least about 10 to about 15,000 nucleotides, or at least about 100 to about 10,000 nucleotides, or at least about 400 to about 8,000 nucleotides, or at least about 600 to about 5000 nucleotides, or at least about 1000 to about 2000 nucleotides. The donor template sequence may comprise certain sequence differences as compared to the genomic sequence; e.g., restriction sites, nucleotide polymorphisms, selectable markers (e.g., drug resistance genes, fluorescent proteins, enzymes etc.), etc., which may be used to assess for successful insertion of the donor nucleic acid at the cleavage site or in some cases may be used for other purposes (e.g., to signify expression at the targeted genomic locus). Alternatively, these sequence differences may include flanking recombination sequences such as FLPs, loxP sequences, or the like, that can be activated at a later time for removal of the marker sequence.

[0342] In some embodiments, the method of the disclosure provides CasX protein and gNA pairs that generate site-specific double strand breaks (DSBs) or single strand breaks (SSBs) (e.g., when the CasX protein is a nickase that can cleave only one strand of a target nucleic acid) within double-stranded DNA (dsDNA) target nucleic acids, which can then be repaired either by non-homologous end joining (NHEJ), homology-directed repair (HDR), homology-independent targeted integration (HITI), micro-homology mediated end joining (MMEJ), single strand annealing (SSA) or base excision repair (BER). In some cases, contacting a RHO gene with a gene editing pair occurs under conditions that are permissive for non-homologous end joining or homology-directed repair. Thus, in some cases, the methods provided herein include contacting the RHO gene with a donor template by introducing the donor template (either in vitro outside of a cell, in vitro inside a cell, in vivo inside a cell, or ex vivo), wherein the donor template, a portion of the donor template, a copy of the donor template, or a portion of a copy of the donor template integrates into the RHO gene to replace a portion of the RHO gene such that either the gene is knocked-down/knocked-out, or corrective or compensating sequence is knocked-in such that a functional rhodopsin protein can be expressed.

[0343] In some embodiments of the method of modifying a RHO target nucleic acid of a cell in vitro or ex vivo, to induce cleavage or any desired modification to a target nucleic acid, the gNA and/or the CasX protein of the present disclosure and, optionally, the donor template sequence, whether they be introduced as nucleic acids or polypeptides, vectors or VLP, are provided to the cells for about 30 minutes to about 24 hours, or at least about 1 hour, 1.5 hours, 2 hours, 2.5 hours, 3 hours, 3.5 hours 4 hours, 5 hours, 6 hours, 7 hours, 8 hours, 12 hours, 16 hours, 18 hours, 20 hours, or any other period from about 30 minutes to about 24 hours, which may be repeated with a frequency of about every day to about every 4 days; e.g., every 1.5 days, every 2 days, every 3 days, or any other frequency from about every day to about every four days. The agent(s) may be provided to the subject cells one or more times; e.g., one time, twice, three times, or more than three times, and the cells allowed to incubate with the agent(s) for some amount of time following each contacting event; e.g., 30 minutes to about 24 hours. In the case of in vitro-based methods, after the incubation period with the CasX and gNA (and optionally the donor template), the media is replaced with fresh media and the cells are cultured further. In some embodiments of the method, the cells to be modified by the methods of the disclosure are eukaryotic, which can include rodent cells, mouse cells, rat cells, primate cells, non-human primate cells, and human cells. In some embodiments, the cells are selected from the group consisting of a rod photoreceptor cell, a retinal progenitor cell, a pluripotent stem cell (iPSC), fibroblasts, and Müller glial cells. In some embodiments, the cells are autologous with respect to the subject. In other embodiments, the cells are allogenic with respect to the subject. In some embodiments of the in vitro or ex vivo method, the RHO target nucleic acid of at least 10% of the cells of the population is modified.

[0344] In some embodiments of the method of modifying a RHO target nucleic acid in a cell, the method further comprises contacting the target nucleic acid sequence of the cell with: a) an additional CRISPR nuclease and a gNA targeting a different or overlapping portion of the RHO target nucleic acid compared to the first gNA; b) a polynucleotide encoding the additional CRISPR nuclease and the gNA of (a); c) a vector comprising the polynucleotide of (b); or d) a VLP comprising the additional CRISPR nuclease and the gNA of (a), wherein the contacting results in modification of the RHO target nucleic acid at a different location in the sequence compared to the first gNA. In some cases, the additional CRISPR nuclease is a CasX protein having a sequence different from the CasX protein of any of the preceding claims. In other cases, the additional CRISPR nuclease is not a CasX protein. In other cases, the additional CRISPR nuclease is selected from the group consisting of Cas9, Cas12a, Cas12b, Cas12c, Cas12d (CasY), Cas12J, Cas13a, Cas13b, Cas13c, Cas13d, CasX, CasY, Cas14, Cpf1, C2c1, Csn2, and sequence variants thereof.

[0345] In those cases where the modification results in a knock-down of the RHO gene, expression of the non-functional rhodopsin protein is reduced by at least about 10%, at least about 20%, at least about 30%, at least about 40%, at least about 50%, at least about 60%, at least about 70%, at least about 80%, or at least about 90% in comparison to cells that have not been modified. In other cases, wherein the modification results in a knock-out of the RHO gene, the target nucleic acid of the cells of the population is modified such that at least about 10%, at least about 20%, at least about 30%, at least about 40%, at least about 50%, at least about 60%, at least about 70%, at least about 80%, or at least about 90% of the cells do not express a detectable level of non-functional rhodopsin protein. Expression of rhodopsin protein can be measured by flow cytometry, ELISA, cell-based assays, Western blot or other methods know in the art or as described in the Examples.

[0346] In other embodiments of the method of modifying a target nucleic acid sequence, modifying the RHO gene comprises binding of a CasX to the target nucleic acid sequence without cleavage. In some embodiments, the CasX is a catalytically inactive CasX (dCasX) protein that retains the ability to bind to the gNA and to the RHO target nucleic acid sequence but lacks the ability to cleave the nucleic acid sequence, thereby interfering with transcription of the RHO allele. In some embodiments, the dCasX comprises a mutation at residues D672, E769, and/or D935 corresponding to the CasX protein of SEQ ID NO:1 or D659, E756 and/or D922 corresponding to the CasX protein of SEQ ID NO: 2. In some embodiments, the mutation is a substitution of alanine or glycine for the residue.

[0347] In some embodiments, the disclosure provides methods of modifying a RHO target nucleic acid in a population of cells in vivo in a subject. In some embodiments of the method, the modified cells of the population are eukaryotic, which can include rodent cells, mouse cells, rat cells, primate cells, non-human primate cells, and human cells. In some embodiments, the cells are selected from the group consisting of a rod photoreceptor cell or a retinal progenitor cell.

[0348] Introducing recombinant expression vectors comprising the components or the nucleic acids encoding the components of the system embodiments into a target cell can be carried out in vivo, in vitro or ex vivo. In some embodiments of the method, vectors may be provided directly to a target host cell. Methods of introducing a nucleic acid (e.g., a nucleic acid comprising a donor polynucleotide sequence, one or more nucleic acids (DNA or RNA) encoding a CasX protein and/or gNA, or a vector comprising same) into a cell are known in the art, and any convenient method can be used to introduce a nucleic acid (e.g., an expression construct) into a cell. Suitable methods include e.g., viral infection, transfection, lipofection, electroporation, calcium phosphate precipitation, polyethyleneimine (PEI)-mediated transfection, DEAE-dextran mediated transfection, liposome-mediated transfection, particle gun technology, nucleofection, electroporation, direct addition by cell penetrating CasX proteins that are fused to or recruit donor DNA, cell squeezing, calcium phosphate precipitation, direct microinjection, nanoparticle-mediated nucleic acid delivery, and the like. Nucleic acids may be introduced into the cells using well-developed commercially-available transfection techniques such as use of TransMessenger reagents from Qiagen, Stemfect RNA Transfection Kit from Stemgent, and TransIT-mRNA Transfection Kit from Mirus Bio LLC, Lonza nucleofection, Maxagen electroporation and the like. Introducing recombinant expression vectors comprising sequences encoding the CasX:gNA systems (and, optionally, the donor sequences) of the disclosure into cells under in vitro conditions can occur in any suitable culture media and under any suitable culture conditions that promote the survival of the cells. For example, cells may be contacted with vectors comprising the subject nucleic acids (e.g., recombinant expression vectors having the donor template sequence and nucleic acids encoding the CasX and gNA) such that the vectors are taken up by the cells. Vectors used for providing the nucleic acids encoding gNAs and/or CasX proteins to a target host cell can include suitable promoters for driving the expression, that is, transcriptional activation of the nucleic acid of interest. In some cases, the encoding nucleic acid of interest will be operably linked to a promoter. This may include ubiquitously acting promoters, for example, the CMV-beta-actin promoter, or inducible promoters, such as promoters that are active in particular cell populations or that respond to the presence of drugs such as tetracycline or kanamycin. By transcriptional activation, it is intended that transcription will be increased above basal levels in the target host cell comprising the vector by at least about 10-fold, by at least about 100-fold, more usually by at least about 1000-fold. In addition, vectors used for providing a nucleic acid encoding a gNA and/or a CasX protein to a cell may include nucleic acid sequences that encode for selectable markers in the target cells, so as to identify cells that have taken up the CasX protein and/or the gNA.

[0349] For viral vector delivery, cells can be contacted with viral particles comprising the subject viral expression vectors and the nucleic acids encoding the CasX and gNA and, optionally, the donor template. In some embodiments, the vector is an Adeno-Associated Viral (AAV) vector, wherein the AAV is selected from AAV1, AAV2, AAV3, AAV4, AAV5, AAV6, AAV7, AAV8, AAV9, AAV10, AAV11, AAV12, AAV 44.9, AAV-Rh74, AAVRh10, or a hybrid, a derivative or variant thereof. In other embodiments, the vector is a retroviral vector, described more fully, below. In other embodiments, the vector is a lentiviral vector. Retroviruses, for example, lentiviruses, may be suitable for use in methods of the present disclosure. Commonly used retroviral vectors are “defective”; e.g., are unable to produce viral proteins required for productive infection. Rather, replication of the vector requires growth in a packaging cell line. To generate viral particles comprising nucleic acids of interest, the retroviral nucleic acids comprising the nucleic acid are packaged into viral capsids by a packaging cell line. Different packaging cell lines provide a different envelope protein (ecotropic, amphotropic or xenotropic) to be incorporated into the capsid, and this envelope protein determines the specificity or tropisms of the viral particle for the cells (ecotropic for murine and rat; amphotropic for most mammalian cell types including human, dog and mouse; and xenotropic for most mammalian cell types except murine cells). The appropriate packaging cell line may be used to ensure that the cells are targeted by the packaged viral particles. Methods of introducing subject vector expression vectors into packaging cell lines and of collecting the viral particles that are generated by the packaging lines are well known in the art, including U.S. Pat. No. 5,173,414; Tratschin et al., Mol. Cell. Biol. 5:3251-3260 (1985); Tratschin, et al., Mol. Cell. Biol. 4:2072-2081 (1984); Hermonat & Muzyczka, PNAS 81:6466-6470 (1984); and Samulski et al., J. Virol. 63:03822-3828 (1989). Nucleic acids can also be introduced by direct microinjection (e.g., injection of RNA).

### VI. Polynucleotides and Vectors

[0350] In another aspect, the present disclosure relates to polynucleotides encoding the Class 2, Type V nucleases and gNA that have utility in the editing of the RHO gene comprising one or more mutations. In some embodiments, the disclosure provides polynucleotides encoding the CasX proteins and the polynucleotides of the gNAs (e.g., the gDNAs and gRNAs) of any of the CasX:gNA system embodiments described herein. In some embodiments, the disclosure provides donor template polynucleotides for use with the CasX:gNA systems in modifying the target nucleic acid in the cells having a RHO gene comprising one or more mutations. In yet further embodiments, the disclosure provides vectors comprising polynucleotides encoding the CasX proteins and the gNAs described herein, as well as the donor templates of the embodiments.

[0351] In some embodiments, the disclosure provides polynucleotide sequences encoding the reference CasX of SEQ ID NOS: 1-3. In other embodiments, the disclosure provides polynucleotide sequences encoding the CasX variants of any of the embodiments described herein, including the CasX protein variants of SEQ ID NOS: 49-160, 237-239, 243-246, 251-263 or 273-281, or sequences having at least about 50%, at least about 60%, at least about 70%, at least about 80%, or at least about 90%, or at least about 95%, or at least about 96%, or at least about 97%, or at least about 98%, or at least about 99% sequence identity thereto.

[0352] In some embodiments, the polynucleotide encodes a gNA scaffold sequence set forth in Table 1 or Table 2, any one of SEQ ID NOS: 2101-2285, or a sequence having at least about 50%, at least about 60%, at least about 70%, at least about 80%, at least about 90%, at least about 95%, at least about 96%, at least about 97%, at least about 98%, at least about 99% sequence identity thereto. In other embodiments, the disclosure provides a targeting sequence polynucleotide selected from the group consisting of SEQ ID NOS: 328-346, 367-376, 382-2100 and 2286-27274, or a sequence having at least about 65%, at least about 75%, at least about 85%, or at least about 95% identity to a sequence selected from the group consisting of SEQ ID NOS: [328-346, 367-376, 382-2100 and 2286-27274. In other embodiments, the disclosure provides a targeting sequence polynucleotide selected from the group consisting of SEQ ID NOS: 382-582, or a sequence having at least about 65%, at least about 75%, at least about 85%, or at least about 95% identity to a sequence selected from the group consisting of SEQ ID NOS: 382-582. In some embodiments, the targeting sequence polynucleotide is, in turn, linked to the gNA scaffold sequence; either as a sgNA or a dgNA, at the 3′ end of the scaffold sequence. In other embodiments, the disclosure provides gNAs comprising targeting sequence polynucleotides having one or more single nucleotide polymorphisms (SNP) relative to a sequence selected from the group consisting of SEQ ID NOS: 328-346, 367-376, 382-2100 and 2286-27274, or SEQ ID NOS: 382-582.

[0353] The present disclosure provides isolated polynucleotide sequences encoding gNA comprising a targeting sequence that is complementary to, and therefore hybridizes with the RHO gene. In some embodiments, the polynucleotide sequence encodes a gNA comprising a targeting sequence that hybridizes with a RHO exon; e.g., any one of exons 1 to 5. In a particular embodiment, the polynucleotide sequence encodes a gNA comprising a targeting sequence that hybridizes with exon 1 of the RHO gene. In other embodiments, the polynucleotide sequence encodes a gNA comprising a targeting sequence that hybridizes with a RHO intron. In other embodiments, the polynucleotide sequence encodes a gNA comprising a targeting sequence that hybridizes with a RHO intron-exon junction. In other embodiments, the polynucleotide sequence encodes a gNA comprising a targeting sequence that hybridizes with an intergenic region of the RHO gene. In other embodiments, the polynucleotide sequence encodes a gNA comprising a targeting sequence that hybridizes with a RHO regulatory element. In some cases, the RHO regulatory element is 5′ of the RHO gene. In other cases, the RHO regulatory element is 3′ of the RHO gene. In some cases, the RHO regulatory element is in an intron of the RHO gene. In other cases, the RHO regulatory element comprises the 5′ UTR of the RHO gene. In still other cases, the RHO regulatory element comprises the 3′UTR of the RHO gene.

[0354] In other embodiments, the disclosure provides donor template nucleic acids, wherein the donor template comprises a nucleotide sequence having homology to a RHO target nucleic acid sequence. In some embodiments, the RHO donor template is intended for gene editing and comprises at least a portion of a RHO gene. In some embodiments, the RHO donor template comprises a sequence that hybridizes with the RHO gene. In other embodiments, the donor template sequence is not identical to the genomic sequence that it replaces and may contain one or more single base changes, insertions, deletions, inversions or rearrangements with respect to the genomic sequence. In some cases of the foregoing embodiment, as the donor template sequence comprises a sequence that is non-homologous relative to the target nucleic acid sequence, the donor template is flanked by two homologous arms such that homology-directed repair between the target DNA region and the two flanking arm sequences results in insertion of the donor template at the target region, resulting in the knock-in of the sequence, such that expression of functional rhodopsin can occur. In some embodiments, the RHO donor sequence comprises a sequence that encodes at least a portion of a RHO exon selected from the group consisting of RHO exons 1-5. In some embodiments, the RHO donor sequence comprises a sequence to correct a mutation of Table 4A. In a particular embodiment, the RHO donor sequence comprises a sequence to correct the P23H mutation. In other embodiments, the RHO donor sequence has a sequence that encodes at least a portion of a RHO intron. In other embodiments, the RHO donor sequence has a sequence that encodes at least a portion of with a RHO intron-exon junction. In other embodiments, the RHO donor sequence has a sequence that encodes at least a portion of an intergenic region of the RHO gene. In other embodiments, the RHO donor sequence has a sequence that encodes at least a portion of a RHO regulatory element. In some cases of the foregoing donor template embodiments, the sequence comprises one or more mutations relative to the wild-type RHO gene such that the gene is knocked-down or knocked out. In some embodiments, the donor polynucleotide comprises at least about 10, at least about 50, at least about 100, or at least about 200, or at least about 300, or at least about 400, or at least about 500, or at least about 600, or at least about 700, or at least about 800, or at least about 900, or at least about 1000, or at least about 10,000, or at least about 15,000, or at least about 30,000 nucleotides. In other embodiments, the donor polynucleotide comprises at least about 10 to about 30,000 nucleotides, or at least about 100 to about 15,000 nucleotides, or at least about 400 to about 10,000 nucleotides, or at least about 600 to about 5000 nucleotides, or at least about 1000 to about 2000 nucleotides. In some embodiments, the donor template is a single stranded DNA template or a single stranded RNA template. In other embodiments, the donor template is a double stranded DNA template.

[0355] In some embodiments, the disclosure relates to methods to produce polynucleotide sequences encoding the reference CasX, the CasX variants, or the gNA of any of the embodiments described herein, including variants thereof, as well as methods to express the proteins expressed or RNA transcribed by the polynucleotide sequences. In general, the methods include producing a polynucleotide sequence coding for the reference CasX, the CasX variants, or the gNA of any of the embodiments described herein and incorporating the encoding gene into an expression vector appropriate for a host cell. For production of the encoded reference CasX, the CasX variants, or the gNA of any of the embodiments described herein, the method includes transforming an appropriate host cell with an expression vector comprising the encoding polynucleotide, and culturing the host cell under conditions causing or permitting the resulting reference CasX, the CasX variants, or the gNA of any of the embodiments described herein to be expressed or transcribed in the transformed host cell, thereby producing the reference CasX, the CasX variants, or the gNA, which is recovered by methods described herein or by standard purification methods known in the art, including the methods of the Examples. Standard recombinant techniques in molecular biology are used to make the polynucleotides and expression vectors of the present disclosure.

[0356] In accordance with the disclosure, polynucleotide sequences that encode the reference CasX, the CasX variants, or the gNA of any of the embodiments described herein are used to generate recombinant DNA molecules that direct the expression in appropriate host cells. Several cloning strategies are suitable for performing the present disclosure, many of which are used to generate a construct that comprises a gene coding for a composition of the present disclosure, or its complement. In some embodiments, the cloning strategy is used to create a gene that encodes a construct that comprises nucleotides encoding the reference CasX, the CasX variants, or the gNA that is used to transform a host cell for expression of the composition.

[0357] In one approach, a construct is first prepared containing the DNA sequence encoding a reference CasX, a CasX variant, or a gNA. Exemplary methods for the preparation of such constructs are described in the Examples. The construct is then used to create an expression vector suitable for transforming a host cell, such as a prokaryotic or eukaryotic host cell for the expression and recovery of the polypeptide construct. Where desired, the host cell is an E. coli cell. In other embodiments, the host cell is selected from Baby Hamster Kidney fibroblast (BHK) cells, human embryonic kidney 293 (HEK293), human embryonic kidney 293T (HEK293T), NS0 cells, SP2/0 cells, YO myeloma cells, P3X63 mouse myeloma cells, PER cells, PER.C6 cells, hybridoma cells, NIH3T3 cells, CV-1 (simian) in Origin with SV40 genetic material (COS), HeLa, Chinese hamster ovary (CHO), or yeast cells, or other eukaryotic cells known in the art suitable for the production of recombinant products. Exemplary methods for the creation of expression vectors, the transformation of host cells and the expression and recovery of reference CasX, the CasX variants, or the gNA are described in the Examples.

[0358] The gene or genes encoding for the reference CasX, the CasX variants, or the gNA constructs can be made in one or more steps, either fully synthetically or by synthesis combined with enzymatic processes, such as restriction enzyme-mediated cloning, PCR and overlap extension, including methods more fully described in the Examples. The methods disclosed herein can be used, for example, to ligate sequences of polynucleotides encoding the various components (e.g., CasX and gNA) genes of a desired sequence. Genes encoding polypeptide compositions are assembled from oligonucleotides using standard techniques of gene synthesis.

[0359] In some embodiments, the nucleotide sequence encoding a CasX protein is codon optimized. This type of optimization can entail a mutation of an encoding nucleotide sequence to mimic the codon preferences of the intended host organism or cell while encoding the same CasX protein. Thus, the codons can be changed, but the encoded protein remains unchanged. For example, if the intended target cell of the CasX protein was a human cell, a human codon-optimized CasX-encoding nucleotide sequence could be used. As another non-limiting example, if the intended host cell were a mouse cell, then a mouse codon-optimized CasX-encoding nucleotide sequence could be generated. As another non-limiting example, if the intended host cell were a plant cell, then a plant codon-optimized CasX protein variant-encoding nucleotide sequence could be generated. As another non-limiting example, if the intended host cell were an insect cell, then an insect codon-optimized CasX protein-encoding nucleotide sequence could be generated. The gene design can be performed using algorithms that optimize codon usage and amino acid composition appropriate for the host cell utilized in the production of the reference CasX or the CasX variants. In one method of the disclosure, a library of polynucleotides encoding the components of the constructs is created and then assembled, as described above. The resulting genes are then assembled and the resulting genes used to transform a host cell and produce and recover the reference CasX, the CasX variants, or the gNA compositions for evaluation of its properties, as described herein.

[0360] In some embodiments, a nucleotide sequence encoding a gNA is operably linked to a control element; e.g., a transcriptional control element, such as a promoter. In some embodiments, a nucleotide sequence encoding a CasX protein is operably linked to a control element; e.g., a transcriptional control element, such as a promoter. In other cases, the nucleotide encoding the CasX and gNA are linked and are operably linked to a single control element. In some cases, the promoter is a constitutively active promoter. In some cases, the promoter is a regulatable promoter. In some cases, the promoter is an inducible promoter. In some cases, the promoter is a tissue-specific promoter. In some cases, the promoter is a cell type-specific promoter. In some cases, the transcriptional control element (e.g., the promoter) is functional in a targeted cell type or targeted cell population. For example, in some cases, the transcriptional control element can be functional in eukaryotic cells; e.g., neurons, spinal motor neurons, medium spiny neurons, cortical neurons, striatal neurons, oligodendrocytes, or glial cells.

[0361] Non-limiting examples of eukaryotic promoters (promoters functional in a eukaryotic cell) include EF1alpha, EF1alpha core promoter, those from cytomegalovirus (CMV) immediate early, herpes simplex virus (HSV) thymidine kinase, early and late SV40, long terminal repeats (LTRs) from retrovirus, and mouse metallothionein-I. Further non-limiting examples of eukaryotic promoters include the CMV promoter full-length promoter, the minimal CMV promoter, the chicken β-actin promoter, the hPGK promoter, the HSV TK promoter, the Mini-TK promoter, the human synapsin I promoter which confers neuron-specific expression, the Mecp2 promoter for selective expression in neurons, the minimal IL-2 promoter, the Rous sarcoma virus enhancer/promoter (single), the spleen focus-forming virus long terminal repeat (LTR) promoter, the SV40 promoter, the SV40 enhancer and early promoter, the TBG promoter: promoter from the human thyroxine-binding globulin gene (Liver specific), the PGK promoter, the human ubiquitin C promoter, the UCOE promoter (Promoter of HNRPA2B1-CBX3), the Histone H2 promoter, the Histone H3 promoter, the U1a1 small nuclear RNA promoter (226 nt), the U1b2 small nuclear RNA promoter (246 nt) 26, the TTR minimal enhancer/promoter, the b-kinesin promoter, the human eIF4A1 promoter, the ROSA26 promoter and the glyceraldehyde 3-phosphate dehydrogenase (GAPDH) promoter.

[0362] Selection of the appropriate vector and promoter is well within the level of ordinary skill in the art, as it related to controlling expression, e.g., for modifying a protein involved in antigen processing, antigen presentation, antigen recognition, and/or antigen response and/or its regulatory element. The expression vector may also contain a ribosome binding site for translation initiation and a transcription terminator. The expression vector may also include appropriate sequences for amplifying expression. The expression vector may also include nucleotide sequences encoding protein tags (e.g., 6×His tag, hemagglutinin tag, FLAG tag, fluorescent protein, etc.) that can be fused to the CasX protein, thus resulting in a chimeric CasX protein that are used for purification or detection.

[0363] In some embodiments, a nucleotide sequence encoding each of a gNA variant or a CasX protein is operably linked to an inducible promoter, a constitutively active promoter, a spatially restricted promoter (i.e., transcriptional control element, enhancer, tissue specific promoter, cell type specific promoter, etc.), or a temporally restricted promoter. In other embodiments, individual nucleotide sequences encoding the gNA or the CasX are linked to one of the foregoing categories of promoters, which are then introduced into the cells to be modified by conventional methods, described below.

[0364] In certain embodiments, suitable promoters can be derived from viruses and can therefore be referred to as viral promoters, or they can be derived from any organism, including prokaryotic or eukaryotic organisms. Suitable promoters can be used to drive expression by any RNA polymerase (e.g., pol I, pol II, pol III). Exemplary promoters include, but are not limited to the SV40 early promoter, mouse mammary tumor virus long terminal repeat (LTR) promoter; adenovirus major late promoter (Ad MLP); a herpes simplex virus (HSV) promoter, a cytomegalovirus (CMV) promoter such as the CMV immediate early promoter region (CMVIE), a rous sarcoma virus (RSV) promoter, a human U6 small nuclear promoter (U6), an enhanced U6 promoter, a human HI promoter (HI), a POL1 promoter, a 7SK promoter, tRNA promoters and the like.

[0365] In some embodiments, a nucleotide sequence encoding a CasX and gNA and, optionally, a donor template, is operably linked to (under the control of) an inducible promoter operable in a eukaryotic cell. Examples of inducible promoters may include, but are not limited to, T7 RNA polymerase promoter, T3 RNA polymerase promoter, isopropyl-beta-D-thiogalactopyranoside (IPTG)-regulated promoter, lactose induced promoter, heat shock promoter, tetracycline-regulated promoter, kanamycin-regulated promoter, steroid-regulated promoter, metal-regulated promoter, estrogen receptor-regulated promoter, etc. Inducible promoters can therefore, in some embodiments, be regulated by molecules including, but not limited to, doxycycline; estrogen and/or an estrogen analog; IPTG; etc. Additional examples of inducible promoters include, without limitation, chemically/biochemically-regulated and physically-regulated promoters such as alcohol-regulated promoters, kanamycin-regulated promoters, tetracycline-regulated promoters (e.g., anhydrotetracycline (aTc)-responsive promoters and other tetracycline-responsive promoter systems, which include a tetracycline repressor protein (tetR), a tetracycline operator sequence (tetO) and a tetracycline transactivator fusion protein (tTA), steroid-regulated promoters (e.g., promoters based on the rat glucocorticoid receptor, human estrogen receptor, moth ecdysone receptors, and promoters from the steroid/retinoid/thyroid receptor superfamily), metal-regulated promoters (e.g., promoters derived from metallothionein (proteins that bind and sequester metal ions) genes from yeast, mouse and human), pathogenesis-regulated promoters (e.g., induced by salicylic acid, ethylene or benzothiadiazole (BTH)), temperature/heat-inducible promoters (e.g., heat shock promoters), and light-regulated promoters (e.g., light responsive promoters from plant cells).

[0366] In some cases, the promoter is a spatially restricted promoter (i.e., cell type specific promoter, tissue specific promoter, etc.) such that in a multi-cellular organism, the promoter is active (i.e., “ON”) in a subset of specific cells. Spatially restricted promoters may also be referred to as enhancers, transcriptional control elements, control sequences, etc. Any convenient spatially restricted promoter may be used as long as the promoter is functional in the targeted host cell (e.g., eukaryotic cell; prokaryotic cell).

[0367] In some cases, the promoter is a reversible promoter. Suitable reversible promoters, including reversible inducible promoters are known in the art. Such reversible promoters may be isolated and derived from many organisms, e.g., eukaryotes and prokaryotes. Modification of reversible promoters derived from a first organism for use in a second organism, e.g., a first prokaryote and a second a eukaryote, a first eukaryote and a second a prokaryote, etc., is well known in the art. Such reversible promoters, and systems based on such reversible promoters but also comprising additional control proteins, include, but are not limited to, alcohol regulated promoters (e.g., alcohol dehydrogenase I (alcA) gene promoter, promoters responsive to alcohol transactivator proteins (AlcR, etc.), tetracycline regulated promoters, (e.g., promoter systems including Tet Activators, TetON, TetOFF, etc.), steroid regulated promoters (e.g., rat glucocorticoid receptor promoter systems, human estrogen receptor promoter systems, retinoid promoter systems, thyroid promoter systems, ecdysone promoter systems, mifepristone promoter systems, etc.), metal regulated promoters (e.g., metallothionein promoter systems, etc.), pathogenesis-related regulated promoters (e.g., salicylic acid regulated promoters, ethylene regulated promoters, benzothiadiazole regulated promoters, etc.), temperature regulated promoters (e.g., heat shock inducible promoters (e.g., HSP-70, HSP-90, soybean heat shock promoter, etc.), light regulated promoters, synthetic inducible promoters, and the like.

[0368] Recombinant expression vectors of the disclosure can also comprise elements that facilitate robust expression of CasX proteins and the gNAs of the disclosure. For example, recombinant expression vectors can include one or more of a polyadenylation signal (PolyA), an intronic sequence or a post-transcriptional regulatory element such as a woodchuck hepatitis post-transcriptional regulatory element (WPRE). Exemplary polyA sequences include hGH poly(A) signal (short), HSV TK poly(A) signal, synthetic polyadenylation signals, SV40 poly(A) signal, β-globin poly(A) signal and the like. A person of ordinary skill in the art will be able to select suitable elements to include in the recombinant expression vectors described herein.

[0369] The polynucleotides encoding the reference CasX, the CasX variants, and the gNA sequences can then be individually cloned into one or more expression vectors. In some embodiments, the present disclosure provides vectors comprising the polynucleotides selected from the group consisting of a retroviral vector, a lentiviral vector, an adenoviral vector, an adeno-associated viral (AAV) vector, a virus-like particle (VLP), a herpes simplex virus (HSV) vector, a plasmid, a minicircle, a nanoplasmid, a DNA vector, and an RNA vector. In some embodiments, the vector is a recombinant expression vector that comprises a nucleotide sequence encoding a CasX protein. In other embodiments, the disclosure provides a recombinant expression vector comprising a nucleotide sequence encoding a CasX protein and a nucleotide sequence encoding a gNA. In some cases, the nucleotide sequence encoding the CasX protein variant and/or the nucleotide sequence encoding the gNA are operably linked to a promoter that is operable in a cell type of choice. In other embodiments, the nucleotide sequence encoding the CasX protein variant and the nucleotide sequence encoding the gNA are provided in separate vectors operably linked to a promoter. In other embodiments, the vector can comprise a donor template or a polynucleotide encoding one or more CAR, engineered TCR, one or more engineered TCR subunits, or a separate vector can be utilized to introduce the donor template or the one or more CAR or engineered TCR subunits into the target cell to be modified.

[0370] In some embodiments, provided herein are one or more recombinant expression vectors comprising one or more of: (i) a nucleotide sequence of a donor template nucleic acid where the donor template comprises a nucleotide sequence having homology to a target sequence of a target nucleic acid (e.g., a target genome); (ii) a nucleotide sequence that encodes a gNA that hybridizes to a target sequence of the locus of the targeted genome (e.g., configured as a single or dual guide RNA) operably linked to a promoter that is operable in a target cell such as a eukaryotic cell; and (iii) a nucleotide sequence encoding a CasX protein operably linked to a promoter that is operable in a target cell such as a eukaryotic cell. In some embodiments, the sequences encoding the donor template, the gNA and the CasX protein are in different recombinant expression vectors, and in other embodiments one or more polynucleotide sequences (for the donor template, CasX, and the gNA) are in the same recombinant expression vector.

[0371] The polynucleotide sequence(s) are inserted into the vector by a variety of procedures. In general, DNA is inserted into an appropriate restriction endonuclease site(s) using techniques known in the art. Vector components generally include, but are not limited to, one or more of a signal sequence, an origin of replication, one or more marker genes, an enhancer element, a promoter, and a transcription termination sequence. Construction of suitable vectors containing one or more of these components employs standard ligation techniques which are known to the skilled artisan. Such techniques are well known in the art and well described in the scientific and patent literature. Various vectors are publicly available. The vector may, for example, be in the form of a plasmid, cosmid, viral particle, or phage that may conveniently be subjected to recombinant DNA procedures, and the choice of vector will often depend on the host cell into which it is to be introduced. Thus, the vector may be an autonomously replicating vector, i.e., a vector, which exists as an extrachromosomal entity, the replication of which is independent of chromosomal replication, e.g., a plasmid. Alternatively, the vector may be one which, when introduced into a host cell, is integrated into the host cell genome and replicated together with the chromosome(s) into which it has been integrated. Once introduced into a suitable host cell, expression of the protein involved in antigen processing, antigen presentation, antigen recognition, and/or antigen response can be determined using any nucleic acid or protein assay known in the art. For example, the presence of transcribed mRNA of reference CasX or the CasX variants can be detected and/or quantified by conventional hybridization assays (e.g., Northern blot analysis), amplification procedures (e.g. RT-PCR), SAGE (U.S. Pat. No. 5,695,937), and array-based technologies (see e.g., U.S. Pat. Nos. 5,405,783, 5,412,087 and 5,445,934), using probes complementary to any region of the polynucleotide.

[0372] The disclosure provides for the use of plasmid expression vectors containing replication and control sequences that are compatible with and recognized by the host cell and are operably linked to the gene encoding the polypeptide for controlled expression of the polypeptide or transcription of the RNA. Such vector sequences are well known for a variety of bacteria, yeast, and viruses. Useful expression vectors that can be used include, for example, segments of chromosomal, non-chromosomal and synthetic DNA sequences. “Expression vector” refers to a DNA construct containing a DNA sequence that is operably linked to a suitable control sequence capable of effecting the expression of the DNA encoding the polypeptide in a suitable host. The requirements are that the vectors are replicable and viable in the host cell of choice. Low- or high-copy number vectors may be used as desired. The control sequences of the vector include a promoter to effect transcription, an optional operator sequence to control such transcription, a sequence encoding suitable mRNA ribosome binding sites, and sequences that control termination of transcription and translation. The promoter may be any DNA sequence, which shows transcriptional activity in the host cell of choice and may be derived from genes encoding proteins either homologous or heterologous to the host cell.

[0373] The polynucleotides and recombinant expression vectors can be delivered to the target host cells by a variety of methods. Such methods include, but are not limited to, viral infection, transfection, lipofection, electroporation, calcium phosphate precipitation, polyethyleneimine (PEI)-mediated transfection, DEAE-dextran mediated transfection, microinjection, liposome-mediated transfection, particle gun technology, nucleofection, direct addition by cell penetrating CasX proteins that are fused to or recruit donor DNA, cell squeezing, calcium phosphate precipitation, direct microinjection, nanoparticle-mediated nucleic acid delivery, and using the commercially available TransMessenger® reagents from Qiagen, Stemfect™ RNA Transfection Kit from Stemgent, and TransIT®-mRNA Transfection Kit from Mirus Bio LLC, Lonza nucleofection, Maxagen electroporation and the like.

[0374] A recombinant expression vector sequence can be packaged into a virus or virus-like particle (also referred to herein as a “VLP” or “virion”) for subsequent infection and transformation of a cell, ex vivo, in vitro or in vivo. Such VLP or virions will typically include proteins that encapsidate or package the vector genome. Suitable expression vectors may include viral expression vectors based on vaccinia virus; poliovirus; adenovirus; a retroviral vector (e.g., Murine Leukemia Virus), spleen necrosis virus, and vectors derived from retroviruses such as Rous Sarcoma Virus, Harvey Sarcoma Virus, avian leukosis virus, retrovirus, a lentivirus, human immunodeficiency virus, myeloproliferative sarcoma virus, and mammary tumor virus; and the like.

[0375] In some embodiments, a recombinant expression vector of the present disclosure is a recombinant adeno-associated virus (AAV) vector. In a particular embodiment, a recombinant expression vector of the present disclosure is a recombinant retrovirus vector. In another particular embodiment, a recombinant expression vector of the present disclosure is a recombinant lentivirus vector.

[0376] AAV is a small (20 nm), nonpathogenic virus that is useful in treating human diseases in situations that employ a viral vector for delivery to a cell such as a eukaryotic cell, either in vivo or ex vivo for cells to be prepared for administration to a subject. A construct is generated, for example, encoding any of the CasX proteins and gNA embodiments as described herein, and optionally a donor template, and can be flanked with AAV inverted terminal repeat (ITR) sequences, thereby enabling packaging of the AAV vector into an AAV viral particle.

[0377] An “AAV” vector may refer to the naturally occurring wild-type virus itself or derivatives thereof. The term covers all subtypes, serotypes and pseudotypes, and both naturally occurring and recombinant forms, except where required otherwise. As used herein, the term “serotype” refers to an AAV which is identified by and distinguished from other AAVs based on capsid protein reactivity with defined antisera, e.g., there are many known serotypes of primate AAVs. In some embodiments, the AAV vector is selected from AAV1, AAV2, AAV3, AAV4, AAV5, AAV6, AAV7, AAV8, AAV9, AAV 10, AAV 44.9, AAV-Rh74 (Rhesus macaque-derived AAV), and AAVRh10, and modified capsids of these serotypes. For example, serotype AAV-2 is used to refer to an AAV which contains capsid proteins encoded from the cap gene of AAV-2 and a genome containing 5′ and 3′ ITR sequences from the same AAV-2 serotype. Pseudotyped AAV refers to an AAV that contains capsid proteins from one serotype and a viral genome including 5′-3′ ITRs of a second serotype. Pseudotyped rAAV would be expected to have cell surface binding properties of the capsid serotype and genetic properties consistent with the ITR serotype. Pseudotyped recombinant AAV (rAAV) are produced using standard techniques described in the art. As used herein, for example, rAAV1 may be used to refer an AAV having both capsid proteins and 5′-3′ ITRs from the same serotype or it may refer to an AAV having capsid proteins from serotype 1 and 5′-3′ ITRs from a different AAV serotype, e.g., AAV serotype 2. For each example illustrated herein the description of the vector design and production describes the serotype of the capsid and 5′-3′ ITR sequences.

[0378] An “AAV virus” or “AAV viral particle” refers to a viral particle composed of at least one AAV capsid protein (preferably by all of the capsid proteins of a wild-type AAV) and an encapsidated polynucleotide. If the particle additionally comprises a heterologous polynucleotide (i.e., a polynucleotide other than a wild-type AAV genome to be delivered to a mammalian cell), it is typically referred to as “rAAV”. An exemplary heterologous polynucleotide is a polynucleotide comprising a CasX protein and/or sgNA and, optionally, a donor template of any of the embodiments described herein.

[0379] By “adeno-associated virus inverted terminal repeats” or “AAV ITRs” is meant the art recognized regions found at each end of the AAV genome which function together in cis as origins of DNA replication and as packaging signals for the virus. AAV ITRs, together with the AAV rep coding region, provide for the efficient excision and rescue from, and integration of a nucleotide sequence interposed between two flanking ITRs into a mammalian cell genome.

[0380] The nucleotide sequences of AAV ITR regions are known. See, for example Kotin, R. M. (1994) Human Gene Therapy 5:793-801; Berns, K. I. “Parvoviridae and their Replication” in Fundamental Virology, 2nd Edition, (B. N. Fields and D. M. Knipe, eds.). As used herein, an AAV ITR need not have the wild-type nucleotide sequence depicted, but may be altered, e.g., by the insertion, deletion or substitution of nucleotides. Additionally, the AAV ITR may be derived from any of several AAV serotypes, including without limitation, AAV1, AAV2, AAV3, AAV4, AAV5, AAV6, AAV7, AAV8, AAV9, AAV10, AAV-Rh74, and AAVRh10, and modified capsids of these serotypes. Furthermore, 5′ and 3′ ITRs which flank a selected nucleotide sequence in an AAV vector need not necessarily be identical or derived from the same AAV serotype or isolate, so long as they function as intended, i.e., to allow for excision and rescue of the sequence of interest from a host cell genome or vector, and to allow integration of the heterologous sequence into the recipient cell genome when AAV Rep gene products are present in the cell. Use of AAV serotypes for integration of heterologous sequences into a host cell is known in the art (see, e.g., WO2018195555A1 and US20180258424A1, incorporated by reference herein.)

[0381] By “AAV rep coding region” is meant the region of the AAV genome which encodes the replication proteins Rep 78, Rep 68, Rep 52 and Rep 40. These Rep expression products have been shown to possess many functions, including recognition, binding and nicking of the AAV origin of DNA replication, DNA helicase activity and modulation of transcription from AAV (or other heterologous) promoters. The Rep expression products are collectively required for replicating the AAV genome.

[0382] By “AAV cap coding region” is meant the region of the AAV genome which encodes the capsid proteins VP1, VP2, and VP3, or functional homologues thereof. These Cap expression products supply the packaging functions which are collectively required for packaging the viral genome.

[0383] In some embodiments, AAV capsids utilized for delivery of the CasX, gNA, and, optionally, donor template nucleotides, to a host cell can be derived from any of several AAV serotypes, including without limitation, AAV1, AAV2, AAV3, AAV4, AAV5, AAV6, AAV7, AAV8, AAV9, AAV10, AAV11, AAV12, AAV 44.9, AAV-Rh74 (Rhesus macaque-derived AAV), and AAVRh10, and the AAV ITRs are derived from AAV serotype 1 or serotype 2. In some embodiments, the AAV vector and the regulatory sequences are selected so that the total size of the vector is below 5 kb, permitting packaging within the AAV capsid. While the AAV vector may be of any AAV serotype, nervous cell tropism varies among AAV capsid serotypes. Thus, use of AAV serotypes compatible with widespread transgene delivery to astrocytes and motoneurons is preferred. In some embodiments, the AAV vector is of serotype 9 or of serotype 6, which have been demonstrated to effectively deliver polynucleotides to motor neurons and glia throughout the spinal cord in preclinical models of ALS (Foust, K D. et al. Therapeutic AAV9-mediated suppression of mutant RHO slows disease progression and extends survival in models of inherited ALS. Mol Ther. 21(12):2148 (2013)). In some embodiments, the methods provide use of AAV9 or AAV6 for targeting of neurons via intraparenchymal brain injection. In some embodiments, the methods provide use of AAV9 for intravenous administering of the vector wherein the AAV9 has the ability to penetrate the blood-brain barrier and drive gene expression in the nervous system via both neuronal and glial tropism of the vector. In order to produce rAAV viral particles, an AAV expression vector is introduced into a suitable host cell using known techniques, such as by transfection. Packaging cells are typically used to form virus particles; such cells include HEK293 or HEK293T cells (and other cells described herein or known in the art), which package adenovirus. A number of transfection techniques are generally known in the art; see, e.g., Sambrook et al. (1989) Molecular Cloning, a laboratory manual, Cold Spring Harbor Laboratories, New York. Particularly suitable transfection methods include calcium phosphate co-precipitation, direct microinjection into cultured cells, electroporation, liposome mediated gene transfer, lipid-mediated transduction, and nucleic acid delivery using high-velocity microprojectiles.

[0384] In some embodiments, host cells transfected with the above-described AAV expression vectors are rendered capable of providing AAV helper functions in order to replicate and encapsidate the nucleotide sequences flanked by the AAV ITRs to produce rAAV viral particles. AAV helper functions are generally AAV-derived coding sequences which can be expressed to provide AAV gene products that, in turn, function in trans for productive AAV replication. AAV helper functions are used herein to complement necessary AAV functions that are missing from the AAV expression vectors. Thus, AAV helper functions include one, or both of the major AAV ORFs (open reading frames), encoding the rep and cap coding regions, or functional homologues thereof. Accessory functions can be introduced into and then expressed in host cells using methods known to those of skill in the art. Commonly, accessory functions are provided by infection of the host cells with an unrelated helper virus. In some embodiments, accessory functions are provided using an accessory function vector. Depending on the host/vector system utilized, any of a number of suitable transcription and translation control elements, including constitutive and inducible promoters, transcription enhancer elements, transcription terminators, etc., may be used in the expression vector.

[0385] In other embodiments, suitable vectors may include virus-like particles (VLP). Virus-like particles (VLPs) are particles that closely resemble viruses, but do not contain viral genetic material and are therefore non-infectious. In some embodiments, VLPs comprise a polynucleotide encoding a transgene of interest, for example any of the CasX protein and/or a gNA embodiments, and, optionally, donor template polynucleotides described herein, packaged with one or more viral structural proteins.

[0386] In other embodiments, the disclosure provides VLPs produced in vitro that comprise a CasX:gNA RNP complex and, optionally, a donor template. Combinations of structural proteins from different viruses can be used to create VLPs, including components from virus families including Parvoviridae (e.g., adeno-associated virus), Retroviridae (e.g., HIV and Alpharetrovirus), Flaviviridae (e.g., Hepatitis C virus), Paramyxoviridae (e.g., Nipah) and bacteriophages (e.g., Qβ, AP205). In some embodiments, the disclosure provides VLP systems designed using components of retrovirus, including lentiviruses such as HIV and Alpharetrovirus, in which individual plasmids comprising polynucleotides encoding the various components are introduced into a packaging cell that, in turn, produce the VLP. In some embodiments, the disclosure provides VLP comprising one or more components of i) protease, ii) a protease cleavage site, iii) one or more components of a gag polyprotein selected from matrix protein (MA), nucleocapsid protein (NC), capsid protein (CA), or p1-p6 protein, v) CasX; vi) gNA, and vi) targeting glycoproteins or antibody fragments wherein the resulting VLP particle encapsidates a CasX:gNA RNP. The targeting glycoproteins or antibody fragments on the surface that provides tropism of the VLP to the target cell, wherein upon administration and entry into the target cell, the RNP molecule is free to be transported into the nucleus of the cell. In other embodiments, the disclosure provides VLP of the foregoing and further comprises one or more components of a pol polyprotein (e.g. a protease), and, optionally, a second CasX or a donor template. The foregoing offers advantages over other vectors in the art in that viral transduction to dividing and non-dividing cells is efficient and that the VLP delivers potent and short-lived RNP that escape a subject's immune surveillance mechanisms that would otherwise detect a foreign protein. In some embodiments, a system to make VLP in a host cell comprises polynucleotides encoding one or more components selected from i) one or more components of a gag polyprotein; ii) a CasX protein of any of the embodiments described herein; iii) a protease cleavage site; iv) a protease; v) a guide RNA of any of the embodiments described herein; vi) a pol polyprotein or portions thereof (e.g., a protease); vii) a pseudotyping glycoprotein or antibody fragment that provides for binding and fusion of the VLP to a target cell; and viii) a donor template. The disclosure contemplates multiple configurations of the arrangement of the encoded components, including duplicates of some of the encoded components. The envelope glycoprotein can be derived from any enveloped viruses known in the art to confer tropism to VLP, including but not limited to the group consisting of Argentine hemorrhagic fever virus, Australian bat virus, Autographa californica multiple nucleopolyhedrovirus, Avian leukosis virus, baboon endogenous virus, Bolivian hemorrhagic fever virus, Borna disease virus, Breda virus, Bunyamwera virus, Chandipura virus, Chikungunya virus, Crimean-Congo hemorrhagic fever virus, Dengue fever virus, Duvenhage virus, Eastern equine encephalitis virus, Ebola hemorrhagic fever virus, Ebola Zaire virus, enteric adenovirus, Ephemerovirus, Epstein-Bar virus (EBV), European bat virus 1, European bat virus 2, Fug Synthetic gP Fusion, Gibbon ape leukemia virus, Hantavirus, Hendra virus, hepatitis A virus, hepatitis B virus, hepatitis C virus, hepatitis D virus, hepatitis E virus, hepatitis G Virus (GB virus C), herpes simplex virus type 1, herpes simplex virus type 2, human cytomegalovirus (HHV5), human foamy virus, human herpesvirus (HHV), human Herpesvirus 7, human herpesvirus type 6, human herpesvirus type 8, human immunodeficiency virus 1 (HV-1), human metapneumovirus, human T-lymphotro pic virus 1, influenza A, influenza B, influenza C virus, Japanese encephalitis virus, Kaposi's sarcoma-associated herpesvirus (HHV8), Kaysanur Forest disease virus, La Crosse virus, Lagos bat virus, Lassa fever virus, lymphocytic choriomeningitis virus (LCMV), Machupo virus, Marburg hemorrhagic fever virus, measles virus, Middle eastern respiratory syndrome-related coronavirus, Mokola virus, Moloney murine leukemia virus, monkey pox, mouse mammary tumor virus, mumps virus, murine gammaherpesvirus, Newcastle disease virus, Nipah virus, Nipah virus, Norwalk virus, Omsk hemorrhagic fever virus, papilloma virus, parvovirus, pseudorabies virus, Quaranfil virus, rabies virus, RD114 Endogenous Feline Retrovirus, respiratory syncytial virus (RSV), Rift Valley fever virus, Ross River virus, rRotavirus, Rous sarcoma virus, rubella virus, Sabia-associated hemorrhagic fever virus, SARS-associated coronavirus (SARS-CoV), Sendai virus, Tacaribe virus, Thogotovirus, tick-borne encephalitis causing virus, varicella zoster virus (HHV3), varicella zoster virus (HHV3), variola major virus, variola minor virus, Venezuelan equine encephalitis virus, Venezuelan hemorrhagic fever virus, vesicular stomatitis virus (VSV), VSV-G, Vesiculovirus, West Nile virus, western equine encephalitis virus, and Zika Virus. In some embodiments, the packaging cell used for the production of VLP is selected from the group consisting of HEK293 cells, Lenti-X HEK293T cells, BHK cells, HepG2 cells, Saos-2 cells, HuH7 cells, NS0 cells, SP2/0 cells, YO myeloma cells, A549 cells, P3X63 mouse myeloma cells, PER cells, PER.C6 cells, hybridoma cells, VERO cells, NIH3T3 cells, COS cells, WI38 cells, MRC5 cells, A549 cells, HeLa cells, CHO cells, or HT1080 cells.

### VII Cells

[0387] In another aspect, the present disclosure relates to a population of cells having one or more mutations in the RHO gene that has been modified by the systems and methods disclosed herein.

[0388] In some embodiments, the present disclosure provides populations of cells that have been modified to correct or compensate for the one or more mutations in the RHO gene such that wild-type rhodopsin (SEQ ID NO:33) or a functional rhodopsin protein is expressed. Cells that have been genetically modified in this way may be administered to a subject for purposes such as gene therapy; e.g., to treat a disease associated with a defect in the RHO gene. Non-limiting examples of mutations of rhodopsin contemplated for modification in populations of cells using the systems of the disclosure are presented in Table 4A. For example, patient-specific autologous induced pluripotent stem cells (iPSC), fibroblasts, or Müller glial cells can be isolated from the subject and then the target nucleic acid bearing the mutation of these iPSC cells can be edited using the CasX:gNA systems by the methods described herein. For example, the method can comprise editing within or near a P23H mutation in a RHO gene of the iPSC, then the genome-edited cells can be differentiated into cells such as photoreceptor cells or retinal progenitor cells and propagated into a population of cells that can be administered into the subject. The differentiating step may be performed according to any method known in the art. For example, iPSCs can be used to generate retinal organoids and photoreceptors as described in the art (Phillips et al., Stem Cells, June 2014, 32(6): pgs. 1480-1492; Zhong et al. Nat. Commun., 2014, 5: pg 4047; Tucker et al., PLoS One, April 2011, 6(4): e18992). In some embodiments of the foregoing, the administration is via an intraocular, intravitreal, subretinal, or suprachoroidal injection or implantation.

[0389] In some embodiments, the population of cells are modified by a Class 2, Type V Cas nuclease and one or more guides targeted to the one or more mutations of the RHO gene. In some embodiments, the disclosure provides methods and populations of cells modified by introducing into the cells of the population: i) a CasX:gNA system comprising a CasX and a gNA of any one of the embodiments described herein; ii) a CasX:gNA system comprising a CasX, a gNA, and a donor template of any one of the embodiments described herein; iii) one or more nucleic acids encoding the CasX and the gNA, and optionally comprising the donor template; iv) a vector selected from the group consisting of a retroviral vector, a lentiviral vector, an adenoviral vector, an adeno-associated viral (AAV) vector, and a herpes simplex virus (HSV) vector and comprising the nucleic acid of (iii), above; v) a VLP comprising the CasX:gNA system of any one of the embodiments described herein; or vi) combinations of two or more of (i) to (v), wherein the RHO target nucleic acid sequence of the cells targeted by the gNA is modified by the CasX protein and, optionally, the donor template.

[0390] In some embodiments, the gNA of the CasX:gNA system is targeted to a mutation in the RHO gene, including, but not limited to the mutations of Table 4A, wherein the NHEJ repair mechanisms of the cell can correct or compensate for the mutation in the cells of the population such that a functional rhodopsin protein can be expressed. In another embodiment, two or more gNA are used in the CasX:gNA system to modify the cells of the population wherein the gNA are targeted to different or overlapping portion of the RHO gene target nucleic acid. In one embodiment of the foregoing, the two or more gNA are targeted to sequences that flank (5′ and 3′ to) a portion or the entirety of the mutation. In a particular embodiment, the mutation in the cells of the population to be modified is the P23H mutation. In some cases of the foregoing, the NHEJ repair mechanisms of the cell can correct or compensate for the mutation. In some embodiments, the disclosure provides a population of cells wherein the cells have been modified such that at least 60%, at least 70%, at least 75%, at least 80%, at least 85%, at least 90%, or at least 95% of the modified cells express a detectable level of functional rhodopsin protein. In other embodiments, the disclosure provides a population of cells wherein the cells have been modified by the systems and methods of any of the embodiments described herein such that the expression of rhodopsin protein is increased by at least about 10%, at least about 20%, at least about 30%, at least about 40%, at least about 50%, at least about 60%, at least about 70%, at least about 80%, or at least about 90% in comparison to a cell where the RHO gene has not been modified. Expression of the rhodopsin protein can be determined by ELISA, Western blot, electrochemiluminescence assays or other methods know in the art, or as described in the Examples.

[0391] In some embodiments, the disclosure provides a method of preparing cells for treatment of a subject having retinitis pigmentosa comprising modifying cells having one or more mutations in the RHO gene by editing the target nucleic acid with a CasX:gNA system or by introducing into the cells a polynucleotide or vector encoding the CasX:gNA system of any of the embodiments described herein, wherein the modification results in the cells ability to produce a wild-type or a functional rhodopsin protein. In some embodiments, the cell has been modified such that expression of functional rhodopsin is increased by at least about 10%, at least about 20%, at least about 30%, at least about 40%, at least about 50%, at least about 60%, at least about 70%, at least about 80%, or at least about 90% in comparison to a cell where the RHO gene has not been modified. In other embodiments of the method, the cells have been modified such that at least about 50%, at least about 60%, at least about 70%, at least about 75%, at least about 80%, at least about 85%, at least about 90%, or at least about 95% of the modified cells express a detectable level of functional rhodopsin. Such modified cells altered in this manner are useful for therapy applications, for example for ex vivo preparation of cells for use in a subject having retinitis pigmentosa. In other embodiments, the disclosure provides compositions of cells modified to express functional rhodopsin for use as a medicament in the treatment of retinitis pigmentosa.

[0392] In some cases of the method, the cells of the population are contacted with a CasX and a gNA wherein the gNA is a guide RNA (gRNA). In other cases, the cells of the population are contacted with a CasX and a gNA wherein the gNA is a guide DNA (gDNA). In other cases, the cells of the populations are contacted with a CasX and a gNA wherein the gNA is a chimera comprising DNA and RNA. As described herein, in embodiments of any of the combinations, each of said gNA molecules (a combination of the scaffold and targeting sequence, which can be configured as a sgRNA or a dgRNA) can be provided as an RNP complexed with a CasX molecule described herein, such that the RNP can then modify the target gene. In some embodiments, the cells of the population are contacted with an RNP of a CasX comprising a sequence of SEQ ID NOs: 49-160, 237-239, 243-246, 251-263 or 273-281, or a sequence at least 65% identical, at least 70% identical, at least 75% identical, at least 80% identical, at least 81% identical, at least 82% identical, at least 83% identical, at least 84% identical, at least 85% identical, at least 86% identical, at least 86% identical, at least 87% identical, at least 88% identical, at least 89% identical, at least 89% identical, at least 90% identical, at least 91% identical, at least 92% identical, at least 93% identical, at least 94% identical, at least 95% identical, at least 96% identical, at least 97% identical, at least 98% identical, at least 99% identical, or at least 99.5% identical thereto, the gNA scaffold comprises a sequence of SEQ ID NOS: 2101-2285 or a sequence at least 65% identical, at least 70% identical, at least 75% identical, at least 80% identical, at least 81% identical, at least 82% identical, at least 83% identical, at least 84% identical, at least 85% identical, at least 86% identical, at least 86% identical, at least 87% identical, at least 88% identical, at least 89% identical, at least 89% identical, at least 90% identical, at least 91% identical, at least 92% identical, at least 93% identical, at least 94% identical, at least 95% identical, at least 96% identical, at least 97% identical, at least 98% identical, at least 99% identical, at least 99.5% identical thereto, and the gNA comprises a targeting sequence of SEQ ID NOs: 328-346, 367-376, 382-2100 and 2286-27274, or SEQ ID NOS: 382-582 or a sequence at least 65% identical, at least 70% identical, at least 75% identical, at least 80% identical, at least 85% identical, at least 90% identical, or at least 95% identical thereto and having between 15 and 30 amino acids. Upon hybridization with the target nucleic acid by the CasX and the gNA, the CasX introduces one or more single-strand breaks or double-strand breaks within the RHO gene that results in a modification of the target nucleic acid such as a permanent indel (deletion or insertion) or a mutation (e.g., substitution, duplication, or inversion) in the target nucleic acid that, in connection with the repair mechanisms of the host cell, results in a correction or a compensation of the mutation with a corresponding expression of functional rhodopsin protein, thereby creating the modified population of cells.

[0393] In some embodiments of the method, the target nucleic acid of the cells of the population is modified using a plurality of gNAs (e.g., two, three, four or more) targeted to different or overlapping portions of the RHO gene wherein the CasX protein introduces multiple breaks in the target nucleic acid sequence that result in a permanent indel (deletion or insertion) or corrective mutation (e.g., a substitution, duplication, or inversion of one or more nucleotides), or is used in conjunction with a donor template, as described, supra.

[0394] An RNP can be introduced into the cells to be modified via any suitable method, including via electroporation, injection, nucleofection, delivery via liposomes, delivery by nanoparticles, or using a protein transduction domain (PTD) conjugated to one or more components of the CasX:gNA. In other cases, the CasX and the one or more gNA are introduced into the population of cells as encoding polynucleotides using a vector; embodiments of which are described herein. Additional methods of modification of the cells using the CasX:gNA system components include viral infection, transfection, conjugation, protoplast fusion, particle gun technology, calcium phosphate precipitation, direct microinjection, and the like. The choice of method is generally dependent on the type of cell being transformed and the circumstances under which the transformation is taking place; e.g., in vitro, ex vivo, or in vivo. A general discussion of these methods can be found in Ausubel, et al, Short Protocols in Molecular Biology, 3rd ed., Wiley & Sons, 1995.

[0395] In some embodiments of the method of modify the population of cells, the method further comprises contacting the RHO gene target nucleic acid sequence of the population of cells with: i) an additional CRISPR nuclease and a gNA targeting a different or overlapping portion of the RHO target nucleic acid compared to the first gNA; ii) a polynucleotide encoding the additional CRISPR nuclease and the gNA of (i); iii) a vector selected from the group consisting of a retroviral vector, a lentiviral vector, an adenoviral vector, an adeno-associated viral (AAV) vector, a herpes simplex virus (HSV) vector and comprising the polynucleotide of (ii); or iv) a VLP comprising the additional CRISPR nuclease and the gNA of (i), wherein the contacting results in modification of the RHO gene at a different location in the sequence compared to the sequence targeted by the first gNA. In one embodiment of the foregoing, the additional CRISPR nuclease is a CasX protein having a sequence different from the CasX protein of the previous embodiments. In another embodiment of the foregoing, the additional CRISPR nuclease is not a CasX protein and is selected from the group consisting of Cas9, Cas12a, Cas12b, Cas12c, Cas12d (CasY), Cas12J, Cas13a, Cas13b, Cas13c, Cas13d, CasX, CasY, Cas14, Cpf1, C2c1, Csn2, and sequence variants thereof.

[0396] In some embodiments, the population of modified cells are animal cells; for example, derived from a rodent, rat, mouse, rabbit or dog cell. In some embodiments, the cell is a human cell. In some embodiments, the cell is a non-human primate cell; e.g., a cynomolgus monkey cell. In some embodiments, the cells are selected from the group consisting of a rod photoreceptor cell, a retinal progenitor cell, a pluripotent stem cell (iPSC), a fibroblast, and Müller glial cells.

[0397] In some embodiments of the method, the modifying of the RHO gene target nucleic acid sequence of the population of cells occurs in vitro or ex vivo. The method provides that the cells can be obtained from a unit of blood or a biopsy collected from a subject using any number of techniques known to the skilled artisan. The cells collected may be washed and filtered or centrifuged to remove the desired cells from other cells or tissue and, optionally, to place the cells in an appropriate buffer or media for subsequent processing steps. The method may include one or more steps of i) introducing into the cells the CasX:gNA system components for the editing of the target nucleic acids; ii) introducing into the cells one or more nucleic acids encoding the CasX:gNA system components to the cells; iii) expansion of the cells, and iv) cryopreservation of the cells for subsequent administration to the subject.

### VIII. Therapeutic Methods

[0398] In another aspect, the present disclosure relates to methods of treating a subject having a disease associated with mutations in the RHO gene, such as retinitis pigmentosa. In some cases, the allele related to the disease associated with mutations in the RHO gene (RHO-related disease) of the subject to be modified comprises one or more mutations, including, but not limited to the mutations presented in Table 4A. A number of therapeutic strategies have been used to design the compositions for use in the methods of treatment of a subject with a RHO-related disease. Additionally, the methods can be used to treat a subject in advance of any symptom of retinitis pigmentosa, e.g., prior to the development of loss of or changes in vision, visual acuity, nyctalopia, color vision, peripheral vision, loss of the mid-peripheral visual field, photophobia, contrast sensitivity, gaze tracking, light aversion, macular sensitivity, and depth perception. Accordingly, the prophylactic administration of a modified cell population or a therapeutically effective amount of the CasX:gNA system composition(s) or the polynucleic acids encoding the CasX:gNA systems of the embodiments can serve to prevent or reduce the progression of a RHO-related disease.

[0399] As described herein, the methods of treatment can prevent, treat and/or ameliorate a RHO-related disease of a subject. In some embodiments, the disclosure provides a method of treating a RHO-related disease in a subject in need thereof, comprising modifying a RHO gene having one or more mutations in eye cells of the subject. In some embodiments, the modifying comprises contacting said cells of one or both eyes of the subject with a therapeutically effective dose of i) a CasX:gNA system comprising a CasX and a gNA of any one of the embodiments described herein; ii) a CasX:gNA system comprising a CasX, a gNA, and a donor template of any one of the embodiments described herein; iii) one or more nucleic acids encoding the CasX and the gNA, and optionally comprising the donor template; iv) a vector selected from the group consisting of a retroviral vector, a lentiviral vector, an adenoviral vector, an adeno-associated viral (AAV) vector, and a herpes simplex virus (HSV) vector and comprising the nucleic acid of (iii), above; v) a VLP comprising the CasX:gNA system of any one of the embodiments described herein; or vi) combinations of two or more of (i) to (v), wherein the RHO target nucleic acid sequence of the cells targeted by the gNA is modified by the CasX protein and, optionally, the donor template. In some embodiments of the method, a second gNA is utilized, wherein the second gNA has a targeting sequence complementary to a different or overlapping portion of the target nucleic acid compared to the first gNA, resulting in an additional break in the RHO target nucleic acid of the cells of the subject. In some embodiments of the foregoing, the gene can be modified by the NHEJ host repair mechanisms, or the CasX:gNA system is utilized in conjunction with a donor template that is inserted by HDR or HITI mechanisms, wherein at least about 10%, at least about 20%, at least about 30%, at least about 40%, at least about 50%, at least about 60%, at least about 70%, at least about 80%, or at least about 90% of the targeted cells are modified. In some embodiments, the modification corrects or compensates for the mutation, resulting in the expression of a functional rhodopsin in the subject. In some cases, expression of a wild-type or functional rhodopsin protein is increased in the eye of a subject by at least about 10%, at least about 20%, at least about 30%, at least about 40%, at least about 50%, at least about 60%, at least about 70%, at least about 80%, or at least about 90% in comparison to a subject wherein the RHO gene of the cells has not been modified. In other embodiments of the foregoing, the gene can be modified by the NHEJ host repair mechanisms, or utilized in conjunction with a donor template that is inserted by HDR or HITI mechanisms to knock-down or knock-out the RHO gene, resulting in the reduction or elimination of the expression of the mutant rhodopsin in the cells of the subject. In some cases, expression of the mutant rhodopsin protein is decreased in the cells of the subject by at least about 10%, at least about 20%, at least about 30%, at least about 40%, at least about 50%, at least about 60%, at least about 70%, at least about 80%, or at least about 90% in comparison to cells of a subject wherein the RHO gene has not been modified. The embodiments of the paragraph are more fully detailed, below, while the methods employed in the modification of the RHO gene have been described, supra. In some embodiments of the method of treatment, the subject is selected from the group consisting of a rodent, a mouse, a rat, and a non-human primate. In other embodiments of the method of treatment, the subject is a human. In some embodiments, the eye cells of the subject to be modified are selected from the group consisting of a neuron, a rod photoreceptor cell, a retinal progenitor cell, a pluripotent stem cell (iPSC), a fibroblast, and Müller glial cell.

[0400] In some embodiments of the method of treatment, the method comprises administering to one or both eyes of the subject a therapeutically effective dose of a vector comprising or encoding the CasX protein and the gNA and, optionally, the donor template (described, supra), wherein the contacting of the cells of the subject with the vector results in modification of the target nucleic acid of the cells by the components of the CasX:gNA system. In some embodiments, the method comprises administration of the vector comprising or encoding a CasX and a plurality of gNAs targeted to different locations in the RHO gene, wherein the contacting of the cells of the subject with the CasX:gNA RNP complexes results in modification of the target nucleic acid of the cells. In one particular embodiment, the vector is an AAV. The AAV utilized can be selected from the group consisting of AAV1, AAV2, AAV3, AAV4, AAV5, AAV6, AAV7, AAV8, AAV9, AAV10, AAV11, AAV12, AAV 44.9, AAV-Rh74, and AAVRh10, or mutated variants thereof. The vector of the embodiments are administered to the subject at a therapeutically effective dose. In some embodiments, the vector is administered to the subject at a dose of at least about 1×10⁵ vector genomes (vg), at least about 1×10⁶ vg, at least about 1×10⁷ vg, at least about 1×10⁸ vg, at least about 1×10⁹ vg, at least about 1×10¹⁰ vg, at least about 1×10¹¹ vg, at least about 1×10¹² vg, at least about 1×10¹³ vg, at least about 1×10¹⁴ vg, at least about 1×10¹⁵ vg, at least about 1×10¹⁶ vg. In other embodiments, the vector is administered to the subject at a dose of at least about 1×10⁵ vg to about 1×10¹⁶ vg, or at least about 1×10⁶ vg to about 1×10¹⁵ vg, or at least about 1×10⁷ vg to about 1×10¹⁴ vg, or at least about 1×10⁸ vg to about 1×10¹³ vg, or at least about 1×10⁹ vg to about 1×10¹² vg, or at least about 1×10¹⁰ vg to about 1×10¹¹ vg. In some embodiments, the vector is administered to the subject at a dose of at least about 1×10⁵ vector genomes (vg)/kg, at least about 1×10⁶ vg/kg, at least about 1×10⁷ vg/kg, at least about 1×10⁸ vg/kg, at least about 1×10⁹ vg/kg, at least about 1×10¹⁰ vg/kg, at least about 1×10¹¹ vg/kg, at least about 1×10¹² vg/kg, at least about 1×10¹³ vg/kg, at least about 1×10¹⁴ vg/kg, at least about 1×10¹⁵ vg/kg, at least about 1×10¹⁶ vg/kg. In other embodiments, the vector is administered to the subject at a dose of at least about 1×10⁵ vg/kg to about 1×10¹⁶ vg/kg, or at least about 1×10⁶ vg/kg to about 1×10¹⁵ vg/kg, or at least about 1×10⁷ vg/kg to about 1×10¹⁴ vg/kg, or at least about 1×10⁸ vg/kg to about 1×10¹³ vg/kg, or at least about 1×10⁹ vg/kg to about 1×10¹² vg/kg, or at least about 1×10¹⁰ vg/kg to about 1×10¹¹ vg/kg.

[0401] In other cases, the vector is a VLP of any of the embodiments described herein wherein the VLP is administered to the subject at a dose of at least about 1×10⁵ particles, at least about 1×10⁶ particles, at least about 1×10⁷ particles, at least about 1×10⁸ particles, at least about 1×10⁹ particles, at least about 1×10¹⁰ particles, at least about 1×10¹¹ particles, at least about 1×10¹² particles, at least about 1×10¹³ particles, at least about 1×10¹⁴ particles, at least about 1×10¹⁵ particles, at least about 1×10⁶ particles. In still other cases, the VLP is administered to the subject at a dose of at least about 1×10⁵ particles to about 1×10¹⁶ particles, or at least about 1×10⁶ particles to about 1×10¹⁵ particles, or at least about 1×10⁷ particles to about 1×10¹⁴ particles, or at least about 1×10⁸ particles to about 1×10¹³ particles, or at least about 1×10⁹ particles to about 1×10¹² particles, or at least about 1×10¹⁰ particles to about 1×10¹¹ particles.

[0402] In other cases, the vector is a VLP of any of the embodiments described herein wherein the VLP is administered to the subject at a dose of at least about 1×10⁵ particles/kg, at least about 1×10⁶ particles/kg, at least about 1×10⁷ particles/kg, at least about 1×10⁸ particles/kg, at least about 1×10⁹ particles/kg, at least about 1×10¹⁰ particles/kg, at least about 1×10¹¹ particles/kg, at least about 1×10¹² particles/kg, at least about 1×10¹³ particles/kg, at least about 1×10¹⁴ particles/kg, at least about 1×10¹⁵ particles/kg, at least about 1×101⁶ particles/kg. In still other cases, the VLP is administered to the subject at a dose of at least about 1×10⁵ particles/kg to about 1×10¹⁶ particles/kg, or at least about 1×10⁶ particles/kg to about 1×10¹⁵ particles/kg, or at least about 1×10⁷ particles/kg to about 1×10¹⁴ particles/kg, or at least about 1×10⁸ particles/kg to about 1×10¹³ particles/kg, or at least about 1×10⁹ particles/kg to about 1×10¹² particles/kg, or at least about 1×10¹⁰ particles/kg to about 1×10¹¹ particles/kg.

[0403] The vector or VLP can be administered according to any of the treatment regimens disclosed herein, below, and are administered to one or both eyes of the subject by a route of administration selected from intraocular, intravitreal, subretinal, or suprachoroidal injection or implantation.

[0404] In some embodiments, the treatment results in the improvement of one or more clinical parameters or endpoints associated with the disease in the subject, wherein the clinical parameter or endpoint is selected from one or any combination of the group consisting of: mean change or mean rate of change in 1) best corrected visual acuity (BCVA); 2) visual field sensitivity (including analysis of hill of vision volumes); 3) retinal sensitivity measured by full-field stimulus testing (FST) 67; 4) multiluminance mobility tests; 5) electrophysiological measures of retinal function; 6) optical coherence tomography (OCT) documenting the rate of photoreceptor loss; and 7) hypo- or hyperfluorescent lesion size on fundus autofluorescence; 8) color vision; 9) contrast sensitivity; 10) gaze tracking; 11) light aversion; 12) macular sensitivity.

[0405] In other embodiments, the disclosure provides methods of treating a subject having a RHO-related disease, the method comprising administering to one or both eyes of the subject of a therapeutically effective amount of the modified population of cells of any one of the embodiments described herein, wherein the administration can produce a beneficial effect in helping to treat (e.g., reduce the severity) or prevent the progression of the disease or results in an improvement in one or more clinical parameters or endpoints associated with the disease in the subject. In the foregoing, clinical parameters or endpoints are selected from one or any combination of the group consisting of: mean change or mean rate of change in 1) best corrected visual acuity (BCVA); 2) visual field sensitivity (including analysis of hill of vision volumes); 3) retinal sensitivity measured by full-field stimulus testing (FST); 4) multiluminance mobility tests; 5) electrophysiological measures of retinal function; 6) optical coherence tomography (OCT) documenting the rate of photoreceptor loss; and 7) hypo- or hyperfluorescent lesion size on fundus autofluorescence; 8) color vision; 9) contrast sensitivity; 10) gaze tracking; 11) light aversion; 12) macular sensitivity. In the embodiments, the population of cells are modified in vitro or ex vivo by CasX:gNA system composition(s) or the nucleic acids encoding the CasX:gNA system of the embodiments described herein, supra. The cells to be modified are selected from the group consisting of a rod photoreceptor cell, a retinal progenitor cell, a pluripotent stem cell (iPSC), fibroblasts, and Müller glial cells. In some cases, the CasX and gNA is delivered to the cells of the population as an RNP (embodiments of which are described herein, supra), wherein the target nucleic acid is modified such that a wild-type or a functional rhodopsin protein is expressed. In other cases, the CasX and gNA is delivered to the cell in a vector (embodiments of which are described herein, supra), wherein the target nucleic acid is modified such that a wild-type or a functional rhodopsin protein is expressed. In some embodiments, the method of treatment comprises the administration to the subject of a population of the modified cells such that, upon administration, a wild-type or a functional rhodopsin protein is expressed. Embodiments of such populations of modified cells are described herein, supra. In some cases, the cells have been modified such that expression of a wild-type or functional rhodopsin protein is increased by at least about 10%, at least about 20%, at least about 30%, at least about 40%, at least about 50%, at least about 60%, at least about 70%, at least about 80%, or at least about 90% in comparison to a cell where the RHO gene has not been modified. In other cases, the cells have been modified such that at least about 50%, at least about 60%, at least about 70%, at least about 75%, at least about 80%, at least about 85%, at least about 90%, or at least about 95% of the modified cells express a detectable level of functional rhodopsin protein. In some embodiments, the modified cells administered to the subject, or their progeny, persist in the subject for at least one month, two month, three months, four months, five months, six months, seven months, eight months, nine months, ten months, eleven months, twelve months, thirteen months, fourteen month, fifteen months, sixteen months, seventeen months, eighteen months, nineteen months, twenty months, twenty-one months, twenty-two months, twenty-three months, two years, three years, four years, or five years after administration of the modified cells to the subject. In some embodiments of the method of treatment, the dose of total cells is within a range of between at or about 10⁴ and at or about 10⁹ cells, such as between 10⁵ and 10⁶ cells body weight, for example, at or about 1×10⁵ cells, 1.5×10⁵ cells, 2×10⁵ cells, or 1×10⁶ cells body weight. For example, in some embodiments, the cells are administered at, or within a certain range of error of, between at or about 10⁴ and at or about 10⁹ cells, such as between 10⁵ and 10⁶ cells body weight, for example, at or about 1×10⁵ cells, 1.5×10⁵ cells, 2×10⁵ cells, or 1×10⁶ cells. In some embodiments, the cells are selected from the group consisting of rodent cells, mouse cells, rat cells, and non-human primate cells. In other embodiments, the cells are human cells. In some embodiments, the cells are selected from the group consisting of a rod photoreceptor cell, a retinal progenitor cell, a pluripotent stem cell (iPSC), fibroblasts, and Müller glial cells. In one embodiment, the cells are autologous with respect to the subject to be administered the cells. In another embodiment, the cells are allogeneic with respect to the subject to be administered the cells. In some embodiments, the cells are administered to one or both eyes of the subject by a route of administration selected from intraocular, intravitreal, subretinal, or suprachoroidal injection or implantation.

[0406] In another embodiment, the invention provides a method of treatment of a subject having a RHO-related disease according to a treatment regimen comprising one or more consecutive doses using a therapeutically effective dose of a population of the modified cells. In one embodiment of the treatment regimen, the therapeutically effective dose of the cells is administered as a single dose. In another embodiment of the treatment regimen, the therapeutically effective dose of the cells is administered to the subject as two or more doses over a period of at least two weeks, or at least one month, or at least two months, or at least three months, or at least four months, or at least five months, or at least six months, or once a year, or every 2 or 3 years. In some embodiments, the dose of total cells and/or dose of individual sub-populations of cells is within a range of between at or about 10⁴ and at or about 10⁹ cells per dose, such as between 10⁵ and 10⁶ cells, for example, at or about 1×10⁵ cells, 1.5×10⁵ cells, 2×10⁵ cells, or 1×10⁶ cells per dose. For example, in some embodiments, the cells are administered at, or within a certain range of error of, between at or about 10⁴ and at or about 10⁹ cells per dose, such as between 10⁵ and 10⁶ cells, for example, at or about 1×10⁵ cells, 1.5×10⁵ cells, 2×10⁵ cells, or 1×10⁶ cells per dose. The cells can be administered to one or both eyes of the subject by a route of administration selected from intraocular, intravitreal, subretinal, or suprachoroidal injection or implantation.

[0407] In another embodiment, the invention provides a method of treatment of a subject having a RHO-related disease according to a treatment regimen comprising one or more consecutive doses using a therapeutically effective dose of a CasX:gNA system, or a polynucleotide encoding the CasX:gNA system, or a vector of any of the embodiments described herein. In one embodiment of the treatment regimen, the therapeutically effective dose is administered as a single dose. In another embodiment of the treatment regimen, the therapeutically effective dose is administered to the subject as two or more doses over a period of at least two weeks, or at least one month, or at least two months, or at least three months, or at least four months, or at least five months, or at least six months, or once a year, or every 2 or 3 years. The doses can be administered to one or both eyes of the subject by a route of administration selected from intraocular, intravitreal, subretinal, or suprachoroidal injection or implantation.

[0408] In some embodiments, the treatment regimen results in the improvement of one, two, or more clinical parameters or endpoints associated with the disease in the subject, wherein the clinical parameter or endpoint is selected from one or any combination of the group consisting of: mean change or mean rate of change in 1) best corrected visual acuity (BCVA); 2) visual field sensitivity (including analysis of hill of vision volumes); 3) retinal sensitivity measured by full-field stimulus testing (FST) 67; 4) multiluminance mobility tests; 5) electrophysiological measures of retinal function; 6) optical coherence tomography (OCT) documenting the rate of photoreceptor loss; and 7) hypo- or hyperfluorescent lesion size on fundus autofluorescence; 8) color vision; 9) contrast sensitivity; 10) gaze tracking; 11) light aversion; 12) macular sensitivity.

[0409] In some embodiments, the disclosure provides compositions comprising CasX and gNA gene editing pairs, for use as a medicament for the treatment of a subject having a neurologic disease, such as retinitis pigmentosa. In the foregoing, the CasX can be a CasX variant of SEQ ID NOs: 49-160, 237-239, 243-246, 251-263 or 273-281 and the gNA can be a gNA variant comprising a sequence of SEQ ID NOS: 2101 having a targeting sequence of SEQ ID NOs: SEQ ID NOs: 49-160, 237-239, 243-246, 251-263 or 273-281, or SEQ ID NOS: 382-582. In other embodiments, the disclosure provides compositions of vectors comprising or encoding the gene editing pairs of CasX and gNA for use as a medicament for the treatment of a subject having a disease, such as retinitis pigmentosa.

### IX. Kits and Articles of Manufacture

[0410] In another aspect, provided herein are kits comprising the compositions of the embodiments described herein. In some embodiments, the kit comprises a CasX protein and one or a plurality of gNA of any of the embodiments of the disclosure comprising a targeting sequence complementary to a target nucleic acid of the RHO gene, an excipient and a suitable container (for example a tube, vial or plate). In other embodiments, the kit comprises a nucleic acid encoding a CasX protein and one or a plurality of gNA of any of the embodiments of the disclosure comprising a targeting sequence complementary to a target nucleic acid of the RHO gene, an excipient and a suitable container. In other embodiments, the kit comprises a vector comprising a nucleic acid encoding a CasX protein and one or a plurality of gNA of any of the embodiments of the disclosure comprising a targeting sequence complementary to a target nucleic acid of the RHO gene, an excipient and a suitable container. In still other embodiments, the kit comprises a VLP comprising a CasX protein and one or a plurality of gNA of any of the embodiments of the disclosure comprising a targeting sequence complementary to a target nucleic acid of the RHO gene an excipient and a suitable container. In still other embodiments, the kit comprises a plurality of cells edited using the Class 2 Type V Crispr systems described herein.

[0411] In some embodiments, the kit further comprises a buffer, a nuclease inhibitor, a protease inhibitor, a liposome, a therapeutic agent, a label, a label visualization reagent, or any combination of the foregoing. In some embodiments, the kit further comprises a pharmaceutically acceptable carrier, diluent or excipient.

[0412] In some embodiments, the kit comprises appropriate control compositions for gene modifying applications, and instructions for use.

[0413] In another aspect, the disclosure relates to compositions comprising a Class 2 Type V CRISPR protein and a first guide nucleic acid (gNA), wherein the gNA comprises a targeting sequence complementary to a non-target strand sequence located 1 nucleotide 3′ of a protospacer adjacent motif (PAM) sequence of a RHO gene target nucleic acid sequence, wherein the RHO gene comprises one or more mutations. In one embodiment, the PAM sequence comprises a TC motif. In another embodiment, the PAM sequence comprises ATC, GTC, CTC or TTC. In another embodiment, the Class 2 Type V CRISPR protein comprises a RuvC domain. In the foregoing embodiments, the RuvC domain generates a staggered double-stranded break in the target nucleic acid sequence and the Class 2 Type V CRISPR protein does not comprise an HNH nuclease domain.

### ENUMERATED EMBODIMENTS

[0414] The invention may be defined by reference to the following sets of enumerated, illustrative embodiments:

### Set I

[0415] 1. A CasX:gNA system comprising a CasX protein and a guide nucleic acid (gNA), wherein the gNA comprises a targeting sequence complementary to a target nucleic acid sequence comprising a rhodopsin (RHO) gene.

[0416] 2. The CasX:gNA system of Set I embodiment 1, wherein the RHO gene comprises a protein coding sequence comprising a mutation.

[0417] 3. The CasX:gNA system of any one of Set I embodiments 1-2, wherein the RHO gene comprises a regulatory region, optionally comprising a mutation.

[0418] 4. The CasX:gNA system of any one of Set I embodiments 1 and 3, wherein the RHO gene comprises a wild-type protein coding sequence.

[0419] 5. The CasX:gNA system of Set I embodiment 2, wherein the RHO gene comprising a mutation encodes a rhodopsin protein comprising a mutation compared to a wild-type rhodopsin protein sequence of SEQ ID NO:100.

[0420] 6. The CasX:gNA system of any one of Set I embodiments 2 and 5, wherein the RHO gene comprising a mutation encodes a protein comprising the sequence of SEQ ID NO:101.

[0421] 7. The CasX:gNA system of any one of Set I embodiments 2 and 5-6, wherein the RHO gene comprising a mutation encodes a protein comprising a P23 or P23H substitution compared to a wild-type rhodopsin protein sequence of SEQ ID NO:100.

[0422] 8. The CasX:gNA system of any one of Set I embodiments 1-7, wherein the gNA is a guide RNA (gRNA).

[0423] 9. The CasX:gNA system of any one of Set I embodiments 1-7, wherein the gNA is a guide DNA (gDNA).

[0424] 10. The CasX:gNA system of any one of Set I embodiments 1-7, wherein the gNA is a chimera comprising DNA and RNA.

[0425] 11. The CasX:gNA system of any one of Set I embodiments 1-10, wherein the gNA is a single-molecule gNA (sgNA).

[0426] 12. The CasX:gNA system of any one of Set I embodiments 1-10, wherein the gNA is a dual-molecule gNA (dgNA).

[0427] 13. The CasX:gNA system of any one of Set I embodiments 1-12, wherein the gNA comprises a targeting sequence consisting of 14, 15, 16, 17, 18, 19, 20, 21, 22, 23, 24, 25, 26, 27, 28, 29, or 30 consecutive nucleotides.

[0428] 14. The CasX:gNA system of Set I embodiment 13, wherein the targeting sequence of the gNA consists of 20 nucleotides.

[0429] 15. The CasX:gNA system of any one of Set I embodiments 7-14, wherein the targeting sequence of the gNA is complementary to a sequence comprising the P23H substitution.

[0430] 16. The CasX:gNA system of any one of Set I embodiments 1-15, wherein the targeting sequence of the gNA comprises a sequence of AAGUGGCUGCGUACCACACC.

[0431] 17. The CasX:gNA system of any one of Set I embodiments 1-16, wherein the targeting sequence of the gNA consists of a sequence of AAGUGGCUGCGUACCACACC.

[0432] 18. The CasX:gNA system of any one of Set I embodiments 1-16, wherein the targeting sequence of the gNA consists of a sequence of AAGUGGCUGCGUACCACAC.

[0433] 19. The CasX:gNA system of any one of Set I embodiments 1-16, wherein the targeting sequence of the gNA consists of a sequence of AAGUGGCUGCGUACCACA.

[0434] 20. The CasX:gNA system of any one of Set I embodiments 1-16, wherein the targeting sequence of the gNA consists of a sequence of AAGUGGCUGCGUACCAC.

[0435] 21. The CasX:gNA system of any one of Set I embodiments 1-16, wherein the targeting sequence of the gNA consists of a sequence of AAGUGGCUGCGUACCA.

[0436] 22. The CasX:gNA system of any one of Set I embodiments 1-16, wherein the targeting sequence of the gNA consists of a sequence of AAGUGGCUGCGUACC.

[0437] 23. The CasX:gNA system of any one Set I embodiments 1-22, further comprising a second gNA, wherein the second gNA has a targeting sequence complementary a different or overlapping portion of the target nucleic acid sequence compared to the targeting sequence of the gNA of any one of the preceding Set I embodiments.

[0438] 24. The CasX:gNA system of any one of Set I embodiments 1-23, wherein the gNA has a scaffold comprising a sequence having at least about 50%, at least about 60%, at least about 70%, at least about 80%, at least about 90%, at least about 95%, at least about 96%, at least about 97%, at least about 98%, at least about 99%, or 100% sequence identity to a sequence selected from the group consisting of sequences set forth in Table 1 and Table 2.

[0439] 25. The CasX:gNA system of any one of Set I embodiments 1-24, wherein the gNA has a scaffold comprising a sequence having at least one nucleotide modification relative to a reference gNA sequence having a sequence of any one of SEQ ID NOS: 4-16 of Table 1.

[0440] 26. The CasX:gNA system of Set I embodiment 25, wherein the at least one modification of the reference gNA comprises at least one substitution, deletion, or substitution of a nucleotide of the gNA sequence.

[0441] 27. The CasX:gNA system of any one Set I embodiments 1-26, wherein the gNA is chemically modified.

[0442] 28. The CasX:gNA system of any one Set I embodiments 1-27, wherein the CasX protein comprises a reference CasX protein having a sequence of any one of SEQ ID NOS: 1-3 a CasX variant protein having a sequence selected from those presented in Table 3, or a sequence having at least about 50%, at least about 60%, at least about 70%, at least about 80%, at least about 90%, or at least about 95%, or at least about 96%, or at least about 97%, or at least about 98%, or at least about 99% sequence identity to a sequence presented in Table 3.

[0443] 29. The CasX:gNA system of Set I embodiment 28, wherein the CasX protein has binding affinity for a protospacer adjacent motif (PAM) sequence selected from the group consisting of TTC, ATC, GTC, and CTC.

[0444] 30. The CasX:gNA system of Set I embodiment 28 or Set I embodiment 29, wherein the CasX variant protein comprises at least one amino acid modification relative to a reference CasX protein having a sequence of any one of SEQ ID NOS:1-3.

[0445] 31. The CasX:gNA system of Set I embodiment 30, wherein the at least one amino acid modification comprises an amino acid substitution, deletion, or substitution in a domain of the CasX variant protein relative to the reference CasX protein.

[0446] 32. The CasX:gNA system of Set I embodiment 31, wherein the domain is selected from the group consisting of a non-target strand binding (NTSB) domain, a target strand loading (TSL) domain, a helical I domain, a helical II domain, an oligonucleotide binding domain (OBD), and a RuvC DNA cleavage domain.

[0447] 33. The CasX:gNA system of any one of Set I embodiments 28-32, wherein the CasX protein is fused to one or more nuclear localization signals (NLS).

[0448] 34. The CasX:gNA system of Set I embodiment 33, wherein the one or more NLS are selected from the group of sequences consisting of

PKKKRKV,
KRPAATKKAGQAKKKK,
PAAKRVKLD,
RQRRNELKRSP,
NQSSNFGPMKGGNFGGRSSGPYGGGGQYFAKPRNQGGY,
RMRIZFKNKGKDTAELRRRRVEVSVELRKAKKDEQILKRRNV,
VSRKRPRP,
PPKKARED,
PQPKKKPL,
SALIKKKKKMAP,
DRLRR,
PKQKKRK,
RKLKKKIKKL,
REKKKFLKRR,
KRKGDEVDGVDEVAKKKSKK,
RKCLQAGMNLEARKTKK,
PRPRKIPR,
PPRKKRTVV,
NLSKKKKRKREK,
RRPSRPFRKP,
KRPRSPSS,
KRGINDRNFWRGENERKTR,
PRPPKMARYDN,
KRSFSKAF,
KLKIKRPVK,
PKTRRRPRRSQRKRPPT,
RRKKRRPRRKKRR,
PKKKSRKPKKKSRK,
HKKKHPDASVNFSEFSK,
QRPGPYDRPQRPGPYDRP,
LSPSLSPLLSPSLSPL,
RGKGGKGLGKGGAKRHRK,
PKRGRGRPKRGRGR,
and
MSRRRKANPTKLSENAKKLAKEVEN.

[0449] 35. The CasX:gNA system of Set I embodiment 33 or Set I embodiment 34, wherein the one or more NLS are fused at the C-terminus of the CasX protein.

[0450] 36. The CasX:gNA system of Set I embodiment 33 or Set I embodiment 34, wherein the one or more NLS are fused at the N-terminus of the CasX protein.

[0451] 37. The CasX:gNA system of Set I embodiment 33 or Set I embodiment 34, wherein the one or more NLS are fused at the N-terminus and C-terminus of the CasX protein.

[0452] 38. The CasX:gNA system of any one of Set I embodiments 28-37, wherein the CasX variant protein exhibits one or more improved characteristics as compared to a reference CasX protein.

[0453] 39. The CasX:gNA system of Set I embodiment 38, wherein the one or more improved characteristics are selected from the group consisting of improved folding of the CasX protein, improved binding affinity of the CasX protein to the guide RNA, improved RNP complex formation, improved binding affinity to the target nucleic acid sequence, altered binding affinity to one or more PAM sequences, improved unwinding of the target nucleic acid sequence, increased activity, increased target nucleic acid sequence cleavage rate, improved editing efficiency, improved editing specificity, increased activity of the nuclease, increased target strand loading for double strand cleavage, decreased target strand loading for single strand nicking, decreased off-target cleavage, improved binding of the non-target strand of DNA, improved CasX protein stability, improved protein:guide RNA complex stability, improved protein solubility, improved protein:guide RNA complex solubility, improved protein yield, improved protein expression, and improved fusion characteristics.

[0454] 40. The CasX:gNA system of Set I embodiment 38 or Set I embodiment 39, wherein the improved characteristic of the CasX variant protein is at least about 1.1 to about 100,000-fold improved relative to the reference CasX protein of SEQ ID NO: 1, SEQ ID NO: 2, or SEQ ID NO: 3.

[0455] 41. The CasX:gNA system of Set I embodiment 38 or Set I embodiment 39, wherein the improved characteristic of the CasX variant protein is at least about 10-fold, at least about 100-fold, at least about 1,000-fold, or at least about 10,000-fold improved relative to the reference CasX protein of SEQ ID NO: 1, SEQ ID NO: 2, or SEQ ID NO: 3.

[0456] 42. The CasX:gNA system of any one of Set I embodiments 39-41, wherein the improved characteristic is improved binding affinity to the target nucleic acid sequence.

[0457] 43. The CasX:gNA system of any one of Set I embodiments 39-41, wherein the improved characteristic is increased target nucleic acid sequence cleavage rate.

[0458] 44. The CasX:gNA system of any one of Set I embodiments 39-41, wherein the improved characteristic is improved CasX protein stability.

[0459] 45. The CasX:gNA system of any one of Set I embodiments 39-41, wherein the improved characteristic is increased binding affinity to one or more PAM sequences wherein the one or more PAM sequences are selected from the group consisting of TTC, ATC, GTC, and CTC.

[0460] 46. The CasX:gNA system of any one of Set I embodiments 28-45, wherein the CasX variant protein and the gNA are associated together in a ribonucleoprotein (RNP) complex.

[0461] 47. The CasX:gNA system of any one of Set I embodiments 28-46, wherein the CasX variant protein comprises a nuclease domain having nickase activity.

[0462] 48. The CasX:gNA system of any one of Set I embodiments 28-46, wherein the CasX variant protein comprises a nuclease domain having double-stranded cleavage activity.

[0463] 49. The CasX:gNA system of any one of Set I embodiments 1-37, wherein the CasX protein is a catalytically inactive CasX (dCasX) protein, and wherein the dCasX and the gNA retain the ability to bind to the target nucleic acid sequence.

[0464] 50. The CasX:gNA system of Set I embodiment 49, wherein the dCasX comprises a mutation at residues:

a. D672, E769, and/or D935 corresponding to the CasX protein of SEQ ID NO: 1; or
b. D659, E756 and/or D922 corresponding to the CasX protein of SEQ ID NO: 2.

[0465] 51. The CasX:gNA system of Set I embodiment 50, wherein the mutation is a substitution of alanine for the residue.

[0466] 52. The CasX:gNA system of any one of Set I embodiments 1-51, further comprising a donor template nucleic acid.

[0467] 53. The CasX:gNA system of Set I embodiment 52, wherein the donor template comprises a nucleic acid comprising at least a portion of a RHO gene, wherein the RHO gene portion is selected from the group consisting of a RHO exon, a RHO intron, and a RHO intron-exon junction.

[0468] 54. The CasX:gNA system of Set I embodiment 52 or Set I embodiment 53, wherein the donor template ranges in size from 10-10,000 nucleotides.

[0469] 55. The CasX:gNA system of any one of Set I embodiments 52-54, wherein the donor template is a single-stranded DNA template or a single stranded RNA template.

[0470] 56. The CasX:gNA system of any one of Set I embodiments 52-54, wherein the donor template is a double-stranded DNA template.

[0471] 57. The CasX:gNA system of any one of Set I embodiments 52-56, wherein the donor template comprises at least a portion of the sequence that encodes SEQ ID NO: 100.

[0472] 58. The CasX:gNA system of Set I embodiment 57, wherein the donor template encodes a protein comprising P23 of SEQ ID NO:100.

[0473] 59. A nucleic acid comprising a sequence that encodes components of the CasX:gNA system of any one of Set I embodiments 1-51.

[0474] 60. The nucleic acid of Set I embodiment 59, wherein the nucleic acid encoding the CasX protein or the gNA is codon optimized for expression in a eukaryotic cell.

[0475] 61. A vector comprising the nucleic acid of Set I embodiment 59 or Set I embodiment 60.

[0476] 62. The vector of Set I embodiment 61, wherein the vector further comprises a promoter.

[0477] 63. A vector comprising a donor template for use in a CasX; gNA system, wherein the donor template comprises a nucleic acid comprising at least a portion of a RHO gene, and wherein the RHO gene portion is selected from the group consisting of a RHO exon, a RHO intron, and a RHO intron-exon junction.

[0478] 64. The vector of Set I embodiment 63, wherein the donor template comprises a sequence that encodes at least a portion of the sequence that encodes SEQ ID NO: 100.

[0479] 65. The vector of Set I embodiment 63 or Set I embodiment 64, further comprising the nucleic acid of Set I embodiment 59 or Set I embodiment 60.

[0480] 66. The vector of any one of Set I embodiments 63-65, wherein the vector is selected from the group consisting of a retroviral vector, a lentiviral vector, an adenoviral vector, an adeno-associated viral (AAV) vector, a herpes simplex virus (HSV) vector, a virus-like particle (VLP), a plasmid, a minicircle, a nanoplasmid, and an RNA vector.

[0481] 67. The vector of Set I embodiment 66, wherein the vector is an AAV vector.

[0482] 68. The vector of Set I embodiment 67, wherein the AAV vector is selected from AAV1, AAV2, AAV3, AAV4, AAV5, AAV6, AAV7, AAV8, AAV9, AAV10, AAV-Rh74, or AAVRh10.

[0483] 69. The vector of Set I embodiment 66, wherein the vector is a retroviral vector.

[0484] 70. The vector of Set I embodiment 66, wherein the vector encoding the VLP comprises one or more nucleic acids encoding a gag polyprotein, the CasX protein of any one of Set I embodiments 28-48, and the gNA of any one of Set I embodiments 8-27.

[0485] 71. A method of modifying a RHO target nucleic acid sequence comprising a RHO gene in a cell, the method comprising contacting the RHO target nucleic acid sequence with a CasX protein and a guide nucleic acid (gNA) comprising a targeting sequence, wherein said contacting comprises introducing into the cell:

a. the CasX protein of any one of Set I embodiments 28-48 or a nucleic acid encoding the CasX protein; and
b. the gNA of any one of Set I embodiments 1-27, or a nucleic acid encoding the gNA, wherein said contacting results in modification of the RHO target nucleic acid sequence by the CasX protein.

[0486] 72. The method of Set I embodiment 71, wherein the CasX protein and the gNA are associated together in a RNP complex.

[0487] 73. The method of Set I embodiment 71 or Set I embodiment 72, further comprising a second gNA or a nucleic acid encoding the second gNA, wherein the second gNA has a targeting sequence complementary to a different or overlapping portion of the RHO target nucleic acid sequence.

[0488] 74. The method of any one of Set I embodiments 71-73, wherein the RHO regulatory region comprises a mutation.

[0489] 75. The method of any one of Set I embodiments 71-74, wherein the RHO gene comprise a mutation and wherein the modifying comprises introducing a single-stranded break in the RHO target nucleic acid sequence.

[0490] 76. The method of any one of Set I embodiments 71-74, wherein the RHO gene comprises a mutation and wherein the modifying comprises introducing a double-stranded break in the RHO target nucleic acid sequence.

[0491] 77. The method of Set I embodiment 75 or Set I embodiment 76, wherein the mutation encodes a P23 substitution or a P23H substitution as compared to the wild-type rhodopsin protein sequence.

[0492] 78. The method of Set I embodiment 77, wherein the modifying of the RHO target nucleic acid sequence results in correction of the P23H substitution.

[0493] 79. The method of any one of Set I embodiments 71-78, wherein the modifying of the RHO target nucleic acid sequence results in the RHO target nucleic acid sequence encoding the wild-type rhodopsin protein sequence of SEQ ID NO:100.

[0494] 80. The method of any one of Set I embodiments 71-79, wherein the modifying of the RHO target nucleic acid sequence occurs in vitro.

[0495] 81. The method of any one of Set I embodiments 71-80, wherein the modifying of the RHO target nucleic acid sequence occurs in vivo.

[0496] 82. The method of any one of Set I embodiments 71-81, wherein the cell is a eukaryotic cell.

[0497] 83. The method of Set I embodiment 82, wherein the eukaryotic cell is selected from the group consisting of a rodent cell, a mouse cell, a rat cell, a primate cell, a non-human primate cell, and a human cell.

[0498] 84. The method of Set I embodiment 83, wherein the eukaryotic cell is a human cell.

[0499] 85. The method of any one of Set I embodiments 71-84, wherein the cell is a photoreceptor cell.

[0500] 86. The method of any one of Set I embodiments 71-84, wherein the cell is a retinal progenitor cell,

[0501] 87. The method of any one of Set I embodiments 71-84, wherein the cell is an induced pluripotent stem cell (iPSC).

[0502] 88. The method of any one of Set I embodiment 71-87, wherein the method further comprises contacting the RHO target nucleic acid sequence with a donor template complementary to at least a portion of a RHO gene and/or a RHO regulatory region comprising one or more mutations, wherein the donor template is inserted into the RHO target nucleic acid sequence to correct the one or more mutations or is inserted to replace the target nucleic acid sequence.

[0503] 89. The method of Set I embodiment 88, wherein the donor template ranges in size from 10-10,000 nucleotides.

[0504] 90. The method of Set I embodiment 88, wherein the donor template ranges in size from 100-1,000 nucleotides.

[0505] 91. The method of any one of Set I embodiments 88-90, wherein the donor template is a single-stranded DNA template or a single stranded RNA template.

[0506] 92. The method of any one of Set I embodiments 88-90, wherein the donor template is a double-stranded DNA template.

[0507] 93. The method of any one of Set I embodiments 88-92, wherein the donor template is inserted by homology directed repair (HDR).

[0508] 94. The method of any one of Set I embodiments 82-93, wherein the method comprises contacting the eukaryotic cell with a vector encoding the CasX protein and the gNA, and optionally further comprising the donor template.

[0509] 95. The method of Set I embodiment 94, wherein the vector is an Adeno-Associated Viral (AAV) vector.

[0510] 96. The method of Set I embodiment 95, wherein the AAV is AAV1, AAV2, AAV3, AAV4, AAV5, AAV6, AAV7, AAV8, AAV9, AAV10, AAV-Rh74, or AAVRh10.

[0511] 97. The method of Set I embodiment 94, wherein the vector is a lentiviral vector.

[0512] 98. The method of any one of Set I embodiments 82-93, wherein the method comprises contacting the eukaryotic cell with a VLP vector, wherein the VLP vector comprises the RNP of Set I embodiment 46.

[0513] 99. The method of any one of Set I embodiments 94-98, wherein the vector is administered to a subject at a therapeutically effective dose.

[0514] 100. The method of Set I embodiment 99, wherein the subject is selected from the group consisting of mouse, rat, dog, pig, non-human primate, and human.

[0515] 101. The method of Set I embodiment 100, wherein the subject is a human.

[0516] 102. The method of any one of Set I embodiments 99-101, wherein the vector is administered at a dose of at least about 1×105 vector genomes (vg), or at least about 1×106 vg, or at least about 1×107 vg, or at least about 1×108 vg, or at least about 1×109 vg, or at least about 1×1010 vg, or at least about 1×1011 vg, or at least about 1×1012 vg.

[0517] 103. The method of any one of Set I embodiments 99-102, wherein the vector is administered by a route of administration selected from the group consisting of intraocular, intravitreal, and sub-retinal routes.

[0518] 104. The method of any one of Set I embodiments 71-103, comprising further contacting the target nucleic acid sequence with an additional CRISPR protein, or a polynucleotide encoding the additional CRISPR protein.

[0519] 105. The method of Set I embodiment 104, wherein the additional CRISPR protein is a CasX protein having a sequence different from the CasX of any one of Set I embodiments 28-51

[0520] 106. The method of Set I embodiment 104, wherein the additional CRISPR protein is not a CasX protein.

[0521] 107. A method of modifying a RHO target nucleic acid sequence of a cell, wherein the nucleic acid encodes a protein having the sequence of SEQ ID NO: 101, the method comprising contacting said cell with: a) CasX:gNA system of any one of Set I embodiments 1-58; b) the nucleic acid of Set I embodiment 59 or Set I embodiment 60; c) the vector as in any one of Set I embodiments 94-103; or combinations thereof.

[0522] 108. The method of Set I embodiment 107, wherein the cell is modified such that expression of the protein of SEQ ID: 101 is reduced by at least about 50%, at least about 60%, at least about 70%, at least about 80%, at least about 90%, or at least about 95% in comparison to a cell that has not been modified.

[0523] 109. The method of Set I embodiment 107 or Set I embodiment 108, wherein the cell has been modified such that the cell does not express a detectable level of the protein of SEQ ID NO:101.

[0524] 110. The method of Set I embodiment 107, wherein the cell has been modified such that it expresses RHO protein having the sequence of SEQ ID NO:100.

[0525] 111. A population of cells modified by the method of Set I embodiment 107 or Set I embodiment 108, wherein the cells have been modified such that at least 70%, at least 75%, at least 80%, at least 85%, at least 90%, or at least 95% of the modified cells do not express a detectable level of the protein of SEQ ID NO:101.

[0526] 112. A population of cells modified by the method of Set I embodiment 110, wherein the cells have been modified such that at least 70%, at least 75%, at least 80%, at least 85%, at least 90%, or at least 95% of the modified cells express a detectable level of RHO protein having the sequence of SEQ ID NO:100.

[0527] 113. The population of cells of Set I embodiment 111 or Set I embodiment 112, wherein the cell is a non-primate mammalian cell, a non-human primate cell, or a human cell.

[0528] 114. The population of cells of any one of Set I embodiments 111-113, wherein the cell is selected from the group consisting of a photoreceptor cell, a retinal progenitor cell, or a pluripotent stem cell (iPSC).

[0529] 115. A method of treating a RHO-related disorder in a subject in need thereof, comprising modifying in a cell of the subject a RHO gene, wherein the RHO gene has one or more mutations, the modifying comprising either contacting said cell with;

a. CasX:gNA system of any one of Set I embodiments 1-58;
b. the nucleic acid of Set I embodiment 59 or Set I embodiment 60;
c. the vector of any one of Set I embodiments 61-70; or
d. combinations thereof.

[0530] 116. The method of Set I embodiment 115, further comprising a second gNA or a nucleic acid encoding the second gNA, wherein the second gNA has a targeting sequence complementary to a different or overlapping portion of the target nucleic acid sequence.

[0531] 117. The method of Set I embodiment 115 or Set I embodiment 116, wherein the modifying corrects the one or more mutations, or wherein expression of the RHO having the one or more mutations is inhibited or suppressed.

[0532] 118. The method of any one of Set I embodiments 115-117, wherein the RHO-related disorder is retinitis pigmentosa.

[0533] 119. The method of any one of Set I embodiments 115-118, wherein the method comprises contacting the cell with the vector.

[0534] 120. The method of Set I embodiment 119, wherein the vector is an Adeno-Associated Viral (AAV) vector.

[0535] 121. The method of Set I embodiment 120, wherein the AAV is AAV1, AAV2, AAV3, AAV4, AAV5, AAV6, AAV7, AAV8, AAV9, AAV10, AAV-Rh74, or AAVRh10.

[0536] 122. The method of Set I embodiment 120, wherein the vector is a lentiviral vector.

[0537] 123. The method of any one of Set I embodiments 115-119, wherein the method comprises contacting the eukaryotic cell with a VLP vector, wherein the VLP vector comprises the RNP of Set I embodiment 46.

[0538] 124. The method of any one of Set I embodiments 115-123, wherein the vector is administered to a subject at a therapeutically effective dose.

[0539] 125. The method of Set I embodiment 124, wherein the subject is selected from the group consisting of mouse, rat, dog, pig, non-human primate, and human.

[0540] 126. The method of Set I embodiment 126, wherein the subject is a human.

[0541] 127. The method of any one of Set I embodiments 115-126, wherein the vector is administered to the subject at a dose of at least about 1×105 vector genomes (vg), or at least about 1×106 vg, or at least about 1×107 vg, or at least about 1×108 vg, or at least about 1×109 vg, or at least about 1×1010 vg, or at least about 1×1011 vg, or at least about 1×1012 vg.

[0542] 128. The method of any one of Set I embodiments 115-127, wherein the vector is administered by a route of administration selected from the group consisting of intraocular, intravitreal, and sub-retinal routes.

[0543] 129. The method of any one of Set I embodiments 115-128, comprising further contacting the target nucleic acid sequence with an additional CRISPR protein, or a polynucleotide encoding the additional CRISPR protein.

[0544] 130. The method of Set I embodiment 129, wherein the additional CRISPR protein is a CasX protein having a sequence different from the CasX of any of the preceding Set I embodiments.

[0545] 131. The method of Set I embodiment 130, wherein the additional CRISPR protein is not a CasX protein.

[0546] 132. The method of any one of Set I embodiments 115-131, wherein the method results in improvement in at least one clinically-relevant endpoint selected from the group consisting of change in the mean retinal sensitivity of the central 2° of the ocular fundus, visual acuity, contrast sensitivity, multiluminance mobility test (MLMT), full-field light sensitivity threshold (FST), health-related quality of life using a questionnaire on visual function, duration of response, and time-to-treatment failure.

[0547] 133. The method of any one of Set I embodiments 115-132, wherein the method results in improvement in at least one clinically-relevant endpoint selected from the group consisting of change in the mean retinal sensitivity of the central 2° of the ocular fundus, visual acuity, contrast sensitivity, multiluminance mobility test (MLMT), full-field light sensitivity threshold (FST), health-related quality of life using a questionnaire on visual function, duration of response, and time-to-treatment failure.

### Set II

[0548] 1. A composition comprising a Class 2 Type V CRISPR protein and a first guide nucleic acid (gNA), wherein the gNA comprises a targeting sequence complementary to a rhodopsin (RHO) gene target nucleic acid sequence, wherein the RHO gene comprises one or more mutations.

[0549] 2. The composition of Set II embodiment 1, wherein the RHO gene comprises one or more mutations in a region selected from the group consisting of.

a. a RHO intron;
b. a RHO exon;
c. a RHO intron-exon junction;
d. a RHO regulatory element; and
e. an intergenic region.

[0550] 3. The composition of any one of Set II embodiment 1 or Set II embodiment 2, wherein the mutation is an insertion, deletion, substitution, duplication, or inversion of one or more nucleotides as compared to the wild-type RHO gene sequence.

[0551] 4. The composition of any one of Set II embodiments 1-3, wherein the mutation is a gain of function mutation.

[0552] 5. The composition of any one of Set II embodiments 1-3, wherein the RHO gene comprises a mutation set forth in Table 4A.

[0553] 6. The composition of any one of Set II embodiments 1-5, wherein the RHO gene comprising a mutation encodes a protein comprising a P23 or P23H substitution compared to a wild-type rhodopsin protein sequence of SEQ ID NO:100.

[0554] 7. The composition of any one of Set II embodiments 1-6, wherein the RHO gene encodes a non-functional rhodopsin protein.

[0555] 8. The composition of any one of Set II embodiments 1-6, wherein the gNA is a guide RNA (gRNA).

[0556] 9. The composition of any one of Set II embodiments 1-6, wherein the gNA is a guide DNA (gDNA).

[0557] 10. The composition of any one of Set II embodiments 1-6, wherein the gNA is a chimera comprising DNA and RNA.

[0558] 11. The composition of any one of Set II embodiments 1-10, wherein the gNA is a single-molecule gNA (sgNA).

[0559] 12. The composition of any one of Set II embodiments 1-10, wherein the gNA is a dual-molecule gNA (dgNA).

[0560] 13. The composition of any one of Set II embodiments 1-12, wherein the targeting sequence of the gNA comprises a sequence selected from the group consisting of the sequences of SEQ ID NOS:328-346, 367-376, 382-2100 and 2286-27274, or a sequence having at least about 65%, at least about 75%, at least about 85%, or at least about 95% identity thereto.

[0561] 14. The composition of any one of Set II embodiments 1-12, wherein the targeting sequence of the gNA comprises a sequence selected from the group consisting of the sequences of SEQ ID NOs:328-346, 367-376, 382-2100 and 2286-27274.

[0562] 15. The composition of any one of Set II embodiments 1-12, wherein the targeting sequence of the gNA comprises a sequence of SEQ ID NOs: 328-346, 367-376, 382-2100 and 2286-27274 with a single nucleotide removed from the 3′ end of the sequence.

[0563] 16. The composition of any one of Set II embodiments 1-12, wherein the targeting sequence of the gNA comprises a sequence of SEQ ID NOs: 2328-346, 367-376, 382-2100 and 2286-27274 with two nucleotides removed from the 3′ end of the sequence.

[0564] 17. The composition of any one of Set II embodiments 1-12, wherein the targeting sequence of the gNA comprises a sequence of SEQ ID NOs: 328-346, 367-376, 382-2100 and 2286-27274 with three nucleotides removed from the 3′ end of the sequence.

[0565] 18. The composition of any one of Set II embodiments 1-12, wherein the targeting sequence of the gNA comprises a sequence of SEQ ID NOs: 328-346, 367-376, 382-2100 and 2286-27274 with four nucleotides removed from the 3′ end of the sequence.

[0566] 19. The composition of any one of Set II embodiments 1-12, wherein the targeting sequence of the gNA comprises a sequence of SEQ ID NOs: 328-346, 367-376, 382-2100 and 2286-27274 with five nucleotides removed from the 3′ end of the sequence.

[0567] 20. The composition of any one of Set II embodiments 1-19, wherein the targeting sequence of the gNA comprises a sequence having one or more single nucleotide polymorphisms (SNP) relative to a sequence of SEQ ID NOS: 328-346, 367-376, 382-2100 and 2286-27274.

[0568] 21. The composition of any one of Set II embodiments 1-19, wherein the targeting sequence of the gNA is complementary to a sequence of a RHO exon.

[0569] 22. The composition of any one of Set II embodiments 1-21, wherein the targeting sequence of the gNA is complementary to a sequence of RHO exon 1.

[0570] 23. The composition of Set II embodiment 21 or Set II embodiment 22, wherein the targeting sequence of the gNA is complementary to a target nucleic acid sequence encoding the P23H substitution.

[0571] 24. The CasX:gNA system of any one of Set II embodiments 21-23, wherein the targeting sequence of the gNA comprises a sequence of AAGUGGCUGCGUACCACACC (SEQ ID NO: 382).

[0572] 25. The CasX:gNA system of any one of Set II embodiments 21-23, wherein the targeting sequence of the gNA consists of a sequence of AAGUGGCUGCGUACCACACC (SEQ ID NO: 382).

[0573] 26. The CasX:gNA system of any one of Set II embodiments 21-23, wherein the targeting sequence of the gNA consists of a sequence of AAGUGGCUGCGUACCACAC (SEQ ID NO: 27275).

[0574] 27. The CasX:gNA system of any one of Set II embodiments 21-23, wherein the targeting sequence of the gNA consists of a sequence of AAGUGGCUGCGUACCACA (SEQ ID NO: 27276).

[0575] 28. The CasX:gNA system of any one of Set II embodiments 21-23, wherein the targeting sequence of the gNA consists of a sequence of AAGUGGCUGCGUACCAC (SEQ ID NO: 27277).

[0576] 29. The CasX:gNA system of any one of Set II embodiments 21-23, wherein the targeting sequence of the gNA consists of a sequence of AAGUGGCUGCGUACCA (SEQ ID NO: 27278).

[0577] 30. The CasX:gNA system of any one of Set II embodiments 21-23, wherein the targeting sequence of the gNA consists of a sequence of AAGUGGCUGCGUACC (SEQ ID NO: 27279).

[0578] 31. The composition of any one of Set II embodiments 1-19, wherein the targeting sequence of the gNA is complementary to a sequence of a RHO intron.

[0579] 32. The composition of any one of Set II embodiments 1-19, wherein the targeting sequence of the gNA is complementary to a sequence of a RHO intron-exon junction.

[0580] 33. The composition of any one of Set II embodiments 1-19, wherein the targeting sequence of the gNA is complementary to a sequence of a RHO regulatory element.

[0581] 34. The composition of any one of Set II embodiments 1-19, wherein the targeting sequence of the gNA is complementary to a sequence comprising one or more single nucleotide polymorphisms (SNPs) of the RHO gene.

[0582] 35. The composition of any one of Set II embodiments 1-19, wherein the targeting sequence of the gNA is complementary to a sequence of an intergenic region of the RHO gene.

[0583] 36. The composition of any one of Set II embodiments 1-35, further comprising a second gNA, wherein the second gNA has a targeting sequence complementary to a different or overlapping portion of the RHO target nucleic acid compared to the targeting sequence of the first gNA.

[0584] 37. The composition of Set II embodiment 36, wherein the second gNA has a targeting sequence complementary to the same exon targeted by the first gNA.

[0585] 38. The composition of Set II embodiment 36, wherein the second gNA has a targeting sequence complementary to a different exon targeted by the first gNA.

[0586] 39. The composition of Set II embodiment 36, wherein the second gNA has a targeting sequence complementary to an intron 3′ to the exon targeted by the first gNA.

[0587] 40. The composition of any one of Set II embodiments 1-39, wherein the first or second gNA has a scaffold comprising a sequence having at least about 50%, at least about 60%, at least about 70%, at least about 80%, at least about 90%, at least about 95%, at least about 96%, at least about 97%, at least about 98%, at least about 99%, or 100% sequence identity to a sequence selected from the group consisting of SEQ ID NOS: 2201-2285.

[0588] 41. The composition of any one of Set II embodiments 1-39, wherein the first or second gNA has a scaffold comprising a sequence selected from the group consisting of SEQ ID NOS: 2201-2285.

[0589] 42. The composition of any one of Set II embodiments 1-39, wherein the first or second gNA scaffold comprises a sequence having at least one modification relative to a reference gNA sequence selected from the group consisting of SEQ ID NOS: 4-16.

[0590] 43. The composition of Set II embodiment 42, wherein the at least one modification of the reference gNA comprises at least one substitution, deletion, or substitution of a nucleotide of the reference gNA sequence.

[0591] 44. The composition of any one of Set II embodiments 1-43, wherein the first or second gNA is chemically modified.

[0592] 45. The composition of any one of Set II embodiments 1-44, wherein the Class 2 Type V CRISPR protein is a reference CasX protein having a sequence of any one of SEQ ID NOS: 1-3, a CasX variant protein having a sequence of SEQ ID NOs: 49-160, 237-239, 243-246, 251-263 or 273-281, or a sequence having at least about 50%, at least about 60%, at least about 70%, at least about 80%, at least about 90%, or at least about 95%, or at least about 95%, or at least about 96%, or at least about 97%, or at least about 98%, or at least about 99% sequence identity thereto.

[0593] 46. The composition of any one of Set II embodiments 1-44, wherein the Class 2 Type V CRISPR protein is a CasX variant protein having a sequence of SEQ ID NOs: 49-160, 237-239, 243-246, 251-263 or 273-281

[0594] 47. The composition of Set II embodiment 45, wherein the CasX variant protein comprises at least one modification relative to a reference CasX protein having a sequence selected from SEQ ID NOS:1-3.

[0595] 48. The composition of Set II embodiment 47, wherein the at least one modification comprises at least one amino acid substitution, deletion, or substitution in a domain of the CasX variant protein relative to the reference CasX protein.

[0596] 49. The composition of Set II embodiment 48, wherein the domain is selected from the group consisting of a non-target strand binding (NTSB) domain, a target strand loading (TSL) domain, a helical I domain, a helical II domain, an oligonucleotide binding domain (OBD), and a RuvC DNA cleavage domain.

[0597] 50. The composition of any one of Set II embodiments 45-49, wherein the CasX protein further comprises one or more nuclear localization signals (NLS).

[0598] 51. The composition of Set II embodiment 50, wherein the one or more NLS are selected from the group of sequences consisting of SEQ ID NOS: 176-213.

[0599] 52. The composition of Set II embodiment 50 or Set II embodiment 51, wherein the one or more NLS are expressed at or near the C-terminus of the CasX protein.

[0600] 53. The composition of Set II embodiment 50 or Set II embodiment 51, wherein the one or more NLS are expressed at or near the N-terminus of the CasX protein.

[0601] 54. The composition of Set II embodiment 50 or Set II embodiment 51, comprising one or more NLS located at or near the N-terminus and at or near the C-terminus of the CasX protein.

[0602] 55. The composition of any one of Set II embodiments 45-54, wherein the Class 2 Type V CRISPR protein is capable of forming a ribonuclear protein complex (RNP) with the gNA.

[0603] 56. The composition of Set II embodiment 55, wherein an RNP comprising the CasX variant protein and the gNA exhibit at least one or more improved characteristics as compared to an RNP comprising the reference CasX protein of SEQ ID NO: 1, SEQ ID NO: 2, or SEQ ID NO: 3 and a gNA comprising a sequence of any one of SEQ ID NOS: 4-16.

[0604] 57. The composition of Set II embodiment 56, wherein the improved characteristic is selected from one or more of the group consisting of improved folding of the CasX variant; improved binding affinity to a guide nucleic acid (gNA); improved binding affinity to a target DNA; improved ability to utilize a greater spectrum of one or more PAM sequences, including ATC, CTC, GTC, or TTC, in the editing of target DNA; improved unwinding of the target DNA; increased editing activity; improved editing efficiency; improved editing specificity; increased nuclease activity; increased target strand loading for double strand cleavage; decreased target strand loading for single strand nicking; decreased off-target cleavage; improved binding of non-target DNA strand; improved protein stability; improved protein solubility; improved protein:gNA complex (RNP) stability; improved protein:gNA complex solubility; improved protein yield; improved protein expression; and improved fusion characteristics.

[0605] 58. The composition of Set II embodiment 56 or Set II embodiment 57, wherein the improved characteristic of the RNP of the CasX variant protein and the gNA variant is at least about 1.1 to about 100-fold or more improved relative to the RNP of the reference CasX protein of SEQ ID NO: 1, SEQ ID NO: 2, or SEQ ID NO: 3 and the gNA comprising a sequence of any one of SEQ ID NOS: 4-16.

[0606] 59. The composition of Set II embodiment 56 or Set II embodiment 57, wherein the improved characteristic of the CasX variant protein is at least about 1.1, at least about 2, at least about 10, at least about 100-fold or more improved relative to the reference CasX protein of SEQ ID NO: 1, SEQ ID NO: 2, or SEQ ID NO: 3 and the gNA comprising a sequence of any one of SEQ ID NOS: 4-16.

[0607] 60. The composition of any one of Set II embodiments 56-59, wherein the improved characteristic comprises editing efficiency, and the RNP of the CasX variant protein and the gNA variant comprises a 1.1 to 100-fold improvement in editing efficiency compared to the RNP of the reference CasX protein of SEQ ID NO: 2 and the gNA of any one of SEQ ID NOS: 4-16.

[0608] 61. The composition of any one of Set II embodiments 56-60, wherein the RNP comprising the CasX variant and the gNA variant exhibits greater editing efficiency and/or binding of a target sequence in the target nucleic acid when any one of the PAM sequences TTC, ATC, GTC, or CTC is located 1 nucleotide 5′ to the non-target strand sequence having identity with the targeting sequence of the gNA in a cellular assay system compared to the editing efficiency and/or binding of an RNP comprising a reference CasX protein and a reference gNA in a comparable assay system.

[0609] 62. The composition of Set II embodiment 61, wherein the PAM sequence is TTC.

[0610] 63. The composition of Set II embodiment 62, wherein the targeting sequence of the gNA comprises a sequence selected from the group consisting of SEQ ID NOs: 370-371, 373-376, and 19918-27274.

[0611] 64. The composition of Set II embodiment 61, wherein the PAM sequence is ATC

[0612] 65. The composition of Set II embodiment 64, wherein the targeting sequence of the gNA comprises a sequence selected from the group consisting of SEQ ID NOs: 583-2100, and 2286-5554.

[0613] 66. The composition of Set II embodiment 61, wherein the PAM sequence is CTC.

[0614] 67. The composition of Set II embodiment 66, wherein the targeting sequence of the gNA comprises a sequence selected from the group consisting of SEQ ID NOs: 367-369, 372, and 10487-19917.

[0615] 68. The composition of Set II embodiment 61, wherein the PAM sequence is GTC.

[0616] 69. The composition of Set II embodiment 68, wherein the targeting sequence of the gNA comprises a sequence selected from the group consisting of SEQ ID NOs: 5555-10486.

[0617] 70. The composition of any one of Set II embodiments 61-69, wherein the increased binding affinity for the one or more PAM sequences is at least 1.5-fold greater compared to the binding affinity of any one of the reference CasX proteins of SEQ ID NOS: 1-3 for the PAM sequences.

[0618] 71. The composition of any one of Set II embodiments 56-70, wherein the RNP has at least a 5%, at least a 10%, at least a 15%, or at least a 20% higher percentage of cleavage-competent RNP compared to an RNP of the reference CasX proteins of SEQ ID NOS: 1-3 and the gNA of SEQ ID NOS: 4-16.

[0619] 72. The composition of any one of Set II embodiments 45-71, wherein the CasX variant protein comprises a RuvC DNA cleavage domain having nickase activity.

[0620] 73. The composition of any one of Set II embodiments 45-71, wherein the CasX variant protein comprises a RuvC DNA cleavage domain having double-stranded cleavage activity.

[0621] 74. The composition of any one of Set II embodiments 45-71, wherein the CasX protein is a catalytically inactive CasX (dCasX) protein, and wherein the dCasX and the gNA retain the ability to bind to the RHO target nucleic acid.

[0622] 75. The composition of Set II embodiment 74, wherein the dCasX comprises a mutation at residues:

a. D672, E769, and/or D935 corresponding to the CasX protein of SEQ ID NO:1; or
b. D659, E756 and/or D922 corresponding to the CasX protein of SEQ ID NO: 2.

[0623] 76. The composition of Set II embodiment 75, wherein the mutation is a substitution of alanine for the residue.

[0624] 77. The composition of any one of Set II embodiments 1-73, further comprising a donor template nucleic acid.

[0625] 78. The composition of Set II embodiment 77, wherein the donor template comprises a nucleic acid comprising at least a portion of a RHO gene selected from the group consisting of a RHO exon, a RHO intron, a RHO intron-exon junction, and a RHO regulatory element.

[0626] 79. The composition of Set II embodiment 78, wherein the donor template comprises a wild-type nucleic acid sequence.

[0627] 80. The composition of Set II embodiment 78, wherein the donor template comprises a nucleic acid sequence having one or more mutations relative to the wild-type RHO gene sequence.

[0628] 81. The composition of any one of Set II embodiments 77-80, wherein the donor template ranges in size from 10-10,000 nucleotides.

[0629] 82. The composition of any one of Set II embodiments 77-81, wherein the donor template is a single-stranded DNA template or a single stranded RNA template.

[0630] 83. The composition of any one of Set II embodiments 77-81, wherein the donor template is a double-stranded DNA template.

[0631] 84. The composition of any one of Set II embodiments 77-83, wherein the donor template comprises homologous arms at or near the 5′ and 3′ ends of the donor template that are complementary to sequences flanking cleavage sites in the RHO target nucleic acid introduced by the Class 2 Type V CRISPR protein.

[0632] 85. A nucleic acid comprising the donor template of any one of Set II embodiments 77-84.

[0633] 86. A nucleic acid comprising a sequence that encodes the CasX of any one of Set II embodiments 45-76.

[0634] 87. A nucleic acid comprising a sequence that encodes the gNA of any one of Set II embodiments 1-44.

[0635] 88. The nucleic acid of Set II embodiment 86, wherein the sequence that encodes the CasX protein is codon optimized for expression in a eukaryotic cell.

[0636] 89. A vector comprising the gNA of any one of Set II embodiments 1-44, the CasX protein of any one of Set II embodiments 45-76, or the nucleic acid of any one of Set II embodiments 85-88.

[0637] 90. The vector of Set II embodiment 89, wherein the vector further comprises a promoter.

[0638] 91. The vector of Set II embodiment 89 or Set II embodiment 90, wherein the vector is selected from the group consisting of a retroviral vector, a lentiviral vector, an adenoviral vector, an adeno-associated viral (AAV) vector, a herpes simplex virus (HSV) vector, a virus-like particle (VLP), a plasmid, a minicircle, a nanoplasmid, a DNA vector, and an RNA vector.

[0639] 92. The vector of Set II embodiment 91, wherein the vector is an AAV vector.

[0640] 93. The vector of Set II embodiment 92, wherein the AAV vector is selected from AAV1, AAV2, AAV3, AAV4, AAV5, AAV6, AAV7, AAV8, AAV9, AAV10, AAV11, AAV12, AAV 44.9, AAV-Rh74, or AAVRh10.

[0641] 94. The vector of Set II embodiment 93, wherein the AAV vector is selected from AAV1, AAV2, AAV5, AAV8, or AAV9.

[0642] 95. The vector of Set II embodiment 91, wherein the vector is a retroviral vector.

[0643] 96. The vector of Set II embodiment 91, wherein the vector is a VLP vector comprising one or more components of a gag polyprotein.

[0644] 97. The vector of Set II embodiment 96, wherein the one or more components of the gag polyprotein are selected from the group consisting of matrix protein (MA), nucleocapsid protein (NC), capsid protein (CA), p1-p6 protein, and protease cleavage site.

[0645] 98. The vector of Set II embodiment 96 or Set II embodiment 97, comprising the CasX protein and the gNA.

[0646] 99. The vector of Set II embodiment 98, wherein the CasX protein and the gNA are associated together in an RNP.

[0647] 100. The vector of any one of Set II embodiments 96-99, further comprising the donor template.

[0648] 101. The vector of any one of Set II embodiments 96-100, further comprising a pseudotyping viral envelope glycoprotein or antibody fragment that provides for binding and fusion of the VLP to a target cell.

[0649] 102. A host cell comprising the vector of any one of Set II embodiments 89-101.

[0650] 103. The host cell of Set II embodiment 101, wherein the host cell is selected from the group consisting of BHK, HEK293, HEK293T, NS0, SP2/0, YO myeloma cells, P3X63 mouse myeloma cells, PER, PER.C6, NIH3T3, COS, HeLa, CHO, and yeast cells.

[0651] 104. A method of modifying a RHO target nucleic acid sequence in a population of cells, wherein the RHO target nucleic acid comprises one or more mutations, the method comprising introducing into cells of the population:

a. the composition of any one of Set II embodiments 1-84;
b. the nucleic acid of any one of Set II embodiments 85-88;
c. the vector of any one of Set II embodiments 89-101; or
d. combinations of two or more of (a)-(c),
wherein the RHO target nucleic acid sequence of the cells targeted by the first gNA is modified by the CasX protein.

[0652] 105. The method of Set II embodiment 104, wherein the modifying comprises introducing a single-stranded break in the RHO target nucleic acid sequence of the cells of the population.

[0653] 106. The method of Set II embodiment 104, wherein the modifying comprises introducing a double-stranded break in the RHO target nucleic acid sequence of the cells of the population.

[0654] 107. The method of any one of Set II embodiments 104-106, further comprising introducing into the cells of the population a second gNA or a nucleic acid encoding the second gNA, wherein the second gNA has a targeting sequence complementary to a different or overlapping portion of the RHO target nucleic acid compared to the first gNA, resulting in an additional break in the RHO target nucleic acid of the cells of the population.

[0655] 108. The method of any one of Set II embodiments 104-107, wherein the modifying comprises introducing an insertion, deletion, substitution, duplication, or inversion of one or more nucleotides in the RHO target nucleic acid of the cells of the population.

[0656] 109. The method of any one of Set II embodiments 104-108, wherein the RHO target nucleic acid of at least 10% of the cells of the population is modified.

[0657] 110. The method of Set II embodiment 108, wherein the modifying results in a knocking down or knocking out of the RHO gene in the cells of the population such that expression of non-functional rhodopsin protein is decreased by at least about 10%, at least about 20%, at least about 30%, at least about 40%, at least about 50%, at least about 60%, at least about 70%, at least about 80%, or at least about 90% in comparison to a cell where the RHO gene has not been modified.

[0658] 111. The method of Set II embodiment 108, wherein the RHO gene of the cells of the population is modified such that at least about 10%, at least about 20%, at least about 30%, at least about 40%, at least about 50%, at least about 60%, at least about 70%, at least about 80%, or at least about 90% of the modified cells do not express a detectable level of non-functional rhodopsin protein.

[0659] 112. The method of Set II embodiment 108, wherein the modifying results in a correction or compensation of the mutation of the RHO gene in the cells of the population such that functional rhodopsin protein is expressed by the cells.

[0660] 113. The method of Set II embodiment 108, wherein expression of the functional rhodopsin protein by the cells of the population is increased by at least about 10%, at least about 20%, at least about 30%, at least about 40%, at least about 50%, at least about 60%, at least about 70%, at least about 80%, or at least about 90% in comparison to a cell where the RHO gene has not been modified.

[0661] 114. The method of any one of Set II embodiments 104-107, wherein the method comprises insertion of the donor template into the break site(s) of the RHO gene target nucleic acid sequence of the cells of the population.

[0662] 115. The method of Set II embodiment 114, wherein the insertion of the donor template is mediated by homology-directed repair (HDR) or homology-independent targeted integration (HITI).

[0663] 116. The method of Set II embodiment 114 or Set II embodiment 115, wherein insertion of the donor template results in a correction or compensation of the RHO gene in the cells of the population such that functional rhodopsin protein is expressed by the cells.

[0664] 117. The method of Set II embodiment 114, wherein expression of the functional rhodopsin protein by the cells of the population is increased by at least about 10%, at least about 20%, at least about 30%, at least about 40%, at least about 50%, at least about 60%, at least about 70%, at least about 80%, or at least about 90% in comparison to a cell where the RHO gene has not been modified.

[0665] 118. The method of any one of Set II embodiments 114-116, wherein the RHO gene of the cells of the population is modified such that at least about 50%, at least about 60%, at least about 70%, at least about 75%, at least about 80%, at least about 85%, at least about 90%, or at least about 95% of the modified cells express a detectable level of functional rhodopsin.

[0666] 119. The method of Set II embodiment 114 or Set II embodiment 115, wherein insertion of the donor template results in a knocking down or knocking out the RHO gene in the cells of the population such that expression of a non-functional rhodopsin protein is decreased by at least about 10%, at least about 20%, at least about 30%, at least about 40%, at least about 50%, at least about 60%, at least about 70%, at least about 80%, or at least about 90% in comparison to a cell where the RHO gene has not been modified of the RHO gene in the cells of the population.

[0667] 120. The method of Set II embodiment 114 or Set II embodiment 115, wherein the RHO gene of the cells of the population is modified such that at least about 10%, at least about 20%, at least about 30%, at least about 40%, at least about 50%, at least about 60%, at least about 70%, at least about 80%, or at least about 90% of the modified cells do not express a detectable level of non-functional rhodopsin protein.

[0668] 121. The method of any one of Set II embodiments 104-120, wherein the cells are eukaryotic.

[0669] 122. The method of Set II embodiment 121, wherein the eukaryotic cells are selected from the group consisting of rodent cells, mouse cells, rat cells, and non-human primate cells.

[0670] 123. The method of Set II embodiment 121, wherein the eukaryotic cells are human cells.

[0671] 124. The method of Set II embodiment 121-123, wherein the eukaryotic cells are selected from the group consisting of a neuron, a rod photoreceptor cell, a retinal progenitor cell, a pluripotent stem cell (iPSC), a fibroblast, and a Müller glial cell.

[0672] 125. The method of any one of Set II embodiment 104-124, wherein the modifying of the RHO gene target nucleic acid sequence of the population of cells occurs in vitro or ex vivo.

[0673] 126. The method of Set II embodiments 104-124, wherein the modifying of the RHO gene target nucleic acid sequence of the population of cells occurs in vivo in a subject.

[0674] 127. The method of Set II embodiment 126, wherein the subject is selected from the group consisting of a rodent, a mouse, a rat, and a non-human primate.

[0675] 128. The method of Set II embodiment 126, wherein the subject is a human.

[0676] 129. The method of any one of Set II embodiments 126-128, wherein the method comprises administering a therapeutically effective dose of an AAV vector to the subject.

[0677] 130. The method of Set II embodiment 129, wherein the AAV vector is administered to the subject at a dose of at least about 1×10⁵ vector genomes (vg), at least about 1×10⁵ vector genomes (vg)/kg, at least about 1×10⁶ vg/kg, at least about 1×10⁷ vg/kg, at least about 1×10⁸ vg/kg, at least about 1×10⁹ vg/kg, at least about 1×10¹⁰ vg/kg, at least about 1×10¹¹ vg/kg, at least about 1×10¹² vg/kg, at least about 1×10¹³ vg/kg, at least about 1×10¹⁴ vg/kg, at least about 1×10¹⁵ vg/kg, or at least about 1×10¹⁶ vg/kg.

[0678] 131. The method of Set II embodiment 129, wherein the AAV vector is administered to the subject at a dose of at least about 1×10⁵ vg/kg to about 1×10¹⁶ vg/kg, at least about 1×10⁶ vg/kg to about 1×10¹⁵ vg/kg, at least about 1×10⁷ vg/kg to about 1×10¹⁴ vg/kg, at least about 1×10⁸ vg/kg to about 1×10¹³ vg/kg, at least about 1×10⁹ vg/kg to about 1×10¹² vg/kg, or at least about 1×10¹⁰ vg/kg to about 1×10¹¹ vg/kg.

[0679] 132. The method of any one of Set II embodiments 126-128, wherein the method comprises administering a therapeutically effective dose of a VLP to the subject.

[0680] 133. The method of Set II embodiment 132, wherein the VLP is administered to the subject at a dose of at least about 1×10⁵ particles/kg, at least about 1×10⁶ particles/kg, at least about 1×10⁷ particles/kg, at least about 1×10⁸ particles/kg, at least about 1×10⁹ particles/kg, at least about 1×10¹⁰ particles/kg, at least about 1×10¹¹ particles/kg, at least about 1×10¹² particles/kg, at least about 1×10¹³ particles/kg, at least about 1×10¹⁴ particles/kg, at least about 1×10¹⁵ particles/kg, at least about 1×101⁶ particles/kg.

[0681] 134. The method of Set II embodiment 132, wherein the VLP is administered to the subject at a dose of at least about 1×10⁵ particles/kg to about 1×10¹⁶ particles/kg, at least about 1×10⁶ particles/kg to about 1×10¹⁵ particles/kg, at least about 1×10⁷ particles/kg to about 1×10¹⁴ particles/kg, at least about 1×10⁸ particles/kg to about 1×10¹³ particles/kg, at least about 1×10⁹ particles/kg to about 1×10¹² particles/kg, at least about 1×10¹⁰ particles/kg to about 1×10¹¹ particles/kg.

[0682] 135. The method of any one of Set II embodiments 127-134 wherein the vector or VLP is administered to one or both eyes of the subject by a route of administration selected from intraocular, intravitreal, subretinal, or suprachoroidal injection or implantation.

[0683] 136. The method of any one of Set II embodiments 104-134, further comprising contacting the RHO target nucleic acid sequence of the population of cells with:

a. an additional CRISPR nuclease and a gNA targeting a different or overlapping portion of the RHO target nucleic acid compared to the first gNA;
b. a polynucleotide encoding the additional CRISPR nuclease and the gNA of (a);
c. a vector comprising the polynucleotide of (b); or
d. a VLP comprising the additional CRISPR nuclease and the gNA of (a);
wherein the contacting results in modification of the RHO gene at a different location in the sequence compared to the sequence targeted by the first gNA.

[0684] 137. The method of Set II embodiment 136, wherein the additional CRISPR nuclease is a CasX protein having a sequence different from the CasX protein of any of the preceding Set II embodiments.

[0685] 138. The method of Set II embodiment 136, wherein the additional CRISPR nuclease is not a CasX protein.

[0686] 139. The method of Set II embodiment 138, wherein the additional CRISPR nuclease is selected from the group consisting of Cas9, Cas12a, Cas12b, Cas12c, Cas12d (CasY), Cas12J, Cas13a, Cas13b, Cas13c, Cas13d, CasX, CasY, Cas14, Cpf1, C2c1, Csn2, Cas Phi, and sequence variants thereof.

[0687] 140. A population of cells modified by the method of any one of Set II embodiments 104-139, wherein the cells have been modified such that at least 70%, at least 75%, at least 80%, at least 85%, at least 90%, or at least 95% of the modified cells do not express a detectable level of non-functional rhodopsin protein.

[0688] 141. A population of cells modified by the method of any one of Set II embodiments 104-139, wherein the mutation of the RHO target nucleic acid is corrected or compensated for in the modified cells of the population, resulting in expression of a functional rhodopsin protein by the modified cells.

[0689] 142. The population of cells of Set II embodiment 141, wherein the cells have been modified such that expression of a functional rhodopsin protein is increased by at least about 10%, at least about 20%, at least about 30%, at least about 40%, at least about 50%, at least about 60%, at least about 70%, at least about 80%, or at least about 90% in comparison to a cell where the RHO gene has not been modified.

[0690] 143. The population of cells of any one of Set II embodiment 140-142, wherein the cells are selected from the group consisting of a neuron, a rod photoreceptor cell, a retinal progenitor cell, a pluripotent stem cell (iPSC), a fibroblast, and a Müller glial cell.

[0691] 144. A method of treating a RHO-related disease in a subject in need thereof, the method comprising administering to one or both eyes of the subject a therapeutically effective amount of the cells of any one of Set II embodiments 140-143.

[0692] 145. The method of Set II embodiment 144, wherein the RHO-related disease is retinitis pigmentosa.

[0693] 146. The method of Set II embodiment 144 or Set II embodiment 145, wherein the subject is selected from the group consisting of a rodent, a mouse, a rat, and a non-human primate.

[0694] 147. The method of any one of Set II embodiments 144-146, wherein the subject is a human.

[0695] 148. The method of any one of Set II embodiments 144-147, wherein the cells are autologous with respect to the subject to be administered the cells.

[0696] 149. The method of any one of Set II embodiments 144-147 wherein the cells are allogeneic with respect to the subject to be administered the cells.

[0697] 150. The method of any one of Set II embodiments 144-149, wherein the cells are administered by a route of administration selected from intraocular, intravitreal, subretinal, or suprachoroidal injection or implantation.

[0698] 151. A method of treating a RHO-related disease in a subject in need thereof, comprising modifying a RHO gene having one or more mutations in eye cells of the subject, the modifying comprising contacting said cells in one or both eyes with a therapeutically effective dose of:

a. the composition of any one of Set II embodiments 1-84;
b. the nucleic acid of any one of Set II embodiments 85-88;
c. the vector as in any one of Set II embodiments 89-95;
d. the VLP of any one of Set II embodiments 96-101; or
e. combinations of two or more of (a)-(d),
wherein the RHO gene of the cells targeted by the first gNA is modified by the CasX protein.

[0699] 152. The method of Set II embodiment 151, wherein the modifying comprises introducing a single-stranded break in the RHO gene of the cells.

[0700] 153. The method of Set II embodiment 151, wherein the modifying comprises introducing a double-stranded break in the RHO gene of the cells.

[0701] 154. The method of any one of Set II embodiments 151-153, further comprising introducing into the cells of the subject a second gNA or a nucleic acid encoding the second gNA, wherein the second gNA has a targeting sequence complementary to a different or overlapping portion of the target nucleic acid compared to the first gNA, resulting in an additional break in the RHO target nucleic acid of the cells of the subject.

[0702] 155. The method of any one of Set II embodiments 151-153, wherein the modifying comprises introducing an insertion, deletion, substitution, duplication, or inversion of one or more nucleotides in the RHO gene of the cells.

[0703] 156. The method of any one of Set II embodiments 151-154, wherein the modifying comprises insertion of the donor template into the break site(s) of the RHO gene target nucleic acid sequence of the cells.

[0704] 157. The method of Set II embodiment 156, wherein the insertion of the donor template is mediated by homology-directed repair (HDR) or homology-independent targeted integration (HITI).

[0705] 158. The method of any one of Set II embodiments 151-157, wherein the modifying results in a correction of or compensation for the mutation(s) in the RHO gene in the modified cells of the subject.

[0706] 159. The method of Set II embodiment 158, wherein correction of the mutation results in expression of functional rhodopsin protein by the modified cells of the subject.

[0707] 160. The method of Set II embodiment 158 or Set II embodiment 159, wherein the RHO gene of the modified cells express increased levels of a functional rhodopsin protein, wherein the increase is at least about 10%, at least about 20%, at least about 30%, at least about 40%, at least about 50%, at least about 60%, at least about 70%, at least about 80%, or at least about 90% in comparison to a cell with a RHO gene that has not been modified.

[0708] 161. The method of any one of Set II embodiments 151-157, wherein the modifying results in a knocking down or knocking out the RHO gene in the modified cells of the subject such that at least about 10%, at least about 20%, at least about 30%, at least about 40%, at least about 50%, at least about 60%, at least about 70%, at least about 80%, or at least about 90% of the modified cells do not express a detectable level of non-functional rhodopsin protein.

[0709] 162. The method of any one of Set II embodiments 151-157, wherein the modifying results in a knocking down or knocking out the RHO gene in the modified cells of the subject such that expression of non-functional rhodopsin protein in the subject is decreased by at least about 10%, at least about 20%, at least about 30%, at least about 40%, at least about 50%, at least about 60%, at least about 70%, at least about 80%, or at least about 90% in comparison to a subject where the RHO gene has not been modified.

[0710] 163. The method of any one of Set II embodiments 151-162, wherein the subject is selected from the group consisting of rodent, mouse, rat, and non-human primate.

[0711] 164. The method of any one of Set II embodiments 151-162, wherein the subject is a human.

[0712] 165. The method of any one of Set II embodiments 151-162, wherein the cells that are modified are selected from the group consisting of a neuron, a rod photoreceptor cell, a retinal progenitor cell, a pluripotent stem cell (iPSC), a fibroblast, and a Müller glial cell.

[0713] 166. The method of any one of Set II embodiments 151-164, wherein the RHO-related disease is retinitis pigmentosa.

[0714] 167. The method of any one of Set II embodiments 151-166, wherein the vector is administered to the subject at a therapeutically-effective dose.

[0715] 168. The method of any one of Set II embodiments 151-167, wherein the vector is an AAV, and is administered to the subject at a dose of at least 1×10⁵ vector genomes (vg), at least about 1×10⁵ vector genomes (vg)/kg, at least about 1×10⁶ vg/kg, at least about 1×10⁷ vg/kg, at least about 1×10⁸ vg/kg, at least about 1×10⁹ vg/kg, at least about 1×10¹⁰ vg/kg, at least about 1×10¹¹ vg/kg, at least about 1×10¹² vg/kg, at least about 1×10¹³ vg/kg, at least about 1×10¹⁴ vg/kg, at least about 1×10¹⁵ vg/kg, or at least about 1×10¹⁶ vg/kg.

[0716] 169. The method of any one of Set II embodiments 151-167, wherein the vector is an AAV, and is administered to the subject at a dose of at least about 1×10⁵ vg/kg to about 1×10¹⁶ vg/kg, at least about 1×10⁶ vg/kg to about 1×10¹⁵ vg/kg, at least about 1×10⁷ vg/kg to about 1×10¹⁴ vg/kg, at least about 1×10⁸ vg/kg to about 1×10¹³ vg/kg, at least about 1×10⁹ vg/kg to about 1×10¹² vg/kg, or at least about 1×10¹⁰ vg/kg to about 1×10¹¹ vg/kg.

[0717] 170. The method of any one of Set II embodiments 151-166, wherein the VLP is administered to the subject at a therapeutically-effective dose.

[0718] 171. The method of Set II embodiment 170, wherein the VLP is administered to the subject at a dose of at least about 1×10⁵ particles/kg, at least about 1×10⁶ particles/kg, at least about 1×10⁷ particles/kg, at least about 1×10⁸ particles/kg, at least about 1×10⁹ particles/kg, at least about 1×10¹⁰ particles/kg, at least about 1×10¹¹ particles/kg, at least about 1×10¹² particles/kg, at least about 1×10¹³ particles/kg, at least about 1×10¹⁴ particles/kg, at least about 1×10¹⁵ particles/kg, at least about 1×101⁶ particles/kg.

[0719] 172. The method of Set II embodiment 170, wherein the VLP is administered to the subject at a dose of at least about 1×10⁵ particles/kg to about 1×10¹⁶ particles/kg, at least about 1×10⁶ particles/kg to about 1×10¹⁵ particles/kg, at least about 1×10⁷ particles/kg to about 1×10¹⁴ particles/kg, at least about 1×10⁸ particles/kg to about 1×10¹³ particles/kg, at least about 1×10⁹ particles/kg to about 1×10¹² particles/kg, at least about 1×10¹⁰ particles/kg to about 1×10¹¹ particles/kg.

[0720] 173. The method of any one of Set II embodiments 167-172, wherein the vector or VLP is administered to one or both eyes of the subject by a route of administration selected from intraocular, intravitreal, subretinal, or suprachoroidal injection or implantation.

[0721] 174. The method of any one of Set II embodiments 151-173, wherein the method results in improvement in at least one clinically-relevant endpoint selected from the group consisting of mean change or mean rate of change in: 1) best corrected visual acuity (BCVA); 2) visual field sensitivity (including analysis of hill of vision volumes); 3) retinal sensitivity measured by full-field stimulus testing (FST); 4) multiluminance mobility tests; 5) electrophysiological measures of retinal function; 6) optical coherence tomography (OCT) documenting the rate of photoreceptor loss; and 7) hypo- or hyperfluorescent lesion size on fundus autofluorescence; 8) color vision; 9) contrast sensitivity; 10) gaze tracking; 11) light aversion; 12) macular sensitivity.

[0722] 175. The method of any one of Set II embodiments 151-173, wherein the method results in improvement in at least two clinically-relevant endpoints selected from the group consisting of mean change or mean rate of change in: 1) best corrected visual acuity (BCVA); 2) visual field sensitivity (including analysis of hill of vision volumes); 3) retinal sensitivity measured by full-field stimulus testing (FST); 4) multiluminance mobility tests; 5) electrophysiological measures of retinal function; 6) optical coherence tomography (OCT) documenting the rate of photoreceptor loss; and 7) hypo- or hyperfluorescent lesion size on fundus autofluorescence; 8) color vision; 9) contrast sensitivity; 10) gaze tracking; 11) light aversion; 12) macular sensitivity.

[0723] 176. The composition of Set II embodiment 1, wherein the target nucleic acid sequence is complementary to a non-target strand sequence located 1 nucleotide 3′ of a protospacer adjacent motif (PAM) sequence.

[0724] 177. The composition of Set II embodiment 176, wherein the PAM sequence comprises a TC motif.

[0725] 178. The composition of Set II embodiment 177, wherein the PAM sequence comprises ATC, GTC, CTC or TTC.

[0726] 179. The composition of any one of Set II embodiments 176-178, wherein the Class 2 Type V CRISPR protein comprises a RuvC domain.

[0727] 180. The composition of Set II embodiment 179, wherein the RuvC domain generates a staggered double-stranded break in the target nucleic acid sequence.

[0728] 181. The composition of any one of Set II embodiments 176-180, wherein the Class 2 Type V CRISPR protein does not comprise an HNH nuclease domain.

[0729] 182. A composition of any one of Set II embodiments 1-84 or Set II embodiments 176-181; a nucleic acid of any one of Set II embodiments 85-88; a vector of any one of Set II embodiments 89-95; a VLP of any one of Set II embodiments 96-101; or combinations thereof, for use as a medicament for the treatment of a RHO-related disease.

[0730] The present description sets forth numerous exemplary configurations, methods, parameters, and the like. It should be recognized, however, that such description is not intended as a limitation on the scope of the present disclosure, but is instead provided as a description of exemplary embodiments.

### EXAMPLES

### Example 1: Creation, Expression and Purification of CasX Stx2

### 1. Growth and Expression

[0731] An expression construct for CasX Stx2 (also referred to herein as CasX2), derived from Planctomycetes (having the amino acid sequence of SEQ ID NO: 2 and encoded by the sequence of the Table 5, below), was constructed from gene fragments (Twist Biosciences) that were codon optimized for E. coli. The assembled construct contains a TEV-cleavable, C-terminal, TwinStrep tag and was cloned into a pBR322-derivative plasmid backbone containing an ampicillin resistance gene. The expression construct was transformed into chemically competent BL21*(DE3) E. coli and a starter culture was grown overnight in LB broth supplemented with carbenicillin at 37° C., 200 RPM, in UltraYield Flasks (Thomson Instrument Company). The following day, this culture was used to seed expression cultures at a 1:100 ratio (starter culture:expression culture). Expression cultures were Terrific Broth (Novagen) supplemented with carbenicillin and grown in UltraYield flasks at 37° C., 200 RPM. Once the cultures reached an OD of 2, they were chilled to 16° C. and IPTG (isopropyl β-D-1-thiogalactopyranoside) was added to a final concentration of 1 mM, from a 1 M stock. The cultures were induced at 16° C., 200 RPM for 20 hours before being harvested by centrifugation at 4,000×g for 15 minutes, 4° C. The cell paste was weighed and resuspended in lysis buffer (50 mM HEPES-NaOH, 250 mM NaCl, 5 mM MgCl₂, 1 mM TCEP, 1 mM benzamidine-HCL, 1 mM PMSF, 0.5% CHAPS, 10% glycerol, pH 8) at a ratio of 5 mL of lysis buffer per gram of cell paste. Once resuspended, the sample was frozen at −80° C. until purification.

TABLE 5
DNA sequence of CasX Stx2 construct

| Construct | DNA Sequence |
|---|---|
| SV40 NLS-CasX- | (SEQ ID NO: 236) |
| SV40 NLS-TEV | |
| cleavage site- | |
| TwinStrep tag | |

### 2. Purification

[0732] Frozen samples were thawed overnight at 4° C. with magnetic stirring. The viscosity of the resulting lysate was reduced by sonication and lysis was completed by homogenization in three passes at 17k PSI using an Emulsiflex C3 (Avestin). Lysate was clarified by centrifugation at 50,000× g, 4° C., for 30 minutes and the supernatant was collected. The clarified supernatant was applied to a Heparin 6 Fast Flow column (GE Life Sciences) by gravity flow. The column was washed with 5 CV of Heparin Buffer A (50 mM HEPES-NaOH, 250 mM NaCl, 5 mM MgCl₂, 1 mM TCEP, 10% glycerol, pH 8), then with 5 CV of Heparin Buffer B (Buffer A with the NaCl concentration adjusted to 500 mM). Protein was eluted with 5 CV of Heparin Buffer C (Buffer A with the NaCl concentration adjusted to 1 M), collected in fractions. Fractions were assayed for protein by Bradford Assay and protein-containing fractions were pooled. The pooled heparin eluate was applied to a Strep-Tactin XT Superflow column (IBA Life Sciences) by gravity flow. The column was washed with 5 CV of Strep Buffer (50 mM HEPES-NaOH, 500 mM NaCl, 5 mM MgCl₂, 1 mM TCEP, 10% glycerol, pH 8). Protein was eluted from the column using 5 CV of Strep Buffer with 50 mM D-Biotin added and collected in fractions. CasX-containing fractions were pooled, concentrated at 4° C. using a 30 kDa cut-off spin concentrator, and purified by size exclusion chromatography on a Superdex 200 pg column (GE Life Sciences). The column was equilibrated with SEC Buffer (25 mM sodium phosphate, 300 mM NaCl, 1 mM TCEP, 10% glycerol, pH 7.25) operated by an AKTA Pure FPLC system (GE Life Sciences). CasX-containing fractions that eluted at the appropriate molecular weight were pooled, concentrated at 4° C. using a 30 kDa cut-off spin concentrator, aliquoted, and snap-frozen in liquid nitrogen before being stored at −80° C.

### 3. Results

[0733] Samples from throughout the purification were resolved by SDS-PAGE and visualized by colloidal Coomassie staining, as shown in FIG. 1 and FIG. 3. In FIG. 1, the lanes, from left to right, are: molecular weight standards, Pellet: insoluble portion following cell lysis, Lysate: soluble portion following cell lysis, Flow Thru: protein that did not bind the Heparin column, Wash: protein that eluted from the column in wash buffer, Elution: protein eluted from the heparin column with elution buffer, Flow Thru: Protein that did not bind the StrepTactinXT column, Elution: protein eluted from the StrepTactin XT column with elution buffer, Injection: concentrated protein injected onto the s200 gel filtration column, Frozen: pooled fractions from the s200 elution that have been concentrated and frozen. In FIG. 3, the lanes from right to left, are the injection (sample of protein injected onto the gel filtration column,) molecular weight markers, lanes 3-9 are samples from the indicated elution volumes. Results from the gel filtration are shown in FIG. 2. The 68.36 mL peak corresponds to the apparent molecular weight of CasX and contained the majority of CasX protein. The average yield was 0.75 mg of purified CasX protein per liter of culture, with 75% purity, as evaluated by colloidal Coomassie staining.

### Example 2: Generation of CasX 119, 438, and 457

[0734] In order to generate the CasX 119, 438, and 457 constructs (sequences in Table 6), the codon-optimized CasX 37 construct (based on the CasX Stx2 construct of Example 1, encoding Planctomycetes CasX SEQ ID NO: 2, with a A708K substitution and a [P793] deletion with fused NLS, and linked guide and non-targeting sequences) was cloned into a mammalian expression plasmid (pStX; see FIG. 4) using standard cloning methods. To build CasX 119, the CasX 37 construct DNA was PCR amplified in two reactions using Q5 DNA polymerase (New England BioLabs Cat #M0491L) according to the manufacturer's protocol, using primers oIC539 and oIC88 as well as oIC87 and oIC540 respectively (see FIG. 5). To build CasX 457, the CasX 365 construct DNA was PCR amplified in four reactions using Q5 DNA polymerase (New England BioLabs Cat #M0491L) according to the manufacturer's protocol, using primers oIC539 and oIC212, oIC211 and oIC376, oIC375 and oIC551, and oIC550 and oIC540 respectively. To build CasX 438, the CasX 119 construct DNA was PCR amplified in four reactions using Q5 DNA polymerase according to the manufacturer's protocol, using primers oIC539 and oIC689, oIC688 and oIC376, oIC375 and oIC551, and oIC550 and oIC540 respectively. The resulting PCR amplification products were then purified using Zymoclean DNA clean and concentrator (Zymo Research Cat #4014) according to the manufacturer's protocol. The pStX backbone was digested using XbaI and SpeI in order to remove the 2931 base pair fragment of DNA between the two sites in plasmid pStx34. The digested backbone fragment was purified by gel extraction from a 1% agarose gel (Gold Bio Cat #A-201-500) using Zymoclean Gel DNA Recovery Kit (Zymo Research Cat #D4002) according to the manufacturer's protocol. The three fragments were then pieced together using Gibson assembly (New England BioLabs Cat #E2621S) following the manufacturer's protocol. Assembled products in the pStx34 were transformed into chemically-competent or electro-competent Turbo Competent E. coli bacterial cells, plated on LB-Agar plates (LB: Teknova Cat #L9315, Agar: Quartzy Cat #214510) containing carbenicillin. Individual colonies were picked and miniprepped using Qiagen spin Miniprep Kit (Qiagen Cat #27104) following the manufacturer's protocol. The resultant plasmids were sequenced using Sanger sequencing to ensure correct assembly. pStX34 includes an EF-1α promoter for the protein as well as a selection marker for both puromycin and carbenicillin. Sequences encoding the targeting sequences that target the gene of interest were designed based on CasX PAM locations. Targeting sequence DNA was ordered as single-stranded DNA (ssDNA) oligos (Integrated DNA Technologies) consisting of the targeting sequence and the reverse complement of this sequence. These two oligos were annealed together and cloned into pStX individually or in bulk by Golden Gate assembly using T4 DNA Ligase (New England BioLabs Cat #M0202L) and an appropriate restriction enzyme for the plasmid. Golden Gate products were transformed into chemically or electro-competent cells such as NEB Turbo competent E. coli (NEB Cat #C2984I), plated on LB-Agar plates containing carbenicillin. Individual colonies were picked and miniprepped using Qiagen spin Miniprep Kit and following the manufacturer's protocol. The resultant plasmids were sequenced using Sanger sequencing to ensure correct ligation. SaCas9 and SpyCas9 control plasmids were prepared similarly to pStX plasmids described above, with the protein and guide regions of pStX exchanged for the respective protein and guide. Targeting sequences for SaCas9 and SpyCas9 were either obtained from the literature or were rationally designed according to established methods. The expression and recovery of the CasX 119, 438 and 457 proteins was performed using the general methodologies of Example 1 (however the DNA sequences were codon optimized for expression in E. coli).

[0735] CasX Variant 119: following the same expression and purification scheme for WT CasX, the following results were obtained for CasX variant 119. Samples from throughout the purification procedure were resolved by SDS-PAGE and visualized by colloidal Coomassie staining, as shown in FIG. 6 and FIG. 8. Results from the gel filtration are shown in FIG. 7. The average yield was 11.7 mg of purified CasX protein per liter of culture at 95% purity, as evaluated by colloidal Coomassie staining.

[0736] CasX Variant 438: Following the same expression and purification scheme for WT CasX, the following results were obtained for CasX variant 438. Samples from throughout the purification procedure were resolved by SDS-PAGE and visualized by colloidal Coomassie staining, as shown in FIGS. 9 and 11. Results from the gel filtration are shown in FIG. 10. The average yield was 13.1 mg of purified CasX protein per liter of culture at 97.5% purity, as evaluated by colloidal Coomassie staining.

[0737] CasX Variant 457: Following the same expression and purification scheme for WT CasX, the following results were obtained for CasX variant 457. Samples from throughout the purification procedure were resolved by SDS-PAGE and visualized by colloidal Coomassie staining, as shown in FIGS. 12 and 14 and gel filtration, as shown in FIG. 13. The average yield was 9.76 mg of purified CasX protein per liter of culture at 91.6% purity, as evaluated by colloidal Coomassie staining.

[0738] Overall, the results support that CasX variants can be produced and recovered at high levels of purity sufficient for experimental assays and evaluation.

TABLE 6
Sequences of CasX 119, 438 and 457

| | DNA | |
|---|---|---|
| Construct | Sequence | Amino Acid Sequence |
| CasX 119 | (SEQ ID | QEIKRINKIRRRLVKDSNTK |
| | NO: 240) | KAGKTGPMKTLLVRVMTPDL |
| | | RERLENLRKKPENIPQPISN |
| | | TSRANLNKLLTDYTEMKKAI |
| | | LHVYWEEFQKDPVGLMSRVA |
| | | QPAPKNIDQRKLIPVKDGNE |
| | | RLTSSGFACSQCCQPLYVYK |
| | | LEQVNDKGKPHTNYFGRCNV |
| | | SEHERLILLSPHKPEANDEL |
| | | VTYSLGKFGQRALDFYSIHV |
| | | TRESNHPVKPLEQIGGNSCA |
| | | SGPVGKALSDACMGAVASFL |
| | | TKYQDIILEHQKVIKKNEKR |
| | | LANLKDIASANGLAFPKITL |
| | | PPQPHTKEGIEAYNNVVAQI |
| | | VIWVNLNLWQKLKIGRDEAK |
| | | PLQRLKGFPSFPLVERQANE |
| | | VDWWDMVCNVKKLINEKKED |
| | | GKVFWQNLAGYKRQEALRPY |
| | | LSSEEDRKKGKKFARYQFGD |
| | | LLLHLEKKHGEDWGKVYDEA |
| | | WERIDKKVEGLSKHIKLEEE |
| | | RRSEDAQSKAALTDWLRAKA |
| | | SFVIEGLKEADKDEFCRCEL |
| | | KLQKWYGDLRGKPFAIEAEN |
| | | SILDISGFSKQYNCAFIWQK |
| | | DGVKKLNLYLIINYFKGGKL |
| | | RFKKIKPEAFEANRFYTVIN |
| | | KKSGEIVPMEVNFNFDDPNL |
| | | IILPLAFGKRQGREFIWNDL |
| | | LSLETGSLKLANGRVIEKTL |
| | | YNRRTRQDEPALFVALTFER |
| | | REVLDSSNIKPMNLIGIDRG |
| | | ENIPAVIALTDPEGCPLSRF |
| | | KDSLGNPTHILRIGESYKEK |
| | | QRTIQAKKEVEQRRAGGYSR |
| | | KYASKAKNLADDMVRNTARD |
| | | LLYYAVTQDAMLIFENLSRG |
| | | FGRQGKRTFMAERQYTRMED |
| | | WLTAKLAYEGLSKTYLSKTL |
| | | AQYTSKTCSNCGFTITSADY |
| | | DRVLEKLKKTATGWMTTING |
| | | KELKVEGQITYYNRYKRQNV |
| | | VKDLSVELDRLSEESVNNDI |
| | | SSWTKGRSGEALSLLKKRFS |
| | | HRPVQEKFVCLNCGFETHAD |
| | | EQAALNIARSWLFLRSQEYK |
| | | KYQTNKTTGNTDKRAFVETW |
| | | QSFYRKKLKEVWKPAV |
| | | (SEQ ID NO: 237) |
| CasX 457 | (SEQ ID | QEIKRINKIRRRLVKDSNTK |
| | NO: 241) | KAGKTGPMKTLLVRVMTPDL |
| | | RERLENLRKKPENIPQPISN |
| | | TSRANLNKLLTDYTEMKKAI |
| | | LHVYWEEFQKDPVGLMSRVA |
| | | QPAPKNIDQRKLIPVKDGNE |
| | | RLTSSGFACSQCCQPLYVYK |
| | | LEQVNDKGKPHTNYFGRCNV |
| | | SEHERLILLSPHKPEANDEL |
| | | VTYSLGKFGQRALDFYSIHV |
| | | TRESNHPVKPLEQIGGNSCA |
| | | SGPVGKALSDACMGAVASFL |
| | | TKYQDIILEHKKVIKKNEKR |
| | | LANLKDIASANGLAFPKITL |
| | | PPQPHTKEGIEAYNNVVAQI |
| | | VIWVNLNLWQKLKIGRDEAK |
| | | PLQRLKGFPSFPLVERQANE |
| | | VDWWDMVCNVKKLINEKKED |
| | | GKVFWQNLAGYKRQEALRPY |
| | | LSSPEDRKKGKKFARYQLGD |
| | | LLLHLEKKHGEDWGKVYDEA |
| | | WERIDKKVEGLSKHIKLEEE |
| | | RRSEDAQSKAALTDWLRAKA |
| | | SFVIEGLKEADKDEFCRCEL |
| | | KLQKWYGDLRGKPFAIEAEN |
| | | SILDISGFSKQYNCAFIWQK |
| | | DGVKKLNLYLIINYFKGGKL |
| | | RFKKIKPEAFEANRFYTVIN |
| | | KKSGEIVPMEVNFNFDDPNL |
| | | IILPLAFGKRQGREFIWNDL |
| | | LSLETGSLKLANGRVIEKPL |
| | | YNRRTRQDEPALFVALTFER |
| | | REVLDSSNIKPMNLIGVDRG |
| | | ENIPAVIALTDPEGCPLSRF |
| | | KDSLGNPTHILRIGESYKEK |
| | | QRTIQAKKEVEQRRAGGYSR |
| | | KYASKAKNLADDMVRNTARD |
| | | LLYYAVTQDAMLIFENLSRG |
| | | FGRQGKRTFMAERQYTRMED |
| | | WLTAKLAYEGLSKTYLSKTL |
| | | AQYTSKTCSNCGFTITSADY |
| | | DRVLEKLKKTATGWMTTING |
| | | KELKVEGQITYYNRRKRQNV |
| | | VKDLSVELDRLSEESVNNDI |
| | | SSWTKGRSGEALSLLKKRFS |
| | | HRPVQEKFVCLNCGFETHAD |
| | | EQAALNIARSWLFLRSQEYK |
| | | KYQTNKTTGNTDKRAFVETW |
| | | QSFYRKKLKEVWKPAV |
| | | (SEQ ID NO: 238) |
| CasX 438 | (SEQ ID | QEIKRINKIRRRLVKDSNTK |
| | NO: 242) | KAGKTGPMKTLLVRVMTPDL |
| | | RERLENLRKKPENIPQPISN |
| | | TSRANLNKLLTDYTEMKKAI |
| | | LHVYWEEFQKDPVGLMSRVA |
| | | QPAPKNIDQRKLIPVKDGNE |
| | | RLTSSGFACSQCCQPLYVYK |
| | | LEQVNDKGKPHTNYFGRCNV |
| | | SEHERLILLSPHKPEANDEL |
| | | VTYSLGKFGQRALDFYSIHV |
| | | TRESNHPVKPLEQIGGNSCA |
| | | SGPVGKALSDACMGAVASFL |
| | | TKYQDIILEHQKVIKKNEKR |
| | | LANLKDIASANGLAFPKITL |
| | | PPQPHTKEGIEAYNNVVAQI |
| | | VIWVNLNLWQKLKIGRDEAK |
| | | PLQRLKGFPSFPLVERQANE |
| | | VDWWDMVCNVKKLINEKKED |
| | | GKVFWQNLAGYKRQEALRPY |
| | | LSSEEDRKKGKKFARYQLGD |
| | | LLKHLEKKHGEDWGKVYDEA |
| | | WERIDKKVEGLSKHIKLEEE |
| | | RRSEDAQSKAALTDWLRAKA |
| | | SFVIEGLKEADKDEFCRCEL |
| | | KLQKWYGDLRGKPFAIEAEN |
| | | SILDISGFSKQYNCAFIWQK |
| | | DGVKKLNLYLIINYFKGGKL |
| | | RFKKIKPEAFEANRFYTVIN |
| | | KKSGEIVPMEVNFNFDDPNL |
| | | IILPLAFGKRQGREFIWNDL |
| | | LSLETGSLKLANGRVIEKTL |
| | | YNRRTRQDEPALFVALTFER |
| | | REVLDSSNIKPMNLIGVDRG |
| | | ENIPAVIALTDPEGCPLSRF |
| | | KDSLGNPTHILRIGESYKEK |
| | | QRTIQAKKEVEQRRAGGYSR |
| | | KYASKAKNLADDMVRNTARD |
| | | LLYYAVTQDAMLIFENLSRG |
| | | FGRQGKRTFMAERQYTRMED |
| | | WLTAKLAYEGLSKTYLSKTL |
| | | AQYTSKTCSNCGFTITSADY |
| | | DRVLEKLKKTATGWMTTING |
| | | KELKVEGQITYYNRRKRQNV |
| | | VKDLSVELDRLSEESVNNDI |
| | | SSWTKGRSGEALSLLKKRFS |
| | | HRPVQEKFVCLNCGFETHAD |
| | | EQAALNIARSWLFLRSQEYK |
| | | KYQTNKTTGNTDKRAFVETW |
| | | QSFYRKKLKEVWKPAV |
| | | (SEQ ID NO: 239) |

### Example 3: CasX Construct 488, 491, 515 and 527

[0739] In order to generate the CasX 488 construct (sequences in Table 7), the codon-optimized CasX 119 construct (based on the CasX Stx2 construct of Example 1, encoding Planctomycetes CasX SEQ ID NO: 2, with a A708K substitution, a L379R substitution, and a [P793] deletion with fused NLS, and linked guide and non-targeting sequences) was cloned into a destination plasmid (pStX; see FIG. 4) using standard cloning methods. In order to generate the CasX 491 construct (sequences in Table 7), the codon-optimized CasX 484 construct (based on the CasX Stx2 construct of Example 1, encoding Planctomycetes CasX SEQ ID NO: 2, with a A708K substitution, a L379R substitution, a [P793] deletion, a I658V substitution, and a F399L substitution with fused NLS, and linked guide and non-targeting sequences) was cloned into a destination plasmid (pStX; see FIG. 4) using standard cloning methods. Construct CasX 1 (CasX SEQ ID NO: 1) was cloned into a destination vector using standard cloning methods. To build CasX 488, the CasX 119 construct DNA was PCR amplified using Q5 DNA polymerase according to the manufacturer's protocol, using primers oIC765 and oIC762 (see FIG. 5). To build CasX 491, the codon optimized CasX 484 construct DNA was PCR amplified using Q5 DNA polymerase according to the manufacturer's protocol, using primers oIC765 and oIC762 (see FIG. 5). The CasX 1 construct was PCR amplified using Q5 DNA polymerase according to the manufacturer's protocol, using primers oIC766 and oIC784. Each of the PCR products were purified by gel extraction from a 1% agarose gel (Gold Bio Cat #A-201-500) using Zymoclean Gel DNA Recovery Kit according to the manufacturer's protocol. The corresponding fragments were then pieced together using Gibson assembly (New England BioLabs Cat #E2621S) following the manufacturer's protocol. Assembled products in pStx1 were transformed into chemically-competent Turbo Competent E. coli bacterial cells, plated on LB-Agar plates containing kanamycin. Individual colonies were picked and miniprepped using Qiagen spin Miniprep Kit following the manufacturer's protocol. The resultant plasmids were sequenced using Sanger sequencing to ensure correct assembly. The correct clones were then subcloned into the mammalian expression vector pStx34 using restriction enzyme cloning. The pStx34 backbone and the CasX 488 and 491 clones in pStx1 were digested with XbaI and BamHI respectively. The digested backbone and respective insert fragments were purified by gel extraction from a 1% agarose gel (Gold Bio Cat #A-201-500) using Zymoclean Gel DNA Recovery Kit according to the manufacturer's protocol. The clean backbone and insert were then ligated together using T4 Ligase (New England Biolabs Cat #M0202L) according to the manufacturer's protocol. The ligated products were transformed into chemically-competent Turbo Competent E. coli bacterial cells, plated on LB-Agar plates containing carbenicillin. Individual colonies were picked and miniprepped using Qiagen spin Miniprep Kit following the manufacturer's protocol. The resultant plasmids were sequenced using Sanger sequencing to ensure correct assembly.

[0740] To build CasX 515 (sequences in Table 7), the CasX 491 construct DNA was PCR amplified in two reactions using Q5 DNA polymerase according to the manufacturer's protocol, using primers oIC539 and oSH556 as well as oSH555 and oIC540 respectively (see FIG. 5). To build CasX 527 (sequences in Table 7), the CasX 491 construct DNA was PCR amplified in two reactions using Q5 DNA polymerase according to the manufacturer's protocol, using primers oIC539 and oSH584 as well as oSH583 and oIC540 respectively. The PCR products were purified by gel extraction from a 1% agarose gel using Zymoclean Gel DNA Recovery Kit according to the manufacturer's protocol. The pStX backbone was digested using XbaI and SpeI in order to remove the 2931 base pair fragment of DNA between the two sites in plasmid pStx56. The digested backbone fragment was purified by gel extraction from a 1% agarose gel using Zymoclean Gel DNA Recovery Kit according to the manufacturer's protocol. The insert and backbone fragments were then pieced together using Gibson assembly (New England BioLabs Cat #E2621S) following the manufacturer's protocol. Assembled products in the pStx56 were transformed into chemically-competent Turbo Competent E. coli bacterial cells, plated on LB-Agar plates containing kanamycin. Individual colonies were picked and miniprepped using Qiagen spin Miniprep Kit following the manufacturer's protocol. The resultant plasmids were sequenced using Sanger sequencing to ensure correct assembly. pStX34 includes an EF-1α promoter for the protein as well as a selection marker for both puromycin and carbenicillin. pStX56 includes an EF-1α promoter for the protein as well as a selection marker for both puromycin and kanamycin Sequences encoding the targeting sequences that target the gene of interest were designed based on CasX PAM locations. Targeting sequence DNA was ordered as single-stranded DNA (ssDNA) oligos (Integrated DNA Technologies) consisting of the targeting sequence and the reverse complement of this sequence. These two oligos were annealed together and cloned into pStX individually or in bulk by Golden Gate assembly using T4 DNA Ligase and an appropriate restriction enzyme for the plasmid. Golden Gate products were transformed into chemically or electro-competent cells such as NEB Turbo competent E. coli (NEB Cat #C2984I), plated on LB-Agar plates containing the appropriate antibiotic. Individual colonies were picked and miniprepped using Qiaprep spin Miniprep Kit and following the manufacturer's protocol. The resultant plasmids were sequenced using Sanger sequencing to ensure correct ligation. SaCas9 and SpyCas9 control plasmids were prepared similarly to pStX plasmids described above, with the protein and guide regions of pStX exchanged for the respective protein and guide. Targeting sequences for SaCas9 and SpyCas9 were either obtained from the literature or were rationally designed according to established methods. The expression and recovery of the CasX constructs was performed using the general methodologies of Example 1 and are summarized as follows:

[0741] CasX variant 488: following the same expression and purification scheme for WT CasX, the following results were obtained for CasX variant 488. Samples from throughout the purification procedure were resolved by SDS-PAGE and visualized by colloidal Coomassie staining, as well as resolved by gel filtration. The average yield was 2.7 mg of purified CasX protein per liter of culture at 98.8% purity, as evaluated by colloidal Coomassie staining.

[0742] CasX Variant 491: following the same expression and purification scheme for WT CasX, the following results were obtained for CasX variant 488. Samples from throughout the purification procedure were resolved by SDS-PAGE and visualized by colloidal Coomassie staining, as well as resolved by gel filtration. The average yield was 12.4 mg of purified CasX protein per liter of culture at 99.4% purity, as evaluated by colloidal Coomassie staining.

[0743] CasX variant 515: following the same expression and purification scheme for WT CasX, the following results were obtained for CasX variant 488. Samples from throughout the purification procedure were resolved by SDS-PAGE and visualized by colloidal Coomassie staining, as well as resolved by gel filtration. The average yield was 7.8 mg of purified CasX protein per liter of culture at 87.200 purity, as evaluated by colloidal Coomassie staining.

TABLE 7
Sequences of CasX 488, 491, 515 and 527

| | | Amino Acid |
|---|---|---|
| Construct | DNA Sequence | Sequence |
| CasX 488 | CAAGAGATCAAGAGA | QEIKRINKIRRRLVK |
| | ATCAACAAGATCAGA | DSNTKKAGKTGPMKT |
| | AGGAGACTGGTCAAG | LLVRVMTPDLRERLE |
| | GACAGCAACACAAAG | NLRKKPENIPQPISN |
| | AAGGCCGGCAAGACA | TSRANLNKLLTDYTE |
| | GGCCCCATGAAaACC | MKKAILHVYWEEFQK |
| | CTGCTCGTCAGA | DPVGLMSRVAQPASK |
| | GTGATGACCCCTGAC | KIDQNKLKPEMDEKG |
| | CTGAGAGAGCGGCTG | NLTTAGFACSQCGQP |
| | GAAAACCTGAGAAAG | LFVYKLEQVSEKGKA |
| | AAGCCCGAGAACATC | YTNYFGRCNVAEHEK |
| | CCTCAGCCTATCAGC | LILLAQLKPEKDSDE |
| | AACACCAGCAGGGCC | AVTYSLGKFGQRALD |
| | AACCTGAACAAGCTG | FYSIHVTKESTHPVK |
| | CTGACCGACTACACC | PLAQIAGNRYASGPV |
| | GAGATGAAGAAAGCC | GKALSDACMGTIASF |
| | ATCCTGCACGTGTAC | LSKYQDIIIEHQKVV |
| | TGGGAAGAGTTCCAG | KGNQKRLESLRELAG |
| | AAAGACCCCGTGGGC | KENLEYPSVTLPPQP |
| | CTGATGAGCAGAGTT | HTKEGVDAYNEVIAR |
| | GCTCAGCCTGCCAGC | VRMWVNLNLWQKLKL |
| | AAGAAGATCGACCAG | SRDDAKPLLRLKGFP |
| | AACAAGCTGAAGCCC | SFPLVERQANEVDWW |
| | GAGATGGACGAGAAG | DMVCNVKKLINEKKE |
| | GGCAATCTGACCACA | DGKVFWQNLAGYKRQ |
| | GCCGGCTTTGCCTGC | EALRPYLSSEEDRKK |
| | TCTCAGTGTGGCCAG | GKKFARYQFGDLLLH |
| | CCTCTGTTCGTGTAC | LEKKHGEDWGKVYDE |
| | AAGCTGGAACAGGTG | AWERIDKKVEGLSKH |
| | TCCGAGAAAGGCAAG | IKLEEERRSEDAQSK |
| | GCCTACACCAACTAC | AALTDWLRAKASFVI |
| | TTCGGCAGATGTAAC | EGLKEADKDEFCRCE |
| | GTGGCCGAGCACGAG | LKLQKWYGDLRGKPF |
| | AAGCTGATTCTGCTG | AIEAENSILDISGFS |
| | GCCCAGCTGAAACCT | KQYNCAFIWQKDGVK |
| | GAGAAGGACTCTGAT | KLNLYLIINYFKGGK |
| | GAGGCCGTGACCTAC | LRFKKIKPEAFEANR |
| | AGCCTGGGCAAGTTT | FYTVINKKSGEIVPM |
| | GGACAGAGAGCCCTG | EVNFNFDDPNLIILP |
| | GACTTCTACAGCATC | LAFGKRQGREFIWND |
| | CACGTGACCAAAGAA | LLSLETGSLKLANGR |
| | AGCACACACCCCGTG | VIEKTLYNRRTRQDE |
| | AAGCCCCTGGCTCAG | PALFVALTFERREVL |
| | ATCGCCGGCAATAGA | DSSNIKPMNLIGIDR |
| | TACGCCTCTGGACCT | GENIPAVIALTDPEG |
| | GTGGGCAAAGCCCTG | CPLSRFKDSLGNPTH |
| | TCCGATGCCTGCATG | ILRIGESYKEKQRTI |
| | GGAACAATCGCCAGC | QAKKEVEQRRAGGYS |
| | TTCCTGAGCAAGTAC | RKYASKAKNLADDMV |
| | CAGGACATCATCATC | RNTARDLLYYAVTQD |
| | GAGCACCAGAAGGTG | AMLIFENLSRGFGRQ |
| | GTCAAGGGCAACCAG | GKRTFMAERQYTRME |
| | AAGAGACTGGAAAGC | DWLTAKLAYEGLSKT |
| | CTGAGGGAGCTGGCC | YLSKTLAQYTSKTCS |
| | GGCAAAGAGAACCTG | NCGFTITSADYDRVL |
| | GAATACCCCAGCGTG | EKLKKTATGWMTTIN |
| | ACCCTGCCTCCTCAG | GKELKVEGQITYYNR |
| | CCTCACACAAAAGAA | YKRQNVVKDLSVELD |
| | GGCGTGGACGCCTAC | RLSEESVNNDISSWT |
| | AACGAAGTGATCGCC | KGRSGEALSLLKKRF |
| | AGAGTGAGAATGTGG | SHRPVQEKFVCLNCG |
| | GTCAACCTGAACCTG | FETHADEQAALNIAR |
| | TGGCAGAAGCTGAAA | SWLFLRSQEYKKYQT |
| | CTGTCCAGGGACGAC | NKTTGNTDKRAFVET |
| | GCCAAGCCTCTGCTG | WQSFYRKKLKEVWKP |
| | AGACTGAAGGGCTTC | AV (SEQ ID NO: 243) |
| | CCTAGCTTCCCTCTG | |
| | GTGGAAAGACAGGCC | |
| | AATGAAGTGGATTGG | |
| | TGGGACATGGTCTGC | |
| | AACGTGAAGAAGCTG | |
| | ATCAACGAGAAGAAA | |
| | GAGGATGGCAAGGTT | |
| | TTCTGGCAGAACCTG | |
| | GCCGGCTACAAGAGA | |
| | CAAGAAGCCCTGAGG | |
| | CCTTACCTGAGCAGC | |
| | GAAGAGGACCGGAAG | |
| | AAGGGCAAGAAGTTC | |
| | GCCAGATACCAGTTC | |
| | GGCGACCTGCTGCTG | |
| | CACCTGGAAAAGAAG | |
| | CACGGCGAGGACTGG | |
| | GGCAAAGTGTACGAT | |
| | GAGGCCTGGGAGAGA | |
| | ATCGACAAGAAGGTG | |
| | GAAGGCCTGAGCAAG | |
| | CACATTAAGCTGGAA | |
| | GAGGAAAGAAGGAGC | |
| | GAGGACGCCCAATCT | |
| | AAAGCCGCTCTGACC | |
| | GATTGGCTGAGAGCC | |
| | AAGGCCAGCTTTGTG | |
| | ATCGAGGGCCTGAAA | |
| | GAGGCCGACAAGGAC | |
| | GAGTTCTGCAGATGC | |
| | GAGCTGAAGCTGCAG | |
| | AAGTGGTACGGCGAT | |
| | CTGAGAGGCAAGCCC | |
| | TTCGCCATTGAGGCC | |
| | GAGAACAGCATCCTG | |
| | GACATCAGCGGCTTC | |
| | AGCAAGCAGTACAAC | |
| | TGCGCCTTCATTTGG | |
| | CAGAAAGACGGCGTC | |
| | AAGAAACTGAACCTG | |
| | TACCTGATCATCAAT | |
| | TACTTCAAAGGCGGC | |
| | AAGCTGCGGTTCAAG | |
| | AAGATCAAACCCGAG | |
| | GCCTTCGAGGCTAAC | |
| | AGATTCTACACCGTG | |
| | ATCAACAAAAAGTCC | |
| | GGCGAGATCGTGCCC | |
| | ATGGAAGTGAACTTC | |
| | AACTTCGACGACCCC | |
| | AACCTGATTATCCTG | |
| | CCTCTGGCCTTCGGC | |
| | AAGAGACAGGGCAGA | |
| | GAGTTCATCTGGAAC | |
| | GATCTGCTGAGCCTG | |
| | GAAACCGGCTCTCTG | |
| | AAGCTGGCCAATGGC | |
| | AGAGTGATCGAGAAA | |
| | ACCCTGTACAACAGG | |
| | AGAACCAGACAGGAC | |
| | GAGCCTGCTCTGTTT | |
| | GTGGCCCTGACCTTC | |
| | GAGAGAAGAGAGGTG | |
| | CTGGACAGCAGCAAC | |
| | ATCAAGCCCATGAAC | |
| | CTGATCGGCATCGAC | |
| | CGGGGCGAGAATATC | |
| | CCTGCTGTGATCGCC | |
| | CTGACAGACCCTGAA | |
| | GGATGCCCACTGAGC | |
| | AGATTCAAGGACTCC | |
| | CTGGGCAACCCTACA | |
| | CACATCCTGAGAATC | |
| | GGCGAGAGCTACAAA | |
| | GAGAAGCAGAGGACA | |
| | ATCCAGGCCAAGAAA | |
| | GAGGTGGAACAGAGA | |
| | AGAGCCGGCGGATAC | |
| | TCTAGGAAGTACGCC | |
| | AGCAAGGCCAAGAAT | |
| | CTGGCCGACGACATG | |
| | GTCCGAAACACCGCC | |
| | AGAGATCTGCTGTAC | |
| | TACGCCGTGACACAG | |
| | GACGCCATGCTGATC | |
| | TTCGAGAATCTGAGC | |
| | AGAGGCTTCGGCCGG | |
| | CAGGGCAAGAGAACC | |
| | TTTATGGCCGAGAGG | |
| | CAGTACACCAGAATG | |
| | GAAGATTGGCTCACA | |
| | GCTAAACTGGCCTAC | |
| | GAGGGACTGAGCAAG | |
| | ACCTACCTGTCCAAA | |
| | ACACTGGCCCAGTAT | |
| | ACCTCCAAGACCTGC | |
| | AGCAATTGCGGCTTC | |
| | ACCATCACCAGCGCC | |
| | GACTACGACAGAGTG | |
| | CTGGAAAAGCTCAAG | |
| | AAAACCGCCACCGGC | |
| | TGGATGACCACCATC | |
| | AACGGCAAAGAGCTG | |
| | AAGGTTGAGGGCCAG | |
| | ATCACCTACTACAAC | |
| | AGGTACAAGAGGCAG | |
| | AACGTCGTGAAGGAT | |
| | CTGAGCGTGGAACTG | |
| | GACAGACTGAGCGAA | |
| | GAGAGCGTGAACAAC | |
| | GACATCAGCAGCTGG | |
| | ACAAAGGGCAGATCA | |
| | GGCGAGGCTCTGAGC | |
| | CTGCTGAAGAAGAgg | |
| | TTTAGCCACAGACCT | |
| | GTGCAAGAGAAGTTC | |
| | GTGTGCCTGAACTGC | |
| | GGCTTCGAGACACAC | |
| | GCCGATGAACAGGCT | |
| | GCCCTGAACATTGCC | |
| | AGAAGCTGGCTGTTC | |
| | CTGAGAAGCCAAGAG | |
| | TACAAGAAGTACCAG | |
| | ACCAACAAGACCACC | |
| | GGCAACACCGACAAG | |
| | AGGGCCTTTGTGGAA | |
| | ACCTGGCAGAGCTTC | |
| | TACAGAAAAAAGCTG | |
| | AAAGAAGTCTGGAAG | |
| | CCCGCCGTG | |
| | (SEQ ID NO: 247) | |
| CasX 491 | CAAGAGATCAAGAGA | QEIKRINKIRRRLVK |
| | ATCAACAAGATCAGA | DSNTKKAGKTGPMKT |
| | AGGAGACTGGTCAAG | LLVRVMTPDLRERLE |
| | GACAGCAACACAAAG | NLRKKPENIPQPISN |
| | AAGGCCGGCAAGACA | TSRANLNKLLTDYTE |
| | GGCCCCATGAAaACC | MKKAILHVYWEEFQK |
| | CTGCTCGTCAGA | DPVGLMSRVAQPASK |
| | GTGATGACCCCTGAC | KIDQNKLKPEMDEKG |
| | CTGAGAGAGCGGCTG | NLTTAGFACSQCGQP |
| | GAAAACCTGAGAAAG | LFVYKLEQVSEKGKA |
| | AAGCCCGAGAACATC | YTNYFGRCNVAEHEK |
| | CCTCAGCCTATCAGC | LILLAQLKPEKDSDE |
| | AACACCAGCAGGGCC | AVTYSLGKFGQRALD |
| | AACCTGAACAAGCTG | FYSIHVTKESTHPVK |
| | CTGACCGACTACACC | PLAQIAGNRYASGPV |
| | GAGATGAAGAAAGCC | GKALSDACMGTIASF |
| | ATCCTGCACGTGTAC | LSKYQDIIIEHQKVV |
| | TGGGAAGAGTTCCAG | KGNQKRLESLRELAG |
| | AAAGACCCCGTGGGC | KENLEYPSVTLPPQP |
| | CTGATGAGCAGAGTT | HTKEGVDAYNEVIAR |
| | GCTCAGCCTGCCAGC | VRMWVNLNLWQKLKL |
| | AAGAAGATCGACCAG | SRDDAKPLLRLKGFP |
| | AACAAGCTGAAGCCC | SFPLVERQANEVDWW |
| | GAGATGGACGAGAAG | DMVCNVKKLINEKKE |
| | GGCAATCTGACCACA | DGKVFWQNLAGYKRQ |
| | GCCGGCTTTGCCTGC | EALRPYLSSEEDRKK |
| | TCTCAGTGTGGCCAG | GKKFARYQLGDLLLH |
| | CCTCTGTTCGTGTAC | LEKKHGEDWGKVYDE |
| | AAGCTGGAACAGGTG | AWERIDKKVEGLSKH |
| | TCCGAGAAAGGCAAG | IKLEEERRSEDAQSK |
| | GCCTACACCAACTAC | AALTDWLRAKASFVI |
| | TTCGGCAGATGTAAC | EGLKEADKDEFCRCE |
| | GTGGCCGAGCACGAG | LKLQKWYGDLRGKPF |
| | AAGCTGATTCTGCTG | AIEAENSILDISGFS |
| | GCCCAGCTGAAACCT | KQYNCAFIWQKDGVK |
| | GAGAAGGACTCTGAT | KLNLYLIINYFKGGK |
| | GAGGCCGTGACCTAC | LRFKKIKPEAFEANR |
| | AGCCTGGGCAAGTTT | FYTVINKKSGEIVPM |
| | GGACAGAGAGCCCTG | EVNFNFDDPNLIILP |
| | GACTTCTACAGCATC | LAFGKRQGREFIWND |
| | CACGTGACCAAAGAA | LLSLETGSLKLANGR |
| | AGCACACACCCCGTG | VIEKTLYNRRTRQDE |
| | AAGCCCCTGGCTCAG | PALFVALTFERREVL |
| | ATCGCCGGCAATAGA | DSSNIKPMNLIGVDR |
| | TACGCCTCTGGACCT | GENIPAVIALTDPEG |
| | GTGGGCAAAGCCCTG | CPLSRFKDSLGNPTH |
| | TCCGATGCCTGCATG | ILRIGESYKEKQRTI |
| | GGAACAATCGCCAGC | QAKKEVEQRRAGGYS |
| | TTCCTGAGCAAGTAC | RKYASKAKNLADDMV |
| | CAGGACATCATCATC | RNTARDLLYYAVTQD |
| | GAGCACCAGAAGGTG | AMLIFENLSRGFGRQ |
| | GTCAAGGGCAACCAG | GKRTFMAERQYTRME |
| | AAGAGACTGGAAAGC | DWLTAKLAYEGLSKT |
| | CTGAGGGAGCTGGCC | YLSKTLAQYTSKTCS |
| | GGCAAAGAGAACCTG | NCGFTITSADYDRVL |
| | GAATACCCCAGCGTG | EKLKKTATGWMTTIN |
| | ACCCTGCCTCCTCAG | GKELKVEGQITYYNR |
| | CCTCACACAAAAGAA | YKRQNVVKDLSVELD |
| | GGCGTGGACGCCTAC | RLSEESVNNDISSWT |
| | AACGAAGTGATCGCC | KGRSGEALSLLKKRF |
| | AGAGTGAGAATGTGG | SHRPVQEKFVCLNCG |
| | GTCAACCTGAACCTG | FETHADEQAALNIAR |
| | TGGCAGAAGCTGAAA | SWLFLRSQEYKKYQT |
| | CTGTCCAGGGACGAC | NKTTGNTDKRAFVET |
| | GCCAAGCCTCTGCTG | WQSFYRKKLKEVWKP |
| | AGACTGAAGGGCTTC | AV |
| | CCTAGCTTCCCTCTG | (SEQ ID NO: 244) |
| | GTGGAAAGACAGGCC | |
| | AATGAAGTGGATTGG | |
| | TGGGACATGGTCTGC | |
| | AACGTGAAGAAGCTG | |
| | ATCAACGAGAAGAAA | |
| | GAGGATGGCAAGGTT | |
| | TTCTGGCAGAACCTG | |
| | GCCGGCTACAAGAGA | |
| | CAAGAAGCCCTGAGG | |
| | CCTTACCTGAGCAGC | |
| | GAAGAGGACCGGAAG | |
| | AAGGGCAAGAAGTTC | |
| | GCCAGATACCAGCTG | |
| | GGCGACCTGCTGCTG | |
| | CACCTGGAAAAGAAG | |
| | CACGGCGAGGACTGG | |
| | GGCAAAGTGTACGAT | |
| | GAGGCCTGGGAGAGA | |
| | ATCGACAAGAAGGTG | |
| | GAAGGCCTGAGCAAG | |
| | CACATTAAGCTGGAA | |
| | GAGGAAAGAAGGAGC | |
| | GAGGACGCCCAATCT | |
| | AAAGCCGCTCTGACC | |
| | GATTGGCTGAGAGCC | |
| | AAGGCCAGCTTTGTG | |
| | ATCGAGGGCCTGAAA | |
| | GAGGCCGACAAGGAC | |
| | GAGTTCTGCAGATGC | |
| | GAGCTGAAGCTGCAG | |
| | AAGTGGTACGGCGAT | |
| | CTGAGAGGCAAGCCC | |
| | TTCGCCATTGAGGCC | |
| | GAGAACAGCATCCTG | |
| | GACATCAGCGGCTTC | |
| | AGCAAGCAGTACAAC | |
| | TGCGCCTTCATTTGG | |
| | CAGAAAGACGGCGTC | |
| | AAGAAACTGAACCTG | |
| | TACCTGATCATCAAT | |
| | TACTTCAAAGGCGGC | |
| | AAGCTGCGGTTCAAG | |
| | AAGATCAAACCCGAG | |
| | GCCTTCGAGGCTAAC | |
| | AGATTCTACACCGTG | |
| | ATCAACAAAAAGTCC | |
| | GGCGAGATCGTGCCC | |
| | ATGGAAGTGAACTTC | |
| | AACTTCGACGACCCC | |
| | AACCTGATTATCCTG | |
| | CCTCTGGCCTTCGGC | |
| | AAGAGACAGGGCAGA | |
| | GAGTTCATCTGGAAC | |
| | GATCTGCTGAGCCTG | |
| | GAAACCGGCTCTCTG | |
| | AAGCTGGCCAATGGC | |
| | AGAGTGATCGAGAAA | |
| | ACCCTGTACAACAGG | |
| | AGAACCAGACAGGAC | |
| | GAGCCTGCTCTGTTT | |
| | GTGGCCCTGACCTTC | |
| | GAGAGAAGAGAGGTG | |
| | CTGGACAGCAGCAAC | |
| | ATCAAGCCCATGAAC | |
| | CTGATCGGCGTGGAC | |
| | CGGGGCGAGAATATC | |
| | CCTGCTGTGATCGCC | |
| | CTGACAGACCCTGAA | |
| | GGATGCCCACTGAGC | |
| | AGATTCAAGGACTCC | |
| | CTGGGCAACCCTACA | |
| | CACATCCTGAGAATC | |
| | GGCGAGAGCTACAAA | |
| | GAGAAGCAGAGGACA | |
| | ATCCAGGCCAAGAAA | |
| | GAGGTGGAACAGAGA | |
| | AGAGCCGGCGGATAC | |
| | TCTAGGAAGTACGCC | |
| | AGCAAGGCCAAGAAT | |
| | CTGGCCGACGACATG | |
| | GTCCGAAACACCGCC | |
| | AGAGATCTGCTGTAC | |
| | TACGCCGTGACACAG | |
| | GACGCCATGCTGATC | |
| | TTCGAGAATCTGAGC | |
| | AGAGGCTTCGGCCGG | |
| | CAGGGCAAGAGAACC | |
| | TTTATGGCCGAGAGG | |
| | CAGTACACCAGAATG | |
| | GAAGATTGGCTCACA | |
| | GCTAAACTGGCCTAC | |
| | GAGGGACTGAGCAAG | |
| | ACCTACCTGTCCAAA | |
| | ACACTGGCCCAGTAT | |
| | ACCTCCAAGACCTGC | |
| | AGCAATTGCGGCTTC | |
| | ACCATCACCAGCGCC | |
| | GACTACGACAGAGTG | |
| | CTGGAAAAGCTCAAG | |
| | AAAACCGCCACCGGC | |
| | TGGATGACCACCATC | |
| | AACGGCAAAGAGCTG | |
| | AAGGTTGAGGGCCAG | |
| | ATCACCTACTACAAC | |
| | AGGTACAAGAGGCAG | |
| | AACGTCGTGAAGGAT | |
| | CTGAGCGTGGAACTG | |
| | GACAGACTGAGCGAA | |
| | GAGAGCGTGAACAAC | |
| | GACATCAGCAGCTGG | |
| | ACAAAGGGCAGATCA | |
| | GGCGAGGCTCTGAGC | |
| | CTGCTGAAGAAGAgg | |
| | TTTAGCCACAGACCT | |
| | GTGCAAGAGAAGTTC | |
| | GTGTGCCTGAACTGC | |
| | GGCTTCGAGACACAC | |
| | GCCGATGAACAGGCT | |
| | GCCCTGAACATTGCC | |
| | AGAAGCTGGCTGTTC | |
| | CTGAGAAGCCAAGAG | |
| | TACAAGAAGTACCAG | |
| | ACCAACAAGACCACC | |
| | GGCAACACCGACAAG | |
| | AGGGCCTTTGTGGAA | |
| | ACCTGGCAGAGCTTC | |
| | TACAGAAAAAAGCTG | |
| | AAAGAAGTCTGGAAG | |
| | CCCGCCGTG | |
| | (SEQ ID NO: 248) | |
| CasX515 | CAAGAGATCAAGAGA | QEIKRINKIRRRLVK |
| | ATCAACAAGATCAGA | DSNTKKAGKTGPMKT |
| | AGGAGACTGGTCAAG | LLVRVMTPDLRERLE |
| | GACAGCAACACAAAG | NLRKKPENIPQPISN |
| | AAGGCCGGCAAGACA | TSRANLNKLLTDYTE |
| | GGCCCCATGAAaACC | MKKAILHVYWEEFQK |
| | CTGCTCGTCAGA | DPVGLMSRVAQPASK |
| | GTGATGACCCCTGAC | KIDQNKLKPEMDEKG |
| | CTGAGAGAGCGGCTG | NLTTAGFACSQCGQP |
| | GAAAACCTGAGAAAG | LFVYKLEQVSEKGKA |
| | AAGCCCGAGAACATC | YTNYFGRCNVAEHEK |
| | CCTCAGCCTATCAGC | LILLAQLKPEKDSDE |
| | AACACCAGCAGGGCC | AVTYSLGKFGQRALD |
| | AACCTGAACAAGCTG | FYSIHVTKESTHPVK |
| | CTGACCGACTACACC | PLAQIAGNRYASGPV |
| | GAGATGAAGAAAGCC | GKALSDACMGTIASF |
| | ATCCTGCACGTGTAC | LSKYQDIIIEHQKVV |
| | TGGGAAGAGTTCCAG | KGNQKRLESLRELAG |
| | AAAGACCCCGTGGGC | KENLEYPSVTLPPQP |
| | CTGATGAGCAGAGTT | HTKEGVDAYNEVIAR |
| | GCTCAGCCTGCCAGC | VRMWVNLNLWQKLKL |
| | AAGAAGATCGACCAG | SRDDAKPLLRLKGFP |
| | AACAAGCTGAAGCCC | SFPLVERQANEVDWW |
| | GAGATGGACGAGAAG | DMVCNVKKLINEKKE |
| | GGCAATCTGACCACA | DGKVFWQNLAGYKRQ |
| | GCCGGCTTTGCCTGC | EALRPYLSSEEDRKK |
| | TCTCAGTGTGGCCAG | GKKFARYQLGDLLLH |
| | CCTCTGTTCGTGTAC | LEKKHGEDWGKVYDE |
| | AAGCTGGAACAGGTG | AWERIDKKVEGLSKH |
| | TCCGAGAAAGGCAAG | IKLEEERRSEDAQSK |
| | GCCTACACCAACTAC | AALTDWLRAKASFVI |
| | TTCGGCAGATGTAAC | EGLKEADKDEFCRCE |
| | GTGGCCGAGCACGAG | LKLQKWYGDLRGKPF |
| | AAGCTGATTCTGCTG | AIEAENSILDISGFS |
| | GCCCAGCTGAAACCT | KQYNCAFIWQKDGVK |
| | GAGAAGGACTCTGAT | KLNLYLIINYFKGGK |
| | GAGGCCGTGACCTAC | LRFKKIKPEAFEANR |
| | AGCCTGGGCAAGTTT | FYTVINKKSGEIVPM |
| | GGACAGAGAGCCCTG | EVNFNFDDPNLIILP |
| | GACTTCTACAGCATC | LAFGKRQGREFIWND |
| | CACGTGACCAAAGAA | LLSLETGSLKLANGR |
| | AGCACACACCCCGTG | VIEKTLYNRRTRQDE |
| | AAGCCCCTGGCTCAG | PALFVALTFERREVL |
| | ATCGCCGGCAATAGA | DSSNIKPMNLIGVDR |
| | TACGCCTCTGGACCT | GENIPAVIALTDPEG |
| | GTGGGCAAAGCCCTG | CPLSRFKDSLGNPTH |
| | TCCGATGCCTGCATG | ILRIGESYKEKQRTI |
| | GGAACAATCGCCAGC | QAKKEVEQRRAGGYS |
| | TTCCTGAGCAAGTAC | RKYASKAKNLADDMV |
| | CAGGACATCATCATC | RNTARDLLYYAVTQD |
| | GAGCACCAGAAGGTG | AMLIFENLSRGFGRQ |
| | GTCAAGGGCAACCAG | GKRTFMAERQYTRME |
| | AAGAGACTGGAAAGC | DWLTAKLAYEGLPSK |
| | CTGAGGGAGCTGGCC | TYLSKTLAQYTSKTC |
| | GGCAAAGAGAACCTG | SNCGFTITSADYDRV |
| | GAATACCCCAGCGTG | LEKLKKTATGWMTTI |
| | ACCCTGCCTCCTCAG | NGKELKVEGQITYYN |
| | CCTCACACAAAAGAA | RYKRQNVVKDLSVEL |
| | GGCGTGGACGCCTAC | DRLSEESVNNDISSW |
| | AACGAAGTGATCGCC | TKGRSGEALSLLKKR |
| | AGAGTGAGAATGTGG | FSHRPVQEKFVCLNC |
| | GTCAACCTGAACCTG | GFETHADEQAALNIA |
| | TGGCAGAAGCTGAAA | RSWLFLRSQEYKKYQ |
| | CTGTCCAGGGACGAC | TNKTTGNTDKRAFVE |
| | GCCAAGCCTCTGCTG | TWQSFYRKKLKEVWK |
| | AGACTGAAGGGCTTC | PAV |
| | CCTAGCTTCCCTCTG | (SEQ ID NO: 245) |
| | GTGGAAAGACAGGCC | |
| | AATGAAGTGGATTGG | |
| | TGGGACATGGTCTGC | |
| | AACGTGAAGAAGCTG | |
| | ATCAACGAGAAGAAA | |
| | GAGGATGGCAAGGTT | |
| | TTCTGGCAGAACCTG | |
| | GCCGGCTACAAGAGA | |
| | CAAGAAGCCCTGAGG | |
| | CCTTACCTGAGCAGC | |
| | GAAGAGGACCGGAAG | |
| | AAGGGCAAGAAGTTC | |
| | GCCAGATACCAGCTG | |
| | GGCGACCTGCTGCTG | |
| | CACCTGGAAAAGAAG | |
| | CACGGCGAGGACTGG | |
| | GGCAAAGTGTACGAT | |
| | GAGGCCTGGGAGAGA | |
| | ATCGACAAGAAGGTG | |
| | GAAGGCCTGAGCAAG | |
| | CACATTAAGCTGGAA | |
| | GAGGAAAGAAGGAGC | |
| | GAGGACGCCCAATCT | |
| | AAAGCCGCTCTGACC | |
| | GATTGGCTGAGAGCC | |
| | AAGGCCAGCTTTGTG | |
| | ATCGAGGGCCTGAAA | |
| | GAGGCCGACAAGGAC | |
| | GAGTTCTGCAGATGC | |
| | GAGCTGAAGCTGCAG | |
| | AAGTGGTACGGCGAT | |
| | CTGAGAGGCAAGCCC | |
| | TTCGCCATTGAGGCC | |
| | GAGAACAGCATCCTG | |
| | GACATCAGCGGCTTC | |
| | AGCAAGCAGTACAAC | |
| | TGCGCCTTCATTTGG | |
| | CAGAAAGACGGCGTC | |
| | AAGAAACTGAACCTG | |
| | TACCTGATCATCAAT | |
| | TACTTCAAAGGCGGC | |
| | AAGCTGCGGTTCAAG | |
| | AAGATCAAACCCGAG | |
| | GCCTTCGAGGCTAAC | |
| | AGATTCTACACCGTG | |
| | ATCAACAAAAAGTCC | |
| | GGCGAGATCGTGCCC | |
| | ATGGAAGTGAACTTC | |
| | AACTTCGACGACCCC | |
| | AACCTGATTATCCTG | |
| | CCTCTGGCCTTCGGC | |
| | AAGAGACAGGGCAGA | |
| | GAGTTCATCTGGAAC | |
| | GATCTGCTGAGCCTG | |
| | GAAACCGGCTCTCTG | |
| | AAGCTGGCCAATGGC | |
| | AGAGTGATCGAGAAA | |
| | ACCCTGTACAACAGG | |
| | AGAACCAGACAGGAC | |
| | GAGCCTGCTCTGTTT | |
| | GTGGCCCTGACCTTC | |
| | GAGAGAAGAGAGGTG | |
| | CTGGACAGCAGCAAC | |
| | ATCAAGCCCATGAAC | |
| | CTGATCGGCGTGGAC | |
| | CGGGGCGAGAATATC | |
| | CCTGCTGTGATCGCC | |
| | CTGACAGACCCTGAA | |
| | GGATGCCCACTGAGC | |
| | AGATTCAAGGACTCC | |
| | CTGGGCAACCCTACA | |
| | CACATCCTGAGAATC | |
| | GGCGAGAGCTACAAA | |
| | GAGAAGCAGAGGACA | |
| | ATCCAGGCCAAGAAA | |
| | GAGGTGGAACAGAGA | |
| | AGAGCCGGCGGATAC | |
| | TCTAGGAAGTACGCC | |
| | AGCAAGGCCAAGAAT | |
| | CTGGCCGACGACATG | |
| | GTCCGAAACACCGCC | |
| | AGAGATCTGCTGTAC | |
| | TACGCCGTGACACAG | |
| | GACGCCATGCTGATC | |
| | TTCGAGAATCTGAGC | |
| | AGAGGCTTCGGCCGG | |
| | CAGGGCAAGAGAACC | |
| | TTTATGGCCGAGAGG | |
| | CAGTACACCAGAATG | |
| | GAAGATTGGCTCACA | |
| | GCTAAACTGGCCTAC | |
| | GAGGGACTGCCCAGC | |
| | AAGACCTACCTGTCC | |
| | AAAACACTGGCCCAG | |
| | TATACCTCCAAGACC | |
| | TGCAGCAATTGCGGC | |
| | TTCACCATCACCAGC | |
| | GCCGACTACGACAGA | |
| | GTGCTGGAAAAGCTC | |
| | AAGAAAACCGCCACC | |
| | GGCTGGATGACCACC | |
| | ATCAACGGCAAAGAG | |
| | CTGAAGGTTGAGGGC | |
| | CAGATCACCTACTAC | |
| | AACAGGTACAAGAGG | |
| | CAGAACGTCGTGAAG | |
| | GATCTGAGCGTGGAA | |
| | CTGGACAGACTGAGC | |
| | GAAGAGAGCGTGAAC | |
| | AACGACATCAGCAGC | |
| | TGGACAAAGGGCAGA | |
| | TCAGGCGAGGCTCTG | |
| | AGCCTGCTGAAGAAG | |
| | AggTTTAGCCACAGA | |
| | CCT | |
| | GTGCAAGAGAAGTTC | |
| | GTGTGCCTGAACTGC | |
| | GGCTTCGAGACACAC | |
| | GCCGATGAACAGGCT | |
| | GCCCTGAACATTGCC | |
| | AGAAGCTGGCTGTTC | |
| | CTGAGAAGCCAAGAG | |
| | TACAAGAAGTACCAG | |
| | ACCAACAAGACCACC | |
| | GGCAACACCGACAAG | |
| | AGGGCCTTTGTGGAA | |
| | ACCTGGCAGAGCTTC | |
| | TACAGAAAAAAGCTG | |
| | AAAGAAGTCTGGAAG | |
| | CCCGCCGTG | |
| | (SEQ ID NO: 249) | |
| CasX 527 | CAAGAGATCAAGAGA | QEIKRINKIRRRLVK |
| | ATCAACAAGATCAGA | DSNTKKAGKTRGPMK |
| | AGGAGACTGGTCAAG | TLLVRVMTPDLRERL |
| | GACAGCAACACAAAG | ENLRKKPENIPQPIS |
| | AAGGCCGGCAAGACA | NTSRANLNKLLTDYT |
| | cggGGCCCCATGAAa | EMKKAILHVYWEEFQ |
| | ACCCTGCTCGTCAGA | KDPVGLMSRVAQPAS |
| | GTGATGACCCCTGAC | KKIDQNKLKPEMDEK |
| | CTGAGAGAGCGGCTG | GNLTTAGFACSQCGQ |
| | GAAAACCTGAGAAAG | PLFVYKLEQVSEKGK |
| | AAGCCCGAGAACATC | AYTNYFGRCNVAEHE |
| | CCTCAGCCTATCAGC | KLILLAQLKPEKDSD |
| | AACACCAGCAGGGCC | EAVTYSLGKFGQRAL |
| | AACCTGAACAAGCTG | DFYSIHVTKESTHPV |
| | CTGACCGACTACACC | KPLAQIAGNRYASGP |
| | GAGATGAAGAAAGCC | VGKALSDACMGTIAS |
| | ATCCTGCACGTGTAC | FLSKYQDIIIEHQKV |
| | TGGGAAGAGTTCCAG | VKGNQKRLESLRELA |
| | AAAGACCCCGTGGGC | GKENLEYPSVTLPPQ |
| | CTGATGAGCAGAGTT | PHTKEGVDAYNEVIA |
| | GCTCAGCCTGCCAGC | RVRMWVNLNLWQKLK |
| | AAGAAGATCGACCAG | LSRDDAKPLLRLKGF |
| | AACAAGCTGAAGCCC | PSFPLVERQANEVDW |
| | GAGATGGACGAGAAG | WDMVCNVKKLINEKK |
| | GGCAATCTGACCACA | EDGKVFWQNLAGYKR |
| | GCCGGCTTTGCCTGC | QEALRPYLSSEEDRK |
| | TCTCAGTGTGGCCAG | KGKKFARYQLGDLLL |
| | CCTCTGTTCGTGTAC | HLEKKHGEDWGKVYD |
| | AAGCTGGAACAGGTG | EAWERIDKKVEGLSK |
| | TCCGAGAAAGGCAAG | HIKLEEERRSEDAQS |
| | GCCTACACCAACTAC | KAALTDWLRAKASFV |
| | TTCGGCAGATGTAAC | IEGLKEADKDEFCRC |
| | GTGGCCGAGCACGAG | ELKLQKWYGDLRGKP |
| | AAGCTGATTCTGCTG | FAIEAENSILDISGF |
| | GCCCAGCTGAAACCT | SKQYNCAFIWQKDGV |
| | GAGAAGGACTCTGAT | KKLNLYLIINYFKGG |
| | GAGGCCGTGACCTAC | KLRFKKIKPEAFEAN |
| | AGCCTGGGCAAGTTT | RFYTVINKKSGEIVP |
| | GGACAGAGAGCCCTG | MEVNFNFDDPNLIIL |
| | GACTTCTACAGCATC | PLAFGKRQGREFIWN |
| | CACGTGACCAAAGAA | DLLSLETGSLKLANG |
| | AGCACACACCCCGTG | RVIEKTLYNRRTRQD |
| | AAGCCCCTGGCTCAG | EPALFVALTFERREV |
| | ATCGCCGGCAATAGA | LDSSNIKPMNLIGVD |
| | TACGCCTCTGGACCT | RGENIPAVIALTDPE |
| | GTGGGCAAAGCCCTG | GCPLSRFKDSLGNPT |
| | TCCGATGCCTGCATG | HILRIGESYKEKQRT |
| | GGAACAATCGCCAGC | IQAKKEVEQRRAGGY |
| | TTCCTGAGCAAGTAC | SRKYASKAKNLADDM |
| | CAGGACATCATCATC | VRNTARDLLYYAVTQ |
| | GAGCACCAGAAGGTG | DAMLIFENLSRGFGR |
| | GTCAAGGGCAACCAG | QGKRTFMAERQYTRM |
| | AAGAGACTGGAAAGC | EDWLTAKLAYEGLSK |
| | CTGAGGGAGCTGGCC | TYLSKTLAQYTSKTC |
| | GGCAAAGAGAACCTG | SNCGFTITSADYDRV |
| | GAATACCCCAGCGTG | LEKLKKTATGWMTTI |
| | ACCCTGCCTCCTCAG | NGKELKVEGQITYYN |
| | CCTCACACAAAAGAA | RYKRQNVVKDLSVEL |
| | GGCGTGGACGCCTAC | DRLSEESVNNDISSW |
| | AACGAAGTGATCGCC | TKGRSGEALSLLKKR |
| | AGAGTGAGAATGTGG | FSHRPVQEKFVCLNC |
| | GTCAACCTGAACCTG | GFETHADEQAALNIA |
| | TGGCAGAAGCTGAAA | RSWLFLRSQEYKKYQ |
| | CTGTCCAGGGACGAC | TNKTTGNTDKRAFVE |
| | GCCAAGCCTCTGCTG | TWQSFYRKKLKEVWK |
| | AGACTGAAGGGCTTC | PAV |
| | CCTAGCTTCCCTCTG | (SEQ ID NO: 246) |
| | GTGGAAAGACAGGCC | |
| | AATGAAGTGGATTGG | |
| | TGGGACATGGTCTGC | |
| | AACGTGAAGAAGCTG | |
| | ATCAACGAGAAGAAA | |
| | GAGGATGGCAAGGTT | |
| | TTCTGGCAGAACCTG | |
| | GCCGGCTACAAGAGA | |
| | CAAGAAGCCCTGAGG | |
| | CCTTACCTGAGCAGC | |
| | GAAGAGGACCGGAAG | |
| | AAGGGCAAGAAGTTC | |
| | GCCAGATACCAGCTG | |
| | GGCGACCTGCTGCTG | |
| | CACCTGGAAAAGAAG | |
| | CACGGCGAGGACTGG | |
| | GGCAAAGTGTACGAT | |
| | GAGGCCTGGGAGAGA | |
| | ATCGACAAGAAGGTG | |
| | GAAGGCCTGAGCAAG | |
| | CACATTAAGCTGGAA | |
| | GAGGAAAGAAGGAGC | |
| | GAGGACGCCCAATCT | |
| | AAAGCCGCTCTGACC | |
| | GATTGGCTGAGAGCC | |
| | AAGGCCAGCTTTGTG | |
| | ATCGAGGGCCTGAAA | |
| | GAGGCCGACAAGGAC | |
| | GAGTTCTGCAGATGC | |
| | GAGCTGAAGCTGCAG | |
| | AAGTGGTACGGCGAT | |
| | CTGAGAGGCAAGCCC | |
| | TTCGCCATTGAGGCC | |
| | GAGAACAGCATCCTG | |
| | GACATCAGCGGCTTC | |
| | AGCAAGCAGTACAAC | |
| | TGCGCCTTCATTTGG | |
| | CAGAAAGACGGCGTC | |
| | AAGAAACTGAACCTG | |
| | TACCTGATCATCAAT | |
| | TACTTCAAAGGCGGC | |
| | AAGCTGCGGTTCAAG | |
| | AAGATCAAACCCGAG | |
| | GCCTTCGAGGCTAAC | |
| | AGATTCTACACCGTG | |
| | ATCAACAAAAAGTCC | |
| | GGCGAGATCGTGCCC | |
| | ATGGAAGTGAACTTC | |
| | AACTTCGACGACCCC | |
| | AACCTGATTATCCTG | |
| | CCTCTGGCCTTCGGC | |
| | AAGAGACAGGGCAGA | |
| | GAGTTCATCTGGAAC | |
| | GATCTGCTGAGCCTG | |
| | GAAACCGGCTCTCTG | |
| | AAGCTGGCCAATGGC | |
| | AGAGTGATCGAGAAA | |
| | ACCCTGTACAACAGG | |
| | AGAACCAGACAGGAC | |
| | GAGCCTGCTCTGTTT | |
| | GTGGCCCTGACCTTC | |
| | GAGAGAAGAGAGGTG | |
| | CTGGACAGCAGCAAC | |
| | ATCAAGCCCATGAAC | |
| | CTGATCGGCGTGGAC | |
| | CGGGGCGAGAATATC | |
| | CCTGCTGTGATCGCC | |
| | CTGACAGACCCTGAA | |
| | GGATGCCCACTGAGC | |
| | AGATTCAAGGACTCC | |
| | CTGGGCAACCCTACA | |
| | CACATCCTGAGAATC | |
| | GGCGAGAGCTACAAA | |
| | GAGAAGCAGAGGACA | |
| | ATCCAGGCCAAGAAA | |
| | GAGGTGGAACAGAGA | |
| | AGAGCCGGCGGATAC | |
| | TCTAGGAAGTACGCC | |
| | AGCAAGGCCAAGAAT | |
| | CTGGCCGACGACATG | |
| | GTCCGAAACACCGCC | |
| | AGAGATCTGCTGTAC | |
| | TACGCCGTGACACAG | |
| | GACGCCATGCTGATC | |
| | TTCGAGAATCTGAGC | |
| | AGAGGCTTCGGCCGG | |
| | CAGGGCAAGAGAACC | |
| | TTTATGGCCGAGAGG | |
| | CAGTACACCAGAATG | |
| | GAAGATTGGCTCACA | |
| | GCTAAACTGGCCTAC | |
| | GAGGGACTGAGCAAG | |
| | ACCTACCTGTCCAAA | |
| | ACACTGGCCCAGTAT | |
| | ACCTCCAAGACCTGC | |
| | AGCAATTGCGGCTTC | |
| | ACCATCACCAGCGCC | |
| | GACTACGACAGAGTG | |
| | CTGGAAAAGCTCAAG | |
| | AAAACCGCCACCGGC | |
| | TGGATGACCACCATC | |
| | AACGGCAAAGAGCTG | |
| | AAGGTTGAGGGCCAG | |
| | ATCACCTACTACAAC | |
| | AGGTACAAGAGGCAG | |
| | AACGTCGTGAAGGAT | |
| | CTGAGCGTGGAACTG | |
| | GACAGACTGAGCGAA | |
| | GAGAGCGTGAACAAC | |
| | GACATCAGCAGCTGG | |
| | ACAAAGGGCAGATCA | |
| | GGCGAGGCTCTGAGC | |
| | CTGCTGAAGAAGAgg | |
| | TTTAGCCACAGACCT | |
| | GTGCAAGAGAAGTTC | |
| | GTGTGCCTGAACTGC | |
| | GGCTTCGAGACACAC | |
| | GCCGATGAACAGGCT | |
| | GCCCTGAACATTGCC | |
| | AGAAGCTGGCTGTTC | |
| | CTGAGAAGCCAAGAG | |
| | TACAAGAAGTACCAG | |
| | ACCAACAAGACCACC | |
| | GGCAACACCGACAAG | |
| | AGGGCCTTTGTGGAA | |
| | ACCTGGCAGAGCTTC | |
| | TACAGAAAAAAGCTG | |
| | AAAGAAGTCTGGAAG | |
| | CCCGCCGTG | |
| | (SEQ ID NO: 250) | |

### Example 4: Design and Generation of CasX Constructs 278-280, 285-288, 290, 291, 293, 300, 492, and 493

[0744] In order to generate the CasX 278-280, 285-288, 290, 291, 293, 300, 492, and 493 constructs (sequences in Table 8), the N- and C-termini of the codon-optimized CasX 119 construct (based on the CasX Stx37 construct of Example 2, encoding Planctomycetes CasX SEQ ID NO: 2, with a A708K substitution and a [P793] deletion with fused NLS, and linked guide and non-targeting sequences) in a mammalian expression vector were manipulated to delete or add NLS sequences (sequences in Table 9). Constructs 278, 279, and 280 were manipulations of the N- and C-termini using only an SV40 NLS sequence. Construct 280 had no NLS on the N-terminus and added two SV40 NLS' on the C-terminus with a triple proline linker in between the two SV40 NLS sequences. Constructs 278, 279, and 280 were made by amplifying pStx34.119.174.NT with Q5 DNA polymerase according to the manufacturer's protocol, using primers oIC527 and oIC528, oIC730 and oIC522, and oIC730 and oIC530 for the first fragments each and using oIC529 and oIC520, oIC519 and oIC731, and oIC529 and oIC731 to create the second fragments each. These fragments were purified by gel extraction from a 1% agarose gel using Zymoclean Gel DNA Recovery Kit according to the manufacturer's protocol. The respective fragments were cloned together using Gibson assembly (New England BioLabs Cat #E2621S) following the manufacturer's protocol. Assembled products in the pStx34 were transformed into chemically-competent Turbo Competent E. coli bacterial cells, plated on LB-Agar plates containing carbenicillin and incubated at 37° C. Individual colonies were picked and miniprepped using Qiagen spin Miniprep Kit following the manufacturer's protocol. The resultant plasmids were sequenced using Sanger sequencing to ensure correct assembly. Sequences encoding the targeting sequences that target the gene of interest were designed based on CasX PAM locations. Targeting sequence DNA was ordered as single-stranded DNA (ssDNA) oligos (Integrated DNA Technologies) consisting of the targeting sequence and the reverse complement of this sequence. These two oligos were annealed together and cloned into pStX individually or in bulk by Golden Gate assembly using T4 DNA Ligase (New England BioLabs Cat #M0202L) and an appropriate restriction enzyme for the plasmid. Golden Gate products were transformed into chemically- or electro-competent cells such as NEB Turbo competent E. coli (NEB Cat #C2984I), plated on LB-Agar plates containing carbenicillin and incubated at 37° C. Individual colonies were picked and miniprepped using Qiagen spin Miniprep Kit and following the manufacturer's protocol. The resultant plasmids were sequenced using Sanger sequencing to ensure correct ligation.

[0745] In order to generate constructs 285-288, 290, 291, 293, and 300, a nested PCR method was used for cloning. The backbone vector and PCR template used was construct pStx34 279.119.174.NT, having the CasX 119, guide 174, and non-targeting spacer (see Examples 8 and 9 and Tables therein for sequences). Construct 278 has the configuration SV40NLS-CasX119. Construct 279 has the configuration CasX119-SV40NLS. Construct 280 has the configuration CasX119-SV40NLS-PPP linker-SV40NLS. Construct 285 has the configuration CasX119-SV40NLS-PPP linker-SynthNLS3. Construct 286 has the configuration CasX119-SV40NLS-PPP linker-SynthNLS4. Construct 287 has the configuration CasX119-SV40NLS-PPP linker-SynthNLS5. Construct 288 has the configuration CasX119-SV40NLS-PPP linker-SynthNLS6. Constrict 290 has the configuration CasX119-SV40NLS-PPP linker-EGL-13 NLS. Construct 291 has the configuration CasX119-SV40NLS-PPP linker-c-Myc NLS. Construct 293 has the configuration CasX119-SV40NLS-PPP linker-Nucleolar RNA Helicase II NLS. Construct 300 has the configuration CasX119-SV40NLS-PPP linker-Influenza A protein NLS. Construct 492 has the configuration SV40NLS-CasX119- SV40NLS-PPP linker-SV40NLS. Construct 493 has the configuration SV40NLS-CasX119- SV40NLS-PPP linker-c-Myc NLS. Each variant had a set of three PCRs; two of which were nested, were purified by gel extraction, digested, and then ligated into the digested and purified backbone. Assembled products in the pStx34 were transformed into chemically-competent Turbo Competent E. coli bacterial cells, plated on LB-Agar plates containing carbenicillin and incubated at 37° C. Individual colonies were picked and miniprepped using Qiagen spin Miniprep Kit following the manufacturer's protocol. The resultant plasmids were sequenced using Sanger sequencing to ensure correct assembly. Sequences encoding the targeting sequences that target the gene of interest were designed based on CasX PAM locations. Targeting sequence DNA was ordered as single-stranded DNA (ssDNA) oligos (Integrated DNA Technologies) consisting of the targeting sequence and the reverse complement of this sequence. These two oligos were annealed together and cloned into the resulting pStX individually or in bulk by Golden Gate assembly using T4 DNA Ligase (New England BioLabs Cat #M0202L) and an appropriate restriction enzyme for the plasmid. Golden Gate products were transformed into chemically- or electro-competent cells such as NEB Turbo competent E. coli (NEB Cat #C2984I), plated on LB-Agar plates containing carbenicillin and incubated at 37° C. Individual colonies were picked and miniprepped using Qiagen spin Miniprep Kit and following the manufacturer's protocol. The resultant plasmids were sequenced using Sanger sequencing to ensure correct ligation.

[0746] In order to generate constructs 492 and 493, constructs 280 and 291 were digested using XbaI and BamHI (NEB #R0145S and NEB #R3136S) according to the manufacturer's protocol. Next, they were purified by gel extraction from a 1% agarose gel using Zymoclean Gel DNA Recovery Kit according to the manufacturer's protocol. Finally, they were ligated using T4 DNA ligase (NEB #M0202S) according to the manufacturer's protocol into the digested and purified pStx34.119.174.NT using XbaI and BamHI and Zymoclean Gel DNA Recovery Kit. Assembled products in the pStx34 were transformed into chemically-competent Turbo Competent E. coli bacterial cells, plated on LB-Agar plates containing carbenicillin and incubated at 37° C. Individual colonies were picked and miniprepped using Qiagen spin Miniprep Kit following the manufacturer's protocol. The resultant plasmids were sequenced using Sanger sequencing to ensure correct assembly. Sequences encoding the targeting spacer sequences that target the gene of interest were designed based on CasX PAM locations. Targeting sequence DNA was ordered as single-stranded DNA (ssDNA) oligos (Integrated DNA Technologies) consisting of the targeting spacer sequence and the reverse complement of this sequence. These two oligos were annealed together and cloned into each pStX individually or in bulk by Golden Gate assembly using T4 DNA Ligase (New England BioLabs Cat #M0202L) and an appropriate restriction enzyme for the respective plasmids. Golden Gate products were transformed into chemically- or electro-competent cells such as NEB Turbo competent E. coli (NEB Cat #C2984I), plated on LB-Agar plates containing carbenicillin and incubated at 37° C. Individual colonies were picked and miniprepped using Qiagen spin Miniprep Kit and following the manufacturer's protocol. The resultant plasmids were sequenced using Sanger sequencing to ensure correct ligation. The plasmids would be used to produce and recover CasX protein utilizing the general methodologies of Examples 1 and 2.

TABLE 8
CasX 278-280, 285-288, 290, 291, 293,
300, 492, and 493 sequences

| Construct | Amino Acid Sequence |
|---|---|
| 278 | MAPKKKRKVSRQEIKRINKIRRRLV |
| | KDSNTKKAGKTGPMKTLLVRVMTPD |
| | LRERLENLRKKPENIPQPISNTSRA |
| | NLNKLLTDYTEMKKAILHVYWEEFQ |
| | KDPVGLMSRVAQPAPKNIDQRKLIP |
| | VKDGNERLTSSGFACSQCCQPLYVY |
| | KLEQVNDKGKPHTNYFGRCNVSEHE |
| | RLILLSPHKPEANDELVTYSLGKFG |
| | QRALDFYSIHVTRESNHPVKPLEQI |
| | GGNSCASGPVGKALSDACMGAVASF |
| | LTKYQDIILEHQKVIKKNEKRLANL |
| | KDIASANGLAFPKITLPPQPHTKEG |
| | IEAYNNVVAQIVIWVNLNLWQKLKI |
| | GRDEAKPLQRLKGFPSFPLVERQAN |
| | EVDWWDMVCNVKKLINEKKEDGKVF |
| | WQNLAGYKRQEALRPYLSSEEDRKK |
| | GKKFARYQFGDLLLHLEKKHGEDWG |
| | KVYDEAWERIDKKVEGLSKHIKLEE |
| | ERRSEDAQSKAALTDWLRAKASFVI |
| | EGLKEADKDEFCRCELKLQKWYGDL |
| | RGKPFAIEAENSILDISGFSKQYNC |
| | AFIWQKDGVKKLNLYLIINYFKGGK |
| | LRFKKIKPEAFEANRFYTVINKKSG |
| | EIVPMEVNFNFDDPNLIILPLAFGK |
| | RQGREFIWNDLLSLETGSLKLANGR |
| | VIEKTLYNRRTRQDEPALFVALTFE |
| | RREVLDSSNIKPMNLIGIDRGENIP |
| | AVIALTDPEGCPLSRFKDSLGNPTH |
| | ILRIGESYKEKQRTIQAKKEVEQRR |
| | AGGYSRKYASKAKNLADDMVRNTAR |
| | DLLYYAVTQDAMLIFENLSRGFGRQ |
| | GKRTFMAERQYTRMEDWLTAKLAYE |
| | GLSKTYLSKTLAQYTSKTCSNCGFT |
| | ITSADYDRVLEKLKKTATGWMTTIN |
| | GKELKVEGQITYYNRYKRQNVVKDL |
| | SVELDRLSEESVNNDISSWTKGRSG |
| | EALSLLKKRFSHRPVQEKFVCLNCG |
| | FETHADEQAALNIARSWLFLRSQEY |
| | KKYQTNKTTGNTDKRAFVETWQSFY |
| | RKKLKEVWKPAV |
| | (SEQ ID NO: 251) |
| 279 | MQEIKRINKIRRRLVKDSNTKKAGK |
| | TGPMKTLLVRVMTPDLRERLENLRK |
| | KPENIPQPISNTSRANLNKLLTDYT |
| | EMKKAILHVYWEEFQKDPVGLMSRV |
| | AQPAPKNIDQRKLIPVKDGNERLTS |
| | SGFACSQCCQPLYVYKLEQVNDKGK |
| | PHTNYFGRCNVSEHERLILLSPHKP |
| | EANDELVTYSLGKFGQRALDFYSIH |
| | VTRESNHPVKPLEQIGGNSCASGPV |
| | GKALSDACMGAVASFLTKYQDIILE |
| | HQKVIKKNEKRLANLKDIASANGLA |
| | FPKITLPPQPHTKEGIEAYNNVVAQ |
| | IVIWVNLNLWQKLKIGRDEAKPLQR |
| | LKGFPSFPLVERQANEVDWWDMVCN |
| | VKKLINEKKEDGKVFWQNLAGYKRQ |
| | EALRPYLSSEEDRKKGKKFARYQFG |
| | DLLLHLEKKHGEDWGKVYDEAWERI |
| | DKKVEGLSKHIKLEEERRSEDAQSK |
| | AALTDWLRAKASFVIEGLKEADKDE |
| | FCRCELKLQKWYGDLRGKPFAIEAE |
| | NSILDISGFSKQYNCAFIWQKDGVK |
| | KLNLYLIINYFKGGKLRFKKIKPEA |
| | FEANRFYTVINKKSGEIVPMEVNFN |
| | FDDPNLIILPLAFGKRQGREFIWND |
| | LLSLETGSLKLANGRVIEKTLYNRR |
| | TRQDEPALFVALTFERREVLDSSNI |
| | KPMNLIGIDRGENIPAVIALTDPEG |
| | CPLSRFKDSLGNPTHILRIGESYKE |
| | KQRTIQAKKEVEQRRAGGYSRKYAS |
| | KAKNLADDMVRNTARDLLYYAVTQD |
| | AMLIFENLSRGFGRQGKRTFMAERQ |
| | YTRMEDWLTAKLAYEGLSKTYLSKT |
| | LAQYTSKTCSNCGFTITSADYDRVL |
| | EKLKKTATGWMTTINGKELKVEGQI |
| | TYYNRYKRQNVVKDLSVELDRLSEE |
| | SVNNDISSWTKGRSGEALSLLKKRF |
| | SHRPVQEKFVCLNCGFETHADEQAA |
| | LNIARSWLFLRSQEYKKYQTNKTTG |
| | NTDKRAFVETWQSFYRKKLKEVWKP |
| | AVTSPKKKRKV |
| | (SEQ ID NO: 252) |
| 280 | MQEIKRINKIRRRLVKDSNTKKAGK |
| | TGPMKTLLVRVMTPDLRERLENLRK |
| | KPENIPQPISNTSRANLNKLLTDYT |
| | EMKKAILHVYWEEFQKDPVGLMSRV |
| | AQPAPKNIDQRKLIPVKDGNERLTS |
| | SGFACSQCCQPLYVYKLEQVNDKGK |
| | PHTNYFGRCNVSEHERLILLSPHKP |
| | EANDELVTYSLGKFGQRALDFYSIH |
| | VTRESNHPVKPLEQIGGNSCASGPV |
| | GKALSDACMGAVASFLTKYQDIILE |
| | HQKVIKKNEKRLANLKDIASANGLA |
| | FPKITLPPQPHTKEGIEAYNNVVAQ |
| | IVIWVNLNLWQKLKIGRDEAKPLQR |
| | LKGFPSFPLVERQANEVDWWDMVCN |
| | VKKLINEKKEDGKVFWQNLAGYKRQ |
| | EALRPYLSSEEDRKKGKKFARYQFG |
| | DLLLHLEKKHGEDWGKVYDEAWERI |
| | DKKVEGLSKHIKLEEERRSEDAQSK |
| | AALTDWLRAKASFVIEGLKEADKDE |
| | FCRCELKLQKWYGDLRGKPFAIEAE |
| | NSILDISGFSKQYNCAFIWQKDGVK |
| | KLNLYLIINYFKGGKLRFKKIKPEA |
| | FEANRFYTVINKKSGEIVPMEVNFN |
| | FDDPNLIILPLAFGKRQGREFIWND |
| | LLSLETGSLKLANGRVIEKTLYNRR |
| | TRQDEPALFVALTFERREVLDSSNI |
| | KPMNLIGIDRGENIPAVIALTDPEG |
| | CPLSRFKDSLGNPTHILRIGESYKE |
| | KQRTIQAKKEVEQRRAGGYSRKYAS |
| | KAKNLADDMVRNTARDLLYYAVTQD |
| | AMLIFENLSRGFGRQGKRTFMAERQ |
| | YTRMEDWLTAKLAYEGLSKTYLSKT |
| | LAQYTSKTCSNCGFTITSADYDRVL |
| | EKLKKTATGWMTTINGKELKVEGQI |
| | TYYNRYKRQNVVKDLSVELDRLSEE |
| | SVNNDISSWTKGRSGEALSLLKKRF |
| | SHRPVQEKFVCLNCGFETHADEQAA |
| | LNIARSWLFLRSQEYKKYQTNKTTG |
| | NTDKRAFVETWQSFYRKKLKEVWKP |
| | AVTSPKKKRKVPPPPKKKRKV |
| | (SEQ ID NO: 253) |
| 285 | MQEIKRINKIRRRLVKDSNTKKAGK |
| | TGPMKTLLVRVMTPDLRERLENLRK |
| | KPENIPQPISNTSRANLNKLLTDYT |
| | EMKKAILHVYWEEFQKDPVGLMSRV |
| | AQPAPKNIDQRKLIPVKDGNERLTS |
| | SGFACSQCCQPLYVYKLEQVNDKGK |
| | PHTNYFGRCNVSEHERLILLSPHKP |
| | EANDELVTYSLGKFGQRALDFYSIH |
| | VTRESNHPVKPLEQIGGNSCASGPV |
| | GKALSDACMGAVASFLTKYQDIILE |
| | HQKVIKKNEKRLANLKDIASANGLA |
| | FPKITLPPQPHTKEGIEAYNNVVAQ |
| | IVIWVNLNLWQKLKIGRDEAKPLQR |
| | LKGFPSFPLVERQANEVDWWDMVCN |
| | VKKLINEKKEDGKVFWQNLAGYKRQ |
| | EALRPYLSSEEDRKKGKKFARYQFG |
| | DLLLHLEKKHGEDWGKVYDEAWERI |
| | DKKVEGLSKHIKLEEERRSEDAQSK |
| | AALTDWLRAKASFVIEGLKEADKDE |
| | FCRCELKLQKWYGDLRGKPFAIEAE |
| | NSILDISGFSKQYNCAFIWQKDGVK |
| | KLNLYLIINYFKGGKLRFKKIKPEA |
| | FEANRFYTVINKKSGEIVPMEVNFN |
| | FDDPNLIILPLAFGKRQGREFIWND |
| | LLSLETGSLKLANGRVIEKTLYNRR |
| | TRQDEPALFVALTFERREVLDSSNI |
| | KPMNLIGIDRGENIPAVIALTDPEG |
| | CPLSRFKDSLGNPTHILRIGESYKE |
| | KQRTIQAKKEVEQRRAGGYSRKYAS |
| | KAKNLADDMVRNTARDLLYYAVTQD |
| | AMLIFENLSRGFGRQGKRTFMAERQ |
| | YTRMEDWLTAKLAYEGLSKTYLSKT |
| | LAQYTSKTCSNCGFTITSADYDRVL |
| | EKLKKTATGWMTTINGKELKVEGQI |
| | TYYNRYKRQNVVKDLSVELDRLSEE |
| | SVNNDISSWTKGRSGEALSLLKKRF |
| | SHRPVQEKFVCLNCGFETHADEQAA |
| | LNIARSWLFLRSQEYKKYQTNKTTG |
| | NTDKRAFVETWQSFYRKKLKEVWKP |
| | AVTSPKKKRKVPPPHKKKHPDASVN |
| | FSEFSK |
| | (SEQ ID NO: 254) |
| 286 | MQEIKRINKIRRRLVKDSNTKKAGK |
| | TGPMKTLLVRVMTPDLRERLENLRK |
| | KPENIPQPISNTSRANLNKLLTDYT |
| | EMKKAILHVYWEEFQKDPVGLMSRV |
| | AQPAPKNIDQRKLIPVKDGNERLTS |
| | SGFACSQCCQPLYVYKLEQVNDKGK |
| | PHTNYFGRCNVSEHERLILLSPHKP |
| | EANDELVTYSLGKFGQRALDFYSIH |
| | VTRESNHPVKPLEQIGGNSCASGPV |
| | GKALSDACMGAVASFLTKYQDIILE |
| | HQKVIKKNEKRLANLKDIASANGLA |
| | FPKITLPPQPHTKEGIEAYNNVVAQ |
| | IVIWVNLNLWQKLKIGRDEAKPLQR |
| | LKGFPSFPLVERQANEVDWWDMVCN |
| | VKKLINEKKEDGKVFWQNLAGYKRQ |
| | EALRPYLSSEEDRKKGKKFARYQFG |
| | DLLLHLEKKHGEDWGKVYDEAWERI |
| | DKKVEGLSKHIKLEEERRSEDAQSK |
| | AALTDWLRAKASFVIEGLKEADKDE |
| | FCRCELKLQKWYGDLRGKPFAIEAE |
| | NSILDISGFSKQYNCAFIWQKDGVK |
| | KLNLYLIINYFKGGKLRFKKIKPEA |
| | FEANRFYTVINKKSGEIVPMEVNFN |
| | FDDPNLIILPLAFGKRQGREFIWND |
| | LLSLETGSLKLANGRVIEKTLYNRR |
| | TRQDEPALFVALTFERREVLDSSNI |
| | KPMNLIGIDRGENIPAVIALTDPEG |
| | CPLSRFKDSLGNPTHILRIGESYKE |
| | KQRTIQAKKEVEQRRAGGYSRKYAS |
| | KAKNLADDMVRNTARDLLYYAVTQD |
| | AMLIFENLSRGFGRQGKRTFMAERQ |
| | YTRMEDWLTAKLAYEGLSKTYLSKT |
| | LAQYTSKTCSNCGFTITSADYDRVL |
| | EKLKKTATGWMTTINGKELKVEGQI |
| | TYYNRYKRQNVVKDLSVELDRLSEE |
| | SVNNDISSWTKGRSGEALSLLKKRF |
| | SHRPVQEKFVCLNCGFETHADEQAA |
| | LNIARSWLFLRSQEYKKYQTNKTTG |
| | NTDKRAFVETWQSFYRKKLKEVWKP |
| | AVTSPKKKRKVPPPQRPGPYDRPQR |
| | PGPYDRP |
| | (SEQ ID NO: 255) |
| 287 | MQEIKRINKIRRRLVKDSNTKKAGK |
| | TGPMKTLLVRVMTPDLRERLENLRK |
| | KPENIPQPISNTSRANLNKLLTDYT |
| | EMKKAILHVYWEEFQKDPVGLMSRV |
| | AQPAPKNIDQRKLIPVKDGNERLTS |
| | SGFACSQCCQPLYVYKLEQVNDKGK |
| | PHTNYFGRCNVSEHERLILLSPHKP |
| | EANDELVTYSLGKFGQRALDFYSIH |
| | VTRESNHPVKPLEQIGGNSCASGPV |
| | GKALSDACMGAVASFLTKYQDIILE |
| | HQKVIKKNEKRLANLKDIASANGLA |
| | FPKITLPPQPHTKEGIEAYNNVVAQ |
| | IVIWVNLNLWQKLKIGRDEAKPLQR |
| | LKGFPSFPLVERQANEVDWWDMVCN |
| | VKKLINEKKEDGKVFWQNLAGYKRQ |
| | EALRPYLSSEEDRKKGKKFARYQFG |
| | DLLLHLEKKHGEDWGKVYDEAWERI |
| | DKKVEGLSKHIKLEEERRSEDAQSK |
| | AALTDWLRAKASFVIEGLKEADKDE |
| | FCRCELKLQKWYGDLRGKPFAIEAE |
| | NSILDISGFSKQYNCAFIWQKDGVK |
| | KLNLYLIINYFKGGKLRFKKIKPEA |
| | FEANRFYTVINKKSGEIVPMEVNFN |
| | FDDPNLIILPLAFGKRQGREFIWND |
| | LLSLETGSLKLANGRVIEKTLYNRR |
| | TRQDEPALFVALTFERREVLDSSNI |
| | KPMNLIGIDRGENIPAVIALTDPEG |
| | CPLSRFKDSLGNPTHILRIGESYKE |
| | KQRTIQAKKEVEQRRAGGYSRKYAS |
| | KAKNLADDMVRNTARDLLYYAVTQD |
| | AMLIFENLSRGFGRQGKRTFMAERQ |
| | YTRMEDWLTAKLAYEGLSKTYLSKT |
| | LAQYTSKTCSNCGFTITSADYDRVL |
| | EKLKKTATGWMTTINGKELKVEGQI |
| | TYYNRYKRQNVVKDLSVELDRLSEE |
| | SVNNDISSWTKGRSGEALSLLKKRF |
| | SHRPVQEKFVCLNCGFETHADEQAA |
| | LNIARSWLFLRSQEYKKYQTNKTTG |
| | NTDKRAFVETWQSFYRKKLKEVWKP |
| | AVTSPKKKRKVPPPLSPSLSPLLSP |
| | SLSPL |
| | (SEQ ID NO: 256) |
| 288 | MQEIKRINKIRRRLVKDSNTKKAGK |
| | TGPMKTLLVRVMTPDLRERLENLRK |
| | KPENIPQPISNTSRANLNKLLTDYT |
| | EMKKAILHVYWEEFQKDPVGLMSRV |
| | AQPAPKNIDQRKLIPVKDGNERLTM |
| | SSGFACSQCCQPLYVYKLEQVNDKG |
| | KPHTNYFGRCNVSEHERLILLSPHK |
| | PEANDELVTYSLGKFGQRALDFYSI |
| | HVTRESNHPVKPLEQIGGNSCASGP |
| | VGKALSDACMGAVASFLTKYQDIIL |
| | EHQKVIKKNEKRLANLKDIASANGL |
| | AFPKITLPPQPHTKEGIEAYNNVVA |
| | QIVIWVNLNLWQKLKIGRDEAKPLQ |
| | RLKGFPSFPLVERQANEVDWWDMVC |
| | NVKKLINEKKEDGKVFWQNLAGYKR |
| | QEALRPYLSSEEDRKKGKKFARYQF |
| | GDLLLHLEKKHGEDWGKVYDEAWER |
| | IDKKVEGLSKHIKLEEERRSEDAQS |
| | KAALTDWLRAKASFVIEGLKEADKD |
| | EFCRCELKLQKWYGDLRGKPFAIEA |
| | ENSILDISGFSKQYNCAFIWQKDGV |
| | KKLNLYLIINYFKGGKLRFKKIKPE |
| | AFEANRFYTVINKKSGEIVPMEVNF |
| | NFDDPNLIILPLAFGKRQGREFIWN |
| | DLLSLETGSLKLANGRVIEKTLYNR |
| | RTRQDEPALFVALTFERREVLDSSN |
| | IKPMNLIGIDRGENIPAVIALTDPE |
| | GCPLSRFKDSLGNPTHILRIGESYK |
| | EKQRTIQAKKEVEQRRAGGYSRKYA |
| | SKAKNLADDMVRNTARDLLYYAVTQ |
| | DAMLIFENLSRGFGRQGKRTFMAER |
| | QYTRMEDWLTAKLAYEGLSKTYLSK |
| | TLAQYTSKTCSNCGFTITSADYDRV |
| | LEKLKKTATGWMTTINGKELKVEGQ |
| | ITYYNRYKRQNVVKDLSVELDRLSE |
| | ESVNNDISSWTKGRSGEALSLLKKR |
| | FSHRPVQEKFVCLNCGFETHADEQA |
| | ALNIARSWLFLRSQEYKKYQTNKTT |
| | GNTDKRAFVETWQSFYRKKLKEVWK |
| | PAVTSPKKKRKVPPPRGKGGKGLGK |
| | GGAKRHRK |
| | (SEQ ID NO: 257) |
| 290 | MQEIKRINKIRRRLVKDSNTKKAGK |
| | TGPMKTLLVRVMTPDLRERLENLRK |
| | KPENIPQPISNTSRANLNKLLTDYT |
| | EMKKAILHVYWEEFQKDPVGLMSRV |
| | AQPAPKNIDQRKLIPVKDGNERLTS |
| | SGFACSQCCQPLYVYKLEQVNDKGK |
| | PHTNYFGRCNVSEHERLILLSPHKP |
| | EANDELVTYSLGKFGQRALDFYSIH |
| | VTRESNHPVKPLEQIGGNSCASGPV |
| | GKALSDACMGAVASFLTKYQDIILE |
| | HQKVIKKNEKRLANLKDIASANGLA |
| | FPKITLPPQPHTKEGIEAYNNVVAQ |
| | IVIWVNLNLWQKLKIGRDEAKPLQR |
| | LKGFPSFPLVERQANEVDWWDMVCN |
| | VKKLINEKKEDGKVFWQNLAGYKRQ |
| | EALRPYLSSEEDRKKGKKFARYQFG |
| | DLLLHLEKKHGEDWGKVYDEAWERI |
| | DKKVEGLSKHIKLEEERRSEDAQSK |
| | AALTDWLRAKASFVIEGLKEADKDE |
| | FCRCELKLQKWYGDLRGKPFAIEAE |
| | NSILDISGFSKQYNCAFIWQKDGVK |
| | KLNLYLIINYFKGGKLRFKKIKPEA |
| | FEANRFYTVINKKSGEIVPMEVNFN |
| | FDDPNLIILPLAFGKRQGREFIWND |
| | LLSLETGSLKLANGRVIEKTLYNRR |
| | TRQDEPALFVALTFERREVLDSSNI |
| | KPMNLIGIDRGENIPAVIALTDPEG |
| | CPLSRFKDSLGNPTHILRIGESYKE |
| | KQRTIQAKKEVEQRRAGGYSRKYAS |
| | KAKNLADDMVRNTARDLLYYAVTQD |
| | AMLIFENLSRGFGRQGKRTFMAERQ |
| | YTRMEDWLTAKLAYEGLSKTYLSKT |
| | LAQYTSKTCSNCGFTITSADYDRVL |
| | EKLKKTATGWMTTINGKELKVEGQI |
| | TYYNRYKRQNVVKDLSVELDRLSEE |
| | SVNNDISSWTKGRSGEALSLLKKRF |
| | SHRPVQEKFVCLNCGFETHADEQAA |
| | LNIARSWLFLRSQEYKKYQTNKTTG |
| | NTDKRAFVETWQSFYRKKLKEVWKP |
| | AVTSPKKKRKVPPPSRRRKANPTKL |
| | SENAKKLAKEVEN |
| | (SEQ ID NO: 258) |
| 291 | MQEIKRINKIRRRLVKDSNTKKAGK |
| | TGPMKTLLVRVMTPDLRERLENLRK |
| | KPENIPQPISNTSRANLNKLLTDYT |
| | EMKKAILHVYWEEFQKDPVGLMSRV |
| | AQPAPKNIDQRKLIPVKDGNERLTS |
| | SGFACSQCCQPLYVYKLEQVNDKGK |
| | PHTNYFGRCNVSEHERLILLSPHKP |
| | EANDELVTYSLGKFGQRALDFYSIH |
| | VTRESNHPVKPLEQIGGNSCASGPV |
| | GKALSDACMGAVASFLTKYQDIILE |
| | HQKVIKKNEKRLANLKDIASANGLA |
| | FPKITLPPQPHTKEGIEAYNNVVAQ |
| | IVIWVNLNLWQKLKIGRDEAKPLQR |
| | LKGFPSFPLVERQANEVDWWDMVCN |
| | VKKLINEKKEDGKVFWQNLAGYKRQ |
| | EALRPYLSSEEDRKKGKKFARYQFG |
| | DLLLHLEKKHGEDWGKVYDEAWERI |
| | DKKVEGLSKHIKLEEERRSEDAQSK |
| | AALTDWLRAKASFVIEGLKEADKDE |
| | FCRCELKLQKWYGDLRGKPFAIEAE |
| | NSILDISGFSKQYNCAFIWQKDGVK |
| | KLNLYLIINYFKGGKLRFKKIKPEA |
| | FEANRFYTVINKKSGEIVPMEVNFN |
| | FDDPNLIILPLAFGKRQGREFIWND |
| | LLSLETGSLKLANGRVIEKTLYNRR |
| | TRQDEPALFVALTFERREVLDSSNI |
| | KPMNLIGIDRGENIPAVIALTDPEG |
| | CPLSRFKDSLGNPTHILRIGESYKE |
| | KQRTIQAKKEVEQRRAGGYSRKYAS |
| | KAKNLADDMVRNTARDLLYYAVTQD |
| | AMLIFENLSRGFGRQGKRTFMAERQ |
| | YTRMEDWLTAKLAYEGLSKTYLSKT |
| | LAQYTSKTCSNCGFTITSADYDRVL |
| | EKLKKTATGWMTTINGKELKVEGQI |
| | TYYNRYKRQNVVKDLSVELDRLSEE |
| | SVNNDISSWTKGRSGEALSLLKKRF |
| | SHRPVQEKFVCLNCGFETHADEQAA |
| | LNIARSWLFLRSQEYKKYQTNKTTG |
| | NTDKRAFVETWQSFYRKKLKEVWKP |
| | AVTSPKKKRKVPPPPAAKRVKLD |
| | (SEQ ID NO: 259) |
| 293 | MQEIKRINKIRRRLVKDSNTKKAGK |
| | TGPMKTLLVRVMTPDLRERLENLRK |
| | KPENIPQPISNTSRANLNKLLTDYT |
| | EMKKAILHVYWEEFQKDPVGLMSRV |
| | AQPAPKNIDQRKLIPVKDGNERLTS |
| | SGFACSQCCQPLYVYKLEQVNDKGK |
| | PHTNYFGRCNVSEHERLILLSPHKP |
| | EANDELVTYSLGKFGQRALDFYSIH |
| | VTRESNHPVKPLEQIGGNSCASGPV |
| | GKALSDACMGAVASFLTKYQDIILE |
| | HQKVIKKNEKRLANLKDIASANGLA |
| | FPKITLPPQPHTKEGIEAYNNVVAQ |
| | IVIWVNLNLWQKLKIGRDEAKPLQR |
| | LKGFPSFPLVERQANEVDWWDMVCN |
| | VKKLINEKKEDGKVFWQNLAGYKRQ |
| | EALRPYLSSEEDRKKGKKFARYQFG |
| | DLLLHLEKKHGEDWGKVYDEAWERI |
| | DKKVEGLSKHIKLEEERRSEDAQSK |
| | AALTDWLRAKASFVIEGLKEADKDE |
| | FCRCELKLQKWYGDLRGKPFAIEAE |
| | NSILDISGFSKQYNCAFIWQKDGVK |
| | KLNLYLIINYFKGGKLRFKKIKPEA |
| | FEANRFYTVINKKSGEIVPMEVNFN |
| | FDDPNLIILPLAFGKRQGREFIWND |
| | LLSLETGSLKLANGRVIEKTLYNRR |
| | TRQDEPALFVALTFERREVLDSSNI |
| | KPMNLIGIDRGENIPAVIALTDPEG |
| | CPLSRFKDSLGNPTHILRIGESYKE |
| | KQRTIQAKKEVEQRRAGGYSRKYAS |
| | KAKNLADDMVRNTARDLLYYAVTQD |
| | AMLIFENLSRGFGRQGKRTFMAERQ |
| | YTRMEDWLTAKLAYEGLSKTYLSKT |
| | LAQYTSKTCSNCGFTITSADYDRVL |
| | EKLKKTATGWMTTINGKELKVEGQI |
| | TYYNRYKRQNVVKDLSVELDRLSEE |
| | SVNNDISSWTKGRSGEALSLLKKRF |
| | SHRPVQEKFVCLNCGFETHADEQAA |
| | LNIARSWLFLRSQEYKKYQTNKTTG |
| | NTDKRAFVETWQSFYRKKLKEVWKP |
| | AVTSPKKKRKVPPPKRSFSKAF |
| | (SEQ ID NO: 260) |
| 300 | MQEIKRINKIRRRLVKDSNTKKAGK |
| | TGPMKTLLVRVMTPDLRERLENLRK |
| | KPENIPQPISNTSRANLNKLLTDYT |
| | EMKKAILHVYWEEFQKDPVGLMSRV |
| | AQPAPKNIDQRKLIPVKDGNERLTS |
| | SGFACSQCCQPLYVYKLEQVNDKGK |
| | PHTNYFGRCNVSEHERLILLSPHKP |
| | EANDELVTYSLGKFGQRALDFYSIH |
| | VTRESNHPVKPLEQIGGNSCASGPV |
| | GKALSDACMGAVASFLTKYQDIILE |
| | HQKVIKKNEKRLANLKDIASANGLA |
| | FPKITLPPQPHTKEGIEAYNNVVAQ |
| | IVIWVNLNLWQKLKIGRDEAKPLQR |
| | LKGFPSFPLVERQANEVDWWDMVCN |
| | VKKLINEKKEDGKVFWQNLAGYKRQ |
| | EALRPYLSSEEDRKKGKKFARYQFG |
| | DLLLHLEKKHGEDWGKVYDEAWERI |
| | DKKVEGLSKHIKLEEERRSEDAQSK |
| | AALTDWLRAKASFVIEGLKEADKDE |
| | FCRCELKLQKWYGDLRGKPFAIEAE |
| | NSILDISGFSKQYNCAFIWQKDGVK |
| | KLNLYLIINYFKGGKLRFKKIKPEA |
| | FEANRFYTVINKKSGEIVPMEVNFN |
| | FDDPNLIILPLAFGKRQGREFIWND |
| | LLSLETGSLKLANGRVIEKTLYNRR |
| | TRQDEPALFVALTFERREVLDSSNI |
| | KPMNLIGIDRGENIPAVIALTDPEG |
| | CPLSRFKDSLGNPTHILRIGESYKE |
| | KQRTIQAKKEVEQRRAGGYSRKYAS |
| | KAKNLADDMVRNTARDLLYYAVTQD |
| | AMLIFENLSRGFGRQGKRTFMAERQ |
| | YTRMEDWLTAKLAYEGLSKTYLSKT |
| | LAQYTSKTCSNCGFTITSADYDRVL |
| | EKLKKTATGWMTTINGKELKVEGQI |
| | TYYNRYKRQNVVKDLSVELDRLSEE |
| | SVNNDISSWTKGRSGEALSLLKKRF |
| | SHRPVQEKFVCLNCGFETHADEQAA |
| | LNIARSWLFLRSQEYKKYQTNKTTG |
| | NTDKRAFVETWQSFYRKKLKEVWKP |
| | AVTSPKKKRKVPPPKRGINDRNFWR |
| | GENERKTR |
| | (SEQ ID NO: 261) |
| 492 | MAPKKKRKVSRMQEIKRINKIRRRL |
| | VKDSNTKKAGKTGPMKTLLVRVMTP |
| | DLRERLENLRKKPENIPQPISNTSR |
| | ANLNKLLTDYTEMKKAILHVYWEEF |
| | QKDPVGLMSRVAQPAPKNIDQRKLI |
| | PVKDGNERLTSSGFACSQCCQPLYV |
| | YKLEQVNDKGKPHTNYFGRCNVSEH |
| | ERLILLSPHKPEANDELVTYSLGKF |
| | GQRALDFYSIHVTRESNHPVKPLEQ |
| | IGGNSCASGPVGKALSDACMGAVAS |
| | FLTKYQDIILEHQKVIKKNEKRLAN |
| | LKDIASANGLAFPKITLPPQPHTKE |
| | GIEAYNNVVAQIVIWVNLNLWQKLK |
| | IGRDEAKPLQRLKGFPSFPLVERQA |
| | NEVDWWDMVCNVKKLINEKKEDGKV |
| | FWQNLAGYKRQEALRPYLSSEEDRK |
| | KGKKFARYQFGDLLLHLEKKHGEDW |
| | GKVYDEAWERIDKKVEGLSKHIKLE |
| | EERRSEDAQSKAALTDWLRAKASFV |
| | IEGLKEADKDEFCRCELKLQKWYGD |
| | LRGKPFAIEAENSILDISGFSKQYN |
| | CAFIWQKDGVKKLNLYLIINYFKGG |
| | KLRFKKIKPEAFEANRFYTVINKKS |
| | GEIVPMEVNFNFDDPNLIILPLAFG |
| | KRQGREFIWNDLLSLETGSLKLANG |
| | RVIEKTLYNRRTRQDEPALFVALTF |
| | ERREVLDSSNIKPMNLIGIDRGENI |
| | PAVIALTDPEGCPLSRFKDSLGNPT |
| | HILRIGESYKEKQRTIQAKKEVEQR |
| | RAGGYSRKYASKAKNLADDMVRNTA |
| | RDLLYYAVTQDAMLIFENLSRGFGR |
| | QGKRTFMAERQYTRMEDWLTAKLAY |
| | EGLSKTYLSKTLAQYTSKTCSNCGF |
| | TITSADYDRVLEKLKKTATGWMTTI |
| | NGKELKVEGQITYYNRYKRQNVVKD |
| | LSVELDRLSEESVNNDISSWTKGRS |
| | GEALSLLKKRFSHRPVQEKFVCLNC |
| | GFETHADEQAALNIARSWLFLRSQE |
| | YKKYQTNKTTGNTDKRAFVETWQSF |
| | YRKKLKEVWKPAVTSPKKKRKVPPP |
| | PKKKRKV |
| | (SEQ ID NO: 262) |
| 493 | MAPKKKRKVSRMQEIKRINKIRRRL |
| | VKDSNTKKAGKTGPMKTLLVRVMTP |
| | DLRERLENLRKKPENIPQPISNTSR |
| | ANLNKLLTDYTEMKKAILHVYWEEF |
| | QKDPVGLMSRVAQPAPKNIDQRKLI |
| | PVKDGNERLTSSGFACSQCCQPLYV |
| | YKLEQVNDKGKPHTNYFGRCNVSEH |
| | ERLILLSPHKPEANDELVTYSLGKF |
| | GQRALDFYSIHVTRESNHPVKPLEQ |
| | IGGNSCASGPVGKALSDACMGAVAS |
| | FLTKYQDIILEHQKVIKKNEKRLAN |
| | LKDIASANGLAFPKITLPPQPHTKE |
| | GIEAYNNVVAQIVIWVNLNLWQKLK |
| | IGRDEAKPLQRLKGFPSFPLVERQA |
| | NEVDWWDMVCNVKKLINEKKEDGKV |
| | FWQNLAGYKRQEALRPYLSSEEDRK |
| | KGKKFARYQFGDLLLHLEKKHGEDW |
| | GKVYDEAWERIDKKVEGLSKHIKLE |
| | EERRSEDAQSKAALTDWLRAKASFV |
| | IEGLKEADKDEFCRCELKLQKWYGD |
| | LRGKPFAIEAENSILDISGFSKQYN |
| | CAFIWQKDGVKKLNLYLIINYFKGG |
| | KLRFKKIKPEAFEANRFYTVINKKS |
| | GEIVPMEVNFNFDDPNLIILPLAFG |
| | KRQGREFIWNDLLSLETGSLKLANG |
| | RVIEKTLYNRRTRQDEPALFVALTF |
| | ERREVLDSSNIKPMNLIGIDRGENI |
| | PAVIALTDPEGCPLSRFKDSLGNPT |
| | HILRIGESYKEKQRTIQAKKEVEQR |
| | RAGGYSRKYASKAKNLADDMVRNTA |
| | RDLLYYAVTQDAMLIFENLSRGFGR |
| | QGKRTFMAERQYTRMEDWLTAKLAY |
| | EGLSKTYLSKTLAQYTSKTCSNCGF |
| | TITSADYDRVLEKLKKTATGWMTTI |
| | NGKELKVEGQITYYNRYKRQNVVKD |
| | LSVELDRLSEESVNNDISSWTKGRS |
| | GEALSLLKKRFSHRPVQEKFVCLNC |
| | GFETHADEQAALNIARSWLFLRSQE |
| | YKKYQTNKTTGNTDKRAFVETWQSF |
| | YRKKLKEVWKPAVTSPKKKRKVPPP |
| | PAAKRVKLD |
| | (SEQ ID NO: 263) |

TABLE 9
Nuclear localization sequence list

| CasX | NLS | DNA Sequence | Amino Acid Sequence |
|---|---|---|---|
| 278, 279, | SV40 | CCAAAGAAGAAGCGGAAGG | PKKKRKV (SEQ ID |
| 280, 492, | | TC (SEQ ID NO: 264) | NO: 176) |
| 493 | | | |
| 285 | SynthNLS3 | CACAAGAAGAAACATCCAGA | HKKKHPDASVNFSE |
| | | CGCATCAGTCAACTTTAGCG | FSK (SEQ ID NO: |
| | | AGTTCAGTAAA (SEQ ID NO: | 207) |
| | | 265) | |
| 286 | SynthNLS4 | CAGCGCCCTGGGCCTTACGA | QRPGPYDRPQRPGP |
| | | TAGGCCGCAAAGACCCGGAC | YDRP (SEQ ID NO: |
| | | CGTATGATCGCCCT (SEQ ID | 208) |
| | | NO: 266) | |
| 287 | SynthNLS5 | CTCAGCCCGAGTCTTAGTCC | LSPSLSPLLSPSLSPL |
| | | ACTGCTTTCCCCGTCCCTGTC | (SEQ ID NO: 209) |
| | | TCCACTG (SEQ ID NO: 267) | |
| 288 | SynthNLS6 | CGGGGCAAGGGTGGCAAGG | RGKGGKGLGKGGA |
| | | GGCTTGGCAAGGGGGGGGCA | KRHRK (SEQ ID NO: |
| | | AAGAGGCACAGGAAG (SEQ | 210) |
| | | ID NO: 268) | |
| 290 | EGL-13 | AGCCGCCGCAGAAAAGCCAA | SRRRKANPTKLSEN |
| | | TCCTACAAAACTGTCAGAAA | AKKLAKEVEN (SEQ |
| | | ATGCGAAAAAACTTGCTAAG | ID NO: 203) |
| | | GAGGTGGAAAAC (SEQ ID | |
| | | NO: 269) | |
| 291 | c-Myc | CCTGCCGCAAAGCGAGTGAA | PAAKRVKLD (SEQ |
| | | ATTGGAC (SEQ ID NO: 270) | ID NO: 178) |
| 293 | Nucleolar RNA | AAGCGGTCCTTCAGTAAGGC | KRSFSKAF (SEQ ID |
| | Helicase II | CTTT (SEQ ID NO: 271) | NO: 199) |
| 300 | Influenza A | AAACGGGGAATAAACGACC | KRGINDRNFWRGEN |
| | protein | GGAACTTCTGGCGCGGGGAA | ERKTR (SEQ ID NO: |
| | | AACGAGCGCAAAACCCGA | 197) |
| | | (SEQ ID NO: 272) | |

### Example 5: Design and Generation of CasX Constructs 387, 395, 485-491, and 494

[0747] In order to generate CasX 395, CasX 485, CasX 486, CasX 487, the codon optimized CasX 119 (based on the CasX 37 construct of Example 2, encoding Planctomycetes CasX SEQ ID NO: 2, with a A708K substitution and a [P793] deletion with fused NLS, and linked guide and non-targeting sequences), CasX 435, CasX 438, and CasX 484 (each based on CasX 119 construct of Example 2 encoding Planctomycetes CasX SEQ ID NO: 2, with a L379R substitution, a A708K substitution, and a [P793] deletion with fused NLS, and linked guide and non-targeting sequences) were cloned respectively into a 4 kb staging vector comprising a KanR marker, colE1 ori, and CasX with fused NLS (pStx1) using standard cloning methods. Gibson primers were designed to amplify the CasX SEQ ID NO: 1 Helical I domain from amino acid 192-331 in its own vector to replace this corresponding region (aa 193-332) on CasX 119, CasX 435, CasX 438, and CasX 484 in pStx1 respectively. The Helical I domain from CasX SEQ ID NO: 1 was amplified with primers oIC768 and oIC784 using Q5 DNA polymerase according to the manufacturer's protocol. The destination vector containing the desired CasX variant was amplified with primers oIC765 and oIC764 using Q5 DNA polymerase according to the manufacturer's protocol. The two fragments were purified by gel extraction from a 1% agarose gel using Zymoclean Gel DNA Recovery Kit according to the manufacturer's protocol. The insert and backbone fragments were then pieced together using Gibson assembly (New England BioLabs Cat #E2621S) following the manufacturer's protocol. Assembled products in the pStx1 staging vector were transformed into chemically-competent Turbo Competent E. coli bacterial cells, plated on LB-Agar plates (LB: Teknova Cat #L9315, Agar: Quartzy Cat #214510) containing kanamycin and incubated at 37° C. Individual colonies were picked and miniprepped using Qiagen spin Miniprep Kit following the manufacturer's protocol. The resultant plasmids were sequenced using Sanger sequencing to ensure correct assembly. Correct clones were then cut and pasted into a mammalian expression plasmid (see FIG. 5) using standard cloning methods. The resultant plasmids were sequenced using Sanger sequencing to ensure correct assembly.

[0748] Sequences encoding the targeting spacer sequences that target the gene of interest were designed based on CasX PAM locations. Targeting spacer sequence DNA was ordered as single-stranded DNA (ssDNA) oligos (Integrated DNA Technologies) consisting of the targeting sequence and the reverse complement of this sequence. These two oligos were annealed together and cloned into pStX individually or in bulk by Golden Gate assembly using T4 DNA Ligase (New England BioLabs Cat #M0202L) and an appropriate restriction enzyme for the plasmid. Golden Gate products were transformed into chemically or electro-competent cells such as NEB Turbo competent E. coli (NEB Cat #C2984I), plated on LB-Agar plates (LB: Teknova Cat #L9315, Agar: Quartzy Cat #214510) containing carbenicillin and incubated at 37° C. Individual colonies were picked and miniprepped using Qiagen spin Miniprep Kit following the manufacturer's protocol. The resultant plasmids were sequenced using Sanger sequencing to ensure correct ligation.

[0749] In order to generate CasX 488, CasX 489, CasX 490, and CasX 491 (sequences in Table 10), the codon optimized CasX 119 (based on the CasX 37 construct of Example 2, encoding Planctomycetes CasX SEQ ID NO: 2, with a A708K substitution and a [P793] deletion with fused NLS, and linked guide and non-targeting sequences), CasX 435, CasX 438, and CasX 484 (each based on CasX119 construct of Example 2 encoding Planctomycetes CasX SEQ ID NO: 2, with a L379R substitution, a A708K substitution, and a [P793] deletion with fused NLS, and linked guide and non-targeting sequences) were cloned respectively into a 4 kb staging vector that was made up of a KanR marker, colE1 ori, and STX with fused NLS (pStx1) using standard cloning methods. Gibson primers were designed to amplify the CasX Stx1 NTSB domain from amino acid 101-191 and Helical I domain from amino acid 192-331 in its own vector to replace this similar region (aa 103-332) on CasX 119, CasX 435, CasX 438, and CasX 484 in pStx1 respectively. The NTSB and Helical I domain from CasX SEQ ID NO: 1 were amplified with primers oIC766 and oIC784 using Q5 DNA polymerase according to the manufacturer's protocol. The destination vector containing the desired CasX variant was amplified with primers oIC762 and oIC765 using Q5 DNA polymerase according to the manufacturer's protocol. The two fragments were purified by gel extraction from a 1% agarose gel using Zymoclean Gel DNA Recovery Kit according to the manufacturer's protocol. The insert and backbone fragments were then pieced together using Gibson assembly (New England BioLabs Cat #E2621S) following the manufacturer's protocol. Assembled products in the pStx1 staging vector were transformed into chemically-competent Turbo Competent E. coli bacterial cells, plated on LB-Agar plates (LB: Teknova Cat #L9315, Agar: Quartzy Cat #214510) containing kanamycin and incubated at 37° C. Individual colonies were picked and miniprepped using Qiagen spin Miniprep Kit following the manufacturer's protocol. The resultant plasmids were sequenced using Sanger sequencing to ensure correct assembly. Correct clones were then cut and pasted into a mammalian expression plasmid (see FIG. 5) using standard cloning methods. The resultant plasmids were sequenced using Sanger sequencing to ensure correct assembly. Sequences encoding the targeting spacer sequences that target the gene of interest were designed based on CasX PAM locations. Targeting spacer sequence DNA was ordered as single-stranded DNA (ssDNA) oligos (Integrated DNA Technologies) consisting of the targeting sequence and the reverse complement of this sequence. These two oligos were annealed together and cloned into pStX individually or in bulk by Golden Gate assembly using T4 DNA Ligase (New England BioLabs Cat #M0202L) and an appropriate restriction enzyme for the plasmid. Golden Gate products were transformed into chemically or electro-competent cells such as NEB Turbo competent E. coli (NEB Cat #C2984I), plated on LB-Agar plates (LB: Teknova Cat #L9315, Agar: Quartzy Cat #214510) containing carbenicillin and incubated at 37° C. Individual colonies were picked and miniprepped using Qiagen spin Miniprep Kit and following the manufacturer's protocol. The resultant plasmids were sequenced using Sanger sequencing to ensure correct ligation.

[0750] In order to generate CasX 387 and CasX 494 (sequences in Table 10), the codon optimized CasX 119 (based on the CasX 37 construct of Example 2, encoding Planctomycetes CasX SEQ ID NO: 2, with a A708K substitution and a [P793] deletion with fused NLS, and linked guide and non-targeting sequences) and CasX 484 (based on CasX119 construct of Example 2 encoding Planctomycetes CasX SEQ ID NO: 2, with a L379R substitution, a A708K substitution, and a [P793] deletion with fused NLS, and linked guide and non-targeting sequences) were cloned respectively into a 4 kb staging vector that was made up of a KanR marker, colE1 ori, and STX with fused NLS (pStx1) using standard cloning methods. Gibson primers were designed to amplify the CasX Stx1 NTSB domain from amino acid 101-191 in its own vector to replace this similar region (aa 103-192) on CasX 119 and CasX 484 in pStx1 respectively. The NTSB domain from CasX Stx1 was amplified with primers oIC766 and oIC767 using Q5 DNA polymerase according to the manufacturer's protocol. The destination vector containing the desired CasX variant was amplified with primers oIC763 and oIC762 using Q5 DNA polymerase according to the manufacturer's protocol. The two fragments were purified by gel extraction from a 1% agarose gel using Zymoclean Gel DNA Recovery Kit according to the manufacturer's protocol. The insert and backbone fragments were then pieced together using Gibson assembly (New England BioLabs Cat #E2621S) following the manufacturer's protocol. Assembled products in the pStx1 staging vector were transformed into chemically-competent Turbo Competent E. coli bacterial cells, plated on LB-Agar plates (LB: Teknova Cat #L9315, Agar: Quartzy Cat #214510) containing kanamycin and incubated at 37° C. Individual colonies were picked and miniprepped using Qiagen spin Miniprep Kit following the manufacturer's protocol. The resultant plasmids were sequenced using Sanger sequencing to ensure correct assembly. Correct clones were then cut and pasted into a mammalian expression plasmid (see FIG. 5) using standard cloning methods. The resultant plasmids were sequenced using Sanger sequencing to ensure correct assembly. Sequences encoding the targeting sequences that target the gene of interest were designed based on CasX PAM locations. Targeting sequence DNA was ordered as single-stranded DNA (ssDNA) oligos (Integrated DNA Technologies) consisting of the targeting sequence and the reverse complement of this sequence. These two oligos were annealed together and cloned into pStX individually or in bulk by Golden Gate assembly using T4 DNA Ligase (New England BioLabs Cat #M0202L) and an appropriate restriction enzyme for the plasmid. Golden Gate products were transformed into chemically or electro-competent cells such as NEB Turbo competent E. coli (NEB Cat #C2984I), plated on LB-Agar plates (LB: Teknova Cat #L9315, Agar: Quartzy Cat #214510) containing carbenicillin and incubated at 37° C. Individual colonies were picked and miniprepped using Qiagen spin Miniprep Kit and following the manufacturer's protocol. The resultant plasmids were sequenced using Sanger sequencing to ensure correct ligation. Sequences of the resulting constructs are listed in Table 10.

TABLE 10
Sequences of CasX 395 and 485-491

| | DNA | |
|---|---|---|
| Construct | Sequence | Amino Acid Sequence |
| CasX 387 | (SEQ ID | MAPKKKRKVSRQEIKRINKIRRRLV |
| | NO: 283) | KDSNTKKAGKTGPMKTLLVRVMTPD |
| | | LRERLENLRKKPENIPQPISNTSRA |
| | | NLNKLLTDYTEMKKAILHVYWEEFQ |
| | | KDPVGLMSRVAQPASKKIDQNKLKP |
| | | EMDEKGNLTTAGFACSQCGQPLFVY |
| | | KLEQVSEKGKAYTNYFGRCNVAEHE |
| | | KLILLAQLKPEKDSDEAVTYSLGKF |
| | | GQRALDFYSIHVTRESNHPVKPLEQ |
| | | IGGNSCASGPVGKALSDACMGAVAS |
| | | FLTKYQDIILEHQKVIKKNEKRLAN |
| | | LKDIASANGLAFPKITLPPQPHTKE |
| | | GIEAYNNVVAQIVIWVNLNLWQKLK |
| | | IGRDEAKPLQRLKGFPSFPLVERQA |
| | | NEVDWWDMVCNVKKLINEKKEDGKV |
| | | FWQNLAGYKRQEALRPYLSSEEDRK |
| | | KGKKFARYQFGDLLLHLEKKHGEDW |
| | | GKVYDEAWERIDKKVEGLSKHIKLE |
| | | EERRSEDAQSKAALTDWLRAKASFV |
| | | IEGLKEADKDEFCRCELKLQKWYGD |
| | | LRGKPFAIEAENSILDISGFSKQYN |
| | | CAFIWQKDGVKKLNLYLIINYFKGG |
| | | KLRFKKIKPEAFEANRFYTVINKKS |
| | | GEIVPMEVNFNFDDPNLIILPLAFG |
| | | KRQGREFIWNDLLSLETGSLKLANG |
| | | RVIEKTLYNRRTRQDEPALFVALTF |
| | | ERREVLDSSNIKPMNLIGIDRGENI |
| | | PAVIALTDPEGCPLSRFKDSLGNPT |
| | | HILRIGESYKEKQRTIQAKKEVEQR |
| | | RAGGYSRKYASKAKNLADDMVRNTA |
| | | RDLLYYAVTQDAMLIFENLSRGFGR |
| | | QGKRTFMAERQYTRMEDWLTAKLAY |
| | | EGLSKTYLSKTLAQYTSKTCSNCGF |
| | | TITSADYDRVLEKLKKTATGWMTTI |
| | | NGKELKVEGQITYYNRYKRQNVVKD |
| | | LSVELDRLSEESVNNDISSWTKGRS |
| | | GEALSLLKKRFSHRPVQEKFVCLNC |
| | | GFETHADEQAALNIARSWLFLRSQE |
| | | YKKYQTNKTTGNTDKRAFVETWQSF |
| | | YRKKLKEVWKPAVTSPKKKRKV |
| | | (SEQ ID NO: 273) |
| CasX 395 | (SEQ ID | MAPKKKRKVSRQEIKRINKIRRRLV |
| | NO: 284) | KDSNTKKAGKTGPMKTLLVRVMTPD |
| | | LRERLENLRKKPENIPQPISNTSRA |
| | | NLNKLLTDYTEMKKAILHVYWEEFQ |
| | | KDPVGLMSRVAQPAPKNIDQRKLIP |
| | | VKDGNERLTSSGFACSQCCQPLYVY |
| | | KLEQVNDKGKPHTNYFGRCNVSEHE |
| | | RLILLSPHKPEANDELVTYSLGKFG |
| | | QRALDFYSIHVTKESTHPVKPLAQI |
| | | AGNRYASGPVGKALSDACMGTIASF |
| | | LSKYQDIIIEHQKVVKGNQKRLESL |
| | | RELAGKENLEYPSVTLPPQPHTKEG |
| | | VDAYNEVIARVRMWVNLNLWQKLKL |
| | | SRDDAKPLLRLKGFPSFPLVERQAN |
| | | EVDWWDMVCNVKKLINEKKEDGKVF |
| | | WQNLAGYKRQEALRPYLSSEEDRKK |
| | | GKKFARYQFGDLLLHLEKKHGEDWG |
| | | KVYDEAWERIDKKVEGLSKHIKLEE |
| | | ERRSEDAQSKAALTDWLRAKASFVI |
| | | EGLKEADKDEFCRCELKLQKWYGDL |
| | | RGKPFAIEAENSILDISGFSKQYNC |
| | | AFIWQKDGVKKLNLYLIINYFKGGK |
| | | LRFKKIKPEAFEANRFYTVINKKSG |
| | | EIVPMEVNFNFDDPNLIILPLAFGK |
| | | RQGREFIWNDLLSLETGSLKLANGR |
| | | VIEKTLYNRRTRQDEPALFVALTFE |
| | | RREVLDSSNIKPMNLIGIDRGENIP |
| | | AVIALTDPEGCPLSRFKDSLGNPTH |
| | | ILRIGESYKEKQRTIQAKKEVEQRR |
| | | AGGYSRKYASKAKNLADDMVRNTAR |
| | | DLLYYAVTQDAMLIFENLSRGFGRQ |
| | | GKRTFMAERQYTRMEDWLTAKLAYE |
| | | GLSKTYLSKTLAQYTSKTCSNCGFT |
| | | ITSADYDRVLEKLKKTATGWMTTIN |
| | | GKELKVEGQITYYNRYKRQNVVKDL |
| | | SVELDRLSEESVNNDISSWTKGRSG |
| | | EALSLLKKRFSHRPVQEKFVCLNCG |
| | | FETHADEQAALNIARSWLFLRSQEY |
| | | KKYQTNKTTGNTDKRAFVETWQSFY |
| | | RKKLKEVWKPAVTSPKKKRKVTSPK |
| | | KKRKV |
| | | (SEQ ID NO: 274) |
| CasX 485 | (SEQ ID | MAPKKKRKVSRQEIKRINKIRRRLV |
| | NO: 285) | KDSNTKKAGKTGPMKTLLVRVMTPD |
| | | LRERLENLRKKPENIPQPISNTSRA |
| | | NLNKLLTDYTEMKKAILHVYWEEFQ |
| | | KDPVGLMSRVAQPAPKNIDQRKLIP |
| | | VKDGNERLTSSGFACSQCCQPLYVY |
| | | KLEQVNDKGKPHTNYFGRCNVSEHE |
| | | RLILLSPHKPEANDELVTYSLGKFG |
| | | QRALDFYSIHVTKESTHPVKPLAQI |
| | | AGNRYASGPVGKALSDACMGTIASF |
| | | LSKYQDIIIEHQKVVKGNQKRLESL |
| | | RELAGKENLEYPSVTLPPQPHTKEG |
| | | VDAYNEVIARVRMWVNLNLWQKLKL |
| | | SRDDAKPLLRLKGFPSFPLVERQAN |
| | | EVDWWDMVCNVKKLINEKKEDGKVF |
| | | WQNLAGYKRQEALRPYLSSEEDRKK |
| | | GKKFARYQLGDLLLHLEKKHGEDWG |
| | | KVYDEAWERIDKKVEGLSKHIKLEE |
| | | ERRSEDAQSKAALTDWLRAKASFVI |
| | | EGLKEADKDEFCRCELKLQKWYGDL |
| | | RGKPFAIEAENSILDISGFSKQYNC |
| | | AFIWQKDGVKKLNLYLIINYFKGGK |
| | | LRFKKIKPEAFEANRFYTVINKKSG |
| | | EIVPMEVNFNFDDPNLIILPLAFGK |
| | | RQGREFIWNDLLSLETGSLKLANGR |
| | | VIEKTLYNRRTRQDEPALFVALTFE |
| | | RREVLDSSNIKPMNLIGVDRGENIP |
| | | AVIALTDPEGCPLSRFKDSLGNPTH |
| | | ILRIGESYKEKQRTIQAKKEVEQRR |
| | | AGGYSRKYASKAKNLADDMVRNTAR |
| | | DLLYYAVTQDAMLIFENLSRGFGRQ |
| | | GKRTFMAERQYTRMEDWLTAKLAYE |
| | | GLSKTYLSKTLAQYTSKTCSNCGFT |
| | | ITSADYDRVLEKLKKTATGWMTTIN |
| | | GKELKVEGQITYYNRRKRQNVVKDL |
| | | SVELDRLSEESVNNDISSWTKGRSG |
| | | EALSLLKKRFSHRPVQEKFVCLNCG |
| | | FETHADEQAALNIARSWLFLRSQEY |
| | | KKYQTNKTTGNTDKRAFVETWQSFY |
| | | RKKLKEVWKPAVTSPKKKRKV |
| | | (SEQ ID NO: 275) |
| CasX 486 | (SEQ ID | MAPKKKRKVSRQEIKRINKIRRRLV |
| | NO: 286) | KDSNTKKAGKTGPMKTLLVRVMTPD |
| | | LRERLENLRKKPENIPQPISNTSRA |
| | | NLNKLLTDYTEMKKAILHVYWEEFQ |
| | | KDPVGLMSRVAQPAPKNIDQRKLIP |
| | | VKDGNERLTSSGFACSQCCQPLYVY |
| | | KLEQVNDKGKPHTNYFGRCNVSEHE |
| | | RLILLSPHKPEANDELVTYSLGKFG |
| | | QRALDFYSIHVTKESTHPVKPLAQI |
| | | AGNRYASGPVGKALSDACMGTIASF |
| | | LSKYQDIIIEHQKVVKGNQKRLESL |
| | | RELAGKENLEYPSVTLPPQPHTKEG |
| | | VDAYNEVIARVRMWVNLNLWQKLKL |
| | | SRDDAKPLLRLKGFPSFPLVERQAN |
| | | EVDWWDMVCNVKKLINEKKEDGKVF |
| | | WQNLAGYKRQEALRPYLSSEEDRKK |
| | | GKKFARYQLGDLLKHLEKKHGEDWG |
| | | KVYDEAWERIDKKVEGLSKHIKLEE |
| | | ERRSEDAQSKAALTDWLRAKASFVI |
| | | EGLKEADKDEFCRCELKLQKWYGDL |
| | | RGKPFAIEAENSILDISGFSKQYNC |
| | | AFIWQKDGVKKLNLYLIINYFKGGK |
| | | LRFKKIKPEAFEANRFYTVINKKSG |
| | | EIVPMEVNFNFDDPNLIILPLAFGK |
| | | RQGREFIWNDLLSLETGSLKLANGR |
| | | VIEKTLYNRRTRQDEPALFVALTFE |
| | | RREVLDSSNIKPMNLIGVDRGENIP |
| | | AVIALTDPEGCPLSRFKDSLGNPTH |
| | | ILRIGESYKEKQRTIQAKKEVEQRR |
| | | AGGYSRKYASKAKNLADDMVRNTAR |
| | | DLLYYAVTQDAMLIFENLSRGFGRQ |
| | | GKRTFMAERQYTRMEDWLTAKLAYE |
| | | GLSKTYLSKTLAQYTSKTCSNCGFT |
| | | ITSADYDRVLEKLKKTATGWMTTIN |
| | | GKELKVEGQITYYNRRKRQNVVKDL |
| | | SVELDRLSEESVNNDISSWTKGRSG |
| | | EALSLLKKRFSHRPVQEKFVCLNCG |
| | | FETHADEQAALNIARSWLFLRSQEY |
| | | KKYQTNKTTGNTDKRAFVETWQSFY |
| | | RKKLKEVWKPAVTSPKKKRKV |
| | | (SEQ ID NO: 276) |
| CasX 487 | (SEQ ID | MAPKKKRKVSRQEIKRINKIRRRLV |
| | NO: 287) | KDSNTKKAGKTGPMKTLLVRVMTPD |
| | | LRERLENLRKKPENIPQPISNTSRA |
| | | NLNKLLTDYTEMKKAILHVYWEEFQ |
| | | KDPVGLMSRVAQPAPKNIDQRKLIP |
| | | VKDGNERLTSSGFACSQCCQPLYVY |
| | | KLEQVNDKGKPHTNYFGRCNVSEHE |
| | | RLILLSPHKPEANDELVTYSLGKFG |
| | | QRALDFYSIHVTKESTHPVKPLAQI |
| | | AGNRYASGPVGKALSDACMGTIASF |
| | | LSKYQDIIIEHQKVVKGNQKRLESL |
| | | RELAGKENLEYPSVTLPPQPHTKEG |
| | | VDAYNEVIARVRMWVNLNLWQKLKL |
| | | SRDDAKPLLRLKGFPSFPLVERQAN |
| | | EVDWWDMVCNVKKLINEKKEDGKVF |
| | | WQNLAGYKRQEALRPYLSSEEDRKK |
| | | GKKFARYQLGDLLLHLEKKHGEDWG |
| | | KVYDEAWERIDKKVEGLSKHIKLEE |
| | | ERRSEDAQSKAALTDWLRAKASFVI |
| | | EGLKEADKDEFCRCELKLQKWYGDL |
| | | RGKPFAIEAENSILDISGFSKQYNC |
| | | AFIWQKDGVKKLNLYLIINYFKGGK |
| | | LRFKKIKPEAFEANRFYTVINKKSG |
| | | EIVPMEVNFNFDDPNLIILPLAFGK |
| | | RQGREFIWNDLLSLETGSLKLANGR |
| | | VIEKTLYNRRTRQDEPALFVALTFE |
| | | RREVLDSSNIKPMNLIGVDRGENIP |
| | | AVIALTDPEGCPLSRFKDSLGNPTH |
| | | ILRIGESYKEKQRTIQAKKEVEQRR |
| | | AGGYSRKYASKAKNLADDMVRNTAR |
| | | DLLYYAVTQDAMLIFENLSRGFGRQ |
| | | GKRTFMAERQYTRMEDWLTAKLAYE |
| | | GLSKTYLSKTLAQYTSKTCSNCGFT |
| | | ITSADYDRVLEKLKKTATGWMTTIN |
| | | GKELKVEGQITYYNRYKRQNVVKDL |
| | | SVELDRLSEESVNNDISSWTKGRSG |
| | | EALSLLKKRFSHRPVQEKFVCLNCG |
| | | FETHADEQAALNIARSWLFLRSQEY |
| | | KKYQTNKTTGNTDKRAFVETWQSFY |
| | | RKKLKEVWKPAVTSPKKKRKV |
| | | (SEQ ID NO: 277) |
| CasX 488 | (SEQ ID | MAPKKKRKVSRQEIKRINKIRRRLV |
| | NO: 288) | KDSNTKKAGKTGPMKTLLVRVMTPD |
| | | LRERLENLRKKPENIPQPISNTSRA |
| | | NLNKLLTDYTEMKKAILHVYWEEFQ |
| | | KDPVGLMSRVAQPASKKIDQNKLKP |
| | | EMDEKGNLTTAGFACSQCGQPLFVY |
| | | KLEQVSEKGKAYTNYFGRCNVAEHE |
| | | KLILLAQLKPEKDSDEAVTYSLGKF |
| | | GQRALDFYSIHVTKESTHPVKPLAQ |
| | | IAGNRYASGPVGKALSDACMGTIAS |
| | | FLSKYQDIIIEHQKVVKGNQKRLES |
| | | LRELAGKENLEYPSVTLPPQPHTKE |
| | | GVDAYNEVIARVRMWVNLNLWQKLK |
| | | LSRDDAKPLLRLKGFPSFPLVERQA |
| | | NEVDWWDMVCNVKKLINEKKEDGKV |
| | | FWQNLAGYKRQEALRPYLSSEEDRK |
| | | KGKKFARYQFGDLLLHLEKKHGEDW |
| | | GKVYDEAWERIDKKVEGLSKHIKLE |
| | | EERRSEDAQSKAALTDWLRAKASFV |
| | | IEGLKEADKDEFCRCELKLQKWYGD |
| | | LRGKPFAIEAENSILDISGFSKQYN |
| | | CAFIWQKDGVKKLNLYLIINYFKGG |
| | | KLRFKKIKPEAFEANRFYTVINKKS |
| | | GEIVPMEVNFNFDDPNLIILPLAFG |
| | | KRQGREFIWNDLLSLETGSLKLANG |
| | | RVIEKTLYNRRTRQDEPALFVALTF |
| | | ERREVLDSSNIKPMNLIGIDRGENI |
| | | PAVIALTDPEGCPLSRFKDSLGNPT |
| | | HILRIGESYKEKQRTIQAKKEVEQR |
| | | RAGGYSRKYASKAKNLADDMVRNTA |
| | | RDLLYYAVTQDAMLIFENLSRGFGR |
| | | QGKRTFMAERQYTRMEDWLTAKLAY |
| | | EGLSKTYLSKTLAQYTSKTCSNCGF |
| | | TITSADYDRVLEKLKKTATGWMTTI |
| | | NGKELKVEGQITYYNRYKRQNVVKD |
| | | LSVELDRLSEESVNNDISSWTKGRS |
| | | GEALSLLKKRFSHRPVQEKFVCLNC |
| | | GFETHADEQAALNIARSWLFLRSQE |
| | | YKKYQTNKTTGNTDKRAFVETWQSF |
| | | YRKKLKEVWKPAVTSPKKKRKV |
| | | (SEQ ID NO: 278) |
| CasX 489 | (SEQ ID | MAPKKKRKVSRQEIKRINKIRRRLV |
| | NO: 289) | KDSNTKKAGKTGPMKTLLVRVMTPD |
| | | LRERLENLRKKPENIPQPISNTSRA |
| | | NLNKLLTDYTEMKKAILHVYWEEFQ |
| | | KDPVGLMSRVAQPASKKIDQNKLKP |
| | | EMDEKGNLTTAGFACSQCGQPLFVY |
| | | KLEQVSEKGKAYTNYFGRCNVAEHE |
| | | KLILLAQLKPEKDSDEAVTYSLGKF |
| | | GQRALDFYSIHVTKESTHPVKPLAQ |
| | | IAGNRYASGPVGKALSDACMGTIAS |
| | | FLSKYQDIIIEHQKVVKGNQKRLES |
| | | LRELAGKENLEYPSVTLPPQPHTKE |
| | | GVDAYNEVIARVRMWVNLNLWQKLK |
| | | LSRDDAKPLLRLKGFPSFPLVERQA |
| | | NEVDWWDMVCNVKKLINEKKEDGKV |
| | | FWQNLAGYKRQEALRPYLSSEEDRK |
| | | KGKKFARYQLGDLLLHLEKKHGEDW |
| | | GKVYDEAWERIDKKVEGLSKHIKLE |
| | | EERRSEDAQSKAALTDWLRAKASFV |
| | | IEGLKEADKDEFCRCELKLQKWYGD |
| | | LRGKPFAIEAENSILDISGFSKQYN |
| | | CAFIWQKDGVKKLNLYLIINYFKGG |
| | | KLRFKKIKPEAFEANRFYTVINKKS |
| | | GEIVPMEVNFNFDDPNLIILPLAFG |
| | | KRQGREFIWNDLLSLETGSLKLANG |
| | | RVIEKTLYNRRTRQDEPALFVALTF |
| | | ERREVLDSSNIKPMNLIGVDRGENI |
| | | PAVIALTDPEGCPLSRFKDSLGNPT |
| | | HILRIGESYKEKQRTIQAKKEVEQR |
| | | RAGGYSRKYASKAKNLADDMVRNTA |
| | | RDLLYYAVTQDAMLIFENLSRGFGR |
| | | QGKRTFMAERQYTRMEDWLTAKLAY |
| | | EGLSKTYLSKTLAQYTSKTCSNCGF |
| | | TITSADYDRVLEKLKKTATGWMTTI |
| | | NGKELKVEGQITYYNRRKRQNVVKD |
| | | LSVELDRLSEESVNNDISSWTKGRS |
| | | GEALSLLKKRFSHRPVQEKFVCLNC |
| | | GFETHADEQAALNIARSWLFLRSQE |
| | | YKKYQTNKTTGNTDKRAFVETWQSF |
| | | YRKKLKEVWKPAVTSPKKKRKV |
| | | (SEQ ID NO: 279) |
| CasX 490 | (SEQ ID | MAPKKKRKVSRQEIKRINKIRRRLV |
| | NO: 290) | KDSNTKKAGKTGPMKTLLVRVMTPD |
| | | LRERLENLRKKPENIPQPISNTSRA |
| | | NLNKLLTDYTEMKKAILHVYWEEFQ |
| | | KDPVGLMSRVAQPASKKIDQNKLKP |
| | | EMDEKGNLTTAGFACSQCGQPLFVY |
| | | KLEQVSEKGKAYTNYFGRCNVAEHE |
| | | KLILLAQLKPEKDSDEAVTYSLGKF |
| | | GQRALDFYSIHVTKESTHPVKPLAQ |
| | | IAGNRYASGPVGKALSDACMGTIAS |
| | | FLSKYQDIIIEHQKVVKGNQKRLES |
| | | LRELAGKENLEYPSVTLPPQPHTKE |
| | | GVDAYNEVIARVRMWVNLNLWQKLK |
| | | LSRDDAKPLLRLKGFPSFPLVERQA |
| | | NEVDWWDMVCNVKKLINEKKEDGKV |
| | | FWQNLAGYKRQEALRPYLSSEEDRK |
| | | KGKKFARYQLGDLLKHLEKKHGEDW |
| | | GKVYDEAWERIDKKVEGLSKHIKLE |
| | | EERRSEDAQSKAALTDWLRAKASFV |
| | | IEGLKEADKDEFCRCELKLQKWYGD |
| | | LRGKPFAIEAENSILDISGFSKQYN |
| | | CAFIWQKDGVKKLNLYLIINYFKGG |
| | | KLRFKKIKPEAFEANRFYTVINKKS |
| | | GEIVPMEVNFNFDDPNLIILPLAFG |
| | | KRQGREFIWNDLLSLETGSLKLANG |
| | | RVIEKTLYNRRTRQDEPALFVALTF |
| | | ERREVLDSSNIKPMNLIGVDRGENI |
| | | PAVIALTDPEGCPLSRFKDSLGNPT |
| | | HILRIGESYKEKQRTIQAKKEVEQR |
| | | RAGGYSRKYASKAKNLADDMVRNTA |
| | | RDLLYYAVTQDAMLIFENLSRGFGR |
| | | QGKRTFMAERQYTRMEDWLTAKLAY |
| | | EGLSKTYLSKTLAQYTSKTCSNCGF |
| | | TITSADYDRVLEKLKKTATGWMTTI |
| | | NGKELKVEGQITYYNRRKRQNVVKD |
| | | LSVELDRLSEESVNNDISSWTKGRS |
| | | GEALSLLKKRFSHRPVQEKFVCLNC |
| | | GFETHADEQAALNIARSWLFLRSQE |
| | | YKKYQTNKTTGNTDKRAFVETWQSF |
| | | YRKKLKEVWKPAVTSPKKKRKV |
| | | (SEQ ID NO: 280) |
| CasX 491 | (SEQ ID | MAPKKKRKVSRQEIKRINKIRRRLV |
| | NO: 291) | KDSNTKKAGKTGPMKTLLVRVMTPD |
| | | LRERLENLRKKPENIPQPISNTSRA |
| | | NLNKLLTDYTEMKKAILHVYWEEFQ |
| | | KDPVGLMSRVAQPASKKIDQNKLKP |
| | | EMDEKGNLTTAGFACSQCGQPLFVY |
| | | KLEQVSEKGKAYTNYFGRCNVAEHE |
| | | KLILLAQLKPEKDSDEAVTYSLGKF |
| | | GQRALDFYSIHVTKESTHPVKPLAQ |
| | | IAGNRYASGPVGKALSDACMGTIAS |
| | | FLSKYQDIIIEHQKVVKGNQKRLES |
| | | LRELAGKENLEYPSVTLPPQPHTKE |
| | | GVDAYNEVIARVRMWVNLNLWQKLK |
| | | LSRDDAKPLLRLKGFPSFPLVERQA |
| | | NEVDWWDMVCNVKKLINEKKEDGKV |
| | | FWQNLAGYKRQEALRPYLSSEEDRK |
| | | KGKKFARYQLGDLLLHLEKKHGEDW |
| | | GKVYDEAWERIDKKVEGLSKHIKLE |
| | | EERRSEDAQSKAALTDWLRAKASFV |
| | | IEGLKEADKDEFCRCELKLQKWYGD |
| | | LRGKPFAIEAENSILDISGFSKQYN |
| | | CAFIWQKDGVKKLNLYLIINYFKGG |
| | | KLRFKKIKPEAFEANRFYTVINKKS |
| | | GEIVPMEVNFNFDDPNLIILPLAFG |
| | | KRQGREFIWNDLLSLETGSLKLANG |
| | | RVIEKTLYNRRTRQDEPALFVALTF |
| | | ERREVLDSSNIKPMNLIGVDRGENI |
| | | PAVIALTDPEGCPLSRFKDSLGNPT |
| | | HILRIGESYKEKQRTIQAKKEVEQR |
| | | RAGGYSRKYASKAKNLADDMVRNTA |
| | | RDLLYYAVTQDAMLIFENLSRGFGR |
| | | QGKRTFMAERQYTRMEDWLTAKLAY |
| | | EGLSKTYLSKTLAQYTSKTCSNCGF |
| | | TITSADYDRVLEKLKKTATGWMTTI |
| | | NGKELKVEGQITYYNRYKRQNVVKD |
| | | LSVELDRLSEESVNNDISSWTKGRS |
| | | GEALSLLKKRFSHRPVQEKFVCLNC |
| | | GFETHADEQAALNIARSWLFLRSQE |
| | | YKKYQTNKTTGNTDKRAFVETWQSF |
| | | YRKKLKEVWKPAVTSPKKKRKV |
| | | (SEQ ID NO: 281) |
| CasX 494 | (SEQ ID | MAPKKKRKVSRQEIKRINKIRRRLV |
| | NO: 292) | KDSNTKKAGKTGPMKTLLVRVMTPD |
| | | LRERLENLRKKPENIPQPISNTSRA |
| | | NLNKLLTDYTEMKKAILHVYWEEFQ |
| | | KDPVGLMSRVAQPASKKIDQNKLKP |
| | | EMDEKGNLTTAGFACSQCGQPLFVY |
| | | KLEQVSEKGKAYTNYFGRCNVAEHE |
| | | KLILLAQLKPEKDSDEAVTYSLGKF |
| | | GQRALDFYSIHVTRESNHPVKPLEQ |
| | | IGGNSCASGPVGKALSDACMGAVAS |
| | | FLTKYQDIILEHQKVIKKNEKRLAN |
| | | LKDIASANGLAFPKITLPPQPHTKE |
| | | GIEAYNNVVAQIVIWVNLNLWQKLK |
| | | IGRDEAKPLQRLKGFPSFPLVERQA |
| | | NEVDWWDMVCNVKKLINEKKEDGKV |
| | | FWQNLAGYKRQEALRPYLSSEEDRK |
| | | KGKKFARYQLGDLLLHLEKKHGEDW |
| | | GKVYDEAWERIDKKVEGLSKHIKLE |
| | | EERRSEDAQSKAALTDWLRAKASFV |
| | | IEGLKEADKDEFCRCELKLQKWYGD |
| | | LRGKPFAIEAENSILDISGFSKQYN |
| | | CAFIWQKDGVKKLNLYLIINYFKGG |
| | | KLRFKKIKPEAFEANRFYTVINKKS |
| | | GEIVPMEVNFNFDDPNLIILPLAFG |
| | | KRQGREFIWNDLLSLETGSLKLANG |
| | | RVIEKTLYNRRTRQDEPALFVALTF |
| | | ERREVLDSSNIKPMNLIGVDRGENI |
| | | PAVIALTDPEGCPLSRFKDSLGNPT |
| | | HILRIGESYKEKQRTIQAKKEVEQR |
| | | RAGGYSRKYASKAKNLADDMVRNTA |
| | | RDLLYYAV |
| | | TQDAMLIFENLSRGFGRQGKRTFMA |
| | | ERQYTRMEDWLTAKLAYEGLSKTYL |
| | | SKTLAQYTSKTCSNCGFTITSADYD |
| | | RVLEKLKKTATGWMTTINGKELKVE |
| | | GQITYYNRYKRQNVVKDLSVELDRL |
| | | SEESVNNDISSWTKGRSGEALSLLK |
| | | KRFSHRPVQEKFVCLNCGFETHADE |
| | | QAALNIARSWLFLRSQEYKKYQTNK |
| | | TTGNTDKRAFVETWQSFYRKKLKEV |
| | | WKPAVTSPKKKRKV |
| | | (SEQ ID NO: 282) |

### Example 6: Generation of RNA Guides

[0751] For the generation of RNA single guides and spacers, templates for in vitro transcription were generated by performing PCR with Q5 polymerase (NEB M0491) according to the recommended protocol, with template oligos for each backbone and amplification primers with the T7 promoter and the spacer sequence. The DNA primer sequences for the T7 promoter, guide and spacer for guides and spacers are presented in Table 11, below. The template oligos, labeled “backbone fwd” and “backbone rev” for each scaffold, were included at a final concentration of 20 nM each, and the amplification primers (T7 promoter and the unique spacer primer) were included at a final concentration of 1 uM each. The sg2, sg32, sg64, and sg174 guides correspond to SEQ ID NOS: 5, 2104, 2106, and 2238, respectively, with the exception that sg2, sg32, and sg64 were modified with an additional 5′ G to increase transcription efficiency (compare sequences in Table 11 to Table 2). The 7.37 spacer targets beta2-microglobulin (B2M). Following PCR amplification, templates were cleaned and isolated by phenol-chloroform-isoamyl alcohol extraction followed by ethanol precipitation.

[0752] In vitro transcriptions were carried out in buffer containing 50 mM Tris pH 8.0, 30 mM MgCl₂, 0.01% Triton X-100, 2 mM spermidine, 20 mM DTT, 5 mM NTPs, 0.5 μM template, and 100 μg/mL T7 RNA polymerase. Reactions were incubated at 37° C. overnight. 20 units of DNase I (Promega #M6101)) were added per 1 mL of transcription volume and incubated for one hour. RNA products were purified via denaturing PAGE, ethanol precipitated, and resuspended in 1× phosphate buffered saline. To fold the sgRNAs, samples were heated to 70° C. for 5 min and then cooled to room temperature. The reactions were supplemented to 1 mM final MgCl₂ concentration, heated to 50° C. for 5 min and then cooled to room temperature. Final RNA guide products were stored at −80° C.

TABLE 11
Sequences for generation of guide RNA

| Primer | Primer sequence | RNA product |
|---|---|---|
| T7 promoter | GAAATTAATA | Used for all |
| primer | CGACTCACTA | |
| | TA | |
| | (SEQ ID | |
| | NO: 293) | |
| sg2 backbone | GAAATTAATA | GGUACUGGCGCUU |
| fwd | CGACTCACTA | UUAUCUCAUUACU |
| | TAGGTACTGG | UUGAGAGCCAUCA |
| | CGCTTTTATC | CCAGCGACUAUGU |
| | TCATTACTTT | CGUAUGGGUAAA |
| | GAGAGCCATC | GCGCUUAUUUAUC |
| | ACCAGCGACT | GGAGAGAAAUCCG |
| | ATGTCGTATG | AUAAAUAAGAAG |
| | GGTAAAG | CAUCAAAGGGCCG |
| | (SEQ ID | AGAUGUCUCGCUC |
| | NO: 294) | CG |
| | | (SEQ ID NO: 306) |
| sg2 backbone | CTTTGATGCT | |
| rev | TCTTATTTAT | |
| | CGGATTTCTC | |
| | TCCGATAAAT | |
| | AAGCGCTTTA | |
| | CCCATACGAC | |
| | ATAGTCGCTG | |
| | GTGATGGC | |
| | (SEQ ID | |
| | NO: 295) | |
| sg2.7.37 | CGGAGCGAGA | |
| spacer primer | CATCTCGGCC | |
| | CTTTGATGCT | |
| | TCTTATTTAT | |
| | CGGATTTCTC | |
| | TCCG | |
| | (SEQ ID | |
| | NO: 296) | |
| sg32 | GAAATTAATA | GGUACUGGCGCUU |
| backbone fwd | CGACTCACTA | UUAUCUCAUUACU |
| | TAGGTACTGG | UUGAGAGCCAUCA |
| | CGCTTTTATC | CCAGCGACUAUGU |
| | TCATTACTTT | CGUAUGGGUAAA |
| | GAGAGCCATC | GCGCCCUCUUCGG |
| | ACCAGCGACT | AGGGAAGCAUCAA |
| | ATGTCGTATG | AGGGCCGAGAUGU |
| | GGTAAAGCGC | CUCG |
| | (SEQ ID | (SEQ ID NO: 307) |
| | NO: 297) | |
| sg32 | CTTTGATGCT | |
| backbone rev | TCCCTCCGAA | |
| | GAGGGCGCTT | |
| | TACCCATACG | |
| | ACATAG | |
| | (SEQ ID | |
| | NO: 298) | |
| sg32.7.37 | CGGAGCGAGA | |
| spacer primer | CATCTCGGCC | |
| | CTTTGATGCT | |
| | TCCCTCCGAA | |
| | GAG | |
| | (SEQ ID | |
| | NO: 299) | |
| sg64 | GAAATTAATA | GGUACUGGCGCCU |
| backbone fwd | CGACTCACTA | UUAUCUCAUUACU |
| | TAGGTACTGG | UUGAGAGCCAUCA |
| | CGCCTTTATC | CCAGCGACUAUGU |
| | TCATTACTTT | CGUAUGGGUAAA |
| | GAGAGCCATC | GCGCUUACGGACU |
| | ACCAGCGACT | UCGGUCCGUAAGA |
| | ATGTCGTATG | AGCAUCAAAGGGC |
| | GGTAAAGCGC | CGAGAUGUCUCGC |
| | (SEQ ID | UCCG |
| | NO: 300) | (SEQ ID NO: 308) |
| sg64 | CTTTGATGCT | |
| backbone rev | TCTTACGGAC | |
| | CGAAGTCCGT | |
| | AAGCGCTTTA | |
| | CCCATACGAC | |
| | ATAG | |
| | (SEQ ID | |
| | NO: 301) | |
| sg64.7.37 | CGGAGCGAGA | |
| spacer primer | CATCTCGGCC | |
| | CTTTGATGCT | |
| | TCTTACGGAC | |
| | CGAAG | |
| | (SEQ ID | |
| | NO: 302) | |
| sg174 | GAAATTAATA | ACUGGCGCUUUUA |
| backbone fwd | CGACTCACTA | UCUgAUUACUUUG |
| | TAACTGGCGC | AGAGCCAUCACCA |
| | TTTTATCTGA | GCGACUAUGUCGU |
| | TTACTTTGAG | AgUGGGUAAAGCU |
| | AGCCATCACC | CCCUCUUCGGAGG |
| | AGCGACTATG | GAGCAUCAAAGGG |
| | TCGTAGTGGG | CCGAGAUGUCUCG |
| | TAAAGCT | CUCCG |
| | (SEQ ID | (SEQ ID NO: 309) |
| | NO: 303) | |
| sg174 | CTTTGATGCT | |
| backbone rev | CCCTCCGAAG | |
| | AGGGAGCTTT | |
| | ACCCACTACG | |
| | ACATAGTCGC | |
| | (SEQ ID | |
| | NO: 304) | |
| sg174.7.37 | CGGAGCGAGA | |
| spacer primer | CATCTCGGCC | |
| | CTTTGATGCT | |
| | CCCTCC | |
| | (SEQ ID | |
| | NO: 305) | |

### Example 7: RNP Assembly

[0753] Purified wild-type and RNP of CasX and single guide RNA (sgRNA) were either prepared immediately before experiments or prepared and snap-frozen in liquid nitrogen and stored at −80° C. for later use. To prepare the RNP complexes, the CasX protein was incubated with sgRNA at 1:1.2 molar ratio. Briefly, sgRNA was added to Buffer #1 (25 mM NaPi, 150 mM NaCl, 200 mM trehalose, 1 mM MgCl2), then the CasX was added to the sgRNA solution, slowly with swirling, and incubated at 37° C. for 10 min to form RNP complexes. RNP complexes were filtered before use through a 0.22 m Costar 8160 filters that were pre-wet with 200 μl Buffer #1. If needed, the RNP sample was concentrated with a 0.5 ml Ultra 100-Kd cutoff filter, (Millipore part #UFC510096), until the desired volume was obtained. Formation of competent RNP was assessed as described in Example 11.

### Example 8: Assessing Binding Affinity to the Guide RNA

[0754] Purified wild-type and improved CasX will be incubated with synthetic single-guide RNA containing a 3′ Cy7.5 moiety in low-salt buffer containing magnesium chloride as well as heparin to prevent non-specific binding and aggregation. The sgRNA will be maintained at a concentration of 10 pM, while the protein will be titrated from 1 pM to 100 μM in separate binding reactions. After allowing the reaction to come to equilibrium, the samples will be run through a vacuum manifold filter-binding assay with a nitrocellulose membrane and a positively charged nylon membrane, which bind protein and nucleic acid, respectively. The membranes will be imaged to identify guide RNA, and the fraction of bound vs unbound RNA will be determined by the amount of fluorescence on the nitrocellulose vs nylon membrane for each protein concentration to calculate the dissociation constant of the protein-sgRNA complex. The experiment will also be carried out with improved variants of the sgRNA to determine if these mutations also affect the affinity of the guide for the wild-type and mutant proteins. We will also perform electromobility shift assays to qualitatively compare to the filter-binding assay and confirm that soluble binding, rather than aggregation, is the primary contributor to protein-RNA association.

### Example 9: Assessing Binding Affinity to the Target DNA

[0755] Purified wild-type and improved CasX will be complexed with single-guide RNA bearing a targeting sequence complementary to the target nucleic acid. The RNP complex will be incubated with double-stranded target DNA containing a PAM and the appropriate target nucleic acid sequence with a 5′ Cy7.5 label on the target strand in low-salt buffer containing magnesium chloride as well as heparin to prevent non-specific binding and aggregation. The target DNA will be maintained at a concentration of 1 nM, while the RNP will be titrated from 1 pM to 100 μM in separate binding reactions. After allowing the reaction to come to equilibrium, the samples will be run on a native 5% polyacrylamide gel to separate bound and unbound target DNA. The gel will be imaged to identify mobility shifts of the target DNA, and the fraction of bound vs unbound DNA will be calculated for each protein concentration to determine the dissociation constant of the RNP-target DNA ternary complex.

### Example 10: Assessing Differential PAM Recognition In Vitro

[0756] Purified wild-type and engineered CasX variants will be complexed with single-guide RNA bearing a fixed targeting sequence. The RNP complexes will be added to buffer containing MgCl2 at a final concentration of 100 nM and incubated with 5′ Cy7.5-labeled double-stranded target DNA at a concentration of 10 nM. Separate reactions will be carried out with different DNA substrates containing different PAMs adjacent to the target nucleic acid sequence. Aliquots of the reactions will be taken at fixed time points and quenched by the addition of an equal volume of 50 mM EDTA and 95% formamide. The samples will be run on a denaturing polyacrylamide gel to separate cleaved and uncleaved DNA substrates. The results will be visualized and the rate of cleavage of the non-canonical PAMs by the CasX variants will be determined.

### Example 11: CasX:gNA In Vitro Cleavage Assays

### 1. Determining Cleavage-Competent Fractions for Protein Variants Compared to Wild-Type Reference CasX

[0757] The ability of CasX variants to form active RNP compared to reference CasX was determined using an in vitro cleavage assay. The beta-2 microglobulin (B2M) 7.37 target for the cleavage assay was created as follows. DNA oligos with the sequence TGAAGCTGACAGCATTCGGGCCGAGATGTCTCGCTCCGTGGCCTTAGCTGTGCTCGC GCT (non-target strand, NTS (SEQ ID NO: 310)) and TGAAGCTGACAGCATTCGGGCCGAGATGTCTCGCTCCGTGGCCTTAGCTGTGCTCGC GCT (target strand, TS (SEQ ID NO: 311)) were purchased with 5′ fluorescent labels (LI-COR IRDye 700 and 800, respectively). dsDNA targets were formed by mixing the oligos in a 1:1 ratio in 1× cleavage buffer (20 mM Tris HCl pH 7.5, 150 mM NaCl, 1 mM TCEP, 5% glycerol, 10 mM MgCl₂), heating to 95° C. for 10 minutes, and allowing the solution to cool to room temperature.

[0758] CasX RNPs were reconstituted with the indicated CasX and guides (see graphs) at a final concentration of 1 μM with 1.5-fold excess of the indicated guide unless otherwise specified in 1× cleavage buffer (20 mM Tris HCl pH 7.5, 150 mM NaCl, 1 mM TCEP, 5% glycerol, 10 mM MgCl₂) at 37° C. for 10 min before being moved to ice until ready to use. The 7.37 target was used, along with sgRNAs having spacers complementary to the 7.37 target.

[0759] Cleavage reactions were prepared with final RNP concentrations of 100 nM and a final target concentration of 100 nM. Reactions were carried out at 37° C. and initiated by the addition of the 7.37 target DNA. Aliquots were taken at 5, 10, 30, 60, and 120 minutes and quenched by adding to 95% formamide, 20 mM EDTA. Samples were denatured by heating at 95° C. for 10 minutes and run on a 10% urea-PAGE gel. The gels were either imaged with a LI-COR Odyssey CLx and quantified using the LI-COR Image Studio software or imaged with a Cytiva Typhoon and quantified using the Cytiva IQTL software. The resulting data were plotted and analyzed using Prism. We assumed that CasX acts essentially as a single-turnover enzyme under the assayed conditions, as indicated by the observation that sub-stoichiometric amounts of enzyme fail to cleave a greater-than-stoichiometric amount of target even under extended time-scales and instead approach a plateau that scales with the amount of enzyme present. Thus, the fraction of target cleaved over long time-scales by an equimolar amount of RNP is indicative of what fraction of the RNP is properly formed and active for cleavage. The cleavage traces were fit with a biphasic rate model, as the cleavage reaction clearly deviates from monophasic under this concentration regime, and the plateau was determined for each of three independent replicates. The mean and standard deviation were calculated to determine the active fraction (Table 12). The graph is shown in FIG. 18.

[0760] Apparent active (competent) fractions were determined for RNPs formed for CasX2+guide 174+7.37 spacer, CasX119+guide 174+7.37 spacer, CasX457+guide 174+7.37 spacer, CasX488+guide 174+7.37 spacer, and CasX491+guide 174+7.37 spacer. The determined active fractions are shown in Table 12. All CasX variants had higher active fractions than the wild-type CasX2, indicating that the engineered CasX variants form significantly more active and stable RNP with the identical guide under tested conditions compared to wild-type CasX. This may be due to an increased affinity for the sgRNA, increased stability or solubility in the presence of sgRNA, or greater stability of a cleavage-competent conformation of the engineered CasX:sgRNA complex. An increase in solubility of the RNP was indicated by a notable decrease in the observed precipitate formed when CasX457, CasX488, or CasX491 was added to the sgRNA compared to CasX2.

2. In Vitro Cleavage Assays—Determining k_{cleave} for CasX Variants Compared to Wild-Type Reference CasX

[0761] Cleavage-competent fractions were also determined using the same protocol for CasX2.2.7.37, CasX2.32.7.37, CasX2.64.7.37, and CasX2.174.7.37 to be 16±3%, 13±3%, 5±2%, and 22±5%, as shown in FIG. 19 and Table 12.

[0762] A second set of guides were tested under different conditions to better isolate the contribution of the guide to RNP formation. 174, 175, 185, 186, 196, 214, and 215 guides with 7.37 spacer were mixed with CasX491 at final concentrations of 1 μM for the guide and 1.5 μM for the protein, rather than with excess guide as before. Results are shown in FIG. 20 and Table 12. Many of these guides exhibited additional improvement over 174, with 185 and 196 achieving 44% and 46% competent fractions, respectively, compared with 17% for 174 under these guide-limiting conditions.

[0763] The data indicate that both CasX variants and sgRNA variants are able to form a higher degree of active RNP with guide RNA compare to wild-type CasX and wild-type sgRNA.

[0764] The apparent cleavage rates of CasX variants 119, 457, 488, and 491 compared to wild-type reference CasX were determined using an in vitro fluorescent assay for cleavage of the target 7.37.

[0765] CasX RNPs were reconstituted with the indicated CasX (see FIG. 21) at a final concentration of 1 μM with 1.5-fold excess of the indicated guide in 1× cleavage buffer (20 mM Tris HCl pH 7.5, 150 mM NaCl, 1 mM TCEP, 5% glycerol, 10 mM MgCl2) at 37° C. for 10 min before being moved to ice until ready to use. Cleavage reactions were set up with a final RNP concentration of 200 nM and a final target concentration of 10 nM. Reactions were carried out at 37° C. except where otherwise noted and initiated by the addition of the target DNA. Aliquots were taken at 0.25, 0.5, 1, 2, 5, and 10 minutes and quenched by adding to 95% formamide, 20 mM EDTA. Samples were denatured by heating at 95° C. for 10 minutes and run on a 10% urea-PAGE gel. The gels were imaged with a LI-COR Odyssey CLx and quantified using the LI-COR Image Studio software or imaged with a Cytiva Typhoon and quantified using the Cytiva IQTL software. The resulting data were plotted and analyzed using Prism, and the apparent first-order rate constant of non-target strand cleavage (k_{cleave}) was determined for each CasX:sgRNA combination replicate individually. The mean and standard deviation of three replicates with independent fits are presented in Table 12, and the cleavage traces are shown in FIG. 22.

[0766] Apparent cleavage rate constants were determined for wild-type CasX2, and CasX variants 119, 457, 488, and 491 with guide 174 and spacer 7.37 utilized in each assay (see Table 12 and FIG. 21). All CasX variants had improved cleavage rates relative to the wild-type CasX2. CasX457 cleaved more slowly than 119, despite having a higher competent fraction as determined above. CasX488 and CasX491 had the highest cleavage rates by a large margin; as the target was almost entirely cleaved in the first timepoint, the true cleavage rate exceeds the resolution of this assay, and the reported k_{cleave} should be taken as a lower bound.

[0767] The data indicate that the CasX variants have a higher level of activity, with k_{cleave} rates reaching at least 30-fold higher compared to wild-type CasX2.

### 3. In Vitro Cleavage Assays: Comparison of Guide Variants to Wild-Type Guides

[0768] Cleavage assays were also performed with wild-type reference CasX2 and reference guide 2 compared to guide variants 32, 64, and 174 to determine whether the variants improved cleavage. The experiments were performed as described above. As many of the resulting RNPs did not approach full cleavage of the target in the time tested, we determined initial reaction velocities (V₀) rather than first-order rate constants. The first two timepoints (15 and 30 seconds) were fit with a line for each CasX:sgRNA combination and replicate. The mean and standard deviation of the slope for three replicates were determined.

[0769] Under the assayed conditions, the V₀ for CasX2 with guides 2, 32, 64, and 174 were 20.4±1.4 nM/min, 18.4±2.4 nM/min, 7.8±1.8 nM/min, and 49.3±1.4 nM/min (see Table 12 and FIG. 22 and FIG. 23). Guide 174 showed substantial improvement in the cleavage rate of the resulting RNP (˜2.5-fold relative to 2, see FIG. 23), while guides 32 and 64 performed similar to or worse than guide 2. Notably, guide 64 supports a cleavage rate lower than that of guide 2 but performs much better in vivo (data not shown). Some of the sequence alterations to generate guide 64 likely improve in vivo transcription at the cost of a nucleotide involved in triplex formation. Improved expression of guide 64 likely explains its improved activity in vivo, while its reduced stability may lead to improper folding in vitro.

[0770] Additional experiments were carried out with guides 174, 175, 185, 186, 196, 214, and 215 with spacer 7.37 and CasX491 to determine relative cleavage rates. To reduce cleavage kinetics to a range measurable with our assay, the cleavage reactions were incubated at 100° C. Results are in FIG. 24 and Table 12. Under these conditions, 215 was the only guide that supported a faster cleavage rate than 174. 196, which exhibited the highest active fraction of RNP under guide-limiting conditions, had kinetics essentially the same as 174, again highlighting that different variants result in improvements of distinct characteristics.

[0771] The data support that, under the conditions of the assay, use of the majority of the guide variants with CasX results in RNP with a higher level of activity than one with the wild-type guide, with improvements in initial cleavage velocity ranging from ˜2-fold to >6-fold. Numbers in Table 12 indicate, from left to right, CasX variant, sgRNA scaffold, and spacer sequence of the RNP construct. In the RNP construct names in the table below, CasX protein variant, guide scaffold and spacer are indicated from left to right.

TABLE 12
Results of cleavage and RNP formation assays

| RNP Construct | k_{cleave}* | Initial velocity* | Competent fraction |
|---|---|---|---|
| 2.2.7.37 | | 20.4 ± 1.4 nM/min | 16 ± 3% |
| 2.32.7.37 | | 18.4 ± 2.4 nM/min | 13 ± 3% |
| 2.64.7.37 | | 7.8 ± 1.8 nM/min | 5 ± 2% |
| 2.174.7.37 | 0.51 ± 0.01 min⁻¹ | 49.3 ± 1.4 nM/min | 22 ± 5% |
| 119.174.7.37 | 6.29 ± 2.11 min⁻¹ | | 35 ± 6% |
| 457.174.7.37 | 3.01 ± 0.90 min⁻¹ | | 53 ± 7% |
| 488.174.7.37 | 15.19 min⁻¹ | | 67% |
| 491.174.7.37 | 16.59 min⁻¹/0.293 | | 83%/17% (guide-limited) |
| | min⁻¹ (10° C.) | | |
| 491.175.7.37 | 0.089 min⁻¹ (10° C.) | | 5% (guide-limited) |
| 491.185.7.37 | 0.227 min⁻¹ (10° C.) | | 44% (guide-limited) |
| 491.186.7.37 | 0.099 min⁻¹ (10° C.) | | 11% (guide-limited) |
| 491.196.7.37 | 0.292 min⁻¹ (10° C.) | | 46% (guide-limited) |
| 491.214.7.37 | 0.284 min⁻¹ (10° C.) | | 30% (guide-limited) |
| 491.215.7.37 | 0.398 min⁻¹ (10° C.) | | 38% (guide-limited) |

*Mean and standard deviation

### Example 12: Identification of Nicking Variants

[0772] Purified modified CasX variants will be complexed with single-guide RNA bearing a fixed targeting sequence. The RNP complexes will be added to buffer containing MgCl₂ at a final concentration of 100 nM and incubated with double-stranded target DNA with a 5′ fluorescein label on the target strand and a 5′ Cy5 label on the non-target strand at a concentration of 10 nM. Aliquots of the reactions will be taken at fixed time points and quenched by the addition of an equal volume of 50 mM EDTA and 95% formamide. The samples will be run on a denaturing polyacrylamide gel to separate cleaved and uncleaved DNA substrates. Efficient cleavage of one strand but not the other would be indicative that the variant possessed single-strand nickase activity.

### Example 13: Assessing Improved Expression and Solubility Characteristics of CasX Variants for RNP Production

[0773] Wild-type and modified CasX variants will be expressed in BL21 (DE3) E. coli under identical conditions. All proteins will be under the control of an IPTG-inducible T7 promoter. Cells will be grown to an OD of 0.6 in TB media at 37° C., at which point the growth temperature will be reduced to 16° C. and expression will be induced by the addition of 0.5 mM IPTG. Cells will be harvested following 18 hours of expression. Soluble protein fractions will be extracted and analyzed on an SDS-PAGE gel. The relative levels of soluble CasX expression will be identified by Coomassie staining. The proteins will be purified in parallel according to the protocol above, and final yields of pure protein will be compared. To determine the solubility of the purified protein, the constructs will be concentrated in storage buffer until the protein begins to precipitate. Precipitated protein will be removed by centrifugation and the final concentration of soluble protein will be measured to determine the maximum solubility for each variant. Finally, the CasX variants will be complexed with single guide RNA and concentrated until precipitation begins. Precipitated RNP will be removed by centrifugation and the final concentration of soluble RNP will be measured to determine the maximum solubility of each variant when bound to guide RNA.

### Example 14: Assays Used to Measure sgNA and CasX Protein Activity

[0774] Several assays were used to carry out initial screens of CasX protein and sgNA Deep Mutational Evolution (DME) libraries and modified mutants, and to measure the activity of select protein and sgNA variants relative to CasX reference sgNAs and proteins.

E. coli CRISPRi Screen:

[0775] Briefly, biological triplicates of dead CasX DME Libraries on a chloramphenicol (CM) resistant plasmid with a GFP gNA on a carbenicillin (Carb) resistant plasmid were transformed (at >5× library size) into MG1655 with genetically integrated and constitutively expressed GFP and RFP. Cells were grown overnight in EZ-RDM+Carb, CM and Anhydrotetracycline (aTc) inducer. E. coli were FACS sorted based on gates for the top 1% of GFP but not RFP repression, collected, and resorted immediately to further enrich for highly functional CasX molecules. Double sorted libraries were then grown out and DNA was collected for deep sequencing on a highseq. This DNA was also re-transformed onto plates and individual clones were picked for further analysis.

E. coli Toxin Selection:

[0776] Briefly carbenicillin resistant plasmid containing an arabinose inducible toxin were transformed into E. coli cells and made electrocompetent. Biological triplicates of CasX DME Libraries with a toxin targeted gNA on a chloramphenicol resistant plasmid were transformed (at >5× library size) into said cells and grown in LB+CM and arabinose inducer. E. coli that cleaved the toxin plasmid survived in the induction media and were grown to mid log and plasmids with functional CasX cleavers were recovered. This selection was repeated as needed. Selected libraries were then grown out and DNA was collected for deep sequencing on a highseq. This DNA was also re-transformed onto plates and individual clones were picked for further analysis and testing.

### Lentiviral Based Screen EGFP Screen:

[0777] Lentiviral particles were produced in HEK293 cells at a confluency of 70%-90% at time of transfection. Cells were transfected using polyethylenimine based transfection of plasmids containing a CasX DME library. Lentiviral vectors were co-transfected with the lentiviral packaging plasmid and the VSV-G envelope plasmids for particle production. Media was changed 12 hours post-transfection, and virus harvested at 36-48 hours post-transfection. Viral supernatants were filtered using 0.45 mm membrane filters, diluted in cell culture media if appropriate, and added to target cells HEK cells with an Integrated GFP reporter. Polybrene was supplemented to enhance transduction efficiency, if necessary. Transduced cells were selected for 24-48 hours post-transduction using puromycin and grown for 7-10 days. Cells were then sorted for GFP disruption & collected for highly functional CasX sgNA or protein variants (see FIG. 25). Libraries were then Amplified via PCR directly from the genome and collected for deep sequencing on a highseq. This DNA could also be re-cloned and re-transformed onto plates and individual clones were picked for further analysis.

### Example 15: Assaying Editing Efficiency of an HEK EGFP Reporter

[0778] To assay the editing efficiency of CasX reference sgNAs and proteins and variants thereof, EGFP HEK293T reporter cells were seeded into 96-well plates and transfected according to the manufacturer's protocol with lipofectamine 3000 (Life Technologies) and 100-200 ng plasmid DNA encoding a reference or CasX variant protein, P2A-puromycin fusion and the reference or variant sgNA. The next day cells were selected with 1.5 μg/ml puromycin for 2 days and analyzed by fluorescence-activated cell sorting (FACS) 7 days after selection to allow for clearance of EGFP protein from the cells. EGFP disruption via editing was traced using an Attune NxT Flow Cytometer and high-throughput autosampler.

### Example 16: Cleavage Efficiency of CasX Reference sgRNA

[0779] The reference CasX sgRNA of SEQ ID NO:4 (below) is described in WO 2018064371 and U.S. Ser. No. 10/570,415B2, the contents of which are incorporated herein by reference:

(SEQ ID NO: 4)
ACAUCUGGCGCGUUUAUUCCAUUACUUUGGAGCCAGUC
CCAGCGACUAUGUCGUAUGGACGAAGCGCUUAUUUAUC
GGAGAGAAACCGAUAAGUAAAACGCAUCAAAG.

[0780] It was found that alterations to the sgRNA reference sequence of SEQ ID NO:4, producing SEQ ID NO:5 (below) were able to improve CasX cleavage efficiency. The sequence is:

(SEQ ID NO: 5)
UACUGGCGCUUUUAUCUCAUUACUUUGAGAGCCAUCAC
CAGCGACUAUGUCGUAUGGGUAAAGCGCUUAUUUAUCG
GAGAGAAAUCCGAUAAAUAAGAAGCAUCAAAG.

[0781] To assay the editing efficiency of CasX reference sgRNAs and variants thereof, EGFP HEK293T reporter cells were seeded into 96-well plates and transfected according to the manufacturer's protocol with lipofectamine 3000 (Life Technologies) and 100-200 ng plasmid DNA encoding a reference CasX protein, P2A-puromycin fusion and the sgRNA. The next day cells were selected with 1.5 μg/ml puromycin for 2 days and analyzed by fluorescence-activated cell sorting (FACS) 7 days after selection to allow for clearance of EGFP protein from the cells. EGFP disruption via editing was traced using an Attune NxT Flow Cytometer and high-throughput autosampler.

[0782] When testing cleavage of an EGFP reporter by CasX reference and sgNA variants, the following spacer target sequences were used:

E6
(TGTGGTCGGGGTAGCGGCTG (SEQ ID NO: 17))
and
E7
(TCAAGTCCGCCATGCCCGAA (SEQ ID NO: 18)).

[0783] An example of the increased cleavage efficiency of the sgRNA of SEQ ID NO:5 compared to the sgRNA of SEQ ID NO:4 is shown in FIG. 26. Editing efficiency of SEQ ID NO: 5 was improved 176% compared to SEQ ID NO: 4. Accordingly, SEQ ID NO: 5 was chosen as reference sgRNA for DME and additional sgNA variant design, described below.

### Example 17: Design, Creation and Evaluation of gNA Variants with Improved Target Cleavage

[0784] Guide nucleic acid (gNA) variants were designed and tested in order to assess improvements in cleavage activity relative to reference gNAs. These guides were discovered via DME or rational design and replacement or addition of guide parts such as the extended stem or the addition of ribozymes at the termini, as described herein.

[0785] Experimental design: All guides were tested In HEK293T or a HEK293T reporter line as follows. Mammalian cells were maintained in a 37° C. incubator, at 5% CO2. HEK293T Human kidney cells and derivatives thereof were grown in Dulbecco's Modified Eagle Medium (DMEM; Corning Cellgro, #10-013-CV) supplemented with 10% fetal bovine serum (FBS; Seradigm, #1500-500), and 100 Units/ml penicillin and 100 mg/ml streptomycin (100×-Pen-Strep; GIBCO #15140-122), and can additionally include sodium pyruvate (100×, Thermofisher #11360070), Non-essential amino acids (1000× Thermofisher #11140050), HEPES buffer (100× Thermofisher #15630080), and 2-mercaptoethanol (1000× Thermofisher #21985023). Cells were seeded at 20-30 thousand cells per well into 96-well plates and transfected using 0.25-1 uL of Lipofectamine 3000 (Thermo Fisher Scientific #L3000008), 50-500 ng of a plasmid containing CasX and the reference or variant CasX guide targeting the reporter or target gene following the manufacturer's protocol. 24-72 hours later the media was changed and 0.3-3.0 ug/ml puromycin (Sigma #P8833) was added to select for transformation. 24-96 hours following selection the cells were analyzed by flow cytometry and gated for the appropriate forward and side scatter, selected for single cells and then gated for green fluorescent protein (GFP) or antibody reporter expression (Attune Nxt Flow Cytometer, Thermo Fisher Scientific) to quantify the expression levels of fluorophores. At least 10,000 events were collected for each sample. For the HEK293T-GFP genome editing reporter cell line, flow cytometry was used to quantify the percentage of GFP-negative (edited) cells and the number of cells with GFP disruption for each variant was compared to the reference guide to generate a fold change measurement.

[0786] Results: Results from the sgNA variants generated via DME were measured and compared to the reference gNA of SEQ ID NO: 4. These results are presented in FIG. 28, with most variants showing improvements from 0.1 to nearly 1.5-fold compared to the reference gNA. Results of the variants generated via rational design and replacement or addition of guide parts (such as the extended stem or the addition of ribozymes at the termini) are shown in FIGS. 28 and 24 respectively; again showing improvements with many of the constructs. The additions to the variants, along with their encoding sequences, portrayed by number in FIG. 29 are listed in Table 13, below. We observed that single mutations such as the C18G improve guide activity when compared to the reference. Additionally, rationally swapping in different stem loops for the extended stem loop, such as MS2, QB, PP7, UvsX, etc. improved activity when compared to the reference guide, as does truncating the original extended stem loop. Finally, we demonstrate that while most ribozymes disrupt activity, the addition of a 3′ HDV to the reference guide RNA can improve activity up to 20-50%.

TABLE 13
Extensions added to 3′ and 5′ ends of gNA

| Exten. | | |
|---|---|---|
| Numb. | Extension Name | Extension Encoding Sequence |
| 1 | HDV | GGGTCGGCATGGCATCTCCACCTCCTCGCGGTCCGACCT |
| | antigenomic | GGGCATCCGAAGGAGGACGCACGTCCACTCGGATGGCT |
| | ribozyme | AAGGGAGAGCCA (SEQ ID NO: 312) |
| 2 | HDV genomic | GGCCGGCATGGTCCCAGCCTCCTCGCTGGCGCCGGCTGG |
| | ribozyme | GCAACATTCCGAGGGGACCGTCCCCTCGGTAATGGCGA |
| | | ATGGGACCC (SEQ ID NO: 313) |
| 3 | HDV ribozyme | GATGGCCGGCATGGTCCCAGCCTCCTCGCTGGCGCCGGC |
| | (v1) | TGGGCAACACCTTCGGGTGGCGAATGGGAC (SEQ ID NO: |
| | | 314) |
| 4 | HDV ribozyme | TTTTGGCCGGCATGGTCCCAGCCTCCTCGCTGGCGCCGG |
| | (v2) | CTGGGCAACATGCTTCGGCATGGCGAATGGGACCCCGG |
| | | G (SEQ ID NO: 315) |
| 5 | Hatchet | CATTCCTCAGAAAATGACAAACCTGTGGGGCGTAAGTA |
| | | GATCTTCGGATCTATGATCGTGCAGACGTTAAAATCAGG |
| | | T(SQEIDNO: 316) |
| 6 | env25 pistol | CGTGGTTAGGGCCACGTTAAATAGTTGCTTAAGCCCTAA |
| | ribozyme (with | GCGTTGATCTTCGGATCAGGTGCAA (SEQ ID NO: 317) |
| | CUUCGGloop) | |
| 7 | HH15 Minimal | GGGAGCCCCGCTGATGAGGTCGGGGAGACCGAAAGGGA |
| | Hammerhead | CTTCGGTCCCTACGGGGCTCCC (SEQ ID NO: 318) |
| | ribozyme | |
| 8 | sTRSV WT viral | CCTGTCACCGGATGTGCTTTCCGGTCTGATGAGTCCGTG |
| | Hammerhead | AGGACGAAACAGG (SEQ ID NO: 319) |
| | ribozyme | |
| 9 | Hammerhead | CGACTACTGATGAGTCCGTGAGGACGAAACGAGTAAGC |
| | ribozyme | TCGTCTAGTCGCGTGTAGCGAAGCA (SEQ ID NO: 320) |
| 10 | Hammerhead | CGACTACTGATGAGTCCGTGAGGACGAAACGAGTAAGC |
| | ribozyme, | TCGTCTAGTCG (SEQ ID NO: 321) |
| | smaller scar | |
| 11 | Hammerhead | CCAGTACTGATGAGTCCGTGAGGACGAAACGAGTAAGC |
| | ribozyme, guide | TCGTCTACTGGCGCTTTTATCTCAT (SEQ ID NO: 322) |
| | scaffold scar | |
| 12 | Twisted Sister 1 | ACCCGCAAGGCCGACGGCATCCGCCGCCGCTGGTGCAA |
| | | GTCCAGCCGCCCCTTCGGGGGCGGGCGCTCATGGGTAAC |
| | | (SEQ ID NO: 323) |
| 13 | Env-9 Twister | GGCAATAAAGCGGTTACAAGCCCGCAAAAATAGCAGAG |
| | | TAATGTCGCGATAGCGCGGCATTAATGCAGCTTTATTG |
| | | (SEQ ID NO: 324) |
| 14 | RBMX | CCACCCCCACCACCACCCCCACCCCCACCACCACCC |
| | recruiting motif | (SEQ ID NO: 325) |

[0787] The results support the conclusion that DME and rational design can be used to improve the performance of the gNAs and that many of these variant RNAs can now be used with the targeting sequences as a component of the CasX:gNA systems described herein to edit target nucleic acid sequences.

### Example 18: CasX Edits P23 RHO in an Allele-Specific Manner

[0788] The goal of this experiment was to show that CasX variant 119 and scaffold variants 64 and 174 can edit the human RHO locus around amino acid residue P23, while native CasX variant 2 and scaffold 2 cannot. HEK293T cells with both wild-type alleles should be editable by the WT CasX spacer (11.1, having the sequence AAGGGGGCTGCGTACCACACC, SEQ ID NO: 326), but not by the mutant CasX spacer (11.2 having the sequence AAGTGGGCTGCGTACCACACC, SEQ ID NO: 327). This experiment additionally demonstrates the ability of CasX spacers to distinguish between on-target and off-target alleles that differ by a single nucleotide.

### Materials and Methods:

[0789] HEK293T cells were seeded at 20-40k cells/well in a 96 well plate in 100 μL of Fibroblast (FB) medium and cultured in a 37° C. incubator with 5% CO2. The following day, confluence of seeded cells was checked to ensure that cells were at ˜75% confluence at time of transfection. If cells were at the right confluence, transfection was carried out. Each CasX and guide construct (119.174, see Table for sequence) was transfected into the HEK293T cells at 100-500 ng per well using Lipofectamine 3000 following the manufacturer's protocol, using 3 wells per construct as replicates. SaCas9 and SpyCas9 targeting RHO were used as benchmarking controls. For each Cas protein type, a non-targeting plasmid was used as a negative control. Cells were selected for successful transfection with puromycin at 0.3-3 μg/ml for 24-48 hours followed by 24-48 hours of recovery in FB medium. A subset of cells for each sample from the experiment was lysed, and the genome was extracted using a Quick extract solution following the manufacturer's protocol. Editing was analyzed using a T7E1 assay. Briefly, the genomic locus at the targeted edit site was amplified using primers (e.g., a 500 bp region around the intended target) using a PCR program on a thermocycler. The PCR amplicon was then hybridized following a hybridization program on a thermocycler, and then treated with T7 Endonuclease for 30 mins at 37° C. The sample was then analyzed on a 2% agarose gel to visualize the DNA bands.

### Results:

[0790] As shown in FIG. 30, results from the T7E1 assay performed to assess editing demonstrated that the CasX construct, 119.64, was able to edit the WT RHO locus in HEK293T cells when targeted to the P23 locus using a spacer that targets the WT sequence (119.64.WT, second lane). A CasX construct with a spacer that targets the mutant sequence (119.64.Mut), or a non-targeting sequence (119.64.NT), was not able to edit the WT locus in these cells.

[0791] FIG. 31 (T7E1 gel) and FIG. 32 (quantification of gel) shows that CasX variant 119 and scaffold variant 174 with spacer 11.1 was able to edit the on-target wild type RHO locus at 34.4% efficiency, while CasX variant and scaffold 174 with the off-target spacer 11.2 showed no activity at the WT locus. In comparison, the on-target SaCas9 construct showed 14.7% editing. SpyCas9 showed 39.9% efficiency at editing the RHO locus in general, but not at the P23H locus due to the absence of a nearby PAM.

[0792] This example demonstrates that CasX with appropriate guides was able to edit the P23 RHO locus in an allele-specific manner, and that the engineered CasX variant 119 and scaffold 64 (as opposed to native CasX variant 2 and scaffold 2) was able to edit P23 RHO locus at a non-canonical CTCN PAM. Additionally, CasX variant 119 and scaffold 174 maintains the ability to edit P23 RHO locus in an allele-specific manner, and edits on target with higher efficiency than SaCas9. SpyCas9 cannot edit allele-specifically at the P23 RHO locus due to unavailability of a PAM sequence. Thus, CasX is uniquely positioned to edit the P23 RHO locus in an allele-specific manner.

### Example 19. Engineered CasX Variants Edit P23 RHO in an Allele Specific Manner

[0793] The purpose of this experiment was to assess the ability of engineered CasX variants to edit the human P23 RHO locus in an allele-specific manner. The ability to edit on target with high specificity and minimum off target activity is important for an allele-specific therapeutic approach to address AdRP.

[0794] Materials and Methods:

[0795] An ARPE19 dual reporter cell line (WT.RHO.GFP mut.RHO.mscarlet) was first generated by knocking into ARPE19 cells a transgene cassette that constitutively expresses exon 1 of the human RHO gene linked to GFP and exon 1 of the human P23H.RHO gene linked to mscarlet. The modified cells were expanded by serial passage every 3-5 days and maintained in Fibroblast (FB) medium, consisting of Dulbecco's Modified Eagle Medium (DMEM; Corning Cellgro, #10-013-CV) supplemented with 10% fetal bovine serum (FBS; Seradigm, #1500-500), and 100 Units/mL penicillin and 100 mg/mL streptomycin (100×-Pen-Strep; GIBCO #15140-122), and can additionally include sodium pyruvate (100×, Thermofisher #11360070), non-essential amino acids (100× Thermofisher #11140050), HEPES buffer (100× Thermofisher #15630080), and 2-mercaptoethanol (1000× Thermofisher #21985023). The cells were incubated at 37° C. and 5% CO2. After 1-2 weeks, GFP+/mscarlet+ cells were bulk sorted into FB medium. The reporter lines were expanded by serial passage every 3-5 days and maintained in FB medium in an incubator at 37° C. and 5% CO2. Reporter clones were generated by a limiting dilution method. The clonal lines were characterized via flow cytometry, genomic sequencing, and functional modification of the RHO locus using a previously validated RHO targeting CasX molecule. The optimal reporter lines were identified as ones that i) had single copies of WTRHO.GFP and mutRHO.mscarlet correctly integrated per cell, ii) maintained doubling times equivalent to unmodified cells, and iii) resulted in reduction in GFP/mscarlet fluorescence upon disruption of the RHO gene when assayed using the methods described below.

[0796] ARPE19 dual reporter cells, constructed using cell line generation methods described above were used for this experiment. Cells were seeded at 20-40k cells/well in a 96 well plate in 100 μL of FB medium and cultured in a 37° C. incubator with 5% CO2. The following day, lentiviral vectors packaging each CasX and guide construct (spacer sequences were 11.1 and 11.2) were used to transduce cells at a high multiplicity of infection (MOI 300), using 3 wells per construct as replicates. A lentivirus packaging a non-targeting construct (spacer 11.2) was used as a negative control. Cells were selected for successful transduction with puromycin at 0.3-3 μg/ml for 24-48 hours followed by recovery in FB medium. Edited cells were analyzed by flow cytometry 14 days after transduction. Briefly, cells were sequentially gated for live cells, single cells, and fraction of GFP-negative and mscarlet-negative cells.

### Results:

[0797] The graph in FIG. 33 shows that CasX variants 119, 438, 488 and 491 and scaffold 174 with spacer 11.1 targeting the WT RHO allele are able to edit on target with minimal off-target activity at the mutant RHO allele. Improved CasX variants show increasingly higher levels of editing on target (GFP-cells, black bars), with no appreciable gain in off-target activity at the P23 RHO locus (mscarlet-cells, gray bars). Similarly, the graph in FIG. 34 shows that CasX variants 119, 438, 488 and 491 and scaffold 174 with spacer 11.2 targeting the mutant RHO allele are able to edit on target with minimal off-target activity at the WT RHO allele. The CasX variants show increasingly higher levels of editing on target at the mutant RHO locus (mscarlet-cells, gray bars)(491>488>438>119), with no appreciable gain in off-target activity at the WT RHO locus (GFP-cells, black bars).

[0798] Under conditions of the assays, the results demonstrates that improved, engineered CasX variants edit the P23 RHO locus at higher efficiencies while maintaining allele-specificity.

### Example 20: CasX Edits the RHO Gene at Many Different Loci in HEK293T Cells

[0799] The purpose of the experiment was to demonstrate the ability of CasX to edit the human RHO locus using the CasX variants 438, 488 and 491, guide 174 variant, and spacers (See Table 1 for sequences) targeting exon 1 of the human RHO gene.

### Materials and Methods:

[0800] To facilitate assessment of editing outcomes, a HEK293T dual reporter cell line was first generated by knocking into HEK293T cells two transgene cassettes that constitutively expressed exon 1 of the human RHO gene linked to GFP and exon 1 of the human P23H.RHO gene linked to mscarlet. The modified cells were expanded by serial passage every 3-5 days and maintained in Fibroblast (FB) medium, consisting of Dulbecco's Modified Eagle Medium (DMEM; Corning Cellgro, #10-013-CV) supplemented with 10% fetal bovine serum (FBS; Seradigm, #1500-500), and 100 Units/mL penicillin and 100 mg/mL streptomycin (100×-Pen-Strep; GIBCO #15140-122), and can additionally include sodium pyruvate (100×, Thermofisher #11360070), non-essential amino acids (100× Thermofisher #11140050), HEPES buffer (100× Thermofisher #15630080), and 2-mercaptoethanol (1000× Thermofisher #21985023). The cells were incubated at 37° C. and 5% CO2. After 1-2 weeks, GFP+/mscarlet+cells were bulk sorted into FB medium. The reporter lines were expanded by serial passage every 3-5 days and maintained in FB medium in an incubator at 37° C. and 5% CO2. Reporter clones were generated by a limiting dilution method. The clonal lines were characterized via flow cytometry, genomic sequencing, and functional modification of the RHO locus using a previously validated RHO targeting CasX molecule. The optimal reporter lines were identified as ones that i) had a single copies of WTRHO.GFP and mutRHO.mscarlet correctly integrated per cell, ii) maintained doubling times equivalent to unmodified cells, and iii) resulted in reduction in GFP and mscarlet fluorescence upon disruption of the RHO gene when assayed using the methods described below.

[0801] Spacers for the guides were chosen based on PAM availability without prior knowledge of potential activity (see Table 14 for sequences). HEK293T dual reporter cells were seeded at 20-40k cells/well in a 96 well plate in 100 μL of FB medium and cultured in a 37° C. incubator with 5% CO2. The following day, cells were transfected at ˜75% confluence. Each CasX and guide construct with spacers (see table for spacer and guide sequences) was transfected into the HEK293T dual reporter cells at 100-500 ng per well using Lipofectamine 3000 following the manufacturer's protocol, using 3 wells per construct as replicates. A non-targeting plasmid was used as a negative control. Cells were selected for successful transfection with puromycin at 0.3-3 μg/ml for 24-48 hours followed by recovery in FB medium. Edited cells were analyzed by flow cytometry 14 days after transfection. Briefly, cells were sequentially gated for live cells, single cells, and fraction of GFP-negative and/or mscarlet-negative cells.

### Results:

[0802] The graph in FIG. 35 shows the results of flow cytometry analysis of Cas-mediated editing at the RHO locus in the HEK293T APRE19 dual dual reporter cells 14 days post-transfection. Eighteen different spacers (indicated by the individual data points) targeting the RHO exon 1 locus were used for each of the different CasX variants (438, 488, and 491) used in this experiment. Each data point is an average measurement of 3 replicates for an individual spacer. The results indicate that CasX and guides with several different spacers were able to edit the RHO locus with an average editing of 20%. The construct with non-targeting spacer resulted in no editing (data not shown).

[0803] Under conditions of the assays, the results demonstrate that, under the conditions of the assay, CasX variants 438, 488 and 491 with appropriate guides were able to successfully edit the RHO gene at many different loci in HEK293T dual reporter cells.

TABLE 14
RHO Guide sequences

| | SSpacer | 174 Scaffold | Scaffold + Spacer |
|---|---|---|---|
| SSpacer | Sequence | Sequence | Sequence |
| 11.13 | CAGCATTCT | ACTGGCGCTTTTATCTG | ACTGGCGCTTTTATCTGATT |
| | TGGGTGGG | ATTACTTTGAGAGCCA | ACTTTGAGAGCCATCACCAG |
| | AGC (SEQ ID | TCACCAGCGACTATGT | CGACTATGTCGTAGTGGGTA |
| | NO: 328) | CGTAGTGGGTAAAGCT | AAGCTCCCTCTTCGGAGGGA |
| | | CCCTCTTCGGAGGGAG | GCATCAAAGCAGCATTCTTG |
| | | CATCAAAG (SEQ ID NO: | GGTGGGAGC (SEQ ID NO: |
| | | 347) | 348) |
| 11.14 | TGGGTGGG | ACTGGCGCTTTTATCTG | ACTGGCGCTTTTATCTGATT |
| | AGCAGCCA | ATTACTTTGAGAGCCA | ACTTTGAGAGCCATCACCAG |
| | CGGG (SEQ | TCACCAGCGACTATGT | CGACTATGTCGTAGTGGGTA |
| | ID NO: 329) | CGTAGTGGGTAAAGCT | AAGCTCCCTCTTCGGAGGGA |
| | | CCCTCTTCGGAGGGAG | GCATCAAAGTGGGTGGGAG |
| | | CATCAAAG (SEQ ID NO: | CAGCCACGGG (SEQ ID NO: |
| | | 347) | 349) |
| 11.15 | TGGCTGTGG | ACTGGCGCTTTTATCTG | ACTGGCGCTTTTATCTGATT |
| | CCCTTGTGG | ATTACTTTGAGAGCCA | ACTTTGAGAGCCATCACCAG |
| | CT (SEQ ID | TCACCAGCGACTATGT | CGACTATGTCGTAGTGGGTA |
| | NO: 330) | CGTAGTGGGTAAAGCT | AAGCTCCCTCTTCGGAGGGA |
| | | CCCTCTTCGGAGGGAG | GCATCAAAGTGGCTGTGGCC |
| | | CATCAAAG (SEQ ID NO: | CTTGTGGCT (SEQ ID NO: |
| | | 347) | 350) |
| 11.16 | GTGCCATTC | ACTGGCGCTTTTATCTG | ACTGGCGCTTTTATCTGATT |
| | ATGGCTGTG | ATTACTTTGAGAGCCA | ACTTTGAGAGCCATCACCAG |
| | GC (SEQ ID | TCACCAGCGACTATGT | CGACTATGTCGTAGTGGGTA |
| | NO: 331 | CGTAGTGGGTAAAGCT | AAGCTCCCTCTTCGGAGGGA |
| | | CCCTCTTCGGAGGGAG | GCATCAAAGGTGCCATTCAT |
| | | CATCAAAG (SEQ ID NO: | GGCTGTGGC (SEQ ID NO: |
| | | 347) | 351) |
| 11.17 | ACGTGCCCT | ACTGGCGCTTTTATCTG | ACTGGCGCTTTTATCTGATT |
| | TCTCCAATG | ATTACTTTGAGAGCCA | ACTTTGAGAGCCATCACCAG |
| | CG (SEQ ID | TCACCAGCGACTATGT | CGACTATGTCGTAGTGGGTA |
| | NO: 332) | CGTAGTGGGTAAAGCT | AAGCTCCCTCTTCGGAGGGA |
| | | CCCTCTTCGGAGGGAG | GCATCAAAGACGTGCCCTTC |
| | | CATCAAAG (SEQ ID NO: | TCCAATGCG (SEQ ID NO: |
| | | 347) | 352) |
| 11.18 | CCAATGCGA | ACTGGCGCTTTTATCTG | ACTGGCGCTTTTATCTGATT |
| | CGGGTGTGG | ATTACTTTGAGAGCCA | ACTTTGAGAGCCATCACCAG |
| | TA (SEQ ID | TCACCAGCGACTATGT | CGACTATGTCGTAGTGGGTA |
| | NO: 333) | CGTAGTGGGTAAAGCT | AAGCTCCCTCTTCGGAGGGA |
| | | CCCTCTTCGGAGGGAG | GCATCAAAGCCAATGCGAC |
| | | CATCAAAG (SEQ ID NO: | GGGTGTGGTA (SEQ ID NO: |
| | | 347) | 353) |
| 11.19 | AGTACCCAC | ACTGGCGCTTTTATCTG | ACTGGCGCTTTTATCTGATT |
| | AGTACTACC | ATTACTTTGAGAGCCA | ACTTTGAGAGCCATCACCAG |
| | TG (SEQ ID | TCACCAGCGACTATGT | CGACTATGTCGTAGTGGGTA |
| | NO: 334) | CGTAGTGGGTAAAGCT | AAGCTCCCTCTTCGGAGGGA |
| | | CCCTCTTCGGAGGGAG | GCATCAAAGAGTACCCACA |
| | | CATCAAAG (SEQ ID NO: | GTACTACCTG (SEQ ID NO: |
| | | 347) | 354) |
| 11.20 | CCATGCTGG | ACTGGCGCTTTTATCTG | ACTGGCGCTTTTATCTGATT |
| | CCGCCTACA | ATTACTTTGAGAGCCA | ACTTTGAGAGCCATCACCAG |
| | TG (SEQ ID | TCACCAGCGACTATGT | CGACTATGTCGTAGTGGGTA |
| | NO: 335) | CGTAGTGGGTAAAGCT | AAGCTCCCTCTTCGGAGGGA |
| | | CCCTCTTCGGAGGGAG | GCATCAAAGCCATGCTGGCC |
| | | CATCAAAG (SEQ ID NO: | GCCTACATG (SEQ ID NO: |
| | | 347) | 355) |
| 11.21 | GCTGATCGT | ACTGGCGCTTTTATCTG | ACTGGCGCTTTTATCTGATT |
| | GCTGGGCTT | ATTACTTTGAGAGCCA | ACTTTGAGAGCCATCACCAG |
| | CC (SEQ ID | TCACCAGCGACTATGT | CGACTATGTCGTAGTGGGTA |
| | NO: 336) | CGTAGTGGGTAAAGCT | AAGCTCCCTCTTCGGAGGGA |
| | | CCCTCTTCGGAGGGAG | GCATCAAAGGCTGATCGTGC |
| | | CATCAAAG (SEQ ID NO: | TGGGCTTCC (SEQ ID NO: |
| | | 347) | 356) |
| 11.22 | CCATCAACT | ACTGGCGCTTTTATCTG | ACTGGCGCTTTTATCTGATT |
| | TCCTCACGC | ATTACTTTGAGAGCCA | ACTTTGAGAGCCATCACCAG |
| | TC (SEQ ID | TCACCAGCGACTATGT | CGACTATGTCGTAGTGGGTA |
| | NO: 337) | CGTAGTGGGTAAAGCT | AAGCTCCCTCTTCGGAGGGA |
| | | CCCTCTTCGGAGGGAG | GCATCAAAGCCATCAACTTC |
| | | CATCAAAG (SEQ ID NO: | CTCACGCTC (SEQ ID NO: |
| | | 347) | 357) |
| 11.23 | TCACGCTCT | ACTGGCGCTTTTATCTG | ACTGGCGCTTTTATCTGATT |
| | ACGTCACCG | ATTACTTTGAGAGCCA | ACTTTGAGAGCCATCACCAG |
| | TC (SEQ ID | TCACCAGCGACTATGT | CGACTATGTCGTAGTGGGTA |
| | NO: 338) | CGTAGTGGGTAAAGCT | AAGCTCCCTCTTCGGAGGGA |
| | | CCCTCTTCGGAGGGAG | GCATCAAAGTCACGCTCTAC |
| | | CATCAAAG (SEQ ID NO: | GTCACCGTC (SEQ ID NO: |
| | | 347) | 358) |
| 11.24 | TGTGCTGGA | ACTGGCGCTTTTATCTG | ACTGGCGCTTTTATCTGATT |
| | CGGTGACGT | ATTACTTTGAGAGCCA | ACTTTGAGAGCCATCACCAG |
| | AG (SEQ ID | TCACCAGCGACTATGT | CGACTATGTCGTAGTGGGTA |
| | NO: 339) | CGTAGTGGGTAAAGCT | AAGCTCCCTCTTCGGAGGGA |
| | | CCCTCTTCGGAGGGAG | GCATCAAAGTGTGCTGGAC |
| | | CATCAAAG (SEQ ID NO: | GGTGACGTAG (SEQ ID NO: |
| | | 347) | 359) |
| 11.25 | TGGTCCTAG | ACTGGCGCTTTTATCTG | ACTGGCGCTTTTATCTGATT |
| | GTGGCTTCA | ATTACTTTGAGAGCCA | ACTTTGAGAGCCATCACCAG |
| | CC (SEQ ID | TCACCAGCGACTATGT | CGACTATGTCGTAGTGGGTA |
| | NO: 340) | CGTAGTGGGTAAAGCT | AAGCTCCCTCTTCGGAGGGA |
| | | CCCTCTTCGGAGGGAG | GCATCAAAGTGGTCCTAGGT |
| | | CATCAAAG (SEQ ID NO: | GGCTTCACC (SEQ ID NO: |
| | | 347) | 360) |
| 11.26 | CCAGCACCC | ACTGGCGCTTTTATCTG | ACTGGCGCTTTTATCTGATT |
| | TCTACACCT | ATTACTTTGAGAGCCA | ACTTTGAGAGCCATCACCAG |
| | CT (SEQ ID | TCACCAGCGACTATGT | CGACTATGTCGTAGTGGGTA |
| | NO: 341) | CGTAGTGGGTAAAGCT | AAGCTCCCTCTTCGGAGGGA |
| | | CCCTCTTCGGAGGGAG | GCATCAAAGCCAGCACCCTC |
| | | CATCAAAG (SEQ ID NO: | TACACCTCT (SEQ ID NO: |
| | | 347) | 361) |
| 11.27 | TCTTCGGGC | ACTGGCGCTTTTATCTG | ACTGGCGCTTTTATCTGATT |
| | CCACAGGAT | ATTACTTTGAGAGCCA | ACTTTGAGAGCCATCACCAG |
| | GC (SEQ ID | TCACCAGCGACTATGT | CGACTATGTCGTAGTGGGTA |
| | NO: 342) | CGTAGTGGGTAAAGCT | AAGCTCCCTCTTCGGAGGGA |
| | | CCCTCTTCGGAGGGAG | GCATCAAAGTCTTCGGGCCC |
| | | CATCAAAG (SEQ ID NO: | ACAGGATGC (SEQ ID NO: |
| | | 347) | 362) |
| 11.28 | GGCCCACA | ACTGGCGCTTTTATCTG | ACTGGCGCTTTTATCTGATT |
| | GGATGCAAT | ATTACTTTGAGAGCCA | ACTTTGAGAGCCATCACCAG |
| | TTG (SEQ ID | TCACCAGCGACTATGT | CGACTATGTCGTAGTGGGTA |
| | NO: 343) | CGTAGTGGGTAAAGCT | AAGCTCCCTCTTCGGAGGGA |
| | | CCCTCTTCGGAGGGAG | GCATCAAAGGGCCCACAGG |
| | | CATCAAAG (SEQ ID NO: | ATGCAATTTG (SEQ ID NO: |
| | | 347) | 363) |
| 11.29 | TTGCCACCC | ACTGGCGCTTTTATCTG | ACTGGCGCTTTTATCTGATT |
| | TGGGCGGTA | ATTACTTTGAGAGCCA | ACTTTGAGAGCCATCACCAG |
| | TG (SEQ ID | TCACCAGCGACTATGT | CGACTATGTCGTAGTGGGTA |
| | NO: 344) | CGTAGTGGGTAAAGCT | AAGCTCCCTCTTCGGAGGGA |
| | | CCCTCTTCGGAGGGAG | GCATCAAAGTTGCCACCCTG |
| | | CATCAAAG (SEQ ID NO: | GGCGGTATG (SEQ ID NO: |
| | | 347) | 364) |
| 11.1 | AAGGGGCT | ACTGGCGCTTTTATCTG | ACTGGCGCTTTTATCTGATT |
| | GCGTACCAC | ATTACTTTGAGAGCCA | ACTTTGAGAGCCATCACCAG |
| | ACC (SEQ ID | TCACCAGCGACTATGT | CGACTATGTCGTAGTGGGTA |
| | NO: 345) | CGTAGTGGGTAAAGCT | AAGCTCCCTCTTCGGAGGGA |
| | | CCCTCTTCGGAGGGAG | GCATCAAAGAAGGGGCTGC |
| | | CATCAAAG (SEQ ID NO: | GTACCACACC (SEQ ID NO: |
| | | 347) | 365) |
| 11.2 | AAGTGGG | ACTGGCGCTTTTATCTG | ACTGGCGCTTTTATCTGATT |
| | CTGCGTAC | ATTACTTTGAGAGCCA | ACTTTGAGAGCCATCACCAG |
| | CACACC | TCACCAGCGACTATGT | CGACTATGTCGTAGTGGGTA |
| | (SEQ ID | CGTAGTGGGTAAAGCT | AAGCTCCCTCTTCGGAGGGA |
| | NO: 346) | CCCTCTTCGGAGGGAG | GCATCAAAGAAGTGGGCTG |
| | | CATCAAAG (SEQ ID NO: | CGTACCACACC (SEQ ID NO: |
| | | 347) | 366) |

### Example 21: CasX Targeted to P23 RHO Shows No Detectable Editing at Predicted Off-Target Locations in the Human Genome

[0804] A key aspect to evaluate targeted RNP of CasX and guide RNA is to ensure specific cleavage at on-target sites in the genome, with limited or no detectable edits at possible off-targets. The purpose of these experiments was to evaluate whether we could detect off-target editing of the RNP targeted to the human RHO P23H spacer (see Table 15 for spacer sequences).

[0805] To achieve this goal, a set of predicted off targets for the human RHO P23H spacer (11.2) in the human genome were generated computationally, and then assessed for detectable editing when treated with a targeted CasX RNP.

### Materials and Methods:

### Off-Target Site Prediction

[0806] Off-targets of the spacer sequence 11.2 were predicted for the entire human genome (hg38). Off-targets were required to have a competent PAM (here, TTC or CTC), and sufficient similarity to the spacer 11.2 sequence. A position-weight-matrix (PWM) was generated to model the PAM-spacer sequence, with a requirement for more stringent sequence matching in the PAM and in the PAM-proximal region of the spacer. Every sequence across the genome was compared to this PWM to generate a score. A score threshold was determined to include every single and double mutation within the spacer sequence, the large majority of triple and quadruple mutants (excluding only those sequences with all mutations occurring in the 7 PAM-proximal nucleotides), and a subset of higher order mutations (5 or more mutations). Regions of the genome with a score greater than or equal to the score threshold were identified for the experiments.

### Cell Treatment

[0807] HEK293T cells were seeded at 20-40k cells/well in a 96 well plate in 100 μL of Fibroblast (FB) medium and cultured in a 37° C. incubator with 5% CO2. The following day, confluence of seeded cells was checked to ensure that cells were at ˜75% confluence at time of transfection. If cells were at the right confluence, transfection was carried out. Each CasX and guide construct (119.174, see Table 15 for spacer sequences) was transfected into the HEK293T cells at 100-500 ng per well using Lipofectamine 3000 following the manufacturer's protocol, using 3 wells per construct as replicates. SaCas9 and SpyCas9 targeting RHO were used as benchmarking controls. For each Cas protein type, a non-targeting plasmid was used as a negative control. Cells were selected for successful transfection with puromycin at 0.3-3 μg/ml for 24-48 hours followed by 24-48 hours of recovery in FB medium. A subset of cells for each sample from the experiment was lysed, and the genome was extracted using a Quick extract solution following the manufacturer's protocol.

[0808] An ARPE19 dual reporter cell line (WT.RHO.GFP mut.RHO.mscarlet) was first generated by knocking into ARPE19 cells a transgene cassette that constitutively expresses exon 1 of the human RHO gene linked to GFP and exon 1 of the human P23H.RHO gene linked to mscarlet. The modified cells were expanded by serial passage every 3-5 days and maintained in Fibroblast (FB) medium, consisting of Dulbecco's Modified Eagle Medium (DMEM; Corning Cellgro, #10-013-CV) supplemented with 10% fetal bovine serum (FBS; Seradigm, #1500-500), and 100 Units/mL penicillin and 100 mg/mL streptomycin (100×-Pen-Strep; GIBCO #15140-122), and can additionally include sodium pyruvate (100×, Thermofisher #11360070), non-essential amino acids (100× Thermofisher #11140050), HEPES buffer (100× Thermofisher #15630080), and 2-mercaptoethanol (1000× Thermofisher #21985023). The cells were incubated at 37° C. and 5% CO2. After 1-2 weeks, GFP+cells were bulk sorted into FB medium. The reporter lines were expanded by serial passage every 3-5 days and maintained in FB medium in an incubator at 37° C. and 5% CO2. Reporter clones were generated by a limiting dilution method. The clonal lines were characterized via flow cytometry, genomic sequencing, and functional modification of the RHO locus using a previously validated RHO targeting CasX molecule. The optimal reporter lines were identified as ones that i) had a single copy of GFP correctly integrated per cell, ii) maintained doubling times equivalent to unmodified cells, and iii) resulted in reduction in GFP fluorescence upon disruption of the RHO gene when assayed using the methods described below.

[0809] ARPE19 dual reporter cells, constructed using cell line generation methods described above, were used for this experiment. Cells were seeded at 20-40k cells/well in a 96 well plate in 100 μL of FB medium and cultured in a 37° C. incubator with 5% CO2. The following day, lentiviral vectors packaging each CasX and guide construct (e.g., see table for sequences) were used to transduce cells at a high multiplicity of infection (MOI 300), using 3 wells per construct as replicates. A lentivirus packaging a non-targeting construct was used as a negative control. Cells were selected for successful transduction with puromycin at 0.3-3 μg/ml for 24-48 hours followed by recovery in FB medium. Cells from the experiment were lysed, and the genome was extracted using a Quick extract solution following the manufacturer's protocol.

### NGS Prep and Analysis

[0810] Genomic DNA was amplified via PCR with primers specific to the target genomic location of interest to form a target amplicon. These primers contain additional sequence at the 5′ ends to introduce Illumina read and 2 sequences (see table for sequences). Typical PCR conditions would be: 1× Kapa Hifi buffer, 300 nM dNTPs, 300 nM each primer, 0.75 ul of Kapa Hifi Hotstart DNA polymerase in a 50 μl reaction. On a thermal cycler, cycle for 95° C. for 5 min; then 16-25 cycles of 98° C. for 15 s, 60° C. for 20 s, 72° C. for 1 min; with a final extension of 2 min at 72° C. Amplified DNA product was purified with Ampure XP DNA cleanup kit, with elution in 30 μl of water.

[0811] A second PCR step was done with indexing adapters to allow multiplexing on the Illumina platform. 20 μl of the purified product from the previous step was combined with 1× Kapa GC buffer, 300 nM dNTPs, 200 nM each primer, 0.75 ul of Kapa Hifi Hotstart DNA polymerase in a 50 μl reaction. On a thermal cycler, cycle for 95° C. for 5 min; then 18 cycles of 98° C. for 15 s, 65° C. for 15 s, 72° C. for 30 s; with a final extension of 2 min at 72° C. Amplified DNA product was purified with Ampure XP DNA cleanup kit, with elution in 30 μl of water. Quality and quantification of the amplicon was assessed using a Fragment Analyzer DNA analyzer kit (Agilent, dsDNA 35-1500 bp). Amplicons were sequenced on the Illumina Miseq according to the manufacturer's instructions.

[0812] Raw fastq files from sequencing were processed as follows: (1) The sequences were trimmed for quality and for adapter sequences; (2) the sequences from read 1 and read 2 were merged into a single insert sequence; (3) each sequence was quantified for containing an insertion or deletion (indel) relative to the reference sequence, in a window around the 3′ end of the spacer (30 bp window centered at −3 bp from 3′ end of spacer). The activity of the StX molecule was quantified as the total percent of reads that contain an indel for each sample.

[0813] Results:

[0814] Two different experiments were conducted to test for off-target cleavage by X-editing RNP. In brief, two different cell lines were each edited by CasX RNP targeted to the human WT or P23H RHO Locus (using spacers 11.1 and 11.2 respectively), or were treated with an non-targeting control RNP (NT). The genomic DNA from each cell experiment was isolated and prepped for NGS sequencing by targeted amplification of the RHO locus (“On-target”) and 8 other loci across the genome that were predicted to be off-targets, based on having a competent PAM (TTC or CTC) and were sufficiently similar to spacer 11.2.

[0815] In the first experiment (FIG. 36), a HEK293T cell line was treated with XE-119.174.11.1, XE-119.174.11.2, or XE-119.174.NT by transfection. None of the predicted off-target sites of spacer 11.2 showed any detectable indel formation when treated with RNP targeted with spacers 11.1 (targeting the WT RHO exon 1) or 11.2 (targeting the P23H mutation in Rho Exon 1; FIG. 37). The on-target site of the RHO exon 1 was appreciably edited by spacer 11.1, with approximately 45% of cells showing indel formation. No editing was observed by spacer 11.2 at the WT RHO Exon1 (FIG. 37), which was expected given that this cell type does not contain a P23H mutated allele.

[0816] In the second experiment (FIG. 38), an ARPE-derived cell line was treated with XE-491.174.11.1 or XE-119.174.NT by lentiviral transduction. None of the predicted off-target sites of spacer 11.2 showed any detectable indel formation when treated with RNP targeted with spacer 11.1. The on-target site of the RHO exon 1 was appreciably edited by spacer 11.1, with approximately 42% of cells showing indel formation.

[0817] Under conditions of the assay, the results show consistent editing of the on-target site and undetected editing at off-target sites, across multiple cell types and delivery modalities. Thus, the CasX-RNP targeted to Rho are highly specific with no evidence of genotoxicity.

TABLE 15
Sequences for on target at the P23 RHO
locus, and predicted off-targets in the
human genome.

| | | | SEQ |
|---|---|---|---|
| | | | ID |
| Spacer | PAM | Sequence | NO: |
| On-target, 11.1 | CTC | AAGGGGCTGCGTACCACACC | 367 |
| On-target, 11.2 | CTC | AAGTGGCTGCGTACCACACC | 368 |
| O.T.1 | CTC | AAGTGGCTGCCCTCCACAGA | 369 |
| O.T.2 | TTC | AAGTGGCTGCATTCTACACC | 370 |
| O.T.3 | TTC | AAGTGGCTATGAACAACAGC | 371 |
| O.T.4 | CTC | AAGTGGCTGCCAGCCACCCC | 372 |
| O.T.5 | TTC | AAGTGGCTGCTGACAGCACT | 373 |
| O.T.6 | TTC | AAGTGGCTGCCTCCCTCAGT | 374 |
| O.T.7 | TTC | AAGTGGCTGTGAACCATGGC | 375 |
| O.T.8 | TTC | AAGTGGCTGCTTATCTAAGC | 376 |

### Example 22: CasX Edits the P23 RHO Locus In Vivo in C57BL/6J Mice

[0818] The purpose of this experiment was to demonstrate the ability of CasX to edit in vivo the endogenous RHO locus in the mouse retina, with a spacer targeting the P23 residue at a therapeutically relevant level, to generate proof-of-concept data that will justify and inform experiments in the P23H mouse disease model. Here, we assessed whether CasX variant 491 and guide variant 174, and a spacer targeting the P23 locus of the mouse RHO gene can generate significant, detectable in the retina when injected subretinally, and evaluate efficacy and safety of two different viral doses (1.0e+9 and 1.0e+10 vg). Rescue of 10% of rod photoreceptors can restore vision in cases of AdRP. Therefore, editing 10% of the RHO loci in rod photoreceptors in the retina may provide a therapeutic benefit in a disease context by reducing the levels of the mutant rhodopsin protein and preventing rod photoreceptor degeneration.

### Materials and Methods:

### Generation of AAV Plasmids and Viral Vectors

[0819] The CasX variant 491 under the control of the CMV promoter and RNA guide variant 174/spacer 11.30 (AAGGGGCTCCGCACCACGCC (SEQ ID NO: 377), targeting mouse RHO exon 1 at P23 residues) under the U6 promoter were cloned into a pAAV plasmid flanked with AAV2 ITR. AAV.491.174.11.30 vectors were produced in HEK293 cells using the triple-transfection method.

### Subretinal Injections

[0820] C57BL/6J mice were obtained from the Jackson Laboratories and maintained in a normal 12 hours light/dark cycle. Subretinal injections were performed on 5-6 weeks old mice. Mice were anesthetized with isoflurane inhalation. Proparacaine (0.5%) was applied topically on the cornea and the eyes were dilated with drops of tropicamide (1%) and phenylephrine (2.5%). Eyes were kept lubricated with genteal gel during the surgery. Under a surgical microscope, an ultrafine 30 ½-gauge disposable needle was passed through the sclera, at the equator and next to the limbus, to create a small hole into the vitreous cavity. Using a blunt-end needle, 1-1.5 μL of virus was injected directly into the subretinal space, between the RPE and retinal layer. Each experimental group (n=5) were injected in one eye with 1e+9 vg or 1e+10 viral genome (vg)/eye, and the contralateral eye injected with the AAV formulation buffer.

### NGS Analysis

[0821] 3 weeks post-injection, animals were sacrificed and the eyes enucleated in fresh PBS. Whole retinae were isolated from the eye cups and processed for gDNA extraction using the DNeasy Blood & Tissue Kit (Qiagen) according to the manufacturer's instructions. Amplicons were amplified from 200 ng of gDNA with a set of primers (Fwd 5′-ACACTCTTTCCCTACACGACGCTCTTCCGATCTNNNNNNNGCAGCCTTGGTCTCTGT CTACG-3′ (SEQ ID NO: 378); Rev 5′-GTGACTGGAGTTCAGACGTGTGCTCTTCCGATCTGCCCCAGTCTCTCTGCTCATACC-3′) (SEQ ID NO: 379) targeting the mouse RHO, exon 1 locus, bead-purified (Beckman coulter, Agencourt Ampure XP) and then re-amplified to incorporate illumina adapter sequence. Specifically, these primers contained an additional sequence at the 5′ ends to introduce Illumina read and 2 sequences as well as a 16 nt random sequence that functions as a unique molecular identifier (UMI). Quality and quantification of the amplicon was assessed using a Fragment Analyzer DNA analyzer kit (Agilent, dsDNA 35-1500 bp). Amplicons were sequenced on the Illumina Miseq according to the manufacturer's instructions. Raw fastq files from sequencing were processed as follows: (1) the sequences were trimmed for quality and for adapter sequences using the program cutadapt (v. 2.1); (2) the sequences from read 1 and read 2 were merged into a single insert sequence using the program flash2 (v2.2.00); and (3) the consensus insert sequences were run through the program CRISPResso2 (v 2.0.29), along with the expected amplicon sequence and the spacer sequence. This program quantifies the percent of reads that were modified in a window around the 3′ end of the spacer (30 bp window centered at −3 bp from 3′ end of spacer). The activity of the CasX molecule was quantified as the total percent of reads that contain insertions, substitutions and/or deletions anywhere within this window.

### Immunohistology

[0822] Mice were euthanized 3-4 weeks post-injection. Enucleated eyes were placed in 10% formalin overnight at 4° C. Retinae were dissected out from the eye cups, rinsed in PBS thoroughly and immersed in 15%-30% sucrose gradient. Tissues were embedded in optimal cutting temperature (OCT), froze on dry ice before being transferred to −80′C storage. 20 μM sections were cut using a cryostat. The sections were blocked for ≥1 hour at room temperature in blocking buffer (2% normal goat serum, 1% BSA, 0.1% Triton-X 100) before antibody labeling. The antibodies used were anti-mouse HA (abcam, 1:500) and Alexa Fluor 488 rabbit anti-mouse (Invitrogen, 1:2000). Sections were counterstained with DAPI to label nuclei, mounted on slides and imaged on a fluorescent microscope.

### Results:

[0823] We assessed the ability of CasX to edit the P23 RHO locus in the mouse retina. Two therapeutically relevant doses, 1.0e+9 and 1.0E+10 vg of AAV-CasX.491.174.11.30 were administered in the subretinal space of 5-6 weeks old C57BL/6J mice. Three weeks post-injections, retinae were harvested and editing levels quantified via NGS and the CRISPResso analysis pipeline. The spacer 11.30 targets the WT P23 genomic locus (FIG. 39) located at the beginning of the first exon of RHO. Overexpression of CasX-491.174.11.30 led to significant, dose-dependent, editing of mRHO exon 1 locus in treated-compared to sham-injected retinae (FIG. 40). The left panel shows the quantification in % of total indels detected by NGS at the mouse P23 RHO locus in AAV-CasX or sham-injected retinae compared to the mouse reference genome. The right panel shows the fraction (%) of edits predicted to lead to frameshift mutations in RHO protein. Data are presented as average of NGS readouts of editing outcomes from the entire retina, from six to eight animals per experimental cohort. The highest AAV dose, 1e+10 vg/eye, increased indels rate by 4-fold compared to the 1.0e+9 vg dose, with 40.3±22% versus 12.3±5% RHO editing detected respectively. The majority of indels generated by CasX.491 were deletions (left panel), predicted to translate to a high frequency of frameshift-mutations (64.7 versus 76.9% for 1.0e+9 and 1.0e+10 vg/dose respectively), and hypothetically high levels of RHO protein knock down. These results suggest that with a spacer driving allele-specific target of mutant P23H locus in the P23H+/−mouse model, CasX could efficiently editing 10% of rod photoreceptor, with the majority of edits translating to a knocking-down the mutant P23H Rho and significantly delay photoreceptor degeneration.

[0824] Immunohistochemistry performed on injected retinal cross-sectioned confirmed CasX expression in the photoreceptors layers, but also showed spread of the virus to the inner layers as show in in FIGS. 41A-F. The treatment groups were 1.0e+9 vg of AAV-CasX (FIG. 41B and e); 1.0e+10 vg AAV-CasX (FIG. 41 c and f); or PBS (FIGS. 41A and 41D). Levels of HA-tagged CasX was assessed by Anti-HA antibody staining (lower panels of FIGS. 41E, and 41F) in the photoreceptor cell bodies in the located in the outer nuclear layer (ONL) as well as outer segments, in retinas injected with both the 1e9 vg (FIGS. 41B and 41E) and 1e10 vg (FIGS. 41C and 41F). The control retinas that received a sham (FIGS. 41A and 41C) injection only showed background levels of signal for HA staining (FIG. 41D) in the RPE/sclera and had no detectable level in the ONL/INL layer. Additionally, gross histological analysis showed that the retinal structure was maintained after subretinal administration of AAV packaging CasX constructs.

[0825] Under the conditions of the experiments, the results demonstrate proof-of-concept that CasX 491, scaffold 174, and a spacer targeting the mouse P23 RHO locus can achieve therapeutically-relevant levels of edits at the P23 mouse locus when subretinally delivered via AAV in the murine retina.

### Example 23: Use of CasX:gNA System to Alleviate Disease Symptoms in a P23H Disease Model

[0826] The mouse RHO^{P23H} model is a well-established disease model for AdRP. The purpose of this experiment will be to demonstrate that CasX and a guide RNA with a spacer targeting the P23H RHO locus in RHO^{P23H} mice can alleviate disease symptoms by preventing rod photoreceptor degeneration.

[0827] Materials and Methods: AAV packaging CasX, guide and a spacer targeting the mouse P23H RHO locus (AAGTGGCTCCGCACCACGCC, SEQ ID NO: 380) will be subretinally administered in 4-6 week old RHO^{P23H} mice at doses ranging from 1e8 viral genomes (vg) to 1e10 vg using injection volumes of 1-1.5 μL. As controls, AAV formulation buffer (e.g., phosphate buffered saline) will be injected in the contralateral eye for experimental animals. As pre-determined time point, for example once before injection and then biweekly starting at 4 weeks post-injection and until 12 weeks post-injection, retinal health and function will be assessed by Optical Coherence Tomography (OCT) and Electroretinography (ERG). Additionally, also at pre-determined time points, for example at 4 weeks post injection and at 12 weeks post injection, a subset of animals will be sacrificed and retinas collected for editing assessment by NGS, WB, and RNAseq.

[0828] This experiment is expected to show that the CasX and guide with a spacer targeting the mouse P23H RHO locus, when delivered by subretinal AAV injection to RHO^{P23H} mice, can edit the target genomic locus (as measured by NGS analysis) and result in reduction of the mutant rhodopsin protein (as measured by WB analysis). Immunohistology is expected to show the maintenance of rod photoreceptors and absence of retinal degeneration. RNAseq is expected to show reduction in the transcript levels of mutant RHO, with no detectable effect on the levels of the WT RHO transcript. OCT and ERG is expected to show that retinal integrity and function are maintained in the eyes that receive AAV.CasX, while the sham treated eyes follow the natural progression of retinal degeneration and loss of function.

What is claimed is:

1. A composition comprising a Class 2 Type V CRISPR protein and a first guide nucleic acid (gNA), wherein the gNA comprises a targeting sequence complementary to a rhodopsin (RHO) gene target nucleic acid sequence, wherein the RHO gene comprises one or more mutations.

2. The composition of claim 1, wherein the RHO gene comprises one or more mutations in a region selected from the group consisting of:
a. a RHO intron;
b. a RHO exon;
c. a RHO intron-exon junction;
d. a RHO regulatory element; and
e. an intergenic region.

3. The composition of any one of claim 1 or claim 2, wherein the mutation is an insertion, deletion, substitution, duplication, or inversion of one or more nucleotides as compared to the wild-type RHO gene sequence.

4. The composition of any one of claims 1-3, wherein the mutation is a gain of function mutation.

5. The composition of any one of claims 1-3, wherein the RHO gene comprises a mutation set forth in Table 4A.

6. The composition of any one of claims 1-5, wherein the RHO gene comprising a mutation encodes a protein comprising a P23 or P23H substitution compared to a wild-type rhodopsin protein sequence of SEQ ID NO:100.

7. The composition of any one of claims 1-6, wherein the RHO gene encodes a non-functional rhodopsin protein.

8. The composition of any one of claims 1-6, wherein the gNA is a guide RNA (gRNA).

9. The composition of any one of claims 1-6, wherein the gNA is a guide DNA (gDNA).

10. The composition of any one of claims 1-6, wherein the gNA is a chimera comprising DNA and RNA.

11. The composition of any one of claims 1-10, wherein the gNA is a single-molecule gNA (sgNA).

12. The composition of any one of claims 1-10, wherein the gNA is a dual-molecule gNA (dgNA).

13. The composition of any one of claims 1-12, wherein the targeting sequence of the gNA comprises a sequence selected from the group consisting of the sequences of SEQ ID NOS:328-346, 367-376, 382-2100 and 2286-27274, or a sequence having at least about 65%, at least about 75%, at least about 85%, or at least about 95% identity thereto.

14. The composition of any one of claims 1-12, wherein the targeting sequence of the gNA comprises a sequence selected from the group consisting of the sequences of SEQ ID NOs:328-346, 367-376, 382-2100 and 2286-27274.

15. The composition of any one of claims 1-12, wherein the targeting sequence of the gNA comprises a sequence of SEQ ID NOs: 328-346, 367-376, 382-2100 and 2286-27274 with a single nucleotide removed from the 3′ end of the sequence.

16. The composition of any one of claims 1-12, wherein the targeting sequence of the gNA comprises a sequence of SEQ ID NOs: 2328-346, 367-376, 382-2100 and 2286-27274 with two nucleotides removed from the 3′ end of the sequence.

17. The composition of any one of claims 1-12, wherein the targeting sequence of the gNA comprises a sequence of SEQ ID NOs: 328-346, 367-376, 382-2100 and 2286-27274 with three nucleotides removed from the 3′ end of the sequence.

18. The composition of any one of claims 1-12, wherein the targeting sequence of the gNA comprises a sequence of SEQ ID NOs: 328-346, 367-376, 382-2100 and 2286-27274 with four nucleotides removed from the 3′ end of the sequence.

19. The composition of any one of claims 1-12, wherein the targeting sequence of the gNA comprises a sequence of SEQ ID NOs: 328-346, 367-376, 382-2100 and 2286-27274 with five nucleotides removed from the 3′ end of the sequence.

20. The composition of any one of claims 1-19, wherein the targeting sequence of the gNA comprises a sequence having one or more single nucleotide polymorphisms (SNP) relative to a sequence of SEQ ID NOS: 328-346, 367-376, 382-2100 and 2286-27274.

21. The composition of any one of claims 1-19, wherein the targeting sequence of the gNA is complementary to a sequence of a RHO exon.

22. The composition of any one of claims 1-21, wherein the targeting sequence of the gNA is complementary to a sequence of RHO exon 1.

23. The composition of claim 21 or claim 22, wherein the targeting sequence of the gNA is complementary to a target nucleic acid sequence encoding the P23H substitution.

24. The CasX:gNA system of any one of claims 21-23, wherein the targeting sequence of the gNA comprises a sequence of AAGUGGCUGCGUACCACACC (SEQ ID NO: 382).

25. The CasX:gNA system of any one of claims 21-23, wherein the targeting sequence of the gNA consists of a sequence of AAGUGGCUGCGUACCACACC (SEQ ID NO: 382).

26. The CasX:gNA system of any one of claims 21-23, wherein the targeting sequence of the gNA consists of a sequence of AAGUGGCUGCGUACCACAC (SEQ ID NO: 27275).

27. The CasX:gNA system of any one of claims 21-23, wherein the targeting sequence of the gNA consists of a sequence of AAGUGGCUGCGUACCACA (SEQ ID NO: 27276).

28. The CasX:gNA system of any one of claims 21-23, wherein the targeting sequence of the gNA consists of a sequence of AAGUGGCUGCGUACCAC (SEQ ID NO: 27277).

29. The CasX:gNA system of any one of claims 21-23, wherein the targeting sequence of the gNA consists of a sequence of AAGUGGCUGCGUACCA (SEQ ID NO: 27278).

30. The CasX:gNA system of any one of claims 21-23, wherein the targeting sequence of the gNA consists of a sequence of AAGUGGCUGCGUACC (SEQ ID NO: 27279).

31. The composition of any one of claims 1-19, wherein the targeting sequence of the gNA is complementary to a sequence of a RHO intron.

32. The composition of any one of claims 1-19, wherein the targeting sequence of the gNA is complementary to a sequence of a RHO intron-exon junction.

33. The composition of any one of claims 1-19, wherein the targeting sequence of the gNA is complementary to a sequence of a RHO regulatory element.

34. The composition of any one of claims 1-19, wherein the targeting sequence of the gNA is complementary to a sequence comprising one or more single nucleotide polymorphisms (SNPs) of the RHO gene.

35. The composition of any one of claims 1-19, wherein the targeting sequence of the gNA is complementary to a sequence of an intergenic region of the RHO gene.

36. The composition of any one of claims 1-35, further comprising a second gNA, wherein the second gNA has a targeting sequence complementary to a different or overlapping portion of the RHO target nucleic acid compared to the targeting sequence of the first gNA.

37. The composition of claim 36, wherein the second gNA has a targeting sequence complementary to the same exon targeted by the first gNA.

38. The composition of claim 36, wherein the second gNA has a targeting sequence complementary to a different exon targeted by the first gNA.

39. The composition of claim 36, wherein the second gNA has a targeting sequence complementary to an intron 3′ to the exon targeted by the first gNA.

40. The composition of any one of claims 1-39, wherein the first or second gNA has a scaffold comprising a sequence having at least about 50%, at least about 60%, at least about 70%, at least about 80%, at least about 90%, at least about 95%, at least about 96%, at least about 97%, at least about 98%, at least about 99%, or 100% sequence identity to a sequence selected from the group consisting of SEQ ID NOS: 2201-2285.

41. The composition of any one of claims 1-39, wherein the first or second gNA has a scaffold comprising a sequence selected from the group consisting of SEQ ID NOS: 2201-2285.

42. The composition of any one of claims 1-39, wherein the first or second gNA scaffold comprises a sequence having at least one modification relative to a reference gNA sequence selected from the group consisting of SEQ ID NOS: 4-16.

43. The composition of claim 42, wherein the at least one modification of the reference gNA comprises at least one substitution, deletion, or substitution of a nucleotide of the reference gNA sequence.

44. The composition of any one of claims 1-43, wherein the first or second gNA is chemically modified.

45. The composition of any one of claims 1-44, wherein the Class 2 Type V CRISPR protein is a reference CasX protein having a sequence of any one of SEQ ID NOS: 1-3, a CasX variant protein having a sequence of SEQ ID NOs: 49-160, 237-239, 243-246, 251-263 or 273-281, or a sequence having at least about 50%, at least about 60%, at least about 70%, at least about 80%, at least about 90%, or at least about 95%, or at least about 95%, or at least about 96%, or at least about 97%, or at least about 98%, or at least about 99% sequence identity thereto.

46. The composition of any one of claims 1-44, wherein the Class 2 Type V CRISPR protein is a CasX variant protein having a sequence of SEQ ID NOs: 49-160, 237-239, 243-246, 251-263 or 273-281

47. The composition of claim 45, wherein the CasX variant protein comprises at least one modification relative to a reference CasX protein having a sequence selected from SEQ ID NOS:1-3.

48. The composition of claim 47, wherein the at least one modification comprises at least one amino acid substitution, deletion, or substitution in a domain of the CasX variant protein relative to the reference CasX protein.

49. The composition of claim 48, wherein the domain is selected from the group consisting of a non-target strand binding (NTSB) domain, a target strand loading (TSL) domain, a helical I domain, a helical II domain, an oligonucleotide binding domain (OBD), and a RuvC DNA cleavage domain.

50. The composition of any one of claims 45-49, wherein the CasX protein further comprises one or more nuclear localization signals (NLS).

51. The composition of claim 50, wherein the one or more NLS are selected from the group of sequences consisting of SEQ ID NOS: 176-213.

52. The composition of claim 50 or claim 51, wherein the one or more NLS are expressed at or near the C-terminus of the CasX protein.

53. The composition of claim 50 or claim 51, wherein the one or more NLS are expressed at or near the N-terminus of the CasX protein.

54. The composition of claim 50 or claim 51, comprising one or more NLS located at or near the N-terminus and at or near the C-terminus of the CasX protein.

55. The composition of any one of claims 45-54, wherein the Class 2 Type V CRISPR protein is capable of forming a ribonuclear protein complex (RNP) with the gNA.

56. The composition of claim 55, wherein an RNP comprising the CasX variant protein and the gNA exhibit at least one or more improved characteristics as compared to an RNP comprising the reference CasX protein of SEQ ID NO: 1, SEQ ID NO: 2, or SEQ ID NO: 3 and a gNA comprising a sequence of any one of SEQ ID NOS: 4-16.

57. The composition of claim 56, wherein the improved characteristic is selected from one or more of the group consisting of improved folding of the CasX variant; improved binding affinity to a guide nucleic acid (gNA); improved binding affinity to a target DNA; improved ability to utilize a greater spectrum of one or more PAM sequences, including ATC, CTC, GTC, or TTC, in the editing of target DNA; improved unwinding of the target DNA; increased editing activity; improved editing efficiency; improved editing specificity; increased nuclease activity; increased target strand loading for double strand cleavage; decreased target strand loading for single strand nicking; decreased off-target cleavage; improved binding of non-target DNA strand; improved protein stability; improved protein solubility; improved protein:gNA complex (RNP) stability; improved protein:gNA complex solubility; improved protein yield; improved protein expression; and improved fusion characteristics.

58. The composition of claim 56 or claim 57, wherein the improved characteristic of the RNP of the CasX variant protein and the gNA variant is at least about 1.1 to about 100-fold or more improved relative to the RNP of the reference CasX protein of SEQ ID NO: 1, SEQ ID NO: 2, or SEQ ID NO: 3 and the gNA comprising a sequence of any one of SEQ ID NOS: 4-16.

59. The composition of claim 56 or claim 57, wherein the improved characteristic of the CasX variant protein is at least about 1.1, at least about 2, at least about 10, at least about 100-fold or more improved relative to the reference CasX protein of SEQ ID NO: 1, SEQ ID NO: 2, or SEQ ID NO: 3 and the gNA comprising a sequence of any one of SEQ ID NOS: 4-16.

60. The composition of any one of claims 56-59, wherein the improved characteristic comprises editing efficiency, and the RNP of the CasX variant protein and the gNA variant comprises a 1.1 to 100-fold improvement in editing efficiency compared to the RNP of the reference CasX protein of SEQ ID NO: 2 and the gNA of any one of SEQ ID NOS: 4-16.

61. The composition of any one of claims 56-60, wherein the RNP comprising the CasX variant and the gNA variant exhibits greater editing efficiency and/or binding of a target sequence in the target nucleic acid when any one of the PAM sequences TTC, ATC, GTC, or CTC is located 1 nucleotide 5′ to the non-target strand sequence having identity with the targeting sequence of the gNA in a cellular assay system compared to the editing efficiency and/or binding of an RNP comprising a reference CasX protein and a reference gNA in a comparable assay system.

62. The composition of claim 61, wherein the PAM sequence is TTC.

63. The composition of claim 62, wherein the targeting sequence of the gNA comprises a sequence selected from the group consisting of SEQ ID NOs: 370-371, 373-376, and 19918-27274.

64. The composition of claim 61, wherein the PAM sequence is ATC

65. The composition of claim 64, wherein the targeting sequence of the gNA comprises a sequence selected from the group consisting of SEQ ID NOs: 583-2100, and 2286-5554.

66. The composition of claim 61, wherein the PAM sequence is CTC.

67. The composition of claim 66, wherein the targeting sequence of the gNA comprises a sequence selected from the group consisting of SEQ ID NOs: 367-369, 372, and 10487-19917.

68. The composition of claim 61, wherein the PAM sequence is GTC.

69. The composition of claim 68, wherein the targeting sequence of the gNA comprises a sequence selected from the group consisting of SEQ ID NOs: 5555-10486.

70. The composition of any one of claims 61-69, wherein the increased binding affinity for the one or more PAM sequences is at least 1.5-fold greater compared to the binding affinity of any one of the reference CasX proteins of SEQ ID NOS: 1-3 for the PAM sequences.

71. The composition of any one of claims 56-70, wherein the RNP has at least a 5%, at least a 10%, at least a 15%, or at least a 20% higher percentage of cleavage-competent RNP compared to an RNP of the reference CasX proteins of SEQ ID NOS: 1-3 and the gNA of SEQ ID NOS: 4-16.

72. The composition of any one of claims 45-71, wherein the CasX variant protein comprises a RuvC DNA cleavage domain having nickase activity.

73. The composition of any one of claims 45-71, wherein the CasX variant protein comprises a RuvC DNA cleavage domain having double-stranded cleavage activity.

74. The composition of any one of claims 45-71, wherein the CasX protein is a catalytically inactive CasX (dCasX) protein, and wherein the dCasX and the gNA retain the ability to bind to the RHO target nucleic acid.

75. The composition of claim 74, wherein the dCasX comprises a mutation at residues:
a. D672, E769, and/or D935 corresponding to the CasX protein of SEQ ID NO:1; or
b. D659, E756 and/or D922 corresponding to the CasX protein of SEQ ID NO: 2.

76. The composition of claim 75, wherein the mutation is a substitution of alanine for the residue.

77. The composition of any one of claims 1-73, further comprising a donor template nucleic acid.

78. The composition of claim 77, wherein the donor template comprises a nucleic acid comprising at least a portion of a RHO gene selected from the group consisting of a RHO exon, a RHO intron, a RHO intron-exon junction, and a RHO regulatory element.

79. The composition of claim 78, wherein the donor template comprises a wild-type nucleic acid sequence.

80. The composition of claim 78, wherein the donor template comprises a nucleic acid sequence having one or more mutations relative to the wild-type RHO gene sequence.

81. The composition of any one of claims 77-80, wherein the donor template ranges in size from 10-10,000 nucleotides.

82. The composition of any one of claims 77-81, wherein the donor template is a single-stranded DNA template or a single stranded RNA template.

83. The composition of any one of claims 77-81, wherein the donor template is a double-stranded DNA template.

84. The composition of any one of claims 77-83, wherein the donor template comprises homologous arms at or near the 5′ and 3′ ends of the donor template that are complementary to sequences flanking cleavage sites in the RHO target nucleic acid introduced by the Class 2 Type V CRISPR protein.

85. A nucleic acid comprising the donor template of any one of claims 77-84.

86. A nucleic acid comprising a sequence that encodes the CasX of any one of claims 45-76.

87. A nucleic acid comprising a sequence that encodes the gNA of any one of claims 1-44.

88. The nucleic acid of claim 86, wherein the sequence that encodes the CasX protein is codon optimized for expression in a eukaryotic cell.

89. A vector comprising the gNA of any one of claims 1-44, the CasX protein of any one of claims 45-76, or the nucleic acid of any one of claims 85-88.

90. The vector of claim 89, wherein the vector further comprises a promoter.

91. The vector of claim 89 or claim 90, wherein the vector is selected from the group consisting of a retroviral vector, a lentiviral vector, an adenoviral vector, an adeno-associated viral (AAV) vector, a herpes simplex virus (HSV) vector, a virus-like particle (VLP), a plasmid, a minicircle, a nanoplasmid, a DNA vector, and an RNA vector.

92. The vector of claim 91, wherein the vector is an AAV vector.

93. The vector of claim 92, wherein the AAV vector is selected from AAV1, AAV2, AAV3, AAV4, AAV5, AAV6, AAV7, AAV8, AAV9, AAV10, AAV11, AAV12, AAV 44.9, AAV-Rh74, or AAVRh10.

94. The vector of claim 93, wherein the AAV vector is selected from AAV1, AAV2, AAV5, AAV8, or AAV9.

95. The vector of claim 91, wherein the vector is a retroviral vector.

96. The vector of claim 91, wherein the vector is a VLP vector comprising one or more components of a gag polyprotein.

97. The vector of claim 96, wherein the one or more components of the gag polyprotein are selected from the group consisting of matrix protein (MA), nucleocapsid protein (NC), capsid protein (CA), p1-p6 protein, and protease cleavage site.

98. The vector of claim 96 or claim 97, comprising the CasX protein and the gNA.

99. The vector of claim 98, wherein the CasX protein and the gNA are associated together in an RNP.

100. The vector of any one of claims 96-99, further comprising the donor template.

101. The vector of any one of claims 96-100, further comprising a pseudotyping viral envelope glycoprotein or antibody fragment that provides for binding and fusion of the VLP to a target cell.

102. A host cell comprising the vector of any one of claims 89-101.

103. The host cell of claim 101, wherein the host cell is selected from the group consisting of BHK, HEK293, HEK293T, NS0, SP2/0, YO myeloma cells, P3X63 mouse myeloma cells, PER, PER.C6, NIH3T3, COS, HeLa, CHO, and yeast cells.

104. A method of modifying a RHO target nucleic acid sequence in a population of cells, wherein the RHO target nucleic acid comprises one or more mutations, the method comprising introducing into cells of the population:
a. the composition of any one of claims 1-84;
b. the nucleic acid of any one of claims 85-88;
c. the vector of any one of claims 89-101; or
d. combinations of two or more of (a)-(c),
wherein the RHO target nucleic acid sequence of the cells targeted by the first gNA is modified by the CasX protein.

105. The method of claim 104, wherein the modifying comprises introducing a single-stranded break in the RHO target nucleic acid sequence of the cells of the population.

106. The method of claim 104, wherein the modifying comprises introducing a double-stranded break in the RHO target nucleic acid sequence of the cells of the population.

107. The method of any one of claims 104-106, further comprising introducing into the cells of the population a second gNA or a nucleic acid encoding the second gNA, wherein the second gNA has a targeting sequence complementary to a different or overlapping portion of the RHO target nucleic acid compared to the first gNA, resulting in an additional break in the RHO target nucleic acid of the cells of the population.

108. The method of any one of claims 104-107, wherein the modifying comprises introducing an insertion, deletion, substitution, duplication, or inversion of one or more nucleotides in the RHO target nucleic acid of the cells of the population.

109. The method of any one of claims 104-108, wherein the RHO target nucleic acid of at least 10% of the cells of the population is modified.

110. The method of claim 108, wherein the modifying results in a knocking down or knocking out of the RHO gene in the cells of the population such that expression of non-functional rhodopsin protein is decreased by at least about 10%, at least about 20%, at least about 30%, at least about 40%, at least about 50%, at least about 60%, at least about 70%, at least about 80%, or at least about 90% in comparison to a cell where the RHO gene has not been modified.

111. The method of claim 108, wherein the RHO gene of the cells of the population is modified such that at least about 10%, at least about 20%, at least about 30%, at least about 40%, at least about 50%, at least about 60%, at least about 70%, at least about 80%, or at least about 90% of the modified cells do not express a detectable level of non-functional rhodopsin protein.

112. The method of claim 108, wherein the modifying results in a correction or compensation of the mutation of the RHO gene in the cells of the population such that functional rhodopsin protein is expressed by the cells.

113. The method of claim 108, wherein expression of the functional rhodopsin protein by the cells of the population is increased by at least about 10%, at least about 20%, at least about 30%, at least about 40%, at least about 50%, at least about 60%, at least about 70%, at least about 80%, or at least about 90% in comparison to a cell where the RHO gene has not been modified.

114. The method of any one of claims 104-107, wherein the method comprises insertion of the donor template into the break site(s) of the RHO gene target nucleic acid sequence of the cells of the population.

115. The method of claim 114, wherein the insertion of the donor template is mediated by homology-directed repair (HDR) or homology-independent targeted integration (HITI).

116. The method of claim 114 or claim 115, wherein insertion of the donor template results in a correction or compensation of the RHO gene in the cells of the population such that functional rhodopsin protein is expressed by the cells.

117. The method of claim 114, wherein expression of the functional rhodopsin protein by the cells of the population is increased by at least about 10%, at least about 20%, at least about 30%, at least about 40%, at least about 50%, at least about 60%, at least about 70%, at least about 80%, or at least about 90% in comparison to a cell where the RHO gene has not been modified.

118. The method of any one of claims 114-116, wherein the RHO gene of the cells of the population is modified such that at least about 50%, at least about 60%, at least about 70%, at least about 75%, at least about 80%, at least about 85%, at least about 90%, or at least about 95% of the modified cells express a detectable level of functional rhodopsin.

119. The method of claim 114 or claim 115, wherein insertion of the donor template results in a knocking down or knocking out the RHO gene in the cells of the population such that expression of a non-functional rhodopsin protein is decreased by at least about 10%, at least about 20%, at least about 30%, at least about 40%, at least about 50%, at least about 60%, at least about 70%, at least about 80%, or at least about 90% in comparison to a cell where the RHO gene has not been modified of the RHO gene in the cells of the population.

120. The method of claim 114 or claim 115, wherein the RHO gene of the cells of the population is modified such that at least about 10%, at least about 20%, at least about 30%, at least about 40%, at least about 50%, at least about 60%, at least about 70%, at least about 80%, or at least about 90% of the modified cells do not express a detectable level of non-functional rhodopsin protein.

121. The method of any one of claims 104-120, wherein the cells are eukaryotic.

122. The method of claim 121, wherein the eukaryotic cells are selected from the group consisting of rodent cells, mouse cells, rat cells, and non-human primate cells.

123. The method of claim 121, wherein the eukaryotic cells are human cells.

124. The method of claim 121-123, wherein the eukaryotic cells are selected from the group consisting of a neuron, a rod photoreceptor cell, a retinal progenitor cell, a pluripotent stem cell (iPSC), a fibroblast, and a Müller glial cell.

125. The method of any one of claim 104-124, wherein the modifying of the RHO gene target nucleic acid sequence of the population of cells occurs in vitro or ex vivo.

126. The method of claims 104-125, wherein the modifying of the RHO gene target nucleic acid sequence of the population of cells occurs in vivo in a subject.

127. The method of claim 126, wherein the subject is selected from the group consisting of a rodent, a mouse, a rat, and a non-human primate.

128. The method of claim 126, wherein the subject is a human.

129. The method of any one of claims 126-128, wherein the method comprises administering a therapeutically effective dose of an AAV vector to the subject.

130. The method of claim 129, wherein the AAV vector is administered to the subject at a dose of at least about 1×10⁵ vector genomes (vg), at least about 1×10⁵ vector genomes (vg)/kg, at least about 1×10⁶ vg/kg, at least about 1×10⁷ vg/kg, at least about 1×10⁸ vg/kg, at least about 1×10⁹ vg/kg, at least about 1×10¹⁰ vg/kg, at least about 1×10¹¹ vg/kg, at least about 1×10¹² vg/kg, at least about 1×10¹³ vg/kg, at least about 1×10¹⁴ vg/kg, at least about 1×10¹⁵ vg/kg, or at least about 1×10¹⁶ vg/kg.

131. The method of claim 129, wherein the AAV vector is administered to the subject at a dose of at least about 1×10⁵ vg/kg to about 1×10¹⁶ vg/kg, at least about 1×10⁶ vg/kg to about 1×10¹⁵ vg/kg, at least about 1×10⁷ vg/kg to about 1×10¹⁴ vg/kg, at least about 1×10⁸ vg/kg to about 1×10¹³ vg/kg, at least about 1×10⁹ vg/kg to about 1×10¹² vg/kg, or at least about 1×10¹⁰ vg/kg to about 1×10¹¹ vg/kg.

132. The method of any one of claims 126-128, wherein the method comprises administering a therapeutically effective dose of a VLP to the subject.

133. The method of claim 132, wherein the VLP is administered to the subject at a dose of at least about 1×10⁵ particles/kg, at least about 1×10⁶ particles/kg, at least about 1×10⁷ particles/kg, at least about 1×10⁸ particles/kg, at least about 1×10⁹ particles/kg, at least about 1×10¹⁰ particles/kg, at least about 1×10¹¹ particles/kg, at least about 1×10¹² particles/kg, at least about 1×10¹³ particles/kg, at least about 1×10¹⁴ particles/kg, at least about 1×10¹⁵ particles/kg, at least about 1×101⁶ particles/kg.

134. The method of claim 132, wherein the VLP is administered to the subject at a dose of at least about 1×10⁵ particles/kg to about 1×10¹⁶ particles/kg, at least about 1×10⁶ particles/kg to about 1×10¹⁵ particles/kg, at least about 1×10⁷ particles/kg to about 1×10¹⁴ particles/kg, at least about 1×10⁸ particles/kg to about 1×10¹³ particles/kg, at least about 1×10⁹ particles/kg to about 1×10¹² particles/kg, at least about 1×10¹⁰ particles/kg to about 1×10¹¹ particles/kg.

135. The method of any one of claims 127-134 wherein the vector or VLP is administered to one or both eyes of the subject by a route of administration selected from intraocular, intravitreal, subretinal, or suprachoroidal injection or implantation.

136. The method of any one of claims 104-134, further comprising contacting the RHO target nucleic acid sequence of the population of cells with:
a. an additional CRISPR nuclease and a gNA targeting a different or overlapping portion of the RHO target nucleic acid compared to the first gNA;
b. a polynucleotide encoding the additional CRISPR nuclease and the gNA of (a);
c. a vector comprising the polynucleotide of (b); or
d. a VLP comprising the additional CRISPR nuclease and the gNA of (a);
wherein the contacting results in modification of the RHO gene at a different location in the sequence compared to the sequence targeted by the first gNA.

137. The method of claim 136, wherein the additional CRISPR nuclease is a CasX protein having a sequence different from the CasX protein of any of the preceding claims.

138. The method of claim 136, wherein the additional CRISPR nuclease is not a CasX protein.

139. The method of claim 138, wherein the additional CRISPR nuclease is selected from the group consisting of Cas9, Cas12a, Cas12b, Cas12c, Cas12d (CasY), Cas12J, Cas13a, Cas13b, Cas13c, Cas13d, CasX, CasY, Cas14, Cpf1, C2c1, Csn2, Cas Phi, and sequence variants thereof.

140. A population of cells modified by the method of any one of claims 104-139, wherein the cells have been modified such that at least 70%, at least 75%, at least 80%, at least 85%, at least 90%, or at least 95% of the modified cells do not express a detectable level of non-functional rhodopsin protein.

141. A population of cells modified by the method of any one of claims 104-139, wherein the mutation of the RHO target nucleic acid is corrected or compensated for in the modified cells of the population, resulting in expression of a functional rhodopsin protein by the modified cells.

142. The population of cells of claim 141, wherein the cells have been modified such that expression of a functional rhodopsin protein is increased by at least about 10%, at least about 20%, at least about 30%, at least about 40%, at least about 50%, at least about 60%, at least about 70%, at least about 80%, or at least about 90% in comparison to a cell where the RHO gene has not been modified.

143. The population of cells of any one of claim 140-142, wherein the cells are selected from the group consisting of a neuron, a rod photoreceptor cell, a retinal progenitor cell, a pluripotent stem cell (iPSC), a fibroblast, and a Müller glial cell.

144. A method of treating a RHO-related disease in a subject in need thereof, the method comprising administering to one or both eyes of the subject a therapeutically effective amount of the cells of any one of claims 140-143.

145. The method of claim 144, wherein the RHO-related disease is retinitis pigmentosa.

146. The method of claim 144 or claim 145, wherein the subject is selected from the group consisting of a rodent, a mouse, a rat, and a non-human primate.

147. The method of any one of claims 144-146, wherein the subject is a human.

148. The method of any one of claims 144-147, wherein the cells are autologous with respect to the subject to be administered the cells.

149. The method of any one of claims 144-147 wherein the cells are allogeneic with respect to the subject to be administered the cells.

150. The method of any one of claims 144-149, wherein the cells are administered by a route of administration selected from intraocular, intravitreal, subretinal, or suprachoroidal injection or implantation.

151. A method of treating a RHO-related disease in a subject in need thereof, comprising modifying a RHO gene having one or more mutations in eye cells of the subject, the modifying comprising contacting said cells in one or both eyes with a therapeutically effective dose of:
a. the composition of any one of claims 1-84;
b. the nucleic acid of any one of claims 85-88;
c. the vector as in any one of claims 89-95;
d. the VLP of any one of claims 96-101; or
e. combinations of two or more of (a)-(d),
wherein the RHO gene of the cells targeted by the first gNA is modified by the CasX protein.

152. The method of claim 151, wherein the modifying comprises introducing a single-stranded break in the RHO gene of the cells.

153. The method of claim 151, wherein the modifying comprises introducing a double-stranded break in the RHO gene of the cells.

154. The method of any one of claims 151-153, further comprising introducing into the cells of the subject a second gNA or a nucleic acid encoding the second gNA, wherein the second gNA has a targeting sequence complementary to a different or overlapping portion of the target nucleic acid compared to the first gNA, resulting in an additional break in the RHO target nucleic acid of the cells of the subject.

155. The method of any one of claims 151-153, wherein the modifying comprises introducing an insertion, deletion, substitution, duplication, or inversion of one or more nucleotides in the RHO gene of the cells.

156. The method of any one of claims 151-154, wherein the modifying comprises insertion of the donor template into the break site(s) of the RHO gene target nucleic acid sequence of the cells.

157. The method of claim 156, wherein the insertion of the donor template is mediated by homology-directed repair (HDR) or homology-independent targeted integration (HITI).

158. The method of any one of claims 151-157, wherein the modifying results in a correction of or compensation for the mutation(s) in the RHO gene in the modified cells of the subject.

159. The method of claim 158, wherein correction of the mutation results in expression of functional rhodopsin protein by the modified cells of the subject.

160. The method of claim 158 or claim 159, wherein the RHO gene of the modified cells express increased levels of a functional rhodopsin protein, wherein the increase is at least about 10%, at least about 20%, at least about 30%, at least about 40%, at least about 50%, at least about 60%, at least about 70%, at least about 80%, or at least about 90% in comparison to a cell with a RHO gene that has not been modified.

161. The method of any one of claims 151-157, wherein the modifying results in a knocking down or knocking out the RHO gene in the modified cells of the subject such that at least about 10%, at least about 20%, at least about 30%, at least about 40%, at least about 50%, at least about 60%, at least about 70%, at least about 80%, or at least about 90% of the modified cells do not express a detectable level of non-functional rhodopsin protein.

162. The method of any one of claims 151-157, wherein the modifying results in a knocking down or knocking out the RHO gene in the modified cells of the subject such that expression of non-functional rhodopsin protein in the subject is decreased by at least about 10%, at least about 20%, at least about 30%, at least about 40%, at least about 50%, at least about 60%, at least about 70%, at least about 80%, or at least about 90% in comparison to a subject where the RHO gene has not been modified.

163. The method of any one of claims 151-162, wherein the subject is selected from the group consisting of rodent, mouse, rat, and non-human primate.

164. The method of any one of claims 151-162, wherein the subject is a human.

165. The method of any one of claims 151-162, wherein the cells that are modified are selected from the group consisting of a neuron, a rod photoreceptor cell, a retinal progenitor cell, a pluripotent stem cell (iPSC), a fibroblast, and a Müller glial cell.

166. The method of any one of claims 151-164, wherein the RHO-related disease is retinitis pigmentosa.

167. The method of any one of claims 151-165, wherein the vector is administered to the subject at a therapeutically-effective dose.

168. The method of any one of claims 151-167, wherein the vector is an AAV, and is administered to the subject at a dose of at least about 1×10⁵ vector genomes (vg)/kg, at least about 1×10⁶ vg/kg, at least about 1×10⁷ vg/kg, at least about 1×10⁸ vg/kg, at least about 1×10⁹ vg/kg, at least about 1×10¹⁰ vg/kg, at least about 1×10¹¹ vg/kg, at least about 1×10¹² vg/kg, at least about 1×10¹³ vg/kg, at least about 1×10¹⁴ vg/kg, at least about 1×10¹⁵ vg/kg, or at least about 1×10¹⁶ vg/kg.

169. The method of any one of claims 151-167, wherein the vector is an AAV, and is administered to the subject at a dose of at least about 1×10⁵ vg/kg to about 1×10¹⁶ vg/kg, at least about 1×10⁶ vg/kg to about 1×10¹⁵ vg/kg, at least about 1×10⁷ vg/kg to about 1×10¹⁴ vg/kg, at least about 1×10⁸ vg/kg to about 1×10¹³ vg/kg, at least about 1×10⁹ vg/kg to about 1×10¹² vg/kg, or at least about 1×10¹⁰ vg/kg to about 1×10¹¹ vg/kg.

170. The method of any one of claims 151-165, wherein the VLP is administered to the subject at a therapeutically-effective dose.

171. The method of claim 169, wherein the VLP is administered to the subject at a dose of at least about 1×10⁵ particles/kg, at least about 1×10⁶ particles/kg, at least about 1×10⁷ particles/kg, at least about 1×10⁸ particles/kg, at least about 1×10⁹ particles/kg, at least about 1×10¹⁰ particles/kg, at least about 1×10¹¹ particles/kg, at least about 1×10¹² particles/kg, at least about 1×10¹³ particles/kg, at least about 1×10¹⁴ particles/kg, at least about 1×10¹⁵ particles/kg, at least about 1×101⁶ particles/kg.

172. The method of claim 170, wherein the VLP is administered to the subject at a dose of at least about 1×10⁵ particles/kg to about 1×10¹⁶ particles/kg, at least about 1×10⁶ particles/kg to about 1×10¹⁵ particles/kg, at least about 1×10⁷ particles/kg to about 1×10¹⁴ particles/kg, at least about 1×10⁸ particles/kg to about 1×10¹³ particles/kg, at least about 1×10⁹ particles/kg to about 1×10¹² particles/kg, at least about 1×10¹⁰ particles/kg to about 1×10¹¹ particles/kg.

173. The method of any one of claims 167-171, wherein the vector or VLP is administered to one or both eyes of the subject by a route of administration selected from intraocular, intravitreal, subretinal, or suprachoroidal injection or implantation.

174. The method of any one of claims 151-172, wherein the method results in improvement in at least one clinically-relevant endpoint selected from the group consisting of mean change or mean rate of change in: 1) best corrected visual acuity (BCVA); 2) visual field sensitivity (including analysis of hill of vision volumes); 3) retinal sensitivity measured by full-field stimulus testing (FST); 4) multiluminance mobility tests; 5) electrophysiological measures of retinal function; 6) optical coherence tomography (OCT) documenting the rate of photoreceptor loss; and 7) hypo- or hyperfluorescent lesion size on fundus autofluorescence; 8) color vision; 9) contrast sensitivity; 10) gaze tracking; 11) light aversion; 12) macular sensitivity.

175. The method of any one of claims 151-172, wherein the method results in improvement in at least two clinically-relevant endpoints selected from the group consisting of mean change or mean rate of change in: 1) best corrected visual acuity (BCVA); 2) visual field sensitivity (including analysis of hill of vision volumes); 3) retinal sensitivity measured by full-field stimulus testing (FST); 4) multiluminance mobility tests; 5) electrophysiological measures of retinal function; 6) optical coherence tomography (OCT) documenting the rate of photoreceptor loss; and 7) hypo- or hyperfluorescent lesion size on fundus autofluorescence; 8) color vision; 9) contrast sensitivity; 10) gaze tracking; 11) light aversion; 12) macular sensitivity.

176. The composition of claim 1, wherein the target nucleic acid sequence is complementary to a non-target strand sequence located 1 nucleotide 3′ of a protospacer adjacent motif (PAM) sequence.

177. The composition of claim 176, wherein the PAM sequence comprises a TC motif.

178. The composition of claim 177, wherein the PAM sequence comprises ATC, GTC, CTC or TTC.

179. The composition of any one of claims 176-178, wherein the Class 2 Type V CRISPR protein comprises a RuvC domain.

180. The composition of claim 179, wherein the RuvC domain generates a staggered double-stranded break in the target nucleic acid sequence.

181. The composition of any one of claims 176-180, wherein the Class 2 Type V CRISPR protein does not comprise an HNH nuclease domain.

182. A composition of any one of claims 1-84 or claims 176-181; a nucleic acid of any one of claims 85-88; a vector of any one of claims 89-95; a VLP of any one of claims 96-101; or combinations thereof, for use as a medicament for the treatment of a RHO-related disease.

The application's sequence listing, which the Patent Office published only in electronic form, follows.

SEQUENCE LISTING (27300 sequences)

SEQ ID NO: 1 - protein, 986 aa, Unknown
  Deltaproteobacteria sp.
MEKRINKIRKKLSADNATKPVSRSGPMKTLLVRVMTDDLKKRLEKRRKKPEVMPQVISNNAANNLRMLLDDYTKMKEAILQVYWQEFKDDHVGLMCKFAQPASKKIDQNKLKPEMDEKGNLTTAGFACSQCGQPLFVYKLEQVSEKGKAYTNYFGRCNVAEHEKLILLAQLKPEKDSDEAVTYSLGKFGQRALDFYSIHVTKESTHPVKPLAQIAGNRYASGPVGKALSDACMGTIASFLSKYQDIIIEHQKVVKGNQKRLESLRELAGKENLEYPSVTLPPQPHTKEGVDAYNEVIARVRMWVNLNLWQKLKLSRDDAKPLLRLKGFPSFPVVERRENEVDWWNTINEVKKLIDAKRDMGRVFWSGVTAEKRNTILEGYNYLPNENDHKKREGSLENPKKPAKRQFGDLLLYLEKKYAGDWGKVFDEAWERIDKKIAGLTSHIEREEARNAEDAQSKAVLTDWLRAKASFVLERLKEMDEKEFYACEIQLQKWYGDLRGNPFAVEAENRVVDISGFSIGSDGHSIQYRNLLAWKYLENGKREFYLLMNYGKKGRIRFTDGTDIKKSGKWQGLLYGGGKAKVIDLTFDPDDEQLIILPLAFGTRQGREFIWNDLLSLETGLIKLANGRVIEKTIYNKKIGRDEPALFVALTFERREVVDPSNIKPVNLIGVDRGENIPAVIALTDPEGCPLPEFKDSSGGPTDILRIGEGYKEKQRAIQAAKEVEQRRAGGYSRKFASKSRNLADDMVRNSARDLFYHAVTHDAVLVFENLSRGFGRQGKRTFMTERQYTKMEDWLTAKLAYEGLTSKTYLSKTLAQYTSKTCSNCGFTITTADYDGMLVRLKKTSDGWATTLNNKELKAEGQITYYNRYKRQTVEKELSAELDRLSEESGNNDISKWTKGRRDEALFLLKKRFSHRPVQEQFVCLDCGHEVHADEQAALNIARSWLFLNSNSTEFKSYKSGKQPFVGAWQAFYKRRLKEVWKPNA

SEQ ID NO: 2 - protein, 978 aa, Unknown
  Planctomycetes sp.
MQEIKRINKIRRRLVKDSNTKKAGKTGPMKTLLVRVMTPDLRERLENLRKKPENIPQPISNTSRANLNKLLTDYTEMKKAILHVYWEEFQKDPVGLMSRVAQPAPKNIDQRKLIPVKDGNERLTSSGFACSQCCQPLYVYKLEQVNDKGKPHTNYFGRCNVSEHERLILLSPHKPEANDELVTYSLGKFGQRALDFYSIHVTRESNHPVKPLEQIGGNSCASGPVGKALSDACMGAVASFLTKYQDIILEHQKVIKKNEKRLANLKDIASANGLAFPKITLPPQPHTKEGIEAYNNVVAQIVIWVNLNLWQKLKIGRDEAKPLQRLKGFPSFPLVERQANEVDWWDMVCNVKKLINEKKEDGKVFWQNLAGYKRQEALLPYLSSEEDRKKGKKFARYQFGDLLLHLEKKHGEDWGKVYDEAWERIDKKVEGLSKHIKLEEERRSEDAQSKAALTDWLRAKASFVIEGLKEADKDEFCRCELKLQKWYGDLRGKPFAIEAENSILDISGFSKQYNCAFIWQKDGVKKLNLYLIINYFKGGKLRFKKIKPEAFEANRFYTVINKKSGEIVPMEVNFNFDDPNLIILPLAFGKRQGREFIWNDLLSLETGSLKLANGRVIEKTLYNRRTRQDEPALFVALTFERREVLDSSNIKPMNLIGIDRGENIPAVIALTDPEGCPLSRFKDSLGNPTHILRIGESYKEKQRTIQAAKEVEQRRAGGYSRKYASKAKNLADDMVRNTARDLLYYAVTQDAMLIFENLSRGFGRQGKRTFMAERQYTRMEDWLTAKLAYEGLPSKTYLSKTLAQYTSKTCSNCGFTITSADYDRVLEKLKKTATGWMTTINGKELKVEGQITYYNRYKRQNVVKDLSVELDRLSEESVNNDISSWTKGRSGEALSLLKKRFSHRPVQEKFVCLNCGFETHADEQAALNIARSWLFLRSQEYKKYQTNKTTGNTDKRAFVETWQSFYRKKLKEVWKPAV

SEQ ID NO: 3 - protein, 855 aa, Unknown
  Candidatus Sungbacteria sp.
MDNANKPSTKSLVNTTRISDHFGVTPGQVTRVFSFGIIPTKRQYAIIERWFAAVEAARERLYGMLYAHFQENPPAYLKEKFSYETFFKGRPVLNGLRDIDPTIMTSAVFTALRHKAEGAMAAFHTNHRRLFEEARKKMREYAECLKANEALLRGAADIDWDKIVNALRTRLNTCLAPEYDAVIADFGALCAFRALIAETNALKGAYNHALNQMLPALVKVDEPEEAEESPRLRFFNGRINDLPKFPVAERETPPDTETIIRQLEDMARVIPDTAEILGYIHRIRHKAARRKPGSAVPLPQRVALYCAIRMERNPEEDPSTVAGHFLGEIDRVCEKRRQGLVRTPFDSQIRARYMDIISFRATLAHPDRWTEIQFLRSNAASRRVRAETISAPFEGFSWTSNRTNPAPQYGMALAKDANAPADAPELCICLSPSSAAFSVREKGGDLIYMRPTGGRRGKDNPGKEITWVPGSFDEYPASGVALKLRLYFGRSQARRMLTNKTWGLLSDNPRVFAANAELVGKKRNPQDRWKLFFHMVISGPPPVEYLDFSSDVRSRARTVIGINRGEVNPLAYAVVSVEDGQVLEEGLLGKKEYIDQLIETRRRISEYQSREQTPPRDLRQRVRHLQDTVLGSARAKIHSLIAFWKGILAIERLDDQFHGREQKIIPKKTYLANKTGFMNALSFSGAVRVDKKGNPWGGMIEIYPGGISRTCTQCGTVWLARRPKNPGHRDAMVVIPDIVDDAAATGFDNVDCDAGTVDYGELFTLSREWVRLTPRYSRVMRGTLGDLERAIRQGDDRKSRQMLELALEPQPQWGQFFCHRCGFNGQSDVLAATNLARRAISLIRRLPDTDTPPTP

SEQ ID NO: 4 - RNA, 108 nt, Artificial Sequence
  gRNA sequence
acaucuggcgcguuuauuccauuacuuuggagccagucccagcgacuaugucguauggacgaagcgcuuauuuaucggagagaaaccgauaaguaaaacgcaucaaag

SEQ ID NO: 5 - RNA, 108 nt, Artificial Sequence
  gRNA sequence
uacuggcgcuuuuaucucauuacuuugagagccaucaccagcgacuaugucguauggguaaagcgcuuauuuaucggagagaaauccgauaaauaagaagcaucaaag

SEQ ID NO: 6 - RNA, 81 nt, Artificial Sequence
  gRNA sequence
acaucuggcgcguuuauuccauuacuuuggagccagucccagcgacuaugucguauggacgaagcgcuuauuuaucggaga

SEQ ID NO: 7 - RNA, 78 nt, Artificial Sequence
  gRNA sequence
acaucuggcgcguuuauuccauuacuuuggagccagucccagcgacuaugucguauggacgaagcgcuuauuuaucgg

SEQ ID NO: 8 - RNA, 80 nt, Artificial Sequence
  gRNA sequence
uacuggcgcuuuuaucucauuacuuugagagccaucaccagcgacuaugucguauggguaaagcgcuuauuuaucggaga

SEQ ID NO: 9 - RNA, 77 nt, Artificial Sequence
  gRNA sequence
uacuggcgcuuuuaucucauuacuuugagagccaucaccagcgacuaugucguauggguaaagcgcuuauuuaucgg

SEQ ID NO: 10 - RNA, 25 nt, Artificial Sequence
  gRNA sequence
guuuacacacucccucucauagggu

SEQ ID NO: 11 - RNA, 25 nt, Artificial Sequence
  gRNA sequence
guuuacacacucccucucaugaggu

SEQ ID NO: 12 - RNA, 25 nt, Artificial Sequence
  gRNA sequence
uuuuacauacccccucucaugggau

SEQ ID NO: 13 - RNA, 25 nt, Artificial Sequence
  gRNA sequence
guuuacacacucccucucauggggg

SEQ ID NO: 14 - RNA, 20 nt, Artificial Sequence
  gRNA sequence
ccagcgacuaugucguaugg

SEQ ID NO: 15 - RNA, 39 nt, Artificial Sequence
  gRNA sequence
gcgcuuauuuaucggagagaaauccgauaaauaagaagc

SEQ ID NO: 16 - RNA, 74 nt, Artificial Sequence
  gRNA sequence
ggcgcuuuuaucucauuacuuugagagccaucaccagcgacuaugucguauggguaaagcgcuuauuuaucgga

SEQ ID NO: 17 - DNA, 20 bp, Artificial Sequence
  E6 spacer sequence
tgtggtcggggtagcggctg

SEQ ID NO: 18 - DNA, 20 bp, Artificial Sequence
  E7 spacer sequence
tcaagtccgccatgcccgaa

SEQ ID NO: 19 - RNA, 21 nt, Artificial Sequence
  stem loop sequence
  misc_feature (4)..(18): n is any ribonucleotide
  misc_feature (8)..(18): These individual nucleotides may be absent
uuunnnnnnnnnnnnnnnuuu

SEQ ID NO: 20 - RNA, 20 nt, Artificial Sequence
  scaffold stem loop
ccagcgacuaugucguaugg

SEQ ID NO: 21 - RNA, 39 nt, Artificial Sequence; identical to SEQ ID NO: 15
  extended stem loop

SEQ ID NO: 22 - RNA, 81 nt, Unknown; identical to SEQ ID NO: 6
  Deltaproteobacter sp.

SEQ ID NO: 23 - RNA, 78 nt, Unknown; identical to SEQ ID NO: 7
  Deltaproteobacter sp.

SEQ ID NO: 24 - RNA, 23 nt, Unknown
  Deltaproteobacter sp.
ccgauaaguaaaacgcaucaaag

SEQ ID NO: 25 - RNA, 80 nt, Unknown; identical to SEQ ID NO: 8
  Planctomycetes sp.

SEQ ID NO: 26 - RNA, 77 nt, Unknown; identical to SEQ ID NO: 9
  Planctomycetes sp.

SEQ ID NO: 27 - RNA, 26 nt, Unknown
  Planctomycetes sp.
ucuccgauaaauaagaagcaucaaag

SEQ ID NO: 28 - RNA, 25 nt, Unknown
  Candidatus Sungbacteria sp.
guuuacacacucccucucauagggu

SEQ ID NO: 29 - RNA, 25 nt, Unknown
  Candidatus Sungbacteria sp.
guuuacacacucccucucaugaggu

SEQ ID NO: 30 - RNA, 25 nt, Unknown
  Candidatus Sungbacteria sp.
uuuuacauacccccucucaugggau

SEQ ID NO: 31 - RNA, 25 nt, Unknown
  Candidatus Sungbacteria sp.
guuuacacacucccucucauggggg

SEQ ID NO: 32 - RNA, 21 nt, Artificial Sequence
  scaffold stem loop
ccagcgacuaugucguagugg

SEQ ID NO: 33 - protein, 348 aa, Homo sapiens [sequence omitted]

SEQ ID NO: 34 - protein, 348 aa, Homo sapiens
MNGTEGPNFYVPFSNATGVVRSHFEYPQYYLAEPWQFSMLAAYMFLLIVLGFPINFLTLYVTVQHKKLRTPLNYILLNLAVADLFMVLGGFTSTLYTSLHGYFVFGPTGCNLEGFFATLGGEIALWSLVVLAIERYVVVCKPMSNFRFGENHAIMGVAFTWVMALACAAPPLAGWSRYIPEGLQCSCGIDYYTLKPEVNNESFVIYMFVVHFTIPMIIIFFCYGQLVFTVKEAAAQQQESATTQKAEKEVTRMVIIMVIAFLICWVPYASVAFYIFTHQGSNFGPIFMTIPAFFAKSAAIYNPVIYIMMNKQFRNCMLTTICCGKNPLGDDEASATVSKTETSQVAPA

SEQ ID NO: 35 - RNA, 19 nt, Artificial Sequence
  MS2 stem loop
acaugaggauuacccaugu

SEQ ID NO: 36 - RNA, 18 nt, Artificial Sequence
  Qbeta stem loop
ugcaugucuaagacagca

SEQ ID NO: 37 - RNA, 20 nt, Artificial Sequence
  U1 hairpin II stem loop
aauccauugcacuccggauu

SEQ ID NO: 38 - RNA, 12 nt, Artificial Sequence
  Uvsx stem loop
ccucuucggagg

SEQ ID NO: 39 - RNA, 21 nt, Artificial Sequence
  PP7 stem loop
aggaguuucuauggaaacccu

SEQ ID NO: 40 - RNA, 30 nt, Artificial Sequence
  phage replication loop
aggugggacgaccucucggucguccuaucu

SEQ ID NO: 41 - RNA, 19 nt, Artificial Sequence
  kissing loop a
ugcucgcuccguucgagca

SEQ ID NO: 42 - RNA, 21 nt, Artificial Sequence
  kissing loop b1
ugcucgacgcguccucgagca

SEQ ID NO: 43 - RNA, 22 nt, Artificial Sequence
  kissing loop b2
ugcucguuugcggcuacgagca

SEQ ID NO: 44 - RNA, 17 nt, Artificial Sequence
  G quadriplex M3q
agggagggagggagagg

SEQ ID NO: 45 - RNA, 19 nt, Artificial Sequence
  G quadriplex telomere basket
gguuaggguuaggguuagg

SEQ ID NO: 46 - RNA, 25 nt, Artificial Sequence
  Sarcin-ricin loop
cugcucaguacgagaggaaccgcag

SEQ ID NO: 47 - RNA, 78 nt, Artificial Sequence
  pseudoknots
uacacugggaucgcugaauuagagaucggcguccuuucauucuauauacuuuggaguuuuaaaaugucucuaaguaca

SEQ ID NO: 48 - protein, 4 aa, Artificial Sequence
  CXXC zing finger/ribbon domain
  MISC_FEATURE (2)..(3): Xaa is any amino acid
CXXC

SEQ ID NO: 49 - protein, 978 aa, Artificial Sequence
  CasX variant
MQEIKRINKIRRRLVKDSNTKKAGKTGPMKTLLVRVMTPDLRERLENLRKKPENIPQPISNTSRANLNKLLTDYTEMKKAILHVYWEEFQKDPVGLMSRVAQPASKKIDQNKLKPEMDEKGNLTTAGFACSQCGQPLFVYKLEQVSEKGKAYTNYFGRCNVAEHEKLILLAQLKPEKDSDEAVTYSLGKFGQRALDFYSIHVTRESNHPVKPLEQIGGNSCASGPVGKALSDACMGAVASFLTKYQDIILEHQKVIKKNEKRLANLKDIASANGLAFPKITLPPQPHTKEGIEAYNNVVAQIVIWVNLNLWQKLKIGRDEAKPLQRLKGFPSFPLVERQANEVDWWDMVCNVKKLINEKKEDGKVFWQNLAGYKRQEALRPYLSSEEDRKKGKKFARYQFGDLLLHLEKKHGEDWGKVYDEAWERIDKKVEGLSKHIKLEEERRSEDAQSKAALTDWLRAKASFVIEGLKEADKDEFCRCELKLQKWYGDLRGKPFAIEAENSILDISGFSKQYNCAFIWQKDGVKKLNLYLIINYFKGGKLRFKKIKPEAFEANRFYTVINKKSGEIVPMEVNFNFDDPNLIILPLAFGKRQGREFIWNDLLSLETGSLKLANGRVIEKTLYNRRTRQDEPALFVALTFERREVLDSSNIKPMNLIGIDRGENIPAVIALTDPEGCPLSRFKDSLGNPTHILRIGESYKEKQRTIQAKKEVEQRRAGGYSRKYASKAKNLADDMVRNTARDLLYYAVTQDAMLIFENLSRGFGRQGKRTFMAERQYTRMEDWLTAKLAYEGLSKTYLSKTLAQYTSKTCSNCGFTITSADYDRVLEKLKKTATGWMTTINGKELKVEGQITYYNRYKRQNVVKDLSVELDRLSEESVNNDISSWTKGRSGEALSLLKKRFSHRPVQEKFVCLNCGFETHADEQAALNIARSWLFLRSQEYKKYQTNKTTGNTDKRAFVETWQSFYRKKLKEVWKPAV

SEQ ID NO: 50 - protein, 977 aa, Artificial Sequence
  CasX variant
MQEIKRINKIRRRLVKDSNTKKAGKTGPMKTLLVRVMTPDLRERLENLRKKPENIPQPISNTSRANLNKLLTDYTEMKKAILHVYWEEFQKDPVGLMSRVAQPAPKNIDQRKLIPVKDGNERLTSSGFACSQCCQPLYVYKLEQVNDKGKPHTNYFGRCNVSEHERLILLSPHKPEANDELVTYSLGKFGQRALDFYSIHVTRESNHPVKPLEQIGGNSCASGPVGKALSDACMGAVASFLTKYQDIILEHQKVIKKNEKRLANLKDIASANGLAFPKITLPPQPHTKEGIEAYNNVVAQIVIWVNLNLWQKLKIGRDEAKPLQRLKGFPSFPLVERQANEVDWWDMVCNVKKLINEKKEDGKVFWQNLAGYKRQEALRPYLSSEEDRKKGKKFARYQFGDLLLHLEKKHGEDWGKVYDEAWERIDKKVEGLSKHIKLEEERRSEDAQSKAALTDWLRAKASFVIEGLKEADKDEFCRCELKLQKWYGDLRGKPFAIEAENSILDISGFSKQYNCAFIWQKDGVKKLNLYLIINYFKGGKLRFKKIKPEAFEANRFYTVINKKSGEIVPMEVNFNFDDPNLIILPLAFGKRQGREFIWNDLLSLETGSLKLANGRVIEKTLYNRRTRQDEPALFVALTFERREVLDSSNIKPMNLIGIDRGENIPAVIALTDPEGCPLSRFKDSLGNPTHILRIGESYKEKQRTIQAKKEVEQRRAGGYSRKYASKAKNLADDMVRNTARDLLYYAVTQDAMLIFENLSRGFGRQGKRTFMAERQYTRMEDWLTAKLAYEGLSKTYLSKTLAQYTSKTCSNCGFTITTADYDGMLVRLKKTSDGWATTLNNKELKAEGQITYYNRYKRQTVEKELSAELDRLSEESGNNDISKWTKGRRDEALFLLKKRFSHRPVQEQFVCLDCGHEVHADEQAALNIARSWLFLRSQEYKKYQTNKTTGNTDKRAFVETWQSFYRKKLKEVWKPAV

SEQ ID NO: 51 - protein, 985 aa, Artificial Sequence
  CasX variant
MEKRINKIRKKLSADNATKPVSRSGPMKTLLVRVMTDDLKKRLEKRRKKPEVMPQVISNNAANNLRMLLDDYTKMKEAILQVYWQEFKDDHVGLMCKFAQPAPKNIDQRKLIPVKDGNERLTSSGFACSQCCQPLYVYKLEQVNDKGKPHTNYFGRCNVSEHERLILLSPHKPEANDELVTYSLGKFGQRALDFYSIHVTKESTHPVKPLAQIAGNRYASGPVGKALSDACMGTIASFLSKYQDIIIEHQKVVKGNQKRLESLRELAGKENLEYPSVTLPPQPHTKEGVDAYNEVIARVRMWVNLNLWQKLKLSRDDAKPLLRLKGFPSFPVVERRENEVDWWNTINEVKKLIDAKRDMGRVFWSGVTAEKRNTILEGYNYLPNENDHKKREGSLENPKKPAKRQFGDLLLYLEKKYAGDWGKVFDEAWERIDKKIAGLTSHIEREEARNAEDAQSKAVLTDWLRAKASFVLERLKEMDEKEFYACEIQLQKWYGDLRGNPFAVEAENRVVDISGFSIGSDGHSIQYRNLLAWKYLENGKREFYLLMNYGKKGRIRFTDGTDIKKSGKWQGLLYGGGKAKVIDLTFDPDDEQLIILPLAFGTRQGREFIWNDLLSLETGLIKLANGRVIEKTIYNKKIGRDEPALFVALTFERREVVDPSNIKPVNLIGVDRGENIPAVIALTDPEGCPLPEFKDSSGGPTDILRIGEGYKEKQRAIQAAKEVEQRRAGGYSRKFASKSRNLADDMVRNSARDLFYHAVTHDAVLVFENLSRGFGRQGKRTFMTERQYTKMEDWLTAKLAYEGLTSKTYLSKTLAQYTSKTCSNCGFTITTADYDGMLVRLKKTSDGWATTLNNKELKAEGQITYYNRYKRQTVEKELSAELDRLSEESGNNDISKWTKGRRDEALFLLKKRFSHRPVQEQFVCLDCGHEVHADEQAALNIARSWLFLNSNSTEFKSYKSGKQPFVGAWQAFYKRRLKEVWKPNA

SEQ ID NO: 52 - protein, 986 aa, Artificial Sequence
  CasX variant
MEKRINKIRKKLSADNATKPVSRSGPMKTLLVRVMTDDLKKRLEKRRKKPEVMPQVISNNAANNLRMLLDDYTKMKEAILQVYWQEFKDDHVGLMCKFAQPASKKIDQNKLKPEMDEKGNLTTAGFACSQCGQPLFVYKLEQVSEKGKAYTNYFGRCNVAEHEKLILLAQLKPEKDSDEAVTYSLGKFGQRALDFYSIHVTKESTHPVKPLAQIAGNRYASGPVGKALSDACMGTIASFLSKYQDIIIEHQKVVKGNQKRLESLRELAGKENLEYPSVTLPPQPHTKEGVDAYNEVIARVRMWVNLNLWQKLKLSRDDAKPLLRLKGFPSFPVVERRENEVDWWNTINEVKKLIDAKRDMGRVFWSGVTAEKRNTILEGYNYLPNENDHKKREGSLENPKKPAKRQFGDLLLYLEKKYAGDWGKVFDEAWERIDKKIAGLTSHIEREEARNAEDAQSKAVLTDWLRAKASFVLERLKEMDEKEFYACEIQLQKWYGDLRGNPFAVEAENRVVDISGFSIGSDGHSIQYRNLLAWKYLENGKREFYLLMNYGKKGRIRFTDGTDIKKSGKWQGLLYGGGKAKVIDLTFDPDDEQLIILPLAFGTRQGREFIWNDLLSLETGLIKLANGRVIEKTIYNKKIGRDEPALFVALTFERREVVDPSNIKPVNLIGVDRGENIPAVIALTDPEGCPLPEFKDSSGGPTDILRIGEGYKEKQRAIQAAKEVEQRRAGGYSRKFASKSRNLADDMVRNSARDLFYHAVTHDAVLVFENLSRGFGRQGKRTFMTERQYTKMEDWLTAKLAYEGLTSKTYLSKTLAQYTSKTCSNCGFTITSADYDRVLEKLKKTATGWMTTINGKELKVEGQITYYNRYKRQNVVKDLSVELDRLSEESVNNDISSWTKGRSGEALSLLKKRFSHRPVQEKFVCLNCGFETHADEQAALNIARSWLFLNSNSTEFKSYKSGKQPFVGAWQAFYKRRLKEVWKPNA

SEQ ID NO: 53 - protein, 921 aa, Artificial Sequence
  CasX variant
MQEIKRINKIRRRLVKDSNTKKAGKTGPMKTLLVRVMTPDLRERLENLRKKPENIPQPISNTSRANLNKLLTDYTEMKKAILHVYWEEFQKDPVGLMSRVAQPAPKNIDQRKLIPVKDGNERLTSSGFACSQCCQPLYVYKLEQVNDKGKPHTNYFGRCNVSEHERLILLSPHKPEANDELVTYSLGKFGQRALDFYSIHVTRESNHPVKPLEQIGGNSCASGPVGKALSDACMGAVASFLTKYQDIILEHQKVIKKNEKRLANLKDIASANGLAFPKITLPPQPHTKEGIEAYNNVVAQIVIWVNLNLWQKLKIGRDEAKPLQRLKGFPSFPLVERQANEVDWWDMVCNVKKLINEKKEDGKVFWQNLAGYKRQEALRPYLSSEEDRKKGKKFARYQFGDLLLHLEKKHGEDWGKVYDEAWERIDKKVEGLSKHIKLEEERRSEDAQSKAALTDWLRAKASFVIEGLKEADKDEFCRCELKLQKWYGDLRGKPFAIEAENSILDISGFSKQYNCAFIWQKDGVKKLNLYLIINYFKGGKLRFKKIKPEAFEANRFYTVINKKSGEIVPMEVNFNFDDPNLIILPLAFGKRQGREFIWNDLLSLETGSLKLANGRVIEKTLYNRRTRQDEPALFVALTFERREVLDSSNIKPVNLIGVDRGENIPAVIALTDPEGCPLPEFKDSSGGPTDILRIGEGYKEKQRAIQAAKEVEQRRAGGYSRKFASKSRNLADDMVRNSARDLFYHAVTHDAVLVFENLSRGFGRQGKRTFMTERQYTKMEDWLTAKLAYEGLTSKTYLSKTLAQYTSKTCSNCGFTITSADYDRVLEKLKKTATGWMTTINGKELKVEGQITYYNRYKRQNVVKDLSVELDRLSEESVNNDISSWTKGRSGEALSLLKKRFSHRPVQEKFVCLNCGFETHA

SEQ ID NO: 54 - protein, 920 aa, Artificial Sequence
  CasX variant
MQEIKRINKIRRRLVKDSNTKKAGKTGPMKTLLVRVMTPDLRERLENLRKKPENIPQPISNTSRANLNKLLTDYTEMKKAILHVYWEEFQKDPVGLMSRVAQPAPKNIDQRKLIPVKDGNERLTSSGFACSQCCQPLYVYKLEQVNDKGKPHTNYFGRCNVSEHERLILLSPHKPEANDELVTYSLGKFGQRALDFYSIHVTRESNHPVKPLEQIGGNSCASGPVGKALSDACMGAVASFLTKYQDIILEHQKVIKKNEKRLANLKDIASANGLAFPKITLPPQPHTKEGIEAYNNVVAQIVIWVNLNLWQKLKIGRDEAKPLQRLKGFPSFPLVERQANEVDWWDMVCNVKKLINEKKEDGKVFWQNLAGYKRQEALRPYLSSEEDRKKGKKFARYQFGDLLLHLEKKHGEDWGKVYDEAWERIDKKVEGLSKHIKLEEERRSEDAQSKAALTDWLRAKASFVIEGLKEADKDEFCRCELKLQKWYGDLRGKPFAIEAENSILDISGFSKQYNCAFIWQKDGVKKLNLYLIINYFKGGKLRFKKIKPEAFEANRFYTVINKKSGEIVPMEVNFNFDDPNLIILPLAFGKRQGREFIWNDLLSLETGSLKLANGRVIEKTLYNRRTRQDEPALFVALTFERREVLDSSNIKPMNLIGIDRGENIPAVIALTDPEGCPLSRFKDSLGNPTHILRIGESYKEKQRTIQAKKEVEQRRAGGYSRKYASKAKNLADDMVRNTARDLLYYAVTQDAMLIFENLSRGFGRQGKRTFMAERQYTRMEDWLTAKLAYEGLSKTYLSKTLAQYTSKTCSNCGFTITSADYDRVLEKLKKTATGWMTTINGKELKVEGQITYYNRYKRQNVVKDLSVELDRLSEESVNNDISSWTKGRSGEALSLLKKRFSHRPVQEKFVCLNCGFETHA

SEQ ID NO: 55 - protein, 977 aa, Artificial Sequence
  CasX variant
MQEIKRINKIRRRLVKDSNTKKAGKTGPMKTLLVRVMTPDLRERLENLRKKPENIPQPISNNAANNLRMLLDDYTKMKEAILQVYWQEFKDDHVGLMCKFAQPAPKNIDQRKLIPVKDGNERLTSSGFACSQCCQPLYVYKLEQVNDKGKPHTNYFGRCNVSEHERLILLSPHKPEANDELVTYSLGKFGQRALDFYSIHVTKESTHPVKPLAQIAGNRYASGPVGKALSDACMGTIASFLSKYQDIIIEHQKVVKGNQKRLESLRELAGKENLEYPSVTLPPQPHTKEGVDAYNEVIARVRMWVNLNLWQKLKLSRDDAKPLLRLKGFPSFPLVERQANEVDWWDMVCNVKKLINEKKEDGKVFWQNLAGYKRQEALRPYLSSEEDRKKGKKFARYQFGDLLLHLEKKHGEDWGKVYDEAWERIDKKVEGLSKHIKLEEERRSEDAQSKAALTDWLRAKASFVIEGLKEADKDEFCRCELKLQKWYGDLRGKPFAIEAENSILDISGFSKQYNCAFIWQKDGVKKLNLYLIINYFKGGKLRFKKIKPEAFEANRFYTVINKKSGEIVPMEVNFNFDDPNLIILPLAFGKRQGREFIWNDLLSLETGSLKLANGRVIEKTLYNRRTRQDEPALFVALTFERREVLDSSNIKPMNLIGIDRGENIPAVIALTDPEGCPLSRFKDSLGNPTHILRIGESYKEKQRTIQAKKEVEQRRAGGYSRKYASKAKNLADDMVRNTARDLLYYAVTQDAMLIFENLSRGFGRQGKRTFMAERQYTRMEDWLTAKLAYEGLSKTYLSKTLAQYTSKTCSNCGFTITSADYDRVLEKLKKTATGWMTTINGKELKVEGQITYYNRYKRQNVVKDLSVELDRLSEESVNNDISSWTKGRSGEALSLLKKRFSHRPVQEKFVCLNCGFETHADEQAALNIARSWLFLRSQEYKKYQTNKTTGNTDKRAFVETWQSFYRKKLKEVWKPAV

SEQ ID NO: 56 - protein, 986 aa, Artificial Sequence
  CasX variant
MQEIKRINKIRRRLVKDSNTKKAGKTGPMKTLLVRVMTPDLRERLENLRKKPENIPQPISNTSRANLNKLLTDYTEMKKAILHVYWEEFQKDPVGLMSRVAQPAPKNIDQRKLIPVKDGNERLTSSGFACSQCCQPLYVYKLEQVNDKGKPHTNYFGRCNVSEHERLILLSPHKPEANDELVTYSLGKFGQRALDFYSIHVTRESNHPVKPLEQIGGNSCASGPVGKALSDACMGAVASFLTKYQDIILEHQKVIKKNEKRLANLKDIASANGLAFPKITLPPQPHTKEGIEAYNNVVAQIVIWVNLNLWQKLKIGRDEAKPLQRLKGFPSFPVVERRENEVDWWNTINEVKKLIDAKRDMGRVFWSGVTAEKRNTILEGYNYLPNENDHKKREGSLENPKKPAKRQFGDLLLYLEKKYAGDWGKVFDEAWERIDKKIAGLTSHIEREEARNAEDAQSKAVLTDWLRAKASFVLERLKEMDEKEFYACEIQLQKWYGDLRGNPFAVEAENSILDISGFSKQYNCAFIWQKDGVKKLNLYLIINYFKGGKLRFKKIKPEAFEANRFYTVINKKSGEIVPMEVNFNFDDPNLIILPLAFGKRQGREFIWNDLLSLETGSLKLANGRVIEKTLYNRRTRQDEPALFVALTFERREVLDSSNIKPMNLIGIDRGENIPAVIALTDPEGCPLSRFKDSLGNPTHILRIGESYKEKQRTIQAKKEVEQRRAGGYSRKYASKAKNLADDMVRNTARDLLYYAVTQDAMLIFENLSRGFGRQGKRTFMAERQYTRMEDWLTAKLAYEGLSKTYLSKTLAQYTSKTCSNCGFTITSADYDRVLEKLKKTATGWMTTINGKELKVEGQITYYNRYKRQNVVKDLSVELDRLSEESVNNDISSWTKGRSGEALSLLKKRFSHRPVQEKFVCLNCGFETHADEQAALNIARSWLFLRSQEYKKYQTNKTTGNTDKRAFVETWQSFYRKKLKEVWKPAV

SEQ ID NO: 57 - protein, 925 aa, Artificial Sequence
  CasX variant
MISNTSRANLNKLLTDYTEMKKAILHVYWEEFQKDPVGLMSRVAQPAPKNIDQRKLIPVKDGNERLTSSGFACSQCCQPLYVYKLEQVNDKGKPHTNYFGRCNVSEHERLILLSPHKPEANDELVTYSLGKFGQRALDFYSIHVTRESNHPVKPLEQIGGNSCASGPVGKALSDACMGAVASFLTKYQDIILEHQKVIKKNEKRLANLKDIASANGLAFPKITLPPQPHTKEGIEAYNNVVAQIVIWVNLNLWQKLKIGRDEAKPLQRLKGFPSFPLVERQANEVDWWDMVCNVKKLINEKKEDGKVFWQNLAGYKRQEALRPYLSSEEDRKKGKKFARYQFGDLLLHLEKKHGEDWGKVYDEAWERIDKKVEGLSKHIKLEEERRSEDAQSKAALTDWLRAKASFVIEGLKEADKDEFCRCELKLQKWYGDLRGKPFAIEAENRVVDISGFSIGSDGHSIQYRNLLAWKYLENGKREFYLLMNYGKKGRIRFTDGTDIKKSGKWQGLLYGGGKAKVIDLTFDPDDEQLIILPLAFGTRQGREFIWNDLLSLETGLIKLANGRVIEKTIYNKKIGRDEPALFVALTFERREVVDPSNIKPMNLIGIDRGENIPAVIALTDPEGCPLSRFKDSLGNPTHILRIGESYKEKQRTIQAKKEVEQRRAGGYSRKYASKAKNLADDMVRNTARDLLYYAVTQDAMLIFENLSRGFGRQGKRTFMAERQYTRMEDWLTAKLAYEGLSKTYLSKTLAQYTSKTCSNCGFTITSADYDRVLEKLKKTATGWMTTINGKELKVEGQITYYNRYKRQNVVKDLSVELDRLSEESVNNDISSWTKGRSGEALSLLKKRFSHRPVQEKFVCLNCGFETHADEQAALNIARSWLFLRSQEYKKYQTNKTTGNTDKRAFVETWQSFYRKKLKEVWKPAV

SEQ ID NO: 58 - protein, 975 aa, Artificial Sequence
  CasX variant
MEKRINKIRKKLSADNATKPVSRSGPMKTLLVRVMTDDLKKRLEKRRKKPEVMPQVISNTSRANLNKLLTDYTEMKKAILHVYWEEFQKDPVGLMSRVAQPAPKNIDQRKLIPVKDGNERLTSSGFACSQCCQPLYVYKLEQVNDKGKPHTNYFGRCNVSEHERLILLSPHKPEANDELVTYSLGKFGQRALDFYSIHVTRESNHPVKPLEQIGGNSCASGPVGKALSDACMGAVASFLTKYQDIILEHQKVIKKNEKRLANLKDIASANGLAFPKITLPPQPHTKEGIEAYNNVVAQIVIWVNLNLWQKLKIGRDEAKPLQRLKGFPSFPLVERQANEVDWWDMVCNVKKLINEKKEDGKVFWQNLAGYKRQEALRPYLSSEEDRKKGKKFARYQFGDLLLHLEKKHGEDWGKVYDEAWERIDKKVEGLSKHIKLEEERRSEDAQSKAALTDWLRAKASFVIEGLKEADKDEFCRCELKLQKWYGDLRGKPFAIEAENSILDISGFSKQYNCAFIWQKDGVKKLNLYLIINYFKGGKLRFKKIKPEAFEANRFYTVINKKSGEIVPMEVNFNFDDPNLIILPLAFGKRQGREFIWNDLLSLETGSLKLANGRVIEKTLYNRRTRQDEPALFVALTFERREVLDSSNIKPMNLIGIDRGENIPAVIALTDPEGCPLSRFKDSLGNPTHILRIGESYKEKQRTIQAKKEVEQRRAGGYSRKYASKAKNLADDMVRNTARDLLYYAVTQDAMLIFENLSRGFGRQGKRTFMAERQYTRMEDWLTAKLAYEGLSKTYLSKTLAQYTSKTCSNCGFTITSADYDRVLEKLKKTATGWMTTINGKELKVEGQITYYNRYKRQNVVKDLSVELDRLSEESVNNDISSWTKGRSGEALSLLKKRFSHRPVQEKFVCLNCGFETHADEQAALNIARSWLFLRSQEYKKYQTNKTTGNTDKRAFVETWQSFYRKKLKEVWKPAV

SEQ ID NO: 59 - protein, 982 aa, Artificial Sequence
  CasX variant
MQEIKRINKIRRRLVKDSNTKKAGKTGPMKTLLVRVMTPDLRERLENLRKKPENIPQPISNTSRANLNKLLTDYTEMKKAILHVYWEEFQKDPVGLMSRVAQPAPKNIDQRKLIPVKDGNERLTSSGFACSQCCQPLYVYKLEQVNDKGKPHTNYFGRCNVSEHERLILLSPHKPEANDELVTYSLGKFGQRALDFYSIHVTRESNHPVKPLEQIGGNSCASGPVGKALSDACMGAVASFLTKYQDIILEHQKVIKKNEKRLANLKDIASANGLAFPKITLPPQPHTKEGIEAYNNVVAQIVIWVNLNLWQKLKIGRDEAKPLQRLKGFPSFPLVERQANEVDWWDMVCNVKKLINEKKEDGKVFWQNLAGYKRQEALRPYLSSEEDRKKGKKFARYQFGDLLLHLEKKHGEDWGKVYDEAWERIDKKVEGLSKHIKLEEERRSEDAQSKAALTDWLRAKASFVIEGLKEADKDEFCRCELKLQKWYGDLRGKPFAIEAENRVVDISGFSIGSDGHSIQYRNLLAWKYLENGKREFYLLMNYGKKGRIRFTDGTDIKKSGKWQGLLYGGGKAKVIDLTFDPDDEQLIILPLAFGTRQGREFIWNDLLSLETGLIKLANGRVIEKTIYNKKIGRDEPALFVALTFERREVVDPSNIKPMNLIGIDRGENIPAVIALTDPEGCPLSRFKDSLGNPTHILRIGESYKEKQRTIQAKKEVEQRRAGGYSRKYASKAKNLADDMVRNTARDLLYYAVTQDAMLIFENLSRGFGRQGKRTFMAERQYTRMEDWLTAKLAYEGLSKTYLSKTLAQYTSKTCSNCGFTITSADYDRVLEKLKKTATGWMTTINGKELKVEGQITYYNRYKRQNVVKDLSVELDRLSEESVNNDISSWTKGRSGEALSLLKKRFSHRPVQEKFVCLNCGFETHADEQAALNIARSWLFLRSQEYKKYQTNKTTGNTDKRAFVETWQSFYRKKLKEVWKPAV

SEQ ID NO: 60 - protein, 977 aa, Artificial Sequence
  CasX variant
MQEIKRINKIRRRLVKDSNTKKAGKTGPMKTLLVRVMTPDLRERLENLRKKPENIPQPISNTSRANLNKLLTDYTEMKKAILHVYWEEFQKDPVGLMSRVAQPAPKNIDQRKLIPVKDGNERLTSSGFACSQCCQPLYVYKLEQVNDKGKPHTNYFGRCNVSEHERLILLSPHKPEANDELVTYSLGKFGQRALDFYSIHVTRESNHPVKPLEQIGGNSCASGPVGKALSDACMGAVASFLTKYQDIILEHQKVIKKNEKRLANLKDIASANGLAFPKITLPPQPHTKEGIEAYNNVVAQIVIWVNLNLWQKLKIGRDEAKPLQRLKGFPSFPLVERQANEVDWWDMVCNVKKLINEKKEDGKVFWQNLAGYKRQEALRPYLSSEEDRKKGKKFARYQFGDLLLHLEKKHGEDWGKVYDEAWERIDKKVEGLSKHIKLEEERRSEDAQSKAALTDWLRAKASFVIEGLKEADKDEFKRCELKLQKWYGDLRGKPFAIEAENSILDISGFSKQYNCAFIWQKDGVKKLNLYLIINYFKGGKLRFKKIKPEAFEANRFYTVINKKSGEIVPMEVNFNFDDPNLIILPLAFGKRQGREFIWNDLLSLETGSLKLANGRVIEKPLYNRRTRQDEPALFVALTFERREVLDSSNIKPMNLIGIDRGENIPAVIALTDPEGCPLSRFKDSLGNPTHILRIGESYKEKQRTIQAKKEVEQRRAGGYSRKYASKAKNLADDMVRNTARDLLYYAVTQDAMLIFENLSRGFGRQGKRTFMAERQYTRMEDWLTAKLAYEGLSKTYLSKTLAQYTSKTCSNCGFTITSADYDRVLEKLKKTATGWMTTINGKELKVEGQITYYNRYKRQNVVKDLSVELDRLSEESVNNDISSWTKGRSGEALSLLKKRFSHRPVQEKFVCLNCGFETHADEQAALNIARSWLFLRSQEYKKYQTNKTTGNTDKRAFVETWQSFYRKKLKEVWKPAV

SEQ ID NO: 61 - protein, 977 aa, Artificial Sequence
  CasX variant
MQEIKRINKIRRRLVKDSNTKKAGKTGPMKTLLVRVMTPDLRERLENLRKKPENIPQPISNTSRANLNKLLTDYTEMKKAILHVYWEEFQKDPVGLMSRVAQPAPKNIDQRKLIPVKDGNERLTSSGFACSQCCQPLYVYKLEQVNDKGKPHTNYFGRCNVSEHERLILLSPHKPEANDELVTYSLGKFGQRALDFYSIHVTRESNHPVKPLEQIGGNSCASGPVGKALSDACMGAVASFLTKYQDIILEHQKVIKKNEKRLANLKDIASANGLAFPKITLPPQPHTKEGIEAYNNVVAQIVIWVNLNLWQKLKIGRDEAKPLQRLKGFPSFPLVERQANEVDWWDMVCNVKKLINEKKEDGKVFWQNLAGYKRQEALLPYLSSEEDRKKGKKFARYQFGDLLLHLEKKHGEDWGKVYDEAWERIDKKVEGLSKHIKLEEERRSEDAQSKAALTDWLRAKASFVIEGLKEADKDEFCRCELKLQKWYGDLRGKPFAIEAENSILDISGFSKQYNCAFIWQKDGVKKLNLYLIINYFKGGKLRFKKIKPEAFEANRFYTVINKKSGEIVPMEVNFNFDDPNLIILPLAFGKRQGREFIWNDLLSLETGSLKLANGRVIEKTLYNRRTRQDEPALFVALTFERREVLDSSNIKPMNLIGIDRGENIPAVIALTDPEGCPLSRFKDSLGNPTHILRIGESYKEKQRTIQAAKEVEQRRAGGYSRKYASKAKNLADDMVRNTARDLLYYAVTQDAMLIFENLSRGFGRQGKRTFAAERQYTRMEDWLTAKLAYEGLPSKTYLSKTLAQYTSKTCSNCGFTITSADYDRVLEKLKKTATGWMTTINGKELKVEGQITYYNRYKRQNVVKDLSVELDRLSEESVNNDISSWTKGRSGEALSLLKKRFSHRPVQEKFVCLNCGFETHADEQAALNIARSWLFLRSQEYKKYQTNKTTGNTDKRAFVETWQSFYRKKLKEVWKPA

SEQ ID NO: 62 - protein, 977 aa, Artificial Sequence
  CasX variant
MQEIKRINKIRRRLVKDSNTKKAGKTGPMKTLLVRVMTPDLRERLENLRKKPENIPQPISNTSRANLNKLLTDYTEMKKAILHVYWEEFQKDPVGLMSRVAQPAPKNIDQRKLIPVKDGNERLTSSGFACSQCCQPLYVYKLEQVNDKGKPHTNYFGRCNVSEHERLILLSPHKPEANDELVTYSLGKFGQRALDFYSIHVTRESNHPVKPLEQIGGNSCASGPVGKALSDACMGAVASFLTKYQDIILEHQKVIKKNEKRLANLKDIASANGLAFPKITLPPQPHTKEGIEAYNNVVAQIVIWVNLNLWQKLKIGRDEAKPLQRLKGFPSFPLVERQANEVDWWDMVCNVKKLINEKKEDGKVFWQNLAGYKRQEALRPYLSSEEDRKKGKKFARYQFGDLLLHLEKKHGEDWGKVYDEAWERIDKKVEGLSKHIKLEEERRSEDAQSKAALTDWLRAKASFVIEGLKEADKDEFCRCELKLQKWYGDLRGKPFAIEAENSILDISGFSKQYNCAFIWQKDGVKKLNLYLIINYFKGGKLRFKKIKPEAFEANRFYTVINKKSGEIVPMEVNFNFDDPNLIILPLAFGKRQGREFIWNDLLSLETGSLKLANGRVIEKTLYNRRTRQDEPALFVALTFERREVLDSSNIKPMNLIGIDRGENIPAVIALTDPEGCPLSRFKDSLGNPTHILRIGESYKEKQRTIQAKKEVEQRRAGGYSRKYASKAKNLANDMVRNTARDLLYYAVTQDAMLIFENLSRGFGRQGKRTFMAERQYTRMEDWLTAKLAYEGLSKTYLSKTLAQYTSKTCSNCGFTITSADYDRVLEKLKKTATGWMTTINGKELKVEGQITYYNRYKRQNVVKDLSVELDRLSEESVNNDISSWTKGRSGEALSLLKKRFSHRPVQEKFVCLNCGFETHADEQAALNIARSWLFLRSQEYKKYQTNKTTGNTDKRAFVETWQSFYRKKLKEVWKPAV

SEQ ID NO: 63 - protein, 978 aa, Artificial Sequence
  CasX variant
MQEIKRINKIRRRLVKDSNTKKAGKTGPMKTLLVRVMTPDLRERLENLRKKPENIPQPISNTSRANLNKLLTDYTEMKKAILHVYWEEFQKDPVGLMSRVAQPAPKNIDQRKLIPVKDGNERLTSSGFACSQCCQPLYVYKLEQVNDKGKPHTNYFGRCNVSEHERLILLSPHKPEANDELVTYSLGKFGQRALDFYSIHVTRESNHPVKPLEQIGGNSCASGPVGKALSDACMGAVASFLTKYQDIILEHQKVIKKNEKRLANLKDIASANGLAFPKITLPPQPHTKEGIEAYNNVVAQIVIWVNLNLWQKLKIGRDEAKPLQRLKGFPSFPLVERQANEVDWWDMVCNVKKLINEKKEDGKVFWQNLAGYKRQEALLPYLSSEEDRKKGKKFARYQFGDLLLHLEKKHGEDWGKVYDEAWERIDKKVEGLSKHIKLEEERRSEDAQSKAALTDWLRAKASFVIEGLKEADKDEFCRCELKLQKWYGDLRGKPFAIEAENSILDISGFSKQYNCAFIWQKDGVKKLNLYLIINYFKGGKLRFKKIKPEAFEANRFYTVINKKSGEIVPMEVNFNFDDPNLIILPLAFGKRQGREFIWNDLLSLETGSLKLANGRVIEKTLYNRRTRQDEPALFVALTFERREVLDSSNIKPMNLIGIDRGENIPAVIALTDPEGCPLSRFKDSLGNPTHILRIGESYKEKQRTIQAAKEVEQRRAGGYSRKYASKAKNLADDMVRNTARDLLYYAVTQDAMLIFENLSRGFGRQGKRTFMAERQYTRMEDQLTAKLAYEGLPSKTYLSKTLAQYTSKTCSNCGFTITSADYDRVLEKLKKTATGWMTTINGKELKVEGQITYYNRYKRQNVVKDLSVELDRLSEESVNNDISSWTKGRSGEALSLLKKRFSHRPVQEKFVCLNCGFETHADEQAALNIARSWLFLRSQEYKKYQTNKTTGNTDKRAFVETWQSFYRKKLKEVWKPAV

SEQ ID NO: 64 - protein, 978 aa, Artificial Sequence
  CasX variant
MQEIKRINKIRRRLVKDSNTKKAGKTGPMKTLLVRVMTPDLRERLENLRKKPENIPQPISNTSRANLNKLLTDYTEMKKAILHVYWEEFQKDPVGLMSRVAQPAPKNIDQRKLIPVKDGNERLTSSGFACSQCCQPLYVYKLEQVNDKGKPHTNYFGRCNVSEHERLILLSPHKPEANDELVTYSLGKFGQRALDFYSIHVTRESNHPVKPLEQIGGNSCASGPVGKALSDACMGAVASFLTKYQDIILEHQKVIKKNEKRLANLKDIASANGLAFPKITLPPQPHTKEGIEAYNNVVAQIVIWVNLNLWQKLKIGRDEAKPLQRLKGFPSFPLVERQANEVDWWDMVCNVKKLINEKKEDGKVFWQNLAGYKRQEALLPYLSSEEDRKKGKKFARYQFGDLLLHLEKKHGEDWGKVYDEAWERIDKKVEGLSKHIKLEEERRSEDAQSKAALTDWLRAKASFVIEGLKEADKDEFCRCELKLQKWYGDLRGKPFAIEAENSILDISGFSKQYNCAFIWQKDGVKKLNLYLIINYFKGGKLRFKKIKPEAFEANRFYTVINKKSGEIVPMEVNFNFDDPNLIILPLAFGKRQGREFIWNDLLSLETGSLKLANGRVIEKTLYNRRTRQDEPALFVALTFERREVLDSSNIKPMNLIGIDRGENIPAVIALTDPEGCPLSRFKDSLGNPTHILRIGESYKEKQRTIQAAKEVEQRRAGGYSRKYASKAKNLADDMVRNTARDLLYYAVTQDAMLIFENLSRGFGRQGKRTFQAERQYTRMEDWLTAKLAYEGLPSKTYLSKTLAQYTSKTCSNCGFTITSADYDRVLEKLKKTATGWMTTINGKELKVEGQITYYNRYKRQNVVKDLSVELDRLSEESVNNDISSWTKGRSGEALSLLKKRFSHRPVQEKFVCLNCGFETHADEQAALNIARSWLFLRSQEYKKYQTNKTTGNTDKRAFVETWQSFYRKKLKEVWKPAV

SEQ ID NO: 65 - protein, 978 aa, Artificial Sequence
  CasX variant
MQEIKRINKIRRRLVKDSNTKKAGKTGPMKTLLVRVMTPDLRERLENLRKKPENIPQPISNTSRANLNKLLTDYTEMKKAILHVYWEEFQKDPVGLMSRVAQPAPKNIDQRKLIPVKDGNERLTSSGFACSQCCQPLYVYKLEQVNDKGKPHTNYFGRCNVSEHERLILLSPHKPEANDELVTYSLGKFGQRALDFYSIHVTRESNHPVKPLEQIGGNSCASGPVGKALSDACMGAVASFLTKYQDIILEHQKVIKKNEKRLANLKDIASANGLAFPKITLPPQPHTKEGIEAYNNVVAQIVIWVNLNLWQKLKIGRDEAKPLQRLKGFPSFPLVERQANEVDWWDMVCNVKKLINEKKEDGKVFWQNLAGYKRQEALLPYLSSEEDRKKGKKFARYQFGDLLLHLEKKHGEDWGKVYDEAWERIDKKVEGLSKHIKLEEERRSEDAQSKAALTDWLIAKASFVIEGLKEADKDEFCRCELKLQKWYGDLRGKPFAIEAENSILDISGFSKQYNCAFIWQKDGVKKLNLYLIINYFKGGKLRFKKIKPEAFEANRFYTVINKKSGEIVPMEVNFNFDDPNLIILPLAFGKRQGREFIWNDLLSLETGSLKLANGRVIEKTLYNRRTRQDEPALFVALTFERREVLDSSNIKPMNLIGIDRGENIPAVIALTDPEGCPLSRFKDSLGNPTHILRIGESYKEKQRTIQAAKEVEQRRAGGYSRKYASKAKNLADDMVRNTVRDLLYYAVTQDAMLIFENLSRGFGRQGKRTFMAERQYTRMEDWLTAKLAYEGLPSKTYLSKTLAQYTSKTCSNCGFTITSADYDRVLEKLKKTATGWMTTINGKELKVEGQITYYNRYKRQNVVKDLSVELDRLSEESVNNDISSWTKGRSGEALSLLKKRFSHRPVQEKFVCLNCGFETHADEQAALNIARSWLFLRSQEYKKYQTNKTTGNTDKRAFVETWQSFYRKKLKEVWKPAV

SEQ ID NO: 66 - protein, 977 aa, Artificial Sequence
  CasX variant
MQEIKRINKIRRRLVKDSNTKKAGKTGPMKTLLVRVMTPDLRERLENLRKKPENIPQPISNTSRANLNKLLTDYTEMKKAILHVYWEEFQKDPVGLMSRVAQPAPKNIDQRKLIPVKDGNERLTSSGFACSQCCQPLYVYKLEQVNDKGKPHTNYFGRCNVSEHERLILLSPHKPEANDELVTYSLGKFGQRALDFYSIHVTRESNHPVKPLEQIGGNSCASGPVGKALSDACMGAVASFLTKYQDIILEHQKVIKKNEKRLANLKDIASANGLAFPKITLPPQPHTKEGIEAYNNVVAQIVIWVNLNLWQKLKIGRDEAKPLQRLKGFPSFPLVERQANEVDWWDMVCNVKKLINEKKEDGKVFWQNLAGYKRQEALRPYLSSEEDRKKGKKFARYQFGDLLLHLEKKHGEDWGKVYDEAWERIDKKVEGLSKHIKLEEERRSEDAQSKAALTDWLRAKASFVIEGLKEADKDEFCRCELKLQKWYGDLRGKPFAIEAENSILDISGFSKQYNCAFIWQKDGVKKLNLYLIINYFKGGKLRFKKIKPEAFEANRFYTVINKKSGEIVPMEVNFNFDDPNLIILPLAFGKRQGREFIWNDLLSLETGSLKLANGRVIEKTLYNRRTRQDEPALFVALTFERREVLDSSNIKPMNLIGIDRGENIPAVIALTDPEGCPLSRFKDSLGNPTHILRIGESYKEKQRTIQAKKEVEQRRAGGYSRKYASKAKNLADDMVRNTARDLLYYAVTQDAMLIFENLSRGFGRQGKRTFNAERQYTRMEDWLTAKLAYEGLSKTYLSKTLAQYTSKTCSNCGFTITSADYDRVLEKLKKTATGWMTTINGKELKVEGQITYYNRYKRQNVVKDLSVELDRLSEESVNNDISSWTKGRSGEALSLLKKRFSHRPVQEKFVCLNCGFETHADEQAALNIARSWLFLRSQEYKKYQTNKTTGNTDKRAFVETWQSFYRKKLKEVWKPAV

SEQ ID NO: 67 - protein, 977 aa, Artificial Sequence
  CasX variant
MQEIKRINKIRRRLVKDSNTKKAGKTGPMKTLLVRVMTPDLRERLENLRKKPENIPQPISNTSRANLNKLLTDYTEMKKAILHVYWEEFQKDPVGLMSRVAQPAPKNIDQRKLIPVKDGNERLTSSGFACSQCCQPLYVYKLEQVNDKGKPHTNYFGRCNVSEHERLILLSPHKPEANDELVTYSLGKFGQRALDFYSIHVTRESNHPVKPLEQIGGNSCASGPVGKALSDACMGAVASFLTKYQDIILEHQKVIKKNEKRLANLKDIASANGLAFPKITLPPQPHTKEGIEAYNNVVAQIVIWVNLNLWQKLKIGRDEAKPLQRLKGFPSFPLVERQANEVDWWDMVCNVKKLINEKKEDGKVFWQNLAGYKRQEALRPYLSSEEDRKKGKKFARYQFGDLLLHLEKKHGEDWGKVYDEAWERIDKKVEGLSKHIKLEEERRSEDAQSKAALTDWLRAKASFVIEGLKEADKDEFCRCELKLQKWYGDLRGKPFAIEAENSILDISGFSKQYNCAFIWQKDGVKKLNLYLIINYFKGGKLRFKKIKPEAFEANRFYTVINKKSGEIVPMEVNFNFDDPNLIILPLAFGKRQGREFIWNDLLSLETGSLKLANGRVIEKTLYNRRTRQDEPALFVALTFERREVLDSSNIKPMNLIGIDRGENIPAVIALTDPEGCPLSRFKDSLGNPTHILRIGESYKEKQRTIQAKKEVEQRRAGGYSRKYASKAKNLADDMVRNTTRDLLYYAVTQDAMLIFENLSRGFGRQGKRTFMAERQYTRMEDWLTAKLAYEGLSKTYLSKTLAQYTSKTCSNCGFTITSADYDRVLEKLKKTATGWMTTINGKELKVEGQITYYNRYKRQNVVKDLSVELDRLSEESVNNDISSWTKGRSGEALSLLKKRFSHRPVQEKFVCLNCGFETHADEQAALNIARSWLFLRSQEYKKYQTNKTTGNTDKRAFVETWQSFYRKKLKEVWKPAV

SEQ ID NO: 68 - protein, 977 aa, Artificial Sequence
  CasX variant
MQEIKRINKIRRRLVKDSNTKKAGKTGPMKTLLVRVMTPDLRERLENLRKKPENIPQPISNTSRANLNKLLTDYTEMKKAILHVYWEEFQKDPVGLMSRVAQPAPKNIDQRKLIPVKDGNERLTSSGFACSQCCQPLYVYKLEQVNDKGKPHTNYFGRCNVSEHERLILLSPHKPEANDELVTYSLGKFGQRALDFYSIHVTRESNHPVKPLEQIGGNSCASGPVGKALSDACMGAVASFLTKYQDIILEHQKVIKKNEKRLANLKDIASANGLAFPKITLPPQPHTKEGIEAYNNVVAQIVIWVNLNLWQKLKIGRDEAKPLQRLKGFPSFPLVERQANEVDWWDMVCNVKKLINEKKEDGKVFWQNLAGYKRQEALRPYLSSEEDRKKGKKFARYQFGDLLLHLEKKHGEDWGKVYDEAWERIDKKVEGLSKHIKLEEERRSEDAQSKAALTDWLRAKASFVIEGLKEADKDEFKRCELKLQKWYGSLRGKPFAIEAENSILDISGFSKQYNCAFIWQKDGVKKLNLYLIINYFKGGKLRFKKIKPEAFEANRFYTVINKKSGEIVPMEVNFNFDDPNLIILPLAFGKRQGREFIWNDLLSLETGSLKLANGRVIEKTLYNRRTRQDEPALFVALTFERREVLDSSNIKPMNLIGIDRGENIPAVIALTDPEGCPLSRFKDSLGNPTHILRIGESYKEKQRTIQAKKEVEQRRAGGYSRKYASKAKNLADDMVRNTARDLLYYAVTQDAMLIFENLSRGFGRQGKRTFMAERQYTRMEDWLTAKLAYEGLSKTYLSKTLAQYTSKTCSNCGFTITSADYDRVLEKLKKTATGWMTTINGKELKVEGQITYYNRYKRQNVVKDLSVELDRLSEESVNNDISSWTKGRSGEALSLLKKRFSHRPVQEKFVCLNCGFETHADEQAALNIARSWLFLRSQEYKKYQTNKTTGNTDKRAFVETWQSFYRKKLKEVWKPAV

SEQ ID NO: 69 - protein, 977 aa, Artificial Sequence
  CasX variant
MQEIKRINKIRRRLVKDSNTKKAGKTGPMKTLLVRVMTPDLRERLENLRKKPENIPQPISNTSRANLNKLLTDYTEMKKAILHVYWEEFQKDPVGLMSRVAQPAPKNIDQRKLIPVKDGNERLTSSGFACSQCCQPLYVYKLEQVNDKGKPHTNYFGRCNVSEHERLILLSPHKPEANDELVTYSLGKFGQRALDFYSIHVTRESNHPVKPLEQIGGNSCASGPVGKALSDACMGAVASFLTKYQDIILEHQKVIKKNEKRLANLKDIASANGLAFPKITLPPQPHTKEGIEAYNNVVAQIVIWVNLNLWQKLKIGRDEAKPLQRLKGFPSFPLVERQANEVDWWDMVCNVKKLINEKKEDGKVFWQNLAGYKRQEALRPYLSSEEDRKKGKKFARYQFGDLLLHLEKKHGEDWGKVYDEAWERIDKKVEGLSKHIKLEEERRSEDAQSKAALTDWLRAKASFVIEGLKEADKDEFKRCELKLQKWYGDLRGKPFAIEAENSILDISGFSKQYNCAFIWQKDGVKKLNLYLIINYFKGGKLRFKKIKPEAFEANRFYTVINKKSGEIVPMEVNFNFDDPNLIILPLAFGKRQGREFIWNDLLSLETGSLKLANGRVIEKTLYNRRTRQDEPALFVALTFERREVLDSSNIKPMNLIGIDRGENIPAVIALTDPEGCPLSRFKDSLGNPTHILRIGESYKEKQRTIQAKKEVEQRRAGGYSRKYASKAKNLANDMVRNTARDLLYYAVTQDAMLIFENLSRGFGRQGKRTFMAERQYTRMEDWLTAKLAYEGLSKTYLSKTLAQYTSKTCSNCGFTITSADYDRVLEKLKKTATGWMTTINGKELKVEGQITYYNRYKRQNVVKDLSVELDRLSEESVNNDISSWTKGRSGEALSLLKKRFSHRPVQEKFVCLNCGFETHADEQAALNIARSWLFLRSQEYKKYQTNKTTGNTDKRAFVETWQSFYRKKLKEVWKPAV

SEQ ID NO: 70 - protein, 978 aa, Artificial Sequence
  CasX variant
MQEIKRINKIRRRLVKDSNTKKAGKTGPMKTLLVRVMTPDLRERLENLRKKPENIPQPISNTSRANLNKLLTDYTEMKKAILHVYWEEFQKDPVGLMSRVAQPAPKNIDQRKLIPVKDGNERLTSSGFACSQCCQPLYVYKLEQVNDKGKPHTNYFGRCNVSEHERLILLSPHKPEANDELVTYSLGKFGQRALDFYSIHVTRESNHPVKPLEQIGGNSCASGPVGKALSDACMGAVASFLTKYQDIILEHQKVIKKNEKRLANLKDIASANGLAFPKITLPPQPHTKEGIEAYNNVVAQIVIWVNLNLWQKLKIGRDEAKPLQRLKGFPSFPLVERQANEVDWWDMVCNVKKLINEKKEDGKVFWQNLAGYKRQEALLPYLSSEEDRKKGKKFARYQFGDLLLHLEKKHGEDWGKVYDEAWERIDKKVEGLSKHIKLEEERRSEDAQSKAALTDWLRAKASFVIEGLKEADKDEFCRCELKLQKWYGDLRGKPFAIEAENSILDISGFSKQYNCAFIWQKDGVKKLNLYLIINYFKGGKLRFKKIKPEAFEANRFYTVINKKSGEIVPMEVNFNFDDPNLIILPLAFGKRQGREFIWNDLLSLETGSLKLANGRVIEKTLYNRRTRQDEPALFVALTFERREVLDSSNIKPMNLIGIDRGENIPAVIALTDPEGCPLSRFKDSLGNPTHILRIGESYKEKQRTIQAAKEKEQRRAGGYSRKYASKAKNLADDMVRNTARDLLYYAVTQDAMLIFENLSRGFGRQGKRTFMAERQYTRMEDWLTAKLAYEGLPSKTYLSKTLAQYTSKTCSNCGFTITSADYDRVLEKLKKTATGWMTTINGKELKVEGQITYYNRYKRQNVVKDLSVELDRLSEESVNNDISSWTKGRSGEALSLLKKRFSHRPVQEKFVCLNCGFETHADEQAALNIARSWLFLRSQEYKKYQTNKTTGNTDKRAFVETWQSFYRKKLKEVWKPAV

SEQ ID NO: 71 - protein, 977 aa, Artificial Sequence
  CasX variant
MQEIKRINKIRRRLVKDSNTKKAGKTGPMKTLLVRVMTPDLRERLENLRKKPENIPQPISNTSRANLNKLLTDYTEMKKAILHVYWEEFQKDPVGLMSRVAQPAPKNIDQRKLIPVKDGNERLTSSGFACSQCCQPLYVYKLEQVNDKGKPHTNYFGRCNVSEHERLILLSPHKPEANDELVTYSLGKFGQRALDFYSIHVTRESNHPVKPLEQIGGNSCASGPVGKALSDACMGAVASFLTKYQDIILEHQKVIKKNEKRLANLKDIASANGLAFPKITLPPQPHTKEGIEAYNNVVAQIVIWVNLNLWQKLKIGRDEAKPLQRLKGFPSFPLVERQANEVDWWDMVCNVKKLINEKKEDGKVFWQNLAGYKRQEALRPYLSSEEDRKKGKKFARYQFGDLLLHLEKKHGEDWGKVYDEAWERIDKKVEGLSKHIKLEEERRSEDAQSKAALTDWLRAKASFVIEGLKEADKDEFKRCELKLQKWYGDLRGKPFAIEAENSILDISGFSKQYNCAFIWQKDGVKKLNLYLIINYFKGGKLRFKKIKPEAFEANRFYTVINKKSGEIVPMEVNFNFDDPNLIILPLAFGKRQGREFIWNDLLSLETGSLKLANGRVIEKTLYNRRTRQDEPALFVALTFERREVLDSSNIKPMNLIGIDRGENIPAVIALTDPEGCPLSRFKDSLGNPTHILRIGESYKEKQRTIQAKKEVEQRRAGGYSRKYASKAKNLADDMVRNTARDLLYYAVTQDAMLIFENLSRGFGRQGKRTFMAERQYTRMEDWLTAKLAYEGLSKTLLSKTLAQYTSKTCSNCGFTITSADYDRVLEKLKKTATGWMTTINGKELKVEGQITYYNRYKRQNVVKDLSVELDRLSEESVNNDISSWTKGRSGEALSLLKKRFSHRPVQEKFVCLNCGFETHADEQAALNIARSWLFLRSQEYKKYQTNKTTGNTDKRAFVETWQSFYRKKLKEVWKPAV

SEQ ID NO: 72 - protein, 977 aa, Artificial Sequence
  CasX variant
MQEIKRINKIRRRLVKDSNTKKAGKTGPMKTLLVRVMTPDLRERLENLRKKPENIPQPISNTSRANLNKLLTDYTEMKKAILHVYWEEFQKDPVGLMSRVAQPAPKNIDQRKLIPVKDGNERLTSSGFACSQCCQPLYVYKLEQVNDKGKPHTNYFGRCNVSEHERLILLSPHKPEANDELVTYSLGKFGQRALDFYSIHVTRESNHPVKPLEQIGGNSCASGPVGKALSDACMGAVASFLTKYQDIILEHQKVIKKNEKRLANLKDIASANGLAFPKITLPPQPHTKEGIEAYNNVVAQIVIWVNLNLWQKLKIGRDEAKPLQRLKGFPSFPLVERQANEVDWWDMVCNVKKLINEKKEDGKVFWQNLAGYKRQEALRPYLSSEEDRKKGKKFARYQFGDLLLHLEKKHGEDWGKVYDEAWERIDKKVEGLSKHIKLEEERRSEDAQSKAALTDWLRAKASFVIEGLKEADKDEFCRCELKLQKWYGDLRGKPFAIEAENSILDISGFSKQYNCAFIWQKDGVKKLNLYLIINYFKGGKLRFKKIKPEAFEANRFYTVINKKSGEIVPMEVNFNFDDPNLIILPLAFGKRQGREFIWNDLLSLETGSLKLANGRVIEKTLYNRRTRQDEPALFVALTFERREVLDSSNIKPMNLIGIDRGENIPAVIALTDPEGCPLSRFKDSLGNPTHILRIGESYKEKQRTIQAKKEVEQRRAGGYSRKYASKAKNLADDMVRNTARDLLYYAVTQDAMLIFENLSRGFGRQGKRTFMAERQYTRMEDWLTAKLAYEGLSKTYLSKTLAQYTSKTCSNCGFTITSADYDRVLEKLKKTATGWMTTINGKELKVEGQITYYNRYKRQNVVKDLSVELDRLSEESVNNDISSWTKGRSGEALSLLKKRFSHRPVQEKFVCLNCGFETHADEQAALNIARSWLFLRSQEYKKYQTNKTTGNTDKRAFVETWQSFYRKKLKEVWKPAV

SEQ ID NO: 73 - protein, 977 aa, Artificial Sequence
  CasX variant
MQEIKRINKIRRRLVKDSNTKKAGKTGPMKTLLVRVMTPDLRERLENLRKKPENIPQPISNTSRANLNKLLTDYTEMKKAILHVYWEEFQKDPVGLMSRVAQPAPKNIDQRKLIPVKDGNERLTSSGFACSQCCQPLYVYKLEQVNDKGKPHTNYFGRCNVSEHERLILLSPHKPEANDELVTYSLGKFGQRALDFYSIHVTRESNHPVKPLEQIGGNSCASGPVGKALSDACMGAVASFLTKYQDIILEHQKVIKKNEKRLANLKDIASANGLAFPKITLPPQPHTKEGIEAYNNVVAQIVIWVNLNLWQKLKIGRDEAKPLQRLKGFPSFPLVERQANEVDWWDMVCNVKKLINEKKEDGKVFWQNLAGYKRQEALRPYLSSEEDRKKGKKFARYQFGDLLLHLEKKHGEDWGKVYDEAWERIDKKVEGLSKHIKLEEERRSEDAQSKAALTDWLRAKASFVIEGLKEADKDEFKRCELKLQKWYGDLRGKPFAIEAENSILDISGFSKQYNCAFIWQKDGVKKLNLYLIINYFKGGKLRFKKIKPEAFEANRFYTVINKKSGEIVPMEVNFNFDDPNLIILPLAFGKRQGREFIWNDLLSLETGSLKLANGRVIEKTLYNRRTRQDEPALFVALTFERREVLDSSNIKPMNLIGIDRGENIPAVIALTDPEGCPLSRFKDSLGNPTHILRIGESYKEKQRTIQAKKEVEQRRAGGYSRKYASKAKNLADDMVRNTARDLLYYAVTQDAMLIFENLSRGFGRQGKRTFNAERQYTRMEDWLTAKLAYEGLSKTYLSKTLAQYTSKTCSNCGFTITSADYDRVLEKLKKTATGWMTTINGKELKVEGQITYYNRYKRQNVVKDLSVELDRLSEESVNNDISSWTKGRSGEALSLLKKRFSHRPVQEKFVCLNCGFETHADEQAALNIARSWLFLRSQEYKKYQTNKTTGNTDKRAFVETWQSFYRKKLKEVWKPAV

SEQ ID NO: 74 - protein, 977 aa, Artificial Sequence
  CasX variant
MQEIKRINKIRRRLVKDSNTKKAGKTGPMKTLLVRVMTPDLRERLENLRKKPENIPQPISNTSRANLNKLLTDYTEMKKAILHVYWEEFQKDPVGLMSRVAQPAPKNIDQRKLIPVKDGNERLTSSGFACSQCCQPLYVYKLEQVNDKGKPHTNYFGRCNVSEHERLILLSPHKPEANDELVTYSLGKFGQRALDFYSIHVTRESNHPVKPLEQIGGNSCASGPVGKALSDACMGAVASFLTKYQDIILEHQKVIKKNEKRLANLKDIASANGLAFPKITLPPQPHTKEGIEAYNNVVAQIVIWVNLNLWQKLKIGRDEAKPLQRLKGFPSFPLVERQANEVDWWDMVCNVKKLINEKKEDGKVFWQNLAGYKRQEALLPYLSSESDRKKGKKFARYQFGDLLLHLEKKHGEDWGKVYDEAWERIDKKVEGLSKHIKLEEERRSEDAQSKAALTDWLRAKASFVIEGLKEADKDEFCRCELKLQKWYGDLRGKPFAIEAENSILDISGFSKQYNCAFIWQKDGVKKLNLYLIINYFKGGKLRFKKIKPEAFEANRFYTVINKKSGEIVPMEVNFNFDDPNLIILPLAFGKRQGREFIWNDLLSLETGSLKLANGRVIEKTLYNRRTRQDEPALFVALTFERREVLDSSNIKPMNLIGIDRGENIPAVIALTDPEGCPLSRFKDSLGNPTHILRIGESYKEKQRTIQAKKEVEQRRAGGYSRKYASKAKNLADDMVRNTARDLLYYAVTQDAMLIFENLSRGFGRQGKRTFMAERQYTRMEDWLTAKLAYEGLSKTYLSKTLAQYTSKTCSNCGFTITSADYDRVLEKLKKTATGWMTTINGKELKVEGQITYYNRYKRQNVVKDLSVELDRLSEESVNNDISSWTKGRSGEALSLLKKRFSHRPVQEKFVCLNCGFETHADEQAALNIARSWLFLRSQEYKKYQTNKTTGNTDKRAFVETWQSFYRKKLKEVWKPAV

SEQ ID NO: 75 - protein, 977 aa, Artificial Sequence
  CasX variant
MQEIKRINKIRRRLVKDSNTKKAGKTGPMKTLLVRVMTPDLRERLENLRKKPENIPQPISNTSRANLNKLLTDYTEMKKAILHVYWEEFQKDPVGLMSRVAQPAPKNIDQRKLIPVKDGNERLTSSGFACSQCCQPLYVYKLEQVNDKGKPHTNYFGRCNVSEHERLILLSPHKPEANDELVTYSLGKFGQRALDFYSIHVTRESNHPVKPLEQIGGNSCASGPVGKALSDACMGAVASFLTKYQDIILEHQKVIKKNEKRLANLKDIASANGLAFPKITLPPQPHTKEGIEAYNNVVAQIVIWVNLNLWQKLKIGRDEAKPLQRLKGFPSFPLVERQANEVDWWDMVCNVKKLINEKKEDGKVFWQNLAGYKRQEALRPYLSSEEDRKKGKKFARYQFGDLLLHLEKKHGEDWGKVYDEAWERIDKKVEGLSKHIKLEEERRSEDAQSKAALTDWLRAKASFVIEGLKEADKDEFKRCELKLQKWYGDLRGKPFAIEAENSILDISGFSKQYNCAFIWQKDGVKKLNLYLIINYFKGGKLRFKKIKPEAFEANRFYTVINKKSGEIVPMEVNFNFDDPNLIILPLAFGKRQGREFIWNDLLSLETGSLKLANGRVIEKTLYNRRTRQDEPALFVALTFERREVLDSSNIKPMNLIGIDRGENIPAVIALTDPEGCPLSRFKDSLGNPTHILRIGESYKEKQRTIQAKKEVEQRRAGGYSRKYASKAKNLADDMVRNTARDLLYYAVTQDAMLIFENLSRGFGRQGKRTFMAERQYTRMEDWLTAKLAYEGLSKTYLSKTLAQYTSKTCSNCGFTITSADYDRVLEKLKKTATGWMTTINGKELKVEGQITYYNRYKRQNVVKDLSVELDRLSEESVNNDISSWTKGRSGEALSLLKKRFSHRPVQEKFVCLNCGFETHADEQAALNIARSWLFLRSQEYKKYQTNKTTGNTDKRAFVETWQSFYRKKLKEVWKPAV

SEQ ID NO: 76 - protein, 978 aa, Artificial Sequence
  CasX variant
MQEIKRINKIRRRLVKDSNTKKAGKTGPMKTLLVRVMTPDLRERLENLRKKPENIPQPISNTSRANLNKLLTDYTEMKKAILHVYWEEFQKDPVGLMSRVAQPAPKNIDQRKLIPVKDGNERLTSSGFACSQCCQPLYVYKLEQVNDKGKPHTNYFGRCNVSEHERLILLSPHKPEANDELVTYSLGKFGQRALDFYSIHVTRESNHPVKPLEQIGGNSCASGPVGKALSDACMGAVASFLTKYQDIILEHQKVIKKNEKRLANLKDIASANGLAFPKITLPPQPHTKEGIEAYNNVVAQIVIWVNLNLWQKLKIGRDEAKPLQRLKGFPSFPLVERQANEVDWWDMVCNVKKLINEKKEDGKVFWQNLAGYKRQEALLPYLSSEEDRKKGKKFARYQFGDLLLHLEKKHGEDWGKVYDEAWERIDKKVEGLSKHIKLEEERRSEDAQSKAALTDWLRAKASFVIEGLKEADKDEFCRCELKLQKWYGDLRGKPFAIEAENSILDISGFSKQYNCAFIWQKDGVKKLNLYLIINYFKGGKLRFKKIKPEAFEANRFYTVINKKSGEIVPMEVNFNFDDPNLIILPLAFGKRQGREFIWNDLLSLETGSLKLANGRVIEKTLYNRRTRQDEPALFVALTFERREVLDSSNIKPMNLIGIDRGENIPAVIALTDPEGCPLSRFKDSLGNPTHILRIGESYKEKQRTIQAAKEVEQRRAGGYSRKYASKAKNLADDMVRNTARDLLYYAVTQDAMLIFENLSRGFGRQGKRTFMAERQYTRMEDWLTAKLAYEGDPSKTYLSKTLAQYTSKTCSNCGFTITSADYDRVLEKLKKTATGWMTTINGKELKVEGQITYYNRYKRQNVVKDLSVELDRLSEESVNNDISSWTKGRSGEALSLLKKRFSHRPVQEKFVCLNCGFETHADEQAALNIARSWLFLRSQEYKKYQTNKTTGNTDKRAFVETWQSFYRKKLKEVWKPAV

SEQ ID NO: 77 - protein, 978 aa, Artificial Sequence
  CasX variant
MQEIKRINKIRRRLVKDSNTKKAGKTGPMKTLLVRVMTPDLRERLENLRKKPENIPQPISNTSRANLNKLLTDYTEMKKAILHVYWEEFQKDPVGLMSRVAQPAPKNIDQRKLIPVKDGNERLTSSGFACSQCCQPLYVYKLEQVNDKGKPHTNYFGRCNVSEHERLILLSPHKPEANDELVTYSLGKFGQRALDFYSIHVTRESNHPVKPLEQIGGNSCASGPVGKALSDACMGAVASFLTKYQDIILEHQKVIKKNEKRLANLKDIASANGLAFPKITLPPQPHTKEGIEAYNNVVAQIVIWVNLNLWQKLKIGRDEAKPLQRLKGFPSFPLVERQANEVDWWDMVCNVKKLINEKKEDGKVFWQNLAGYKRQEALLPYLSSEEDRKKGKKFARYQFGDLLLHLEKKHGEDWGKVYDEAWERIDKKVEGLSKHIKLEEERRSEDAQSKAALTDWLRAKASFVIEGLKEADKDEFCRCELKLQKWYGDLRGKPFAIEAENSILDISGFSKQYNCAFIWQKDGVKKLNLYLIINYFKGGKLRFKKIKPEAFEANRFYTVINKKSGEIVPMEVNFNFDDPNLIILPLAFGKRQGREFIWNDLLSLETGSLKLANGRVIEKTLYNRRTRQDEPALFVALTFERREVLDSSNIKPMNLIGIDRGENIPAVIALTDPEGCPLSRFKDSLGNPTHILRIGESYKEKQRTIQAAKEVEQRRAGGYSRKYASKAKNLADDMVRNTARDLLYYAVTQDAMLIFENLSRGFGRQGKRTFMAERQYTRMEDWLTAKLAYEFLPSKTYLSKTLAQYTSKTCSNCGFTITSADYDRVLEKLKKTATGWMTTINGKELKVEGQITYYNRYKRQNVVKDLSVELDRLSEESVNNDISSWTKGRSGEALSLLKKRFSHRPVQEKFVCLNCGFETHADEQAALNIARSWLFLRSQEYKKYQTNKTTGNTDKRAFVETWQSFYRKKLKEVWKPAV

SEQ ID NO: 78 - protein, 977 aa, Artificial Sequence
  CasX variant
MQEIKRINKIRRRLVKDSNTKKAGKTGPMKTLLVRVMTPDLRERLENLRKKPENIPQPISNTSRANLNKLLTDYTEMKKAILHVYWEEFQKDPVGLMSRVAQPAPKNIDQRKLIPVKDGNERLTSSGFACSQCCQPLYVYKLEQVNDKGKPHTNYFGRCNVSEHERLILLSPHKPEANDELVTYSLGKFGQRALDFYSIHVTRESNHPVKPLEQIGGNSCASGPVGKALSDACMGAVASFLTKYQDIILEHQKVIKKNEKRLANLKDIASANGLAFPKITLPPQPHTKEGIEAYNNVVAQIVIWVNLNLWQKLKIGRDEAKPLQRLKGFPSFPLVERQANEVDWWDMVCNVKKLINEKKEDGKVFWQNLAGYKRQEALLPYLSSEEDRKKGKKFARYQFGDLLLHLEKKHGEDWGKVYDEAWERIDKKVEGLSKHIKLEEERRSEDAQSKAALTDWLRAKASFVIEGLKEADKDEFCRCELKLQKWYGDLRGKPFAIEAENSILDISGFSKQYNCAFIWQKDGVKKLNLYLIINYFKGGKLRFKKIKPEAFEANRFYTVINKKSGEIVPMEVNFNFDDPNLIILPLAFGKRQGREFIWNDLLSLETGSLKLANGRVIEKTLYNRRTRQDEPALFVALTFERREVLDSSNIKPMNLIGIDRGENIPAVIALTDPEGCPLSRFKDSLGNPTHILRIGESYKEKQRTIQAKKEVEQRRAGGYSRKYASKAKNLADDMVRNTVRDLLYYAVTQDAMLIFENLSRGFGRQGKRTFMAERQYTRMEDWLTAKLAYEGLSKTYLSKTLAQYTSKTCSNCGFTITSADYDRVLEKLKKTATGWMTTINGKELKVEGQITYYNRYKRQNVVKDLSVELDRLSEESVNNDISSWTKGRSGEALSLLKKRFSHRPVQEKFVCLNCGFETHADEQAALNIARSWLFLRSQEYKKYQTNKTTGNTDKRAFVETWQSFYRKKLKEVWKPAV

SEQ ID NO: 79 - protein, 977 aa, Artificial Sequence
  CasX variant
MQEIKRINKIRRRLVKDSNTKKAGKTGPMKTLLVRVMTPDLRERLENLRKKPENIPQPISNTSRANLNKLLTDYTEMKKAILHVYWEEFQKDPVGLMSRVAQPAPKNIDQRKLIPVKDGNERLTSSGFACSQCCQPLYVYKLEQVNDKGKPHTNYFGRCNVSEHERLILLSPHKPEANDELVTYSLGKFGQRALDFYSIHVTRESNHPVKPLEQIGGNSCASGPVGKALSDACMGAVASFLTKYQDIILEHQKVIKKNEKRLANLKDIASANGLAFPKITLPPQPHTKEGIEAYNNVVAQIVIWVNLNLWQKLKIGRDEAKPLQRLKGFPSFPLVERQANEVDWWDMVCNVKKLINEKKEDGKVFWQNLAGYKRQEALRPYLSSEEDRKKGKKFARYQFGDLLLHLEKKHGEDWGKVYDEAWERIDKKVEGLSKHIKLEEERRSEDAQSKAALTDWLRAKASFVIEGLKEADKDEFCRCELKLQKWYGDLRGKPFAIEAENSILDISGFSKQYNCAFIWQKDGVKKLNLYLIINYFKGGKLRFKKIKPEAFEANRFYTVINKKSGEIVPMEVNFNFDDPNLIILPLAFGKRQGREFIWNDLLSLETGSLKLANGRVIEKTLYNRRTRQDEPALFVALTFERREVLDSSNIKPMNLIGIDRGENIPAVIALTDPEGCPLSRFKDSLGNPTHILRIGESYKEKQRTIQAKKEVEQRRAGGYSRKYASKAKNLADDMVRNTVRDLLYYAVTQDAMLIFENLSRGFGRQGKRTFMAERQYTRMEDWLTAKLAYEGLSKTYLSKTLAQYTSKTCSNCGFTITSADYDRVLEKLKKTATGWMTTINGKELKVEGQITYYNRYKRQNVVKDLSVELDRLSEESVNNDISSWTKGRSGEALSLLKKRFSHRPVQEKFVCLNCGFETHADEQAALNIARSWLFLRSQEYKKYQTNKTTGNTDKRAFVETWQSFYRKKLKEVWKPAV

SEQ ID NO: 80 - protein, 977 aa, Artificial Sequence
  CasX variant
MQEIKRINKIRRRLVKDSNTKKAGKTGPMKTLLVRVMTPDLRERLENLRKKPENIPQPISNTSRANLNKLLTDYTEMKKAILHVYWEEFQKDPVGLMSRVAQPAPKNIDQRKLIPVKDGNERLTSSGFACSQCCQPLYVYKLEQVNDKGKPHTNYFGRCNVSEHERLILLSPHKPEANDELVTYSLGKFGQRALDFYSIHVTRESNHPVKPLEQIGGNSCASGPVGKALSDACMGAVASFLTKYQDIILEHQKVIKKNEKRLANLKDIASANGLAFPKITLPPQPHTKEGIEAYNNVVAQIVIWVNLNLWQKLKIGRDEAKPLQRLKGFPSFPLVERQANEVDWWDMVCNVKKLINEKKEDGKVFWQNLAGYKRQEALLPYLSSEEDRKKGKKFARYQFGDLLLHLEKKHGEDWGKVYDEAWERIDKKVEGLSKHIKLEEERRSEDAQSKAALTDWLRAKASFVIEGLKEADKDEFKRCELKLQKWYGDLRGKPFAIEAENSILDISGFSKQYNCAFIWQKDGVKKLNLYLIINYFKGGKLRFKKIKPEAFEANRFYTVINKKSGEIVPMEVNFNFDDPNLIILPLAFGKRQGREFIWNDLLSLETGSLKLANGRVIEKTLYNRRTRQDEPALFVALTFERREVLDSSNIKPMNLIGIDRGENIPAVIALTDPEGCPLSRFKDSLGNPTHILRIGESYKEKQRTIQAKKEVEQRRAGGYSRKYASKAKNLADDMVRNTARDLLYYAVTQDAMLIFENLSRGFGRQGKRTFMAERQYTRMEDWLTAKLAYEGLSKTYLSKTLAQYTSKTCSNCGFTITSADYDRVLEKLKKTATGWMTTINGKELKVEGQITYYNRYKRQNVVKDLSVELDRLSEESVNNDISSWTKGRSGEALSLLKKRFSHRPVQEKFVCLNCGFETHADEQAALNIARSWLFLRSQEYKKYQTNKTTGNTDKRAFVETWQSFYRKKLKEVWKPAV

SEQ ID NO: 81 - protein, 978 aa, Artificial Sequence
  CasX variant
MQEIKRINKIRRRLVKDSNTKKAGKTGPMKTLLVRVMTPDLRERLENLRKKPENIPQPISNTSRANLNKLLTDYTEMKKAILHVYWEEFQKDPVGLMSRVAQPAPKNIDQRKLIPVKDGNERLTSSGFACSQCCQPLYVYKLEQVNDKGKPHTNYFGRCNVSEHERLILLSPHKPEANDELVTYSLGKFGQRALDFYSIHVTRESNHPVKPLEQIGGNSCASGPVGKALSDACMGAVASFLTKYQDIIIEHQKVIKKNEKRLANLKDIASANGLAFPKITLPPQPHTKEGIEAYNNVVAQIVIWVNLNLWQKLKIGRDEAKPLQRLKGFPSFPLVERQANEVDWWDMVCNVKKLINEKKEDGKVFWQNLAGYKRQEALLPYLSSEEDRKKGKKFARYQFGDLLLHLEKKHGEDWGKVYDEAWERIDKKVEGLSKHIKLEEERRSEDAQSKAALTDWLRAKASFVIEGLKEADKDEFCRCELKLQKWYGDLRGKPFAIEAENSILDISGFSKQYNCAFIWQKDGVKKLNLYLIINYFKGGKLRFKKIKPEAFEANRFYTVINKKSGEIVPMEVNFNFDDPNLIILPLAFGKRQGREFIWNDLLSLETGSLKLANGRVIEKTLYNRRTRQDEPALFVALTFERREVLDSSNIKPMNLIGIDRGENIPAVIALTDPEGCPLSRFKDSLGNPTHILRIGESYKEKQRTIQAAKEVEQRRAGGYSRKYASKAKNLADDMVRNTARDLLYYAVTQDAMLIFENLSRGFGRQGKRTFNAERQYTRMEDWLTAKLAYEGLPSKTYLSKTLAQYTSKTCSNCGFTITSADYDRVLEKLKKTATGWMTTINGKELKVEGQITYYNRYKRQNVVKDLSVELDRLSEESVNNDISSWTKGRSGEALSLLKKRFSHRPVQEKFVCLNCGFETHADEQAALNIARSWLFLRSQEYKKYQTNKTTGNTDKRAFVETWQSFYRKKLKEVWKPAV

SEQ ID NO: 82 - protein, 978 aa, Artificial Sequence
  CasX variant
MQEIKRINKIRRRLVKDSNTKKAGKTGPMKTLLVRVMTPDLRERLENLRKKPENIPQPISNTSRANLNKLLTDYTEMKKAILHVYWEEFQKDPVGLMSRVAQPAPKNIDQRKLIPVKDGNERLTSSGFACSQCCQPLYVYKLEQVNDKGKPHTNYFGRCNVSEHERLILLSPHKPEANDELVTYSLGKFGQRALDFYSIHVTRESNHPVKPLEQIGGNSCASGPVGKALSDACMGAVASFLTKYQDIILEHQKVIKKNEKRLANLKDIASANGLAFPKITLPPQPHTKEGIEAYNNVVAQIVIWVNLNLWQKLKIGRDEAKPLQRLKGFPSFPLVERQANEVDWWDMVCNVKKLINEKKEDGKVFWQNLAGYKRQEALLPYLSSEEDRKKGKKFARYQFGDLLLHLEKKHGEDWGKVYDEAWERIDKKVEGLSKHIKLEEERRSEDAQSKAALTDWLRAKASFVIEGLKEADKDEFCRCELKLQKWYGDLRGKPFAIEAENSILDISGFSKQYNCAFIWQKDGVKKLNLYLIINYFKGGKLRFKKIKPEAFEANRFYTVINKKSGEIVPMEVNFNFDDPNLIILPLAFGKRQGREFIWNDLLSLETGSLKLANGRVIEKTLYNRRTRQDEPALFVALTFERREVLDSSNIKPMNLIGIDRGENIPAVIALTDPEGCPLSRFKDSLGNPTHILRIGESYKEKQRTIQAAKEVEQRRAGGYSRKYASKAKNLADDMVRNTARDLLYYAKTQDAMLIFENLSRGFGRQGKRTFMAERQYTRMEDWLTAKLAYEGLPSKTYLSKTLAQYTSKTCSNCGFTITSADYDRVLEKLKKTATGWMTTINGKELKVEGQITYYNRYKRQNVVKDLSVELDRLSEESVNNDISSWTKGRSGEALSLLKKRFSHRPVQEKFVCLNCGFETHADEQAALNIARSWLFLRSQEYKKYQTNKTTGNTDKRAFVETWQSFYRKKLKEVWKPAV

SEQ ID NO: 83 - protein, 977 aa, Artificial Sequence
  CasX variant
MQEIKRINKIRRRLVKDSNTKKAGKTGPMKTLLVRVMTPDLRERLENLRKKPENIPQPISNTSRANLNKLLTDYTEMKKAILHVYWEEFQKDPVGLMSRVAQPAPKNIDQRKLIPVKDGNERLTSSGFACSQCCQPLYVYKLEQVNDKGKPHTNYFGRCNVSEHERLILLSPHKPEANDELVTYSLGKFGQRALDFYSIHVTRESNHPVKPLEQIGGNSCASGPVGKALSDACMGAVASFLTKYQDIILEHQKVIKKNEKRLANLKDIASANGLAFPKITLPPQPHTKEGIEAYNNVVAQIVIWVNLNLWQKLKIGRDEAKPLQRLKGFPSFPLVERQANEVDWWDMVCNVKKLINEKKEDGKVFWQNLAGYKRQEALRPYLSSEEDRKKGKKFARYQFGDLLLHLEKKHGEDWGKVYDEAWERIDKKVEGLSKHIKLEEERRSEDAQSKAALTDWLRAKASFVIEGLKEADKDEFKRCELKLQKWYGDLRGKPFAIEAENSILDISGFSKQYNCAFIWQKDGVKKLNLYLIINYFKGGKLRFKKIKPEAFEANRFYTVINKKSGEIVPMEVNFNFDDPNLIILPLAFGKRQGREFIWNDLLSLETGSLKLANGRVIEKTLYNRRTRQDEPALFVALTFERREVLDSSNIKPMNLIGIDRGENIPAVIALTDPEGCPLSRFKDSLGNPTHILRIGESYKEKQRTIQAKKEVEQRRAGGYSRKYASKAKNLADDMVRNTARDLLYYAVTQDAMLIFENLSRGFGRQGKRTFMAERQYTRNEDWLTAKLAYEGLSKTYLSKTLAQYTSKTCSNCGFTITSADYDRVLEKLKKTATGWMTTINGKELKVEGQITYYNRYKRQNVVKDLSVELDRLSEESVNNDISSWTKGRSGEALSLLKKRFSHRPVQEKFVCLNCGFETHADEQAALNIARSWLFLRSQEYKKYQTNKTTGNTDKRAFVETWQSFYRKKLKEVWKPAV

SEQ ID NO: 84 - protein, 978 aa, Artificial Sequence
  CasX variant
MQEIKRINKIRRRLVKDSNTKKAGKTGPMKTLLVRVMTPDLRERLENLRKKPENIPQPISNTSRANLNKLLTDYTEMKKAILHVYWEEFQKDPVGLMSRVAQPAPKNIDQRKLIPVKDGNERLTSSGFACSQCCQPLYVYKLEQVNDKGKPHTNYFGRCNVSEHERLILLSPHKPEANDELVTYSLGKFGQRALDFYSIHVTRESNHPVKPLEQIGGNSCASGPVGKALSDACMGAVASFLTKYQDIILEHQKVIKKNEKRLANLKDIASANGLAFPKITLPPQPHTKEGIEAYNNVVAQIVIWVNLNLWQKLKIGRDEAKPLQRLKGFPSFPLVERQANEVDWWDMVCNVKKLINEKKEDGKVFWQNLAGYKRQEALLPYLSSEEDRKKGKKFARYQFGDLLLHLEKKHGEDWGKVYDEAWERIDKKVEGLSKHIKLEEERRSEDAQSKAALTDWLRAKASFVIEGLKEADKDEFCRCELKLQKWYGDLRGKPFAIEAENSILDISGFSKQYNCAFIWQKDGVKKLNLYLIINYFKGGKLRFKKIKPEAFEANRFYTVINKKSGEIVPMEVNFNFDDPNLIILPLAFGKRQGREFIWNDLLSLETGSLKLANGRVIEKTLYNRRTRQDEPALFVALTFERREVLDSSNIKPMNLIGIDRGENIPAVIALTDPEGCPLSRFKDSLGNPTHILRIGESYKEKQRTIQAAKEVEQRRAGGYSRKYASKAKNLADDMVRNTARDLLYYAVTQDAMLIMENLSRGFGRQGKRTFMAERQYTRMEDWLTAKLAYEGLPSKTYLSKTLAQYTSKTCSNCGFTITSADYDRVLEKLKKTATGWMTTINGKELKVEGQITYYNRYKRQNVVKDLSVELDRLSEESVNNDISSWTKGRSGEALSLLKKRFSHRPVQEKFVCLNCGFETHADEQAALNIARSWLFLRSQEYKKYQTNKTTGNTDKRAFVETWQSFYRKKLKEVWKPAV

SEQ ID NO: 85 - protein, 977 aa, Artificial Sequence
  CasX variant
MQEIKRINKIRRRLVKDSNTKKAGKTGPMKTLLVRVMTPDLRERLENLRKKPENIPQPISNTSRANLNKLLTDYTEMKKAILHVYWEEFQKDPVGLMSRVAQPAPKNIDQRKLIPVKDGNERLTSSGFACSQCCQPLYVYKLEQVNDKGKPHTNYFGRCNVSEHERLILLSPHKPEANDELVTYSLGKFGQRALDFYSIHVTRESNHPVKPLEQIGGNSCASGPVGKALSDACMGAVASFLTKYQDIILEHQKVIKKNEKRLANLKDIASANGLAFPKITLPPQPHTKEGIEAYNNVVAQIVIWVNLNLWQKLKIGRDEAKPLQRLKGFPSFPLVERQANEVDWWDMVCNVKKLINEKKEDGKVFWQNLAGYKRQEALRPYLSSEEDRKKGKKFARYQFGDLLLHLEKKHGEDWGKVYDEAWERIDKKVEGLSKHIKLEEERRSEDAQSKAALTDWLRAKASFVIEGLKEADKDEFCRCELKLQKWYGDLRGKPFAIEAENSILDISGFSKQYNCAFIWQKDGVKKLNLYLIINYFKGGKLRFKKIKPEAFEANRFYTVINKKSGEIVPMEVNFNFDDPNLIILPLAFGKRQGREFIWNDLLSLETGSLKLANGRVIEKTLYNRRTRQDEPALFVALTFERREVLDSSNIKPMNLIGIDRGENIPAVIALTDPEGCPLSRFKDSLGNPTHILRIGESYKEKQRTIQAKKEVEQRRAGGYSRKYASKAKNLADDMVRNTARDLLYYAVTQDAMLIFENLSRGFGRQGKRTFMAERQYTRMEDWLTAKLAYEGLSKTYLSKTLAQYTSKTCSNCGFTITSADYDRVLEKLKKTATGWMTTINGKELKVEGQITYYNRRKRQNVVKDLSVELDRLSEESVNNDISSWTKGRSGEALSLLKKRFSHRPVQEKFVCLNCGFETHADEQAALNIARSWLFLRSQEYKKYQTNKTTGNTDKRAFVETWQSFYRKKLKEVWKPAV

SEQ ID NO: 86 - protein, 977 aa, Artificial Sequence
  CasX variant
MQEIKRINKIRRRLVKDSNTKKAGKTGPMKTLLVRVMTPDLRERLENLRKKPENIPQPISNTSRANLNKLLTDYTEMKKAILHVYWEEFQKDPVGLMSRVAQPAPKNIDQRKLIPVKDGNERLTSSGFACSQCCQPLYVYKLEQVNDKGKPHTNYFGRCNVSEHERLILLSPHKPEANDELVTYSLGKFGQRALDFYSIHVTRESNHPVKPLEQIGGNSCASGPVGKALSDACMGAVASFLTKYQDIILEHQKVIKKNEKRLANLKDIASANGLAFPKITLPPQPHTKEGIEAYNNVVAQIVIWVNLNLWQKLKIGRDEAKPLQRLKGFPSFPLVERQANEVDWWDMVCNVKKLINEKKEDGKVFWQNLAGYKRQEALRPYLSSEEDRKKGKKFARYQFGDLLLHLEKKHGEDWGKVYDEAWERIDKKVEGLSKHIKLEEERRSEDAQSKAALTDWLRAKASFVIEGLKEADKDEFCRCELKLQKWYGDLRGKPFAIEAENSILDISGFSKQYNCAFIWQKDGVKKLNLYLIINYFKGGKLRFKKIKPEAFEANRFYTVINKKSGEIVPMEVNFNFDDPNLIILPLAFGKRQGREFIWNDLLSLETGSLKLANGRVIEKTLYNRRTRQDEPALFVALTFERREVLDSSNIKPMNLIGVDRGENIPAVIALTDPEGCPLSRFKDSLGNPTHILRIGESYKEKQRTIQAKKEVEQRRAGGYSRKYASKAKNLADDMVRNTARDLLYYAVTQDAMLIFENLSRGFGRQGKRTFMAERQYTRMEDWLTAKLAYEGLSKTYLSKTLAQYTSKTCSNCGFTITSADYDRVLEKLKKTATGWMTTINGKELKVEGQITYYNRRKRQNVVKDLSVELDRLSEESVNNDISSWTKGRSGEALSLLKKRFSHRPVQEKFVCLNCGFETHADEQAALNIARSWLFLRSQEYKKYQTNKTTGNTDKRAFVETWQSFYRKKLKEVWKPAV

SEQ ID NO: 87 - protein, 977 aa, Artificial Sequence
  CasX variant
MQEIKRINKIRRRLVKDSNTKKAGKTGPMKTLLVRVMTPDLRERLENLRKKPENIPQPISNTSRANLNKLLTDYTEMKKAILHVYWEEFQKDPVGLMSRVAQPAPKNIDQRKLIPVKDGNERLTSSGFACSQCCQPLYVYKLEQVNDKGKPHTNYFGRCNVSEHERLILLSPHKPEANDELVTYSLGKFGQRALDFYSIHVTRESNHPVKPLEQIGGNSCASGPVGKALSDACMGAVASFLTKYQDIILEHQKVIKKNEKRLANLKDIASANGLAFPKITLPPQPHTKEGIEAYNNVVAQIVIWVNLNLWQKLKIGRDEAKPLQRLKGFPSFPLVERQANEVDWWDMVCNVKKLINEKKEDGKVFWQNLAGYKRQEALRPYLSSENDRKKGKKFARYQFGDLLLHLEKKHGEDWGKVYDEAWERIDKKVEGLSKHIKLEEERRSEDAQSKAALTDWLRAKASFVIEGLKEADKDEFCRCELKLQKWYGDLRGKPFAIEAENSILDISGFSKQYNCAFIWQKDGVKKLNLYLIINYFKGGKLRFKKIKPEAFEANRFYTVINKKSGEIVPMEVNFNFDDPNLIILPLAFGKRQGREFIWNDLLSLETGSLKLANGRVIEKTLYNRRTRQDEPALFVALTFERREVLDSSNIKPMNLIGVDRGENIPAVIALTDPEGCPLSRFKDSLGNPTHILRIGESYKEKQRTIQAKKEVEQRRAGGYSRKYASKAKNLADDMVRNTARDLLYYAVTQDAMLIFENLSRGFGRQGKRTFMAERQYTRMEDWLTAKLAYEGLSKTYLSKTLAQYTSKTCSNCGFTITSADYDRVLEKLKKTATGWMTTINGKELKVEGQITYYNRRKRQNVVKDLSVELDRLSEESVNNDISSWTKGRSGEALSLLKKRFSHRPVQEKFVCLNCGFETHADEQAALNIARSWLFLRSQEYKKYQTNKTTGNTDKRAFVETWQSFYRKKLKEVWKPAV

SEQ ID NO: 88 - protein, 977 aa, Artificial Sequence
  CasX variant
MQEIKRINKIRRRLVKDSNTKKAGKTGPMKTLLVRVMTPDLRERLENLRKKPENIPQPISNTSRANLNKLLTDYTEMKKAILHVYWEEFQKDPVGLMSRVAQPAPKNIDQRKLIPVKDGNERLTSSGFACSQCCQPLYVYKLEQVNDKGKPHTNYFGRCNVSEHERLILLSPHKPEANDELVTYSLGKFGQRALDFYSIHVTRESNHPVKPLEQIGGNSCASGPVGKALSDACMGAVASFLTKYQDIILEHQKVIKKNEKRLANLKDIASANGLAFPKITLPPQPHTKEGIEAYNNVVAQIVIWVNLNLWQKLKIGRDEAKPLQRLKGFPSFPLVERQANEVDWWDMVCNVKKLINEKKEDGKVFWQNLAGYKRQEALRPYLSSEEDRKKGKKFARYQFGDLLKHLEKKHGEDWGKVYDEAWERIDKKVEGLSKHIKLEEERRSEDAQSKAALTDWLRAKASFVIEGLKEADKDEFCRCELKLQKWYGDLRGKPFAIEAENSILDISGFSKQYNCAFIWQKDGVKKLNLYLIINYFKGGKLRFKKIKPEAFEANRFYTVINKKSGEIVPMEVNFNFDDPNLIILPLAFGKRQGREFIWNDLLSLETGSLKLANGRVIEKTLYNRRTRQDEPALFVALTFERREVLDSSNIKPMNLIGVDRGENIPAVIALTDPEGCPLSRFKDSLGNPTHILRIGESYKEKQRTIQAKKEVEQRRAGGYSRKYASKAKNLADDMVRNTARDLLYYAVTQDAMLIFENLSRGFGRQGKRTFMAERQYTRMEDWLTAKLAYEGLSKTYLSKTLAQYTSKTCSNCGFTITSADYDRVLEKLKKTATGWMTTINGKELKVEGQITYYNRRKRQNVVKDLSVELDRLSEESVNNDISSWTKGRSGEALSLLKKRFSHRPVQEKFVCLNCGFETHADEQAALNIARSWLFLRSQEYKKYQTNKTTGNTDKRAFVETWQSFYRKKLKEVWKPAV

SEQ ID NO: 89 - protein, 978 aa, Artificial Sequence
  CasX variant
MQEIKRINKIRRRLVKDSNTKKAGKTGPMKTLLVRVMTPDLRERLENLRKKPENIPQPISNTSRANLNKLLTDYTEMKKAILHVYWEEFQKDPVGLMSRVAQPAPKNIDQRKLIPVKDGNERLTSSGFACSQCCQPLYVYKLEQVNDKGKPHTNYFGRCNVSEHERLILLSPHKPEANDELVTYSLGKFGQVRALDFYSIHVTRESNHPVKPLEQIGGNSCASGPVGKALSDACMGAVASFLTKYQDIILEHQKVIKKNEKRLANLKDIASANGLAFPKITLPPQPHTKEGIEAYNNVVAQIVIWVNLNLWQKLKIGRDEAKPLQRLKGFPSFPLVERQANEVDWWDMVCNVKKLINEKKEDGKVFWQNLAGYKRQEALRPYLSSEEDRKKGKKFARYQFGDLLLHLEKKHGEDWGKVYDEAWERIDKKVEGLSKHIKLEEERRSEDAQSKAALTDWLRAKASFVIEGLKEADKDEFCRCELKLQKWYGDLRGKPFAIEAENSILDISGFSKQYNCAFIWQKDGVKKLNLYLIINYFKGGKLRFKKIKPEAFEANRFYTVINKKSGEIVPMEVNFNFDDPNLIILPLAFGKRQGREFIWNDLLSLETGSLKLANGRVIEKTLYNRRTRQDEPALFVALTFERREVLDSSNIKPMNLIGVDRGENIPAVIALTDPEGCPLSRFKDSLGNPTHILRIGESYKEKQRTIQAKKEVEQRRAGGYSRKYASKAKNLADDMVRNTARDLLYYAVTQDAMLIFENLSRGFGRQGKRTFMAERQYTRMEDWLTAKLAYEGLSKTYLSKTLAQYTSKTCSNCGFTITSADYDRVLEKLKKTATGWMTTINGKELKVEGQITYYNRRKRQNVVKDLSVELDRLSEESVNNDISSWTKGRSGEALSLLKKRFSHRPVQEKFVCLNCGFETHADEQAALNIARSWLFLRSQEYKKYQTNKTTGNTDKRAFVETWQSFYRKKLKEVWKPAV

SEQ ID NO: 90 - protein, 977 aa, Artificial Sequence
  CasX variant
MQEIKRINKIRRRLVKDSNTKKAGKTGPMKTLLVRVMTPDLRERLENLRKKPENIPQPISNTSRANLNKLLTDYTEMKKAILHVYWEEFQKDPVGLMSRVAQPAPKNIDQRKLIPVKDGNERLTSSGFACSQCCQPLYVYKLEQVNDKGKPHTNYFGRCNVSEHERLILLSPHKPEANDELVTYSLGKFGQRALDFYSIHVTRESNHPVKPLEQIGGNSCASGPVGKALSDACMGAVASFLTKYQDIILEHQKVIKKNEKRLANLKDIASANGLAFPKITLPPQPHTKEGIEAYNNVVAQIVIWVNLNLWQKLKIGRDEAKPLQRLKGFPSFPLVERQANEVDWWDMVCNVKKLINEKKEDGKVFWQNLAGYKRQEALRPYLSSENDRKKGKKFARYQFGDLLKHLEKKHGEDWGKVYDEAWERIDKKVEGLSKHIKLEEERRSEDAQSKAALTDWLRAKASFVIEGLKEADKDEFCRCELKLQKWYGDLRGKPFAIEAENSILDISGFSKQYNCAFIWQKDGVKKLNLYLIINYFKGGKLRFKKIKPEAFEANRFYTVINKKSGEIVPMEVNFNFDDPNLIILPLAFGKRQGREFIWNDLLSLETGSLKLANGRVIEKTLYNRRTRQDEPALFVALTFERREVLDSSNIKPMNLIGVDRGENIPAVIALTDPEGCPLSRFKDSLGNPTHILRIGESYKEKQRTIQAKKEVEQRRAGGYSRKYASKAKNLADDMVRNTARDLLYYAVTQDAMLIFENLSRGFGRQGKRTFMAERQYTRMEDWLTAKLAYEGLSKTYLSKTLAQYTSKTCSNCGFTITSADYDRVLEKLKKTATGWMTTINGKELKVEGQITYYNRRKRQNVVKDLSVELDRLSEESVNNDISSWTKGRSGEALSLLKKRFSHRPVQEKFVCLNCGFETHADEQAALNIARSWLFLRSQEYKKYQTNKTTGNTDKRAFVETWQSFYRKKLKEVWKPAV

SEQ ID NO: 91 - protein, 977 aa, Artificial Sequence
  CasX variant
MQEIKRINKIRRRLVKDSNTKKAGKTGPMKTLLVRVMTPDLRERLENLRKKPENIPQPISNTSRANLNKLLTDYTEMKKAILHVYWEEFQKDPVGLMSRVAQPAPKNIDQRKLIPVKDGNERLTSSGFACSQCCQPLYVYKLEQVNDKGKPHTNYFGRCNVSEHERLILLSPHKPEANDELVTYSLGKFGQRALDFYSIHVTRESNHPVKPLEQIGGNSCASGPVGKALSDACMGAVASFLTKYQDIILEHQKVIKKNEKRLANLKDIASANGLAFPKITLPPQPHTKEGIEAYNNVVAQIVIWVNLNLWQKLKIGRDEAKPLQRLKGFPSFPLVERQANEVDWWDMVCNVKKLINEKKEDGKVFWQNLAGYKRQEALRPYLSSEEDRKKGKKFARYQLGDLLLHLEKKHGEDWGKVYDEAWERIDKKVEGLSKHIKLEEERRSEDAQSKAALTDWLRAKASFVIEGLKEADKDEFCRCELKLQKWYGDLRGKPFAIEAENSILDISGFSKQYNCAFIWQKDGVKKLNLYLIINYFKGGKLRFKKIKPEAFEANRFYTVINKKSGEIVPMEVNFNFDDPNLIILPLAFGKRQGREFIWNDLLSLETGSLKLANGRVIEKTLYNRRTRQDEPALFVALTFERREVLDSSNIKPMNLIGVDRGENIPAVIALTDPEGCPLSRFKDSLGNPTHILRIGESYKEKQRTIQAKKEVEQRRAGGYSRKYASKAKNLADDMVRNTARDLLYYAVTQDAMLIFENLSRGFGRQGKRTFMAERQYTRMEDWLTAKLAYEGLSKTYLSKTLAQYTSKTCSNCGFTITSADYDRVLEKLKKTATGWMTTINGKELKVEGQITYYNRRKRQNVVKDLSVELDRLSEESVNNDISSWTKGRSGEALSLLKKRFSHRPVQEKFVCLNCGFETHADEQAALNIARSWLFLRSQEYKKYQTNKTTGNTDKRAFVETWQSFYRKKLKEVWKPAV

SEQ ID NO: 92 - protein, 977 aa, Artificial Sequence
  CasX variant
MQEIKRINKIRRRLVKDSNTKKAGKTGPMKTLLVRVMTPDLRERLENLRKKPENIPQPISNTSRANLNKLLTDYTEMKKAILHVYWEEFQKDPVGLMSRVAQPAPKNIDQRKLIPVKDGNERLTSSGFACSQCCQPLYVYKLEQVNDKGKPHTNYFGRCNVSEHERLILLSPHKPEANDELVTYSLGKFGQRALDFYSIHVTRESNHPVKPLEQIGGNSCASGPVGKALSDACMGAVASFLTKYQDIILEHQKVIKKNEKRLANLKDIASANGLAFPKITLPPQPHTKEGIEAYNNVVAQIVIWVNLNLWQKLKIGRDEAKPLQRLKGFPSFPLVERQANEVDWWDMVCNVKKLINEKKEDGKVFWQNLAGYKRQEALRPYLSSENDRKKGKKFARYQLGDLLLHLEKKHGEDWGKVYDEAWERIDKKVEGLSKHIKLEEERRSEDAQSKAALTDWLRAKASFVIEGLKEADKDEFCRCELKLQKWYGDLRGKPFAIEAENSILDISGFSKQYNCAFIWQKDGVKKLNLYLIINYFKGGKLRFKKIKPEAFEANRFYTVINKKSGEIVPMEVNFNFDDPNLIILPLAFGKRQGREFIWNDLLSLETGSLKLANGRVIEKTLYNRRTRQDEPALFVALTFERREVLDSSNIKPMNLIGVDRGENIPAVIALTDPEGCPLSRFKDSLGNPTHILRIGESYKEKQRTIQAKKEVEQRRAGGYSRKYASKAKNLADDMVRNTARDLLYYAVTQDAMLIFENLSRGFGRQGKRTFMAERQYTRMEDWLTAKLAYEGLSKTYLSKTLAQYTSKTCSNCGFTITSADYDRVLEKLKKTATGWMTTINGKELKVEGQITYYNRRKRQNVVKDLSVELDRLSEESVNNDISSWTKGRSGEALSLLKKRFSHRPVQEKFVCLNCGFETHADEQAALNIARSWLFLRSQEYKKYQTNKTTGNTDKRAFVETWQSFYRKKLKEVWKPAV

SEQ ID NO: 93 - protein, 977 aa, Artificial Sequence
  CasX variant
MQEIKRINKIRRRLVKDSNTKKAGKTGPMKTLLVRVMTPDLRERLENLRKKPENIPQPISNTSRANLNKLLTDYTEMKKAILHVYWEEFQKDPVGLMSRVAQPAPKNIDQRKLIPVKDGNERLTSSGFACSQCCQPLYVYKLEQVNDKGKPHTNYFGRCNVSEHERLILLSPHKPEANDELVTYSLGKFGQRALDFYSIHVTRESNHPVKPLEQIGGNSCASGPVGKALSDACMGAVASFLTKYQDIILEHQKVIKKNEKRLANLKDIASANGLAFPKITLPPQPHTKEGIEAYNNVVAQIVIWVNLNLWQKLKIGRDEAKPLQRLKGFPSFPLVERQANEVDWWDMVCNVKKLINEKKEDGKVFWQNLAGYKRQEALRPYLSSEEDRKKGKKFARYQLGDLLLHLEKKHGEDWGKVYDEAWERIDKKVEGLSKHIKLEEERRSEDAQSKAALTDWLRAKASFVIEGLKEADKDEFSRCELKLQKWYGDLRGKPFAIEAENSILDISGFSKQYNCAFIWQKDGVKKLNLYLIINYFKGGKLRFKKIKPEAFEANRFYTVINKKSGEIVPMEVNFNFDDPNLIILPLAFGKRQGREFIWNDLLSLETGSLKLANGRVIEKTLYNRRTRQDEPALFVALTFERREVLDSSNIKPMNLIGVDRGENIPAVIALTDPEGCPLSRFKDSLGNPTHILRIGESYKEKQRTIQAKKEVEQRRAGGYSRKYASKAKNLADDMVRNTARDLLYYAVTQDAMLIFENLSRGFGRQGKRTFMAERQYTRMEDWLTAKLAYEGLSKTYLSKTLAQYTSKTCSNCGFTITSADYDRVLEKLKKTATGWMTTINGKELKVEGQITYYNRRKRQNVVKDLSVELDRLSEESVNNDISSWTKGRSGEALSLLKKRFSHRPVQEKFVCLNCGFETHADEQAALNIARSWLFLRSQEYKKYQTNKTTGNTDKRAFVETWQSFYRKKLKEVWKPAV

SEQ ID NO: 94 - protein, 977 aa, Artificial Sequence
  CasX variant
MQEIKRINKIRRRLVKDSNTKKAGKTGPMKTLLVRVMTPDLRERLENLRKKPENIPQPISNTSRANLNKLLTDYTEMKKAILHVYWEEFQKDPVGLMSRVAQPAPKNIDQRKLIPVKDGNERLTSSGFACSQCCQPLYVYKLEQVNDKGKPHTNYFGRCNVSEHERLILLSPHKPEANDELVTYSLGKFGQRALDFYSIHVTRESNHPVKPLEQIGGNSCASGPVGKALSDACMGAVASFLTKYQDIILEHQKVIKKNEKRLANLKDIASANGLAFPKITLPPQPHTKEGIEAYNNVVAQIVIWVNLNLWQKLKIGRDEAKPLQRLKGFPSFPLVERQANEVDWWDMVCNVKKLINEKKEDGKVFWQNLAGYKRQEALRPYLSSEEDRKKGKKFARYQLGDLLKHLEKKHGEDWGKVYDEAWERIDKKVEGLSKHIKLEEERRSEDAQSKAALTDWLRAKASFVIEGLKEADKDEFCRCELKLQKWYGDLRGKPFAIEAENSILDISGFSKQYNCAFIWQKDGVKKLNLYLIINYFKGGKLRFKKIKPEAFEANRFYTVINKKSGEIVPMEVNFNFDDPNLIILPLAFGKRQGREFIWNDLLSLETGSLKLANGRVIEKTLYNRRTRQDEPALFVALTFERREVLDSSNIKPMNLIGVDRGENIPAVIALTDPEGCPLSRFKDSLGNPTHILRIGESYKEKQRTIQAKKEVEQRRAGGYSRKYASKAKNLADDMVRNTARDLLYYAVTQDAMLIFENLSRGFGRQGKRTFMAERQYTRMEDWLTAKLAYEGLSKTYLSKTLAQYTSKTCSNCGFTITSADYDRVLEKLKKTATGWMTTINGKELKVEGQITYYNRRKRQNVVKDLSVELDRLSEESVNNDISSWTKGRSGEALSLLKKRFSHRPVQEKFVCLNCGFETHADEQAALNIARSWLFLRSQEYKKYQTNKTTGNTDKRAFVETWQSFYRKKLKEVWKPAV

SEQ ID NO: 95 - protein, 977 aa, Artificial Sequence
  CasX variant
MQEIKRINKIRRRLVKDSNTKKAGKTGPMKTLLVRVMTPDLRERLENLRKKPENIPQPISNTSRANLNKLLTDYTEMKKAILHVYWEEFQKDPVGLMSRVAQPAPKNIDQRKLIPVKDGNERLTSSGFACSQCCQPLYVYKLEQVNDKGKPHTNYFGRCNVSEHERLILLSPHKPEANDELVTYSLGKFGQRALDFYSIHVTRESNHPVKPLEQIGGNSCASGPVGKALSDACMGAVASFLTKYQDIILEHQKVIKKNEKRLANLKDIASANGLAFPKITLPPQPHTKEGIEAYNNVVAQIVIWVNLNLWQKLKIGRDEAKPLQRLKGFPSFPLVERQANEVDWWDMVCNVKKLINEKKEDGKVFWQNLAGYKRQEALRPYLSSENDRKKGKKFARYQLGDLLKHLEKKHGEDWGKVYDEAWERIDKKVEGLSKHIKLEEERRSEDAQSKAALTDWLRAKASFVIEGLKEADKDEFSRCELKLQKWYGDLRGKPFAIEAENSILDISGFSKQYNCAFIWQKDGVKKLNLYLIINYFKGGKLRFKKIKPEAFEANRFYTVINKKSGEIVPMEVNFNFDDPNLIILPLAFGKRQGREFIWNDLLSLETGSLKLANGRVIEKTLYNRRTRQDEPALFVALTFERREVLDSSNIKPMNLIGVDRGENIPAVIALTDPEGCPLSRFKDSLGNPTHILRIGESYKEKQRTIQAKKEVEQRRAGGYSRKYASKAKNLADDMVRNTARDLLYYAVTQDAMLIFENLSRGFGRQGKRTFMAERQYTRMEDWLTAKLAYEGLSKTYLSKTLAQYTSKTCSNCGFTITSADYDRVLEKLKKTATGWMTTINGKELKVEGQITYYNRRKRQNVVKDLSVELDRLSEESVNNDISSWTKGRSGEALSLLKKRFSHRPVQEKFVCLNCGFETHADEQAALNIARSWLFLRSQEYKKYQTNKTTGNTDKRAFVETWQSFYRKKLKEVWKPAV

SEQ ID NO: 96 - protein, 977 aa, Artificial Sequence
  CasX variant
MQEIKRINKIRRRLVKDSNTKKAGKTGPMKTLLVRVMTPDLRERLENLRKKPENIPQPISNTSRANLNKLLTDYTEMKKAILHVYWEEFQKDPVGLMSRVAQPAPKNIDQRKLIPVKDGNERLTSSGFACSQCCQPLYVYKLEQVNDKGKPHTNYFGRCNVSEHERLILLSPHKPEANDELVTYSLGKFGQRALDFYSIHVTRESNHPVKPLEQIGGNSCASGPVGKALSDACMGAVASFLTKYQDIILEHQKVIKKNEKRLANLKDIASANGLAFPKITLPPQPHTKEGIEAYNNVVAQIVIWVNLNLWQKLKIGRDEAKPLQRLKGFPSFPLVERQANEVDWWDMVCNVKKLINEKKEDGKVFWQNLAGYKRQEALRPYLSSEEDRKKGKKFARYQLGDLLLHLEKKHGEDWGKVYDEAWERIDKKVEGLSKHIKLEEERRSEDAQSKAALTDWLRAKASFVIEGLKEADKDEFCRCELKLQKWYGDLRGKPFAIEAENSILDISGFSKQYNCAFIWQKDGVKKLNLYLIINYFKGGKLRFKKIKPEAFEANRFYTVINKKSGEIVPMEVNFNFDDPNLIILPLAFGKRQGREFIWNDLLSLETGSLKLANGRVIEKTLYNRRTRQDEPALFVALTFERREVLDSSNIKPMNLIGVDRGENIPAVIALTDPEGCPLSRFKDSLGNPTHILRIGESYKEKQRTIQAKKEVEQRRAGGYSRKYASKAKNLADDMVRNTARDLLYYAVTQDAMLIFENLSRGFGRQGKRTFMAERQYTRMEDWLTAKLAYEGLSKTLLSKTLAQYTSKTCSNCGFTITSADYDRVLEKLKKTATGWMTTINGKELKVEGQITYYNRRKRQNVVKDLSVELDRLSEESVNNDISSWTKGRSGEALSLLKKRFSHRPVQEKFVCLNCGFETHADEQAALNIARSWLFLRSQEYKKYQTNKTTGNTDKRAFVETWQSFYRKKLKEVWKPAV

SEQ ID NO: 97 - protein, 977 aa, Artificial Sequence
  CasX variant
MQEIKRINKIRRRLVKDSNTKKAGKTGPMKTLLVRVMTPDLRERLENLRKKPENIPQPISNTSRANLNKLLTDYTEMKKAILHVYWEEFQKDPVGLMSRVAQPAPKNIDQRKLIPVKDGNERLTSSGFACSQCCQPLYVYKLEQVNDKGKPHTNYFGRCNVSEHERLILLSPHKPEANDELVTYSLGKFGQRALDFYSIHVTRESNHPVKPLEQIGGNSCASGPVGKALSDACMGAVASFLTKYQDIILEHQKVIKKNEKRLANLKDIASANGLAFPKITLPPQPHTKEGIEAYNNVVAQIVIWVNLNLWQKLKIGRDEAKPLQRLKGFPSFPLVERQANEVDWWDMVCNVKKLINEKKEDGKVFWQNLAGYKRQEALRPYLSSENDRKKGKKFARYQLGDLLLHLEKKHGEDWGKVYDEAWERIDKKVEGLSKHIKLEEERRSEDAQSKAALTDWLRAKASFVIEGLKEADKDEFCRCELKLQKWYGDLRGKPFAIEAENSILDISGFSKQYNCAFIWQKDGVKKLNLYLIINYFKGGKLRFKKIKPEAFEANRFYTVINKKSGEIVPMEVNFNFDDPNLIILPLAFGKRQGREFIWNDLLSLETGSLKLANGRVIEKTLYNRRTRQDEPALFVALTFERREVLDSSNIKPMNLIGVDRGENIPAVIALTDPEGCPLSRFKDSLGNPTHILRIGESYKEKQRTIQAKKEVEQRRAGGYSRKYASKAKNLADDMVRNTARDLLYYAVTQDAMLIFENLSRGFGRQGKRTFMAERQYTRMEDWLTAKLAYEGLSKTLLSKTLAQYTSKTCSNCGFTITSADYDRVLEKLKKTATGWMTTINGKELKVEGQITYYNRRKRQNVVKDLSVELDRLSEESVNNDISSWTKGRSGEALSLLKKRFSHRPVQEKFVCLNCGFETHADEQAALNIARSWLFLRSQEYKKYQTNKTTGNTDKRAFVETWQSFYRKKLKEVWKPAV

SEQ ID NO: 98 - protein, 977 aa, Artificial Sequence
  CasX variant
MQEIKRINKIRRRLVKDSNTKKAGKTGPMKTLLVRVMTPDLRERLENLRKKPENIPQPISNTSRANLNKLLTDYTEMKKAILHVYWEEFQKDPVGLMSRVAQPAPKNIDQRKLIPVKDGNERLTSSGFACSQCCQPLYVYKLEQVNDKGKPHTNYFGRCNVSEHERLILLSPHKPEANDELVTYSLGKFGQRALDFYSIHVTRESNHPVKPLEQIGGNSCASGPVGKALSDACMGAVASFLTKYQDIILEHQKVIKKNEKRLANLKDIASANGLAFPKITLPPQPHTKEGIEAYNNVVAQIVIWVNLNLWQKLKIGRDEAKPLQRLKGFPSFPLVERQANEVDWWDMVCNVKKLINEKKEDGKVFWQNLAGYKRQEALRPYLSSENDRKKGKKFARYQLGDLLKHLEKKHGEDWGKVYDEAWERIDKKVEGLSKHIKLEEERRSEDAQSKAALTDWLRAKASFVIEGLKEADKDEFSRCELKLQKWYGDLRGKPFAIEAENSILDISGFSKQYNCAFIWQKDGVKKLNLYLIINYFKGGKLRFKKIKPEAFEANRFYTVINKKSGEIVPMEVNFNFDDPNLIILPLAFGKRQGREFIWNDLLSLETGSLKLANGRVIEKTLYNRRTRQDEPALFVALTFERREVLDSSNIKPMNLIGVDRGENIPAVIALTDPEGCPLSRFKDSLGNPTHILRIGESYKEKQRTIQAKKEVEQRRAGGYSRKYASKAKNLADDMVRNTARDLLYYAVTQDAMLIFENLSRGFGRQGKRTFMAERQYTRMEDWLTAKLAYEGLSKTLLSKTLAQYTSKTCSNCGFTITSADYDRVLEKLKKTATGWMTTINGKELKVEGQITYYNRRKRQNVVKDLSVELDRLSEESVNNDISSWTKGRSGEALSLLKKRFSHRPVQEKFVCLNCGFETHADEQAALNIARSWLFLRSQEYKKYQTNKTTGNTDKRAFVETWQSFYRKKLKEVWKPAV

SEQ ID NO: 99 - protein, 977 aa, Artificial Sequence
  CasX variant
MQEIKRINKIRRRLVKDSNTKKAGKTGPMKTLLVRVMTPDLRERLENLRKKPENIPQPISNTSRANLNKLLTDYTEMKKAILHVYWEEFQKDPVGLMSRVAQPAPKNIDQRKLIPVKDGNERLTSSGFACSQCCQPLYVYKLEQVNDKGKPHTNYFGRCNVSEHERLILLSPHKPEANDELVTYSLGKFGQRALDFYSIHVTRESNHPVKPLEQIGGNSCASGPVGKALSDACMGAVASFLTKYQDIILEHQKVIKKNEKRLANLKDIASANGLAFPKITLPPQPHTKEGIEAYNNVVAQIVIWVNLNLWQKLKIGRDEAKPLQRLKGFPSFPLVERQANEVDWWDMVCNVKKLINEKKEDGKVFWQNLAGYKRQEALRPYLSSEEDRKKGKKFARYQFGDLLLHLEKKHGEDWGKVYDEAWERIDKKVEGLSKHIKLEEERRSEDAQSKAALTDWLRAKASFVIEGLKEADKDEFCRCELKLQKWYGDLRGKPFAIEAENSILDISGFSKQYNCAFIWQKDGVKKLNLYLIINYFKGGKLRFKKIKPEAFEANRFYTVINKKSGEIVPMEVNFNFDDPNLIILPLAFGKRQGREFIWNDLLSLETGSLKLANGRVIEKTLYNRRTRQDEPALFVALTFERREVLDSSNIKPMNLIGVDRGENIPAVIALTDPEGCPLSRFKDSLGNPTHILRIGESYKEKQRTIQAKKEVEQRRAGGYSRKYASKAKNLADDMVRNTARDLLYYAVTQDAMLIFENLSRGFGRQGKRTFMAERQYTRMEDWLTAKLAYEGLSKTLLSKTLAQYTSKTCSNCGFTITSADYDRVLEKLKKTATGWMTTINGKELKVEGQITYYNRRKRQNVVKDLSVELDRLSEESVNNDISSWTKGRSGEALSLLKKRFSHRPVQEKFVCLNCGFETHADEQAALNIARSWLFLRSQEYKKYQTNKTTGNTDKRAFVETWQSFYRKKLKEVWKPAV

SEQ ID NO: 100 - protein, 977 aa, Artificial Sequence
  CasX variant
MQEIKRINKIRRRLVKDSNTKKAGKTGPMKTLLVRVMTPDLRERLENLRKKPENIPQPISNTSRANLNKLLTDYTEMKKAILHVYWEEFQKDPVGLMSRVAQPAPKNIDQRKLIPVKDGNERLTSSGFACSQCCQPLYVYKLEQVNDKGKPHTNYFGRCNVSEHERLILLSPHKPEANDELVTYSLGKFGQRALDFYSIHVTRESNHPVKPLEQIGGNSCASGPVGKALSDACMGAVASFLTKYQDIILEHQKVIKKNEKRLANLKDIASANGLAFPKITLPPQPHTKEGIEAYNNVVAQIVIWVNLNLWQKLKIGRDEAKPLQRLKGFPSFPLVERQANEVDWWDMVCNVKKLINEKKEDGKVFWQNLAGYKRQEALRPYLSSEEDRKKGKKFARYQFGDLLKHLEKKHGEDWGKVYDEAWERIDKKVEGLSKHIKLEEERRSEDAQSKAALTDWLRAKASFVIEGLKEADKDEFCRCELKLQKWYGDLRGKPFAIEAENSILDISGFSKQYNCAFIWQKDGVKKLNLYLIINYFKGGKLRFKKIKPEAFEANRFYTVINKKSGEIVPMEVNFNFDDPNLIILPLAFGKRQGREFIWNDLLSLETGSLKLANGRVIEKTLYNRRTRQDEPALFVALTFERREVLDSSNIKPMNLIGVDRGENIPAVIALTDPEGCPLSRFKDSLGNPTHILRIGESYKEKQRTIQAKKEVEQRRAGGYSRKYASKAKNLADDMVRNTARDLLYYAVTQDAMLIFENLSRGFGRQGKRTFMAERQYTRMEDWLTAKLAYEGLSKTLLSKTLAQYTSKTCSNCGFTITSADYDRVLEKLKKTATGWMTTINGKELKVEGQITYYNRRKRQNVVKDLSVELDRLSEESVNNDISSWTKGRSGEALSLLKKRFSHRPVQEKFVCLNCGFETHADEQAALNIARSWLFLRSQEYKKYQTNKTTGNTDKRAFVETWQSFYRKKLKEVWKPAV

SEQ ID NO: 101 - protein, 977 aa, Artificial Sequence
  CasX variant
MQEIKRINKIRRRLVKDSNTKKAGKTGPMKTLLVRVMTPDLRERLENLRKKPENIPQPISNTSRANLNKLLTDYTEMKKAILHVYWEEFQKDPVGLMSRVAQPAPKNIDQRKLIPVKDGNERLTSSGFACSQCCQPLYVYKLEQVNDKGKPHTNYFGRCNVSEHERLILLSPHKPEANDELVTYSLGKFGQRALDFYSIHVTRESNHPVKPLEQIGGNSCASGPVGKALSDACMGAVASFLTKYQDIILEHQKVIKKNEKRLANLKDIASANGLAFPKITLPPQPHTKEGIEAYNNVVAQIVIWVNLNLWQKLKIGRDEAKPLQRLKGFPSFPLVERQANEVDWWDMVCNVKKLINEKKEDGKVFWQNLAGYKRQEALRPYLSSENDRKKGKKFARYQFGDLLLHLEKKHGEDWGKVYDEAWERIDKKVEGLSKHIKLEEERRSEDAQSKAALTDWLRAKASFVIEGLKEADKDEFCRCELKLQKWYGDLRGKPFAIEAENSILDISGFSKQYNCAFIWQKDGVKKLNLYLIINYFKGGKLRFKKIKPEAFEANRFYTVINKKSGEIVPMEVNFNFDDPNLIILPLAFGKRQGREFIWNDLLSLETGSLKLANGRVIEKTLYNRRTRQDEPALFVALTFERREVLDSSNIKPMNLIGVDRGENIPAVIALTDPEGCPLSRFKDSLGNPTHILRIGESYKEKQRTIQAKKEVEQRRAGGYSRKYASKAKNLADDMVRNTARDLLYYAVTQDAMLIFENLSRGFGRQGKRTFMAERQYTRMEDWLTAKLAYEGLSKTLLSKTLAQYTSKTCSNCGFTITSADYDRVLEKLKKTATGWMTTINGKELKVEGQITYYNRRKRQNVVKDLSVELDRLSEESVNNDISSWTKGRSGEALSLLKKRFSHRPVQEKFVCLNCGFETHADEQAALNIARSWLFLRSQEYKKYQTNKTTGNTDKRAFVETWQSFYRKKLKEVWKPAV

SEQ ID NO: 102 - protein, 977 aa, Artificial Sequence
  CasX variant
MQEIKRINKIRRRLVKDSNTKKAGKTGPMKTLLVRVMTPDLRERLENLRKKPENIPQPISNTSRANLNKLLTDYTEMKKAILHVYWEEFQKDPVGLMSRVAQPAPKNIDQRKLIPVKDGNERLTSSGFACSQCCQPLYVYKLEQVNDKGKPHTNYFGRCNVSEHERLILLSPHKPEANDELVTYSLGKFGQRALDFYSIHVTRESNHPVKPLEQIGGNSCASGPVGKALSDACMGAVASFLTKYQDIILEHQKVIKKNEKRLANLKDIASANGLAFPKITLPPQPHTKEGIEAYNNVVAQIVIWVNLNLWQKLKIGRDEAKPLQRLKGFPSFPLVERQANEVDWWDMVCNVKKLINEKKEDGKVFWQNLAGYKRQEALRPYLSSENDRKKGKKFARYQFGDLLKHLEKKHGEDWGKVYDEAWERIDKKVEGLSKHIKLEEERRSEDAQSKAALTDWLRAKASFVIEGLKEADKDEFSRCELKLQKWYGDLRGKPFAIEAENSILDISGFSKQYNCAFIWQKDGVKKLNLYLIINYFKGGKLRFKKIKPEAFEANRFYTVINKKSGEIVPMEVNFNFDDPNLIILPLAFGKRQGREFIWNDLLSLETGSLKLANGRVIEKTLYNRRTRQDEPALFVALTFERREVLDSSNIKPMNLIGVDRGENIPAVIALTDPEGCPLSRFKDSLGNPTHILRIGESYKEKQRTIQAKKEVEQRRAGGYSRKYASKAKNLADDMVRNTARDLLYYAVTQDAMLIFENLSRGFGRQGKRTFMAERQYTRMEDWLTAKLAYEGLSKTLLSKTLAQYTSKTCSNCGFTITSADYDRVLEKLKKTATGWMTTINGKELKVEGQITYYNRRKRQNVVKDLSVELDRLSEESVNNDISSWTKGRSGEALSLLKKRFSHRPVQEKFVCLNCGFETHADEQAALNIARSWLFLRSQEYKKYQTNKTTGNTDKRAFVETWQSFYRKKLKEVWKPAV

SEQ ID NO: 103 - protein, 977 aa, Artificial Sequence
  CasX variant
MQEIKRINKIRRRLVKDSNTKKAGKTGPMKTLLVRVMTPDLRERLENLRKKPENIPQPISNTSRANLNKLLTDYTEMKKAILHVYWEEFQKDPVGLMSRVAQPAPKNIDQRKLIPVKDGNERLTSSGFACSQCCQPLYVYKLEQVNDKGKPHTNYFGRCNVSEHERLILLSPHKPEANDELVTYSLGKFGQRALDFYSIHVTRESNHPVKPLEQIGGNSCASGPVGKALSDACMGAVASFLTKYQDIILEHQKVIKKNEKRLANLKDIASANGLAFPKITLPPQPHTKEGIEAYNNVVAQIVIWVNLNLWQKLKIGRDEAKPLQRLKGFPSFPLVERQANEVDWWDMVCNVKKLINEKKEDGKVFWQNLAGYKRQEALRPYLSSENDRKKGKKFARYQFGDLLLHLEKKHGEDWGKVYDEAWERIDKKVEGLSKHIKLEEERRSEDAQSKAALTDWLRAKASFVIEGLKEADKDEFCRCELKLQKWYGDLRGKPFAIEAENSILDISGFSKQYNCAFIWQKDGVKKLNLYLIINYFKGGKLRFKKIKPEAFEANRFYTVINKKSGEIVPMEVNFNFDDPNLIILPLAFGKRQGREFIWNDLLSLETGSLKLANGRVIEKTLYNRRTRQDEPALFVALTFERREVLDSSNIKPMNLIGIDRGENIPAVIALTDPEGCPLSRFKDSLGNPTHILRIGESYKEKQRTIQAKKEVEQRRAGGYSRKYASKAKNLADDMVRNTARDLLYYAVTQDAMLIFENLSRGFGRQGKRTFMAERQYTRMEDWLTAKLAYEGLSKTYLSKTLAQYTSKTCSNCGFTITSADYDRVLEKLKKTATGWMTTINGKELKVEGQITYYNRRKRQNVVKDLSVELDRLSEESVNNDISSWTKGRSGEALSLLKKRFSHRPVQEKFVCLNCGFETHADEQAALNIARSWLFLRSQEYKKYQTNKTTGNTDKRAFVETWQSFYRKKLKEVWKPAV

SEQ ID NO: 104 - protein, 977 aa, Artificial Sequence
  CasX variant
MQEIKRINKIRRRLVKDSNTKKAGKTGPMKTLLVRVMTPDLRERLENLRKKPENIPQPISNTSRANLNKLLTDYTEMKKAILHVYWEEFQKDPVGLMSRVAQPAPKNIDQRKLIPVKDGNERLTSSGFACSQCCQPLYVYKLEQVNDKGKPHTNYFGRCNVSEHERLILLSPHKPEANDELVTYSLGKFGQRALDFYSIHVTRESNHPVKPLEQIGGNSCASGPVGKALSDACMGAVASFLTKYQDIILEHQKVIKKNEKRLANLKDIASANGLAFPKITLPPQPHTKEGIEAYNNVVAQIVIWVNLNLWQKLKIGRDEAKPLQRLKGFPSFPLVERQANEVDWWDMVCNVKKLINEKKEDGKVFWQNLAGYKRQEALRPYLSSENDRKKGKKFARYQFGDLLKHLEKKHGEDWGKVYDEAWERIDKKVEGLSKHIKLEEERRSEDAQSKAALTDWLRAKASFVIEGLKEADKDEFCRCELKLQKWYGDLRGKPFAIEAENSILDISGFSKQYNCAFIWQKDGVKKLNLYLIINYFKGGKLRFKKIKPEAFEANRFYTVINKKSGEIVPMEVNFNFDDPNLIILPLAFGKRQGREFIWNDLLSLETGSLKLANGRVIEKTLYNRRTRQDEPALFVALTFERREVLDSSNIKPMNLIGIDRGENIPAVIALTDPEGCPLSRFKDSLGNPTHILRIGESYKEKQRTIQAKKEVEQRRAGGYSRKYASKAKNLADDMVRNTARDLLYYAVTQDAMLIFENLSRGFGRQGKRTFMAERQYTRMEDWLTAKLAYEGLSKTYLSKTLAQYTSKTCSNCGFTITSADYDRVLEKLKKTATGWMTTINGKELKVEGQITYYNRRKRQNVVKDLSVELDRLSEESVNNDISSWTKGRSGEALSLLKKRFSHRPVQEKFVCLNCGFETHADEQAALNIARSWLFLRSQEYKKYQTNKTTGNTDKRAFVETWQSFYRKKLKEVWKPAV

SEQ ID NO: 105 - protein, 977 aa, Artificial Sequence
  CasX variant
MQEIKRINKIRRRLVKDSNTKKAGKTGPMKTLLVRVMTPDLRERLENLRKKPENIPQPISNTSRANLNKLLTDYTEMKKAILHVYWEEFQKDPVGLMSRVAQPAPKNIDQRKLIPVKDGNERLTSSGFACSQCCQPLYVYKLEQVNDKGKPHTNYFGRCNVSEHERLILLSPHKPEANDELVTYSLGKFGQRALDFYSIHVTRESNHPVKPLEQIGGNSCASGPVGKALSDACMGAVASFLTKYQDIILEHQKVIKKNEKRLANLKDIASANGLAFPKITLPPQPHTKEGIEAYNNVVAQIVIWVNLNLWQKLKIGRDEAKPLQRLKGFPSFPLVERQANEVDWWDMVCNVKKLINEKKEDGKVFWQNLAGYKRQEALRPYLSSPEDRKKGKKFARYQFGDLLLHLEKKHGEDWGKVYDEAWERIDKKVEGLSKHIKLEEERRSEDAQSKAALTDWLRAKASFVIEGLKEADKDEFCRCELKLQKWYGDLRGKPFAIEAENSILDISGFSKQYNCAFIWQKDGVKKLNLYLIINYFKGGKLRFKKIKPEAFEANRFYTVINKKSGEIVPMEVNFNFDDPNLIILPLAFGKRQGREFIWNDLLSLETGSLKLANGRVIEKTLYNRRTRQDEPALFVALTFERREVLDSSNIKPMNLIGIDRGENIPAVIALTDPEGCPLSRFKDSLGNPTHILRIGESYKEKQRTIQAKKEVEQRRAGGYSRKYASKAKNLANDMVRNTARDLLYYAVTQDAMLIFENLSRGFGRQGKRTFMAERQYTRMEDWLTAKLAYEGLSKTYLSKTLAQYTSKTCSNCGFTITSADYDRVLEKLKKTATGWMTTINGKELKVEGQITYYNRRKRQNVVKDLSVELDRLSEESVNNDISSWTKGRSGEALSLLKKRFSHRPVQEKFVCLNCGFETHADEQAALNIARSWLFLRSQEYKKYQTNKTTGNTDKRAFVETWQSFYRKKLKEVWKPAV

SEQ ID NO: 106 - protein, 977 aa, Artificial Sequence
  CasX variant
MQEIKRINKIRRRLVKDSNTKKAGKTGPMKTLLVRVMTPDLRERLENLRKKPENIPQPISNTSRANLNKLLTDYTEMKKAILHVYWEEFQKDPVGLMSRVAQPAPKNIDQRKLIPVKDGNERLTSSGFACSQCCQPLYVYKLEQVNDKGKPHTNYFGRCNVSEHERLILLSPHKPEANDELVTYSLGKFGQRALDFYSIHVTRESNHPVKPLEQIGGNSCASGPVGKALSDACMGAVASFLTKYQDIILEHQKVIKKNEKRLANLKDIASANGLAFPKITLPPQPHTKEGIEAYNNVVAQIVIWVNLNLWQKLKIGRDEAKPLQRLKGFPSFPLVERQANEVDWWDMVCNVKKLINEKKEDGKVFWQNLAGYKRQEALRPYLSSPEDRKKGKKFARYQFGDLLLHLEKKHGEDWGKVYDEAWERIDKKVEGLSKHIKLEEERRSEDAQSKAALTDWLRAKASFVIEGLKEADKDEFCRCELKLQKWYGDLRGKPFAIEAENSILDISGFSKQYNCAFIWQKDGVKKLNLYLIINYFKGGKLRFKKIKPEAFEANRFYTVINKKSGEIVPMEVNFNFDDPNLIILPLAFGKRQGREFIWNDLLSLETGSLKLANGRVIEKTLYNRRTRQDEPALFVALTFERREVLDSSNIKPMNLIGVDRGENIPAVIALTDPEGCPLSRFKDSLGNPTHILRIGESYKEKQRTIQAKKEVEQRRAGGYSRKYASKAKNLANDMVRNTARDLLYYAVTQDAMLIFENLSRGFGRQGKRTFMAERQYTRMEDWLTAKLAYEGLSKTYLSKTLAQYTSKTCSNCGFTITSADYDRVLEKLKKTATGWMTTINGKELKVEGQITYYNRRKRQNVVKDLSVELDRLSEESVNNDISSWTKGRSGEALSLLKKRFSHRPVQEKFVCLNCGFETHADEQAALNIARSWLFLRSQEYKKYQTNKTTGNTDKRAFVETWQSFYRKKLKEVWKPAV

SEQ ID NO: 107 - protein, 977 aa, Artificial Sequence
  CasX variant
MQEIKRINKIRRRLVKDSNTKKAGKTGPMKTLLVRVMTPDLRERLENLRKKPENIPQPISNTSRANLNKLLTDYTEMKKAILHVYWEEFQKDPVGLMSRVAQPAPKNIDQRKLIPVKDGNERLTSSGFACSQCCQPLYVYKLEQVNDKGKPHTNYFGRCNVSEHERLILLSPHKPEANDELVTYSLGKFGQRALDFYSIHVTRESNHPVKPLEQIGGNSCASGPVGKALSDACMGAVASFLTKYQDIILEHQKVIKKNEKRLANLKDIASANGLAFPKITLPPQPHTKEGIEAYNNVVAQIVIWVNLNLWQKLKIGRDEAKPLQRLKGFPSFPLVERQANEVDWWDMVCNVKKLINEKKEDGKVFWQNLAGYKRQEALRPYLSSPEDRKKGKKFARYQLGDLLLHLEKKHGEDWGKVYDEAWERIDKKVEGLSKHIKLEEERRSEDAQSKAALTDWLRAKASFVIEGLKEADKDEFCRCELKLQKWYGDLRGKPFAIEAENSILDISGFSKQYNCAFIWQKDGVKKLNLYLIINYFKGGKLRFKKIKPEAFEANRFYTVINKKSGEIVPMEVNFNFDDPNLIILPLAFGKRQGREFIWNDLLSLETGSLKLANGRVIEKTLYNRRTRQDEPALFVALTFERREVLDSSNIKPMNLIGVDRGENIPAVIALTDPEGCPLSRFKDSLGNPTHILRIGESYKEKQRTIQAKKEVEQRRAGGYSRKYASKAKNLANDMVRNTARDLLYYAVTQDAMLIFENLSRGFGRQGKRTFMAERQYTRMEDWLTAKLAYEGLSKTYLSKTLAQYTSKTCSNCGFTITSADYDRVLEKLKKTATGWMTTINGKELKVEGQITYYNRRKRQNVVKDLSVELDRLSEESVNNDISSWTKGRSGEALSLLKKRFSHRPVQEKFVCLNCGFETHADEQAALNIARSWLFLRSQEYKKYQTNKTTGNTDKRAFVETWQSFYRKKLKEVWKPAV

SEQ ID NO: 108 - protein, 977 aa, Artificial Sequence
  CasX variant
MQEIKRINKIRRRLVKDSNTKKAGKTGPMKTLLVRVMTPDLRERLENLRKKPENIPQPISNTSRANLNKLLTDYTEMKKAILHVYWEEFQKDPVGLMSRVAQPAPKNIDQRKLIPVKDGNERLTSSGFACSQCCQPLYVYKLEQVNDKGKPHTNYFGRCNVSEHERLILLSPHKPEANDELVTYSLGKFGQRALDFYSIHVTRESNHPVKPLEQIGGNSCASGPVGKALSDACMGAVASFLTKYQDIILEHQKVIKKNEKRLANLKDIASANGLAFPKITLPPQPHTKEGIEAYNNVVAQIVIWVNLNLWQKLKIGRDEAKPLQRLKGFPSFPLVERQANEVDWWDMVCNVKKLINEKKEDGKVFWQNLAGYKRQEALRPYLSSPNDRKKGKKFARYQFGDLLLHLEKKHGEDWGKVYDEAWERIDKKVEGLSKHIKLEEERRSEDAQSKAALTDWLRAKASFVIEGLKEADKDEFCRCELKLQKWYGDLRGKPFAIEAENSILDISGFSKQYNCAFIWQKDGVKKLNLYLIINYFKGGKLRFKKIKPEAFEANRFYTVINKKSGEIVPMEVNFNFDDPNLIILPLAFGKRQGREFIWNDLLSLETGSLKLANGRVIEKTLYNRRTRQDEPALFVALTFERREVLDSSNIKPMNLIGVDRGENIPAVIALTDPEGCPLSRFKDSLGNPTHILRIGESYKEKQRTIQAKKEVEQRRAGGYSRKYASKAKNLANDMVRNTARDLLYYAVTQDAMLIFENLSRGFGRQGKRTFMAERQYTRMEDWLTAKLAYEGLSKTYLSKTLAQYTSKTCSNCGFTITSADYDRVLEKLKKTATGWMTTINGKELKVEGQITYYNRRKRQNVVKDLSVELDRLSEESVNNDISSWTKGRSGEALSLLKKRFSHRPVQEKFVCLNCGFETHADEQAALNIARSWLFLRSQEYKKYQTNKTTGNTDKRAFVETWQSFYRKKLKEVWKPAV

SEQ ID NO: 109 - protein, 977 aa, Artificial Sequence
  CasX variant
MQEIKRINKIRRRLVKDSNTKKAGKTGPMKTLLVRVMTPDLRERLENLRKKPENIPQPISNTSRANLNKLLTDYTEMKKAILHVYWEEFQKDPVGLMSRVAQPAPKNIDQRKLIPVKDGNERLTSSGFACSQCCQPLYVYKLEQVNDKGKPHTNYFGRCNVSEHERLILLSPHKPEANDELVTYSLGKFGQRALDFYSIHVTRESNHPVKPLEQIGGNSCASGPVGKALSDACMGAVASFLTKYQDIILEHQKVIKKNEKRLANLKDIASANGLAFPKITLPPQPHTKEGIEAYNNVVAQIVIWVNLNLWQKLKIGRDEAKPLQRLKGFPSFPLVERQANEVDWWDMVCNVKKLINEKKEDGKVFWQNLAGYKRQEALRPYLSSPEDRKKGKKFARYQFGDLLKHLEKKHGEDWGKVYDEAWERIDKKVEGLSKHIKLEEERRSEDAQSKAALTDWLRAKASFVIEGLKEADKDEFCRCELKLQKWYGDLRGKPFAIEAENSILDISGFSKQYNCAFIWQKDGVKKLNLYLIINYFKGGKLRFKKIKPEAFEANRFYTVINKKSGEIVPMEVNFNFDDPNLIILPLAFGKRQGREFIWNDLLSLETGSLKLANGRVIEKTLYNRRTRQDEPALFVALTFERREVLDSSNIKPMNLIGVDRGENIPAVIALTDPEGCPLSRFKDSLGNPTHILRIGESYKEKQRTIQAKKEVEQRRAGGYSRKYASKAKNLANDMVRNTARDLLYYAVTQDAMLIFENLSRGFGRQGKRTFMAERQYTRMEDWLTAKLAYEGLSKTYLSKTLAQYTSKTCSNCGFTITSADYDRVLEKLKKTATGWMTTINGKELKVEGQITYYNRRKRQNVVKDLSVELDRLSEESVNNDISSWTKGRSGEALSLLKKRFSHRPVQEKFVCLNCGFETHADEQAALNIARSWLFLRSQEYKKYQTNKTTGNTDKRAFVETWQSFYRKKLKEVWKPAV

SEQ ID NO: 110 - protein, 977 aa, Artificial Sequence
  CasX variant
MQEIKRINKIRRRLVKDSNTKKAGKTGPMKTLLVRVMTPDLRERLENLRKKPENIPQPISNTSRANLNKLLTDYTEMKKAILHVYWEEFQKDPVGLMSRVAQPAPKNIDQRKLIPVKDGNERLTSSGFACSQCCQPLYVYKLEQVNDKGKPHTNYFGRCNVSEHERLILLSPHKPEANDELVTYSLGKFGQRALDFYSIHVTRESNHPVKPLEQIGGNSCASGPVGKALSDACMGAVASFLTKYQDIILEHKKVIKKNEKRLANLKDIASANGLAFPKITLPPQPHTKEGIEAYNNVVAQIVIWVNLNLWQKLKIGRDEAKPLQRLKGFPSFPLVERQANEVDWWDMVCNVKKLINEKKEDGKVFWQNLAGYKRQEALRPYLSSPEDRKKGKKFARYQFGDLLLHLEKKHGEDWGKVYDEAWERIDKKVEGLSKHIKLEEERRSEDAQSKAALTDWLRAKASFVIEGLKEADKDEFCRCELKLQKWYGDLRGKPFAIEAENSILDISGFSKQYNCAFIWQKDGVKKLNLYLIINYFKGGKLRFKKIKPEAFEANRFYTVINKKSGEIVPMEVNFNFDDPNLIILPLAFGKRQGREFIWNDLLSLETGSLKLANGRVIEKPLYNRRTRQDEPALFVALTFERREVLDSSNIKPMNLIGIDRGENIPAVIALTDPEGCPLSRFKDSLGNPTHILRIGESYKEKQRTIQAKKEVEQRRAGGYSRKYASKAKNLADDMVRNTARDLLYYAVTQDAMLIFENLSRGFGRQGKRTFMAERQYTRMEDWLTAKLAYEGLSKTYLSKTLAQYTSKTCSNCGFTITSADYDRVLEKLKKTATGWMTTINGKELKVEGQITYYNRRKRQNVVKDLSVELDRLSEESVNNDISSWTKGRSGEALSLLKKRFSHRPVQEKFVCLNCGFETHADEQAALNIARSWLFLRSQEYKKYQTNKTTGNTDKRAFVETWQSFYRKKLKEVWKPAV

SEQ ID NO: 111 - protein, 977 aa, Artificial Sequence
  CasX variant
MQEIKRINKIRRRLVKDSNTKKAGKTGPMKTLLVRVMTPDLRERLENLRKKPENIPQPISNTSRANLNKLLTDYTEMKKAILHVYWEEFQKDPVGLMSRVAQPAPKNIDQRKLIPVKDGNERLTSSGFACSQCCQPLYVYKLEQVNDKGKPHTNYFGRCNVSEHERLILLSPHKPEANDELVTYSLGKFGQRALDFYSIHVTRESNHPVKPLEQIGGNSCASGPVGKALSDACMGAVASFLTKYQDIILEHKKVIKKNEKRLANLKDIASANGLAFPKITLPPQPHTKEGIEAYNNVVAQIVIWVNLNLWQKLKIGRDEAKPLQRLKGFPSFPLVERQANEVDWWDMVCNVKKLINEKKEDGKVFWQNLAGYKRQEALRPYLSSPEDRKKGKKFARYQFGDLLLHLEKKHGEDWGKVYDEAWERIDKKVEGLSKHIKLEEERRSEDAQSKAALTDWLRAKASFVIEGLKEADKDEFCRCELKLQKWYGDLRGKPFAIEAENSILDISGFSKQYNCAFIWQKDGVKKLNLYLIINYFKGGKLRFKKIKPEAFEANRFYTVINKKSGEIVPMEVNFNFDDPNLIILPLAFGKRQGREFIWNDLLSLETGSLKLANGRVIEKPLYNRRTRQDEPALFVALTFERREVLDSSNIKPMNLIGVDRGENIPAVIALTDPEGCPLSRFKDSLGNPTHILRIGESYKEKQRTIQAKKEVEQRRAGGYSRKYASKAKNLADDMVRNTARDLLYYAVTQDAMLIFENLSRGFGRQGKRTFMAERQYTRMEDWLTAKLAYEGLSKTYLSKTLAQYTSKTCSNCGFTITSADYDRVLEKLKKTATGWMTTINGKELKVEGQITYYNRRKRQNVVKDLSVELDRLSEESVNNDISSWTKGRSGEALSLLKKRFSHRPVQEKFVCLNCGFETHADEQAALNIARSWLFLRSQEYKKYQTNKTTGNTDKRAFVETWQSFYRKKLKEVWKPAV

SEQ ID NO: 112 - protein, 977 aa, Artificial Sequence
  CasX variant
MQEIKRINKIRRRLVKDSNTKKAGKTGPMKTLLVRVMTPDLRERLENLRKKPENIPQPISNTSRANLNKLLTDYTEMKKAILHVYWEEFQKDPVGLMSRVAQPAPKNIDQRKLIPVKDGNERLTSSGFACSQCCQPLYVYKLEQVNDKGKPHTNYFGRCNVSEHERLILLSPHKPEANDELVTYSLGKFGQRALDFYSIHVTRESNHPVKPLEQIGGNSCASGPVGKALSDACMGAVASFLTKYQDIILEHKKVIKKNEKRLANLKDIASANGLAFPKITLPPQPHTKEGIEAYNNVVAQIVIWVNLNLWQKLKIGRDEAKPLQRLKGFPSFPLVERQANEVDWWDMVCNVKKLINEKKEDGKVFWQNLAGYKRQEALRPYLSSPNDRKKGKKFARYQFGDLLLHLEKKHGEDWGKVYDEAWERIDKKVEGLSKHIKLEEERRSEDAQSKAALTDWLRAKASFVIEGLKEADKDEFCRCELKLQKWYGDLRGKPFAIEAENSILDISGFSKQYNCAFIWQKDGVKKLNLYLIINYFKGGKLRFKKIKPEAFEANRFYTVINKKSGEIVPMEVNFNFDDPNLIILPLAFGKRQGREFIWNDLLSLETGSLKLANGRVIEKPLYNRRTRQDEPALFVALTFERREVLDSSNIKPMNLIGVDRGENIPAVIALTDPEGCPLSRFKDSLGNPTHILRIGESYKEKQRTIQAKKEVEQRRAGGYSRKYASKAKNLADDMVRNTARDLLYYAVTQDAMLIFENLSRGFGRQGKRTFMAERQYTRMEDWLTAKLAYEGLSKTYLSKTLAQYTSKTCSNCGFTITSADYDRVLEKLKKTATGWMTTINGKELKVEGQITYYNRRKRQNVVKDLSVELDRLSEESVNNDISSWTKGRSGEALSLLKKRFSHRPVQEKFVCLNCGFETHADEQAALNIARSWLFLRSQEYKKYQTNKTTGNTDKRAFVETWQSFYRKKLKEVWKPAV

SEQ ID NO: 113 - protein, 977 aa, Artificial Sequence
  CasX variant
MQEIKRINKIRRRLVKDSNTKKAGKTGPMKTLLVRVMTPDLRERLENLRKKPENIPQPISNTSRANLNKLLTDYTEMKKAILHVYWEEFQKDPVGLMSRVAQPAPKNIDQRKLIPVKDGNERLTSSGFACSQCCQPLYVYKLEQVNDKGKPHTNYFGRCNVSEHERLILLSPHKPEANDELVTYSLGKFGQRALDFYSIHVTRESNHPVKPLEQIGGNSCASGPVGKALSDACMGAVASFLTKYQDIILEHKKVIKKNEKRLANLKDIASANGLAFPKITLPPQPHTKEGIEAYNNVVAQIVIWVNLNLWQKLKIGRDEAKPLQRLKGFPSFPLVERQANEVDWWDMVCNVKKLINEKKEDGKVFWQNLAGYKRQEALRPYLSSPEDRKKGKKFARYQLGDLLLHLEKKHGEDWGKVYDEAWERIDKKVEGLSKHIKLEEERRSEDAQSKAALTDWLRAKASFVIEGLKEADKDEFCRCELKLQKWYGDLRGKPFAIEAENSILDISGFSKQYNCAFIWQKDGVKKLNLYLIINYFKGGKLRFKKIKPEAFEANRFYTVINKKSGEIVPMEVNFNFDDPNLIILPLAFGKRQGREFIWNDLLSLETGSLKLANGRVIEKPLYNRRTRQDEPALFVALTFERREVLDSSNIKPMNLIGVDRGENIPAVIALTDPEGCPLSRFKDSLGNPTHILRIGESYKEKQRTIQAKKEVEQRRAGGYSRKYASKAKNLADDMVRNTARDLLYYAVTQDAMLIFENLSRGFGRQGKRTFMAERQYTRMEDWLTAKLAYEGLSKTYLSKTLAQYTSKTCSNCGFTITSADYDRVLEKLKKTATGWMTTINGKELKVEGQITYYNRRKRQNVVKDLSVELDRLSEESVNNDISSWTKGRSGEALSLLKKRFSHRPVQEKFVCLNCGFETHADEQAALNIARSWLFLRSQEYKKYQTNKTTGNTDKRAFVETWQSFYRKKLKEVWKPAV

SEQ ID NO: 114 - protein, 977 aa, Artificial Sequence
  CasX variant
MQEIKRINKIRRRLVKDSNTKKAGKTGPMKTLLVRVMTPDLRERLENLRKKPENIPQPISNTSRANLNKLLTDYTEMKKAILHVYWEEFQKDPVGLMSRVAQPAPKNIDQRKLIPVKDGNERLTSSGFACSQCCQPLYVYKLEQVNDKGKPHTNYFGRCNVSEHERLILLSPHKPEANDELVTYSLGKFGQRALDFYSIHVTRESNHPVKPLEQIGGNSCASGPVGKALSDACMGAVASFLTKYQDIILEHKKVIKKNEKRLANLKDIASANGLAFPKITLPPQPHTKEGIEAYNNVVAQIVIWVNLNLWQKLKIGRDEAKPLQRLKGFPSFPLVERQANEVDWWDMVCNVKKLINEKKEDGKVFWQNLAGYKRQEALRPYLSSPEDRKKGKKFARYQFGDLLKHLEKKHGEDWGKVYDEAWERIDKKVEGLSKHIKLEEERRSEDAQSKAALTDWLRAKASFVIEGLKEADKDEFCRCELKLQKWYGDLRGKPFAIEAENSILDISGFSKQYNCAFIWQKDGVKKLNLYLIINYFKGGKLRFKKIKPEAFEANRFYTVINKKSGEIVPMEVNFNFDDPNLIILPLAFGKRQGREFIWNDLLSLETGSLKLANGRVIEKPLYNRRTRQDEPALFVALTFERREVLDSSNIKPMNLIGVDRGENIPAVIALTDPEGCPLSRFKDSLGNPTHILRIGESYKEKQRTIQAKKEVEQRRAGGYSRKYASKAKNLADDMVRNTARDLLYYAVTQDAMLIFENLSRGFGRQGKRTFMAERQYTRMEDWLTAKLAYEGLSKTYLSKTLAQYTSKTCSNCGFTITSADYDRVLEKLKKTATGWMTTINGKELKVEGQITYYNRRKRQNVVKDLSVELDRLSEESVNNDISSWTKGRSGEALSLLKKRFSHRPVQEKFVCLNCGFETHADEQAALNIARSWLFLRSQEYKKYQTNKTTGNTDKRAFVETWQSFYRKKLKEVWKPAV

SEQ ID NO: 115 - protein, 977 aa, Artificial Sequence
  CasX variant
MQEIKRINKIRRRLVKDSNTKKAGKTGPMKTLLVRVMTPDLRERLENLRKKPENIPQPISNTSRANLNKLLTDYTEMKKAILHVYWEEFQKDPVGLMSRVAQPAPKNIDQRKLIPVKDGNERLTSSGFACSQCCQPLYVYKLEQVNDKGKPHTNYFGRCNVSEHERLILLSPHKPEANDELVTYSLGKFGQRALDFYSIHVTRESNHPVKPLEQIGGNSCASGPVGKALSDACMGAVASFLTKYQDIILEHQKVIKKNEKRLANLKDIASANGLAFPKITLPPQPHTKEGIEAYNNVVAQIVIWVNLNLWQKLKIGRDEAKPLQRLKGFPSFPLVERQANEVDWWDMVCNVKKLINEKKEDGKVFWQNLAGYKRQEALRPYLSSENDRKKGKKFARYQFGDLLLHLEKKHGEDWGKVYDEAWERIDKKVEGLSKHIKLEEERRSEDAQSKAALTDWLRAKASFVIEGLKEADKDEFCRCELKLQKWYGDLRGKPFAIEAENSILDISGFSKQYNCAFIWQKDGVKKLNLYLIINYFKGGKLRFKKIKPEAFEANRFYTVINKKSGEIVPMEVNFNFDDPNLIILPLAFGKRQGREFIWNDLLSLETGSLKLANGRVIEKPLYNRRTRQDEPALFVALTFERREVLDSSNIKPMNLIGVDRGENIPAVIALTDPEGCPLSRFKDSLGNPTHILRIGESYKEKQRTIQAKKEVEQRRAGGYSRKYASKAKNLADDMVRNTARDLLYYAVTQDAMLIFENLSRGFGRQGKRTFMAERQYTRMEDWLTAKLAYEGLSKTYLSKTLAQYTSKTCSNCGFTITSADYDRVLEKLKKTATGWMTTINGKELKVEGQITYYNRRKRQNVVKDLSVELDRLSEESVNNDISSWTKGRSGEALSLLKKRFSHRPVQEKFVCLNCGFETHADEQAALNIARSWLFLRSQEYKKYQTNKTTGNTDKRAFVETWQSFYRKKLKEVWKPAV

SEQ ID NO: 116 - protein, 977 aa, Artificial Sequence
  CasX variant
MQEIKRINKIRRRLVKDSNTKKAGKTGPMKTLLVRVMTPDLRERLENLRKKPENIPQPISNTSRANLNKLLTDYTEMKKAILHVYWEEFQKDPVGLMSRVAQPAPKNIDQRKLIPVKDGNERLTSSGFACSQCCQPLYVYKLEQVNDKGKPHTNYFGRCNVSEHERLILLSPHKPEANDELVTYSLGKFGQRALDFYSIHVTRESNHPVKPLEQIGGNSCASGPVGKALSDACMGAVASFLTKYQDIILEHKKVIKKNEKRLANLKDIASANGLAFPKITLPPQPHTKEGIEAYNNVVAQIVIWVNLNLWQKLKIGRDEAKPLQRLKGFPSFPLVERQANEVDWWDMVCNVKKLINEKKEDGKVFWQNLAGYKRQEALRPYLSSPEDRKKGKKFARYQFGDLLLHLEKKHGEDWGKVYDEAWERIDKKVEGLSKHIKLEEERRSEDAQSKAALTDWLRAKASFVIEGLKEADKDEFCRCELKLQKWYGDLRGKPFAIEAENSILDISGFSKQYNCAFIWQKDGVKKLNLYLIINYFKGGKLRFKKIKPEAFEANRFYTVINKKSGEIVPMEVNFNFDDPNLIILPLAFGKRQGREFIWNDLLSLETGSLKLANGRVIEKPLYNRRTRQDEPALFVALTFERREVLDSSNIKPMNLIGIDRGENIPAVIALTDPEGCPLSRFKDSLGNPTHILRIGESYKEKQRTIQAKKEVEQRRAGGYSRKYASKAKNLADDMVRNTARDLLYYAVTQDAMLIFENLSRGFGRQGKRTFMAERQYTRMEDWLTAKLAYEGLSKTYLSKTLAQYTSKTCSNCGFTITSADYDRVLEKLKKTATGWMTTINGKELKVEGQITYYNRYKRQNVVKDLSVELDRLSEESVNNDISSWTKGRSGEALSLLKKRFSHRPVQEKFVCLNCGFETHADEQAALNIARSWLFLRSQEYKKYQTNKTTGNTDKRAFVETWQSFYRKKLKEVWKPAV

SEQ ID NO: 117 - protein, 976 aa, Artificial Sequence
  CasX variant
QEIKRINKIRRRLVKDSNTKKAGKTGPMKTLLVRVMTPDLRERLENLRKKPENIPQPISNTSRANLNKLLTDYTEMKKAILHVYWEEFQKDPVGLMSRVAQPAPKNIDQRKLIPVKDGNERLTSSGFACSQCCQPLYVYKLEQVNDKGKPHTNYFGRCNVSEHERLILLSPHKPEANDELVTYSLGKFGQRALDFYSIHVTRESNHPVKPLEQIGGNSCASGPVGKALSDACMGAVASFLTKYQDIILEHQKVIKKNEKRLANLKDIASANGLAFPKITLPPQPHTKEGIEAYNNVVAQIVIWVNLNLWQKLKIGRDEAKPLQRLKGFPSFPLVERQANEVDWWDMVCNVKKLINEKKEDGKVFWQNLAGYKRQEALRPYLSSEEDRKKGKKFARYQFGDLLLHLEKKHGEDWGKVYDEAWERIDKKVEGLSKHIKLEEERRSEDAQSKAALTDWLRAKASFVIEGLKEADKDEFCRCELKLQKWYGDLRGKPFAIEAENSILDISGFSKQYNCAFIWQKDGVKKLNLYLIINYFKGGKLRFKKIKPEAFEANRFYTVINKKSGEIVPMEVNFNFDDPNLIILPLAFGKRQGREFIWNDLLSLETGSLKLANGRVIEKTLYNRRTRQDEPALFVALTFERREVLDSSNIKPMNLIGIDRGENIPAVIALTDPEGCPLSRFKDSLGNPTHILRIGESYKEKQRTIQAKKEVEQRRAGGYSRKYASKAKNLADDMVRNTARDLLYYAVTQDAMLIFENLSRGFGRQGKRTFMAERQYTRMEDWLTAKLAYEGLSKTYLSKTLAQYTSKTCSNCGFTITSADYDRVLEKLKKTATGWMTTINGKELKVEGQITYYNRYKRQNVVKDLSVELDRLSEESVNNDISSWTKGRSGEALSLLKKRFSHRPVQEKFVCLNCGFETHADEQAALNIARSWLFLRSQEYKKYQTNKTTGNTDKRAFVETWQSFYRKKLKEVWKPAV

SEQ ID NO: 118 - protein, 977 aa, Artificial Sequence; identical to SEQ ID NO: 72
  CasX variant

SEQ ID NO: 119 - protein, 977 aa, Artificial Sequence; identical to SEQ ID NO: 72
  CasX variant

SEQ ID NO: 120 - protein, 977 aa, Artificial Sequence; identical to SEQ ID NO: 72
  CasX variant

SEQ ID NO: 121 - protein, 977 aa, Artificial Sequence; identical to SEQ ID NO: 72
  CasX variant

SEQ ID NO: 122 - protein, 977 aa, Artificial Sequence; identical to SEQ ID NO: 72
  CasX variant

SEQ ID NO: 123 - protein, 978 aa, Artificial Sequence
  CasX variant
MQEIKRINKIRRRLVKDSNTKKAGKTGPMKTLLVRVMTPDLRERLENLRKKPENIPQPISNTSRANLNKLLTDYTEMKKAILHVYWEEFQKDPVGLMSRVAQPAPKNIDQRKLIPVKDGNERLTMSSGFACSQCCQPLYVYKLEQVNDKGKPHTNYFGRCNVSEHERLILLSPHKPEANDELVTYSLGKFGQRALDFYSIHVTRESNHPVKPLEQIGGNSCASGPVGKALSDACMGAVASFLTKYQDIILEHQKVIKKNEKRLANLKDIASANGLAFPKITLPPQPHTKEGIEAYNNVVAQIVIWVNLNLWQKLKIGRDEAKPLQRLKGFPSFPLVERQANEVDWWDMVCNVKKLINEKKEDGKVFWQNLAGYKRQEALRPYLSSEEDRKKGKKFARYQFGDLLLHLEKKHGEDWGKVYDEAWERIDKKVEGLSKHIKLEEERRSEDAQSKAALTDWLRAKASFVIEGLKEADKDEFCRCELKLQKWYGDLRGKPFAIEAENSILDISGFSKQYNCAFIWQKDGVKKLNLYLIINYFKGGKLRFKKIKPEAFEANRFYTVINKKSGEIVPMEVNFNFDDPNLIILPLAFGKRQGREFIWNDLLSLETGSLKLANGRVIEKTLYNRRTRQDEPALFVALTFERREVLDSSNIKPMNLIGIDRGENIPAVIALTDPEGCPLSRFKDSLGNPTHILRIGESYKEKQRTIQAKKEVEQRRAGGYSRKYASKAKNLADDMVRNTARDLLYYAVTQDAMLIFENLSRGFGRQGKRTFMAERQYTRMEDWLTAKLAYEGLSKTYLSKTLAQYTSKTCSNCGFTITSADYDRVLEKLKKTATGWMTTINGKELKVEGQITYYNRYKRQNVVKDLSVELDRLSEESVNNDISSWTKGRSGEALSLLKKRFSHRPVQEKFVCLNCGFETHADEQAALNIARSWLFLRSQEYKKYQTNKTTGNTDKRAFVETWQSFYRKKLKEVWKPAV

SEQ ID NO: 124 - protein, 977 aa, Artificial Sequence; identical to SEQ ID NO: 72
  CasX variant

SEQ ID NO: 125 - protein, 977 aa, Artificial Sequence; identical to SEQ ID NO: 72
  CasX variant

SEQ ID NO: 126 - protein, 977 aa, Artificial Sequence; identical to SEQ ID NO: 72
  CasX variant

SEQ ID NO: 127 - protein, 977 aa, Artificial Sequence; identical to SEQ ID NO: 72
  CasX variant

SEQ ID NO: 128 - protein, 977 aa, Artificial Sequence; identical to SEQ ID NO: 72
  CasX variant

SEQ ID NO: 129 - protein, 977 aa, Artificial Sequence; identical to SEQ ID NO: 72
  CasX variant

SEQ ID NO: 130 - protein, 977 aa, Artificial Sequence
  CasX variant
QEIKRINKIRRRLVKDSNTKKAGKTGPMKTLLVRVMTPDLRERLENLRKKPENIPQPISNTSRANLNKLLTDYTEMKKAILHVYWEEFQKDPVGLMSRVAQPASKKIDQNKLKPEMDEKGNLTTAGFACSQCGQPLFVYKLEQVSEKGKAYTNYFGRCNVAEHEKLILLAQLKPEKDSDEAVTYSLGKFGQRALDFYSIHVTRESNHPVKPLEQIGGNSCASGPVGKALSDACMGAVASFLTKYQDIILEHQKVIKKNEKRLANLKDIASANGLAFPKITLPPQPHTKEGIEAYNNVVAQIVIWVNLNLWQKLKIGRDEAKPLQRLKGFPSFPLVERQANEVDWWDMVCNVKKLINEKKEDGKVFWQNLAGYKRQEALRPYLSSEEDRKKGKKFARYQFGDLLLHLEKKHGEDWGKVYDEAWERIDKKVEGLSKHIKLEEERRSEDAQSKAALTDWLRAKASFVIEGLKEADKDEFCRCELKLQKWYGDLRGKPFAIEAENSILDISGFSKQYNCAFIWQKDGVKKLNLYLIINYFKGGKLRFKKIKPEAFEANRFYTVINKKSGEIVPMEVNFNFDDPNLIILPLAFGKRQGREFIWNDLLSLETGSLKLANGRVIEKTLYNRRTRQDEPALFVALTFERREVLDSSNIKPMNLIGIDRGENIPAVIALTDPEGCPLSRFKDSLGNPTHILRIGESYKEKQRTIQAKKEVEQRRAGGYSRKYASKAKNLADDMVRNTARDLLYYAVTQDAMLIFENLSRGFGRQGKRTFMAERQYTRMEDWLTAKLAYEGLSKTYLSKTLAQYTSKTCSNCGFTITSADYDRVLEKLKKTATGWMTTINGKELKVEGQITYYNRYKRQNVVKDLSVELDRLSEESVNNDISSWTKGRSGEALSLLKKRFSHRPVQEKFVCLNCGFETHADEQAALNIARSWLFLRSQEYKKYQTNKTTGNTDKRAFVETWQSFYRKKLKEVWKPAV

SEQ ID NO: 131 - protein, 976 aa, Artificial Sequence
  CasX variant
QEIKRINKIRRRLVKDSNTKKAGKTGPMKTLLVRVMTPDLRERLENLRKKPENIPQPISNTSRANLNKLLTDYTEMKKAILHVYWEEFQKDPVGLMSRVAQPAPKNIDQRKLIPVKDGNERLTSSGFACSQCCQPLYVYKLEQVNDKGKPHTNYFGRCNVSEHERLILLSPHKPEANDELVTYSLGKFGQRALDFYSIHVTKESTHPVKPLAQIAGNRYASGPVGKALSDACMGTIASFLSKYQDIIIEHQKVVKGNQKRLESLRELAGKENLEYPSVTLPPQPHTKEGVDAYNEVIARVRMWVNLNLWQKLKLSRDDAKPLLRLKGFPSFPLVERQANEVDWWDMVCNVKKLINEKKEDGKVFWQNLAGYKRQEALRPYLSSEEDRKKGKKFARYQFGDLLLHLEKKHGEDWGKVYDEAWERIDKKVEGLSKHIKLEEERRSEDAQSKAALTDWLRAKASFVIEGLKEADKDEFCRCELKLQKWYGDLRGKPFAIEAENSILDISGFSKQYNCAFIWQKDGVKKLNLYLIINYFKGGKLRFKKIKPEAFEANRFYTVINKKSGEIVPMEVNFNFDDPNLIILPLAFGKRQGREFIWNDLLSLETGSLKLANGRVIEKTLYNRRTRQDEPALFVALTFERREVLDSSNIKPMNLIGIDRGENIPAVIALTDPEGCPLSRFKDSLGNPTHILRIGESYKEKQRTIQAKKEVEQRRAGGYSRKYASKAKNLADDMVRNTARDLLYYAVTQDAMLIFENLSRGFGRQGKRTFMAERQYTRMEDWLTAKLAYEGLSKTYLSKTLAQYTSKTCSNCGFTITSADYDRVLEKLKKTATGWMTTINGKELKVEGQITYYNRYKRQNVVKDLSVELDRLSEESVNNDISSWTKGRSGEALSLLKKRFSHRPVQEKFVCLNCGFETHADEQAALNIARSWLFLRSQEYKKYQTNKTTGNTDKRAFVETWQSFYRKKLKEVWKPAV

SEQ ID NO: 132 - protein, 976 aa, Artificial Sequence
  CasX variant
QEIKRINKIRRRLVKDSNTKKAGKTGPMKTLLVRVMTPDLRERLENLRKKPENIPQPISNTSRANLNKLLTDYTEMKKAILHVYWEEFQKDPVGLMSRVAQPAPKNIDQRKLIPVKDGNERLTSSGFACSQCCQPLYVYKLEQVNDKGKPHTNYFGRCNVSEHERLILLSPHKPEANDELVTYSLGKFGQRALDFYSIHVTKESTHPVKPLAQIAGNRYASGPVGKALSDACMGTIASFLSKYQDIIIEHQKVVKGNQKRLESLRELAGKENLEYPSVTLPPQPHTKEGVDAYNEVIARVRMWVNLNLWQKLKLSRDDAKPLLRLKGFPSFPLVERQANEVDWWDMVCNVKKLINEKKEDGKVFWQNLAGYKRQEALRPYLSSEEDRKKGKKFARYQLGDLLLHLEKKHGEDWGKVYDEAWERIDKKVEGLSKHIKLEEERRSEDAQSKAALTDWLRAKASFVIEGLKEADKDEFCRCELKLQKWYGDLRGKPFAIEAENSILDISGFSKQYNCAFIWQKDGVKKLNLYLIINYFKGGKLRFKKIKPEAFEANRFYTVINKKSGEIVPMEVNFNFDDPNLIILPLAFGKRQGREFIWNDLLSLETGSLKLANGRVIEKTLYNRRTRQDEPALFVALTFERREVLDSSNIKPMNLIGVDRGENIPAVIALTDPEGCPLSRFKDSLGNPTHILRIGESYKEKQRTIQAKKEVEQRRAGGYSRKYASKAKNLADDMVRNTARDLLYYAVTQDAMLIFENLSRGFGRQGKRTFMAERQYTRMEDWLTAKLAYEGLSKTYLSKTLAQYTSKTCSNCGFTITSADYDRVLEKLKKTATGWMTTINGKELKVEGQITYYNRRKRQNVVKDLSVELDRLSEESVNNDISSWTKGRSGEALSLLKKRFSHRPVQEKFVCLNCGFETHADEQAALNIARSWLFLRSQEYKKYQTNKTTGNTDKRAFVETWQSFYRKKLKEVWKPAV

SEQ ID NO: 133 - protein, 976 aa, Artificial Sequence
  CasX variant
QEIKRINKIRRRLVKDSNTKKAGKTGPMKTLLVRVMTPDLRERLENLRKKPENIPQPISNTSRANLNKLLTDYTEMKKAILHVYWEEFQKDPVGLMSRVAQPAPKNIDQRKLIPVKDGNERLTSSGFACSQCCQPLYVYKLEQVNDKGKPHTNYFGRCNVSEHERLILLSPHKPEANDELVTYSLGKFGQRALDFYSIHVTKESTHPVKPLAQIAGNRYASGPVGKALSDACMGTIASFLSKYQDIIIEHQKVVKGNQKRLESLRELAGKENLEYPSVTLPPQPHTKEGVDAYNEVIARVRMWVNLNLWQKLKLSRDDAKPLLRLKGFPSFPLVERQANEVDWWDMVCNVKKLINEKKEDGKVFWQNLAGYKRQEALRPYLSSEEDRKKGKKFARYQLGDLLKHLEKKHGEDWGKVYDEAWERIDKKVEGLSKHIKLEEERRSEDAQSKAALTDWLRAKASFVIEGLKEADKDEFCRCELKLQKWYGDLRGKPFAIEAENSILDISGFSKQYNCAFIWQKDGVKKLNLYLIINYFKGGKLRFKKIKPEAFEANRFYTVINKKSGEIVPMEVNFNFDDPNLIILPLAFGKRQGREFIWNDLLSLETGSLKLANGRVIEKTLYNRRTRQDEPALFVALTFERREVLDSSNIKPMNLIGVDRGENIPAVIALTDPEGCPLSRFKDSLGNPTHILRIGESYKEKQRTIQAKKEVEQRRAGGYSRKYASKAKNLADDMVRNTARDLLYYAVTQDAMLIFENLSRGFGRQGKRTFMAERQYTRMEDWLTAKLAYEGLSKTYLSKTLAQYTSKTCSNCGFTITSADYDRVLEKLKKTATGWMTTINGKELKVEGQITYYNRRKRQNVVKDLSVELDRLSEESVNNDISSWTKGRSGEALSLLKKRFSHRPVQEKFVCLNCGFETHADEQAALNIARSWLFLRSQEYKKYQTNKTTGNTDKRAFVETWQSFYRKKLKEVWKPAV

SEQ ID NO: 134 - protein, 976 aa, Artificial Sequence
  CasX variant
QEIKRINKIRRRLVKDSNTKKAGKTGPMKTLLVRVMTPDLRERLENLRKKPENIPQPISNTSRANLNKLLTDYTEMKKAILHVYWEEFQKDPVGLMSRVAQPAPKNIDQRKLIPVKDGNERLTSSGFACSQCCQPLYVYKLEQVNDKGKPHTNYFGRCNVSEHERLILLSPHKPEANDELVTYSLGKFGQRALDFYSIHVTKESTHPVKPLAQIAGNRYASGPVGKALSDACMGTIASFLSKYQDIIIEHQKVVKGNQKRLESLRELAGKENLEYPSVTLPPQPHTKEGVDAYNEVIARVRMWVNLNLWQKLKLSRDDAKPLLRLKGFPSFPLVERQANEVDWWDMVCNVKKLINEKKEDGKVFWQNLAGYKRQEALRPYLSSEEDRKKGKKFARYQLGDLLLHLEKKHGEDWGKVYDEAWERIDKKVEGLSKHIKLEEERRSEDAQSKAALTDWLRAKASFVIEGLKEADKDEFCRCELKLQKWYGDLRGKPFAIEAENSILDISGFSKQYNCAFIWQKDGVKKLNLYLIINYFKGGKLRFKKIKPEAFEANRFYTVINKKSGEIVPMEVNFNFDDPNLIILPLAFGKRQGREFIWNDLLSLETGSLKLANGRVIEKTLYNRRTRQDEPALFVALTFERREVLDSSNIKPMNLIGVDRGENIPAVIALTDPEGCPLSRFKDSLGNPTHILRIGESYKEKQRTIQAKKEVEQRRAGGYSRKYASKAKNLADDMVRNTARDLLYYAVTQDAMLIFENLSRGFGRQGKRTFMAERQYTRMEDWLTAKLAYEGLSKTYLSKTLAQYTSKTCSNCGFTITSADYDRVLEKLKKTATGWMTTINGKELKVEGQITYYNRYKRQNVVKDLSVELDRLSEESVNNDISSWTKGRSGEALSLLKKRFSHRPVQEKFVCLNCGFETHADEQAALNIARSWLFLRSQEYKKYQTNKTTGNTDKRAFVETWQSFYRKKLKEVWKPAV

SEQ ID NO: 135 - protein, 977 aa, Artificial Sequence
  CasX variant
QEIKRINKIRRRLVKDSNTKKAGKTGPMKTLLVRVMTPDLRERLENLRKKPENIPQPISNTSRANLNKLLTDYTEMKKAILHVYWEEFQKDPVGLMSRVAQPASKKIDQNKLKPEMDEKGNLTTAGFACSQCGQPLFVYKLEQVSEKGKAYTNYFGRCNVAEHEKLILLAQLKPEKDSDEAVTYSLGKFGQRALDFYSIHVTKESTHPVKPLAQIAGNRYASGPVGKALSDACMGTIASFLSKYQDIIIEHQKVVKGNQKRLESLRELAGKENLEYPSVTLPPQPHTKEGVDAYNEVIARVRMWVNLNLWQKLKLSRDDAKPLLRLKGFPSFPLVERQANEVDWWDMVCNVKKLINEKKEDGKVFWQNLAGYKRQEALRPYLSSEEDRKKGKKFARYQFGDLLLHLEKKHGEDWGKVYDEAWERIDKKVEGLSKHIKLEEERRSEDAQSKAALTDWLRAKASFVIEGLKEADKDEFCRCELKLQKWYGDLRGKPFAIEAENSILDISGFSKQYNCAFIWQKDGVKKLNLYLIINYFKGGKLRFKKIKPEAFEANRFYTVINKKSGEIVPMEVNFNFDDPNLIILPLAFGKRQGREFIWNDLLSLETGSLKLANGRVIEKTLYNRRTRQDEPALFVALTFERREVLDSSNIKPMNLIGIDRGENIPAVIALTDPEGCPLSRFKDSLGNPTHILRIGESYKEKQRTIQAKKEVEQRRAGGYSRKYASKAKNLADDMVRNTARDLLYYAVTQDAMLIFENLSRGFGRQGKRTFMAERQYTRMEDWLTAKLAYEGLSKTYLSKTLAQYTSKTCSNCGFTITSADYDRVLEKLKKTATGWMTTINGKELKVEGQITYYNRYKRQNVVKDLSVELDRLSEESVNNDISSWTKGRSGEALSLLKKRFSHRPVQEKFVCLNCGFETHADEQAALNIARSWLFLRSQEYKKYQTNKTTGNTDKRAFVETWQSFYRKKLKEVWKPAV

SEQ ID NO: 136 - protein, 977 aa, Artificial Sequence
  CasX variant
QEIKRINKIRRRLVKDSNTKKAGKTGPMKTLLVRVMTPDLRERLENLRKKPENIPQPISNTSRANLNKLLTDYTEMKKAILHVYWEEFQKDPVGLMSRVAQPASKKIDQNKLKPEMDEKGNLTTAGFACSQCGQPLFVYKLEQVSEKGKAYTNYFGRCNVAEHEKLILLAQLKPEKDSDEAVTYSLGKFGQRALDFYSIHVTKESTHPVKPLAQIAGNRYASGPVGKALSDACMGTIASFLSKYQDIIIEHQKVVKGNQKRLESLRELAGKENLEYPSVTLPPQPHTKEGVDAYNEVIARVRMWVNLNLWQKLKLSRDDAKPLLRLKGFPSFPLVERQANEVDWWDMVCNVKKLINEKKEDGKVFWQNLAGYKRQEALRPYLSSEEDRKKGKKFARYQLGDLLLHLEKKHGEDWGKVYDEAWERIDKKVEGLSKHIKLEEERRSEDAQSKAALTDWLRAKASFVIEGLKEADKDEFCRCELKLQKWYGDLRGKPFAIEAENSILDISGFSKQYNCAFIWQKDGVKKLNLYLIINYFKGGKLRFKKIKPEAFEANRFYTVINKKSGEIVPMEVNFNFDDPNLIILPLAFGKRQGREFIWNDLLSLETGSLKLANGRVIEKTLYNRRTRQDEPALFVALTFERREVLDSSNIKPMNLIGVDRGENIPAVIALTDPEGCPLSRFKDSLGNPTHILRIGESYKEKQRTIQAKKEVEQRRAGGYSRKYASKAKNLADDMVRNTARDLLYYAVTQDAMLIFENLSRGFGRQGKRTFMAERQYTRMEDWLTAKLAYEGLSKTYLSKTLAQYTSKTCSNCGFTITSADYDRVLEKLKKTATGWMTTINGKELKVEGQITYYNRRKRQNVVKDLSVELDRLSEESVNNDISSWTKGRSGEALSLLKKRFSHRPVQEKFVCLNCGFETHADEQAALNIARSWLFLRSQEYKKYQTNKTTGNTDKRAFVETWQSFYRKKLKEVWKPAV

SEQ ID NO: 137 - protein, 977 aa, Artificial Sequence
  CasX variant
QEIKRINKIRRRLVKDSNTKKAGKTGPMKTLLVRVMTPDLRERLENLRKKPENIPQPISNTSRANLNKLLTDYTEMKKAILHVYWEEFQKDPVGLMSRVAQPASKKIDQNKLKPEMDEKGNLTTAGFACSQCGQPLFVYKLEQVSEKGKAYTNYFGRCNVAEHEKLILLAQLKPEKDSDEAVTYSLGKFGQRALDFYSIHVTKESTHPVKPLAQIAGNRYASGPVGKALSDACMGTIASFLSKYQDIIIEHQKVVKGNQKRLESLRELAGKENLEYPSVTLPPQPHTKEGVDAYNEVIARVRMWVNLNLWQKLKLSRDDAKPLLRLKGFPSFPLVERQANEVDWWDMVCNVKKLINEKKEDGKVFWQNLAGYKRQEALRPYLSSEEDRKKGKKFARYQLGDLLKHLEKKHGEDWGKVYDEAWERIDKKVEGLSKHIKLEEERRSEDAQSKAALTDWLRAKASFVIEGLKEADKDEFCRCELKLQKWYGDLRGKPFAIEAENSILDISGFSKQYNCAFIWQKDGVKKLNLYLIINYFKGGKLRFKKIKPEAFEANRFYTVINKKSGEIVPMEVNFNFDDPNLIILPLAFGKRQGREFIWNDLLSLETGSLKLANGRVIEKTLYNRRTRQDEPALFVALTFERREVLDSSNIKPMNLIGVDRGENIPAVIALTDPEGCPLSRFKDSLGNPTHILRIGESYKEKQRTIQAKKEVEQRRAGGYSRKYASKAKNLADDMVRNTARDLLYYAVTQDAMLIFENLSRGFGRQGKRTFMAERQYTRMEDWLTAKLAYEGLSKTYLSKTLAQYTSKTCSNCGFTITSADYDRVLEKLKKTATGWMTTINGKELKVEGQITYYNRRKRQNVVKDLSVELDRLSEESVNNDISSWTKGRSGEALSLLKKRFSHRPVQEKFVCLNCGFETHADEQAALNIARSWLFLRSQEYKKYQTNKTTGNTDKRAFVETWQSFYRKKLKEVWKPAV

SEQ ID NO: 138 - protein, 977 aa, Artificial Sequence
  CasX variant
QEIKRINKIRRRLVKDSNTKKAGKTGPMKTLLVRVMTPDLRERLENLRKKPENIPQPISNTSRANLNKLLTDYTEMKKAILHVYWEEFQKDPVGLMSRVAQPASKKIDQNKLKPEMDEKGNLTTAGFACSQCGQPLFVYKLEQVSEKGKAYTNYFGRCNVAEHEKLILLAQLKPEKDSDEAVTYSLGKFGQRALDFYSIHVTKESTHPVKPLAQIAGNRYASGPVGKALSDACMGTIASFLSKYQDIIIEHQKVVKGNQKRLESLRELAGKENLEYPSVTLPPQPHTKEGVDAYNEVIARVRMWVNLNLWQKLKLSRDDAKPLLRLKGFPSFPLVERQANEVDWWDMVCNVKKLINEKKEDGKVFWQNLAGYKRQEALRPYLSSEEDRKKGKKFARYQLGDLLLHLEKKHGEDWGKVYDEAWERIDKKVEGLSKHIKLEEERRSEDAQSKAALTDWLRAKASFVIEGLKEADKDEFCRCELKLQKWYGDLRGKPFAIEAENSILDISGFSKQYNCAFIWQKDGVKKLNLYLIINYFKGGKLRFKKIKPEAFEANRFYTVINKKSGEIVPMEVNFNFDDPNLIILPLAFGKRQGREFIWNDLLSLETGSLKLANGRVIEKTLYNRRTRQDEPALFVALTFERREVLDSSNIKPMNLIGVDRGENIPAVIALTDPEGCPLSRFKDSLGNPTHILRIGESYKEKQRTIQAKKEVEQRRAGGYSRKYASKAKNLADDMVRNTARDLLYYAVTQDAMLIFENLSRGFGRQGKRTFMAERQYTRMEDWLTAKLAYEGLSKTYLSKTLAQYTSKTCSNCGFTITSADYDRVLEKLKKTATGWMTTINGKELKVEGQITYYNRYKRQNVVKDLSVELDRLSEESVNNDISSWTKGRSGEALSLLKKRFSHRPVQEKFVCLNCGFETHADEQAALNIARSWLFLRSQEYKKYQTNKTTGNTDKRAFVETWQSFYRKKLKEVWKPAV

SEQ ID NO: 139 - protein, 977 aa, Artificial Sequence
  CasX variant
QEIKRINKIRRRLVKDSNTKKAGKTGPMKTLLVRVMTPDLRERLENLRKKPENIPQPISNTSRANLNKLLTDYTEMKKAILHVYWEEFQKDPVGLMSRVAQPASKKIDQNKLKPEMDEKGNLTTAGFACSQCGQPLFVYKLEQVSEKGKAYTNYFGRCNVAEHEKLILLAQLKPEKDSDEAVTYSLGKFGQRALDFYSIHVTRESNHPVKPLEQIGGNSCASGPVGKALSDACMGAVASFLTKYQDIILEHQKVIKKNEKRLANLKDIASANGLAFPKITLPPQPHTKEGIEAYNNVVAQIVIWVNLNLWQKLKIGRDEAKPLQRLKGFPSFPLVERQANEVDWWDMVCNVKKLINEKKEDGKVFWQNLAGYKRQEALRPYLSSEEDRKKGKKFARYQLGDLLLHLEKKHGEDWGKVYDEAWERIDKKVEGLSKHIKLEEERRSEDAQSKAALTDWLRAKASFVIEGLKEADKDEFCRCELKLQKWYGDLRGKPFAIEAENSILDISGFSKQYNCAFIWQKDGVKKLNLYLIINYFKGGKLRFKKIKPEAFEANRFYTVINKKSGEIVPMEVNFNFDDPNLIILPLAFGKRQGREFIWNDLLSLETGSLKLANGRVIEKTLYNRRTRQDEPALFVALTFERREVLDSSNIKPMNLIGVDRGENIPAVIALTDPEGCPLSRFKDSLGNPTHILRIGESYKEKQRTIQAKKEVEQRRAGGYSRKYASKAKNLADDMVRNTARDLLYYAVTQDAMLIFENLSRGFGRQGKRTFMAERQYTRMEDWLTAKLAYEGLSKTYLSKTLAQYTSKTCSNCGFTITSADYDRVLEKLKKTATGWMTTINGKELKVEGQITYYNRYKRQNVVKDLSVELDRLSEESVNNDISSWTKGRSGEALSLLKKRFSHRPVQEKFVCLNCGFETHADEQAALNIARSWLFLRSQEYKKYQTNKTTGNTDKRAFVETWQSFYRKKLKEVWKPAV

SEQ ID NO: 140 - protein, 978 aa, Artificial Sequence
  CasX variant
MQEIKRINKIRRRLVKDSNTKKAGKTGPMKTLLVRVMTPDLRERLENLRKKPENIPQPISNTSRANLNKLLTDYTEMKKAILHVYWEEFQKDPVGLMSRVAQPAPKNIDQRKLIPVKDGNERLTSSGFACSQCCQPLYVYKLEQVNDKGKPHTNYFGRCNVSEHERLILLSPHKPEANDELVTYSLGKFGQRALDFYSIHVTRESNHPVKPLEQIGGNSCASGPVGKALSDACMGAVASFLTKYQDIILEHQKVIKKNEKRLANLKDIASANGLAFPKITLPPQPHTKEGIEAYNNVVAQIVIWVNLNLWQKLKIGRDEAKPLQRLKGFPSFPLVERQANEVDWWDMVCNVKKLINEKKEDGKVFWQNLAGYKRQEALLPYLSSEEDRKKGKKFARYQFGDLLLHLEKKHGEDWGKVYDEAWERIDKKVEGLSKHIKLEEERRSEDAQSKAALTDWLRAKASFVIEGLKEADKDEFCRCELKLQKWYGDLRGKPFAIEAENSILDISGFSKQYNCAFIWQKDGVKKLNLYLIINYFKGGKLRFKKIKPEAFEANRFYTVINKKSGEIVPMEVNFNFDDPNLIILPLAFGKRQGREFIWNDLLSLETGSLKLANGRVIEKTLYNRRTRQDEPALFVALTFERREVLDSSNIKPMNLIGIDRGENIPAVIALTDPEGCPLSRFKDSLGNPTHILRIGESYKEKQRTIQAAKEVEQRRAGGYSRKYASKAKNLADDMVRNTARDLLYYAVTQDAMLIFENLSRGFGRQGKRTFMAERQYTRMEDWLTAKLAYEGLPSKTYLSKTLAQYTSKTCSNCGFTITSADYDRVLEKLKKTATGWMTTINGKELKVEGQITYYNRYKRQNVVKDLGVELDRLSEESVNNDISSWTKGRSGEALSLLKKRFSHRPVQEKFVCLNCGFETHADEQAALNIARSWLFLRSQEYKKYQTNKTTGNTDKRAFVETWQSFYRKKLKEVWKPAV

SEQ ID NO: 141 - protein, 986 aa, Artificial Sequence; identical to SEQ ID NO: 56
  CasX variant

SEQ ID NO: 142 - protein, 978 aa, Artificial Sequence
  CasX variant
MQEIKRINKIRRRLVKDSNTKKAGKTGPMKTLLVRVMTPDLRERLENLRKKPENIPQPISNTSRANLNKLLTDYTEMKKAILHVYWEEFQKDPVGLMSRVAQPAPKNIDQRKLIPVKDGNERLTSSGFACSQCCQPLYVYKLEQVNDKGKPHTNYFGRCNVSEHERLILLSPHKPEANDELVTYSLGKFGQRALDFYSIHVTRESNHPVKPLEQIGGNSCASGPVGKALSDACMGAVASFLTKYQDIILEHQKVIKKNEKRLANLKDIASANGLAFPKITLPPQPHTKEGIEAYNNVVAQIVIWVNLNLWQKLKIGRDEAKPLQRLKGFPSFPLVERQANEVDWWDMVCNVKKLINEKKEDGKVFWQNLAGYKRQEALRPYLSSEEDRKKGKKFARYQFGDLLLHLEKKHGEDWGKVYDEAWERIDKKVEGLSKHIKLEEERRSEDAQSKAALTDWLRAKASFVIEGLKEADKDEFCRCELKLQKWYGDLRGKPFAIEAENSILDISGFSKQYNCAFIWQKDGVKKLNLYLIINYFKGGKLRFKKIKPEAFEANRFYTVINKKSGEIVPMEVNFNFDDPNLIILPLAFGKRQGREFIWNDLLSLETGSLKLANGRVIEKTLYNRRTRQDEPALFVALTFERREVLDSSNIKPVNLIGVDRGENIPAVIALTDPEGCPLPEFKDSSGGPTDILRIGEGYKEKQRAIQAAKEVEQRRAGGYSRKFASKSRNLADDMVRNSARDLFYHAVTHDAVLVFENLSRGFGRQGKRTFMTERQYTKMEDWLTAKLAYEGLTSKTYLSKTLAQYTSKTCSNCGFTITSADYDRVLEKLKKTATGWMTTINGKELKVEGQITYYNRYKRQNVVKDLSVELDRLSEESVNNDISSWTKGRSGEALSLLKKRFSHRPVQEKFVCLNCGFETHADEQAALNIARSWLFLRSQEYKKYQTNKTTGNTDKRAFVETWQSFYRKKLKEVWKPAV

SEQ ID NO: 143 - protein, 972 aa, Artificial Sequence
  CasX variant
MQEIKRINKIRRRLVKDSNTKKAGKTGPMKTLLVRVMTPDLRERLENLRKKPENIPQPISNTSRANLNKLLTDYTEMKKAILHVYWEEFQKDPVGLMSRVAQPAPKNIDQRKLIPVKDGNERLTSSGFACSQCCQPLYVYKLEQVNDKGKPHTNYFGRCNVSEHERLILLSPHKPEANDELVTYSLGKFGQRALDFYSIHVTRESNHPVKPLEQIGGNSCASGPVGKALSDACMGAVASFLTKYQDIILEHQKVIKKNEKRLANLKDIASANGLAFPKITLPPQPHTKEGIEAYNNVVAQIVIWVNLNLWQKLKIGRDEAKPLQRLKGFPSFPLVERQANEVDWWDMVCNVKKLINEKKEDGKVFWQNLAGYKRQEALRPYLSSEEDRKKGKKFARYQFGDLLLHLEKKHGEDWGKVYDEAWERIDKKVEGLSKHIKLEEERRSEDAQSKAALTDWLRAKASFVIEGLKEADKDEFCRCELKLQKWYGDLRGKPFAIEAENSILDISGFSKQYNCAFIWQKDGVKKLNLYLIINYFKGGKLRFKKIKPEAFEANRFYTVINKKSGEIVPMEVNFNFDDPNLIILPLAFGKRQGREFIWNDLLSLETGSLKLANGRVIEKTLYNRRTRQDEPALFVALTFERREVLDSSNIKPMNLIGIDRGENIPAVIALTDPEGCPLSRFKDSLGNPTHILRIGESYKEKQRTIQAKKEVEQRRAGGYSRKYASKAKNLADDMVRNTARDLLYYAVTQDAMLIFENLSRGFGRQGKRTFMAERQYTRMEDWLTAKLAYEGLSKTYLSKTLAQYTSKTCSNCGFTITSADYDRVLEKLKKTATGWMTTINGKELKVEGQITYYNRYKRQNVVKDLSVELDRLSEESVNNDISSWTKGRSGEALSLLKKRFSHRPVQEKFVCLNCGFETHADEQAALNIARSWLFLNSNSTEFKSYKSGKQPFVGAWQAFYKRRLKEVWKPNA

SEQ ID NO: 144 - protein, 978 aa, Artificial Sequence
  CasX variant
QEIKRINKIRRRLVKDSNTKKAGKTGPMKTLLVRVMTPDLRERLENLRKKPENIPQPISNTSRANLNKLLTDYTEMKKAILHVYWEEFQKDPVGLMSRVAQPASKKIDQNKLKPEMDEKGNLTTAGFACSQCGQPLFVYKLEQVSEKGKAYTNYFGRCNVAEHEKLILLAQLKPEKDSDEAVTYSLGKFGQRALDFYSIHVTKESTHPVKPLAQIAGNRYASGPVGKALSDACMGTIASFLSKYQDIIIEHQKVVKGNQKRLESLRELAGKENLEYPSVTLPPQPHTKEGVDAYNEVIARVRMWVNLNLWQKLKLSRDDAKPLLRLKGFPSFPLVERQANEVDWWDMVCNVKKLINEKKEDGKVFWQNLAGYKRQEALRPYLSSEEDRKKGKKFARYQLGDLLLHLEKKHGEDWGKVYDEAWERIDKKVEGLSKHIKLEEERRSEDAQSKAALTDWLRAKASFVIEGLKEADKDEFCRCELKLQKWYGDLRGKPFAIEAENSILDISGFSKQYNCAFIWQKDGVKKLNLYLIINYFKGGKLRFKKIKPEAFEANRFYTVINKKSGEIVPMEVNFNFDDPNLIILPLAFGKRQGREFIWNDLLSLETGSLKLANGRVIEKTLYNRRTRQDEPALFVALTFERREVLDSSNIKPMNLIGVDRGENIPAVIALTDPEGCPLSRFKDSLGNPTHILRIGESYKEKQRTIQAKKEVEQRRAGGYSRKYASKAKNLADDMVRNTARDLLYYAVTQDAMLIFENLSRGFGRQGKRTFMAERQYTRMEDWLTAKLAYEGLSKTYLSKTLAQYTSKTCSNCGFTIHTSADYDRVLEKLKKTATGWMTTINGKELKVEGQITYYNRYKRQNVVKDLSVELDRLSEESVNNDISSWTKGRSGEALSLLKKRFSHRPVQEKFVCLNCGFETHADEQAALNIARSWLFLRSQEYKKYQTNKTTGNTDKRAFVETWQSFYRKKLKEVWKPAV

SEQ ID NO: 145 - protein, 978 aa, Artificial Sequence
  CasX variant
QEIKRINKIRRRLVKDSNTKKAGKTGPMKTLLVRVMTPDLRERLENLRKKPENIPQPISNTSRANLNKLLTDYTEMKKAILHVYWEEFQKDPVGLMSRVAQPASKKIDQNKLKPEMDEKGNLTTAGFACSQCGQPLFVYKLEQVSEKGKAYTNYFGRCNVAEHEKLILLAQLKPEKDSDEAVTYSLGKFGQRALDFYSIHVTKESTHPVKPLAQIAGNRYASGPVGKALSDACMGTIASFLSKYQDIIIEHQKVVKGNQKRLESLRELAGKENLEYPSVTLPPQPHTKEGVDAYNEVIARVRMWVNLNLWQKLKLSRDDAKPLLRLKGFPSFPLVERQANEVDWWDMVCNVKKLINEKKEDGKVFWQNLAGYKRQEALRPYLSSEEDRKKGKKFARYQLGDLLLHLEKKHGEDWGKVYDEAWERIDKKVEGLSKHIKLEEERRSEDAQSKAALTDWLRAKASFVIEGLKEADKDEFCRCELKLQKWYGDLRGKPFAIEAENSILDISGFSKQYNCAFIWQKDGVKKLNLYLIINYFKGGKLRFKKIKPEAFEANRFYTVINKKSGEIVPMEVNFNFDDPNLIILPLAFGKRQGREFIWNDLLSLETGSLKLANGRVIEKTLYNRRTRQDEPALFVALTFERREVLDSSNIKPMNLIGVDRGENIPAVIALTDPEGCPLSRFKDSLGNPTHILRIGESYKEKQRTIQAKKEVEQRRAGGYSRKYASKAKNLADDMVRNTARDLLYYAVTQDAMLIFENLSRGFGRQGKRTFMAERQYTRMEDWLTAKLAYEGLPSKTYLSKTLAQYTSKTCSNCGFTITSADYDRVLEKLKKTATGWMTTINGKELKVEGQITYYNRYKRQNVVKDLSVELDRLSEESVNNDISSWTKGRSGEALSLLKKRFSHRPVQEKFVCLNCGFETHADEQAALNIARSWLFLRSQEYKKYQTNKTTGNTDKRAFVETWQSFYRKKLKEVWKPAV

SEQ ID NO: 146 - protein, 977 aa, Artificial Sequence
  CasX variant
QEIKRINKIRRRLVKDSNTKKAGKTGPMKTLLVRVMTPDLRERLENLRKKPENIPQPISNTSRANLNKLLTDYTEMKKAILHVYWEEFQKDPVGLMSRVAQPASKKIDQNKLKPEMDEKGNLTTAGFACSQCGQPLFVYKLEQVSEKGKAYTNYFGRCNVAEHEKLILLAQLKPEKDSDEAVTYSLGKFGQRALDFYSIHVTKESTHPVKPLAQIAGNRYASGPVGKALSDACMGTIASFLSKYQDIIIEHQKVVKGNQKRLESLRELAGKENLEYPSVTLPPQPHTKEGVDAYNEVIARVRMWVNHNLWQKLKLSRDDAKPLLRLKGFPSFPLVERQANEVDWWDMVCNVKKLINEKKEDGKVFWQNLAGYKRQEALRPYLSSEEDRKKGKKFARYQLGDLLLHLEKKHGEDWGKVYDEAWERIDKKVEGLSKHIKLEEERRSEDAQSKAALTDWLRAKASFVIEGLKEADKDEFCRCELKLQKWYGDLRGKPFAIEAENSILDISGFSKQYNCAFIWQKDGVKKLNLYLIINYFKGGKLRFKKIKPEAFEANRFYTVINKKSGEIVPMEVNFNFDDPNLIILPLAFGKRQGREFIWNDLLSLETGSLKLANGRVIEKTLYNRRTRQDEPALFVALTFERREVLDSSNIKPMNLIGVDRGENIPAVIALTDPEGCPLSRFKDSLGNPTHILRIGESYKEKQRTIQAKKEVEQRRAGGYSRKYASKAKNLADDMVRNTARDLLYYAVTQDAMLIFENLSRGFGRQGKRTFMAERQYTRMEDWLTAKLAYEGLSKTYLSKTLAQYTSKTCSNCGFTITSADYDRVLEKLKKTATGWMTTINGKELKVEGQITYYNRYKRQNVVKDLSVELDRLSEESVNNDISSWTKGRSGEALSLLKKRFSHRPVQEKFVCLNCGFETHADEQAALNIARSWLFLRSQEYKKYQTNKTTGNTDKRAFVETWQSFYRKKLKEVWKPAV

SEQ ID NO: 147 - protein, 978 aa, Artificial Sequence
  CasX variant
QEIKRINKIRRRLVKDSNTKKAGKTGPMKTLLVRVMTPDLRERLENLRKKPENIPQPISNTSRANLNKLLTDYTEMKKAILHVYWEEFQKDPVGLMSRVAQPASKKIDQNKLKPEMDEKGNLTTAGFACSQCGQPLFVYKLEQVSEKGKAYTNYFGRCNVAEHEKLILLAQLKPEKDSDEAVTYSLGKFGQRALDFYSIHVTKESTHPVKPLAQIAGNRYASGAPVGKALSDACMGTIASFLSKYQDIIIEHQKVVKGNQKRLESLRELAGKENLEYPSVTLPPQPHTKEGVDAYNEVIARVRMWVNLNLWQKLKLSRDDAKPLLRLKGFPSFPLVERQANEVDWWDMVCNVKKLINEKKEDGKVFWQNLAGYKRQEALRPYLSSEEDRKKGKKFARYQLGDLLLHLEKKHGEDWGKVYDEAWERIDKKVEGLSKHIKLEEERRSEDAQSKAALTDWLRAKASFVIEGLKEADKDEFCRCELKLQKWYGDLRGKPFAIEAENSILDISGFSKQYNCAFIWQKDGVKKLNLYLIINYFKGGKLRFKKIKPEAFEANRFYTVINKKSGEIVPMEVNFNFDDPNLIILPLAFGKRQGREFIWNDLLSLETGSLKLANGRVIEKTLYNRRTRQDEPALFVALTFERREVLDSSNIKPMNLIGVDRGENIPAVIALTDPEGCPLSRFKDSLGNPTHILRIGESYKEKQRTIQAKKEVEQRRAGGYSRKYASKAKNLADDMVRNTARDLLYYAVTQDAMLIFENLSRGFGRQGKRTFMAERQYTRMEDWLTAKLAYEGLSKTYLSKTLAQYTSKTCSNCGFTITSADYDRVLEKLKKTATGWMTTINGKELKVEGQITYYNRYKRQNVVKDLSVELDRLSEESVNNDISSWTKGRSGEALSLLKKRFSHRPVQEKFVCLNCGFETHADEQAALNIARSWLFLRSQEYKKYQTNKTTGNTDKRAFVETWQSFYRKKLKEVWKPAV

SEQ ID NO: 148 - protein, 979 aa, Artificial Sequence
  CasX variant
RQEIKRINKIRRRLVKDSNTKKAGKTGPMKTLLVRVMTPDLRERLENLRKKPENIPQPISNTSRANLNKLLTDYTEMKKAILHVYWEEFQKDPVGLMSRVAQPASKKIDQNKLKPEMDEKGNLTTAGFACSQCGQPLFVYKLEQVSEKGKAYTNYFGRCNVAEHEKLILLAQLKPEKDSDEAVTYSLGKFGQRALDFYSIHVTKESTHPVKPLAQIAGNRYASGAPVGKALSDACMGTIASFLSKYQDIIIEHQKVVKGNQKRLESLRELAGKENLEYPSVTLPPQPHTKEGVDAYNEVIARVRMWVNLNLWQKLKLSRDDAKPLLRLKGFPSFPLVERQANEVDWWDMVCNVKKLINEKKEDGKVFWQNLAGYKRQEALRPYLSSEEDRKKGKKFARYQLGDLLLHLEKKHGEDWGKVYDEAWERIDKKVEGLSKHIKLEEERRSEDAQSKAALTDWLRAKASFVIEGLKEADKDEFCRCELKLQKWYGDLRGKPFAIEAENSILDISGFSKQYNCAFIWQKDGVKKLNLYLIINYFKGGKLRFKKIKPEAFEANRFYTVINKKSGEIVPMEVNFNFDDPNLIILPLAFGKRQGREFIWNDLLSLETGSLKLANGRVIEKTLYNRRTRQDEPALFVALTFERREVLDSSNIKPMNLIGVDRGENIPAVIALTDPEGCPLSRFKDSLGNPTHILRIGESYKEKQRTIQAKKEVEQRRAGGYSRKYASKAKNLADDMVRNTARDLLYYAVTQDAMLIFENLSRGFGRQGKRTFMAERQYTRMEDWLTAKLAYEGLSKTYLSKTLAQYTSKTCSNCGFTITSADYDRVLEKLKKTATGWMTTINGKELKVEGQITYYNRYKRQNVVKDLSVELDRLSEESVNNDISSWTKGRSGEALSLLKKRFSHRPVQEKFVCLNCGFETHADEQAALNIARSWLFLRSQEYKKYQTNKTTGNTDKRAFVETWQSFYRKKLKEVWKPAV

SEQ ID NO: 149 - protein, 978 aa, Artificial Sequence
  CasX variant
QEIKRINKIRRRLVKDSNTKKAGKTGPMKTLLVRVMTPDLRERLENLRKKPENIPQPISNTSRANLNKLLTDYTEMKKAILHVYWEEFQKDPVGLMSRVAQPASKKIDQNKLKPEMDEKGNLTTAGFACSQCGQPLFVYKLEQVSEKGKAYTNYFGRCNVAEHEKLILLAQLKPEKDSDEAVTYSLGKFGQRALDFYSIHVTKESTHPVKPLAQIAGNRYASGPVGKALSDACMGTIASFLSKYQDIIIEHQKVVKGNQKRLESLRELAGKENLEYPSVTLPPQPHTKEGVDAYNEVIARVRMWVNLNLWQKLKLSRDDAKPLLRLKGFPSFPLVERQANEVDWWDMVCNVKKLINEKKEDGKVFWQNLAGYKRQEALRPYLSSEEDRKKGKKFARYQLGDLLLHLEKKHGEDWGKVYDEAWERIDKKVEGLSKHIKLEEERRSEDAQSKAALTDWLRAKASFVIEGLKEADKDEFCRCELKLQKWYGDLRGKPFAIEAENSILDISGFSKQYNCAFIWQKDGVKKLNLYLIINYFKGGKLRFKKIKPEAFEANRFYTVINKKSGEIVPMEVNFNFDDPNLIILPLAFGKRQGREFIWNDLLSLETGSLKLANGRVIEKTLYNRRTRQDEPALFVALTFERREVLDSSNIKPMNLIGVDRGENIPAVIALTDPEGCPLSRFKDSLGNPTHIQLRIGESYKEKQRTIQAKKEVEQRRAGGYSRKYASKAKNLADDMVRNTARDLLYYAVTQDAMLIFENLSRGFGRQGKRTFMAERQYTRMEDWLTAKLAYEGLSKTYLSKTLAQYTSKTCSNCGFTITSADYDRVLEKLKKTATGWMTTINGKELKVEGQITYYNRYKRQNVVKDLSVELDRLSEESVNNDISSWTKGRSGEALSLLKKRFSHRPVQEKFVCLNCGFETHADEQAALNIARSWLFLRSQEYKKYQTNKTTGNTDKRAFVETWQSFYRKKLKEVWKPAV

SEQ ID NO: 150 - protein, 977 aa, Artificial Sequence
  CasX variant
QEIKRINKIRRRLVKDSNTKKAGKTGPMKTLLVRVMTPDLRERLENLRKKPENIPQPISNTSRANLNKLLTDYTEMKKAILHVYWEEFQKDPVGLMSRVAQPASKKIDQNKLKPEMDEKGNLTTAGFACSQCGQPLFVYKLEQVSEKGKAYTNYFGRCNVAEHEKLILLAQLKPEKDSDEAVTYSLGKFGQRALDFYSIHVTKESTHPVKPLAQIAGNRYASGPVGKALSDACMGTIASFLSKYQDIIIEHQKVVKGNQKRLESLRELAGKENLEYPSVTLPPQPHTKEGVDAYNEVIARVRMWVNLNLWQKLKLSRDDAKPLLRLKGFPSFPLVERQANEVDWWDMVCNVKKLINEKKEDGKVFWQNLAGYKRQEALRPYLSSEEDRKKGKKFARYQLGDLLLHLEKKHGEDWGKVYDEAWERIDKKVEGLSKHIKLEEERRSEDAQSKAALTDWLRAKASFVIEGLKEADKDEFCRCELKLQKWYGDLRGKPFAIEAENSILDISGFSKQYNCAFIWQKDGVKKLNLYLIINYFKGGKLRFKKIKPEAFEANRFYTVINKKSGEIVPMEVNFNFDDPNLIILPLAFGKRQGREFIWNDLLSLETGSLKLANGRVIEKTLYNRRTRQDEPALFVALTFERREVLDSSNIKPMNLIGVDRGENIPAVIALTDPEGCPLSRFKDSLGNPTHILRIGESYKEKQRTTQAKKEVEQRRAGGYSRKYASKAKNLADDMVRNTARDLLYYAVTQDAMLIFENLSRGFGRQGKRTFMAERQYTRMEDWLTAKLAYEGLSKTYLSKTLAQYTSKTCSNCGFTITSADYDRVLEKLKKTATGWMTTINGKELKVEGQITYYNRYKRQNVVKDLSVELDRLSEESVNNDISSWTKGRSGEALSLLKKRFSHRPVQEKFVCLNCGFETHADEQAALNIARSWLFLRSQEYKKYQTNKTTGNTDKRAFVETWQSFYRKKLKEVWKPAV

SEQ ID NO: 151 - protein, 977 aa, Artificial Sequence
  CasX variant
QEIKRINKIRRRLVKDSNTKKAGKTGPMKTLLVRVMTPDLRERLENLRKKPENIPQPISNTSRANLNKLLTDYTEMKKAILHVYWEEFQKDPVGLMSRVAQPASKKIDQNKLKPEMDEKGNLTTAGFACSQCGQPLFVYKLEQVSEKGKAYTNYFGRCNVAEHEKLILLAQLKPEKDSDEAVTYSLGKFGQRALDFYSIHVTKESTHPVKPLAQIAGNRYASGPVGKALSDACMGTIASFLSKYQDIIIEHQKVVKGNQKRLESLRELAGKENLEYPSVTLPPQPHTKEGVDAYNEVIARVRMWVNLNLWQKLKLSRDDAKPLLRLKGFPSFPLVERQANEVDWWDMVCNVKKLINEKKEDGKVFWQNLAGYKRQEALRPYLSSEEDRKKGKKFARYQLGDLLLHLEKKHGEDWGKVYDEAWERIDKKVEGLSKHIKLEEERRSEDAQSKAALTDWLRAKASFVIEGLKEADKDEFCRCELKLQKWYGDLRGKPFAIEAENSILDISGFSKQYNCAFIWQKDGVKKLNLYLIINYFKGGKLRFKKIKPEAFEANRFYTVINKKSGEIVPMEVNFNFDDPNLIILPLAFGKRQGREFIWNDLLSLETGSLKLANGRVIEKTLYNRRTRQDEPALFVALTFERREVLDSSNIKPMNLIGVDRGENIPAVIALTDPEGCPLSRFKRSLGNPTHILRIGESYKEKQRTIQAKKEVEQRRAGGYSRKYASKAKNLADDMVRNTARDLLYYAVTQDAMLIFENLSRGFGRQGKRTFMAERQYTRMEDWLTAKLAYEGLSKTYLSKTLAQYTSKTCSNCGFTITSADYDRVLEKLKKTATGWMTTINGKELKVEGQITYYNRYKRQNVVKDLSVELDRLSEESVNNDISSWTKGRSGEALSLLKKRFSHRPVQEKFVCLNCGFETHADEQAALNIARSWLFLRSQEYKKYQTNKTTGNTDKRAFVETWQSFYRKKLKEVWKPAV

SEQ ID NO: 152 - protein, 977 aa, Artificial Sequence
  CasX variant
QEIKRINKIRRRLVKDSNTKKAGKTYPMKTLLVRVMTPDLRERLENLRKKPENIPQPISNTSRANLNKLLTDYTEMKKAILHVYWEEFQKDPVGLMSRVAQPASKKIDQNKLKPEMDEKGNLTTAGFACSQCGQPLFVYKLEQVSEKGKAYTNYFGRCNVAEHEKLILLAQLKPEKDSDEAVTYSLGKFGQRALDFYSIHVTKESTHPVKPLAQIAGNRYASGPVGKALSDACMGTIASFLSKYQDIIIEHQKVVKGNQKRLESLRELAGKENLEYPSVTLPPQPHTKEGVDAYNEVIARVRMWVNLNLWQKLKLSRDDAKPLLRLKGFPSFPLVERQANEVDWWDMVCNVKKLINEKKEDGKVFWQNLAGYKRQEALRPYLSSEEDRKKGKKFARYQLGDLLLHLEKKHGEDWGKVYDEAWERIDKKVEGLSKHIKLEEERRSEDAQSKAALTDWLRAKASFVIEGLKEADKDEFCRCELKLQKWYGDLRGKPFAIEAENSILDISGFSKQYNCAFIWQKDGVKKLNLYLIINYFKGGKLRFKKIKPEAFEANRFYTVINKKSGEIVPMEVNFNFDDPNLIILPLAFGKRQGREFIWNDLLSLETGSLKLANGRVIEKTLYNRRTRQDEPALFVALTFERREVLDSSNIKPMNLIGVDRGENIPAVIALTDPEGCPLSRFKDSLGNPTHILRIGESYKEKQRTIQAKKEVEQRRAGGYSRKYASKAKNLADDMVRNTARDLLYYAVTQDAMLIFENLSRGFGRQGKRTFMAERQYTRMEDWLTAKLAYEGLSKTYLSKTLAQYTSKTCSNCGFTITSADYDRVLEKLKKTATGWMTTINGKELKVEGQITYYNRYKRQNVVKDLSVELDRLSEESVNNDISSWTKGRSGEALSLLKKRFSHRPVQEKFVCLNCGFETHADEQAALNIARSWLFLRSQEYKKYQTNKTTGNTDKRAFVETWQSFYRKKLKEVWKPAV

SEQ ID NO: 153 - protein, 977 aa, Artificial Sequence
  CasX variant
QEIKRINKIRRRLVKDSNTKKAGKTGPMKTLLVRVMTPDLRERLENLRKKPENIPQPISNTSRANLNKLLTDYTEMKKAILHVYWEEFQKDPVGLMSRVAQPASKKIDQNKLKPEMDEKGNLTTAGFACSQCGQPLFVYKLEQVSEKGKAYTNYFGRCNVAEHEKLILLAQLKPEKDSDEAVTYSLGKFGQRALDFYSIHVTKESTHPVKPLAQIAGNRYASGPVGKALSDACMGTIASFLSKYQDIIIEHQKVVKGNQKRLESLRELAGKENLEYPSVTLPPQPHTKEGVDAYNEVIARVRMWVNLNLWQKLKLSRDDAKPLLRLKGFPSFPLVERQANEVDWWDMVCNVKKLINEKKEDGKVFWQNLAGYKRQEALRPYLSSEEDRKKGKKFARYQLGDLLLHLEKKHGEDWGKVYDEAWERIDKKVEGLSKHIKLEEERRSEDAQSKAALTDWLRAKASFVIEGLKEADKDEFCRCELKLQKWYGDLRGKPFAIEAENSILDISGFSKQYNCAFIWQKDGVKKLNLYLIINYFKGGKLRFKKIKPEAFEANRFYTVINKKSGEIVPMEVNFNFDDPNLIILPLAFGKRQGREFIWNDLLSLETGSLKLANGRVIEKTLYNRRTRQDEPALFVALTFERREVLDSSNIKPMNLIGVDRGENIPAVIALTDPEGCPLSRFKDSLGNPTHILRIGESYKEKQRTIQAKKEVEQRRAGGYSRKYASKAKNLADDMVRNTARDLLYYAVTQDAMLIFENLSRGFGRQGKRTFMAERQYTRMEDWLTAKLAYEGLSKTYLSKTLAQYTSKTCSNCGFTIHSADYDRVLEKLKKTATGWMTTINGKELKVEGQITYYNRYKRQNVVKDLSVELDRLSEESVNNDISSWTKGRSGEALSLLKKRFSHRPVQEKFVCLNCGFETHADEQAALNIARSWLFLRSQEYKKYQTNKTTGNTDKRAFVETWQSFYRKKLKEVWKPAV

SEQ ID NO: 154 - protein, 977 aa, Artificial Sequence
  CasX variant
QEIKRINKIRRRLVKDSNTKKAGKTGPMKTLLVRVMTPDLRERLENLRKKPENIPQPISNTSRANLNKLLTDYTEMKKAILHVYWEEFQKDPVGLMSRVAQPASKKIDQNKLKPEMDEKGNLTTAGFACSQCGQPLFVYKLEQVSEKGKAYTNYFGRCNVAEHEKLILLAQLKPEKDSDEAVTYSLGKFGQRALDFYSIHVTKESTHPVKPLAQIAGNRYASGPVGKALSDACMGTIASFLSKYQDIIIEHQKVVKGNQKRLESLRELAGKENLEYPSVTLPPQPHTKEGVDAYNEVIARVRMWVNLNLWQKLKLSRDDAKPLLRLKGFPSFPLVERQANEVDWWDMVCNVKKLINEKKEDGKVFWQNLAGYKRQEALRPYLSSEEDRKKGKKFARYQLGDLLLHLEKKHGEDWGKVYDEAWERIDKKVEGLSKHIKLEEERRSEDAQSKAALTDWLRAKASFVIEGLKEADKDEFCRCELKLQKWYGDLRGKPFAIEAENSILDISGFSKQYNCAFIWQKDGVKKLNLYLIINYFKGGKLRFKKIKPEAFEANRFYTVINKKSGEIVPMEVNFNFDDPNLIILPLAFGKRQGREFIWNDLLSLETGSLKLANGRVIEKTLYNRRTRQDEPALFVALTFERREVLDSSNIKPMNLIGVDRGENIPAVIALTDPEGCPLSRFKDSLGNPTHILRIGESYKEKQRTIQAKKEVEQRRAGGYSRKYASKAKNLADDMVRNTARDLLYYAATQDAMLIFENLSRGFGRQGKRTFMAERQYTRMEDWLTAKLAYEGLSKTYLSKTLAQYTSKTCSNCGFTITSADYDRVLEKLKKTATGWMTTINGKELKVEGQITYYNRYKRQNVVKDLSVELDRLSEESVNNDISSWTKGRSGEALSLLKKRFSHRPVQEKFVCLNCGFETHADEQAALNIARSWLFLRSQEYKKYQTNKTTGNTDKRAFVETWQSFYRKKLKEVWKPAV

SEQ ID NO: 155 - protein, 977 aa, Artificial Sequence
  CasX variant
QEIKRINKIRRRLVKDSNTKKAGKTGPMKTLLVRVMTPDLRERLENLRKKPENIPQPISNTSRANLNKLLTDYTEMKKAILHVYWEEFQKDPVGLMSRVAQPASKKIDQNKLKPEMDEKGNLTTAGFACSQCGQPLFVYKLEQVSEKGKAYTNYFGRCNVAEHEKLILLAQLKPEKDSDEAVTYSLGKFGQRALDFYSIHVTKESTHPVKPLAQIAGNRYASGPVGKALSDACMGTIASFLSKYQDIIIEHQKVVKGNQKRLESLRELAGKENLEYPSVTLPPQPHTKEGVDAYNEVIARVRMWVNLNLWQKLKLSRDDAKPLLRLKGFPSFPLVERQANEVDWWDMVCNVKKLINEKKEDGKVFWQNLAGYKRQEALRPYLSSEEDRKKGKKFARYQLGDLLLHLEKKHGEDWGKVYDEAWERIDKKVEGLSKHIKLEEERRSEDAQSKAALTDWLRAKASFVIEGLKEADKDEFCRCELKLQKWYGDLRGKPFAIEAENSILDISGFSKQYNCAFIWQKDGVKKLNLYLIINYFKGGKLRFKKIKPEAFEANRFYTVINKKSGEIVPMEVNFNFDDPNLIILPLAFGKRQGREFIWNDLLSLETGSLKLANGRVIEKTLYNRRTRQDEPALFVALTFERREVLDSSNIKPMNLIGVDRGENIPAVIALTDPEGCPLSRFKDSLGNPTHILRIGESYKEKQRTIQAAKEVEQRRAGGYSRKYASKAKNLADDMVRNTARDLLYYAVTQDAMLIFENLSRGFGRQGKRTFMAERQYTRMEDWLTAKLAYEGLSKTYLSKTLAQYTSKTCSNCGFTITSADYDRVLEKLKKTATGWMTTINGKELKVEGQITYYNRYKRQNVVKDLSVELDRLSEESVNNDISSWTKGRSGEALSLLKKRFSHRPVQEKFVCLNCGFETHADEQAALNIARSWLFLRSQEYKKYQTNKTTGNTDKRAFVETWQSFYRKKLKEVWKPAV

SEQ ID NO: 156 - protein, 978 aa, Artificial Sequence
  CasX variant
QEIKRINKIRRRLVKDSNTKKAGKTRGPMKTLLVRVMTPDLRERLENLRKKPENIPQPISNTSRANLNKLLTDYTEMKKAILHVYWEEFQKDPVGLMSRVAQPASKKIDQNKLKPEMDEKGNLTTAGFACSQCGQPLFVYKLEQVSEKGKAYTNYFGRCNVAEHEKLILLAQLKPEKDSDEAVTYSLGKFGQRALDFYSIHVTKESTHPVKPLAQIAGNRYASGPVGKALSDACMGTIASFLSKYQDIIIEHQKVVKGNQKRLESLRELAGKENLEYPSVTLPPQPHTKEGVDAYNEVIARVRMWVNLNLWQKLKLSRDDAKPLLRLKGFPSFPLVERQANEVDWWDMVCNVKKLINEKKEDGKVFWQNLAGYKRQEALRPYLSSEEDRKKGKKFARYQLGDLLLHLEKKHGEDWGKVYDEAWERIDKKVEGLSKHIKLEEERRSEDAQSKAALTDWLRAKASFVIEGLKEADKDEFCRCELKLQKWYGDLRGKPFAIEAENSILDISGFSKQYNCAFIWQKDGVKKLNLYLIINYFKGGKLRFKKIKPEAFEANRFYTVINKKSGEIVPMEVNFNFDDPNLIILPLAFGKRQGREFIWNDLLSLETGSLKLANGRVIEKTLYNRRTRQDEPALFVALTFERREVLDSSNIKPMNLIGVDRGENIPAVIALTDPEGCPLSRFKDSLGNPTHILRIGESYKEKQRTIQAKKEVEQRRAGGYSRKYASKAKNLADDMVRNTARDLLYYAVTQDAMLIFENLSRGFGRQGKRTFMAERQYTRMEDWLTAKLAYEGLSKTYLSKTLAQYTSKTCSNCGFTITSADYDRVLEKLKKTATGWMTTINGKELKVEGQITYYNRYKRQNVVKDLSVELDRLSEESVNNDISSWTKGRSGEALSLLKKRFSHRPVQEKFVCLNCGFETHADEQAALNIARSWLFLRSQEYKKYQTNKTTGNTDKRAFVETWQSFYRKKLKEVWKPAV

SEQ ID NO: 157 - protein, 978 aa, Artificial Sequence
  CasX variant
QEIKRINKIRRRLVKDSNTKKAGKTGPMKTLLVRVMTPDLRERLENLRKKPENIPQPISNTSRANLNKLLTDYTEMKKAILHVYWEEFQKDPVGLMSRVAQPASKKIDQNKLKPEMDEKGNLTTAGFACSQCGQPLFVYKLEQVSEKGKAYTNYFGRCNVAEHEKLILLAQLKPEKDSDEAVTYSLGKFGQRALDFYSIHVTKESTHPVKPLAQIAGNRYASYPVGKALSDACMGTIASFLSKYQDIIIEHQKVVKGNQKRLESLRELAGKENLEYPSVTLPPQPHTKEGVDAYNEVIARVRMWVNLNLWQKLKLSRDDAKPLLRLKGFPSFPLVERQANEVDWWDMVCNVKKLINEKKEDGKVFWQNLAGYKRQEALRPYLSSEEDRKKGKKFARYQLGDLLLHLEKKHGEDWGKVYDEAWERIDKKVEGLSKHIKLEEERRSEDAQSKAALTDWLRAKASFVIEGLKEADKDEFCRCELKLQKWYGDLRGKPFAIEAENSILDISGFSKQYNCAFIWQKDGVKKLNLYLIINYFKGGKLRFKKIKPEAFEANRFYTVINKKSGEIVPMEVNFNFDDPNLIILPLAFGKRQGREFIWNDLLSLETGSLKLANGRVIEKTLYNRRTRQDEPALFVALTFERREVLDSSNIKPMNLIGVDRGENIPAVIALTDPEGCPLSRFKDSLGNPTHILRIGESYKEKQRTIQAKKEVEQRRAGGYSRKYASKAKNLADDMVRNTARDLLYYAVTQDAMLIFENLSRGFGRQGKRTFMAERQYTRMEDWLTAKLAYEGLPSKTYLSKTLAQYTSKTCSNCGFTITSADYDRVLEKLKKTATGWMTTINGKELKVEGQITYYNRYKRQNVVKDLSVELDRLSEESVNNDISSWTKGRSGEALSLLKKRFSHRPVQEKFVCLNCGFETHADEQAALNIARSWLFLRSQEYKKYQTNKTTGNTDKRAFVETWQSFYRKKLKEVWKPAV

SEQ ID NO: 158 - protein, 978 aa, Artificial Sequence
  CasX variant
QEIKRINKIRRRLVKDSNTKKAGKTGPMKTLLVRVMTPDLRERLENLRKKPENIPQPISNTSRANLNKLLTDYTEMKKAILHVYWEEFQKDPVGLMSRVAQPASKKIDQNKLKPEMDEKGNLTTAGFACSQCGQPLFVYKLEQVSEKGKAYTNYFGRCNVAEHEKLILLAQLKPEKDSDEAVTYSLGKFGQRALDFYSIHVTKESTHPVKPLAQIAGNRYASNPVGKALSDACMGTIASFLSKYQDIIIEHQKVVKGNQKRLESLRELAGKENLEYPSVTLPPQPHTKEGVDAYNEVIARVRMWVNLNLWQKLKLSRDDAKPLLRLKGFPSFPLVERQANEVDWWDMVCNVKKLINEKKEDGKVFWQNLAGYKRQEALRPYLSSEEDRKKGKKFARYQLGDLLLHLEKKHGEDWGKVYDEAWERIDKKVEGLSKHIKLEEERRSEDAQSKAALTDWLRAKASFVIEGLKEADKDEFCRCELKLQKWYGDLRGKPFAIEAENSILDISGFSKQYNCAFIWQKDGVKKLNLYLIINYFKGGKLRFKKIKPEAFEANRFYTVINKKSGEIVPMEVNFNFDDPNLIILPLAFGKRQGREFIWNDLLSLETGSLKLANGRVIEKTLYNRRTRQDEPALFVALTFERREVLDSSNIKPMNLIGVDRGENIPAVIALTDPEGCPLSRFKDSLGNPTHILRIGESYKEKQRTIQAKKEVEQRRAGGYSRKYASKAKNLADDMVRNTARDLLYYAVTQDAMLIFENLSRGFGRQGKRTFMAERQYTRMEDWLTAKLAYEGLPSKTYLSKTLAQYTSKTCSNCGFTITSADYDRVLEKLKKTATGWMTTINGKELKVEGQITYYNRYKRQNVVKDLSVELDRLSEESVNNDISSWTKGRSGEALSLLKKRFSHRPVQEKFVCLNCGFETHADEQAALNIARSWLFLRSQEYKKYQTNKTTGNTDKRAFVETWQSFYRKKLKEVWKPAV

SEQ ID NO: 159 - protein, 979 aa, Artificial Sequence
  CasX variant
QEIKRINKIRRRLVKDSNTKKAGKTGPMKTLLVRVMTPDLRERLENLRKKPENIPQPISNTSRANLNKLLTDYTEMKKAILHVYWEEFQKDPVGLMSRVAQPASKKIDQNKLKPEMDEKGNLTTAGFACSQCGQPLFVYKLEQVSEKGKAYTNYFGRCNVAEHEKLILLAQLKPEKDSDEAVTYSLGKFGQRALDFYSIHVTKESTHPVKPLAQIAGNRYASGPVGKALSDACMGTIASFLSKYQDIIIEHQKVVKGNQKRLESLRELAGKENLEYPSVTLPPQPHTKEGVDAYNEVIARVRMWVNLNLWQKLKLSRDDAKPLLRLKGFPSFPLVERQANEVDWWDMVCNVKKLINEKKEDGKVFWQNLAGYKRQEALRPYLSSEEDRKKGKKFARYQLGDLLLHLEKKHGEDWGKVYDEAWERIDKKVEGLSKHIKLEEERRSEDAQSKAALTDWLRAKASFVIEGLKEADKDEFCRCELKLQKWYGDLRGKPFAIEAENSILDISGFSKQYNCAFIWQKDGVKKLNLYLIINYFKGWGKLRFKKIKPEAFEANRFYTVINKKSGEIVPMEVNFNFDDPNLIILPLAFGKRQGREFIWNDLLSLETGSLKLANGRVIEKTLYNRRTRQDEPALFVALTFERREVLDSSNIKPMNLIGVDRGENIPAVIALTDPEGCPLSRFKDSLGNPTHILRIGESYKEKQRTIQAKKEVEQRRAGGYSRKYASKAKNLADDMVRNTARDLLYYAVTQDAMLIFENLSRGFGRQGKRTFMAERQYTRMEDWLTAKLAYEGLPSKTYLSKTLAQYTSKTCSNCGFTITSADYDRVLEKLKKTATGWMTTINGKELKVEGQITYYNRYKRQNVVKDLSVELDRLSEESVNNDISSWTKGRSGEALSLLKKRFSHRPVQEKFVCLNCGFETHADEQAALNIARSWLFLRSQEYKKYQTNKTTGNTDKRAFVETWQSFYRKKLKEVWKPAV

SEQ ID NO: 160 - protein, 979 aa, Artificial Sequence
  CasX variant
QEIKRINKIRRRLVKDSNTKKAGKTGPMKTLLVRVMTPDLRERLENLRKKPENIPQPISNTSRANLNKLLTDYTEMKKAILHVYWEEFQKDPVGLMSRVAQPASKKIDQNKLKPEMDEKGNLTTAGFACSQCGQPLFVYKLEQVSEKGKAYTNYFGRCNVAEHEKLILLAQLKPEKDSDEAVTYSLGKFGQRALDFYSIHVTKESTHPVKPLAQIAGNRYASGPVGKALSDACMGTIASFLSKYQDIIIEHQKVVKGNQKRLESLRELAGKENLEYPSVTLPPQPHTKEGVDAYNEVIARVRMWVNLNLWQKLKLSRDDAKPLLRLKGFPSFPLVERQANEVDWWDMVCNVKKLINEKKEDGKVFWQNLAGYKRQEALRPYLSSEEDRKKGKKFARYQLGDLLLHLEKKHGEDWGKVYDEAWERIDKKVEGLSKHIKLEEERRSEDAQSKAALTDWLRAKASFVIEGLKEADKDEFCRCELKLQKWYGDLRGKPFAIEAENSILDISGFSKQYNCAFIWQKDGVKKLNLYLIINYFKGYGKLRFKKIKPEAFEANRFYTVINKKSGEIVPMEVNFNFDDPNLIILPLAFGKRQGREFIWNDLLSLETGSLKLANGRVIEKTLYNRRTRQDEPALFVALTFERREVLDSSNIKPMNLIGVDRGENIPAVIALTDPEGCPLSRFKDSLGNPTHILRIGESYKEKQRTIQAKKEVEQRRAGGYSRKYASKAKNLADDMVRNTARDLLYYAVTQDAMLIFENLSRGFGRQGKRTFMAERQYTRMEDWLTAKLAYEGLPSKTYLSKTLAQYTSKTCSNCGFTITSADYDRVLEKLKKTATGWMTTINGKELKVEGQITYYNRYKRQNVVKDLSVELDRLSEESVNNDISSWTKGRSGEALSLLKKRFSHRPVQEKFVCLNCGFETHADEQAALNIARSWLFLRSQEYKKYQTNKTTGNTDKRAFVETWQSFYRKKLKEVWKPAV

SEQ ID NO: 161 - protein, 84 aa, Artificial Sequence
  chloroplast transit peptide
MASMISSSAVTTVSRASRGQSAAMAPFGGLKSMTGFPVRKVNTDITSITSNGGRVKCMQVWPPIGKKKFETLSYLPPLTRDSRA

SEQ ID NO: 162 - protein, 57 aa, Artificial Sequence
  chloroplast transit peptide
MASMISSSAVTTVSRASRGQSAAMAPFGGLKSMTGFPVRKVNTDITSITSNGGRVKS

SEQ ID NO: 163 - protein, 85 aa, Artificial Sequence
  chloroplast transit peptide
MASSMLSSATMVASPAQATMVAPFNGLKSSAAFPATRKANNDITSITSNGGRVNCMQVWPPIEKKKFETLSYLPDLTDSGGRVNC

SEQ ID NO: 164 - protein, 76 aa, Artificial Sequence
  chloroplast transit peptide
MAQVSRICNGVQNPSLISNLSKSSQRKSPLSVSLKTQQHPRAYPISSSWGLKKSGMTLIGSELRPLKVMSSVSTAC

SEQ ID NO: 165 - protein, 76 aa, Artificial Sequence
  chloroplast transit peptide
MAQVSRICNGVWNPSLISNLSKSSQRKSPLSVSLKTQQHPRAYPISSSWGLKKSGMTLIGSELRPLKVMSSVSTAC

SEQ ID NO: 166 - protein, 72 aa, Artificial Sequence
  chloroplast transit peptide
MAQINNMAQGIQTLNPNSNFHKPQVPKSSSFLVFGSKKLKNSANSMLVLKKDSIFMQLFCSFRISASVATAC

SEQ ID NO: 167 - protein, 69 aa, Artificial Sequence
  chloroplast transit peptide
MAALVTSQLATSGTVLSVTDRFRRPGFQGLRPRNPADAALGMRTVGASAAPKQSRKPHRFDRRCLSMVV

SEQ ID NO: 168 - protein, 77 aa, Artificial Sequence
  chloroplast transit peptide
MAALTTSQLATSATGFGIADRSAPSSLLRHGFQGLKPRSPAGGDATSLSVTTSARATPKQQRSVQRGSRRFPSVVVC

SEQ ID NO: 169 - protein, 57 aa, Artificial Sequence
  chloroplast transit peptide
MASSVLSSAAVATRSNVAQANMVAPFTGLKSAASFPVSRKQNLDITSIASNGGRVQC

SEQ ID NO: 170 - protein, 65 aa, Artificial Sequence
  chloroplast transit peptide
MESLAATSVFAPSRVAVPAARALVRAGTVVPTRRTSSTSGTSGVKCSAAVTPQASPVISRSAAAA

SEQ ID NO: 171 - protein, 72 aa, Artificial Sequence
  chloroplast transit peptide
MGAAATSMQSLKFSNRLVPPSRRLSPVPNNVTCNNLPKSAAPVRTVKCCASSWNSTINGAAATTNGASAASS

SEQ ID NO: 172 - protein, 20 aa, Artificial Sequence
  endosomal escape peptide
  MISC_FEATURE (4)..(4): Xaa is Lys, His or Arg
  MISC_FEATURE (8)..(8): Xaa is Lys, His or Arg
  MISC_FEATURE (11)..(11): Xaa is Lys, His or Arg
  MISC_FEATURE (15)..(15): Xaa is Lys, His or Arg
  MISC_FEATURE (19)..(19): Xaa is Lys, His or Arg
GLFXALLXLLXSLWXLLLXA

SEQ ID NO: 173 - protein, 20 aa, Artificial Sequence
  endosomal escape peptide
GLFHALLHLLHSLWHLLLHA

SEQ ID NO: 174 - protein, 9 aa, Artificial Sequence
  endosomal escape peptide
HHHHHHHHH

SEQ ID NO: 175 - skipped

SEQ ID NO: 176 - protein, 7 aa, Artificial Sequence
  nuclear localization signal
PKKKRKV

SEQ ID NO: 177 - protein, 16 aa, Artificial Sequence
  nuclear localization signal
KRPAATKKAGQAKKKK

SEQ ID NO: 178 - protein, 9 aa, Artificial Sequence
  nuclear localization signal
PAAKRVKLD

SEQ ID NO: 179 - protein, 11 aa, Artificial Sequence
  nuclear localization signal
RQRRNELKRSP

SEQ ID NO: 180 - protein, 38 aa, Artificial Sequence
  nuclear localization signal
NQSSNFGPMKGGNFGGRSSGPYGGGGQYFAKPRNQGGY

SEQ ID NO: 181 - protein, 42 aa, Artificial Sequence
  nuclear localization signal
RMRIZFKNKGKDTAELRRRRVEVSVELRKAKKDEQILKRRNV

SEQ ID NO: 182 - protein, 8 aa, Artificial Sequence
  nuclear localization signal
VSRKRPRP

SEQ ID NO: 183 - protein, 8 aa, Artificial Sequence
  nuclear localization signal
PPKKARED

SEQ ID NO: 184 - protein, 8 aa, Artificial Sequence
  nuclear localization signal
PQPKKKPL

SEQ ID NO: 185 - protein, 12 aa, Artificial Sequence
  nuclear localization signal
SALIKKKKKMAP

SEQ ID NO: 186 - protein, 5 aa, Artificial Sequence
  nuclear localization signal
DRLRR

SEQ ID NO: 187 - protein, 7 aa, Artificial Sequence
  nuclear localization signal
PKQKKRK

SEQ ID NO: 188 - protein, 9 aa, Artificial Sequence
  nuclear localization signal
RKLKKKIKK

SEQ ID NO: 189 - protein, 10 aa, Artificial Sequence
  nuclear localization signal
REKKKFLKRR

SEQ ID NO: 190 - protein, 20 aa, Artificial Sequence
  nuclear localization signal
KRKGDEVDGVDEVAKKKSKK

SEQ ID NO: 191 - protein, 17 aa, Artificial Sequence
  nuclear localization signal
RKCLQAGMNLEARKTKK

SEQ ID NO: 192 - protein, 8 aa, Artificial Sequence
  nuclear localization signal
PRPRKIPR

SEQ ID NO: 193 - protein, 9 aa, Artificial Sequence
  nuclear localization signal
PPRKKRTVV

SEQ ID NO: 194 - protein, 12 aa, Artificial Sequence
  nuclear localization signal
NLSKKKKRKREK

SEQ ID NO: 195 - protein, 10 aa, Artificial Sequence
  nuclear localization signal
RRPSRPFRKP

SEQ ID NO: 196 - protein, 8 aa, Artificial Sequence
  nuclear localization signal
KRPRSPSS

SEQ ID NO: 197 - protein, 19 aa, Artificial Sequence
  nuclear localization signal
KRGINDRNFWRGENERKTR

SEQ ID NO: 198 - protein, 11 aa, Artificial Sequence
  nuclear localization signal
PRPPKMARYDN

SEQ ID NO: 199 - protein, 8 aa, Artificial Sequence
  nuclear localization signal
KRSFSKAF

SEQ ID NO: 200 - protein, 9 aa, Artificial Sequence
  nuclear localization signal
KLKIKRPVK

SEQ ID NO: 201 - protein, 19 aa, Artificial Sequence
  nuclear localization signal
PKKKRKVPPPPAAKRVKLD

SEQ ID NO: 202 - protein, 17 aa, Artificial Sequence
  nuclear localization signal
PKTRRRPRRSQRKRPPT

SEQ ID NO: 203 - protein, 25 aa, Artificial Sequence
  nuclear localization signal
MSRRRKANPTKLSENAKKLAKEVEN

SEQ ID NO: 204 - protein, 16 aa, Artificial Sequence
  nuclear localization signal
KTRRRPRRSQRKRPPT

SEQ ID NO: 205 - protein, 13 aa, Artificial Sequence
  nuclear localization signal
RRKKRRPRRKKRR

SEQ ID NO: 206 - protein, 14 aa, Artificial Sequence
  nuclear localization signal
PKKKSRKPKKKSRK

SEQ ID NO: 207 - protein, 17 aa, Artificial Sequence
  nuclear localization signal
HKKKHPDASVNFSEFSK

SEQ ID NO: 208 - protein, 18 aa, Artificial Sequence
  nuclear localization signal
QRPGPYDRPQRPGPYDRP

SEQ ID NO: 209 - protein, 16 aa, Artificial Sequence
  nuclear localization signal
LSPSLSPLLSPSLSPL

SEQ ID NO: 210 - protein, 18 aa, Artificial Sequence
  nuclear localization signal
RGKGGKGLGKGGAKRHRK

SEQ ID NO: 211 - protein, 14 aa, Artificial Sequence
  nuclear localization signal
PKRGRGRPKRGRGR

SEQ ID NO: 212 - protein, 19 aa, Artificial Sequence
  nuclear localization signal
PKKKRKVPPPPAAKRVKLD

SEQ ID NO: 213 - protein, 17 aa, Artificial Sequence
  nuclear localization signal
PKKKRKVPPPPKKKRKV

SEQ ID NO: 214 - protein, 11 aa, Artificial Sequence
  peptide transduction domain
YGRKKRRQRRR

SEQ ID NO: 215 - protein, 8 aa, Artificial Sequence
  peptide transduction domain
RKKRRQRR

SEQ ID NO: 216 - protein, 11 aa, Artificial Sequence
  peptide transduction domain
YARAAARQARA

SEQ ID NO: 217 - protein, 11 aa, Artificial Sequence
  peptide transduction domain
THRLPRRRRRR

SEQ ID NO: 218 - protein, 11 aa, Artificial Sequence
  peptide transduction domain
GGRRARRRRRR

SEQ ID NO: 219 - protein, 50 aa, Artificial Sequence
  peptide transduction domain
  MISC_FEATURE (4)..(50): These individual amino acid residues may be present or absent
RRRRRRRRRRRRRRRRRRRRRRRRRRRRRRRRRRRRRRRRRRRRRRRRRR

SEQ ID NO: 220 - protein, 12 aa, Artificial Sequence
  peptide transduction domain
RRQRRTSKLMKR

SEQ ID NO: 221 - protein, 27 aa, Artificial Sequence
  peptide transduction domain
GWTLNSAGYLLGKINLKALAALAKKIL

SEQ ID NO: 222 - protein, 33 aa, Artificial Sequence
  peptide transduction domain
KALAWEAKLAKALAKALAKHLAKALAKALKCEA

SEQ ID NO: 223 - protein, 16 aa, Artificial Sequence
  peptide transduction domain
RQIKIWFQNRRMKWKK

SEQ ID NO: 224 - protein, 5 aa, Artificial Sequence
  linker
GSGGS

SEQ ID NO: 225 - protein, 6 aa, Artificial Sequence
  linker
GGSGGS

SEQ ID NO: 226 - protein, 4 aa, Artificial Sequence
  linker
GGGS

SEQ ID NO: 227 - protein, 4 aa, Artificial Sequence
  linker
GGSG

SEQ ID NO: 228 - protein, 5 aa, Artificial Sequence
  linker
GGSGG

SEQ ID NO: 229 - protein, 5 aa, Artificial Sequence
  linker
GSGSG

SEQ ID NO: 230 - protein, 5 aa, Artificial Sequence
  linker
GSGGG

SEQ ID NO: 231 - protein, 5 aa, Artificial Sequence
  linker
GGGSG

SEQ ID NO: 232 - protein, 5 aa, Artificial Sequence
  linker
GSSSG

SEQ ID NO: 233 - protein, 4 aa, Artificial Sequence
  linker
GPGP

SEQ ID NO: 234 - protein, 6 aa, Artificial Sequence
  linker
PPAPPA

SEQ ID NO: 235 - protein, 7 aa, Artificial Sequence
  linker
PPPGPPP

SEQ ID NO: 236 - DNA, 3120 bp, Artificial Sequence
  SV40 NLS-CasX-SV40 NLS-TEV cleavage site-TwinStrep tag
atggctccgaagaagaagcgaaaggtcagccaggaaattaaacgcatcaacaagatccgccgtcgtctggtaaaagacagcaatacgaaaaaagccggaaaaaccggtccgatgaaaacgctgctggtgcgcgtgatgacgccggatctccgcgaacgtcttgagaatttgcgtaagaaacctgaaaatattccgcaaccgatttctaacacctcgcgcgccaatctgaataaactgctgaccgattacaccgaaatgaagaaagcgattctgcacgtttactgggaagagttccagaaagacccggtcggtctgatgagccgcgttgcgcaacctgcgccgaaaaatatcgatcagcgcaagttaatcccggttaaagatggtaatgaacgtttaacctccagcggctttgcctgcagtcagtgctgccagccactttatgtttataaacttgaacaggttaacgataaagggaaaccccataccaattatttcggccgctgcaatgtcagcgaacatgaacgcctgattttgttaagcccgcataaaccggaagcgaatgacgaactggtgacctattccctgggtaaatttggtcagcgggcgctggatttttacagcattcatgtgacgcgggaaagtaaccatccggtaaagccactggaacaaatcggcggtaacagctgcgcctctggcccggttggcaaagcgcttagcgatgcctgtatgggcgcggtggcgagctttctgacaaaataccaggatattatcctggagcatcagaaggtgatcaaaaagaacgagaaacgtctggcaaatttaaaggatattgcctccgctaacggcctggcgttcccgaagattaccttaccgccgcagccgcacaccaaagaaggtatcgaagcgtataacaacgttgttgcccagatcgtcatctgggtgaatctcaacctgtggcaaaaactgaaaattggtcgtgatgaagcaaaaccgttgcagcgactgaaaggattcccgtcgtttccgctggttgaacgacaggcgaacgaagtggattggtgggatatggtttgtaacgtcaaaaaattgatcaacgaaaaaaaggaagatggcaaagttttctggcaaaatctggcgggttacaaacgtcaggaggcgttgcttccgtatctctcttcagaagaagatcgcaaaaaaggcaagaagtttgctcgctatcagtttggcgatttattactgcatctggaaaaaaaacacggcgaagactggggcaaagtgtacgatgaagcctgggagcgtatcgacaaaaaagtggaaggtttgtcgaaacatattaaactcgaagaagagcgccgcagtgaagatgcgcagtcaaaagcagcgctgacggactggttacgtgcgaaagccagttttgtgattgaaggattaaaagaagctgataaagatgaattttgccgttgcgaactgaaactgcaaaaatggtatggcgacctgcgcggcaaaccgttcgccattgaggcagaaaatagcatccttgatatctccggtttcagcaaacaatataactgcgcgtttatttggcagaaagacggcgtgaaaaagcttaacctgtatctgatcattaactattttaaaggcgggaaactgcgtttcaagaaaatcaagccggaagcatttgaagccaatcgtttttataccgttattaataaaaaaagcggtgaaatcgtgccgatggaagttaattttaactttgatgatccgaacttgattattctgccgctggcattcggtaaacggcagggccgtgagtttatctggaacgacctgttatcgctggaaacgggcagcctgaaattagccaacggtcgcgtcattgaaaaaacgctctacaaccgccgcacccgccaggatgagccggcactgtttgtcgcgctgacctttgaacggcgtgaagtcctcgatagcagcaacatcaaaccaatgaaccttatcggtattgatcgtggtgaaaacattcctgccgttatcgccctgactgatccagaaggctgcccgctttctcgcttcaaagattcactgggcaacccgacccatatcctccgtattggcgagagctacaaagagaaacagcgtaccattcaggcagccaaagaagtggagcagcgtcgcgcgggcggctatagccgtaaatatgccagcaaagctaaaaacctggcggatgacatggtgcgtaacacggcgcgcgatttgctgtactacgccgtcacccaggacgcgatgctgatttttgagaacctctcccgcggttttgggcgtcagggtaaacgcacgtttatggcggaacgccagtatacgcgtatggaggactggctgaccgcgaagctggcctatgaaggcttgccgtctaaaacttacctgagcaagaccctggctcagtacaccagtaaaacctgtagtaattgcggctttaccatcaccagcgccgattatgaccgcgtgctggaaaagctgaagaaaaccgccaccggctggatgaccaccatcaatggtaaagagcttaaagtcgaagggcagattacttattacaaccgttataagcggcaaaacgtggtgaaagatctgtcggttgagctggaccgtttgtctgaagaaagcgtgaacaatgatatcagctcctggaccaaaggtcgttccggcgaagcgttaagtctgttgaaaaagcgctttagccatcgcccggtgcaggaaaaattcgtttgcctgaactgtggcttcgaaacccacgccgacgagcaagcggcgctcaatattgcgcgtagctggctgttcctgcgcagccaggaatataaaaaatatcaaaccaacaaaacaactggcaataccgacaagcgtgcctttgttgaaacctggcagagcttctatcgcaaaaaactgaaagaggtctggaaaccggcggtagcgccaaagaaaaaacgcaaagtgagcgaaaatctttattttcaaggtagcgcatggagtcatcctcaattcgagaaaggtggaggttctggcggtggatcgggaggttcagcgtggagccacccgcagttcgaaaaaggaaggggatccggctgctaa

SEQ ID NO: 237 - protein, 976 aa, Artificial Sequence; identical to SEQ ID NO: 117
  CasX Variant

SEQ ID NO: 238 - protein, 976 aa, Artificial Sequence
  CasX Variant
QEIKRINKIRRRLVKDSNTKKAGKTGPMKTLLVRVMTPDLRERLENLRKKPENIPQPISNTSRANLNKLLTDYTEMKKAILHVYWEEFQKDPVGLMSRVAQPAPKNIDQRKLIPVKDGNERLTSSGFACSQCCQPLYVYKLEQVNDKGKPHTNYFGRCNVSEHERLILLSPHKPEANDELVTYSLGKFGQRALDFYSIHVTRESNHPVKPLEQIGGNSCASGPVGKALSDACMGAVASFLTKYQDIILEHKKVIKKNEKRLANLKDIASANGLAFPKITLPPQPHTKEGIEAYNNVVAQIVIWVNLNLWQKLKIGRDEAKPLQRLKGFPSFPLVERQANEVDWWDMVCNVKKLINEKKEDGKVFWQNLAGYKRQEALRPYLSSPEDRKKGKKFARYQLGDLLLHLEKKHGEDWGKVYDEAWERIDKKVEGLSKHIKLEEERRSEDAQSKAALTDWLRAKASFVIEGLKEADKDEFCRCELKLQKWYGDLRGKPFAIEAENSILDISGFSKQYNCAFIWQKDGVKKLNLYLIINYFKGGKLRFKKIKPEAFEANRFYTVINKKSGEIVPMEVNFNFDDPNLIILPLAFGKRQGREFIWNDLLSLETGSLKLANGRVIEKPLYNRRTRQDEPALFVALTFERREVLDSSNIKPMNLIGVDRGENIPAVIALTDPEGCPLSRFKDSLGNPTHILRIGESYKEKQRTIQAKKEVEQRRAGGYSRKYASKAKNLADDMVRNTARDLLYYAVTQDAMLIFENLSRGFGRQGKRTFMAERQYTRMEDWLTAKLAYEGLSKTYLSKTLAQYTSKTCSNCGFTITSADYDRVLEKLKKTATGWMTTINGKELKVEGQITYYNRRKRQNVVKDLSVELDRLSEESVNNDISSWTKGRSGEALSLLKKRFSHRPVQEKFVCLNCGFETHADEQAALNIARSWLFLRSQEYKKYQTNKTTGNTDKRAFVETWQSFYRKKLKEVWKPAV

SEQ ID NO: 239 - protein, 976 aa, Artificial Sequence
  CasX Variant
QEIKRINKIRRRLVKDSNTKKAGKTGPMKTLLVRVMTPDLRERLENLRKKPENIPQPISNTSRANLNKLLTDYTEMKKAILHVYWEEFQKDPVGLMSRVAQPAPKNIDQRKLIPVKDGNERLTSSGFACSQCCQPLYVYKLEQVNDKGKPHTNYFGRCNVSEHERLILLSPHKPEANDELVTYSLGKFGQRALDFYSIHVTRESNHPVKPLEQIGGNSCASGPVGKALSDACMGAVASFLTKYQDIILEHQKVIKKNEKRLANLKDIASANGLAFPKITLPPQPHTKEGIEAYNNVVAQIVIWVNLNLWQKLKIGRDEAKPLQRLKGFPSFPLVERQANEVDWWDMVCNVKKLINEKKEDGKVFWQNLAGYKRQEALRPYLSSEEDRKKGKKFARYQLGDLLKHLEKKHGEDWGKVYDEAWERIDKKVEGLSKHIKLEEERRSEDAQSKAALTDWLRAKASFVIEGLKEADKDEFCRCELKLQKWYGDLRGKPFAIEAENSILDISGFSKQYNCAFIWQKDGVKKLNLYLIINYFKGGKLRFKKIKPEAFEANRFYTVINKKSGEIVPMEVNFNFDDPNLIILPLAFGKRQGREFIWNDLLSLETGSLKLANGRVIEKTLYNRRTRQDEPALFVALTFERREVLDSSNIKPMNLIGVDRGENIPAVIALTDPEGCPLSRFKDSLGNPTHILRIGESYKEKQRTIQAKKEVEQRRAGGYSRKYASKAKNLADDMVRNTARDLLYYAVTQDAMLIFENLSRGFGRQGKRTFMAERQYTRMEDWLTAKLAYEGLSKTYLSKTLAQYTSKTCSNCGFTITSADYDRVLEKLKKTATGWMTTINGKELKVEGQITYYNRRKRQNVVKDLSVELDRLSEESVNNDISSWTKGRSGEALSLLKKRFSHRPVQEKFVCLNCGFETHADEQAALNIARSWLFLRSQEYKKYQTNKTTGNTDKRAFVETWQSFYRKKLKEVWKPAV

SEQ ID NO: 240 - DNA, 3123 bp, Artificial Sequence
  CasX Variant
atggctccgaagaagaagcgaaaggtcagccaggaaattaaacgcatcaacaagatccgccgtcgtctggtaaaagacagcaatacgaaaaaagccggaaaaaccggtccgatgaaaacgctgctggtgcgcgtgatgacgccggatctccgcgaacgtcttgagaatttgcgtaagaaacctgaaaatattccgcaaccgatttctaacacctcgcgcgccaatctgaataaactgctgaccgattacaccgaaatgaagaaagcgattctgcacgtttactgggaagagttccagaaagacccggtcggtctgatgagccgcgttgcgcaacctgcgccgaaaaatatcgatcagcgcaagttaatcccggttaaagatggtaatgaacgtttaacctccagcggctttgcctgcagtcagtgctgccagccactttatgtttataaacttgaacaggttaacgataaagggaaaccccataccaattatttcggccgctgcaatgtcagcgaacatgaacgcctgattttgttaagcccgcataaaccggaagcgaatgacgaactggtgacctattccctgggtaaatttggtcagcgggcgctggatttttacagcattcatgtgacgcgggaaagtaaccatccggtaaagccactggaacaaatcggcggtaacagctgcgcctctggcccggttggcaaagcgcttagcgatgcctgtatgggcgcggtggcgagctttctgacaaaataccaggatattatcctggagcatcagaaggtgatcaaaaagaacgagaaacgtctggcaaatttaaaggatattgcctccgctaacggcctggcgttcccgaagattaccttaccgccgcagccgcacaccaaagaaggtatcgaagcgtataacaacgttgttgcccagatcgtcatctgggtgaatctcaacctgtggcaaaaactgaaaattggtcgtgatgaagcaaaaccgttgcagcgactgaaaggattcccgtcgtttccgctggttgaacgacaggcgaacgaagtggattggtgggatatggtttgtaacgtcaaaaaattgatcaacgaaaaaaaggaagatggcaaagttttctggcaaaatctggcgggttacaaacgtcaggaggcgttgcgtccgtatctctcttcagaagaagatcgcaaaaaaggcaagaagtttgctcgctatcagtttggcgatttattactgcatctggaaaaaaaacacggcgaagactggggcaaagtgtacgatgaagcctgggagcgtatcgacaaaaaagtggaaggtttgtcgaaacatattaaactcgaagaagagcgccgcagtgaagatgcgcagtcaaaagcagcgctgacggactggttacgtgcgaaagccagttttgtgattgaaggattaaaagaagctgataaagatgaattttgccgttgcgaactgaaactgcaaaaatggtatggcgacctgcgcggcaaaccgttcgccattgaggcagaaaatagcatccttgatatctccggtttcagcaaacaatataactgcgcgtttatttggcagaaagacggcgtgaaaaagcttaacctgtatctgatcattaactattttaaaggcgggaaactgcgtttcaagaaaatcaagccggaagcatttgaagccaatcgtttttataccgttattaataaaaaaagcggtgaaatcgtgccgatggaagttaattttaactttgatgatccgaacttgattattctgccgctggcattcggtaaacggcagggccgtgagtttatctggaacgacctgttatcgctggaaacgggcagcctgaaattagccaacggtcgcgtcattgaaaaaacgctctacaaccgccgcacccgccaggatgagccggcactgtttgtcgcgctgacctttgaacggcgtgaagtcctcgatagcagcaacatcaaaccaatgaaccttatcggtattgatcgtggtgaaaacattcctgccgttatcgccctgactgatccagaaggctgcccgctttctcgcttcaaagattcactgggcaacccgacccatatcctccgtattggcgagagctacaaagagaaacagcgtaccattcaggcaaagaaagaagtggagcagcgtcgcgcgggcggctatagccgtaaatatgccagcaaagctaaaaacctggcggatgacatggtgcgtaacacggcgcgcgatttgctgtactacgccgtcacccaggacgcgatgctgatttttgagaacctctcccgcggttttgggcgtcagggtaaacgcacgtttatggcggaacgccagtatacgcgtatggaggactggctgaccgcgaagctggcctatgaaggcttgtctaaaacttacctgagcaagaccctggctcagtacaccagtaaaacctgtagtaattgcggctttaccatcaccagcgccgattatgaccgcgtgctggaaaagctgaagaaaaccgccaccggctggatgaccaccatcaatggtaaagagcttaaagtcgaagggcagattacttattacaaccgttataagcggcaaaacgtggtgaaagatctgtcggttgagctggaccgtttgtctgaagaaagcgtgaacaatgatatcagctcctggaccaaaggtcgttccggcgaagcgttaagtctgttgaaaaagcgctttagccatcgcccggtgcaggaaaaattcgtttgcctgaactgtggcttcgaaacccacgccgacgagcaagcggcgctcaatattgcgcgtagctggctgttcctgcgcagccaggaatataaaaaatatcaaaccaacaaaacaactggcaataccgacaagcgtgcctttgttgaaacctggcagagcttctatcgcaagaagctgaaagaggtctggaaaccggcggtaccacctgcgccaaagaaaaaacgcaaagtgagcgaaaatctttattttcaaggtagcgcatggagtcatcctcaattcgagaaaggtggaggttctggcggtggatcgggaggttcagcgtggagccacccgcagttcgaaaaaggaaggggatccggctgctaa

SEQ ID NO: 241 - DNA, 3123 bp, Artificial Sequence
  CasX Variant
atggctccgaagaagaagcgaaaggtcagccaggaaattaaacgcatcaacaagatccgccgtcgtctggtaaaagacagcaatacgaaaaaagccggaaaaaccggtccgatgaaaacgctgctggtgcgcgtgatgacgccggatctccgcgaacgtcttgagaatttgcgtaagaaacctgaaaatattccgcaaccgatttctaacacctcgcgcgccaatctgaataaactgctgaccgattacaccgaaatgaagaaagcgattctgcacgtttactgggaagagttccagaaagacccggtcggtctgatgagccgcgttgcgcaacctgcgccgaaaaatatcgatcagcgcaagttaatcccggttaaagatggtaatgaacgtttaacctccagcggctttgcctgcagtcagtgctgccagccactttatgtttataaacttgaacaggttaacgataaagggaaaccccataccaattatttcggccgctgcaatgtcagcgaacatgaacgcctgattttgttaagcccgcataaaccggaagcgaatgacgaactggtgacctattccctgggtaaatttggtcagcgggcgctggatttttacagcattcatgtgacgcgggaaagtaaccatccggtaaagccactggaacaaatcggcggtaacagctgcgcctctggcccggttggcaaagcgcttagcgatgcctgtatgggcgcggtggcgagctttctgacaaaataccaggatattatcctggagcataagaaggtgatcaaaaagaacgagaaacgtctggcaaatttaaaggatattgcctccgctaacggcctggcgttcccgaagattaccttaccgccgcagccgcacaccaaagaaggtatcgaagcgtataacaacgttgttgcccagatcgtcatctgggtgaatctcaacctgtggcaaaaactgaaaattggtcgtgatgaagcaaaaccgttgcagcgactgaaaggattcccgtcgtttccgctggttgaacgacaggcgaacgaagtggattggtgggatatggtttgtaacgtcaaaaaattgatcaacgaaaaaaaggaagatggcaaagttttctggcaaaatctggcgggttacaaacgtcaggaggcgttgcgtccgtatctctcttcaccagaagatcgcaaaaaaggcaagaagtttgctcgctatcagttgggcgatttattactgcatctggaaaaaaaacacggcgaagactggggcaaagtgtacgatgaagcctgggagcgtatcgacaaaaaagtggaaggtttgtcgaaacatattaaactcgaagaagagcgccgcagtgaagatgcgcagtcaaaagcagcgctgacggactggttacgtgcgaaagccagttttgtgattgaaggattaaaagaagctgataaagatgaattttgccgttgcgaactgaaactgcaaaaatggtatggcgacctgcgcggcaaaccgttcgccattgaggcagaaaatagcatccttgatatctccggtttcagcaaacaatataactgcgcgtttatttggcagaaagacggcgtgaaaaagcttaacctgtatctgatcattaactattttaaaggcgggaaactgcgtttcaagaaaatcaagccggaagcatttgaagccaatcgtttttataccgttattaataaaaaaagcggtgaaatcgtgccgatggaagttaattttaactttgatgatccgaacttgattattctgccgctggcattcggtaaacggcagggccgtgagtttatctggaacgacctgttatcgctggaaacgggcagcctgaaattagccaacggtcgcgtcattgaaaaaccgctctacaaccgccgcacccgccaggatgagccggcactgtttgtcgcgctgacctttgaacggcgtgaagtcctcgatagcagcaacatcaaaccaatgaaccttatcggtgttgatcgtggtgaaaacattcctgccgttatcgccctgactgatccagaaggctgcccgctttctcgcttcaaagattcactgggcaacccgacccatatcctccgtattggcgagagctacaaagagaaacagcgtaccattcaggcaaagaaagaagtggagcagcgtcgcgcgggcggctatagccgtaaatatgccagcaaagctaaaaacctggcggatgacatggtgcgtaacacggcgcgcgatttgctgtactacgccgtcacccaggacgcgatgctgatttttgagaacctctcccgcggttttgggcgtcagggtaaacgcacgtttatggcggaacgccagtatacgcgtatggaggactggctgaccgcgaagctggcctatgaaggcttgtctaaaacttacctgagcaagaccctggctcagtacaccagtaaaacctgtagtaattgcggctttaccatcaccagcgccgattatgaccgcgtgctggaaaagctgaagaaaaccgccaccggctggatgaccaccatcaatggtaaagagcttaaagtcgaagggcagattacttattacaaccgtcgtaagcggcaaaacgtggtgaaagatctgtcggttgagctggaccgtttgtctgaagaaagcgtgaacaatgatatcagctcctggaccaaaggtcgttccggcgaagcgttaagtctgttgaaaaagcgctttagccatcgcccggtgcaggaaaaattcgtttgcctgaactgtggcttcgaaacccacgccgacgagcaagcggcgctcaatattgcgcgtagctggctgttcctgcgcagccaggaatataaaaaatatcaaaccaacaaaacaactggcaataccgacaagcgtgcctttgttgaaacctggcagagcttctatcgcaagaagctgaaagaggtctggaaaccggcggtaccacctgcgccaaagaaaaaacgcaaagtgagcgaaaatctttattttcaaggtagcgcatggagtcatcctcaattcgagaaaggtggaggttctggcggtggatcgggaggttcagcgtggagccacccgcagttcgaaaaaggaaggggatccggctgctaa

SEQ ID NO: 242 - DNA, 3123 bp, Artificial Sequence
  CasX Variant
atggctccgaagaagaagcgaaaggtcagccaggaaattaaacgcatcaacaagatccgccgtcgtctggtaaaagacagcaatacgaaaaaagccggaaaaaccggtccgatgaaaacgctgctggtgcgcgtgatgacgccggatctccgcgaacgtcttgagaatttgcgtaagaaacctgaaaatattccgcaaccgatttctaacacctcgcgcgccaatctgaataaactgctgaccgattacaccgaaatgaagaaagcgattctgcacgtttactgggaagagttccagaaagacccggtcggtctgatgagccgcgttgcgcaacctgcgccgaaaaatatcgatcagcgcaagttaatcccggttaaagatggtaatgaacgtttaacctccagcggctttgcctgcagtcagtgctgccagccactttatgtttataaacttgaacaggttaacgataaagggaaaccccataccaattatttcggccgctgcaatgtcagcgaacatgaacgcctgattttgttaagcccgcataaaccggaagcgaatgacgaactggtgacctattccctgggtaaatttggtcagcgggcgctggatttttacagcattcatgtgacgcgggaaagtaaccatccggtaaagccactggaacaaatcggcggtaacagctgcgcctctggcccggttggcaaagcgcttagcgatgcctgtatgggcgcggtggcgagctttctgacaaaataccaggatattatcctggagcatcagaaggtgatcaaaaagaacgagaaacgtctggcaaatttaaaggatattgcctccgctaacggcctggcgttcccgaagattaccttaccgccgcagccgcacaccaaagaaggtatcgaagcgtataacaacgttgttgcccagatcgtcatctgggtgaatctcaacctgtggcaaaaactgaaaattggtcgtgatgaagcaaaaccgttgcagcgactgaaaggattcccgtcgtttccgctggttgaacgacaggcgaacgaagtggattggtgggatatggtttgtaacgtcaaaaaattgatcaacgaaaaaaaggaagatggcaaagttttctggcaaaatctggcgggttacaaacgtcaggaggcgttgcgtccgtatctctcttcagaagaagatcgcaaaaaaggcaagaagtttgctcgctatcagttgggcgatttattaaagcatctggaaaaaaaacacggcgaagactggggcaaagtgtacgatgaagcctgggagcgtatcgacaaaaaagtggaaggtttgtcgaaacatattaaactcgaagaagagcgccgcagtgaagatgcgcagtcaaaagcagcgctgacggactggttacgtgcgaaagccagttttgtgattgaaggattaaaagaagctgataaagatgaattttgccgttgcgaactgaaactgcaaaaatggtatggcgacctgcgcggcaaaccgttcgccattgaggcagaaaatagcatccttgatatctccggtttcagcaaacaatataactgcgcgtttatttggcagaaagacggcgtgaaaaagcttaacctgtatctgatcattaactattttaaaggcgggaaactgcgtttcaagaaaatcaagccggaagcatttgaagccaatcgtttttataccgttattaataaaaaaagcggtgaaatcgtgccgatggaagttaattttaactttgatgatccgaacttgattattctgccgctggcattcggtaaacggcagggccgtgagtttatctggaacgacctgttatcgctggaaacgggcagcctgaaattagccaacggtcgcgtcattgaaaaaacgctctacaaccgccgcacccgccaggatgagccggcactgtttgtcgcgctgacctttgaacggcgtgaagtcctcgatagcagcaacatcaaaccaatgaaccttatcggtgttgatcgtggtgaaaacattcctgccgttatcgccctgactgatccagaaggctgcccgctttctcgcttcaaagattcactgggcaacccgacccatatcctccgtattggcgagagctacaaagagaaacagcgtaccattcaggcaaagaaagaagtggagcagcgtcgcgcgggcggctatagccgtaaatatgccagcaaagctaaaaacctggcggatgacatggtgcgtaacacggcgcgcgatttgctgtactacgccgtcacccaggacgcgatgctgatttttgagaacctctcccgcggttttgggcgtcagggtaaacgcacgtttatggcggaacgccagtatacgcgtatggaggactggctgaccgcgaagctggcctatgaaggcttgtctaaaacttacctgagcaagaccctggctcagtacaccagtaaaacctgtagtaattgcggctttaccatcaccagcgccgattatgaccgcgtgctggaaaagctgaagaaaaccgccaccggctggatgaccaccatcaatggtaaagagcttaaagtcgaagggcagattacttattacaaccgtcgtaagcggcaaaacgtggtgaaagatctgtcggttgagctggaccgtttgtctgaagaaagcgtgaacaatgatatcagctcctggaccaaaggtcgttccggcgaagcgttaagtctgttgaaaaagcgctttagccatcgcccggtgcaggaaaaattcgtttgcctgaactgtggcttcgaaacccacgccgacgagcaagcggcgctcaatattgcgcgtagctggctgttcctgcgcagccaggaatataaaaaatatcaaaccaacaaaacaactggcaataccgacaagcgtgcctttgttgaaacctggcagagcttctatcgcaagaagctgaaagaggtctggaaaccggcggtaccacctgcgccaaagaaaaaacgcaaagtgagcgaaaatctttattttcaaggtagcgcatggagtcatcctcaattcgagaaaggtggaggttctggcggtggatcgggaggttcagcgtggagccacccgcagttcgaaaaaggaaggggatccggctgctaa

SEQ ID NO: 243 - protein, 977 aa, Artificial Sequence; identical to SEQ ID NO: 135
  CasX Variant

SEQ ID NO: 244 - protein, 977 aa, Artificial Sequence; identical to SEQ ID NO: 138
  CasX Variant

SEQ ID NO: 245 - protein, 978 aa, Artificial Sequence; identical to SEQ ID NO: 145
  CasX Variant

SEQ ID NO: 246 - protein, 978 aa, Artificial Sequence; identical to SEQ ID NO: 156
  CasX Variant

SEQ ID NO: 247 - DNA, 2931 bp, Artificial Sequence
  CasX Variant
caagagatcaagagaatcaacaagatcagaaggagactggtcaaggacagcaacacaaagaaggccggcaagacaggccccatgaaaaccctgctcgtcagagtgatgacccctgacctgagagagcggctggaaaacctgagaaagaagcccgagaacatccctcagcctatcagcaacaccagcagggccaacctgaacaagctgctgaccgactacaccgagatgaagaaagccatcctgcacgtgtactgggaagagttccagaaagaccccgtgggcctgatgagcagagttgctcagcctgccagcaagaagatcgaccagaacaagctgaagcccgagatggacgagaagggcaatctgaccacagccggctttgcctgctctcagtgtggccagcctctgttcgtgtacaagctggaacaggtgtccgagaaaggcaaggcctacaccaactacttcggcagatgtaacgtggccgagcacgagaagctgattctgctggcccagctgaaacctgagaaggactctgatgaggccgtgacctacagcctgggcaagtttggacagagagccctggacttctacagcatccacgtgaccaaagaaagcacacaccccgtgaagcccctggctcagatcgccggcaatagatacgcctctggacctgtgggcaaagccctgtccgatgcctgcatgggaacaatcgccagcttcctgagcaagtaccaggacatcatcatcgagcaccagaaggtggtcaagggcaaccagaagagactggaaagcctgagggagctggccggcaaagagaacctggaataccccagcgtgaccctgcctcctcagcctcacacaaaagaaggcgtggacgcctacaacgaagtgatcgccagagtgagaatgtgggtcaacctgaacctgtggcagaagctgaaactgtccagggacgacgccaagcctctgctgagactgaagggcttccctagcttccctctggtggaaagacaggccaatgaagtggattggtgggacatggtctgcaacgtgaagaagctgatcaacgagaagaaagaggatggcaaggttttctggcagaacctggccggctacaagagacaagaagccctgaggccttacctgagcagcgaagaggaccggaagaagggcaagaagttcgccagataccagttcggcgacctgctgctgcacctggaaaagaagcacggcgaggactggggcaaagtgtacgatgaggcctgggagagaatcgacaagaaggtggaaggcctgagcaagcacattaagctggaagaggaaagaaggagcgaggacgcccaatctaaagccgctctgaccgattggctgagagccaaggccagctttgtgatcgagggcctgaaagaggccgacaaggacgagttctgcagatgcgagctgaagctgcagaagtggtacggcgatctgagaggcaagcccttcgccattgaggccgagaacagcatcctggacatcagcggcttcagcaagcagtacaactgcgccttcatttggcagaaagacggcgtcaagaaactgaacctgtacctgatcatcaattacttcaaaggcggcaagctgcggttcaagaagatcaaacccgaggccttcgaggctaacagattctacaccgtgatcaacaaaaagtccggcgagatcgtgcccatggaagtgaacttcaacttcgacgaccccaacctgattatcctgcctctggccttcggcaagagacagggcagagagttcatctggaacgatctgctgagcctggaaaccggctctctgaagctggccaatggcagagtgatcgagaaaaccctgtacaacaggagaaccagacaggacgagcctgctctgtttgtggccctgaccttcgagagaagagaggtgctggacagcagcaacatcaagcccatgaacctgatcggcatcgaccggggcgagaatatccctgctgtgatcgccctgacagaccctgaaggatgcccactgagcagattcaaggactccctgggcaaccctacacacatcctgagaatcggcgagagctacaaagagaagcagaggacaatccaggccaagaaagaggtggaacagagaagagccggcggatactctaggaagtacgccagcaaggccaagaatctggccgacgacatggtccgaaacaccgccagagatctgctgtactacgccgtgacacaggacgccatgctgatcttcgagaatctgagcagaggcttcggccggcagggcaagagaacctttatggccgagaggcagtacaccagaatggaagattggctcacagctaaactggcctacgagggactgagcaagacctacctgtccaaaacactggcccagtatacctccaagacctgcagcaattgcggcttcaccatcaccagcgccgactacgacagagtgctggaaaagctcaagaaaaccgccaccggctggatgaccaccatcaacggcaaagagctgaaggttgagggccagatcacctactacaacaggtacaagaggcagaacgtcgtgaaggatctgagcgtggaactggacagactgagcgaagagagcgtgaacaacgacatcagcagctggacaaagggcagatcaggcgaggctctgagcctgctgaagaagaggtttagccacagacctgtgcaagagaagttcgtgtgcctgaactgcggcttcgagacacacgccgatgaacaggctgccctgaacattgccagaagctggctgttcctgagaagccaagagtacaagaagtaccagaccaacaagaccaccggcaacaccgacaagagggcctttgtggaaacctggcagagcttctacagaaaaaagctgaaagaagtctggaagcccgccgtg

SEQ ID NO: 248 - DNA, 2931 bp, Artificial Sequence
  CasX Variant
caagagatcaagagaatcaacaagatcagaaggagactggtcaaggacagcaacacaaagaaggccggcaagacaggccccatgaaaaccctgctcgtcagagtgatgacccctgacctgagagagcggctggaaaacctgagaaagaagcccgagaacatccctcagcctatcagcaacaccagcagggccaacctgaacaagctgctgaccgactacaccgagatgaagaaagccatcctgcacgtgtactgggaagagttccagaaagaccccgtgggcctgatgagcagagttgctcagcctgccagcaagaagatcgaccagaacaagctgaagcccgagatggacgagaagggcaatctgaccacagccggctttgcctgctctcagtgtggccagcctctgttcgtgtacaagctggaacaggtgtccgagaaaggcaaggcctacaccaactacttcggcagatgtaacgtggccgagcacgagaagctgattctgctggcccagctgaaacctgagaaggactctgatgaggccgtgacctacagcctgggcaagtttggacagagagccctggacttctacagcatccacgtgaccaaagaaagcacacaccccgtgaagcccctggctcagatcgccggcaatagatacgcctctggacctgtgggcaaagccctgtccgatgcctgcatgggaacaatcgccagcttcctgagcaagtaccaggacatcatcatcgagcaccagaaggtggtcaagggcaaccagaagagactggaaagcctgagggagctggccggcaaagagaacctggaataccccagcgtgaccctgcctcctcagcctcacacaaaagaaggcgtggacgcctacaacgaagtgatcgccagagtgagaatgtgggtcaacctgaacctgtggcagaagctgaaactgtccagggacgacgccaagcctctgctgagactgaagggcttccctagcttccctctggtggaaagacaggccaatgaagtggattggtgggacatggtctgcaacgtgaagaagctgatcaacgagaagaaagaggatggcaaggttttctggcagaacctggccggctacaagagacaagaagccctgaggccttacctgagcagcgaagaggaccggaagaagggcaagaagttcgccagataccagctgggcgacctgctgctgcacctggaaaagaagcacggcgaggactggggcaaagtgtacgatgaggcctgggagagaatcgacaagaaggtggaaggcctgagcaagcacattaagctggaagaggaaagaaggagcgaggacgcccaatctaaagccgctctgaccgattggctgagagccaaggccagctttgtgatcgagggcctgaaagaggccgacaaggacgagttctgcagatgcgagctgaagctgcagaagtggtacggcgatctgagaggcaagcccttcgccattgaggccgagaacagcatcctggacatcagcggcttcagcaagcagtacaactgcgccttcatttggcagaaagacggcgtcaagaaactgaacctgtacctgatcatcaattacttcaaaggcggcaagctgcggttcaagaagatcaaacccgaggccttcgaggctaacagattctacaccgtgatcaacaaaaagtccggcgagatcgtgcccatggaagtgaacttcaacttcgacgaccccaacctgattatcctgcctctggccttcggcaagagacagggcagagagttcatctggaacgatctgctgagcctggaaaccggctctctgaagctggccaatggcagagtgatcgagaaaaccctgtacaacaggagaaccagacaggacgagcctgctctgtttgtggccctgaccttcgagagaagagaggtgctggacagcagcaacatcaagcccatgaacctgatcggcgtggaccggggcgagaatatccctgctgtgatcgccctgacagaccctgaaggatgcccactgagcagattcaaggactccctgggcaaccctacacacatcctgagaatcggcgagagctacaaagagaagcagaggacaatccaggccaagaaagaggtggaacagagaagagccggcggatactctaggaagtacgccagcaaggccaagaatctggccgacgacatggtccgaaacaccgccagagatctgctgtactacgccgtgacacaggacgccatgctgatcttcgagaatctgagcagaggcttcggccggcagggcaagagaacctttatggccgagaggcagtacaccagaatggaagattggctcacagctaaactggcctacgagggactgagcaagacctacctgtccaaaacactggcccagtatacctccaagacctgcagcaattgcggcttcaccatcaccagcgccgactacgacagagtgctggaaaagctcaagaaaaccgccaccggctggatgaccaccatcaacggcaaagagctgaaggttgagggccagatcacctactacaacaggtacaagaggcagaacgtcgtgaaggatctgagcgtggaactggacagactgagcgaagagagcgtgaacaacgacatcagcagctggacaaagggcagatcaggcgaggctctgagcctgctgaagaagaggtttagccacagacctgtgcaagagaagttcgtgtgcctgaactgcggcttcgagacacacgccgatgaacaggctgccctgaacattgccagaagctggctgttcctgagaagccaagagtacaagaagtaccagaccaacaagaccaccggcaacaccgacaagagggcctttgtggaaacctggcagagcttctacagaaaaaagctgaaagaagtctggaagcccgccgtg

SEQ ID NO: 249 - DNA, 2934 bp, Artificial Sequence
  CasX Variant
caagagatcaagagaatcaacaagatcagaaggagactggtcaaggacagcaacacaaagaaggccggcaagacaggccccatgaaaaccctgctcgtcagagtgatgacccctgacctgagagagcggctggaaaacctgagaaagaagcccgagaacatccctcagcctatcagcaacaccagcagggccaacctgaacaagctgctgaccgactacaccgagatgaagaaagccatcctgcacgtgtactgggaagagttccagaaagaccccgtgggcctgatgagcagagttgctcagcctgccagcaagaagatcgaccagaacaagctgaagcccgagatggacgagaagggcaatctgaccacagccggctttgcctgctctcagtgtggccagcctctgttcgtgtacaagctggaacaggtgtccgagaaaggcaaggcctacaccaactacttcggcagatgtaacgtggccgagcacgagaagctgattctgctggcccagctgaaacctgagaaggactctgatgaggccgtgacctacagcctgggcaagtttggacagagagccctggacttctacagcatccacgtgaccaaagaaagcacacaccccgtgaagcccctggctcagatcgccggcaatagatacgcctctggacctgtgggcaaagccctgtccgatgcctgcatgggaacaatcgccagcttcctgagcaagtaccaggacatcatcatcgagcaccagaaggtggtcaagggcaaccagaagagactggaaagcctgagggagctggccggcaaagagaacctggaataccccagcgtgaccctgcctcctcagcctcacacaaaagaaggcgtggacgcctacaacgaagtgatcgccagagtgagaatgtgggtcaacctgaacctgtggcagaagctgaaactgtccagggacgacgccaagcctctgctgagactgaagggcttccctagcttccctctggtggaaagacaggccaatgaagtggattggtgggacatggtctgcaacgtgaagaagctgatcaacgagaagaaagaggatggcaaggttttctggcagaacctggccggctacaagagacaagaagccctgaggccttacctgagcagcgaagaggaccggaagaagggcaagaagttcgccagataccagctgggcgacctgctgctgcacctggaaaagaagcacggcgaggactggggcaaagtgtacgatgaggcctgggagagaatcgacaagaaggtggaaggcctgagcaagcacattaagctggaagaggaaagaaggagcgaggacgcccaatctaaagccgctctgaccgattggctgagagccaaggccagctttgtgatcgagggcctgaaagaggccgacaaggacgagttctgcagatgcgagctgaagctgcagaagtggtacggcgatctgagaggcaagcccttcgccattgaggccgagaacagcatcctggacatcagcggcttcagcaagcagtacaactgcgccttcatttggcagaaagacggcgtcaagaaactgaacctgtacctgatcatcaattacttcaaaggcggcaagctgcggttcaagaagatcaaacccgaggccttcgaggctaacagattctacaccgtgatcaacaaaaagtccggcgagatcgtgcccatggaagtgaacttcaacttcgacgaccccaacctgattatcctgcctctggccttcggcaagagacagggcagagagttcatctggaacgatctgctgagcctggaaaccggctctctgaagctggccaatggcagagtgatcgagaaaaccctgtacaacaggagaaccagacaggacgagcctgctctgtttgtggccctgaccttcgagagaagagaggtgctggacagcagcaacatcaagcccatgaacctgatcggcgtggaccggggcgagaatatccctgctgtgatcgccctgacagaccctgaaggatgcccactgagcagattcaaggactccctgggcaaccctacacacatcctgagaatcggcgagagctacaaagagaagcagaggacaatccaggccaagaaagaggtggaacagagaagagccggcggatactctaggaagtacgccagcaaggccaagaatctggccgacgacatggtccgaaacaccgccagagatctgctgtactacgccgtgacacaggacgccatgctgatcttcgagaatctgagcagaggcttcggccggcagggcaagagaacctttatggccgagaggcagtacaccagaatggaagattggctcacagctaaactggcctacgagggactgcccagcaagacctacctgtccaaaacactggcccagtatacctccaagacctgcagcaattgcggcttcaccatcaccagcgccgactacgacagagtgctggaaaagctcaagaaaaccgccaccggctggatgaccaccatcaacggcaaagagctgaaggttgagggccagatcacctactacaacaggtacaagaggcagaacgtcgtgaaggatctgagcgtggaactggacagactgagcgaagagagcgtgaacaacgacatcagcagctggacaaagggcagatcaggcgaggctctgagcctgctgaagaagaggtttagccacagacctgtgcaagagaagttcgtgtgcctgaactgcggcttcgagacacacgccgatgaacaggctgccctgaacattgccagaagctggctgttcctgagaagccaagagtacaagaagtaccagaccaacaagaccaccggcaacaccgacaagagggcctttgtggaaacctggcagagcttctacagaaaaaagctgaaagaagtctggaagcccgccgtg

SEQ ID NO: 250 - DNA, 2934 bp, Artificial Sequence
  CasX Variant
caagagatcaagagaatcaacaagatcagaaggagactggtcaaggacagcaacacaaagaaggccggcaagacacggggccccatgaaaaccctgctcgtcagagtgatgacccctgacctgagagagcggctggaaaacctgagaaagaagcccgagaacatccctcagcctatcagcaacaccagcagggccaacctgaacaagctgctgaccgactacaccgagatgaagaaagccatcctgcacgtgtactgggaagagttccagaaagaccccgtgggcctgatgagcagagttgctcagcctgccagcaagaagatcgaccagaacaagctgaagcccgagatggacgagaagggcaatctgaccacagccggctttgcctgctctcagtgtggccagcctctgttcgtgtacaagctggaacaggtgtccgagaaaggcaaggcctacaccaactacttcggcagatgtaacgtggccgagcacgagaagctgattctgctggcccagctgaaacctgagaaggactctgatgaggccgtgacctacagcctgggcaagtttggacagagagccctggacttctacagcatccacgtgaccaaagaaagcacacaccccgtgaagcccctggctcagatcgccggcaatagatacgcctctggacctgtgggcaaagccctgtccgatgcctgcatgggaacaatcgccagcttcctgagcaagtaccaggacatcatcatcgagcaccagaaggtggtcaagggcaaccagaagagactggaaagcctgagggagctggccggcaaagagaacctggaataccccagcgtgaccctgcctcctcagcctcacacaaaagaaggcgtggacgcctacaacgaagtgatcgccagagtgagaatgtgggtcaacctgaacctgtggcagaagctgaaactgtccagggacgacgccaagcctctgctgagactgaagggcttccctagcttccctctggtggaaagacaggccaatgaagtggattggtgggacatggtctgcaacgtgaagaagctgatcaacgagaagaaagaggatggcaaggttttctggcagaacctggccggctacaagagacaagaagccctgaggccttacctgagcagcgaagaggaccggaagaagggcaagaagttcgccagataccagctgggcgacctgctgctgcacctggaaaagaagcacggcgaggactggggcaaagtgtacgatgaggcctgggagagaatcgacaagaaggtggaaggcctgagcaagcacattaagctggaagaggaaagaaggagcgaggacgcccaatctaaagccgctctgaccgattggctgagagccaaggccagctttgtgatcgagggcctgaaagaggccgacaaggacgagttctgcagatgcgagctgaagctgcagaagtggtacggcgatctgagaggcaagcccttcgccattgaggccgagaacagcatcctggacatcagcggcttcagcaagcagtacaactgcgccttcatttggcagaaagacggcgtcaagaaactgaacctgtacctgatcatcaattacttcaaaggcggcaagctgcggttcaagaagatcaaacccgaggccttcgaggctaacagattctacaccgtgatcaacaaaaagtccggcgagatcgtgcccatggaagtgaacttcaacttcgacgaccccaacctgattatcctgcctctggccttcggcaagagacagggcagagagttcatctggaacgatctgctgagcctggaaaccggctctctgaagctggccaatggcagagtgatcgagaaaaccctgtacaacaggagaaccagacaggacgagcctgctctgtttgtggccctgaccttcgagagaagagaggtgctggacagcagcaacatcaagcccatgaacctgatcggcgtggaccggggcgagaatatccctgctgtgatcgccctgacagaccctgaaggatgcccactgagcagattcaaggactccctgggcaaccctacacacatcctgagaatcggcgagagctacaaagagaagcagaggacaatccaggccaagaaagaggtggaacagagaagagccggcggatactctaggaagtacgccagcaaggccaagaatctggccgacgacatggtccgaaacaccgccagagatctgctgtactacgccgtgacacaggacgccatgctgatcttcgagaatctgagcagaggcttcggccggcagggcaagagaacctttatggccgagaggcagtacaccagaatggaagattggctcacagctaaactggcctacgagggactgagcaagacctacctgtccaaaacactggcccagtatacctccaagacctgcagcaattgcggcttcaccatcaccagcgccgactacgacagagtgctggaaaagctcaagaaaaccgccaccggctggatgaccaccatcaacggcaaagagctgaaggttgagggccagatcacctactacaacaggtacaagaggcagaacgtcgtgaaggatctgagcgtggaactggacagactgagcgaagagagcgtgaacaacgacatcagcagctggacaaagggcagatcaggcgaggctctgagcctgctgaagaagaggtttagccacagacctgtgcaagagaagttcgtgtgcctgaactgcggcttcgagacacacgccgatgaacaggctgccctgaacattgccagaagctggctgttcctgagaagccaagagtacaagaagtaccagaccaacaagaccaccggcaacaccgacaagagggcctttgtggaaacctggcagagcttctacagaaaaaagctgaaagaagtctggaagcccgccgtg

SEQ ID NO: 251 - protein, 987 aa, Artificial Sequence
  CasX Variant
MAPKKKRKVSRQEIKRINKIRRRLVKDSNTKKAGKTGPMKTLLVRVMTPDLRERLENLRKKPENIPQPISNTSRANLNKLLTDYTEMKKAILHVYWEEFQKDPVGLMSRVAQPAPKNIDQRKLIPVKDGNERLTSSGFACSQCCQPLYVYKLEQVNDKGKPHTNYFGRCNVSEHERLILLSPHKPEANDELVTYSLGKFGQRALDFYSIHVTRESNHPVKPLEQIGGNSCASGPVGKALSDACMGAVASFLTKYQDIILEHQKVIKKNEKRLANLKDIASANGLAFPKITLPPQPHTKEGIEAYNNVVAQIVIWVNLNLWQKLKIGRDEAKPLQRLKGFPSFPLVERQANEVDWWDMVCNVKKLINEKKEDGKVFWQNLAGYKRQEALRPYLSSEEDRKKGKKFARYQFGDLLLHLEKKHGEDWGKVYDEAWERIDKKVEGLSKHIKLEEERRSEDAQSKAALTDWLRAKASFVIEGLKEADKDEFCRCELKLQKWYGDLRGKPFAIEAENSILDISGFSKQYNCAFIWQKDGVKKLNLYLIINYFKGGKLRFKKIKPEAFEANRFYTVINKKSGEIVPMEVNFNFDDPNLIILPLAFGKRQGREFIWNDLLSLETGSLKLANGRVIEKTLYNRRTRQDEPALFVALTFERREVLDSSNIKPMNLIGIDRGENIPAVIALTDPEGCPLSRFKDSLGNPTHILRIGESYKEKQRTIQAKKEVEQRRAGGYSRKYASKAKNLADDMVRNTARDLLYYAVTQDAMLIFENLSRGFGRQGKRTFMAERQYTRMEDWLTAKLAYEGLSKTYLSKTLAQYTSKTCSNCGFTITSADYDRVLEKLKKTATGWMTTINGKELKVEGQITYYNRYKRQNVVKDLSVELDRLSEESVNNDISSWTKGRSGEALSLLKKRFSHRPVQEKFVCLNCGFETHADEQAALNIARSWLFLRSQEYKKYQTNKTTGNTDKRAFVETWQSFYRKKLKEVWKPAV

SEQ ID NO: 252 - protein, 986 aa, Artificial Sequence
  CasX Variant
MQEIKRINKIRRRLVKDSNTKKAGKTGPMKTLLVRVMTPDLRERLENLRKKPENIPQPISNTSRANLNKLLTDYTEMKKAILHVYWEEFQKDPVGLMSRVAQPAPKNIDQRKLIPVKDGNERLTSSGFACSQCCQPLYVYKLEQVNDKGKPHTNYFGRCNVSEHERLILLSPHKPEANDELVTYSLGKFGQRALDFYSIHVTRESNHPVKPLEQIGGNSCASGPVGKALSDACMGAVASFLTKYQDIILEHQKVIKKNEKRLANLKDIASANGLAFPKITLPPQPHTKEGIEAYNNVVAQIVIWVNLNLWQKLKIGRDEAKPLQRLKGFPSFPLVERQANEVDWWDMVCNVKKLINEKKEDGKVFWQNLAGYKRQEALRPYLSSEEDRKKGKKFARYQFGDLLLHLEKKHGEDWGKVYDEAWERIDKKVEGLSKHIKLEEERRSEDAQSKAALTDWLRAKASFVIEGLKEADKDEFCRCELKLQKWYGDLRGKPFAIEAENSILDISGFSKQYNCAFIWQKDGVKKLNLYLIINYFKGGKLRFKKIKPEAFEANRFYTVINKKSGEIVPMEVNFNFDDPNLIILPLAFGKRQGREFIWNDLLSLETGSLKLANGRVIEKTLYNRRTRQDEPALFVALTFERREVLDSSNIKPMNLIGIDRGENIPAVIALTDPEGCPLSRFKDSLGNPTHILRIGESYKEKQRTIQAKKEVEQRRAGGYSRKYASKAKNLADDMVRNTARDLLYYAVTQDAMLIFENLSRGFGRQGKRTFMAERQYTRMEDWLTAKLAYEGLSKTYLSKTLAQYTSKTCSNCGFTITSADYDRVLEKLKKTATGWMTTINGKELKVEGQITYYNRYKRQNVVKDLSVELDRLSEESVNNDISSWTKGRSGEALSLLKKRFSHRPVQEKFVCLNCGFETHADEQAALNIARSWLFLRSQEYKKYQTNKTTGNTDKRAFVETWQSFYRKKLKEVWKPAVTSPKKKRKV

SEQ ID NO: 253 - protein, 996 aa, Artificial Sequence
  CasX Variant
MQEIKRINKIRRRLVKDSNTKKAGKTGPMKTLLVRVMTPDLRERLENLRKKPENIPQPISNTSRANLNKLLTDYTEMKKAILHVYWEEFQKDPVGLMSRVAQPAPKNIDQRKLIPVKDGNERLTSSGFACSQCCQPLYVYKLEQVNDKGKPHTNYFGRCNVSEHERLILLSPHKPEANDELVTYSLGKFGQRALDFYSIHVTRESNHPVKPLEQIGGNSCASGPVGKALSDACMGAVASFLTKYQDIILEHQKVIKKNEKRLANLKDIASANGLAFPKITLPPQPHTKEGIEAYNNVVAQIVIWVNLNLWQKLKIGRDEAKPLQRLKGFPSFPLVERQANEVDWWDMVCNVKKLINEKKEDGKVFWQNLAGYKRQEALRPYLSSEEDRKKGKKFARYQFGDLLLHLEKKHGEDWGKVYDEAWERIDKKVEGLSKHIKLEEERRSEDAQSKAALTDWLRAKASFVIEGLKEADKDEFCRCELKLQKWYGDLRGKPFAIEAENSILDISGFSKQYNCAFIWQKDGVKKLNLYLIINYFKGGKLRFKKIKPEAFEANRFYTVINKKSGEIVPMEVNFNFDDPNLIILPLAFGKRQGREFIWNDLLSLETGSLKLANGRVIEKTLYNRRTRQDEPALFVALTFERREVLDSSNIKPMNLIGIDRGENIPAVIALTDPEGCPLSRFKDSLGNPTHILRIGESYKEKQRTIQAKKEVEQRRAGGYSRKYASKAKNLADDMVRNTARDLLYYAVTQDAMLIFENLSRGFGRQGKRTFMAERQYTRMEDWLTAKLAYEGLSKTYLSKTLAQYTSKTCSNCGFTITSADYDRVLEKLKKTATGWMTTINGKELKVEGQITYYNRYKRQNVVKDLSVELDRLSEESVNNDISSWTKGRSGEALSLLKKRFSHRPVQEKFVCLNCGFETHADEQAALNIARSWLFLRSQEYKKYQTNKTTGNTDKRAFVETWQSFYRKKLKEVWKPAVTSPKKKRKVPPPPKKKRKV

SEQ ID NO: 254 - protein, 1006 aa, Artificial Sequence
  CasX Variant
MQEIKRINKIRRRLVKDSNTKKAGKTGPMKTLLVRVMTPDLRERLENLRKKPENIPQPISNTSRANLNKLLTDYTEMKKAILHVYWEEFQKDPVGLMSRVAQPAPKNIDQRKLIPVKDGNERLTSSGFACSQCCQPLYVYKLEQVNDKGKPHTNYFGRCNVSEHERLILLSPHKPEANDELVTYSLGKFGQRALDFYSIHVTRESNHPVKPLEQIGGNSCASGPVGKALSDACMGAVASFLTKYQDIILEHQKVIKKNEKRLANLKDIASANGLAFPKITLPPQPHTKEGIEAYNNVVAQIVIWVNLNLWQKLKIGRDEAKPLQRLKGFPSFPLVERQANEVDWWDMVCNVKKLINEKKEDGKVFWQNLAGYKRQEALRPYLSSEEDRKKGKKFARYQFGDLLLHLEKKHGEDWGKVYDEAWERIDKKVEGLSKHIKLEEERRSEDAQSKAALTDWLRAKASFVIEGLKEADKDEFCRCELKLQKWYGDLRGKPFAIEAENSILDISGFSKQYNCAFIWQKDGVKKLNLYLIINYFKGGKLRFKKIKPEAFEANRFYTVINKKSGEIVPMEVNFNFDDPNLIILPLAFGKRQGREFIWNDLLSLETGSLKLANGRVIEKTLYNRRTRQDEPALFVALTFERREVLDSSNIKPMNLIGIDRGENIPAVIALTDPEGCPLSRFKDSLGNPTHILRIGESYKEKQRTIQAKKEVEQRRAGGYSRKYASKAKNLADDMVRNTARDLLYYAVTQDAMLIFENLSRGFGRQGKRTFMAERQYTRMEDWLTAKLAYEGLSKTYLSKTLAQYTSKTCSNCGFTITSADYDRVLEKLKKTATGWMTTINGKELKVEGQITYYNRYKRQNVVKDLSVELDRLSEESVNNDISSWTKGRSGEALSLLKKRFSHRPVQEKFVCLNCGFETHADEQAALNIARSWLFLRSQEYKKYQTNKTTGNTDKRAFVETWQSFYRKKLKEVWKPAVTSPKKKRKVPPPHKKKHPDASVNFSEFSK

SEQ ID NO: 255 - protein, 1007 aa, Artificial Sequence
  CasX Variant
MQEIKRINKIRRRLVKDSNTKKAGKTGPMKTLLVRVMTPDLRERLENLRKKPENIPQPISNTSRANLNKLLTDYTEMKKAILHVYWEEFQKDPVGLMSRVAQPAPKNIDQRKLIPVKDGNERLTSSGFACSQCCQPLYVYKLEQVNDKGKPHTNYFGRCNVSEHERLILLSPHKPEANDELVTYSLGKFGQRALDFYSIHVTRESNHPVKPLEQIGGNSCASGPVGKALSDACMGAVASFLTKYQDIILEHQKVIKKNEKRLANLKDIASANGLAFPKITLPPQPHTKEGIEAYNNVVAQIVIWVNLNLWQKLKIGRDEAKPLQRLKGFPSFPLVERQANEVDWWDMVCNVKKLINEKKEDGKVFWQNLAGYKRQEALRPYLSSEEDRKKGKKFARYQFGDLLLHLEKKHGEDWGKVYDEAWERIDKKVEGLSKHIKLEEERRSEDAQSKAALTDWLRAKASFVIEGLKEADKDEFCRCELKLQKWYGDLRGKPFAIEAENSILDISGFSKQYNCAFIWQKDGVKKLNLYLIINYFKGGKLRFKKIKPEAFEANRFYTVINKKSGEIVPMEVNFNFDDPNLIILPLAFGKRQGREFIWNDLLSLETGSLKLANGRVIEKTLYNRRTRQDEPALFVALTFERREVLDSSNIKPMNLIGIDRGENIPAVIALTDPEGCPLSRFKDSLGNPTHILRIGESYKEKQRTIQAKKEVEQRRAGGYSRKYASKAKNLADDMVRNTARDLLYYAVTQDAMLIFENLSRGFGRQGKRTFMAERQYTRMEDWLTAKLAYEGLSKTYLSKTLAQYTSKTCSNCGFTITSADYDRVLEKLKKTATGWMTTINGKELKVEGQITYYNRYKRQNVVKDLSVELDRLSEESVNNDISSWTKGRSGEALSLLKKRFSHRPVQEKFVCLNCGFETHADEQAALNIARSWLFLRSQEYKKYQTNKTTGNTDKRAFVETWQSFYRKKLKEVWKPAVTSPKKKRKVPPPQRPGPYDRPQRPGPYDRP

SEQ ID NO: 256 - protein, 1005 aa, Artificial Sequence
  CasX Variant
MQEIKRINKIRRRLVKDSNTKKAGKTGPMKTLLVRVMTPDLRERLENLRKKPENIPQPISNTSRANLNKLLTDYTEMKKAILHVYWEEFQKDPVGLMSRVAQPAPKNIDQRKLIPVKDGNERLTSSGFACSQCCQPLYVYKLEQVNDKGKPHTNYFGRCNVSEHERLILLSPHKPEANDELVTYSLGKFGQRALDFYSIHVTRESNHPVKPLEQIGGNSCASGPVGKALSDACMGAVASFLTKYQDIILEHQKVIKKNEKRLANLKDIASANGLAFPKITLPPQPHTKEGIEAYNNVVAQIVIWVNLNLWQKLKIGRDEAKPLQRLKGFPSFPLVERQANEVDWWDMVCNVKKLINEKKEDGKVFWQNLAGYKRQEALRPYLSSEEDRKKGKKFARYQFGDLLLHLEKKHGEDWGKVYDEAWERIDKKVEGLSKHIKLEEERRSEDAQSKAALTDWLRAKASFVIEGLKEADKDEFCRCELKLQKWYGDLRGKPFAIEAENSILDISGFSKQYNCAFIWQKDGVKKLNLYLIINYFKGGKLRFKKIKPEAFEANRFYTVINKKSGEIVPMEVNFNFDDPNLIILPLAFGKRQGREFIWNDLLSLETGSLKLANGRVIEKTLYNRRTRQDEPALFVALTFERREVLDSSNIKPMNLIGIDRGENIPAVIALTDPEGCPLSRFKDSLGNPTHILRIGESYKEKQRTIQAKKEVEQRRAGGYSRKYASKAKNLADDMVRNTARDLLYYAVTQDAMLIFENLSRGFGRQGKRTFMAERQYTRMEDWLTAKLAYEGLSKTYLSKTLAQYTSKTCSNCGFTITSADYDRVLEKLKKTATGWMTTINGKELKVEGQITYYNRYKRQNVVKDLSVELDRLSEESVNNDISSWTKGRSGEALSLLKKRFSHRPVQEKFVCLNCGFETHADEQAALNIARSWLFLRSQEYKKYQTNKTTGNTDKRAFVETWQSFYRKKLKEVWKPAVTSPKKKRKVPPPLSPSLSPLLSPSLSPL

SEQ ID NO: 257 - protein, 1008 aa, Artificial Sequence
  CasX Variant
MQEIKRINKIRRRLVKDSNTKKAGKTGPMKTLLVRVMTPDLRERLENLRKKPENIPQPISNTSRANLNKLLTDYTEMKKAILHVYWEEFQKDPVGLMSRVAQPAPKNIDQRKLIPVKDGNERLTMSSGFACSQCCQPLYVYKLEQVNDKGKPHTNYFGRCNVSEHERLILLSPHKPEANDELVTYSLGKFGQRALDFYSIHVTRESNHPVKPLEQIGGNSCASGPVGKALSDACMGAVASFLTKYQDIILEHQKVIKKNEKRLANLKDIASANGLAFPKITLPPQPHTKEGIEAYNNVVAQIVIWVNLNLWQKLKIGRDEAKPLQRLKGFPSFPLVERQANEVDWWDMVCNVKKLINEKKEDGKVFWQNLAGYKRQEALRPYLSSEEDRKKGKKFARYQFGDLLLHLEKKHGEDWGKVYDEAWERIDKKVEGLSKHIKLEEERRSEDAQSKAALTDWLRAKASFVIEGLKEADKDEFCRCELKLQKWYGDLRGKPFAIEAENSILDISGFSKQYNCAFIWQKDGVKKLNLYLIINYFKGGKLRFKKIKPEAFEANRFYTVINKKSGEIVPMEVNFNFDDPNLIILPLAFGKRQGREFIWNDLLSLETGSLKLANGRVIEKTLYNRRTRQDEPALFVALTFERREVLDSSNIKPMNLIGIDRGENIPAVIALTDPEGCPLSRFKDSLGNPTHILRIGESYKEKQRTIQAKKEVEQRRAGGYSRKYASKAKNLADDMVRNTARDLLYYAVTQDAMLIFENLSRGFGRQGKRTFMAERQYTRMEDWLTAKLAYEGLSKTYLSKTLAQYTSKTCSNCGFTITSADYDRVLEKLKKTATGWMTTINGKELKVEGQITYYNRYKRQNVVKDLSVELDRLSEESVNNDISSWTKGRSGEALSLLKKRFSHRPVQEKFVCLNCGFETHADEQAALNIARSWLFLRSQEYKKYQTNKTTGNTDKRAFVETWQSFYRKKLKEVWKPAVTSPKKKRKVPPPRGKGGKGLGKGGAKRHRK

SEQ ID NO: 258 - protein, 1013 aa, Artificial Sequence
  CasX Variant
MQEIKRINKIRRRLVKDSNTKKAGKTGPMKTLLVRVMTPDLRERLENLRKKPENIPQPISNTSRANLNKLLTDYTEMKKAILHVYWEEFQKDPVGLMSRVAQPAPKNIDQRKLIPVKDGNERLTSSGFACSQCCQPLYVYKLEQVNDKGKPHTNYFGRCNVSEHERLILLSPHKPEANDELVTYSLGKFGQRALDFYSIHVTRESNHPVKPLEQIGGNSCASGPVGKALSDACMGAVASFLTKYQDIILEHQKVIKKNEKRLANLKDIASANGLAFPKITLPPQPHTKEGIEAYNNVVAQIVIWVNLNLWQKLKIGRDEAKPLQRLKGFPSFPLVERQANEVDWWDMVCNVKKLINEKKEDGKVFWQNLAGYKRQEALRPYLSSEEDRKKGKKFARYQFGDLLLHLEKKHGEDWGKVYDEAWERIDKKVEGLSKHIKLEEERRSEDAQSKAALTDWLRAKASFVIEGLKEADKDEFCRCELKLQKWYGDLRGKPFAIEAENSILDISGFSKQYNCAFIWQKDGVKKLNLYLIINYFKGGKLRFKKIKPEAFEANRFYTVINKKSGEIVPMEVNFNFDDPNLIILPLAFGKRQGREFIWNDLLSLETGSLKLANGRVIEKTLYNRRTRQDEPALFVALTFERREVLDSSNIKPMNLIGIDRGENIPAVIALTDPEGCPLSRFKDSLGNPTHILRIGESYKEKQRTIQAKKEVEQRRAGGYSRKYASKAKNLADDMVRNTARDLLYYAVTQDAMLIFENLSRGFGRQGKRTFMAERQYTRMEDWLTAKLAYEGLSKTYLSKTLAQYTSKTCSNCGFTITSADYDRVLEKLKKTATGWMTTINGKELKVEGQITYYNRYKRQNVVKDLSVELDRLSEESVNNDISSWTKGRSGEALSLLKKRFSHRPVQEKFVCLNCGFETHADEQAALNIARSWLFLRSQEYKKYQTNKTTGNTDKRAFVETWQSFYRKKLKEVWKPAVTSPKKKRKVPPPSRRRKANPTKLSENAKKLAKEVEN

SEQ ID NO: 259 - protein, 998 aa, Artificial Sequence
  CasX Variant
MQEIKRINKIRRRLVKDSNTKKAGKTGPMKTLLVRVMTPDLRERLENLRKKPENIPQPISNTSRANLNKLLTDYTEMKKAILHVYWEEFQKDPVGLMSRVAQPAPKNIDQRKLIPVKDGNERLTSSGFACSQCCQPLYVYKLEQVNDKGKPHTNYFGRCNVSEHERLILLSPHKPEANDELVTYSLGKFGQRALDFYSIHVTRESNHPVKPLEQIGGNSCASGPVGKALSDACMGAVASFLTKYQDIILEHQKVIKKNEKRLANLKDIASANGLAFPKITLPPQPHTKEGIEAYNNVVAQIVIWVNLNLWQKLKIGRDEAKPLQRLKGFPSFPLVERQANEVDWWDMVCNVKKLINEKKEDGKVFWQNLAGYKRQEALRPYLSSEEDRKKGKKFARYQFGDLLLHLEKKHGEDWGKVYDEAWERIDKKVEGLSKHIKLEEERRSEDAQSKAALTDWLRAKASFVIEGLKEADKDEFCRCELKLQKWYGDLRGKPFAIEAENSILDISGFSKQYNCAFIWQKDGVKKLNLYLIINYFKGGKLRFKKIKPEAFEANRFYTVINKKSGEIVPMEVNFNFDDPNLIILPLAFGKRQGREFIWNDLLSLETGSLKLANGRVIEKTLYNRRTRQDEPALFVALTFERREVLDSSNIKPMNLIGIDRGENIPAVIALTDPEGCPLSRFKDSLGNPTHILRIGESYKEKQRTIQAKKEVEQRRAGGYSRKYASKAKNLADDMVRNTARDLLYYAVTQDAMLIFENLSRGFGRQGKRTFMAERQYTRMEDWLTAKLAYEGLSKTYLSKTLAQYTSKTCSNCGFTITSADYDRVLEKLKKTATGWMTTINGKELKVEGQITYYNRYKRQNVVKDLSVELDRLSEESVNNDISSWTKGRSGEALSLLKKRFSHRPVQEKFVCLNCGFETHADEQAALNIARSWLFLRSQEYKKYQTNKTTGNTDKRAFVETWQSFYRKKLKEVWKPAVTSPKKKRKVPPPPAAKRVKLD

SEQ ID NO: 260 - protein, 997 aa, Artificial Sequence
  CasX Variant
MQEIKRINKIRRRLVKDSNTKKAGKTGPMKTLLVRVMTPDLRERLENLRKKPENIPQPISNTSRANLNKLLTDYTEMKKAILHVYWEEFQKDPVGLMSRVAQPAPKNIDQRKLIPVKDGNERLTSSGFACSQCCQPLYVYKLEQVNDKGKPHTNYFGRCNVSEHERLILLSPHKPEANDELVTYSLGKFGQRALDFYSIHVTRESNHPVKPLEQIGGNSCASGPVGKALSDACMGAVASFLTKYQDIILEHQKVIKKNEKRLANLKDIASANGLAFPKITLPPQPHTKEGIEAYNNVVAQIVIWVNLNLWQKLKIGRDEAKPLQRLKGFPSFPLVERQANEVDWWDMVCNVKKLINEKKEDGKVFWQNLAGYKRQEALRPYLSSEEDRKKGKKFARYQFGDLLLHLEKKHGEDWGKVYDEAWERIDKKVEGLSKHIKLEEERRSEDAQSKAALTDWLRAKASFVIEGLKEADKDEFCRCELKLQKWYGDLRGKPFAIEAENSILDISGFSKQYNCAFIWQKDGVKKLNLYLIINYFKGGKLRFKKIKPEAFEANRFYTVINKKSGEIVPMEVNFNFDDPNLIILPLAFGKRQGREFIWNDLLSLETGSLKLANGRVIEKTLYNRRTRQDEPALFVALTFERREVLDSSNIKPMNLIGIDRGENIPAVIALTDPEGCPLSRFKDSLGNPTHILRIGESYKEKQRTIQAKKEVEQRRAGGYSRKYASKAKNLADDMVRNTARDLLYYAVTQDAMLIFENLSRGFGRQGKRTFMAERQYTRMEDWLTAKLAYEGLSKTYLSKTLAQYTSKTCSNCGFTITSADYDRVLEKLKKTATGWMTTINGKELKVEGQITYYNRYKRQNVVKDLSVELDRLSEESVNNDISSWTKGRSGEALSLLKKRFSHRPVQEKFVCLNCGFETHADEQAALNIARSWLFLRSQEYKKYQTNKTTGNTDKRAFVETWQSFYRKKLKEVWKPAVTSPKKKRKVPPPKRSFSKAF

SEQ ID NO: 261 - protein, 1008 aa, Artificial Sequence
  CasX Variant
MQEIKRINKIRRRLVKDSNTKKAGKTGPMKTLLVRVMTPDLRERLENLRKKPENIPQPISNTSRANLNKLLTDYTEMKKAILHVYWEEFQKDPVGLMSRVAQPAPKNIDQRKLIPVKDGNERLTSSGFACSQCCQPLYVYKLEQVNDKGKPHTNYFGRCNVSEHERLILLSPHKPEANDELVTYSLGKFGQRALDFYSIHVTRESNHPVKPLEQIGGNSCASGPVGKALSDACMGAVASFLTKYQDIILEHQKVIKKNEKRLANLKDIASANGLAFPKITLPPQPHTKEGIEAYNNVVAQIVIWVNLNLWQKLKIGRDEAKPLQRLKGFPSFPLVERQANEVDWWDMVCNVKKLINEKKEDGKVFWQNLAGYKRQEALRPYLSSEEDRKKGKKFARYQFGDLLLHLEKKHGEDWGKVYDEAWERIDKKVEGLSKHIKLEEERRSEDAQSKAALTDWLRAKASFVIEGLKEADKDEFCRCELKLQKWYGDLRGKPFAIEAENSILDISGFSKQYNCAFIWQKDGVKKLNLYLIINYFKGGKLRFKKIKPEAFEANRFYTVINKKSGEIVPMEVNFNFDDPNLIILPLAFGKRQGREFIWNDLLSLETGSLKLANGRVIEKTLYNRRTRQDEPALFVALTFERREVLDSSNIKPMNLIGIDRGENIPAVIALTDPEGCPLSRFKDSLGNPTHILRIGESYKEKQRTIQAKKEVEQRRAGGYSRKYASKAKNLADDMVRNTARDLLYYAVTQDAMLIFENLSRGFGRQGKRTFMAERQYTRMEDWLTAKLAYEGLSKTYLSKTLAQYTSKTCSNCGFTITSADYDRVLEKLKKTATGWMTTINGKELKVEGQITYYNRYKRQNVVKDLSVELDRLSEESVNNDISSWTKGRSGEALSLLKKRFSHRPVQEKFVCLNCGFETHADEQAALNIARSWLFLRSQEYKKYQTNKTTGNTDKRAFVETWQSFYRKKLKEVWKPAVTSPKKKRKVPPPKRGINDRNFWRGENERKTR

SEQ ID NO: 262 - protein, 1007 aa, Artificial Sequence
  CasX Variant
MAPKKKRKVSRMQEIKRINKIRRRLVKDSNTKKAGKTGPMKTLLVRVMTPDLRERLENLRKKPENIPQPISNTSRANLNKLLTDYTEMKKAILHVYWEEFQKDPVGLMSRVAQPAPKNIDQRKLIPVKDGNERLTSSGFACSQCCQPLYVYKLEQVNDKGKPHTNYFGRCNVSEHERLILLSPHKPEANDELVTYSLGKFGQRALDFYSIHVTRESNHPVKPLEQIGGNSCASGPVGKALSDACMGAVASFLTKYQDIILEHQKVIKKNEKRLANLKDIASANGLAFPKITLPPQPHTKEGIEAYNNVVAQIVIWVNLNLWQKLKIGRDEAKPLQRLKGFPSFPLVERQANEVDWWDMVCNVKKLINEKKEDGKVFWQNLAGYKRQEALRPYLSSEEDRKKGKKFARYQFGDLLLHLEKKHGEDWGKVYDEAWERIDKKVEGLSKHIKLEEERRSEDAQSKAALTDWLRAKASFVIEGLKEADKDEFCRCELKLQKWYGDLRGKPFAIEAENSILDISGFSKQYNCAFIWQKDGVKKLNLYLIINYFKGGKLRFKKIKPEAFEANRFYTVINKKSGEIVPMEVNFNFDDPNLIILPLAFGKRQGREFIWNDLLSLETGSLKLANGRVIEKTLYNRRTRQDEPALFVALTFERREVLDSSNIKPMNLIGIDRGENIPAVIALTDPEGCPLSRFKDSLGNPTHILRIGESYKEKQRTIQAKKEVEQRRAGGYSRKYASKAKNLADDMVRNTARDLLYYAVTQDAMLIFENLSRGFGRQGKRTFMAERQYTRMEDWLTAKLAYEGLSKTYLSKTLAQYTSKTCSNCGFTITSADYDRVLEKLKKTATGWMTTINGKELKVEGQITYYNRYKRQNVVKDLSVELDRLSEESVNNDISSWTKGRSGEALSLLKKRFSHRPVQEKFVCLNCGFETHADEQAALNIARSWLFLRSQEYKKYQTNKTTGNTDKRAFVETWQSFYRKKLKEVWKPAVTSPKKKRKVPPPPKKKRKV

SEQ ID NO: 263 - protein, 1009 aa, Artificial Sequence
  CasX Variant
MAPKKKRKVSRMQEIKRINKIRRRLVKDSNTKKAGKTGPMKTLLVRVMTPDLRERLENLRKKPENIPQPISNTSRANLNKLLTDYTEMKKAILHVYWEEFQKDPVGLMSRVAQPAPKNIDQRKLIPVKDGNERLTSSGFACSQCCQPLYVYKLEQVNDKGKPHTNYFGRCNVSEHERLILLSPHKPEANDELVTYSLGKFGQRALDFYSIHVTRESNHPVKPLEQIGGNSCASGPVGKALSDACMGAVASFLTKYQDIILEHQKVIKKNEKRLANLKDIASANGLAFPKITLPPQPHTKEGIEAYNNVVAQIVIWVNLNLWQKLKIGRDEAKPLQRLKGFPSFPLVERQANEVDWWDMVCNVKKLINEKKEDGKVFWQNLAGYKRQEALRPYLSSEEDRKKGKKFARYQFGDLLLHLEKKHGEDWGKVYDEAWERIDKKVEGLSKHIKLEEERRSEDAQSKAALTDWLRAKASFVIEGLKEADKDEFCRCELKLQKWYGDLRGKPFAIEAENSILDISGFSKQYNCAFIWQKDGVKKLNLYLIINYFKGGKLRFKKIKPEAFEANRFYTVINKKSGEIVPMEVNFNFDDPNLIILPLAFGKRQGREFIWNDLLSLETGSLKLANGRVIEKTLYNRRTRQDEPALFVALTFERREVLDSSNIKPMNLIGIDRGENIPAVIALTDPEGCPLSRFKDSLGNPTHILRIGESYKEKQRTIQAKKEVEQRRAGGYSRKYASKAKNLADDMVRNTARDLLYYAVTQDAMLIFENLSRGFGRQGKRTFMAERQYTRMEDWLTAKLAYEGLSKTYLSKTLAQYTSKTCSNCGFTITSADYDRVLEKLKKTATGWMTTINGKELKVEGQITYYNRYKRQNVVKDLSVELDRLSEESVNNDISSWTKGRSGEALSLLKKRFSHRPVQEKFVCLNCGFETHADEQAALNIARSWLFLRSQEYKKYQTNKTTGNTDKRAFVETWQSFYRKKLKEVWKPAVTSPKKKRKVPPPPAAKRVKLD

SEQ ID NO: 264 - DNA, 21 bp, Artificial Sequence
  nuclear localization signal
ccaaagaagaagcggaaggtc

SEQ ID NO: 265 - DNA, 51 bp, Artificial Sequence
  nuclear localization signal
cacaagaagaaacatccagacgcatcagtcaactttagcgagttcagtaaa

SEQ ID NO: 266 - DNA, 54 bp, Artificial Sequence
  nuclear localization signal
cagcgccctgggccttacgataggccgcaaagacccggaccgtatgatcgccct

SEQ ID NO: 267 - DNA, 48 bp, Artificial Sequence
  nuclear localization signal
ctcagcccgagtcttagtccactgctttccccgtccctgtctccactg

SEQ ID NO: 268 - DNA, 54 bp, Artificial Sequence
  nuclear localization signal
cggggcaagggtggcaaggggcttggcaaggggggggcaaagaggcacaggaag

SEQ ID NO: 269 - DNA, 72 bp, Artificial Sequence
  nuclear localization signal
agccgccgcagaaaagccaatcctacaaaactgtcagaaaatgcgaaaaaacttgctaaggaggtggaaaac

SEQ ID NO: 270 - DNA, 27 bp, Artificial Sequence
  nuclear localization signal
cctgccgcaaagcgagtgaaattggac

SEQ ID NO: 271 - DNA, 24 bp, Artificial Sequence
  nuclear localization signal
aagcggtccttcagtaaggccttt

SEQ ID NO: 272 - DNA, 57 bp, Artificial Sequence
  nuclear localization signal
aaacggggaataaacgaccggaacttctggcgcggggaaaacgagcgcaaaacccga

SEQ ID NO: 273 - protein, 997 aa, Artificial Sequence
  CasX variant
MAPKKKRKVSRQEIKRINKIRRRLVKDSNTKKAGKTGPMKTLLVRVMTPDLRERLENLRKKPENIPQPISNTSRANLNKLLTDYTEMKKAILHVYWEEFQKDPVGLMSRVAQPASKKIDQNKLKPEMDEKGNLTTAGFACSQCGQPLFVYKLEQVSEKGKAYTNYFGRCNVAEHEKLILLAQLKPEKDSDEAVTYSLGKFGQRALDFYSIHVTRESNHPVKPLEQIGGNSCASGPVGKALSDACMGAVASFLTKYQDIILEHQKVIKKNEKRLANLKDIASANGLAFPKITLPPQPHTKEGIEAYNNVVAQIVIWVNLNLWQKLKIGRDEAKPLQRLKGFPSFPLVERQANEVDWWDMVCNVKKLINEKKEDGKVFWQNLAGYKRQEALRPYLSSEEDRKKGKKFARYQFGDLLLHLEKKHGEDWGKVYDEAWERIDKKVEGLSKHIKLEEERRSEDAQSKAALTDWLRAKASFVIEGLKEADKDEFCRCELKLQKWYGDLRGKPFAIEAENSILDISGFSKQYNCAFIWQKDGVKKLNLYLIINYFKGGKLRFKKIKPEAFEANRFYTVINKKSGEIVPMEVNFNFDDPNLIILPLAFGKRQGREFIWNDLLSLETGSLKLANGRVIEKTLYNRRTRQDEPALFVALTFERREVLDSSNIKPMNLIGIDRGENIPAVIALTDPEGCPLSRFKDSLGNPTHILRIGESYKEKQRTIQAKKEVEQRRAGGYSRKYASKAKNLADDMVRNTARDLLYYAVTQDAMLIFENLSRGFGRQGKRTFMAERQYTRMEDWLTAKLAYEGLSKTYLSKTLAQYTSKTCSNCGFTITSADYDRVLEKLKKTATGWMTTINGKELKVEGQITYYNRYKRQNVVKDLSVELDRLSEESVNNDISSWTKGRSGEALSLLKKRFSHRPVQEKFVCLNCGFETHADEQAALNIARSWLFLRSQEYKKYQTNKTTGNTDKRAFVETWQSFYRKKLKEVWKPAVTSPKKKRKV

SEQ ID NO: 274 - protein, 1005 aa, Artificial Sequence
  CasX variant
MAPKKKRKVSRQEIKRINKIRRRLVKDSNTKKAGKTGPMKTLLVRVMTPDLRERLENLRKKPENIPQPISNTSRANLNKLLTDYTEMKKAILHVYWEEFQKDPVGLMSRVAQPAPKNIDQRKLIPVKDGNERLTSSGFACSQCCQPLYVYKLEQVNDKGKPHTNYFGRCNVSEHERLILLSPHKPEANDELVTYSLGKFGQRALDFYSIHVTKESTHPVKPLAQIAGNRYASGPVGKALSDACMGTIASFLSKYQDIIIEHQKVVKGNQKRLESLRELAGKENLEYPSVTLPPQPHTKEGVDAYNEVIARVRMWVNLNLWQKLKLSRDDAKPLLRLKGFPSFPLVERQANEVDWWDMVCNVKKLINEKKEDGKVFWQNLAGYKRQEALRPYLSSEEDRKKGKKFARYQFGDLLLHLEKKHGEDWGKVYDEAWERIDKKVEGLSKHIKLEEERRSEDAQSKAALTDWLRAKASFVIEGLKEADKDEFCRCELKLQKWYGDLRGKPFAIEAENSILDISGFSKQYNCAFIWQKDGVKKLNLYLIINYFKGGKLRFKKIKPEAFEANRFYTVINKKSGEIVPMEVNFNFDDPNLIILPLAFGKRQGREFIWNDLLSLETGSLKLANGRVIEKTLYNRRTRQDEPALFVALTFERREVLDSSNIKPMNLIGIDRGENIPAVIALTDPEGCPLSRFKDSLGNPTHILRIGESYKEKQRTIQAKKEVEQRRAGGYSRKYASKAKNLADDMVRNTARDLLYYAVTQDAMLIFENLSRGFGRQGKRTFMAERQYTRMEDWLTAKLAYEGLSKTYLSKTLAQYTSKTCSNCGFTITSADYDRVLEKLKKTATGWMTTINGKELKVEGQITYYNRYKRQNVVKDLSVELDRLSEESVNNDISSWTKGRSGEALSLLKKRFSHRPVQEKFVCLNCGFETHADEQAALNIARSWLFLRSQEYKKYQTNKTTGNTDKRAFVETWQSFYRKKLKEVWKPAVTSPKKKRKVTSPKKKRKV

SEQ ID NO: 275 - protein, 996 aa, Artificial Sequence
  CasX variant
MAPKKKRKVSRQEIKRINKIRRRLVKDSNTKKAGKTGPMKTLLVRVMTPDLRERLENLRKKPENIPQPISNTSRANLNKLLTDYTEMKKAILHVYWEEFQKDPVGLMSRVAQPAPKNIDQRKLIPVKDGNERLTSSGFACSQCCQPLYVYKLEQVNDKGKPHTNYFGRCNVSEHERLILLSPHKPEANDELVTYSLGKFGQRALDFYSIHVTKESTHPVKPLAQIAGNRYASGPVGKALSDACMGTIASFLSKYQDIIIEHQKVVKGNQKRLESLRELAGKENLEYPSVTLPPQPHTKEGVDAYNEVIARVRMWVNLNLWQKLKLSRDDAKPLLRLKGFPSFPLVERQANEVDWWDMVCNVKKLINEKKEDGKVFWQNLAGYKRQEALRPYLSSEEDRKKGKKFARYQLGDLLLHLEKKHGEDWGKVYDEAWERIDKKVEGLSKHIKLEEERRSEDAQSKAALTDWLRAKASFVIEGLKEADKDEFCRCELKLQKWYGDLRGKPFAIEAENSILDISGFSKQYNCAFIWQKDGVKKLNLYLIINYFKGGKLRFKKIKPEAFEANRFYTVINKKSGEIVPMEVNFNFDDPNLIILPLAFGKRQGREFIWNDLLSLETGSLKLANGRVIEKTLYNRRTRQDEPALFVALTFERREVLDSSNIKPMNLIGVDRGENIPAVIALTDPEGCPLSRFKDSLGNPTHILRIGESYKEKQRTIQAKKEVEQRRAGGYSRKYASKAKNLADDMVRNTARDLLYYAVTQDAMLIFENLSRGFGRQGKRTFMAERQYTRMEDWLTAKLAYEGLSKTYLSKTLAQYTSKTCSNCGFTITSADYDRVLEKLKKTATGWMTTINGKELKVEGQITYYNRRKRQNVVKDLSVELDRLSEESVNNDISSWTKGRSGEALSLLKKRFSHRPVQEKFVCLNCGFETHADEQAALNIARSWLFLRSQEYKKYQTNKTTGNTDKRAFVETWQSFYRKKLKEVWKPAVTSPKKKRKV

SEQ ID NO: 276 - protein, 996 aa, Artificial Sequence
  CasX variant
MAPKKKRKVSRQEIKRINKIRRRLVKDSNTKKAGKTGPMKTLLVRVMTPDLRERLENLRKKPENIPQPISNTSRANLNKLLTDYTEMKKAILHVYWEEFQKDPVGLMSRVAQPAPKNIDQRKLIPVKDGNERLTSSGFACSQCCQPLYVYKLEQVNDKGKPHTNYFGRCNVSEHERLILLSPHKPEANDELVTYSLGKFGQRALDFYSIHVTKESTHPVKPLAQIAGNRYASGPVGKALSDACMGTIASFLSKYQDIIIEHQKVVKGNQKRLESLRELAGKENLEYPSVTLPPQPHTKEGVDAYNEVIARVRMWVNLNLWQKLKLSRDDAKPLLRLKGFPSFPLVERQANEVDWWDMVCNVKKLINEKKEDGKVFWQNLAGYKRQEALRPYLSSEEDRKKGKKFARYQLGDLLKHLEKKHGEDWGKVYDEAWERIDKKVEGLSKHIKLEEERRSEDAQSKAALTDWLRAKASFVIEGLKEADKDEFCRCELKLQKWYGDLRGKPFAIEAENSILDISGFSKQYNCAFIWQKDGVKKLNLYLIINYFKGGKLRFKKIKPEAFEANRFYTVINKKSGEIVPMEVNFNFDDPNLIILPLAFGKRQGREFIWNDLLSLETGSLKLANGRVIEKTLYNRRTRQDEPALFVALTFERREVLDSSNIKPMNLIGVDRGENIPAVIALTDPEGCPLSRFKDSLGNPTHILRIGESYKEKQRTIQAKKEVEQRRAGGYSRKYASKAKNLADDMVRNTARDLLYYAVTQDAMLIFENLSRGFGRQGKRTFMAERQYTRMEDWLTAKLAYEGLSKTYLSKTLAQYTSKTCSNCGFTITSADYDRVLEKLKKTATGWMTTINGKELKVEGQITYYNRRKRQNVVKDLSVELDRLSEESVNNDISSWTKGRSGEALSLLKKRFSHRPVQEKFVCLNCGFETHADEQAALNIARSWLFLRSQEYKKYQTNKTTGNTDKRAFVETWQSFYRKKLKEVWKPAVTSPKKKRKV

SEQ ID NO: 277 - protein, 996 aa, Artificial Sequence
  CasX variant
MAPKKKRKVSRQEIKRINKIRRRLVKDSNTKKAGKTGPMKTLLVRVMTPDLRERLENLRKKPENIPQPISNTSRANLNKLLTDYTEMKKAILHVYWEEFQKDPVGLMSRVAQPAPKNIDQRKLIPVKDGNERLTSSGFACSQCCQPLYVYKLEQVNDKGKPHTNYFGRCNVSEHERLILLSPHKPEANDELVTYSLGKFGQRALDFYSIHVTKESTHPVKPLAQIAGNRYASGPVGKALSDACMGTIASFLSKYQDIIIEHQKVVKGNQKRLESLRELAGKENLEYPSVTLPPQPHTKEGVDAYNEVIARVRMWVNLNLWQKLKLSRDDAKPLLRLKGFPSFPLVERQANEVDWWDMVCNVKKLINEKKEDGKVFWQNLAGYKRQEALRPYLSSEEDRKKGKKFARYQLGDLLLHLEKKHGEDWGKVYDEAWERIDKKVEGLSKHIKLEEERRSEDAQSKAALTDWLRAKASFVIEGLKEADKDEFCRCELKLQKWYGDLRGKPFAIEAENSILDISGFSKQYNCAFIWQKDGVKKLNLYLIINYFKGGKLRFKKIKPEAFEANRFYTVINKKSGEIVPMEVNFNFDDPNLIILPLAFGKRQGREFIWNDLLSLETGSLKLANGRVIEKTLYNRRTRQDEPALFVALTFERREVLDSSNIKPMNLIGVDRGENIPAVIALTDPEGCPLSRFKDSLGNPTHILRIGESYKEKQRTIQAKKEVEQRRAGGYSRKYASKAKNLADDMVRNTARDLLYYAVTQDAMLIFENLSRGFGRQGKRTFMAERQYTRMEDWLTAKLAYEGLSKTYLSKTLAQYTSKTCSNCGFTITSADYDRVLEKLKKTATGWMTTINGKELKVEGQITYYNRYKRQNVVKDLSVELDRLSEESVNNDISSWTKGRSGEALSLLKKRFSHRPVQEKFVCLNCGFETHADEQAALNIARSWLFLRSQEYKKYQTNKTTGNTDKRAFVETWQSFYRKKLKEVWKPAVTSPKKKRKV

SEQ ID NO: 278 - protein, 997 aa, Artificial Sequence
  CasX variant
MAPKKKRKVSRQEIKRINKIRRRLVKDSNTKKAGKTGPMKTLLVRVMTPDLRERLENLRKKPENIPQPISNTSRANLNKLLTDYTEMKKAILHVYWEEFQKDPVGLMSRVAQPASKKIDQNKLKPEMDEKGNLTTAGFACSQCGQPLFVYKLEQVSEKGKAYTNYFGRCNVAEHEKLILLAQLKPEKDSDEAVTYSLGKFGQRALDFYSIHVTKESTHPVKPLAQIAGNRYASGPVGKALSDACMGTIASFLSKYQDIIIEHQKVVKGNQKRLESLRELAGKENLEYPSVTLPPQPHTKEGVDAYNEVIARVRMWVNLNLWQKLKLSRDDAKPLLRLKGFPSFPLVERQANEVDWWDMVCNVKKLINEKKEDGKVFWQNLAGYKRQEALRPYLSSEEDRKKGKKFARYQFGDLLLHLEKKHGEDWGKVYDEAWERIDKKVEGLSKHIKLEEERRSEDAQSKAALTDWLRAKASFVIEGLKEADKDEFCRCELKLQKWYGDLRGKPFAIEAENSILDISGFSKQYNCAFIWQKDGVKKLNLYLIINYFKGGKLRFKKIKPEAFEANRFYTVINKKSGEIVPMEVNFNFDDPNLIILPLAFGKRQGREFIWNDLLSLETGSLKLANGRVIEKTLYNRRTRQDEPALFVALTFERREVLDSSNIKPMNLIGIDRGENIPAVIALTDPEGCPLSRFKDSLGNPTHILRIGESYKEKQRTIQAKKEVEQRRAGGYSRKYASKAKNLADDMVRNTARDLLYYAVTQDAMLIFENLSRGFGRQGKRTFMAERQYTRMEDWLTAKLAYEGLSKTYLSKTLAQYTSKTCSNCGFTITSADYDRVLEKLKKTATGWMTTINGKELKVEGQITYYNRYKRQNVVKDLSVELDRLSEESVNNDISSWTKGRSGEALSLLKKRFSHRPVQEKFVCLNCGFETHADEQAALNIARSWLFLRSQEYKKYQTNKTTGNTDKRAFVETWQSFYRKKLKEVWKPAVTSPKKKRKV

SEQ ID NO: 279 - protein, 997 aa, Artificial Sequence
  CasX variant
MAPKKKRKVSRQEIKRINKIRRRLVKDSNTKKAGKTGPMKTLLVRVMTPDLRERLENLRKKPENIPQPISNTSRANLNKLLTDYTEMKKAILHVYWEEFQKDPVGLMSRVAQPASKKIDQNKLKPEMDEKGNLTTAGFACSQCGQPLFVYKLEQVSEKGKAYTNYFGRCNVAEHEKLILLAQLKPEKDSDEAVTYSLGKFGQRALDFYSIHVTKESTHPVKPLAQIAGNRYASGPVGKALSDACMGTIASFLSKYQDIIIEHQKVVKGNQKRLESLRELAGKENLEYPSVTLPPQPHTKEGVDAYNEVIARVRMWVNLNLWQKLKLSRDDAKPLLRLKGFPSFPLVERQANEVDWWDMVCNVKKLINEKKEDGKVFWQNLAGYKRQEALRPYLSSEEDRKKGKKFARYQLGDLLLHLEKKHGEDWGKVYDEAWERIDKKVEGLSKHIKLEEERRSEDAQSKAALTDWLRAKASFVIEGLKEADKDEFCRCELKLQKWYGDLRGKPFAIEAENSILDISGFSKQYNCAFIWQKDGVKKLNLYLIINYFKGGKLRFKKIKPEAFEANRFYTVINKKSGEIVPMEVNFNFDDPNLIILPLAFGKRQGREFIWNDLLSLETGSLKLANGRVIEKTLYNRRTRQDEPALFVALTFERREVLDSSNIKPMNLIGVDRGENIPAVIALTDPEGCPLSRFKDSLGNPTHILRIGESYKEKQRTIQAKKEVEQRRAGGYSRKYASKAKNLADDMVRNTARDLLYYAVTQDAMLIFENLSRGFGRQGKRTFMAERQYTRMEDWLTAKLAYEGLSKTYLSKTLAQYTSKTCSNCGFTITSADYDRVLEKLKKTATGWMTTINGKELKVEGQITYYNRRKRQNVVKDLSVELDRLSEESVNNDISSWTKGRSGEALSLLKKRFSHRPVQEKFVCLNCGFETHADEQAALNIARSWLFLRSQEYKKYQTNKTTGNTDKRAFVETWQSFYRKKLKEVWKPAVTSPKKKRKV

SEQ ID NO: 280 - protein, 997 aa, Artificial Sequence
  CasX variant
MAPKKKRKVSRQEIKRINKIRRRLVKDSNTKKAGKTGPMKTLLVRVMTPDLRERLENLRKKPENIPQPISNTSRANLNKLLTDYTEMKKAILHVYWEEFQKDPVGLMSRVAQPASKKIDQNKLKPEMDEKGNLTTAGFACSQCGQPLFVYKLEQVSEKGKAYTNYFGRCNVAEHEKLILLAQLKPEKDSDEAVTYSLGKFGQRALDFYSIHVTKESTHPVKPLAQIAGNRYASGPVGKALSDACMGTIASFLSKYQDIIIEHQKVVKGNQKRLESLRELAGKENLEYPSVTLPPQPHTKEGVDAYNEVIARVRMWVNLNLWQKLKLSRDDAKPLLRLKGFPSFPLVERQANEVDWWDMVCNVKKLINEKKEDGKVFWQNLAGYKRQEALRPYLSSEEDRKKGKKFARYQLGDLLKHLEKKHGEDWGKVYDEAWERIDKKVEGLSKHIKLEEERRSEDAQSKAALTDWLRAKASFVIEGLKEADKDEFCRCELKLQKWYGDLRGKPFAIEAENSILDISGFSKQYNCAFIWQKDGVKKLNLYLIINYFKGGKLRFKKIKPEAFEANRFYTVINKKSGEIVPMEVNFNFDDPNLIILPLAFGKRQGREFIWNDLLSLETGSLKLANGRVIEKTLYNRRTRQDEPALFVALTFERREVLDSSNIKPMNLIGVDRGENIPAVIALTDPEGCPLSRFKDSLGNPTHILRIGESYKEKQRTIQAKKEVEQRRAGGYSRKYASKAKNLADDMVRNTARDLLYYAVTQDAMLIFENLSRGFGRQGKRTFMAERQYTRMEDWLTAKLAYEGLSKTYLSKTLAQYTSKTCSNCGFTITSADYDRVLEKLKKTATGWMTTINGKELKVEGQITYYNRRKRQNVVKDLSVELDRLSEESVNNDISSWTKGRSGEALSLLKKRFSHRPVQEKFVCLNCGFETHADEQAALNIARSWLFLRSQEYKKYQTNKTTGNTDKRAFVETWQSFYRKKLKEVWKPAVTSPKKKRKV

SEQ ID NO: 281 - protein, 997 aa, Artificial Sequence
  CasX variant
MAPKKKRKVSRQEIKRINKIRRRLVKDSNTKKAGKTGPMKTLLVRVMTPDLRERLENLRKKPENIPQPISNTSRANLNKLLTDYTEMKKAILHVYWEEFQKDPVGLMSRVAQPASKKIDQNKLKPEMDEKGNLTTAGFACSQCGQPLFVYKLEQVSEKGKAYTNYFGRCNVAEHEKLILLAQLKPEKDSDEAVTYSLGKFGQRALDFYSIHVTKESTHPVKPLAQIAGNRYASGPVGKALSDACMGTIASFLSKYQDIIIEHQKVVKGNQKRLESLRELAGKENLEYPSVTLPPQPHTKEGVDAYNEVIARVRMWVNLNLWQKLKLSRDDAKPLLRLKGFPSFPLVERQANEVDWWDMVCNVKKLINEKKEDGKVFWQNLAGYKRQEALRPYLSSEEDRKKGKKFARYQLGDLLLHLEKKHGEDWGKVYDEAWERIDKKVEGLSKHIKLEEERRSEDAQSKAALTDWLRAKASFVIEGLKEADKDEFCRCELKLQKWYGDLRGKPFAIEAENSILDISGFSKQYNCAFIWQKDGVKKLNLYLIINYFKGGKLRFKKIKPEAFEANRFYTVINKKSGEIVPMEVNFNFDDPNLIILPLAFGKRQGREFIWNDLLSLETGSLKLANGRVIEKTLYNRRTRQDEPALFVALTFERREVLDSSNIKPMNLIGVDRGENIPAVIALTDPEGCPLSRFKDSLGNPTHILRIGESYKEKQRTIQAKKEVEQRRAGGYSRKYASKAKNLADDMVRNTARDLLYYAVTQDAMLIFENLSRGFGRQGKRTFMAERQYTRMEDWLTAKLAYEGLSKTYLSKTLAQYTSKTCSNCGFTITSADYDRVLEKLKKTATGWMTTINGKELKVEGQITYYNRYKRQNVVKDLSVELDRLSEESVNNDISSWTKGRSGEALSLLKKRFSHRPVQEKFVCLNCGFETHADEQAALNIARSWLFLRSQEYKKYQTNKTTGNTDKRAFVETWQSFYRKKLKEVWKPAVTSPKKKRKV

SEQ ID NO: 282 - protein, 997 aa, Artificial Sequence
  CasX variant
MAPKKKRKVSRQEIKRINKIRRRLVKDSNTKKAGKTGPMKTLLVRVMTPDLRERLENLRKKPENIPQPISNTSRANLNKLLTDYTEMKKAILHVYWEEFQKDPVGLMSRVAQPASKKIDQNKLKPEMDEKGNLTTAGFACSQCGQPLFVYKLEQVSEKGKAYTNYFGRCNVAEHEKLILLAQLKPEKDSDEAVTYSLGKFGQRALDFYSIHVTRESNHPVKPLEQIGGNSCASGPVGKALSDACMGAVASFLTKYQDIILEHQKVIKKNEKRLANLKDIASANGLAFPKITLPPQPHTKEGIEAYNNVVAQIVIWVNLNLWQKLKIGRDEAKPLQRLKGFPSFPLVERQANEVDWWDMVCNVKKLINEKKEDGKVFWQNLAGYKRQEALRPYLSSEEDRKKGKKFARYQLGDLLLHLEKKHGEDWGKVYDEAWERIDKKVEGLSKHIKLEEERRSEDAQSKAALTDWLRAKASFVIEGLKEADKDEFCRCELKLQKWYGDLRGKPFAIEAENSILDISGFSKQYNCAFIWQKDGVKKLNLYLIINYFKGGKLRFKKIKPEAFEANRFYTVINKKSGEIVPMEVNFNFDDPNLIILPLAFGKRQGREFIWNDLLSLETGSLKLANGRVIEKTLYNRRTRQDEPALFVALTFERREVLDSSNIKPMNLIGVDRGENIPAVIALTDPEGCPLSRFKDSLGNPTHILRIGESYKEKQRTIQAKKEVEQRRAGGYSRKYASKAKNLADDMVRNTARDLLYYAVTQDAMLIFENLSRGFGRQGKRTFMAERQYTRMEDWLTAKLAYEGLSKTYLSKTLAQYTSKTCSNCGFTITSADYDRVLEKLKKTATGWMTTINGKELKVEGQITYYNRYKRQNVVKDLSVELDRLSEESVNNDISSWTKGRSGEALSLLKKRFSHRPVQEKFVCLNCGFETHADEQAALNIARSWLFLRSQEYKKYQTNKTTGNTDKRAFVETWQSFYRKKLKEVWKPAVTSPKKKRKV

SEQ ID NO: 283 - DNA, 2991 bp, Artificial Sequence
  CasX variant
atggccccaaagaagaagcggaaggtctctagacaagagatcaagagaatcaacaagatcagaaggagactggtcaaggacagcaacacaaagaaggccggcaagacaggccccatgaaaaccctgctcgtcagagtgatgacccctgacctgagagagcggctggaaaacctgagaaagaagcccgagaacatccctcagcctatcagcaacaccagcagggccaacctgaacaagctgctgaccgactacaccgagatgaagaaagccatcctgcacgtgtactgggaagagttccagaaagaccccgtgggcctgatgagcagagttgctcagcctgccagcaagaagatcgaccagaacaagctgaagcccgagatggacgagaagggcaatctgaccacagccggctttgcctgctctcagtgtggccagcctctgttcgtgtacaagctggaacaggtgtccgagaaaggcaaggcctacaccaactacttcggcagatgtaacgtggccgagcacgagaagctgattctgctggcccagctgaaacctgagaaggactctgatgaggccgtgacctacagcctgggcaagtttggacagagagccctggacttctacagcatccacgtgaccagggagagcaatcaccctgtgaagcccctggaacagatcggcggcaatagctgtgcctctggacctgtgggaaaagccctgagcgacgcctgtatgggagccgtggcatccttcctgaccaagtaccaggacatcatcctggaacaccagaaagtgatcaagaagaacgagaaaagactggccaacctcaaggatatcgccagcgctaacggcctggcctttcctaagatcaccctgcctccacagcctcacaccaaagagggcatcgaggcctacaacaacgtggtggcccagatcgtgatttgggtcaacctgaatctgtggcagaagctgaagatcggcagggacgaagccaagccactgcagagactgaagggcttccctagcttccctctggtggaaagacaggccaatgaagtggattggtgggacatggtctgcaacgtgaagaagctgatcaacgagaagaaagaggatggcaaggttttctggcagaacctggccggctacaagagacaagaagccctgaggccttacctgagcagcgaagaggaccggaagaagggcaagaagttcgccagataccagttcggcgacctgctgctgcacctggaaaagaagcacggcgaggactggggcaaagtgtacgatgaggcctgggagagaatcgacaagaaggtggaaggcctgagcaagcacattaagctggaagaggaaagaaggagcgaggacgcccaatctaaagccgctctgaccgattggctgagagccaaggccagctttgtgatcgagggcctgaaagaggccgacaaggacgagttctgcagatgcgagctgaagctgcagaagtggtacggcgatctgagaggcaagcccttcgccattgaggccgagaacagcatcctggacatcagcggcttcagcaagcagtacaactgcgccttcatttggcagaaagacggcgtcaagaaactgaacctgtacctgatcatcaattacttcaaaggcggcaagctgcggttcaagaagatcaaacccgaggccttcgaggctaacagattctacaccgtgatcaacaaaaagtccggcgagatcgtgcccatggaagtgaacttcaacttcgacgaccccaacctgattatcctgcctctggccttcggcaagagacagggcagagagttcatctggaacgatctgctgagcctggaaaccggctctctgaagctggccaatggcagagtgatcgagaaaaccctgtacaacaggagaaccagacaggacgagcctgctctgtttgtggccctgaccttcgagagaagagaggtgctggacagcagcaacatcaagcccatgaacctgatcggcatcgaccggggcgagaatatccctgctgtgatcgccctgacagaccctgaaggatgcccactgagcagattcaaggactccctgggcaaccctacacacatcctgagaatcggcgagagctacaaagagaagcagaggacaatccaggccaagaaagaggtggaacagagaagagccggcggatactctaggaagtacgccagcaaggccaagaatctggccgacgacatggtccgaaacaccgccagagatctgctgtactacgccgtgacacaggacgccatgctgatcttcgagaatctgagcagaggcttcggccggcagggcaagagaacctttatggccgagaggcagtacaccagaatggaagattggctcacagctaaactggcctacgagggactgagcaagacctacctgtccaaaacactggcccagtatacctccaagacctgcagcaattgcggcttcaccatcaccagcgccgactacgacagagtgctggaaaagctcaagaaaaccgccaccggctggatgaccaccatcaacggcaaagagctgaaggttgagggccagatcacctactacaacaggtacaagaggcagaacgtcgtgaaggatctgagcgtggaactggacagactgagcgaagagagcgtgaacaacgacatcagcagctggacaaagggcagatcaggcgaggctctgagcctgctgaagaagaggtttagccacagacctgtgcaagagaagttcgtgtgcctgaactgcggcttcgagacacacgccgatgaacaggctgccctgaacattgccagaagctggctgttcctgagaagccaagagtacaagaagtaccagaccaacaagaccaccggcaacaccgacaagagggcctttgtggaaacctggcagagcttctacagaaaaaagctgaaagaagtctggaagcccgccgtgactagtccaaaaaagaagagaaaggta

SEQ ID NO: 284 - DNA, 2988 bp, Artificial Sequence
  CasX variant
atggccccaaagaagaagcggaaggtctctagacaagagatcaagagaatcaacaagatcagaaggagactggtcaaggacagcaacacaaagaaggccggcaagacaggccccatgaaaaccctgctcgtcagagtgatgacccctgacctgagagagcggctggaaaacctgagaaagaagcccgagaacatccctcagcctatcagcaacaccagcagggccaacctgaacaagctgctgaccgactacaccgagatgaagaaagccatcctgcacgtgtactgggaagagttccagaaagaccccgtgggcctgatgagcagagttgctcagcccgctcctaagaacatcgaccagagaaagctgatccccgtgaaggacggcaacgagagactgacctctagcggctttgcctgcagccagtgttgccagcctctgtacgtgtacaagctggaacaagtgaacgacaagggcaagccccacaccaactacttcggcagatgcaacgtgtccgagcacgagaggctgatcctgctgtctcctcacaagcccgaggccaacgatgagctggtcacatacagcctgggcaagttcggacagagagccctggacttctacagcatccacgtgaccaaagaaagcacacaccccgtgaagcccctggctcagatcgccggcaatagatacgcctctggacctgtgggcaaagccctgtccgatgcctgcatgggaacaatcgccagcttcctgagcaagtaccaggacatcatcatcgagcaccagaaggtggtcaagggcaaccagaagagactggaaagcctgagggagctggccggcaaagagaacctggaataccccagcgtgaccctgcctcctcagcctcacacaaaagaaggcgtggacgcctacaacgaagtgatcgccagagtgagaatgtgggtcaacctgaacctgtggcagaagctgaaactgtccagggacgacgccaagcctctgctgagactgaagggcttccctagcttccctctggtggaaagacaggccaatgaagtggattggtgggacatggtctgcaacgtgaagaagctgatcaacgagaagaaagaggatggcaaggttttctggcagaacctggccggctacaagagacaagaagccctgaggccttacctgagcagcgaagaggaccggaagaagggcaagaagttcgccagataccagttcggcgacctgctgctgcacctggaaaagaagcacggcgaggactggggcaaagtgtacgatgaggcctgggagagaatcgacaagaaggtggaaggcctgagcaagcacattaagctggaagaggaaagaaggagcgaggacgcccaatctaaagccgctctgaccgattggctgagagccaaggccagctttgtgatcgagggcctgaaagaggccgacaaggacgagttctgcagatgcgagctgaagctgcagaagtggtacggcgatctgagaggcaagcccttcgccattgaggccgagaacagcatcctggacatcagcggcttcagcaagcagtacaactgcgccttcatttggcagaaagacggcgtcaagaaactgaacctgtacctgatcatcaattacttcaaaggcggcaagctgcggttcaagaagatcaaacccgaggccttcgaggctaacagattctacaccgtgatcaacaaaaagtccggcgagatcgtgcccatggaagtgaacttcaacttcgacgaccccaacctgattatcctgcctctggccttcggcaagagacagggcagagagttcatctggaacgatctgctgagcctggaaaccggctctctgaagctggccaatggcagagtgatcgagaaaaccctgtacaacaggagaaccagacaggacgagcctgctctgtttgtggccctgaccttcgagagaagagaggtgctggacagcagcaacatcaagcccatgaacctgatcggcatcgaccggggcgagaatatccctgctgtgatcgccctgacagaccctgaaggatgcccactgagcagattcaaggactccctgggcaaccctacacacatcctgagaatcggcgagagctacaaagagaagcagaggacaatccaggccaagaaagaggtggaacagagaagagccggcggatactctaggaagtacgccagcaaggccaagaatctggccgacgacatggtccgaaacaccgccagagatctgctgtactacgccgtgacacaggacgccatgctgatcttcgagaatctgagcagaggcttcggccggcagggcaagagaacctttatggccgagaggcagtacaccagaatggaagattggctcacagctaaactggcctacgagggactgagcaagacctacctgtccaaaacactggcccagtatacctccaagacctgcagcaattgcggcttcaccatcaccagcgccgactacgacagagtgctggaaaagctcaagaaaaccgccaccggctggatgaccaccatcaacggcaaagagctgaaggttgagggccagatcacctactacaacaggtacaagaggcagaacgtcgtgaaggatctgagcgtggaactggacagactgagcgaagagagcgtgaacaacgacatcagcagctggacaaagggcagatcaggcgaggctctgagcctgctgaagaagaggtttagccacagacctgtgcaagagaagttcgtgtgcctgaactgcggcttcgagacacacgccgatgaacaggctgccctgaacattgccagaagctggctgttcctgagaagccaagagtacaagaagtaccagaccaacaagaccaccggcaacaccgacaagagggcctttgtggaaacctggcagagcttctacagaaaaaagctgaaagaagtctggaagcccgccgtgactagtccaaaaaagaagagaaaggta

SEQ ID NO: 285 - DNA, 2988 bp, Artificial Sequence
  CasX variant
atggccccaaagaagaagcggaaggtctctagacaagagatcaagagaatcaacaagatcagaaggagactggtcaaggacagcaacacaaagaaggccggcaagacaggccccatgaaaaccctgctcgtcagagtgatgacccctgacctgagagagcggctggaaaacctgagaaagaagcccgagaacatccctcagcctatcagcaacaccagcagggccaacctgaacaagctgctgaccgactacaccgagatgaagaaagccatcctgcacgtgtactgggaagagttccagaaagaccccgtgggcctgatgagcagagttgctcagcccgctcctaagaacatcgaccagagaaagctgatccccgtgaaggacggcaacgagagactgacctctagcggctttgcctgcagccagtgttgccagcctctgtacgtgtacaagctggaacaagtgaacgacaagggcaagccccacaccaactacttcggcagatgcaacgtgtccgagcacgagaggctgatcctgctgtctcctcacaagcccgaggccaacgatgagctggtcacatacagcctgggcaagttcggacagagagccctggacttctacagcatccacgtgaccaaagaaagcacacaccccgtgaagcccctggctcagatcgccggcaatagatacgcctctggacctgtgggcaaagccctgtccgatgcctgcatgggaacaatcgccagcttcctgagcaagtaccaggacatcatcatcgagcaccagaaggtggtcaagggcaaccagaagagactggaaagcctgagggagctggccggcaaagagaacctggaataccccagcgtgaccctgcctcctcagcctcacacaaaagaaggcgtggacgcctacaacgaagtgatcgccagagtgagaatgtgggtcaacctgaacctgtggcagaagctgaaactgtccagggacgacgccaagcctctgctgagactgaagggcttccctagcttccctctggtggaaagacaggccaatgaagtggattggtgggacatggtctgcaacgtgaagaagctgatcaacgagaagaaagaggatggcaaggttttctggcagaacctggccggctacaagagacaagaagccctgaggccttacctgagcagcgaagaggaccggaagaagggcaagaagttcgccagataccagctgggcgacctgctgctgcacctggaaaagaagcacggcgaggactggggcaaagtgtacgatgaggcctgggagagaatcgacaagaaggtggaaggcctgagcaagcacattaagctggaagaggaaagaaggagcgaggacgcccaatctaaagccgctctgaccgattggctgagagccaaggccagctttgtgatcgagggcctgaaagaggccgacaaggacgagttctgcagatgcgagctgaagctgcagaagtggtacggcgatctgagaggcaagcccttcgccattgaggccgagaacagcatcctggacatcagcggcttcagcaagcagtacaactgcgccttcatttggcagaaagacggcgtcaagaaactgaacctgtacctgatcatcaattacttcaaaggcggcaagctgcggttcaagaagatcaaacccgaggccttcgaggctaacagattctacaccgtgatcaacaaaaagtccggcgagatcgtgcccatggaagtgaacttcaacttcgacgaccccaacctgattatcctgcctctggccttcggcaagagacagggcagagagttcatctggaacgatctgctgagcctggaaaccggctctctgaagctggccaatggcagagtgatcgagaaaaccctgtacaacaggagaaccagacaggacgagcctgctctgtttgtggccctgaccttcgagagaagagaggtgctggacagcagcaacatcaagcccatgaacctgatcggcgtggaccggggcgagaatatccctgctgtgatcgccctgacagaccctgaaggatgcccactgagcagattcaaggactccctgggcaaccctacacacatcctgagaatcggcgagagctacaaagagaagcagaggacaatccaggccaagaaagaggtggaacagagaagagccggcggatactctaggaagtacgccagcaaggccaagaatctggccgacgacatggtccgaaacaccgccagagatctgctgtactacgccgtgacacaggacgccatgctgatcttcgagaatctgagcagaggcttcggccggcagggcaagagaacctttatggccgagaggcagtacaccagaatggaagattggctcacagctaaactggcctacgagggactgagcaagacctacctgtccaaaacactggcccagtatacctccaagacctgcagcaattgcggcttcaccatcaccagcgccgactacgacagagtgctggaaaagctcaagaaaaccgccaccggctggatgaccaccatcaacggcaaagagctgaaggttgagggccagatcacctactacaacaggaggaagaggcagaacgtcgtgaaggatctgagcgtggaactggacagactgagcgaagagagcgtgaacaacgacatcagcagctggacaaagggcagatcaggcgaggctctgagcctgctgaagaagaggtttagccacagacctgtgcaagagaagttcgtgtgcctgaactgcggcttcgagacacacgccgatgaacaggctgccctgaacattgccagaagctggctgttcctgagaagccaagagtacaagaagtaccagaccaacaagaccaccggcaacaccgacaagagggcctttgtggaaacctggcagagcttctacagaaaaaagctgaaagaagtctggaagcccgccgtgactagtccaaaaaagaagagaaaggta

SEQ ID NO: 286 - DNA, 2988 bp, Artificial Sequence
  CasX variant
atggccccaaagaagaagcggaaggtctctagacaagagatcaagagaatcaacaagatcagaaggagactggtcaaggacagcaacacaaagaaggccggcaagacaggccccatgaaaaccctgctcgtcagagtgatgacccctgacctgagagagcggctggaaaacctgagaaagaagcccgagaacatccctcagcctatcagcaacaccagcagggccaacctgaacaagctgctgaccgactacaccgagatgaagaaagccatcctgcacgtgtactgggaagagttccagaaagaccccgtgggcctgatgagcagagttgctcagcccgctcctaagaacatcgaccagagaaagctgatccccgtgaaggacggcaacgagagactgacctctagcggctttgcctgcagccagtgttgccagcctctgtacgtgtacaagctggaacaagtgaacgacaagggcaagccccacaccaactacttcggcagatgcaacgtgtccgagcacgagaggctgatcctgctgtctcctcacaagcccgaggccaacgatgagctggtcacatacagcctgggcaagttcggacagagagccctggacttctacagcatccacgtgaccaaagaaagcacacaccccgtgaagcccctggctcagatcgccggcaatagatacgcctctggacctgtgggcaaagccctgtccgatgcctgcatgggaacaatcgccagcttcctgagcaagtaccaggacatcatcatcgagcaccagaaggtggtcaagggcaaccagaagagactggaaagcctgagggagctggccggcaaagagaacctggaataccccagcgtgaccctgcctcctcagcctcacacaaaagaaggcgtggacgcctacaacgaagtgatcgccagagtgagaatgtgggtcaacctgaacctgtggcagaagctgaaactgtccagggacgacgccaagcctctgctgagactgaagggcttccctagcttccctctggtggaaagacaggccaatgaagtggattggtgggacatggtctgcaacgtgaagaagctgatcaacgagaagaaagaggatggcaaggttttctggcagaacctggccggctacaagagacaagaagccctgaggccttacctgagcagcgaagaggaccggaagaagggcaagaagttcgccagataccagctgggcgacctgctgaagcacctggaaaagaagcacggcgaggactggggcaaagtgtacgatgaggcctgggagagaatcgacaagaaggtggaaggcctgagcaagcacattaagctggaagaggaaagaaggagcgaggacgcccaatctaaagccgctctgaccgattggctgagagccaaggccagctttgtgatcgagggcctgaaagaggccgacaaggacgagttctgcagatgcgagctgaagctgcagaagtggtacggcgatctgagaggcaagcccttcgccattgaggccgagaacagcatcctggacatcagcggcttcagcaagcagtacaactgcgccttcatttggcagaaagacggcgtcaagaaactgaacctgtacctgatcatcaattacttcaaaggcggcaagctgcggttcaagaagatcaaacccgaggccttcgaggctaacagattctacaccgtgatcaacaaaaagtccggcgagatcgtgcccatggaagtgaacttcaacttcgacgaccccaacctgattatcctgcctctggccttcggcaagagacagggcagagagttcatctggaacgatctgctgagcctggaaaccggctctctgaagctggccaatggcagagtgatcgagaaaaccctgtacaacaggagaaccagacaggacgagcctgctctgtttgtggccctgaccttcgagagaagagaggtgctggacagcagcaacatcaagcccatgaacctgatcggcgtggaccggggcgagaatatccctgctgtgatcgccctgacagaccctgaaggatgcccactgagcagattcaaggactccctgggcaaccctacacacatcctgagaatcggcgagagctacaaagagaagcagaggacaatccaggccaagaaagaggtggaacagagaagagccggcggatactctaggaagtacgccagcaaggccaagaatctggccgacgacatggtccgaaacaccgccagagatctgctgtactacgccgtgacacaggacgccatgctgatcttcgagaatctgagcagaggcttcggccggcagggcaagagaacctttatggccgagaggcagtacaccagaatggaagattggctcacagctaaactggcctacgagggactgagcaagacctacctgtccaaaacactggcccagtatacctccaagacctgcagcaattgcggcttcaccatcaccagcgccgactacgacagagtgctggaaaagctcaagaaaaccgccaccggctggatgaccaccatcaacggcaaagagctgaaggttgagggccagatcacctactacaacaggaggaagaggcagaacgtcgtgaaggatctgagcgtggaactggacagactgagcgaagagagcgtgaacaacgacatcagcagctggacaaagggcagatcaggcgaggctctgagcctgctgaagaagaggtttagccacagacctgtgcaagagaagttcgtgtgcctgaactgcggcttcgagacacacgccgatgaacaggctgccctgaacattgccagaagctggctgttcctgagaagccaagagtacaagaagtaccagaccaacaagaccaccggcaacaccgacaagagggcctttgtggaaacctggcagagcttctacagaaaaaagctgaaagaagtctggaagcccgccgtgactagtccaaaaaagaagagaaaggta

SEQ ID NO: 287 - DNA, 2988 bp, Artificial Sequence
  CasX variant
atggccccaaagaagaagcggaaggtctctagacaagagatcaagagaatcaacaagatcagaaggagactggtcaaggacagcaacacaaagaaggccggcaagacaggccccatgaaaaccctgctcgtcagagtgatgacccctgacctgagagagcggctggaaaacctgagaaagaagcccgagaacatccctcagcctatcagcaacaccagcagggccaacctgaacaagctgctgaccgactacaccgagatgaagaaagccatcctgcacgtgtactgggaagagttccagaaagaccccgtgggcctgatgagcagagttgctcagcccgctcctaagaacatcgaccagagaaagctgatccccgtgaaggacggcaacgagagactgacctctagcggctttgcctgcagccagtgttgccagcctctgtacgtgtacaagctggaacaagtgaacgacaagggcaagccccacaccaactacttcggcagatgcaacgtgtccgagcacgagaggctgatcctgctgtctcctcacaagcccgaggccaacgatgagctggtcacatacagcctgggcaagttcggacagagagccctggacttctacagcatccacgtgaccaaagaaagcacacaccccgtgaagcccctggctcagatcgccggcaatagatacgcctctggacctgtgggcaaagccctgtccgatgcctgcatgggaacaatcgccagcttcctgagcaagtaccaggacatcatcatcgagcaccagaaggtggtcaagggcaaccagaagagactggaaagcctgagggagctggccggcaaagagaacctggaataccccagcgtgaccctgcctcctcagcctcacacaaaagaaggcgtggacgcctacaacgaagtgatcgccagagtgagaatgtgggtcaacctgaacctgtggcagaagctgaaactgtccagggacgacgccaagcctctgctgagactgaagggcttccctagcttccctctggtggaaagacaggccaatgaagtggattggtgggacatggtctgcaacgtgaagaagctgatcaacgagaagaaagaggatggcaaggttttctggcagaacctggccggctacaagagacaagaagccctgaggccttacctgagcagcgaagaggaccggaagaagggcaagaagttcgccagataccagctgggcgacctgctgctgcacctggaaaagaagcacggcgaggactggggcaaagtgtacgatgaggcctgggagagaatcgacaagaaggtggaaggcctgagcaagcacattaagctggaagaggaaagaaggagcgaggacgcccaatctaaagccgctctgaccgattggctgagagccaaggccagctttgtgatcgagggcctgaaagaggccgacaaggacgagttctgcagatgcgagctgaagctgcagaagtggtacggcgatctgagaggcaagcccttcgccattgaggccgagaacagcatcctggacatcagcggcttcagcaagcagtacaactgcgccttcatttggcagaaagacggcgtcaagaaactgaacctgtacctgatcatcaattacttcaaaggcggcaagctgcggttcaagaagatcaaacccgaggccttcgaggctaacagattctacaccgtgatcaacaaaaagtccggcgagatcgtgcccatggaagtgaacttcaacttcgacgaccccaacctgattatcctgcctctggccttcggcaagagacagggcagagagttcatctggaacgatctgctgagcctggaaaccggctctctgaagctggccaatggcagagtgatcgagaaaaccctgtacaacaggagaaccagacaggacgagcctgctctgtttgtggccctgaccttcgagagaagagaggtgctggacagcagcaacatcaagcccatgaacctgatcggcgtggaccggggcgagaatatccctgctgtgatcgccctgacagaccctgaaggatgcccactgagcagattcaaggactccctgggcaaccctacacacatcctgagaatcggcgagagctacaaagagaagcagaggacaatccaggccaagaaagaggtggaacagagaagagccggcggatactctaggaagtacgccagcaaggccaagaatctggccgacgacatggtccgaaacaccgccagagatctgctgtactacgccgtgacacaggacgccatgctgatcttcgagaatctgagcagaggcttcggccggcagggcaagagaacctttatggccgagaggcagtacaccagaatggaagattggctcacagctaaactggcctacgagggactgagcaagacctacctgtccaaaacactggcccagtatacctccaagacctgcagcaattgcggcttcaccatcaccagcgccgactacgacagagtgctggaaaagctcaagaaaaccgccaccggctggatgaccaccatcaacggcaaagagctgaaggttgagggccagatcacctactacaacaggtacaagaggcagaacgtcgtgaaggatctgagcgtggaactggacagactgagcgaagagagcgtgaacaacgacatcagcagctggacaaagggcagatcaggcgaggctctgagcctgctgaagaagaggtttagccacagacctgtgcaagagaagttcgtgtgcctgaactgcggcttcgagacacacgccgatgaacaggctgccctgaacattgccagaagctggctgttcctgagaagccaagagtacaagaagtaccagaccaacaagaccaccggcaacaccgacaagagggcctttgtggaaacctggcagagcttctacagaaaaaagctgaaagaagtctggaagcccgccgtgactagtccaaaaaagaagagaaaggta

SEQ ID NO: 288 - DNA, 2991 bp, Artificial Sequence
  CasX variant
atggccccaaagaagaagcggaaggtctctagacaagagatcaagagaatcaacaagatcagaaggagactggtcaaggacagcaacacaaagaaggccggcaagacaggccccatgaaaaccctgctcgtcagagtgatgacccctgacctgagagagcggctggaaaacctgagaaagaagcccgagaacatccctcagcctatcagcaacaccagcagggccaacctgaacaagctgctgaccgactacaccgagatgaagaaagccatcctgcacgtgtactgggaagagttccagaaagaccccgtgggcctgatgagcagagttgctcagcctgccagcaagaagatcgaccagaacaagctgaagcccgagatggacgagaagggcaatctgaccacagccggctttgcctgctctcagtgtggccagcctctgttcgtgtacaagctggaacaggtgtccgagaaaggcaaggcctacaccaactacttcggcagatgtaacgtggccgagcacgagaagctgattctgctggcccagctgaaacctgagaaggactctgatgaggccgtgacctacagcctgggcaagtttggacagagagccctggacttctacagcatccacgtgaccaaagaaagcacacaccccgtgaagcccctggctcagatcgccggcaatagatacgcctctggacctgtgggcaaagccctgtccgatgcctgcatgggaacaatcgccagcttcctgagcaagtaccaggacatcatcatcgagcaccagaaggtggtcaagggcaaccagaagagactggaaagcctgagggagctggccggcaaagagaacctggaataccccagcgtgaccctgcctcctcagcctcacacaaaagaaggcgtggacgcctacaacgaagtgatcgccagagtgagaatgtgggtcaacctgaacctgtggcagaagctgaaactgtccagggacgacgccaagcctctgctgagactgaagggcttccctagcttccctctggtggaaagacaggccaatgaagtggattggtgggacatggtctgcaacgtgaagaagctgatcaacgagaagaaagaggatggcaaggttttctggcagaacctggccggctacaagagacaagaagccctgaggccttacctgagcagcgaagaggaccggaagaagggcaagaagttcgccagataccagttcggcgacctgctgctgcacctggaaaagaagcacggcgaggactggggcaaagtgtacgatgaggcctgggagagaatcgacaagaaggtggaaggcctgagcaagcacattaagctggaagaggaaagaaggagcgaggacgcccaatctaaagccgctctgaccgattggctgagagccaaggccagctttgtgatcgagggcctgaaagaggccgacaaggacgagttctgcagatgcgagctgaagctgcagaagtggtacggcgatctgagaggcaagcccttcgccattgaggccgagaacagcatcctggacatcagcggcttcagcaagcagtacaactgcgccttcatttggcagaaagacggcgtcaagaaactgaacctgtacctgatcatcaattacttcaaaggcggcaagctgcggttcaagaagatcaaacccgaggccttcgaggctaacagattctacaccgtgatcaacaaaaagtccggcgagatcgtgcccatggaagtgaacttcaacttcgacgaccccaacctgattatcctgcctctggccttcggcaagagacagggcagagagttcatctggaacgatctgctgagcctggaaaccggctctctgaagctggccaatggcagagtgatcgagaaaaccctgtacaacaggagaaccagacaggacgagcctgctctgtttgtggccctgaccttcgagagaagagaggtgctggacagcagcaacatcaagcccatgaacctgatcggcatcgaccggggcgagaatatccctgctgtgatcgccctgacagaccctgaaggatgcccactgagcagattcaaggactccctgggcaaccctacacacatcctgagaatcggcgagagctacaaagagaagcagaggacaatccaggccaagaaagaggtggaacagagaagagccggcggatactctaggaagtacgccagcaaggccaagaatctggccgacgacatggtccgaaacaccgccagagatctgctgtactacgccgtgacacaggacgccatgctgatcttcgagaatctgagcagaggcttcggccggcagggcaagagaacctttatggccgagaggcagtacaccagaatggaagattggctcacagctaaactggcctacgagggactgagcaagacctacctgtccaaaacactggcccagtatacctccaagacctgcagcaattgcggcttcaccatcaccagcgccgactacgacagagtgctggaaaagctcaagaaaaccgccaccggctggatgaccaccatcaacggcaaagagctgaaggttgagggccagatcacctactacaacaggtacaagaggcagaacgtcgtgaaggatctgagcgtggaactggacagactgagcgaagagagcgtgaacaacgacatcagcagctggacaaagggcagatcaggcgaggctctgagcctgctgaagaagaggtttagccacagacctgtgcaagagaagttcgtgtgcctgaactgcggcttcgagacacacgccgatgaacaggctgccctgaacattgccagaagctggctgttcctgagaagccaagagtacaagaagtaccagaccaacaagaccaccggcaacaccgacaagagggcctttgtggaaacctggcagagcttctacagaaaaaagctgaaagaagtctggaagcccgccgtgactagtccaaaaaagaagagaaaggta

SEQ ID NO: 289 - DNA, 2991 bp, Artificial Sequence
  CasX variant
atggccccaaagaagaagcggaaggtctctagacaagagatcaagagaatcaacaagatcagaaggagactggtcaaggacagcaacacaaagaaggccggcaagacaggccccatgaaaaccctgctcgtcagagtgatgacccctgacctgagagagcggctggaaaacctgagaaagaagcccgagaacatccctcagcctatcagcaacaccagcagggccaacctgaacaagctgctgaccgactacaccgagatgaagaaagccatcctgcacgtgtactgggaagagttccagaaagaccccgtgggcctgatgagcagagttgctcagcctgccagcaagaagatcgaccagaacaagctgaagcccgagatggacgagaagggcaatctgaccacagccggctttgcctgctctcagtgtggccagcctctgttcgtgtacaagctggaacaggtgtccgagaaaggcaaggcctacaccaactacttcggcagatgtaacgtggccgagcacgagaagctgattctgctggcccagctgaaacctgagaaggactctgatgaggccgtgacctacagcctgggcaagtttggacagagagccctggacttctacagcatccacgtgaccaaagaaagcacacaccccgtgaagcccctggctcagatcgccggcaatagatacgcctctggacctgtgggcaaagccctgtccgatgcctgcatgggaacaatcgccagcttcctgagcaagtaccaggacatcatcatcgagcaccagaaggtggtcaagggcaaccagaagagactggaaagcctgagggagctggccggcaaagagaacctggaataccccagcgtgaccctgcctcctcagcctcacacaaaagaaggcgtggacgcctacaacgaagtgatcgccagagtgagaatgtgggtcaacctgaacctgtggcagaagctgaaactgtccagggacgacgccaagcctctgctgagactgaagggcttccctagcttccctctggtggaaagacaggccaatgaagtggattggtgggacatggtctgcaacgtgaagaagctgatcaacgagaagaaagaggatggcaaggttttctggcagaacctggccggctacaagagacaagaagccctgaggccttacctgagcagcgaagaggaccggaagaagggcaagaagttcgccagataccagctgggcgacctgctgctgcacctggaaaagaagcacggcgaggactggggcaaagtgtacgatgaggcctgggagagaatcgacaagaaggtggaaggcctgagcaagcacattaagctggaagaggaaagaaggagcgaggacgcccaatctaaagccgctctgaccgattggctgagagccaaggccagctttgtgatcgagggcctgaaagaggccgacaaggacgagttctgcagatgcgagctgaagctgcagaagtggtacggcgatctgagaggcaagcccttcgccattgaggccgagaacagcatcctggacatcagcggcttcagcaagcagtacaactgcgccttcatttggcagaaagacggcgtcaagaaactgaacctgtacctgatcatcaattacttcaaaggcggcaagctgcggttcaagaagatcaaacccgaggccttcgaggctaacagattctacaccgtgatcaacaaaaagtccggcgagatcgtgcccatggaagtgaacttcaacttcgacgaccccaacctgattatcctgcctctggccttcggcaagagacagggcagagagttcatctggaacgatctgctgagcctggaaaccggctctctgaagctggccaatggcagagtgatcgagaaaaccctgtacaacaggagaaccagacaggacgagcctgctctgtttgtggccctgaccttcgagagaagagaggtgctggacagcagcaacatcaagcccatgaacctgatcggcgtggaccggggcgagaatatccctgctgtgatcgccctgacagaccctgaaggatgcccactgagcagattcaaggactccctgggcaaccctacacacatcctgagaatcggcgagagctacaaagagaagcagaggacaatccaggccaagaaagaggtggaacagagaagagccggcggatactctaggaagtacgccagcaaggccaagaatctggccgacgacatggtccgaaacaccgccagagatctgctgtactacgccgtgacacaggacgccatgctgatcttcgagaatctgagcagaggcttcggccggcagggcaagagaacctttatggccgagaggcagtacaccagaatggaagattggctcacagctaaactggcctacgagggactgagcaagacctacctgtccaaaacactggcccagtatacctccaagacctgcagcaattgcggcttcaccatcaccagcgccgactacgacagagtgctggaaaagctcaagaaaaccgccaccggctggatgaccaccatcaacggcaaagagctgaaggttgagggccagatcacctactacaacaggaggaagaggcagaacgtcgtgaaggatctgagcgtggaactggacagactgagcgaagagagcgtgaacaacgacatcagcagctggacaaagggcagatcaggcgaggctctgagcctgctgaagaagaggtttagccacagacctgtgcaagagaagttcgtgtgcctgaactgcggcttcgagacacacgccgatgaacaggctgccctgaacattgccagaagctggctgttcctgagaagccaagagtacaagaagtaccagaccaacaagaccaccggcaacaccgacaagagggcctttgtggaaacctggcagagcttctacagaaaaaagctgaaagaagtctggaagcccgccgtgactagtccaaaaaagaagagaaaggta

SEQ ID NO: 290 - DNA, 2991 bp, Artificial Sequence
  CasX variant
atggccccaaagaagaagcggaaggtctctagacaagagatcaagagaatcaacaagatcagaaggagactggtcaaggacagcaacacaaagaaggccggcaagacaggccccatgaaaaccctgctcgtcagagtgatgacccctgacctgagagagcggctggaaaacctgagaaagaagcccgagaacatccctcagcctatcagcaacaccagcagggccaacctgaacaagctgctgaccgactacaccgagatgaagaaagccatcctgcacgtgtactgggaagagttccagaaagaccccgtgggcctgatgagcagagttgctcagcctgccagcaagaagatcgaccagaacaagctgaagcccgagatggacgagaagggcaatctgaccacagccggctttgcctgctctcagtgtggccagcctctgttcgtgtacaagctggaacaggtgtccgagaaaggcaaggcctacaccaactacttcggcagatgtaacgtggccgagcacgagaagctgattctgctggcccagctgaaacctgagaaggactctgatgaggccgtgacctacagcctgggcaagtttggacagagagccctggacttctacagcatccacgtgaccaaagaaagcacacaccccgtgaagcccctggctcagatcgccggcaatagatacgcctctggacctgtgggcaaagccctgtccgatgcctgcatgggaacaatcgccagcttcctgagcaagtaccaggacatcatcatcgagcaccagaaggtggtcaagggcaaccagaagagactggaaagcctgagggagctggccggcaaagagaacctggaataccccagcgtgaccctgcctcctcagcctcacacaaaagaaggcgtggacgcctacaacgaagtgatcgccagagtgagaatgtgggtcaacctgaacctgtggcagaagctgaaactgtccagggacgacgccaagcctctgctgagactgaagggcttccctagcttccctctggtggaaagacaggccaatgaagtggattggtgggacatggtctgcaacgtgaagaagctgatcaacgagaagaaagaggatggcaaggttttctggcagaacctggccggctacaagagacaagaagccctgaggccttacctgagcagcgaagaggaccggaagaagggcaagaagttcgccagataccagctgggcgacctgctgaagcacctggaaaagaagcacggcgaggactggggcaaagtgtacgatgaggcctgggagagaatcgacaagaaggtggaaggcctgagcaagcacattaagctggaagaggaaagaaggagcgaggacgcccaatctaaagccgctctgaccgattggctgagagccaaggccagctttgtgatcgagggcctgaaagaggccgacaaggacgagttctgcagatgcgagctgaagctgcagaagtggtacggcgatctgagaggcaagcccttcgccattgaggccgagaacagcatcctggacatcagcggcttcagcaagcagtacaactgcgccttcatttggcagaaagacggcgtcaagaaactgaacctgtacctgatcatcaattacttcaaaggcggcaagctgcggttcaagaagatcaaacccgaggccttcgaggctaacagattctacaccgtgatcaacaaaaagtccggcgagatcgtgcccatggaagtgaacttcaacttcgacgaccccaacctgattatcctgcctctggccttcggcaagagacagggcagagagttcatctggaacgatctgctgagcctggaaaccggctctctgaagctggccaatggcagagtgatcgagaaaaccctgtacaacaggagaaccagacaggacgagcctgctctgtttgtggccctgaccttcgagagaagagaggtgctggacagcagcaacatcaagcccatgaacctgatcggcgtggaccggggcgagaatatccctgctgtgatcgccctgacagaccctgaaggatgcccactgagcagattcaaggactccctgggcaaccctacacacatcctgagaatcggcgagagctacaaagagaagcagaggacaatccaggccaagaaagaggtggaacagagaagagccggcggatactctaggaagtacgccagcaaggccaagaatctggccgacgacatggtccgaaacaccgccagagatctgctgtactacgccgtgacacaggacgccatgctgatcttcgagaatctgagcagaggcttcggccggcagggcaagagaacctttatggccgagaggcagtacaccagaatggaagattggctcacagctaaactggcctacgagggactgagcaagacctacctgtccaaaacactggcccagtatacctccaagacctgcagcaattgcggcttcaccatcaccagcgccgactacgacagagtgctggaaaagctcaagaaaaccgccaccggctggatgaccaccatcaacggcaaagagctgaaggttgagggccagatcacctactacaacaggaggaagaggcagaacgtcgtgaaggatctgagcgtggaactggacagactgagcgaagagagcgtgaacaacgacatcagcagctggacaaagggcagatcaggcgaggctctgagcctgctgaagaagaggtttagccacagacctgtgcaagagaagttcgtgtgcctgaactgcggcttcgagacacacgccgatgaacaggctgccctgaacattgccagaagctggctgttcctgagaagccaagagtacaagaagtaccagaccaacaagaccaccggcaacaccgacaagagggcctttgtggaaacctggcagagcttctacagaaaaaagctgaaagaagtctggaagcccgccgtgactagtccaaaaaagaagagaaaggta

SEQ ID NO: 291 - DNA, 2991 bp, Artificial Sequence
  CasX variant
atggccccaaagaagaagcggaaggtctctagacaagagatcaagagaatcaacaagatcagaaggagactggtcaaggacagcaacacaaagaaggccggcaagacaggccccatgaaaaccctgctcgtcagagtgatgacccctgacctgagagagcggctggaaaacctgagaaagaagcccgagaacatccctcagcctatcagcaacaccagcagggccaacctgaacaagctgctgaccgactacaccgagatgaagaaagccatcctgcacgtgtactgggaagagttccagaaagaccccgtgggcctgatgagcagagttgctcagcctgccagcaagaagatcgaccagaacaagctgaagcccgagatggacgagaagggcaatctgaccacagccggctttgcctgctctcagtgtggccagcctctgttcgtgtacaagctggaacaggtgtccgagaaaggcaaggcctacaccaactacttcggcagatgtaacgtggccgagcacgagaagctgattctgctggcccagctgaaacctgagaaggactctgatgaggccgtgacctacagcctgggcaagtttggacagagagccctggacttctacagcatccacgtgaccaaagaaagcacacaccccgtgaagcccctggctcagatcgccggcaatagatacgcctctggacctgtgggcaaagccctgtccgatgcctgcatgggaacaatcgccagcttcctgagcaagtaccaggacatcatcatcgagcaccagaaggtggtcaagggcaaccagaagagactggaaagcctgagggagctggccggcaaagagaacctggaataccccagcgtgaccctgcctcctcagcctcacacaaaagaaggcgtggacgcctacaacgaagtgatcgccagagtgagaatgtgggtcaacctgaacctgtggcagaagctgaaactgtccagggacgacgccaagcctctgctgagactgaagggcttccctagcttccctctggtggaaagacaggccaatgaagtggattggtgggacatggtctgcaacgtgaagaagctgatcaacgagaagaaagaggatggcaaggttttctggcagaacctggccggctacaagagacaagaagccctgaggccttacctgagcagcgaagaggaccggaagaagggcaagaagttcgccagataccagctgggcgacctgctgctgcacctggaaaagaagcacggcgaggactggggcaaagtgtacgatgaggcctgggagagaatcgacaagaaggtggaaggcctgagcaagcacattaagctggaagaggaaagaaggagcgaggacgcccaatctaaagccgctctgaccgattggctgagagccaaggccagctttgtgatcgagggcctgaaagaggccgacaaggacgagttctgcagatgcgagctgaagctgcagaagtggtacggcgatctgagaggcaagcccttcgccattgaggccgagaacagcatcctggacatcagcggcttcagcaagcagtacaactgcgccttcatttggcagaaagacggcgtcaagaaactgaacctgtacctgatcatcaattacttcaaaggcggcaagctgcggttcaagaagatcaaacccgaggccttcgaggctaacagattctacaccgtgatcaacaaaaagtccggcgagatcgtgcccatggaagtgaacttcaacttcgacgaccccaacctgattatcctgcctctggccttcggcaagagacagggcagagagttcatctggaacgatctgctgagcctggaaaccggctctctgaagctggccaatggcagagtgatcgagaaaaccctgtacaacaggagaaccagacaggacgagcctgctctgtttgtggccctgaccttcgagagaagagaggtgctggacagcagcaacatcaagcccatgaacctgatcggcgtggaccggggcgagaatatccctgctgtgatcgccctgacagaccctgaaggatgcccactgagcagattcaaggactccctgggcaaccctacacacatcctgagaatcggcgagagctacaaagagaagcagaggacaatccaggccaagaaagaggtggaacagagaagagccggcggatactctaggaagtacgccagcaaggccaagaatctggccgacgacatggtccgaaacaccgccagagatctgctgtactacgccgtgacacaggacgccatgctgatcttcgagaatctgagcagaggcttcggccggcagggcaagagaacctttatggccgagaggcagtacaccagaatggaagattggctcacagctaaactggcctacgagggactgagcaagacctacctgtccaaaacactggcccagtatacctccaagacctgcagcaattgcggcttcaccatcaccagcgccgactacgacagagtgctggaaaagctcaagaaaaccgccaccggctggatgaccaccatcaacggcaaagagctgaaggttgagggccagatcacctactacaacaggtacaagaggcagaacgtcgtgaaggatctgagcgtggaactggacagactgagcgaagagagcgtgaacaacgacatcagcagctggacaaagggcagatcaggcgaggctctgagcctgctgaagaagaggtttagccacagacctgtgcaagagaagttcgtgtgcctgaactgcggcttcgagacacacgccgatgaacaggctgccctgaacattgccagaagctggctgttcctgagaagccaagagtacaagaagtaccagaccaacaagaccaccggcaacaccgacaagagggcctttgtggaaacctggcagagcttctacagaaaaaagctgaaagaagtctggaagcccgccgtgactagtccaaaaaagaagagaaaggta

SEQ ID NO: 292 - DNA, 2991 bp, Artificial Sequence
  CasX variant
atggccccaaagaagaagcggaaggtctctagacaagagatcaagagaatcaacaagatcagaaggagactggtcaaggacagcaacacaaagaaggccggcaagacaggccccatgaaaaccctgctcgtcagagtgatgacccctgacctgagagagcggctggaaaacctgagaaagaagcccgagaacatccctcagcctatcagcaacaccagcagggccaacctgaacaagctgctgaccgactacaccgagatgaagaaagccatcctgcacgtgtactgggaagagttccagaaagaccccgtgggcctgatgagcagagttgctcagcctgccagcaagaagatcgaccagaacaagctgaagcccgagatggacgagaagggcaatctgaccacagccggctttgcctgctctcagtgtggccagcctctgttcgtgtacaagctggaacaggtgtccgagaaaggcaaggcctacaccaactacttcggcagatgtaacgtggccgagcacgagaagctgattctgctggcccagctgaaacctgagaaggactctgatgaggccgtgacctacagcctgggcaagtttggacagagagccctggacttctacagcatccacgtgaccagggagagcaatcaccctgtgaagcccctggaacagatcggcggcaatagctgtgcctctggacctgtgggaaaagccctgagcgacgcctgtatgggagccgtggcatccttcctgaccaagtaccaggacatcatcctggaacaccagaaagtgatcaagaagaacgagaaaagactggccaacctcaaggatatcgccagcgctaacggcctggcctttcctaagatcaccctgcctccacagcctcacaccaaagagggcatcgaggcctacaacaacgtggtggcccagatcgtgatttgggtcaacctgaatctgtggcagaagctgaagatcggcagggacgaagccaagccactgcagagactgaagggcttccctagcttccctctggtggaaagacaggccaatgaagtggattggtgggacatggtctgcaacgtgaagaagctgatcaacgagaagaaagaggatggcaaggttttctggcagaacctggccggctacaagagacaagaagccctgaggccttacctgagcagcgaagaggaccggaagaagggcaagaagttcgccagataccagctgggcgacctgctgctgcacctggaaaagaagcacggcgaggactggggcaaagtgtacgatgaggcctgggagagaatcgacaagaaggtggaaggcctgagcaagcacattaagctggaagaggaaagaaggagcgaggacgcccaatctaaagccgctctgaccgattggctgagagccaaggccagctttgtgatcgagggcctgaaagaggccgacaaggacgagttctgcagatgcgagctgaagctgcagaagtggtacggcgatctgagaggcaagcccttcgccattgaggccgagaacagcatcctggacatcagcggcttcagcaagcagtacaactgcgccttcatttggcagaaagacggcgtcaagaaactgaacctgtacctgatcatcaattacttcaaaggcggcaagctgcggttcaagaagatcaaacccgaggccttcgaggctaacagattctacaccgtgatcaacaaaaagtccggcgagatcgtgcccatggaagtgaacttcaacttcgacgaccccaacctgattatcctgcctctggccttcggcaagagacagggcagagagttcatctggaacgatctgctgagcctggaaaccggctctctgaagctggccaatggcagagtgatcgagaaaaccctgtacaacaggagaaccagacaggacgagcctgctctgtttgtggccctgaccttcgagagaagagaggtgctggacagcagcaacatcaagcccatgaacctgatcggcgtggaccggggcgagaatatccctgctgtgatcgccctgacagaccctgaaggatgcccactgagcagattcaaggactccctgggcaaccctacacacatcctgagaatcggcgagagctacaaagagaagcagaggacaatccaggccaagaaagaggtggaacagagaagagccggcggatactctaggaagtacgccagcaaggccaagaatctggccgacgacatggtccgaaacaccgccagagatctgctgtactacgccgtgacacaggacgccatgctgatcttcgagaatctgagcagaggcttcggccggcagggcaagagaacctttatggccgagaggcagtacaccagaatggaagattggctcacagctaaactggcctacgagggactgagcaagacctacctgtccaaaacactggcccagtatacctccaagacctgcagcaattgcggcttcaccatcaccagcgccgactacgacagagtgctggaaaagctcaagaaaaccgccaccggctggatgaccaccatcaacggcaaagagctgaaggttgagggccagatcacctactacaacaggtacaagaggcagaacgtcgtgaaggatctgagcgtggaactggacagactgagcgaagagagcgtgaacaacgacatcagcagctggacaaagggcagatcaggcgaggctctgagcctgctgaagaagaggtttagccacagacctgtgcaagagaagttcgtgtgcctgaactgcggcttcgagacacacgccgatgaacaggctgccctgaacattgccagaagctggctgttcctgagaagccaagagtacaagaagtaccagaccaacaagaccaccggcaacaccgacaagagggcctttgtggaaacctggcagagcttctacagaaaaaagctgaaagaagtctggaagcccgccgtgactagtccaaaaaagaagagaaaggta

SEQ ID NO: 293 - DNA, 22 bp, Artificial Sequence
  T7 promoter primer
gaaattaatacgactcactata

SEQ ID NO: 294 - DNA, 87 bp, Artificial Sequence
  sg2 backbone fwd
gaaattaatacgactcactataggtactggcgcttttatctcattactttgagagccatcaccagcgactatgtcgtatgggtaaag

SEQ ID NO: 295 - DNA, 78 bp, Artificial Sequence
  sg2 backbone rev
ctttgatgcttcttatttatcggatttctctccgataaataagcgctttacccatacgacatagtcgctggtgatggc

SEQ ID NO: 296 - DNA, 54 bp, Artificial Sequence
  sg2.7.37 spacer primer
cggagcgagacatctcggccctttgatgcttcttatttatcggatttctctccg

SEQ ID NO: 297 - DNA, 90 bp, Artificial Sequence
  sg32 backbone fwd
gaaattaatacgactcactataggtactggcgcttttatctcattactttgagagccatcaccagcgactatgtcgtatgggtaaagcgc

SEQ ID NO: 298 - DNA, 46 bp, Artificial Sequence
  sg32 backbone rev
ctttgatgcttccctccgaagagggcgctttacccatacgacatag

SEQ ID NO: 299 - DNA, 43 bp, Artificial Sequence
  sg32.7.37 spacer primer
cggagcgagacatctcggccctttgatgcttccctccgaagag

SEQ ID NO: 300 - DNA, 90 bp, Artificial Sequence
  sg64 backbone fwd
gaaattaatacgactcactataggtactggcgcctttatctcattactttgagagccatcaccagcgactatgtcgtatgggtaaagcgc

SEQ ID NO: 301 - DNA, 54 bp, Artificial Sequence
  sg64 backbone rev
ctttgatgcttcttacggaccgaagtccgtaagcgctttacccatacgacatag

SEQ ID NO: 302 - DNA, 45 bp, Artificial Sequence
  sg64.7.37 spacer primer
cggagcgagacatctcggccctttgatgcttcttacggaccgaag

SEQ ID NO: 303 - DNA, 87 bp, Artificial Sequence
  sg174 backbone fwd
gaaattaatacgactcactataactggcgcttttatctgattactttgagagccatcaccagcgactatgtcgtagtgggtaaagct

SEQ ID NO: 304 - DNA, 50 bp, Artificial Sequence
  sg174 backbone rev
ctttgatgctccctccgaagagggagctttacccactacgacatagtcgc

SEQ ID NO: 305 - DNA, 36 bp, Artificial Sequence
  sg174.7.37 spacer primer
cggagcgagacatctcggccctttgatgctccctcc

SEQ ID NO: 306 - RNA, 130 nt, Artificial Sequence
  gRNA sequence
gguacuggcgcuuuuaucucauuacuuugagagccaucaccagcgacuaugucguauggguaaagcgcuuauuuaucggagagaaauccgauaaauaagaagcaucaaagggccgagaugucucgcuccg

SEQ ID NO: 307 - RNA, 107 nt, Artificial Sequence
  gRNA sequence
gguacuggcgcuuuuaucucauuacuuugagagccaucaccagcgacuaugucguauggguaaagcgcccucuucggagggaagcaucaaagggccgagaugucucg

SEQ ID NO: 308 - RNA, 119 nt, Artificial Sequence
  gRNA sequence
guacuggcgccuuuaucucauuacuuugagagccaucaccagcgacuaugucguauggguaaagcgcuuacggacuucgguccguaagaagcaucaaagggccgagaugucucgcuccg

SEQ ID NO: 309 - RNA, 109 nt, Artificial Sequence
  gRNA sequence
acuggcgcuuuuaucugauuacuuugagagccaucaccagcgacuaugucguaguggguaaagcucccucuucggagggagcaucaaagggccgagaugucucgcuccg

SEQ ID NO: 310 - DNA, 60 bp, Artificial Sequence
  gRNA target oligo
tgaagctgacagcattcgggccgagatgtctcgctccgtggccttagctgtgctcgcgct

SEQ ID NO: 311 - DNA, 60 bp, Artificial Sequence; identical to SEQ ID NO: 310
  gRNA target oligo

SEQ ID NO: 312 - DNA, 89 bp, Artificial Sequence
  HDV antigenomic ribozyme
gggtcggcatggcatctccacctcctcgcggtccgacctgggcatccgaaggaggacgcacgtccactcggatggctaagggagagcca

SEQ ID NO: 313 - DNA, 86 bp, Artificial Sequence
  HDV genomic ribozyme
ggccggcatggtcccagcctcctcgctggcgccggctgggcaacattccgaggggaccgtcccctcggtaatggcgaatgggaccc

SEQ ID NO: 314 - DNA, 69 bp, Artificial Sequence
  HDV ribozyme
gatggccggcatggtcccagcctcctcgctggcgccggctgggcaacaccttcgggtggcgaatgggac

SEQ ID NO: 315 - DNA, 78 bp, Artificial Sequence
  HDV ribozyme
ttttggccggcatggtcccagcctcctcgctggcgccggctgggcaacatgcttcggcatggcgaatgggaccccggg

SEQ ID NO: 316 - DNA, 78 bp, Artificial Sequence
  Hatchet
cattcctcagaaaatgacaaacctgtggggcgtaagtagatcttcggatctatgatcgtgcagacgttaaaatcaggt

SEQ ID NO: 317 - DNA, 64 bp, Artificial Sequence
  env25 pistol ribozyme (with CUUCGG loop)
cgtggttagggccacgttaaatagttgcttaagccctaagcgttgatcttcggatcaggtgcaa

SEQ ID NO: 318 - DNA, 60 bp, Artificial Sequence
  HH15 Minimal Hammerhead ribozyme
gggagccccgctgatgaggtcggggagaccgaaagggacttcggtccctacggggctccc

SEQ ID NO: 319 - DNA, 52 bp, Artificial Sequence
  sTRSV WT viral Hammerhead ribozyme
cctgtcaccggatgtgctttccggtctgatgagtccgtgaggacgaaacagg

SEQ ID NO: 320 - DNA, 63 bp, Artificial Sequence
  Hammerhead ribozyme
cgactactgatgagtccgtgaggacgaaacgagtaagctcgtctagtcgcgtgtagcgaagca

SEQ ID NO: 321 - DNA, 49 bp, Artificial Sequence
  Hammerhead ribozyme, smaller scar
cgactactgatgagtccgtgaggacgaaacgagtaagctcgtctagtcg

SEQ ID NO: 322 - DNA, 63 bp, Artificial Sequence
  Hammerhead ribozyme, guide scaffold scar
ccagtactgatgagtccgtgaggacgaaacgagtaagctcgtctactggcgcttttatctcat

SEQ ID NO: 323 - DNA, 77 bp, Artificial Sequence
  Twisted Sister 1
acccgcaaggccgacggcatccgccgccgctggtgcaagtccagccgccccttcgggggcgggcgctcatgggtaac

SEQ ID NO: 324 - DNA, 76 bp, Artificial Sequence
  Env-9 Twister
ggcaataaagcggttacaagcccgcaaaaatagcagagtaatgtcgcgatagcgcggcattaatgcagctttattg

SEQ ID NO: 325 - DNA, 36 bp, Artificial Sequence
  RBMX recruiting motif
ccacccccaccaccacccccacccccaccaccaccc

SEQ ID NO: 326 - DNA, 21 bp, Artificial Sequence
  spacer sequence
aagggggctgcgtaccacacc

SEQ ID NO: 327 - DNA, 21 bp, Artificial Sequence
  spacer sequence
aagtgggctgcgtaccacacc

SEQ ID NO: 328 - DNA, 19 bp, Artificial Sequence
  spacer sequence
agcattcttgggtgggagc

SEQ ID NO: 329 - DNA, 19 bp, Artificial Sequence
  spacer sequence
gggtgggagcagccacggg

SEQ ID NO: 330 - DNA, 19 bp, Artificial Sequence
  spacer sequence
ggctgtggcccttgtggct

SEQ ID NO: 331 - DNA, 20 bp, Artificial Sequence
  spacer sequence
gtgccattcatggctgtggc

SEQ ID NO: 332 - DNA, 19 bp, Artificial Sequence
  spacer sequence
cgtgcccttctccaatgcg

SEQ ID NO: 333 - DNA, 19 bp, Artificial Sequence
  spacer sequence
caatgcgacgggtgtggta

SEQ ID NO: 334 - DNA, 19 bp, Artificial Sequence
  spacer sequence
gtacccacagtactacctg

SEQ ID NO: 335 - DNA, 19 bp, Artificial Sequence
  spacer sequence
catgctggccgcctacatg

SEQ ID NO: 336 - DNA, 19 bp, Artificial Sequence
  spacer sequence
ctgatcgtgctgggcttcc

SEQ ID NO: 337 - DNA, 19 bp, Artificial Sequence
  spacer sequence
catcaacttcctcacgctc

SEQ ID NO: 338 - DNA, 19 bp, Artificial Sequence
  spacer sequence
cacgctctacgtcaccgtc

SEQ ID NO: 339 - DNA, 19 bp, Artificial Sequence
  spacer sequence
gtgctggacggtgacgtag

SEQ ID NO: 340 - DNA, 19 bp, Artificial Sequence
  spacer sequence
ggtcctaggtggcttcacc

SEQ ID NO: 341 - DNA, 19 bp, Artificial Sequence
  spacer sequence
cagcaccctctacacctct

SEQ ID NO: 342 - DNA, 19 bp, Artificial Sequence
  spacer sequence
cttcgggcccacaggatgc

SEQ ID NO: 343 - DNA, 19 bp, Artificial Sequence
  spacer sequence
gcccacaggatgcaatttg

SEQ ID NO: 344 - DNA, 19 bp, Artificial Sequence
  spacer sequence
tgccaccctgggcggtatg

SEQ ID NO: 345 - DNA, 19 bp, Artificial Sequence
  spacer sequence
aggggctgcgtaccacacc

SEQ ID NO: 346 - DNA, 21 bp, Artificial Sequence
  spacer sequence
aagtgggctgcgtaccacacc

SEQ ID NO: 347 - DNA, 89 bp, Artificial Sequence
  CasX variant scaffold
actggcgcttttatctgattactttgagagccatcaccagcgactatgtcgtagtgggtaaagctccctcttcggagggagcatcaaag

SEQ ID NO: 348 - DNA, 109 bp, Artificial Sequence
  CasX gRNA
actggcgcttttatctgattactttgagagccatcaccagcgactatgtcgtagtgggtaaagctccctcttcggagggagcatcaaagcagcattcttgggtgggagc

SEQ ID NO: 349 - DNA, 109 bp, Artificial Sequence
  CasX gRNA
actggcgcttttatctgattactttgagagccatcaccagcgactatgtcgtagtgggtaaagctccctcttcggagggagcatcaaagtgggtgggagcagccacggg

SEQ ID NO: 350 - DNA, 109 bp, Artificial Sequence
  CasX gRNA
actggcgcttttatctgattactttgagagccatcaccagcgactatgtcgtagtgggtaaagctccctcttcggagggagcatcaaagtggctgtggcccttgtggct

SEQ ID NO: 351 - DNA, 109 bp, Artificial Sequence
  CasX gRNA
actggcgcttttatctgattactttgagagccatcaccagcgactatgtcgtagtgggtaaagctccctcttcggagggagcatcaaaggtgccattcatggctgtggc

SEQ ID NO: 352 - DNA, 109 bp, Artificial Sequence
  CasX gRNA
actggcgcttttatctgattactttgagagccatcaccagcgactatgtcgtagtgggtaaagctccctcttcggagggagcatcaaagacgtgcccttctccaatgcg

SEQ ID NO: 353 - DNA, 109 bp, Artificial Sequence
  CasX gRNA
actggcgcttttatctgattactttgagagccatcaccagcgactatgtcgtagtgggtaaagctccctcttcggagggagcatcaaagccaatgcgacgggtgtggta

SEQ ID NO: 354 - DNA, 109 bp, Artificial Sequence
  CasX gRNA
actggcgcttttatctgattactttgagagccatcaccagcgactatgtcgtagtgggtaaagctccctcttcggagggagcatcaaagagtacccacagtactacctg

SEQ ID NO: 355 - DNA, 109 bp, Artificial Sequence
  CasX gRNA
actggcgcttttatctgattactttgagagccatcaccagcgactatgtcgtagtgggtaaagctccctcttcggagggagcatcaaagccatgctggccgcctacatg

SEQ ID NO: 356 - DNA, 109 bp, Artificial Sequence
  CasX gRNA
actggcgcttttatctgattactttgagagccatcaccagcgactatgtcgtagtgggtaaagctccctcttcggagggagcatcaaaggctgatcgtgctgggcttcc

SEQ ID NO: 357 - DNA, 109 bp, Artificial Sequence
  CasX gRNA
actggcgcttttatctgattactttgagagccatcaccagcgactatgtcgtagtgggtaaagctccctcttcggagggagcatcaaagccatcaacttcctcacgctc

SEQ ID NO: 358 - DNA, 109 bp, Artificial Sequence
  CasX gRNA
actggcgcttttatctgattactttgagagccatcaccagcgactatgtcgtagtgggtaaagctccctcttcggagggagcatcaaagtcacgctctacgtcaccgtc

SEQ ID NO: 359 - DNA, 109 bp, Artificial Sequence
  CasX gRNA
actggcgcttttatctgattactttgagagccatcaccagcgactatgtcgtagtgggtaaagctccctcttcggagggagcatcaaagtgtgctggacggtgacgtag

SEQ ID NO: 360 - DNA, 109 bp, Artificial Sequence
  CasX gRNA
actggcgcttttatctgattactttgagagccatcaccagcgactatgtcgtagtgggtaaagctccctcttcggagggagcatcaaagtggtcctaggtggcttcacc

SEQ ID NO: 361 - DNA, 109 bp, Artificial Sequence
  CasX gRNA
actggcgcttttatctgattactttgagagccatcaccagcgactatgtcgtagtgggtaaagctccctcttcggagggagcatcaaagccagcaccctctacacctct

SEQ ID NO: 362 - DNA, 109 bp, Artificial Sequence
  CasX gRNA
actggcgcttttatctgattactttgagagccatcaccagcgactatgtcgtagtgggtaaagctccctcttcggagggagcatcaaagtcttcgggcccacaggatgc

SEQ ID NO: 363 - DNA, 109 bp, Artificial Sequence
  CasX gRNA
actggcgcttttatctgattactttgagagccatcaccagcgactatgtcgtagtgggtaaagctccctcttcggagggagcatcaaagggcccacaggatgcaatttg

SEQ ID NO: 364 - DNA, 109 bp, Artificial Sequence
  CasX gRNA
actggcgcttttatctgattactttgagagccatcaccagcgactatgtcgtagtgggtaaagctccctcttcggagggagcatcaaagttgccaccctgggcggtatg

SEQ ID NO: 365 - DNA, 109 bp, Artificial Sequence
  CasX gRNA
actggcgcttttatctgattactttgagagccatcaccagcgactatgtcgtagtgggtaaagctccctcttcggagggagcatcaaagaaggggctgcgtaccacacc

SEQ ID NO: 366 - DNA, 110 bp, Artificial Sequence
  CasX gRNA
actggcgcttttatctgattactttgagagccatcaccagcgactatgtcgtagtgggtaaagctccctcttcggagggagcatcaaagaagtgggctgcgtaccacacc

SEQ ID NO: 367 - DNA, 20 bp, Artificial Sequence
  spacer sequence
aaggggctgcgtaccacacc

SEQ ID NO: 368 - DNA, 20 bp, Artificial Sequence
  spacer sequence
aagtggctgcgtaccacacc

SEQ ID NO: 369 - DNA, 20 bp, Artificial Sequence
  spacer sequence
aagtggctgccctccacaga

SEQ ID NO: 370 - DNA, 20 bp, Artificial Sequence
  spacer sequence
aagtggctgcattctacacc

SEQ ID NO: 371 - DNA, 20 bp, Artificial Sequence
  spacer sequence
aagtggctatgaacaacagc

SEQ ID NO: 372 - DNA, 20 bp, Artificial Sequence
  spacer sequence
aagtggctgccagccacccc

SEQ ID NO: 373 - DNA, 20 bp, Artificial Sequence
  spacer sequence
aagtggctgctgacagcact

SEQ ID NO: 374 - DNA, 20 bp, Artificial Sequence
  spacer sequence
aagtggctgcctccctcagt

SEQ ID NO: 375 - DNA, 20 bp, Artificial Sequence
  spacer sequence
aagtggctgtgaaccatggc

SEQ ID NO: 376 - DNA, 20 bp, Artificial Sequence
  spacer sequence
aagtggctgcttatctaagc

SEQ ID NO: 377 - DNA, 20 bp, Artificial Sequence
  spacer sequence
aaggggctccgcaccacgcc

SEQ ID NO: 378 - DNA, 62 bp, Artificial Sequence
  mouse Rho primer
  misc_feature (34)..(40): n is any nucleotide
acactctttccctacacgacgctcttccgatctnnnnnnngcagccttggtctctgtctacg

SEQ ID NO: 379 - DNA, 57 bp, Artificial Sequence
  mouse Rho primer
gtgactggagttcagacgtgtgctcttccgatctgccccagtctctctgctcatacc

SEQ ID NO: 380 - DNA, 20 bp, Artificial Sequence
  spacer sequence
aagtggctccgcaccacgcc

SEQ ID NO: 381 - RNA, 31 nt, Artificial Sequence
  tracrRNA stem loop
  misc_feature (4)..(28): n is any ribonucleotide
  misc_feature (8)..(28): These individual nucleotides may be absent
uuunnnnnnnnnnnnnnnnnnnnnnnnnuuu

SEQ ID NO: 382 - RNA, 20 nt, Artificial Sequence
  spacer targeting mutant Rho
aaguggcugcguaccacacc

SEQ ID NO: 383 - RNA, 20 nt, Artificial Sequence
  spacer targeting mutant Rho
uaggcaggucuuaggccagg

SEQ ID NO: 384 - RNA, 20 nt, Artificial Sequence
  spacer targeting mutant Rho
uaggccagggccaccuggcu

SEQ ID NO: 385 - RNA, 20 nt, Artificial Sequence
  spacer targeting mutant Rho
uaggccgaggccaccuggcu

SEQ ID NO: 386 - RNA, 20 nt, Artificial Sequence
  spacer targeting mutant Rho
gccuaagaccugccuaggac

SEQ ID NO: 387 - RNA, 20 nt, Artificial Sequence
  spacer targeting mutant Rho
acuuccucaggcucuacguc

SEQ ID NO: 388 - RNA, 20 nt, Artificial Sequence
  spacer targeting mutant Rho
ggcucuacgucaccguccag

SEQ ID NO: 389 - RNA, 20 nt, Artificial Sequence
  spacer targeting mutant Rho
ccaucaacuuccucaggcuc

SEQ ID NO: 390 - RNA, 20 nt, Artificial Sequence
  spacer targeting mutant Rho
ucaggcucuacgucaccguc

SEQ ID NO: 391 - RNA, 20 nt, Artificial Sequence
  spacer targeting mutant Rho
ccaaugcgauggguguggua

SEQ ID NO: 392 - RNA, 20 nt, Artificial Sequence
  spacer targeting mutant Rho
aaugcgaugggugugguacg

SEQ ID NO: 393 - RNA, 20 nt, Artificial Sequence
  spacer targeting mutant Rho
gcagaagcauguaggcggcc

SEQ ID NO: 394 - RNA, 20 nt, Artificial Sequence
  spacer targeting mutant Rho
uggaccuagguggcuucacc

SEQ ID NO: 395 - RNA, 20 nt, Artificial Sequence
  spacer targeting mutant Rho
ucauggaccuagguggcuuc

SEQ ID NO: 396 - RNA, 20 nt, Artificial Sequence
  spacer targeting mutant Rho
augaagaggucagccacggc

SEQ ID NO: 397 - RNA, 20 nt, Artificial Sequence
  spacer targeting mutant Rho
ucaugguccuagauggcuuc

SEQ ID NO: 398 - RNA, 20 nt, Artificial Sequence
  spacer targeting mutant Rho
uagauggcuucaccagcacc

SEQ ID NO: 399 - RNA, 20 nt, Artificial Sequence
  spacer targeting mutant Rho
ugguccuagauggcuucacc

SEQ ID NO: 400 - RNA, 20 nt, Artificial Sequence
  spacer targeting mutant Rho
aggaccaugaagaggucagc

SEQ ID NO: 401 - RNA, 20 nt, Artificial Sequence
  spacer targeting mutant Rho
ucuucuggcccacaggaugc

SEQ ID NO: 402 - RNA, 20 nt, Artificial Sequence
  spacer targeting mutant Rho
ugugggccagaagacgaagu

SEQ ID NO: 403 - RNA, 20 nt, Artificial Sequence
  spacer targeting mutant Rho
ucuggcccacaggaugcaau

SEQ ID NO: 404 - RNA, 20 nt, Artificial Sequence
  spacer targeting mutant Rho
uguggaaucaacuacuacac

SEQ ID NO: 405 - RNA, 20 nt, Artificial Sequence
  spacer targeting mutant Rho
uggccaucgagcuguacgug

SEQ ID NO: 406 - RNA, 20 nt, Artificial Sequence
  spacer targeting mutant Rho
agcuguacgugguggugugu

SEQ ID NO: 407 - RNA, 20 nt, Artificial Sequence
  spacer targeting mutant Rho
gggaugcaccugaggacagg

SEQ ID NO: 408 - RNA, 20 nt, Artificial Sequence
  spacer targeting mutant Rho
ucaggugcauccccgagggc

SEQ ID NO: 409 - RNA, 20 nt, Artificial Sequence
  spacer targeting mutant Rho
ggugcauccccgagggccug

SEQ ID NO: 410 - RNA, 20 nt, Artificial Sequence
  spacer targeting mutant Rho
uguggaaucggcuacuacac

SEQ ID NO: 411 - RNA, 20 nt, Artificial Sequence
  spacer targeting mutant Rho
gcuacuacacgcucaagccg

SEQ ID NO: 412 - RNA, 20 nt, Artificial Sequence
  spacer targeting mutant Rho
ccuucaccauccccaugauu

SEQ ID NO: 413 - RNA, 20 nt, Artificial Sequence
  spacer targeting mutant Rho
acauguucgugguccccuuc

SEQ ID NO: 414 - RNA, 20 nt, Artificial Sequence
  spacer targeting mutant Rho
ugguccccuucaccaucccc

SEQ ID NO: 415 - RNA, 20 nt, Artificial Sequence
  spacer targeting mutant Rho
uggggauggugaaggggacc

SEQ ID NO: 416 - RNA, 20 nt, Artificial Sequence
  spacer targeting mutant Rho
uggccaucgagugguacgug

SEQ ID NO: 417 - RNA, 20 nt, Artificial Sequence
  spacer targeting mutant Rho
agugguacgugguggugugu

SEQ ID NO: 418 - RNA, 20 nt, Artificial Sequence
  spacer targeting mutant Rho
aagacggagacgagcuaggu

SEQ ID NO: 419 - RNA, 20 nt, Artificial Sequence
  spacer targeting mutant Rho
uaggccggggccaccuagcu

SEQ ID NO: 420 - RNA, 20 nt, Artificial Sequence
  spacer targeting mutant Rho
cagcguucuuugccgagagc

SEQ ID NO: 421 - RNA, 20 nt, Artificial Sequence
  spacer targeting mutant Rho
gcaaagaacgcugggauggu

SEQ ID NO: 422 - RNA, 20 nt, Artificial Sequence
  spacer targeting mutant Rho
cggcaaagaacgcugggaug

SEQ ID NO: 423 - RNA, 20 nt, Artificial Sequence
  spacer targeting mutant Rho
uugccgagagcgccgccauc

SEQ ID NO: 424 - RNA, 20 nt, Artificial Sequence
  spacer targeting mutant Rho
uaggcccgggccaccuggcu

SEQ ID NO: 425 - RNA, 20 nt, Artificial Sequence
  spacer targeting mutant Rho
uaggcaggucuuaggcccgg

SEQ ID NO: 426 - RNA, 20 nt, Artificial Sequence
  spacer targeting mutant Rho
ccgagagccugcagugcucg

SEQ ID NO: 427 - RNA, 20 nt, Artificial Sequence
  spacer targeting mutant Rho
acacgagcacugcaggcucu

SEQ ID NO: 428 - RNA, 20 nt, Artificial Sequence
  spacer targeting mutant Rho
ucagguacauccccgagagc

SEQ ID NO: 429 - RNA, 20 nt, Artificial Sequence
  spacer targeting mutant Rho
cggggauguaccugaggaca

SEQ ID NO: 430 - RNA, 20 nt, Artificial Sequence
  spacer targeting mutant Rho
gguacauccccgagagccug

SEQ ID NO: 431 - RNA, 20 nt, Artificial Sequence
  spacer targeting mutant Rho
gcugggugcucuacgccagc

SEQ ID NO: 432 - RNA, 20 nt, Artificial Sequence
  spacer targeting mutant Rho
ugaucugcugggugcucuac

SEQ ID NO: 433 - RNA, 20 nt, Artificial Sequence
  spacer targeting mutant Rho
acgccagcguggcauucuac

SEQ ID NO: 434 - RNA, 20 nt, Artificial Sequence
  spacer targeting mutant Rho
aaauuguauccugugggccc

SEQ ID NO: 435 - RNA, 20 nt, Artificial Sequence
  spacer targeting mutant Rho
ucgggcccacaggauacaau

SEQ ID NO: 436 - RNA, 20 nt, Artificial Sequence
  spacer targeting mutant Rho
ggcccacaggauacaauuug

SEQ ID NO: 437 - RNA, 20 nt, Artificial Sequence
  spacer targeting mutant Rho
ugcugggcuuccgcaucaac

SEQ ID NO: 438 - RNA, 20 nt, Artificial Sequence
  spacer targeting mutant Rho
gcaucaacuuccucacgcuc

SEQ ID NO: 439 - RNA, 20 nt, Artificial Sequence
  spacer targeting mutant Rho
ucaggcccacaggaugcaau

SEQ ID NO: 440 - RNA, 20 nt, Artificial Sequence
  spacer targeting mutant Rho
ucuucaggcccacaggaugc

SEQ ID NO: 441 - RNA, 20 nt, Artificial Sequence
  spacer targeting mutant Rho
ugugggccugaagacgaagu

SEQ ID NO: 442 - RNA, 20 nt, Artificial Sequence
  spacer targeting mutant Rho
uguggaaucuacuacuacac

SEQ ID NO: 443 - RNA, 20 nt, Artificial Sequence
  spacer targeting mutant Rho
acgugcccuucuccagugcg

SEQ ID NO: 444 - RNA, 20 nt, Artificial Sequence
  spacer targeting mutant Rho
cacuggagaagggcacguag

SEQ ID NO: 445 - RNA, 20 nt, Artificial Sequence
  spacer targeting mutant Rho
ccagugcgacggguguggua

SEQ ID NO: 446 - RNA, 20 nt, Artificial Sequence
  spacer targeting mutant Rho
agugcgacgggugugguacg

SEQ ID NO: 447 - RNA, 20 nt, Artificial Sequence
  spacer targeting mutant Rho
acagguucgugguccacuuc

SEQ ID NO: 448 - RNA, 20 nt, Artificial Sequence
  spacer targeting mutant Rho
ucuacagguucgugguccac

SEQ ID NO: 449 - RNA, 20 nt, Artificial Sequence
  spacer targeting mutant Rho
uuugucaucuacagguucgu

SEQ ID NO: 450 - RNA, 20 nt, Artificial Sequence
  spacer targeting mutant Rho
ugaccaucccagaguucuuu

SEQ ID NO: 451 - RNA, 20 nt, Artificial Sequence
  spacer targeting mutant Rho
gggauggucaugaagauggg

SEQ ID NO: 452 - RNA, 20 nt, Artificial Sequence
  spacer targeting mutant Rho
uggcaaagaacucugggaug

SEQ ID NO: 453 - RNA, 20 nt, Artificial Sequence
  spacer targeting mutant Rho
cagaguucuuugccaagagc

SEQ ID NO: 454 - RNA, 20 nt, Artificial Sequence
  spacer targeting mutant Rho
ucaugaccaucccagaguuc

SEQ ID NO: 455 - RNA, 20 nt, Artificial Sequence
  spacer targeting mutant Rho
ccuaggaccaugaagagguc

SEQ ID NO: 456 - RNA, 20 nt, Artificial Sequence
  spacer targeting mutant Rho
uaggugacuucaccagcacc

SEQ ID NO: 457 - RNA, 20 nt, Artificial Sequence
  spacer targeting mutant Rho
ucaugguccuaggugacuuc

SEQ ID NO: 458 - RNA, 20 nt, Artificial Sequence
  spacer targeting mutant Rho
ugguccuaggugacuucacc

SEQ ID NO: 459 - RNA, 20 nt, Artificial Sequence
  spacer targeting mutant Rho
gcuucgggaagaaccaugcc

SEQ ID NO: 460 - RNA, 20 nt, Artificial Sequence
  spacer targeting mutant Rho
cgaagcggaaguugcucaug

SEQ ID NO: 461 - RNA, 20 nt, Artificial Sequence
  spacer targeting mutant Rho
ucccgaagcggaaguugcuc

SEQ ID NO: 462 - RNA, 20 nt, Artificial Sequence
  spacer targeting mutant Rho
ggaagaaccaugccaucaug

SEQ ID NO: 463 - RNA, 20 nt, Artificial Sequence
  spacer targeting mutant Rho
ugcugcgcuuccccaucaac

SEQ ID NO: 464 - RNA, 20 nt, Artificial Sequence
  spacer targeting mutant Rho
gcugaucgugcugcgcuucc

SEQ ID NO: 465 - RNA, 20 nt, Artificial Sequence
  spacer targeting mutant Rho
uccaaauugcauccuguggg

SEQ ID NO: 466 - RNA, 20 nt, Artificial Sequence
  spacer targeting mutant Rho
augacccaggugaaggcaac

SEQ ID NO: 467 - RNA, 20 nt, Artificial Sequence
  spacer targeting mutant Rho
uggagcuggccugcgccgca

SEQ ID NO: 468 - RNA, 20 nt, Artificial Sequence
  spacer targeting mutant Rho
ccugggucauggagcuggcc

SEQ ID NO: 469 - RNA, 20 nt, Artificial Sequence
  spacer targeting mutant Rho
cucgccggcugguccaggua

SEQ ID NO: 470 - RNA, 20 nt, Artificial Sequence
  spacer targeting mutant Rho
ugaucugggugcccuacgcc

SEQ ID NO: 471 - RNA, 20 nt, Artificial Sequence
  spacer targeting mutant Rho
cuuuccugaucugggugccc

SEQ ID NO: 472 - RNA, 20 nt, Artificial Sequence
  spacer targeting mutant Rho
ucgcuuuccugaucugggug

SEQ ID NO: 473 - RNA, 20 nt, Artificial Sequence
  spacer targeting mutant Rho
gggugcccuacgccagcgug

SEQ ID NO: 474 - RNA, 20 nt, Artificial Sequence
  spacer targeting mutant Rho
uaggccggggccagcuggcu

SEQ ID NO: 475 - RNA, 20 nt, Artificial Sequence
  spacer targeting mutant Rho
uaggccugggccaccuggcu

SEQ ID NO: 476 - RNA, 20 nt, Artificial Sequence
  spacer targeting mutant Rho
uaggcaggucuuaggccugg

SEQ ID NO: 477 - RNA, 20 nt, Artificial Sequence
  spacer targeting mutant Rho
ccagcauccucuacaccucu

SEQ ID NO: 478 - RNA, 20 nt, Artificial Sequence
  spacer targeting mutant Rho
ucuacaccucucugcaugga

SEQ ID NO: 479 - RNA, 20 nt, Artificial Sequence
  spacer targeting mutant Rho
aaggcgcugcguaccacacc

SEQ ID NO: 480 - RNA, 20 nt, Artificial Sequence
  spacer targeting mutant Rho
ggcucgucuccgucuuggac

SEQ ID NO: 481 - RNA, 20 nt, Artificial Sequence
  spacer targeting mutant Rho
uaggccggggccaucuggcu

SEQ ID NO: 482 - RNA, 20 nt, Artificial Sequence
  spacer targeting mutant Rho
ccuaggucauggcgcuggcc

SEQ ID NO: 483 - RNA, 20 nt, Artificial Sequence
  spacer targeting mutant Rho
acuuccucacgcucuaaguc

SEQ ID NO: 484 - RNA, 20 nt, Artificial Sequence
  spacer targeting mutant Rho
cgcucuaagucaccguccag

SEQ ID NO: 485 - RNA, 20 nt, Artificial Sequence
  spacer targeting mutant Rho
aagucaccguccagcacaag

SEQ ID NO: 486 - RNA, 20 nt, Artificial Sequence
  spacer targeting mutant Rho
ugugcuggacggugacuuag

SEQ ID NO: 487 - RNA, 20 nt, Artificial Sequence
  spacer targeting mutant Rho
ucacgcucuaagucaccguc

SEQ ID NO: 488 - RNA, 20 nt, Artificial Sequence
  spacer targeting mutant Rho
ccagcugguccagguaaugg

SEQ ID NO: 489 - RNA, 20 nt, Artificial Sequence
  spacer targeting mutant Rho
auucuacacgagcacugcag

SEQ ID NO: 490 - RNA, 20 nt, Artificial Sequence
  spacer targeting mutant Rho
uguagaaucgacuacuacac

SEQ ID NO: 491 - RNA, 20 nt, Artificial Sequence
  spacer targeting mutant Rho
ucacccaguucuugccgcag

SEQ ID NO: 492 - RNA, 20 nt, Artificial Sequence
  spacer targeting mutant Rho
gcugcggcaagaacugggug

SEQ ID NO: 493 - RNA, 20 nt, Artificial Sequence
  spacer targeting mutant Rho
cccaguucuugccgcagcag

SEQ ID NO: 494 - RNA, 20 nt, Artificial Sequence
  spacer targeting mutant Rho
ucgucacccaguucuugccg

SEQ ID NO: 495 - RNA, 20 nt, Artificial Sequence
  spacer targeting mutant Rho
gguacauccccaagggccug

SEQ ID NO: 496 - RNA, 20 nt, Artificial Sequence
  spacer targeting mutant Rho
ucagguacauccccaagggc

SEQ ID NO: 497 - RNA, 20 nt, Artificial Sequence
  spacer targeting mutant Rho
ccaagggccugcagugcucg

SEQ ID NO: 498 - RNA, 20 nt, Artificial Sequence
  spacer targeting mutant Rho
agcuuuacgugguggugugu

SEQ ID NO: 499 - RNA, 20 nt, Artificial Sequence
  spacer targeting mutant Rho
uggccaucgagcuuuacgug

SEQ ID NO: 500 - RNA, 20 nt, Artificial Sequence
  spacer targeting mutant Rho
uugccacccuggcgguauga

SEQ ID NO: 501 - RNA, 20 nt, Artificial Sequence
  spacer targeting mutant Rho
uaccgccaggguggcaaaga

SEQ ID NO: 502 - RNA, 20 nt, Artificial Sequence
  spacer targeting mutant Rho
uggucccagguggcuucacc

SEQ ID NO: 503 - RNA, 20 nt, Artificial Sequence
  spacer targeting mutant Rho
ucauggucccagguggcuuc

SEQ ID NO: 504 - RNA, 20 nt, Artificial Sequence
  spacer targeting mutant Rho
cagguggcuucaccagcacc

SEQ ID NO: 505 - RNA, 20 nt, Artificial Sequence
  spacer targeting mutant Rho
ccugggucauggugcuggcc

SEQ ID NO: 506 - RNA, 20 nt, Artificial Sequence
  spacer targeting mutant Rho
uggugcuggccugcgccgca

SEQ ID NO: 507 - RNA, 20 nt, Artificial Sequence
  spacer targeting mutant Rho
ggaacgcaugcucaccacca

SEQ ID NO: 508 - RNA, 20 nt, Artificial Sequence
  spacer targeting mutant Rho
aguuccggaacgcaugcuca

SEQ ID NO: 509 - RNA, 20 nt, Artificial Sequence
  spacer targeting mutant Rho
gccagguaguaccgugggua

SEQ ID NO: 510 - RNA, 20 nt, Artificial Sequence
  spacer targeting mutant Rho
aguacccacgguacuaccug

SEQ ID NO: 511 - RNA, 20 nt, Artificial Sequence
  spacer targeting mutant Rho
cggccaucgagcgguacgug

SEQ ID NO: 512 - RNA, 20 nt, Artificial Sequence
  spacer targeting mutant Rho
auggccgggaccaccaagga

SEQ ID NO: 513 - RNA, 20 nt, Artificial Sequence
  spacer targeting mutant Rho
uugguggucccggccaucga

SEQ ID NO: 514 - RNA, 20 nt, Artificial Sequence
  spacer targeting mutant Rho
uugccaagagggccgccauc

SEQ ID NO: 515 - RNA, 20 nt, Artificial Sequence
  spacer targeting mutant Rho
acacgagcacugccaggccc

SEQ ID NO: 516 - RNA, 20 nt, Artificial Sequence
  spacer targeting mutant Rho
ccgagggccuggcagugcuc

SEQ ID NO: 517 - RNA, 20 nt, Artificial Sequence
  spacer targeting mutant Rho
aaugcgacggaugugguacg

SEQ ID NO: 518 - RNA, 20 nt, Artificial Sequence
  spacer targeting mutant Rho
ccaaugcgacggauguggua

SEQ ID NO: 519 - RNA, 20 nt, Artificial Sequence
  spacer targeting mutant Rho
gucgcauuggagaagggcac

SEQ ID NO: 520 - RNA, 20 nt, Artificial Sequence
  spacer targeting mutant Rho
acaccucucugcauguauac

SEQ ID NO: 521 - RNA, 20 nt, Artificial Sequence
  spacer targeting mutant Rho
cugcauguauacuucgucuu

SEQ ID NO: 522 - RNA, 20 nt, Artificial Sequence
  spacer targeting mutant Rho
gcauguauacuucgucuucg

SEQ ID NO: 523 - RNA, 20 nt, Artificial Sequence
  spacer targeting mutant Rho
gugauguaccugaggacagg

SEQ ID NO: 524 - RNA, 20 nt, Artificial Sequence
  spacer targeting mutant Rho
gguacaucaccgagggccug

SEQ ID NO: 525 - RNA, 20 nt, Artificial Sequence
  spacer targeting mutant Rho
ucagguacaucaccgagggc

SEQ ID NO: 526 - RNA, 20 nt, Artificial Sequence
  spacer targeting mutant Rho
uggccaucgagcgguaagug

SEQ ID NO: 527 - RNA, 20 nt, Artificial Sequence
  spacer targeting mutant Rho
agcgguaagugguggugugu

SEQ ID NO: 528 - RNA, 20 nt, Artificial Sequence
  spacer targeting mutant Rho
ucgggcccacaggaggcaau

SEQ ID NO: 529 - RNA, 20 nt, Artificial Sequence
  spacer targeting mutant Rho
aaauugccuccugugggccc

SEQ ID NO: 530 - RNA, 20 nt, Artificial Sequence
  spacer targeting mutant Rho
ucuucgggcccacaggaggc

SEQ ID NO: 531 - RNA, 20 nt, Artificial Sequence
  spacer targeting mutant Rho
ggcccacaggaggcaauuug

SEQ ID NO: 532 - RNA, 20 nt, Artificial Sequence
  spacer targeting mutant Rho
uaggccggggccaacuggcu

SEQ ID NO: 533 - RNA, 20 nt, Artificial Sequence
  spacer targeting mutant Rho
agcacaagaagcggcgcacg

SEQ ID NO: 534 - RNA, 20 nt, Artificial Sequence
  spacer targeting mutant Rho
ugguccuacguggcuucacc

SEQ ID NO: 535 - RNA, 20 nt, Artificial Sequence
  spacer targeting mutant Rho
ucaugguccuacguggcuuc

SEQ ID NO: 536 - RNA, 20 nt, Artificial Sequence
  spacer targeting mutant Rho
uacguggcuucaccagcacc

SEQ ID NO: 537 - RNA, 20 nt, Artificial Sequence
  spacer targeting mutant Rho
ggcguagggcacccagcaga

SEQ ID NO: 538 - RNA, 20 nt, Artificial Sequence
  spacer targeting mutant Rho
acaaccgugucaucuauauc

SEQ ID NO: 539 - RNA, 20 nt, Artificial Sequence
  spacer targeting mutant Rho
ucaugauauagaugacacgg

SEQ ID NO: 540 - RNA, 20 nt, Artificial Sequence
  spacer targeting mutant Rho
ugauauagaugacacgguug

SEQ ID NO: 541 - RNA, 20 nt, Artificial Sequence
  spacer targeting mutant Rho
auaucaugaugaacaaguag

SEQ ID NO: 542 - RNA, 20 nt, Artificial Sequence
  spacer targeting mutant Rho
ugaugaacaaguaggugccu

SEQ ID NO: 543 - RNA, 20 nt, Artificial Sequence
  spacer targeting mutant Rho
aaggcgacgggugugguacg

SEQ ID NO: 544 - RNA, 20 nt, Artificial Sequence
  spacer targeting mutant Rho
ccaaggcgacggguguggua

SEQ ID NO: 545 - RNA, 20 nt, Artificial Sequence
  spacer targeting mutant Rho
ccuuggagaagggcacguag

SEQ ID NO: 546 - RNA, 20 nt, Artificial Sequence
  spacer targeting mutant Rho
acgugcccuucuccaaggcg

SEQ ID NO: 547 - RNA, 20 nt, Artificial Sequence
  spacer targeting mutant Rho
ugcccacaggaugcaauuug

SEQ ID NO: 548 - RNA, 20 nt, Artificial Sequence
  spacer targeting mutant Rho
ucuucgugcccacaggaugc

SEQ ID NO: 549 - RNA, 20 nt, Artificial Sequence
  spacer targeting mutant Rho
ucgugcccacaggaugcaau

SEQ ID NO: 550 - RNA, 20 nt, Artificial Sequence
  spacer targeting mutant Rho
ugugggcacgaagacgaagu

SEQ ID NO: 551 - RNA, 20 nt, Artificial Sequence
  spacer targeting mutant Rho
acaccagcacugcaggcccu

SEQ ID NO: 552 - RNA, 20 nt, Artificial Sequence
  spacer targeting mutant Rho
auuccacaccagcacugcag

SEQ ID NO: 553 - RNA, 20 nt, Artificial Sequence
  spacer targeting mutant Rho
agccucuugccuuccuguuc

SEQ ID NO: 554 - RNA, 20 nt, Artificial Sequence
  spacer targeting mutant Rho
ggaacaggaaggcaagaggc

SEQ ID NO: 555 - RNA, 20 nt, Artificial Sequence
  spacer targeting mutant Rho
uguuccggaacugcaugcuc

SEQ ID NO: 556 - RNA, 20 nt, Artificial Sequence
  spacer targeting mutant Rho
ugccuuccuguuccggaacu

SEQ ID NO: 557 - RNA, 20 nt, Artificial Sequence
  spacer targeting mutant Rho
uaggccggggccgccuggcu

SEQ ID NO: 558 - RNA, 20 nt, Artificial Sequence
  spacer targeting mutant Rho
cccaguguucuugccgcagc

SEQ ID NO: 559 - RNA, 20 nt, Artificial Sequence
  spacer targeting mutant Rho
gcugcggcaagaacacuggg

SEQ ID NO: 560 - RNA, 20 nt, Artificial Sequence
  spacer targeting mutant Rho
ucgucacccaguguucuugc

SEQ ID NO: 561 - RNA, 20 nt, Artificial Sequence
  spacer targeting mutant Rho
ucacccaguguucuugccgc

SEQ ID NO: 562 - RNA, 20 nt, Artificial Sequence
  spacer targeting mutant Rho
ugugaaaucgacuacuacac

SEQ ID NO: 563 - RNA, 20 nt, Artificial Sequence
  spacer targeting mutant Rho
auuucacacgagcacugcag

SEQ ID NO: 564 - RNA, 20 nt, Artificial Sequence
  spacer targeting mutant Rho
cacgagcacugcaggcccuc

SEQ ID NO: 565 - RNA, 20 nt, Artificial Sequence
  spacer targeting mutant Rho
uggcgcuggucugcgccgca

SEQ ID NO: 566 - RNA, 20 nt, Artificial Sequence
  spacer targeting mutant Rho
gcgccgcacccccacucgcc

SEQ ID NO: 567 - RNA, 20 nt, Artificial Sequence
  spacer targeting mutant Rho
ggcuugagcguguaguaguc

SEQ ID NO: 568 - RNA, 20 nt, Artificial Sequence
  spacer targeting mutant Rho
cugcagugcucguguggaau

SEQ ID NO: 569 - RNA, 20 nt, Artificial Sequence
  spacer targeting mutant Rho
uuguugaccuccggcuugag

SEQ ID NO: 570 - RNA, 20 nt, Artificial Sequence
  spacer targeting mutant Rho
acacgagcacugcagugaag

SEQ ID NO: 571 - RNA, 20 nt, Artificial Sequence
  spacer targeting mutant Rho
acuucacugcagugcucgug

SEQ ID NO: 572 - RNA, 20 nt, Artificial Sequence
  spacer targeting mutant Rho
acuacuacacgcucaagccg

SEQ ID NO: 573 - RNA, 20 nt, Artificial Sequence
  spacer targeting mutant Rho
ugguccacuucacugcagug

SEQ ID NO: 574 - RNA, 20 nt, Artificial Sequence
  spacer targeting mutant Rho
agccggaggucaacaacgag

SEQ ID NO: 575 - RNA, 20 nt, Artificial Sequence
  spacer targeting mutant Rho
ucuacauguucgugguccac

SEQ ID NO: 576 - RNA, 20 nt, Artificial Sequence
  spacer targeting mutant Rho
acaacgagucuuuugucauc

SEQ ID NO: 577 - RNA, 20 nt, Artificial Sequence
  spacer targeting mutant Rho
acauguucgugguccacuuc

SEQ ID NO: 578 - RNA, 20 nt, Artificial Sequence
  spacer targeting mutant Rho
uguggaaucgacuacuacac

SEQ ID NO: 579 - RNA, 20 nt, Artificial Sequence
  spacer targeting mutant Rho
uuugucaucuacauguucgu

SEQ ID NO: 580 - RNA, 20 nt, Artificial Sequence
  spacer targeting mutant Rho
uauggaaucgacuacuacac

SEQ ID NO: 581 - RNA, 20 nt, Artificial Sequence
  spacer targeting mutant Rho
auuccauacgagcacugcag

SEQ ID NO: 582 - RNA, 20 nt, Artificial Sequence
  spacer targeting mutant Rho
auacgagcacugcaggcccu

SEQ ID NO: 583 - RNA, 20 nt, Artificial Sequence
  targeting sequence with ATCN PAM
ucagaccucauucgaguuug

SEQ ID NO: 584 - RNA, 20 nt, Artificial Sequence
  targeting sequence with ATCN PAM
guguucguuuccuagcacca

SEQ ID NO: 585 - RNA, 20 nt, Artificial Sequence
  targeting sequence with ATCN PAM
ucagggugaugggacaugag

SEQ ID NO: 586 - RNA, 20 nt, Artificial Sequence
  targeting sequence with ATCN PAM
gggugaugggacaugaggcu

SEQ ID NO: 587 - RNA, 20 nt, Artificial Sequence
  targeting sequence with ATCN PAM
cccugaugauuuucaagugc

SEQ ID NO: 588 - RNA, 20 nt, Artificial Sequence
  targeting sequence with ATCN PAM
gccagcgcaguccaaaaaga

SEQ ID NO: 589 - RNA, 20 nt, Artificial Sequence
  targeting sequence with ATCN PAM
ugcucuuuaaaaaucacaua

SEQ ID NO: 590 - RNA, 20 nt, Artificial Sequence
  targeting sequence with ATCN PAM
cauagcaaaacuagaggcaa

SEQ ID NO: 591 - RNA, 20 nt, Artificial Sequence
  targeting sequence with ATCN PAM
caggaacugaacugcucaau

SEQ ID NO: 592 - RNA, 20 nt, Artificial Sequence
  targeting sequence with ATCN PAM
uagcacugcacuccagccug

SEQ ID NO: 593 - RNA, 20 nt, Artificial Sequence
  targeting sequence with ATCN PAM
cggcucacugcaagcuccgc

SEQ ID NO: 594 - RNA, 20 nt, Artificial Sequence
  targeting sequence with ATCN PAM
agugagugcggggugcuggg

SEQ ID NO: 595 - RNA, 20 nt, Artificial Sequence
  targeting sequence with ATCN PAM
uggaggcaaaguccaucuag

SEQ ID NO: 596 - RNA, 20 nt, Artificial Sequence
  targeting sequence with ATCN PAM
gguaucugccuaugagagag

SEQ ID NO: 597 - RNA, 20 nt, Artificial Sequence
  targeting sequence with ATCN PAM
gccuaugagagaguuguguc

SEQ ID NO: 598 - RNA, 20 nt, Artificial Sequence
  targeting sequence with ATCN PAM
ggugagacacaacucucuca

SEQ ID NO: 599 - RNA, 20 nt, Artificial Sequence
  targeting sequence with ATCN PAM
uuuguguaucauucccaaga

SEQ ID NO: 600 - RNA, 20 nt, Artificial Sequence
  targeting sequence with ATCN PAM
uucccaagaggugaaacaua

SEQ ID NO: 601 - RNA, 20 nt, Artificial Sequence
  targeting sequence with ATCN PAM
aaggcucugaaguuugcugu

SEQ ID NO: 602 - RNA, 20 nt, Artificial Sequence
  targeting sequence with ATCN PAM
uuccugccuuugccacagca

SEQ ID NO: 603 - RNA, 20 nt, Artificial Sequence
  targeting sequence with ATCN PAM
ggugcuuugagaaagaccau

SEQ ID NO: 604 - RNA, 20 nt, Artificial Sequence
  targeting sequence with ATCN PAM
uuaaauacuaugauggcaaa

SEQ ID NO: 605 - RNA, 20 nt, Artificial Sequence
  targeting sequence with ATCN PAM
uaguauuuaaagauggucuu

SEQ ID NO: 606 - RNA, 20 nt, Artificial Sequence
  targeting sequence with ATCN PAM
cuguaugccguuaaaauaca

SEQ ID NO: 607 - RNA, 20 nt, Artificial Sequence
  targeting sequence with ATCN PAM
gauuuuacacauuuauuucu

SEQ ID NO: 608 - RNA, 20 nt, Artificial Sequence
  targeting sequence with ATCN PAM
gauuuguucuuuuuguauuu

SEQ ID NO: 609 - RNA, 20 nt, Artificial Sequence
  targeting sequence with ATCN PAM
gaaauaaauguguaaaaucu

SEQ ID NO: 610 - RNA, 20 nt, Artificial Sequence
  targeting sequence with ATCN PAM
ucacugcugcgugcaccaca

SEQ ID NO: 611 - RNA, 20 nt, Artificial Sequence
  targeting sequence with ATCN PAM
gcaagaaggguauuccagag

SEQ ID NO: 612 - RNA, 20 nt, Artificial Sequence
  targeting sequence with ATCN PAM
cuccuacuccauugagguca

SEQ ID NO: 613 - RNA, 20 nt, Artificial Sequence
  targeting sequence with ATCN PAM
aaugugaccucaauggagua

SEQ ID NO: 614 - RNA, 20 nt, Artificial Sequence
  targeting sequence with ATCN PAM
ugugucaucuaaugugaccu

SEQ ID NO: 615 - RNA, 20 nt, Artificial Sequence
  targeting sequence with ATCN PAM
ugcuucucuguccucugggc

SEQ ID NO: 616 - RNA, 20 nt, Artificial Sequence
  targeting sequence with ATCN PAM
augaggcguugcugacaauu

SEQ ID NO: 617 - RNA, 20 nt, Artificial Sequence
  targeting sequence with ATCN PAM
agugagaaggucuccuuucc

SEQ ID NO: 618 - RNA, 20 nt, Artificial Sequence
  targeting sequence with ATCN PAM
cgguuagaauuccagguagg

SEQ ID NO: 619 - RNA, 20 nt, Artificial Sequence
  targeting sequence with ATCN PAM
accucacaauguuuccauca

SEQ ID NO: 620 - RNA, 20 nt, Artificial Sequence
  targeting sequence with ATCN PAM
auucaauuaauuagagugca

SEQ ID NO: 621 - RNA, 20 nt, Artificial Sequence
  targeting sequence with ATCN PAM
cugaagcugcgcucuucugu

SEQ ID NO: 622 - RNA, 20 nt, Artificial Sequence
  targeting sequence with ATCN PAM
uuauaucucugaagcugcgc

SEQ ID NO: 623 - RNA, 20 nt, Artificial Sequence
  targeting sequence with ATCN PAM
ugucuucuucaucuuuauau

SEQ ID NO: 624 - RNA, 20 nt, Artificial Sequence
  targeting sequence with ATCN PAM
gagcagacaccuacucugca

SEQ ID NO: 625 - RNA, 20 nt, Artificial Sequence
  targeting sequence with ATCN PAM
aaucauccauuuaugggagc

SEQ ID NO: 626 - RNA, 20 nt, Artificial Sequence
  targeting sequence with ATCN PAM
uccauuuaugggagcuuccu

SEQ ID NO: 627 - RNA, 20 nt, Artificial Sequence
  targeting sequence with ATCN PAM
auuuaugggagcuuccuggg

SEQ ID NO: 628 - RNA, 20 nt, Artificial Sequence
  targeting sequence with ATCN PAM
ccaggccucacagagggccu

SEQ ID NO: 629 - RNA, 20 nt, Artificial Sequence
  targeting sequence with ATCN PAM
aggucgaggguucccagcag

SEQ ID NO: 630 - RNA, 20 nt, Artificial Sequence
  targeting sequence with ATCN PAM
ugucuggacaggguuugcug

SEQ ID NO: 631 - RNA, 20 nt, Artificial Sequence
  targeting sequence with ATCN PAM
gagcagcagggacagagggg

SEQ ID NO: 632 - RNA, 20 nt, Artificial Sequence
  targeting sequence with ATCN PAM
ccucugucccugcugcucug

SEQ ID NO: 633 - RNA, 20 nt, Artificial Sequence
  targeting sequence with ATCN PAM
ccucugacccuggaucagag

SEQ ID NO: 634 - RNA, 20 nt, Artificial Sequence
  targeting sequence with ATCN PAM
agggucagaggagaugagcg

SEQ ID NO: 635 - RNA, 20 nt, Artificial Sequence
  targeting sequence with ATCN PAM
gagcccgagaaagcaccugg

SEQ ID NO: 636 - RNA, 20 nt, Artificial Sequence
  targeting sequence with ATCN PAM
aggugcuuucucgggcucug

SEQ ID NO: 637 - RNA, 20 nt, Artificial Sequence
  targeting sequence with ATCN PAM
ucacccugucuagccuguug

SEQ ID NO: 638 - RNA, 20 nt, Artificial Sequence
  targeting sequence with ATCN PAM
agcucaggcauggaaggguu

SEQ ID NO: 639 - RNA, 20 nt, Artificial Sequence
  targeting sequence with ATCN PAM
cagcccagcgaugugcuuau

SEQ ID NO: 640 - RNA, 20 nt, Artificial Sequence
  targeting sequence with ATCN PAM
uaaaucagucuuucccuaug

SEQ ID NO: 641 - RNA, 20 nt, Artificial Sequence
  targeting sequence with ATCN PAM
gucuuucccuaugucuccuc

SEQ ID NO: 642 - RNA, 20 nt, Artificial Sequence
  targeting sequence with ATCN PAM
uuccuggccauguggccuug

SEQ ID NO: 643 - RNA, 20 nt, Artificial Sequence
  targeting sequence with ATCN PAM
gcagcagggggaaugggagg

SEQ ID NO: 644 - RNA, 20 nt, Artificial Sequence
  targeting sequence with ATCN PAM
caggcguaggagggugaguu

SEQ ID NO: 645 - RNA, 20 nt, Artificial Sequence
  targeting sequence with ATCN PAM
cauuggaucgucccaagaaa

SEQ ID NO: 646 - RNA, 20 nt, Artificial Sequence
  targeting sequence with ATCN PAM
aaugagaucacaggcguagg

SEQ ID NO: 647 - RNA, 20 nt, Artificial Sequence
  targeting sequence with ATCN PAM
ucccaagaaauuaucauuuc

SEQ ID NO: 648 - RNA, 20 nt, Artificial Sequence
  targeting sequence with ATCN PAM
uuucuaacuuagaaaugagg

SEQ ID NO: 649 - RNA, 20 nt, Artificial Sequence
  targeting sequence with ATCN PAM
ugccucauuucuaagugugu

SEQ ID NO: 650 - RNA, 20 nt, Artificial Sequence
  targeting sequence with ATCN PAM
cagcauugcuugaggccaag

SEQ ID NO: 651 - RNA, 20 nt, Artificial Sequence
  targeting sequence with ATCN PAM
cacaugcaccaaacacacau

SEQ ID NO: 652 - RNA, 20 nt, Artificial Sequence
  targeting sequence with ATCN PAM
guguuuguguggugugcgug

SEQ ID NO: 653 - RNA, 20 nt, Artificial Sequence
  targeting sequence with ATCN PAM
cgugggggcugcuucuccac

SEQ ID NO: 654 - RNA, 20 nt, Artificial Sequence
  targeting sequence with ATCN PAM
cagcugcuugcagagguccu

SEQ ID NO: 655 - RNA, 20 nt, Artificial Sequence
  targeting sequence with ATCN PAM
gagucaaccgaagcugccca

SEQ ID NO: 656 - RNA, 20 nt, Artificial Sequence
  targeting sequence with ATCN PAM
ccagugacuccgccugccac

SEQ ID NO: 657 - RNA, 20 nt, Artificial Sequence
  targeting sequence with ATCN PAM
uccccgcagcccagcucuga

SEQ ID NO: 658 - RNA, 20 nt, Artificial Sequence
  targeting sequence with ATCN PAM
cggcucacugcaaccuccgc

SEQ ID NO: 659 - RNA, 20 nt, Artificial Sequence
  targeting sequence with ATCN PAM
cuugaacccaggaggcggag

SEQ ID NO: 660 - RNA, 20 nt, Artificial Sequence
  targeting sequence with ATCN PAM
uuucaccucggccuccugag

SEQ ID NO: 661 - RNA, 20 nt, Artificial Sequence
  targeting sequence with ATCN PAM
cuguguuuuggacaaugaaa

SEQ ID NO: 662 - RNA, 20 nt, Artificial Sequence
  targeting sequence with ATCN PAM
ggagcagccacugccaucaa

SEQ ID NO: 663 - RNA, 20 nt, Artificial Sequence
  targeting sequence with ATCN PAM
augguauaucagaaucaugu

SEQ ID NO: 664 - RNA, 20 nt, Artificial Sequence
  targeting sequence with ATCN PAM
gaaucauguugaaauacggu

SEQ ID NO: 665 - RNA, 20 nt, Artificial Sequence
  targeting sequence with ATCN PAM
uguugaaauacgguguucua

SEQ ID NO: 666 - RNA, 20 nt, Artificial Sequence
  targeting sequence with ATCN PAM
uguguuucauuccuuuguua

SEQ ID NO: 667 - RNA, 20 nt, Artificial Sequence
  targeting sequence with ATCN PAM
aaguaccaaaaucagggauu

SEQ ID NO: 668 - RNA, 20 nt, Artificial Sequence
  targeting sequence with ATCN PAM
gggauuuauaaaagagagaa

SEQ ID NO: 669 - RNA, 20 nt, Artificial Sequence
  targeting sequence with ATCN PAM
cugauuuugguacuucgauc

SEQ ID NO: 670 - RNA, 20 nt, Artificial Sequence
  targeting sequence with ATCN PAM
guuaccccuuauauaguuga

SEQ ID NO: 671 - RNA, 20 nt, Artificial Sequence
  targeting sequence with ATCN PAM
uucaacuauauaagggguaa

SEQ ID NO: 672 - RNA, 20 nt, Artificial Sequence
  targeting sequence with ATCN PAM
gcauagggugccauucaccu

SEQ ID NO: 673 - RNA, 20 nt, Artificial Sequence
  targeting sequence with ATCN PAM
cuucaucugcauagggugcc

SEQ ID NO: 674 - RNA, 20 nt, Artificial Sequence
  targeting sequence with ATCN PAM
aaagggaaacaccugggucu

SEQ ID NO: 675 - RNA, 20 nt, Artificial Sequence
  targeting sequence with ATCN PAM
agcuuugggaagucagcaca

SEQ ID NO: 676 - RNA, 20 nt, Artificial Sequence
  targeting sequence with ATCN PAM
gaggccaauuugugcugacu

SEQ ID NO: 677 - RNA, 20 nt, Artificial Sequence
  targeting sequence with ATCN PAM
aggaaaaacaccaaggucug

SEQ ID NO: 678 - RNA, 20 nt, Artificial Sequence
  targeting sequence with ATCN PAM
ugccucauugcuacagaguc

SEQ ID NO: 679 - RNA, 20 nt, Artificial Sequence
  targeting sequence with ATCN PAM
ugggcauaaggggucagacu

SEQ ID NO: 680 - RNA, 20 nt, Artificial Sequence
  targeting sequence with ATCN PAM
uuuaguuuuaguauugaagg

SEQ ID NO: 681 - RNA, 20 nt, Artificial Sequence
  targeting sequence with ATCN PAM
uugaaauuuccagucccauc

SEQ ID NO: 682 - RNA, 20 nt, Artificial Sequence
  targeting sequence with ATCN PAM
acauuugggaaccauuagca

SEQ ID NO: 683 - RNA, 20 nt, Artificial Sequence
  targeting sequence with ATCN PAM
cuccuggcuuccugggcagg

SEQ ID NO: 684 - RNA, 20 nt, Artificial Sequence
  targeting sequence with ATCN PAM
ucaacaaggaaaggccuugc

SEQ ID NO: 685 - RNA, 20 nt, Artificial Sequence
  targeting sequence with ATCN PAM
gccuuagguucccucccucc

SEQ ID NO: 686 - RNA, 20 nt, Artificial Sequence
  targeting sequence with ATCN PAM
aaaggaaaaccucaccucuu

SEQ ID NO: 687 - RNA, 20 nt, Artificial Sequence
  targeting sequence with ATCN PAM
uuuuguuacuugggugugaa

SEQ ID NO: 688 - RNA, 20 nt, Artificial Sequence
  targeting sequence with ATCN PAM
gaggcuacucccuuugcacu

SEQ ID NO: 689 - RNA, 20 nt, Artificial Sequence
  targeting sequence with ATCN PAM
gcuauguagugcaaagggag

SEQ ID NO: 690 - RNA, 20 nt, Artificial Sequence
  targeting sequence with ATCN PAM
gagguacuuuuuuauuuuuu

SEQ ID NO: 691 - RNA, 20 nt, Artificial Sequence
  targeting sequence with ATCN PAM
caaugguuguggaccauucc

SEQ ID NO: 692 - RNA, 20 nt, Artificial Sequence
  targeting sequence with ATCN PAM
ucuaggguuugaguaccuuc

SEQ ID NO: 693 - RNA, 20 nt, Artificial Sequence
  targeting sequence with ATCN PAM
gugcuuuuguugcuucauuc

SEQ ID NO: 694 - RNA, 20 nt, Artificial Sequence
  targeting sequence with ATCN PAM
ucccacgcaucuggaggcag

SEQ ID NO: 695 - RNA, 20 nt, Artificial Sequence
  targeting sequence with ATCN PAM
ggaggcaggcucuguaugca

SEQ ID NO: 696 - RNA, 20 nt, Artificial Sequence
  targeting sequence with ATCN PAM
gguucuuuccauggcccuga

SEQ ID NO: 697 - RNA, 20 nt, Artificial Sequence
  targeting sequence with ATCN PAM
agggaaaaaaagacuguuuu

SEQ ID NO: 698 - RNA, 20 nt, Artificial Sequence
  targeting sequence with ATCN PAM
ugcagucugcucccauguac

SEQ ID NO: 699 - RNA, 20 nt, Artificial Sequence
  targeting sequence with ATCN PAM
agguacugguacaugggagc

SEQ ID NO: 700 - RNA, 20 nt, Artificial Sequence
  targeting sequence with ATCN PAM
gguaggcuuccuugaacagu

SEQ ID NO: 701 - RNA, 20 nt, Artificial Sequence
  targeting sequence with ATCN PAM
gugucugugacacccaagca

SEQ ID NO: 702 - RNA, 20 nt, Artificial Sequence
  targeting sequence with ATCN PAM
aaaccuagcgcuuccauggc

SEQ ID NO: 703 - RNA, 20 nt, Artificial Sequence
  targeting sequence with ATCN PAM
agccagcaggagcuggaguu

SEQ ID NO: 704 - RNA, 20 nt, Artificial Sequence
  targeting sequence with ATCN PAM
gccuucuuaagggaccccac

SEQ ID NO: 705 - RNA, 20 nt, Artificial Sequence
  targeting sequence with ATCN PAM
uagccacuuccucacugugg

SEQ ID NO: 706 - RNA, 20 nt, Artificial Sequence
  targeting sequence with ATCN PAM
uagaaagggugucaccuacc

SEQ ID NO: 707 - RNA, 20 nt, Artificial Sequence
  targeting sequence with ATCN PAM
cccuacgucuauagagaagc

SEQ ID NO: 708 - RNA, 20 nt, Artificial Sequence
  targeting sequence with ATCN PAM
ucacaaagcugugaggauca

SEQ ID NO: 709 - RNA, 20 nt, Artificial Sequence
  targeting sequence with ATCN PAM
ucacagcuuugugaggaugg

SEQ ID NO: 710 - RNA, 20 nt, Artificial Sequence
  targeting sequence with ATCN PAM
aaugggaggaugccuguaaa

SEQ ID NO: 711 - RNA, 20 nt, Artificial Sequence
  targeting sequence with ATCN PAM
ucccauuugauccucacagc

SEQ ID NO: 712 - RNA, 20 nt, Artificial Sequence
  targeting sequence with ATCN PAM
gacaugcugcuccuggguca

SEQ ID NO: 713 - RNA, 20 nt, Artificial Sequence
  targeting sequence with ATCN PAM
caggcacuccguaaauggcg

SEQ ID NO: 714 - RNA, 20 nt, Artificial Sequence
  targeting sequence with ATCN PAM
guguagucacuggccaugau

SEQ ID NO: 715 - RNA, 20 nt, Artificial Sequence
  targeting sequence with ATCN PAM
uggccagugacuacaccgau

SEQ ID NO: 716 - RNA, 20 nt, Artificial Sequence
  targeting sequence with ATCN PAM
gccaacuaaggugggagaga

SEQ ID NO: 717 - RNA, 20 nt, Artificial Sequence
  targeting sequence with ATCN PAM
cucccaccuuaguuggcaga

SEQ ID NO: 718 - RNA, 20 nt, Artificial Sequence
  targeting sequence with ATCN PAM
gagaccuugaccaucucucc

SEQ ID NO: 719 - RNA, 20 nt, Artificial Sequence
  targeting sequence with ATCN PAM
cgccaugaagguacguggga

SEQ ID NO: 720 - RNA, 20 nt, Artificial Sequence
  targeting sequence with ATCN PAM
aguccaugaaucccgccaug

SEQ ID NO: 721 - RNA, 20 nt, Artificial Sequence
  targeting sequence with ATCN PAM
cucuagcuuucauagacuag

SEQ ID NO: 722 - RNA, 20 nt, Artificial Sequence
  targeting sequence with ATCN PAM
gaccccucucugcacauaag

SEQ ID NO: 723 - RNA, 20 nt, Artificial Sequence
  targeting sequence with ATCN PAM
agaaccucagauggaggaag

SEQ ID NO: 724 - RNA, 20 nt, Artificial Sequence
  targeting sequence with ATCN PAM
gagguucuagauggaaacac

SEQ ID NO: 725 - RNA, 20 nt, Artificial Sequence
  targeting sequence with ATCN PAM
ccccacagucaauuaaggag

SEQ ID NO: 726 - RNA, 20 nt, Artificial Sequence
  targeting sequence with ATCN PAM
cgucccucuuugccacuccu

SEQ ID NO: 727 - RNA, 20 nt, Artificial Sequence
  targeting sequence with ATCN PAM
aacccaaggcgggcaucacg

SEQ ID NO: 728 - RNA, 20 nt, Artificial Sequence
  targeting sequence with ATCN PAM
agacuuguaggcaugaagag

SEQ ID NO: 729 - RNA, 20 nt, Artificial Sequence
  targeting sequence with ATCN PAM
caguuaagccuugugacugc

SEQ ID NO: 730 - RNA, 20 nt, Artificial Sequence
  targeting sequence with ATCN PAM
cugcuuuaaauuccccuuua

SEQ ID NO: 731 - RNA, 20 nt, Artificial Sequence
  targeting sequence with ATCN PAM
gcacaaccaucccugcuuua

SEQ ID NO: 732 - RNA, 20 nt, Artificial Sequence
  targeting sequence with ATCN PAM
uuguguaacaauguucaagu

SEQ ID NO: 733 - RNA, 20 nt, Artificial Sequence
  targeting sequence with ATCN PAM
agauuauauuuuuagauguc

SEQ ID NO: 734 - RNA, 20 nt, Artificial Sequence
  targeting sequence with ATCN PAM
ugaucauuguguaacaaugu

SEQ ID NO: 735 - RNA, 20 nt, Artificial Sequence
  targeting sequence with ATCN PAM
aaaaauauaaucuugaucau

SEQ ID NO: 736 - RNA, 20 nt, Artificial Sequence
  targeting sequence with ATCN PAM
ccacuuuccuacacugggga

SEQ ID NO: 737 - RNA, 20 nt, Artificial Sequence
  targeting sequence with ATCN PAM
uacagcuuccuccaucucca

SEQ ID NO: 738 - RNA, 20 nt, Artificial Sequence
  targeting sequence with ATCN PAM
ccauggagggagcuucccuc

SEQ ID NO: 739 - RNA, 20 nt, Artificial Sequence
  targeting sequence with ATCN PAM
uccucccugcuggcauuucu

SEQ ID NO: 740 - RNA, 20 nt, Artificial Sequence
  targeting sequence with ATCN PAM
ccagaauagguguuguuuug

SEQ ID NO: 741 - RNA, 20 nt, Artificial Sequence
  targeting sequence with ATCN PAM
agagggaagguucuuaauuu

SEQ ID NO: 742 - RNA, 20 nt, Artificial Sequence
  targeting sequence with ATCN PAM
uaauaacacugcacacugcc

SEQ ID NO: 743 - RNA, 20 nt, Artificial Sequence
  targeting sequence with ATCN PAM
auucaaauauuuguugagca

SEQ ID NO: 744 - RNA, 20 nt, Artificial Sequence
  targeting sequence with ATCN PAM
ccaaaacacucccugagaau

SEQ ID NO: 745 - RNA, 20 nt, Artificial Sequence
  targeting sequence with ATCN PAM
uguggcuuuaauacacccuu

SEQ ID NO: 746 - RNA, 20 nt, Artificial Sequence
  targeting sequence with ATCN PAM
augaacaguguuauuuuuua

SEQ ID NO: 747 - RNA, 20 nt, Artificial Sequence
  targeting sequence with ATCN PAM
auuaaguacaacaugggaca

SEQ ID NO: 748 - RNA, 20 nt, Artificial Sequence
  targeting sequence with ATCN PAM
caguucuuugggaggccgag

SEQ ID NO: 749 - RNA, 20 nt, Artificial Sequence
  targeting sequence with ATCN PAM
gccugucucggccucccaaa

SEQ ID NO: 750 - RNA, 20 nt, Artificial Sequence
  targeting sequence with ATCN PAM
guugaggccaggaguuuaag

SEQ ID NO: 751 - RNA, 20 nt, Artificial Sequence
  targeting sequence with ATCN PAM
cggcucacuguagccucugu

SEQ ID NO: 752 - RNA, 20 nt, Artificial Sequence
  targeting sequence with ATCN PAM
ugccacugcauuccagccuu

SEQ ID NO: 753 - RNA, 20 nt, Artificial Sequence
  targeting sequence with ATCN PAM
guacaauaugauguuuugaa

SEQ ID NO: 754 - RNA, 20 nt, Artificial Sequence
  targeting sequence with ATCN PAM
uauuguacugauuuuuuugu

SEQ ID NO: 755 - RNA, 20 nt, Artificial Sequence
  targeting sequence with ATCN PAM
agcuuuuucaaaacaucaua

SEQ ID NO: 756 - RNA, 20 nt, Artificial Sequence
  targeting sequence with ATCN PAM
uccagcuuuuucaaaacauc

SEQ ID NO: 757 - RNA, 20 nt, Artificial Sequence
  targeting sequence with ATCN PAM
aaauccuguauccccccccu

SEQ ID NO: 758 - RNA, 20 nt, Artificial Sequence
  targeting sequence with ATCN PAM
uguauccccccccuuucuuu

SEQ ID NO: 759 - RNA, 20 nt, Artificial Sequence
  targeting sequence with ATCN PAM
ccccccuuucuuucccucug

SEQ ID NO: 760 - RNA, 20 nt, Artificial Sequence
  targeting sequence with ATCN PAM
cuggggaccacccugugcaa

SEQ ID NO: 761 - RNA, 20 nt, Artificial Sequence
  targeting sequence with ATCN PAM
ccacuagauggcagagaaga

SEQ ID NO: 762 - RNA, 20 nt, Artificial Sequence
  targeting sequence with ATCN PAM
aguggggauggcauaccauc

SEQ ID NO: 763 - RNA, 20 nt, Artificial Sequence
  targeting sequence with ATCN PAM
cggcagcuguucagaguggu

SEQ ID NO: 764 - RNA, 20 nt, Artificial Sequence
  targeting sequence with ATCN PAM
ugcagcaucacggcagcugu

SEQ ID NO: 765 - RNA, 20 nt, Artificial Sequence
  targeting sequence with ATCN PAM
gguugaaggaacuuggaaac

SEQ ID NO: 766 - RNA, 20 nt, Artificial Sequence
  targeting sequence with ATCN PAM
guuuccaaguuccuucaacc

SEQ ID NO: 767 - RNA, 20 nt, Artificial Sequence
  targeting sequence with ATCN PAM
uagacuccagcacagccgac

SEQ ID NO: 768 - RNA, 20 nt, Artificial Sequence
  targeting sequence with ATCN PAM
uuguggaaagggggcugcua

SEQ ID NO: 769 - RNA, 20 nt, Artificial Sequence
  targeting sequence with ATCN PAM
ggguuuccuuaaaacaccuu

SEQ ID NO: 770 - RNA, 20 nt, Artificial Sequence
  targeting sequence with ATCN PAM
agaggguaguguauaacacc

SEQ ID NO: 771 - RNA, 20 nt, Artificial Sequence
  targeting sequence with ATCN PAM
caugggcuaaggaacagagg

SEQ ID NO: 772 - RNA, 20 nt, Artificial Sequence
  targeting sequence with ATCN PAM
gagucagaaccuagcaaaca

SEQ ID NO: 773 - RNA, 20 nt, Artificial Sequence
  targeting sequence with ATCN PAM
guguucuccaggcaucuggu

SEQ ID NO: 774 - RNA, 20 nt, Artificial Sequence
  targeting sequence with ATCN PAM
gguucauagucggagagcuc

SEQ ID NO: 775 - RNA, 20 nt, Artificial Sequence
  targeting sequence with ATCN PAM
guuuaauuggucagccuccc

SEQ ID NO: 776 - RNA, 20 nt, Artificial Sequence
  targeting sequence with ATCN PAM
cacaggaccaggcuuccugu

SEQ ID NO: 777 - RNA, 20 nt, Artificial Sequence
  targeting sequence with ATCN PAM
uuucaucccacaggaccagg

SEQ ID NO: 778 - RNA, 20 nt, Artificial Sequence
  targeting sequence with ATCN PAM
ccugaggucuuuucaggagg

SEQ ID NO: 779 - RNA, 20 nt, Artificial Sequence
  targeting sequence with ATCN PAM
ucccuccugaaaagaccuca

SEQ ID NO: 780 - RNA, 20 nt, Artificial Sequence
  targeting sequence with ATCN PAM
ugaccacuugcagccucugc

SEQ ID NO: 781 - RNA, 20 nt, Artificial Sequence
  targeting sequence with ATCN PAM
ccccauucaaaaugggcuga

SEQ ID NO: 782 - RNA, 20 nt, Artificial Sequence
  targeting sequence with ATCN PAM
gaaagcagcaaaacuagcuu

SEQ ID NO: 783 - RNA, 20 nt, Artificial Sequence
  targeting sequence with ATCN PAM
uaaaauugcagcccuugccu

SEQ ID NO: 784 - RNA, 20 nt, Artificial Sequence
  targeting sequence with ATCN PAM
cgccaagucuguggaaggca

SEQ ID NO: 785 - RNA, 20 nt, Artificial Sequence
  targeting sequence with ATCN PAM
guguuuaugcccucucagcu

SEQ ID NO: 786 - RNA, 20 nt, Artificial Sequence
  targeting sequence with ATCN PAM
uggcgacauggguagaaugc

SEQ ID NO: 787 - RNA, 20 nt, Artificial Sequence
  targeting sequence with ATCN PAM
guccaugcaucucucucucu

SEQ ID NO: 788 - RNA, 20 nt, Artificial Sequence
  targeting sequence with ATCN PAM
cucucucucuugcugugaug

SEQ ID NO: 789 - RNA, 20 nt, Artificial Sequence
  targeting sequence with ATCN PAM
cagcaagagagagagagaug

SEQ ID NO: 790 - RNA, 20 nt, Artificial Sequence
  targeting sequence with ATCN PAM
cgguuuuguuuuaccugauc

SEQ ID NO: 791 - RNA, 20 nt, Artificial Sequence
  targeting sequence with ATCN PAM
gguaaaacaaaaccgcgaug

SEQ ID NO: 792 - RNA, 20 nt, Artificial Sequence
  targeting sequence with ATCN PAM
caaaaugacugaugcaaccg

SEQ ID NO: 793 - RNA, 20 nt, Artificial Sequence
  targeting sequence with ATCN PAM
gucauuuugggaucagguaa

SEQ ID NO: 794 - RNA, 20 nt, Artificial Sequence
  targeting sequence with ATCN PAM
cgguugcaucagucauuuug

SEQ ID NO: 795 - RNA, 20 nt, Artificial Sequence
  targeting sequence with ATCN PAM
ugcaaagaacagcaaagaca

SEQ ID NO: 796 - RNA, 20 nt, Artificial Sequence
  targeting sequence with ATCN PAM
aauuuuggggauaaagccgc

SEQ ID NO: 797 - RNA, 20 nt, Artificial Sequence
  targeting sequence with ATCN PAM
ccaaaauuggaucaugcaaa

SEQ ID NO: 798 - RNA, 20 nt, Artificial Sequence
  targeting sequence with ATCN PAM
ugcgugcaggagguuauacc

SEQ ID NO: 799 - RNA, 20 nt, Artificial Sequence
  targeting sequence with ATCN PAM
ucgugcgugcaggagguuau

SEQ ID NO: 800 - RNA, 20 nt, Artificial Sequence
  targeting sequence with ATCN PAM
gcugccuucuuggcuucaaa

SEQ ID NO: 801 - RNA, 20 nt, Artificial Sequence
  targeting sequence with ATCN PAM
gaguacaagaccucaucagc

SEQ ID NO: 802 - RNA, 20 nt, Artificial Sequence
  targeting sequence with ATCN PAM
gcagcauugagguaaaaguu

SEQ ID NO: 803 - RNA, 20 nt, Artificial Sequence
  targeting sequence with ATCN PAM
uuuccagcagcgugaaaaug

SEQ ID NO: 804 - RNA, 20 nt, Artificial Sequence
  targeting sequence with ATCN PAM
ugaggcuuccuuagccaugu

SEQ ID NO: 805 - RNA, 20 nt, Artificial Sequence
  targeting sequence with ATCN PAM
uggcagaaggcaaggaagag

SEQ ID NO: 806 - RNA, 20 nt, Artificial Sequence
  targeting sequence with ATCN PAM
auauaagcugugacuugcuc

SEQ ID NO: 807 - RNA, 20 nt, Artificial Sequence
  targeting sequence with ATCN PAM
gaucucgugagacuuacuau

SEQ ID NO: 808 - RNA, 20 nt, Artificial Sequence
  targeting sequence with ATCN PAM
gaugguuuuaaaaagaggag

SEQ ID NO: 809 - RNA, 20 nt, Artificial Sequence
  targeting sequence with ATCN PAM
cgugagacuuacuaucauga

SEQ ID NO: 810 - RNA, 20 nt, Artificial Sequence
  targeting sequence with ATCN PAM
ugagaacagcaugggaaaga

SEQ ID NO: 811 - RNA, 20 nt, Artificial Sequence
  targeting sequence with ATCN PAM
uggggcaggucuuucccaug

SEQ ID NO: 812 - RNA, 20 nt, Artificial Sequence
  targeting sequence with ATCN PAM
ugaauucccauguguugugg

SEQ ID NO: 813 - RNA, 20 nt, Artificial Sequence
  targeting sequence with ATCN PAM
caucuugaauucccaugugu

SEQ ID NO: 814 - RNA, 20 nt, Artificial Sequence
  targeting sequence with ATCN PAM
ggguggggacacagccaaac

SEQ ID NO: 815 - RNA, 20 nt, Artificial Sequence
  targeting sequence with ATCN PAM
gcaggcaaaagcccugagga

SEQ ID NO: 816 - RNA, 20 nt, Artificial Sequence
  targeting sequence with ATCN PAM
gggccacagccuugcuccag

SEQ ID NO: 817 - RNA, 20 nt, Artificial Sequence
  targeting sequence with ATCN PAM
gccucagucaguuaccacgu

SEQ ID NO: 818 - RNA, 20 nt, Artificial Sequence
  targeting sequence with ATCN PAM
ggaacccaucugccucaguc

SEQ ID NO: 819 - RNA, 20 nt, Artificial Sequence
  targeting sequence with ATCN PAM
cuccaggguuggguuucuug

SEQ ID NO: 820 - RNA, 20 nt, Artificial Sequence
  targeting sequence with ATCN PAM
cuuuucacagacaagaaacc

SEQ ID NO: 821 - RNA, 20 nt, Artificial Sequence
  targeting sequence with ATCN PAM
ucacagcagccugugacgua

SEQ ID NO: 822 - RNA, 20 nt, Artificial Sequence
  targeting sequence with ATCN PAM
uccugguggcggauagcugg

SEQ ID NO: 823 - RNA, 20 nt, Artificial Sequence
  targeting sequence with ATCN PAM
gccaccaggaggaugcaaac

SEQ ID NO: 824 - RNA, 20 nt, Artificial Sequence
  targeting sequence with ATCN PAM
ucucagacuccaguaaucug

SEQ ID NO: 825 - RNA, 20 nt, Artificial Sequence
  targeting sequence with ATCN PAM
gauagcgcuggaggaguuuc

SEQ ID NO: 826 - RNA, 20 nt, Artificial Sequence
  targeting sequence with ATCN PAM
gauuacuggagucugagagg

SEQ ID NO: 827 - RNA, 20 nt, Artificial Sequence
  targeting sequence with ATCN PAM
aacccaauaggccugcagug

SEQ ID NO: 828 - RNA, 20 nt, Artificial Sequence
  targeting sequence with ATCN PAM
caggaccacacaccuugauu

SEQ ID NO: 829 - RNA, 20 nt, Artificial Sequence
  targeting sequence with ATCN PAM
aggugugugguccugggaug

SEQ ID NO: 830 - RNA, 20 nt, Artificial Sequence
  targeting sequence with ATCN PAM
gucugacuggugccggauga

SEQ ID NO: 831 - RNA, 20 nt, Artificial Sequence
  targeting sequence with ATCN PAM
ggcaccagucagaccgauau

SEQ ID NO: 832 - RNA, 20 nt, Artificial Sequence
  targeting sequence with ATCN PAM
ucaaaaagagaaccaagaaa

SEQ ID NO: 833 - RNA, 20 nt, Artificial Sequence
  targeting sequence with ATCN PAM
ugggcuucacaagggaucug

SEQ ID NO: 834 - RNA, 20 nt, Artificial Sequence
  targeting sequence with ATCN PAM
cuugugaagcccaagaucgu

SEQ ID NO: 835 - RNA, 20 nt, Artificial Sequence
  targeting sequence with ATCN PAM
gagggcagccaugaugccuu

SEQ ID NO: 836 - RNA, 20 nt, Artificial Sequence
  targeting sequence with ATCN PAM
uggcugcccucagaucccuu

SEQ ID NO: 837 - RNA, 20 nt, Artificial Sequence
  targeting sequence with ATCN PAM
uggaaggaggcuuucccgcc

SEQ ID NO: 838 - RNA, 20 nt, Artificial Sequence
  targeting sequence with ATCN PAM
ccagcuacggagcaagcugg

SEQ ID NO: 839 - RNA, 20 nt, Artificial Sequence
  targeting sequence with ATCN PAM
ggagacugccuaguauucug

SEQ ID NO: 840 - RNA, 20 nt, Artificial Sequence
  targeting sequence with ATCN PAM
caucuggagacugccuagua

SEQ ID NO: 841 - RNA, 20 nt, Artificial Sequence
  targeting sequence with ATCN PAM
caggaggucaagggucaccu

SEQ ID NO: 842 - RNA, 20 nt, Artificial Sequence
  targeting sequence with ATCN PAM
aaacugaccccaagacacuc

SEQ ID NO: 843 - RNA, 20 nt, Artificial Sequence
  targeting sequence with ATCN PAM
cacccugccagugucugaac

SEQ ID NO: 844 - RNA, 20 nt, Artificial Sequence
  targeting sequence with ATCN PAM
ggggguucagacacuggcag

SEQ ID NO: 845 - RNA, 20 nt, Artificial Sequence
  targeting sequence with ATCN PAM
acuugaacuggagucucagu

SEQ ID NO: 846 - RNA, 20 nt, Artificial Sequence
  targeting sequence with ATCN PAM
uaucccucuaaggaugccuc

SEQ ID NO: 847 - RNA, 20 nt, Artificial Sequence
  targeting sequence with ATCN PAM
cucuaaggaugccucaaacc

SEQ ID NO: 848 - RNA, 20 nt, Artificial Sequence
  targeting sequence with ATCN PAM
uuagagggauaugaugguuu

SEQ ID NO: 849 - RNA, 20 nt, Artificial Sequence
  targeting sequence with ATCN PAM
ccagguuugaggcauccuua

SEQ ID NO: 850 - RNA, 20 nt, Artificial Sequence
  targeting sequence with ATCN PAM
uccauuaucaacucacaacu

SEQ ID NO: 851 - RNA, 20 nt, Artificial Sequence
  targeting sequence with ATCN PAM
acucacaacuuccucagugu

SEQ ID NO: 852 - RNA, 20 nt, Artificial Sequence
  targeting sequence with ATCN PAM
guuggcacagaguggguacu

SEQ ID NO: 853 - RNA, 20 nt, Artificial Sequence
  targeting sequence with ATCN PAM
ugggccagaaggcaaaguug

SEQ ID NO: 854 - RNA, 20 nt, Artificial Sequence
  targeting sequence with ATCN PAM
uugaaggcaagggggaaguu

SEQ ID NO: 855 - RNA, 20 nt, Artificial Sequence
  targeting sequence with ATCN PAM
uuauauucccagagcuccug

SEQ ID NO: 856 - RNA, 20 nt, Artificial Sequence
  targeting sequence with ATCN PAM
ucaggagcucugggaauaua

SEQ ID NO: 857 - RNA, 20 nt, Artificial Sequence
  targeting sequence with ATCN PAM
aaaucucuguuaacaacuga

SEQ ID NO: 858 - RNA, 20 nt, Artificial Sequence
  targeting sequence with ATCN PAM
cuguuaacaacugagugagc

SEQ ID NO: 859 - RNA, 20 nt, Artificial Sequence
  targeting sequence with ATCN PAM
uuuuuuuuuuuuuuuuuuuu

SEQ ID NO: 860 - RNA, 20 nt, Artificial Sequence
  targeting sequence with ATCN PAM
guaagcacgguauaaaccga

SEQ ID NO: 861 - RNA, 20 nt, Artificial Sequence
  targeting sequence with ATCN PAM
cuuuuaaugcuaacgcuggu

SEQ ID NO: 862 - RNA, 20 nt, Artificial Sequence
  targeting sequence with ATCN PAM
caagacugacaaaacagacu

SEQ ID NO: 863 - RNA, 20 nt, Artificial Sequence
  targeting sequence with ATCN PAM
caugacagauugcaggcccu

SEQ ID NO: 864 - RNA, 20 nt, Artificial Sequence
  targeting sequence with ATCN PAM
gucaugugaugcuauacuag

SEQ ID NO: 865 - RNA, 20 nt, Artificial Sequence
  targeting sequence with ATCN PAM
acguccuguagugaaucccc

SEQ ID NO: 866 - RNA, 20 nt, Artificial Sequence
  targeting sequence with ATCN PAM
cccucccuuuccaggucuuc

SEQ ID NO: 867 - RNA, 20 nt, Artificial Sequence
  targeting sequence with ATCN PAM
uaaauguuucuuaccaggcc

SEQ ID NO: 868 - RNA, 20 nt, Artificial Sequence
  targeting sequence with ATCN PAM
acucucuuugaagcccgcua

SEQ ID NO: 869 - RNA, 20 nt, Artificial Sequence
  targeting sequence with ATCN PAM
gaacccaggcauuccuuuuu

SEQ ID NO: 870 - RNA, 20 nt, Artificial Sequence
  targeting sequence with ATCN PAM
acaaaaaggaaugccugggu

SEQ ID NO: 871 - RNA, 20 nt, Artificial Sequence
  targeting sequence with ATCN PAM
accaacagcccggaccaggc

SEQ ID NO: 872 - RNA, 20 nt, Artificial Sequence
  targeting sequence with ATCN PAM
ggcccuaugguccccuggua

SEQ ID NO: 873 - RNA, 20 nt, Artificial Sequence
  targeting sequence with ATCN PAM
gcguuccugcaggcuucauc

SEQ ID NO: 874 - RNA, 20 nt, Artificial Sequence
  targeting sequence with ATCN PAM
guggccaucugcguuccugc

SEQ ID NO: 875 - RNA, 20 nt, Artificial Sequence
  targeting sequence with ATCN PAM
cagaacuuuggaaggccgag

SEQ ID NO: 876 - RNA, 20 nt, Artificial Sequence
  targeting sequence with ATCN PAM
guccgccucggccuuccaaa

SEQ ID NO: 877 - RNA, 20 nt, Artificial Sequence
  targeting sequence with ATCN PAM
cuugaggucaggcguuccag

SEQ ID NO: 878 - RNA, 20 nt, Artificial Sequence
  targeting sequence with ATCN PAM
cuugaaccccggaagcggag

SEQ ID NO: 879 - RNA, 20 nt, Artificial Sequence
  targeting sequence with ATCN PAM
cagcuuacugcagccuccgc

SEQ ID NO: 880 - RNA, 20 nt, Artificial Sequence
  targeting sequence with ATCN PAM
caccacugcacuccagccug

SEQ ID NO: 881 - RNA, 20 nt, Artificial Sequence
  targeting sequence with ATCN PAM
cuucucucuuccuuggugcu

SEQ ID NO: 882 - RNA, 20 nt, Artificial Sequence
  targeting sequence with ATCN PAM
gccccggcgcucucucaucc

SEQ ID NO: 883 - RNA, 20 nt, Artificial Sequence
  targeting sequence with ATCN PAM
aagaauguaaaggaaaauuu

SEQ ID NO: 884 - RNA, 20 nt, Artificial Sequence
  targeting sequence with ATCN PAM
uaccugcccuuggcacuagu

SEQ ID NO: 885 - RNA, 20 nt, Artificial Sequence
  targeting sequence with ATCN PAM
acuuccgccagaaguugaag

SEQ ID NO: 886 - RNA, 20 nt, Artificial Sequence
  targeting sequence with ATCN PAM
agcguuugggcuauuuccgc

SEQ ID NO: 887 - RNA, 20 nt, Artificial Sequence
  targeting sequence with ATCN PAM
cuccugaccgcuaggaagcg

SEQ ID NO: 888 - RNA, 20 nt, Artificial Sequence
  targeting sequence with ATCN PAM
agaccgacuucccaaaauuc

SEQ ID NO: 889 - RNA, 20 nt, Artificial Sequence
  targeting sequence with ATCN PAM
cuauuuacuauguaaauuca

SEQ ID NO: 890 - RNA, 20 nt, Artificial Sequence
  targeting sequence with ATCN PAM
uacguuagcgguuccggucu

SEQ ID NO: 891 - RNA, 20 nt, Artificial Sequence
  targeting sequence with ATCN PAM
ccaaaauucuccuuccacau

SEQ ID NO: 892 - RNA, 20 nt, Artificial Sequence
  targeting sequence with ATCN PAM
cuuaagaccagccuggccaa

SEQ ID NO: 893 - RNA, 20 nt, Artificial Sequence
  targeting sequence with ATCN PAM
cucgccucagccuccugagu

SEQ ID NO: 894 - RNA, 20 nt, Artificial Sequence
  targeting sequence with ATCN PAM
ccgcuacucaggaggcugag

SEQ ID NO: 895 - RNA, 20 nt, Artificial Sequence
  targeting sequence with ATCN PAM
agaacaagcuuaaaaauuag

SEQ ID NO: 896 - RNA, 20 nt, Artificial Sequence
  targeting sequence with ATCN PAM
ugccacuccacugcacucca

SEQ ID NO: 897 - RNA, 20 nt, Artificial Sequence
  targeting sequence with ATCN PAM
cggcucacugcaacuucugc

SEQ ID NO: 898 - RNA, 20 nt, Artificial Sequence
  targeting sequence with ATCN PAM
cuugucccuugaaccuggga

SEQ ID NO: 899 - RNA, 20 nt, Artificial Sequence
  targeting sequence with ATCN PAM
cagcuacuacggagccugag

SEQ ID NO: 900 - RNA, 20 nt, Artificial Sequence
  targeting sequence with ATCN PAM
ccugaggucaggaguuugag

SEQ ID NO: 901 - RNA, 20 nt, Artificial Sequence
  targeting sequence with ATCN PAM
gcccaccuuggccucccaaa

SEQ ID NO: 902 - RNA, 20 nt, Artificial Sequence
  targeting sequence with ATCN PAM
cagcauuuugggaggccaag

SEQ ID NO: 903 - RNA, 20 nt, Artificial Sequence
  targeting sequence with ATCN PAM
aacuccacaaggaaggaagg

SEQ ID NO: 904 - RNA, 20 nt, Artificial Sequence
  targeting sequence with ATCN PAM
ucuaacuccacaaggaagga

SEQ ID NO: 905 - RNA, 20 nt, Artificial Sequence
  targeting sequence with ATCN PAM
aggccaauggggcuuuaggg

SEQ ID NO: 906 - RNA, 20 nt, Artificial Sequence
  targeting sequence with ATCN PAM
ucauauguaaaggggccuag

SEQ ID NO: 907 - RNA, 20 nt, Artificial Sequence
  targeting sequence with ATCN PAM
gacaggccuucgguuaaaug

SEQ ID NO: 908 - RNA, 20 nt, Artificial Sequence
  targeting sequence with ATCN PAM
cuacagggcccugcuguguc

SEQ ID NO: 909 - RNA, 20 nt, Artificial Sequence
  targeting sequence with ATCN PAM
ggccagcugggcucuccucc

SEQ ID NO: 910 - RNA, 20 nt, Artificial Sequence
  targeting sequence with ATCN PAM
cugcagaggcaggggcgcgg

SEQ ID NO: 911 - RNA, 20 nt, Artificial Sequence
  targeting sequence with ATCN PAM
gugggugacugcagaggaac

SEQ ID NO: 912 - RNA, 20 nt, Artificial Sequence
  targeting sequence with ATCN PAM
ggguagcucaggcuuuggag

SEQ ID NO: 913 - RNA, 20 nt, Artificial Sequence
  targeting sequence with ATCN PAM
uccuaugagcugcaagccca

SEQ ID NO: 914 - RNA, 20 nt, Artificial Sequence
  targeting sequence with ATCN PAM
gcaaagaccagcccaugagc

SEQ ID NO: 915 - RNA, 20 nt, Artificial Sequence
  targeting sequence with ATCN PAM
ggcccaccagcuguuuuuau

SEQ ID NO: 916 - RNA, 20 nt, Artificial Sequence
  targeting sequence with ATCN PAM
agguuugagugcaguggugu

SEQ ID NO: 917 - RNA, 20 nt, Artificial Sequence
  targeting sequence with ATCN PAM
ccccccaaaaauauauauac

SEQ ID NO: 918 - RNA, 20 nt, Artificial Sequence
  targeting sequence with ATCN PAM
ucccacuucagcuuccugag

SEQ ID NO: 919 - RNA, 20 nt, Artificial Sequence
  targeting sequence with ATCN PAM
uagcuuacugcagccucaaa

SEQ ID NO: 920 - RNA, 20 nt, Artificial Sequence
  targeting sequence with ATCN PAM
caccugugaauagccacuuc

SEQ ID NO: 921 - RNA, 20 nt, Artificial Sequence
  targeting sequence with ATCN PAM
aacauaaggagacucaugca

SEQ ID NO: 922 - RNA, 20 nt, Artificial Sequence
  targeting sequence with ATCN PAM
acacauauccaacauaagga

SEQ ID NO: 923 - RNA, 20 nt, Artificial Sequence
  targeting sequence with ATCN PAM
aucuacacauauccaacaua

SEQ ID NO: 924 - RNA, 20 nt, Artificial Sequence
  targeting sequence with ATCN PAM
auccaucuacacauauccaa

SEQ ID NO: 925 - RNA, 20 nt, Artificial Sequence
  targeting sequence with ATCN PAM
auccauccaucuacacauau

SEQ ID NO: 926 - RNA, 20 nt, Artificial Sequence
  targeting sequence with ATCN PAM
aucuauccauccaucuacac

SEQ ID NO: 927 - RNA, 20 nt, Artificial Sequence
  targeting sequence with ATCN PAM
aucuaucuauccauccaucu

SEQ ID NO: 928 - RNA, 20 nt, Artificial Sequence
  targeting sequence with ATCN PAM
aucuaucuaucuauccaucc

SEQ ID NO: 929 - RNA, 20 nt, Artificial Sequence
  targeting sequence with ATCN PAM
aucuaucuaucuaucuaucc

SEQ ID NO: 930 - RNA, 20 nt, Artificial Sequence
  targeting sequence with ATCN PAM
aucuaucuaucuaucuaucu

SEQ ID NO: 931 - RNA, 20 nt, Artificial Sequence
  targeting sequence with ATCN PAM
aucuaucuaucuaucuaucu

SEQ ID NO: 932 - RNA, 20 nt, Artificial Sequence
  targeting sequence with ATCN PAM
aucuaucuaucuaucuaucu

SEQ ID NO: 933 - RNA, 20 nt, Artificial Sequence
  targeting sequence with ATCN PAM
aucuaucuaucuaucuaucu

SEQ ID NO: 934 - RNA, 20 nt, Artificial Sequence
  targeting sequence with ATCN PAM
aucuaucuaucuaucuaucu

SEQ ID NO: 935 - RNA, 20 nt, Artificial Sequence
  targeting sequence with ATCN PAM
aucuaucuaucuaucuaucu

SEQ ID NO: 936 - RNA, 20 nt, Artificial Sequence
  targeting sequence with ATCN PAM
ggucggucggucagucuguc

SEQ ID NO: 937 - RNA, 20 nt, Artificial Sequence
  targeting sequence with ATCN PAM
ccucauucccuuggcuuccc

SEQ ID NO: 938 - RNA, 20 nt, Artificial Sequence
  targeting sequence with ATCN PAM
ggccucagcugccuucccac

SEQ ID NO: 939 - RNA, 20 nt, Artificial Sequence
  targeting sequence with ATCN PAM
uaccccagggccuuugccuu

SEQ ID NO: 940 - RNA, 20 nt, Artificial Sequence
  targeting sequence with ATCN PAM
gccuagauugugcuuccccc

SEQ ID NO: 941 - RNA, 20 nt, Artificial Sequence
  targeting sequence with ATCN PAM
aggcagauagaacugugaag

SEQ ID NO: 942 - RNA, 20 nt, Artificial Sequence
  targeting sequence with ATCN PAM
cucagaugucagcuccaaug

SEQ ID NO: 943 - RNA, 20 nt, Artificial Sequence
  targeting sequence with ATCN PAM
gagugauugacaggaacuag

SEQ ID NO: 944 - RNA, 20 nt, Artificial Sequence
  targeting sequence with ATCN PAM
aaagcuggggcuuuggcugg

SEQ ID NO: 945 - RNA, 20 nt, Artificial Sequence
  targeting sequence with ATCN PAM
uuguugagcaacuacuaugu

SEQ ID NO: 946 - RNA, 20 nt, Artificial Sequence
  targeting sequence with ATCN PAM
cauugucccugcccugguuc

SEQ ID NO: 947 - RNA, 20 nt, Artificial Sequence
  targeting sequence with ATCN PAM
ucucaagcugaaauaauauc

SEQ ID NO: 948 - RNA, 20 nt, Artificial Sequence
  targeting sequence with ATCN PAM
ugaccuuaccaccuucuauu

SEQ ID NO: 949 - RNA, 20 nt, Artificial Sequence
  targeting sequence with ATCN PAM
ugaccucugcggacauaaag

SEQ ID NO: 950 - RNA, 20 nt, Artificial Sequence
  targeting sequence with ATCN PAM
uuuauguccgcagaggucag

SEQ ID NO: 951 - RNA, 20 nt, Artificial Sequence
  targeting sequence with ATCN PAM
caguuuauccuuuauguccg

SEQ ID NO: 952 - RNA, 20 nt, Artificial Sequence
  targeting sequence with ATCN PAM
uucugcaagaaugaagaaga

SEQ ID NO: 953 - RNA, 20 nt, Artificial Sequence
  targeting sequence with ATCN PAM
gggacaaacaccgccacuuu

SEQ ID NO: 954 - RNA, 20 nt, Artificial Sequence
  targeting sequence with ATCN PAM
cuucucuucuaacuauaagc

SEQ ID NO: 955 - RNA, 20 nt, Artificial Sequence
  targeting sequence with ATCN PAM
uagugcaccugaagggaaag

SEQ ID NO: 956 - RNA, 20 nt, Artificial Sequence
  targeting sequence with ATCN PAM
cccaagucugcuuuuagcuu

SEQ ID NO: 957 - RNA, 20 nt, Artificial Sequence
  targeting sequence with ATCN PAM
uucugcagcugcaggcauau

SEQ ID NO: 958 - RNA, 20 nt, Artificial Sequence
  targeting sequence with ATCN PAM
gggaggcagaguugcguguc

SEQ ID NO: 959 - RNA, 20 nt, Artificial Sequence
  targeting sequence with ATCN PAM
gaggcuuggacugcuucucu

SEQ ID NO: 960 - RNA, 20 nt, Artificial Sequence
  targeting sequence with ATCN PAM
uuaaaaacucuuagucugua

SEQ ID NO: 961 - RNA, 20 nt, Artificial Sequence
  targeting sequence with ATCN PAM
uacccacuauugcucaccag

SEQ ID NO: 962 - RNA, 20 nt, Artificial Sequence
  targeting sequence with ATCN PAM
cugaguucuuuuucccuggu

SEQ ID NO: 963 - RNA, 20 nt, Artificial Sequence
  targeting sequence with ATCN PAM
cugcugcgaauaugcaucac

SEQ ID NO: 964 - RNA, 20 nt, Artificial Sequence
  targeting sequence with ATCN PAM
cagcacacuguggucauuga

SEQ ID NO: 965 - RNA, 20 nt, Artificial Sequence
  targeting sequence with ATCN PAM
guguagcuggcugugaguca

SEQ ID NO: 966 - RNA, 20 nt, Artificial Sequence
  targeting sequence with ATCN PAM
uuaucuguguagcuggcugu

SEQ ID NO: 967 - RNA, 20 nt, Artificial Sequence
  targeting sequence with ATCN PAM
gagggaaagcagcccaacuu

SEQ ID NO: 968 - RNA, 20 nt, Artificial Sequence
  targeting sequence with ATCN PAM
ccuuuauguccagcacauuu

SEQ ID NO: 969 - RNA, 20 nt, Artificial Sequence
  targeting sequence with ATCN PAM
ccucccaagcagggucucug

SEQ ID NO: 970 - RNA, 20 nt, Artificial Sequence
  targeting sequence with ATCN PAM
ccuggaggacugaggaaugg

SEQ ID NO: 971 - RNA, 20 nt, Artificial Sequence
  targeting sequence with ATCN PAM
auuccucaguccuccaggag

SEQ ID NO: 972 - RNA, 20 nt, Artificial Sequence
  targeting sequence with ATCN PAM
ucacuggaguggcucauuug

SEQ ID NO: 973 - RNA, 20 nt, Artificial Sequence
  targeting sequence with ATCN PAM
ggggugaggccguuggaguu

SEQ ID NO: 974 - RNA, 20 nt, Artificial Sequence
  targeting sequence with ATCN PAM
uuaccauuguuaggaaaccc

SEQ ID NO: 975 - RNA, 20 nt, Artificial Sequence
  targeting sequence with ATCN PAM
caugcauguuuggggcuucc

SEQ ID NO: 976 - RNA, 20 nt, Artificial Sequence
  targeting sequence with ATCN PAM
accagguuggcaggaacuua

SEQ ID NO: 977 - RNA, 20 nt, Artificial Sequence
  targeting sequence with ATCN PAM
ugcucuguucccaucuacca

SEQ ID NO: 978 - RNA, 20 nt, Artificial Sequence
  targeting sequence with ATCN PAM
uaguaccauucuuguaguaa

SEQ ID NO: 979 - RNA, 20 nt, Artificial Sequence
  targeting sequence with ATCN PAM
guccagacaaggcacagagg

SEQ ID NO: 980 - RNA, 20 nt, Artificial Sequence
  targeting sequence with ATCN PAM
gccaagcaauacauuugugg

SEQ ID NO: 981 - RNA, 20 nt, Artificial Sequence
  targeting sequence with ATCN PAM
gggguauuauggcaggguug

SEQ ID NO: 982 - RNA, 20 nt, Artificial Sequence
  targeting sequence with ATCN PAM
auaagcuauggauuaauagu

SEQ ID NO: 983 - RNA, 20 nt, Artificial Sequence
  targeting sequence with ATCN PAM
auagcuuauugauaaaauuc

SEQ ID NO: 984 - RNA, 20 nt, Artificial Sequence
  targeting sequence with ATCN PAM
uccucuaagaacaagggcug

SEQ ID NO: 985 - RNA, 20 nt, Artificial Sequence
  targeting sequence with ATCN PAM
acuccuuaguuaaucucugg

SEQ ID NO: 986 - RNA, 20 nt, Artificial Sequence
  targeting sequence with ATCN PAM
cugggccugaaaauuuccag

SEQ ID NO: 987 - RNA, 20 nt, Artificial Sequence
  targeting sequence with ATCN PAM
ugugccuccaccuccccguc

SEQ ID NO: 988 - RNA, 20 nt, Artificial Sequence
  targeting sequence with ATCN PAM
uggccaauaccuacaagcag

SEQ ID NO: 989 - RNA, 20 nt, Artificial Sequence
  targeting sequence with ATCN PAM
auggugaugguguugugcuu

SEQ ID NO: 990 - RNA, 20 nt, Artificial Sequence
  targeting sequence with ATCN PAM
ccauggauauccuggccaau

SEQ ID NO: 991 - RNA, 20 nt, Artificial Sequence
  targeting sequence with ATCN PAM
accucagcucucuugggaag

SEQ ID NO: 992 - RNA, 20 nt, Artificial Sequence
  targeting sequence with ATCN PAM
cuauauccuccaccucuugg

SEQ ID NO: 993 - RNA, 20 nt, Artificial Sequence
  targeting sequence with ATCN PAM
uccaccucuugguucuucag

SEQ ID NO: 994 - RNA, 20 nt, Artificial Sequence
  targeting sequence with ATCN PAM
guuuucucacacauguuuua

SEQ ID NO: 995 - RNA, 20 nt, Artificial Sequence
  targeting sequence with ATCN PAM
cagucaacucccuaaaguug

SEQ ID NO: 996 - RNA, 20 nt, Artificial Sequence
  targeting sequence with ATCN PAM
caacuuaaaagaaacccaaa

SEQ ID NO: 997 - RNA, 20 nt, Artificial Sequence
  targeting sequence with ATCN PAM
ugcucugucacccaggcugg

SEQ ID NO: 998 - RNA, 20 nt, Artificial Sequence
  targeting sequence with ATCN PAM
caccacuacacuccagccug

SEQ ID NO: 999 - RNA, 20 nt, Artificial Sequence
  targeting sequence with ATCN PAM
uagcucacugcagccucuaa

SEQ ID NO: 1000 - RNA, 20 nt, Artificial Sequence
  targeting sequence with ATCN PAM
cuugagcccgggaguuagag

SEQ ID NO: 1001 - RNA, 20 nt, Artificial Sequence
  targeting sequence with ATCN PAM
ucccaucugacccucccaug

SEQ ID NO: 1002 - RNA, 20 nt, Artificial Sequence
  targeting sequence with ATCN PAM
gacccucccauguagcuggg

SEQ ID NO: 1003 - RNA, 20 nt, Artificial Sequence
  targeting sequence with ATCN PAM
caguguggugguacacaccu

SEQ ID NO: 1004 - RNA, 20 nt, Artificial Sequence
  targeting sequence with ATCN PAM
cuacaaaaaauuaaaaaacu

SEQ ID NO: 1005 - RNA, 20 nt, Artificial Sequence
  targeting sequence with ATCN PAM
gccuggguaacacagugaga

SEQ ID NO: 1006 - RNA, 20 nt, Artificial Sequence
  targeting sequence with ATCN PAM
caagcucuuggccucaagca

SEQ ID NO: 1007 - RNA, 20 nt, Artificial Sequence
  targeting sequence with ATCN PAM
cccaacacuuuggaaggcca

SEQ ID NO: 1008 - RNA, 20 nt, Artificial Sequence
  targeting sequence with ATCN PAM
ugcauucaaaauguauaaaa

SEQ ID NO: 1009 - RNA, 20 nt, Artificial Sequence
  targeting sequence with ATCN PAM
agacuaggguuagcaaguua

SEQ ID NO: 1010 - RNA, 20 nt, Artificial Sequence
  targeting sequence with ATCN PAM
gacuuuuuauagaaaaagcu

SEQ ID NO: 1011 - RNA, 20 nt, Artificial Sequence
  targeting sequence with ATCN PAM
cagcacuuugggaggcugag

SEQ ID NO: 1012 - RNA, 20 nt, Artificial Sequence
  targeting sequence with ATCN PAM
accugccucagccucccaaa

SEQ ID NO: 1013 - RNA, 20 nt, Artificial Sequence
  targeting sequence with ATCN PAM
caaggucaagagaucaagac

SEQ ID NO: 1014 - RNA, 20 nt, Artificial Sequence
  targeting sequence with ATCN PAM
cuugaccuugugauccaccu

SEQ ID NO: 1015 - RNA, 20 nt, Artificial Sequence
  targeting sequence with ATCN PAM
agaccauccuggccaacaug

SEQ ID NO: 1016 - RNA, 20 nt, Artificial Sequence
  targeting sequence with ATCN PAM
uggccaacauggugaaaccc

SEQ ID NO: 1017 - RNA, 20 nt, Artificial Sequence
  targeting sequence with ATCN PAM
uggcucacugcaaccuccgc

SEQ ID NO: 1018 - RNA, 20 nt, Artificial Sequence
  targeting sequence with ATCN PAM
caccaccgcacuccagccug

SEQ ID NO: 1019 - RNA, 20 nt, Artificial Sequence
  targeting sequence with ATCN PAM
gagguuuuuuguuuuuaguu

SEQ ID NO: 1020 - RNA, 20 nt, Artificial Sequence
  targeting sequence with ATCN PAM
uugaauugucuauggcugcu

SEQ ID NO: 1021 - RNA, 20 nt, Artificial Sequence
  targeting sequence with ATCN PAM
gccuagcagaggucugcaaa

SEQ ID NO: 1022 - RNA, 20 nt, Artificial Sequence
  targeting sequence with ATCN PAM
uggaaaguuguaucggccua

SEQ ID NO: 1023 - RNA, 20 nt, Artificial Sequence
  targeting sequence with ATCN PAM
ucauggaaaguuguaucggc

SEQ ID NO: 1024 - RNA, 20 nt, Artificial Sequence
  targeting sequence with ATCN PAM
gugcaguccaguagaggagc

SEQ ID NO: 1025 - RNA, 20 nt, Artificial Sequence
  targeting sequence with ATCN PAM
caccagccacauauuuugag

SEQ ID NO: 1026 - RNA, 20 nt, Artificial Sequence
  targeting sequence with ATCN PAM
agucuuucaaucacaccagc

SEQ ID NO: 1027 - RNA, 20 nt, Artificial Sequence
  targeting sequence with ATCN PAM
auuauaaauuuaaaaaucca

SEQ ID NO: 1028 - RNA, 20 nt, Artificial Sequence
  targeting sequence with ATCN PAM
ccaggagcucguuagaaaua

SEQ ID NO: 1029 - RNA, 20 nt, Artificial Sequence
  targeting sequence with ATCN PAM
uuugaugacccacagaugug

SEQ ID NO: 1030 - RNA, 20 nt, Artificial Sequence
  targeting sequence with ATCN PAM
aaagaugcuguauuucuaac

SEQ ID NO: 1031 - RNA, 20 nt, Artificial Sequence
  targeting sequence with ATCN PAM
gugggucaucaaaagaugcu

SEQ ID NO: 1032 - RNA, 20 nt, Artificial Sequence
  targeting sequence with ATCN PAM
gagaaagcugguagaguguc

SEQ ID NO: 1033 - RNA, 20 nt, Artificial Sequence
  targeting sequence with ATCN PAM
uaguuuuggggucugcugug

SEQ ID NO: 1034 - RNA, 20 nt, Artificial Sequence
  targeting sequence with ATCN PAM
cugucuugcacagcagaccc

SEQ ID NO: 1035 - RNA, 20 nt, Artificial Sequence
  targeting sequence with ATCN PAM
gccccgcaccagucugaccu

SEQ ID NO: 1036 - RNA, 20 nt, Artificial Sequence
  targeting sequence with ATCN PAM
ucaauaucugccccgcacca

SEQ ID NO: 1037 - RNA, 20 nt, Artificial Sequence
  targeting sequence with ATCN PAM
gauuuggccacaaguuaauc

SEQ ID NO: 1038 - RNA, 20 nt, Artificial Sequence
  targeting sequence with ATCN PAM
gauccucaauaucugccccg

SEQ ID NO: 1039 - RNA, 20 nt, Artificial Sequence
  targeting sequence with ATCN PAM
auauuuucuagccuuaauaa

SEQ ID NO: 1040 - RNA, 20 nt, Artificial Sequence
  targeting sequence with ATCN PAM
ugcccacuuaggcccaucca

SEQ ID NO: 1041 - RNA, 20 nt, Artificial Sequence
  targeting sequence with ATCN PAM
agagaaagcagguggcacuu

SEQ ID NO: 1042 - RNA, 20 nt, Artificial Sequence
  targeting sequence with ATCN PAM
cggcuguaaaggcaguaagu

SEQ ID NO: 1043 - RNA, 20 nt, Artificial Sequence
  targeting sequence with ATCN PAM
ccagggaggaguucaucgcg

SEQ ID NO: 1044 - RNA, 20 nt, Artificial Sequence
  targeting sequence with ATCN PAM
ccaggaucuugaucuugcgg

SEQ ID NO: 1045 - RNA, 20 nt, Artificial Sequence
  targeting sequence with ATCN PAM
uggagauauuucacaaggug

SEQ ID NO: 1046 - RNA, 20 nt, Artificial Sequence
  targeting sequence with ATCN PAM
ugaucuugcggcuaugcagg

SEQ ID NO: 1047 - RNA, 20 nt, Artificial Sequence
  targeting sequence with ATCN PAM
agauccuggagauauuucac

SEQ ID NO: 1048 - RNA, 20 nt, Artificial Sequence
  targeting sequence with ATCN PAM
ugcggcuaugcagguaggag

SEQ ID NO: 1049 - RNA, 20 nt, Artificial Sequence
  targeting sequence with ATCN PAM
ggcgggacagccgggagagc

SEQ ID NO: 1050 - RNA, 20 nt, Artificial Sequence
  targeting sequence with ATCN PAM
gccuggccugucuccuuuga

SEQ ID NO: 1051 - RNA, 20 nt, Artificial Sequence
  targeting sequence with ATCN PAM
ugcuauuuagagcugcucgu

SEQ ID NO: 1052 - RNA, 20 nt, Artificial Sequence
  targeting sequence with ATCN PAM
gaaaaacacaaggcuugggc

SEQ ID NO: 1053 - RNA, 20 nt, Artificial Sequence
  targeting sequence with ATCN PAM
acaucucuccugucaaacca

SEQ ID NO: 1054 - RNA, 20 nt, Artificial Sequence
  targeting sequence with ATCN PAM
cuccugucaaaccagucagu

SEQ ID NO: 1055 - RNA, 20 nt, Artificial Sequence
  targeting sequence with ATCN PAM
cacuggucuggucucucagu

SEQ ID NO: 1056 - RNA, 20 nt, Artificial Sequence
  targeting sequence with ATCN PAM
guuguucaggaaacugccuu

SEQ ID NO: 1057 - RNA, 20 nt, Artificial Sequence
  targeting sequence with ATCN PAM
auuuaauuuucaaauuauac

SEQ ID NO: 1058 - RNA, 20 nt, Artificial Sequence
  targeting sequence with ATCN PAM
aauggauacugggguggaau

SEQ ID NO: 1059 - RNA, 20 nt, Artificial Sequence
  targeting sequence with ATCN PAM
auuugauaaccuaaugugaa

SEQ ID NO: 1060 - RNA, 20 nt, Artificial Sequence
  targeting sequence with ATCN PAM
acaauuccuaagagcuagug

SEQ ID NO: 1061 - RNA, 20 nt, Artificial Sequence
  targeting sequence with ATCN PAM
gccuugcuaaagcuaggggc

SEQ ID NO: 1062 - RNA, 20 nt, Artificial Sequence
  targeting sequence with ATCN PAM
auaauacaaagcaaauuucu

SEQ ID NO: 1063 - RNA, 20 nt, Artificial Sequence
  targeting sequence with ATCN PAM
ucugauuauauuucaucauu

SEQ ID NO: 1064 - RNA, 20 nt, Artificial Sequence
  targeting sequence with ATCN PAM
gaagaugaaaaauaguucua

SEQ ID NO: 1065 - RNA, 20 nt, Artificial Sequence
  targeting sequence with ATCN PAM
uuggaaaagccguauuuuuu

SEQ ID NO: 1066 - RNA, 20 nt, Artificial Sequence
  targeting sequence with ATCN PAM
aaaaaaaauacggcuuuucc

SEQ ID NO: 1067 - RNA, 20 nt, Artificial Sequence
  targeting sequence with ATCN PAM
caaaacauguucaaacacau

SEQ ID NO: 1068 - RNA, 20 nt, Artificial Sequence
  targeting sequence with ATCN PAM
uugcuacugaauguguuuga

SEQ ID NO: 1069 - RNA, 20 nt, Artificial Sequence
  targeting sequence with ATCN PAM
accauuggcacacacauuaa

SEQ ID NO: 1070 - RNA, 20 nt, Artificial Sequence
  targeting sequence with ATCN PAM
guuaugcauagcuuugcacu

SEQ ID NO: 1071 - RNA, 20 nt, Artificial Sequence
  targeting sequence with ATCN PAM
uaaacucugcagcuuucaag

SEQ ID NO: 1072 - RNA, 20 nt, Artificial Sequence
  targeting sequence with ATCN PAM
ugaaaaauuaagucuaucuu

SEQ ID NO: 1073 - RNA, 20 nt, Artificial Sequence
  targeting sequence with ATCN PAM
ugacuggcuuugggaaaauc

SEQ ID NO: 1074 - RNA, 20 nt, Artificial Sequence
  targeting sequence with ATCN PAM
uauguuucuuccaggugcac

SEQ ID NO: 1075 - RNA, 20 nt, Artificial Sequence
  targeting sequence with ATCN PAM
cuaagccugacgugguuuuc

SEQ ID NO: 1076 - RNA, 20 nt, Artificial Sequence
  targeting sequence with ATCN PAM
ccagugguuugucaccucug

SEQ ID NO: 1077 - RNA, 20 nt, Artificial Sequence
  targeting sequence with ATCN PAM
auaauucagcacauuugguc

SEQ ID NO: 1078 - RNA, 20 nt, Artificial Sequence
  targeting sequence with ATCN PAM
caugaagcucaauuggauac

SEQ ID NO: 1079 - RNA, 20 nt, Artificial Sequence
  targeting sequence with ATCN PAM
aauugagcuucaugggauug

SEQ ID NO: 1080 - RNA, 20 nt, Artificial Sequence
  targeting sequence with ATCN PAM
gaagaauacaacaucccaca

SEQ ID NO: 1081 - RNA, 20 nt, Artificial Sequence
  targeting sequence with ATCN PAM
cacauuaucaggucagcuuc

SEQ ID NO: 1082 - RNA, 20 nt, Artificial Sequence
  targeting sequence with ATCN PAM
ggucagcuucuaaagacacc

SEQ ID NO: 1083 - RNA, 20 nt, Artificial Sequence
  targeting sequence with ATCN PAM
ucgggcaaaaaccauuguca

SEQ ID NO: 1084 - RNA, 20 nt, Artificial Sequence
  targeting sequence with ATCN PAM
uagagaccaagagguuuaag

SEQ ID NO: 1085 - RNA, 20 nt, Artificial Sequence
  targeting sequence with ATCN PAM
cuccagucugcgguucuugc

SEQ ID NO: 1086 - RNA, 20 nt, Artificial Sequence
  targeting sequence with ATCN PAM
uucagcugagguagcaagaa

SEQ ID NO: 1087 - RNA, 20 nt, Artificial Sequence
  targeting sequence with ATCN PAM
uucaguuacuuuuacuuccc

SEQ ID NO: 1088 - RNA, 20 nt, Artificial Sequence
  targeting sequence with ATCN PAM
gcccaccuggagucuuguaa

SEQ ID NO: 1089 - RNA, 20 nt, Artificial Sequence
  targeting sequence with ATCN PAM
ugcaaggccaguuuucagca

SEQ ID NO: 1090 - RNA, 20 nt, Artificial Sequence
  targeting sequence with ATCN PAM
uuuaaaagcuaaucaugcaa

SEQ ID NO: 1091 - RNA, 20 nt, Artificial Sequence
  targeting sequence with ATCN PAM
gaucagcagauaaugagagu

SEQ ID NO: 1092 - RNA, 20 nt, Artificial Sequence
  targeting sequence with ATCN PAM
gaucauuuaaaagcuaauca

SEQ ID NO: 1093 - RNA, 20 nt, Artificial Sequence
  targeting sequence with ATCN PAM
gcagauaaugagaguagaag

SEQ ID NO: 1094 - RNA, 20 nt, Artificial Sequence
  targeting sequence with ATCN PAM
gcugaucugaucauuuaaaa

SEQ ID NO: 1095 - RNA, 20 nt, Artificial Sequence
  targeting sequence with ATCN PAM
guuaacguuucuccacccuc

SEQ ID NO: 1096 - RNA, 20 nt, Artificial Sequence
  targeting sequence with ATCN PAM
gugaaaaucaguuaacguuu

SEQ ID NO: 1097 - RNA, 20 nt, Artificial Sequence
  targeting sequence with ATCN PAM
ucagugaaaaucaguuaacg

SEQ ID NO: 1098 - RNA, 20 nt, Artificial Sequence
  targeting sequence with ATCN PAM
aaaagaauuuggaaguauaa

SEQ ID NO: 1099 - RNA, 20 nt, Artificial Sequence
  targeting sequence with ATCN PAM
accucuuuauucuaaaaggu

SEQ ID NO: 1100 - RNA, 20 nt, Artificial Sequence
  targeting sequence with ATCN PAM
uugucuuaguagagacagug

SEQ ID NO: 1101 - RNA, 20 nt, Artificial Sequence
  targeting sequence with ATCN PAM
ucuuugucuuaguagagaca

SEQ ID NO: 1102 - RNA, 20 nt, Artificial Sequence
  targeting sequence with ATCN PAM
ccaaaccugagguccgauug

SEQ ID NO: 1103 - RNA, 20 nt, Artificial Sequence
  targeting sequence with ATCN PAM
gaccucagguuuggggauua

SEQ ID NO: 1104 - RNA, 20 nt, Artificial Sequence
  targeting sequence with ATCN PAM
cuacuauauuucucaaucgg

SEQ ID NO: 1105 - RNA, 20 nt, Artificial Sequence
  targeting sequence with ATCN PAM
auggaagcuucucaucgcua

SEQ ID NO: 1106 - RNA, 20 nt, Artificial Sequence
  targeting sequence with ATCN PAM
ugaaaaaguguuucuugaac

SEQ ID NO: 1107 - RNA, 20 nt, Artificial Sequence
  targeting sequence with ATCN PAM
cguucaagaaacacuuuuuc

SEQ ID NO: 1108 - RNA, 20 nt, Artificial Sequence
  targeting sequence with ATCN PAM
gaauugaaaacccaaaaugg

SEQ ID NO: 1109 - RNA, 20 nt, Artificial Sequence
  targeting sequence with ATCN PAM
gaacagcaaauucuaauucc

SEQ ID NO: 1110 - RNA, 20 nt, Artificial Sequence
  targeting sequence with ATCN PAM
cuuucccaaucagaacagca

SEQ ID NO: 1111 - RNA, 20 nt, Artificial Sequence
  targeting sequence with ATCN PAM
guguucgugggaugguaucu

SEQ ID NO: 1112 - RNA, 20 nt, Artificial Sequence
  targeting sequence with ATCN PAM
cacgaacacagauagaaaga

SEQ ID NO: 1113 - RNA, 20 nt, Artificial Sequence
  targeting sequence with ATCN PAM
ucugaaaaggaaaaguaaac

SEQ ID NO: 1114 - RNA, 20 nt, Artificial Sequence
  targeting sequence with ATCN PAM
aacuaaugacccaugaacuu

SEQ ID NO: 1115 - RNA, 20 nt, Artificial Sequence
  targeting sequence with ATCN PAM
ccacuuuacagauaaggaca

SEQ ID NO: 1116 - RNA, 20 nt, Artificial Sequence
  targeting sequence with ATCN PAM
guaaaguggagauaaaaaua

SEQ ID NO: 1117 - RNA, 20 nt, Artificial Sequence
  targeting sequence with ATCN PAM
ugagcaaguuacuuagcuuc

SEQ ID NO: 1118 - RNA, 20 nt, Artificial Sequence
  targeting sequence with ATCN PAM
cacagauacuaaguguccca

SEQ ID NO: 1119 - RNA, 20 nt, Artificial Sequence
  targeting sequence with ATCN PAM
gugugaucuugagcaaguua

SEQ ID NO: 1120 - RNA, 20 nt, Artificial Sequence
  targeting sequence with ATCN PAM
uaauuuaaaauauuccauac

SEQ ID NO: 1121 - RNA, 20 nt, Artificial Sequence
  targeting sequence with ATCN PAM
uuuuggcuuauuucauucuu

SEQ ID NO: 1122 - RNA, 20 nt, Artificial Sequence
  targeting sequence with ATCN PAM
cauguaauacuccuuaacca

SEQ ID NO: 1123 - RNA, 20 nt, Artificial Sequence
  targeting sequence with ATCN PAM
guuaauaauaccuugcauuu

SEQ ID NO: 1124 - RNA, 20 nt, Artificial Sequence
  targeting sequence with ATCN PAM
uuuucacuucucauuuuaca

SEQ ID NO: 1125 - RNA, 20 nt, Artificial Sequence
  targeting sequence with ATCN PAM
aaaauauuguaaaaugagaa

SEQ ID NO: 1126 - RNA, 20 nt, Artificial Sequence
  targeting sequence with ATCN PAM
ugacuaguccuguuuuucac

SEQ ID NO: 1127 - RNA, 20 nt, Artificial Sequence
  targeting sequence with ATCN PAM
guaaaauagagguaaccauc

SEQ ID NO: 1128 - RNA, 20 nt, Artificial Sequence
  targeting sequence with ATCN PAM
ucccaaaaugauacugggau

SEQ ID NO: 1129 - RNA, 20 nt, Artificial Sequence
  targeting sequence with ATCN PAM
caaaaugauacugggauuga

SEQ ID NO: 1130 - RNA, 20 nt, Artificial Sequence
  targeting sequence with ATCN PAM
uuuugggaugauugcuucau

SEQ ID NO: 1131 - RNA, 20 nt, Artificial Sequence
  targeting sequence with ATCN PAM
caguaucauuuugggaugau

SEQ ID NO: 1132 - RNA, 20 nt, Artificial Sequence
  targeting sequence with ATCN PAM
cauguugagaacuagacucu

SEQ ID NO: 1133 - RNA, 20 nt, Artificial Sequence
  targeting sequence with ATCN PAM
acauaaaccucaaagcuuuc

SEQ ID NO: 1134 - RNA, 20 nt, Artificial Sequence
  targeting sequence with ATCN PAM
cuuauucacugagguauuau

SEQ ID NO: 1135 - RNA, 20 nt, Artificial Sequence
  targeting sequence with ATCN PAM
auuauuuguaauaugcucuu

SEQ ID NO: 1136 - RNA, 20 nt, Artificial Sequence
  targeting sequence with ATCN PAM
cauaguucaucuauuauuug

SEQ ID NO: 1137 - RNA, 20 nt, Artificial Sequence
  targeting sequence with ATCN PAM
ucuauuuuaauguaaugcuu

SEQ ID NO: 1138 - RNA, 20 nt, Artificial Sequence
  targeting sequence with ATCN PAM
agugcuuucaagcacuauua

SEQ ID NO: 1139 - RNA, 20 nt, Artificial Sequence
  targeting sequence with ATCN PAM
gaacaaaaguagaaguugug

SEQ ID NO: 1140 - RNA, 20 nt, Artificial Sequence
  targeting sequence with ATCN PAM
gaagaaaucggaacaaaagu

SEQ ID NO: 1141 - RNA, 20 nt, Artificial Sequence
  targeting sequence with ATCN PAM
ucauacuucucguuguguuc

SEQ ID NO: 1142 - RNA, 20 nt, Artificial Sequence
  targeting sequence with ATCN PAM
uaaacaaauuuuguucagcc

SEQ ID NO: 1143 - RNA, 20 nt, Artificial Sequence
  targeting sequence with ATCN PAM
aauuuuuguucugaacaaaa

SEQ ID NO: 1144 - RNA, 20 nt, Artificial Sequence
  targeting sequence with ATCN PAM
ugaacucaaugaucuuucuu

SEQ ID NO: 1145 - RNA, 20 nt, Artificial Sequence
  targeting sequence with ATCN PAM
uugaguucaggaucaaauuu

SEQ ID NO: 1146 - RNA, 20 nt, Artificial Sequence
  targeting sequence with ATCN PAM
uucuuuuuuuuuuacaaggc

SEQ ID NO: 1147 - RNA, 20 nt, Artificial Sequence
  targeting sequence with ATCN PAM
uuuuuuaguuuucuuaauug

SEQ ID NO: 1148 - RNA, 20 nt, Artificial Sequence
  targeting sequence with ATCN PAM
caauuaagaaaacuaaaaaa

SEQ ID NO: 1149 - RNA, 20 nt, Artificial Sequence
  targeting sequence with ATCN PAM
ucaacacccucaucuucuuu

SEQ ID NO: 1150 - RNA, 20 nt, Artificial Sequence
  targeting sequence with ATCN PAM
acacccucaucuucuuucaa

SEQ ID NO: 1151 - RNA, 20 nt, Artificial Sequence
  targeting sequence with ATCN PAM
ucuuucaaaagcaaaugagu

SEQ ID NO: 1152 - RNA, 20 nt, Artificial Sequence
  targeting sequence with ATCN PAM
uuuuugcacuugcuucgggu

SEQ ID NO: 1153 - RNA, 20 nt, Artificial Sequence
  targeting sequence with ATCN PAM
acaaaaccaaaguaacaauu

SEQ ID NO: 1154 - RNA, 20 nt, Artificial Sequence
  targeting sequence with ATCN PAM
caucuacaaaaccaaaguaa

SEQ ID NO: 1155 - RNA, 20 nt, Artificial Sequence
  targeting sequence with ATCN PAM
ugacuugauaccccuuuuag

SEQ ID NO: 1156 - RNA, 20 nt, Artificial Sequence
  targeting sequence with ATCN PAM
agucaagauauaaagacugc

SEQ ID NO: 1157 - RNA, 20 nt, Artificial Sequence
  targeting sequence with ATCN PAM
aaaucuucuggcuuaagaga

SEQ ID NO: 1158 - RNA, 20 nt, Artificial Sequence
  targeting sequence with ATCN PAM
ucuggcuuaagagaagucuc

SEQ ID NO: 1159 - RNA, 20 nt, Artificial Sequence
  targeting sequence with ATCN PAM
ucacaaaaauggagagacuu

SEQ ID NO: 1160 - RNA, 20 nt, Artificial Sequence
  targeting sequence with ATCN PAM
aaaaguucacuugcuaauua

SEQ ID NO: 1161 - RNA, 20 nt, Artificial Sequence
  targeting sequence with ATCN PAM
gaacuucaguccuugugggc

SEQ ID NO: 1162 - RNA, 20 nt, Artificial Sequence
  targeting sequence with ATCN PAM
uuuucuagcccacaaggacu

SEQ ID NO: 1163 - RNA, 20 nt, Artificial Sequence
  targeting sequence with ATCN PAM
gaaaugugguccaguucuuu

SEQ ID NO: 1164 - RNA, 20 nt, Artificial Sequence
  targeting sequence with ATCN PAM
gucauuuaaaaaugaaaaag

SEQ ID NO: 1165 - RNA, 20 nt, Artificial Sequence
  targeting sequence with ATCN PAM
cucuuuuucauuuuuaaaug

SEQ ID NO: 1166 - RNA, 20 nt, Artificial Sequence
  targeting sequence with ATCN PAM
uuuggcuguacuaucuuuac

SEQ ID NO: 1167 - RNA, 20 nt, Artificial Sequence
  targeting sequence with ATCN PAM
uuaccaucuuauaugcuuac

SEQ ID NO: 1168 - RNA, 20 nt, Artificial Sequence
  targeting sequence with ATCN PAM
uauaugcuuaccugauaaag

SEQ ID NO: 1169 - RNA, 20 nt, Artificial Sequence
  targeting sequence with ATCN PAM
gguaagcauauaagauggua

SEQ ID NO: 1170 - RNA, 20 nt, Artificial Sequence
  targeting sequence with ATCN PAM
aaucuuccugcugucuuccc

SEQ ID NO: 1171 - RNA, 20 nt, Artificial Sequence
  targeting sequence with ATCN PAM
uccugcugucuucccaaaua

SEQ ID NO: 1172 - RNA, 20 nt, Artificial Sequence
  targeting sequence with ATCN PAM
acaugggacagacuuacggc

SEQ ID NO: 1173 - RNA, 20 nt, Artificial Sequence
  targeting sequence with ATCN PAM
cuucugcucaguuuggugcu

SEQ ID NO: 1174 - RNA, 20 nt, Artificial Sequence
  targeting sequence with ATCN PAM
cuugcuacaagaacccaucg

SEQ ID NO: 1175 - RNA, 20 nt, Artificial Sequence
  targeting sequence with ATCN PAM
ucauuuguuccucaucuucu

SEQ ID NO: 1176 - RNA, 20 nt, Artificial Sequence
  targeting sequence with ATCN PAM
uuuguuccucaucuucuccc

SEQ ID NO: 1177 - RNA, 20 nt, Artificial Sequence
  targeting sequence with ATCN PAM
ucucccacucuuuccaauuc

SEQ ID NO: 1178 - RNA, 20 nt, Artificial Sequence
  targeting sequence with ATCN PAM
ucuuugcuggaaaaacaaag

SEQ ID NO: 1179 - RNA, 20 nt, Artificial Sequence
  targeting sequence with ATCN PAM
cuuagacuuuguuuuuccag

SEQ ID NO: 1180 - RNA, 20 nt, Artificial Sequence
  targeting sequence with ATCN PAM
cccucauuuuaauauggaua

SEQ ID NO: 1181 - RNA, 20 nt, Artificial Sequence
  targeting sequence with ATCN PAM
cugcacaacaaaaaagucaa

SEQ ID NO: 1182 - RNA, 20 nt, Artificial Sequence
  targeting sequence with ATCN PAM
gaaaaguuucuagcuugacu

SEQ ID NO: 1183 - RNA, 20 nt, Artificial Sequence
  targeting sequence with ATCN PAM
cugaguagggcuauuauaaa

SEQ ID NO: 1184 - RNA, 20 nt, Artificial Sequence
  targeting sequence with ATCN PAM
uuauaauagcccuacucagu

SEQ ID NO: 1185 - RNA, 20 nt, Artificial Sequence
  targeting sequence with ATCN PAM
gugaguuacacugucuucuc

SEQ ID NO: 1186 - RNA, 20 nt, Artificial Sequence
  targeting sequence with ATCN PAM
cuuucaucagauguaauccu

SEQ ID NO: 1187 - RNA, 20 nt, Artificial Sequence
  targeting sequence with ATCN PAM
gauguaauccuccagaaggu

SEQ ID NO: 1188 - RNA, 20 nt, Artificial Sequence
  targeting sequence with ATCN PAM
gaugaaagugauacacacuc

SEQ ID NO: 1189 - RNA, 20 nt, Artificial Sequence
  targeting sequence with ATCN PAM
uccagaagguaaauaauuug

SEQ ID NO: 1190 - RNA, 20 nt, Artificial Sequence
  targeting sequence with ATCN PAM
aauuauuuaccuucuggagg

SEQ ID NO: 1191 - RNA, 20 nt, Artificial Sequence
  targeting sequence with ATCN PAM
ucuucauucuugauccucau

SEQ ID NO: 1192 - RNA, 20 nt, Artificial Sequence
  targeting sequence with ATCN PAM
agaaugaagaagauucaaaa

SEQ ID NO: 1193 - RNA, 20 nt, Artificial Sequence
  targeting sequence with ATCN PAM
ucaugguaaccuuguaggua

SEQ ID NO: 1194 - RNA, 20 nt, Artificial Sequence
  targeting sequence with ATCN PAM
auaaauugagaguaaaccuu

SEQ ID NO: 1195 - RNA, 20 nt, Artificial Sequence
  targeting sequence with ATCN PAM
uggucuaauacuucuccccc

SEQ ID NO: 1196 - RNA, 20 nt, Artificial Sequence
  targeting sequence with ATCN PAM
ucccacuuccuccucccaaa

SEQ ID NO: 1197 - RNA, 20 nt, Artificial Sequence
  targeting sequence with ATCN PAM
ccugaucccaagaguuugag

SEQ ID NO: 1198 - RNA, 20 nt, Artificial Sequence
  targeting sequence with ATCN PAM
ggugaucuucccacuuccuc

SEQ ID NO: 1199 - RNA, 20 nt, Artificial Sequence
  targeting sequence with ATCN PAM
caagaguuugagaccagccu

SEQ ID NO: 1200 - RNA, 20 nt, Artificial Sequence
  targeting sequence with ATCN PAM
cacugugcucuccaggcugg

SEQ ID NO: 1201 - RNA, 20 nt, Artificial Sequence
  targeting sequence with ATCN PAM
ucgucuuugcaaaaaaugaa

SEQ ID NO: 1202 - RNA, 20 nt, Artificial Sequence
  targeting sequence with ATCN PAM
uagcucccugaagccuugac

SEQ ID NO: 1203 - RNA, 20 nt, Artificial Sequence
  targeting sequence with ATCN PAM
caaaaaaaaacccacuaaac

SEQ ID NO: 1204 - RNA, 20 nt, Artificial Sequence
  targeting sequence with ATCN PAM
uagaagacacauuggaacuu

SEQ ID NO: 1205 - RNA, 20 nt, Artificial Sequence
  targeting sequence with ATCN PAM
uaaucacuaaaccacagauu

SEQ ID NO: 1206 - RNA, 20 nt, Artificial Sequence
  targeting sequence with ATCN PAM
cuaaaccacagauuguaaaa

SEQ ID NO: 1207 - RNA, 20 nt, Artificial Sequence
  targeting sequence with ATCN PAM
gugguuuagugauuaggaua

SEQ ID NO: 1208 - RNA, 20 nt, Artificial Sequence
  targeting sequence with ATCN PAM
accuuuuacaaucugugguu

SEQ ID NO: 1209 - RNA, 20 nt, Artificial Sequence
  targeting sequence with ATCN PAM
cucuagacccauccaccuuu

SEQ ID NO: 1210 - RNA, 20 nt, Artificial Sequence
  targeting sequence with ATCN PAM
uuuaacccaaguucuuuucu

SEQ ID NO: 1211 - RNA, 20 nt, Artificial Sequence
  targeting sequence with ATCN PAM
agguuuucugauguaauuug

SEQ ID NO: 1212 - RNA, 20 nt, Artificial Sequence
  targeting sequence with ATCN PAM
gaaaaccuugauucuaauuc

SEQ ID NO: 1213 - RNA, 20 nt, Artificial Sequence
  targeting sequence with ATCN PAM
agcuccucaaaauuauuuua

SEQ ID NO: 1214 - RNA, 20 nt, Artificial Sequence
  targeting sequence with ATCN PAM
auccagcuccucaaaauuau

SEQ ID NO: 1215 - RNA, 20 nt, Artificial Sequence
  targeting sequence with ATCN PAM
uaugaaaugauauuguuuac

SEQ ID NO: 1216 - RNA, 20 nt, Artificial Sequence
  targeting sequence with ATCN PAM
uuucauaagauccauccagc

SEQ ID NO: 1217 - RNA, 20 nt, Artificial Sequence
  targeting sequence with ATCN PAM
cuaaaauuguaaacaauauc

SEQ ID NO: 1218 - RNA, 20 nt, Artificial Sequence
  targeting sequence with ATCN PAM
gcacaaacucuuaagagacu

SEQ ID NO: 1219 - RNA, 20 nt, Artificial Sequence
  targeting sequence with ATCN PAM
caaagucucgguaaaagacu

SEQ ID NO: 1220 - RNA, 20 nt, Artificial Sequence
  targeting sequence with ATCN PAM
ccuucuuuuuacagagucuu

SEQ ID NO: 1221 - RNA, 20 nt, Artificial Sequence
  targeting sequence with ATCN PAM
uaaccuccuaucacacacgu

SEQ ID NO: 1222 - RNA, 20 nt, Artificial Sequence
  targeting sequence with ATCN PAM
cacacguagucuaaugacuu

SEQ ID NO: 1223 - RNA, 20 nt, Artificial Sequence
  targeting sequence with ATCN PAM
uaggaagucauuagacuacg

SEQ ID NO: 1224 - RNA, 20 nt, Artificial Sequence
  targeting sequence with ATCN PAM
uccaaccccaaggggaccuc

SEQ ID NO: 1225 - RNA, 20 nt, Artificial Sequence
  targeting sequence with ATCN PAM
uagaugaggaagucgagcgc

SEQ ID NO: 1226 - RNA, 20 nt, Artificial Sequence
  targeting sequence with ATCN PAM
aagaugacuagggagacugg

SEQ ID NO: 1227 - RNA, 20 nt, Artificial Sequence
  targeting sequence with ATCN PAM
gcccuggggugcgcucgacu

SEQ ID NO: 1228 - RNA, 20 nt, Artificial Sequence
  targeting sequence with ATCN PAM
cacaggaagagcaccugggc

SEQ ID NO: 1229 - RNA, 20 nt, Artificial Sequence
  targeting sequence with ATCN PAM
ggagaguggacagugugugg

SEQ ID NO: 1230 - RNA, 20 nt, Artificial Sequence
  targeting sequence with ATCN PAM
agcaggguccggcugcagca

SEQ ID NO: 1231 - RNA, 20 nt, Artificial Sequence
  targeting sequence with ATCN PAM
uacuccgccccacacccugg

SEQ ID NO: 1232 - RNA, 20 nt, Artificial Sequence
  targeting sequence with ATCN PAM
aauccauucucgaggaagac

SEQ ID NO: 1233 - RNA, 20 nt, Artificial Sequence
  targeting sequence with ATCN PAM
auucucgaggaagacgcacc

SEQ ID NO: 1234 - RNA, 20 nt, Artificial Sequence
  targeting sequence with ATCN PAM
cucgcgcucugguugcgcug

SEQ ID NO: 1235 - RNA, 20 nt, Artificial Sequence
  targeting sequence with ATCN PAM
cggcuucccuuacggcucgg

SEQ ID NO: 1236 - RNA, 20 nt, Artificial Sequence
  targeting sequence with ATCN PAM
cuccacgucaacacggcccu

SEQ ID NO: 1237 - RNA, 20 nt, Artificial Sequence
  targeting sequence with ATCN PAM
aaggcagcgacagggccaga

SEQ ID NO: 1238 - RNA, 20 nt, Artificial Sequence
  targeting sequence with ATCN PAM
cacacccacgagacagcacg

SEQ ID NO: 1239 - RNA, 20 nt, Artificial Sequence
  targeting sequence with ATCN PAM
acauaguacccauacucuug

SEQ ID NO: 1240 - RNA, 20 nt, Artificial Sequence
  targeting sequence with ATCN PAM
uaauuaaaauaaaugagaca

SEQ ID NO: 1241 - RNA, 20 nt, Artificial Sequence
  targeting sequence with ATCN PAM
uaacauuuagagcaagugac

SEQ ID NO: 1242 - RNA, 20 nt, Artificial Sequence
  targeting sequence with ATCN PAM
gcgucgcuugcucuaagugu

SEQ ID NO: 1243 - RNA, 20 nt, Artificial Sequence
  targeting sequence with ATCN PAM
cagguuuaaaggcucccuag

SEQ ID NO: 1244 - RNA, 20 nt, Artificial Sequence
  targeting sequence with ATCN PAM
cguuucucuaaaacuggaga

SEQ ID NO: 1245 - RNA, 20 nt, Artificial Sequence
  targeting sequence with ATCN PAM
ccaguuuuagagaaacgaga

SEQ ID NO: 1246 - RNA, 20 nt, Artificial Sequence
  targeting sequence with ATCN PAM
uaccugcccaucuccaguuu

SEQ ID NO: 1247 - RNA, 20 nt, Artificial Sequence
  targeting sequence with ATCN PAM
gaaaggugcucaaaaugagc

SEQ ID NO: 1248 - RNA, 20 nt, Artificial Sequence
  targeting sequence with ATCN PAM
aaaggugacaaagucauucc

SEQ ID NO: 1249 - RNA, 20 nt, Artificial Sequence
  targeting sequence with ATCN PAM
ccuaaaucuauaacauagca

SEQ ID NO: 1250 - RNA, 20 nt, Artificial Sequence
  targeting sequence with ATCN PAM
auaacauagcagucuguuuu

SEQ ID NO: 1251 - RNA, 20 nt, Artificial Sequence
  targeting sequence with ATCN PAM
cauaaguaagaauaugacaa

SEQ ID NO: 1252 - RNA, 20 nt, Artificial Sequence
  targeting sequence with ATCN PAM
uucagcauuguugugaagcc

SEQ ID NO: 1253 - RNA, 20 nt, Artificial Sequence
  targeting sequence with ATCN PAM
cagaagggacagaaccaaag

SEQ ID NO: 1254 - RNA, 20 nt, Artificial Sequence
  targeting sequence with ATCN PAM
uucucuguguaaagcaugcc

SEQ ID NO: 1255 - RNA, 20 nt, Artificial Sequence
  targeting sequence with ATCN PAM
cacacggaaauccugaacau

SEQ ID NO: 1256 - RNA, 20 nt, Artificial Sequence
  targeting sequence with ATCN PAM
ugaacauccuucaaggcuca

SEQ ID NO: 1257 - RNA, 20 nt, Artificial Sequence
  targeting sequence with ATCN PAM
uucaaggcucacguuggaga

SEQ ID NO: 1258 - RNA, 20 nt, Artificial Sequence
  targeting sequence with ATCN PAM
uuuaucucguugugucuuca

SEQ ID NO: 1259 - RNA, 20 nt, Artificial Sequence
  targeting sequence with ATCN PAM
cguugugucuucaccacucu

SEQ ID NO: 1260 - RNA, 20 nt, Artificial Sequence
  targeting sequence with ATCN PAM
acccucucugggcuucaguu

SEQ ID NO: 1261 - RNA, 20 nt, Artificial Sequence
  targeting sequence with ATCN PAM
cccauuuauguuaccugccu

SEQ ID NO: 1262 - RNA, 20 nt, Artificial Sequence
  targeting sequence with ATCN PAM
ucaacacuaggaauuguaug

SEQ ID NO: 1263 - RNA, 20 nt, Artificial Sequence
  targeting sequence with ATCN PAM
gugaaucuuucauuuguacu

SEQ ID NO: 1264 - RNA, 20 nt, Artificial Sequence
  targeting sequence with ATCN PAM
uucauuuguacuuuuaauag

SEQ ID NO: 1265 - RNA, 20 nt, Artificial Sequence
  targeting sequence with ATCN PAM
cuauuaaaaguacaaaugaa

SEQ ID NO: 1266 - RNA, 20 nt, Artificial Sequence
  targeting sequence with ATCN PAM
uuuuacuuuuaacuuuauua

SEQ ID NO: 1267 - RNA, 20 nt, Artificial Sequence
  targeting sequence with ATCN PAM
gcuugugcuauagguacguu

SEQ ID NO: 1268 - RNA, 20 nt, Artificial Sequence
  targeting sequence with ATCN PAM
ucagcuugugcuauagguac

SEQ ID NO: 1269 - RNA, 20 nt, Artificial Sequence
  targeting sequence with ATCN PAM
ggguuuuuaugugaaauggc

SEQ ID NO: 1270 - RNA, 20 nt, Artificial Sequence
  targeting sequence with ATCN PAM
acucugaaaaaaaaacaaaa

SEQ ID NO: 1271 - RNA, 20 nt, Artificial Sequence
  targeting sequence with ATCN PAM
ggcugcauucggccagcaaa

SEQ ID NO: 1272 - RNA, 20 nt, Artificial Sequence
  targeting sequence with ATCN PAM
guuuaauucagaagucuaau

SEQ ID NO: 1273 - RNA, 20 nt, Artificial Sequence
  targeting sequence with ATCN PAM
auaguaacaacaaccacuga

SEQ ID NO: 1274 - RNA, 20 nt, Artificial Sequence
  targeting sequence with ATCN PAM
aguauuuuauuacuauccau

SEQ ID NO: 1275 - RNA, 20 nt, Artificial Sequence
  targeting sequence with ATCN PAM
acccacaguauuucguuuua

SEQ ID NO: 1276 - RNA, 20 nt, Artificial Sequence
  targeting sequence with ATCN PAM
uucauucacguaugaauaca

SEQ ID NO: 1277 - RNA, 20 nt, Artificial Sequence
  targeting sequence with ATCN PAM
uuauucaucauucauucacg

SEQ ID NO: 1278 - RNA, 20 nt, Artificial Sequence
  targeting sequence with ATCN PAM
guaaugggccaaaaaccaga

SEQ ID NO: 1279 - RNA, 20 nt, Artificial Sequence
  targeting sequence with ATCN PAM
uaauagguugucucaaaucu

SEQ ID NO: 1280 - RNA, 20 nt, Artificial Sequence
  targeting sequence with ATCN PAM
cuuauccuaauagguugucu

SEQ ID NO: 1281 - RNA, 20 nt, Artificial Sequence
  targeting sequence with ATCN PAM
auccugauggcugcuagaua

SEQ ID NO: 1282 - RNA, 20 nt, Artificial Sequence
  targeting sequence with ATCN PAM
ugauggcugcuagauauacc

SEQ ID NO: 1283 - RNA, 20 nt, Artificial Sequence
  targeting sequence with ATCN PAM
ggauugauggucuauagaac

SEQ ID NO: 1284 - RNA, 20 nt, Artificial Sequence
  targeting sequence with ATCN PAM
agcagccaucaggauugaug

SEQ ID NO: 1285 - RNA, 20 nt, Artificial Sequence
  targeting sequence with ATCN PAM
gcugguauaucuagcagcca

SEQ ID NO: 1286 - RNA, 20 nt, Artificial Sequence
  targeting sequence with ATCN PAM
uagaugucaaagauuagucc

SEQ ID NO: 1287 - RNA, 20 nt, Artificial Sequence
  targeting sequence with ATCN PAM
aggauuuuuuuaguucuacu

SEQ ID NO: 1288 - RNA, 20 nt, Artificial Sequence
  targeting sequence with ATCN PAM
uugacaucuaggauuuuuuu

SEQ ID NO: 1289 - RNA, 20 nt, Artificial Sequence
  targeting sequence with ATCN PAM
aaaucagccauugucucccg

SEQ ID NO: 1290 - RNA, 20 nt, Artificial Sequence
  targeting sequence with ATCN PAM
gccauugucucccggucugc

SEQ ID NO: 1291 - RNA, 20 nt, Artificial Sequence
  targeting sequence with ATCN PAM
cagcagcaggucuuaaaaaa

SEQ ID NO: 1292 - RNA, 20 nt, Artificial Sequence
  targeting sequence with ATCN PAM
uguuacucuacuucucauaa

SEQ ID NO: 1293 - RNA, 20 nt, Artificial Sequence
  targeting sequence with ATCN PAM
cucuagguuuaugagaagua

SEQ ID NO: 1294 - RNA, 20 nt, Artificial Sequence
  targeting sequence with ATCN PAM
ggcuugcaacauuuaaauuu

SEQ ID NO: 1295 - RNA, 20 nt, Artificial Sequence
  targeting sequence with ATCN PAM
ucggguagaaaaauagaguu

SEQ ID NO: 1296 - RNA, 20 nt, Artificial Sequence
  targeting sequence with ATCN PAM
uucccaaaugcucccuuauu

SEQ ID NO: 1297 - RNA, 20 nt, Artificial Sequence
  targeting sequence with ATCN PAM
caaccaggaugucuuauuag

SEQ ID NO: 1298 - RNA, 20 nt, Artificial Sequence
  targeting sequence with ATCN PAM
ugguugagaugaaccuggag

SEQ ID NO: 1299 - RNA, 20 nt, Artificial Sequence
  targeting sequence with ATCN PAM
cauuuaaagaugaagaaauu

SEQ ID NO: 1300 - RNA, 20 nt, Artificial Sequence
  targeting sequence with ATCN PAM
uuaaaugagaugaaaauucc

SEQ ID NO: 1301 - RNA, 20 nt, Artificial Sequence
  targeting sequence with ATCN PAM
caauuucuucaucuuuaaau

SEQ ID NO: 1302 - RNA, 20 nt, Artificial Sequence
  targeting sequence with ATCN PAM
ugcaaauuguccucugacaa

SEQ ID NO: 1303 - RNA, 20 nt, Artificial Sequence
  targeting sequence with ATCN PAM
cugcaauggaaucugacagu

SEQ ID NO: 1304 - RNA, 20 nt, Artificial Sequence
  targeting sequence with ATCN PAM
ccagaaacucagaauuggaa

SEQ ID NO: 1305 - RNA, 20 nt, Artificial Sequence
  targeting sequence with ATCN PAM
aaacucuuaauguacuuaga

SEQ ID NO: 1306 - RNA, 20 nt, Artificial Sequence
  targeting sequence with ATCN PAM
gacauauaugauauauuuua

SEQ ID NO: 1307 - RNA, 20 nt, Artificial Sequence
  targeting sequence with ATCN PAM
uauaugucugauuugcccca

SEQ ID NO: 1308 - RNA, 20 nt, Artificial Sequence
  targeting sequence with ATCN PAM
ugaaauuugccuuccuaaaa

SEQ ID NO: 1309 - RNA, 20 nt, Artificial Sequence
  targeting sequence with ATCN PAM
aagaggaagaauguucaggc

SEQ ID NO: 1310 - RNA, 20 nt, Artificial Sequence
  targeting sequence with ATCN PAM
uuucugaaugucucauuuga

SEQ ID NO: 1311 - RNA, 20 nt, Artificial Sequence
  targeting sequence with ATCN PAM
caaaaucauuucugaauguc

SEQ ID NO: 1312 - RNA, 20 nt, Artificial Sequence
  targeting sequence with ATCN PAM
cuuugaugagcucauaugug

SEQ ID NO: 1313 - RNA, 20 nt, Artificial Sequence
  targeting sequence with ATCN PAM
aagugauuccugugugaccu

SEQ ID NO: 1314 - RNA, 20 nt, Artificial Sequence
  targeting sequence with ATCN PAM
uugguauguggcuuccuuuc

SEQ ID NO: 1315 - RNA, 20 nt, Artificial Sequence
  targeting sequence with ATCN PAM
aaagucauccuugguaugug

SEQ ID NO: 1316 - RNA, 20 nt, Artificial Sequence
  targeting sequence with ATCN PAM
aauaauccaccauagcaauc

SEQ ID NO: 1317 - RNA, 20 nt, Artificial Sequence
  targeting sequence with ATCN PAM
accauagcaauccacaagug

SEQ ID NO: 1318 - RNA, 20 nt, Artificial Sequence
  targeting sequence with ATCN PAM
acaagugucaggcgcuuugg

SEQ ID NO: 1319 - RNA, 20 nt, Artificial Sequence
  targeting sequence with ATCN PAM
aaagcgccugacacuugugg

SEQ ID NO: 1320 - RNA, 20 nt, Artificial Sequence
  targeting sequence with ATCN PAM
uuguuuuguaggugagaaug

SEQ ID NO: 1321 - RNA, 20 nt, Artificial Sequence
  targeting sequence with ATCN PAM
gagcuuucauucucaccuac

SEQ ID NO: 1322 - RNA, 20 nt, Artificial Sequence
  targeting sequence with ATCN PAM
ccuaucugagcuuucauucu

SEQ ID NO: 1323 - RNA, 20 nt, Artificial Sequence
  targeting sequence with ATCN PAM
gcuuuucuggccccacgucc

SEQ ID NO: 1324 - RNA, 20 nt, Artificial Sequence
  targeting sequence with ATCN PAM
cacucuuuccagcugggcaa

SEQ ID NO: 1325 - RNA, 20 nt, Artificial Sequence
  targeting sequence with ATCN PAM
uccuuguuccagcuucuuua

SEQ ID NO: 1326 - RNA, 20 nt, Artificial Sequence
  targeting sequence with ATCN PAM
uuguuccagcuucuuuauca

SEQ ID NO: 1327 - RNA, 20 nt, Artificial Sequence
  targeting sequence with ATCN PAM
gccagcucugugacuaggag

SEQ ID NO: 1328 - RNA, 20 nt, Artificial Sequence
  targeting sequence with ATCN PAM
gggcaguggugccuguccug

SEQ ID NO: 1329 - RNA, 20 nt, Artificial Sequence
  targeting sequence with ATCN PAM
uuacgaaaacauaauguagu

SEQ ID NO: 1330 - RNA, 20 nt, Artificial Sequence
  targeting sequence with ATCN PAM
aauaagauaauguaaguuua

SEQ ID NO: 1331 - RNA, 20 nt, Artificial Sequence
  targeting sequence with ATCN PAM
uauuugauccuuacgaaaac

SEQ ID NO: 1332 - RNA, 20 nt, Artificial Sequence
  targeting sequence with ATCN PAM
gugaaacagguauacaguug

SEQ ID NO: 1333 - RNA, 20 nt, Artificial Sequence
  targeting sequence with ATCN PAM
agcuuuugucaguaacuugg

SEQ ID NO: 1334 - RNA, 20 nt, Artificial Sequence
  targeting sequence with ATCN PAM
aaaaaucaagcuuuugucag

SEQ ID NO: 1335 - RNA, 20 nt, Artificial Sequence
  targeting sequence with ATCN PAM
gaauggauuuccuucucaac

SEQ ID NO: 1336 - RNA, 20 nt, Artificial Sequence
  targeting sequence with ATCN PAM
auucagaugguuggggggcc

SEQ ID NO: 1337 - RNA, 20 nt, Artificial Sequence
  targeting sequence with ATCN PAM
uggccugaaacagucucuca

SEQ ID NO: 1338 - RNA, 20 nt, Artificial Sequence
  targeting sequence with ATCN PAM
acacagacuuuaaguaugau

SEQ ID NO: 1339 - RNA, 20 nt, Artificial Sequence
  targeting sequence with ATCN PAM
uacuuaaagucuguguugau

SEQ ID NO: 1340 - RNA, 20 nt, Artificial Sequence
  targeting sequence with ATCN PAM
uuuaucuuaacccaggcauu

SEQ ID NO: 1341 - RNA, 20 nt, Artificial Sequence
  targeting sequence with ATCN PAM
uaacccaggcauuccuuucu

SEQ ID NO: 1342 - RNA, 20 nt, Artificial Sequence
  targeting sequence with ATCN PAM
cgccacuacacuccagccug

SEQ ID NO: 1343 - RNA, 20 nt, Artificial Sequence
  targeting sequence with ATCN PAM
cagcucacugcaagcuccac

SEQ ID NO: 1344 - RNA, 20 nt, Artificial Sequence
  targeting sequence with ATCN PAM
ucccguguagcugggacuau

SEQ ID NO: 1345 - RNA, 20 nt, Artificial Sequence
  targeting sequence with ATCN PAM
ugcuuggcuaauuuuuugua

SEQ ID NO: 1346 - RNA, 20 nt, Artificial Sequence
  targeting sequence with ATCN PAM
uggcuaacacggugaaaccc

SEQ ID NO: 1347 - RNA, 20 nt, Artificial Sequence
  targeting sequence with ATCN PAM
ugaggucaggagacugagac

SEQ ID NO: 1348 - RNA, 20 nt, Artificial Sequence
  targeting sequence with ATCN PAM
acccaccucggccucccaaa

SEQ ID NO: 1349 - RNA, 20 nt, Artificial Sequence
  targeting sequence with ATCN PAM
cagcacuuugggaggccgag

SEQ ID NO: 1350 - RNA, 20 nt, Artificial Sequence
  targeting sequence with ATCN PAM
aaggaccuagggucggccgg

SEQ ID NO: 1351 - RNA, 20 nt, Artificial Sequence
  targeting sequence with ATCN PAM
accuauaagcuagaagcccc

SEQ ID NO: 1352 - RNA, 20 nt, Artificial Sequence
  targeting sequence with ATCN PAM
uucuggaccaaaccaaugca

SEQ ID NO: 1353 - RNA, 20 nt, Artificial Sequence
  targeting sequence with ATCN PAM
aauacauuuaagaaaugcau

SEQ ID NO: 1354 - RNA, 20 nt, Artificial Sequence
  targeting sequence with ATCN PAM
cuucagauauuuuacagagu

SEQ ID NO: 1355 - RNA, 20 nt, Artificial Sequence
  targeting sequence with ATCN PAM
gaagagauuuauucugagcc

SEQ ID NO: 1356 - RNA, 20 nt, Artificial Sequence
  targeting sequence with ATCN PAM
aacucuguaaaauaucugaa

SEQ ID NO: 1357 - RNA, 20 nt, Artificial Sequence
  targeting sequence with ATCN PAM
ggcuaugugcaagauguugc

SEQ ID NO: 1358 - RNA, 20 nt, Artificial Sequence
  targeting sequence with ATCN PAM
aaauaauuuaauuugacuga

SEQ ID NO: 1359 - RNA, 20 nt, Artificial Sequence
  targeting sequence with ATCN PAM
cuuaaaauauuuugcaguuu

SEQ ID NO: 1360 - RNA, 20 nt, Artificial Sequence
  targeting sequence with ATCN PAM
aucagauacauuuaagaaau

SEQ ID NO: 1361 - RNA, 20 nt, Artificial Sequence
  targeting sequence with ATCN PAM
gauacauuuaagaaauacau

SEQ ID NO: 1362 - RNA, 20 nt, Artificial Sequence
  targeting sequence with ATCN PAM
gauugaugucucaugccucc

SEQ ID NO: 1363 - RNA, 20 nt, Artificial Sequence
  targeting sequence with ATCN PAM
aaccaauguauuucuuaaau

SEQ ID NO: 1364 - RNA, 20 nt, Artificial Sequence
  targeting sequence with ATCN PAM
agaaaggcaggacaacucaa

SEQ ID NO: 1365 - RNA, 20 nt, Artificial Sequence
  targeting sequence with ATCN PAM
caggucuuuaaacaaacuca

SEQ ID NO: 1366 - RNA, 20 nt, Artificial Sequence
  targeting sequence with ATCN PAM
acagaaaggaaugucugggu

SEQ ID NO: 1367 - RNA, 20 nt, Artificial Sequence
  targeting sequence with ATCN PAM
uaacccagacauuccuuucu

SEQ ID NO: 1368 - RNA, 20 nt, Artificial Sequence
  targeting sequence with ATCN PAM
uuuaucuuaacccagacauu

SEQ ID NO: 1369 - RNA, 20 nt, Artificial Sequence
  targeting sequence with ATCN PAM
cggcucacugcaaccucugu

SEQ ID NO: 1370 - RNA, 20 nt, Artificial Sequence
  targeting sequence with ATCN PAM
cagcuacuagggaggcugag

SEQ ID NO: 1371 - RNA, 20 nt, Artificial Sequence
  targeting sequence with ATCN PAM
cgaggucaggaguuugaggc

SEQ ID NO: 1372 - RNA, 20 nt, Artificial Sequence
  targeting sequence with ATCN PAM
gcccgccucggccucccaaa

SEQ ID NO: 1373 - RNA, 20 nt, Artificial Sequence
  targeting sequence with ATCN PAM
cagcguuuugggaggccgag

SEQ ID NO: 1374 - RNA, 20 nt, Artificial Sequence
  targeting sequence with ATCN PAM
uacuuaaagucuguguugau

SEQ ID NO: 1375 - RNA, 20 nt, Artificial Sequence
  targeting sequence with ATCN PAM
acacagacuuuaaguaugau

SEQ ID NO: 1376 - RNA, 20 nt, Artificial Sequence
  targeting sequence with ATCN PAM
ucuucauuaaucuuuuucug

SEQ ID NO: 1377 - RNA, 20 nt, Artificial Sequence
  targeting sequence with ATCN PAM
uuuucugauccucuccuuga

SEQ ID NO: 1378 - RNA, 20 nt, Artificial Sequence
  targeting sequence with ATCN PAM
gaaaaagauuaaugaagaag

SEQ ID NO: 1379 - RNA, 20 nt, Artificial Sequence
  targeting sequence with ATCN PAM
ucuccuugaauuaaaaugcu

SEQ ID NO: 1380 - RNA, 20 nt, Artificial Sequence
  targeting sequence with ATCN PAM
gagauuuguugucucaacag

SEQ ID NO: 1381 - RNA, 20 nt, Artificial Sequence
  targeting sequence with ATCN PAM
cggauauuuaccccagacaa

SEQ ID NO: 1382 - RNA, 20 nt, Artificial Sequence
  targeting sequence with ATCN PAM
uaguuuuccauugcuguuga

SEQ ID NO: 1383 - RNA, 20 nt, Artificial Sequence
  targeting sequence with ATCN PAM
auaaaaccugcauuucacca

SEQ ID NO: 1384 - RNA, 20 nt, Artificial Sequence
  targeting sequence with ATCN PAM
gacaccaccuccucaagcuu

SEQ ID NO: 1385 - RNA, 20 nt, Artificial Sequence
  targeting sequence with ATCN PAM
uuugugcccuauguaaauca

SEQ ID NO: 1386 - RNA, 20 nt, Artificial Sequence
  targeting sequence with ATCN PAM
aucuuuugugcccuauguaa

SEQ ID NO: 1387 - RNA, 20 nt, Artificial Sequence
  targeting sequence with ATCN PAM
aaucaaucuuuugugcccua

SEQ ID NO: 1388 - RNA, 20 nt, Artificial Sequence
  targeting sequence with ATCN PAM
uuuauuaugcaguuggguua

SEQ ID NO: 1389 - RNA, 20 nt, Artificial Sequence
  targeting sequence with ATCN PAM
ugccacugcacuccagucug

SEQ ID NO: 1390 - RNA, 20 nt, Artificial Sequence
  targeting sequence with ATCN PAM
uggcucacugcaaccucugc

SEQ ID NO: 1391 - RNA, 20 nt, Artificial Sequence
  targeting sequence with ATCN PAM
cuagaaccugggaggcagag

SEQ ID NO: 1392 - RNA, 20 nt, Artificial Sequence
  targeting sequence with ATCN PAM
cagcuacucgagaggcugag

SEQ ID NO: 1393 - RNA, 20 nt, Artificial Sequence
  targeting sequence with ATCN PAM
cagcacucugggaggccaag

SEQ ID NO: 1394 - RNA, 20 nt, Artificial Sequence
  targeting sequence with ATCN PAM
auguuugcagcucgauuuuu

SEQ ID NO: 1395 - RNA, 20 nt, Artificial Sequence
  targeting sequence with ATCN PAM
agcugcaaacauagauaggc

SEQ ID NO: 1396 - RNA, 20 nt, Artificial Sequence
  targeting sequence with ATCN PAM
ggcuaaauaauuucuuucua

SEQ ID NO: 1397 - RNA, 20 nt, Artificial Sequence
  targeting sequence with ATCN PAM
cugcgucuuccuccuucgaa

SEQ ID NO: 1398 - RNA, 20 nt, Artificial Sequence
  targeting sequence with ATCN PAM
uguuuucaugugucucuuaa

SEQ ID NO: 1399 - RNA, 20 nt, Artificial Sequence
  targeting sequence with ATCN PAM
gaguacuguucuguauuuca

SEQ ID NO: 1400 - RNA, 20 nt, Artificial Sequence
  targeting sequence with ATCN PAM
aaucuaauaggucauugauu

SEQ ID NO: 1401 - RNA, 20 nt, Artificial Sequence
  targeting sequence with ATCN PAM
aauaggucauugauuauaaa

SEQ ID NO: 1402 - RNA, 20 nt, Artificial Sequence
  targeting sequence with ATCN PAM
augaccuauuagauuggaug

SEQ ID NO: 1403 - RNA, 20 nt, Artificial Sequence
  targeting sequence with ATCN PAM
auaagaaagcaaaaaaugcu

SEQ ID NO: 1404 - RNA, 20 nt, Artificial Sequence
  targeting sequence with ATCN PAM
ucaauuauaagacacaaccu

SEQ ID NO: 1405 - RNA, 20 nt, Artificial Sequence
  targeting sequence with ATCN PAM
auuauaagacacaaccuuag

SEQ ID NO: 1406 - RNA, 20 nt, Artificial Sequence
  targeting sequence with ATCN PAM
auucuaaagcuuacauuuuu

SEQ ID NO: 1407 - RNA, 20 nt, Artificial Sequence
  targeting sequence with ATCN PAM
agugagaaggugugaaacag

SEQ ID NO: 1408 - RNA, 20 nt, Artificial Sequence
  targeting sequence with ATCN PAM
cucccuccccucagggaaau

SEQ ID NO: 1409 - RNA, 20 nt, Artificial Sequence
  targeting sequence with ATCN PAM
uaaucccucccuccccucag

SEQ ID NO: 1410 - RNA, 20 nt, Artificial Sequence
  targeting sequence with ATCN PAM
guucauaucuguuggugccu

SEQ ID NO: 1411 - RNA, 20 nt, Artificial Sequence
  targeting sequence with ATCN PAM
guuggugccuggcaccuaag

SEQ ID NO: 1412 - RNA, 20 nt, Artificial Sequence
  targeting sequence with ATCN PAM
guggauuuacuggcccuuaa

SEQ ID NO: 1413 - RNA, 20 nt, Artificial Sequence
  targeting sequence with ATCN PAM
acagauacuuacugaguccc

SEQ ID NO: 1414 - RNA, 20 nt, Artificial Sequence
  targeting sequence with ATCN PAM
uaaaggcuagacaacaugag

SEQ ID NO: 1415 - RNA, 20 nt, Artificial Sequence
  targeting sequence with ATCN PAM
ggacaaagagcuaacuacug

SEQ ID NO: 1416 - RNA, 20 nt, Artificial Sequence
  targeting sequence with ATCN PAM
acucaguaguuagcucuuug

SEQ ID NO: 1417 - RNA, 20 nt, Artificial Sequence
  targeting sequence with ATCN PAM
ugauugaaugggcugcugug

SEQ ID NO: 1418 - RNA, 20 nt, Artificial Sequence
  targeting sequence with ATCN PAM
ugauccacucaguaguuagc

SEQ ID NO: 1419 - RNA, 20 nt, Artificial Sequence
  targeting sequence with ATCN PAM
uuuugguuccuaauugucuu

SEQ ID NO: 1420 - RNA, 20 nt, Artificial Sequence
  targeting sequence with ATCN PAM
cauuuaagccugauggaacu

SEQ ID NO: 1421 - RNA, 20 nt, Artificial Sequence
  targeting sequence with ATCN PAM
ggcuuaaaugcgaugucauu

SEQ ID NO: 1422 - RNA, 20 nt, Artificial Sequence
  targeting sequence with ATCN PAM
guugaguuccaucaggcuua

SEQ ID NO: 1423 - RNA, 20 nt, Artificial Sequence
  targeting sequence with ATCN PAM
gcuuccggcagccaaaauca

SEQ ID NO: 1424 - RNA, 20 nt, Artificial Sequence
  targeting sequence with ATCN PAM
uaccaguaaucugcuuccgg

SEQ ID NO: 1425 - RNA, 20 nt, Artificial Sequence
  targeting sequence with ATCN PAM
caaaaaaaaaaaaaaagggu

SEQ ID NO: 1426 - RNA, 20 nt, Artificial Sequence
  targeting sequence with ATCN PAM
cuauuaaaaaguaauaggga

SEQ ID NO: 1427 - RNA, 20 nt, Artificial Sequence
  targeting sequence with ATCN PAM
gauaagaaccugugaacaau

SEQ ID NO: 1428 - RNA, 20 nt, Artificial Sequence
  targeting sequence with ATCN PAM
gauaguuuacuugcccguuu

SEQ ID NO: 1429 - RNA, 20 nt, Artificial Sequence
  targeting sequence with ATCN PAM
uucccuuuuuacuuugagac

SEQ ID NO: 1430 - RNA, 20 nt, Artificial Sequence
  targeting sequence with ATCN PAM
caaugccuuugaaacuggac

SEQ ID NO: 1431 - RNA, 20 nt, Artificial Sequence
  targeting sequence with ATCN PAM
gacuuuucauggacacagca

SEQ ID NO: 1432 - RNA, 20 nt, Artificial Sequence
  targeting sequence with ATCN PAM
aaacaguuccauauggaugu

SEQ ID NO: 1433 - RNA, 20 nt, Artificial Sequence
  targeting sequence with ATCN PAM
auauggaacuguuuagauag

SEQ ID NO: 1434 - RNA, 20 nt, Artificial Sequence
  targeting sequence with ATCN PAM
agguauauaaaaguaauuuu

SEQ ID NO: 1435 - RNA, 20 nt, Artificial Sequence
  targeting sequence with ATCN PAM
uacaaagguuuuuuggucaa

SEQ ID NO: 1436 - RNA, 20 nt, Artificial Sequence
  targeting sequence with ATCN PAM
cucuuucugucuaagucuac

SEQ ID NO: 1437 - RNA, 20 nt, Artificial Sequence
  targeting sequence with ATCN PAM
agagacaacagagaagagga

SEQ ID NO: 1438 - RNA, 20 nt, Artificial Sequence
  targeting sequence with ATCN PAM
gucugcguaucuagagacaa

SEQ ID NO: 1439 - RNA, 20 nt, Artificial Sequence
  targeting sequence with ATCN PAM
ccauucuuuguaugguuaac

SEQ ID NO: 1440 - RNA, 20 nt, Artificial Sequence
  targeting sequence with ATCN PAM
uaaaacaugguuaaauuguu

SEQ ID NO: 1441 - RNA, 20 nt, Artificial Sequence
  targeting sequence with ATCN PAM
aaacucuauuaguuuuucua

SEQ ID NO: 1442 - RNA, 20 nt, Artificial Sequence
  targeting sequence with ATCN PAM
uuuccaauacucuaaccauu

SEQ ID NO: 1443 - RNA, 20 nt, Artificial Sequence
  targeting sequence with ATCN PAM
agcggaaacuuucugaaaug

SEQ ID NO: 1444 - RNA, 20 nt, Artificial Sequence
  targeting sequence with ATCN PAM
gagaaaucaagcggaaacuu

SEQ ID NO: 1445 - RNA, 20 nt, Artificial Sequence
  targeting sequence with ATCN PAM
cgucacugcacuccagccug

SEQ ID NO: 1446 - RNA, 20 nt, Artificial Sequence
  targeting sequence with ATCN PAM
cggcuuacugcaagcuccac

SEQ ID NO: 1447 - RNA, 20 nt, Artificial Sequence
  targeting sequence with ATCN PAM
uggcuaacacggagaaaccc

SEQ ID NO: 1448 - RNA, 20 nt, Artificial Sequence
  targeting sequence with ATCN PAM
agaccauccuggcuaacacg

SEQ ID NO: 1449 - RNA, 20 nt, Artificial Sequence
  targeting sequence with ATCN PAM
ccugaccucguaauccaccc

SEQ ID NO: 1450 - RNA, 20 nt, Artificial Sequence
  targeting sequence with ATCN PAM
acccaccucggccucccaaa

SEQ ID NO: 1451 - RNA, 20 nt, Artificial Sequence
  targeting sequence with ATCN PAM
cagcacuuugggaggccgag

SEQ ID NO: 1452 - RNA, 20 nt, Artificial Sequence
  targeting sequence with ATCN PAM
ggccgggcgcgguggcucac

SEQ ID NO: 1453 - RNA, 20 nt, Artificial Sequence
  targeting sequence with ATCN PAM
cuauguggagaguuuaaaaa

SEQ ID NO: 1454 - RNA, 20 nt, Artificial Sequence
  targeting sequence with ATCN PAM
aucacuauguggagaguuua

SEQ ID NO: 1455 - RNA, 20 nt, Artificial Sequence
  targeting sequence with ATCN PAM
aauaccuaaauccauauuac

SEQ ID NO: 1456 - RNA, 20 nt, Artificial Sequence
  targeting sequence with ATCN PAM
auauuacagcuggguuuuau

SEQ ID NO: 1457 - RNA, 20 nt, Artificial Sequence
  targeting sequence with ATCN PAM
augacugcacuacugcacac

SEQ ID NO: 1458 - RNA, 20 nt, Artificial Sequence
  targeting sequence with ATCN PAM
cugcagccucaaacuccugg

SEQ ID NO: 1459 - RNA, 20 nt, Artificial Sequence
  targeting sequence with ATCN PAM
cuuaagcccaggaguuugag

SEQ ID NO: 1460 - RNA, 20 nt, Artificial Sequence
  targeting sequence with ATCN PAM
ucccaccucagccucccgag

SEQ ID NO: 1461 - RNA, 20 nt, Artificial Sequence
  targeting sequence with ATCN PAM
guagccaauaaaaacugcac

SEQ ID NO: 1462 - RNA, 20 nt, Artificial Sequence
  targeting sequence with ATCN PAM
auuagucagaauuccugcag

SEQ ID NO: 1463 - RNA, 20 nt, Artificial Sequence
  targeting sequence with ATCN PAM
cauagauaaucuguauuugu

SEQ ID NO: 1464 - RNA, 20 nt, Artificial Sequence
  targeting sequence with ATCN PAM
augugauaucuauuagucag

SEQ ID NO: 1465 - RNA, 20 nt, Artificial Sequence
  targeting sequence with ATCN PAM
guauuugucucuuuugccag

SEQ ID NO: 1466 - RNA, 20 nt, Artificial Sequence
  targeting sequence with ATCN PAM
gaggugucauaaaccuggca

SEQ ID NO: 1467 - RNA, 20 nt, Artificial Sequence
  targeting sequence with ATCN PAM
uucgcauaugccacacagua

SEQ ID NO: 1468 - RNA, 20 nt, Artificial Sequence
  targeting sequence with ATCN PAM
caaugagcccacccucacua

SEQ ID NO: 1469 - RNA, 20 nt, Artificial Sequence
  targeting sequence with ATCN PAM
cauugccuccugacuucaaa

SEQ ID NO: 1470 - RNA, 20 nt, Artificial Sequence
  targeting sequence with ATCN PAM
gggggaagagagcucuuugc

SEQ ID NO: 1471 - RNA, 20 nt, Artificial Sequence
  targeting sequence with ATCN PAM
cuccucugcugaggaccuuu

SEQ ID NO: 1472 - RNA, 20 nt, Artificial Sequence
  targeting sequence with ATCN PAM
gauuugauuuguauuuuaaa

SEQ ID NO: 1473 - RNA, 20 nt, Artificial Sequence
  targeting sequence with ATCN PAM
gaucccuccucugcugagga

SEQ ID NO: 1474 - RNA, 20 nt, Artificial Sequence
  targeting sequence with ATCN PAM
aaucagaucccuccucugcu

SEQ ID NO: 1475 - RNA, 20 nt, Artificial Sequence
  targeting sequence with ATCN PAM
uuuuaaaauacaaaucaaau

SEQ ID NO: 1476 - RNA, 20 nt, Artificial Sequence
  targeting sequence with ATCN PAM
ucaaaugugcuugcaaaacc

SEQ ID NO: 1477 - RNA, 20 nt, Artificial Sequence
  targeting sequence with ATCN PAM
caguuucaugcaccacuucc

SEQ ID NO: 1478 - RNA, 20 nt, Artificial Sequence
  targeting sequence with ATCN PAM
auguugucccacagcauagg

SEQ ID NO: 1479 - RNA, 20 nt, Artificial Sequence
  targeting sequence with ATCN PAM
uaugcugugggacaacaugg

SEQ ID NO: 1480 - RNA, 20 nt, Artificial Sequence
  targeting sequence with ATCN PAM
ugacucagacucaauaacca

SEQ ID NO: 1481 - RNA, 20 nt, Artificial Sequence
  targeting sequence with ATCN PAM
aauggauaacauugagauaa

SEQ ID NO: 1482 - RNA, 20 nt, Artificial Sequence
  targeting sequence with ATCN PAM
auuugauacaugaagaaauc

SEQ ID NO: 1483 - RNA, 20 nt, Artificial Sequence
  targeting sequence with ATCN PAM
gccaaaagaaguuaaaaacc

SEQ ID NO: 1484 - RNA, 20 nt, Artificial Sequence
  targeting sequence with ATCN PAM
aagaggcccaucagccaaaa

SEQ ID NO: 1485 - RNA, 20 nt, Artificial Sequence
  targeting sequence with ATCN PAM
gauggaagcuuuagaccacu

SEQ ID NO: 1486 - RNA, 20 nt, Artificial Sequence
  targeting sequence with ATCN PAM
gauuaucaaagaggcccauc

SEQ ID NO: 1487 - RNA, 20 nt, Artificial Sequence
  targeting sequence with ATCN PAM
uucuagaaaguggucuaaag

SEQ ID NO: 1488 - RNA, 20 nt, Artificial Sequence
  targeting sequence with ATCN PAM
gacuaaaauuauaugcauga

SEQ ID NO: 1489 - RNA, 20 nt, Artificial Sequence
  targeting sequence with ATCN PAM
uacugaaauccuaaagcucu

SEQ ID NO: 1490 - RNA, 20 nt, Artificial Sequence
  targeting sequence with ATCN PAM
uaaagcucugggagccugag

SEQ ID NO: 1491 - RNA, 20 nt, Artificial Sequence
  targeting sequence with ATCN PAM
ucccaacucaggcucccaga

SEQ ID NO: 1492 - RNA, 20 nt, Artificial Sequence
  targeting sequence with ATCN PAM
ggccugggugacagagcuag

SEQ ID NO: 1493 - RNA, 20 nt, Artificial Sequence
  targeting sequence with ATCN PAM
gcugcauggccuuggcaagu

SEQ ID NO: 1494 - RNA, 20 nt, Artificial Sequence
  targeting sequence with ATCN PAM
uaguggcuguugaggaaugu

SEQ ID NO: 1495 - RNA, 20 nt, Artificial Sequence
  targeting sequence with ATCN PAM
ucaagugcccuaaugguguu

SEQ ID NO: 1496 - RNA, 20 nt, Artificial Sequence
  targeting sequence with ATCN PAM
guaguggcauuugcacagca

SEQ ID NO: 1497 - RNA, 20 nt, Artificial Sequence
  targeting sequence with ATCN PAM
cacuugaugcuuccaacaac

SEQ ID NO: 1498 - RNA, 20 nt, Artificial Sequence
  targeting sequence with ATCN PAM
agugagaugugugugacagg

SEQ ID NO: 1499 - RNA, 20 nt, Artificial Sequence
  targeting sequence with ATCN PAM
ccgcucaaagaugagaaaac

SEQ ID NO: 1500 - RNA, 20 nt, Artificial Sequence
  targeting sequence with ATCN PAM
uugagcggagauaagagucc

SEQ ID NO: 1501 - RNA, 20 nt, Artificial Sequence
  targeting sequence with ATCN PAM
ccuguaauugcuccaagucu

SEQ ID NO: 1502 - RNA, 20 nt, Artificial Sequence
  targeting sequence with ATCN PAM
ugcugccucuucaugacacc

SEQ ID NO: 1503 - RNA, 20 nt, Artificial Sequence
  targeting sequence with ATCN PAM
gcauguaauuucugaacccc

SEQ ID NO: 1504 - RNA, 20 nt, Artificial Sequence
  targeting sequence with ATCN PAM
agcuuauuuuaagaauacaa

SEQ ID NO: 1505 - RNA, 20 nt, Artificial Sequence
  targeting sequence with ATCN PAM
acuuccauuuaaugaagagu

SEQ ID NO: 1506 - RNA, 20 nt, Artificial Sequence
  targeting sequence with ATCN PAM
ucauaaaggucuucaucuuc

SEQ ID NO: 1507 - RNA, 20 nt, Artificial Sequence
  targeting sequence with ATCN PAM
uaaaggucuucaucuucauu

SEQ ID NO: 1508 - RNA, 20 nt, Artificial Sequence
  targeting sequence with ATCN PAM
ucauugucuucagguugaau

SEQ ID NO: 1509 - RNA, 20 nt, Artificial Sequence
  targeting sequence with ATCN PAM
cucuuccuccuccuccuccu

SEQ ID NO: 1510 - RNA, 20 nt, Artificial Sequence
  targeting sequence with ATCN PAM
ccaaucccucuuccuccucc

SEQ ID NO: 1511 - RNA, 20 nt, Artificial Sequence
  targeting sequence with ATCN PAM
ucacaccaaccaugagguaa

SEQ ID NO: 1512 - RNA, 20 nt, Artificial Sequence
  targeting sequence with ATCN PAM
auuuuucaaauaaggaaaug

SEQ ID NO: 1513 - RNA, 20 nt, Artificial Sequence
  targeting sequence with ATCN PAM
ccaucaccugcuaccuacca

SEQ ID NO: 1514 - RNA, 20 nt, Artificial Sequence
  targeting sequence with ATCN PAM
ccugcuaccuaccaggauga

SEQ ID NO: 1515 - RNA, 20 nt, Artificial Sequence
  targeting sequence with ATCN PAM
ugguagguagcaggugaugg

SEQ ID NO: 1516 - RNA, 20 nt, Artificial Sequence
  targeting sequence with ATCN PAM
cuccucccucauccugguag

SEQ ID NO: 1517 - RNA, 20 nt, Artificial Sequence
  targeting sequence with ATCN PAM
uauggcucacccuaauaucu

SEQ ID NO: 1518 - RNA, 20 nt, Artificial Sequence
  targeting sequence with ATCN PAM
acuauuucagcuacuguaaa

SEQ ID NO: 1519 - RNA, 20 nt, Artificial Sequence
  targeting sequence with ATCN PAM
caagcaugagccaccacacc

SEQ ID NO: 1520 - RNA, 20 nt, Artificial Sequence
  targeting sequence with ATCN PAM
cagcacuuugggaagccaag

SEQ ID NO: 1521 - RNA, 20 nt, Artificial Sequence
  targeting sequence with ATCN PAM
acccgccuuggcuucccaaa

SEQ ID NO: 1522 - RNA, 20 nt, Artificial Sequence
  targeting sequence with ATCN PAM
ugaggucaggaguuugagac

SEQ ID NO: 1523 - RNA, 20 nt, Artificial Sequence
  targeting sequence with ATCN PAM
guaaaguaccuuuuuuuuga

SEQ ID NO: 1524 - RNA, 20 nt, Artificial Sequence
  targeting sequence with ATCN PAM
uaguugacucccauaaaaag

SEQ ID NO: 1525 - RNA, 20 nt, Artificial Sequence
  targeting sequence with ATCN PAM
uccucagagucuuuuuaugg

SEQ ID NO: 1526 - RNA, 20 nt, Artificial Sequence
  targeting sequence with ATCN PAM
gaaacacagaggaacaguau

SEQ ID NO: 1527 - RNA, 20 nt, Artificial Sequence
  targeting sequence with ATCN PAM
uaaggacuuuuagacuuuau

SEQ ID NO: 1528 - RNA, 20 nt, Artificial Sequence
  targeting sequence with ATCN PAM
gaucuaucacucuuugcuua

SEQ ID NO: 1529 - RNA, 20 nt, Artificial Sequence
  targeting sequence with ATCN PAM
gauucgcauuuucauacuac

SEQ ID NO: 1530 - RNA, 20 nt, Artificial Sequence
  targeting sequence with ATCN PAM
aucacucuuugcuuaaaacc

SEQ ID NO: 1531 - RNA, 20 nt, Artificial Sequence
  targeting sequence with ATCN PAM
cucuuugcuuaaaaccuuuc

SEQ ID NO: 1532 - RNA, 20 nt, Artificial Sequence
  targeting sequence with ATCN PAM
uaaagcaaugggaagccaaa

SEQ ID NO: 1533 - RNA, 20 nt, Artificial Sequence
  targeting sequence with ATCN PAM
guuccauccauguggauggg

SEQ ID NO: 1534 - RNA, 20 nt, Artificial Sequence
  targeting sequence with ATCN PAM
auguggaugggucugucucc

SEQ ID NO: 1535 - RNA, 20 nt, Artificial Sequence
  targeting sequence with ATCN PAM
acauggauggaacagaugug

SEQ ID NO: 1536 - RNA, 20 nt, Artificial Sequence
  targeting sequence with ATCN PAM
ggcuaagcucugcucauccu

SEQ ID NO: 1537 - RNA, 20 nt, Artificial Sequence
  targeting sequence with ATCN PAM
uuuaggucuccacugaagga

SEQ ID NO: 1538 - RNA, 20 nt, Artificial Sequence
  targeting sequence with ATCN PAM
uucaguggagaccuaaagga

SEQ ID NO: 1539 - RNA, 20 nt, Artificial Sequence
  targeting sequence with ATCN PAM
cauccuuagagaaauguucc

SEQ ID NO: 1540 - RNA, 20 nt, Artificial Sequence
  targeting sequence with ATCN PAM
uuagagaaauguucccucau

SEQ ID NO: 1541 - RNA, 20 nt, Artificial Sequence
  targeting sequence with ATCN PAM
aaauuaggucccccaggaga

SEQ ID NO: 1542 - RNA, 20 nt, Artificial Sequence
  targeting sequence with ATCN PAM
ccugggggaccuaauuuaga

SEQ ID NO: 1543 - RNA, 20 nt, Artificial Sequence
  targeting sequence with ATCN PAM
caaaaauguacuccuuuugu

SEQ ID NO: 1544 - RNA, 20 nt, Artificial Sequence
  targeting sequence with ATCN PAM
auugcacagcauggugacca

SEQ ID NO: 1545 - RNA, 20 nt, Artificial Sequence
  targeting sequence with ATCN PAM
auuccuggccgggaacagug

SEQ ID NO: 1546 - RNA, 20 nt, Artificial Sequence
  targeting sequence with ATCN PAM
gcagugauggauauguuaau

SEQ ID NO: 1547 - RNA, 20 nt, Artificial Sequence
  targeting sequence with ATCN PAM
cugcagauacuuauuuuuuu

SEQ ID NO: 1548 - RNA, 20 nt, Artificial Sequence
  targeting sequence with ATCN PAM
aucacugcagauacuuauuu

SEQ ID NO: 1549 - RNA, 20 nt, Artificial Sequence
  targeting sequence with ATCN PAM
gguuccccaguuauucucuu

SEQ ID NO: 1550 - RNA, 20 nt, Artificial Sequence
  targeting sequence with ATCN PAM
uaugaaagagaauaacuggg

SEQ ID NO: 1551 - RNA, 20 nt, Artificial Sequence
  targeting sequence with ATCN PAM
gugucuuaccauguuguauu

SEQ ID NO: 1552 - RNA, 20 nt, Artificial Sequence
  targeting sequence with ATCN PAM
aacacaaauacaacauggua

SEQ ID NO: 1553 - RNA, 20 nt, Artificial Sequence
  targeting sequence with ATCN PAM
uaaaccagcauuucccagag

SEQ ID NO: 1554 - RNA, 20 nt, Artificial Sequence
  targeting sequence with ATCN PAM
agaagcaaagcgcuugccua

SEQ ID NO: 1555 - RNA, 20 nt, Artificial Sequence
  targeting sequence with ATCN PAM
gcugacaaaagcguuauuau

SEQ ID NO: 1556 - RNA, 20 nt, Artificial Sequence
  targeting sequence with ATCN PAM
ggacaucaaaacuggaaggc

SEQ ID NO: 1557 - RNA, 20 nt, Artificial Sequence
  targeting sequence with ATCN PAM
aaacuggaaggcauucugaa

SEQ ID NO: 1558 - RNA, 20 nt, Artificial Sequence
  targeting sequence with ATCN PAM
aacucauaauacuguacacc

SEQ ID NO: 1559 - RNA, 20 nt, Artificial Sequence
  targeting sequence with ATCN PAM
caguucaucugacauuguag

SEQ ID NO: 1560 - RNA, 20 nt, Artificial Sequence
  targeting sequence with ATCN PAM
gacauuguagacuuuauccc

SEQ ID NO: 1561 - RNA, 20 nt, Artificial Sequence
  targeting sequence with ATCN PAM
cacccccaaccugucaucuu

SEQ ID NO: 1562 - RNA, 20 nt, Artificial Sequence
  targeting sequence with ATCN PAM
uccagugucccugucucaga

SEQ ID NO: 1563 - RNA, 20 nt, Artificial Sequence
  targeting sequence with ATCN PAM
acccagugucaaaugucaga

SEQ ID NO: 1564 - RNA, 20 nt, Artificial Sequence
  targeting sequence with ATCN PAM
guucuuauggaacuuacagg

SEQ ID NO: 1565 - RNA, 20 nt, Artificial Sequence
  targeting sequence with ATCN PAM
auuuuuuguuuuguuuuguu

SEQ ID NO: 1566 - RNA, 20 nt, Artificial Sequence
  targeting sequence with ATCN PAM
ucuuacuucagcuucccaaa

SEQ ID NO: 1567 - RNA, 20 nt, Artificial Sequence
  targeting sequence with ATCN PAM
caguacuuugagaggacugc

SEQ ID NO: 1568 - RNA, 20 nt, Artificial Sequence
  targeting sequence with ATCN PAM
uucucccuuggccgcccaaa

SEQ ID NO: 1569 - RNA, 20 nt, Artificial Sequence
  targeting sequence with ATCN PAM
cagcaguuugggcggccaag

SEQ ID NO: 1570 - RNA, 20 nt, Artificial Sequence
  targeting sequence with ATCN PAM
auucaucuguugauggacac

SEQ ID NO: 1571 - RNA, 20 nt, Artificial Sequence
  targeting sequence with ATCN PAM
guugauggacacuuguguug

SEQ ID NO: 1572 - RNA, 20 nt, Artificial Sequence
  targeting sequence with ATCN PAM
acagaugaauggauaaagaa

SEQ ID NO: 1573 - RNA, 20 nt, Artificial Sequence
  targeting sequence with ATCN PAM
acaaacaauuuuugaaggaa

SEQ ID NO: 1574 - RNA, 20 nt, Artificial Sequence
  targeting sequence with ATCN PAM
uguaccaugcaaggcgucuc

SEQ ID NO: 1575 - RNA, 20 nt, Artificial Sequence
  targeting sequence with ATCN PAM
uuagacaacaaugaaagcug

SEQ ID NO: 1576 - RNA, 20 nt, Artificial Sequence
  targeting sequence with ATCN PAM
ggaaacaugacaaauccuua

SEQ ID NO: 1577 - RNA, 20 nt, Artificial Sequence
  targeting sequence with ATCN PAM
uggucugugaugucuucauu

SEQ ID NO: 1578 - RNA, 20 nt, Artificial Sequence
  targeting sequence with ATCN PAM
cagaccaagaucuggaaaca

SEQ ID NO: 1579 - RNA, 20 nt, Artificial Sequence
  targeting sequence with ATCN PAM
uccauuucugggccuccaca

SEQ ID NO: 1580 - RNA, 20 nt, Artificial Sequence
  targeting sequence with ATCN PAM
guggcuguuacucuuacugu

SEQ ID NO: 1581 - RNA, 20 nt, Artificial Sequence
  targeting sequence with ATCN PAM
ucccaccuuggccuuuaggu

SEQ ID NO: 1582 - RNA, 20 nt, Artificial Sequence
  targeting sequence with ATCN PAM
auccucccaccuuggccuuu

SEQ ID NO: 1583 - RNA, 20 nt, Artificial Sequence
  targeting sequence with ATCN PAM
cuacaaauaagaaaacagug

SEQ ID NO: 1584 - RNA, 20 nt, Artificial Sequence
  targeting sequence with ATCN PAM
ucaguuguagccacugaaau

SEQ ID NO: 1585 - RNA, 20 nt, Artificial Sequence
  targeting sequence with ATCN PAM
uugugguuugcugcauagua

SEQ ID NO: 1586 - RNA, 20 nt, Artificial Sequence
  targeting sequence with ATCN PAM
acaguuguuuacuucccagg

SEQ ID NO: 1587 - RNA, 20 nt, Artificial Sequence
  targeting sequence with ATCN PAM
uugugccugggaaguaaaca

SEQ ID NO: 1588 - RNA, 20 nt, Artificial Sequence
  targeting sequence with ATCN PAM
uauuacucaucaacuggcau

SEQ ID NO: 1589 - RNA, 20 nt, Artificial Sequence
  targeting sequence with ATCN PAM
acuggcaucuuguuccucca

SEQ ID NO: 1590 - RNA, 20 nt, Artificial Sequence
  targeting sequence with ATCN PAM
uguuccuccagugacuuugg

SEQ ID NO: 1591 - RNA, 20 nt, Artificial Sequence
  targeting sequence with ATCN PAM
gaacguaccaaagucacugg

SEQ ID NO: 1592 - RNA, 20 nt, Artificial Sequence
  targeting sequence with ATCN PAM
ggaaucagaacguaccaaag

SEQ ID NO: 1593 - RNA, 20 nt, Artificial Sequence
  targeting sequence with ATCN PAM
gggcuaaaaaugcuaaaaug

SEQ ID NO: 1594 - RNA, 20 nt, Artificial Sequence
  targeting sequence with ATCN PAM
ccauauucugaaugcauuuu

SEQ ID NO: 1595 - RNA, 20 nt, Artificial Sequence
  targeting sequence with ATCN PAM
ugagagaguuaauacuacuu

SEQ ID NO: 1596 - RNA, 20 nt, Artificial Sequence
  targeting sequence with ATCN PAM
gagacuacaggaagggcccc

SEQ ID NO: 1597 - RNA, 20 nt, Artificial Sequence
  targeting sequence with ATCN PAM
uguuaccauuuccuuugcug

SEQ ID NO: 1598 - RNA, 20 nt, Artificial Sequence
  targeting sequence with ATCN PAM
auguuuaugugaaauucuuc

SEQ ID NO: 1599 - RNA, 20 nt, Artificial Sequence
  targeting sequence with ATCN PAM
uggccacggucccgugccag

SEQ ID NO: 1600 - RNA, 20 nt, Artificial Sequence
  targeting sequence with ATCN PAM
accauuaauggaaauaaccu

SEQ ID NO: 1601 - RNA, 20 nt, Artificial Sequence
  targeting sequence with ATCN PAM
gucuguguucguugcuagug

SEQ ID NO: 1602 - RNA, 20 nt, Artificial Sequence
  targeting sequence with ATCN PAM
acuagcaacgaacacagacu

SEQ ID NO: 1603 - RNA, 20 nt, Artificial Sequence
  targeting sequence with ATCN PAM
agugacuucauuguauccac

SEQ ID NO: 1604 - RNA, 20 nt, Artificial Sequence
  targeting sequence with ATCN PAM
cucucaguguuccaguuccc

SEQ ID NO: 1605 - RNA, 20 nt, Artificial Sequence
  targeting sequence with ATCN PAM
aaaaggagcaugcuacucac

SEQ ID NO: 1606 - RNA, 20 nt, Artificial Sequence
  targeting sequence with ATCN PAM
gugagacacagugaguagca

SEQ ID NO: 1607 - RNA, 20 nt, Artificial Sequence
  targeting sequence with ATCN PAM
cuacccucaaggagcuugug

SEQ ID NO: 1608 - RNA, 20 nt, Artificial Sequence
  targeting sequence with ATCN PAM
caccuucuccuaagaccaca

SEQ ID NO: 1609 - RNA, 20 nt, Artificial Sequence
  targeting sequence with ATCN PAM
uuagaacagugccuagcaca

SEQ ID NO: 1610 - RNA, 20 nt, Artificial Sequence
  targeting sequence with ATCN PAM
guagggugggaaugagaaua

SEQ ID NO: 1611 - RNA, 20 nt, Artificial Sequence
  targeting sequence with ATCN PAM
ccuggucuaaaguccaagcc

SEQ ID NO: 1612 - RNA, 20 nt, Artificial Sequence
  targeting sequence with ATCN PAM
guguuccacuaagccugccu

SEQ ID NO: 1613 - RNA, 20 nt, Artificial Sequence
  targeting sequence with ATCN PAM
aacaaguuauuuuuugccuu

SEQ ID NO: 1614 - RNA, 20 nt, Artificial Sequence
  targeting sequence with ATCN PAM
agaagguaacuccagugcac

SEQ ID NO: 1615 - RNA, 20 nt, Artificial Sequence
  targeting sequence with ATCN PAM
gggacaggggggagcaagcc

SEQ ID NO: 1616 - RNA, 20 nt, Artificial Sequence
  targeting sequence with ATCN PAM
gagcugugccucucccaugg

SEQ ID NO: 1617 - RNA, 20 nt, Artificial Sequence
  targeting sequence with ATCN PAM
caacacaugacucuaucuga

SEQ ID NO: 1618 - RNA, 20 nt, Artificial Sequence
  targeting sequence with ATCN PAM
aguuuucuuucauaggucuc

SEQ ID NO: 1619 - RNA, 20 nt, Artificial Sequence
  targeting sequence with ATCN PAM
uuguuauuuuaaaugcuagg

SEQ ID NO: 1620 - RNA, 20 nt, Artificial Sequence
  targeting sequence with ATCN PAM
cugaaaaguuggcuagaacu

SEQ ID NO: 1621 - RNA, 20 nt, Artificial Sequence
  targeting sequence with ATCN PAM
auuuuauuuuucuucugaaa

SEQ ID NO: 1622 - RNA, 20 nt, Artificial Sequence
  targeting sequence with ATCN PAM
uucuuucagaagaaaaauaa

SEQ ID NO: 1623 - RNA, 20 nt, Artificial Sequence
  targeting sequence with ATCN PAM
aucauucuuucagaagaaaa

SEQ ID NO: 1624 - RNA, 20 nt, Artificial Sequence
  targeting sequence with ATCN PAM
uuguaacuuacuaugaaucu

SEQ ID NO: 1625 - RNA, 20 nt, Artificial Sequence
  targeting sequence with ATCN PAM
aguuucccccaguggaucca

SEQ ID NO: 1626 - RNA, 20 nt, Artificial Sequence
  targeting sequence with ATCN PAM
acugggggaaacuggaugaa

SEQ ID NO: 1627 - RNA, 20 nt, Artificial Sequence
  targeting sequence with ATCN PAM
aucuuauguaacuauuauac

SEQ ID NO: 1628 - RNA, 20 nt, Artificial Sequence
  targeting sequence with ATCN PAM
uauguaacuauuauacaaua

SEQ ID NO: 1629 - RNA, 20 nt, Artificial Sequence
  targeting sequence with ATCN PAM
agaccaggaaacugagacug

SEQ ID NO: 1630 - RNA, 20 nt, Artificial Sequence
  targeting sequence with ATCN PAM
cauguguagauugccaucag

SEQ ID NO: 1631 - RNA, 20 nt, Artificial Sequence
  targeting sequence with ATCN PAM
acacaugcgauaaaacaaca

SEQ ID NO: 1632 - RNA, 20 nt, Artificial Sequence
  targeting sequence with ATCN PAM
gcgugacacagaacuaagcc

SEQ ID NO: 1633 - RNA, 20 nt, Artificial Sequence
  targeting sequence with ATCN PAM
ccaugcaguuaccacuuagu

SEQ ID NO: 1634 - RNA, 20 nt, Artificial Sequence
  targeting sequence with ATCN PAM
acucaccuuaccuccaguua

SEQ ID NO: 1635 - RNA, 20 nt, Artificial Sequence
  targeting sequence with ATCN PAM
ccaaacccugguaaccacaa

SEQ ID NO: 1636 - RNA, 20 nt, Artificial Sequence
  targeting sequence with ATCN PAM
guucuccauuucuauaauuu

SEQ ID NO: 1637 - RNA, 20 nt, Artificial Sequence
  targeting sequence with ATCN PAM
uacaguauaugaccuuuuga

SEQ ID NO: 1638 - RNA, 20 nt, Artificial Sequence
  targeting sequence with ATCN PAM
caaaaggucauauacuguac

SEQ ID NO: 1639 - RNA, 20 nt, Artificial Sequence
  targeting sequence with ATCN PAM
uggagauccaucuaaguugu

SEQ ID NO: 1640 - RNA, 20 nt, Artificial Sequence
  targeting sequence with ATCN PAM
ccaggauuuuaugcugaaug

SEQ ID NO: 1641 - RNA, 20 nt, Artificial Sequence
  targeting sequence with ATCN PAM
aucuaaguuguuguauguuu

SEQ ID NO: 1642 - RNA, 20 nt, Artificial Sequence
  targeting sequence with ATCN PAM
aaguuguuguauguuucaau

SEQ ID NO: 1643 - RNA, 20 nt, Artificial Sequence
  targeting sequence with ATCN PAM
aucuucuuuuauauuauugu

SEQ ID NO: 1644 - RNA, 20 nt, Artificial Sequence
  targeting sequence with ATCN PAM
ucuuuuauauuauugugcau

SEQ ID NO: 1645 - RNA, 20 nt, Artificial Sequence
  targeting sequence with ATCN PAM
agcagcaagaucaucugcug

SEQ ID NO: 1646 - RNA, 20 nt, Artificial Sequence
  targeting sequence with ATCN PAM
ugcugcuugauuuguguuug

SEQ ID NO: 1647 - RNA, 20 nt, Artificial Sequence
  targeting sequence with ATCN PAM
ucugcugcagguaagugcag

SEQ ID NO: 1648 - RNA, 20 nt, Artificial Sequence
  targeting sequence with ATCN PAM
gcugcagguaagugcagcuc

SEQ ID NO: 1649 - RNA, 20 nt, Artificial Sequence
  targeting sequence with ATCN PAM
ucagagcugcacuuaccugc

SEQ ID NO: 1650 - RNA, 20 nt, Artificial Sequence
  targeting sequence with ATCN PAM
uaucgucagagcugcacuua

SEQ ID NO: 1651 - RNA, 20 nt, Artificial Sequence
  targeting sequence with ATCN PAM
uccacacagacucucaaaau

SEQ ID NO: 1652 - RNA, 20 nt, Artificial Sequence
  targeting sequence with ATCN PAM
aauuauuucaugcagcagag

SEQ ID NO: 1653 - RNA, 20 nt, Artificial Sequence
  targeting sequence with ATCN PAM
aggagacgaagaaagaagaa

SEQ ID NO: 1654 - RNA, 20 nt, Artificial Sequence
  targeting sequence with ATCN PAM
aaggcacaagucuuucccau

SEQ ID NO: 1655 - RNA, 20 nt, Artificial Sequence
  targeting sequence with ATCN PAM
ugaagcaaaagagaacuaca

SEQ ID NO: 1656 - RNA, 20 nt, Artificial Sequence
  targeting sequence with ATCN PAM
agcuauacugaguggaggcu

SEQ ID NO: 1657 - RNA, 20 nt, Artificial Sequence
  targeting sequence with ATCN PAM
aagugugggagggaaagcuu

SEQ ID NO: 1658 - RNA, 20 nt, Artificial Sequence
  targeting sequence with ATCN PAM
agaaucucucauugacaggc

SEQ ID NO: 1659 - RNA, 20 nt, Artificial Sequence
  targeting sequence with ATCN PAM
cucauugacaggccauguga

SEQ ID NO: 1660 - RNA, 20 nt, Artificial Sequence
  targeting sequence with ATCN PAM
uucugagcuggagcuuuacg

SEQ ID NO: 1661 - RNA, 20 nt, Artificial Sequence
  targeting sequence with ATCN PAM
gacagauagggauaaaaaua

SEQ ID NO: 1662 - RNA, 20 nt, Artificial Sequence
  targeting sequence with ATCN PAM
gucagaugaggaacguaaag

SEQ ID NO: 1663 - RNA, 20 nt, Artificial Sequence
  targeting sequence with ATCN PAM
cuaucugucagaugaggaac

SEQ ID NO: 1664 - RNA, 20 nt, Artificial Sequence
  targeting sequence with ATCN PAM
cgucaagucaguauuuuuau

SEQ ID NO: 1665 - RNA, 20 nt, Artificial Sequence
  targeting sequence with ATCN PAM
cuuccguucagcaucuguug

SEQ ID NO: 1666 - RNA, 20 nt, Artificial Sequence
  targeting sequence with ATCN PAM
guugagcaccuucuacaaag

SEQ ID NO: 1667 - RNA, 20 nt, Artificial Sequence
  targeting sequence with ATCN PAM
ccucccacuuaaagagcacc

SEQ ID NO: 1668 - RNA, 20 nt, Artificial Sequence
  targeting sequence with ATCN PAM
caauccccucccacuuaaag

SEQ ID NO: 1669 - RNA, 20 nt, Artificial Sequence
  targeting sequence with ATCN PAM
cugggccagccaccacuucc

SEQ ID NO: 1670 - RNA, 20 nt, Artificial Sequence
  targeting sequence with ATCN PAM
ccaugccuuuuguugguugu

SEQ ID NO: 1671 - RNA, 20 nt, Artificial Sequence
  targeting sequence with ATCN PAM
uuuguccagcuguguacaca

SEQ ID NO: 1672 - RNA, 20 nt, Artificial Sequence
  targeting sequence with ATCN PAM
ccagcgccagguacugacca

SEQ ID NO: 1673 - RNA, 20 nt, Artificial Sequence
  targeting sequence with ATCN PAM
cauugaacauccccagcgcc

SEQ ID NO: 1674 - RNA, 20 nt, Artificial Sequence
  targeting sequence with ATCN PAM
ucagcauacggaacaaaaau

SEQ ID NO: 1675 - RNA, 20 nt, Artificial Sequence
  targeting sequence with ATCN PAM
gcauacggaacaaaaauggc

SEQ ID NO: 1676 - RNA, 20 nt, Artificial Sequence
  targeting sequence with ATCN PAM
uuacuuucuccucgccauuu

SEQ ID NO: 1677 - RNA, 20 nt, Artificial Sequence
  targeting sequence with ATCN PAM
agcggccggggggcucccuc

SEQ ID NO: 1678 - RNA, 20 nt, Artificial Sequence
  targeting sequence with ATCN PAM
gcuggaacccuucaagguac

SEQ ID NO: 1679 - RNA, 20 nt, Artificial Sequence
  targeting sequence with ATCN PAM
uggacauuuuagcaaagcag

SEQ ID NO: 1680 - RNA, 20 nt, Artificial Sequence
  targeting sequence with ATCN PAM
gcuuugcuaaaauguccagg

SEQ ID NO: 1681 - RNA, 20 nt, Artificial Sequence
  targeting sequence with ATCN PAM
auaguggagcucuuugcugu

SEQ ID NO: 1682 - RNA, 20 nt, Artificial Sequence
  targeting sequence with ATCN PAM
cuaggcuuuagggacgucug

SEQ ID NO: 1683 - RNA, 20 nt, Artificial Sequence
  targeting sequence with ATCN PAM
guauccuuuacagaguccuc

SEQ ID NO: 1684 - RNA, 20 nt, Artificial Sequence
  targeting sequence with ATCN PAM
uuuacagaguccucugaggg

SEQ ID NO: 1685 - RNA, 20 nt, Artificial Sequence
  targeting sequence with ATCN PAM
guaaaaugacauugagcugg

SEQ ID NO: 1686 - RNA, 20 nt, Artificial Sequence
  targeting sequence with ATCN PAM
aguaggcaaccaucuguaaa

SEQ ID NO: 1687 - RNA, 20 nt, Artificial Sequence
  targeting sequence with ATCN PAM
aacagcaggaacucuggggc

SEQ ID NO: 1688 - RNA, 20 nt, Artificial Sequence
  targeting sequence with ATCN PAM
ucucaccucagccucccaag

SEQ ID NO: 1689 - RNA, 20 nt, Artificial Sequence
  targeting sequence with ATCN PAM
aagcuacuugggaggcugag

SEQ ID NO: 1690 - RNA, 20 nt, Artificial Sequence
  targeting sequence with ATCN PAM
caggcacaugccacuacacc

SEQ ID NO: 1691 - RNA, 20 nt, Artificial Sequence
  targeting sequence with ATCN PAM
ggaguucaagaccagccugg

SEQ ID NO: 1692 - RNA, 20 nt, Artificial Sequence
  targeting sequence with ATCN PAM
cgagcgauucacuugccucg

SEQ ID NO: 1693 - RNA, 20 nt, Artificial Sequence
  targeting sequence with ATCN PAM
cucgagaucaggaguucaag

SEQ ID NO: 1694 - RNA, 20 nt, Artificial Sequence
  targeting sequence with ATCN PAM
cagcacuucaggaggccgag

SEQ ID NO: 1695 - RNA, 20 nt, Artificial Sequence
  targeting sequence with ATCN PAM
uggcaaggagccccuggggg

SEQ ID NO: 1696 - RNA, 20 nt, Artificial Sequence
  targeting sequence with ATCN PAM
gcuguagacaguaaguaguu

SEQ ID NO: 1697 - RNA, 20 nt, Artificial Sequence
  targeting sequence with ATCN PAM
agaaacucucccaucggcug

SEQ ID NO: 1698 - RNA, 20 nt, Artificial Sequence
  targeting sequence with ATCN PAM
ucauucucucuguucaucca

SEQ ID NO: 1699 - RNA, 20 nt, Artificial Sequence
  targeting sequence with ATCN PAM
ucggcauccucauucucucu

SEQ ID NO: 1700 - RNA, 20 nt, Artificial Sequence
  targeting sequence with ATCN PAM
guugacaaugacauccucgg

SEQ ID NO: 1701 - RNA, 20 nt, Artificial Sequence
  targeting sequence with ATCN PAM
cuuccacucugaagucagca

SEQ ID NO: 1702 - RNA, 20 nt, Artificial Sequence
  targeting sequence with ATCN PAM
gaaaaguugaacuuucuccu

SEQ ID NO: 1703 - RNA, 20 nt, Artificial Sequence
  targeting sequence with ATCN PAM
ccugaggaaaucacuguuag

SEQ ID NO: 1704 - RNA, 20 nt, Artificial Sequence
  targeting sequence with ATCN PAM
caacugaagagaagaaugac

SEQ ID NO: 1705 - RNA, 20 nt, Artificial Sequence
  targeting sequence with ATCN PAM
uggcuaccccagcuuucccc

SEQ ID NO: 1706 - RNA, 20 nt, Artificial Sequence
  targeting sequence with ATCN PAM
caguuuggcaguagagaucu

SEQ ID NO: 1707 - RNA, 20 nt, Artificial Sequence
  targeting sequence with ATCN PAM
cuacugccaaacugagauau

SEQ ID NO: 1708 - RNA, 20 nt, Artificial Sequence
  targeting sequence with ATCN PAM
agcuugagacuuuccaaacu

SEQ ID NO: 1709 - RNA, 20 nt, Artificial Sequence
  targeting sequence with ATCN PAM
cacccugaggucaugggggc

SEQ ID NO: 1710 - RNA, 20 nt, Artificial Sequence
  targeting sequence with ATCN PAM
cagugccuuugauuguuuca

SEQ ID NO: 1711 - RNA, 20 nt, Artificial Sequence
  targeting sequence with ATCN PAM
aaggcacugagauggggacc

SEQ ID NO: 1712 - RNA, 20 nt, Artificial Sequence
  targeting sequence with ATCN PAM
uacugccccaggagguaaaa

SEQ ID NO: 1713 - RNA, 20 nt, Artificial Sequence
  targeting sequence with ATCN PAM
cugauccaucucacagggac

SEQ ID NO: 1714 - RNA, 20 nt, Artificial Sequence
  targeting sequence with ATCN PAM
gugauuuucaacccccuuuu

SEQ ID NO: 1715 - RNA, 20 nt, Artificial Sequence
  targeting sequence with ATCN PAM
aucucacagggacugagccc

SEQ ID NO: 1716 - RNA, 20 nt, Artificial Sequence
  targeting sequence with ATCN PAM
cacagggacugagcccagcc

SEQ ID NO: 1717 - RNA, 20 nt, Artificial Sequence
  targeting sequence with ATCN PAM
aggagcccagcccaccagug

SEQ ID NO: 1718 - RNA, 20 nt, Artificial Sequence
  targeting sequence with ATCN PAM
gugccagucacacaaagguc

SEQ ID NO: 1719 - RNA, 20 nt, Artificial Sequence
  targeting sequence with ATCN PAM
gcaggcucccucauuaacau

SEQ ID NO: 1720 - RNA, 20 nt, Artificial Sequence
  targeting sequence with ATCN PAM
cucucggucuuugucucuuu

SEQ ID NO: 1721 - RNA, 20 nt, Artificial Sequence
  targeting sequence with ATCN PAM
aguggugcuaccagguuacc

SEQ ID NO: 1722 - RNA, 20 nt, Artificial Sequence
  targeting sequence with ATCN PAM
cagugucuugugguaaccug

SEQ ID NO: 1723 - RNA, 20 nt, Artificial Sequence
  targeting sequence with ATCN PAM
gaaaagcuggaauuaauaaa

SEQ ID NO: 1724 - RNA, 20 nt, Artificial Sequence
  targeting sequence with ATCN PAM
accuaauguugccucuuugu

SEQ ID NO: 1725 - RNA, 20 nt, Artificial Sequence
  targeting sequence with ATCN PAM
ugccacugcacuccagccca

SEQ ID NO: 1726 - RNA, 20 nt, Artificial Sequence
  targeting sequence with ATCN PAM
cggcucacugcaacuuccgc

SEQ ID NO: 1727 - RNA, 20 nt, Artificial Sequence
  targeting sequence with ATCN PAM
cuuagaacccgggaggcgga

SEQ ID NO: 1728 - RNA, 20 nt, Artificial Sequence
  targeting sequence with ATCN PAM
cagcuauuccagaggcugag

SEQ ID NO: 1729 - RNA, 20 nt, Artificial Sequence
  targeting sequence with ATCN PAM
uuacugaaaaugcaaaauua

SEQ ID NO: 1730 - RNA, 20 nt, Artificial Sequence
  targeting sequence with ATCN PAM
ccugaggucaggaguucuag

SEQ ID NO: 1731 - RNA, 20 nt, Artificial Sequence
  targeting sequence with ATCN PAM
accugccucaaccucccaaa

SEQ ID NO: 1732 - RNA, 20 nt, Artificial Sequence
  targeting sequence with ATCN PAM
cgggcugccgcuuuucucuu

SEQ ID NO: 1733 - RNA, 20 nt, Artificial Sequence
  targeting sequence with ATCN PAM
aguucaagagaaaagcggca

SEQ ID NO: 1734 - RNA, 20 nt, Artificial Sequence
  targeting sequence with ATCN PAM
gugcuguggggcugggacug

SEQ ID NO: 1735 - RNA, 20 nt, Artificial Sequence
  targeting sequence with ATCN PAM
ccauagguucucaguuucaa

SEQ ID NO: 1736 - RNA, 20 nt, Artificial Sequence
  targeting sequence with ATCN PAM
aauuuucaaaaaagagcaau

SEQ ID NO: 1737 - RNA, 20 nt, Artificial Sequence
  targeting sequence with ATCN PAM
cuugcagcacaaagacauuu

SEQ ID NO: 1738 - RNA, 20 nt, Artificial Sequence
  targeting sequence with ATCN PAM
ccccacauuuucuaguaugu

SEQ ID NO: 1739 - RNA, 20 nt, Artificial Sequence
  targeting sequence with ATCN PAM
uaguguugcuccccaguaag

SEQ ID NO: 1740 - RNA, 20 nt, Artificial Sequence
  targeting sequence with ATCN PAM
ucuucagcugcagcaguguc

SEQ ID NO: 1741 - RNA, 20 nt, Artificial Sequence
  targeting sequence with ATCN PAM
gcuguuucacugaguccccu

SEQ ID NO: 1742 - RNA, 20 nt, Artificial Sequence
  targeting sequence with ATCN PAM
caggaaggcugaaccucaac

SEQ ID NO: 1743 - RNA, 20 nt, Artificial Sequence
  targeting sequence with ATCN PAM
cguaagacugauugaugggu

SEQ ID NO: 1744 - RNA, 20 nt, Artificial Sequence
  targeting sequence with ATCN PAM
gucuuacgggaugaagcaga

SEQ ID NO: 1745 - RNA, 20 nt, Artificial Sequence
  targeting sequence with ATCN PAM
aucagucuuacgggaugaag

SEQ ID NO: 1746 - RNA, 20 nt, Artificial Sequence
  targeting sequence with ATCN PAM
gcaggcuguggcccuucaua

SEQ ID NO: 1747 - RNA, 20 nt, Artificial Sequence
  targeting sequence with ATCN PAM
ucuguugauuagagaggaac

SEQ ID NO: 1748 - RNA, 20 nt, Artificial Sequence
  targeting sequence with ATCN PAM
acagaagauaaaagagguua

SEQ ID NO: 1749 - RNA, 20 nt, Artificial Sequence
  targeting sequence with ATCN PAM
uggcuguggcugacugggga

SEQ ID NO: 1750 - RNA, 20 nt, Artificial Sequence
  targeting sequence with ATCN PAM
aauugcagucaugccuguua

SEQ ID NO: 1751 - RNA, 20 nt, Artificial Sequence
  targeting sequence with ATCN PAM
cagaaaaugaaaauauaaca

SEQ ID NO: 1752 - RNA, 20 nt, Artificial Sequence
  targeting sequence with ATCN PAM
uugagcaggccaucuuugag

SEQ ID NO: 1753 - RNA, 20 nt, Artificial Sequence
  targeting sequence with ATCN PAM
uugaguuaggcuaaggacau

SEQ ID NO: 1754 - RNA, 20 nt, Artificial Sequence
  targeting sequence with ATCN PAM
cagaguuugugaccugaaaa

SEQ ID NO: 1755 - RNA, 20 nt, Artificial Sequence
  targeting sequence with ATCN PAM
uacccccauguuccucuuca

SEQ ID NO: 1756 - RNA, 20 nt, Artificial Sequence
  targeting sequence with ATCN PAM
ccagccaggcgugguggcag

SEQ ID NO: 1757 - RNA, 20 nt, Artificial Sequence
  targeting sequence with ATCN PAM
caucuccagccaggcguggu

SEQ ID NO: 1758 - RNA, 20 nt, Artificial Sequence
  targeting sequence with ATCN PAM
uauacuguaaguauucagga

SEQ ID NO: 1759 - RNA, 20 nt, Artificial Sequence
  targeting sequence with ATCN PAM
acccuccauggaaacaaguu

SEQ ID NO: 1760 - RNA, 20 nt, Artificial Sequence
  targeting sequence with ATCN PAM
uacuaccaugcucucuauau

SEQ ID NO: 1761 - RNA, 20 nt, Artificial Sequence
  targeting sequence with ATCN PAM
aaaacucuucccucuuacau

SEQ ID NO: 1762 - RNA, 20 nt, Artificial Sequence
  targeting sequence with ATCN PAM
gcucccuuuaucuuuucuuu

SEQ ID NO: 1763 - RNA, 20 nt, Artificial Sequence
  targeting sequence with ATCN PAM
gccaugggaaacugagaaaa

SEQ ID NO: 1764 - RNA, 20 nt, Artificial Sequence
  targeting sequence with ATCN PAM
ucuaguuucccuggcccucu

SEQ ID NO: 1765 - RNA, 20 nt, Artificial Sequence
  targeting sequence with ATCN PAM
aguuucccuggcccucucua

SEQ ID NO: 1766 - RNA, 20 nt, Artificial Sequence
  targeting sequence with ATCN PAM
gcuuaauguguguacaucau

SEQ ID NO: 1767 - RNA, 20 nt, Artificial Sequence
  targeting sequence with ATCN PAM
ucauucaacagauacuuauu

SEQ ID NO: 1768 - RNA, 20 nt, Artificial Sequence
  targeting sequence with ATCN PAM
uucaacagauacuuauuggc

SEQ ID NO: 1769 - RNA, 20 nt, Artificial Sequence
  targeting sequence with ATCN PAM
guugaaugaugauguacaca

SEQ ID NO: 1770 - RNA, 20 nt, Artificial Sequence
  targeting sequence with ATCN PAM
aggaagauuuagaauucaau

SEQ ID NO: 1771 - RNA, 20 nt, Artificial Sequence
  targeting sequence with ATCN PAM
uccuagauugggaagggaag

SEQ ID NO: 1772 - RNA, 20 nt, Artificial Sequence
  targeting sequence with ATCN PAM
uauauugaauucuaaaucuu

SEQ ID NO: 1773 - RNA, 20 nt, Artificial Sequence
  targeting sequence with ATCN PAM
uccuauauugaauucuaaau

SEQ ID NO: 1774 - RNA, 20 nt, Artificial Sequence
  targeting sequence with ATCN PAM
aacccauacuuuuguguuag

SEQ ID NO: 1775 - RNA, 20 nt, Artificial Sequence
  targeting sequence with ATCN PAM
ccuuaaguauuacuaacacu

SEQ ID NO: 1776 - RNA, 20 nt, Artificial Sequence
  targeting sequence with ATCN PAM
ggcuuaauaauaauaauagc

SEQ ID NO: 1777 - RNA, 20 nt, Artificial Sequence
  targeting sequence with ATCN PAM
auauuagaaugucuaucaga

SEQ ID NO: 1778 - RNA, 20 nt, Artificial Sequence
  targeting sequence with ATCN PAM
gauuagucuugcaaugacca

SEQ ID NO: 1779 - RNA, 20 nt, Artificial Sequence
  targeting sequence with ATCN PAM
gauagacauucuaauaugga

SEQ ID NO: 1780 - RNA, 20 nt, Artificial Sequence
  targeting sequence with ATCN PAM
ggccuacuucugauuuuaag

SEQ ID NO: 1781 - RNA, 20 nt, Artificial Sequence
  targeting sequence with ATCN PAM
gaaguaggccagauauggug

SEQ ID NO: 1782 - RNA, 20 nt, Artificial Sequence
  targeting sequence with ATCN PAM
uuccacuuaaaaucagaagu

SEQ ID NO: 1783 - RNA, 20 nt, Artificial Sequence
  targeting sequence with ATCN PAM
acacauugauaucguucugu

SEQ ID NO: 1784 - RNA, 20 nt, Artificial Sequence
  targeting sequence with ATCN PAM
auguguagauucaaaaagcu

SEQ ID NO: 1785 - RNA, 20 nt, Artificial Sequence
  targeting sequence with ATCN PAM
uucugucuuucaccaaaugu

SEQ ID NO: 1786 - RNA, 20 nt, Artificial Sequence
  targeting sequence with ATCN PAM
uggccaaaauguuuucacau

SEQ ID NO: 1787 - RNA, 20 nt, Artificial Sequence
  targeting sequence with ATCN PAM
ugucacaguuuauaguucaa

SEQ ID NO: 1788 - RNA, 20 nt, Artificial Sequence
  targeting sequence with ATCN PAM
ggaaacccuugaacuauaaa

SEQ ID NO: 1789 - RNA, 20 nt, Artificial Sequence
  targeting sequence with ATCN PAM
agucccauuuaaaacuuagu

SEQ ID NO: 1790 - RNA, 20 nt, Artificial Sequence
  targeting sequence with ATCN PAM
cuuaaauauccagucccauu

SEQ ID NO: 1791 - RNA, 20 nt, Artificial Sequence
  targeting sequence with ATCN PAM
guucaaaauuggaugccuua

SEQ ID NO: 1792 - RNA, 20 nt, Artificial Sequence
  targeting sequence with ATCN PAM
aauuuugaacagauuauaaa

SEQ ID NO: 1793 - RNA, 20 nt, Artificial Sequence
  targeting sequence with ATCN PAM
aguuaaagugaacagccaau

SEQ ID NO: 1794 - RNA, 20 nt, Artificial Sequence
  targeting sequence with ATCN PAM
caaaucgucuuuuuauucac

SEQ ID NO: 1795 - RNA, 20 nt, Artificial Sequence
  targeting sequence with ATCN PAM
ucuuuuuauucacaaaagac

SEQ ID NO: 1796 - RNA, 20 nt, Artificial Sequence
  targeting sequence with ATCN PAM
uaacucaaugcaaccuugaa

SEQ ID NO: 1797 - RNA, 20 nt, Artificial Sequence
  targeting sequence with ATCN PAM
uacgacugcauuccagccua

SEQ ID NO: 1798 - RNA, 20 nt, Artificial Sequence
  targeting sequence with ATCN PAM
uuucaugugcuuauuggcca

SEQ ID NO: 1799 - RNA, 20 nt, Artificial Sequence
  targeting sequence with ATCN PAM
uuagccaucaggaaaaugca

SEQ ID NO: 1800 - RNA, 20 nt, Artificial Sequence
  targeting sequence with ATCN PAM
ggaaaaugcaaauugaaacc

SEQ ID NO: 1801 - RNA, 20 nt, Artificial Sequence
  targeting sequence with ATCN PAM
cauugugguuucaauuugca

SEQ ID NO: 1802 - RNA, 20 nt, Artificial Sequence
  targeting sequence with ATCN PAM
ucauacacugcuaaugcaaa

SEQ ID NO: 1803 - RNA, 20 nt, Artificial Sequence
  targeting sequence with ATCN PAM
cagcacuuugggaggccaag

SEQ ID NO: 1804 - RNA, 20 nt, Artificial Sequence
  targeting sequence with ATCN PAM
acccaccuuggccucccaaa

SEQ ID NO: 1805 - RNA, 20 nt, Artificial Sequence
  targeting sequence with ATCN PAM
ucugagcucaggaguuugag

SEQ ID NO: 1806 - RNA, 20 nt, Artificial Sequence
  targeting sequence with ATCN PAM
gagcucaggaguuugagacu

SEQ ID NO: 1807 - RNA, 20 nt, Artificial Sequence
  targeting sequence with ATCN PAM
guagucccagcuacuuggga

SEQ ID NO: 1808 - RNA, 20 nt, Artificial Sequence
  targeting sequence with ATCN PAM
uccuaccucagccucccaag

SEQ ID NO: 1809 - RNA, 20 nt, Artificial Sequence
  targeting sequence with ATCN PAM
cgugaagcugggaaguggag

SEQ ID NO: 1810 - RNA, 20 nt, Artificial Sequence
  targeting sequence with ATCN PAM
uggcuuacugcaaccuccac

SEQ ID NO: 1811 - RNA, 20 nt, Artificial Sequence
  targeting sequence with ATCN PAM
ugaaauaaacaagaauuaaa

SEQ ID NO: 1812 - RNA, 20 nt, Artificial Sequence
  targeting sequence with ATCN PAM
auaaccauugcaauacaauu

SEQ ID NO: 1813 - RNA, 20 nt, Artificial Sequence
  targeting sequence with ATCN PAM
gaggaaaaagaacacacagc

SEQ ID NO: 1814 - RNA, 20 nt, Artificial Sequence
  targeting sequence with ATCN PAM
uuuccaaucugaggaaaaag

SEQ ID NO: 1815 - RNA, 20 nt, Artificial Sequence
  targeting sequence with ATCN PAM
ggcacugaacuuugaccccu

SEQ ID NO: 1816 - RNA, 20 nt, Artificial Sequence
  targeting sequence with ATCN PAM
gcuacuuuacuaaaggcgag

SEQ ID NO: 1817 - RNA, 20 nt, Artificial Sequence
  targeting sequence with ATCN PAM
cuuuucaccaaggauggagu

SEQ ID NO: 1818 - RNA, 20 nt, Artificial Sequence
  targeting sequence with ATCN PAM
uuggugaaaagagauacuug

SEQ ID NO: 1819 - RNA, 20 nt, Artificial Sequence
  targeting sequence with ATCN PAM
gguuucgcuugacacgucca

SEQ ID NO: 1820 - RNA, 20 nt, Artificial Sequence
  targeting sequence with ATCN PAM
cuguaggcauagcgguccuu

SEQ ID NO: 1821 - RNA, 20 nt, Artificial Sequence
  targeting sequence with ATCN PAM
ggugcugcacaaugacguca

SEQ ID NO: 1822 - RNA, 20 nt, Artificial Sequence
  targeting sequence with ATCN PAM
cugagcagaaagguaagagg

SEQ ID NO: 1823 - RNA, 20 nt, Artificial Sequence
  targeting sequence with ATCN PAM
acuuacuucagguguauuca

SEQ ID NO: 1824 - RNA, 20 nt, Artificial Sequence
  targeting sequence with ATCN PAM
gaagccugccuaaguaacug

SEQ ID NO: 1825 - RNA, 20 nt, Artificial Sequence
  targeting sequence with ATCN PAM
ccgggggccacuagugcugu

SEQ ID NO: 1826 - RNA, 20 nt, Artificial Sequence
  targeting sequence with ATCN PAM
aaaguccuauaggacacaau

SEQ ID NO: 1827 - RNA, 20 nt, Artificial Sequence
  targeting sequence with ATCN PAM
caggguucagcagaguugau

SEQ ID NO: 1828 - RNA, 20 nt, Artificial Sequence
  targeting sequence with ATCN PAM
acucugcugaacccugggau

SEQ ID NO: 1829 - RNA, 20 nt, Artificial Sequence
  targeting sequence with ATCN PAM
aauacauacaaucaacucug

SEQ ID NO: 1830 - RNA, 20 nt, Artificial Sequence
  targeting sequence with ATCN PAM
uuagaguaucuaauacauac

SEQ ID NO: 1831 - RNA, 20 nt, Artificial Sequence
  targeting sequence with ATCN PAM
cacuuuaauugccaguagcg

SEQ ID NO: 1832 - RNA, 20 nt, Artificial Sequence
  targeting sequence with ATCN PAM
uuuacuuagcgcuacuggca

SEQ ID NO: 1833 - RNA, 20 nt, Artificial Sequence
  targeting sequence with ATCN PAM
aguucuagcaagagguuguu

SEQ ID NO: 1834 - RNA, 20 nt, Artificial Sequence
  targeting sequence with ATCN PAM
gaacugucaaagaaaaaaau

SEQ ID NO: 1835 - RNA, 20 nt, Artificial Sequence
  targeting sequence with ATCN PAM
ucuugacaagcucuuugcau

SEQ ID NO: 1836 - RNA, 20 nt, Artificial Sequence
  targeting sequence with ATCN PAM
acagaaaucgauuggcuauc

SEQ ID NO: 1837 - RNA, 20 nt, Artificial Sequence
  targeting sequence with ATCN PAM
auuggcuauccaacugccag

SEQ ID NO: 1838 - RNA, 20 nt, Artificial Sequence
  targeting sequence with ATCN PAM
auuucuguagauggcaaucu

SEQ ID NO: 1839 - RNA, 20 nt, Artificial Sequence
  targeting sequence with ATCN PAM
aacugccagagaaaauccuc

SEQ ID NO: 1840 - RNA, 20 nt, Artificial Sequence
  targeting sequence with ATCN PAM
ucaucuaugaguuguauuca

SEQ ID NO: 1841 - RNA, 20 nt, Artificial Sequence
  targeting sequence with ATCN PAM
augaguuguauucagaggac

SEQ ID NO: 1842 - RNA, 20 nt, Artificial Sequence
  targeting sequence with ATCN PAM
gacaugcauuaccggguaaa

SEQ ID NO: 1843 - RNA, 20 nt, Artificial Sequence
  targeting sequence with ATCN PAM
ucuccuuuacccgguaaugc

SEQ ID NO: 1844 - RNA, 20 nt, Artificial Sequence
  targeting sequence with ATCN PAM
agaaguuugagugcaaccuc

SEQ ID NO: 1845 - RNA, 20 nt, Artificial Sequence
  targeting sequence with ATCN PAM
caucauccugugccaggugg

SEQ ID NO: 1846 - RNA, 20 nt, Artificial Sequence
  targeting sequence with ATCN PAM
uccugugccaggugggcagc

SEQ ID NO: 1847 - RNA, 20 nt, Artificial Sequence
  targeting sequence with ATCN PAM
ugugccaggugggcagcagc

SEQ ID NO: 1848 - RNA, 20 nt, Artificial Sequence
  targeting sequence with ATCN PAM
gcaagucaugagccauaaac

SEQ ID NO: 1849 - RNA, 20 nt, Artificial Sequence
  targeting sequence with ATCN PAM
caguacuuuaggaagcugga

SEQ ID NO: 1850 - RNA, 20 nt, Artificial Sequence
  targeting sequence with ATCN PAM
ucauucuguacaccaauuua

SEQ ID NO: 1851 - RNA, 20 nt, Artificial Sequence
  targeting sequence with ATCN PAM
auaaaaacuaucuucauucu

SEQ ID NO: 1852 - RNA, 20 nt, Artificial Sequence
  targeting sequence with ATCN PAM
acucaguaauugucaaggaa

SEQ ID NO: 1853 - RNA, 20 nt, Artificial Sequence
  targeting sequence with ATCN PAM
uucaggaauuaaaacuuccu

SEQ ID NO: 1854 - RNA, 20 nt, Artificial Sequence
  targeting sequence with ATCN PAM
ugagaaauauuuuucuauga

SEQ ID NO: 1855 - RNA, 20 nt, Artificial Sequence
  targeting sequence with ATCN PAM
uggaaguagagguggauuua

SEQ ID NO: 1856 - RNA, 20 nt, Artificial Sequence
  targeting sequence with ATCN PAM
accucuacuuccaagaugcu

SEQ ID NO: 1857 - RNA, 20 nt, Artificial Sequence
  targeting sequence with ATCN PAM
ccuccaacagaacuauguaa

SEQ ID NO: 1858 - RNA, 20 nt, Artificial Sequence
  targeting sequence with ATCN PAM
aaguuagaacuccaagcggu

SEQ ID NO: 1859 - RNA, 20 nt, Artificial Sequence
  targeting sequence with ATCN PAM
uguaauuuguagcaacccua

SEQ ID NO: 1860 - RNA, 20 nt, Artificial Sequence
  targeting sequence with ATCN PAM
auccuguaauuuguagcaac

SEQ ID NO: 1861 - RNA, 20 nt, Artificial Sequence
  targeting sequence with ATCN PAM
ucaaugcaaacccccaccca

SEQ ID NO: 1862 - RNA, 20 nt, Artificial Sequence
  targeting sequence with ATCN PAM
gaggcugaauugggcuccgu

SEQ ID NO: 1863 - RNA, 20 nt, Artificial Sequence
  targeting sequence with ATCN PAM
aagacuccaugcaaggcuuc

SEQ ID NO: 1864 - RNA, 20 nt, Artificial Sequence
  targeting sequence with ATCN PAM
uuaauccaagacuccaugca

SEQ ID NO: 1865 - RNA, 20 nt, Artificial Sequence
  targeting sequence with ATCN PAM
uggggucuacauuggguuag

SEQ ID NO: 1866 - RNA, 20 nt, Artificial Sequence
  targeting sequence with ATCN PAM
aacccaauguagaccccacg

SEQ ID NO: 1867 - RNA, 20 nt, Artificial Sequence
  targeting sequence with ATCN PAM
aucuaacccaauguagaccc

SEQ ID NO: 1868 - RNA, 20 nt, Artificial Sequence
  targeting sequence with ATCN PAM
aucuaucuaacccaauguag

SEQ ID NO: 1869 - RNA, 20 nt, Artificial Sequence
  targeting sequence with ATCN PAM
uucugucccuaaggggagaa

SEQ ID NO: 1870 - RNA, 20 nt, Artificial Sequence
  targeting sequence with ATCN PAM
ccuuggggaggucugggggc

SEQ ID NO: 1871 - RNA, 20 nt, Artificial Sequence
  targeting sequence with ATCN PAM
gccacucccgcuccuucacu

SEQ ID NO: 1872 - RNA, 20 nt, Artificial Sequence
  targeting sequence with ATCN PAM
aggugaucgguggcccuccu

SEQ ID NO: 1873 - RNA, 20 nt, Artificial Sequence
  targeting sequence with ATCN PAM
ccuugauguaacgaaugaga

SEQ ID NO: 1874 - RNA, 20 nt, Artificial Sequence
  targeting sequence with ATCN PAM
guggcccuccuggaagagaa

SEQ ID NO: 1875 - RNA, 20 nt, Artificial Sequence
  targeting sequence with ATCN PAM
gccugacaggagacgugagg

SEQ ID NO: 1876 - RNA, 20 nt, Artificial Sequence
  targeting sequence with ATCN PAM
gcaugcacacgugggugacc

SEQ ID NO: 1877 - RNA, 20 nt, Artificial Sequence
  targeting sequence with ATCN PAM
cccaccuucuggagaccuua

SEQ ID NO: 1878 - RNA, 20 nt, Artificial Sequence
  targeting sequence with ATCN PAM
cuaacaaaucucccaccuuc

SEQ ID NO: 1879 - RNA, 20 nt, Artificial Sequence
  targeting sequence with ATCN PAM
acagaagcaacaucucuaac

SEQ ID NO: 1880 - RNA, 20 nt, Artificial Sequence
  targeting sequence with ATCN PAM
cugccucccucuagaaaucc

SEQ ID NO: 1881 - RNA, 20 nt, Artificial Sequence
  targeting sequence with ATCN PAM
uuaccuaggucagcuccuga

SEQ ID NO: 1882 - RNA, 20 nt, Artificial Sequence
  targeting sequence with ATCN PAM
ggagcugaccuagguaacga

SEQ ID NO: 1883 - RNA, 20 nt, Artificial Sequence
  targeting sequence with ATCN PAM
acucgcugcccuaaucagga

SEQ ID NO: 1884 - RNA, 20 nt, Artificial Sequence
  targeting sequence with ATCN PAM
ugaggacccagcauucuuua

SEQ ID NO: 1885 - RNA, 20 nt, Artificial Sequence
  targeting sequence with ATCN PAM
guaucuugaggacccagcau

SEQ ID NO: 1886 - RNA, 20 nt, Artificial Sequence
  targeting sequence with ATCN PAM
aucaguaucuugaggaccca

SEQ ID NO: 1887 - RNA, 20 nt, Artificial Sequence
  targeting sequence with ATCN PAM
aacuggccaaagggcccauu

SEQ ID NO: 1888 - RNA, 20 nt, Artificial Sequence
  targeting sequence with ATCN PAM
cacaucuaacuggccaaagg

SEQ ID NO: 1889 - RNA, 20 nt, Artificial Sequence
  targeting sequence with ATCN PAM
agguuacacaaaauucugug

SEQ ID NO: 1890 - RNA, 20 nt, Artificial Sequence
  targeting sequence with ATCN PAM
gcugcacagcuuggcuguca

SEQ ID NO: 1891 - RNA, 20 nt, Artificial Sequence
  targeting sequence with ATCN PAM
ccagcaaagaccugacaagc

SEQ ID NO: 1892 - RNA, 20 nt, Artificial Sequence
  targeting sequence with ATCN PAM
ugggcaggucacuuuaccuc

SEQ ID NO: 1893 - RNA, 20 nt, Artificial Sequence
  targeting sequence with ATCN PAM
ucauguaaaaccagccucac

SEQ ID NO: 1894 - RNA, 20 nt, Artificial Sequence
  targeting sequence with ATCN PAM
caguggcuauucacagguau

SEQ ID NO: 1895 - RNA, 20 nt, Artificial Sequence
  targeting sequence with ATCN PAM
gccugggcaacauagcaaga

SEQ ID NO: 1896 - RNA, 20 nt, Artificial Sequence
  targeting sequence with ATCN PAM
cuaaaaaaaauuuuuuuuaa

SEQ ID NO: 1897 - RNA, 20 nt, Artificial Sequence
  targeting sequence with ATCN PAM
cugguuuaaaaaaaauuuuu

SEQ ID NO: 1898 - RNA, 20 nt, Artificial Sequence
  targeting sequence with ATCN PAM
guaaaugauagcuaucauga

SEQ ID NO: 1899 - RNA, 20 nt, Artificial Sequence
  targeting sequence with ATCN PAM
uuuacugauaucccugguuu

SEQ ID NO: 1900 - RNA, 20 nt, Artificial Sequence
  targeting sequence with ATCN PAM
ugaucacuaucaucauuauu

SEQ ID NO: 1901 - RNA, 20 nt, Artificial Sequence
  targeting sequence with ATCN PAM
ugauagcuaucauuuacuga

SEQ ID NO: 1902 - RNA, 20 nt, Artificial Sequence
  targeting sequence with ATCN PAM
cuaucaucauuauuauaauu

SEQ ID NO: 1903 - RNA, 20 nt, Artificial Sequence
  targeting sequence with ATCN PAM
ucauuauuauaauuuucuac

SEQ ID NO: 1904 - RNA, 20 nt, Artificial Sequence
  targeting sequence with ATCN PAM
uuauuauaauuuucuaccac

SEQ ID NO: 1905 - RNA, 20 nt, Artificial Sequence
  targeting sequence with ATCN PAM
gagucacgaacuaacacagg

SEQ ID NO: 1906 - RNA, 20 nt, Artificial Sequence
  targeting sequence with ATCN PAM
cugcuagguggcaucuccua

SEQ ID NO: 1907 - RNA, 20 nt, Artificial Sequence
  targeting sequence with ATCN PAM
ccuaaagcugcaguuugggu

SEQ ID NO: 1908 - RNA, 20 nt, Artificial Sequence
  targeting sequence with ATCN PAM
acaaauccccaguccgaaca

SEQ ID NO: 1909 - RNA, 20 nt, Artificial Sequence
  targeting sequence with ATCN PAM
ccaguccgaacagacacuga

SEQ ID NO: 1910 - RNA, 20 nt, Artificial Sequence
  targeting sequence with ATCN PAM
gaggcugcagaaguaaugac

SEQ ID NO: 1911 - RNA, 20 nt, Artificial Sequence
  targeting sequence with ATCN PAM
uuaggaggccagaagcgagg

SEQ ID NO: 1912 - RNA, 20 nt, Artificial Sequence
  targeting sequence with ATCN PAM
aaagaaagaggggggugggg

SEQ ID NO: 1913 - RNA, 20 nt, Artificial Sequence
  targeting sequence with ATCN PAM
caugugcucugcaagaacaa

SEQ ID NO: 1914 - RNA, 20 nt, Artificial Sequence
  targeting sequence with ATCN PAM
uggcccacugccaggccguu

SEQ ID NO: 1915 - RNA, 20 nt, Artificial Sequence
  targeting sequence with ATCN PAM
uguugccauggugacugaca

SEQ ID NO: 1916 - RNA, 20 nt, Artificial Sequence
  targeting sequence with ATCN PAM
ggcaaaauuucagcgaaaac

SEQ ID NO: 1917 - RNA, 20 nt, Artificial Sequence
  targeting sequence with ATCN PAM
ugaagaucuucguggacaau

SEQ ID NO: 1918 - RNA, 20 nt, Artificial Sequence
  targeting sequence with ATCN PAM
ucaggaucuggcaaaauuuc

SEQ ID NO: 1919 - RNA, 20 nt, Artificial Sequence
  targeting sequence with ATCN PAM
ucguggacaaucucuuugcu

SEQ ID NO: 1920 - RNA, 20 nt, Artificial Sequence
  targeting sequence with ATCN PAM
cuuugcuaucguccugcuga

SEQ ID NO: 1921 - RNA, 20 nt, Artificial Sequence
  targeting sequence with ATCN PAM
uccugcugaagcaggccaca

SEQ ID NO: 1922 - RNA, 20 nt, Artificial Sequence
  targeting sequence with ATCN PAM
accacggccagcuucuuacg

SEQ ID NO: 1923 - RNA, 20 nt, Artificial Sequence
  targeting sequence with ATCN PAM
acaccaaggagcugcuuuuu

SEQ ID NO: 1924 - RNA, 20 nt, Artificial Sequence
  targeting sequence with ATCN PAM
uccuuugauuagagacucuc

SEQ ID NO: 1925 - RNA, 20 nt, Artificial Sequence
  targeting sequence with ATCN PAM
uuugauuagagacucuccuc

SEQ ID NO: 1926 - RNA, 20 nt, Artificial Sequence
  targeting sequence with ATCN PAM
aaggaugaugucccugggcc

SEQ ID NO: 1927 - RNA, 20 nt, Artificial Sequence
  targeting sequence with ATCN PAM
ccccauucacugagugccaa

SEQ ID NO: 1928 - RNA, 20 nt, Artificial Sequence
  targeting sequence with ATCN PAM
aucgccccauucacugagug

SEQ ID NO: 1929 - RNA, 20 nt, Artificial Sequence
  targeting sequence with ATCN PAM
uguuuccuucccacgcugua

SEQ ID NO: 1930 - RNA, 20 nt, Artificial Sequence
  targeting sequence with ATCN PAM
gaaagggggaaggggauggg

SEQ ID NO: 1931 - RNA, 20 nt, Artificial Sequence
  targeting sequence with ATCN PAM
ccuucccccuuucagaugac

SEQ ID NO: 1932 - RNA, 20 nt, Artificial Sequence
  targeting sequence with ATCN PAM
aagcacuucgcauucugcug

SEQ ID NO: 1933 - RNA, 20 nt, Artificial Sequence
  targeting sequence with ATCN PAM
uugggguuguaggcguuguu

SEQ ID NO: 1934 - RNA, 20 nt, Artificial Sequence
  targeting sequence with ATCN PAM
agcccuguggccugaggaag

SEQ ID NO: 1935 - RNA, 20 nt, Artificial Sequence
  targeting sequence with ATCN PAM
ggaaacccugcaguggccga

SEQ ID NO: 1936 - RNA, 20 nt, Artificial Sequence
  targeting sequence with ATCN PAM
gcccauaacaucaggaaacc

SEQ ID NO: 1937 - RNA, 20 nt, Artificial Sequence
  targeting sequence with ATCN PAM
augggggaggggucuggagu

SEQ ID NO: 1938 - RNA, 20 nt, Artificial Sequence
  targeting sequence with ATCN PAM
auucugcugcugagaacaag

SEQ ID NO: 1939 - RNA, 20 nt, Artificial Sequence
  targeting sequence with ATCN PAM
cuuacugugugaucuuaagu

SEQ ID NO: 1940 - RNA, 20 nt, Artificial Sequence
  targeting sequence with ATCN PAM
cacaguaagggaugcaggca

SEQ ID NO: 1941 - RNA, 20 nt, Artificial Sequence
  targeting sequence with ATCN PAM
uaaguuagugagccucucug

SEQ ID NO: 1942 - RNA, 20 nt, Artificial Sequence
  targeting sequence with ATCN PAM
aguguauuccuguagcaauu

SEQ ID NO: 1943 - RNA, 20 nt, Artificial Sequence
  targeting sequence with ATCN PAM
ccuccccuagccugccauag

SEQ ID NO: 1944 - RNA, 20 nt, Artificial Sequence
  targeting sequence with ATCN PAM
gcauucccagcuguaacauu

SEQ ID NO: 1945 - RNA, 20 nt, Artificial Sequence
  targeting sequence with ATCN PAM
ugugagaaccacccugggcu

SEQ ID NO: 1946 - RNA, 20 nt, Artificial Sequence
  targeting sequence with ATCN PAM
ccacugucccuguuccccag

SEQ ID NO: 1947 - RNA, 20 nt, Artificial Sequence
  targeting sequence with ATCN PAM
aagccagcaccuucccugug

SEQ ID NO: 1948 - RNA, 20 nt, Artificial Sequence
  targeting sequence with ATCN PAM
uggagccauuguagccgacc

SEQ ID NO: 1949 - RNA, 20 nt, Artificial Sequence
  targeting sequence with ATCN PAM
ucugccuccaugucuucucc

SEQ ID NO: 1950 - RNA, 20 nt, Artificial Sequence
  targeting sequence with ATCN PAM
cuuccuuuauggcuaucuuc

SEQ ID NO: 1951 - RNA, 20 nt, Artificial Sequence
  targeting sequence with ATCN PAM
ucucauuucaccucacauuc

SEQ ID NO: 1952 - RNA, 20 nt, Artificial Sequence
  targeting sequence with ATCN PAM
cugucuaugaagugcuggcu

SEQ ID NO: 1953 - RNA, 20 nt, Artificial Sequence
  targeting sequence with ATCN PAM
ggccuuuucacucaacaauc

SEQ ID NO: 1954 - RNA, 20 nt, Artificial Sequence
  targeting sequence with ATCN PAM
ccuaaagcaucguucugugu

SEQ ID NO: 1955 - RNA, 20 nt, Artificial Sequence
  targeting sequence with ATCN PAM
uucugugucaguaaauggua

SEQ ID NO: 1956 - RNA, 20 nt, Artificial Sequence
  targeting sequence with ATCN PAM
cuguauuauuuccuacaauu

SEQ ID NO: 1957 - RNA, 20 nt, Artificial Sequence
  targeting sequence with ATCN PAM
cuuaaacccuuugccuaguu

SEQ ID NO: 1958 - RNA, 20 nt, Artificial Sequence
  targeting sequence with ATCN PAM
cucuagagcuaugcacacug

SEQ ID NO: 1959 - RNA, 20 nt, Artificial Sequence
  targeting sequence with ATCN PAM
ucccacccauguuggcaugu

SEQ ID NO: 1960 - RNA, 20 nt, Artificial Sequence
  targeting sequence with ATCN PAM
cccaccacagucauggcacu

SEQ ID NO: 1961 - RNA, 20 nt, Artificial Sequence
  targeting sequence with ATCN PAM
acaagacacaauaaaaugca

SEQ ID NO: 1962 - RNA, 20 nt, Artificial Sequence
  targeting sequence with ATCN PAM
uucuagcuagguccuugcac

SEQ ID NO: 1963 - RNA, 20 nt, Artificial Sequence
  targeting sequence with ATCN PAM
acuuagaagaagugggcucu

SEQ ID NO: 1964 - RNA, 20 nt, Artificial Sequence
  targeting sequence with ATCN PAM
ucaacuuagaagaagugggc

SEQ ID NO: 1965 - RNA, 20 nt, Artificial Sequence
  targeting sequence with ATCN PAM
uccaugccugacacagauca

SEQ ID NO: 1966 - RNA, 20 nt, Artificial Sequence
  targeting sequence with ATCN PAM
augccugacacagaucagcu

SEQ ID NO: 1967 - RNA, 20 nt, Artificial Sequence
  targeting sequence with ATCN PAM
gugucaggcauggaugaugg

SEQ ID NO: 1968 - RNA, 20 nt, Artificial Sequence
  targeting sequence with ATCN PAM
gcuauucaagaaauguuagu

SEQ ID NO: 1969 - RNA, 20 nt, Artificial Sequence
  targeting sequence with ATCN PAM
gaauuccacuaacauuucuu

SEQ ID NO: 1970 - RNA, 20 nt, Artificial Sequence
  targeting sequence with ATCN PAM
gaggaaaaagaccagaaagc

SEQ ID NO: 1971 - RNA, 20 nt, Artificial Sequence
  targeting sequence with ATCN PAM
uugucugccccauuacaaac

SEQ ID NO: 1972 - RNA, 20 nt, Artificial Sequence
  targeting sequence with ATCN PAM
accaggaacucaucucccuc

SEQ ID NO: 1973 - RNA, 20 nt, Artificial Sequence
  targeting sequence with ATCN PAM
cccucaauugccccaaacua

SEQ ID NO: 1974 - RNA, 20 nt, Artificial Sequence
  targeting sequence with ATCN PAM
ugggagaaaaccuuuuaaua

SEQ ID NO: 1975 - RNA, 20 nt, Artificial Sequence
  targeting sequence with ATCN PAM
ugaccucaaaaauaaaugca

SEQ ID NO: 1976 - RNA, 20 nt, Artificial Sequence
  targeting sequence with ATCN PAM
uaaaguccuggcagaggaag

SEQ ID NO: 1977 - RNA, 20 nt, Artificial Sequence
  targeting sequence with ATCN PAM
ugcugacgcagcgggucagg

SEQ ID NO: 1978 - RNA, 20 nt, Artificial Sequence
  targeting sequence with ATCN PAM
gucgccucugccuccggcca

SEQ ID NO: 1979 - RNA, 20 nt, Artificial Sequence
  targeting sequence with ATCN PAM
ugugguuuuggcccagagag

SEQ ID NO: 1980 - RNA, 20 nt, Artificial Sequence
  targeting sequence with ATCN PAM
gacccagucuuggaauuuuu

SEQ ID NO: 1981 - RNA, 20 nt, Artificial Sequence
  targeting sequence with ATCN PAM
aacagcaagauaaaguauag

SEQ ID NO: 1982 - RNA, 20 nt, Artificial Sequence
  targeting sequence with ATCN PAM
ugcuguuggauuucaaacau

SEQ ID NO: 1983 - RNA, 20 nt, Artificial Sequence
  targeting sequence with ATCN PAM
aucauaugcucagcugugau

SEQ ID NO: 1984 - RNA, 20 nt, Artificial Sequence
  targeting sequence with ATCN PAM
uaugcucagcugugauaugc

SEQ ID NO: 1985 - RNA, 20 nt, Artificial Sequence
  targeting sequence with ATCN PAM
cagcugagcauaugauggau

SEQ ID NO: 1986 - RNA, 20 nt, Artificial Sequence
  targeting sequence with ATCN PAM
caagcagcuguaacuagagc

SEQ ID NO: 1987 - RNA, 20 nt, Artificial Sequence
  targeting sequence with ATCN PAM
uucagguuucgucaagccaa

SEQ ID NO: 1988 - RNA, 20 nt, Artificial Sequence
  targeting sequence with ATCN PAM
ccuggaagcuuucucaaacu

SEQ ID NO: 1989 - RNA, 20 nt, Artificial Sequence
  targeting sequence with ATCN PAM
aguuucaccaucuccuggaa

SEQ ID NO: 1990 - RNA, 20 nt, Artificial Sequence
  targeting sequence with ATCN PAM
gagcccugagaggucuggaa

SEQ ID NO: 1991 - RNA, 20 nt, Artificial Sequence
  targeting sequence with ATCN PAM
cccaggcucuccagucuugu

SEQ ID NO: 1992 - RNA, 20 nt, Artificial Sequence
  targeting sequence with ATCN PAM
uuaccuucacuguauuuucu

SEQ ID NO: 1993 - RNA, 20 nt, Artificial Sequence
  targeting sequence with ATCN PAM
ugccugcauuuugcccagug

SEQ ID NO: 1994 - RNA, 20 nt, Artificial Sequence
  targeting sequence with ATCN PAM
cuccuuugcccaugguagcc

SEQ ID NO: 1995 - RNA, 20 nt, Artificial Sequence
  targeting sequence with ATCN PAM
aaacagaaguuaauggauuu

SEQ ID NO: 1996 - RNA, 20 nt, Artificial Sequence
  targeting sequence with ATCN PAM
auuaacuucuguuuagaugu

SEQ ID NO: 1997 - RNA, 20 nt, Artificial Sequence
  targeting sequence with ATCN PAM
uaggcuggugacuuuuuggg

SEQ ID NO: 1998 - RNA, 20 nt, Artificial Sequence
  targeting sequence with ATCN PAM
cuccucauuggcacauuaaa

SEQ ID NO: 1999 - RNA, 20 nt, Artificial Sequence
  targeting sequence with ATCN PAM
uuuccaccaugccaucucuc

SEQ ID NO: 2000 - RNA, 20 nt, Artificial Sequence
  targeting sequence with ATCN PAM
gccaggaccucugugcuaau

SEQ ID NO: 2001 - RNA, 20 nt, Artificial Sequence
  targeting sequence with ATCN PAM
cuccuggcuuccugggcagg

SEQ ID NO: 2002 - RNA, 20 nt, Artificial Sequence
  targeting sequence with ATCN PAM
uuaacaaggaaaggccuugc

SEQ ID NO: 2003 - RNA, 20 nt, Artificial Sequence
  targeting sequence with ATCN PAM
uguaggagggcaucuguccc

SEQ ID NO: 2004 - RNA, 20 nt, Artificial Sequence
  targeting sequence with ATCN PAM
guccccagggcagggaucag

SEQ ID NO: 2005 - RNA, 20 nt, Artificial Sequence
  targeting sequence with ATCN PAM
cugcccuggggacagaugcc

SEQ ID NO: 2006 - RNA, 20 nt, Artificial Sequence
  targeting sequence with ATCN PAM
ggagagcuguuuccagaggc

SEQ ID NO: 2007 - RNA, 20 nt, Artificial Sequence
  targeting sequence with ATCN PAM
cuuaccuuucuuggacucag

SEQ ID NO: 2008 - RNA, 20 nt, Artificial Sequence
  targeting sequence with ATCN PAM
gccucccucagcagaacccc

SEQ ID NO: 2009 - RNA, 20 nt, Artificial Sequence
  targeting sequence with ATCN PAM
cagguugugccgcaguuaca

SEQ ID NO: 2010 - RNA, 20 nt, Artificial Sequence
  targeting sequence with ATCN PAM
ggacaaagggcagaggaagc

SEQ ID NO: 2011 - RNA, 20 nt, Artificial Sequence
  targeting sequence with ATCN PAM
uauggcgaggcaggccugua

SEQ ID NO: 2012 - RNA, 20 nt, Artificial Sequence
  targeting sequence with ATCN PAM
uccccuccuucccaccuaca

SEQ ID NO: 2013 - RNA, 20 nt, Artificial Sequence
  targeting sequence with ATCN PAM
ugcaccucucucaugacugg

SEQ ID NO: 2014 - RNA, 20 nt, Artificial Sequence
  targeting sequence with ATCN PAM
gcacccugcccagccugccc

SEQ ID NO: 2015 - RNA, 20 nt, Artificial Sequence
  targeting sequence with ATCN PAM
ucccacgcaucuggaggcag

SEQ ID NO: 2016 - RNA, 20 nt, Artificial Sequence
  targeting sequence with ATCN PAM
cacgcaucuggaggcaggcu

SEQ ID NO: 2017 - RNA, 20 nt, Artificial Sequence
  targeting sequence with ATCN PAM
ggaggcaggcucuguaugca

SEQ ID NO: 2018 - RNA, 20 nt, Artificial Sequence
  targeting sequence with ATCN PAM
gguucuuuccauggcucuga

SEQ ID NO: 2019 - RNA, 20 nt, Artificial Sequence
  targeting sequence with ATCN PAM
agggaaaaaaagaagacugu

SEQ ID NO: 2020 - RNA, 20 nt, Artificial Sequence
  targeting sequence with ATCN PAM
ugcaguccgcucccauguac

SEQ ID NO: 2021 - RNA, 20 nt, Artificial Sequence
  targeting sequence with ATCN PAM
agguacugguacaugggagc

SEQ ID NO: 2022 - RNA, 20 nt, Artificial Sequence
  targeting sequence with ATCN PAM
gguaggcuuccuugaacagu

SEQ ID NO: 2023 - RNA, 20 nt, Artificial Sequence
  targeting sequence with ATCN PAM
gugucugugacacccaagca

SEQ ID NO: 2024 - RNA, 20 nt, Artificial Sequence
  targeting sequence with ATCN PAM
aaaccuucuagcgcuuccau

SEQ ID NO: 2025 - RNA, 20 nt, Artificial Sequence
  targeting sequence with ATCN PAM
agccagcaggagcuggaguu

SEQ ID NO: 2026 - RNA, 20 nt, Artificial Sequence
  targeting sequence with ATCN PAM
gccuucuuaagggaccccac

SEQ ID NO: 2027 - RNA, 20 nt, Artificial Sequence
  targeting sequence with ATCN PAM
cgccaugaagguacguggga

SEQ ID NO: 2028 - RNA, 20 nt, Artificial Sequence
  targeting sequence with ATCN PAM
aguccaugaaucccgccaug

SEQ ID NO: 2029 - RNA, 20 nt, Artificial Sequence
  targeting sequence with ATCN PAM
cucuagcuuucauagacuag

SEQ ID NO: 2030 - RNA, 20 nt, Artificial Sequence
  targeting sequence with ATCN PAM
gagguucuagauggaaacac

SEQ ID NO: 2031 - RNA, 20 nt, Artificial Sequence
  targeting sequence with ATCN PAM
ccccacagucaauuaaugag

SEQ ID NO: 2032 - RNA, 20 nt, Artificial Sequence
  targeting sequence with ATCN PAM
cgucccucuuugccacuccu

SEQ ID NO: 2033 - RNA, 20 nt, Artificial Sequence
  targeting sequence with ATCN PAM
aacccaaggcgggcaucacg

SEQ ID NO: 2034 - RNA, 20 nt, Artificial Sequence
  targeting sequence with ATCN PAM
agacuuguaggcaugaagag

SEQ ID NO: 2035 - RNA, 20 nt, Artificial Sequence
  targeting sequence with ATCN PAM
caguuaagccucaugacugc

SEQ ID NO: 2036 - RNA, 20 nt, Artificial Sequence
  targeting sequence with ATCN PAM
gggaugguugugcagaugcu

SEQ ID NO: 2037 - RNA, 20 nt, Artificial Sequence
  targeting sequence with ATCN PAM
cugauuuaaauuccccuuua

SEQ ID NO: 2038 - RNA, 20 nt, Artificial Sequence
  targeting sequence with ATCN PAM
gcacaaccaucccugauuua

SEQ ID NO: 2039 - RNA, 20 nt, Artificial Sequence
  targeting sequence with ATCN PAM
cuucccuuguuuaguaaugg

SEQ ID NO: 2040 - RNA, 20 nt, Artificial Sequence
  targeting sequence with ATCN PAM
uuguguaacaaugaucuaga

SEQ ID NO: 2041 - RNA, 20 nt, Artificial Sequence
  targeting sequence with ATCN PAM
uuguuacacaacgaucacuu

SEQ ID NO: 2042 - RNA, 20 nt, Artificial Sequence
  targeting sequence with ATCN PAM
agauuauauuuuuagauguc

SEQ ID NO: 2043 - RNA, 20 nt, Artificial Sequence
  targeting sequence with ATCN PAM
agaucauuguuacacaacga

SEQ ID NO: 2044 - RNA, 20 nt, Artificial Sequence
  targeting sequence with ATCN PAM
aaaaauauaaucuagaucau

SEQ ID NO: 2045 - RNA, 20 nt, Artificial Sequence
  targeting sequence with ATCN PAM
ccacuuuccuacacugagga

SEQ ID NO: 2046 - RNA, 20 nt, Artificial Sequence
  targeting sequence with ATCN PAM
uagcacuuugggaggccgag

SEQ ID NO: 2047 - RNA, 20 nt, Artificial Sequence
  targeting sequence with ATCN PAM
gcacaccucggccucccaaa

SEQ ID NO: 2048 - RNA, 20 nt, Artificial Sequence
  targeting sequence with ATCN PAM
caaggucaggagaucgagac

SEQ ID NO: 2049 - RNA, 20 nt, Artificial Sequence
  targeting sequence with ATCN PAM
cuauggagggagcuucccuc

SEQ ID NO: 2050 - RNA, 20 nt, Artificial Sequence
  targeting sequence with ATCN PAM
cuagaauagaaaggauugua

SEQ ID NO: 2051 - RNA, 20 nt, Artificial Sequence
  targeting sequence with ATCN PAM
uuucuauucuagggauuugu

SEQ ID NO: 2052 - RNA, 20 nt, Artificial Sequence
  targeting sequence with ATCN PAM
guaaacacucauauuaaacc

SEQ ID NO: 2053 - RNA, 20 nt, Artificial Sequence
  targeting sequence with ATCN PAM
cagcacuuugggaggcugag

SEQ ID NO: 2054 - RNA, 20 nt, Artificial Sequence
  targeting sequence with ATCN PAM
ggcuggguguggugguuuau

SEQ ID NO: 2055 - RNA, 20 nt, Artificial Sequence
  targeting sequence with ATCN PAM
auuguguacaacaugcuguu

SEQ ID NO: 2056 - RNA, 20 nt, Artificial Sequence
  targeting sequence with ATCN PAM
uguggcuuuuucaaaacagc

SEQ ID NO: 2057 - RNA, 20 nt, Artificial Sequence
  targeting sequence with ATCN PAM
ucaauaucauguggcuuuuu

SEQ ID NO: 2058 - RNA, 20 nt, Artificial Sequence
  targeting sequence with ATCN PAM
agccuaucuucaauaucaug

SEQ ID NO: 2059 - RNA, 20 nt, Artificial Sequence
  targeting sequence with ATCN PAM
aaaucccgaguaccccaccu

SEQ ID NO: 2060 - RNA, 20 nt, Artificial Sequence
  targeting sequence with ATCN PAM
cgaguaccccaccucuuuac

SEQ ID NO: 2061 - RNA, 20 nt, Artificial Sequence
  targeting sequence with ATCN PAM
aagcuggugagccugagugc

SEQ ID NO: 2062 - RNA, 20 nt, Artificial Sequence
  targeting sequence with ATCN PAM
cuaggaaccacuauauccaa

SEQ ID NO: 2063 - RNA, 20 nt, Artificial Sequence
  targeting sequence with ATCN PAM
ccacuagauggcagagaaga

SEQ ID NO: 2064 - RNA, 20 nt, Artificial Sequence
  targeting sequence with ATCN PAM
aguggggauggcuguccauc

SEQ ID NO: 2065 - RNA, 20 nt, Artificial Sequence
  targeting sequence with ATCN PAM
guuuccgaguuccuucaacc

SEQ ID NO: 2066 - RNA, 20 nt, Artificial Sequence
  targeting sequence with ATCN PAM
uagacacuagcacagcugag

SEQ ID NO: 2067 - RNA, 20 nt, Artificial Sequence
  targeting sequence with ATCN PAM
ucuuuguggaaaggggccug

SEQ ID NO: 2068 - RNA, 20 nt, Artificial Sequence
  targeting sequence with ATCN PAM
ggguuuccuuaaagcgccuu

SEQ ID NO: 2069 - RNA, 20 nt, Artificial Sequence
  targeting sequence with ATCN PAM
agagggugauguguaagacc

SEQ ID NO: 2070 - RNA, 20 nt, Artificial Sequence
  targeting sequence with ATCN PAM
cccucuagaucuggguuucc

SEQ ID NO: 2071 - RNA, 20 nt, Artificial Sequence
  targeting sequence with ATCN PAM
caugggccaaggaacacagg

SEQ ID NO: 2072 - RNA, 20 nt, Artificial Sequence
  targeting sequence with ATCN PAM
gagucagaaccuggcaaaca

SEQ ID NO: 2073 - RNA, 20 nt, Artificial Sequence
  targeting sequence with ATCN PAM
guguucuccaggcauguggu

SEQ ID NO: 2074 - RNA, 20 nt, Artificial Sequence
  targeting sequence with ATCN PAM
ugacaccucccagagcuaag

SEQ ID NO: 2075 - RNA, 20 nt, Artificial Sequence
  targeting sequence with ATCN PAM
guuuaauugaccagcuuucc

SEQ ID NO: 2076 - RNA, 20 nt, Artificial Sequence
  targeting sequence with ATCN PAM
cacaggaccaggcuuccugu

SEQ ID NO: 2077 - RNA, 20 nt, Artificial Sequence
  targeting sequence with ATCN PAM
uuucaucccacaggaccagg

SEQ ID NO: 2078 - RNA, 20 nt, Artificial Sequence
  targeting sequence with ATCN PAM
cccgaggucuuuucaggagg

SEQ ID NO: 2079 - RNA, 20 nt, Artificial Sequence
  targeting sequence with ATCN PAM
ucccuccugaaaagaccucg

SEQ ID NO: 2080 - RNA, 20 nt, Artificial Sequence
  targeting sequence with ATCN PAM
ugaccacuugcagccucugc

SEQ ID NO: 2081 - RNA, 20 nt, Artificial Sequence
  targeting sequence with ATCN PAM
gaaagcagcaaaacuagcuu

SEQ ID NO: 2082 - RNA, 20 nt, Artificial Sequence
  targeting sequence with ATCN PAM
caccaagucuguggaaggca

SEQ ID NO: 2083 - RNA, 20 nt, Artificial Sequence
  targeting sequence with ATCN PAM
gucuuuauacccucucagcu

SEQ ID NO: 2084 - RNA, 20 nt, Artificial Sequence
  targeting sequence with ATCN PAM
uggcaacauggguagaaugc

SEQ ID NO: 2085 - RNA, 20 nt, Artificial Sequence
  targeting sequence with ATCN PAM
guccaugcaucucauccucu

SEQ ID NO: 2086 - RNA, 20 nt, Artificial Sequence
  targeting sequence with ATCN PAM
cauccucuccugcugugaug

SEQ ID NO: 2087 - RNA, 20 nt, Artificial Sequence
  targeting sequence with ATCN PAM
ucuccugcugugaugcugcg

SEQ ID NO: 2088 - RNA, 20 nt, Artificial Sequence
  targeting sequence with ATCN PAM
cagcaggagaggaugagaug

SEQ ID NO: 2089 - RNA, 20 nt, Artificial Sequence
  targeting sequence with ATCN PAM
cgguuuuguuuuaccugauc

SEQ ID NO: 2090 - RNA, 20 nt, Artificial Sequence
  targeting sequence with ATCN PAM
gguaaaacaaaaccgugaug

SEQ ID NO: 2091 - RNA, 20 nt, Artificial Sequence
  targeting sequence with ATCN PAM
caaaaugacugaugcaacug

SEQ ID NO: 2092 - RNA, 20 nt, Artificial Sequence
  targeting sequence with ATCN PAM
gucauuuugagaucagguaa

SEQ ID NO: 2093 - RNA, 20 nt, Artificial Sequence
  targeting sequence with ATCN PAM
caguugcaucagucauuuug

SEQ ID NO: 2094 - RNA, 20 nt, Artificial Sequence
  targeting sequence with ATCN PAM
cauggauaaagccaugccuc

SEQ ID NO: 2095 - RNA, 20 nt, Artificial Sequence
  targeting sequence with ATCN PAM
augggauuggaccauguaaa

SEQ ID NO: 2096 - RNA, 20 nt, Artificial Sequence
  targeting sequence with ATCN PAM
ugcgugcaggagguuauacc

SEQ ID NO: 2097 - RNA, 20 nt, Artificial Sequence
  targeting sequence with ATCN PAM
ucgugcgugcaggagguuau

SEQ ID NO: 2098 - RNA, 20 nt, Artificial Sequence
  targeting sequence with ATCN PAM
gugcuugcucccuuccucuc

SEQ ID NO: 2099 - RNA, 20 nt, Artificial Sequence
  targeting sequence with ATCN PAM
agacagugagccacagagga

SEQ ID NO: 2100 - RNA, 20 nt, Artificial Sequence
  targeting sequence with ATCN PAM
cccacuuuugaagccaagaa

SEQ ID NO: 2101 - RNA, 108 nt, Artificial Sequence
  CasX variant scaffold
uacuggcgcuuuuaucucauuacuuugagagccaucaccagcgacuaugucguauggguaaagcgcaggugggacgaccucucggucguccuaucugaagcaucaaag

SEQ ID NO: 2102 - RNA, 99 nt, Artificial Sequence
  CasX variant scaffold
uacuggcgcuuuuaucucauuacuuugagagccaucaccagcgacuaugucguauggguaaagcgcugcucgacgcguccucgagcagaagcaucaaag

SEQ ID NO: 2103 - RNA, 97 nt, Artificial Sequence
  CasX variant scaffold
uacuggcgcuuuuaucucauuacuuugagagccaucaccagcgacuaugucguauggguaaagcgcugcucgcuccguucgagcagaagcaucaaag

SEQ ID NO: 2104 - RNA, 91 nt, Artificial Sequence
  CasX variant scaffold
guacuggcgcuuuuaucucauuacuuugagagccaucaccagcgacuaugucguauggguaaagcgcccucuucggagggaagcaucaaag

SEQ ID NO: 2105 - RNA, 99 nt, Artificial Sequence
  CasX variant scaffold
uacuggcgcuuuuaucucauuacuuugagagccaucaccagcgacuaugucguauggguaaagcgcaggaguuucuauggaaacccugaagcaucaaag

SEQ ID NO: 2106 - RNA, 99 nt, Artificial Sequence
  CasX variant scaffold
guacuggcgccuuuaucucauuacuuugagagccaucaccagcgacuaugucguauggguaaagcgcuuacggacuucgguccguaagaagcaucaaag

SEQ ID NO: 2107 - RNA, 90 nt, Artificial Sequence
  CasX variant scaffold
uacuggcgcuuuuaucucauuacuuugagagccaucaccagcgacuaugucguauggguaaagcgcugcgcuugcgcagaagcaucaaag

SEQ ID NO: 2108 - RNA, 108 nt, Artificial Sequence
  CasX variant scaffold
uacuggcgcuuuuaucugauuacuuugagagccaucaccagcgacuaugucguauggguaaagcgcuuauuuaucggagagaaauccgauaaauaagaagcaucaaag

SEQ ID NO: 2109 - RNA, 108 nt, Artificial Sequence
  CasX variant scaffold
uacuggcgcuuuuaucgcauuacuuugagagccaucaccagcgacuaugucguauggguaaagcgcuuauuuaucggagagaaauccgauaaauaagaagcaucaaag

SEQ ID NO: 2110 - RNA, 110 nt, Artificial Sequence
  CasX variant scaffold
uacuggcgcuuuuaucucauuacuuugagagccaucaccagcgacuaugucguauggguaaagcgcuuauuuaucggagacuucgguccgauaaauaagaagcaucaaag

SEQ ID NO: 2111 - RNA, 97 nt, Artificial Sequence
  CasX variant scaffold
uacuggcgcuuuuaucucauuacuuugagagccaucaccagcgacuaugucguauggguaaagcgcacaugaggauuacccaugugaagcaucaaag

SEQ ID NO: 2112 - RNA, 106 nt, Artificial Sequence
  CasX variant scaffold
gcuggcgcuuuuaucucauuacuuugagagccaucaccagcgacuaugucguauggguaaagcgcuuauuuaucgugagaaauccgauaaauaagaagcaucaaag

SEQ ID NO: 2113 - RNA, 96 nt, Artificial Sequence
  CasX variant scaffold
uacuggcgcuuuuaucucauuacuuugagagccaucaccagcgacuaugucguauggguaaagcgcugcaugucuaagacagcagaagcaucaaag

SEQ ID NO: 2114 - RNA, 90 nt, Artificial Sequence
  CasX variant scaffold
uacuggcgcuuuuaucucauuacuuugagagccaucaccagcgacuaugucguauggguaaagcgcagggcuucggccgaagcaucaaag

SEQ ID NO: 2115 - RNA, 98 nt, Artificial Sequence
  CasX variant scaffold
uacuggcgcuuuuaucucauuacuuugagagccaucaccagcgacuaugucguauggguaaagcgcaauccauugcacuccggauugaagcaucaaag

SEQ ID NO: 2116 - RNA, 108 nt, Artificial Sequence
  CasX variant scaffold
uacuggcgcuuuucucgcauuacuuugagagccaucaccagcgacuaugucguauggguaaagcgcuuauuuaucggagagaaauccgauaaauaagaagcaucaaag

SEQ ID NO: 2117 - RNA, 108 nt, Artificial Sequence
  CasX variant scaffold
uacuggcgcuuuuaucucauuacuuugagagccaucaccagcgacuaugucguauggguaaagcgcuuauuuaucggacuucgguccgauaaauaagaagcaucaaag

SEQ ID NO: 2118 - RNA, 100 nt, Artificial Sequence
  CasX variant scaffold
uacuggcgcuuuuaucucauuacuuugagagccaucaccagcgacuaugucguauggguaaagcgcugcucguuugcggcuacgagcagaagcaucaaag

SEQ ID NO: 2119 - RNA, 100 nt, Artificial Sequence
  CasX variant scaffold
uacuggcgcuuuuaucucauuacuuugagagccaucaccagcgacuaugucguauggguaaagcgcuuauuuaucgagagauaaauaagaagcaucaaag

SEQ ID NO: 2120 - RNA, 107 nt, Artificial Sequence
  CasX variant scaffold
uacggcgcuuuuaucucauuacuuugagagccaucaccagcgacuaugucguauggguaaagcgcuuauuuaucggagagaaauccgauaaauaagaagcaucaaag

SEQ ID NO: 2121 - RNA, 99 nt, Artificial Sequence
  CasX variant scaffold
uacuggcgccuuuuaucucauuacuuugagagccaucaccagcgacuaugucguauggguaaagcgcuuacggacuucgguccguaagaagcaucaaag

SEQ ID NO: 2122 - RNA, 108 nt, Artificial Sequence
  CasX variant scaffold
uacuggcgcuuuuaucucauuacuuugagagccaucaccagcgacuaugucguaucgguaaagcgcuuauuuaucggagagaaauccgauaaauaagaagcaucaaag

SEQ ID NO: 2123 - RNA, 108 nt, Artificial Sequence
  CasX variant scaffold
uacuggcgccuuuaucucauuacuuugagagccaucaccagcgacuaugucguauggguaaagcgcuuauuuaucggacuucgguccgauaaauaagaagcaucaaag

SEQ ID NO: 2124 - RNA, 105 nt, Artificial Sequence
  CasX variant scaffold
uacuggcgcuuuuaucucauuacuuugagagccaucaccagcgacuaugucguauggguaaagcgcuuauuuaucgagaaauccgauaaauaagaagcaucaaag

SEQ ID NO: 2125 - RNA, 103 nt, Artificial Sequence
  CasX variant scaffold
gcgcuuuuaucucauuacuuugagagccaucaccagcgacuaugucguauggguaaagcgcuuauuuaucggagagaaauccgauaaauaagaagcaucaaag

SEQ ID NO: 2126 - RNA, 103 nt, Artificial Sequence
  CasX variant scaffold
uacuggcgcuuuuaucucauuacuuugagagccaucaccagcgacuaugucguauggguaaagcgcuuauuuaucggagagagauaaauaagaagcaucaaag

SEQ ID NO: 2127 - RNA, 108 nt, Artificial Sequence
  CasX variant scaffold
uacuggcgcuuuuaucucauuacuuuggagagccaucaccagcgacuaugucguauggguaaagcgcuuauuuaucggagaguauccgauaaauaagaagcaucaaag

SEQ ID NO: 2128 - RNA, 109 nt, Artificial Sequence
  CasX variant scaffold
uacuggcgcuuuuaucucauuacuuugagagccaucaccagcgacuauguucguauggguaaagcgcuuauuuaucggagagaaauccgauaaauaagaagcaucaaag

SEQ ID NO: 2129 - RNA, 105 nt, Artificial Sequence
  CasX variant scaffold
agcgcuuuuaucucauuacuuugagagccaucaccagcgacuaugucguauggguaaagcgcuuauuuaucggagagaaaugccgauaaauaagaagcaucaaag

SEQ ID NO: 2130 - RNA, 109 nt, Artificial Sequence
  CasX variant scaffold
uacuggcgcuuuuaucucauuacuuugagagccaucaccagcgacuaugucguauggguaaagcgcuuauuuaucggagagaaauccgauaaaauaagaagcaucaaag

SEQ ID NO: 2131 - RNA, 109 nt, Artificial Sequence
  CasX variant scaffold
uacuggcgcuuuuaucucauuacuuugagagccaucaccagcgacuaugucguauggguaaagcgcuuauuguaucggagagaaauccgauaaauaagaagcaucaaag

SEQ ID NO: 2132 - RNA, 102 nt, Artificial Sequence
  CasX variant scaffold
gcgcuuuuaucucauuacuuugagagccaucaccagcgacuaugucguauggguaaagcgcuuauuuaucggacuucgguccgauaaauaagcgcaucaaag

SEQ ID NO: 2133 - RNA, 108 nt, Artificial Sequence
  CasX variant scaffold
uacuggcgcuuuucucucauuacuuugagagccaucaccagcgacuaugucguauggguaaagcgcuuauuuaucggagagaaauccgauaaauaagaagcaucaaag

SEQ ID NO: 2134 - RNA, 106 nt, Artificial Sequence
  CasX variant scaffold
guggcgcuuuuaucucauuacuuugagagccaucaccagcgacuaugucguauggguaaagcgcuuauuuaucggagagaaauccgauaaauaagaagcaucaaag

SEQ ID NO: 2135 - RNA, 110 nt, Artificial Sequence
  CasX variant scaffold
uacuggcgcuuuuaucucauuacuuugagagccaucaccagcgaccuuaugucguauggguaaagcgcuuauuuaucggagagaaauccgauaaauaagaagcaucaaag

SEQ ID NO: 2136 - RNA, 107 nt, Artificial Sequence
  CasX variant scaffold
gauggcgcuuuuaucucauuacuuugagagccaucaccagcgacuaugucguauggguaaagcgcuuauuuaucggacuucgguccgauaaauaagaagcaucaaag

SEQ ID NO: 2137 - RNA, 106 nt, Artificial Sequence
  CasX variant scaffold
uacuggcgcuuuuaucucauuacuuugagagccaucaccagcgacuaugucguauggguaaagcgcuuauuuaucggagagaaauccgauaaaagaagcaucaaag

SEQ ID NO: 2138 - RNA, 109 nt, Artificial Sequence
  CasX variant scaffold
uacuggcgcuuuuaucucauuacuuugagagccaucaccagcgaucuaugucguauggguaaagcgcuuauuuaucggagagaaauccgauaaauaagaagcaucaaag

SEQ ID NO: 2139 - RNA, 106 nt, Artificial Sequence
  CasX variant scaffold
uacuggcgcuuuuaucucauuacuuugagagccaucaccagcgacuaugucguauggguaaaggcuuauuuaucggagagaaauccgauaaaaagaagcaucaaag

SEQ ID NO: 2140 - RNA, 107 nt, Artificial Sequence
  CasX variant scaffold
uacuggcgcuuuuaucucauuacuuugagagccaucaccagcgacuaugucguauggguaaagcgcuuauuuaucggagagaaauccgauaaaaagaagcaucaaag

SEQ ID NO: 2141 - RNA, 107 nt, Artificial Sequence
  CasX variant scaffold
uacuggcgcuuuaucucauuacuuugagagccaucaccagcgacuaugucguauggguaaagcgcuuauuuaucggacuucgguccgauaaauaagaagcaucaaag

SEQ ID NO: 2142 - RNA, 98 nt, Artificial Sequence
  CasX variant scaffold
cggcgcuuuucucgcauuacuuugagagccaucaccagcgacuaugucguauggguaaagcgcuuauuguaucgagagauaaauaagaagcaucaaag

SEQ ID NO: 2143 - RNA, 107 nt, Artificial Sequence
  CasX variant scaffold
cacuggcgcuuuuaucucauuacuuugagagccaucaccagcgacuaugucguauggguaaagcgcuuauuuucggagagaaauccgauaaauaagaagcaucaaag

SEQ ID NO: 2144 - RNA, 106 nt, Artificial Sequence
  CasX variant scaffold
uacuggcgcuuuaucucauuacuuugagagccaucaccagcgacuucggucguauggguaaagcgcuuauguaucggcuucggccgauacauaagaagcaucaaag

SEQ ID NO: 2145 - RNA, 107 nt, Artificial Sequence
  CasX variant scaffold
uacuggcgcuuuuaucucauuacuuugagagccaucaccagcgacuucggucguauggguaaagcgcuuauguaucggcuucggccgauacauaagaagcaucaaag

SEQ ID NO: 2146 - RNA, 109 nt, Artificial Sequence
  CasX variant scaffold
uacuggcgcuuuuaucucauuacuuugagagccaucaccagcgacuaugucguaugggugaaagcgcuuauuuaucggagagaaauccgauaaauaagaagcaucaaag

SEQ ID NO: 2147 - RNA, 64 nt, Artificial Sequence
  CasX variant scaffold
uacuggcgcuuuuaucucauuacuuugagagccaucaccagcgacuucggucguauggguaaag

SEQ ID NO: 2148 - RNA, 62 nt, Artificial Sequence
  CasX variant scaffold
gaugggcuuuuaucucauuacuuugagagccaucaccagcgacuucggucguauggguaaag

SEQ ID NO: 2149 - RNA, 105 nt, Artificial Sequence
  CasX variant scaffold
gaugggcuuuuaucucauuacuuugagagccaucaccagcgacuucggucguauggguaaagcgcuuauuuaucggcuucggccgauaaauaagaagcaucaaag

SEQ ID NO: 2150 - RNA, 156 nt, Artificial Sequence
  CasX variant scaffold
uacuggcgcuuuuaucucauuacuuugagagccaucaccagcgacuaugucguauggguaaagcgcuacacugggaucgcugaauuagagaucggcguccuuucauucuauauacuuuggaguuuuaaaaugucucuaaguacagaagcaucaaag

SEQ ID NO: 2151 - RNA, 103 nt, Artificial Sequence
  CasX variant scaffold
ggcgcuuuuaucucauuacuuugagagccaucaccagcgacuucggucguauggguaaagcgcuuauuuaucggcuucggccgauaaauaagaagcaucaaag

SEQ ID NO: 2152 - RNA, 106 nt, Artificial Sequence
  CasX variant scaffold
gcuggcgcuuuuaucucauuacuuugagagccaucaccagcgacuucggucguauggguaaagcgcuuauuuaucggcuucggccgauaaauaagaagcaucaaag

SEQ ID NO: 2153 - RNA, 109 nt, Artificial Sequence
  CasX variant scaffold
uacuggcgcuuuuaucucauuacuuugagagccaucaccagcgacuucggucguauggguaaagcgcuuauuuaucggagagaaauccgauaaauaagaagcaucaaag

SEQ ID NO: 2154 - RNA, 112 nt, Artificial Sequence
  CasX variant scaffold
uacuggcgcuuuuaucucauuacuuugagagccaugcuccaccagcgacuaugucguauggguaaagcgcuuauuuaucggagagaaauccgauaaauaagaagcaucaaag

SEQ ID NO: 2155 - RNA, 97 nt, Artificial Sequence
  CasX variant scaffold
uacuggcgcuuuuaucucauuacuuugagagccaucaccagcgacuaugucguauggguaaagcgggguuaggguuaggguuagggaagcaucaaag

SEQ ID NO: 2156 - RNA, 96 nt, Artificial Sequence
  CasX variant scaffold
uacuggcgcuuuuaucucauuacuuugagagccaucaccagcgacuaugucguauggguaaagcggagggagggagggagagggaaagcaucaaag

SEQ ID NO: 2157 - RNA, 101 nt, Artificial Sequence
  CasX variant scaffold
uacuggcgcuuuuaucucauuacuuugagagccaucaccagcgacuaugucguauggguaaagcguuggguuaggguuaggguuagggaaaagcaucaaag

SEQ ID NO: 2158 - RNA, 91 nt, Artificial Sequence
  CasX variant scaffold
uacuggcgcuuuuaucucauuacuuugagagccaucaccagcgacuaugucguauggguaaagcgcagggcuucggccggaagcaucaaag

SEQ ID NO: 2159 - RNA, 103 nt, Artificial Sequence
  CasX variant scaffold
uacuggcgcuuuuaucucauuacuuugagagccaucaccagcgacuaugucguauggguaaagcgccugcucaguacgagaggaaccgcaggaagcaucaaag

SEQ ID NO: 2160 - RNA, 90 nt, Artificial Sequence
  CasX variant scaffold
uacuggcgcuuuuaucugauuacuuugagagccaucaccagcgacuaugucguauggguaaagcgcccucuucggagggaagcaucaaag

SEQ ID NO: 2161 - RNA, 98 nt, Artificial Sequence
  CasX variant scaffold
uacuggcgccuuuaucugauuacuuugagagccaucaccagcgacuaugucguauggguaaagcgcuuacggacuucgguccguaagaagcaucaaag

SEQ ID NO: 2162 - RNA, 98 nt, Artificial Sequence
  CasX variant scaffold
uacuggcgcuuuuaucugauuacuuugagagccaucaccagcgacuaugucguauggguaaagcgcggacgaccucucggucguccgaagcaucaaag

SEQ ID NO: 2163 - RNA, 108 nt, Artificial Sequence
  CasX variant scaffold
uacuggcgcuuuuaucugauuacuuugagagccaucaccagcgacuaugucguauggguaaagcgcaggugggacgaccucucggucguccuaucugaagcaucaaag

SEQ ID NO: 2164 - RNA, 99 nt, Artificial Sequence
  CasX variant scaffold
uacuggcgccuuuaucugcauuacuuugagagccaucaccagcgacuaugucguauggguaaagcgcuuacggacuucgguccguaagaagcaucaaag

SEQ ID NO: 2165 - RNA, 97 nt, Artificial Sequence
  CasX variant scaffold
gcuggcgcuuuuaucugauuacuuugagagccaucaccagcgacuaugucguauggguaaagcgcuuacggacuucgguccguaagaagcaucaaag

SEQ ID NO: 2166 - RNA, 108 nt, Artificial Sequence
  CasX variant scaffold
uacuggcgccuuuaucugauuacuuugagagccaucaccagcgacuaugucguauggguaaagcgcaggugggacgaccucucggucguccuaucugaagcaucaaag

SEQ ID NO: 2167 - RNA, 98 nt, Artificial Sequence
  CasX variant scaffold
uacuggcgccuuuaucugauuacuuugagagccaucaccagcgacuaugucguauggguaaagcgcggacgaccucucggucguccgaagcaucaaag

SEQ ID NO: 2168 - RNA, 90 nt, Artificial Sequence
  CasX variant scaffold
uacuggcgccuuuaucucauuacuuugagagccaucaccagcgacuaugucguauggguaaagcgcccucuucggagggaagcaucaaag

SEQ ID NO: 2169 - RNA, 98 nt, Artificial Sequence
  CasX variant scaffold
uacuggcgcuuuuaucucauuacuuugagagccaucaccagcgacuaugucguauggguaaagcgcuuacggacuucgguccguaagaagcaucaaag

SEQ ID NO: 2170 - RNA, 99 nt, Artificial Sequence
  CasX variant scaffold
uacuggcgccuuuaucaucauuacuuugagagccaucaccagcgacuaugucguauggguaaagcgcuuacggacuucgguccguaagaagcaucaaag

SEQ ID NO: 2171 - RNA, 194 nt, Artificial Sequence
  CasX variant scaffold
uacuggcgcuuuuaucucauuacuuugagagccaucaccagcgacuaugucguauggguaaagcgcuuauuuaucggagagaaauccgauaaauaagaagcaucaaagggccggcauggucccagccuccucgcuggcgccggcugggcaacauuccgaggggaccguccccucgguaauggcgaaugggaccc

SEQ ID NO: 2172 - RNA, 108 nt, Artificial Sequence
  CasX variant scaffold
uacuggcgccuuuaucucauuacuuugagagccaucaccagcgacuaugucguauggguaaagcgcaggugggacgaccucucggucguccuaucugaagcaucaaag

SEQ ID NO: 2173 - RNA, 106 nt, Artificial Sequence
  CasX variant scaffold
uacuggcgcuuuuaucucauuacuuugagagccaucaccagcgacuaugucguauggguaaagcgcuuauuuaucggagaaauccgauaaauaagaagcaucaaag

SEQ ID NO: 2174 - RNA, 98 nt, Artificial Sequence
  CasX variant scaffold
uacuggcgccuuuaucucauuacuuugagagccaucaccagcgacuaugucguauggguaaagcgcggacgaccucucggucguccgaagcaucaaag

SEQ ID NO: 2175 - RNA, 92 nt, Artificial Sequence
  CasX variant scaffold
uacuggcgcuuuuaucucauuacuuugagagccaucaccagcgacuaugucguauggguaaagcgccggacuucgguccggaagcaucaaag

SEQ ID NO: 2176 - RNA, 108 nt, Artificial Sequence
  CasX variant scaffold
uacuggcgcuuuuaucggauuacuuugagagccaucaccagcgacuaugucguauggguaaagcgcuuauuuaucggagagaaauccgauaaauaagaagcaucaaag

SEQ ID NO: 2177 - RNA, 98 nt, Artificial Sequence
  CasX variant scaffold
uacuggcgcuuuuaucucauuacuuugagagccaucaccagcgacuaugucguauggguaaagcgcggacgaccucucggucguccgaagcaucaaag

SEQ ID NO: 2178 - RNA, 89 nt, Artificial Sequence
  CasX variant scaffold
gcuggcgcuuuuaucugauuacuuugagagccaucaccagcgacuaugucguauggguaaagcgcccucuucggagggaagcaucaaag

SEQ ID NO: 2179 - RNA, 88 nt, Artificial Sequence
  CasX variant scaffold
gcuggcgccuuuaucugauuacuuugagagccaucaccagcgacuaugucguauggguaaagcucccucuucggagggagcaucaaag

SEQ ID NO: 2180 - RNA, 197 nt, Artificial Sequence
  CasX variant scaffold
uacuggcgcuuuuaucucauuacuuugagagccaucaccagcgacuaugucguauggguaaagcgcuuauuuaucggagagaaauccgauaaauaagaagcaucaaaggggucggcauggcaucuccaccuccucgcgguccgaccugggcauccgaaggaggacgcacguccacucggauggcuaagggagagcca

SEQ ID NO: 2181 - RNA, 88 nt, Artificial Sequence
  CasX variant scaffold
gcuggcgccuuuaucugauuacuuugagagccaucaccagcgacuaugucguauggguaaagcgcccucuucggagggcgcaucaaag

SEQ ID NO: 2182 - RNA, 186 nt, Artificial Sequence
  CasX variant scaffold
uacuggcgcuuuuaucucauuacuuugagagccaucaccagcgacuaugucguauggguaaagcgcuuauuuaucggagagaaauccgauaaauaagaagcaucaaaguuuuggccggcauggucccagccuccucgcuggcgccggcugggcaacaugcuucggcauggcgaaugggaccccggg

SEQ ID NO: 2183 - RNA, 97 nt, Artificial Sequence
  CasX variant scaffold
gauggcgccuuuaucucauuacuuugagagccaucaccagcgacuaugucguauggguaaagcgcuuacggacuucgguccguaagaagcaucaaag

SEQ ID NO: 2184 - RNA, 89 nt, Artificial Sequence
  CasX variant scaffold
gcuggcgcuuuuaucucauuacuuugagagccaucaccagcgacuaugucguauggguaaagcgcccucuucggagggaagcaucaaag

SEQ ID NO: 2185 - RNA, 96 nt, Artificial Sequence
  CasX variant scaffold
gcuggcgccuuuaucugauuacuuugagagccaucaccagcgacuaugucguauggguaaagcucuuacggacuucgguccguaagagcaucaaag

SEQ ID NO: 2186 - RNA, 96 nt, Artificial Sequence
  CasX variant scaffold
gcuggcgccuuuaucugauuacuuugagagccaucaccagcgacuaugucguauggguaaagcucggacgaccucucggucguccgagcaucaaag

SEQ ID NO: 2187 - RNA, 160 nt, Artificial Sequence
  CasX variant scaffold
uacuggcgcuuuuaucucauuacuuugagagccaucaccagcgacuaugucguauggguaaagcgcuuauuuaucggagagaaauccgauaaauaagaagcaucaaagccugucaccggaugugcuuuccggucugaugaguccgugaggacgaaacagg

SEQ ID NO: 2188 - RNA, 97 nt, Artificial Sequence
  CasX variant scaffold
gcuggcgcuuuuaucugauuacuuugagagccaucaccagcgacuaugucguauggguaaagcgcggacgaccucucggucguccgaagcaucaaag

SEQ ID NO: 2189 - RNA, 97 nt, Artificial Sequence
  CasX variant scaffold
gcuggcgccuuuaucugauuacuuugagagccaucaccagcgacuaugucguauggguaaagcgcggacgaccucucggucguccgaagcaucaaag

SEQ ID NO: 2190 - RNA, 106 nt, Artificial Sequence
  CasX variant scaffold
gcuggcgccuuuaucugauuacuuugagagccaucaccagcgacuaugucguauggguaaagcucaggugggacgaccucucggucguccuaucugagcaucaaag

SEQ ID NO: 2191 - RNA, 177 nt, Artificial Sequence
  CasX variant scaffold
uacuggcgcuuuuaucucauuacuuugagagccaucaccagcgacuaugucguauggguaaagcgcuuauuuaucggagagaaauccgauaaauaagaagcaucaaaggauggccggcauggucccagccuccucgcuggcgccggcugggcaacaccuucggguggcgaaugggac

SEQ ID NO: 2192 - RNA, 107 nt, Artificial Sequence
  CasX variant scaffold
gcuggcgcuuuuaucugauuacuuugagagccaucaccagcgacuaugucguauggguaaagcgcaggugggacgaccucucggucguccuaucugaagcaucaaag

SEQ ID NO: 2193 - RNA, 109 nt, Artificial Sequence
  CasX variant scaffold
uacuggcgcuuuuaucucauuacuuugagagccaucaccagcgacuaugucguacuggguaaagcgcuuauuuaucggagagaaauccgauaaauaagaagcaucaaag

SEQ ID NO: 2194 - RNA, 107 nt, Artificial Sequence
  CasX variant scaffold
uacuggcgcuuuuaucucauuacuuugagagccaucaccagcgacuaugucguauggguaaagcgcuuauuuaucgugagaaauccgauaaauaagaagcaucaaag

SEQ ID NO: 2195 - RNA, 109 nt, Artificial Sequence
  CasX variant scaffold
guacuggcgcuuuuaucucauuacuuugagagccaucaccagcgacuaugucguauggguaaagcgcuuauuuaucggagagaaauccgauaaauaagaagcaucaaag

SEQ ID NO: 2196 - RNA, 97 nt, Artificial Sequence
  CasX variant scaffold
gcuggcgcuuuuaucucauuacuuugagagccaucaccagcgacuaugucguauggguaaagcgcggacgaccucucggucguccgaagcaucaaag

SEQ ID NO: 2197 - RNA, 97 nt, Artificial Sequence
  CasX variant scaffold
gcuggcgccuuuaucugauuacuuugagagccaucaccagcgacuaugucguauggguaaagcgcuuacggacuucgguccguaagaagcaucaaag

SEQ ID NO: 2198 - RNA, 107 nt, Artificial Sequence
  CasX variant scaffold
gcuggcgcuuuuaucucauuacuuugagagccaucaccagcgacuaugucguauggguaaagcgcuuauuuaucggagagaaauccgauaaauaagaagcaucaaag

SEQ ID NO: 2199 - RNA, 97 nt, Artificial Sequence
  CasX variant scaffold
gcuggcgccuuuaucucauuacuuugagagccaucaccagcgacuaugucguauggguaaagcgcuuacggacuucgguccguaagaagcaucaaag

SEQ ID NO: 2200 - RNA, 89 nt, Artificial Sequence
  CasX variant scaffold
gcuggcgccuuuaucugauuacuuugagagccaucaccagcgacuaugucguauggguaaagcgcccucuucggagggaagcaucaaag

SEQ ID NO: 2201 - RNA, 107 nt, Artificial Sequence
  CasX variant scaffold
gcuggcgcuuuuaucucauuacuuugagagccaucaccagcgacuaugucguauggguaaagcgcaggugggacgaccucucggucguccuaucugaagcaucaaag

SEQ ID NO: 2202 - RNA, 107 nt, Artificial Sequence
  CasX variant scaffold
gcuggcgccuuuaucucauuacuuugagagccaucaccagcgacuaugucguauggguaaagcgcaggugggacgaccucucggucguccuaucugaagcaucaaag

SEQ ID NO: 2203 - RNA, 107 nt, Artificial Sequence
  CasX variant scaffold
gcuggcgccuuuaucugauuacuuugagagccaucaccagcgacuaugucguauggguaaagcgcaggugggacgaccucucggucguccuaucugaagcaucaaag

SEQ ID NO: 2204 - RNA, 98 nt, Artificial Sequence
  CasX variant scaffold
uacuggcgcuuuuaucugauuacuuugagagccaucaccagcgacuaugucguauggguaaagcgcuuacggacuucgguccguaagaagcaucaaag

SEQ ID NO: 2205 - RNA, 89 nt, Artificial Sequence
  CasX variant scaffold
gcuggcgccuuuaucucauuacuuugagagccaucaccagcgacuaugucguauggguaaagcgcccucuucggagggaagcaucaaag

SEQ ID NO: 2206 - RNA, 97 nt, Artificial Sequence
  CasX variant scaffold
gcuggcgcuuuuaucucauuacuuugagagccaucaccagcgacuaugucguauggguaaagcgcuuacggacuucgguccguaagaagcaucaaag

SEQ ID NO: 2207 - RNA, 97 nt, Artificial Sequence
  CasX variant scaffold
gcuggcgccuuuaucucauuacuuugagagccaucaccagcgacuaugucguauggguaaagcgcggacgaccucucggucguccgaagcaucaaag

SEQ ID NO: 2208 - RNA, 177 nt, Artificial Sequence
  CasX variant scaffold
gauggccggcauggucccagccuccucgcuggcgccggcugggcaacaccuucggguggcgaaugggacuacuggcgcuuuuaucucauuacuuugagagccaucaccagcgacuaugucguauggguaaagcgcuuauuuaucggagagaaauccgauaaauaagaagcaucaaag

SEQ ID NO: 2209 - RNA, 194 nt, Artificial Sequence
  CasX variant scaffold
ggccggcauggucccagccuccucgcuggcgccggcugggcaacauuccgaggggaccguccccucgguaauggcgaaugggacccuacuggcgcuuuuaucucauuacuuugagagccaucaccagcgacuaugucguauggguaaagcgcuuauuuaucggagagaaauccgauaaauaagaagcaucaaag

SEQ ID NO: 2210 - RNA, 96 nt, Artificial Sequence
  CasX variant scaffold
gcuggcgccuuuaucugauuacuuugagagccaucaccagcgacuaugucguauggguaaagcgcuuacggacuucgguccguaagcgcaucaaag

SEQ ID NO: 2211 - RNA, 172 nt, Artificial Sequence
  CasX variant scaffold
cgugguuagggccacguuaaauaguugcuuaagcccuaagcguugaucuucggaucaggugcaauacuggcgcuuuuaucucauuacuuugagagccaucaccagcgacuaugucguauggguaaagcgcuuauuuaucggagagaaauccgauaaauaagaagcaucaaag

SEQ ID NO: 2212 - RNA, 197 nt, Artificial Sequence
  CasX variant scaffold
gggucggcauggcaucuccaccuccucgcgguccgaccugggcauccgaaggaggacgcacguccacucggauggcuaagggagagccauacuggcgcuuuuaucucauuacuuugagagccaucaccagcgacuaugucguauggguaaagcgcuuauuuaucggagagaaauccgauaaauaagaagcaucaaag

SEQ ID NO: 2213 - RNA, 171 nt, Artificial Sequence
  CasX variant scaffold
uacuggcgcuuuuaucucauuacuuugagagccaucaccagcgacuaugucguauggguaaagcgcuuauuuaucggagagaaauccgauaaauaagaagcaucaaagccaguacugaugaguccgugaggacgaaacgaguaagcucgucuacuggcgcuuuuaucucau

SEQ ID NO: 2214 - RNA, 99 nt, Artificial Sequence
  CasX variant scaffold
uacuggcgccuuuaucucauuacuuuagagagccaucaccagcgacuaugucguauggguaaagcgcuuacggacuucgguccguaagaagcaucaaag

SEQ ID NO: 2215 - RNA, 157 nt, Artificial Sequence
  CasX variant scaffold
cgacuacugaugaguccgugaggacgaaacgaguaagcucgucuagucguacuggcgcuuuuaucucauuacuuugagagccaucaccagcgacuaugucguauggguaaagcgcuuauuuaucggagagaaauccgauaaauaagaagcaucaaag

SEQ ID NO: 2216 - RNA, 106 nt, Artificial Sequence
  CasX variant scaffold
gcuggcgccuuuaucugauuacuuugagagccaucaccagcgacuaugucguauggguaaagcgcaggugggacgaccucucggucguccuaucugcgcaucaaag

SEQ ID NO: 2217 - RNA, 97 nt, Artificial Sequence
  CasX variant scaffold
uacuggcgccuuuaucucauuacuuuagagccaucaccagcgacuaugucguauggguaaagcgcuuacggacuucgguccguaagaagcaucaaag

SEQ ID NO: 2218 - RNA, 186 nt, Artificial Sequence
  CasX variant scaffold
uacuggcgcuuuuaucucauuacuuugagagccaucaccagcgacuaugucguauggguaaagcgcuuauuuaucggagagaaauccgauaaauaagaagcaucaaagcauuccucagaaaaugacaaaccuguggggcguaaguagaucuucggaucuaugaucgugcagacguuaaaaucaggu

SEQ ID NO: 2219 - RNA, 171 nt, Artificial Sequence
  CasX variant scaffold
uacuggcgcuuuuaucucauuacuuugagagccaucaccagcgacuaugucguauggguaaagcgcuuauuuaucggagagaaauccgauaaauaagaagcaucaaagcgacuacugaugaguccgugaggacgaaacgaguaagcucgucuagucgcguguagcgaagca

SEQ ID NO: 2220 - RNA, 186 nt, Artificial Sequence
  CasX variant scaffold
cauuccucagaaaaugacaaaccuguggggcguaaguagaucuucggaucuaugaucgugcagacguuaaaaucagguuacuggcgcuuuuaucucauuacuuugagagccaucaccagcgacuaugucguauggguaaagcgcuuauuuaucggagagaaauccgauaaauaagaagcaucaaag

SEQ ID NO: 2221 - RNA, 186 nt, Artificial Sequence
  CasX variant scaffold
uuuuggccggcauggucccagccuccucgcuggcgccggcugggcaacaugcuucggcauggcgaaugggaccccggguacuggcgcuuuuaucucauuacuuugagagccaucaccagcgacuaugucguauggguaaagcgcuuauuuaucggagagaaauccgauaaauaagaagcaucaaag

SEQ ID NO: 2222 - RNA, 171 nt, Artificial Sequence
  CasX variant scaffold
cgacuacugaugaguccgugaggacgaaacgaguaagcucgucuagucgcguguagcgaagcauacuggcgcuuuuaucucauuacuuugagagccaucaccagcgacuaugucguauggguaaagcgcuuauuuaucggagagaaauccgauaaauaagaagcaucaaag

SEQ ID NO: 2223 - RNA, 168 nt, Artificial Sequence
  CasX variant scaffold
uacuggcgcuuuuaucucauuacuuugagagccaucaccagcgacuaugucguauggguaaagcgcuuauuuaucggagagaaauccgauaaauaagaagcaucaaaggggagccccgcugaugaggucggggagaccgaaagggacuucggucccuacggggcuccc

SEQ ID NO: 2224 - RNA, 144 nt, Artificial Sequence
  CasX variant scaffold
ccacccccaccaccacccccacccccaccaccacccuacuggcgcuuuuaucucauuacuuugagagccaucaccagcgacuaugucguauggguaaagcgcuuauuuaucggagagaaauccgauaaauaagaagcaucaaag

SEQ ID NO: 2225 - RNA, 157 nt, Artificial Sequence
  CasX variant scaffold
uacuggcgcuuuuaucucauuacuuugagagccaucaccagcgacuaugucguauggguaaagcgcuuauuuaucggagagaaauccgauaaauaagaagcaucaaagcgacuacugaugaguccgugaggacgaaacgaguaagcucgucuagucg

SEQ ID NO: 2226 - RNA, 172 nt, Artificial Sequence
  CasX variant scaffold
uacuggcgcuuuuaucucauuacuuugagagccaucaccagcgacuaugucguauggguaaagcgcuuauuuaucggagagaaauccgauaaauaagaagcaucaaagcgugguuagggccacguuaaauaguugcuuaagcccuaagcguugaucuucggaucaggugcaa

SEQ ID NO: 2227 - RNA, 184 nt, Artificial Sequence
  CasX variant scaffold
uacuggcgcuuuuaucucauuacuuugagagccaucaccagcgacuaugucguauggguaaagcgcuuauuuaucggagagaaauccgauaaauaagaagcaucaaagggcaauaaagcgguuacaagcccgcaaaaauagcagaguaaugucgcgauagcgcggcauuaaugcagcuuuauug

SEQ ID NO: 2228 - RNA, 122 nt, Artificial Sequence
  CasX variant scaffold
uacuggcgcuuuuaucucauuacuauuaucucauuacuuugagagccaucaccagcgacuaugucguauggguaaagcgcuuauuuaucggagagaaauccgauaaauaagaagcaucaaag

SEQ ID NO: 2229 - RNA, 184 nt, Artificial Sequence
  CasX variant scaffold
ggcaauaaagcgguuacaagcccgcaaaaauagcagaguaaugucgcgauagcgcggcauuaaugcagcuuuauuguacuggcgcuuuuaucucauuacuuugagagccaucaccagcgacuaugucguauggguaaagcgcuuauuuaucggagagaaauccgauaaauaagaagcaucaaag

SEQ ID NO: 2230 - RNA, 185 nt, Artificial Sequence
  CasX variant scaffold
uacuggcgcuuuuaucucauuacuuugagagccaucaccagcgacuaugucguauggguaaagcgcuuauuuaucggagagaaauccgauaaauaagaagcaucaaagacccgcaaggccgacggcauccgccgccgcuggugcaaguccagccgccccuucgggggcgggcgcucauggguaac

SEQ ID NO: 2231 - RNA, 63 nt, Artificial Sequence
  CasX variant scaffold
uacuggcgcuuuuaucucauuacuuugagagccaucaccagcgacuaugucguauggguaaag

SEQ ID NO: 2232 - RNA, 168 nt, Artificial Sequence
  CasX variant scaffold
gggagccccgcugaugaggucggggagaccgaaagggacuucggucccuacggggcucccuacuggcgcuuuuaucucauuacuuugagagccaucaccagcgacuaugucguauggguaaagcgcuuauuuaucggagagaaauccgauaaauaagaagcaucaaag

SEQ ID NO: 2233 - RNA, 171 nt, Artificial Sequence
  CasX variant scaffold
ccaguacugaugaguccgugaggacgaaacgaguaagcucgucuacuggcgcuuuuaucucauuacuggcgcuuuuaucucauuacuuugagagccaucaccagcgacuaugucguauggguaaagcgcuuauuuaucggagagaaauccgauaaauaagaagcaucaaag

SEQ ID NO: 2234 - RNA, 185 nt, Artificial Sequence
  CasX variant scaffold
acccgcaaggccgacggcauccgccgccgcuggugcaaguccagccgccccuucgggggcgggcgcucauggguaacuacuggcgcuuuuaucucauuacuuugagagccaucaccagcgacuaugucguauggguaaagcgcuuauuuaucggagagaaauccgauaaauaagaagcaucaaag

SEQ ID NO: 2235 - RNA, 160 nt, Artificial Sequence
  CasX variant scaffold
ccugucaccggaugugcuuuccggucugaugaguccgugaggacgaaacagguacuggcgcuuuuaucucauuacuuugagagccaucaccagcgacuaugucguauggguaaagcgcuuauuuaucggagagaaauccgauaaauaagaagcaucaaag

SEQ ID NO: 2236 - RNA, 100 nt, Artificial Sequence
  CasX variant scaffold
guacuggcgccuuuaucucauuacuuugagagccaucaccagcgacuaugucguaguggguaaagcgcuuacggacuucgguccguaagaagcaucaaag

SEQ ID NO: 2237 - RNA, 91 nt, Artificial Sequence
  CasX variant scaffold
guacuggcgcuuuuaucugauuacuuugagagccaucaccagcgacuaugucguaguggguaaagcucccucuucggagggagcaucaaag

SEQ ID NO: 2238 - RNA, 89 nt, Artificial Sequence
  CasX variant scaffold
acuggcgcuuuuaucugauuacuuugagagccaucaccagcgacuaugucguaguggguaaagcucccucuucggagggagcaucaaag

SEQ ID NO: 2239 - RNA, 97 nt, Artificial Sequence
  CasX variant scaffold
acuggcgccuuuaucucauuacuuugagagccaucaccagcgacuaugucguauggguaaagcgcuuacggacuucgguccguaagaagcaucaaag

SEQ ID NO: 2240 - RNA, 89 nt, Artificial Sequence
  CasX variant scaffold
gcuggcgcuuuuaucugauuacuuugagagccaucaccagcgacuaugucguaguggguaaagcucccucuucggagggagcaucaaag

SEQ ID NO: 2241 - RNA, 88 nt, Artificial Sequence
  CasX variant scaffold
acuggcgcuuuuaucugauuacuuugagagccaucaccagcgacuaugucguauggguaaagcucccucuucggagggagcaucaaag

SEQ ID NO: 2242 - RNA, 97 nt, Artificial Sequence
  CasX variant scaffold
acuggcgccuuuaucugauuacuuugagagccaucaccagcgacuaugucguauggguaaagcgcuuacggacuucgguccguaagaagcaucaaag

SEQ ID NO: 2243 - RNA, 97 nt, Artificial Sequence
  CasX variant scaffold
acuggcgcuuuuaucugauuacuuugagagccaucaccagcgacuaugucguauggguaaagcgcuuacggacuucgguccguaagaagcaucaaag

SEQ ID NO: 2244 - RNA, 98 nt, Artificial Sequence
  CasX variant scaffold
acuggcgcuuuuaucugauuacuuugagagccaucaccagcgacuaugucguaguggguaaagcgcuuacggacuucgguccguaagaagcaucaaag

SEQ ID NO: 2245 - RNA, 89 nt, Artificial Sequence
  CasX variant scaffold
acuggcgcuuuuaucugauuacuuugagagccaucaccagcgacuaugucguauuggguaaagcucccucuucggagggagcaucaaag

SEQ ID NO: 2246 - RNA, 98 nt, Artificial Sequence
  CasX variant scaffold
acuggcgcuuuuaucugauuacuuugagagccaucaccagcgacuaugucguauuggguaaagcgcuuacggacuucgguccguaagaagcaucaaag

SEQ ID NO: 2247 - RNA, 98 nt, Artificial Sequence
  CasX variant scaffold
acuggcgccuuuaucaucauuacuuugagagccaucaccagcgacuaugucguauggguaaagcgcuuacggacuucgguccguaagaagcaucaaag

SEQ ID NO: 2248 - RNA, 90 nt, Artificial Sequence
  CasX variant scaffold
acuggcgcuuuuaucugauuacuuugagagccaucaccagcgacuaugucguaguggguaaagcgcccucuucggagggaagcaucaaag

SEQ ID NO: 2249 - RNA, 96 nt, Artificial Sequence
  CasX variant scaffold
acuggcgcuuuuaucugauuacuuugagagccaucaccagcgacuaugucguaguggguaaagcucacaugaggaucacccaugugagcaucaaag

SEQ ID NO: 2250 - RNA, 89 nt, Artificial Sequence
  CasX variant scaffold
acuggcacuuuuaccugauuacuuugagagccaacaccagcgacuaugucguaguggguaaagcucccucuucggagggagcaucaaag

SEQ ID NO: 2251 - RNA, 89 nt, Artificial Sequence
  CasX variant scaffold
acuggcacuuuuaucugauuacuuugagagccaucaccagcgacuaugucguaguggguaaagcucccucuucggagggagcaucaaag

SEQ ID NO: 2252 - RNA, 89 nt, Artificial Sequence
  CasX variant scaffold
acuggcccuuuuaucugauuacuuugagagccaucaccagcgacuaugucguaguggguaaagcucccucuucggagggagcaucaaag

SEQ ID NO: 2253 - RNA, 89 nt, Artificial Sequence
  CasX variant scaffold
acuggcgcuuuuaccugauuacuuugagagccaucaccagcgacuaugucguaguggguaaagcucccucuucggagggagcaucaaag

SEQ ID NO: 2254 - RNA, 89 nt, Artificial Sequence
  CasX variant scaffold
acuggcgcuuuuaucugauuacuuugagagccaacaccagcgacuaugucguaguggguaaagcucccucuucggagggagcaucaaag

SEQ ID NO: 2255 - RNA, 97 nt, Artificial Sequence
  CasX variant scaffold
acuggcaccuuuaccugauuacuuugagagccaacaccagcgacuaugucguauggguaaagcgcuuacggacuucgguccguaagaagcaucaaag

SEQ ID NO: 2256 - RNA, 97 nt, Artificial Sequence
  CasX variant scaffold
acuggcaccuuuaucugauuacuuugagagccaucaccagcgacuaugucguauggguaaagcgcuuacggacuucgguccguaagaagcaucaaag

SEQ ID NO: 2257 - RNA, 97 nt, Artificial Sequence
  CasX variant scaffold
acuggccccuuuaucugauuacuuugagagccaucaccagcgacuaugucguauggguaaagcgcuuacggacuucgguccguaagaagcaucaaag

SEQ ID NO: 2258 - RNA, 97 nt, Artificial Sequence
  CasX variant scaffold
acuggcgccuuuaucugauuacuuugagagccaacaccagcgacuaugucguauggguaaagcgcuuacggacuucgguccguaagaagcaucaaag

SEQ ID NO: 2259 - RNA, 89 nt, Artificial Sequence; identical to SEQ ID NO: 2240
  CasX variant scaffold

SEQ ID NO: 2260 - RNA, 90 nt, Artificial Sequence
  CasX variant scaffold
gacuggcgcuuuuaucugauuacuuugagagccaucaccagcgacuaugucguaguggguaaagcucccucuucggagggagcaucaaag

SEQ ID NO: 2261 - RNA, 90 nt, Artificial Sequence
  CasX variant scaffold
acuggcgccuuuaucugauuacuuuggagagccaucaccagcgacuaugucguaguggguaaagcucccucuucggagggagcaucaaag

SEQ ID NO: 2262 - RNA, 89 nt, Artificial Sequence
  CasX variant scaffold
acuggcgcauuuaucugauuacuuugugagccaucaccagcgacuaugucguaguggguaaagcucccucuucggagggagcaucaaag

SEQ ID NO: 2263 - RNA, 89 nt, Artificial Sequence
  CasX variant scaffold
acuggcgccuuuaucugauuacuuugagagccaucaccagcgacuaugucguaguggguaaagcucccucuucggagggagcaucaaag

SEQ ID NO: 2264 - RNA, 90 nt, Artificial Sequence
  CasX variant scaffold
acuggcgcuuuuaucugauuacuuuggagagccaucaccagcgacuaugucguaguggguaaagcucccucuucggagggagcaucaaag

SEQ ID NO: 2265 - RNA, 89 nt, Artificial Sequence
  CasX variant scaffold
acuggcgcauuuaucugauuacuuugagagccaucaccagcgacuaugucguaguggguaaagcucccucuucggagggagcaucaaag

SEQ ID NO: 2266 - RNA, 89 nt, Artificial Sequence
  CasX variant scaffold
acuggcgcuuuuaucugauuacuuugugagccaucaccagcgacuaugucguaguggguaaagcucccucuucggagggagcaucaaag

SEQ ID NO: 2267 - RNA, 90 nt, Artificial Sequence
  CasX variant scaffold
acuggcgcuuuuauucugauuacuuugagagccaucaccagcgacuaugucguaguggguaaagcucccucuucggagggagcaucaaag

SEQ ID NO: 2268 - RNA, 88 nt, Artificial Sequence
  CasX variant scaffold
acggcgcuuuuaucugauuacuuugagagccaucaccagcgacuaugucguaguggguaaagcucccucuucggagggagcaucaaag

SEQ ID NO: 2269 - RNA, 89 nt, Artificial Sequence
  CasX variant scaffold
acuggcgcuuuuauaugauuacuuugagagccaucaccagcgacuaugucguaguggguaaagcucccucuucggagggagcaucaaag

SEQ ID NO: 2270 - RNA, 90 nt, Artificial Sequence
  CasX variant scaffold
acuggcgcuuuuaucuugauuacuuugagagccaucaccagcgacuaugucguaguggguaaagcucccucuucggagggagcaucaaag

SEQ ID NO: 2271 - RNA, 89 nt, Artificial Sequence
  CasX variant scaffold
acuggcgcuuuuaucugauuacuuugagagccagcaccagcgacuaugucguaguggguaaagcucccucuucggagggagcaucaaag

SEQ ID NO: 2272 - RNA, 89 nt, Artificial Sequence
  CasX variant scaffold
acuggcgcuguuaucugauuacuucgagagccaucaccagcgacuaugucguaguggguaaagcucccucuucggagggagcaucgaag

SEQ ID NO: 2273 - RNA, 89 nt, Artificial Sequence
  CasX variant scaffold
acuggcgcucuuaucugauuacuucgagagccaucaccagcgacuaugucguaguggguaaagcucccucuucggagggagcaucgaag

SEQ ID NO: 2274 - RNA, 89 nt, Artificial Sequence
  CasX variant scaffold
acuggcgcuuguaucugauuacucugagagccaucaccagcgacuaugucguaguggguaaagcucccucuucggagggagcaucagag

SEQ ID NO: 2275 - RNA, 89 nt, Artificial Sequence
  CasX variant scaffold
acuggcgcuucuaucugauuacucugagagccaucaccagcgacuaugucguaguggguaaagcucccucuucggagggagcaucagag

SEQ ID NO: 2276 - RNA, 89 nt, Artificial Sequence
  CasX variant scaffold
acuggcgcuuugaucugauuaccuugagagccaucaccagcgacuaugucguaguggguaaagcucccucuucggagggagcaucaagg

SEQ ID NO: 2277 - RNA, 89 nt, Artificial Sequence
  CasX variant scaffold
acuggcgcuuucaucugauuaccuugagagccaucaccagcgacuaugucguaguggguaaagcucccucuucggagggagcaucaagg

SEQ ID NO: 2278 - RNA, 89 nt, Artificial Sequence
  CasX variant scaffold
acuggcgcuguuaucugauuacuuugagagccaucaccagcgacuaugucguaguggguaaagcucccucuucggagggagcaucaaag

SEQ ID NO: 2279 - RNA, 89 nt, Artificial Sequence
  CasX variant scaffold
acuggcgcuuuuaucugauuacuuugagagccaucaccagcgacuaugucguaguggguaaagcucccucuucggagggagcaucgaag

SEQ ID NO: 2280 - RNA, 89 nt, Artificial Sequence
  CasX variant scaffold
acuggcgcuuuuaucugauuacuucgagagccaucaccagcgacuaugucguaguggguaaagcucccucuucggagggagcaucaaag

SEQ ID NO: 2281 - RNA, 98 nt, Artificial Sequence
  CasX variant scaffold
acuggcacuucuaucugauuacucugagagccaucaccagcgacuaugucguauggguaaagccgcuuacggacuucgguccguaagaggcaucagag

SEQ ID NO: 2282 - RNA, 89 nt, Artificial Sequence
  CasX variant scaffold
acuggcacuucuaucugauuacucugagagccaucaccagcgacuaugucguaguggguaaagcucccucuucggagggagcaucagag

SEQ ID NO: 2283 - RNA, 98 nt, Artificial Sequence
  CasX variant scaffold
acuggcaccuuuaucugauuacuuugagagccaucaccagcgacuaugucguauggguaaagccgcuuacggacuucgguccguaagaggcaucaaag

SEQ ID NO: 2284 - RNA, 98 nt, Artificial Sequence
  CasX variant scaffold
acuggcacuuguaucugauuacucugagagccaucaccagcgacuaugucguauggguaaagccgcuuacggacuucgguccguaagaggcaucagag

SEQ ID NO: 2285 - RNA, 89 nt, Artificial Sequence
  CasX variant scaffold
acuggcacuuguaucugauuacucugagagccaucaccagcgacuaugucguaguggguaaagcucccucuucggagggagcaucagag

SEQ ID NO: 2286 - RNA, 20 nt, Artificial Sequence
  targeting sequence with ATCN PAM
gaguacaagaccuccgauau

SEQ ID NO: 2287 - RNA, 20 nt, Artificial Sequence
  targeting sequence with ATCN PAM
gaggucuuguacucugauga

SEQ ID NO: 2288 - RNA, 20 nt, Artificial Sequence
  targeting sequence with ATCN PAM
gcagcauugagguaaaagau

SEQ ID NO: 2289 - RNA, 20 nt, Artificial Sequence
  targeting sequence with ATCN PAM
uuuaccucaaugcugcugau

SEQ ID NO: 2290 - RNA, 20 nt, Artificial Sequence
  targeting sequence with ATCN PAM
gggccacagccuugcuccgg

SEQ ID NO: 2291 - RNA, 20 nt, Artificial Sequence
  targeting sequence with ATCN PAM
cacaacagcucacacuaccu

SEQ ID NO: 2292 - RNA, 20 nt, Artificial Sequence
  targeting sequence with ATCN PAM
ggaacccaugugccucaccc

SEQ ID NO: 2293 - RNA, 20 nt, Artificial Sequence
  targeting sequence with ATCN PAM
cuccaggguuggguuucuag

SEQ ID NO: 2294 - RNA, 20 nt, Artificial Sequence
  targeting sequence with ATCN PAM
cuuuucacagacuagaaacc

SEQ ID NO: 2295 - RNA, 20 nt, Artificial Sequence
  targeting sequence with ATCN PAM
aaacccaauaggccugcagu

SEQ ID NO: 2296 - RNA, 20 nt, Artificial Sequence
  targeting sequence with ATCN PAM
cagugcugucuggcugucug

SEQ ID NO: 2297 - RNA, 20 nt, Artificial Sequence
  targeting sequence with ATCN PAM
cacauucccauaccuucaca

SEQ ID NO: 2298 - RNA, 20 nt, Artificial Sequence
  targeting sequence with ATCN PAM
ucuugcugagccuuaauuuc

SEQ ID NO: 2299 - RNA, 20 nt, Artificial Sequence
  targeting sequence with ATCN PAM
ccauggguccauagccaaaa

SEQ ID NO: 2300 - RNA, 20 nt, Artificial Sequence
  targeting sequence with ATCN PAM
guauauucugggguuuaccu

SEQ ID NO: 2301 - RNA, 20 nt, Artificial Sequence
  targeting sequence with ATCN PAM
acuggccuggaucugggggu

SEQ ID NO: 2302 - RNA, 20 nt, Artificial Sequence
  targeting sequence with ATCN PAM
aggccaguggauuuacaagu

SEQ ID NO: 2303 - RNA, 20 nt, Artificial Sequence
  targeting sequence with ATCN PAM
gggggucuucaccugaagcc

SEQ ID NO: 2304 - RNA, 20 nt, Artificial Sequence
  targeting sequence with ATCN PAM
uacuggggucaaaauguagu

SEQ ID NO: 2305 - RNA, 20 nt, Artificial Sequence
  targeting sequence with ATCN PAM
uaggaguuuacuuuaacgca

SEQ ID NO: 2306 - RNA, 20 nt, Artificial Sequence
  targeting sequence with ATCN PAM
acugccugcagacuuauuug

SEQ ID NO: 2307 - RNA, 20 nt, Artificial Sequence
  targeting sequence with ATCN PAM
gggugcucagcauaauucca

SEQ ID NO: 2308 - RNA, 20 nt, Artificial Sequence
  targeting sequence with ATCN PAM
gcaguucucuggaauuaugc

SEQ ID NO: 2309 - RNA, 20 nt, Artificial Sequence
  targeting sequence with ATCN PAM
uuagugggugccuuuuggau

SEQ ID NO: 2310 - RNA, 20 nt, Artificial Sequence
  targeting sequence with ATCN PAM
aaaaggcacccacuaaggau

SEQ ID NO: 2311 - RNA, 20 nt, Artificial Sequence
  targeting sequence with ATCN PAM
ccccuauccaaaaggcaccc

SEQ ID NO: 2312 - RNA, 20 nt, Artificial Sequence
  targeting sequence with ATCN PAM
auggcacucagcaggugcau

SEQ ID NO: 2313 - RNA, 20 nt, Artificial Sequence
  targeting sequence with ATCN PAM
uuuuuauuggucauggugau

SEQ ID NO: 2314 - RNA, 20 nt, Artificial Sequence
  targeting sequence with ATCN PAM
ccaugaccaauaaaaacgau

SEQ ID NO: 2315 - RNA, 20 nt, Artificial Sequence
  targeting sequence with ATCN PAM
uggggccuagaauggauaug

SEQ ID NO: 2316 - RNA, 20 nt, Artificial Sequence
  targeting sequence with ATCN PAM
auucuaggccccaggauauc

SEQ ID NO: 2317 - RNA, 20 nt, Artificial Sequence
  targeting sequence with ATCN PAM
cugcaaaaaaaaaacaaaca

SEQ ID NO: 2318 - RNA, 20 nt, Artificial Sequence
  targeting sequence with ATCN PAM
cuugagcccaggaguuguag

SEQ ID NO: 2319 - RNA, 20 nt, Artificial Sequence
  targeting sequence with ATCN PAM
uccucuuuugaccucccaaa

SEQ ID NO: 2320 - RNA, 20 nt, Artificial Sequence
  targeting sequence with ATCN PAM
cuacacuuugggaggucaaa

SEQ ID NO: 2321 - RNA, 20 nt, Artificial Sequence
  targeting sequence with ATCN PAM
cagguguaagccaccauguc

SEQ ID NO: 2322 - RNA, 20 nt, Artificial Sequence
  targeting sequence with ATCN PAM
aucuuuuaucucacggcaag

SEQ ID NO: 2323 - RNA, 20 nt, Artificial Sequence
  targeting sequence with ATCN PAM
uuuaucucacggcaagauuu

SEQ ID NO: 2324 - RNA, 20 nt, Artificial Sequence
  targeting sequence with ATCN PAM
cacggcaagauuucaauuca

SEQ ID NO: 2325 - RNA, 20 nt, Artificial Sequence
  targeting sequence with ATCN PAM
ugccgugagauaaaagauug

SEQ ID NO: 2326 - RNA, 20 nt, Artificial Sequence
  targeting sequence with ATCN PAM
aacaaacuaacuccuaauag

SEQ ID NO: 2327 - RNA, 20 nt, Artificial Sequence
  targeting sequence with ATCN PAM
uucuaaaaaccugcacacag

SEQ ID NO: 2328 - RNA, 20 nt, Artificial Sequence
  targeting sequence with ATCN PAM
aacucuuagacaagcuggug

SEQ ID NO: 2329 - RNA, 20 nt, Artificial Sequence
  targeting sequence with ATCN PAM
uccuccaauaugcugcucuu

SEQ ID NO: 2330 - RNA, 20 nt, Artificial Sequence
  targeting sequence with ATCN PAM
uagcugugcuaagugugugu

SEQ ID NO: 2331 - RNA, 20 nt, Artificial Sequence
  targeting sequence with ATCN PAM
cuugcuucaaaagacuacau

SEQ ID NO: 2332 - RNA, 20 nt, Artificial Sequence
  targeting sequence with ATCN PAM
cacaauguagucuuuugaag

SEQ ID NO: 2333 - RNA, 20 nt, Artificial Sequence
  targeting sequence with ATCN PAM
ggagucagacagaacugcgu

SEQ ID NO: 2334 - RNA, 20 nt, Artificial Sequence
  targeting sequence with ATCN PAM
acuagguucuggguauauac

SEQ ID NO: 2335 - RNA, 20 nt, Artificial Sequence
  targeting sequence with ATCN PAM
cgcaugcugaacauccacua

SEQ ID NO: 2336 - RNA, 20 nt, Artificial Sequence
  targeting sequence with ATCN PAM
cuacuucuaaagagaaggua

SEQ ID NO: 2337 - RNA, 20 nt, Artificial Sequence
  targeting sequence with ATCN PAM
uaagacuugucauccuauuu

SEQ ID NO: 2338 - RNA, 20 nt, Artificial Sequence
  targeting sequence with ATCN PAM
uauuuuauuggucucccucu

SEQ ID NO: 2339 - RNA, 20 nt, Artificial Sequence
  targeting sequence with ATCN PAM
ccaugagccacaacucugcc

SEQ ID NO: 2340 - RNA, 20 nt, Artificial Sequence
  targeting sequence with ATCN PAM
gcaggccccguuuggcagag

SEQ ID NO: 2341 - RNA, 20 nt, Artificial Sequence
  targeting sequence with ATCN PAM
cccaaauccgcaggccccgu

SEQ ID NO: 2342 - RNA, 20 nt, Artificial Sequence
  targeting sequence with ATCN PAM
ugggagcuuaggggucaugg

SEQ ID NO: 2343 - RNA, 20 nt, Artificial Sequence
  targeting sequence with ATCN PAM
augaccccuaagcucccaag

SEQ ID NO: 2344 - RNA, 20 nt, Artificial Sequence
  targeting sequence with ATCN PAM
uuuuuugaucuuugcuuguc

SEQ ID NO: 2345 - RNA, 20 nt, Artificial Sequence
  targeting sequence with ATCN PAM
aaaaaagaugcaaaccuuug

SEQ ID NO: 2346 - RNA, 20 nt, Artificial Sequence
  targeting sequence with ATCN PAM
uugcuugucugguaaaagcc

SEQ ID NO: 2347 - RNA, 20 nt, Artificial Sequence
  targeting sequence with ATCN PAM
aaccuuuguaaaggcugcuu

SEQ ID NO: 2348 - RNA, 20 nt, Artificial Sequence
  targeting sequence with ATCN PAM
gccagaaacaggucauuguu

SEQ ID NO: 2349 - RNA, 20 nt, Artificial Sequence
  targeting sequence with ATCN PAM
uuucugagaccauugcuagu

SEQ ID NO: 2350 - RNA, 20 nt, Artificial Sequence
  targeting sequence with ATCN PAM
acagccacugguugaaacuc

SEQ ID NO: 2351 - RNA, 20 nt, Artificial Sequence
  targeting sequence with ATCN PAM
gugacagggcuggauggcug

SEQ ID NO: 2352 - RNA, 20 nt, Artificial Sequence
  targeting sequence with ATCN PAM
agcccugucacugaugaagg

SEQ ID NO: 2353 - RNA, 20 nt, Artificial Sequence
  targeting sequence with ATCN PAM
cuucauugaguugagggcuc

SEQ ID NO: 2354 - RNA, 20 nt, Artificial Sequence
  targeting sequence with ATCN PAM
ucucaauccuugucaggagc

SEQ ID NO: 2355 - RNA, 20 nt, Artificial Sequence
  targeting sequence with ATCN PAM
uugucaggagccgccaagaa

SEQ ID NO: 2356 - RNA, 20 nt, Artificial Sequence
  targeting sequence with ATCN PAM
gugucuucaggcaggagccg

SEQ ID NO: 2357 - RNA, 20 nt, Artificial Sequence
  targeting sequence with ATCN PAM
gcaggaccggcuccugccug

SEQ ID NO: 2358 - RNA, 20 nt, Artificial Sequence
  targeting sequence with ATCN PAM
ugcaggacgacauggugccu

SEQ ID NO: 2359 - RNA, 20 nt, Artificial Sequence
  targeting sequence with ATCN PAM
gcaggugcuaugggaaacuu

SEQ ID NO: 2360 - RNA, 20 nt, Artificial Sequence
  targeting sequence with ATCN PAM
cccacugcaaccacauggua

SEQ ID NO: 2361 - RNA, 20 nt, Artificial Sequence
  targeting sequence with ATCN PAM
cugccaucacccacugcaac

SEQ ID NO: 2362 - RNA, 20 nt, Artificial Sequence
  targeting sequence with ATCN PAM
ggagccugguccaggaagcu

SEQ ID NO: 2363 - RNA, 20 nt, Artificial Sequence
  targeting sequence with ATCN PAM
aggggcuuuguuaaccugcc

SEQ ID NO: 2364 - RNA, 20 nt, Artificial Sequence
  targeting sequence with ATCN PAM
gccauaaccuauuggugggc

SEQ ID NO: 2365 - RNA, 20 nt, Artificial Sequence
  targeting sequence with ATCN PAM
ugaacuugugagcuggagaa

SEQ ID NO: 2366 - RNA, 20 nt, Artificial Sequence
  targeting sequence with ATCN PAM
uccccacuuuuuucugcuuu

SEQ ID NO: 2367 - RNA, 20 nt, Artificial Sequence
  targeting sequence with ATCN PAM
ucaggaauagaaaagcagaa

SEQ ID NO: 2368 - RNA, 20 nt, Artificial Sequence
  targeting sequence with ATCN PAM
caggccaccaaacacaccuu

SEQ ID NO: 2369 - RNA, 20 nt, Artificial Sequence
  targeting sequence with ATCN PAM
ggacuuggacgagcuccugg

SEQ ID NO: 2370 - RNA, 20 nt, Artificial Sequence
  targeting sequence with ATCN PAM
cuaaggugaaaagacaggcu

SEQ ID NO: 2371 - RNA, 20 nt, Artificial Sequence
  targeting sequence with ATCN PAM
ucuaggugucuuuggugggg

SEQ ID NO: 2372 - RNA, 20 nt, Artificial Sequence
  targeting sequence with ATCN PAM
caguaugaauguguuaugaa

SEQ ID NO: 2373 - RNA, 20 nt, Artificial Sequence
  targeting sequence with ATCN PAM
ccagagucagugcaucucug

SEQ ID NO: 2374 - RNA, 20 nt, Artificial Sequence
  targeting sequence with ATCN PAM
cugcuuccggggauaacaaa

SEQ ID NO: 2375 - RNA, 20 nt, Artificial Sequence
  targeting sequence with ATCN PAM
ccggaagcagagaugcacug

SEQ ID NO: 2376 - RNA, 20 nt, Artificial Sequence
  targeting sequence with ATCN PAM
ugaguuaaaauuuuguuauc

SEQ ID NO: 2377 - RNA, 20 nt, Artificial Sequence
  targeting sequence with ATCN PAM
cuuaaggguucauccugagu

SEQ ID NO: 2378 - RNA, 20 nt, Artificial Sequence
  targeting sequence with ATCN PAM
agacccuagagguagaauuu

SEQ ID NO: 2379 - RNA, 20 nt, Artificial Sequence
  targeting sequence with ATCN PAM
acccacuucagccucccaaa

SEQ ID NO: 2380 - RNA, 20 nt, Artificial Sequence
  targeting sequence with ATCN PAM
uuccaccuuagccucccagu

SEQ ID NO: 2381 - RNA, 20 nt, Artificial Sequence
  targeting sequence with ATCN PAM
uggcucacugcaacuuccac

SEQ ID NO: 2382 - RNA, 20 nt, Artificial Sequence
  targeting sequence with ATCN PAM
cgccacugcauuccagccug

SEQ ID NO: 2383 - RNA, 20 nt, Artificial Sequence
  targeting sequence with ATCN PAM
cacagaaagaaacugcacuc

SEQ ID NO: 2384 - RNA, 20 nt, Artificial Sequence
  targeting sequence with ATCN PAM
gagaagggaagggagguuug

SEQ ID NO: 2385 - RNA, 20 nt, Artificial Sequence
  targeting sequence with ATCN PAM
caugacuaaacugagcuguc

SEQ ID NO: 2386 - RNA, 20 nt, Artificial Sequence
  targeting sequence with ATCN PAM
uucuacagguuggcauuucu

SEQ ID NO: 2387 - RNA, 20 nt, Artificial Sequence
  targeting sequence with ATCN PAM
uccuaaucuuucuacagguu

SEQ ID NO: 2388 - RNA, 20 nt, Artificial Sequence
  targeting sequence with ATCN PAM
acucuguggucacguguggc

SEQ ID NO: 2389 - RNA, 20 nt, Artificial Sequence
  targeting sequence with ATCN PAM
aaaacuaaaaccaaaaacaa

SEQ ID NO: 2390 - RNA, 20 nt, Artificial Sequence
  targeting sequence with ATCN PAM
cuauuccaaggagguugguu

SEQ ID NO: 2391 - RNA, 20 nt, Artificial Sequence
  targeting sequence with ATCN PAM
ccccugcccccaccugguag

SEQ ID NO: 2392 - RNA, 20 nt, Artificial Sequence
  targeting sequence with ATCN PAM
cccccaccccccacauaaug

SEQ ID NO: 2393 - RNA, 20 nt, Artificial Sequence
  targeting sequence with ATCN PAM
aguccugauuaacguggcau

SEQ ID NO: 2394 - RNA, 20 nt, Artificial Sequence
  targeting sequence with ATCN PAM
ggacuagaucucccccaccc

SEQ ID NO: 2395 - RNA, 20 nt, Artificial Sequence
  targeting sequence with ATCN PAM
ugggaagcaauuuucaagua

SEQ ID NO: 2396 - RNA, 20 nt, Artificial Sequence
  targeting sequence with ATCN PAM
gguuuucagaaaauuuuaaa

SEQ ID NO: 2397 - RNA, 20 nt, Artificial Sequence
  targeting sequence with ATCN PAM
agaaagcauacaauuuauuu

SEQ ID NO: 2398 - RNA, 20 nt, Artificial Sequence
  targeting sequence with ATCN PAM
ccauauaaacaugucacuua

SEQ ID NO: 2399 - RNA, 20 nt, Artificial Sequence
  targeting sequence with ATCN PAM
aaaucaccaagcaugagaac

SEQ ID NO: 2400 - RNA, 20 nt, Artificial Sequence
  targeting sequence with ATCN PAM
ccaagcaugagaacacuguu

SEQ ID NO: 2401 - RNA, 20 nt, Artificial Sequence
  targeting sequence with ATCN PAM
cucagcacagccucuuucug

SEQ ID NO: 2402 - RNA, 20 nt, Artificial Sequence
  targeting sequence with ATCN PAM
ggggccauggcaaagacuug

SEQ ID NO: 2403 - RNA, 20 nt, Artificial Sequence
  targeting sequence with ATCN PAM
uaggagacuagaaauguccu

SEQ ID NO: 2404 - RNA, 20 nt, Artificial Sequence
  targeting sequence with ATCN PAM
gcgccauagcagcugccaga

SEQ ID NO: 2405 - RNA, 20 nt, Artificial Sequence
  targeting sequence with ATCN PAM
ggguauacaaugcgcuuucc

SEQ ID NO: 2406 - RNA, 20 nt, Artificial Sequence
  targeting sequence with ATCN PAM
uauauuaggccgaccuaaua

SEQ ID NO: 2407 - RNA, 20 nt, Artificial Sequence
  targeting sequence with ATCN PAM
acuugaacaauuagcucgcu

SEQ ID NO: 2408 - RNA, 20 nt, Artificial Sequence
  targeting sequence with ATCN PAM
uggggaaaggagugcuuuuu

SEQ ID NO: 2409 - RNA, 20 nt, Artificial Sequence
  targeting sequence with ATCN PAM
ggccuagggccuguguuccu

SEQ ID NO: 2410 - RNA, 20 nt, Artificial Sequence
  targeting sequence with ATCN PAM
cugagccuccaggaccacag

SEQ ID NO: 2411 - RNA, 20 nt, Artificial Sequence
  targeting sequence with ATCN PAM
cuuccuucucagguccucuc

SEQ ID NO: 2412 - RNA, 20 nt, Artificial Sequence
  targeting sequence with ATCN PAM
gaggcagggaaggugcucag

SEQ ID NO: 2413 - RNA, 20 nt, Artificial Sequence
  targeting sequence with ATCN PAM
gacagugggacagcaggagg

SEQ ID NO: 2414 - RNA, 20 nt, Artificial Sequence
  targeting sequence with ATCN PAM
gguucucaccccugcagacc

SEQ ID NO: 2415 - RNA, 20 nt, Artificial Sequence
  targeting sequence with ATCN PAM
ugugcugaggucaggucugc

SEQ ID NO: 2416 - RNA, 20 nt, Artificial Sequence
  targeting sequence with ATCN PAM
cuaaccauucagcugagaag

SEQ ID NO: 2417 - RNA, 20 nt, Artificial Sequence
  targeting sequence with ATCN PAM
cucugguuaguugcuucuca

SEQ ID NO: 2418 - RNA, 20 nt, Artificial Sequence
  targeting sequence with ATCN PAM
guuccaggaaaguaacuggg

SEQ ID NO: 2419 - RNA, 20 nt, Artificial Sequence
  targeting sequence with ATCN PAM
cauugucuuugccccaguua

SEQ ID NO: 2420 - RNA, 20 nt, Artificial Sequence
  targeting sequence with ATCN PAM
ucacauugucuuugccccag

SEQ ID NO: 2421 - RNA, 20 nt, Artificial Sequence
  targeting sequence with ATCN PAM
cccauaugaucugaauaaga

SEQ ID NO: 2422 - RNA, 20 nt, Artificial Sequence
  targeting sequence with ATCN PAM
uaugggugauaccacaugcu

SEQ ID NO: 2423 - RNA, 20 nt, Artificial Sequence
  targeting sequence with ATCN PAM
gaauaagaugacaggucucg

SEQ ID NO: 2424 - RNA, 20 nt, Artificial Sequence
  targeting sequence with ATCN PAM
uauucagaucauauggguga

SEQ ID NO: 2425 - RNA, 20 nt, Artificial Sequence
  targeting sequence with ATCN PAM
agaccugucaucuuauucag

SEQ ID NO: 2426 - RNA, 20 nt, Artificial Sequence
  targeting sequence with ATCN PAM
ggcugucucucucucacaua

SEQ ID NO: 2427 - RNA, 20 nt, Artificial Sequence
  targeting sequence with ATCN PAM
ugaacccccgacccugcaga

SEQ ID NO: 2428 - RNA, 20 nt, Artificial Sequence
  targeting sequence with ATCN PAM
gcuaaacaacacuuucuaga

SEQ ID NO: 2429 - RNA, 20 nt, Artificial Sequence
  targeting sequence with ATCN PAM
gggacgcuggcccccagugc

SEQ ID NO: 2430 - RNA, 20 nt, Artificial Sequence
  targeting sequence with ATCN PAM
ugggacagcaucagggacgc

SEQ ID NO: 2431 - RNA, 20 nt, Artificial Sequence
  targeting sequence with ATCN PAM
cccaggaacaccugcagggc

SEQ ID NO: 2432 - RNA, 20 nt, Artificial Sequence
  targeting sequence with ATCN PAM
caggcugcccugcagguguu

SEQ ID NO: 2433 - RNA, 20 nt, Artificial Sequence
  targeting sequence with ATCN PAM
cucuucccgagaccugggac

SEQ ID NO: 2434 - RNA, 20 nt, Artificial Sequence
  targeting sequence with ATCN PAM
ggcuuuucuagcagcaaggg

SEQ ID NO: 2435 - RNA, 20 nt, Artificial Sequence
  targeting sequence with ATCN PAM
gaacuuccugugccagcguu

SEQ ID NO: 2436 - RNA, 20 nt, Artificial Sequence
  targeting sequence with ATCN PAM
agaguguuuuuguuuguugu

SEQ ID NO: 2437 - RNA, 20 nt, Artificial Sequence
  targeting sequence with ATCN PAM
ugaggaagcacaacaaacaa

SEQ ID NO: 2438 - RNA, 20 nt, Artificial Sequence
  targeting sequence with ATCN PAM
aaggaaauccugaggaagca

SEQ ID NO: 2439 - RNA, 20 nt, Artificial Sequence
  targeting sequence with ATCN PAM
ggagaccccaaagaaacaaa

SEQ ID NO: 2440 - RNA, 20 nt, Artificial Sequence
  targeting sequence with ATCN PAM
uuguuucuuuggggucucca

SEQ ID NO: 2441 - RNA, 20 nt, Artificial Sequence
  targeting sequence with ATCN PAM
ccaaacaggcugacugggcc

SEQ ID NO: 2442 - RNA, 20 nt, Artificial Sequence
  targeting sequence with ATCN PAM
aggagcccaaagccgccgug

SEQ ID NO: 2443 - RNA, 20 nt, Artificial Sequence
  targeting sequence with ATCN PAM
ccacggcggcuuugggcucc

SEQ ID NO: 2444 - RNA, 20 nt, Artificial Sequence
  targeting sequence with ATCN PAM
cagcaggagagcacgucaag

SEQ ID NO: 2445 - RNA, 20 nt, Artificial Sequence
  targeting sequence with ATCN PAM
agaucuguggugaccauggc

SEQ ID NO: 2446 - RNA, 20 nt, Artificial Sequence
  targeting sequence with ATCN PAM
cgauggccuugacgugcucu

SEQ ID NO: 2447 - RNA, 20 nt, Artificial Sequence
  targeting sequence with ATCN PAM
guggugaccauggcuggguu

SEQ ID NO: 2448 - RNA, 20 nt, Artificial Sequence
  targeting sequence with ATCN PAM
caugucaccucuugacugac

SEQ ID NO: 2449 - RNA, 20 nt, Artificial Sequence
  targeting sequence with ATCN PAM
aaagcuaaugugauaguggc

SEQ ID NO: 2450 - RNA, 20 nt, Artificial Sequence
  targeting sequence with ATCN PAM
cauuagcuuuagauaauuag

SEQ ID NO: 2451 - RNA, 20 nt, Artificial Sequence
  targeting sequence with ATCN PAM
cugugucuccugaagaaccu

SEQ ID NO: 2452 - RNA, 20 nt, Artificial Sequence
  targeting sequence with ATCN PAM
cuuccccuagugacuccaca

SEQ ID NO: 2453 - RNA, 20 nt, Artificial Sequence
  targeting sequence with ATCN PAM
cagcugccauuugcugagcg

SEQ ID NO: 2454 - RNA, 20 nt, Artificial Sequence
  targeting sequence with ATCN PAM
cagcgucuggguuguaguga

SEQ ID NO: 2455 - RNA, 20 nt, Artificial Sequence
  targeting sequence with ATCN PAM
gggcuggugucuccucgccc

SEQ ID NO: 2456 - RNA, 20 nt, Artificial Sequence
  targeting sequence with ATCN PAM
gcaaggugggcgaggagaca

SEQ ID NO: 2457 - RNA, 20 nt, Artificial Sequence
  targeting sequence with ATCN PAM
ucugcaaggugggcgaggag

SEQ ID NO: 2458 - RNA, 20 nt, Artificial Sequence
  targeting sequence with ATCN PAM
ggacuuugggaauaacuugu

SEQ ID NO: 2459 - RNA, 20 nt, Artificial Sequence
  targeting sequence with ATCN PAM
gaggcuaaagcucagcucua

SEQ ID NO: 2460 - RNA, 20 nt, Artificial Sequence
  targeting sequence with ATCN PAM
gcuggaugucgaugccaacu

SEQ ID NO: 2461 - RNA, 20 nt, Artificial Sequence
  targeting sequence with ATCN PAM
agcagaucagaggcuaaagc

SEQ ID NO: 2462 - RNA, 20 nt, Artificial Sequence
  targeting sequence with ATCN PAM
acauccagcagaucagaggc

SEQ ID NO: 2463 - RNA, 20 nt, Artificial Sequence
  targeting sequence with ATCN PAM
aucagggaagaauucuuaug

SEQ ID NO: 2464 - RNA, 20 nt, Artificial Sequence
  targeting sequence with ATCN PAM
gggaagaauucuuaugggag

SEQ ID NO: 2465 - RNA, 20 nt, Artificial Sequence
  targeting sequence with ATCN PAM
augguuccucccauaagaau

SEQ ID NO: 2466 - RNA, 20 nt, Artificial Sequence
  targeting sequence with ATCN PAM
ucucuuaggagacacucuuu

SEQ ID NO: 2467 - RNA, 20 nt, Artificial Sequence
  targeting sequence with ATCN PAM
cuauuuaccucuuggaauuc

SEQ ID NO: 2468 - RNA, 20 nt, Artificial Sequence
  targeting sequence with ATCN PAM
uuucccgccaucucuauuua

SEQ ID NO: 2469 - RNA, 20 nt, Artificial Sequence
  targeting sequence with ATCN PAM
gaggcccuuccaguguggcc

SEQ ID NO: 2470 - RNA, 20 nt, Artificial Sequence
  targeting sequence with ATCN PAM
aagcaccuccguuuggcauc

SEQ ID NO: 2471 - RNA, 20 nt, Artificial Sequence
  targeting sequence with ATCN PAM
ggucuccauucuaccugccu

SEQ ID NO: 2472 - RNA, 20 nt, Artificial Sequence
  targeting sequence with ATCN PAM
caggguguuggggcaguggu

SEQ ID NO: 2473 - RNA, 20 nt, Artificial Sequence
  targeting sequence with ATCN PAM
ugucucagugcugccccacc

SEQ ID NO: 2474 - RNA, 20 nt, Artificial Sequence
  targeting sequence with ATCN PAM
auccugucucagugcugccc

SEQ ID NO: 2475 - RNA, 20 nt, Artificial Sequence
  targeting sequence with ATCN PAM
uguccuuugccuaccgcagc

SEQ ID NO: 2476 - RNA, 20 nt, Artificial Sequence
  targeting sequence with ATCN PAM
acagccuuuaggacccagcc

SEQ ID NO: 2477 - RNA, 20 nt, Artificial Sequence
  targeting sequence with ATCN PAM
uggcugggccacugcuaccu

SEQ ID NO: 2478 - RNA, 20 nt, Artificial Sequence
  targeting sequence with ATCN PAM
ccaaauccuggcugggccac

SEQ ID NO: 2479 - RNA, 20 nt, Artificial Sequence
  targeting sequence with ATCN PAM
uuaaccagccucuuccauau

SEQ ID NO: 2480 - RNA, 20 nt, Artificial Sequence
  targeting sequence with ATCN PAM
aggucccuuugugaggggcc

SEQ ID NO: 2481 - RNA, 20 nt, Artificial Sequence
  targeting sequence with ATCN PAM
aucaaggucccuuugugagg

SEQ ID NO: 2482 - RNA, 20 nt, Artificial Sequence
  targeting sequence with ATCN PAM
uuuucuuguccgauaguaau

SEQ ID NO: 2483 - RNA, 20 nt, Artificial Sequence
  targeting sequence with ATCN PAM
gacaagaaaaagauggggug

SEQ ID NO: 2484 - RNA, 20 nt, Artificial Sequence
  targeting sequence with ATCN PAM
gugccucugucuuuaaaaaa

SEQ ID NO: 2485 - RNA, 20 nt, Artificial Sequence
  targeting sequence with ATCN PAM
gccuggcucucuucuauaug

SEQ ID NO: 2486 - RNA, 20 nt, Artificial Sequence
  targeting sequence with ATCN PAM
gguuacccugaggguacuug

SEQ ID NO: 2487 - RNA, 20 nt, Artificial Sequence
  targeting sequence with ATCN PAM
ggaaagcaagcagaacaugc

SEQ ID NO: 2488 - RNA, 20 nt, Artificial Sequence
  targeting sequence with ATCN PAM
cacccaacgucccuggagga

SEQ ID NO: 2489 - RNA, 20 nt, Artificial Sequence
  targeting sequence with ATCN PAM
aaaaauaacacugcucagca

SEQ ID NO: 2490 - RNA, 20 nt, Artificial Sequence
  targeting sequence with ATCN PAM
cugucuggagacaggcaagg

SEQ ID NO: 2491 - RNA, 20 nt, Artificial Sequence
  targeting sequence with ATCN PAM
aggccucauguccccaugag

SEQ ID NO: 2492 - RNA, 20 nt, Artificial Sequence
  targeting sequence with ATCN PAM
cucauggggacaugaggccu

SEQ ID NO: 2493 - RNA, 20 nt, Artificial Sequence
  targeting sequence with ATCN PAM
acuuuuccgugagaauuccu

SEQ ID NO: 2494 - RNA, 20 nt, Artificial Sequence
  targeting sequence with ATCN PAM
gagagauggaaauaaucaug

SEQ ID NO: 2495 - RNA, 20 nt, Artificial Sequence
  targeting sequence with ATCN PAM
cucagaugagaagaauaaag

SEQ ID NO: 2496 - RNA, 20 nt, Artificial Sequence
  targeting sequence with ATCN PAM
ugcccaccucuuaggguggu

SEQ ID NO: 2497 - RNA, 20 nt, Artificial Sequence
  targeting sequence with ATCN PAM
ucaccacccuaagagguggg

SEQ ID NO: 2498 - RNA, 20 nt, Artificial Sequence
  targeting sequence with ATCN PAM
gaaucuucaccacccuaaga

SEQ ID NO: 2499 - RNA, 20 nt, Artificial Sequence
  targeting sequence with ATCN PAM
ggguaccugguaggggauua

SEQ ID NO: 2500 - RNA, 20 nt, Artificial Sequence
  targeting sequence with ATCN PAM
accuggagagggaaggggca

SEQ ID NO: 2501 - RNA, 20 nt, Artificial Sequence
  targeting sequence with ATCN PAM
acaucgcccgcaaacuggac

SEQ ID NO: 2502 - RNA, 20 nt, Artificial Sequence
  targeting sequence with ATCN PAM
cccgcaaacuggacaaggcu

SEQ ID NO: 2503 - RNA, 20 nt, Artificial Sequence
  targeting sequence with ATCN PAM
ucagguaggucucagcagca

SEQ ID NO: 2504 - RNA, 20 nt, Artificial Sequence
  targeting sequence with ATCN PAM
cagcgcugggucuccacgug

SEQ ID NO: 2505 - RNA, 20 nt, Artificial Sequence
  targeting sequence with ATCN PAM
gaaccccaaagggccccugu

SEQ ID NO: 2506 - RNA, 20 nt, Artificial Sequence
  targeting sequence with ATCN PAM
cgagggcagcuucucuccau

SEQ ID NO: 2507 - RNA, 20 nt, Artificial Sequence
  targeting sequence with ATCN PAM
uggagggccuuuccacuugu

SEQ ID NO: 2508 - RNA, 20 nt, Artificial Sequence
  targeting sequence with ATCN PAM
uuacugacagccagcucugc

SEQ ID NO: 2509 - RNA, 20 nt, Artificial Sequence
  targeting sequence with ATCN PAM
ccggugccugucaccacccu

SEQ ID NO: 2510 - RNA, 20 nt, Artificial Sequence
  targeting sequence with ATCN PAM
gccaugugucugagccugug

SEQ ID NO: 2511 - RNA, 20 nt, Artificial Sequence
  targeting sequence with ATCN PAM
ccacaucagccaugugucug

SEQ ID NO: 2512 - RNA, 20 nt, Artificial Sequence
  targeting sequence with ATCN PAM
gugcuuuccagauccagacu

SEQ ID NO: 2513 - RNA, 20 nt, Artificial Sequence
  targeting sequence with ATCN PAM
ggaaagcacagauggugcuu

SEQ ID NO: 2514 - RNA, 20 nt, Artificial Sequence
  targeting sequence with ATCN PAM
agacugugagagccauuuca

SEQ ID NO: 2515 - RNA, 20 nt, Artificial Sequence
  targeting sequence with ATCN PAM
gcugcuucugccagccugag

SEQ ID NO: 2516 - RNA, 20 nt, Artificial Sequence
  targeting sequence with ATCN PAM
auccccgagaggauuaggag

SEQ ID NO: 2517 - RNA, 20 nt, Artificial Sequence
  targeting sequence with ATCN PAM
ccgagaggauuaggagcugu

SEQ ID NO: 2518 - RNA, 20 nt, Artificial Sequence
  targeting sequence with ATCN PAM
ucucggggauggauuucucu

SEQ ID NO: 2519 - RNA, 20 nt, Artificial Sequence
  targeting sequence with ATCN PAM
uggcacagcuccuaauccuc

SEQ ID NO: 2520 - RNA, 20 nt, Artificial Sequence
  targeting sequence with ATCN PAM
ucccccgacucacccaccca

SEQ ID NO: 2521 - RNA, 20 nt, Artificial Sequence
  targeting sequence with ATCN PAM
ugguccauuuuagagugaaa

SEQ ID NO: 2522 - RNA, 20 nt, Artificial Sequence
  targeting sequence with ATCN PAM
ccucaccaauggagcuguuc

SEQ ID NO: 2523 - RNA, 20 nt, Artificial Sequence
  targeting sequence with ATCN PAM
aauaaauuucucuugagaag

SEQ ID NO: 2524 - RNA, 20 nt, Artificial Sequence
  targeting sequence with ATCN PAM
augcugcuugggaaaucuaa

SEQ ID NO: 2525 - RNA, 20 nt, Artificial Sequence
  targeting sequence with ATCN PAM
uagaaugacucagaccucgc

SEQ ID NO: 2526 - RNA, 20 nt, Artificial Sequence
  targeting sequence with ATCN PAM
ggcagacuuucucaccaugg

SEQ ID NO: 2527 - RNA, 20 nt, Artificial Sequence
  targeting sequence with ATCN PAM
uugacaacugauaagaagug

SEQ ID NO: 2528 - RNA, 20 nt, Artificial Sequence
  targeting sequence with ATCN PAM
guugucaaagaugacugugg

SEQ ID NO: 2529 - RNA, 20 nt, Artificial Sequence
  targeting sequence with ATCN PAM
ccacuucuuaucaguuguca

SEQ ID NO: 2530 - RNA, 20 nt, Artificial Sequence
  targeting sequence with ATCN PAM
ucaccacuucuuaucaguug

SEQ ID NO: 2531 - RNA, 20 nt, Artificial Sequence
  targeting sequence with ATCN PAM
ucaucaccacuucuuaucag

SEQ ID NO: 2532 - RNA, 20 nt, Artificial Sequence
  targeting sequence with ATCN PAM
guuugcagcacuacaggagc

SEQ ID NO: 2533 - RNA, 20 nt, Artificial Sequence
  targeting sequence with ATCN PAM
gaaacauuuuauuuugaggg

SEQ ID NO: 2534 - RNA, 20 nt, Artificial Sequence
  targeting sequence with ATCN PAM
agucgcuugcauauugcugu

SEQ ID NO: 2535 - RNA, 20 nt, Artificial Sequence
  targeting sequence with ATCN PAM
gcucuucgaaaacaaaaggc

SEQ ID NO: 2536 - RNA, 20 nt, Artificial Sequence
  targeting sequence with ATCN PAM
uauuuugccagccugacaac

SEQ ID NO: 2537 - RNA, 20 nt, Artificial Sequence
  targeting sequence with ATCN PAM
auuagggacaucauauuuug

SEQ ID NO: 2538 - RNA, 20 nt, Artificial Sequence
  targeting sequence with ATCN PAM
ugaguuuaaggaugacaucu

SEQ ID NO: 2539 - RNA, 20 nt, Artificial Sequence
  targeting sequence with ATCN PAM
uuaaacucaggaugcuucuc

SEQ ID NO: 2540 - RNA, 20 nt, Artificial Sequence
  targeting sequence with ATCN PAM
acaugccguaugcucagugg

SEQ ID NO: 2541 - RNA, 20 nt, Artificial Sequence
  targeting sequence with ATCN PAM
uucucugcuagccacugagc

SEQ ID NO: 2542 - RNA, 20 nt, Artificial Sequence
  targeting sequence with ATCN PAM
cuuugaggaagcccagaaag

SEQ ID NO: 2543 - RNA, 20 nt, Artificial Sequence
  targeting sequence with ATCN PAM
ucccguuuaauccucgcaac

SEQ ID NO: 2544 - RNA, 20 nt, Artificial Sequence
  targeting sequence with ATCN PAM
ucgcaacagcccuaugguau

SEQ ID NO: 2545 - RNA, 20 nt, Artificial Sequence
  targeting sequence with ATCN PAM
uuaugauucccauuuugcag

SEQ ID NO: 2546 - RNA, 20 nt, Artificial Sequence
  targeting sequence with ATCN PAM
uaaugaugguagcuauacca

SEQ ID NO: 2547 - RNA, 20 nt, Artificial Sequence
  targeting sequence with ATCN PAM
gcaaaaugggaaucauaaug

SEQ ID NO: 2548 - RNA, 20 nt, Artificial Sequence
  targeting sequence with ATCN PAM
ucccuuauuguccucauggu

SEQ ID NO: 2549 - RNA, 20 nt, Artificial Sequence
  targeting sequence with ATCN PAM
gagccagaaauagaagcuga

SEQ ID NO: 2550 - RNA, 20 nt, Artificial Sequence
  targeting sequence with ATCN PAM
gaaauaggaguuaaagcaag

SEQ ID NO: 2551 - RNA, 20 nt, Artificial Sequence
  targeting sequence with ATCN PAM
gcgaaaguucuauacuugcu

SEQ ID NO: 2552 - RNA, 20 nt, Artificial Sequence
  targeting sequence with ATCN PAM
uauuuuuuaaaguugacuuc

SEQ ID NO: 2553 - RNA, 20 nt, Artificial Sequence
  targeting sequence with ATCN PAM
ugccaacagcugugcaagga

SEQ ID NO: 2554 - RNA, 20 nt, Artificial Sequence
  targeting sequence with ATCN PAM
agucagcagcagagccagaa

SEQ ID NO: 2555 - RNA, 20 nt, Artificial Sequence
  targeting sequence with ATCN PAM
gguuccccagucagagaggu

SEQ ID NO: 2556 - RNA, 20 nt, Artificial Sequence
  targeting sequence with ATCN PAM
aacacccaacuuccauuaga

SEQ ID NO: 2557 - RNA, 20 nt, Artificial Sequence
  targeting sequence with ATCN PAM
gauuuacgcuucuauauggu

SEQ ID NO: 2558 - RNA, 20 nt, Artificial Sequence
  targeting sequence with ATCN PAM
gaugcuauggaacaucaaac

SEQ ID NO: 2559 - RNA, 20 nt, Artificial Sequence
  targeting sequence with ATCN PAM
gcauguuugggcaaaacaca

SEQ ID NO: 2560 - RNA, 20 nt, Artificial Sequence
  targeting sequence with ATCN PAM
accuauccaucugucugugu

SEQ ID NO: 2561 - RNA, 20 nt, Artificial Sequence
  targeting sequence with ATCN PAM
aucugucugugucugcccuu

SEQ ID NO: 2562 - RNA, 20 nt, Artificial Sequence
  targeting sequence with ATCN PAM
gucugugucugcccuuccaa

SEQ ID NO: 2563 - RNA, 20 nt, Artificial Sequence
  targeting sequence with ATCN PAM
aucaccauaguaacuuggua

SEQ ID NO: 2564 - RNA, 20 nt, Artificial Sequence
  targeting sequence with ATCN PAM
ccauaguaacuugguacuca

SEQ ID NO: 2565 - RNA, 20 nt, Artificial Sequence
  targeting sequence with ATCN PAM
acaaccucuugucugaguac

SEQ ID NO: 2566 - RNA, 20 nt, Artificial Sequence
  targeting sequence with ATCN PAM
uccgccuucagagaaggaga

SEQ ID NO: 2567 - RNA, 20 nt, Artificial Sequence
  targeting sequence with ATCN PAM
uaauccuccgccuucagaga

SEQ ID NO: 2568 - RNA, 20 nt, Artificial Sequence
  targeting sequence with ATCN PAM
uuugagugcucucauauggc

SEQ ID NO: 2569 - RNA, 20 nt, Artificial Sequence
  targeting sequence with ATCN PAM
caaggggcuggccacguagu

SEQ ID NO: 2570 - RNA, 20 nt, Artificial Sequence
  targeting sequence with ATCN PAM
guuaaacaguauaggaacga

SEQ ID NO: 2571 - RNA, 20 nt, Artificial Sequence
  targeting sequence with ATCN PAM
uuccuauacuguuuaacaga

SEQ ID NO: 2572 - RNA, 20 nt, Artificial Sequence
  targeting sequence with ATCN PAM
caaccauuugugaaaacaag

SEQ ID NO: 2573 - RNA, 20 nt, Artificial Sequence
  targeting sequence with ATCN PAM
gccucaguuaucacaaccau

SEQ ID NO: 2574 - RNA, 20 nt, Artificial Sequence
  targeting sequence with ATCN PAM
uucaaaguggucauugaaaa

SEQ ID NO: 2575 - RNA, 20 nt, Artificial Sequence
  targeting sequence with ATCN PAM
cccuuuuuaugagcaaugaa

SEQ ID NO: 2576 - RNA, 20 nt, Artificial Sequence
  targeting sequence with ATCN PAM
ucaccacagacuuaugaaga

SEQ ID NO: 2577 - RNA, 20 nt, Artificial Sequence
  targeting sequence with ATCN PAM
agugaggugauuagcaacaa

SEQ ID NO: 2578 - RNA, 20 nt, Artificial Sequence
  targeting sequence with ATCN PAM
ccucacuggauccucaccac

SEQ ID NO: 2579 - RNA, 20 nt, Artificial Sequence
  targeting sequence with ATCN PAM
ccuuaggagucacaaaacuu

SEQ ID NO: 2580 - RNA, 20 nt, Artificial Sequence
  targeting sequence with ATCN PAM
ucagugagguucugcccccu

SEQ ID NO: 2581 - RNA, 20 nt, Artificial Sequence
  targeting sequence with ATCN PAM
cacuguacuuuuuccaggau

SEQ ID NO: 2582 - RNA, 20 nt, Artificial Sequence
  targeting sequence with ATCN PAM
uggaaaaaguacagugagau

SEQ ID NO: 2583 - RNA, 20 nt, Artificial Sequence
  targeting sequence with ATCN PAM
cagcaacgaagcacugcaga

SEQ ID NO: 2584 - RNA, 20 nt, Artificial Sequence
  targeting sequence with ATCN PAM
gcagugcuucguugcuggga

SEQ ID NO: 2585 - RNA, 20 nt, Artificial Sequence
  targeting sequence with ATCN PAM
uuaaaccugcucuccgccac

SEQ ID NO: 2586 - RNA, 20 nt, Artificial Sequence
  targeting sequence with ATCN PAM
aguaauaauaggcagcauca

SEQ ID NO: 2587 - RNA, 20 nt, Artificial Sequence
  targeting sequence with ATCN PAM
aggcacugcauggacagcau

SEQ ID NO: 2588 - RNA, 20 nt, Artificial Sequence
  targeting sequence with ATCN PAM
gccagaccacuguuuuccca

SEQ ID NO: 2589 - RNA, 20 nt, Artificial Sequence
  targeting sequence with ATCN PAM
uggugucagaguggggcuug

SEQ ID NO: 2590 - RNA, 20 nt, Artificial Sequence
  targeting sequence with ATCN PAM
gaagagcugggacauuuuaa

SEQ ID NO: 2591 - RNA, 20 nt, Artificial Sequence
  targeting sequence with ATCN PAM
gguguaucaucuuuuuccag

SEQ ID NO: 2592 - RNA, 20 nt, Artificial Sequence
  targeting sequence with ATCN PAM
ucuuuuuccaguuugcccau

SEQ ID NO: 2593 - RNA, 20 nt, Artificial Sequence
  targeting sequence with ATCN PAM
uuuuccaguuugcccaucag

SEQ ID NO: 2594 - RNA, 20 nt, Artificial Sequence
  targeting sequence with ATCN PAM
gaaugguaugaggaccgucc

SEQ ID NO: 2595 - RNA, 20 nt, Artificial Sequence
  targeting sequence with ATCN PAM
cuccccugcuaccugggagc

SEQ ID NO: 2596 - RNA, 20 nt, Artificial Sequence
  targeting sequence with ATCN PAM
ucucauuuaauuaaaaaaau

SEQ ID NO: 2597 - RNA, 20 nt, Artificial Sequence
  targeting sequence with ATCN PAM
cucguucaucuucucauuua

SEQ ID NO: 2598 - RNA, 20 nt, Artificial Sequence
  targeting sequence with ATCN PAM
ggaguguguuacuguaaagc

SEQ ID NO: 2599 - RNA, 20 nt, Artificial Sequence
  targeting sequence with ATCN PAM
cagccaggaaaacaguuuca

SEQ ID NO: 2600 - RNA, 20 nt, Artificial Sequence
  targeting sequence with ATCN PAM
ugggaagucuugugaaagaa

SEQ ID NO: 2601 - RNA, 20 nt, Artificial Sequence
  targeting sequence with ATCN PAM
ccuugucucuuccacuucca

SEQ ID NO: 2602 - RNA, 20 nt, Artificial Sequence
  targeting sequence with ATCN PAM
uuccugagcucugcaugccc

SEQ ID NO: 2603 - RNA, 20 nt, Artificial Sequence
  targeting sequence with ATCN PAM
guccugugggagucccuugu

SEQ ID NO: 2604 - RNA, 20 nt, Artificial Sequence
  targeting sequence with ATCN PAM
gaagcauaaggcacuggccc

SEQ ID NO: 2605 - RNA, 20 nt, Artificial Sequence
  targeting sequence with ATCN PAM
uaugccucuucccucugcug

SEQ ID NO: 2606 - RNA, 20 nt, Artificial Sequence
  targeting sequence with ATCN PAM
ugggucuugcugcagcuguc

SEQ ID NO: 2607 - RNA, 20 nt, Artificial Sequence
  targeting sequence with ATCN PAM
gggagggugcagugagagau

SEQ ID NO: 2608 - RNA, 20 nt, Artificial Sequence
  targeting sequence with ATCN PAM
cucacugcacccucccagau

SEQ ID NO: 2609 - RNA, 20 nt, Artificial Sequence
  targeting sequence with ATCN PAM
ggaaaaaauauccucaaacu

SEQ ID NO: 2610 - RNA, 20 nt, Artificial Sequence
  targeting sequence with ATCN PAM
ucaaacucccuggccuuaug

SEQ ID NO: 2611 - RNA, 20 nt, Artificial Sequence
  targeting sequence with ATCN PAM
uggaguggcccuacuccuaa

SEQ ID NO: 2612 - RNA, 20 nt, Artificial Sequence
  targeting sequence with ATCN PAM
guucucccaccacacagugu

SEQ ID NO: 2613 - RNA, 20 nt, Artificial Sequence
  targeting sequence with ATCN PAM
gcugugugcagcggguggga

SEQ ID NO: 2614 - RNA, 20 nt, Artificial Sequence
  targeting sequence with ATCN PAM
ugcccagaaggacacaaugc

SEQ ID NO: 2615 - RNA, 20 nt, Artificial Sequence
  targeting sequence with ATCN PAM
aucgccacacgguaaggugg

SEQ ID NO: 2616 - RNA, 20 nt, Artificial Sequence
  targeting sequence with ATCN PAM
ccacacgguaagguggcugg

SEQ ID NO: 2617 - RNA, 20 nt, Artificial Sequence
  targeting sequence with ATCN PAM
ccugagcuaggggucccggg

SEQ ID NO: 2618 - RNA, 20 nt, Artificial Sequence
  targeting sequence with ATCN PAM
aaagagcagcagacuggaug

SEQ ID NO: 2619 - RNA, 20 nt, Artificial Sequence
  targeting sequence with ATCN PAM
agucugcugcucuuuagaua

SEQ ID NO: 2620 - RNA, 20 nt, Artificial Sequence
  targeting sequence with ATCN PAM
uggucuccucugggaagaaa

SEQ ID NO: 2621 - RNA, 20 nt, Artificial Sequence
  targeting sequence with ATCN PAM
aagaaacucaaacuuuuucu

SEQ ID NO: 2622 - RNA, 20 nt, Artificial Sequence
  targeting sequence with ATCN PAM
agcagugggcuccugaauug

SEQ ID NO: 2623 - RNA, 20 nt, Artificial Sequence
  targeting sequence with ATCN PAM
caauucaggagcccacugcu

SEQ ID NO: 2624 - RNA, 20 nt, Artificial Sequence
  targeting sequence with ATCN PAM
agagcuggaaugggccuugc

SEQ ID NO: 2625 - RNA, 20 nt, Artificial Sequence
  targeting sequence with ATCN PAM
aagccugcacugaggaacua

SEQ ID NO: 2626 - RNA, 20 nt, Artificial Sequence
  targeting sequence with ATCN PAM
gggccuucgcccuacugaag

SEQ ID NO: 2627 - RNA, 20 nt, Artificial Sequence
  targeting sequence with ATCN PAM
cgagccuuugguuaaucugg

SEQ ID NO: 2628 - RNA, 20 nt, Artificial Sequence
  targeting sequence with ATCN PAM
cucccuggcccugucaguga

SEQ ID NO: 2629 - RNA, 20 nt, Artificial Sequence
  targeting sequence with ATCN PAM
cugacagggccagggaggga

SEQ ID NO: 2630 - RNA, 20 nt, Artificial Sequence
  targeting sequence with ATCN PAM
acacauuuuugccaaugaga

SEQ ID NO: 2631 - RNA, 20 nt, Artificial Sequence
  targeting sequence with ATCN PAM
auacuuugggauuugacgaa

SEQ ID NO: 2632 - RNA, 20 nt, Artificial Sequence
  targeting sequence with ATCN PAM
caaaguauggauuuuuaugc

SEQ ID NO: 2633 - RNA, 20 nt, Artificial Sequence
  targeting sequence with ATCN PAM
ugcugguuguggaagcauuu

SEQ ID NO: 2634 - RNA, 20 nt, Artificial Sequence
  targeting sequence with ATCN PAM
caacaacuuuuugcagggaa

SEQ ID NO: 2635 - RNA, 20 nt, Artificial Sequence
  targeting sequence with ATCN PAM
caauauucaccugaccucuu

SEQ ID NO: 2636 - RNA, 20 nt, Artificial Sequence
  targeting sequence with ATCN PAM
cacaaccaauacuucaaaau

SEQ ID NO: 2637 - RNA, 20 nt, Artificial Sequence
  targeting sequence with ATCN PAM
ccucgauuugcugagcauac

SEQ ID NO: 2638 - RNA, 20 nt, Artificial Sequence
  targeting sequence with ATCN PAM
aggagaugcaccgaaaacug

SEQ ID NO: 2639 - RNA, 20 nt, Artificial Sequence
  targeting sequence with ATCN PAM
uuucaccaggaucagacaac

SEQ ID NO: 2640 - RNA, 20 nt, Artificial Sequence
  targeting sequence with ATCN PAM
uggugaaaugauuacauuug

SEQ ID NO: 2641 - RNA, 20 nt, Artificial Sequence
  targeting sequence with ATCN PAM
gacaacuguaguggaucaga

SEQ ID NO: 2642 - RNA, 20 nt, Artificial Sequence
  targeting sequence with ATCN PAM
acuacaguugucugauccug

SEQ ID NO: 2643 - RNA, 20 nt, Artificial Sequence
  targeting sequence with ATCN PAM
gaccagcagcagaccaccaa

SEQ ID NO: 2644 - RNA, 20 nt, Artificial Sequence
  targeting sequence with ATCN PAM
cuguuugguggucugcugcu

SEQ ID NO: 2645 - RNA, 20 nt, Artificial Sequence
  targeting sequence with ATCN PAM
ugaccuuuuuuuggugcaag

SEQ ID NO: 2646 - RNA, 20 nt, Artificial Sequence
  targeting sequence with ATCN PAM
cgguugucauguaaagucca

SEQ ID NO: 2647 - RNA, 20 nt, Artificial Sequence
  targeting sequence with ATCN PAM
gauugagaaauguuuuguug

SEQ ID NO: 2648 - RNA, 20 nt, Artificial Sequence
  targeting sequence with ATCN PAM
gaugugaggugugacaaaaa

SEQ ID NO: 2649 - RNA, 20 nt, Artificial Sequence
  targeting sequence with ATCN PAM
gcucaugaggcacccacuua

SEQ ID NO: 2650 - RNA, 20 nt, Artificial Sequence
  targeting sequence with ATCN PAM
agcuuuuucaccuucccaau

SEQ ID NO: 2651 - RNA, 20 nt, Artificial Sequence
  targeting sequence with ATCN PAM
ucucacaacuacaggagaag

SEQ ID NO: 2652 - RNA, 20 nt, Artificial Sequence
  targeting sequence with ATCN PAM
gcuucgaugauugcucucgg

SEQ ID NO: 2653 - RNA, 20 nt, Artificial Sequence
  targeting sequence with ATCN PAM
aagcugauccucucacaacu

SEQ ID NO: 2654 - RNA, 20 nt, Artificial Sequence
  targeting sequence with ATCN PAM
ucgaagcugauccucucaca

SEQ ID NO: 2655 - RNA, 20 nt, Artificial Sequence
  targeting sequence with ATCN PAM
ucaagccucucaucuccuuu

SEQ ID NO: 2656 - RNA, 20 nt, Artificial Sequence
  targeting sequence with ATCN PAM
ccuuugcaaaacuucuugaa

SEQ ID NO: 2657 - RNA, 20 nt, Artificial Sequence
  targeting sequence with ATCN PAM
acaacgcauuuggcccagga

SEQ ID NO: 2658 - RNA, 20 nt, Artificial Sequence
  targeting sequence with ATCN PAM
uuugcauagucuaaaauaaa

SEQ ID NO: 2659 - RNA, 20 nt, Artificial Sequence
  targeting sequence with ATCN PAM
uuucaacgggcauuucucgc

SEQ ID NO: 2660 - RNA, 20 nt, Artificial Sequence
  targeting sequence with ATCN PAM
aacagcaaauuccagagcca

SEQ ID NO: 2661 - RNA, 20 nt, Artificial Sequence
  targeting sequence with ATCN PAM
ucucuggccuucagcuucuu

SEQ ID NO: 2662 - RNA, 20 nt, Artificial Sequence
  targeting sequence with ATCN PAM
cuauuuuauagagaaagaag

SEQ ID NO: 2663 - RNA, 20 nt, Artificial Sequence
  targeting sequence with ATCN PAM
aguacauagugcuguuaucc

SEQ ID NO: 2664 - RNA, 20 nt, Artificial Sequence
  targeting sequence with ATCN PAM
caucaaguacauagugcugu

SEQ ID NO: 2665 - RNA, 20 nt, Artificial Sequence
  targeting sequence with ATCN PAM
ucaaaacaaucccaucaagu

SEQ ID NO: 2666 - RNA, 20 nt, Artificial Sequence
  targeting sequence with ATCN PAM
uuacugcugcuccaggcaag

SEQ ID NO: 2667 - RNA, 20 nt, Artificial Sequence
  targeting sequence with ATCN PAM
agcauuucucuuuuuucaga

SEQ ID NO: 2668 - RNA, 20 nt, Artificial Sequence
  targeting sequence with ATCN PAM
cugaaaaaagagaaaugcua

SEQ ID NO: 2669 - RNA, 20 nt, Artificial Sequence
  targeting sequence with ATCN PAM
ugacacugcacuccaccuug

SEQ ID NO: 2670 - RNA, 20 nt, Artificial Sequence
  targeting sequence with ATCN PAM
uagcucauggcagccucaaa

SEQ ID NO: 2671 - RNA, 20 nt, Artificial Sequence
  targeting sequence with ATCN PAM
cuugaguccagcaguuugag

SEQ ID NO: 2672 - RNA, 20 nt, Artificial Sequence
  targeting sequence with ATCN PAM
uccugccugagccucccaga

SEQ ID NO: 2673 - RNA, 20 nt, Artificial Sequence
  targeting sequence with ATCN PAM
cagugcucugggaggcucag

SEQ ID NO: 2674 - RNA, 20 nt, Artificial Sequence
  targeting sequence with ATCN PAM
gugcugacuucucagcacau

SEQ ID NO: 2675 - RNA, 20 nt, Artificial Sequence
  targeting sequence with ATCN PAM
cuucccacagcagggucagu

SEQ ID NO: 2676 - RNA, 20 nt, Artificial Sequence
  targeting sequence with ATCN PAM
ucccuuacagucuuuggcuu

SEQ ID NO: 2677 - RNA, 20 nt, Artificial Sequence
  targeting sequence with ATCN PAM
uuaucaggugcucaccugga

SEQ ID NO: 2678 - RNA, 20 nt, Artificial Sequence
  targeting sequence with ATCN PAM
ggugcucaccuggagagaaa

SEQ ID NO: 2679 - RNA, 20 nt, Artificial Sequence
  targeting sequence with ATCN PAM
cagcugaaucuuauuaauug

SEQ ID NO: 2680 - RNA, 20 nt, Artificial Sequence
  targeting sequence with ATCN PAM
uauuaauugggccauuccuu

SEQ ID NO: 2681 - RNA, 20 nt, Artificial Sequence
  targeting sequence with ATCN PAM
cagggucugucacguaguag

SEQ ID NO: 2682 - RNA, 20 nt, Artificial Sequence
  targeting sequence with ATCN PAM
cucaggggaaacguuuagag

SEQ ID NO: 2683 - RNA, 20 nt, Artificial Sequence
  targeting sequence with ATCN PAM
uccuccacuucacuugcccc

SEQ ID NO: 2684 - RNA, 20 nt, Artificial Sequence
  targeting sequence with ATCN PAM
agggcccagcagagcagcac

SEQ ID NO: 2685 - RNA, 20 nt, Artificial Sequence
  targeting sequence with ATCN PAM
gugcugcucugcugggcccu

SEQ ID NO: 2686 - RNA, 20 nt, Artificial Sequence
  targeting sequence with ATCN PAM
aggaaggaccugaacuuccc

SEQ ID NO: 2687 - RNA, 20 nt, Artificial Sequence
  targeting sequence with ATCN PAM
uucccagaggaaaggacucc

SEQ ID NO: 2688 - RNA, 20 nt, Artificial Sequence
  targeting sequence with ATCN PAM
uguucuuacccuggaaagga

SEQ ID NO: 2689 - RNA, 20 nt, Artificial Sequence
  targeting sequence with ATCN PAM
uuuccaggguaagaacaaga

SEQ ID NO: 2690 - RNA, 20 nt, Artificial Sequence
  targeting sequence with ATCN PAM
cugagccaccaaagcuuaac

SEQ ID NO: 2691 - RNA, 20 nt, Artificial Sequence
  targeting sequence with ATCN PAM
ucaccaucuaaagcuuuauu

SEQ ID NO: 2692 - RNA, 20 nt, Artificial Sequence
  targeting sequence with ATCN PAM
aaagcuuuauuagaaauggg

SEQ ID NO: 2693 - RNA, 20 nt, Artificial Sequence
  targeting sequence with ATCN PAM
caguuuauauacagugugcc

SEQ ID NO: 2694 - RNA, 20 nt, Artificial Sequence
  targeting sequence with ATCN PAM
ggcacacuguauauaaacug

SEQ ID NO: 2695 - RNA, 20 nt, Artificial Sequence
  targeting sequence with ATCN PAM
cuaaucugugcuaacugccu

SEQ ID NO: 2696 - RNA, 20 nt, Artificial Sequence
  targeting sequence with ATCN PAM
gugcuaacugccuccuguua

SEQ ID NO: 2697 - RNA, 20 nt, Artificial Sequence
  targeting sequence with ATCN PAM
gucaagcugcuguuggaaag

SEQ ID NO: 2698 - RNA, 20 nt, Artificial Sequence
  targeting sequence with ATCN PAM
gugguuauguccuaagcugc

SEQ ID NO: 2699 - RNA, 20 nt, Artificial Sequence
  targeting sequence with ATCN PAM
gaccuggguuugaacagcag

SEQ ID NO: 2700 - RNA, 20 nt, Artificial Sequence
  targeting sequence with ATCN PAM
ucuaucuaggugucgguuuc

SEQ ID NO: 2701 - RNA, 20 nt, Artificial Sequence
  targeting sequence with ATCN PAM
aucuaggugucgguuuccuc

SEQ ID NO: 2702 - RNA, 20 nt, Artificial Sequence
  targeting sequence with ATCN PAM
aggugucgguuuccucauca

SEQ ID NO: 2703 - RNA, 20 nt, Artificial Sequence
  targeting sequence with ATCN PAM
guacugugaggauaaaaaug

SEQ ID NO: 2704 - RNA, 20 nt, Artificial Sequence
  targeting sequence with ATCN PAM
ucacaguacugaugaggaaa

SEQ ID NO: 2705 - RNA, 20 nt, Artificial Sequence
  targeting sequence with ATCN PAM
ggucuuuaacauaauaaccu

SEQ ID NO: 2706 - RNA, 20 nt, Artificial Sequence
  targeting sequence with ATCN PAM
gagccgcucuuguugauguc

SEQ ID NO: 2707 - RNA, 20 nt, Artificial Sequence
  targeting sequence with ATCN PAM
acaagagcggcucugauuau

SEQ ID NO: 2708 - RNA, 20 nt, Artificial Sequence
  targeting sequence with ATCN PAM
cuguuugcuuuucucucacu

SEQ ID NO: 2709 - RNA, 20 nt, Artificial Sequence
  targeting sequence with ATCN PAM
uccugcagugagagaaaagc

SEQ ID NO: 2710 - RNA, 20 nt, Artificial Sequence
  targeting sequence with ATCN PAM
guucaguguccaucguccug

SEQ ID NO: 2711 - RNA, 20 nt, Artificial Sequence
  targeting sequence with ATCN PAM
uccugaaacucuuuucaaca

SEQ ID NO: 2712 - RNA, 20 nt, Artificial Sequence
  targeting sequence with ATCN PAM
ccagguuccugcugcacagc

SEQ ID NO: 2713 - RNA, 20 nt, Artificial Sequence
  targeting sequence with ATCN PAM
cuaaaguguauccuuucucu

SEQ ID NO: 2714 - RNA, 20 nt, Artificial Sequence
  targeting sequence with ATCN PAM
uuucucuuaucccuccuccg

SEQ ID NO: 2715 - RNA, 20 nt, Artificial Sequence
  targeting sequence with ATCN PAM
cuccuccgucccaccaccgu

SEQ ID NO: 2716 - RNA, 20 nt, Artificial Sequence
  targeting sequence with ATCN PAM
ucucuuggccugggccccug

SEQ ID NO: 2717 - RNA, 20 nt, Artificial Sequence
  targeting sequence with ATCN PAM
cuccuagaacccacagauga

SEQ ID NO: 2718 - RNA, 20 nt, Artificial Sequence
  targeting sequence with ATCN PAM
guggguucuaggagggauug

SEQ ID NO: 2719 - RNA, 20 nt, Artificial Sequence
  targeting sequence with ATCN PAM
aagagggaggucacaaguua

SEQ ID NO: 2720 - RNA, 20 nt, Artificial Sequence
  targeting sequence with ATCN PAM
accaaaccagacccuaacuu

SEQ ID NO: 2721 - RNA, 20 nt, Artificial Sequence
  targeting sequence with ATCN PAM
ccuccuccagguaaacuucc

SEQ ID NO: 2722 - RNA, 20 nt, Artificial Sequence
  targeting sequence with ATCN PAM
ugcaagcugaggcagccagg

SEQ ID NO: 2723 - RNA, 20 nt, Artificial Sequence
  targeting sequence with ATCN PAM
ucccuggcugccucagcuug

SEQ ID NO: 2724 - RNA, 20 nt, Artificial Sequence
  targeting sequence with ATCN PAM
acuuggccaucuucccuggc

SEQ ID NO: 2725 - RNA, 20 nt, Artificial Sequence
  targeting sequence with ATCN PAM
agggccacagugguaccaua

SEQ ID NO: 2726 - RNA, 20 nt, Artificial Sequence
  targeting sequence with ATCN PAM
ggcugcacaggcccuucagg

SEQ ID NO: 2727 - RNA, 20 nt, Artificial Sequence
  targeting sequence with ATCN PAM
aguaucuggcugcacaggcc

SEQ ID NO: 2728 - RNA, 20 nt, Artificial Sequence
  targeting sequence with ATCN PAM
uuaccaggcaaugauccaga

SEQ ID NO: 2729 - RNA, 20 nt, Artificial Sequence
  targeting sequence with ATCN PAM
uugccugguaaugauccagu

SEQ ID NO: 2730 - RNA, 20 nt, Artificial Sequence
  targeting sequence with ATCN PAM
agauuuuuaaggucuuggau

SEQ ID NO: 2731 - RNA, 20 nt, Artificial Sequence
  targeting sequence with ATCN PAM
ggaucauugccugguaauga

SEQ ID NO: 2732 - RNA, 20 nt, Artificial Sequence
  targeting sequence with ATCN PAM
aagaccuuaaaaaucuggau

SEQ ID NO: 2733 - RNA, 20 nt, Artificial Sequence
  targeting sequence with ATCN PAM
cacuguacucucagcuccuu

SEQ ID NO: 2734 - RNA, 20 nt, Artificial Sequence
  targeting sequence with ATCN PAM
ucuagcgaggccaauucuua

SEQ ID NO: 2735 - RNA, 20 nt, Artificial Sequence
  targeting sequence with ATCN PAM
aggggugccuuccuggaguc

SEQ ID NO: 2736 - RNA, 20 nt, Artificial Sequence
  targeting sequence with ATCN PAM
uuuccagcaaguucuguuug

SEQ ID NO: 2737 - RNA, 20 nt, Artificial Sequence
  targeting sequence with ATCN PAM
agcuguugacucaaacagaa

SEQ ID NO: 2738 - RNA, 20 nt, Artificial Sequence
  targeting sequence with ATCN PAM
ccuggggaccuggaaauggc

SEQ ID NO: 2739 - RNA, 20 nt, Artificial Sequence
  targeting sequence with ATCN PAM
cucccaguguuccugcuccc

SEQ ID NO: 2740 - RNA, 20 nt, Artificial Sequence
  targeting sequence with ATCN PAM
gaggugaccugagaggagag

SEQ ID NO: 2741 - RNA, 20 nt, Artificial Sequence
  targeting sequence with ATCN PAM
uaggagggccuggcuggcag

SEQ ID NO: 2742 - RNA, 20 nt, Artificial Sequence
  targeting sequence with ATCN PAM
uauacccugacuaggccaaa

SEQ ID NO: 2743 - RNA, 20 nt, Artificial Sequence
  targeting sequence with ATCN PAM
gcaggcccagagaugcuaag

SEQ ID NO: 2744 - RNA, 20 nt, Artificial Sequence
  targeting sequence with ATCN PAM
cugggccugcugauggcuca

SEQ ID NO: 2745 - RNA, 20 nt, Artificial Sequence
  targeting sequence with ATCN PAM
uuggaaaaauuccugggccu

SEQ ID NO: 2746 - RNA, 20 nt, Artificial Sequence
  targeting sequence with ATCN PAM
gagaaguacacucaccucuc

SEQ ID NO: 2747 - RNA, 20 nt, Artificial Sequence
  targeting sequence with ATCN PAM
cugccagauuccaaaagucc

SEQ ID NO: 2748 - RNA, 20 nt, Artificial Sequence
  targeting sequence with ATCN PAM
ggcagggauguacaggccac

SEQ ID NO: 2749 - RNA, 20 nt, Artificial Sequence
  targeting sequence with ATCN PAM
gcgccaagcccuuccacgac

SEQ ID NO: 2750 - RNA, 20 nt, Artificial Sequence
  targeting sequence with ATCN PAM
ucaccucacugucguggaag

SEQ ID NO: 2751 - RNA, 20 nt, Artificial Sequence
  targeting sequence with ATCN PAM
caugccuucuugccuggccu

SEQ ID NO: 2752 - RNA, 20 nt, Artificial Sequence
  targeting sequence with ATCN PAM
accccacacucccaacccac

SEQ ID NO: 2753 - RNA, 20 nt, Artificial Sequence
  targeting sequence with ATCN PAM
ucccucaagcucagagcaag

SEQ ID NO: 2754 - RNA, 20 nt, Artificial Sequence
  targeting sequence with ATCN PAM
cggcuccacccucuccuagc

SEQ ID NO: 2755 - RNA, 20 nt, Artificial Sequence
  targeting sequence with ATCN PAM
uucugcaccuuggguucccc

SEQ ID NO: 2756 - RNA, 20 nt, Artificial Sequence
  targeting sequence with ATCN PAM
ugcuuccccauggcauggag

SEQ ID NO: 2757 - RNA, 20 nt, Artificial Sequence
  targeting sequence with ATCN PAM
acugccgccagcccuucauc

SEQ ID NO: 2758 - RNA, 20 nt, Artificial Sequence
  targeting sequence with ATCN PAM
ucuccgccucuuccuacggu

SEQ ID NO: 2759 - RNA, 20 nt, Artificial Sequence
  targeting sequence with ATCN PAM
ugagcaugugggugggacag

SEQ ID NO: 2760 - RNA, 20 nt, Artificial Sequence
  targeting sequence with ATCN PAM
cugggaacaccgacagugac

SEQ ID NO: 2761 - RNA, 20 nt, Artificial Sequence
  targeting sequence with ATCN PAM
gacucucuuucuggggcauu

SEQ ID NO: 2762 - RNA, 20 nt, Artificial Sequence
  targeting sequence with ATCN PAM
cagccuccuggucugaaugc

SEQ ID NO: 2763 - RNA, 20 nt, Artificial Sequence
  targeting sequence with ATCN PAM
aggcccagcuccuuugaugu

SEQ ID NO: 2764 - RNA, 20 nt, Artificial Sequence
  targeting sequence with ATCN PAM
aaggagcugggccuugauaa

SEQ ID NO: 2765 - RNA, 20 nt, Artificial Sequence
  targeting sequence with ATCN PAM
ucugucaacaucaaaggagc

SEQ ID NO: 2766 - RNA, 20 nt, Artificial Sequence
  targeting sequence with ATCN PAM
gaagccccuucccaggagcu

SEQ ID NO: 2767 - RNA, 20 nt, Artificial Sequence
  targeting sequence with ATCN PAM
guguguguguaggggcaguc

SEQ ID NO: 2768 - RNA, 20 nt, Artificial Sequence
  targeting sequence with ATCN PAM
gugugugugcaggggcaguc

SEQ ID NO: 2769 - RNA, 20 nt, Artificial Sequence
  targeting sequence with ATCN PAM
gugugugugcaggggcaguu

SEQ ID NO: 2770 - RNA, 20 nt, Artificial Sequence
  targeting sequence with ATCN PAM
gugugugugcaggggcaguu

SEQ ID NO: 2771 - RNA, 20 nt, Artificial Sequence
  targeting sequence with ATCN PAM
cuuccuccagguagaacuca

SEQ ID NO: 2772 - RNA, 20 nt, Artificial Sequence
  targeting sequence with ATCN PAM
cugaugaagaagccaucucc

SEQ ID NO: 2773 - RNA, 20 nt, Artificial Sequence
  targeting sequence with ATCN PAM
gugaucccuuccuccaggua

SEQ ID NO: 2774 - RNA, 20 nt, Artificial Sequence
  targeting sequence with ATCN PAM
cccucaucgaccuggaggug

SEQ ID NO: 2775 - RNA, 20 nt, Artificial Sequence
  targeting sequence with ATCN PAM
accuggaggugcugagaccc

SEQ ID NO: 2776 - RNA, 20 nt, Artificial Sequence
  targeting sequence with ATCN PAM
cgcuugggucucagcaccuc

SEQ ID NO: 2777 - RNA, 20 nt, Artificial Sequence
  targeting sequence with ATCN PAM
cuagcugucugucaucccgc

SEQ ID NO: 2778 - RNA, 20 nt, Artificial Sequence
  targeting sequence with ATCN PAM
augcccuuggccagagccug

SEQ ID NO: 2779 - RNA, 20 nt, Artificial Sequence
  targeting sequence with ATCN PAM
ccugggacugggcccuccua

SEQ ID NO: 2780 - RNA, 20 nt, Artificial Sequence
  targeting sequence with ATCN PAM
cgggccaugcugagccuggc

SEQ ID NO: 2781 - RNA, 20 nt, Artificial Sequence
  targeting sequence with ATCN PAM
cucugggaacacagggccag

SEQ ID NO: 2782 - RNA, 20 nt, Artificial Sequence
  targeting sequence with ATCN PAM
cugucccugucccauguggg

SEQ ID NO: 2783 - RNA, 20 nt, Artificial Sequence
  targeting sequence with ATCN PAM
gagaugggcagacagcuggc

SEQ ID NO: 2784 - RNA, 20 nt, Artificial Sequence
  targeting sequence with ATCN PAM
cugaucccugucccuguccc

SEQ ID NO: 2785 - RNA, 20 nt, Artificial Sequence
  targeting sequence with ATCN PAM
ugucccauguuggcuaugca

SEQ ID NO: 2786 - RNA, 20 nt, Artificial Sequence
  targeting sequence with ATCN PAM
ugacaucaugucccauguug

SEQ ID NO: 2787 - RNA, 20 nt, Artificial Sequence
  targeting sequence with ATCN PAM
cuguguuaugggggcaccac

SEQ ID NO: 2788 - RNA, 20 nt, Artificial Sequence
  targeting sequence with ATCN PAM
ccucagccuuauagccccca

SEQ ID NO: 2789 - RNA, 20 nt, Artificial Sequence
  targeting sequence with ATCN PAM
uccuggccaaggggcaggcu

SEQ ID NO: 2790 - RNA, 20 nt, Artificial Sequence
  targeting sequence with ATCN PAM
cugccacccaggcucccuca

SEQ ID NO: 2791 - RNA, 20 nt, Artificial Sequence
  targeting sequence with ATCN PAM
guggcaccugagggagccug

SEQ ID NO: 2792 - RNA, 20 nt, Artificial Sequence
  targeting sequence with ATCN PAM
ucuguggcaccugagggagc

SEQ ID NO: 2793 - RNA, 20 nt, Artificial Sequence
  targeting sequence with ATCN PAM
caagugcccgcagaccccca

SEQ ID NO: 2794 - RNA, 20 nt, Artificial Sequence
  targeting sequence with ATCN PAM
uggagaaacauucaguggcu

SEQ ID NO: 2795 - RNA, 20 nt, Artificial Sequence
  targeting sequence with ATCN PAM
cugggcccauccccuccgug

SEQ ID NO: 2796 - RNA, 20 nt, Artificial Sequence
  targeting sequence with ATCN PAM
ccuccgugccuacccgcagu

SEQ ID NO: 2797 - RNA, 20 nt, Artificial Sequence
  targeting sequence with ATCN PAM
gaaggaagggacucugcugg

SEQ ID NO: 2798 - RNA, 20 nt, Artificial Sequence
  targeting sequence with ATCN PAM
cugcuucugauuccauccuu

SEQ ID NO: 2799 - RNA, 20 nt, Artificial Sequence
  targeting sequence with ATCN PAM
gaagcagagauggagacaga

SEQ ID NO: 2800 - RNA, 20 nt, Artificial Sequence
  targeting sequence with ATCN PAM
uugaccagaucccuccaggc

SEQ ID NO: 2801 - RNA, 20 nt, Artificial Sequence
  targeting sequence with ATCN PAM
ggucaaggauggaaucagaa

SEQ ID NO: 2802 - RNA, 20 nt, Artificial Sequence
  targeting sequence with ATCN PAM
cuccaggcucccagauucug

SEQ ID NO: 2803 - RNA, 20 nt, Artificial Sequence
  targeting sequence with ATCN PAM
gggagccuggagggaucugg

SEQ ID NO: 2804 - RNA, 20 nt, Artificial Sequence
  targeting sequence with ATCN PAM
gagaugaggacccguucaca

SEQ ID NO: 2805 - RNA, 20 nt, Artificial Sequence
  targeting sequence with ATCN PAM
ccgauggaguccuuggucuc

SEQ ID NO: 2806 - RNA, 20 nt, Artificial Sequence
  targeting sequence with ATCN PAM
cuucuccugugcacaugggg

SEQ ID NO: 2807 - RNA, 20 nt, Artificial Sequence
  targeting sequence with ATCN PAM
uccuccaccacugcgcuagc

SEQ ID NO: 2808 - RNA, 20 nt, Artificial Sequence
  targeting sequence with ATCN PAM
ggaaguucuggccaauccuc

SEQ ID NO: 2809 - RNA, 20 nt, Artificial Sequence
  targeting sequence with ATCN PAM
uuggcaguggugagagagga

SEQ ID NO: 2810 - RNA, 20 nt, Artificial Sequence
  targeting sequence with ATCN PAM
uggaaucuuuggcaguggug

SEQ ID NO: 2811 - RNA, 20 nt, Artificial Sequence
  targeting sequence with ATCN PAM
uaauccacacagaugucuca

SEQ ID NO: 2812 - RNA, 20 nt, Artificial Sequence
  targeting sequence with ATCN PAM
acacagaugucucacugugg

SEQ ID NO: 2813 - RNA, 20 nt, Artificial Sequence
  targeting sequence with ATCN PAM
guguggauuaugauccugga

SEQ ID NO: 2814 - RNA, 20 nt, Artificial Sequence
  targeting sequence with ATCN PAM
cggcggcucauggagcgcag

SEQ ID NO: 2815 - RNA, 20 nt, Artificial Sequence
  targeting sequence with ATCN PAM
agcgauggcccccaccccug

SEQ ID NO: 2816 - RNA, 20 nt, Artificial Sequence
  targeting sequence with ATCN PAM
cuugaugaggacaucccggc

SEQ ID NO: 2817 - RNA, 20 nt, Artificial Sequence
  targeting sequence with ATCN PAM
auggcuccaaguugggacag

SEQ ID NO: 2818 - RNA, 20 nt, Artificial Sequence
  targeting sequence with ATCN PAM
aaaguggacuucacuggccc

SEQ ID NO: 2819 - RNA, 20 nt, Artificial Sequence
  targeting sequence with ATCN PAM
uccccaaauccugggggccc

SEQ ID NO: 2820 - RNA, 20 nt, Artificial Sequence
  targeting sequence with ATCN PAM
ugggggcccagcaagcguga

SEQ ID NO: 2821 - RNA, 20 nt, Artificial Sequence
  targeting sequence with ATCN PAM
cgcuugcugggcccccagga

SEQ ID NO: 2822 - RNA, 20 nt, Artificial Sequence
  targeting sequence with ATCN PAM
ccccuuccagcccucaaaca

SEQ ID NO: 2823 - RNA, 20 nt, Artificial Sequence
  targeting sequence with ATCN PAM
gcccuacgccuggggccagg

SEQ ID NO: 2824 - RNA, 20 nt, Artificial Sequence
  targeting sequence with ATCN PAM
aagggaagacagcuguaaga

SEQ ID NO: 2825 - RNA, 20 nt, Artificial Sequence
  targeting sequence with ATCN PAM
uugcaccugcggcaguaggg

SEQ ID NO: 2826 - RNA, 20 nt, Artificial Sequence
  targeting sequence with ATCN PAM
uggggacggccugcacccuc

SEQ ID NO: 2827 - RNA, 20 nt, Artificial Sequence
  targeting sequence with ATCN PAM
gggcaagaaacacauucuga

SEQ ID NO: 2828 - RNA, 20 nt, Artificial Sequence
  targeting sequence with ATCN PAM
ccuggugcuauuuacaaggc

SEQ ID NO: 2829 - RNA, 20 nt, Artificial Sequence
  targeting sequence with ATCN PAM
guuacuuucagaacggcucc

SEQ ID NO: 2830 - RNA, 20 nt, Artificial Sequence
  targeting sequence with ATCN PAM
gcggacuccagcaggcugcc

SEQ ID NO: 2831 - RNA, 20 nt, Artificial Sequence
  targeting sequence with ATCN PAM
gucagaccguuagcauguac

SEQ ID NO: 2832 - RNA, 20 nt, Artificial Sequence
  targeting sequence with ATCN PAM
guuggcaaaauguacaugcu

SEQ ID NO: 2833 - RNA, 20 nt, Artificial Sequence
  targeting sequence with ATCN PAM
gcaucuacauuuuagcaaau

SEQ ID NO: 2834 - RNA, 20 nt, Artificial Sequence
  targeting sequence with ATCN PAM
acauuuuagcaaaucaucuu

SEQ ID NO: 2835 - RNA, 20 nt, Artificial Sequence
  targeting sequence with ATCN PAM
ucuuauugucugcaacuuaa

SEQ ID NO: 2836 - RNA, 20 nt, Artificial Sequence
  targeting sequence with ATCN PAM
uauugucugcaacuuaauuu

SEQ ID NO: 2837 - RNA, 20 nt, Artificial Sequence
  targeting sequence with ATCN PAM
aaauggcaauauagaaaggg

SEQ ID NO: 2838 - RNA, 20 nt, Artificial Sequence
  targeting sequence with ATCN PAM
aaauaaauaaacaaaaaaac

SEQ ID NO: 2839 - RNA, 20 nt, Artificial Sequence
  targeting sequence with ATCN PAM
ccauuaaaucaaaauaaaua

SEQ ID NO: 2840 - RNA, 20 nt, Artificial Sequence
  targeting sequence with ATCN PAM
aucuugacaagagaaaauac

SEQ ID NO: 2841 - RNA, 20 nt, Artificial Sequence
  targeting sequence with ATCN PAM
ugacaagagaaaauacgugg

SEQ ID NO: 2842 - RNA, 20 nt, Artificial Sequence
  targeting sequence with ATCN PAM
ucuuuggacccacguauuuu

SEQ ID NO: 2843 - RNA, 20 nt, Artificial Sequence
  targeting sequence with ATCN PAM
accuuccccagccccacaga

SEQ ID NO: 2844 - RNA, 20 nt, Artificial Sequence
  targeting sequence with ATCN PAM
caaacggaaacccccugcuu

SEQ ID NO: 2845 - RNA, 20 nt, Artificial Sequence
  targeting sequence with ATCN PAM
cugguguccaguccaacagc

SEQ ID NO: 2846 - RNA, 20 nt, Artificial Sequence
  targeting sequence with ATCN PAM
uaacucuuccuucacagggc

SEQ ID NO: 2847 - RNA, 20 nt, Artificial Sequence
  targeting sequence with ATCN PAM
ugggccgccccucccagggc

SEQ ID NO: 2848 - RNA, 20 nt, Artificial Sequence
  targeting sequence with ATCN PAM
auacugcagcacgaggggag

SEQ ID NO: 2849 - RNA, 20 nt, Artificial Sequence
  targeting sequence with ATCN PAM
cagagcccuugccccacccc

SEQ ID NO: 2850 - RNA, 20 nt, Artificial Sequence
  targeting sequence with ATCN PAM
cucuggagaugauggaggaa

SEQ ID NO: 2851 - RNA, 20 nt, Artificial Sequence
  targeting sequence with ATCN PAM
ccagagagaugcggagggag

SEQ ID NO: 2852 - RNA, 20 nt, Artificial Sequence
  targeting sequence with ATCN PAM
ucuccagagagaugcggagg

SEQ ID NO: 2853 - RNA, 20 nt, Artificial Sequence
  targeting sequence with ATCN PAM
ugcaugcgcucucucacuaa

SEQ ID NO: 2854 - RNA, 20 nt, Artificial Sequence
  targeting sequence with ATCN PAM
uaacacauuaauaaauguuu

SEQ ID NO: 2855 - RNA, 20 nt, Artificial Sequence
  targeting sequence with ATCN PAM
uuugcauauggcugggaaaa

SEQ ID NO: 2856 - RNA, 20 nt, Artificial Sequence
  targeting sequence with ATCN PAM
cagugacagaucagaugguc

SEQ ID NO: 2857 - RNA, 20 nt, Artificial Sequence
  targeting sequence with ATCN PAM
gucacugugauugacugcug

SEQ ID NO: 2858 - RNA, 20 nt, Artificial Sequence
  targeting sequence with ATCN PAM
gauggucccuggcuggaggc

SEQ ID NO: 2859 - RNA, 20 nt, Artificial Sequence
  targeting sequence with ATCN PAM
gaucugucacugugauugac

SEQ ID NO: 2860 - RNA, 20 nt, Artificial Sequence
  targeting sequence with ATCN PAM
ccucagccgaagaacacaaa

SEQ ID NO: 2861 - RNA, 20 nt, Artificial Sequence
  targeting sequence with ATCN PAM
gaaugaauagggguccuacu

SEQ ID NO: 2862 - RNA, 20 nt, Artificial Sequence
  targeting sequence with ATCN PAM
uccaaggcugccuauuacac

SEQ ID NO: 2863 - RNA, 20 nt, Artificial Sequence
  targeting sequence with ATCN PAM
aaggcugccuauuacacagg

SEQ ID NO: 2864 - RNA, 20 nt, Artificial Sequence
  targeting sequence with ATCN PAM
ccuguguaauaggcagccuu

SEQ ID NO: 2865 - RNA, 20 nt, Artificial Sequence
  targeting sequence with ATCN PAM
ggcugagagagaaaagcagc

SEQ ID NO: 2866 - RNA, 20 nt, Artificial Sequence
  targeting sequence with ATCN PAM
gggucugaaccaaguccagu

SEQ ID NO: 2867 - RNA, 20 nt, Artificial Sequence
  targeting sequence with ATCN PAM
gcacaaaagggcccccucca

SEQ ID NO: 2868 - RNA, 20 nt, Artificial Sequence
  targeting sequence with ATCN PAM
agcgcuguucacagacgcag

SEQ ID NO: 2869 - RNA, 20 nt, Artificial Sequence
  targeting sequence with ATCN PAM
uccagcgcuguucacagacg

SEQ ID NO: 2870 - RNA, 20 nt, Artificial Sequence
  targeting sequence with ATCN PAM
ucauccagcgcuguucacag

SEQ ID NO: 2871 - RNA, 20 nt, Artificial Sequence
  targeting sequence with ATCN PAM
uguugaccccucaagugccu

SEQ ID NO: 2872 - RNA, 20 nt, Artificial Sequence
  targeting sequence with ATCN PAM
ccaggucccuguggugccuu

SEQ ID NO: 2873 - RNA, 20 nt, Artificial Sequence
  targeting sequence with ATCN PAM
cugccccaccgugcagccuu

SEQ ID NO: 2874 - RNA, 20 nt, Artificial Sequence
  targeting sequence with ATCN PAM
uuccaccucagccuccugag

SEQ ID NO: 2875 - RNA, 20 nt, Artificial Sequence
  targeting sequence with ATCN PAM
auugagccaaggacaggaau

SEQ ID NO: 2876 - RNA, 20 nt, Artificial Sequence
  targeting sequence with ATCN PAM
uagcuuacugcagccuugaa

SEQ ID NO: 2877 - RNA, 20 nt, Artificial Sequence
  targeting sequence with ATCN PAM
cuaaacaacauuuaaaaauu

SEQ ID NO: 2878 - RNA, 20 nt, Artificial Sequence
  targeting sequence with ATCN PAM
cauuugucuucuuaaaacaa

SEQ ID NO: 2879 - RNA, 20 nt, Artificial Sequence
  targeting sequence with ATCN PAM
acaguuaucucauuugucuu

SEQ ID NO: 2880 - RNA, 20 nt, Artificial Sequence
  targeting sequence with ATCN PAM
uaauggcuguguaaaaacug

SEQ ID NO: 2881 - RNA, 20 nt, Artificial Sequence
  targeting sequence with ATCN PAM
cagcacuuugggaggccaag

SEQ ID NO: 2882 - RNA, 20 nt, Artificial Sequence
  targeting sequence with ATCN PAM
uccugccuuggccucccaaa

SEQ ID NO: 2883 - RNA, 20 nt, Artificial Sequence
  targeting sequence with ATCN PAM
cuugagccgggaguuagaga

SEQ ID NO: 2884 - RNA, 20 nt, Artificial Sequence
  targeting sequence with ATCN PAM
gacugggacugguccugauc

SEQ ID NO: 2885 - RNA, 20 nt, Artificial Sequence
  targeting sequence with ATCN PAM
ggaccagucccagucagaug

SEQ ID NO: 2886 - RNA, 20 nt, Artificial Sequence
  targeting sequence with ATCN PAM
cucaucuccaagugcucaac

SEQ ID NO: 2887 - RNA, 20 nt, Artificial Sequence
  targeting sequence with ATCN PAM
ccaagugcucaacauugugc

SEQ ID NO: 2888 - RNA, 20 nt, Artificial Sequence
  targeting sequence with ATCN PAM
guccccagcaaggcugugaa

SEQ ID NO: 2889 - RNA, 20 nt, Artificial Sequence
  targeting sequence with ATCN PAM
gggaggcucgggguaagcac

SEQ ID NO: 2890 - RNA, 20 nt, Artificial Sequence
  targeting sequence with ATCN PAM
gcagggggagaaucagggag

SEQ ID NO: 2891 - RNA, 20 nt, Artificial Sequence
  targeting sequence with ATCN PAM
agaacacuggccugguaugg

SEQ ID NO: 2892 - RNA, 20 nt, Artificial Sequence
  targeting sequence with ATCN PAM
ccagcacgccacccuggggg

SEQ ID NO: 2893 - RNA, 20 nt, Artificial Sequence
  targeting sequence with ATCN PAM
cucauguuuaguuuccgauc

SEQ ID NO: 2894 - RNA, 20 nt, Artificial Sequence
  targeting sequence with ATCN PAM
gaaacuaaacaugagagaug

SEQ ID NO: 2895 - RNA, 20 nt, Artificial Sequence
  targeting sequence with ATCN PAM
guacccccugagacugggag

SEQ ID NO: 2896 - RNA, 20 nt, Artificial Sequence
  targeting sequence with ATCN PAM
cacaugguuccugcuuucaa

SEQ ID NO: 2897 - RNA, 20 nt, Artificial Sequence
  targeting sequence with ATCN PAM
accucagcguccccagggcc

SEQ ID NO: 2898 - RNA, 20 nt, Artificial Sequence
  targeting sequence with ATCN PAM
agggggaauaagggagggag

SEQ ID NO: 2899 - RNA, 20 nt, Artificial Sequence
  targeting sequence with ATCN PAM
uucuccuccuucuccuccuc

SEQ ID NO: 2900 - RNA, 20 nt, Artificial Sequence
  targeting sequence with ATCN PAM
cucuucagccucugcaagag

SEQ ID NO: 2901 - RNA, 20 nt, Artificial Sequence
  targeting sequence with ATCN PAM
accgaggcaaaggcaaagcc

SEQ ID NO: 2902 - RNA, 20 nt, Artificial Sequence
  targeting sequence with ATCN PAM
uggggcacccgagucccagc

SEQ ID NO: 2903 - RNA, 20 nt, Artificial Sequence
  targeting sequence with ATCN PAM
agccaucuuggcuuagaaag

SEQ ID NO: 2904 - RNA, 20 nt, Artificial Sequence
  targeting sequence with ATCN PAM
uggcuuagaaagccccccac

SEQ ID NO: 2905 - RNA, 20 nt, Artificial Sequence
  targeting sequence with ATCN PAM
cagcucugcagaggaacuuu

SEQ ID NO: 2906 - RNA, 20 nt, Artificial Sequence
  targeting sequence with ATCN PAM
gggguaugcagggucaaagu

SEQ ID NO: 2907 - RNA, 20 nt, Artificial Sequence
  targeting sequence with ATCN PAM
cugccucugagcucacaacc

SEQ ID NO: 2908 - RNA, 20 nt, Artificial Sequence
  targeting sequence with ATCN PAM
auuucuagaaugcaggacca

SEQ ID NO: 2909 - RNA, 20 nt, Artificial Sequence
  targeting sequence with ATCN PAM
cgaguaacugggucuacagg

SEQ ID NO: 2910 - RNA, 20 nt, Artificial Sequence
  targeting sequence with ATCN PAM
uccuaccucagcaucccgag

SEQ ID NO: 2911 - RNA, 20 nt, Artificial Sequence
  targeting sequence with ATCN PAM
cuugagccuaggacaggaau

SEQ ID NO: 2912 - RNA, 20 nt, Artificial Sequence
  targeting sequence with ATCN PAM
uagcuuacugcagccuugaa

SEQ ID NO: 2913 - RNA, 20 nt, Artificial Sequence
  targeting sequence with ATCN PAM
cuaaaaaacauuuaaaaauu

SEQ ID NO: 2914 - RNA, 20 nt, Artificial Sequence
  targeting sequence with ATCN PAM
cauuugucuucuuaaaacaa

SEQ ID NO: 2915 - RNA, 20 nt, Artificial Sequence
  targeting sequence with ATCN PAM
gcgacuaucucauuugucuu

SEQ ID NO: 2916 - RNA, 20 nt, Artificial Sequence
  targeting sequence with ATCN PAM
cagcacuuugggaggcugag

SEQ ID NO: 2917 - RNA, 20 nt, Artificial Sequence
  targeting sequence with ATCN PAM
cagccucccaaagugcugag

SEQ ID NO: 2918 - RNA, 20 nt, Artificial Sequence
  targeting sequence with ATCN PAM
uccugccuugggagccacuu

SEQ ID NO: 2919 - RNA, 20 nt, Artificial Sequence
  targeting sequence with ATCN PAM
cuugagccugggaguuagag

SEQ ID NO: 2920 - RNA, 20 nt, Artificial Sequence
  targeting sequence with ATCN PAM
uggcucacugcagccucaac

SEQ ID NO: 2921 - RNA, 20 nt, Artificial Sequence
  targeting sequence with ATCN PAM
ugccgcugcacuccaaccug

SEQ ID NO: 2922 - RNA, 20 nt, Artificial Sequence
  targeting sequence with ATCN PAM
cucugugacucagguuggag

SEQ ID NO: 2923 - RNA, 20 nt, Artificial Sequence
  targeting sequence with ATCN PAM
gccucggccucccaaagugc

SEQ ID NO: 2924 - RNA, 20 nt, Artificial Sequence
  targeting sequence with ATCN PAM
auccgccucggccucccaaa

SEQ ID NO: 2925 - RNA, 20 nt, Artificial Sequence
  targeting sequence with ATCN PAM
cuugagaucaggaguuagag

SEQ ID NO: 2926 - RNA, 20 nt, Artificial Sequence
  targeting sequence with ATCN PAM
caagugauccauccgccucg

SEQ ID NO: 2927 - RNA, 20 nt, Artificial Sequence
  targeting sequence with ATCN PAM
ggaguuagagaccagccugg

SEQ ID NO: 2928 - RNA, 20 nt, Artificial Sequence
  targeting sequence with ATCN PAM
ugucuguacuaaaaauauaa

SEQ ID NO: 2929 - RNA, 20 nt, Artificial Sequence
  targeting sequence with ATCN PAM
cuugaacccaggaagaggag

SEQ ID NO: 2930 - RNA, 20 nt, Artificial Sequence
  targeting sequence with ATCN PAM
uggcucacugcaaccuccuc

SEQ ID NO: 2931 - RNA, 20 nt, Artificial Sequence
  targeting sequence with ATCN PAM
caccacugcacuccagcuug

SEQ ID NO: 2932 - RNA, 20 nt, Artificial Sequence
  targeting sequence with ATCN PAM
uacacaccaggcacccccac

SEQ ID NO: 2933 - RNA, 20 nt, Artificial Sequence
  targeting sequence with ATCN PAM
cuuccugagucuccuucagg

SEQ ID NO: 2934 - RNA, 20 nt, Artificial Sequence
  targeting sequence with ATCN PAM
auauauuuguugcugacagu

SEQ ID NO: 2935 - RNA, 20 nt, Artificial Sequence
  targeting sequence with ATCN PAM
cuuacaagcacucccaauaa

SEQ ID NO: 2936 - RNA, 20 nt, Artificial Sequence
  targeting sequence with ATCN PAM
uauuagguaggcacuauuau

SEQ ID NO: 2937 - RNA, 20 nt, Artificial Sequence
  targeting sequence with ATCN PAM
uucccauuuuacagagugga

SEQ ID NO: 2938 - RNA, 20 nt, Artificial Sequence
  targeting sequence with ATCN PAM
ggacugaggcuacacagccu

SEQ ID NO: 2939 - RNA, 20 nt, Artificial Sequence
  targeting sequence with ATCN PAM
uuagacccuauggccuuggu

SEQ ID NO: 2940 - RNA, 20 nt, Artificial Sequence
  targeting sequence with ATCN PAM
auacaguaaaccucaccugc

SEQ ID NO: 2941 - RNA, 20 nt, Artificial Sequence
  targeting sequence with ATCN PAM
agccuccucuccucgaggcu

SEQ ID NO: 2942 - RNA, 20 nt, Artificial Sequence
  targeting sequence with ATCN PAM
uugaugaggggagggaggca

SEQ ID NO: 2943 - RNA, 20 nt, Artificial Sequence
  targeting sequence with ATCN PAM
aagauagcucucaggaaaga

SEQ ID NO: 2944 - RNA, 20 nt, Artificial Sequence
  targeting sequence with ATCN PAM
gcuucccaaaccuggcuaug

SEQ ID NO: 2945 - RNA, 20 nt, Artificial Sequence
  targeting sequence with ATCN PAM
gugacagccugggcuauaac

SEQ ID NO: 2946 - RNA, 20 nt, Artificial Sequence
  targeting sequence with ATCN PAM
gcaaaauggauauagcagag

SEQ ID NO: 2947 - RNA, 20 nt, Artificial Sequence
  targeting sequence with ATCN PAM
auuuugcagaugaaaagacu

SEQ ID NO: 2948 - RNA, 20 nt, Artificial Sequence
  targeting sequence with ATCN PAM
cugcuauauccauuuugcag

SEQ ID NO: 2949 - RNA, 20 nt, Artificial Sequence
  targeting sequence with ATCN PAM
uggcacuuugggaggccgag

SEQ ID NO: 2950 - RNA, 20 nt, Artificial Sequence
  targeting sequence with ATCN PAM
acccuccucggccucccaaa

SEQ ID NO: 2951 - RNA, 20 nt, Artificial Sequence
  targeting sequence with ATCN PAM
cuugagccaggaguucagga

SEQ ID NO: 2952 - RNA, 20 nt, Artificial Sequence
  targeting sequence with ATCN PAM
ucucaccucagccuccugag

SEQ ID NO: 2953 - RNA, 20 nt, Artificial Sequence
  targeting sequence with ATCN PAM
cuugagcccaggaggcagag

SEQ ID NO: 2954 - RNA, 20 nt, Artificial Sequence
  targeting sequence with ATCN PAM
uagcucacuguagccucugc

SEQ ID NO: 2955 - RNA, 20 nt, Artificial Sequence
  targeting sequence with ATCN PAM
cugaggugacagugcucuuu

SEQ ID NO: 2956 - RNA, 20 nt, Artificial Sequence
  targeting sequence with ATCN PAM
ccagggcuccaugagguugc

SEQ ID NO: 2957 - RNA, 20 nt, Artificial Sequence
  targeting sequence with ATCN PAM
caguacuuccccucucuguc

SEQ ID NO: 2958 - RNA, 20 nt, Artificial Sequence
  targeting sequence with ATCN PAM
ucuagguccauucccccacu

SEQ ID NO: 2959 - RNA, 20 nt, Artificial Sequence
  targeting sequence with ATCN PAM
agguccauucccccacucac

SEQ ID NO: 2960 - RNA, 20 nt, Artificial Sequence
  targeting sequence with ATCN PAM
gugaacaaaacagacaucau

SEQ ID NO: 2961 - RNA, 20 nt, Artificial Sequence
  targeting sequence with ATCN PAM
ucccaccucuuuccacuaca

SEQ ID NO: 2962 - RNA, 20 nt, Artificial Sequence
  targeting sequence with ATCN PAM
caccucuuuccacuacaggc

SEQ ID NO: 2963 - RNA, 20 nt, Artificial Sequence
  targeting sequence with ATCN PAM
ugcuuuuugcauagugcuuc

SEQ ID NO: 2964 - RNA, 20 nt, Artificial Sequence
  targeting sequence with ATCN PAM
cacacagcuuagcaguaccu

SEQ ID NO: 2965 - RNA, 20 nt, Artificial Sequence
  targeting sequence with ATCN PAM
aggacacccuccuucuggcc

SEQ ID NO: 2966 - RNA, 20 nt, Artificial Sequence
  targeting sequence with ATCN PAM
aacccucaccuuaaccucau

SEQ ID NO: 2967 - RNA, 20 nt, Artificial Sequence
  targeting sequence with ATCN PAM
ccaggccaagcgccuuaaac

SEQ ID NO: 2968 - RNA, 20 nt, Artificial Sequence
  targeting sequence with ATCN PAM
cacccgcccugccuuagccc

SEQ ID NO: 2969 - RNA, 20 nt, Artificial Sequence
  targeting sequence with ATCN PAM
gucugcucagaagagugccc

SEQ ID NO: 2970 - RNA, 20 nt, Artificial Sequence
  targeting sequence with ATCN PAM
gggaauccugggugggaaga

SEQ ID NO: 2971 - RNA, 20 nt, Artificial Sequence
  targeting sequence with ATCN PAM
ugggugggaagagagacagu

SEQ ID NO: 2972 - RNA, 20 nt, Artificial Sequence
  targeting sequence with ATCN PAM
cucucucacugucucucuuc

SEQ ID NO: 2973 - RNA, 20 nt, Artificial Sequence
  targeting sequence with ATCN PAM
cuuaaucucucucucacugu

SEQ ID NO: 2974 - RNA, 20 nt, Artificial Sequence
  targeting sequence with ATCN PAM
gggcuuugcacucucagggg

SEQ ID NO: 2975 - RNA, 20 nt, Artificial Sequence
  targeting sequence with ATCN PAM
aggcggaaggaccccugaga

SEQ ID NO: 2976 - RNA, 20 nt, Artificial Sequence
  targeting sequence with ATCN PAM
uguugcuuggacgacgggga

SEQ ID NO: 2977 - RNA, 20 nt, Artificial Sequence
  targeting sequence with ATCN PAM
gcccccaaggcucugacuac

SEQ ID NO: 2978 - RNA, 20 nt, Artificial Sequence
  targeting sequence with ATCN PAM
ugcuauucuggaaucggccc

SEQ ID NO: 2979 - RNA, 20 nt, Artificial Sequence
  targeting sequence with ATCN PAM
gcccucguggggccaccugg

SEQ ID NO: 2980 - RNA, 20 nt, Artificial Sequence
  targeting sequence with ATCN PAM
gccacgagggccucaaaugc

SEQ ID NO: 2981 - RNA, 20 nt, Artificial Sequence
  targeting sequence with ATCN PAM
ucccucccuccacuccaucu

SEQ ID NO: 2982 - RNA, 20 nt, Artificial Sequence
  targeting sequence with ATCN PAM
uugggggcauuugagucacc

SEQ ID NO: 2983 - RNA, 20 nt, Artificial Sequence
  targeting sequence with ATCN PAM
cugguguagaaaggugacuc

SEQ ID NO: 2984 - RNA, 20 nt, Artificial Sequence
  targeting sequence with ATCN PAM
gcccaagccacugcucacuu

SEQ ID NO: 2985 - RNA, 20 nt, Artificial Sequence
  targeting sequence with ATCN PAM
agaggaaagugagcaguggc

SEQ ID NO: 2986 - RNA, 20 nt, Artificial Sequence
  targeting sequence with ATCN PAM
gggcugggggcaguuguaau

SEQ ID NO: 2987 - RNA, 20 nt, Artificial Sequence
  targeting sequence with ATCN PAM
uccccaccuagccaccuggc

SEQ ID NO: 2988 - RNA, 20 nt, Artificial Sequence
  targeting sequence with ATCN PAM
gcuucuucccacauuugagu

SEQ ID NO: 2989 - RNA, 20 nt, Artificial Sequence
  targeting sequence with ATCN PAM
uuguauucccaggggccugc

SEQ ID NO: 2990 - RNA, 20 nt, Artificial Sequence
  targeting sequence with ATCN PAM
uuguugcauggaauuggaau

SEQ ID NO: 2991 - RNA, 20 nt, Artificial Sequence
  targeting sequence with ATCN PAM
aguccccacacuccucugac

SEQ ID NO: 2992 - RNA, 20 nt, Artificial Sequence
  targeting sequence with ATCN PAM
cgucacacagccccuuaccu

SEQ ID NO: 2993 - RNA, 20 nt, Artificial Sequence
  targeting sequence with ATCN PAM
aggaaaagggaggagaaggu

SEQ ID NO: 2994 - RNA, 20 nt, Artificial Sequence
  targeting sequence with ATCN PAM
ugaguaccucuccucccuga

SEQ ID NO: 2995 - RNA, 20 nt, Artificial Sequence
  targeting sequence with ATCN PAM
ccgcugcagaaacugagggc

SEQ ID NO: 2996 - RNA, 20 nt, Artificial Sequence
  targeting sequence with ATCN PAM
uauuaauccccgcugcagaa

SEQ ID NO: 2997 - RNA, 20 nt, Artificial Sequence
  targeting sequence with ATCN PAM
cccagaugcugauucagcca

SEQ ID NO: 2998 - RNA, 20 nt, Artificial Sequence
  targeting sequence with ATCN PAM
gggagauuggggguguucau

SEQ ID NO: 2999 - RNA, 20 nt, Artificial Sequence
  targeting sequence with ATCN PAM
gcaucugggagauugggggu

SEQ ID NO: 3000 - RNA, 20 nt, Artificial Sequence
  targeting sequence with ATCN PAM
agcuggagcccugaguggcu

SEQ ID NO: 3001 - RNA, 20 nt, Artificial Sequence
  targeting sequence with ATCN PAM
gcagaaacauguaggcggcc

SEQ ID NO: 3002 - RNA, 20 nt, Artificial Sequence
  targeting sequence with ATCN PAM
ugcugggcuuccccaucaac

SEQ ID NO: 3003 - RNA, 20 nt, Artificial Sequence
  targeting sequence with ATCN PAM
acuuccucacgcucuacguc

SEQ ID NO: 3004 - RNA, 20 nt, Artificial Sequence
  targeting sequence with ATCN PAM
ugcucaaccuagccguggcu

SEQ ID NO: 3005 - RNA, 20 nt, Artificial Sequence
  targeting sequence with ATCN PAM
augcagagagguguagaggg

SEQ ID NO: 3006 - RNA, 20 nt, Artificial Sequence
  targeting sequence with ATCN PAM
ugugggcccgaagacgaagu

SEQ ID NO: 3007 - RNA, 20 nt, Artificial Sequence
  targeting sequence with ATCN PAM
aaagcccucauauauucagu

SEQ ID NO: 3008 - RNA, 20 nt, Artificial Sequence
  targeting sequence with ATCN PAM
ccaugaaugguguuuguuga

SEQ ID NO: 3009 - RNA, 20 nt, Artificial Sequence
  targeting sequence with ATCN PAM
aggcaguguucagugccagc

SEQ ID NO: 3010 - RNA, 20 nt, Artificial Sequence
  targeting sequence with ATCN PAM
uauuuggagcaauaugcgcu

SEQ ID NO: 3011 - RNA, 20 nt, Artificial Sequence
  targeting sequence with ATCN PAM
aucucgggccauguuugcag

SEQ ID NO: 3012 - RNA, 20 nt, Artificial Sequence
  targeting sequence with ATCN PAM
cgggccauguuugcagcacc

SEQ ID NO: 3013 - RNA, 20 nt, Artificial Sequence
  targeting sequence with ATCN PAM
acuucccacccugagcuugg

SEQ ID NO: 3014 - RNA, 20 nt, Artificial Sequence
  targeting sequence with ATCN PAM
ucugccuccccucucagccc

SEQ ID NO: 3015 - RNA, 20 nt, Artificial Sequence
  targeting sequence with ATCN PAM
guuuuccuguuaaaugcaag

SEQ ID NO: 3016 - RNA, 20 nt, Artificial Sequence
  targeting sequence with ATCN PAM
cugcagcaccccaucuguuu

SEQ ID NO: 3017 - RNA, 20 nt, Artificial Sequence
  targeting sequence with ATCN PAM
guuaucccugcagcacccca

SEQ ID NO: 3018 - RNA, 20 nt, Artificial Sequence
  targeting sequence with ATCN PAM
cacuuaacagagaggaaaac

SEQ ID NO: 3019 - RNA, 20 nt, Artificial Sequence
  targeting sequence with ATCN PAM
cuaaaugagucucuuccccu

SEQ ID NO: 3020 - RNA, 20 nt, Artificial Sequence
  targeting sequence with ATCN PAM
cagccaggagaccuaggcuc

SEQ ID NO: 3021 - RNA, 20 nt, Artificial Sequence
  targeting sequence with ATCN PAM
aggaauaucucugcugagau

SEQ ID NO: 3022 - RNA, 20 nt, Artificial Sequence
  targeting sequence with ATCN PAM
cugcugagaugcaggaggag

SEQ ID NO: 3023 - RNA, 20 nt, Artificial Sequence
  targeting sequence with ATCN PAM
cagcagagauauuccuggau

SEQ ID NO: 3024 - RNA, 20 nt, Artificial Sequence
  targeting sequence with ATCN PAM
cuggccauuguuggguguuu

SEQ ID NO: 3025 - RNA, 20 nt, Artificial Sequence
  targeting sequence with ATCN PAM
cagaucacucaguucuggcc

SEQ ID NO: 3026 - RNA, 20 nt, Artificial Sequence
  targeting sequence with ATCN PAM
gugauuauugaaugcaacaa

SEQ ID NO: 3027 - RNA, 20 nt, Artificial Sequence
  targeting sequence with ATCN PAM
cucaguucuggccagaaggu

SEQ ID NO: 3028 - RNA, 20 nt, Artificial Sequence
  targeting sequence with ATCN PAM
accaaacugggacauuccua

SEQ ID NO: 3029 - RNA, 20 nt, Artificial Sequence
  targeting sequence with ATCN PAM
guccugcucaccaccccaug

SEQ ID NO: 3030 - RNA, 20 nt, Artificial Sequence
  targeting sequence with ATCN PAM
uuuccuucuucuuccucugg

SEQ ID NO: 3031 - RNA, 20 nt, Artificial Sequence
  targeting sequence with ATCN PAM
uaauguggggcagaguuccu

SEQ ID NO: 3032 - RNA, 20 nt, Artificial Sequence
  targeting sequence with ATCN PAM
ugacccccugaucugauucg

SEQ ID NO: 3033 - RNA, 20 nt, Artificial Sequence
  targeting sequence with ATCN PAM
gggggucaggauugaacugg

SEQ ID NO: 3034 - RNA, 20 nt, Artificial Sequence
  targeting sequence with ATCN PAM
gauucgugucccuuaugggc

SEQ ID NO: 3035 - RNA, 20 nt, Artificial Sequence
  targeting sequence with ATCN PAM
gaucagggggucaggauuga

SEQ ID NO: 3036 - RNA, 20 nt, Artificial Sequence
  targeting sequence with ATCN PAM
cucucccacuccugguugcc

SEQ ID NO: 3037 - RNA, 20 nt, Artificial Sequence
  targeting sequence with ATCN PAM
agcgguacgugguggugugu

SEQ ID NO: 3038 - RNA, 20 nt, Artificial Sequence
  targeting sequence with ATCN PAM
ugggcguugccuucaccugg

SEQ ID NO: 3039 - RNA, 20 nt, Artificial Sequence
  targeting sequence with ATCN PAM
ccugagccccaugucaaaca

SEQ ID NO: 3040 - RNA, 20 nt, Artificial Sequence
  targeting sequence with ATCN PAM
aagacaucccaacccuucac

SEQ ID NO: 3041 - RNA, 20 nt, Artificial Sequence
  targeting sequence with ATCN PAM
caacccuucaccuuggcugu

SEQ ID NO: 3042 - RNA, 20 nt, Artificial Sequence
  targeting sequence with ATCN PAM
ucaacuaagcuaggcgcaaa

SEQ ID NO: 3043 - RNA, 20 nt, Artificial Sequence
  targeting sequence with ATCN PAM
ucuuuggucuaguaccccgg

SEQ ID NO: 3044 - RNA, 20 nt, Artificial Sequence
  targeting sequence with ATCN PAM
ccuagaggcugagugggacc

SEQ ID NO: 3045 - RNA, 20 nt, Artificial Sequence
  targeting sequence with ATCN PAM
cagccccauuaggagacaau

SEQ ID NO: 3046 - RNA, 20 nt, Artificial Sequence
  targeting sequence with ATCN PAM
ucuccaaucuggccuaguuc

SEQ ID NO: 3047 - RNA, 20 nt, Artificial Sequence
  targeting sequence with ATCN PAM
ggccuaguucuauccucugg

SEQ ID NO: 3048 - RNA, 20 nt, Artificial Sequence
  targeting sequence with ATCN PAM
ucuggaagcagagccgcugg

SEQ ID NO: 3049 - RNA, 20 nt, Artificial Sequence
  targeting sequence with ATCN PAM
ggaaccauugccacguccua

SEQ ID NO: 3050 - RNA, 20 nt, Artificial Sequence
  targeting sequence with ATCN PAM
uugugcagcuucuggaaacu

SEQ ID NO: 3051 - RNA, 20 nt, Artificial Sequence
  targeting sequence with ATCN PAM
cuuagauacucugugugucc

SEQ ID NO: 3052 - RNA, 20 nt, Artificial Sequence
  targeting sequence with ATCN PAM
aagggaucuuugugcagcuu

SEQ ID NO: 3053 - RNA, 20 nt, Artificial Sequence
  targeting sequence with ATCN PAM
uuggccuggaaaauacucuc

SEQ ID NO: 3054 - RNA, 20 nt, Artificial Sequence
  targeting sequence with ATCN PAM
acugcccgcugaggcuaggg

SEQ ID NO: 3055 - RNA, 20 nt, Artificial Sequence
  targeting sequence with ATCN PAM
gguaacgcagccaccaaaca

SEQ ID NO: 3056 - RNA, 20 nt, Artificial Sequence
  targeting sequence with ATCN PAM
gugucgcuucauuguuuggu

SEQ ID NO: 3057 - RNA, 20 nt, Artificial Sequence
  targeting sequence with ATCN PAM
gcauccccaucugauccauu

SEQ ID NO: 3058 - RNA, 20 nt, Artificial Sequence
  targeting sequence with ATCN PAM
ccaucugauccauuccaucc

SEQ ID NO: 3059 - RNA, 20 nt, Artificial Sequence
  targeting sequence with ATCN PAM
gauccauuccauccugucac

SEQ ID NO: 3060 - RNA, 20 nt, Artificial Sequence
  targeting sequence with ATCN PAM
gauggggaugcagaugcacc

SEQ ID NO: 3061 - RNA, 20 nt, Artificial Sequence
  targeting sequence with ATCN PAM
auuccauccugucacccagc

SEQ ID NO: 3062 - RNA, 20 nt, Artificial Sequence
  targeting sequence with ATCN PAM
ugucacccagccaugcagac

SEQ ID NO: 3063 - RNA, 20 nt, Artificial Sequence
  targeting sequence with ATCN PAM
uaaacgucugcauggcuggg

SEQ ID NO: 3064 - RNA, 20 nt, Artificial Sequence
  targeting sequence with ATCN PAM
ccuuuuccagggagggaaug

SEQ ID NO: 3065 - RNA, 20 nt, Artificial Sequence
  targeting sequence with ATCN PAM
ccgagggccugcagugcucg

SEQ ID NO: 3066 - RNA, 20 nt, Artificial Sequence
  targeting sequence with ATCN PAM
acuacuacacgcucaagccg

SEQ ID NO: 3067 - RNA, 20 nt, Artificial Sequence
  targeting sequence with ATCN PAM
acauguucgugguccacuuc

SEQ ID NO: 3068 - RNA, 20 nt, Artificial Sequence
  targeting sequence with ATCN PAM
ccaugauuaucaucuuuuuc

SEQ ID NO: 3069 - RNA, 20 nt, Artificial Sequence
  targeting sequence with ATCN PAM
uggggauggugaaguggacc

SEQ ID NO: 3070 - RNA, 20 nt, Artificial Sequence
  targeting sequence with ATCN PAM
ucuuuuucugcuaugggcag

SEQ ID NO: 3071 - RNA, 20 nt, Artificial Sequence
  targeting sequence with ATCN PAM
uuuucugcuaugggcagcuc

SEQ ID NO: 3072 - RNA, 20 nt, Artificial Sequence
  targeting sequence with ATCN PAM
gcggcuccugcucccuggag

SEQ ID NO: 3073 - RNA, 20 nt, Artificial Sequence
  targeting sequence with ATCN PAM
ucauggucaucgcuuuccug

SEQ ID NO: 3074 - RNA, 20 nt, Artificial Sequence
  targeting sequence with ATCN PAM
uggucaucgcuuuccugauc

SEQ ID NO: 3075 - RNA, 20 nt, Artificial Sequence
  targeting sequence with ATCN PAM
cuuuccugaucugcugggug

SEQ ID NO: 3076 - RNA, 20 nt, Artificial Sequence
  targeting sequence with ATCN PAM
ggaaagcgaugaccaugaug

SEQ ID NO: 3077 - RNA, 20 nt, Artificial Sequence
  targeting sequence with ATCN PAM
gcugggugcccuacgccagc

SEQ ID NO: 3078 - RNA, 20 nt, Artificial Sequence
  targeting sequence with ATCN PAM
ucacccaccagggcuccaac

SEQ ID NO: 3079 - RNA, 20 nt, Artificial Sequence
  targeting sequence with ATCN PAM
ucaugaccaucccagcguuc

SEQ ID NO: 3080 - RNA, 20 nt, Artificial Sequence
  targeting sequence with ATCN PAM
cagcguucuuugccaagagc

SEQ ID NO: 3081 - RNA, 20 nt, Artificial Sequence
  targeting sequence with ATCN PAM
acaacccugucaucuauauc

SEQ ID NO: 3082 - RNA, 20 nt, Artificial Sequence
  targeting sequence with ATCN PAM
auaucaugaugaacaagcag

SEQ ID NO: 3083 - RNA, 20 nt, Artificial Sequence
  targeting sequence with ATCN PAM
ugaugaacaagcaggugccu

SEQ ID NO: 3084 - RNA, 20 nt, Artificial Sequence
  targeting sequence with ATCN PAM
ugauauagaugacaggguug

SEQ ID NO: 3085 - RNA, 20 nt, Artificial Sequence
  targeting sequence with ATCN PAM
ggguuacuggcagcagucuu

SEQ ID NO: 3086 - RNA, 20 nt, Artificial Sequence
  targeting sequence with ATCN PAM
gcauuucucacacacucccc

SEQ ID NO: 3087 - RNA, 20 nt, Artificial Sequence
  targeting sequence with ATCN PAM
cagggugggcccaggaaccu

SEQ ID NO: 3088 - RNA, 20 nt, Artificial Sequence
  targeting sequence with ATCN PAM
gagccaccuguggagggcuu

SEQ ID NO: 3089 - RNA, 20 nt, Artificial Sequence
  targeting sequence with ATCN PAM
cauucccgacuuggguccuu

SEQ ID NO: 3090 - RNA, 20 nt, Artificial Sequence
  targeting sequence with ATCN PAM
auagaaagguagaaagggca

SEQ ID NO: 3091 - RNA, 20 nt, Artificial Sequence
  targeting sequence with ATCN PAM
aagaguuugguguuuugccc

SEQ ID NO: 3092 - RNA, 20 nt, Artificial Sequence
  targeting sequence with ATCN PAM
cuuguaauccaagaguuugg

SEQ ID NO: 3093 - RNA, 20 nt, Artificial Sequence
  targeting sequence with ATCN PAM
cuaggggugaggagcgucug

SEQ ID NO: 3094 - RNA, 20 nt, Artificial Sequence
  targeting sequence with ATCN PAM
agcuuccuggagggaaccug

SEQ ID NO: 3095 - RNA, 20 nt, Artificial Sequence
  targeting sequence with ATCN PAM
acucaaauccagcuuccugg

SEQ ID NO: 3096 - RNA, 20 nt, Artificial Sequence
  targeting sequence with ATCN PAM
ugaggggcagaagcaggcaa

SEQ ID NO: 3097 - RNA, 20 nt, Artificial Sequence
  targeting sequence with ATCN PAM
gcugcggcaagaacccacug

SEQ ID NO: 3098 - RNA, 20 nt, Artificial Sequence
  targeting sequence with ATCN PAM
ucacccaguggguucuugcc

SEQ ID NO: 3099 - RNA, 20 nt, Artificial Sequence
  targeting sequence with ATCN PAM
ccuacaccuucccccagcca

SEQ ID NO: 3100 - RNA, 20 nt, Artificial Sequence
  targeting sequence with ATCN PAM
caccaggagcagcgccugug

SEQ ID NO: 3101 - RNA, 20 nt, Artificial Sequence
  targeting sequence with ATCN PAM
accaagaccuacugaucugg

SEQ ID NO: 3102 - RNA, 20 nt, Artificial Sequence
  targeting sequence with ATCN PAM
guaggucuugguggaugucc

SEQ ID NO: 3103 - RNA, 20 nt, Artificial Sequence
  targeting sequence with ATCN PAM
ggagucccacguuccccaag

SEQ ID NO: 3104 - RNA, 20 nt, Artificial Sequence
  targeting sequence with ATCN PAM
cgcuggccuuggggaacgug

SEQ ID NO: 3105 - RNA, 20 nt, Artificial Sequence
  targeting sequence with ATCN PAM
uucaggaacacgaggauucu

SEQ ID NO: 3106 - RNA, 20 nt, Artificial Sequence
  targeting sequence with ATCN PAM
ucguguuccugaaagaugag

SEQ ID NO: 3107 - RNA, 20 nt, Artificial Sequence
  targeting sequence with ATCN PAM
cuaagcugggacacuuuucc

SEQ ID NO: 3108 - RNA, 20 nt, Artificial Sequence
  targeting sequence with ATCN PAM
agcauuuauuaagcaccuac

SEQ ID NO: 3109 - RNA, 20 nt, Artificial Sequence
  targeting sequence with ATCN PAM
auccagcauuuauuaagcac

SEQ ID NO: 3110 - RNA, 20 nt, Artificial Sequence
  targeting sequence with ATCN PAM
auccucucagacccucgcag

SEQ ID NO: 3111 - RNA, 20 nt, Artificial Sequence
  targeting sequence with ATCN PAM
ucucagacccucgcagcagc

SEQ ID NO: 3112 - RNA, 20 nt, Artificial Sequence
  targeting sequence with ATCN PAM
uuagccaaguaugaguugcu

SEQ ID NO: 3113 - RNA, 20 nt, Artificial Sequence
  targeting sequence with ATCN PAM
cagaucccugguccugccga

SEQ ID NO: 3114 - RNA, 20 nt, Artificial Sequence
  targeting sequence with ATCN PAM
gggauuuccauuuuauagga

SEQ ID NO: 3115 - RNA, 20 nt, Artificial Sequence
  targeting sequence with ATCN PAM
cugguccugccgacacgcag

SEQ ID NO: 3116 - RNA, 20 nt, Artificial Sequence
  targeting sequence with ATCN PAM
guacagcuucuugcuauuua

SEQ ID NO: 3117 - RNA, 20 nt, Artificial Sequence
  targeting sequence with ATCN PAM
auuaauguaacuaguuaauu

SEQ ID NO: 3118 - RNA, 20 nt, Artificial Sequence
  targeting sequence with ATCN PAM
uaguaauuaacuaguuacau

SEQ ID NO: 3119 - RNA, 20 nt, Artificial Sequence
  targeting sequence with ATCN PAM
ccuccugauagugaacauuu

SEQ ID NO: 3120 - RNA, 20 nt, Artificial Sequence
  targeting sequence with ATCN PAM
ggaggugauaaucauaguaa

SEQ ID NO: 3121 - RNA, 20 nt, Artificial Sequence
  targeting sequence with ATCN PAM
caaaauguucacuaucagga

SEQ ID NO: 3122 - RNA, 20 nt, Artificial Sequence
  targeting sequence with ATCN PAM
gaaugcccaaucucaaaaug

SEQ ID NO: 3123 - RNA, 20 nt, Artificial Sequence
  targeting sequence with ATCN PAM
ucugaaugcccaaucucaaa

SEQ ID NO: 3124 - RNA, 20 nt, Artificial Sequence
  targeting sequence with ATCN PAM
aggccagaccagggcugggg

SEQ ID NO: 3125 - RNA, 20 nt, Artificial Sequence
  targeting sequence with ATCN PAM
gaccugaaaaaacaacacug

SEQ ID NO: 3126 - RNA, 20 nt, Artificial Sequence
  targeting sequence with ATCN PAM
cacccucauugggaacuugg

SEQ ID NO: 3127 - RNA, 20 nt, Artificial Sequence
  targeting sequence with ATCN PAM
agagcauggagccucuagaa

SEQ ID NO: 3128 - RNA, 20 nt, Artificial Sequence
  targeting sequence with ATCN PAM
gggacucagcuguuaauuaa

SEQ ID NO: 3129 - RNA, 20 nt, Artificial Sequence
  targeting sequence with ATCN PAM
uuaucucgaagagcuuagaa

SEQ ID NO: 3130 - RNA, 20 nt, Artificial Sequence
  targeting sequence with ATCN PAM
cgaagagcuuagaaacaaag

SEQ ID NO: 3131 - RNA, 20 nt, Artificial Sequence
  targeting sequence with ATCN PAM
ccaaggaagguaggcccagu

SEQ ID NO: 3132 - RNA, 20 nt, Artificial Sequence
  targeting sequence with ATCN PAM
ucagcaguugcuaguccauu

SEQ ID NO: 3133 - RNA, 20 nt, Artificial Sequence
  targeting sequence with ATCN PAM
gcuccaaaaagcuggccaca

SEQ ID NO: 3134 - RNA, 20 nt, Artificial Sequence
  targeting sequence with ATCN PAM
cugaggugucagaauuaagc

SEQ ID NO: 3135 - RNA, 20 nt, Artificial Sequence
  targeting sequence with ATCN PAM
acaggauagauugaaacugc

SEQ ID NO: 3136 - RNA, 20 nt, Artificial Sequence
  targeting sequence with ATCN PAM
uguggauagagugugaaagc

SEQ ID NO: 3137 - RNA, 20 nt, Artificial Sequence
  targeting sequence with ATCN PAM
auccuguggauagaguguga

SEQ ID NO: 3138 - RNA, 20 nt, Artificial Sequence
  targeting sequence with ATCN PAM
gguggaagcuggcaguuuca

SEQ ID NO: 3139 - RNA, 20 nt, Artificial Sequence
  targeting sequence with ATCN PAM
cugacccugggauggcugga

SEQ ID NO: 3140 - RNA, 20 nt, Artificial Sequence
  targeting sequence with ATCN PAM
cagggucagggaucaggugg

SEQ ID NO: 3141 - RNA, 20 nt, Artificial Sequence
  targeting sequence with ATCN PAM
agccaucccagggucaggga

SEQ ID NO: 3142 - RNA, 20 nt, Artificial Sequence
  targeting sequence with ATCN PAM
gcaaaaaagaaucuuaaaac

SEQ ID NO: 3143 - RNA, 20 nt, Artificial Sequence
  targeting sequence with ATCN PAM
uaaaacugaccuuggcuggg

SEQ ID NO: 3144 - RNA, 20 nt, Artificial Sequence
  targeting sequence with ATCN PAM
cagcacuuugggaggccaag

SEQ ID NO: 3145 - RNA, 20 nt, Artificial Sequence
  targeting sequence with ATCN PAM
gcccaccuuggccucccaaa

SEQ ID NO: 3146 - RNA, 20 nt, Artificial Sequence
  targeting sequence with ATCN PAM
cgaggucaggaguuugagac

SEQ ID NO: 3147 - RNA, 20 nt, Artificial Sequence
  targeting sequence with ATCN PAM
gcugggcaugguggcgcgug

SEQ ID NO: 3148 - RNA, 20 nt, Artificial Sequence
  targeting sequence with ATCN PAM
cagcuauucagugggcugag

SEQ ID NO: 3149 - RNA, 20 nt, Artificial Sequence
  targeting sequence with ATCN PAM
cuugaaccugggagguggag

SEQ ID NO: 3150 - RNA, 20 nt, Artificial Sequence
  targeting sequence with ATCN PAM
cggcucacugcaaccuccac

SEQ ID NO: 3151 - RNA, 20 nt, Artificial Sequence
  targeting sequence with ATCN PAM
agugguuuuuuuguuguugu

SEQ ID NO: 3152 - RNA, 20 nt, Artificial Sequence
  targeting sequence with ATCN PAM
uaaggggauuagaugcgacu

SEQ ID NO: 3153 - RNA, 20 nt, Artificial Sequence
  targeting sequence with ATCN PAM
ccuuaggaucaagugguuuu

SEQ ID NO: 3154 - RNA, 20 nt, Artificial Sequence
  targeting sequence with ATCN PAM
aauccccuuaggaucaagug

SEQ ID NO: 3155 - RNA, 20 nt, Artificial Sequence
  targeting sequence with ATCN PAM
gcugcaugccaggcaguagg

SEQ ID NO: 3156 - RNA, 20 nt, Artificial Sequence
  targeting sequence with ATCN PAM
uuuuccccuuugggacaggg

SEQ ID NO: 3157 - RNA, 20 nt, Artificial Sequence
  targeting sequence with ATCN PAM
caugcuccugcccuccuuuc

SEQ ID NO: 3158 - RNA, 20 nt, Artificial Sequence
  targeting sequence with ATCN PAM
gcuaucucaugcuccugccc

SEQ ID NO: 3159 - RNA, 20 nt, Artificial Sequence
  targeting sequence with ATCN PAM
ucggugccuuggugaggcug

SEQ ID NO: 3160 - RNA, 20 nt, Artificial Sequence
  targeting sequence with ATCN PAM
ugcugggaucucuaucauug

SEQ ID NO: 3161 - RNA, 20 nt, Artificial Sequence
  targeting sequence with ATCN PAM
cagcaugauuugccccagcc

SEQ ID NO: 3162 - RNA, 20 nt, Artificial Sequence
  targeting sequence with ATCN PAM
cuaucauugucccucuuuac

SEQ ID NO: 3163 - RNA, 20 nt, Artificial Sequence
  targeting sequence with ATCN PAM
uugucccucuuuacugugac

SEQ ID NO: 3164 - RNA, 20 nt, Artificial Sequence
  targeting sequence with ATCN PAM
agugagucacaguaaagagg

SEQ ID NO: 3165 - RNA, 20 nt, Artificial Sequence
  targeting sequence with ATCN PAM
gucaggauacuuuuggucac

SEQ ID NO: 3166 - RNA, 20 nt, Artificial Sequence
  targeting sequence with ATCN PAM
ugacugauauuaucuaguga

SEQ ID NO: 3167 - RNA, 20 nt, Artificial Sequence
  targeting sequence with ATCN PAM
cuugugaccaaaaguauccu

SEQ ID NO: 3168 - RNA, 20 nt, Artificial Sequence
  targeting sequence with ATCN PAM
aacucauuugggcugaagca

SEQ ID NO: 3169 - RNA, 20 nt, Artificial Sequence
  targeting sequence with ATCN PAM
ccaugacugagauggggauu

SEQ ID NO: 3170 - RNA, 20 nt, Artificial Sequence
  targeting sequence with ATCN PAM
cagucauggugauacccugu

SEQ ID NO: 3171 - RNA, 20 nt, Artificial Sequence
  targeting sequence with ATCN PAM
ccaucucagucauggugaua

SEQ ID NO: 3172 - RNA, 20 nt, Artificial Sequence
  targeting sequence with ATCN PAM
cagaauuaauccccaucuca

SEQ ID NO: 3173 - RNA, 20 nt, Artificial Sequence
  targeting sequence with ATCN PAM
ggugaccuagacuuggccaa

SEQ ID NO: 3174 - RNA, 20 nt, Artificial Sequence
  targeting sequence with ATCN PAM
uacguaacucauuuaugccu

SEQ ID NO: 3175 - RNA, 20 nt, Artificial Sequence
  targeting sequence with ATCN PAM
aaaaaauugcaaccucaggc

SEQ ID NO: 3176 - RNA, 20 nt, Artificial Sequence
  targeting sequence with ATCN PAM
gaccuuggcgaugaccuuga

SEQ ID NO: 3177 - RNA, 20 nt, Artificial Sequence
  targeting sequence with ATCN PAM
ccaaggucugauugcaaaaa

SEQ ID NO: 3178 - RNA, 20 nt, Artificial Sequence
  targeting sequence with ATCN PAM
uacugcucaaggucaucgcc

SEQ ID NO: 3179 - RNA, 20 nt, Artificial Sequence
  targeting sequence with ATCN PAM
ccauggcuggaauggggauu

SEQ ID NO: 3180 - RNA, 20 nt, Artificial Sequence
  targeting sequence with ATCN PAM
ccauuccagccauggugaug

SEQ ID NO: 3181 - RNA, 20 nt, Artificial Sequence
  targeting sequence with ATCN PAM
ucugauuggucagaccuagg

SEQ ID NO: 3182 - RNA, 20 nt, Artificial Sequence
  targeting sequence with ATCN PAM
gaggaugaauccccauucca

SEQ ID NO: 3183 - RNA, 20 nt, Artificial Sequence
  targeting sequence with ATCN PAM
acccagagggaauggaaucu

SEQ ID NO: 3184 - RNA, 20 nt, Artificial Sequence
  targeting sequence with ATCN PAM
aaguugguguuuucugggca

SEQ ID NO: 3185 - RNA, 20 nt, Artificial Sequence
  targeting sequence with ATCN PAM
ucucagggacaugagggaga

SEQ ID NO: 3186 - RNA, 20 nt, Artificial Sequence
  targeting sequence with ATCN PAM
cagggacaugagggagaaga

SEQ ID NO: 3187 - RNA, 20 nt, Artificial Sequence
  targeting sequence with ATCN PAM
ucucccucaugucccugaga

SEQ ID NO: 3188 - RNA, 20 nt, Artificial Sequence
  targeting sequence with ATCN PAM
aaaacaaagggugagaccuu

SEQ ID NO: 3189 - RNA, 20 nt, Artificial Sequence
  targeting sequence with ATCN PAM
uagcugcccugacuugcagg

SEQ ID NO: 3190 - RNA, 20 nt, Artificial Sequence
  targeting sequence with ATCN PAM
ggacaaaccagagaauguuc

SEQ ID NO: 3191 - RNA, 20 nt, Artificial Sequence
  targeting sequence with ATCN PAM
ccaggcagccagcagaugua

SEQ ID NO: 3192 - RNA, 20 nt, Artificial Sequence
  targeting sequence with ATCN PAM
gcuggcugccuggagaugag

SEQ ID NO: 3193 - RNA, 20 nt, Artificial Sequence
  targeting sequence with ATCN PAM
ccgaguccccagugcauucu

SEQ ID NO: 3194 - RNA, 20 nt, Artificial Sequence
  targeting sequence with ATCN PAM
cucccuuggcgugacagagc

SEQ ID NO: 3195 - RNA, 20 nt, Artificial Sequence
  targeting sequence with ATCN PAM
caaaaaaaaaaaagaaaaga

SEQ ID NO: 3196 - RNA, 20 nt, Artificial Sequence
  targeting sequence with ATCN PAM
uucugucucagccucucaag

SEQ ID NO: 3197 - RNA, 20 nt, Artificial Sequence
  targeting sequence with ATCN PAM
ccacaaaaaauaaaaaauaa

SEQ ID NO: 3198 - RNA, 20 nt, Artificial Sequence
  targeting sequence with ATCN PAM
uuugaggcuggaaguucaaa

SEQ ID NO: 3199 - RNA, 20 nt, Artificial Sequence
  targeting sequence with ATCN PAM
uccugccuuggccucucaaa

SEQ ID NO: 3200 - RNA, 20 nt, Artificial Sequence
  targeting sequence with ATCN PAM
cacuugguagaauugucuau

SEQ ID NO: 3201 - RNA, 20 nt, Artificial Sequence
  targeting sequence with ATCN PAM
uauuagucccuauagacaau

SEQ ID NO: 3202 - RNA, 20 nt, Artificial Sequence
  targeting sequence with ATCN PAM
ccuuacaagucaauuuccca

SEQ ID NO: 3203 - RNA, 20 nt, Artificial Sequence
  targeting sequence with ATCN PAM
uccuagguucuagcugggca

SEQ ID NO: 3204 - RNA, 20 nt, Artificial Sequence
  targeting sequence with ATCN PAM
uagguucuagcugggcaccu

SEQ ID NO: 3205 - RNA, 20 nt, Artificial Sequence
  targeting sequence with ATCN PAM
uucggcuucuuuugcaccug

SEQ ID NO: 3206 - RNA, 20 nt, Artificial Sequence
  targeting sequence with ATCN PAM
ugccaccacaggugcaaaag

SEQ ID NO: 3207 - RNA, 20 nt, Artificial Sequence
  targeting sequence with ATCN PAM
uuucugaguacccuacaaug

SEQ ID NO: 3208 - RNA, 20 nt, Artificial Sequence
  targeting sequence with ATCN PAM
uuucuuccugcuggcuggaa

SEQ ID NO: 3209 - RNA, 20 nt, Artificial Sequence
  targeting sequence with ATCN PAM
ugacugcuuuccagccagca

SEQ ID NO: 3210 - RNA, 20 nt, Artificial Sequence
  targeting sequence with ATCN PAM
aauaugggugcggaagcucc

SEQ ID NO: 3211 - RNA, 20 nt, Artificial Sequence
  targeting sequence with ATCN PAM
ugagauagaaucugaggaca

SEQ ID NO: 3212 - RNA, 20 nt, Artificial Sequence
  targeting sequence with ATCN PAM
caugaucuaauaugggugcg

SEQ ID NO: 3213 - RNA, 20 nt, Artificial Sequence
  targeting sequence with ATCN PAM
gaggacagagaauggcaaag

SEQ ID NO: 3214 - RNA, 20 nt, Artificial Sequence
  targeting sequence with ATCN PAM
caagugacuuaaacaagaaa

SEQ ID NO: 3215 - RNA, 20 nt, Artificial Sequence
  targeting sequence with ATCN PAM
uggcucacuacaaccucuac

SEQ ID NO: 3216 - RNA, 20 nt, Artificial Sequence
  targeting sequence with ATCN PAM
cagcuacucgggaggcugag

SEQ ID NO: 3217 - RNA, 20 nt, Artificial Sequence
  targeting sequence with ATCN PAM
gccugggcaacauggcaaaa

SEQ ID NO: 3218 - RNA, 20 nt, Artificial Sequence
  targeting sequence with ATCN PAM
ugaacuccugagcucaagua

SEQ ID NO: 3219 - RNA, 20 nt, Artificial Sequence
  targeting sequence with ATCN PAM
gccugccucagccucccaaa

SEQ ID NO: 3220 - RNA, 20 nt, Artificial Sequence
  targeting sequence with ATCN PAM
cagcacuuugggaggcugag

SEQ ID NO: 3221 - RNA, 20 nt, Artificial Sequence
  targeting sequence with ATCN PAM
uccugaguuccugggcugca

SEQ ID NO: 3222 - RNA, 20 nt, Artificial Sequence
  targeting sequence with ATCN PAM
aagugcagguccucucugaa

SEQ ID NO: 3223 - RNA, 20 nt, Artificial Sequence
  targeting sequence with ATCN PAM
auguaaauauuuuauauuca

SEQ ID NO: 3224 - RNA, 20 nt, Artificial Sequence
  targeting sequence with ATCN PAM
ggacauuugugacuuuucuu

SEQ ID NO: 3225 - RNA, 20 nt, Artificial Sequence
  targeting sequence with ATCN PAM
caguucugaacuuuuggaag

SEQ ID NO: 3226 - RNA, 20 nt, Artificial Sequence
  targeting sequence with ATCN PAM
ucagaacuguagggcaguuc

SEQ ID NO: 3227 - RNA, 20 nt, Artificial Sequence
  targeting sequence with ATCN PAM
cagaagcucaccaagcggcc

SEQ ID NO: 3228 - RNA, 20 nt, Artificial Sequence
  targeting sequence with ATCN PAM
gacugcagggacaacgggcc

SEQ ID NO: 3229 - RNA, 20 nt, Artificial Sequence
  targeting sequence with ATCN PAM
ucuagaggaauuuuuagauc

SEQ ID NO: 3230 - RNA, 20 nt, Artificial Sequence
  targeting sequence with ATCN PAM
aaaaauuccucuagaggauu

SEQ ID NO: 3231 - RNA, 20 nt, Artificial Sequence
  targeting sequence with ATCN PAM
ugcagcacauuuuagagcuu

SEQ ID NO: 3232 - RNA, 20 nt, Artificial Sequence
  targeting sequence with ATCN PAM
aguuucgcauuugaagggaa

SEQ ID NO: 3233 - RNA, 20 nt, Artificial Sequence
  targeting sequence with ATCN PAM
uggcacagccgggagcaugg

SEQ ID NO: 3234 - RNA, 20 nt, Artificial Sequence
  targeting sequence with ATCN PAM
cugaguguugcucuacuucu

SEQ ID NO: 3235 - RNA, 20 nt, Artificial Sequence
  targeting sequence with ATCN PAM
cauuuaugggacacuuccaa

SEQ ID NO: 3236 - RNA, 20 nt, Artificial Sequence
  targeting sequence with ATCN PAM
aaauugcugcccccacuugu

SEQ ID NO: 3237 - RNA, 20 nt, Artificial Sequence
  targeting sequence with ATCN PAM
caguaauggguacugagcac

SEQ ID NO: 3238 - RNA, 20 nt, Artificial Sequence
  targeting sequence with ATCN PAM
cuggugcccagcacagcacc

SEQ ID NO: 3239 - RNA, 20 nt, Artificial Sequence
  targeting sequence with ATCN PAM
gucuuguuccuggugguauc

SEQ ID NO: 3240 - RNA, 20 nt, Artificial Sequence
  targeting sequence with ATCN PAM
cagcucugcuuccgugucuc

SEQ ID NO: 3241 - RNA, 20 nt, Artificial Sequence
  targeting sequence with ATCN PAM
ucagaaaagccuucccuggc

SEQ ID NO: 3242 - RNA, 20 nt, Artificial Sequence
  targeting sequence with ATCN PAM
acucugaggccaaaagauga

SEQ ID NO: 3243 - RNA, 20 nt, Artificial Sequence
  targeting sequence with ATCN PAM
uuuggccucagaguagaugc

SEQ ID NO: 3244 - RNA, 20 nt, Artificial Sequence
  targeting sequence with ATCN PAM
auugacuuguacggcaagac

SEQ ID NO: 3245 - RNA, 20 nt, Artificial Sequence
  targeting sequence with ATCN PAM
uucaugacucuggaucagcc

SEQ ID NO: 3246 - RNA, 20 nt, Artificial Sequence
  targeting sequence with ATCN PAM
agagucaugaaugauaugca

SEQ ID NO: 3247 - RNA, 20 nt, Artificial Sequence
  targeting sequence with ATCN PAM
gccaggcagaucugcugauc

SEQ ID NO: 3248 - RNA, 20 nt, Artificial Sequence
  targeting sequence with ATCN PAM
gccuggcugauccagaguca

SEQ ID NO: 3249 - RNA, 20 nt, Artificial Sequence
  targeting sequence with ATCN PAM
gcugaucugaaccaagcuug

SEQ ID NO: 3250 - RNA, 20 nt, Artificial Sequence
  targeting sequence with ATCN PAM
gcagaucugccuggcugauc

SEQ ID NO: 3251 - RNA, 20 nt, Artificial Sequence
  targeting sequence with ATCN PAM
gaaccaagcuuggucaauuu

SEQ ID NO: 3252 - RNA, 20 nt, Artificial Sequence
  targeting sequence with ATCN PAM
guggucaacuggaggguugg

SEQ ID NO: 3253 - RNA, 20 nt, Artificial Sequence
  targeting sequence with ATCN PAM
gagggucaaccagccagucc

SEQ ID NO: 3254 - RNA, 20 nt, Artificial Sequence
  targeting sequence with ATCN PAM
ccccuguuacccagccaucu

SEQ ID NO: 3255 - RNA, 20 nt, Artificial Sequence
  targeting sequence with ATCN PAM
ggcaggcuagcuaggagcua

SEQ ID NO: 3256 - RNA, 20 nt, Artificial Sequence
  targeting sequence with ATCN PAM
uuucugcuauuggucaaagc

SEQ ID NO: 3257 - RNA, 20 nt, Artificial Sequence
  targeting sequence with ATCN PAM
uaugacuugcuuugaccaau

SEQ ID NO: 3258 - RNA, 20 nt, Artificial Sequence
  targeting sequence with ATCN PAM
acucagacuuaagaaaugug

SEQ ID NO: 3259 - RNA, 20 nt, Artificial Sequence
  targeting sequence with ATCN PAM
cuacacuuugggaggccagg

SEQ ID NO: 3260 - RNA, 20 nt, Artificial Sequence
  targeting sequence with ATCN PAM
ccuacuucagucuuccaagu

SEQ ID NO: 3261 - RNA, 20 nt, Artificial Sequence
  targeting sequence with ATCN PAM
cuugagcccagaaggucgag

SEQ ID NO: 3262 - RNA, 20 nt, Artificial Sequence
  targeting sequence with ATCN PAM
uagcucacugcagccucgac

SEQ ID NO: 3263 - RNA, 20 nt, Artificial Sequence
  targeting sequence with ATCN PAM
auucaacacacacagaggag

SEQ ID NO: 3264 - RNA, 20 nt, Artificial Sequence
  targeting sequence with ATCN PAM
ggccccuuuugucuccucug

SEQ ID NO: 3265 - RNA, 20 nt, Artificial Sequence
  targeting sequence with ATCN PAM
gcacauggcccauuccagga

SEQ ID NO: 3266 - RNA, 20 nt, Artificial Sequence
  targeting sequence with ATCN PAM
cacaauucacccacacugcg

SEQ ID NO: 3267 - RNA, 20 nt, Artificial Sequence
  targeting sequence with ATCN PAM
ugcauggcuccccacugccc

SEQ ID NO: 3268 - RNA, 20 nt, Artificial Sequence
  targeting sequence with ATCN PAM
gacuucacuuuagaacacuu

SEQ ID NO: 3269 - RNA, 20 nt, Artificial Sequence
  targeting sequence with ATCN PAM
aaguguucuaaagugaaguc

SEQ ID NO: 3270 - RNA, 20 nt, Artificial Sequence
  targeting sequence with ATCN PAM
ggacucggggaggcuguggu

SEQ ID NO: 3271 - RNA, 20 nt, Artificial Sequence
  targeting sequence with ATCN PAM
cuggugauggagagcccucu

SEQ ID NO: 3272 - RNA, 20 nt, Artificial Sequence
  targeting sequence with ATCN PAM
ccagagaucuggacucgggg

SEQ ID NO: 3273 - RNA, 20 nt, Artificial Sequence
  targeting sequence with ATCN PAM
cuuccucagagguaaccacu

SEQ ID NO: 3274 - RNA, 20 nt, Artificial Sequence
  targeting sequence with ATCN PAM
auucagaacuuuuuucuacu

SEQ ID NO: 3275 - RNA, 20 nt, Artificial Sequence
  targeting sequence with ATCN PAM
uaccagucacaagcaguaga

SEQ ID NO: 3276 - RNA, 20 nt, Artificial Sequence
  targeting sequence with ATCN PAM
gagaguacaccccaacuacu

SEQ ID NO: 3277 - RNA, 20 nt, Artificial Sequence
  targeting sequence with ATCN PAM
gguggagagugaacaaguaa

SEQ ID NO: 3278 - RNA, 20 nt, Artificial Sequence
  targeting sequence with ATCN PAM
uagcagaaauucaaaacaac

SEQ ID NO: 3279 - RNA, 20 nt, Artificial Sequence
  targeting sequence with ATCN PAM
uugcacguaaguguauaugu

SEQ ID NO: 3280 - RNA, 20 nt, Artificial Sequence
  targeting sequence with ATCN PAM
gagacaaacauauacacuua

SEQ ID NO: 3281 - RNA, 20 nt, Artificial Sequence
  targeting sequence with ATCN PAM
acgccuagaguggaauaggu

SEQ ID NO: 3282 - RNA, 20 nt, Artificial Sequence
  targeting sequence with ATCN PAM
cugaauugcuuucuaaggcg

SEQ ID NO: 3283 - RNA, 20 nt, Artificial Sequence
  targeting sequence with ATCN PAM
uagucacucacuauugauag

SEQ ID NO: 3284 - RNA, 20 nt, Artificial Sequence
  targeting sequence with ATCN PAM
auagugagugacuaggauuc

SEQ ID NO: 3285 - RNA, 20 nt, Artificial Sequence
  targeting sequence with ATCN PAM
uugucauuuugcugagugug

SEQ ID NO: 3286 - RNA, 20 nt, Artificial Sequence
  targeting sequence with ATCN PAM
caccccugcacuccagccug

SEQ ID NO: 3287 - RNA, 20 nt, Artificial Sequence
  targeting sequence with ATCN PAM
cagcucccugcagccuugac

SEQ ID NO: 3288 - RNA, 20 nt, Artificial Sequence
  targeting sequence with ATCN PAM
uccugccucggccucccagg

SEQ ID NO: 3289 - RNA, 20 nt, Artificial Sequence
  targeting sequence with ATCN PAM
ugucucuaccaaaaaauaca

SEQ ID NO: 3290 - RNA, 20 nt, Artificial Sequence
  targeting sequence with ATCN PAM
cuugagcccaggaguucaag

SEQ ID NO: 3291 - RNA, 20 nt, Artificial Sequence
  targeting sequence with ATCN PAM
uccugccucagccucccgaa

SEQ ID NO: 3292 - RNA, 20 nt, Artificial Sequence
  targeting sequence with ATCN PAM
cagaacuucgggaggcugag

SEQ ID NO: 3293 - RNA, 20 nt, Artificial Sequence
  targeting sequence with ATCN PAM
uuguuuuaauccaucuuguc

SEQ ID NO: 3294 - RNA, 20 nt, Artificial Sequence
  targeting sequence with ATCN PAM
aucuugucauuuuauauuau

SEQ ID NO: 3295 - RNA, 20 nt, Artificial Sequence
  targeting sequence with ATCN PAM
ugucauuuuauauuauauua

SEQ ID NO: 3296 - RNA, 20 nt, Artificial Sequence
  targeting sequence with ATCN PAM
agccauugcacuccagccug

SEQ ID NO: 3297 - RNA, 20 nt, Artificial Sequence
  targeting sequence with ATCN PAM
ugguucacugcagucuccag

SEQ ID NO: 3298 - RNA, 20 nt, Artificial Sequence
  targeting sequence with ATCN PAM
cuugaaccugggagcuggag

SEQ ID NO: 3299 - RNA, 20 nt, Artificial Sequence
  targeting sequence with ATCN PAM
cuacuaaaaauacaaaauua

SEQ ID NO: 3300 - RNA, 20 nt, Artificial Sequence
  targeting sequence with ATCN PAM
ccugaggucaggaguuugag

SEQ ID NO: 3301 - RNA, 20 nt, Artificial Sequence
  targeting sequence with ATCN PAM
gcccaccucagccucccaaa

SEQ ID NO: 3302 - RNA, 20 nt, Artificial Sequence
  targeting sequence with ATCN PAM
uagcacuuugggaggcugag

SEQ ID NO: 3303 - RNA, 20 nt, Artificial Sequence
  targeting sequence with ATCN PAM
aaaaugacaaggugggcugg

SEQ ID NO: 3304 - RNA, 20 nt, Artificial Sequence
  targeting sequence with ATCN PAM
cacccuuucugcagaauauu

SEQ ID NO: 3305 - RNA, 20 nt, Artificial Sequence
  targeting sequence with ATCN PAM
aauugacagacaaaaaaaaa

SEQ ID NO: 3306 - RNA, 20 nt, Artificial Sequence
  targeting sequence with ATCN PAM
acugggacaauggacaaaga

SEQ ID NO: 3307 - RNA, 20 nt, Artificial Sequence
  targeting sequence with ATCN PAM
augaagacuuuugugaagca

SEQ ID NO: 3308 - RNA, 20 nt, Artificial Sequence
  targeting sequence with ATCN PAM
uccguuauugauuuauuucu

SEQ ID NO: 3309 - RNA, 20 nt, Artificial Sequence
  targeting sequence with ATCN PAM
auaacggaggaugcuucaca

SEQ ID NO: 3310 - RNA, 20 nt, Artificial Sequence
  targeting sequence with ATCN PAM
gaguagccccuucugaggcc

SEQ ID NO: 3311 - RNA, 20 nt, Artificial Sequence
  targeting sequence with ATCN PAM
uaccaggugggcaaugggcu

SEQ ID NO: 3312 - RNA, 20 nt, Artificial Sequence
  targeting sequence with ATCN PAM
gcaucuccagccccuggugg

SEQ ID NO: 3313 - RNA, 20 nt, Artificial Sequence
  targeting sequence with ATCN PAM
ccagccccuggugggcagag

SEQ ID NO: 3314 - RNA, 20 nt, Artificial Sequence
  targeting sequence with ATCN PAM
cgccugugcccucugcccac

SEQ ID NO: 3315 - RNA, 20 nt, Artificial Sequence
  targeting sequence with ATCN PAM
agcaucucagcucccaacau

SEQ ID NO: 3316 - RNA, 20 nt, Artificial Sequence
  targeting sequence with ATCN PAM
cagcucccaacauugcacca

SEQ ID NO: 3317 - RNA, 20 nt, Artificial Sequence
  targeting sequence with ATCN PAM
ugccuucuguagggagcccc

SEQ ID NO: 3318 - RNA, 20 nt, Artificial Sequence
  targeting sequence with ATCN PAM
gggcugauuggagugguggg

SEQ ID NO: 3319 - RNA, 20 nt, Artificial Sequence
  targeting sequence with ATCN PAM
gcccugauugggcugggagu

SEQ ID NO: 3320 - RNA, 20 nt, Artificial Sequence
  targeting sequence with ATCN PAM
cacccuccucgacuuccaca

SEQ ID NO: 3321 - RNA, 20 nt, Artificial Sequence
  targeting sequence with ATCN PAM
ugcuguggaagucgaggagg

SEQ ID NO: 3322 - RNA, 20 nt, Artificial Sequence
  targeting sequence with ATCN PAM
uccaggucuccugaaucuga

SEQ ID NO: 3323 - RNA, 20 nt, Artificial Sequence
  targeting sequence with ATCN PAM
aggucuccugaaucugaaaa

SEQ ID NO: 3324 - RNA, 20 nt, Artificial Sequence
  targeting sequence with ATCN PAM
gaaaagccaggugagcaaga

SEQ ID NO: 3325 - RNA, 20 nt, Artificial Sequence
  targeting sequence with ATCN PAM
cugcgagcccacucccuggg

SEQ ID NO: 3326 - RNA, 20 nt, Artificial Sequence
  targeting sequence with ATCN PAM
aaggcaacccagggaguggg

SEQ ID NO: 3327 - RNA, 20 nt, Artificial Sequence
  targeting sequence with ATCN PAM
gcucuucagccaaaaggcag

SEQ ID NO: 3328 - RNA, 20 nt, Artificial Sequence
  targeting sequence with ATCN PAM
acagguagcaaggccaggua

SEQ ID NO: 3329 - RNA, 20 nt, Artificial Sequence
  targeting sequence with ATCN PAM
gaaugccuagcccugcauaa

SEQ ID NO: 3330 - RNA, 20 nt, Artificial Sequence
  targeting sequence with ATCN PAM
ggacaugagggugcaccgag

SEQ ID NO: 3331 - RNA, 20 nt, Artificial Sequence
  targeting sequence with ATCN PAM
gaccgggagguccucgaggg

SEQ ID NO: 3332 - RNA, 20 nt, Artificial Sequence
  targeting sequence with ATCN PAM
cauuagcaaacagcaacaag

SEQ ID NO: 3333 - RNA, 20 nt, Artificial Sequence
  targeting sequence with ATCN PAM
agagcuggaggagcccagag

SEQ ID NO: 3334 - RNA, 20 nt, Artificial Sequence
  targeting sequence with ATCN PAM
uucagggucaccucuucuag

SEQ ID NO: 3335 - RNA, 20 nt, Artificial Sequence
  targeting sequence with ATCN PAM
cccuaggugucuuggcaaau

SEQ ID NO: 3336 - RNA, 20 nt, Artificial Sequence
  targeting sequence with ATCN PAM
uucaaggcucaaaaugcacc

SEQ ID NO: 3337 - RNA, 20 nt, Artificial Sequence
  targeting sequence with ATCN PAM
uccuucugggaaggagggaa

SEQ ID NO: 3338 - RNA, 20 nt, Artificial Sequence
  targeting sequence with ATCN PAM
ugaacagggagccauggacg

SEQ ID NO: 3339 - RNA, 20 nt, Artificial Sequence
  targeting sequence with ATCN PAM
cacaccccucaccucccugc

SEQ ID NO: 3340 - RNA, 20 nt, Artificial Sequence
  targeting sequence with ATCN PAM
aagcaagaacugggggcauu

SEQ ID NO: 3341 - RNA, 20 nt, Artificial Sequence
  targeting sequence with ATCN PAM
gccccuccucucucuuccag

SEQ ID NO: 3342 - RNA, 20 nt, Artificial Sequence
  targeting sequence with ATCN PAM
ugguauacagcaggcaugga

SEQ ID NO: 3343 - RNA, 20 nt, Artificial Sequence
  targeting sequence with ATCN PAM
cagccccucauucggcagcu

SEQ ID NO: 3344 - RNA, 20 nt, Artificial Sequence
  targeting sequence with ATCN PAM
guacaguggggacgggggcc

SEQ ID NO: 3345 - RNA, 20 nt, Artificial Sequence
  targeting sequence with ATCN PAM
cuucgaccccuguugggucc

SEQ ID NO: 3346 - RNA, 20 nt, Artificial Sequence
  targeting sequence with ATCN PAM
agagcaaaauuauaaagaga

SEQ ID NO: 3347 - RNA, 20 nt, Artificial Sequence
  targeting sequence with ATCN PAM
agaguuucaugguuuuuuuu

SEQ ID NO: 3348 - RNA, 20 nt, Artificial Sequence
  targeting sequence with ATCN PAM
caccacugcacuccagccug

SEQ ID NO: 3349 - RNA, 20 nt, Artificial Sequence
  targeting sequence with ATCN PAM
cagcucacugcagucuccac

SEQ ID NO: 3350 - RNA, 20 nt, Artificial Sequence
  targeting sequence with ATCN PAM
ucccaccucagccucccaag

SEQ ID NO: 3351 - RNA, 20 nt, Artificial Sequence
  targeting sequence with ATCN PAM
uuaaaaaugagcagagugug

SEQ ID NO: 3352 - RNA, 20 nt, Artificial Sequence
  targeting sequence with ATCN PAM
ugagaccucgacucuacgaa

SEQ ID NO: 3353 - RNA, 20 nt, Artificial Sequence
  targeting sequence with ATCN PAM
gcagaauuuaaagacuuaaa

SEQ ID NO: 3354 - RNA, 20 nt, Artificial Sequence
  targeting sequence with ATCN PAM
aucugcagaauuuaaagacu

SEQ ID NO: 3355 - RNA, 20 nt, Artificial Sequence
  targeting sequence with ATCN PAM
gaaaucaacauuuccauuca

SEQ ID NO: 3356 - RNA, 20 nt, Artificial Sequence
  targeting sequence with ATCN PAM
acauuuccauucaccacauu

SEQ ID NO: 3357 - RNA, 20 nt, Artificial Sequence
  targeting sequence with ATCN PAM
gguuucauauuuaaaucccu

SEQ ID NO: 3358 - RNA, 20 nt, Artificial Sequence
  targeting sequence with ATCN PAM
cuuuuaugcauuucauggug

SEQ ID NO: 3359 - RNA, 20 nt, Artificial Sequence
  targeting sequence with ATCN PAM
agggugggggaagcaugaga

SEQ ID NO: 3360 - RNA, 20 nt, Artificial Sequence
  targeting sequence with ATCN PAM
cacuucauuugcaacuauuu

SEQ ID NO: 3361 - RNA, 20 nt, Artificial Sequence
  targeting sequence with ATCN PAM
aucucuauaaucaauuuuag

SEQ ID NO: 3362 - RNA, 20 nt, Artificial Sequence
  targeting sequence with ATCN PAM
cuauaaucaauuuuagaaua

SEQ ID NO: 3363 - RNA, 20 nt, Artificial Sequence
  targeting sequence with ATCN PAM
auuuuagaauauuuucauca

SEQ ID NO: 3364 - RNA, 20 nt, Artificial Sequence
  targeting sequence with ATCN PAM
cuucaagaaaaccaguaccc

SEQ ID NO: 3365 - RNA, 20 nt, Artificial Sequence
  targeting sequence with ATCN PAM
gcuuucugcaucuauggacu

SEQ ID NO: 3366 - RNA, 20 nt, Artificial Sequence
  targeting sequence with ATCN PAM
auggacuucuuauucuggac

SEQ ID NO: 3367 - RNA, 20 nt, Artificial Sequence
  targeting sequence with ATCN PAM
gacaguauguggcuuuuucu

SEQ ID NO: 3368 - RNA, 20 nt, Artificial Sequence
  targeting sequence with ATCN PAM
agccauacaaaggagugaag

SEQ ID NO: 3369 - RNA, 20 nt, Artificial Sequence
  targeting sequence with ATCN PAM
cguggaauauuauccagcca

SEQ ID NO: 3370 - RNA, 20 nt, Artificial Sequence
  targeting sequence with ATCN PAM
aucugucaaucauucaucau

SEQ ID NO: 3371 - RNA, 20 nt, Artificial Sequence
  targeting sequence with ATCN PAM
gucaaucauucaucauggau

SEQ ID NO: 3372 - RNA, 20 nt, Artificial Sequence
  targeting sequence with ATCN PAM
uucaucauggauguuugggc

SEQ ID NO: 3373 - RNA, 20 nt, Artificial Sequence
  targeting sequence with ATCN PAM
uggauguuugggcugguucc

SEQ ID NO: 3374 - RNA, 20 nt, Artificial Sequence
  targeting sequence with ATCN PAM
augaugaaugauugacagau

SEQ ID NO: 3375 - RNA, 20 nt, Artificial Sequence
  targeting sequence with ATCN PAM
uugggccgacaugaauagug

SEQ ID NO: 3376 - RNA, 20 nt, Artificial Sequence
  targeting sequence with ATCN PAM
uagcacuuugggagacugag

SEQ ID NO: 3377 - RNA, 20 nt, Artificial Sequence
  targeting sequence with ATCN PAM
ucccaccucagucucccaaa

SEQ ID NO: 3378 - RNA, 20 nt, Artificial Sequence
  targeting sequence with ATCN PAM
uuauuauuauuauuauuauu

SEQ ID NO: 3379 - RNA, 20 nt, Artificial Sequence
  targeting sequence with ATCN PAM
ucuugccucagucuccgaag

SEQ ID NO: 3380 - RNA, 20 nt, Artificial Sequence
  targeting sequence with ATCN PAM
cuugagcuggagaggucaag

SEQ ID NO: 3381 - RNA, 20 nt, Artificial Sequence
  targeting sequence with ATCN PAM
uggcucacugcagccuugac

SEQ ID NO: 3382 - RNA, 20 nt, Artificial Sequence
  targeting sequence with ATCN PAM
gucacccaagcuggagugca

SEQ ID NO: 3383 - RNA, 20 nt, Artificial Sequence
  targeting sequence with ATCN PAM
auuugaaaguuuuuuguuuu

SEQ ID NO: 3384 - RNA, 20 nt, Artificial Sequence
  targeting sequence with ATCN PAM
uguggacacucuuguuucau

SEQ ID NO: 3385 - RNA, 20 nt, Artificial Sequence
  targeting sequence with ATCN PAM
gcuggguuauuucaaagcaa

SEQ ID NO: 3386 - RNA, 20 nt, Artificial Sequence
  targeting sequence with ATCN PAM
agcauuugcuuugaaauaac

SEQ ID NO: 3387 - RNA, 20 nt, Artificial Sequence
  targeting sequence with ATCN PAM
uuucaucuguaaauaucuuu

SEQ ID NO: 3388 - RNA, 20 nt, Artificial Sequence
  targeting sequence with ATCN PAM
guaaauaucuuuuauaauau

SEQ ID NO: 3389 - RNA, 20 nt, Artificial Sequence
  targeting sequence with ATCN PAM
uuuauaauauuuaccuuuaa

SEQ ID NO: 3390 - RNA, 20 nt, Artificial Sequence
  targeting sequence with ATCN PAM
guuaaagguaaauauuauaa

SEQ ID NO: 3391 - RNA, 20 nt, Artificial Sequence
  targeting sequence with ATCN PAM
cuaauauccgauauuuccuu

SEQ ID NO: 3392 - RNA, 20 nt, Artificial Sequence
  targeting sequence with ATCN PAM
gauauuuccuuccagugcuc

SEQ ID NO: 3393 - RNA, 20 nt, Artificial Sequence
  targeting sequence with ATCN PAM
gauauuagggauaauauugu

SEQ ID NO: 3394 - RNA, 20 nt, Artificial Sequence
  targeting sequence with ATCN PAM
guugccuuucuuuuuccagu

SEQ ID NO: 3395 - RNA, 20 nt, Artificial Sequence
  targeting sequence with ATCN PAM
aacuggaaaaagaaaggcaa

SEQ ID NO: 3396 - RNA, 20 nt, Artificial Sequence
  targeting sequence with ATCN PAM
ugcucugggaaugagcauuu

SEQ ID NO: 3397 - RNA, 20 nt, Artificial Sequence
  targeting sequence with ATCN PAM
aaauugggugaauuucguaa

SEQ ID NO: 3398 - RNA, 20 nt, Artificial Sequence
  targeting sequence with ATCN PAM
cucuuuuuaaagaauggagu

SEQ ID NO: 3399 - RNA, 20 nt, Artificial Sequence
  targeting sequence with ATCN PAM
cagcacuuugggaggccgag

SEQ ID NO: 3400 - RNA, 20 nt, Artificial Sequence
  targeting sequence with ATCN PAM
gccagguaugguggcagcgc

SEQ ID NO: 3401 - RNA, 20 nt, Artificial Sequence
  targeting sequence with ATCN PAM
cagcuacuugggaggcugag

SEQ ID NO: 3402 - RNA, 20 nt, Artificial Sequence
  targeting sequence with ATCN PAM
cagcucacugcaaccuccac

SEQ ID NO: 3403 - RNA, 20 nt, Artificial Sequence
  targeting sequence with ATCN PAM
cgccauugcacuccagccug

SEQ ID NO: 3404 - RNA, 20 nt, Artificial Sequence
  targeting sequence with ATCN PAM
gggagcucccaugccagcgg

SEQ ID NO: 3405 - RNA, 20 nt, Artificial Sequence
  targeting sequence with ATCN PAM
gauccuugcuggacccucac

SEQ ID NO: 3406 - RNA, 20 nt, Artificial Sequence
  targeting sequence with ATCN PAM
gaugccccccucuccccaag

SEQ ID NO: 3407 - RNA, 20 nt, Artificial Sequence
  targeting sequence with ATCN PAM
uugcuggacccucacccacc

SEQ ID NO: 3408 - RNA, 20 nt, Artificial Sequence
  targeting sequence with ATCN PAM
gcuggcccgugggggguggg

SEQ ID NO: 3409 - RNA, 20 nt, Artificial Sequence
  targeting sequence with ATCN PAM
cccggggcccagucacaacu

SEQ ID NO: 3410 - RNA, 20 nt, Artificial Sequence
  targeting sequence with ATCN PAM
cuccucaggcccgagccacg

SEQ ID NO: 3411 - RNA, 20 nt, Artificial Sequence
  targeting sequence with ATCN PAM
agcucuacauccugcacaag

SEQ ID NO: 3412 - RNA, 20 nt, Artificial Sequence
  targeting sequence with ATCN PAM
ugcacaaguacccaacagug

SEQ ID NO: 3413 - RNA, 20 nt, Artificial Sequence
  targeting sequence with ATCN PAM
cggcugagaccacaggagga

SEQ ID NO: 3414 - RNA, 20 nt, Artificial Sequence
  targeting sequence with ATCN PAM
caaacaugcaacaguucacc

SEQ ID NO: 3415 - RNA, 20 nt, Artificial Sequence
  targeting sequence with ATCN PAM
cagggccugugucagcugug

SEQ ID NO: 3416 - RNA, 20 nt, Artificial Sequence
  targeting sequence with ATCN PAM
uuauaaggaggcuccaaaag

SEQ ID NO: 3417 - RNA, 20 nt, Artificial Sequence
  targeting sequence with ATCN PAM
ggacugucaucagccaccag

SEQ ID NO: 3418 - RNA, 20 nt, Artificial Sequence
  targeting sequence with ATCN PAM
gccaccaggaauaccucagg

SEQ ID NO: 3419 - RNA, 20 nt, Artificial Sequence
  targeting sequence with ATCN PAM
ugccuaacuuccugcaugua

SEQ ID NO: 3420 - RNA, 20 nt, Artificial Sequence
  targeting sequence with ATCN PAM
gucaccagguaaccacaggg

SEQ ID NO: 3421 - RNA, 20 nt, Artificial Sequence
  targeting sequence with ATCN PAM
cagaaagucccacccuggua

SEQ ID NO: 3422 - RNA, 20 nt, Artificial Sequence
  targeting sequence with ATCN PAM
gacaccugacgccccucugg

SEQ ID NO: 3423 - RNA, 20 nt, Artificial Sequence
  targeting sequence with ATCN PAM
ccaagacuagaaacuaccuu

SEQ ID NO: 3424 - RNA, 20 nt, Artificial Sequence
  targeting sequence with ATCN PAM
ccaaggcugugagcggcagg

SEQ ID NO: 3425 - RNA, 20 nt, Artificial Sequence
  targeting sequence with ATCN PAM
uuacagcaggacaaucacca

SEQ ID NO: 3426 - RNA, 20 nt, Artificial Sequence
  targeting sequence with ATCN PAM
gaccucagcccauguucugc

SEQ ID NO: 3427 - RNA, 20 nt, Artificial Sequence
  targeting sequence with ATCN PAM
gugggaaaguggcaggccua

SEQ ID NO: 3428 - RNA, 20 nt, Artificial Sequence
  targeting sequence with ATCN PAM
cucaaccaccugcccuaggc

SEQ ID NO: 3429 - RNA, 20 nt, Artificial Sequence
  targeting sequence with ATCN PAM
ugagauccuagaaucauagu

SEQ ID NO: 3430 - RNA, 20 nt, Artificial Sequence
  targeting sequence with ATCN PAM
caggaucucucaaccaccug

SEQ ID NO: 3431 - RNA, 20 nt, Artificial Sequence
  targeting sequence with ATCN PAM
uagaaucauaguagacagug

SEQ ID NO: 3432 - RNA, 20 nt, Artificial Sequence
  targeting sequence with ATCN PAM
uaguagacagugccuccaag

SEQ ID NO: 3433 - RNA, 20 nt, Artificial Sequence
  targeting sequence with ATCN PAM
agcccaggaagauggccccc

SEQ ID NO: 3434 - RNA, 20 nt, Artificial Sequence
  targeting sequence with ATCN PAM
uccugggcuggauuuucuuc

SEQ ID NO: 3435 - RNA, 20 nt, Artificial Sequence
  targeting sequence with ATCN PAM
ccacaccacccccuacaagu

SEQ ID NO: 3436 - RNA, 20 nt, Artificial Sequence
  targeting sequence with ATCN PAM
agugcauguguccugagugc

SEQ ID NO: 3437 - RNA, 20 nt, Artificial Sequence
  targeting sequence with ATCN PAM
gcccgccuuggccucccaaa

SEQ ID NO: 3438 - RNA, 20 nt, Artificial Sequence
  targeting sequence with ATCN PAM
cuugaggucaggaguuugag

SEQ ID NO: 3439 - RNA, 20 nt, Artificial Sequence
  targeting sequence with ATCN PAM
cagguacuuggguggcugag

SEQ ID NO: 3440 - RNA, 20 nt, Artificial Sequence
  targeting sequence with ATCN PAM
cuugaacccaggaggcagau

SEQ ID NO: 3441 - RNA, 20 nt, Artificial Sequence
  targeting sequence with ATCN PAM
gccuccuggguucaagugau

SEQ ID NO: 3442 - RNA, 20 nt, Artificial Sequence
  targeting sequence with ATCN PAM
cggcucacuguaacaucugc

SEQ ID NO: 3443 - RNA, 20 nt, Artificial Sequence
  targeting sequence with ATCN PAM
caccacuguacuccagcgug

SEQ ID NO: 3444 - RNA, 20 nt, Artificial Sequence
  targeting sequence with ATCN PAM
gggcuuuaucuggaggacaa

SEQ ID NO: 3445 - RNA, 20 nt, Artificial Sequence
  targeting sequence with ATCN PAM
ggaggacaaugcagagcugu

SEQ ID NO: 3446 - RNA, 20 nt, Artificial Sequence
  targeting sequence with ATCN PAM
uuccacagcucugcauuguc

SEQ ID NO: 3447 - RNA, 20 nt, Artificial Sequence
  targeting sequence with ATCN PAM
gggcaagauacuaggauccc

SEQ ID NO: 3448 - RNA, 20 nt, Artificial Sequence
  targeting sequence with ATCN PAM
ugcccagauuggucucuaau

SEQ ID NO: 3449 - RNA, 20 nt, Artificial Sequence
  targeting sequence with ATCN PAM
uaguaucuugcccagauugg

SEQ ID NO: 3450 - RNA, 20 nt, Artificial Sequence
  targeting sequence with ATCN PAM
caucucugcaaaaaauaaaa

SEQ ID NO: 3451 - RNA, 20 nt, Artificial Sequence
  targeting sequence with ATCN PAM
cugcaaaaaauaaaaauauu

SEQ ID NO: 3452 - RNA, 20 nt, Artificial Sequence
  targeting sequence with ATCN PAM
uccugccucagccucccaag

SEQ ID NO: 3453 - RNA, 20 nt, Artificial Sequence
  targeting sequence with ATCN PAM
cuugagccugggaggucaag

SEQ ID NO: 3454 - RNA, 20 nt, Artificial Sequence
  targeting sequence with ATCN PAM
caguuuacugcagccuugac

SEQ ID NO: 3455 - RNA, 20 nt, Artificial Sequence
  targeting sequence with ATCN PAM
ccccaccacacuccagcaca

SEQ ID NO: 3456 - RNA, 20 nt, Artificial Sequence
  targeting sequence with ATCN PAM
uggcugccagguggaagaca

SEQ ID NO: 3457 - RNA, 20 nt, Artificial Sequence
  targeting sequence with ATCN PAM
uuuagccacucugagccuca

SEQ ID NO: 3458 - RNA, 20 nt, Artificial Sequence
  targeting sequence with ATCN PAM
aauuccaggagaugcugagg

SEQ ID NO: 3459 - RNA, 20 nt, Artificial Sequence
  targeting sequence with ATCN PAM
ccuggaauuugauggaggag

SEQ ID NO: 3460 - RNA, 20 nt, Artificial Sequence
  targeting sequence with ATCN PAM
cacacucagcccccggaagg

SEQ ID NO: 3461 - RNA, 20 nt, Artificial Sequence
  targeting sequence with ATCN PAM
agggauggggcucaauuucu

SEQ ID NO: 3462 - RNA, 20 nt, Artificial Sequence
  targeting sequence with ATCN PAM
cuggaugacccuuccggggg

SEQ ID NO: 3463 - RNA, 20 nt, Artificial Sequence
  targeting sequence with ATCN PAM
ccaucuuacagauaagagac

SEQ ID NO: 3464 - RNA, 20 nt, Artificial Sequence
  targeting sequence with ATCN PAM
uacagauaagagacuaaggc

SEQ ID NO: 3465 - RNA, 20 nt, Artificial Sequence
  targeting sequence with ATCN PAM
guaagauggggauggcaaca

SEQ ID NO: 3466 - RNA, 20 nt, Artificial Sequence
  targeting sequence with ATCN PAM
cccuucuaagccuuagucuc

SEQ ID NO: 3467 - RNA, 20 nt, Artificial Sequence
  targeting sequence with ATCN PAM
cagcucuggguggcucuggg

SEQ ID NO: 3468 - RNA, 20 nt, Artificial Sequence
  targeting sequence with ATCN PAM
aggccucaucauccaaagug

SEQ ID NO: 3469 - RNA, 20 nt, Artificial Sequence
  targeting sequence with ATCN PAM
uccaaaguguccagccagag

SEQ ID NO: 3470 - RNA, 20 nt, Artificial Sequence
  targeting sequence with ATCN PAM
aaaguguccagccagagggc

SEQ ID NO: 3471 - RNA, 20 nt, Artificial Sequence
  targeting sequence with ATCN PAM
auaaagacuuuuguuucuuu

SEQ ID NO: 3472 - RNA, 20 nt, Artificial Sequence
  targeting sequence with ATCN PAM
uugaaccucagccucuaccc

SEQ ID NO: 3473 - RNA, 20 nt, Artificial Sequence
  targeting sequence with ATCN PAM
gcugagcaccugcuguuuac

SEQ ID NO: 3474 - RNA, 20 nt, Artificial Sequence
  targeting sequence with ATCN PAM
gagccccagcauuggccagg

SEQ ID NO: 3475 - RNA, 20 nt, Artificial Sequence
  targeting sequence with ATCN PAM
cugaggcaggaccuccuauc

SEQ ID NO: 3476 - RNA, 20 nt, Artificial Sequence
  targeting sequence with ATCN PAM
gugcugcagccccauauagc

SEQ ID NO: 3477 - RNA, 20 nt, Artificial Sequence
  targeting sequence with ATCN PAM
ggaugcaaaggggcugaugg

SEQ ID NO: 3478 - RNA, 20 nt, Artificial Sequence
  targeting sequence with ATCN PAM
cgauaucugugcugcagccc

SEQ ID NO: 3479 - RNA, 20 nt, Artificial Sequence
  targeting sequence with ATCN PAM
gccccuuugcaucccgauau

SEQ ID NO: 3480 - RNA, 20 nt, Artificial Sequence
  targeting sequence with ATCN PAM
cccuccaucagccccuuugc

SEQ ID NO: 3481 - RNA, 20 nt, Artificial Sequence
  targeting sequence with ATCN PAM
cagggccagguuaaucuccc

SEQ ID NO: 3482 - RNA, 20 nt, Artificial Sequence
  targeting sequence with ATCN PAM
ggcuuccaggaugagauggc

SEQ ID NO: 3483 - RNA, 20 nt, Artificial Sequence
  targeting sequence with ATCN PAM
uggaagccugaucgcagggc

SEQ ID NO: 3484 - RNA, 20 nt, Artificial Sequence
  targeting sequence with ATCN PAM
cauccuggaagccugaucgc

SEQ ID NO: 3485 - RNA, 20 nt, Artificial Sequence
  targeting sequence with ATCN PAM
aaagccaucucauccuggaa

SEQ ID NO: 3486 - RNA, 20 nt, Artificial Sequence
  targeting sequence with ATCN PAM
uaaaggauggguagcuguug

SEQ ID NO: 3487 - RNA, 20 nt, Artificial Sequence
  targeting sequence with ATCN PAM
uuuaggaucaaaagccaucu

SEQ ID NO: 3488 - RNA, 20 nt, Artificial Sequence
  targeting sequence with ATCN PAM
gccugacaacagcuacccau

SEQ ID NO: 3489 - RNA, 20 nt, Artificial Sequence
  targeting sequence with ATCN PAM
ucugccucaucugccugaca

SEQ ID NO: 3490 - RNA, 20 nt, Artificial Sequence
  targeting sequence with ATCN PAM
gaggggugggaugaaaggag

SEQ ID NO: 3491 - RNA, 20 nt, Artificial Sequence
  targeting sequence with ATCN PAM
caccccucagauggcauccu

SEQ ID NO: 3492 - RNA, 20 nt, Artificial Sequence
  targeting sequence with ATCN PAM
ccuccuuucaucccaccccu

SEQ ID NO: 3493 - RNA, 20 nt, Artificial Sequence
  targeting sequence with ATCN PAM
guuuagaaagaacccucugg

SEQ ID NO: 3494 - RNA, 20 nt, Artificial Sequence
  targeting sequence with ATCN PAM
uuccuuuccacugccagagg

SEQ ID NO: 3495 - RNA, 20 nt, Artificial Sequence
  targeting sequence with ATCN PAM
uugcucagacagcccgucca

SEQ ID NO: 3496 - RNA, 20 nt, Artificial Sequence
  targeting sequence with ATCN PAM
cugucuggaggggguaccau

SEQ ID NO: 3497 - RNA, 20 nt, Artificial Sequence
  targeting sequence with ATCN PAM
cugugcuccucuuuacuggg

SEQ ID NO: 3498 - RNA, 20 nt, Artificial Sequence
  targeting sequence with ATCN PAM
gcggcacuccucacacggag

SEQ ID NO: 3499 - RNA, 20 nt, Artificial Sequence
  targeting sequence with ATCN PAM
uggagcccagagucaagagg

SEQ ID NO: 3500 - RNA, 20 nt, Artificial Sequence
  targeting sequence with ATCN PAM
cagcgucauugucaccaaau

SEQ ID NO: 3501 - RNA, 20 nt, Artificial Sequence
  targeting sequence with ATCN PAM
caaaacaaaaaguguccuca

SEQ ID NO: 3502 - RNA, 20 nt, Artificial Sequence
  targeting sequence with ATCN PAM
gaaugcguguuggaacugca

SEQ ID NO: 3503 - RNA, 20 nt, Artificial Sequence
  targeting sequence with ATCN PAM
uccagcccuaauugagcugg

SEQ ID NO: 3504 - RNA, 20 nt, Artificial Sequence
  targeting sequence with ATCN PAM
gggcagggcuuggcaggaaa

SEQ ID NO: 3505 - RNA, 20 nt, Artificial Sequence
  targeting sequence with ATCN PAM
gcaaucagggcagggcuugg

SEQ ID NO: 3506 - RNA, 20 nt, Artificial Sequence
  targeting sequence with ATCN PAM
uucuaaacagauccccuucc

SEQ ID NO: 3507 - RNA, 20 nt, Artificial Sequence
  targeting sequence with ATCN PAM
guuuagaaagauauauugcu

SEQ ID NO: 3508 - RNA, 20 nt, Artificial Sequence
  targeting sequence with ATCN PAM
ccuuccuuucacuggaacaa

SEQ ID NO: 3509 - RNA, 20 nt, Artificial Sequence
  targeting sequence with ATCN PAM
acccugcagcccuuguucca

SEQ ID NO: 3510 - RNA, 20 nt, Artificial Sequence
  targeting sequence with ATCN PAM
agccgccaucuacccugcag

SEQ ID NO: 3511 - RNA, 20 nt, Artificial Sequence
  targeting sequence with ATCN PAM
cgcagggccuuguaagccaa

SEQ ID NO: 3512 - RNA, 20 nt, Artificial Sequence
  targeting sequence with ATCN PAM
cugcagagacucuguugcuu

SEQ ID NO: 3513 - RNA, 20 nt, Artificial Sequence
  targeting sequence with ATCN PAM
ggguuguggcaggagccucc

SEQ ID NO: 3514 - RNA, 20 nt, Artificial Sequence
  targeting sequence with ATCN PAM
agaagcuaccacuucuaacc

SEQ ID NO: 3515 - RNA, 20 nt, Artificial Sequence
  targeting sequence with ATCN PAM
cuguugaagauggugugaac

SEQ ID NO: 3516 - RNA, 20 nt, Artificial Sequence
  targeting sequence with ATCN PAM
ucaacagcgauccagaagcu

SEQ ID NO: 3517 - RNA, 20 nt, Artificial Sequence
  targeting sequence with ATCN PAM
gcagagcccguucacaccau

SEQ ID NO: 3518 - RNA, 20 nt, Artificial Sequence
  targeting sequence with ATCN PAM
aucagcagagcccguucaca

SEQ ID NO: 3519 - RNA, 20 nt, Artificial Sequence
  targeting sequence with ATCN PAM
aauccaucagcagagcccgu

SEQ ID NO: 3520 - RNA, 20 nt, Artificial Sequence
  targeting sequence with ATCN PAM
gugacccuuccuacauccaa

SEQ ID NO: 3521 - RNA, 20 nt, Artificial Sequence
  targeting sequence with ATCN PAM
agaccccaaauuguggacug

SEQ ID NO: 3522 - RNA, 20 nt, Artificial Sequence
  targeting sequence with ATCN PAM
cggcagccuccuggcacgug

SEQ ID NO: 3523 - RNA, 20 nt, Artificial Sequence
  targeting sequence with ATCN PAM
ggaccauaucucggcagccu

SEQ ID NO: 3524 - RNA, 20 nt, Artificial Sequence
  targeting sequence with ATCN PAM
gcugcucccuuccugccccu

SEQ ID NO: 3525 - RNA, 20 nt, Artificial Sequence
  targeting sequence with ATCN PAM
cggcuuugccuagaugugcu

SEQ ID NO: 3526 - RNA, 20 nt, Artificial Sequence
  targeting sequence with ATCN PAM
aggcaaagccgggauuccag

SEQ ID NO: 3527 - RNA, 20 nt, Artificial Sequence
  targeting sequence with ATCN PAM
gcucugggugcccuucuggg

SEQ ID NO: 3528 - RNA, 20 nt, Artificial Sequence
  targeting sequence with ATCN PAM
caccaucugcucugggugcc

SEQ ID NO: 3529 - RNA, 20 nt, Artificial Sequence
  targeting sequence with ATCN PAM
gugggcaucucacguccaug

SEQ ID NO: 3530 - RNA, 20 nt, Artificial Sequence
  targeting sequence with ATCN PAM
cacguccaugagcuggggac

SEQ ID NO: 3531 - RNA, 20 nt, Artificial Sequence
  targeting sequence with ATCN PAM
augaaaccuugggcaaguua

SEQ ID NO: 3532 - RNA, 20 nt, Artificial Sequence
  targeting sequence with ATCN PAM
uuaaacuaaacuccuuugaa

SEQ ID NO: 3533 - RNA, 20 nt, Artificial Sequence
  targeting sequence with ATCN PAM
ggggucccuagccuccuaug

SEQ ID NO: 3534 - RNA, 20 nt, Artificial Sequence
  targeting sequence with ATCN PAM
ggggcucugaggaccuggca

SEQ ID NO: 3535 - RNA, 20 nt, Artificial Sequence
  targeting sequence with ATCN PAM
uuaucuggggcucugaggac

SEQ ID NO: 3536 - RNA, 20 nt, Artificial Sequence
  targeting sequence with ATCN PAM
cuaguuuccagagucguuuc

SEQ ID NO: 3537 - RNA, 20 nt, Artificial Sequence
  targeting sequence with ATCN PAM
gacauuaagacaggcugugg

SEQ ID NO: 3538 - RNA, 20 nt, Artificial Sequence
  targeting sequence with ATCN PAM
uucuaugucauuaaauauuc

SEQ ID NO: 3539 - RNA, 20 nt, Artificial Sequence
  targeting sequence with ATCN PAM
gguugcaaaauggugugcac

SEQ ID NO: 3540 - RNA, 20 nt, Artificial Sequence
  targeting sequence with ATCN PAM
gggugugcacaccauuuugc

SEQ ID NO: 3541 - RNA, 20 nt, Artificial Sequence
  targeting sequence with ATCN PAM
ugaguucacuccucggcccc

SEQ ID NO: 3542 - RNA, 20 nt, Artificial Sequence
  targeting sequence with ATCN PAM
aagcgccccgugcggcuggc

SEQ ID NO: 3543 - RNA, 20 nt, Artificial Sequence
  targeting sequence with ATCN PAM
cacccaccccccucacccuc

SEQ ID NO: 3544 - RNA, 20 nt, Artificial Sequence
  targeting sequence with ATCN PAM
aaugugcugauaacuuaaau

SEQ ID NO: 3545 - RNA, 20 nt, Artificial Sequence
  targeting sequence with ATCN PAM
gcacauuugauagcauuuug

SEQ ID NO: 3546 - RNA, 20 nt, Artificial Sequence
  targeting sequence with ATCN PAM
gcugcuuaauaagaaggaau

SEQ ID NO: 3547 - RNA, 20 nt, Artificial Sequence
  targeting sequence with ATCN PAM
augcucagaauagaaaaugu

SEQ ID NO: 3548 - RNA, 20 nt, Artificial Sequence
  targeting sequence with ATCN PAM
uucacauuuucuauucugag

SEQ ID NO: 3549 - RNA, 20 nt, Artificial Sequence
  targeting sequence with ATCN PAM
cuccacacagaagccacugu

SEQ ID NO: 3550 - RNA, 20 nt, Artificial Sequence
  targeting sequence with ATCN PAM
cacaaauaccaguucuaaaa

SEQ ID NO: 3551 - RNA, 20 nt, Artificial Sequence
  targeting sequence with ATCN PAM
uuuguccuaguucuuacucu

SEQ ID NO: 3552 - RNA, 20 nt, Artificial Sequence
  targeting sequence with ATCN PAM
agaguaagaacuaggacaaa

SEQ ID NO: 3553 - RNA, 20 nt, Artificial Sequence
  targeting sequence with ATCN PAM
cgagagccagcuccaaaggu

SEQ ID NO: 3554 - RNA, 20 nt, Artificial Sequence
  targeting sequence with ATCN PAM
uucccugggguuggagagga

SEQ ID NO: 3555 - RNA, 20 nt, Artificial Sequence
  targeting sequence with ATCN PAM
gguucauuguucuugugggc

SEQ ID NO: 3556 - RNA, 20 nt, Artificial Sequence
  targeting sequence with ATCN PAM
agcuuaaaaaauacguagca

SEQ ID NO: 3557 - RNA, 20 nt, Artificial Sequence
  targeting sequence with ATCN PAM
cuguaugacagacgcagcaa

SEQ ID NO: 3558 - RNA, 20 nt, Artificial Sequence
  targeting sequence with ATCN PAM
cuaacaagcccgucaggaau

SEQ ID NO: 3559 - RNA, 20 nt, Artificial Sequence
  targeting sequence with ATCN PAM
uccuggaggucccggggugu

SEQ ID NO: 3560 - RNA, 20 nt, Artificial Sequence
  targeting sequence with ATCN PAM
ccuggccucugacugccuuc

SEQ ID NO: 3561 - RNA, 20 nt, Artificial Sequence
  targeting sequence with ATCN PAM
caggacaaaggcuggagccc

SEQ ID NO: 3562 - RNA, 20 nt, Artificial Sequence
  targeting sequence with ATCN PAM
ucuuuauaauaaaagccuua

SEQ ID NO: 3563 - RNA, 20 nt, Artificial Sequence
  targeting sequence with ATCN PAM
gccacagagggucguuucug

SEQ ID NO: 3564 - RNA, 20 nt, Artificial Sequence
  targeting sequence with ATCN PAM
ugcaccaacugugaauagcu

SEQ ID NO: 3565 - RNA, 20 nt, Artificial Sequence
  targeting sequence with ATCN PAM
uuagaaacacuuucagcaag

SEQ ID NO: 3566 - RNA, 20 nt, Artificial Sequence
  targeting sequence with ATCN PAM
ugcugaaaguguuucuaaag

SEQ ID NO: 3567 - RNA, 20 nt, Artificial Sequence
  targeting sequence with ATCN PAM
aguagcccagcuacagccuc

SEQ ID NO: 3568 - RNA, 20 nt, Artificial Sequence
  targeting sequence with ATCN PAM
uaaccccucuccuuuuccug

SEQ ID NO: 3569 - RNA, 20 nt, Artificial Sequence
  targeting sequence with ATCN PAM
aaggucaguucaaggagggc

SEQ ID NO: 3570 - RNA, 20 nt, Artificial Sequence
  targeting sequence with ATCN PAM
acacuggugcagggagcccu

SEQ ID NO: 3571 - RNA, 20 nt, Artificial Sequence
  targeting sequence with ATCN PAM
acgagugcuacagugaggcc

SEQ ID NO: 3572 - RNA, 20 nt, Artificial Sequence
  targeting sequence with ATCN PAM
aagccaccaccugcucaaac

SEQ ID NO: 3573 - RNA, 20 nt, Artificial Sequence
  targeting sequence with ATCN PAM
uggccgcgcuggaggccaac

SEQ ID NO: 3574 - RNA, 20 nt, Artificial Sequence
  targeting sequence with ATCN PAM
gaggggagcagcggagucag

SEQ ID NO: 3575 - RNA, 20 nt, Artificial Sequence
  targeting sequence with ATCN PAM
guccauuaggggcaagcacc

SEQ ID NO: 3576 - RNA, 20 nt, Artificial Sequence
  targeting sequence with ATCN PAM
cagggugcuugccccuaaug

SEQ ID NO: 3577 - RNA, 20 nt, Artificial Sequence
  targeting sequence with ATCN PAM
gccgcaggugagugccccag

SEQ ID NO: 3578 - RNA, 20 nt, Artificial Sequence
  targeting sequence with ATCN PAM
cugccauggccacauuggug

SEQ ID NO: 3579 - RNA, 20 nt, Artificial Sequence
  targeting sequence with ATCN PAM
ugccuccuuauagaaauacc

SEQ ID NO: 3580 - RNA, 20 nt, Artificial Sequence
  targeting sequence with ATCN PAM
ccaacuccccacggccccca

SEQ ID NO: 3581 - RNA, 20 nt, Artificial Sequence
  targeting sequence with ATCN PAM
cugaacuguucugugggggc

SEQ ID NO: 3582 - RNA, 20 nt, Artificial Sequence
  targeting sequence with ATCN PAM
ccucuccauccagagggugc

SEQ ID NO: 3583 - RNA, 20 nt, Artificial Sequence
  targeting sequence with ATCN PAM
agagggugcucuccugcccc

SEQ ID NO: 3584 - RNA, 20 nt, Artificial Sequence
  targeting sequence with ATCN PAM
ggggucgggggcugggccuc

SEQ ID NO: 3585 - RNA, 20 nt, Artificial Sequence
  targeting sequence with ATCN PAM
cucagcucuucaggccccca

SEQ ID NO: 3586 - RNA, 20 nt, Artificial Sequence
  targeting sequence with ATCN PAM
cccgccgccgagccaccgca

SEQ ID NO: 3587 - RNA, 20 nt, Artificial Sequence
  targeting sequence with ATCN PAM
ggccgaggagucgagggugc

SEQ ID NO: 3588 - RNA, 20 nt, Artificial Sequence
  targeting sequence with ATCN PAM
cuugcucgcugagcggcguc

SEQ ID NO: 3589 - RNA, 20 nt, Artificial Sequence
  targeting sequence with ATCN PAM
aggacaugacgccgcucagc

SEQ ID NO: 3590 - RNA, 20 nt, Artificial Sequence
  targeting sequence with ATCN PAM
gcuuguaguagcgcugcacg

SEQ ID NO: 3591 - RNA, 20 nt, Artificial Sequence
  targeting sequence with ATCN PAM
ugcagcgcuacuacaagcag

SEQ ID NO: 3592 - RNA, 20 nt, Artificial Sequence
  targeting sequence with ATCN PAM
uccgguacucaggaaucucc

SEQ ID NO: 3593 - RNA, 20 nt, Artificial Sequence
  targeting sequence with ATCN PAM
ccuuggcguagaggagcuug

SEQ ID NO: 3594 - RNA, 20 nt, Artificial Sequence
  targeting sequence with ATCN PAM
ugggcagagaagagcgaggg

SEQ ID NO: 3595 - RNA, 20 nt, Artificial Sequence
  targeting sequence with ATCN PAM
aacacccucgcucuucucug

SEQ ID NO: 3596 - RNA, 20 nt, Artificial Sequence
  targeting sequence with ATCN PAM
guccuuucuccagcagccau

SEQ ID NO: 3597 - RNA, 20 nt, Artificial Sequence
  targeting sequence with ATCN PAM
ggucguuuucuggaugagcc

SEQ ID NO: 3598 - RNA, 20 nt, Artificial Sequence
  targeting sequence with ATCN PAM
agaaaacgaccagauccguc

SEQ ID NO: 3599 - RNA, 20 nt, Artificial Sequence
  targeting sequence with ATCN PAM
cuccugccacauaagugacc

SEQ ID NO: 3600 - RNA, 20 nt, Artificial Sequence
  targeting sequence with ATCN PAM
uuguccuaacaguccugggg

SEQ ID NO: 3601 - RNA, 20 nt, Artificial Sequence
  targeting sequence with ATCN PAM
uuguuacguggaaugggcug

SEQ ID NO: 3602 - RNA, 20 nt, Artificial Sequence
  targeting sequence with ATCN PAM
cccugagaaggacacauccu

SEQ ID NO: 3603 - RNA, 20 nt, Artificial Sequence
  targeting sequence with ATCN PAM
uagccaccaagaccuaucac

SEQ ID NO: 3604 - RNA, 20 nt, Artificial Sequence
  targeting sequence with ATCN PAM
cuccacuacuacucacguac

SEQ ID NO: 3605 - RNA, 20 nt, Artificial Sequence
  targeting sequence with ATCN PAM
ugcagugccagcuuuaauga

SEQ ID NO: 3606 - RNA, 20 nt, Artificial Sequence
  targeting sequence with ATCN PAM
uuaaagcuggcacugcagga

SEQ ID NO: 3607 - RNA, 20 nt, Artificial Sequence
  targeting sequence with ATCN PAM
caucccugcucacagcaacc

SEQ ID NO: 3608 - RNA, 20 nt, Artificial Sequence
  targeting sequence with ATCN PAM
cugcucacagcaaccggcug

SEQ ID NO: 3609 - RNA, 20 nt, Artificial Sequence
  targeting sequence with ATCN PAM
ucuuucaucuucaaccucua

SEQ ID NO: 3610 - RNA, 20 nt, Artificial Sequence
  targeting sequence with ATCN PAM
ucaaccucuaaagccagaca

SEQ ID NO: 3611 - RNA, 20 nt, Artificial Sequence
  targeting sequence with ATCN PAM
cagagcuccuagccacccau

SEQ ID NO: 3612 - RNA, 20 nt, Artificial Sequence
  targeting sequence with ATCN PAM
ccccucugcccaccccuuca

SEQ ID NO: 3613 - RNA, 20 nt, Artificial Sequence
  targeting sequence with ATCN PAM
gaaaaccgggccaggcucug

SEQ ID NO: 3614 - RNA, 20 nt, Artificial Sequence
  targeting sequence with ATCN PAM
ucugaaaaccgggccaggcu

SEQ ID NO: 3615 - RNA, 20 nt, Artificial Sequence
  targeting sequence with ATCN PAM
cugcagaccaacugcacaug

SEQ ID NO: 3616 - RNA, 20 nt, Artificial Sequence
  targeting sequence with ATCN PAM
gaaacucuguaucgcugcag

SEQ ID NO: 3617 - RNA, 20 nt, Artificial Sequence
  targeting sequence with ATCN PAM
cacauccccuagaccugaga

SEQ ID NO: 3618 - RNA, 20 nt, Artificial Sequence
  targeting sequence with ATCN PAM
ccuagaccugagaucuuuug

SEQ ID NO: 3619 - RNA, 20 nt, Artificial Sequence
  targeting sequence with ATCN PAM
caggucuaggggauguggga

SEQ ID NO: 3620 - RNA, 20 nt, Artificial Sequence
  targeting sequence with ATCN PAM
uuugguuccccucccaggaa

SEQ ID NO: 3621 - RNA, 20 nt, Artificial Sequence
  targeting sequence with ATCN PAM
uccugggaggggaaccaaaa

SEQ ID NO: 3622 - RNA, 20 nt, Artificial Sequence
  targeting sequence with ATCN PAM
cugagcucagccucagagag

SEQ ID NO: 3623 - RNA, 20 nt, Artificial Sequence
  targeting sequence with ATCN PAM
cugaccugcagcugggcaag

SEQ ID NO: 3624 - RNA, 20 nt, Artificial Sequence
  targeting sequence with ATCN PAM
acgccugcuccaucucugac

SEQ ID NO: 3625 - RNA, 20 nt, Artificial Sequence
  targeting sequence with ATCN PAM
cgcaggccuucaucgacgcc

SEQ ID NO: 3626 - RNA, 20 nt, Artificial Sequence
  targeting sequence with ATCN PAM
acgccugccuuucagucauc

SEQ ID NO: 3627 - RNA, 20 nt, Artificial Sequence
  targeting sequence with ATCN PAM
acaagacagaccacaucgac

SEQ ID NO: 3628 - RNA, 20 nt, Artificial Sequence
  targeting sequence with ATCN PAM
ugaagaacccccaguuuguc

SEQ ID NO: 3629 - RNA, 20 nt, Artificial Sequence
  targeting sequence with ATCN PAM
ugugacaaggcuccaaccuc

SEQ ID NO: 3630 - RNA, 20 nt, Artificial Sequence
  targeting sequence with ATCN PAM
cuggccagcuggggugcagu

SEQ ID NO: 3631 - RNA, 20 nt, Artificial Sequence
  targeting sequence with ATCN PAM
cuuacccaguugguagcccu

SEQ ID NO: 3632 - RNA, 20 nt, Artificial Sequence
  targeting sequence with ATCN PAM
gaaucucuuacccaguuggu

SEQ ID NO: 3633 - RNA, 20 nt, Artificial Sequence
  targeting sequence with ATCN PAM
gugaaguggagcugauggug

SEQ ID NO: 3634 - RNA, 20 nt, Artificial Sequence
  targeting sequence with ATCN PAM
gcuccacuucacagauaagc

SEQ ID NO: 3635 - RNA, 20 nt, Artificial Sequence
  targeting sequence with ATCN PAM
uucucccgcaccccucucag

SEQ ID NO: 3636 - RNA, 20 nt, Artificial Sequence
  targeting sequence with ATCN PAM
gagaacacacagcugggaaa

SEQ ID NO: 3637 - RNA, 20 nt, Artificial Sequence
  targeting sequence with ATCN PAM
ggaagaccaacagguggcgg

SEQ ID NO: 3638 - RNA, 20 nt, Artificial Sequence
  targeting sequence with ATCN PAM
ccgaccccgacacccuacac

SEQ ID NO: 3639 - RNA, 20 nt, Artificial Sequence
  targeting sequence with ATCN PAM
gugaagacaagcccccacug

SEQ ID NO: 3640 - RNA, 20 nt, Artificial Sequence
  targeting sequence with ATCN PAM
agaaacuucugcaacgugcc

SEQ ID NO: 3641 - RNA, 20 nt, Artificial Sequence
  targeting sequence with ATCN PAM
ggcuggucaccgagccucuc

SEQ ID NO: 3642 - RNA, 20 nt, Artificial Sequence
  targeting sequence with ATCN PAM
aggcacuggcacauggaguc

SEQ ID NO: 3643 - RNA, 20 nt, Artificial Sequence
  targeting sequence with ATCN PAM
cugaucccucugggccucug

SEQ ID NO: 3644 - RNA, 20 nt, Artificial Sequence
  targeting sequence with ATCN PAM
gugauguccccaaggccacg

SEQ ID NO: 3645 - RNA, 20 nt, Artificial Sequence
  targeting sequence with ATCN PAM
cucugggccucugcuguacc

SEQ ID NO: 3646 - RNA, 20 nt, Artificial Sequence
  targeting sequence with ATCN PAM
accugacccgccugcucucc

SEQ ID NO: 3647 - RNA, 20 nt, Artificial Sequence
  targeting sequence with ATCN PAM
caagaaggugcucccggaaa

SEQ ID NO: 3648 - RNA, 20 nt, Artificial Sequence
  targeting sequence with ATCN PAM
ucggccgccugugggagguc

SEQ ID NO: 3649 - RNA, 20 nt, Artificial Sequence
  targeting sequence with ATCN PAM
ggagggaaccacagcccuug

SEQ ID NO: 3650 - RNA, 20 nt, Artificial Sequence
  targeting sequence with ATCN PAM
cuacucccccaccccccagc

SEQ ID NO: 3651 - RNA, 20 nt, Artificial Sequence
  targeting sequence with ATCN PAM
agccccucaguggguguggc

SEQ ID NO: 3652 - RNA, 20 nt, Artificial Sequence
  targeting sequence with ATCN PAM
cccggggccgagguugggca

SEQ ID NO: 3653 - RNA, 20 nt, Artificial Sequence
  targeting sequence with ATCN PAM
uucugucuucauuucuguuu

SEQ ID NO: 3654 - RNA, 20 nt, Artificial Sequence
  targeting sequence with ATCN PAM
uucugucuuguuucuguuuc

SEQ ID NO: 3655 - RNA, 20 nt, Artificial Sequence
  targeting sequence with ATCN PAM
uucugucucugcuucuguuu

SEQ ID NO: 3656 - RNA, 20 nt, Artificial Sequence
  targeting sequence with ATCN PAM
cugucuccguuucuguuucu

SEQ ID NO: 3657 - RNA, 20 nt, Artificial Sequence
  targeting sequence with ATCN PAM
aaagagacagucagagagaa

SEQ ID NO: 3658 - RNA, 20 nt, Artificial Sequence
  targeting sequence with ATCN PAM
cugucucauucucucugacu

SEQ ID NO: 3659 - RNA, 20 nt, Artificial Sequence
  targeting sequence with ATCN PAM
cucucuccgucucucccaga

SEQ ID NO: 3660 - RNA, 20 nt, Artificial Sequence
  targeting sequence with ATCN PAM
cacuuaucucucucuccguc

SEQ ID NO: 3661 - RNA, 20 nt, Artificial Sequence
  targeting sequence with ATCN PAM
agagacacacagcgagcgag

SEQ ID NO: 3662 - RNA, 20 nt, Artificial Sequence
  targeting sequence with ATCN PAM
cgggucacuguguguguguc

SEQ ID NO: 3663 - RNA, 20 nt, Artificial Sequence
  targeting sequence with ATCN PAM
uccuguuucucuccaccgcu

SEQ ID NO: 3664 - RNA, 20 nt, Artificial Sequence
  targeting sequence with ATCN PAM
gggcuggcaggagcucuggg

SEQ ID NO: 3665 - RNA, 20 nt, Artificial Sequence
  targeting sequence with ATCN PAM
ucugggucucgggguccccu

SEQ ID NO: 3666 - RNA, 20 nt, Artificial Sequence
  targeting sequence with ATCN PAM
cgggcucgcaggccuggcag

SEQ ID NO: 3667 - RNA, 20 nt, Artificial Sequence
  targeting sequence with ATCN PAM
cgcccucccggggccucucu

SEQ ID NO: 3668 - RNA, 20 nt, Artificial Sequence
  targeting sequence with ATCN PAM
gcuugaggaggccuggugug

SEQ ID NO: 3669 - RNA, 20 nt, Artificial Sequence
  targeting sequence with ATCN PAM
caugccccaguggggaagcu

SEQ ID NO: 3670 - RNA, 20 nt, Artificial Sequence
  targeting sequence with ATCN PAM
cugaaggugccucccuggcc

SEQ ID NO: 3671 - RNA, 20 nt, Artificial Sequence
  targeting sequence with ATCN PAM
gaugggaggggagaggccga

SEQ ID NO: 3672 - RNA, 20 nt, Artificial Sequence
  targeting sequence with ATCN PAM
gaucccugaaggugccuccc

SEQ ID NO: 3673 - RNA, 20 nt, Artificial Sequence
  targeting sequence with ATCN PAM
uucgggaccuggacgacacc

SEQ ID NO: 3674 - RNA, 20 nt, Artificial Sequence
  targeting sequence with ATCN PAM
ggguccgggcagggagcugg

SEQ ID NO: 3675 - RNA, 20 nt, Artificial Sequence
  targeting sequence with ATCN PAM
guaaaauggggagggcagga

SEQ ID NO: 3676 - RNA, 20 nt, Artificial Sequence
  targeting sequence with ATCN PAM
gcaauuguaacaugaacagc

SEQ ID NO: 3677 - RNA, 20 nt, Artificial Sequence
  targeting sequence with ATCN PAM
cagcacuuugggaggaugag

SEQ ID NO: 3678 - RNA, 20 nt, Artificial Sequence
  targeting sequence with ATCN PAM
ucccaaagugcugggauuac

SEQ ID NO: 3679 - RNA, 20 nt, Artificial Sequence
  targeting sequence with ATCN PAM
uccugccucauccucccaaa

SEQ ID NO: 3680 - RNA, 20 nt, Artificial Sequence
  targeting sequence with ATCN PAM
cuugagcccaggaguucaag

SEQ ID NO: 3681 - RNA, 20 nt, Artificial Sequence
  targeting sequence with ATCN PAM
uuacaaaaaguaaaauuagc

SEQ ID NO: 3682 - RNA, 20 nt, Artificial Sequence
  targeting sequence with ATCN PAM
agcuaauuuuacuuuuugua

SEQ ID NO: 3683 - RNA, 20 nt, Artificial Sequence
  targeting sequence with ATCN PAM
ccucauuucagccuccugag

SEQ ID NO: 3684 - RNA, 20 nt, Artificial Sequence
  targeting sequence with ATCN PAM
cuugagcccaggaggucgag

SEQ ID NO: 3685 - RNA, 20 nt, Artificial Sequence
  targeting sequence with ATCN PAM
cagcucacugcagccucgac

SEQ ID NO: 3686 - RNA, 20 nt, Artificial Sequence
  targeting sequence with ATCN PAM
cauucugucacccaggcugg

SEQ ID NO: 3687 - RNA, 20 nt, Artificial Sequence
  targeting sequence with ATCN PAM
cgucucaaaaacaaacaaac

SEQ ID NO: 3688 - RNA, 20 nt, Artificial Sequence
  targeting sequence with ATCN PAM
cuccuuuaggaauuaggaag

SEQ ID NO: 3689 - RNA, 20 nt, Artificial Sequence
  targeting sequence with ATCN PAM
aaugaggcccccucagcaag

SEQ ID NO: 3690 - RNA, 20 nt, Artificial Sequence
  targeting sequence with ATCN PAM
ucucaguguccccacauuca

SEQ ID NO: 3691 - RNA, 20 nt, Artificial Sequence
  targeting sequence with ATCN PAM
uggaggccuucugcaagaau

SEQ ID NO: 3692 - RNA, 20 nt, Artificial Sequence
  targeting sequence with ATCN PAM
ucuccuugaccugugucagc

SEQ ID NO: 3693 - RNA, 20 nt, Artificial Sequence
  targeting sequence with ATCN PAM
cuaugucagugcccaggcag

SEQ ID NO: 3694 - RNA, 20 nt, Artificial Sequence
  targeting sequence with ATCN PAM
aggccaagccccggguaagu

SEQ ID NO: 3695 - RNA, 20 nt, Artificial Sequence
  targeting sequence with ATCN PAM
caggcaaggcccgcuacaca

SEQ ID NO: 3696 - RNA, 20 nt, Artificial Sequence
  targeting sequence with ATCN PAM
acgccaucacaggcaaggcc

SEQ ID NO: 3697 - RNA, 20 nt, Artificial Sequence
  targeting sequence with ATCN PAM
acaagggcuccaucgacgcc

SEQ ID NO: 3698 - RNA, 20 nt, Artificial Sequence
  targeting sequence with ATCN PAM
agcagcaaaucaacaagggc

SEQ ID NO: 3699 - RNA, 20 nt, Artificial Sequence
  targeting sequence with ATCN PAM
gggccaaggcccccucugua

SEQ ID NO: 3700 - RNA, 20 nt, Artificial Sequence
  targeting sequence with ATCN PAM
uucuuacugugcagccaaca

SEQ ID NO: 3701 - RNA, 20 nt, Artificial Sequence
  targeting sequence with ATCN PAM
ugggcaggucacuugcccuc

SEQ ID NO: 3702 - RNA, 20 nt, Artificial Sequence
  targeting sequence with ATCN PAM
cccagcugggaagcggcagg

SEQ ID NO: 3703 - RNA, 20 nt, Artificial Sequence
  targeting sequence with ATCN PAM
guguuucggguccaccuaaa

SEQ ID NO: 3704 - RNA, 20 nt, Artificial Sequence
  targeting sequence with ATCN PAM
gccugcaaguggggucgagg

SEQ ID NO: 3705 - RNA, 20 nt, Artificial Sequence
  targeting sequence with ATCN PAM
ccaaggguggcccuccaggc

SEQ ID NO: 3706 - RNA, 20 nt, Artificial Sequence
  targeting sequence with ATCN PAM
gcucauggcuguggguccag

SEQ ID NO: 3707 - RNA, 20 nt, Artificial Sequence
  targeting sequence with ATCN PAM
caguggaacaccuggguccc

SEQ ID NO: 3708 - RNA, 20 nt, Artificial Sequence
  targeting sequence with ATCN PAM
acaaaaauugauuuaaagaa

SEQ ID NO: 3709 - RNA, 20 nt, Artificial Sequence
  targeting sequence with ATCN PAM
auuuuuguggauaguuaagu

SEQ ID NO: 3710 - RNA, 20 nt, Artificial Sequence
  targeting sequence with ATCN PAM
gccuaauacuauuauguacu

SEQ ID NO: 3711 - RNA, 20 nt, Artificial Sequence
  targeting sequence with ATCN PAM
uugccaaaucugccuaauac

SEQ ID NO: 3712 - RNA, 20 nt, Artificial Sequence
  targeting sequence with ATCN PAM
gugccucccacgccccagac

SEQ ID NO: 3713 - RNA, 20 nt, Artificial Sequence
  targeting sequence with ATCN PAM
ggaaccacaagggccacugu

SEQ ID NO: 3714 - RNA, 20 nt, Artificial Sequence
  targeting sequence with ATCN PAM
uuggcacagcccagcugugu

SEQ ID NO: 3715 - RNA, 20 nt, Artificial Sequence
  targeting sequence with ATCN PAM
uggcugggugcaguggcuca

SEQ ID NO: 3716 - RNA, 20 nt, Artificial Sequence
  targeting sequence with ATCN PAM
cagcacuuugggaggccaaa

SEQ ID NO: 3717 - RNA, 20 nt, Artificial Sequence
  targeting sequence with ATCN PAM
ucccgcuuuggccucccaaa

SEQ ID NO: 3718 - RNA, 20 nt, Artificial Sequence
  targeting sequence with ATCN PAM
cuucaaaaauuaauaacaaa

SEQ ID NO: 3719 - RNA, 20 nt, Artificial Sequence
  targeting sequence with ATCN PAM
gaggccccgguucugggcuc

SEQ ID NO: 3720 - RNA, 20 nt, Artificial Sequence
  targeting sequence with ATCN PAM
uccaggcagcccucuagccu

SEQ ID NO: 3721 - RNA, 20 nt, Artificial Sequence
  targeting sequence with ATCN PAM
agaagauucuuuggccuucc

SEQ ID NO: 3722 - RNA, 20 nt, Artificial Sequence
  targeting sequence with ATCN PAM
ucuggaugagagcggaggcu

SEQ ID NO: 3723 - RNA, 20 nt, Artificial Sequence
  targeting sequence with ATCN PAM
ccuccucccggccucugccc

SEQ ID NO: 3724 - RNA, 20 nt, Artificial Sequence
  targeting sequence with ATCN PAM
gguacagcacaagggcagag

SEQ ID NO: 3725 - RNA, 20 nt, Artificial Sequence
  targeting sequence with ATCN PAM
gccccuggcuggcccuugag

SEQ ID NO: 3726 - RNA, 20 nt, Artificial Sequence
  targeting sequence with ATCN PAM
ccugaauccagagcagggaa

SEQ ID NO: 3727 - RNA, 20 nt, Artificial Sequence
  targeting sequence with ATCN PAM
agagcagggaaggguggaug

SEQ ID NO: 3728 - RNA, 20 nt, Artificial Sequence
  targeting sequence with ATCN PAM
acccuucccugcucuggauu

SEQ ID NO: 3729 - RNA, 20 nt, Artificial Sequence
  targeting sequence with ATCN PAM
gugguuuucucagucaucca

SEQ ID NO: 3730 - RNA, 20 nt, Artificial Sequence
  targeting sequence with ATCN PAM
guugagcccuugcagcaagc

SEQ ID NO: 3731 - RNA, 20 nt, Artificial Sequence
  targeting sequence with ATCN PAM
gcauguacagcugucugcgg

SEQ ID NO: 3732 - RNA, 20 nt, Artificial Sequence
  targeting sequence with ATCN PAM
aguuggugagcaucuucucc

SEQ ID NO: 3733 - RNA, 20 nt, Artificial Sequence
  targeting sequence with ATCN PAM
ucuccaccacagacucugug

SEQ ID NO: 3734 - RNA, 20 nt, Artificial Sequence
  targeting sequence with ATCN PAM
ugaaggagcugcugguggac

SEQ ID NO: 3735 - RNA, 20 nt, Artificial Sequence
  targeting sequence with ATCN PAM
cgcugcacggcaagcuggag

SEQ ID NO: 3736 - RNA, 20 nt, Artificial Sequence
  targeting sequence with ATCN PAM
ucuuuguccacgcgcuggag

SEQ ID NO: 3737 - RNA, 20 nt, Artificial Sequence
  targeting sequence with ATCN PAM
guggaagcaacuggugaugg

SEQ ID NO: 3738 - RNA, 20 nt, Artificial Sequence
  targeting sequence with ATCN PAM
ccaguugcuuccacagauuc

SEQ ID NO: 3739 - RNA, 20 nt, Artificial Sequence
  targeting sequence with ATCN PAM
caggaggcauacaagcagcc

SEQ ID NO: 3740 - RNA, 20 nt, Artificial Sequence
  targeting sequence with ATCN PAM
accguggaagguaaugagcu

SEQ ID NO: 3741 - RNA, 20 nt, Artificial Sequence
  targeting sequence with ATCN PAM
cagcggggcuggacaccccc

SEQ ID NO: 3742 - RNA, 20 nt, Artificial Sequence
  targeting sequence with ATCN PAM
uuuuucacgaaacccuccag

SEQ ID NO: 3743 - RNA, 20 nt, Artificial Sequence
  targeting sequence with ATCN PAM
cuuccaugccucucaugccu

SEQ ID NO: 3744 - RNA, 20 nt, Artificial Sequence
  targeting sequence with ATCN PAM
agugagcagagaaugacagu

SEQ ID NO: 3745 - RNA, 20 nt, Artificial Sequence
  targeting sequence with ATCN PAM
gccuccaacccuucuccccg

SEQ ID NO: 3746 - RNA, 20 nt, Artificial Sequence
  targeting sequence with ATCN PAM
ccuuccuggaguauaagcac

SEQ ID NO: 3747 - RNA, 20 nt, Artificial Sequence
  targeting sequence with ATCN PAM
caccaaggagcugaaccgca

SEQ ID NO: 3748 - RNA, 20 nt, Artificial Sequence
  targeting sequence with ATCN PAM
gucaugucugucugcagcuc

SEQ ID NO: 3749 - RNA, 20 nt, Artificial Sequence
  targeting sequence with ATCN PAM
ccuaggagggaaaguugagg

SEQ ID NO: 3750 - RNA, 20 nt, Artificial Sequence
  targeting sequence with ATCN PAM
gcaaagguagugggcgggga

SEQ ID NO: 3751 - RNA, 20 nt, Artificial Sequence
  targeting sequence with ATCN PAM
gagaggaaauccgcaaaggu

SEQ ID NO: 3752 - RNA, 20 nt, Artificial Sequence
  targeting sequence with ATCN PAM
gagauuccaucuccuccauc

SEQ ID NO: 3753 - RNA, 20 nt, Artificial Sequence
  targeting sequence with ATCN PAM
cagauccgagaggaaauccg

SEQ ID NO: 3754 - RNA, 20 nt, Artificial Sequence
  targeting sequence with ATCN PAM
ccuccaucugcagcagcguc

SEQ ID NO: 3755 - RNA, 20 nt, Artificial Sequence
  targeting sequence with ATCN PAM
gcagcagcgucuucugccag

SEQ ID NO: 3756 - RNA, 20 nt, Artificial Sequence
  targeting sequence with ATCN PAM
ggcauugcuuugcuggccau

SEQ ID NO: 3757 - RNA, 20 nt, Artificial Sequence
  targeting sequence with ATCN PAM
ucccacccaggaaagccacu

SEQ ID NO: 3758 - RNA, 20 nt, Artificial Sequence
  targeting sequence with ATCN PAM
gcuuuuaaaaguuucuuaau

SEQ ID NO: 3759 - RNA, 20 nt, Artificial Sequence
  targeting sequence with ATCN PAM
ccacuaauuuuagagcauuu

SEQ ID NO: 3760 - RNA, 20 nt, Artificial Sequence
  targeting sequence with ATCN PAM
ccauucagcuuucugucucu

SEQ ID NO: 3761 - RNA, 20 nt, Artificial Sequence
  targeting sequence with ATCN PAM
ucucuuaaguaccuucagua

SEQ ID NO: 3762 - RNA, 20 nt, Artificial Sequence
  targeting sequence with ATCN PAM
caagcagagaaauuuggaac

SEQ ID NO: 3763 - RNA, 20 nt, Artificial Sequence
  targeting sequence with ATCN PAM
ccuggccaccuaacaucuuc

SEQ ID NO: 3764 - RNA, 20 nt, Artificial Sequence
  targeting sequence with ATCN PAM
ucuacccauuggugcuggag

SEQ ID NO: 3765 - RNA, 20 nt, Artificial Sequence
  targeting sequence with ATCN PAM
cauccugccuucucccaucu

SEQ ID NO: 3766 - RNA, 20 nt, Artificial Sequence
  targeting sequence with ATCN PAM
ugccuucucccaucugccaa

SEQ ID NO: 3767 - RNA, 20 nt, Artificial Sequence
  targeting sequence with ATCN PAM
gccaaucuucagaggggcug

SEQ ID NO: 3768 - RNA, 20 nt, Artificial Sequence
  targeting sequence with ATCN PAM
ucagaggggcuggggcaagg

SEQ ID NO: 3769 - RNA, 20 nt, Artificial Sequence
  targeting sequence with ATCN PAM
gcagcguccugcugcugcuc

SEQ ID NO: 3770 - RNA, 20 nt, Artificial Sequence
  targeting sequence with ATCN PAM
ucaucugcagcguccugcug

SEQ ID NO: 3771 - RNA, 20 nt, Artificial Sequence
  targeting sequence with ATCN PAM
uguccaucgucaucugcagc

SEQ ID NO: 3772 - RNA, 20 nt, Artificial Sequence
  targeting sequence with ATCN PAM
ucguguccaucgucaucugc

SEQ ID NO: 3773 - RNA, 20 nt, Artificial Sequence
  targeting sequence with ATCN PAM
ccacacugcagcuggggggc

SEQ ID NO: 3774 - RNA, 20 nt, Artificial Sequence
  targeting sequence with ATCN PAM
agguagggaacuucaaccag

SEQ ID NO: 3775 - RNA, 20 nt, Artificial Sequence
  targeting sequence with ATCN PAM
gugcagagguuggggaaggg

SEQ ID NO: 3776 - RNA, 20 nt, Artificial Sequence
  targeting sequence with ATCN PAM
guguggcaccugaggcucag

SEQ ID NO: 3777 - RNA, 20 nt, Artificial Sequence
  targeting sequence with ATCN PAM
cuauguuaucaguguggcac

SEQ ID NO: 3778 - RNA, 20 nt, Artificial Sequence
  targeting sequence with ATCN PAM
cagcccccugcauugagcca

SEQ ID NO: 3779 - RNA, 20 nt, Artificial Sequence
  targeting sequence with ATCN PAM
uuacagccugggaggaguag

SEQ ID NO: 3780 - RNA, 20 nt, Artificial Sequence
  targeting sequence with ATCN PAM
gcaaggcugcccugggacca

SEQ ID NO: 3781 - RNA, 20 nt, Artificial Sequence
  targeting sequence with ATCN PAM
ugggguggcacacgcugcuu

SEQ ID NO: 3782 - RNA, 20 nt, Artificial Sequence
  targeting sequence with ATCN PAM
caggagacaugcaaggagau

SEQ ID NO: 3783 - RNA, 20 nt, Artificial Sequence
  targeting sequence with ATCN PAM
ccuugcaugucuccugggau

SEQ ID NO: 3784 - RNA, 20 nt, Artificial Sequence
  targeting sequence with ATCN PAM
uagagccugggcugccaggc

SEQ ID NO: 3785 - RNA, 20 nt, Artificial Sequence
  targeting sequence with ATCN PAM
gaaaccauaagaaauugucc

SEQ ID NO: 3786 - RNA, 20 nt, Artificial Sequence
  targeting sequence with ATCN PAM
ggaccuggaccaucagaaac

SEQ ID NO: 3787 - RNA, 20 nt, Artificial Sequence
  targeting sequence with ATCN PAM
cugaccucaagcaagucacu

SEQ ID NO: 3788 - RNA, 20 nt, Artificial Sequence
  targeting sequence with ATCN PAM
ccacuugacauaugaggaaa

SEQ ID NO: 3789 - RNA, 20 nt, Artificial Sequence
  targeting sequence with ATCN PAM
gccccucacccagcaccuga

SEQ ID NO: 3790 - RNA, 20 nt, Artificial Sequence
  targeting sequence with ATCN PAM
gccaagcaucugccccucac

SEQ ID NO: 3791 - RNA, 20 nt, Artificial Sequence
  targeting sequence with ATCN PAM
acucacugugaugggcagcu

SEQ ID NO: 3792 - RNA, 20 nt, Artificial Sequence
  targeting sequence with ATCN PAM
cagugaguggauggggcgcc

SEQ ID NO: 3793 - RNA, 20 nt, Artificial Sequence
  targeting sequence with ATCN PAM
acugcucggucaacgagucc

SEQ ID NO: 3794 - RNA, 20 nt, Artificial Sequence
  targeting sequence with ATCN PAM
uccacugcucggucaacgag

SEQ ID NO: 3795 - RNA, 20 nt, Artificial Sequence
  targeting sequence with ATCN PAM
ggaugucgcagcuuacuugg

SEQ ID NO: 3796 - RNA, 20 nt, Artificial Sequence
  targeting sequence with ATCN PAM
agauugucucugacagaauc

SEQ ID NO: 3797 - RNA, 20 nt, Artificial Sequence
  targeting sequence with ATCN PAM
ugacccgguacucgugacuc

SEQ ID NO: 3798 - RNA, 20 nt, Artificial Sequence
  targeting sequence with ATCN PAM
ucccccuuugcacccacaga

SEQ ID NO: 3799 - RNA, 20 nt, Artificial Sequence
  targeting sequence with ATCN PAM
acgugagcaccaaaggggcc

SEQ ID NO: 3800 - RNA, 20 nt, Artificial Sequence
  targeting sequence with ATCN PAM
agcaccaccccggggagccu

SEQ ID NO: 3801 - RNA, 20 nt, Artificial Sequence
  targeting sequence with ATCN PAM
acuucucccucuuggccgua

SEQ ID NO: 3802 - RNA, 20 nt, Artificial Sequence
  targeting sequence with ATCN PAM
augggcgggccuacgcagac

SEQ ID NO: 3803 - RNA, 20 nt, Artificial Sequence
  targeting sequence with ATCN PAM
gcgccaguggacuucuucau

SEQ ID NO: 3804 - RNA, 20 nt, Artificial Sequence
  targeting sequence with ATCN PAM
ccugcccgucccccggggcc

SEQ ID NO: 3805 - RNA, 20 nt, Artificial Sequence
  targeting sequence with ATCN PAM
cggccugggccccuggcucu

SEQ ID NO: 3806 - RNA, 20 nt, Artificial Sequence
  targeting sequence with ATCN PAM
ugcaucccggccugggcccc

SEQ ID NO: 3807 - RNA, 20 nt, Artificial Sequence
  targeting sequence with ATCN PAM
guccauccugcaucccggcc

SEQ ID NO: 3808 - RNA, 20 nt, Artificial Sequence
  targeting sequence with ATCN PAM
cuguccccucuuccucccuc

SEQ ID NO: 3809 - RNA, 20 nt, Artificial Sequence
  targeting sequence with ATCN PAM
ggcccccgaaugccucaccg

SEQ ID NO: 3810 - RNA, 20 nt, Artificial Sequence
  targeting sequence with ATCN PAM
caguggcuggugagcguuuc

SEQ ID NO: 3811 - RNA, 20 nt, Artificial Sequence
  targeting sequence with ATCN PAM
gugcaccugcagccccagag

SEQ ID NO: 3812 - RNA, 20 nt, Artificial Sequence
  targeting sequence with ATCN PAM
guccccgccgcagcccuguc

SEQ ID NO: 3813 - RNA, 20 nt, Artificial Sequence
  targeting sequence with ATCN PAM
cggccaucaguccccgccgc

SEQ ID NO: 3814 - RNA, 20 nt, Artificial Sequence
  targeting sequence with ATCN PAM
ccugcaccaugccugagggg

SEQ ID NO: 3815 - RNA, 20 nt, Artificial Sequence
  targeting sequence with ATCN PAM
gugcgccuggggggagcagc

SEQ ID NO: 3816 - RNA, 20 nt, Artificial Sequence
  targeting sequence with ATCN PAM
gcagggccugccuucugcug

SEQ ID NO: 3817 - RNA, 20 nt, Artificial Sequence
  targeting sequence with ATCN PAM
ucugcccaguuagugcccag

SEQ ID NO: 3818 - RNA, 20 nt, Artificial Sequence
  targeting sequence with ATCN PAM
caccuccuccaggaagccuu

SEQ ID NO: 3819 - RNA, 20 nt, Artificial Sequence
  targeting sequence with ATCN PAM
ggggagagagacuucaccag

SEQ ID NO: 3820 - RNA, 20 nt, Artificial Sequence
  targeting sequence with ATCN PAM
cugaaggcacugacuuuucu

SEQ ID NO: 3821 - RNA, 20 nt, Artificial Sequence
  targeting sequence with ATCN PAM
uagccccacuggauguuccu

SEQ ID NO: 3822 - RNA, 20 nt, Artificial Sequence
  targeting sequence with ATCN PAM
aguggggcuaggauugggag

SEQ ID NO: 3823 - RNA, 20 nt, Artificial Sequence
  targeting sequence with ATCN PAM
ucuggcuggcccaggggugu

SEQ ID NO: 3824 - RNA, 20 nt, Artificial Sequence
  targeting sequence with ATCN PAM
gugugugugcaaucaacacc

SEQ ID NO: 3825 - RNA, 20 nt, Artificial Sequence
  targeting sequence with ATCN PAM
acaccauucucauuacagcu

SEQ ID NO: 3826 - RNA, 20 nt, Artificial Sequence
  targeting sequence with ATCN PAM
cuuauggagcaacuacugua

SEQ ID NO: 3827 - RNA, 20 nt, Artificial Sequence
  targeting sequence with ATCN PAM
uugagccaagccucucuugg

SEQ ID NO: 3828 - RNA, 20 nt, Artificial Sequence
  targeting sequence with ATCN PAM
augggcuugggggcuggcgg

SEQ ID NO: 3829 - RNA, 20 nt, Artificial Sequence
  targeting sequence with ATCN PAM
cuuccagcccagagaaauca

SEQ ID NO: 3830 - RNA, 20 nt, Artificial Sequence
  targeting sequence with ATCN PAM
gcuccgugcaggggucugug

SEQ ID NO: 3831 - RNA, 20 nt, Artificial Sequence
  targeting sequence with ATCN PAM
augggaaugaccuccaugua

SEQ ID NO: 3832 - RNA, 20 nt, Artificial Sequence
  targeting sequence with ATCN PAM
ccauccaugggaaugaccuc

SEQ ID NO: 3833 - RNA, 20 nt, Artificial Sequence
  targeting sequence with ATCN PAM
uggugcccccggccuugggg

SEQ ID NO: 3834 - RNA, 20 nt, Artificial Sequence
  targeting sequence with ATCN PAM
ugugugucacagggccagcc

SEQ ID NO: 3835 - RNA, 20 nt, Artificial Sequence
  targeting sequence with ATCN PAM
ugaggggaggugcugugguc

SEQ ID NO: 3836 - RNA, 20 nt, Artificial Sequence
  targeting sequence with ATCN PAM
cugagccuggcucuagggug

SEQ ID NO: 3837 - RNA, 20 nt, Artificial Sequence
  targeting sequence with ATCN PAM
ccccauuccacgccaugcca

SEQ ID NO: 3838 - RNA, 20 nt, Artificial Sequence
  targeting sequence with ATCN PAM
guuucccacaguucugcaac

SEQ ID NO: 3839 - RNA, 20 nt, Artificial Sequence
  targeting sequence with ATCN PAM
gagacccuuuugucccaccc

SEQ ID NO: 3840 - RNA, 20 nt, Artificial Sequence
  targeting sequence with ATCN PAM
ugagaacgucugcugggcug

SEQ ID NO: 3841 - RNA, 20 nt, Artificial Sequence
  targeting sequence with ATCN PAM
accagcccagcagacguucu

SEQ ID NO: 3842 - RNA, 20 nt, Artificial Sequence
  targeting sequence with ATCN PAM
ggcguguggaagagccguca

SEQ ID NO: 3843 - RNA, 20 nt, Artificial Sequence
  targeting sequence with ATCN PAM
gugacuggcccagaggggcc

SEQ ID NO: 3844 - RNA, 20 nt, Artificial Sequence
  targeting sequence with ATCN PAM
cuaaaccaugccaguagccc

SEQ ID NO: 3845 - RNA, 20 nt, Artificial Sequence
  targeting sequence with ATCN PAM
uuugcaauuaaaaaggcugg

SEQ ID NO: 3846 - RNA, 20 nt, Artificial Sequence
  targeting sequence with ATCN PAM
gagccagagcuggagggaua

SEQ ID NO: 3847 - RNA, 20 nt, Artificial Sequence
  targeting sequence with ATCN PAM
cuccagcucuggcucugaug

SEQ ID NO: 3848 - RNA, 20 nt, Artificial Sequence
  targeting sequence with ATCN PAM
gcuuuaucccuccagcucug

SEQ ID NO: 3849 - RNA, 20 nt, Artificial Sequence
  targeting sequence with ATCN PAM
ugccguuucugcuuggggca

SEQ ID NO: 3850 - RNA, 20 nt, Artificial Sequence
  targeting sequence with ATCN PAM
ucuguccucacucugcugcu

SEQ ID NO: 3851 - RNA, 20 nt, Artificial Sequence
  targeting sequence with ATCN PAM
gucaggcaguggcucacagg

SEQ ID NO: 3852 - RNA, 20 nt, Artificial Sequence
  targeting sequence with ATCN PAM
acacgccgugggccacguca

SEQ ID NO: 3853 - RNA, 20 nt, Artificial Sequence
  targeting sequence with ATCN PAM
gaggaaggaaccugggccgg

SEQ ID NO: 3854 - RNA, 20 nt, Artificial Sequence
  targeting sequence with ATCN PAM
gccaggugacccgagagagg

SEQ ID NO: 3855 - RNA, 20 nt, Artificial Sequence
  targeting sequence with ATCN PAM
cauucgccccucucucgggu

SEQ ID NO: 3856 - RNA, 20 nt, Artificial Sequence
  targeting sequence with ATCN PAM
gaggcugcaggccagcaggc

SEQ ID NO: 3857 - RNA, 20 nt, Artificial Sequence
  targeting sequence with ATCN PAM
uccuugccagcacagugacc

SEQ ID NO: 3858 - RNA, 20 nt, Artificial Sequence
  targeting sequence with ATCN PAM
uccaggagacccccuaagua

SEQ ID NO: 3859 - RNA, 20 nt, Artificial Sequence
  targeting sequence with ATCN PAM
cuaaagccaccaaugacaug

SEQ ID NO: 3860 - RNA, 20 nt, Artificial Sequence
  targeting sequence with ATCN PAM
ugguauccccugaaacuaac

SEQ ID NO: 3861 - RNA, 20 nt, Artificial Sequence
  targeting sequence with ATCN PAM
ccugaaacuaacaacauuca

SEQ ID NO: 3862 - RNA, 20 nt, Artificial Sequence
  targeting sequence with ATCN PAM
acgcgguaagcaugcccagu

SEQ ID NO: 3863 - RNA, 20 nt, Artificial Sequence
  targeting sequence with ATCN PAM
cgggggcggggcaggugcca

SEQ ID NO: 3864 - RNA, 20 nt, Artificial Sequence
  targeting sequence with ATCN PAM
cuccacaugcacaggugacc

SEQ ID NO: 3865 - RNA, 20 nt, Artificial Sequence
  targeting sequence with ATCN PAM
ggcuggccgccccuuuaguu

SEQ ID NO: 3866 - RNA, 20 nt, Artificial Sequence
  targeting sequence with ATCN PAM
ucgaggcugugugggugaau

SEQ ID NO: 3867 - RNA, 20 nt, Artificial Sequence
  targeting sequence with ATCN PAM
ccuccagcccaaaacuacac

SEQ ID NO: 3868 - RNA, 20 nt, Artificial Sequence
  targeting sequence with ATCN PAM
ugaaggcuguguugagcuuu

SEQ ID NO: 3869 - RNA, 20 nt, Artificial Sequence
  targeting sequence with ATCN PAM
agcuuaaaagcccccuguuc

SEQ ID NO: 3870 - RNA, 20 nt, Artificial Sequence
  targeting sequence with ATCN PAM
gggaaggcuucagaacaggg

SEQ ID NO: 3871 - RNA, 20 nt, Artificial Sequence
  targeting sequence with ATCN PAM
ggccuucucaggagcagcac

SEQ ID NO: 3872 - RNA, 20 nt, Artificial Sequence
  targeting sequence with ATCN PAM
gccagccacagggacauaaa

SEQ ID NO: 3873 - RNA, 20 nt, Artificial Sequence
  targeting sequence with ATCN PAM
cagaugcccggcacguggcc

SEQ ID NO: 3874 - RNA, 20 nt, Artificial Sequence
  targeting sequence with ATCN PAM
gggaugugucgggaagccuc

SEQ ID NO: 3875 - RNA, 20 nt, Artificial Sequence
  targeting sequence with ATCN PAM
guuacuuccauggaggagcu

SEQ ID NO: 3876 - RNA, 20 nt, Artificial Sequence
  targeting sequence with ATCN PAM
gggcuggggguuggggacgc

SEQ ID NO: 3877 - RNA, 20 nt, Artificial Sequence
  targeting sequence with ATCN PAM
uggugccucuggccaacacu

SEQ ID NO: 3878 - RNA, 20 nt, Artificial Sequence
  targeting sequence with ATCN PAM
cuaagguggacauggcggga

SEQ ID NO: 3879 - RNA, 20 nt, Artificial Sequence
  targeting sequence with ATCN PAM
cucugagcugggagguaugg

SEQ ID NO: 3880 - RNA, 20 nt, Artificial Sequence
  targeting sequence with ATCN PAM
gguguagaauaaagaagcgu

SEQ ID NO: 3881 - RNA, 20 nt, Artificial Sequence
  targeting sequence with ATCN PAM
gucccuguccugcucucauc

SEQ ID NO: 3882 - RNA, 20 nt, Artificial Sequence
  targeting sequence with ATCN PAM
gagggcauggaauccauguu

SEQ ID NO: 3883 - RNA, 20 nt, Artificial Sequence
  targeting sequence with ATCN PAM
auguuuccacucaggccucg

SEQ ID NO: 3884 - RNA, 20 nt, Artificial Sequence
  targeting sequence with ATCN PAM
guucagagccuccugcacgc

SEQ ID NO: 3885 - RNA, 20 nt, Artificial Sequence
  targeting sequence with ATCN PAM
auaaaaugggaccugccuga

SEQ ID NO: 3886 - RNA, 20 nt, Artificial Sequence
  targeting sequence with ATCN PAM
cucugugccucuguuucccc

SEQ ID NO: 3887 - RNA, 20 nt, Artificial Sequence
  targeting sequence with ATCN PAM
uagggaagcuacugaaucuc

SEQ ID NO: 3888 - RNA, 20 nt, Artificial Sequence
  targeting sequence with ATCN PAM
uacagccacagcucacaccu

SEQ ID NO: 3889 - RNA, 20 nt, Artificial Sequence
  targeting sequence with ATCN PAM
cugaagcccugucuaccccg

SEQ ID NO: 3890 - RNA, 20 nt, Artificial Sequence
  targeting sequence with ATCN PAM
ucucaggaaucccugaagcc

SEQ ID NO: 3891 - RNA, 20 nt, Artificial Sequence
  targeting sequence with ATCN PAM
acuaaauggggugggagcaa

SEQ ID NO: 3892 - RNA, 20 nt, Artificial Sequence
  targeting sequence with ATCN PAM
uucccaggcagccccgauga

SEQ ID NO: 3893 - RNA, 20 nt, Artificial Sequence
  targeting sequence with ATCN PAM
acgacugcagccgcacugca

SEQ ID NO: 3894 - RNA, 20 nt, Artificial Sequence
  targeting sequence with ATCN PAM
ucaaggccaauuucaccauc

SEQ ID NO: 3895 - RNA, 20 nt, Artificial Sequence
  targeting sequence with ATCN PAM
caacagucacguggucugga

SEQ ID NO: 3896 - RNA, 20 nt, Artificial Sequence
  targeting sequence with ATCN PAM
auuccagaccacgugacugu

SEQ ID NO: 3897 - RNA, 20 nt, Artificial Sequence
  targeting sequence with ATCN PAM
ggugaccaaaggcagggccu

SEQ ID NO: 3898 - RNA, 20 nt, Artificial Sequence
  targeting sequence with ATCN PAM
gcacuguggcucggguccca

SEQ ID NO: 3899 - RNA, 20 nt, Artificial Sequence
  targeting sequence with ATCN PAM
ccaugccacugaggcugggc

SEQ ID NO: 3900 - RNA, 20 nt, Artificial Sequence
  targeting sequence with ATCN PAM
cgggcagccugcccagccuc

SEQ ID NO: 3901 - RNA, 20 nt, Artificial Sequence
  targeting sequence with ATCN PAM
gcaggaucaugcccuggggg

SEQ ID NO: 3902 - RNA, 20 nt, Artificial Sequence
  targeting sequence with ATCN PAM
ugcagaucucgggcagccug

SEQ ID NO: 3903 - RNA, 20 nt, Artificial Sequence
  targeting sequence with ATCN PAM
ugcccugggggcaaggagcc

SEQ ID NO: 3904 - RNA, 20 nt, Artificial Sequence
  targeting sequence with ATCN PAM
aucucggaaggcaggacggu

SEQ ID NO: 3905 - RNA, 20 nt, Artificial Sequence
  targeting sequence with ATCN PAM
augugcgccaggaguaccca

SEQ ID NO: 3906 - RNA, 20 nt, Artificial Sequence
  targeting sequence with ATCN PAM
cggaaggcaggacggucaug

SEQ ID NO: 3907 - RNA, 20 nt, Artificial Sequence
  targeting sequence with ATCN PAM
gggggcagaggugggggccc

SEQ ID NO: 3908 - RNA, 20 nt, Artificial Sequence
  targeting sequence with ATCN PAM
cagcaccagccgagcccucu

SEQ ID NO: 3909 - RNA, 20 nt, Artificial Sequence
  targeting sequence with ATCN PAM
gguaaagguaaccggagucu

SEQ ID NO: 3910 - RNA, 20 nt, Artificial Sequence
  targeting sequence with ATCN PAM
accugaacgagagcaugcag

SEQ ID NO: 3911 - RNA, 20 nt, Artificial Sequence
  targeting sequence with ATCN PAM
guggggguagugggcaucag

SEQ ID NO: 3912 - RNA, 20 nt, Artificial Sequence
  targeting sequence with ATCN PAM
gggugcuggagcccauagca

SEQ ID NO: 3913 - RNA, 20 nt, Artificial Sequence
  targeting sequence with ATCN PAM
ugucuuggacccuucaggag

SEQ ID NO: 3914 - RNA, 20 nt, Artificial Sequence
  targeting sequence with ATCN PAM
aggcccggcccugugcccuc

SEQ ID NO: 3915 - RNA, 20 nt, Artificial Sequence
  targeting sequence with ATCN PAM
cgcccugugaacgugugcag

SEQ ID NO: 3916 - RNA, 20 nt, Artificial Sequence
  targeting sequence with ATCN PAM
aaacccaagccccugcccuu

SEQ ID NO: 3917 - RNA, 20 nt, Artificial Sequence
  targeting sequence with ATCN PAM
gccuggccugugucuuauuu

SEQ ID NO: 3918 - RNA, 20 nt, Artificial Sequence
  targeting sequence with ATCN PAM
gaggcugggagcggccgagg

SEQ ID NO: 3919 - RNA, 20 nt, Artificial Sequence
  targeting sequence with ATCN PAM
cuucacuuugugccucuugc

SEQ ID NO: 3920 - RNA, 20 nt, Artificial Sequence
  targeting sequence with ATCN PAM
caaggcuacaaugcaauacc

SEQ ID NO: 3921 - RNA, 20 nt, Artificial Sequence
  targeting sequence with ATCN PAM
uggucuuccuccucccugca

SEQ ID NO: 3922 - RNA, 20 nt, Artificial Sequence
  targeting sequence with ATCN PAM
ggggccuggaagcuucucug

SEQ ID NO: 3923 - RNA, 20 nt, Artificial Sequence
  targeting sequence with ATCN PAM
ucaggaggacacgcagaggg

SEQ ID NO: 3924 - RNA, 20 nt, Artificial Sequence
  targeting sequence with ATCN PAM
caaaaugcccagccuggggc

SEQ ID NO: 3925 - RNA, 20 nt, Artificial Sequence
  targeting sequence with ATCN PAM
ccaggaccuugagugccaga

SEQ ID NO: 3926 - RNA, 20 nt, Artificial Sequence
  targeting sequence with ATCN PAM
aacccggacaaccccagcuu

SEQ ID NO: 3927 - RNA, 20 nt, Artificial Sequence
  targeting sequence with ATCN PAM
ccacccccucaacccugcuc

SEQ ID NO: 3928 - RNA, 20 nt, Artificial Sequence
  targeting sequence with ATCN PAM
uuuauugagcaacuacugug

SEQ ID NO: 3929 - RNA, 20 nt, Artificial Sequence
  targeting sequence with ATCN PAM
ccacacccagcacaggcccu

SEQ ID NO: 3930 - RNA, 20 nt, Artificial Sequence
  targeting sequence with ATCN PAM
uuuccccucucagagccuca

SEQ ID NO: 3931 - RNA, 20 nt, Artificial Sequence
  targeting sequence with ATCN PAM
guggcaugagaaucgugccu

SEQ ID NO: 3932 - RNA, 20 nt, Artificial Sequence
  targeting sequence with ATCN PAM
ugccucugccucccuugcag

SEQ ID NO: 3933 - RNA, 20 nt, Artificial Sequence
  targeting sequence with ATCN PAM
ucucacuuaauucucacacc

SEQ ID NO: 3934 - RNA, 20 nt, Artificial Sequence
  targeting sequence with ATCN PAM
cccaagucccccccaaccca

SEQ ID NO: 3935 - RNA, 20 nt, Artificial Sequence
  targeting sequence with ATCN PAM
gaucugagcaguuaggccgg

SEQ ID NO: 3936 - RNA, 20 nt, Artificial Sequence
  targeting sequence with ATCN PAM
gaucacccaaguccccccca

SEQ ID NO: 3937 - RNA, 20 nt, Artificial Sequence
  targeting sequence with ATCN PAM
gagcaguuaggccgggccug

SEQ ID NO: 3938 - RNA, 20 nt, Artificial Sequence
  targeting sequence with ATCN PAM
cuccugcucccucuugggag

SEQ ID NO: 3939 - RNA, 20 nt, Artificial Sequence
  targeting sequence with ATCN PAM
aguuucccugcucuggggca

SEQ ID NO: 3940 - RNA, 20 nt, Artificial Sequence
  targeting sequence with ATCN PAM
ccucccagcuccaggaaucu

SEQ ID NO: 3941 - RNA, 20 nt, Artificial Sequence
  targeting sequence with ATCN PAM
ccaaccauaccuaccuugag

SEQ ID NO: 3942 - RNA, 20 nt, Artificial Sequence
  targeting sequence with ATCN PAM
ugcagccccugaaggccacg

SEQ ID NO: 3943 - RNA, 20 nt, Artificial Sequence
  targeting sequence with ATCN PAM
gacgugccguuccucuucca

SEQ ID NO: 3944 - RNA, 20 nt, Artificial Sequence
  targeting sequence with ATCN PAM
cagcuccagaaccuucuccg

SEQ ID NO: 3945 - RNA, 20 nt, Artificial Sequence
  targeting sequence with ATCN PAM
cagccagcugugcgggcggg

SEQ ID NO: 3946 - RNA, 20 nt, Artificial Sequence
  targeting sequence with ATCN PAM
caggcccuggcaucagagcu

SEQ ID NO: 3947 - RNA, 20 nt, Artificial Sequence
  targeting sequence with ATCN PAM
gagcuuucaagucuuguucc

SEQ ID NO: 3948 - RNA, 20 nt, Artificial Sequence
  targeting sequence with ATCN PAM
ucagugcucagcugaggccc

SEQ ID NO: 3949 - RNA, 20 nt, Artificial Sequence
  targeting sequence with ATCN PAM
ccaagcccaggccugcccug

SEQ ID NO: 3950 - RNA, 20 nt, Artificial Sequence
  targeting sequence with ATCN PAM
ccuuggaacagcucuguaac

SEQ ID NO: 3951 - RNA, 20 nt, Artificial Sequence
  targeting sequence with ATCN PAM
ucuccuuggaacagcucugu

SEQ ID NO: 3952 - RNA, 20 nt, Artificial Sequence
  targeting sequence with ATCN PAM
aaccugaccuuguucccucg

SEQ ID NO: 3953 - RNA, 20 nt, Artificial Sequence
  targeting sequence with ATCN PAM
gguguggacuccucugcucu

SEQ ID NO: 3954 - RNA, 20 nt, Artificial Sequence
  targeting sequence with ATCN PAM
ccucaucugcccacauuaca

SEQ ID NO: 3955 - RNA, 20 nt, Artificial Sequence
  targeting sequence with ATCN PAM
gcccacauuacagggggaca

SEQ ID NO: 3956 - RNA, 20 nt, Artificial Sequence
  targeting sequence with ATCN PAM
cccaugcccuccagcagcaa

SEQ ID NO: 3957 - RNA, 20 nt, Artificial Sequence
  targeting sequence with ATCN PAM
gcugcggcucacagggcagc

SEQ ID NO: 3958 - RNA, 20 nt, Artificial Sequence
  targeting sequence with ATCN PAM
ccucucacagcugcccugug

SEQ ID NO: 3959 - RNA, 20 nt, Artificial Sequence
  targeting sequence with ATCN PAM
cauguccgggcuguucccug

SEQ ID NO: 3960 - RNA, 20 nt, Artificial Sequence
  targeting sequence with ATCN PAM
gacacauguguguguccccu

SEQ ID NO: 3961 - RNA, 20 nt, Artificial Sequence
  targeting sequence with ATCN PAM
uggcuuaucauccaggagag

SEQ ID NO: 3962 - RNA, 20 nt, Artificial Sequence
  targeting sequence with ATCN PAM
uccaggagagcagcccccau

SEQ ID NO: 3963 - RNA, 20 nt, Artificial Sequence
  targeting sequence with ATCN PAM
aggagagcagcccccauccc

SEQ ID NO: 3964 - RNA, 20 nt, Artificial Sequence
  targeting sequence with ATCN PAM
cgcagugacgccauaagccc

SEQ ID NO: 3965 - RNA, 20 nt, Artificial Sequence
  targeting sequence with ATCN PAM
gugugggcuuauggcgucac

SEQ ID NO: 3966 - RNA, 20 nt, Artificial Sequence
  targeting sequence with ATCN PAM
ugugacuuuucuuguaauca

SEQ ID NO: 3967 - RNA, 20 nt, Artificial Sequence
  targeting sequence with ATCN PAM
uggcagcccuagggguccua

SEQ ID NO: 3968 - RNA, 20 nt, Artificial Sequence
  targeting sequence with ATCN PAM
cacagauggggaaacugagg

SEQ ID NO: 3969 - RNA, 20 nt, Artificial Sequence
  targeting sequence with ATCN PAM
gugagauaggaccccuaggg

SEQ ID NO: 3970 - RNA, 20 nt, Artificial Sequence
  targeting sequence with ATCN PAM
gaggcucagagcaggacuca

SEQ ID NO: 3971 - RNA, 20 nt, Artificial Sequence
  targeting sequence with ATCN PAM
uuagggcaaagcuuuaaaga

SEQ ID NO: 3972 - RNA, 20 nt, Artificial Sequence
  targeting sequence with ATCN PAM
auaguguuuuccgcauagag

SEQ ID NO: 3973 - RNA, 20 nt, Artificial Sequence
  targeting sequence with ATCN PAM
cagccucuaugcggaaaaca

SEQ ID NO: 3974 - RNA, 20 nt, Artificial Sequence
  targeting sequence with ATCN PAM
uuuguuuuaaaguguuccca

SEQ ID NO: 3975 - RNA, 20 nt, Artificial Sequence
  targeting sequence with ATCN PAM
uccagccucagccucccaag

SEQ ID NO: 3976 - RNA, 20 nt, Artificial Sequence
  targeting sequence with ATCN PAM
cuugaguccaggaguucuag

SEQ ID NO: 3977 - RNA, 20 nt, Artificial Sequence
  targeting sequence with ATCN PAM
gcauagcacacuacagccua

SEQ ID NO: 3978 - RNA, 20 nt, Artificial Sequence
  targeting sequence with ATCN PAM
gguguccacacuaaguucag

SEQ ID NO: 3979 - RNA, 20 nt, Artificial Sequence
  targeting sequence with ATCN PAM
auauggugaccucccgggag

SEQ ID NO: 3980 - RNA, 20 nt, Artificial Sequence
  targeting sequence with ATCN PAM
gcuaacacuuccuggacacu

SEQ ID NO: 3981 - RNA, 20 nt, Artificial Sequence
  targeting sequence with ATCN PAM
gcaguugaacauggguaacu

SEQ ID NO: 3982 - RNA, 20 nt, Artificial Sequence
  targeting sequence with ATCN PAM
aaaaagaaagaaagaaaauu

SEQ ID NO: 3983 - RNA, 20 nt, Artificial Sequence
  targeting sequence with ATCN PAM
ugccuaccuuaaagcuuuug

SEQ ID NO: 3984 - RNA, 20 nt, Artificial Sequence
  targeting sequence with ATCN PAM
ucucaccuggacagcccucc

SEQ ID NO: 3985 - RNA, 20 nt, Artificial Sequence
  targeting sequence with ATCN PAM
gcuaacacagcugccaaaug

SEQ ID NO: 3986 - RNA, 20 nt, Artificial Sequence
  targeting sequence with ATCN PAM
ggggagaccugcuuuacauu

SEQ ID NO: 3987 - RNA, 20 nt, Artificial Sequence
  targeting sequence with ATCN PAM
ugaauccuaaauccucccgu

SEQ ID NO: 3988 - RNA, 20 nt, Artificial Sequence
  targeting sequence with ATCN PAM
uaaauccucccguggguccc

SEQ ID NO: 3989 - RNA, 20 nt, Artificial Sequence
  targeting sequence with ATCN PAM
ucccguggguccccucaucu

SEQ ID NO: 3990 - RNA, 20 nt, Artificial Sequence
  targeting sequence with ATCN PAM
ucuaacuccauuucacaccu

SEQ ID NO: 3991 - RNA, 20 nt, Artificial Sequence
  targeting sequence with ATCN PAM
caagcucguuccugccucag

SEQ ID NO: 3992 - RNA, 20 nt, Artificial Sequence
  targeting sequence with ATCN PAM
uuggcaccuccucucagugc

SEQ ID NO: 3993 - RNA, 20 nt, Artificial Sequence
  targeting sequence with ATCN PAM
uguguguguuacaguugggg

SEQ ID NO: 3994 - RNA, 20 nt, Artificial Sequence
  targeting sequence with ATCN PAM
ugcagcugcagggaagaggu

SEQ ID NO: 3995 - RNA, 20 nt, Artificial Sequence
  targeting sequence with ATCN PAM
caccucaccucuucccugca

SEQ ID NO: 3996 - RNA, 20 nt, Artificial Sequence
  targeting sequence with ATCN PAM
ucaccacugcgagggaugau

SEQ ID NO: 3997 - RNA, 20 nt, Artificial Sequence
  targeting sequence with ATCN PAM
cucgcaguggugaggauccc

SEQ ID NO: 3998 - RNA, 20 nt, Artificial Sequence
  targeting sequence with ATCN PAM
ucccucgcaguggugaggau

SEQ ID NO: 3999 - RNA, 20 nt, Artificial Sequence
  targeting sequence with ATCN PAM
uuuaaaaauaaguuguuuaa

SEQ ID NO: 4000 - RNA, 20 nt, Artificial Sequence
  targeting sequence with ATCN PAM
cucccaccaagggaacauaa

SEQ ID NO: 4001 - RNA, 20 nt, Artificial Sequence
  targeting sequence with ATCN PAM
ggggccucccaggugucccc

SEQ ID NO: 4002 - RNA, 20 nt, Artificial Sequence
  targeting sequence with ATCN PAM
agccagggugggguccuggg

SEQ ID NO: 4003 - RNA, 20 nt, Artificial Sequence
  targeting sequence with ATCN PAM
ccccgagcugggcgccuggu

SEQ ID NO: 4004 - RNA, 20 nt, Artificial Sequence
  targeting sequence with ATCN PAM
gugggcuagggcagcaggga

SEQ ID NO: 4005 - RNA, 20 nt, Artificial Sequence
  targeting sequence with ATCN PAM
uaaaauaaaauuuuaaaaaa

SEQ ID NO: 4006 - RNA, 20 nt, Artificial Sequence
  targeting sequence with ATCN PAM
uucggagcagccgacggcuu

SEQ ID NO: 4007 - RNA, 20 nt, Artificial Sequence
  targeting sequence with ATCN PAM
guguuccgagggggaagcug

SEQ ID NO: 4008 - RNA, 20 nt, Artificial Sequence
  targeting sequence with ATCN PAM
gcuucccccucggaacacag

SEQ ID NO: 4009 - RNA, 20 nt, Artificial Sequence
  targeting sequence with ATCN PAM
caaggcaaaccggcucaaac

SEQ ID NO: 4010 - RNA, 20 nt, Artificial Sequence
  targeting sequence with ATCN PAM
cccucccccagcaggggcgg

SEQ ID NO: 4011 - RNA, 20 nt, Artificial Sequence
  targeting sequence with ATCN PAM
ccgcagcgcccuccaaguca

SEQ ID NO: 4012 - RNA, 20 nt, Artificial Sequence
  targeting sequence with ATCN PAM
uucucucacacaaagcuggu

SEQ ID NO: 4013 - RNA, 20 nt, Artificial Sequence
  targeting sequence with ATCN PAM
cgaggacagccaggagcugg

SEQ ID NO: 4014 - RNA, 20 nt, Artificial Sequence
  targeting sequence with ATCN PAM
agccccagcaguccagccuc

SEQ ID NO: 4015 - RNA, 20 nt, Artificial Sequence
  targeting sequence with ATCN PAM
gucuccacagguccuggaau

SEQ ID NO: 4016 - RNA, 20 nt, Artificial Sequence
  targeting sequence with ATCN PAM
caugccucugaggcauucgu

SEQ ID NO: 4017 - RNA, 20 nt, Artificial Sequence
  targeting sequence with ATCN PAM
ugaaaacuugccgucugggc

SEQ ID NO: 4018 - RNA, 20 nt, Artificial Sequence
  targeting sequence with ATCN PAM
caggaguuggggggcugagc

SEQ ID NO: 4019 - RNA, 20 nt, Artificial Sequence
  targeting sequence with ATCN PAM
cucucucacaugggaugagc

SEQ ID NO: 4020 - RNA, 20 nt, Artificial Sequence
  targeting sequence with ATCN PAM
caugugagagagggauaaag

SEQ ID NO: 4021 - RNA, 20 nt, Artificial Sequence
  targeting sequence with ATCN PAM
ugcucucaaaacggggccga

SEQ ID NO: 4022 - RNA, 20 nt, Artificial Sequence
  targeting sequence with ATCN PAM
auaugucagaguuuuaaugg

SEQ ID NO: 4023 - RNA, 20 nt, Artificial Sequence
  targeting sequence with ATCN PAM
ugccgcagacccaccgcagg

SEQ ID NO: 4024 - RNA, 20 nt, Artificial Sequence
  targeting sequence with ATCN PAM
uuuucauagugccaccugcg

SEQ ID NO: 4025 - RNA, 20 nt, Artificial Sequence
  targeting sequence with ATCN PAM
agcgguuccgucacagguac

SEQ ID NO: 4026 - RNA, 20 nt, Artificial Sequence
  targeting sequence with ATCN PAM
aacacuucaggcaggaaggu

SEQ ID NO: 4027 - RNA, 20 nt, Artificial Sequence
  targeting sequence with ATCN PAM
uaaacaaucaaacacuucag

SEQ ID NO: 4028 - RNA, 20 nt, Artificial Sequence
  targeting sequence with ATCN PAM
ugggaaagucagguuuccuu

SEQ ID NO: 4029 - RNA, 20 nt, Artificial Sequence
  targeting sequence with ATCN PAM
ugugcuuucagcucuguggc

SEQ ID NO: 4030 - RNA, 20 nt, Artificial Sequence
  targeting sequence with ATCN PAM
cuuugggguauuaagacugc

SEQ ID NO: 4031 - RNA, 20 nt, Artificial Sequence
  targeting sequence with ATCN PAM
cagcgcuuugggagguggac

SEQ ID NO: 4032 - RNA, 20 nt, Artificial Sequence
  targeting sequence with ATCN PAM
uuccacguccaccucccaaa

SEQ ID NO: 4033 - RNA, 20 nt, Artificial Sequence
  targeting sequence with ATCN PAM
ccugaagccuggaggucaag

SEQ ID NO: 4034 - RNA, 20 nt, Artificial Sequence
  targeting sequence with ATCN PAM
uggccggggacugggcuguc

SEQ ID NO: 4035 - RNA, 20 nt, Artificial Sequence
  targeting sequence with ATCN PAM
uucacgggagccaaagagag

SEQ ID NO: 4036 - RNA, 20 nt, Artificial Sequence
  targeting sequence with ATCN PAM
uaccguuaccgugguacauu

SEQ ID NO: 4037 - RNA, 20 nt, Artificial Sequence
  targeting sequence with ATCN PAM
uuguaacuuuccugaaaauc

SEQ ID NO: 4038 - RNA, 20 nt, Artificial Sequence
  targeting sequence with ATCN PAM
aaaauuauuccaaaguaaaa

SEQ ID NO: 4039 - RNA, 20 nt, Artificial Sequence
  targeting sequence with ATCN PAM
ccugugcagcucaacagcuu

SEQ ID NO: 4040 - RNA, 20 nt, Artificial Sequence
  targeting sequence with ATCN PAM
ggcccugaccucuguggccu

SEQ ID NO: 4041 - RNA, 20 nt, Artificial Sequence
  targeting sequence with ATCN PAM
ucucccuacagccccuccag

SEQ ID NO: 4042 - RNA, 20 nt, Artificial Sequence
  targeting sequence with ATCN PAM
agaccagcuggacaccaucu

SEQ ID NO: 4043 - RNA, 20 nt, Artificial Sequence
  targeting sequence with ATCN PAM
ggaagggcugaagccagcca

SEQ ID NO: 4044 - RNA, 20 nt, Artificial Sequence
  targeting sequence with ATCN PAM
ugcccagucuguguguuggc

SEQ ID NO: 4045 - RNA, 20 nt, Artificial Sequence
  targeting sequence with ATCN PAM
gcccacccaccccaaacagg

SEQ ID NO: 4046 - RNA, 20 nt, Artificial Sequence
  targeting sequence with ATCN PAM
agccaggcuugugaccuaag

SEQ ID NO: 4047 - RNA, 20 nt, Artificial Sequence
  targeting sequence with ATCN PAM
guaaaauggguacgcagcaa

SEQ ID NO: 4048 - RNA, 20 nt, Artificial Sequence
  targeting sequence with ATCN PAM
ccucugaaccucggacucca

SEQ ID NO: 4049 - RNA, 20 nt, Artificial Sequence
  targeting sequence with ATCN PAM
guaaaauaagacagcaauag

SEQ ID NO: 4050 - RNA, 20 nt, Artificial Sequence
  targeting sequence with ATCN PAM
gaggcuggaugggcuacacc

SEQ ID NO: 4051 - RNA, 20 nt, Artificial Sequence
  targeting sequence with ATCN PAM
agccucggaugcuuugacuu

SEQ ID NO: 4052 - RNA, 20 nt, Artificial Sequence
  targeting sequence with ATCN PAM
cacacugugcuccucuggga

SEQ ID NO: 4053 - RNA, 20 nt, Artificial Sequence
  targeting sequence with ATCN PAM
aaccuccaaguccccccagc

SEQ ID NO: 4054 - RNA, 20 nt, Artificial Sequence
  targeting sequence with ATCN PAM
cacacccuccuccccagccc

SEQ ID NO: 4055 - RNA, 20 nt, Artificial Sequence
  targeting sequence with ATCN PAM
cacgaccgcuguggacacag

SEQ ID NO: 4056 - RNA, 20 nt, Artificial Sequence
  targeting sequence with ATCN PAM
ccgggcuggauuccaugagc

SEQ ID NO: 4057 - RNA, 20 nt, Artificial Sequence
  targeting sequence with ATCN PAM
agcccggagauguuugcgca

SEQ ID NO: 4058 - RNA, 20 nt, Artificial Sequence
  targeting sequence with ATCN PAM
gagcucagaggcccagcccc

SEQ ID NO: 4059 - RNA, 20 nt, Artificial Sequence
  targeting sequence with ATCN PAM
uggggcugggccucugagcu

SEQ ID NO: 4060 - RNA, 20 nt, Artificial Sequence
  targeting sequence with ATCN PAM
cauucaacccucaccacacc

SEQ ID NO: 4061 - RNA, 20 nt, Artificial Sequence
  targeting sequence with ATCN PAM
acucuuucagggugugguga

SEQ ID NO: 4062 - RNA, 20 nt, Artificial Sequence
  targeting sequence with ATCN PAM
cuucaacucucugugccuca

SEQ ID NO: 4063 - RNA, 20 nt, Artificial Sequence
  targeting sequence with ATCN PAM
agccauuccggcugugugcc

SEQ ID NO: 4064 - RNA, 20 nt, Artificial Sequence
  targeting sequence with ATCN PAM
aagccuccagcgcaggccug

SEQ ID NO: 4065 - RNA, 20 nt, Artificial Sequence
  targeting sequence with ATCN PAM
ggagcccgcaggccugcgcu

SEQ ID NO: 4066 - RNA, 20 nt, Artificial Sequence
  targeting sequence with ATCN PAM
ccgcccuuaaccacagccuc

SEQ ID NO: 4067 - RNA, 20 nt, Artificial Sequence
  targeting sequence with ATCN PAM
gccgcuuggagcuggaaaaa

SEQ ID NO: 4068 - RNA, 20 nt, Artificial Sequence
  targeting sequence with ATCN PAM
aggugauggcugcuucuaga

SEQ ID NO: 4069 - RNA, 20 nt, Artificial Sequence
  targeting sequence with ATCN PAM
ccuugaugggccucaguuuc

SEQ ID NO: 4070 - RNA, 20 nt, Artificial Sequence
  targeting sequence with ATCN PAM
uuguuugaggugacugagcu

SEQ ID NO: 4071 - RNA, 20 nt, Artificial Sequence
  targeting sequence with ATCN PAM
guaaauaaugggggggggcc

SEQ ID NO: 4072 - RNA, 20 nt, Artificial Sequence
  targeting sequence with ATCN PAM
gagcauaaagugcuacauga

SEQ ID NO: 4073 - RNA, 20 nt, Artificial Sequence
  targeting sequence with ATCN PAM
uguagcacuuuaugcucuga

SEQ ID NO: 4074 - RNA, 20 nt, Artificial Sequence
  targeting sequence with ATCN PAM
ugcgcuggagggggagggaa

SEQ ID NO: 4075 - RNA, 20 nt, Artificial Sequence
  targeting sequence with ATCN PAM
aguuucaggguaaaggacgg

SEQ ID NO: 4076 - RNA, 20 nt, Artificial Sequence
  targeting sequence with ATCN PAM
gggggccagcgccagcgggg

SEQ ID NO: 4077 - RNA, 20 nt, Artificial Sequence
  targeting sequence with ATCN PAM
ugacugcaucgaguaucagc

SEQ ID NO: 4078 - RNA, 20 nt, Artificial Sequence
  targeting sequence with ATCN PAM
aguaucagccgagcagggug

SEQ ID NO: 4079 - RNA, 20 nt, Artificial Sequence
  targeting sequence with ATCN PAM
gccgagcaggguggagcagg

SEQ ID NO: 4080 - RNA, 20 nt, Artificial Sequence
  targeting sequence with ATCN PAM
aguggcaggggcccugcucc

SEQ ID NO: 4081 - RNA, 20 nt, Artificial Sequence
  targeting sequence with ATCN PAM
ucacugccccccaaguacag

SEQ ID NO: 4082 - RNA, 20 nt, Artificial Sequence
  targeting sequence with ATCN PAM
aaguccacguggcuggcacu

SEQ ID NO: 4083 - RNA, 20 nt, Artificial Sequence
  targeting sequence with ATCN PAM
ccacauggcugucagagcug

SEQ ID NO: 4084 - RNA, 20 nt, Artificial Sequence
  targeting sequence with ATCN PAM
aggggcggaggcgcucaccc

SEQ ID NO: 4085 - RNA, 20 nt, Artificial Sequence
  targeting sequence with ATCN PAM
ugccagcaccuggcagggcc

SEQ ID NO: 4086 - RNA, 20 nt, Artificial Sequence
  targeting sequence with ATCN PAM
gguuccggaagggacccugu

SEQ ID NO: 4087 - RNA, 20 nt, Artificial Sequence
  targeting sequence with ATCN PAM
gccaugucucuccuuucccc

SEQ ID NO: 4088 - RNA, 20 nt, Artificial Sequence
  targeting sequence with ATCN PAM
aagucuuuagccugcaggca

SEQ ID NO: 4089 - RNA, 20 nt, Artificial Sequence
  targeting sequence with ATCN PAM
cugagccuuugccccuaucg

SEQ ID NO: 4090 - RNA, 20 nt, Artificial Sequence
  targeting sequence with ATCN PAM
ugugcucugccuggaaugcc

SEQ ID NO: 4091 - RNA, 20 nt, Artificial Sequence
  targeting sequence with ATCN PAM
gucaagugcugcuccaaccu

SEQ ID NO: 4092 - RNA, 20 nt, Artificial Sequence
  targeting sequence with ATCN PAM
gaggagugcgggagggcuuc

SEQ ID NO: 4093 - RNA, 20 nt, Artificial Sequence
  targeting sequence with ATCN PAM
gucugaugucaugaccuccu

SEQ ID NO: 4094 - RNA, 20 nt, Artificial Sequence
  targeting sequence with ATCN PAM
gacagaugccacacacuaac

SEQ ID NO: 4095 - RNA, 20 nt, Artificial Sequence
  targeting sequence with ATCN PAM
caugcccguccaagcucugg

SEQ ID NO: 4096 - RNA, 20 nt, Artificial Sequence
  targeting sequence with ATCN PAM
uaaccccagcccgcgaccau

SEQ ID NO: 4097 - RNA, 20 nt, Artificial Sequence
  targeting sequence with ATCN PAM
uggucgcgggcugggguuag

SEQ ID NO: 4098 - RNA, 20 nt, Artificial Sequence
  targeting sequence with ATCN PAM
uugaccgaaggggugugagc

SEQ ID NO: 4099 - RNA, 20 nt, Artificial Sequence
  targeting sequence with ATCN PAM
ugccugaggucacaccgugg

SEQ ID NO: 4100 - RNA, 20 nt, Artificial Sequence
  targeting sequence with ATCN PAM
ccagucuauggaaggggaaa

SEQ ID NO: 4101 - RNA, 20 nt, Artificial Sequence
  targeting sequence with ATCN PAM
ccccagaaccugaaugacau

SEQ ID NO: 4102 - RNA, 20 nt, Artificial Sequence
  targeting sequence with ATCN PAM
uuuaaucuccccagaaccug

SEQ ID NO: 4103 - RNA, 20 nt, Artificial Sequence
  targeting sequence with ATCN PAM
ugucauaauuacugugguug

SEQ ID NO: 4104 - RNA, 20 nt, Artificial Sequence
  targeting sequence with ATCN PAM
ccauggagaccgggagucac

SEQ ID NO: 4105 - RNA, 20 nt, Artificial Sequence
  targeting sequence with ATCN PAM
gacuuugcagagggcguuuc

SEQ ID NO: 4106 - RNA, 20 nt, Artificial Sequence
  targeting sequence with ATCN PAM
ggcccggcagaaacgcccuc

SEQ ID NO: 4107 - RNA, 20 nt, Artificial Sequence
  targeting sequence with ATCN PAM
auaaagugggcugagcgcag

SEQ ID NO: 4108 - RNA, 20 nt, Artificial Sequence
  targeting sequence with ATCN PAM
guucuuggagccuccauuuu

SEQ ID NO: 4109 - RNA, 20 nt, Artificial Sequence
  targeting sequence with ATCN PAM
ugccucugccccuuccuagc

SEQ ID NO: 4110 - RNA, 20 nt, Artificial Sequence
  targeting sequence with ATCN PAM
gggaaguuggccccaggguc

SEQ ID NO: 4111 - RNA, 20 nt, Artificial Sequence
  targeting sequence with ATCN PAM
cuaggugagugcaggacccu

SEQ ID NO: 4112 - RNA, 20 nt, Artificial Sequence
  targeting sequence with ATCN PAM
agggcgcugacagauccccc

SEQ ID NO: 4113 - RNA, 20 nt, Artificial Sequence
  targeting sequence with ATCN PAM
gucagcgcccuggauacgcc

SEQ ID NO: 4114 - RNA, 20 nt, Artificial Sequence
  targeting sequence with ATCN PAM
cccacucacccuccugggug

SEQ ID NO: 4115 - RNA, 20 nt, Artificial Sequence
  targeting sequence with ATCN PAM
uucacacugaccauugaacc

SEQ ID NO: 4116 - RNA, 20 nt, Artificial Sequence
  targeting sequence with ATCN PAM
cucauuugcacacccaaagg

SEQ ID NO: 4117 - RNA, 20 nt, Artificial Sequence
  targeting sequence with ATCN PAM
gccucuggaaggagugagcc

SEQ ID NO: 4118 - RNA, 20 nt, Artificial Sequence
  targeting sequence with ATCN PAM
ucagccucuggaaggaguga

SEQ ID NO: 4119 - RNA, 20 nt, Artificial Sequence
  targeting sequence with ATCN PAM
cauuuucagacaaaugcaac

SEQ ID NO: 4120 - RNA, 20 nt, Artificial Sequence
  targeting sequence with ATCN PAM
cccagcauguggccuggccu

SEQ ID NO: 4121 - RNA, 20 nt, Artificial Sequence
  targeting sequence with ATCN PAM
gcagaggccaggccacaugc

SEQ ID NO: 4122 - RNA, 20 nt, Artificial Sequence
  targeting sequence with ATCN PAM
caaugggcccugccugaauc

SEQ ID NO: 4123 - RNA, 20 nt, Artificial Sequence
  targeting sequence with ATCN PAM
cuauggcccagccagagggg

SEQ ID NO: 4124 - RNA, 20 nt, Artificial Sequence
  targeting sequence with ATCN PAM
gcggauccagacccucacuc

SEQ ID NO: 4125 - RNA, 20 nt, Artificial Sequence
  targeting sequence with ATCN PAM
gcagauagaagcaggagucc

SEQ ID NO: 4126 - RNA, 20 nt, Artificial Sequence
  targeting sequence with ATCN PAM
agacccucacuccccagcug

SEQ ID NO: 4127 - RNA, 20 nt, Artificial Sequence
  targeting sequence with ATCN PAM
ccagcuuacagaaggggaaa

SEQ ID NO: 4128 - RNA, 20 nt, Artificial Sequence
  targeting sequence with ATCN PAM
uccccagcuuacagaagggg

SEQ ID NO: 4129 - RNA, 20 nt, Artificial Sequence
  targeting sequence with ATCN PAM
ucauccccagcuuacagaag

SEQ ID NO: 4130 - RNA, 20 nt, Artificial Sequence
  targeting sequence with ATCN PAM
cagucucugugcuggggcug

SEQ ID NO: 4131 - RNA, 20 nt, Artificial Sequence
  targeting sequence with ATCN PAM
aauagggccugaaggcaggc

SEQ ID NO: 4132 - RNA, 20 nt, Artificial Sequence
  targeting sequence with ATCN PAM
caucuccuccaaggcccuga

SEQ ID NO: 4133 - RNA, 20 nt, Artificial Sequence
  targeting sequence with ATCN PAM
ccuccaaggcccugacccuc

SEQ ID NO: 4134 - RNA, 20 nt, Artificial Sequence
  targeting sequence with ATCN PAM
ccuguccacugaggccaguu

SEQ ID NO: 4135 - RNA, 20 nt, Artificial Sequence
  targeting sequence with ATCN PAM
agagggagaaaagacaccag

SEQ ID NO: 4136 - RNA, 20 nt, Artificial Sequence
  targeting sequence with ATCN PAM
caggggugucucucucagcc

SEQ ID NO: 4137 - RNA, 20 nt, Artificial Sequence
  targeting sequence with ATCN PAM
acccacauccuaggagggag

SEQ ID NO: 4138 - RNA, 20 nt, Artificial Sequence
  targeting sequence with ATCN PAM
uaggagggaggcauaagacc

SEQ ID NO: 4139 - RNA, 20 nt, Artificial Sequence
  targeting sequence with ATCN PAM
cucccagcccugagaauguc

SEQ ID NO: 4140 - RNA, 20 nt, Artificial Sequence
  targeting sequence with ATCN PAM
guuucuccaggccagagggu

SEQ ID NO: 4141 - RNA, 20 nt, Artificial Sequence
  targeting sequence with ATCN PAM
cagccaauccuccuagaacc

SEQ ID NO: 4142 - RNA, 20 nt, Artificial Sequence
  targeting sequence with ATCN PAM
uccuagaacccccucuccua

SEQ ID NO: 4143 - RNA, 20 nt, Artificial Sequence
  targeting sequence with ATCN PAM
ugccaagugucucugcuugc

SEQ ID NO: 4144 - RNA, 20 nt, Artificial Sequence
  targeting sequence with ATCN PAM
cccagugacgaagggugcaa

SEQ ID NO: 4145 - RNA, 20 nt, Artificial Sequence
  targeting sequence with ATCN PAM
cucccagcccccagcccaaa

SEQ ID NO: 4146 - RNA, 20 nt, Artificial Sequence
  targeting sequence with ATCN PAM
uggaagcucucucucccucc

SEQ ID NO: 4147 - RNA, 20 nt, Artificial Sequence
  targeting sequence with ATCN PAM
cagccccuaaauuggugcaa

SEQ ID NO: 4148 - RNA, 20 nt, Artificial Sequence
  targeting sequence with ATCN PAM
ggcaguuuuaaacuggcaug

SEQ ID NO: 4149 - RNA, 20 nt, Artificial Sequence
  targeting sequence with ATCN PAM
cccaacaagguggggcagac

SEQ ID NO: 4150 - RNA, 20 nt, Artificial Sequence
  targeting sequence with ATCN PAM
guggcacucaacaacuuccc

SEQ ID NO: 4151 - RNA, 20 nt, Artificial Sequence
  targeting sequence with ATCN PAM
caaccuguuuggagugcaag

SEQ ID NO: 4152 - RNA, 20 nt, Artificial Sequence
  targeting sequence with ATCN PAM
cuuuccucaaaucacaaccu

SEQ ID NO: 4153 - RNA, 20 nt, Artificial Sequence
  targeting sequence with ATCN PAM
aagcuacaugcaauggaggc

SEQ ID NO: 4154 - RNA, 20 nt, Artificial Sequence
  targeting sequence with ATCN PAM
uaacugccccaaauacguug

SEQ ID NO: 4155 - RNA, 20 nt, Artificial Sequence
  targeting sequence with ATCN PAM
gggacaaauuuggggacuuc

SEQ ID NO: 4156 - RNA, 20 nt, Artificial Sequence
  targeting sequence with ATCN PAM
ugacccaggcucuggaguug

SEQ ID NO: 4157 - RNA, 20 nt, Artificial Sequence
  targeting sequence with ATCN PAM
cuugagccgcccacaacucc

SEQ ID NO: 4158 - RNA, 20 nt, Artificial Sequence
  targeting sequence with ATCN PAM
agccagaugggaccaggaga

SEQ ID NO: 4159 - RNA, 20 nt, Artificial Sequence
  targeting sequence with ATCN PAM
ggcuggauuucucugucacu

SEQ ID NO: 4160 - RNA, 20 nt, Artificial Sequence
  targeting sequence with ATCN PAM
uuuuuucuccuggucccauc

SEQ ID NO: 4161 - RNA, 20 nt, Artificial Sequence
  targeting sequence with ATCN PAM
ucuuccccagagguacccca

SEQ ID NO: 4162 - RNA, 20 nt, Artificial Sequence
  targeting sequence with ATCN PAM
caugccccaccccaugggua

SEQ ID NO: 4163 - RNA, 20 nt, Artificial Sequence
  targeting sequence with ATCN PAM
auccuguugcugagccugac

SEQ ID NO: 4164 - RNA, 20 nt, Artificial Sequence
  targeting sequence with ATCN PAM
uguugcugagccugacucug

SEQ ID NO: 4165 - RNA, 20 nt, Artificial Sequence
  targeting sequence with ATCN PAM
caucacuccccaccacuggg

SEQ ID NO: 4166 - RNA, 20 nt, Artificial Sequence
  targeting sequence with ATCN PAM
cuccccaccacuggggcugc

SEQ ID NO: 4167 - RNA, 20 nt, Artificial Sequence
  targeting sequence with ATCN PAM
cagcccccaaaucuguccag

SEQ ID NO: 4168 - RNA, 20 nt, Artificial Sequence
  targeting sequence with ATCN PAM
guccagagcccaccugccac

SEQ ID NO: 4169 - RNA, 20 nt, Artificial Sequence
  targeting sequence with ATCN PAM
ccccacugccaucuggcacc

SEQ ID NO: 4170 - RNA, 20 nt, Artificial Sequence
  targeting sequence with ATCN PAM
ggcacccaccacagagccug

SEQ ID NO: 4171 - RNA, 20 nt, Artificial Sequence
  targeting sequence with ATCN PAM
ugagcacuuacugugugcca

SEQ ID NO: 4172 - RNA, 20 nt, Artificial Sequence
  targeting sequence with ATCN PAM
auucccgggaggcggccuca

SEQ ID NO: 4173 - RNA, 20 nt, Artificial Sequence
  targeting sequence with ATCN PAM
uuuauguaccuggcgccugu

SEQ ID NO: 4174 - RNA, 20 nt, Artificial Sequence
  targeting sequence with ATCN PAM
cauuuaauacccccaacagc

SEQ ID NO: 4175 - RNA, 20 nt, Artificial Sequence
  targeting sequence with ATCN PAM
ugggguccugggagccauga

SEQ ID NO: 4176 - RNA, 20 nt, Artificial Sequence
  targeting sequence with ATCN PAM
aggcaaagggagcagccugu

SEQ ID NO: 4177 - RNA, 20 nt, Artificial Sequence
  targeting sequence with ATCN PAM
guccucggcucaccugccca

SEQ ID NO: 4178 - RNA, 20 nt, Artificial Sequence
  targeting sequence with ATCN PAM
ggggcuagaaguaggagaug

SEQ ID NO: 4179 - RNA, 20 nt, Artificial Sequence
  targeting sequence with ATCN PAM
ccuacuucuagccccagaug

SEQ ID NO: 4180 - RNA, 20 nt, Artificial Sequence
  targeting sequence with ATCN PAM
ggcuuguucugcagcuguaa

SEQ ID NO: 4181 - RNA, 20 nt, Artificial Sequence
  targeting sequence with ATCN PAM
gcuuggugcuuacuguguac

SEQ ID NO: 4182 - RNA, 20 nt, Artificial Sequence
  targeting sequence with ATCN PAM
auucaucuaguccuuaaaac

SEQ ID NO: 4183 - RNA, 20 nt, Artificial Sequence
  targeting sequence with ATCN PAM
auaaaugcagcucaguguac

SEQ ID NO: 4184 - RNA, 20 nt, Artificial Sequence
  targeting sequence with ATCN PAM
aguccuuaaaacaaugcuuu

SEQ ID NO: 4185 - RNA, 20 nt, Artificial Sequence
  targeting sequence with ATCN PAM
caaagcauuguuuuaaggac

SEQ ID NO: 4186 - RNA, 20 nt, Artificial Sequence
  targeting sequence with ATCN PAM
uuaucccaaagcauuguuuu

SEQ ID NO: 4187 - RNA, 20 nt, Artificial Sequence
  targeting sequence with ATCN PAM
gugaaguggggacaguaaaa

SEQ ID NO: 4188 - RNA, 20 nt, Artificial Sequence
  targeting sequence with ATCN PAM
ggcugcuuggguucaagucc

SEQ ID NO: 4189 - RNA, 20 nt, Artificial Sequence
  targeting sequence with ATCN PAM
gucgcugcauagcuggcaac

SEQ ID NO: 4190 - RNA, 20 nt, Artificial Sequence
  targeting sequence with ATCN PAM
uuauucuugcuccaggcugu

SEQ ID NO: 4191 - RNA, 20 nt, Artificial Sequence
  targeting sequence with ATCN PAM
cucccccaccccugcccaug

SEQ ID NO: 4192 - RNA, 20 nt, Artificial Sequence
  targeting sequence with ATCN PAM
cccagaggugcucaaggucc

SEQ ID NO: 4193 - RNA, 20 nt, Artificial Sequence
  targeting sequence with ATCN PAM
guggccuugggguggggaag

SEQ ID NO: 4194 - RNA, 20 nt, Artificial Sequence
  targeting sequence with ATCN PAM
cacagaucagcuuacaccaa

SEQ ID NO: 4195 - RNA, 20 nt, Artificial Sequence
  targeting sequence with ATCN PAM
gugggauuccuuaggccagc

SEQ ID NO: 4196 - RNA, 20 nt, Artificial Sequence
  targeting sequence with ATCN PAM
gcuuacaccaaagggccgag

SEQ ID NO: 4197 - RNA, 20 nt, Artificial Sequence
  targeting sequence with ATCN PAM
cgcaggcaacuguguuuggc

SEQ ID NO: 4198 - RNA, 20 nt, Artificial Sequence
  targeting sequence with ATCN PAM
ccaccccagagcuucaucuc

SEQ ID NO: 4199 - RNA, 20 nt, Artificial Sequence
  targeting sequence with ATCN PAM
accaucuccaccccagagcu

SEQ ID NO: 4200 - RNA, 20 nt, Artificial Sequence
  targeting sequence with ATCN PAM
ggccggccacccugaaagua

SEQ ID NO: 4201 - RNA, 20 nt, Artificial Sequence
  targeting sequence with ATCN PAM
gcauuuucucaaagccccag

SEQ ID NO: 4202 - RNA, 20 nt, Artificial Sequence
  targeting sequence with ATCN PAM
caugaaauucuugucacagc

SEQ ID NO: 4203 - RNA, 20 nt, Artificial Sequence
  targeting sequence with ATCN PAM
gcaaaaugcagaacucagcc

SEQ ID NO: 4204 - RNA, 20 nt, Artificial Sequence
  targeting sequence with ATCN PAM
ccaucagcaaaaugcagaac

SEQ ID NO: 4205 - RNA, 20 nt, Artificial Sequence
  targeting sequence with ATCN PAM
gagucuggcgagcccacuuc

SEQ ID NO: 4206 - RNA, 20 nt, Artificial Sequence
  targeting sequence with ATCN PAM
ccauaguucacccugaggaa

SEQ ID NO: 4207 - RNA, 20 nt, Artificial Sequence
  targeting sequence with ATCN PAM
acagacccagcucccaaagc

SEQ ID NO: 4208 - RNA, 20 nt, Artificial Sequence
  targeting sequence with ATCN PAM
cuugccaugaacuuccuuuc

SEQ ID NO: 4209 - RNA, 20 nt, Artificial Sequence
  targeting sequence with ATCN PAM
gcauguguguugacaugaca

SEQ ID NO: 4210 - RNA, 20 nt, Artificial Sequence
  targeting sequence with ATCN PAM
cuccauucuccuggcccugg

SEQ ID NO: 4211 - RNA, 20 nt, Artificial Sequence
  targeting sequence with ATCN PAM
gcccaccccagcugccuggg

SEQ ID NO: 4212 - RNA, 20 nt, Artificial Sequence
  targeting sequence with ATCN PAM
cagagugcguguguuuuggg

SEQ ID NO: 4213 - RNA, 20 nt, Artificial Sequence
  targeting sequence with ATCN PAM
aaguccagaaggcagcaaag

SEQ ID NO: 4214 - RNA, 20 nt, Artificial Sequence
  targeting sequence with ATCN PAM
guguuuuuaaugcccagccu

SEQ ID NO: 4215 - RNA, 20 nt, Artificial Sequence
  targeting sequence with ATCN PAM
agccugucuggccucagcau

SEQ ID NO: 4216 - RNA, 20 nt, Artificial Sequence
  targeting sequence with ATCN PAM
accucugcuagugcccaacu

SEQ ID NO: 4217 - RNA, 20 nt, Artificial Sequence
  targeting sequence with ATCN PAM
cacaguugggcacuagcaga

SEQ ID NO: 4218 - RNA, 20 nt, Artificial Sequence
  targeting sequence with ATCN PAM
ucagcaaguugcuuaaccuc

SEQ ID NO: 4219 - RNA, 20 nt, Artificial Sequence
  targeting sequence with ATCN PAM
guaaaaugugaugagaauag

SEQ ID NO: 4220 - RNA, 20 nt, Artificial Sequence
  targeting sequence with ATCN PAM
cauuuuacagaugaagaaac

SEQ ID NO: 4221 - RNA, 20 nt, Artificial Sequence
  targeting sequence with ATCN PAM
caugucacaauucccaguuc

SEQ ID NO: 4222 - RNA, 20 nt, Artificial Sequence
  targeting sequence with ATCN PAM
cacugcacaccuagcccugu

SEQ ID NO: 4223 - RNA, 20 nt, Artificial Sequence
  targeting sequence with ATCN PAM
gcagggcccuggugcacacc

SEQ ID NO: 4224 - RNA, 20 nt, Artificial Sequence
  targeting sequence with ATCN PAM
ccaacgugcaaugguaacuc

SEQ ID NO: 4225 - RNA, 20 nt, Artificial Sequence
  targeting sequence with ATCN PAM
ggaucucugcgcgcucccac

SEQ ID NO: 4226 - RNA, 20 nt, Artificial Sequence
  targeting sequence with ATCN PAM
agauguacguggaacccagg

SEQ ID NO: 4227 - RNA, 20 nt, Artificial Sequence
  targeting sequence with ATCN PAM
cugcgcgcucccaccuguga

SEQ ID NO: 4228 - RNA, 20 nt, Artificial Sequence
  targeting sequence with ATCN PAM
agguacacccgggcgguggc

SEQ ID NO: 4229 - RNA, 20 nt, Artificial Sequence
  targeting sequence with ATCN PAM
gagcugcgcgcaccgccugc

SEQ ID NO: 4230 - RNA, 20 nt, Artificial Sequence
  targeting sequence with ATCN PAM
aguugggcuugcagugcgcg

SEQ ID NO: 4231 - RNA, 20 nt, Artificial Sequence
  targeting sequence with ATCN PAM
gccugccccacggcgccggc

SEQ ID NO: 4232 - RNA, 20 nt, Artificial Sequence
  targeting sequence with ATCN PAM
agcagggcgccaaggagcag

SEQ ID NO: 4233 - RNA, 20 nt, Artificial Sequence
  targeting sequence with ATCN PAM
ugaggauguugucgucggag

SEQ ID NO: 4234 - RNA, 20 nt, Artificial Sequence
  targeting sequence with ATCN PAM
ucaagaucaagcagggcgcc

SEQ ID NO: 4235 - RNA, 20 nt, Artificial Sequence
  targeting sequence with ATCN PAM
gcucccuggacacgcgcggc

SEQ ID NO: 4236 - RNA, 20 nt, Artificial Sequence
  targeting sequence with ATCN PAM
ccauccgcucccuggacacg

SEQ ID NO: 4237 - RNA, 20 nt, Artificial Sequence
  targeting sequence with ATCN PAM
cgggcguguucucgaagcgg

SEQ ID NO: 4238 - RNA, 20 nt, Artificial Sequence
  targeting sequence with ATCN PAM
cggccguggccgugcgcuuc

SEQ ID NO: 4239 - RNA, 20 nt, Artificial Sequence
  targeting sequence with ATCN PAM
accagggcuucugccagcug

SEQ ID NO: 4240 - RNA, 20 nt, Artificial Sequence
  targeting sequence with ATCN PAM
ugcagcuggaccccggccag

SEQ ID NO: 4241 - RNA, 20 nt, Artificial Sequence
  targeting sequence with ATCN PAM
uguuguaguuguccgugagg

SEQ ID NO: 4242 - RNA, 20 nt, Artificial Sequence
  targeting sequence with ATCN PAM
gcugucgggcgccaaccuga

SEQ ID NO: 4243 - RNA, 20 nt, Artificial Sequence
  targeting sequence with ATCN PAM
agcgucgguuccccucgccc

SEQ ID NO: 4244 - RNA, 20 nt, Artificial Sequence
  targeting sequence with ATCN PAM
ccagggcgccggcccgcgcc

SEQ ID NO: 4245 - RNA, 20 nt, Artificial Sequence
  targeting sequence with ATCN PAM
gggcgugcgcgggcugcgcg

SEQ ID NO: 4246 - RNA, 20 nt, Artificial Sequence
  targeting sequence with ATCN PAM
cggcccgggcccgccccccg

SEQ ID NO: 4247 - RNA, 20 nt, Artificial Sequence
  targeting sequence with ATCN PAM
gucccccaaaccccagaccc

SEQ ID NO: 4248 - RNA, 20 nt, Artificial Sequence
  targeting sequence with ATCN PAM
cuuuuaugggucugggguuu

SEQ ID NO: 4249 - RNA, 20 nt, Artificial Sequence
  targeting sequence with ATCN PAM
gacccugagcacuggucccu

SEQ ID NO: 4250 - RNA, 20 nt, Artificial Sequence
  targeting sequence with ATCN PAM
guugugggccacuggcugga

SEQ ID NO: 4251 - RNA, 20 nt, Artificial Sequence
  targeting sequence with ATCN PAM
ucccaggcuuaguggaagau

SEQ ID NO: 4252 - RNA, 20 nt, Artificial Sequence
  targeting sequence with ATCN PAM
uccacuaagccugggaggau

SEQ ID NO: 4253 - RNA, 20 nt, Artificial Sequence
  targeting sequence with ATCN PAM
agaacccugcccagugccgg

SEQ ID NO: 4254 - RNA, 20 nt, Artificial Sequence
  targeting sequence with ATCN PAM
caaaagcagcguuaggggca

SEQ ID NO: 4255 - RNA, 20 nt, Artificial Sequence
  targeting sequence with ATCN PAM
gugaggaaaaagagagcccg

SEQ ID NO: 4256 - RNA, 20 nt, Artificial Sequence
  targeting sequence with ATCN PAM
uccagauauggaaaccaagg

SEQ ID NO: 4257 - RNA, 20 nt, Artificial Sequence
  targeting sequence with ATCN PAM
ggaagauggguuaccaauag

SEQ ID NO: 4258 - RNA, 20 nt, Artificial Sequence
  targeting sequence with ATCN PAM
ugggccagucccuuccccuc

SEQ ID NO: 4259 - RNA, 20 nt, Artificial Sequence
  targeting sequence with ATCN PAM
gacccccagcuuccacaggg

SEQ ID NO: 4260 - RNA, 20 nt, Artificial Sequence
  targeting sequence with ATCN PAM
ugcccgccuuguuccagacc

SEQ ID NO: 4261 - RNA, 20 nt, Artificial Sequence
  targeting sequence with ATCN PAM
aagcaguggccagaccaggg

SEQ ID NO: 4262 - RNA, 20 nt, Artificial Sequence
  targeting sequence with ATCN PAM
acccaccaagagccacucag

SEQ ID NO: 4263 - RNA, 20 nt, Artificial Sequence
  targeting sequence with ATCN PAM
agagaggaagacagggacac

SEQ ID NO: 4264 - RNA, 20 nt, Artificial Sequence
  targeting sequence with ATCN PAM
ugccacccgugggggccaac

SEQ ID NO: 4265 - RNA, 20 nt, Artificial Sequence
  targeting sequence with ATCN PAM
ucagugcccccaccccaguc

SEQ ID NO: 4266 - RNA, 20 nt, Artificial Sequence
  targeting sequence with ATCN PAM
gcuggucucucugucuuauc

SEQ ID NO: 4267 - RNA, 20 nt, Artificial Sequence
  targeting sequence with ATCN PAM
cucucucuccugcccccacc

SEQ ID NO: 4268 - RNA, 20 nt, Artificial Sequence
  targeting sequence with ATCN PAM
cuguuccuaucugucuugcu

SEQ ID NO: 4269 - RNA, 20 nt, Artificial Sequence
  targeting sequence with ATCN PAM
gucuugcuccucccguucac

SEQ ID NO: 4270 - RNA, 20 nt, Artificial Sequence
  targeting sequence with ATCN PAM
gucucucugugucucuaucu

SEQ ID NO: 4271 - RNA, 20 nt, Artificial Sequence
  targeting sequence with ATCN PAM
cugucucucucucugucucc

SEQ ID NO: 4272 - RNA, 20 nt, Artificial Sequence
  targeting sequence with ATCN PAM
cucacccccacucccucucc

SEQ ID NO: 4273 - RNA, 20 nt, Artificial Sequence
  targeting sequence with ATCN PAM
gguucaucuugcugcauccu

SEQ ID NO: 4274 - RNA, 20 nt, Artificial Sequence
  targeting sequence with ATCN PAM
ugcugcauccugcagcuccc

SEQ ID NO: 4275 - RNA, 20 nt, Artificial Sequence
  targeting sequence with ATCN PAM
ugcagcuccccccacugagc

SEQ ID NO: 4276 - RNA, 20 nt, Artificial Sequence
  targeting sequence with ATCN PAM
ucacggcucaguggggggag

SEQ ID NO: 4277 - RNA, 20 nt, Artificial Sequence
  targeting sequence with ATCN PAM
ccacaggcuggucuaagaca

SEQ ID NO: 4278 - RNA, 20 nt, Artificial Sequence
  targeting sequence with ATCN PAM
ucaccacaggcuggucuaag

SEQ ID NO: 4279 - RNA, 20 nt, Artificial Sequence
  targeting sequence with ATCN PAM
ugggcacuugggacacaagc

SEQ ID NO: 4280 - RNA, 20 nt, Artificial Sequence
  targeting sequence with ATCN PAM
ucacaucaacuggaggugag

SEQ ID NO: 4281 - RNA, 20 nt, Artificial Sequence
  targeting sequence with ATCN PAM
acuggaggugagaagugcug

SEQ ID NO: 4282 - RNA, 20 nt, Artificial Sequence
  targeting sequence with ATCN PAM
uagcagaacaccugccccug

SEQ ID NO: 4283 - RNA, 20 nt, Artificial Sequence
  targeting sequence with ATCN PAM
cacacccucccaggggcagg

SEQ ID NO: 4284 - RNA, 20 nt, Artificial Sequence
  targeting sequence with ATCN PAM
ugugcccagcacugcccuac

SEQ ID NO: 4285 - RNA, 20 nt, Artificial Sequence
  targeting sequence with ATCN PAM
gguagggcagugcugggcac

SEQ ID NO: 4286 - RNA, 20 nt, Artificial Sequence
  targeting sequence with ATCN PAM
uacaccauccuugcagccag

SEQ ID NO: 4287 - RNA, 20 nt, Artificial Sequence
  targeting sequence with ATCN PAM
uugcagccagcugacuaggc

SEQ ID NO: 4288 - RNA, 20 nt, Artificial Sequence
  targeting sequence with ATCN PAM
gugaaauggguuugcugacc

SEQ ID NO: 4289 - RNA, 20 nt, Artificial Sequence
  targeting sequence with ATCN PAM
uuaccuugcuaaugccccuc

SEQ ID NO: 4290 - RNA, 20 nt, Artificial Sequence
  targeting sequence with ATCN PAM
ggguuucaauccuuaccuug

SEQ ID NO: 4291 - RNA, 20 nt, Artificial Sequence
  targeting sequence with ATCN PAM
ggcuccacaucuuaugauuu

SEQ ID NO: 4292 - RNA, 20 nt, Artificial Sequence
  targeting sequence with ATCN PAM
uaugauuucucccuucuacc

SEQ ID NO: 4293 - RNA, 20 nt, Artificial Sequence
  targeting sequence with ATCN PAM
uaagauguggagccagaucu

SEQ ID NO: 4294 - RNA, 20 nt, Artificial Sequence
  targeting sequence with ATCN PAM
ggccaggauggcucauggug

SEQ ID NO: 4295 - RNA, 20 nt, Artificial Sequence
  targeting sequence with ATCN PAM
uggccugauggugcucccag

SEQ ID NO: 4296 - RNA, 20 nt, Artificial Sequence
  targeting sequence with ATCN PAM
uaguaaggccagggaaggug

SEQ ID NO: 4297 - RNA, 20 nt, Artificial Sequence
  targeting sequence with ATCN PAM
ccccuugguucccuccaaaa

SEQ ID NO: 4298 - RNA, 20 nt, Artificial Sequence
  targeting sequence with ATCN PAM
ccacuccugaguaccuuuca

SEQ ID NO: 4299 - RNA, 20 nt, Artificial Sequence
  targeting sequence with ATCN PAM
gacuugaacaaaaacugaaa

SEQ ID NO: 4300 - RNA, 20 nt, Artificial Sequence
  targeting sequence with ATCN PAM
aggaaaaggucuugguuuga

SEQ ID NO: 4301 - RNA, 20 nt, Artificial Sequence
  targeting sequence with ATCN PAM
gcgugcuagaauguacugau

SEQ ID NO: 4302 - RNA, 20 nt, Artificial Sequence
  targeting sequence with ATCN PAM
guacauucuagcacgcugau

SEQ ID NO: 4303 - RNA, 20 nt, Artificial Sequence
  targeting sequence with ATCN PAM
uuacuguacauggaaaacca

SEQ ID NO: 4304 - RNA, 20 nt, Artificial Sequence
  targeting sequence with ATCN PAM
aggaagcuuuacaucauuac

SEQ ID NO: 4305 - RNA, 20 nt, Artificial Sequence
  targeting sequence with ATCN PAM
augcauuuaucaaggaagcu

SEQ ID NO: 4306 - RNA, 20 nt, Artificial Sequence
  targeting sequence with ATCN PAM
ccuauuucacauuugucuuu

SEQ ID NO: 4307 - RNA, 20 nt, Artificial Sequence
  targeting sequence with ATCN PAM
agaugccaccaaaaugccug

SEQ ID NO: 4308 - RNA, 20 nt, Artificial Sequence
  targeting sequence with ATCN PAM
ggauuaucaccuauuucaca

SEQ ID NO: 4309 - RNA, 20 nt, Artificial Sequence
  targeting sequence with ATCN PAM
agccaugggccuagguggug

SEQ ID NO: 4310 - RNA, 20 nt, Artificial Sequence
  targeting sequence with ATCN PAM
cugcugcuucucgggggcug

SEQ ID NO: 4311 - RNA, 20 nt, Artificial Sequence
  targeting sequence with ATCN PAM
caaggacagaaaaccaacac

SEQ ID NO: 4312 - RNA, 20 nt, Artificial Sequence
  targeting sequence with ATCN PAM
uucugagcaaacuaucgcaa

SEQ ID NO: 4313 - RNA, 20 nt, Artificial Sequence
  targeting sequence with ATCN PAM
augucccuacaaaggacaug

SEQ ID NO: 4314 - RNA, 20 nt, Artificial Sequence
  targeting sequence with ATCN PAM
uuuuuuauggcugcauagua

SEQ ID NO: 4315 - RNA, 20 nt, Artificial Sequence
  targeting sequence with ATCN PAM
agucuaucauugauggaccu

SEQ ID NO: 4316 - RNA, 20 nt, Artificial Sequence
  targeting sequence with ATCN PAM
uugauggaccuuugaucaac

SEQ ID NO: 4317 - RNA, 20 nt, Artificial Sequence
  targeting sequence with ATCN PAM
augauagacuggauuaagaa

SEQ ID NO: 4318 - RNA, 20 nt, Artificial Sequence
  targeting sequence with ATCN PAM
cuguguccccguggggcugg

SEQ ID NO: 4319 - RNA, 20 nt, Artificial Sequence
  targeting sequence with ATCN PAM
aacucacagagcacaaaggg

SEQ ID NO: 4320 - RNA, 20 nt, Artificial Sequence
  targeting sequence with ATCN PAM
ccaggcgacaaccgccugag

SEQ ID NO: 4321 - RNA, 20 nt, Artificial Sequence
  targeting sequence with ATCN PAM
aauggggucagcagcacagc

SEQ ID NO: 4322 - RNA, 20 nt, Artificial Sequence
  targeting sequence with ATCN PAM
ccugagccucaauuuaugca

SEQ ID NO: 4323 - RNA, 20 nt, Artificial Sequence
  targeting sequence with ATCN PAM
aggaccagggccucaucucc

SEQ ID NO: 4324 - RNA, 20 nt, Artificial Sequence
  targeting sequence with ATCN PAM
cagcucugcaaccucugccu

SEQ ID NO: 4325 - RNA, 20 nt, Artificial Sequence
  targeting sequence with ATCN PAM
cuugcacccaggaggcagag

SEQ ID NO: 4326 - RNA, 20 nt, Artificial Sequence
  targeting sequence with ATCN PAM
cagcuacucgggaggcugag

SEQ ID NO: 4327 - RNA, 20 nt, Artificial Sequence
  targeting sequence with ATCN PAM
agagugaguguuacucacag

SEQ ID NO: 4328 - RNA, 20 nt, Artificial Sequence
  targeting sequence with ATCN PAM
ucccuccuuacucaagagca

SEQ ID NO: 4329 - RNA, 20 nt, Artificial Sequence
  targeting sequence with ATCN PAM
cuccuuacucaagagcagcc

SEQ ID NO: 4330 - RNA, 20 nt, Artificial Sequence
  targeting sequence with ATCN PAM
cgggaugagccacccucuuu

SEQ ID NO: 4331 - RNA, 20 nt, Artificial Sequence
  targeting sequence with ATCN PAM
cgagauacccagcugucguu

SEQ ID NO: 4332 - RNA, 20 nt, Artificial Sequence
  targeting sequence with ATCN PAM
uggagacaccaggagacuua

SEQ ID NO: 4333 - RNA, 20 nt, Artificial Sequence
  targeting sequence with ATCN PAM
aaaucuuggagacaccagga

SEQ ID NO: 4334 - RNA, 20 nt, Artificial Sequence
  targeting sequence with ATCN PAM
ggcugcuccucuuccaggca

SEQ ID NO: 4335 - RNA, 20 nt, Artificial Sequence
  targeting sequence with ATCN PAM
aggugccucccggguucugc

SEQ ID NO: 4336 - RNA, 20 nt, Artificial Sequence
  targeting sequence with ATCN PAM
aggggaggcuauuuccagcu

SEQ ID NO: 4337 - RNA, 20 nt, Artificial Sequence
  targeting sequence with ATCN PAM
ucuuccucuaggccuccuuc

SEQ ID NO: 4338 - RNA, 20 nt, Artificial Sequence
  targeting sequence with ATCN PAM
gugcugacgaaaccggcuuc

SEQ ID NO: 4339 - RNA, 20 nt, Artificial Sequence
  targeting sequence with ATCN PAM
ucacucgagaggcuuggcug

SEQ ID NO: 4340 - RNA, 20 nt, Artificial Sequence
  targeting sequence with ATCN PAM
uuuugaggcagagguuuccc

SEQ ID NO: 4341 - RNA, 20 nt, Artificial Sequence
  targeting sequence with ATCN PAM
gggcuuggaugggcugugca

SEQ ID NO: 4342 - RNA, 20 nt, Artificial Sequence
  targeting sequence with ATCN PAM
aagcccagauccuuuugagg

SEQ ID NO: 4343 - RNA, 20 nt, Artificial Sequence
  targeting sequence with ATCN PAM
aguugcacagcccauccaag

SEQ ID NO: 4344 - RNA, 20 nt, Artificial Sequence
  targeting sequence with ATCN PAM
ccacugcccauaauucacuu

SEQ ID NO: 4345 - RNA, 20 nt, Artificial Sequence
  targeting sequence with ATCN PAM
uccccaaggggccugggguc

SEQ ID NO: 4346 - RNA, 20 nt, Artificial Sequence
  targeting sequence with ATCN PAM
ccauguaucagagaaggaaa

SEQ ID NO: 4347 - RNA, 20 nt, Artificial Sequence
  targeting sequence with ATCN PAM
gagaaggaaauugaggcuga

SEQ ID NO: 4348 - RNA, 20 nt, Artificial Sequence
  targeting sequence with ATCN PAM
uccgaguccagcccuguggg

SEQ ID NO: 4349 - RNA, 20 nt, Artificial Sequence
  targeting sequence with ATCN PAM
gaguccagcccugugggcug

SEQ ID NO: 4350 - RNA, 20 nt, Artificial Sequence
  targeting sequence with ATCN PAM
gcaccucccacccccagaug

SEQ ID NO: 4351 - RNA, 20 nt, Artificial Sequence
  targeting sequence with ATCN PAM
gggggugggaggugcagaug

SEQ ID NO: 4352 - RNA, 20 nt, Artificial Sequence
  targeting sequence with ATCN PAM
cacuagcgucccuuuccaug

SEQ ID NO: 4353 - RNA, 20 nt, Artificial Sequence
  targeting sequence with ATCN PAM
uccccugugcacugggcaua

SEQ ID NO: 4354 - RNA, 20 nt, Artificial Sequence
  targeting sequence with ATCN PAM
ccuccuccaggaagcccucu

SEQ ID NO: 4355 - RNA, 20 nt, Artificial Sequence
  targeting sequence with ATCN PAM
auuggcagcuccggugccuc

SEQ ID NO: 4356 - RNA, 20 nt, Artificial Sequence
  targeting sequence with ATCN PAM
gucuuucgcuacugcuggcc

SEQ ID NO: 4357 - RNA, 20 nt, Artificial Sequence
  targeting sequence with ATCN PAM
gugcccucccugaccucccc

SEQ ID NO: 4358 - RNA, 20 nt, Artificial Sequence
  targeting sequence with ATCN PAM
ucuccugccggcuccucugc

SEQ ID NO: 4359 - RNA, 20 nt, Artificial Sequence
  targeting sequence with ATCN PAM
agucccacagcucucaauga

SEQ ID NO: 4360 - RNA, 20 nt, Artificial Sequence
  targeting sequence with ATCN PAM
gggaguggagacaaugaaau

SEQ ID NO: 4361 - RNA, 20 nt, Artificial Sequence
  targeting sequence with ATCN PAM
ugccugaaaaacaaaaacaa

SEQ ID NO: 4362 - RNA, 20 nt, Artificial Sequence
  targeting sequence with ATCN PAM
aaccccagcuggggagguuu

SEQ ID NO: 4363 - RNA, 20 nt, Artificial Sequence
  targeting sequence with ATCN PAM
ggcuaucuggcgaggcuuuc

SEQ ID NO: 4364 - RNA, 20 nt, Artificial Sequence
  targeting sequence with ATCN PAM
ggcgaggcuuucaaggaggg

SEQ ID NO: 4365 - RNA, 20 nt, Artificial Sequence
  targeting sequence with ATCN PAM
cccuccuugaaagccucgcc

SEQ ID NO: 4366 - RNA, 20 nt, Artificial Sequence
  targeting sequence with ATCN PAM
cuccaugcuccugccaaauc

SEQ ID NO: 4367 - RNA, 20 nt, Artificial Sequence
  targeting sequence with ATCN PAM
cugcaugcucccaccuccua

SEQ ID NO: 4368 - RNA, 20 nt, Artificial Sequence
  targeting sequence with ATCN PAM
aagggugugccuggucagga

SEQ ID NO: 4369 - RNA, 20 nt, Artificial Sequence
  targeting sequence with ATCN PAM
cagcucugcugugugacuga

SEQ ID NO: 4370 - RNA, 20 nt, Artificial Sequence
  targeting sequence with ATCN PAM
cugaccgggagaccaggagg

SEQ ID NO: 4371 - RNA, 20 nt, Artificial Sequence
  targeting sequence with ATCN PAM
ccacccaggcugagcaggag

SEQ ID NO: 4372 - RNA, 20 nt, Artificial Sequence
  targeting sequence with ATCN PAM
gugugcuaaccacaugcccc

SEQ ID NO: 4373 - RNA, 20 nt, Artificial Sequence
  targeting sequence with ATCN PAM
augccccacccuccuccugu

SEQ ID NO: 4374 - RNA, 20 nt, Artificial Sequence
  targeting sequence with ATCN PAM
ccaucugagaucaguaucca

SEQ ID NO: 4375 - RNA, 20 nt, Artificial Sequence
  targeting sequence with ATCN PAM
gagaucaguauccacgaagg

SEQ ID NO: 4376 - RNA, 20 nt, Artificial Sequence
  targeting sequence with ATCN PAM
cagauggggaugugucgggu

SEQ ID NO: 4377 - RNA, 20 nt, Artificial Sequence
  targeting sequence with ATCN PAM
guauccacgaaggagacucg

SEQ ID NO: 4378 - RNA, 20 nt, Artificial Sequence
  targeting sequence with ATCN PAM
acgaaggagacucgguguga

SEQ ID NO: 4379 - RNA, 20 nt, Artificial Sequence
  targeting sequence with ATCN PAM
caccgagucuccuucgugga

SEQ ID NO: 4380 - RNA, 20 nt, Artificial Sequence
  targeting sequence with ATCN PAM
gcuggcucugccgacagcac

SEQ ID NO: 4381 - RNA, 20 nt, Artificial Sequence
  targeting sequence with ATCN PAM
gagguccaguaggcacccca

SEQ ID NO: 4382 - RNA, 20 nt, Artificial Sequence
  targeting sequence with ATCN PAM
cccguccuuggugccaggcc

SEQ ID NO: 4383 - RNA, 20 nt, Artificial Sequence
  targeting sequence with ATCN PAM
guaaaaugggccuaauuaca

SEQ ID NO: 4384 - RNA, 20 nt, Artificial Sequence
  targeting sequence with ATCN PAM
ugcggcuguuuccgccucgc

SEQ ID NO: 4385 - RNA, 20 nt, Artificial Sequence
  targeting sequence with ATCN PAM
ccuuccucagccacugagcg

SEQ ID NO: 4386 - RNA, 20 nt, Artificial Sequence
  targeting sequence with ATCN PAM
caaucgcccuggccuccucu

SEQ ID NO: 4387 - RNA, 20 nt, Artificial Sequence
  targeting sequence with ATCN PAM
cccuggccuccucuuccuuc

SEQ ID NO: 4388 - RNA, 20 nt, Artificial Sequence
  targeting sequence with ATCN PAM
ugagguauuggggguuucaa

SEQ ID NO: 4389 - RNA, 20 nt, Artificial Sequence
  targeting sequence with ATCN PAM
ggagacagccuuuaaagagu

SEQ ID NO: 4390 - RNA, 20 nt, Artificial Sequence
  targeting sequence with ATCN PAM
cauuuuaacuuaaugaacuc

SEQ ID NO: 4391 - RNA, 20 nt, Artificial Sequence
  targeting sequence with ATCN PAM
ccucauaccaucucauuuua

SEQ ID NO: 4392 - RNA, 20 nt, Artificial Sequence
  targeting sequence with ATCN PAM
caggcgugagccaccgcacc

SEQ ID NO: 4393 - RNA, 20 nt, Artificial Sequence
  targeting sequence with ATCN PAM
uagcacuuugggaggcugau

SEQ ID NO: 4394 - RNA, 20 nt, Artificial Sequence
  targeting sequence with ATCN PAM
gccucccaaagugcuaggau

SEQ ID NO: 4395 - RNA, 20 nt, Artificial Sequence
  targeting sequence with ATCN PAM
uccugcaucagccucccaaa

SEQ ID NO: 4396 - RNA, 20 nt, Artificial Sequence
  targeting sequence with ATCN PAM
cuugagcccaggaguucgag

SEQ ID NO: 4397 - RNA, 20 nt, Artificial Sequence
  targeting sequence with ATCN PAM
cuacaaaaaguuagcugggc

SEQ ID NO: 4398 - RNA, 20 nt, Artificial Sequence
  targeting sequence with ATCN PAM
ucccaccucgguccucuaag

SEQ ID NO: 4399 - RNA, 20 nt, Artificial Sequence
  targeting sequence with ATCN PAM
cucaacaacagaaaccuauu

SEQ ID NO: 4400 - RNA, 20 nt, Artificial Sequence
  targeting sequence with ATCN PAM
agucuguggccucuuguuac

SEQ ID NO: 4401 - RNA, 20 nt, Artificial Sequence
  targeting sequence with ATCN PAM
gcaagccaaggagagaggcu

SEQ ID NO: 4402 - RNA, 20 nt, Artificial Sequence
  targeting sequence with ATCN PAM
ugugaggacacagccagaag

SEQ ID NO: 4403 - RNA, 20 nt, Artificial Sequence
  targeting sequence with ATCN PAM
ucccucacuuccugcauauc

SEQ ID NO: 4404 - RNA, 20 nt, Artificial Sequence
  targeting sequence with ATCN PAM
gaauccucagcuccacuucu

SEQ ID NO: 4405 - RNA, 20 nt, Artificial Sequence
  targeting sequence with ATCN PAM
ucagcuccacuucuuuauuu

SEQ ID NO: 4406 - RNA, 20 nt, Artificial Sequence
  targeting sequence with ATCN PAM
caacacugcacuccagccug

SEQ ID NO: 4407 - RNA, 20 nt, Artificial Sequence
  targeting sequence with ATCN PAM
cagcucacugcagccucgac

SEQ ID NO: 4408 - RNA, 20 nt, Artificial Sequence
  targeting sequence with ATCN PAM
uccaaccucagccuccugag

SEQ ID NO: 4409 - RNA, 20 nt, Artificial Sequence
  targeting sequence with ATCN PAM
aggcuucccuuuggcucucc

SEQ ID NO: 4410 - RNA, 20 nt, Artificial Sequence
  targeting sequence with ATCN PAM
ggaaagggcaugacaggcag

SEQ ID NO: 4411 - RNA, 20 nt, Artificial Sequence
  targeting sequence with ATCN PAM
ccccagggcugccgccuucu

SEQ ID NO: 4412 - RNA, 20 nt, Artificial Sequence
  targeting sequence with ATCN PAM
cucagguuucugcucaaaua

SEQ ID NO: 4413 - RNA, 20 nt, Artificial Sequence
  targeting sequence with ATCN PAM
cccuccaaagaggcccuccc

SEQ ID NO: 4414 - RNA, 20 nt, Artificial Sequence
  targeting sequence with ATCN PAM
gggcuaguauccaucucucu

SEQ ID NO: 4415 - RNA, 20 nt, Artificial Sequence
  targeting sequence with ATCN PAM
aucucucucacuggauggac

SEQ ID NO: 4416 - RNA, 20 nt, Artificial Sequence
  targeting sequence with ATCN PAM
cucucacuggauggaccuuc

SEQ ID NO: 4417 - RNA, 20 nt, Artificial Sequence
  targeting sequence with ATCN PAM
agugagagagauggauacua

SEQ ID NO: 4418 - RNA, 20 nt, Artificial Sequence
  targeting sequence with ATCN PAM
ccugcccuggugaaggucca

SEQ ID NO: 4419 - RNA, 20 nt, Artificial Sequence
  targeting sequence with ATCN PAM
cccaaaacacagggucacag

SEQ ID NO: 4420 - RNA, 20 nt, Artificial Sequence
  targeting sequence with ATCN PAM
acgggccccccuggaggccc

SEQ ID NO: 4421 - RNA, 20 nt, Artificial Sequence
  targeting sequence with ATCN PAM
ccucggcuucccacgcagca

SEQ ID NO: 4422 - RNA, 20 nt, Artificial Sequence
  targeting sequence with ATCN PAM
gucuuccagugauuccucca

SEQ ID NO: 4423 - RNA, 20 nt, Artificial Sequence
  targeting sequence with ATCN PAM
cuggaagacagauggggaag

SEQ ID NO: 4424 - RNA, 20 nt, Artificial Sequence
  targeting sequence with ATCN PAM
agccuucuucccaaacaagc

SEQ ID NO: 4425 - RNA, 20 nt, Artificial Sequence
  targeting sequence with ATCN PAM
cuuuggacuuggggacucug

SEQ ID NO: 4426 - RNA, 20 nt, Artificial Sequence
  targeting sequence with ATCN PAM
gggagcaggaugagggaagg

SEQ ID NO: 4427 - RNA, 20 nt, Artificial Sequence
  targeting sequence with ATCN PAM
ugcucccagauggaggugca

SEQ ID NO: 4428 - RNA, 20 nt, Artificial Sequence
  targeting sequence with ATCN PAM
ucacccacacuugguggugu

SEQ ID NO: 4429 - RNA, 20 nt, Artificial Sequence
  targeting sequence with ATCN PAM
cagcacuuugggaggccgag

SEQ ID NO: 4430 - RNA, 20 nt, Artificial Sequence
  targeting sequence with ATCN PAM
gcccgccucggccucccaaa

SEQ ID NO: 4431 - RNA, 20 nt, Artificial Sequence
  targeting sequence with ATCN PAM
cgaggucaggagauagagac

SEQ ID NO: 4432 - RNA, 20 nt, Artificial Sequence
  targeting sequence with ATCN PAM
ccugaccucgugauccgccc

SEQ ID NO: 4433 - RNA, 20 nt, Artificial Sequence
  targeting sequence with ATCN PAM
cagcuacucaggaggcugag

SEQ ID NO: 4434 - RNA, 20 nt, Artificial Sequence
  targeting sequence with ATCN PAM
cggcucacugcaagcuccgc

SEQ ID NO: 4435 - RNA, 20 nt, Artificial Sequence
  targeting sequence with ATCN PAM
uggcaaucccacgucuagau

SEQ ID NO: 4436 - RNA, 20 nt, Artificial Sequence
  targeting sequence with ATCN PAM
cacgucuagauauuggaaua

SEQ ID NO: 4437 - RNA, 20 nt, Artificial Sequence
  targeting sequence with ATCN PAM
agacgugggauugccaggau

SEQ ID NO: 4438 - RNA, 20 nt, Artificial Sequence
  targeting sequence with ATCN PAM
guacagguuuuuauggaccu

SEQ ID NO: 4439 - RNA, 20 nt, Artificial Sequence
  targeting sequence with ATCN PAM
auggagcugugacaagcauc

SEQ ID NO: 4440 - RNA, 20 nt, Artificial Sequence
  targeting sequence with ATCN PAM
ggaaacaagccaaguguccc

SEQ ID NO: 4441 - RNA, 20 nt, Artificial Sequence
  targeting sequence with ATCN PAM
agaggcuguuccuuuucguu

SEQ ID NO: 4442 - RNA, 20 nt, Artificial Sequence
  targeting sequence with ATCN PAM
uugugucggaguaucaagag

SEQ ID NO: 4443 - RNA, 20 nt, Artificial Sequence
  targeting sequence with ATCN PAM
ccaagccaggcuggaaaggc

SEQ ID NO: 4444 - RNA, 20 nt, Artificial Sequence
  targeting sequence with ATCN PAM
ugcagcguggagccuuucca

SEQ ID NO: 4445 - RNA, 20 nt, Artificial Sequence
  targeting sequence with ATCN PAM
cauguacaugcuguuuggaa

SEQ ID NO: 4446 - RNA, 20 nt, Artificial Sequence
  targeting sequence with ATCN PAM
gugucccguccuguggccug

SEQ ID NO: 4447 - RNA, 20 nt, Artificial Sequence
  targeting sequence with ATCN PAM
caaaugugaagucugguaaa

SEQ ID NO: 4448 - RNA, 20 nt, Artificial Sequence
  targeting sequence with ATCN PAM
gaggccacuucuccugaugu

SEQ ID NO: 4449 - RNA, 20 nt, Artificial Sequence
  targeting sequence with ATCN PAM
ggagaaguggccucagaucu

SEQ ID NO: 4450 - RNA, 20 nt, Artificial Sequence
  targeting sequence with ATCN PAM
cuugcgcagcaugcugcccc

SEQ ID NO: 4451 - RNA, 20 nt, Artificial Sequence
  targeting sequence with ATCN PAM
gcggcuucuaagacgcucaa

SEQ ID NO: 4452 - RNA, 20 nt, Artificial Sequence
  targeting sequence with ATCN PAM
gcgaggcagcguccccuccu

SEQ ID NO: 4453 - RNA, 20 nt, Artificial Sequence
  targeting sequence with ATCN PAM
cugucccugguuccuuuagu

SEQ ID NO: 4454 - RNA, 20 nt, Artificial Sequence
  targeting sequence with ATCN PAM
ggcuucgcgguguguccuca

SEQ ID NO: 4455 - RNA, 20 nt, Artificial Sequence
  targeting sequence with ATCN PAM
gugcaauugaacauucauuc

SEQ ID NO: 4456 - RNA, 20 nt, Artificial Sequence
  targeting sequence with ATCN PAM
acgcggcccucgccgacucc

SEQ ID NO: 4457 - RNA, 20 nt, Artificial Sequence
  targeting sequence with ATCN PAM
aagaaggaaacgguggggcu

SEQ ID NO: 4458 - RNA, 20 nt, Artificial Sequence
  targeting sequence with ATCN PAM
aaagccuucccgacuuccau

SEQ ID NO: 4459 - RNA, 20 nt, Artificial Sequence
  targeting sequence with ATCN PAM
agucgcgcuuggucacuucc

SEQ ID NO: 4460 - RNA, 20 nt, Artificial Sequence
  targeting sequence with ATCN PAM
ggguuggaggcucugaaauu

SEQ ID NO: 4461 - RNA, 20 nt, Artificial Sequence
  targeting sequence with ATCN PAM
uggcuugagaggagccagaa

SEQ ID NO: 4462 - RNA, 20 nt, Artificial Sequence
  targeting sequence with ATCN PAM
aaccggcguaggcaggaacg

SEQ ID NO: 4463 - RNA, 20 nt, Artificial Sequence
  targeting sequence with ATCN PAM
gcauuaauaagggaggcagu

SEQ ID NO: 4464 - RNA, 20 nt, Artificial Sequence
  targeting sequence with ATCN PAM
gagaguaaguugcaggcgcg

SEQ ID NO: 4465 - RNA, 20 nt, Artificial Sequence
  targeting sequence with ATCN PAM
cgccugcaacuuacucuccg

SEQ ID NO: 4466 - RNA, 20 nt, Artificial Sequence
  targeting sequence with ATCN PAM
ugaaaaccacugggguugug

SEQ ID NO: 4467 - RNA, 20 nt, Artificial Sequence
  targeting sequence with ATCN PAM
agugauuuaaccauaauaca

SEQ ID NO: 4468 - RNA, 20 nt, Artificial Sequence
  targeting sequence with ATCN PAM
cucgaucuugaaaaccacug

SEQ ID NO: 4469 - RNA, 20 nt, Artificial Sequence
  targeting sequence with ATCN PAM
gcacaaccuuacucaaauau

SEQ ID NO: 4470 - RNA, 20 nt, Artificial Sequence
  targeting sequence with ATCN PAM
ccaaaugucgcaacgagguc

SEQ ID NO: 4471 - RNA, 20 nt, Artificial Sequence
  targeting sequence with ATCN PAM
ccuucccauccccauccagg

SEQ ID NO: 4472 - RNA, 20 nt, Artificial Sequence
  targeting sequence with ATCN PAM
ccauccaggagccacgccag

SEQ ID NO: 4473 - RNA, 20 nt, Artificial Sequence
  targeting sequence with ATCN PAM
aggagccacgccaggaucac

SEQ ID NO: 4474 - RNA, 20 nt, Artificial Sequence
  targeting sequence with ATCN PAM
uggcguggcuccuggauggg

SEQ ID NO: 4475 - RNA, 20 nt, Artificial Sequence
  targeting sequence with ATCN PAM
cauuuguaaauuuaauuauu

SEQ ID NO: 4476 - RNA, 20 nt, Artificial Sequence
  targeting sequence with ATCN PAM
cgccacugcacuccagccug

SEQ ID NO: 4477 - RNA, 20 nt, Artificial Sequence
  targeting sequence with ATCN PAM
cggcucacugcaagcuccgc

SEQ ID NO: 4478 - RNA, 20 nt, Artificial Sequence
  targeting sequence with ATCN PAM
agaccagacuggcuaacacg

SEQ ID NO: 4479 - RNA, 20 nt, Artificial Sequence
  targeting sequence with ATCN PAM
ccugaccucgugauccgccc

SEQ ID NO: 4480 - RNA, 20 nt, Artificial Sequence
  targeting sequence with ATCN PAM
cgaggucaggagaucgagac

SEQ ID NO: 4481 - RNA, 20 nt, Artificial Sequence
  targeting sequence with ATCN PAM
gcccgccucggccucccaaa

SEQ ID NO: 4482 - RNA, 20 nt, Artificial Sequence
  targeting sequence with ATCN PAM
cagcacuuugggaggccgag

SEQ ID NO: 4483 - RNA, 20 nt, Artificial Sequence
  targeting sequence with ATCN PAM
uggccggucgcaguggcuca

SEQ ID NO: 4484 - RNA, 20 nt, Artificial Sequence
  targeting sequence with ATCN PAM
cauuuaguuguucaccuuuu

SEQ ID NO: 4485 - RNA, 20 nt, Artificial Sequence
  targeting sequence with ATCN PAM
aggcuggagugcaguggcac

SEQ ID NO: 4486 - RNA, 20 nt, Artificial Sequence
  targeting sequence with ATCN PAM
cuugagcccaaaaauucaag

SEQ ID NO: 4487 - RNA, 20 nt, Artificial Sequence
  targeting sequence with ATCN PAM
ucuccccucagucugcagag

SEQ ID NO: 4488 - RNA, 20 nt, Artificial Sequence
  targeting sequence with ATCN PAM
ugagacagacaaaaggccag

SEQ ID NO: 4489 - RNA, 20 nt, Artificial Sequence
  targeting sequence with ATCN PAM
cccaauuuuauugcaaauau

SEQ ID NO: 4490 - RNA, 20 nt, Artificial Sequence
  targeting sequence with ATCN PAM
aaccaacuugucaacuaaua

SEQ ID NO: 4491 - RNA, 20 nt, Artificial Sequence
  targeting sequence with ATCN PAM
uuaagaauuauuuuuguuac

SEQ ID NO: 4492 - RNA, 20 nt, Artificial Sequence
  targeting sequence with ATCN PAM
aucauuaagaauuauuuuug

SEQ ID NO: 4493 - RNA, 20 nt, Artificial Sequence
  targeting sequence with ATCN PAM
auaguaauccaucauuaaga

SEQ ID NO: 4494 - RNA, 20 nt, Artificial Sequence
  targeting sequence with ATCN PAM
ucucuuccaauuucucauuu

SEQ ID NO: 4495 - RNA, 20 nt, Artificial Sequence
  targeting sequence with ATCN PAM
uccugccucagccucuccag

SEQ ID NO: 4496 - RNA, 20 nt, Artificial Sequence
  targeting sequence with ATCN PAM
cuugagacugggaggucaag

SEQ ID NO: 4497 - RNA, 20 nt, Artificial Sequence
  targeting sequence with ATCN PAM
uugaccucccagucucaagu

SEQ ID NO: 4498 - RNA, 20 nt, Artificial Sequence
  targeting sequence with ATCN PAM
cagcucacugcauccuugac

SEQ ID NO: 4499 - RNA, 20 nt, Artificial Sequence
  targeting sequence with ATCN PAM
cuuaaaaaaaauucugguaa

SEQ ID NO: 4500 - RNA, 20 nt, Artificial Sequence
  targeting sequence with ATCN PAM
uauuggucacaccauccuac

SEQ ID NO: 4501 - RNA, 20 nt, Artificial Sequence
  targeting sequence with ATCN PAM
uuguaggcucaaaguuugug

SEQ ID NO: 4502 - RNA, 20 nt, Artificial Sequence
  targeting sequence with ATCN PAM
guuuauuucucuuagaaacu

SEQ ID NO: 4503 - RNA, 20 nt, Artificial Sequence
  targeting sequence with ATCN PAM
cagcacuuugggaggcugag

SEQ ID NO: 4504 - RNA, 20 nt, Artificial Sequence
  targeting sequence with ATCN PAM
acccuccucagccucccaaa

SEQ ID NO: 4505 - RNA, 20 nt, Artificial Sequence
  targeting sequence with ATCN PAM
ccugaggucaggaguucgag

SEQ ID NO: 4506 - RNA, 20 nt, Artificial Sequence
  targeting sequence with ATCN PAM
cuacuaacaauacaaaaaau

SEQ ID NO: 4507 - RNA, 20 nt, Artificial Sequence
  targeting sequence with ATCN PAM
uccugccuuggcuuacuccu

SEQ ID NO: 4508 - RNA, 20 nt, Artificial Sequence
  targeting sequence with ATCN PAM
uuugaguuuaagaccagccu

SEQ ID NO: 4509 - RNA, 20 nt, Artificial Sequence
  targeting sequence with ATCN PAM
caucucuaccaacaaagaag

SEQ ID NO: 4510 - RNA, 20 nt, Artificial Sequence
  targeting sequence with ATCN PAM
cuaccaacaaagaagaaauu

SEQ ID NO: 4511 - RNA, 20 nt, Artificial Sequence
  targeting sequence with ATCN PAM
cccaggcuggagugcaacgg

SEQ ID NO: 4512 - RNA, 20 nt, Artificial Sequence
  targeting sequence with ATCN PAM
caugcaucaggagaggacag

SEQ ID NO: 4513 - RNA, 20 nt, Artificial Sequence
  targeting sequence with ATCN PAM
ggagaggacagggucaggga

SEQ ID NO: 4514 - RNA, 20 nt, Artificial Sequence
  targeting sequence with ATCN PAM
cugacccuguccucuccuga

SEQ ID NO: 4515 - RNA, 20 nt, Artificial Sequence
  targeting sequence with ATCN PAM
agccuuggaaccaagccucu

SEQ ID NO: 4516 - RNA, 20 nt, Artificial Sequence
  targeting sequence with ATCN PAM
uguuggccccaaccauggcu

SEQ ID NO: 4517 - RNA, 20 nt, Artificial Sequence
  targeting sequence with ATCN PAM
uccagcuggguggacagaag

SEQ ID NO: 4518 - RNA, 20 nt, Artificial Sequence
  targeting sequence with ATCN PAM
agcuggguggacagaagugu

SEQ ID NO: 4519 - RNA, 20 nt, Artificial Sequence
  targeting sequence with ATCN PAM
acuucacuucuggcugccuc

SEQ ID NO: 4520 - RNA, 20 nt, Artificial Sequence
  targeting sequence with ATCN PAM
agacugugcucuggcagccc

SEQ ID NO: 4521 - RNA, 20 nt, Artificial Sequence
  targeting sequence with ATCN PAM
aagucaggccaacuggaguc

SEQ ID NO: 4522 - RNA, 20 nt, Artificial Sequence
  targeting sequence with ATCN PAM
cguguccaucccuugagcca

SEQ ID NO: 4523 - RNA, 20 nt, Artificial Sequence
  targeting sequence with ATCN PAM
cuugagccagaggucaggug

SEQ ID NO: 4524 - RNA, 20 nt, Artificial Sequence
  targeting sequence with ATCN PAM
cuugaccucgugauccgccu

SEQ ID NO: 4525 - RNA, 20 nt, Artificial Sequence
  targeting sequence with ATCN PAM
cgaggucaagagauggagac

SEQ ID NO: 4526 - RNA, 20 nt, Artificial Sequence
  targeting sequence with ATCN PAM
gccugccucggccucccaaa

SEQ ID NO: 4527 - RNA, 20 nt, Artificial Sequence
  targeting sequence with ATCN PAM
cagcacuuugggaggccgag

SEQ ID NO: 4528 - RNA, 20 nt, Artificial Sequence
  targeting sequence with ATCN PAM
cugggccaggcgcuguggcu

SEQ ID NO: 4529 - RNA, 20 nt, Artificial Sequence
  targeting sequence with ATCN PAM
aaaaacugugaagagccucu

SEQ ID NO: 4530 - RNA, 20 nt, Artificial Sequence
  targeting sequence with ATCN PAM
uguaaguagaggcucuucac

SEQ ID NO: 4531 - RNA, 20 nt, Artificial Sequence
  targeting sequence with ATCN PAM
auaggcaaaagaccaaauac

SEQ ID NO: 4532 - RNA, 20 nt, Artificial Sequence
  targeting sequence with ATCN PAM
guuggguguuugaggaaugg

SEQ ID NO: 4533 - RNA, 20 nt, Artificial Sequence
  targeting sequence with ATCN PAM
caaucaguuggguguuugag

SEQ ID NO: 4534 - RNA, 20 nt, Artificial Sequence
  targeting sequence with ATCN PAM
ugaauaccacgcuaaagguu

SEQ ID NO: 4535 - RNA, 20 nt, Artificial Sequence
  targeting sequence with ATCN PAM
uaugugggggccaaguugca

SEQ ID NO: 4536 - RNA, 20 nt, Artificial Sequence
  targeting sequence with ATCN PAM
auugcuugaacugcucaccu

SEQ ID NO: 4537 - RNA, 20 nt, Artificial Sequence
  targeting sequence with ATCN PAM
uaaagccaccaucuuucagu

SEQ ID NO: 4538 - RNA, 20 nt, Artificial Sequence
  targeting sequence with ATCN PAM
uucaguccagauaccauggc

SEQ ID NO: 4539 - RNA, 20 nt, Artificial Sequence
  targeting sequence with ATCN PAM
ggacugaaagaugguggcuu

SEQ ID NO: 4540 - RNA, 20 nt, Artificial Sequence
  targeting sequence with ATCN PAM
augugacccccaagccuaga

SEQ ID NO: 4541 - RNA, 20 nt, Artificial Sequence
  targeting sequence with ATCN PAM
agggcuggaagaaagcucaa

SEQ ID NO: 4542 - RNA, 20 nt, Artificial Sequence
  targeting sequence with ATCN PAM
ggaggcaaaagauggucuag

SEQ ID NO: 4543 - RNA, 20 nt, Artificial Sequence
  targeting sequence with ATCN PAM
uuugccuccagauugccuua

SEQ ID NO: 4544 - RNA, 20 nt, Artificial Sequence
  targeting sequence with ATCN PAM
uacuagaccaucuuuugccu

SEQ ID NO: 4545 - RNA, 20 nt, Artificial Sequence
  targeting sequence with ATCN PAM
gucauuaggaacacuaucaa

SEQ ID NO: 4546 - RNA, 20 nt, Artificial Sequence
  targeting sequence with ATCN PAM
auucuuuuuucacuucucac

SEQ ID NO: 4547 - RNA, 20 nt, Artificial Sequence
  targeting sequence with ATCN PAM
aaaacuuaaaaauaggucca

SEQ ID NO: 4548 - RNA, 20 nt, Artificial Sequence
  targeting sequence with ATCN PAM
cuuugaagaaaauguauuug

SEQ ID NO: 4549 - RNA, 20 nt, Artificial Sequence
  targeting sequence with ATCN PAM
acaugcauauauuuacacaa

SEQ ID NO: 4550 - RNA, 20 nt, Artificial Sequence
  targeting sequence with ATCN PAM
uaaugcacugauuauacagg

SEQ ID NO: 4551 - RNA, 20 nt, Artificial Sequence
  targeting sequence with ATCN PAM
gugcauuaagauuuaaaaag

SEQ ID NO: 4552 - RNA, 20 nt, Artificial Sequence
  targeting sequence with ATCN PAM
cggcucacugcaagcuccgc

SEQ ID NO: 4553 - RNA, 20 nt, Artificial Sequence
  targeting sequence with ATCN PAM
gacuguaccucaaaggaaca

SEQ ID NO: 4554 - RNA, 20 nt, Artificial Sequence
  targeting sequence with ATCN PAM
gaaacaaaaccaaaugcagu

SEQ ID NO: 4555 - RNA, 20 nt, Artificial Sequence
  targeting sequence with ATCN PAM
gacuuuuacuccauucagaa

SEQ ID NO: 4556 - RNA, 20 nt, Artificial Sequence
  targeting sequence with ATCN PAM
uaaacaauguaaaaugcgca

SEQ ID NO: 4557 - RNA, 20 nt, Artificial Sequence
  targeting sequence with ATCN PAM
cccaggccaacacagccagc

SEQ ID NO: 4558 - RNA, 20 nt, Artificial Sequence
  targeting sequence with ATCN PAM
uguuacuuuugaguuucuuu

SEQ ID NO: 4559 - RNA, 20 nt, Artificial Sequence
  targeting sequence with ATCN PAM
guuuucauucuuugcuguac

SEQ ID NO: 4560 - RNA, 20 nt, Artificial Sequence
  targeting sequence with ATCN PAM
ggugcaguaauggcuuucuu

SEQ ID NO: 4561 - RNA, 20 nt, Artificial Sequence
  targeting sequence with ATCN PAM
gcacugaagguccuuccuaa

SEQ ID NO: 4562 - RNA, 20 nt, Artificial Sequence
  targeting sequence with ATCN PAM
uccuuucucaaacugucuua

SEQ ID NO: 4563 - RNA, 20 nt, Artificial Sequence
  targeting sequence with ATCN PAM
aaggaagguuuucaccugua

SEQ ID NO: 4564 - RNA, 20 nt, Artificial Sequence
  targeting sequence with ATCN PAM
aucaaaggaagguuuucacc

SEQ ID NO: 4565 - RNA, 20 nt, Artificial Sequence
  targeting sequence with ATCN PAM
aucuaucaaagugacuucca

SEQ ID NO: 4566 - RNA, 20 nt, Artificial Sequence
  targeting sequence with ATCN PAM
aucaaagugacuuccagugc

SEQ ID NO: 4567 - RNA, 20 nt, Artificial Sequence
  targeting sequence with ATCN PAM
aagugacuuccagugcccac

SEQ ID NO: 4568 - RNA, 20 nt, Artificial Sequence
  targeting sequence with ATCN PAM
accaguuuuucuaagcuaga

SEQ ID NO: 4569 - RNA, 20 nt, Artificial Sequence
  targeting sequence with ATCN PAM
uuuaaauaacuuuguggggg

SEQ ID NO: 4570 - RNA, 20 nt, Artificial Sequence
  targeting sequence with ATCN PAM
gcugagguuggggugaagac

SEQ ID NO: 4571 - RNA, 20 nt, Artificial Sequence
  targeting sequence with ATCN PAM
aaguaguuauggaaacaaca

SEQ ID NO: 4572 - RNA, 20 nt, Artificial Sequence
  targeting sequence with ATCN PAM
agcuugccaaagcaaaagga

SEQ ID NO: 4573 - RNA, 20 nt, Artificial Sequence
  targeting sequence with ATCN PAM
aguucugaaggaauuuccug

SEQ ID NO: 4574 - RNA, 20 nt, Artificial Sequence
  targeting sequence with ATCN PAM
uauaugcacuugguugcaca

SEQ ID NO: 4575 - RNA, 20 nt, Artificial Sequence
  targeting sequence with ATCN PAM
uuccauauuauuuguaguau

SEQ ID NO: 4576 - RNA, 20 nt, Artificial Sequence
  targeting sequence with ATCN PAM
agagagcuugguuaaucuuu

SEQ ID NO: 4577 - RNA, 20 nt, Artificial Sequence
  targeting sequence with ATCN PAM
ugguggaacuugaacauuua

SEQ ID NO: 4578 - RNA, 20 nt, Artificial Sequence
  targeting sequence with ATCN PAM
uccugguggaacuugaacau

SEQ ID NO: 4579 - RNA, 20 nt, Artificial Sequence
  targeting sequence with ATCN PAM
auagaaguccacugagcaua

SEQ ID NO: 4580 - RNA, 20 nt, Artificial Sequence
  targeting sequence with ATCN PAM
ccuuugguugauucucuuag

SEQ ID NO: 4581 - RNA, 20 nt, Artificial Sequence
  targeting sequence with ATCN PAM
accaaaggugauucuccuaa

SEQ ID NO: 4582 - RNA, 20 nt, Artificial Sequence
  targeting sequence with ATCN PAM
ucacuuugguuguaauuagg

SEQ ID NO: 4583 - RNA, 20 nt, Artificial Sequence
  targeting sequence with ATCN PAM
cuuugguuguaauuaggggu

SEQ ID NO: 4584 - RNA, 20 nt, Artificial Sequence
  targeting sequence with ATCN PAM
ugggcugggguugucuuuag

SEQ ID NO: 4585 - RNA, 20 nt, Artificial Sequence
  targeting sequence with ATCN PAM
cugggugaacguuuucuugg

SEQ ID NO: 4586 - RNA, 20 nt, Artificial Sequence
  targeting sequence with ATCN PAM
cuauccuacuacacugguuu

SEQ ID NO: 4587 - RNA, 20 nt, Artificial Sequence
  targeting sequence with ATCN PAM
uacuacacugguuuuuggaa

SEQ ID NO: 4588 - RNA, 20 nt, Artificial Sequence
  targeting sequence with ATCN PAM
caaaacaaaggcggcagagg

SEQ ID NO: 4589 - RNA, 20 nt, Artificial Sequence
  targeting sequence with ATCN PAM
acacauuucuucauuuaaaa

SEQ ID NO: 4590 - RNA, 20 nt, Artificial Sequence
  targeting sequence with ATCN PAM
cuucuuuauuucaaaggaaa

SEQ ID NO: 4591 - RNA, 20 nt, Artificial Sequence
  targeting sequence with ATCN PAM
uauuagaaaccauaaggaag

SEQ ID NO: 4592 - RNA, 20 nt, Artificial Sequence
  targeting sequence with ATCN PAM
gaacagcauacuugaagaau

SEQ ID NO: 4593 - RNA, 20 nt, Artificial Sequence
  targeting sequence with ATCN PAM
cuuggccgcacuuuuaaggu

SEQ ID NO: 4594 - RNA, 20 nt, Artificial Sequence
  targeting sequence with ATCN PAM
cugcacaguccuacuacagu

SEQ ID NO: 4595 - RNA, 20 nt, Artificial Sequence
  targeting sequence with ATCN PAM
uuugggggaugaugcuuuca

SEQ ID NO: 4596 - RNA, 20 nt, Artificial Sequence
  targeting sequence with ATCN PAM
cccaaaggaucacugcacag

SEQ ID NO: 4597 - RNA, 20 nt, Artificial Sequence
  targeting sequence with ATCN PAM
ucccccaaaggaucacugca

SEQ ID NO: 4598 - RNA, 20 nt, Artificial Sequence
  targeting sequence with ATCN PAM
ucgucaagguuaaggggcag

SEQ ID NO: 4599 - RNA, 20 nt, Artificial Sequence
  targeting sequence with ATCN PAM
cuuuugaaccugccccuuaa

SEQ ID NO: 4600 - RNA, 20 nt, Artificial Sequence
  targeting sequence with ATCN PAM
uacuuccaggauuagcguaa

SEQ ID NO: 4601 - RNA, 20 nt, Artificial Sequence
  targeting sequence with ATCN PAM
uggaaguaugaucacuuuug

SEQ ID NO: 4602 - RNA, 20 nt, Artificial Sequence
  targeting sequence with ATCN PAM
cucuggcuuucucacccaag

SEQ ID NO: 4603 - RNA, 20 nt, Artificial Sequence
  targeting sequence with ATCN PAM
auguguucuuccacggacaa

SEQ ID NO: 4604 - RNA, 20 nt, Artificial Sequence
  targeting sequence with ATCN PAM
accccgaauccaaaaauuca

SEQ ID NO: 4605 - RNA, 20 nt, Artificial Sequence
  targeting sequence with ATCN PAM
aaaaauucagacauggaaug

SEQ ID NO: 4606 - RNA, 20 nt, Artificial Sequence
  targeting sequence with ATCN PAM
uaccacauuccaugucugaa

SEQ ID NO: 4607 - RNA, 20 nt, Artificial Sequence
  targeting sequence with ATCN PAM
cagacuaacuuuacugugaa

SEQ ID NO: 4608 - RNA, 20 nt, Artificial Sequence
  targeting sequence with ATCN PAM
ccucucccuaucccagacua

SEQ ID NO: 4609 - RNA, 20 nt, Artificial Sequence
  targeting sequence with ATCN PAM
gguuuucgcaucuuuuuagu

SEQ ID NO: 4610 - RNA, 20 nt, Artificial Sequence
  targeting sequence with ATCN PAM
uuuuaguggguuuuagugca

SEQ ID NO: 4611 - RNA, 20 nt, Artificial Sequence
  targeting sequence with ATCN PAM
aaauuguggcuugaaggacu

SEQ ID NO: 4612 - RNA, 20 nt, Artificial Sequence
  targeting sequence with ATCN PAM
ggagcacaccgaagggcaau

SEQ ID NO: 4613 - RNA, 20 nt, Artificial Sequence
  targeting sequence with ATCN PAM
uaaaacaguccuuuaauaug

SEQ ID NO: 4614 - RNA, 20 nt, Artificial Sequence
  targeting sequence with ATCN PAM
caaggaaaaucaugcuacau

SEQ ID NO: 4615 - RNA, 20 nt, Artificial Sequence
  targeting sequence with ATCN PAM
ugcuacauaaaaaugaucca

SEQ ID NO: 4616 - RNA, 20 nt, Artificial Sequence
  targeting sequence with ATCN PAM
uuuuuauguagcaugauuuu

SEQ ID NO: 4617 - RNA, 20 nt, Artificial Sequence
  targeting sequence with ATCN PAM
aagauuuucgcccaaaaaac

SEQ ID NO: 4618 - RNA, 20 nt, Artificial Sequence
  targeting sequence with ATCN PAM
uggaucauuuuuauguagca

SEQ ID NO: 4619 - RNA, 20 nt, Artificial Sequence
  targeting sequence with ATCN PAM
aagaaguuuuuugggcgaaa

SEQ ID NO: 4620 - RNA, 20 nt, Artificial Sequence
  targeting sequence with ATCN PAM
aaaaaauacuauugcaauug

SEQ ID NO: 4621 - RNA, 20 nt, Artificial Sequence
  targeting sequence with ATCN PAM
guuuacauuuagaauaaugu

SEQ ID NO: 4622 - RNA, 20 nt, Artificial Sequence
  targeting sequence with ATCN PAM
ucuaggggaugaaaagaacc

SEQ ID NO: 4623 - RNA, 20 nt, Artificial Sequence
  targeting sequence with ATCN PAM
aggggaugaaaagaaccguu

SEQ ID NO: 4624 - RNA, 20 nt, Artificial Sequence
  targeting sequence with ATCN PAM
ccuagaugaugcuggcacag

SEQ ID NO: 4625 - RNA, 20 nt, Artificial Sequence
  targeting sequence with ATCN PAM
uccuggcugucauggcaguc

SEQ ID NO: 4626 - RNA, 20 nt, Artificial Sequence
  targeting sequence with ATCN PAM
acauccuccuggcugucaug

SEQ ID NO: 4627 - RNA, 20 nt, Artificial Sequence
  targeting sequence with ATCN PAM
uggagaugcgcgucuggcau

SEQ ID NO: 4628 - RNA, 20 nt, Artificial Sequence
  targeting sequence with ATCN PAM
ccaagauggagcugcagcag

SEQ ID NO: 4629 - RNA, 20 nt, Artificial Sequence
  targeting sequence with ATCN PAM
cagaauacuugugagcagaa

SEQ ID NO: 4630 - RNA, 20 nt, Artificial Sequence
  targeting sequence with ATCN PAM
ggcuugcccagggggcaugu

SEQ ID NO: 4631 - RNA, 20 nt, Artificial Sequence
  targeting sequence with ATCN PAM
ugagcaaugccaaugauuuu

SEQ ID NO: 4632 - RNA, 20 nt, Artificial Sequence
  targeting sequence with ATCN PAM
uuggcauugcucaagaugca

SEQ ID NO: 4633 - RNA, 20 nt, Artificial Sequence
  targeting sequence with ATCN PAM
agccuuuuacauucauucaa

SEQ ID NO: 4634 - RNA, 20 nt, Artificial Sequence
  targeting sequence with ATCN PAM
cuugaauagugaguuauaca

SEQ ID NO: 4635 - RNA, 20 nt, Artificial Sequence
  targeting sequence with ATCN PAM
cacuggaaugcaguggaggg

SEQ ID NO: 4636 - RNA, 20 nt, Artificial Sequence
  targeting sequence with ATCN PAM
aaguugcacagaauauauuu

SEQ ID NO: 4637 - RNA, 20 nt, Artificial Sequence
  targeting sequence with ATCN PAM
uauuugaaauuuuuuauguu

SEQ ID NO: 4638 - RNA, 20 nt, Artificial Sequence
  targeting sequence with ATCN PAM
cugucccugaggcaguacug

SEQ ID NO: 4639 - RNA, 20 nt, Artificial Sequence
  targeting sequence with ATCN PAM
guaaacuaaaaauaaaaucc

SEQ ID NO: 4640 - RNA, 20 nt, Artificial Sequence
  targeting sequence with ATCN PAM
uaagacccccagccaaauga

SEQ ID NO: 4641 - RNA, 20 nt, Artificial Sequence
  targeting sequence with ATCN PAM
uugccaagaacucacuuuuu

SEQ ID NO: 4642 - RNA, 20 nt, Artificial Sequence
  targeting sequence with ATCN PAM
ccucccuuuuugaguugugg

SEQ ID NO: 4643 - RNA, 20 nt, Artificial Sequence
  targeting sequence with ATCN PAM
cuauuuucacauuaaugcug

SEQ ID NO: 4644 - RNA, 20 nt, Artificial Sequence
  targeting sequence with ATCN PAM
uaagacugacagaauggacu

SEQ ID NO: 4645 - RNA, 20 nt, Artificial Sequence
  targeting sequence with ATCN PAM
aauuauaaacaagaccuaag

SEQ ID NO: 4646 - RNA, 20 nt, Artificial Sequence
  targeting sequence with ATCN PAM
cacccuauaaaccauaaaau

SEQ ID NO: 4647 - RNA, 20 nt, Artificial Sequence
  targeting sequence with ATCN PAM
caucaguuuuuaaaaaaauu

SEQ ID NO: 4648 - RNA, 20 nt, Artificial Sequence
  targeting sequence with ATCN PAM
guuuuuaaaaaaauuaacug

SEQ ID NO: 4649 - RNA, 20 nt, Artificial Sequence
  targeting sequence with ATCN PAM
caugacagacaacagacucc

SEQ ID NO: 4650 - RNA, 20 nt, Artificial Sequence
  targeting sequence with ATCN PAM
cuaaguaggggcuaacaagu

SEQ ID NO: 4651 - RNA, 20 nt, Artificial Sequence
  targeting sequence with ATCN PAM
acacauggaaaguauacauu

SEQ ID NO: 4652 - RNA, 20 nt, Artificial Sequence
  targeting sequence with ATCN PAM
uaaaucaacacauggaaagu

SEQ ID NO: 4653 - RNA, 20 nt, Artificial Sequence
  targeting sequence with ATCN PAM
cacuauaggaaucgauucac

SEQ ID NO: 4654 - RNA, 20 nt, Artificial Sequence
  targeting sequence with ATCN PAM
auucacaacuugcuuuuuuu

SEQ ID NO: 4655 - RNA, 20 nt, Artificial Sequence
  targeting sequence with ATCN PAM
auuccuauagugugauacua

SEQ ID NO: 4656 - RNA, 20 nt, Artificial Sequence
  targeting sequence with ATCN PAM
ccaagacccacuguugaaug

SEQ ID NO: 4657 - RNA, 20 nt, Artificial Sequence
  targeting sequence with ATCN PAM
cuccaugucaauacacagaa

SEQ ID NO: 4658 - RNA, 20 nt, Artificial Sequence
  targeting sequence with ATCN PAM
accucauuuuuuuuuaacug

SEQ ID NO: 4659 - RNA, 20 nt, Artificial Sequence
  targeting sequence with ATCN PAM
ccaagggggaacuagcugca

SEQ ID NO: 4660 - RNA, 20 nt, Artificial Sequence
  targeting sequence with ATCN PAM
uuguuauaguggaaaaguug

SEQ ID NO: 4661 - RNA, 20 nt, Artificial Sequence
  targeting sequence with ATCN PAM
cugacaucaguggaaaggga

SEQ ID NO: 4662 - RNA, 20 nt, Artificial Sequence
  targeting sequence with ATCN PAM
guggaaagggaucucugauc

SEQ ID NO: 4663 - RNA, 20 nt, Artificial Sequence
  targeting sequence with ATCN PAM
cuuuccacugaugucaggga

SEQ ID NO: 4664 - RNA, 20 nt, Artificial Sequence
  targeting sequence with ATCN PAM
cugaucugccuucuuaagaa

SEQ ID NO: 4665 - RNA, 20 nt, Artificial Sequence
  targeting sequence with ATCN PAM
gagaucccuuuccacugaug

SEQ ID NO: 4666 - RNA, 20 nt, Artificial Sequence
  targeting sequence with ATCN PAM
gccuucuuaagaagggcaca

SEQ ID NO: 4667 - RNA, 20 nt, Artificial Sequence
  targeting sequence with ATCN PAM
aacuaaaggagagugugccc

SEQ ID NO: 4668 - RNA, 20 nt, Artificial Sequence
  targeting sequence with ATCN PAM
ucuguaaagaggacacuaug

SEQ ID NO: 4669 - RNA, 20 nt, Artificial Sequence
  targeting sequence with ATCN PAM
cgccgcugcacucuagccug

SEQ ID NO: 4670 - RNA, 20 nt, Artificial Sequence
  targeting sequence with ATCN PAM
cagcucacugccagcuccac

SEQ ID NO: 4671 - RNA, 20 nt, Artificial Sequence
  targeting sequence with ATCN PAM
cuacuaaaaauacaaaaauu

SEQ ID NO: 4672 - RNA, 20 nt, Artificial Sequence
  targeting sequence with ATCN PAM
uaacacggugaaaccccauc

SEQ ID NO: 4673 - RNA, 20 nt, Artificial Sequence
  targeting sequence with ATCN PAM
agaccauccuaacacgguga

SEQ ID NO: 4674 - RNA, 20 nt, Artificial Sequence
  targeting sequence with ATCN PAM
ccugaccuugugauccgccc

SEQ ID NO: 4675 - RNA, 20 nt, Artificial Sequence
  targeting sequence with ATCN PAM
caaggucaggagaucaagac

SEQ ID NO: 4676 - RNA, 20 nt, Artificial Sequence
  targeting sequence with ATCN PAM
gcccgccucggccucccaaa

SEQ ID NO: 4677 - RNA, 20 nt, Artificial Sequence
  targeting sequence with ATCN PAM
caaauccccugggauuacag

SEQ ID NO: 4678 - RNA, 20 nt, Artificial Sequence
  targeting sequence with ATCN PAM
ccugggauuacaggcgugcg

SEQ ID NO: 4679 - RNA, 20 nt, Artificial Sequence
  targeting sequence with ATCN PAM
caggggauuugggauuuugg

SEQ ID NO: 4680 - RNA, 20 nt, Artificial Sequence
  targeting sequence with ATCN PAM
ggucuugguaauauagacuu

SEQ ID NO: 4681 - RNA, 20 nt, Artificial Sequence
  targeting sequence with ATCN PAM
cucaauuacuaaaaaaacuu

SEQ ID NO: 4682 - RNA, 20 nt, Artificial Sequence
  targeting sequence with ATCN PAM
cuugaauacuuuggaauuaa

SEQ ID NO: 4683 - RNA, 20 nt, Artificial Sequence
  targeting sequence with ATCN PAM
gaccauagcuagggaaauag

SEQ ID NO: 4684 - RNA, 20 nt, Artificial Sequence
  targeting sequence with ATCN PAM
uccaaaguuggucugagccu

SEQ ID NO: 4685 - RNA, 20 nt, Artificial Sequence
  targeting sequence with ATCN PAM
caggaaaccaggaccagaaa

SEQ ID NO: 4686 - RNA, 20 nt, Artificial Sequence
  targeting sequence with ATCN PAM
auugucugucuauaguuggc

SEQ ID NO: 4687 - RNA, 20 nt, Artificial Sequence
  targeting sequence with ATCN PAM
uucuggacuggacagcaucc

SEQ ID NO: 4688 - RNA, 20 nt, Artificial Sequence
  targeting sequence with ATCN PAM
uaggaaaaaauaauuaaaac

SEQ ID NO: 4689 - RNA, 20 nt, Artificial Sequence
  targeting sequence with ATCN PAM
ucuucaggcccugcuuaugu

SEQ ID NO: 4690 - RNA, 20 nt, Artificial Sequence
  targeting sequence with ATCN PAM
ggguaaaugaucuagacauu

SEQ ID NO: 4691 - RNA, 20 nt, Artificial Sequence
  targeting sequence with ATCN PAM
uuuacccagaugccaucuuc

SEQ ID NO: 4692 - RNA, 20 nt, Artificial Sequence
  targeting sequence with ATCN PAM
agacauucccuugauucuuu

SEQ ID NO: 4693 - RNA, 20 nt, Artificial Sequence
  targeting sequence with ATCN PAM
agggaaugucuagaucauuu

SEQ ID NO: 4694 - RNA, 20 nt, Artificial Sequence
  targeting sequence with ATCN PAM
auuuuauucugugaggaagu

SEQ ID NO: 4695 - RNA, 20 nt, Artificial Sequence
  targeting sequence with ATCN PAM
cauauaggcacauugccuga

SEQ ID NO: 4696 - RNA, 20 nt, Artificial Sequence
  targeting sequence with ATCN PAM
aaaucucauauaggcacauu

SEQ ID NO: 4697 - RNA, 20 nt, Artificial Sequence
  targeting sequence with ATCN PAM
uauuuguccauuacugcuuc

SEQ ID NO: 4698 - RNA, 20 nt, Artificial Sequence
  targeting sequence with ATCN PAM
caguguauggaaaaccacau

SEQ ID NO: 4699 - RNA, 20 nt, Artificial Sequence
  targeting sequence with ATCN PAM
caguaaucucaguguaugga

SEQ ID NO: 4700 - RNA, 20 nt, Artificial Sequence
  targeting sequence with ATCN PAM
uaagaaacauuucccaagua

SEQ ID NO: 4701 - RNA, 20 nt, Artificial Sequence
  targeting sequence with ATCN PAM
caaucauuuuaagaguaggu

SEQ ID NO: 4702 - RNA, 20 nt, Artificial Sequence
  targeting sequence with ATCN PAM
uuuuaagaguagguauacuc

SEQ ID NO: 4703 - RNA, 20 nt, Artificial Sequence
  targeting sequence with ATCN PAM
uuuuuccuuccgcuguuuuc

SEQ ID NO: 4704 - RNA, 20 nt, Artificial Sequence
  targeting sequence with ATCN PAM
agguuaguaugaaggaaaag

SEQ ID NO: 4705 - RNA, 20 nt, Artificial Sequence
  targeting sequence with ATCN PAM
guccuaugaacgggcccggg

SEQ ID NO: 4706 - RNA, 20 nt, Artificial Sequence
  targeting sequence with ATCN PAM
cguaucaguccuaugaacgg

SEQ ID NO: 4707 - RNA, 20 nt, Artificial Sequence
  targeting sequence with ATCN PAM
ugaacuugaagcaggaacug

SEQ ID NO: 4708 - RNA, 20 nt, Artificial Sequence
  targeting sequence with ATCN PAM
uucacaucuaaggagaaaaa

SEQ ID NO: 4709 - RNA, 20 nt, Artificial Sequence
  targeting sequence with ATCN PAM
aaggagaaaaaaaaaguuua

SEQ ID NO: 4710 - RNA, 20 nt, Artificial Sequence
  targeting sequence with ATCN PAM
uuccuggcauuauuuacauc

SEQ ID NO: 4711 - RNA, 20 nt, Artificial Sequence
  targeting sequence with ATCN PAM
aacucccaaaacacauucua

SEQ ID NO: 4712 - RNA, 20 nt, Artificial Sequence
  targeting sequence with ATCN PAM
uuuccagagacuaagagcua

SEQ ID NO: 4713 - RNA, 20 nt, Artificial Sequence
  targeting sequence with ATCN PAM
cguggcaacauggcuguucc

SEQ ID NO: 4714 - RNA, 20 nt, Artificial Sequence
  targeting sequence with ATCN PAM
uuucaauacacaguauuugc

SEQ ID NO: 4715 - RNA, 20 nt, Artificial Sequence
  targeting sequence with ATCN PAM
cugcaaauacuguguauuga

SEQ ID NO: 4716 - RNA, 20 nt, Artificial Sequence
  targeting sequence with ATCN PAM
gggcugcuggcaucgcugca

SEQ ID NO: 4717 - RNA, 20 nt, Artificial Sequence
  targeting sequence with ATCN PAM
uuucaugaggcuugcuuaau

SEQ ID NO: 4718 - RNA, 20 nt, Artificial Sequence
  targeting sequence with ATCN PAM
gggugagugagcuggccagu

SEQ ID NO: 4719 - RNA, 20 nt, Artificial Sequence
  targeting sequence with ATCN PAM
caaacauccgggugagugag

SEQ ID NO: 4720 - RNA, 20 nt, Artificial Sequence
  targeting sequence with ATCN PAM
uccccauggccaaacacaag

SEQ ID NO: 4721 - RNA, 20 nt, Artificial Sequence
  targeting sequence with ATCN PAM
ccauggccaaacacaagugu

SEQ ID NO: 4722 - RNA, 20 nt, Artificial Sequence
  targeting sequence with ATCN PAM
ugccucccccacuccuuaga

SEQ ID NO: 4723 - RNA, 20 nt, Artificial Sequence
  targeting sequence with ATCN PAM
ucuugccucccccacuccuu

SEQ ID NO: 4724 - RNA, 20 nt, Artificial Sequence
  targeting sequence with ATCN PAM
ucuuuguuuuacuucuccau

SEQ ID NO: 4725 - RNA, 20 nt, Artificial Sequence
  targeting sequence with ATCN PAM
guagagguauaagacagagu

SEQ ID NO: 4726 - RNA, 20 nt, Artificial Sequence
  targeting sequence with ATCN PAM
ccggcacucugucuuauacc

SEQ ID NO: 4727 - RNA, 20 nt, Artificial Sequence
  targeting sequence with ATCN PAM
ccugccuuggucucccaaag

SEQ ID NO: 4728 - RNA, 20 nt, Artificial Sequence
  targeting sequence with ATCN PAM
cagcacuuugggagaccaag

SEQ ID NO: 4729 - RNA, 20 nt, Artificial Sequence
  targeting sequence with ATCN PAM
uuuaaaccuuuucuaggcug

SEQ ID NO: 4730 - RNA, 20 nt, Artificial Sequence
  targeting sequence with ATCN PAM
cauccuuuaaaccuuuucua

SEQ ID NO: 4731 - RNA, 20 nt, Artificial Sequence
  targeting sequence with ATCN PAM
gagauucuagguggaaaaau

SEQ ID NO: 4732 - RNA, 20 nt, Artificial Sequence
  targeting sequence with ATCN PAM
cugaucucauccuuuaaacc

SEQ ID NO: 4733 - RNA, 20 nt, Artificial Sequence
  targeting sequence with ATCN PAM
auuucucuccagcccuuuac

SEQ ID NO: 4734 - RNA, 20 nt, Artificial Sequence
  targeting sequence with ATCN PAM
uccauuucucuccagcccuu

SEQ ID NO: 4735 - RNA, 20 nt, Artificial Sequence
  targeting sequence with ATCN PAM
auguuggaggaaaaaauggg

SEQ ID NO: 4736 - RNA, 20 nt, Artificial Sequence
  targeting sequence with ATCN PAM
ggaagauccgaagaguuggg

SEQ ID NO: 4737 - RNA, 20 nt, Artificial Sequence
  targeting sequence with ATCN PAM
uccagauuucccauuuuuuc

SEQ ID NO: 4738 - RNA, 20 nt, Artificial Sequence
  targeting sequence with ATCN PAM
gaagaguugggauucuagaa

SEQ ID NO: 4739 - RNA, 20 nt, Artificial Sequence
  targeting sequence with ATCN PAM
caacucuucggaucuuccag

SEQ ID NO: 4740 - RNA, 20 nt, Artificial Sequence
  targeting sequence with ATCN PAM
auucuagaaucccaacucuu

SEQ ID NO: 4741 - RNA, 20 nt, Artificial Sequence
  targeting sequence with ATCN PAM
ugugacuccucugcucagua

SEQ ID NO: 4742 - RNA, 20 nt, Artificial Sequence
  targeting sequence with ATCN PAM
acuuagcucuuuaguuccug

SEQ ID NO: 4743 - RNA, 20 nt, Artificial Sequence
  targeting sequence with ATCN PAM
gcccucugccugacagagag

SEQ ID NO: 4744 - RNA, 20 nt, Artificial Sequence
  targeting sequence with ATCN PAM
caacagggaauguacuauca

SEQ ID NO: 4745 - RNA, 20 nt, Artificial Sequence
  targeting sequence with ATCN PAM
cucagguagcauacauuuaa

SEQ ID NO: 4746 - RNA, 20 nt, Artificial Sequence
  targeting sequence with ATCN PAM
aaaacuaucuccuuucuuuc

SEQ ID NO: 4747 - RNA, 20 nt, Artificial Sequence
  targeting sequence with ATCN PAM
ccuuucuuucuucuuuuuaa

SEQ ID NO: 4748 - RNA, 20 nt, Artificial Sequence
  targeting sequence with ATCN PAM
caucuauaauauguaaacaa

SEQ ID NO: 4749 - RNA, 20 nt, Artificial Sequence
  targeting sequence with ATCN PAM
auaauauguaaacaaacuuu

SEQ ID NO: 4750 - RNA, 20 nt, Artificial Sequence
  targeting sequence with ATCN PAM
uaaacauucucccuuccaau

SEQ ID NO: 4751 - RNA, 20 nt, Artificial Sequence
  targeting sequence with ATCN PAM
uaaacuccacugcuuuucua

SEQ ID NO: 4752 - RNA, 20 nt, Artificial Sequence
  targeting sequence with ATCN PAM
uuguuucuuagaaaagcagu

SEQ ID NO: 4753 - RNA, 20 nt, Artificial Sequence
  targeting sequence with ATCN PAM
uaaaaaggguaagacaaugc

SEQ ID NO: 4754 - RNA, 20 nt, Artificial Sequence
  targeting sequence with ATCN PAM
uugauaggagucucuauacu

SEQ ID NO: 4755 - RNA, 20 nt, Artificial Sequence
  targeting sequence with ATCN PAM
aggauaaagaagaacuaaau

SEQ ID NO: 4756 - RNA, 20 nt, Artificial Sequence
  targeting sequence with ATCN PAM
aaaguaggacugcuuucuca

SEQ ID NO: 4757 - RNA, 20 nt, Artificial Sequence
  targeting sequence with ATCN PAM
aucaaaaguaggacugcuuu

SEQ ID NO: 4758 - RNA, 20 nt, Artificial Sequence
  targeting sequence with ATCN PAM
gcugcccagaguacgugauc

SEQ ID NO: 4759 - RNA, 20 nt, Artificial Sequence
  targeting sequence with ATCN PAM
cguacucugggcagcagaug

SEQ ID NO: 4760 - RNA, 20 nt, Artificial Sequence
  targeting sequence with ATCN PAM
ggaacaggucccaucccuag

SEQ ID NO: 4761 - RNA, 20 nt, Artificial Sequence
  targeting sequence with ATCN PAM
cuagaauugauuuuccacca

SEQ ID NO: 4762 - RNA, 20 nt, Artificial Sequence
  targeting sequence with ATCN PAM
auucuagggaugggaccugu

SEQ ID NO: 4763 - RNA, 20 nt, Artificial Sequence
  targeting sequence with ATCN PAM
uauggcauuuugugaacuua

SEQ ID NO: 4764 - RNA, 20 nt, Artificial Sequence
  targeting sequence with ATCN PAM
aacaccgaaaacaccacaga

SEQ ID NO: 4765 - RNA, 20 nt, Artificial Sequence
  targeting sequence with ATCN PAM
uucucucucuuuaccagaga

SEQ ID NO: 4766 - RNA, 20 nt, Artificial Sequence
  targeting sequence with ATCN PAM
caagagaccagcacuuugga

SEQ ID NO: 4767 - RNA, 20 nt, Artificial Sequence
  targeting sequence with ATCN PAM
ggcaggaaauuacucuccuc

SEQ ID NO: 4768 - RNA, 20 nt, Artificial Sequence
  targeting sequence with ATCN PAM
ugauaaaagcagacacaugu

SEQ ID NO: 4769 - RNA, 20 nt, Artificial Sequence
  targeting sequence with ATCN PAM
agauguaggcuggugaccac

SEQ ID NO: 4770 - RNA, 20 nt, Artificial Sequence
  targeting sequence with ATCN PAM
cacaugugucugcuuuuauc

SEQ ID NO: 4771 - RNA, 20 nt, Artificial Sequence
  targeting sequence with ATCN PAM
cugcaugugucccacaggcu

SEQ ID NO: 4772 - RNA, 20 nt, Artificial Sequence
  targeting sequence with ATCN PAM
uauuugauauuaaacauggc

SEQ ID NO: 4773 - RNA, 20 nt, Artificial Sequence
  targeting sequence with ATCN PAM
aauaagauuccuaagaagcc

SEQ ID NO: 4774 - RNA, 20 nt, Artificial Sequence
  targeting sequence with ATCN PAM
guucuacugguauguaugag

SEQ ID NO: 4775 - RNA, 20 nt, Artificial Sequence
  targeting sequence with ATCN PAM
gugccuacuaugcaaauuca

SEQ ID NO: 4776 - RNA, 20 nt, Artificial Sequence
  targeting sequence with ATCN PAM
gcauuuuauagaugaggaaa

SEQ ID NO: 4777 - RNA, 20 nt, Artificial Sequence
  targeting sequence with ATCN PAM
auaaaaugcagauaauaccu

SEQ ID NO: 4778 - RNA, 20 nt, Artificial Sequence
  targeting sequence with ATCN PAM
uugcugcccuacuuaauauu

SEQ ID NO: 4779 - RNA, 20 nt, Artificial Sequence
  targeting sequence with ATCN PAM
aguuuugacuuuaaaaucca

SEQ ID NO: 4780 - RNA, 20 nt, Artificial Sequence
  targeting sequence with ATCN PAM
aaguucuuaaacuuuacaau

SEQ ID NO: 4781 - RNA, 20 nt, Artificial Sequence
  targeting sequence with ATCN PAM
cauuguaaaguuuaagaacu

SEQ ID NO: 4782 - RNA, 20 nt, Artificial Sequence
  targeting sequence with ATCN PAM
ggguuuguagaguuucaaaa

SEQ ID NO: 4783 - RNA, 20 nt, Artificial Sequence
  targeting sequence with ATCN PAM
acuaacucuccucauaagua

SEQ ID NO: 4784 - RNA, 20 nt, Artificial Sequence
  targeting sequence with ATCN PAM
gagucagagugcuagcgauc

SEQ ID NO: 4785 - RNA, 20 nt, Artificial Sequence
  targeting sequence with ATCN PAM
cuagcacucugacucugauu

SEQ ID NO: 4786 - RNA, 20 nt, Artificial Sequence
  targeting sequence with ATCN PAM
aaaucacuuagcaaaaguga

SEQ ID NO: 4787 - RNA, 20 nt, Artificial Sequence
  targeting sequence with ATCN PAM
cuuagcaaaagugagcugga

SEQ ID NO: 4788 - RNA, 20 nt, Artificial Sequence
  targeting sequence with ATCN PAM
guguagcucuuuccagcuca

SEQ ID NO: 4789 - RNA, 20 nt, Artificial Sequence
  targeting sequence with ATCN PAM
caucaguguagcucuuucca

SEQ ID NO: 4790 - RNA, 20 nt, Artificial Sequence
  targeting sequence with ATCN PAM
gacuccaaaccaucacauca

SEQ ID NO: 4791 - RNA, 20 nt, Artificial Sequence
  targeting sequence with ATCN PAM
acuccacuuugacaucagac

SEQ ID NO: 4792 - RNA, 20 nt, Artificial Sequence
  targeting sequence with ATCN PAM
uuuuaauuguagguucauaa

SEQ ID NO: 4793 - RNA, 20 nt, Artificial Sequence
  targeting sequence with ATCN PAM
aaacccucauauacugcugu

SEQ ID NO: 4794 - RNA, 20 nt, Artificial Sequence
  targeting sequence with ATCN PAM
gggguagaauugcugaguca

SEQ ID NO: 4795 - RNA, 20 nt, Artificial Sequence
  targeting sequence with ATCN PAM
ucauugccaaaaaguauaaa

SEQ ID NO: 4796 - RNA, 20 nt, Artificial Sequence
  targeting sequence with ATCN PAM
uugccaaaaaguauaaacaa

SEQ ID NO: 4797 - RNA, 20 nt, Artificial Sequence
  targeting sequence with ATCN PAM
ucuuggcuguucacaaguca

SEQ ID NO: 4798 - RNA, 20 nt, Artificial Sequence
  targeting sequence with ATCN PAM
uggcuguucacaagucaagu

SEQ ID NO: 4799 - RNA, 20 nt, Artificial Sequence
  targeting sequence with ATCN PAM
auauuuuguauccuaaucug

SEQ ID NO: 4800 - RNA, 20 nt, Artificial Sequence
  targeting sequence with ATCN PAM
uaaucugcuugucauuugcc

SEQ ID NO: 4801 - RNA, 20 nt, Artificial Sequence
  targeting sequence with ATCN PAM
gcuugucauuugccaccugg

SEQ ID NO: 4802 - RNA, 20 nt, Artificial Sequence
  targeting sequence with ATCN PAM
auggaugcucacagaaacau

SEQ ID NO: 4803 - RNA, 20 nt, Artificial Sequence
  targeting sequence with ATCN PAM
auugaaggagaaaggaagaa

SEQ ID NO: 4804 - RNA, 20 nt, Artificial Sequence
  targeting sequence with ATCN PAM
aucgauugaaggagaaagga

SEQ ID NO: 4805 - RNA, 20 nt, Artificial Sequence
  targeting sequence with ATCN PAM
ucauaugcauacauguagug

SEQ ID NO: 4806 - RNA, 20 nt, Artificial Sequence
  targeting sequence with ATCN PAM
cgagcccuaggcaaaacuac

SEQ ID NO: 4807 - RNA, 20 nt, Artificial Sequence
  targeting sequence with ATCN PAM
uuuccucaucuucucaccug

SEQ ID NO: 4808 - RNA, 20 nt, Artificial Sequence
  targeting sequence with ATCN PAM
ucucaccugaccuuucauaa

SEQ ID NO: 4809 - RNA, 20 nt, Artificial Sequence
  targeting sequence with ATCN PAM
uaagucaaagagugucugua

SEQ ID NO: 4810 - RNA, 20 nt, Artificial Sequence
  targeting sequence with ATCN PAM
uaaaugggaaauauuguuuu

SEQ ID NO: 4811 - RNA, 20 nt, Artificial Sequence
  targeting sequence with ATCN PAM
aaccauuguuagccagggac

SEQ ID NO: 4812 - RNA, 20 nt, Artificial Sequence
  targeting sequence with ATCN PAM
caggccccaguccugggaau

SEQ ID NO: 4813 - RNA, 20 nt, Artificial Sequence
  targeting sequence with ATCN PAM
uuacaaauaacaugaggcaa

SEQ ID NO: 4814 - RNA, 20 nt, Artificial Sequence
  targeting sequence with ATCN PAM
uuuugaauucagucugcugu

SEQ ID NO: 4815 - RNA, 20 nt, Artificial Sequence
  targeting sequence with ATCN PAM
gucaauaucauuuugaauuc

SEQ ID NO: 4816 - RNA, 20 nt, Artificial Sequence
  targeting sequence with ATCN PAM
cugguaaagucuuggcugca

SEQ ID NO: 4817 - RNA, 20 nt, Artificial Sequence
  targeting sequence with ATCN PAM
agagcucauguaaugagggg

SEQ ID NO: 4818 - RNA, 20 nt, Artificial Sequence
  targeting sequence with ATCN PAM
uagaaaaugagacccugcua

SEQ ID NO: 4819 - RNA, 20 nt, Artificial Sequence
  targeting sequence with ATCN PAM
cugguagcagggucucauuu

SEQ ID NO: 4820 - RNA, 20 nt, Artificial Sequence
  targeting sequence with ATCN PAM
cugacaagcagccucuccuu

SEQ ID NO: 4821 - RNA, 20 nt, Artificial Sequence
  targeting sequence with ATCN PAM
ucuauugaaagagauuuaac

SEQ ID NO: 4822 - RNA, 20 nt, Artificial Sequence
  targeting sequence with ATCN PAM
cuuucaauagaggauuuauu

SEQ ID NO: 4823 - RNA, 20 nt, Artificial Sequence
  targeting sequence with ATCN PAM
cagaggucuaguuaaaucuc

SEQ ID NO: 4824 - RNA, 20 nt, Artificial Sequence
  targeting sequence with ATCN PAM
uuucuaacaccuagaguuug

SEQ ID NO: 4825 - RNA, 20 nt, Artificial Sequence
  targeting sequence with ATCN PAM
aacucuagguguuagaaaag

SEQ ID NO: 4826 - RNA, 20 nt, Artificial Sequence
  targeting sequence with ATCN PAM
cuuuaaaaaaaaaaaaaaaa

SEQ ID NO: 4827 - RNA, 20 nt, Artificial Sequence
  targeting sequence with ATCN PAM
uggcucacugcagccucaaa

SEQ ID NO: 4828 - RNA, 20 nt, Artificial Sequence
  targeting sequence with ATCN PAM
cuugagcucuggaauuugag

SEQ ID NO: 4829 - RNA, 20 nt, Artificial Sequence
  targeting sequence with ATCN PAM
ucccaccucagccuucugag

SEQ ID NO: 4830 - RNA, 20 nt, Artificial Sequence
  targeting sequence with ATCN PAM
uccugccucagcuucccaaa

SEQ ID NO: 4831 - RNA, 20 nt, Artificial Sequence
  targeting sequence with ATCN PAM
uucaaacuauagauacuuua

SEQ ID NO: 4832 - RNA, 20 nt, Artificial Sequence
  targeting sequence with ATCN PAM
auaguuugaaagaugaaaau

SEQ ID NO: 4833 - RNA, 20 nt, Artificial Sequence
  targeting sequence with ATCN PAM
auacguugugaaggcaaaua

SEQ ID NO: 4834 - RNA, 20 nt, Artificial Sequence
  targeting sequence with ATCN PAM
ggugugaaauauugggauuc

SEQ ID NO: 4835 - RNA, 20 nt, Artificial Sequence
  targeting sequence with ATCN PAM
caauauuucacaccugauuu

SEQ ID NO: 4836 - RNA, 20 nt, Artificial Sequence
  targeting sequence with ATCN PAM
gagaauacuugcaaaagucc

SEQ ID NO: 4837 - RNA, 20 nt, Artificial Sequence
  targeting sequence with ATCN PAM
uaagaagguugcaaaccugu

SEQ ID NO: 4838 - RNA, 20 nt, Artificial Sequence
  targeting sequence with ATCN PAM
aguuugaaaaugacuuccag

SEQ ID NO: 4839 - RNA, 20 nt, Artificial Sequence
  targeting sequence with ATCN PAM
cauauuaugucuagaggugc

SEQ ID NO: 4840 - RNA, 20 nt, Artificial Sequence
  targeting sequence with ATCN PAM
ucacuccugccauuuugcac

SEQ ID NO: 4841 - RNA, 20 nt, Artificial Sequence
  targeting sequence with ATCN PAM
aaaaccuggacugagcacau

SEQ ID NO: 4842 - RNA, 20 nt, Artificial Sequence
  targeting sequence with ATCN PAM
cagcucugcaacucgcuagc

SEQ ID NO: 4843 - RNA, 20 nt, Artificial Sequence
  targeting sequence with ATCN PAM
cccaagcuagcgaguugcag

SEQ ID NO: 4844 - RNA, 20 nt, Artificial Sequence
  targeting sequence with ATCN PAM
uuuucauccucuauaaagag

SEQ ID NO: 4845 - RNA, 20 nt, Artificial Sequence
  targeting sequence with ATCN PAM
ucuauaaagaggaaaucuac

SEQ ID NO: 4846 - RNA, 20 nt, Artificial Sequence
  targeting sequence with ATCN PAM
accuacuccaaagggcaauu

SEQ ID NO: 4847 - RNA, 20 nt, Artificial Sequence
  targeting sequence with ATCN PAM
uugcaauugcccuuuggagu

SEQ ID NO: 4848 - RNA, 20 nt, Artificial Sequence
  targeting sequence with ATCN PAM
aauaccuggcacacaagagg

SEQ ID NO: 4849 - RNA, 20 nt, Artificial Sequence
  targeting sequence with ATCN PAM
gucucacagagcaccucuug

SEQ ID NO: 4850 - RNA, 20 nt, Artificial Sequence
  targeting sequence with ATCN PAM
caaauauacauuugguuuca

SEQ ID NO: 4851 - RNA, 20 nt, Artificial Sequence
  targeting sequence with ATCN PAM
cgccacugcacuccaaccug

SEQ ID NO: 4852 - RNA, 20 nt, Artificial Sequence
  targeting sequence with ATCN PAM
uggcucauuguggucucaau

SEQ ID NO: 4853 - RNA, 20 nt, Artificial Sequence
  targeting sequence with ATCN PAM
ccuaggcucuagugacccuu

SEQ ID NO: 4854 - RNA, 20 nt, Artificial Sequence
  targeting sequence with ATCN PAM
aggaauucaagaccagccug

SEQ ID NO: 4855 - RNA, 20 nt, Artificial Sequence
  targeting sequence with ATCN PAM
cuucaauccaggaauucaag

SEQ ID NO: 4856 - RNA, 20 nt, Artificial Sequence
  targeting sequence with ATCN PAM
uccugccuuggccucccaaa

SEQ ID NO: 4857 - RNA, 20 nt, Artificial Sequence
  targeting sequence with ATCN PAM
cagcacuuugggaggccaag

SEQ ID NO: 4858 - RNA, 20 nt, Artificial Sequence
  targeting sequence with ATCN PAM
uaaauauacugaaaacagug

SEQ ID NO: 4859 - RNA, 20 nt, Artificial Sequence
  targeting sequence with ATCN PAM
cagaaauggguuuacugggc

SEQ ID NO: 4860 - RNA, 20 nt, Artificial Sequence
  targeting sequence with ATCN PAM
uccucaauccuagauacaag

SEQ ID NO: 4861 - RNA, 20 nt, Artificial Sequence
  targeting sequence with ATCN PAM
uagauacaagccucuuuuac

SEQ ID NO: 4862 - RNA, 20 nt, Artificial Sequence
  targeting sequence with ATCN PAM
aggauugaggaggauggagu

SEQ ID NO: 4863 - RNA, 20 nt, Artificial Sequence
  targeting sequence with ATCN PAM
agguuccugccauuucccug

SEQ ID NO: 4864 - RNA, 20 nt, Artificial Sequence
  targeting sequence with ATCN PAM
ggcaaacuugagccagggaa

SEQ ID NO: 4865 - RNA, 20 nt, Artificial Sequence
  targeting sequence with ATCN PAM
accuauguaugugugugagg

SEQ ID NO: 4866 - RNA, 20 nt, Artificial Sequence
  targeting sequence with ATCN PAM
uggugcacugcagccucaaa

SEQ ID NO: 4867 - RNA, 20 nt, Artificial Sequence
  targeting sequence with ATCN PAM
cuugagcccaggaguuugag

SEQ ID NO: 4868 - RNA, 20 nt, Artificial Sequence
  targeting sequence with ATCN PAM
ucccaucucagccuccugag

SEQ ID NO: 4869 - RNA, 20 nt, Artificial Sequence
  targeting sequence with ATCN PAM
cagccuccugaguagcuggg

SEQ ID NO: 4870 - RNA, 20 nt, Artificial Sequence
  targeting sequence with ATCN PAM
aauuuuuucaaaucuccaaa

SEQ ID NO: 4871 - RNA, 20 nt, Artificial Sequence
  targeting sequence with ATCN PAM
ccaaaaagaguuauauagaa

SEQ ID NO: 4872 - RNA, 20 nt, Artificial Sequence
  targeting sequence with ATCN PAM
ucaccaugcucuuacagaaa

SEQ ID NO: 4873 - RNA, 20 nt, Artificial Sequence
  targeting sequence with ATCN PAM
cugugaacaauaguuacauu

SEQ ID NO: 4874 - RNA, 20 nt, Artificial Sequence
  targeting sequence with ATCN PAM
uucuacuuacccaaaugcug

SEQ ID NO: 4875 - RNA, 20 nt, Artificial Sequence
  targeting sequence with ATCN PAM
cagcagaugaaacagacaaa

SEQ ID NO: 4876 - RNA, 20 nt, Artificial Sequence
  targeting sequence with ATCN PAM
gcugagaucauucuacuuac

SEQ ID NO: 4877 - RNA, 20 nt, Artificial Sequence
  targeting sequence with ATCN PAM
gggcaaaauagcaaaacccu

SEQ ID NO: 4878 - RNA, 20 nt, Artificial Sequence
  targeting sequence with ATCN PAM
ucccaccucagccuccugag

SEQ ID NO: 4879 - RNA, 20 nt, Artificial Sequence
  targeting sequence with ATCN PAM
cuugagcccgagaggucaag

SEQ ID NO: 4880 - RNA, 20 nt, Artificial Sequence
  targeting sequence with ATCN PAM
uucugggacuccuguuuuug

SEQ ID NO: 4881 - RNA, 20 nt, Artificial Sequence
  targeting sequence with ATCN PAM
uuauuaaaccucacuacuaa

SEQ ID NO: 4882 - RNA, 20 nt, Artificial Sequence
  targeting sequence with ATCN PAM
gaaccaauuggcuugugccu

SEQ ID NO: 4883 - RNA, 20 nt, Artificial Sequence
  targeting sequence with ATCN PAM
aauaacaggcacaagccaau

SEQ ID NO: 4884 - RNA, 20 nt, Artificial Sequence
  targeting sequence with ATCN PAM
gguuggugugguggcaugug

SEQ ID NO: 4885 - RNA, 20 nt, Artificial Sequence
  targeting sequence with ATCN PAM
cagcuacuugggaggcugag

SEQ ID NO: 4886 - RNA, 20 nt, Artificial Sequence
  targeting sequence with ATCN PAM
ccauuacuaauauuauaauc

SEQ ID NO: 4887 - RNA, 20 nt, Artificial Sequence
  targeting sequence with ATCN PAM
ucuuagcacacuuuauuuuc

SEQ ID NO: 4888 - RNA, 20 nt, Artificial Sequence
  targeting sequence with ATCN PAM
ucucauuaaauauuaacacc

SEQ ID NO: 4889 - RNA, 20 nt, Artificial Sequence
  targeting sequence with ATCN PAM
ucccuuuuucuccccuacug

SEQ ID NO: 4890 - RNA, 20 nt, Artificial Sequence
  targeting sequence with ATCN PAM
uguaaagggguuaaaauucc

SEQ ID NO: 4891 - RNA, 20 nt, Artificial Sequence
  targeting sequence with ATCN PAM
gggcagaggagauggugggu

SEQ ID NO: 4892 - RNA, 20 nt, Artificial Sequence
  targeting sequence with ATCN PAM
ccucugccccgauuuguguc

SEQ ID NO: 4893 - RNA, 20 nt, Artificial Sequence
  targeting sequence with ATCN PAM
uacaagaacagucaugccuc

SEQ ID NO: 4894 - RNA, 20 nt, Artificial Sequence
  targeting sequence with ATCN PAM
uuaagugaggcaugacuguu

SEQ ID NO: 4895 - RNA, 20 nt, Artificial Sequence
  targeting sequence with ATCN PAM
ugagaaaugaguuguuacgu

SEQ ID NO: 4896 - RNA, 20 nt, Artificial Sequence
  targeting sequence with ATCN PAM
cuaugugaacaccauacagu

SEQ ID NO: 4897 - RNA, 20 nt, Artificial Sequence
  targeting sequence with ATCN PAM
agauaguacagccuaugaua

SEQ ID NO: 4898 - RNA, 20 nt, Artificial Sequence
  targeting sequence with ATCN PAM
agauuuguguaaguacacug

SEQ ID NO: 4899 - RNA, 20 nt, Artificial Sequence
  targeting sequence with ATCN PAM
uaggcuguacuaucuagauu

SEQ ID NO: 4900 - RNA, 20 nt, Artificial Sequence
  targeting sequence with ATCN PAM
agacauaucuaaacauagaa

SEQ ID NO: 4901 - RNA, 20 nt, Artificial Sequence
  targeting sequence with ATCN PAM
aaacauagaaaaggcacacu

SEQ ID NO: 4902 - RNA, 20 nt, Artificial Sequence
  targeting sequence with ATCN PAM
cagcugcuuggaagcugagg

SEQ ID NO: 4903 - RNA, 20 nt, Artificial Sequence
  targeting sequence with ATCN PAM
caaaaaaacaaaacaaaaca

SEQ ID NO: 4904 - RNA, 20 nt, Artificial Sequence
  targeting sequence with ATCN PAM
acaacauauaagacaguugu

SEQ ID NO: 4905 - RNA, 20 nt, Artificial Sequence
  targeting sequence with ATCN PAM
aaaugucauuauucagcaca

SEQ ID NO: 4906 - RNA, 20 nt, Artificial Sequence
  targeting sequence with ATCN PAM
cacauagucaugugcugaau

SEQ ID NO: 4907 - RNA, 20 nt, Artificial Sequence
  targeting sequence with ATCN PAM
uuugccagccaaaaucacac

SEQ ID NO: 4908 - RNA, 20 nt, Artificial Sequence
  targeting sequence with ATCN PAM
aagcggaggugcgugaacau

SEQ ID NO: 4909 - RNA, 20 nt, Artificial Sequence
  targeting sequence with ATCN PAM
caugcuacuuguaauccaag

SEQ ID NO: 4910 - RNA, 20 nt, Artificial Sequence
  targeting sequence with ATCN PAM
uauuuuaaggauuuuuacuc

SEQ ID NO: 4911 - RNA, 20 nt, Artificial Sequence
  targeting sequence with ATCN PAM
uuaaaauaagauuauuaauc

SEQ ID NO: 4912 - RNA, 20 nt, Artificial Sequence
  targeting sequence with ATCN PAM
gcaaacagaaagccuuugca

SEQ ID NO: 4913 - RNA, 20 nt, Artificial Sequence
  targeting sequence with ATCN PAM
uacagugcaaaggcuuucug

SEQ ID NO: 4914 - RNA, 20 nt, Artificial Sequence
  targeting sequence with ATCN PAM
uauuuugguagaugaaauuc

SEQ ID NO: 4915 - RNA, 20 nt, Artificial Sequence
  targeting sequence with ATCN PAM
accaaaauaugauacuugcu

SEQ ID NO: 4916 - RNA, 20 nt, Artificial Sequence
  targeting sequence with ATCN PAM
cccacuggaagcaaaaccug

SEQ ID NO: 4917 - RNA, 20 nt, Artificial Sequence
  targeting sequence with ATCN PAM
acaaaguauuaaacacauca

SEQ ID NO: 4918 - RNA, 20 nt, Artificial Sequence
  targeting sequence with ATCN PAM
agauuuugucguagguaaau

SEQ ID NO: 4919 - RNA, 20 nt, Artificial Sequence
  targeting sequence with ATCN PAM
ugauguguuuaauacuuugu

SEQ ID NO: 4920 - RNA, 20 nt, Artificial Sequence
  targeting sequence with ATCN PAM
aggaaguugacuacuguguu

SEQ ID NO: 4921 - RNA, 20 nt, Artificial Sequence
  targeting sequence with ATCN PAM
gagaugagccaggggccuuu

SEQ ID NO: 4922 - RNA, 20 nt, Artificial Sequence
  targeting sequence with ATCN PAM
cugaucuaggaaguugacua

SEQ ID NO: 4923 - RNA, 20 nt, Artificial Sequence
  targeting sequence with ATCN PAM
guaauuugacacaaaaggcc

SEQ ID NO: 4924 - RNA, 20 nt, Artificial Sequence
  targeting sequence with ATCN PAM
cugagaaccaauggugcuuc

SEQ ID NO: 4925 - RNA, 20 nt, Artificial Sequence
  targeting sequence with ATCN PAM
ugugcuagugaccuauugcc

SEQ ID NO: 4926 - RNA, 20 nt, Artificial Sequence
  targeting sequence with ATCN PAM
acucuccccaauucagcuag

SEQ ID NO: 4927 - RNA, 20 nt, Artificial Sequence
  targeting sequence with ATCN PAM
uuuucccuuuucagcugaag

SEQ ID NO: 4928 - RNA, 20 nt, Artificial Sequence
  targeting sequence with ATCN PAM
gucccccacaauauuucaag

SEQ ID NO: 4929 - RNA, 20 nt, Artificial Sequence
  targeting sequence with ATCN PAM
uaaugacaagaaaacaguaa

SEQ ID NO: 4930 - RNA, 20 nt, Artificial Sequence
  targeting sequence with ATCN PAM
aaauaauacaggaaauaaau

SEQ ID NO: 4931 - RNA, 20 nt, Artificial Sequence
  targeting sequence with ATCN PAM
ggguugugccagaauguuag

SEQ ID NO: 4932 - RNA, 20 nt, Artificial Sequence
  targeting sequence with ATCN PAM
uuguauuccccuagaaaaaa

SEQ ID NO: 4933 - RNA, 20 nt, Artificial Sequence
  targeting sequence with ATCN PAM
cacuagguacuuccauauau

SEQ ID NO: 4934 - RNA, 20 nt, Artificial Sequence
  targeting sequence with ATCN PAM
ccuuuaauaacuucaacaac

SEQ ID NO: 4935 - RNA, 20 nt, Artificial Sequence
  targeting sequence with ATCN PAM
uuacauuuuuacagagggag

SEQ ID NO: 4936 - RNA, 20 nt, Artificial Sequence
  targeting sequence with ATCN PAM
gagccucaguuucucccucu

SEQ ID NO: 4937 - RNA, 20 nt, Artificial Sequence
  targeting sequence with ATCN PAM
acucagagcuggcaagcaaa

SEQ ID NO: 4938 - RNA, 20 nt, Artificial Sequence
  targeting sequence with ATCN PAM
ccuccauuccucuuuagcgg

SEQ ID NO: 4939 - RNA, 20 nt, Artificial Sequence
  targeting sequence with ATCN PAM
caguuuagcguuuagccgcu

SEQ ID NO: 4940 - RNA, 20 nt, Artificial Sequence
  targeting sequence with ATCN PAM
cuuuuauggaagauuguaua

SEQ ID NO: 4941 - RNA, 20 nt, Artificial Sequence
  targeting sequence with ATCN PAM
uccauaaaagagauuuaugg

SEQ ID NO: 4942 - RNA, 20 nt, Artificial Sequence
  targeting sequence with ATCN PAM
caauuaggaaauaugacgua

SEQ ID NO: 4943 - RNA, 20 nt, Artificial Sequence
  targeting sequence with ATCN PAM
aauuagcccuucauuuauga

SEQ ID NO: 4944 - RNA, 20 nt, Artificial Sequence
  targeting sequence with ATCN PAM
agccuacauaucgucuggag

SEQ ID NO: 4945 - RNA, 20 nt, Artificial Sequence
  targeting sequence with ATCN PAM
ucuggagauucucagaucac

SEQ ID NO: 4946 - RNA, 20 nt, Artificial Sequence
  targeting sequence with ATCN PAM
ccagacgauauguaggcuag

SEQ ID NO: 4947 - RNA, 20 nt, Artificial Sequence
  targeting sequence with ATCN PAM
gagaaucuccagacgauaug

SEQ ID NO: 4948 - RNA, 20 nt, Artificial Sequence
  targeting sequence with ATCN PAM
cuuuucaguugacaggucuc

SEQ ID NO: 4949 - RNA, 20 nt, Artificial Sequence
  targeting sequence with ATCN PAM
gagcauacaucauuggguua

SEQ ID NO: 4950 - RNA, 20 nt, Artificial Sequence
  targeting sequence with ATCN PAM
uuggguuauguccaaugaug

SEQ ID NO: 4951 - RNA, 20 nt, Artificial Sequence
  targeting sequence with ATCN PAM
uuggacauaacccaaugaug

SEQ ID NO: 4952 - RNA, 20 nt, Artificial Sequence
  targeting sequence with ATCN PAM
acuaaaauuauauuuaaaca

SEQ ID NO: 4953 - RNA, 20 nt, Artificial Sequence
  targeting sequence with ATCN PAM
ccggguuuaauacaaacuuu

SEQ ID NO: 4954 - RNA, 20 nt, Artificial Sequence
  targeting sequence with ATCN PAM
gcuucugagaaaguuuguau

SEQ ID NO: 4955 - RNA, 20 nt, Artificial Sequence
  targeting sequence with ATCN PAM
ccuucaaauacaagcuuuca

SEQ ID NO: 4956 - RNA, 20 nt, Artificial Sequence
  targeting sequence with ATCN PAM
acaccugggggguuuuuagc

SEQ ID NO: 4957 - RNA, 20 nt, Artificial Sequence
  targeting sequence with ATCN PAM
uacugagcuacuguagccug

SEQ ID NO: 4958 - RNA, 20 nt, Artificial Sequence
  targeting sequence with ATCN PAM
ggccuggaauccuacugagc

SEQ ID NO: 4959 - RNA, 20 nt, Artificial Sequence
  targeting sequence with ATCN PAM
ccuaagaaaaaaacuaccaa

SEQ ID NO: 4960 - RNA, 20 nt, Artificial Sequence
  targeting sequence with ATCN PAM
ucaguuucuagcagcaaauu

SEQ ID NO: 4961 - RNA, 20 nt, Artificial Sequence
  targeting sequence with ATCN PAM
uucugagcuucaguguucuc

SEQ ID NO: 4962 - RNA, 20 nt, Artificial Sequence
  targeting sequence with ATCN PAM
uauuuacaguugagaacacu

SEQ ID NO: 4963 - RNA, 20 nt, Artificial Sequence
  targeting sequence with ATCN PAM
agauaucuaagggucccuuc

SEQ ID NO: 4964 - RNA, 20 nt, Artificial Sequence
  targeting sequence with ATCN PAM
agauuaaucuuauuuacagu

SEQ ID NO: 4965 - RNA, 20 nt, Artificial Sequence
  targeting sequence with ATCN PAM
aagggucccuucuacuucug

SEQ ID NO: 4966 - RNA, 20 nt, Artificial Sequence
  targeting sequence with ATCN PAM
cauguuuuguuaguggcagc

SEQ ID NO: 4967 - RNA, 20 nt, Artificial Sequence
  targeting sequence with ATCN PAM
gaaguuggcacaggucucau

SEQ ID NO: 4968 - RNA, 20 nt, Artificial Sequence
  targeting sequence with ATCN PAM
cuuaaaaaaauuucuaaacc

SEQ ID NO: 4969 - RNA, 20 nt, Artificial Sequence
  targeting sequence with ATCN PAM
uguauuuggggaaggcagga

SEQ ID NO: 4970 - RNA, 20 nt, Artificial Sequence
  targeting sequence with ATCN PAM
cacucauagcugaaugcaca

SEQ ID NO: 4971 - RNA, 20 nt, Artificial Sequence
  targeting sequence with ATCN PAM
gaacuccaccucagccuuug

SEQ ID NO: 4972 - RNA, 20 nt, Artificial Sequence
  targeting sequence with ATCN PAM
aagcucugcuacaauggcuu

SEQ ID NO: 4973 - RNA, 20 nt, Artificial Sequence
  targeting sequence with ATCN PAM
gaagcauuccaaagccuaua

SEQ ID NO: 4974 - RNA, 20 nt, Artificial Sequence
  targeting sequence with ATCN PAM
gccuaacucuggaauaauca

SEQ ID NO: 4975 - RNA, 20 nt, Artificial Sequence
  targeting sequence with ATCN PAM
ucacuuggagcuacucacuu

SEQ ID NO: 4976 - RNA, 20 nt, Artificial Sequence
  targeting sequence with ATCN PAM
cuucucaauaauguccuucg

SEQ ID NO: 4977 - RNA, 20 nt, Artificial Sequence
  targeting sequence with ATCN PAM
cuacuucggucauuauuucc

SEQ ID NO: 4978 - RNA, 20 nt, Artificial Sequence
  targeting sequence with ATCN PAM
caaguugaaguaaauguuua

SEQ ID NO: 4979 - RNA, 20 nt, Artificial Sequence
  targeting sequence with ATCN PAM
aaugcuucagagagcuaggc

SEQ ID NO: 4980 - RNA, 20 nt, Artificial Sequence
  targeting sequence with ATCN PAM
auaugguugaaagccuagcu

SEQ ID NO: 4981 - RNA, 20 nt, Artificial Sequence
  targeting sequence with ATCN PAM
cgaaaucuauaugguugaaa

SEQ ID NO: 4982 - RNA, 20 nt, Artificial Sequence
  targeting sequence with ATCN PAM
uccugguaugaaaauaacac

SEQ ID NO: 4983 - RNA, 20 nt, Artificial Sequence
  targeting sequence with ATCN PAM
ugguaugaaaauaacacuga

SEQ ID NO: 4984 - RNA, 20 nt, Artificial Sequence
  targeting sequence with ATCN PAM
uggcuuuaccacuuacugag

SEQ ID NO: 4985 - RNA, 20 nt, Artificial Sequence
  targeting sequence with ATCN PAM
uuaaaaugggaauaauacaa

SEQ ID NO: 4986 - RNA, 20 nt, Artificial Sequence
  targeting sequence with ATCN PAM
ucacaguaggcccuacaggu

SEQ ID NO: 4987 - RNA, 20 nt, Artificial Sequence
  targeting sequence with ATCN PAM
agcacuaggcacaucacagg

SEQ ID NO: 4988 - RNA, 20 nt, Artificial Sequence
  targeting sequence with ATCN PAM
caggaguuuaacacuguucg

SEQ ID NO: 4989 - RNA, 20 nt, Artificial Sequence
  targeting sequence with ATCN PAM
ucaucaaauaacaaacagca

SEQ ID NO: 4990 - RNA, 20 nt, Artificial Sequence
  targeting sequence with ATCN PAM
ucaaauaacaaacagcaaca

SEQ ID NO: 4991 - RNA, 20 nt, Artificial Sequence
  targeting sequence with ATCN PAM
aauaacaaacagcaacacug

SEQ ID NO: 4992 - RNA, 20 nt, Artificial Sequence
  targeting sequence with ATCN PAM
acucagauacuaguaaaaua

SEQ ID NO: 4993 - RNA, 20 nt, Artificial Sequence
  targeting sequence with ATCN PAM
gaguugaugagagggaggcc

SEQ ID NO: 4994 - RNA, 20 nt, Artificial Sequence
  targeting sequence with ATCN PAM
ugagcauccacgcaugcauu

SEQ ID NO: 4995 - RNA, 20 nt, Artificial Sequence
  targeting sequence with ATCN PAM
acgcaugcauuaacugguuc

SEQ ID NO: 4996 - RNA, 20 nt, Artificial Sequence
  targeting sequence with ATCN PAM
uucugugaccaagaaccagu

SEQ ID NO: 4997 - RNA, 20 nt, Artificial Sequence
  targeting sequence with ATCN PAM
gugaaguccauccacagccu

SEQ ID NO: 4998 - RNA, 20 nt, Artificial Sequence
  targeting sequence with ATCN PAM
acagccuacuuucuuccuac

SEQ ID NO: 4999 - RNA, 20 nt, Artificial Sequence
  targeting sequence with ATCN PAM
cucuaagcugaauacuacca

SEQ ID NO: 5000 - RNA, 20 nt, Artificial Sequence
  targeting sequence with ATCN PAM
aagcucuuuccauuaaguua

SEQ ID NO: 5001 - RNA, 20 nt, Artificial Sequence
  targeting sequence with ATCN PAM
aacuuaauggaaagagcuua

SEQ ID NO: 5002 - RNA, 20 nt, Artificial Sequence
  targeting sequence with ATCN PAM
cagcauugugggaggcugag

SEQ ID NO: 5003 - RNA, 20 nt, Artificial Sequence
  targeting sequence with ATCN PAM
acccaccucagccucccaca

SEQ ID NO: 5004 - RNA, 20 nt, Artificial Sequence
  targeting sequence with ATCN PAM
ccugaggucaggaguucgag

SEQ ID NO: 5005 - RNA, 20 nt, Artificial Sequence
  targeting sequence with ATCN PAM
cagcuacuggggaggcuaag

SEQ ID NO: 5006 - RNA, 20 nt, Artificial Sequence
  targeting sequence with ATCN PAM
cuugaacccaggaggcggag

SEQ ID NO: 5007 - RNA, 20 nt, Artificial Sequence
  targeting sequence with ATCN PAM
ugacuugcugcaaccuccgc

SEQ ID NO: 5008 - RNA, 20 nt, Artificial Sequence
  targeting sequence with ATCN PAM
caccacugcacuccagccug

SEQ ID NO: 5009 - RNA, 20 nt, Artificial Sequence
  targeting sequence with ATCN PAM
ugccacugcacuccagccug

SEQ ID NO: 5010 - RNA, 20 nt, Artificial Sequence
  targeting sequence with ATCN PAM
cagcucacugcaaccuccac

SEQ ID NO: 5011 - RNA, 20 nt, Artificial Sequence
  targeting sequence with ATCN PAM
gagagguggagguugcagug

SEQ ID NO: 5012 - RNA, 20 nt, Artificial Sequence
  targeting sequence with ATCN PAM
cuacuaaaaauacaaaaaaa

SEQ ID NO: 5013 - RNA, 20 nt, Artificial Sequence
  targeting sequence with ATCN PAM
uggcuaacauggugaaaccc

SEQ ID NO: 5014 - RNA, 20 nt, Artificial Sequence
  targeting sequence with ATCN PAM
ucugaccuugugauccaccc

SEQ ID NO: 5015 - RNA, 20 nt, Artificial Sequence
  targeting sequence with ATCN PAM
caaggucagaagauugagac

SEQ ID NO: 5016 - RNA, 20 nt, Artificial Sequence
  targeting sequence with ATCN PAM
acccaccucagccucccaaa

SEQ ID NO: 5017 - RNA, 20 nt, Artificial Sequence
  targeting sequence with ATCN PAM
uagcacuuugggaggcugag

SEQ ID NO: 5018 - RNA, 20 nt, Artificial Sequence
  targeting sequence with ATCN PAM
uuucugggcuccaaaaguuc

SEQ ID NO: 5019 - RNA, 20 nt, Artificial Sequence
  targeting sequence with ATCN PAM
uuuccuugaaguugcaauca

SEQ ID NO: 5020 - RNA, 20 nt, Artificial Sequence
  targeting sequence with ATCN PAM
ggguauaauuaaaaagauac

SEQ ID NO: 5021 - RNA, 20 nt, Artificial Sequence
  targeting sequence with ATCN PAM
uuuuaauuauacccugauug

SEQ ID NO: 5022 - RNA, 20 nt, Artificial Sequence
  targeting sequence with ATCN PAM
agguaucuuuuuaauuauac

SEQ ID NO: 5023 - RNA, 20 nt, Artificial Sequence
  targeting sequence with ATCN PAM
guuugaaaaaucuagguauc

SEQ ID NO: 5024 - RNA, 20 nt, Artificial Sequence
  targeting sequence with ATCN PAM
ccauuggugccucaugcaca

SEQ ID NO: 5025 - RNA, 20 nt, Artificial Sequence
  targeting sequence with ATCN PAM
uuucuaaggaguguagaagc

SEQ ID NO: 5026 - RNA, 20 nt, Artificial Sequence
  targeting sequence with ATCN PAM
aucaaucuaaacagucugua

SEQ ID NO: 5027 - RNA, 20 nt, Artificial Sequence
  targeting sequence with ATCN PAM
aucuaaacagucuguauucu

SEQ ID NO: 5028 - RNA, 20 nt, Artificial Sequence
  targeting sequence with ATCN PAM
aaacagucuguauucuccac

SEQ ID NO: 5029 - RNA, 20 nt, Artificial Sequence
  targeting sequence with ATCN PAM
uuagacuucaaacaaccagu

SEQ ID NO: 5030 - RNA, 20 nt, Artificial Sequence
  targeting sequence with ATCN PAM
uauuuccugggcuuacagag

SEQ ID NO: 5031 - RNA, 20 nt, Artificial Sequence
  targeting sequence with ATCN PAM
gaaaaauaauacuggauggc

SEQ ID NO: 5032 - RNA, 20 nt, Artificial Sequence
  targeting sequence with ATCN PAM
aguauuauuuuucagauaag

SEQ ID NO: 5033 - RNA, 20 nt, Artificial Sequence
  targeting sequence with ATCN PAM
guuugcugagccauccagua

SEQ ID NO: 5034 - RNA, 20 nt, Artificial Sequence
  targeting sequence with ATCN PAM
gagauaggguccuaaguaua

SEQ ID NO: 5035 - RNA, 20 nt, Artificial Sequence
  targeting sequence with ATCN PAM
cugauuuaaaaucaguuugc

SEQ ID NO: 5036 - RNA, 20 nt, Artificial Sequence
  targeting sequence with ATCN PAM
gcccaguagaggacucccug

SEQ ID NO: 5037 - RNA, 20 nt, Artificial Sequence
  targeting sequence with ATCN PAM
ucaauaccuaaaauacaggg

SEQ ID NO: 5038 - RNA, 20 nt, Artificial Sequence
  targeting sequence with ATCN PAM
ucauguuuguaguccuagcu

SEQ ID NO: 5039 - RNA, 20 nt, Artificial Sequence
  targeting sequence with ATCN PAM
cugaaguucuuugucuuuuc

SEQ ID NO: 5040 - RNA, 20 nt, Artificial Sequence
  targeting sequence with ATCN PAM
aacccuguccccauccuacc

SEQ ID NO: 5041 - RNA, 20 nt, Artificial Sequence
  targeting sequence with ATCN PAM
uaccuuaaaaugcacucucu

SEQ ID NO: 5042 - RNA, 20 nt, Artificial Sequence
  targeting sequence with ATCN PAM
cagcacuuugggaggccgag

SEQ ID NO: 5043 - RNA, 20 nt, Artificial Sequence
  targeting sequence with ATCN PAM
ugaggucagguguucacgac

SEQ ID NO: 5044 - RNA, 20 nt, Artificial Sequence
  targeting sequence with ATCN PAM
cuugaaccugggaggcagaa

SEQ ID NO: 5045 - RNA, 20 nt, Artificial Sequence
  targeting sequence with ATCN PAM
caaacaaacaaacaaacaaa

SEQ ID NO: 5046 - RNA, 20 nt, Artificial Sequence
  targeting sequence with ATCN PAM
gcucugugcuugaagugaaa

SEQ ID NO: 5047 - RNA, 20 nt, Artificial Sequence
  targeting sequence with ATCN PAM
ccuucuaguucucuguacuu

SEQ ID NO: 5048 - RNA, 20 nt, Artificial Sequence
  targeting sequence with ATCN PAM
uauacauucuugaacuccuu

SEQ ID NO: 5049 - RNA, 20 nt, Artificial Sequence
  targeting sequence with ATCN PAM
caucggucuacuaaaaaguu

SEQ ID NO: 5050 - RNA, 20 nt, Artificial Sequence
  targeting sequence with ATCN PAM
gucuacuaaaaaguuucugu

SEQ ID NO: 5051 - RNA, 20 nt, Artificial Sequence
  targeting sequence with ATCN PAM
ucuccaaauuacuaaaucca

SEQ ID NO: 5052 - RNA, 20 nt, Artificial Sequence
  targeting sequence with ATCN PAM
ccaaauuacuaaauccaaag

SEQ ID NO: 5053 - RNA, 20 nt, Artificial Sequence
  targeting sequence with ATCN PAM
aaagagaaguucuuaguccu

SEQ ID NO: 5054 - RNA, 20 nt, Artificial Sequence
  targeting sequence with ATCN PAM
gcagcauuugacauacuuga

SEQ ID NO: 5055 - RNA, 20 nt, Artificial Sequence
  targeting sequence with ATCN PAM
aguaugucaaaugcugcaga

SEQ ID NO: 5056 - RNA, 20 nt, Artificial Sequence
  targeting sequence with ATCN PAM
ucucuagauuuuccucuucu

SEQ ID NO: 5057 - RNA, 20 nt, Artificial Sequence
  targeting sequence with ATCN PAM
agagaggaugguguacugga

SEQ ID NO: 5058 - RNA, 20 nt, Artificial Sequence
  targeting sequence with ATCN PAM
ucuuccuuuucuucuucucc

SEQ ID NO: 5059 - RNA, 20 nt, Artificial Sequence
  targeting sequence with ATCN PAM
uaugacucuaagagucucua

SEQ ID NO: 5060 - RNA, 20 nt, Artificial Sequence
  targeting sequence with ATCN PAM
aagugggaauguugaauagg

SEQ ID NO: 5061 - RNA, 20 nt, Artificial Sequence
  targeting sequence with ATCN PAM
gccaucuaagugggaauguu

SEQ ID NO: 5062 - RNA, 20 nt, Artificial Sequence
  targeting sequence with ATCN PAM
caguuaaugacaaaucuauu

SEQ ID NO: 5063 - RNA, 20 nt, Artificial Sequence
  targeting sequence with ATCN PAM
auucuuccagcuguuuaggu

SEQ ID NO: 5064 - RNA, 20 nt, Artificial Sequence
  targeting sequence with ATCN PAM
ucauaguuacugauuucuuu

SEQ ID NO: 5065 - RNA, 20 nt, Artificial Sequence
  targeting sequence with ATCN PAM
guaacuaugaggauuuuaac

SEQ ID NO: 5066 - RNA, 20 nt, Artificial Sequence
  targeting sequence with ATCN PAM
aaccugccagaaaauucugu

SEQ ID NO: 5067 - RNA, 20 nt, Artificial Sequence
  targeting sequence with ATCN PAM
ccuucaaaauacaucuaaaa

SEQ ID NO: 5068 - RNA, 20 nt, Artificial Sequence
  targeting sequence with ATCN PAM
aaaauccaacuacaucuuau

SEQ ID NO: 5069 - RNA, 20 nt, Artificial Sequence
  targeting sequence with ATCN PAM
aacuacaucuuauaaucuuc

SEQ ID NO: 5070 - RNA, 20 nt, Artificial Sequence
  targeting sequence with ATCN PAM
uauaaucuucacuuguacuu

SEQ ID NO: 5071 - RNA, 20 nt, Artificial Sequence
  targeting sequence with ATCN PAM
ucacuuguacuuuagucuga

SEQ ID NO: 5072 - RNA, 20 nt, Artificial Sequence
  targeting sequence with ATCN PAM
ugguucagacuaaaguacaa

SEQ ID NO: 5073 - RNA, 20 nt, Artificial Sequence
  targeting sequence with ATCN PAM
uauauugucugaguuacuaa

SEQ ID NO: 5074 - RNA, 20 nt, Artificial Sequence
  targeting sequence with ATCN PAM
uuuuaguaacucagacaaua

SEQ ID NO: 5075 - RNA, 20 nt, Artificial Sequence
  targeting sequence with ATCN PAM
ugcccacauaucuguucuua

SEQ ID NO: 5076 - RNA, 20 nt, Artificial Sequence
  targeting sequence with ATCN PAM
guucuuaauacuacaaccag

SEQ ID NO: 5077 - RNA, 20 nt, Artificial Sequence
  targeting sequence with ATCN PAM
uucugguuguaguauuaaga

SEQ ID NO: 5078 - RNA, 20 nt, Artificial Sequence
  targeting sequence with ATCN PAM
uuuaaaaaccuaagucaaau

SEQ ID NO: 5079 - RNA, 20 nt, Artificial Sequence
  targeting sequence with ATCN PAM
caucaguccucugcuuaaaa

SEQ ID NO: 5080 - RNA, 20 nt, Artificial Sequence
  targeting sequence with ATCN PAM
guccucugcuuaaaauucuu

SEQ ID NO: 5081 - RNA, 20 nt, Artificial Sequence
  targeting sequence with ATCN PAM
caggaauucauugaagaauu

SEQ ID NO: 5082 - RNA, 20 nt, Artificial Sequence
  targeting sequence with ATCN PAM
auguaguucagaccuuuguu

SEQ ID NO: 5083 - RNA, 20 nt, Artificial Sequence
  targeting sequence with ATCN PAM
acuuauaugcauauuuuuuc

SEQ ID NO: 5084 - RNA, 20 nt, Artificial Sequence
  targeting sequence with ATCN PAM
ccaaaauauuuuccaauaua

SEQ ID NO: 5085 - RNA, 20 nt, Artificial Sequence
  targeting sequence with ATCN PAM
uaauuuuuugguauuccuag

SEQ ID NO: 5086 - RNA, 20 nt, Artificial Sequence
  targeting sequence with ATCN PAM
uuuaacaccauaaaguaugu

SEQ ID NO: 5087 - RNA, 20 nt, Artificial Sequence
  targeting sequence with ATCN PAM
gaaguuaauucuaucaaaau

SEQ ID NO: 5088 - RNA, 20 nt, Artificial Sequence
  targeting sequence with ATCN PAM
aaauuuauacaaacacuuac

SEQ ID NO: 5089 - RNA, 20 nt, Artificial Sequence
  targeting sequence with ATCN PAM
uuguuuacauuucucuugac

SEQ ID NO: 5090 - RNA, 20 nt, Artificial Sequence
  targeting sequence with ATCN PAM
uaacugcauaaacugcauaa

SEQ ID NO: 5091 - RNA, 20 nt, Artificial Sequence
  targeting sequence with ATCN PAM
acuuaaagugcaugugacac

SEQ ID NO: 5092 - RNA, 20 nt, Artificial Sequence
  targeting sequence with ATCN PAM
ccugagugaccaguuccucu

SEQ ID NO: 5093 - RNA, 20 nt, Artificial Sequence
  targeting sequence with ATCN PAM
caguaaaaagcgaucucuug

SEQ ID NO: 5094 - RNA, 20 nt, Artificial Sequence
  targeting sequence with ATCN PAM
cuuuuuacugagauaugcag

SEQ ID NO: 5095 - RNA, 20 nt, Artificial Sequence
  targeting sequence with ATCN PAM
cuugagacuucucuauuauu

SEQ ID NO: 5096 - RNA, 20 nt, Artificial Sequence
  targeting sequence with ATCN PAM
caugguauuauucgagguuu

SEQ ID NO: 5097 - RNA, 20 nt, Artificial Sequence
  targeting sequence with ATCN PAM
acuuuuucuuguaaugucau

SEQ ID NO: 5098 - RNA, 20 nt, Artificial Sequence
  targeting sequence with ATCN PAM
agcaaucaacuuuuucuugu

SEQ ID NO: 5099 - RNA, 20 nt, Artificial Sequence
  targeting sequence with ATCN PAM
guaugaaauggcaggcaacc

SEQ ID NO: 5100 - RNA, 20 nt, Artificial Sequence
  targeting sequence with ATCN PAM
ucuguaugaaauggcaggca

SEQ ID NO: 5101 - RNA, 20 nt, Artificial Sequence
  targeting sequence with ATCN PAM
uaaggaagagaaaauacauu

SEQ ID NO: 5102 - RNA, 20 nt, Artificial Sequence
  targeting sequence with ATCN PAM
uaaggaaaauguuauuuuaa

SEQ ID NO: 5103 - RNA, 20 nt, Artificial Sequence
  targeting sequence with ATCN PAM
auaacauaaacuguuaacac

SEQ ID NO: 5104 - RNA, 20 nt, Artificial Sequence
  targeting sequence with ATCN PAM
guguauaacuucugacuccc

SEQ ID NO: 5105 - RNA, 20 nt, Artificial Sequence
  targeting sequence with ATCN PAM
uugauugugugugagggucc

SEQ ID NO: 5106 - RNA, 20 nt, Artificial Sequence
  targeting sequence with ATCN PAM
aagauccguguauaacuucu

SEQ ID NO: 5107 - RNA, 20 nt, Artificial Sequence
  targeting sequence with ATCN PAM
ccacuuugaucaagaguuaa

SEQ ID NO: 5108 - RNA, 20 nt, Artificial Sequence
  targeting sequence with ATCN PAM
aaguggggauuaggggugcu

SEQ ID NO: 5109 - RNA, 20 nt, Artificial Sequence
  targeting sequence with ATCN PAM
agaguuaacuguauuugguc

SEQ ID NO: 5110 - RNA, 20 nt, Artificial Sequence
  targeting sequence with ATCN PAM
uuggaaucuccaaagugaug

SEQ ID NO: 5111 - RNA, 20 nt, Artificial Sequence
  targeting sequence with ATCN PAM
ccaaagugaugugucuuuuu

SEQ ID NO: 5112 - RNA, 20 nt, Artificial Sequence
  targeting sequence with ATCN PAM
cuuuggagauuccaaggauu

SEQ ID NO: 5113 - RNA, 20 nt, Artificial Sequence
  targeting sequence with ATCN PAM
gccgucuuauuagcauacaa

SEQ ID NO: 5114 - RNA, 20 nt, Artificial Sequence
  targeting sequence with ATCN PAM
gaaagaccaaggcauaauua

SEQ ID NO: 5115 - RNA, 20 nt, Artificial Sequence
  targeting sequence with ATCN PAM
uuuaaccuucacucuccuuc

SEQ ID NO: 5116 - RNA, 20 nt, Artificial Sequence
  targeting sequence with ATCN PAM
ccaauggcaagcaauuuaau

SEQ ID NO: 5117 - RNA, 20 nt, Artificial Sequence
  targeting sequence with ATCN PAM
aucacacccacauaaugaag

SEQ ID NO: 5118 - RNA, 20 nt, Artificial Sequence
  targeting sequence with ATCN PAM
cacccacauaaugaaguuuc

SEQ ID NO: 5119 - RNA, 20 nt, Artificial Sequence
  targeting sequence with ATCN PAM
agaagcucccuaacccuguc

SEQ ID NO: 5120 - RNA, 20 nt, Artificial Sequence
  targeting sequence with ATCN PAM
cuucccauaugccuugccua

SEQ ID NO: 5121 - RNA, 20 nt, Artificial Sequence
  targeting sequence with ATCN PAM
uuucaucugcauccuuuaua

SEQ ID NO: 5122 - RNA, 20 nt, Artificial Sequence
  targeting sequence with ATCN PAM
gcauccuuuauaauaggcca

SEQ ID NO: 5123 - RNA, 20 nt, Artificial Sequence
  targeting sequence with ATCN PAM
uuuauaauaggccaguauac

SEQ ID NO: 5124 - RNA, 20 nt, Artificial Sequence
  targeting sequence with ATCN PAM
aaggagggggcuguggaaac

SEQ ID NO: 5125 - RNA, 20 nt, Artificial Sequence
  targeting sequence with ATCN PAM
cauuuccaaugcccauugaa

SEQ ID NO: 5126 - RNA, 20 nt, Artificial Sequence
  targeting sequence with ATCN PAM
aauacuaucuccagguagac

SEQ ID NO: 5127 - RNA, 20 nt, Artificial Sequence
  targeting sequence with ATCN PAM
ccagguagacagagucagaa

SEQ ID NO: 5128 - RNA, 20 nt, Artificial Sequence
  targeting sequence with ATCN PAM
uuuaauucaauucaauucug

SEQ ID NO: 5129 - RNA, 20 nt, Artificial Sequence
  targeting sequence with ATCN PAM
ccacagaccuggcaucagaa

SEQ ID NO: 5130 - RNA, 20 nt, Artificial Sequence
  targeting sequence with ATCN PAM
gaauuguguuguugagagga

SEQ ID NO: 5131 - RNA, 20 nt, Artificial Sequence
  targeting sequence with ATCN PAM
ucucaacaacacaauucuga

SEQ ID NO: 5132 - RNA, 20 nt, Artificial Sequence
  targeting sequence with ATCN PAM
acucaauuuccuuuacacuc

SEQ ID NO: 5133 - RNA, 20 nt, Artificial Sequence
  targeting sequence with ATCN PAM
gauuuggccuucuuuauggu

SEQ ID NO: 5134 - RNA, 20 nt, Artificial Sequence
  targeting sequence with ATCN PAM
gaugugccuuugaaggccau

SEQ ID NO: 5135 - RNA, 20 nt, Artificial Sequence
  targeting sequence with ATCN PAM
accauaaagaaggccaaauc

SEQ ID NO: 5136 - RNA, 20 nt, Artificial Sequence
  targeting sequence with ATCN PAM
aaucucguauacccuucccu

SEQ ID NO: 5137 - RNA, 20 nt, Artificial Sequence
  targeting sequence with ATCN PAM
cguauacccuucccuuuaua

SEQ ID NO: 5138 - RNA, 20 nt, Artificial Sequence
  targeting sequence with ATCN PAM
aaauuauaaagggaagggua

SEQ ID NO: 5139 - RNA, 20 nt, Artificial Sequence
  targeting sequence with ATCN PAM
caacauuuugggaggccaaa

SEQ ID NO: 5140 - RNA, 20 nt, Artificial Sequence
  targeting sequence with ATCN PAM
uccugccuuuuggccuccca

SEQ ID NO: 5141 - RNA, 20 nt, Artificial Sequence
  targeting sequence with ATCN PAM
cuugagcccaggaguuugag

SEQ ID NO: 5142 - RNA, 20 nt, Artificial Sequence
  targeting sequence with ATCN PAM
uuuccuucugaucaccccac

SEQ ID NO: 5143 - RNA, 20 nt, Artificial Sequence
  targeting sequence with ATCN PAM
gaaggaaaggauucauagga

SEQ ID NO: 5144 - RNA, 20 nt, Artificial Sequence
  targeting sequence with ATCN PAM
ccccacucacccugggcuag

SEQ ID NO: 5145 - RNA, 20 nt, Artificial Sequence
  targeting sequence with ATCN PAM
auuuuauuaagaaugcuagc

SEQ ID NO: 5146 - RNA, 20 nt, Artificial Sequence
  targeting sequence with ATCN PAM
cuguuuguucugagguuaua

SEQ ID NO: 5147 - RNA, 20 nt, Artificial Sequence
  targeting sequence with ATCN PAM
aagauauauagcaaacaaca

SEQ ID NO: 5148 - RNA, 20 nt, Artificial Sequence
  targeting sequence with ATCN PAM
uggauucaaaaccccugaca

SEQ ID NO: 5149 - RNA, 20 nt, Artificial Sequence
  targeting sequence with ATCN PAM
gcuuaaaaaguuggcauuua

SEQ ID NO: 5150 - RNA, 20 nt, Artificial Sequence
  targeting sequence with ATCN PAM
accauaaggcauaagagggu

SEQ ID NO: 5151 - RNA, 20 nt, Artificial Sequence
  targeting sequence with ATCN PAM
aacuucacagugaaaaaucu

SEQ ID NO: 5152 - RNA, 20 nt, Artificial Sequence
  targeting sequence with ATCN PAM
guuuggaucuuaaauccaac

SEQ ID NO: 5153 - RNA, 20 nt, Artificial Sequence
  targeting sequence with ATCN PAM
aaacagauuuuucacuguga

SEQ ID NO: 5154 - RNA, 20 nt, Artificial Sequence
  targeting sequence with ATCN PAM
uaaauccaacugcucaauag

SEQ ID NO: 5155 - RNA, 20 nt, Artificial Sequence
  targeting sequence with ATCN PAM
aacugcucaauagcaaacaa

SEQ ID NO: 5156 - RNA, 20 nt, Artificial Sequence
  targeting sequence with ATCN PAM
ggcaaaacuauaaagaaucu

SEQ ID NO: 5157 - RNA, 20 nt, Artificial Sequence
  targeting sequence with ATCN PAM
ccuuugcuuuaguauuuauc

SEQ ID NO: 5158 - RNA, 20 nt, Artificial Sequence
  targeting sequence with ATCN PAM
cuuagaaaauauguaucauu

SEQ ID NO: 5159 - RNA, 20 nt, Artificial Sequence
  targeting sequence with ATCN PAM
uuuauaagaucaacuaaaaa

SEQ ID NO: 5160 - RNA, 20 nt, Artificial Sequence
  targeting sequence with ATCN PAM
uauaaaugauacauauuuuc

SEQ ID NO: 5161 - RNA, 20 nt, Artificial Sequence
  targeting sequence with ATCN PAM
acuaaaaaauggcaagguca

SEQ ID NO: 5162 - RNA, 20 nt, Artificial Sequence
  targeting sequence with ATCN PAM
aacuauaggcuaaguuugua

SEQ ID NO: 5163 - RNA, 20 nt, Artificial Sequence
  targeting sequence with ATCN PAM
auaguccugaguacaaacuu

SEQ ID NO: 5164 - RNA, 20 nt, Artificial Sequence
  targeting sequence with ATCN PAM
agcuuuauucaacacaacca

SEQ ID NO: 5165 - RNA, 20 nt, Artificial Sequence
  targeting sequence with ATCN PAM
uccuccaauccaguuuuauc

SEQ ID NO: 5166 - RNA, 20 nt, Artificial Sequence
  targeting sequence with ATCN PAM
uccaauccaguuuuaucuca

SEQ ID NO: 5167 - RNA, 20 nt, Artificial Sequence
  targeting sequence with ATCN PAM
aguuuuaucucagagauuug

SEQ ID NO: 5168 - RNA, 20 nt, Artificial Sequence
  targeting sequence with ATCN PAM
cagagauuuguucugcugau

SEQ ID NO: 5169 - RNA, 20 nt, Artificial Sequence
  targeting sequence with ATCN PAM
cugagauaaaacuggauugg

SEQ ID NO: 5170 - RNA, 20 nt, Artificial Sequence
  targeting sequence with ATCN PAM
gcagaacaaaucucugagau

SEQ ID NO: 5171 - RNA, 20 nt, Artificial Sequence
  targeting sequence with ATCN PAM
ggagauacaaguuucacacu

SEQ ID NO: 5172 - RNA, 20 nt, Artificial Sequence
  targeting sequence with ATCN PAM
ccagaucagcagaacaaauc

SEQ ID NO: 5173 - RNA, 20 nt, Artificial Sequence
  targeting sequence with ATCN PAM
cagugugaaacuuguaucuc

SEQ ID NO: 5174 - RNA, 20 nt, Artificial Sequence
  targeting sequence with ATCN PAM
uuuucuuuuuuuuuuuuuuu

SEQ ID NO: 5175 - RNA, 20 nt, Artificial Sequence
  targeting sequence with ATCN PAM
agguggccaaaaaaaaaaaa

SEQ ID NO: 5176 - RNA, 20 nt, Artificial Sequence
  targeting sequence with ATCN PAM
aucaagaauuuuuuuuuuuu

SEQ ID NO: 5177 - RNA, 20 nt, Artificial Sequence
  targeting sequence with ATCN PAM
agaauuuuuuuuuuuuaauu

SEQ ID NO: 5178 - RNA, 20 nt, Artificial Sequence
  targeting sequence with ATCN PAM
aauuccuauuuguuaugcau

SEQ ID NO: 5179 - RNA, 20 nt, Artificial Sequence
  targeting sequence with ATCN PAM
ucgaauuuaacccauguuuu

SEQ ID NO: 5180 - RNA, 20 nt, Artificial Sequence
  targeting sequence with ATCN PAM
guguuucuuucaaugaacaa

SEQ ID NO: 5181 - RNA, 20 nt, Artificial Sequence
  targeting sequence with ATCN PAM
ucacuuucucaagcgaaaua

SEQ ID NO: 5182 - RNA, 20 nt, Artificial Sequence
  targeting sequence with ATCN PAM
uggagugucccgucucuugu

SEQ ID NO: 5183 - RNA, 20 nt, Artificial Sequence
  targeting sequence with ATCN PAM
uccuggagugucccgucucu

SEQ ID NO: 5184 - RNA, 20 nt, Artificial Sequence
  targeting sequence with ATCN PAM
gagcauguccauacagcuac

SEQ ID NO: 5185 - RNA, 20 nt, Artificial Sequence
  targeting sequence with ATCN PAM
cagccaggggcauuugcuau

SEQ ID NO: 5186 - RNA, 20 nt, Artificial Sequence
  targeting sequence with ATCN PAM
acugcugaaaaacgcuaagu

SEQ ID NO: 5187 - RNA, 20 nt, Artificial Sequence
  targeting sequence with ATCN PAM
uauaguuaguuaguccugca

SEQ ID NO: 5188 - RNA, 20 nt, Artificial Sequence
  targeting sequence with ATCN PAM
ugaauccuauaguuaguuag

SEQ ID NO: 5189 - RNA, 20 nt, Artificial Sequence
  targeting sequence with ATCN PAM
cauccugaauccuauaguua

SEQ ID NO: 5190 - RNA, 20 nt, Artificial Sequence
  targeting sequence with ATCN PAM
gucuuuuaaaaaaaaaaaaa

SEQ ID NO: 5191 - RNA, 20 nt, Artificial Sequence
  targeting sequence with ATCN PAM
gggagaaaccugaggguuau

SEQ ID NO: 5192 - RNA, 20 nt, Artificial Sequence
  targeting sequence with ATCN PAM
cuguaauaugaagcaagagg

SEQ ID NO: 5193 - RNA, 20 nt, Artificial Sequence
  targeting sequence with ATCN PAM
ucuugcuucauauuacagug

SEQ ID NO: 5194 - RNA, 20 nt, Artificial Sequence
  targeting sequence with ATCN PAM
cuuguuuuggaauugccauu

SEQ ID NO: 5195 - RNA, 20 nt, Artificial Sequence
  targeting sequence with ATCN PAM
auggugucacaugagauaau

SEQ ID NO: 5196 - RNA, 20 nt, Artificial Sequence
  targeting sequence with ATCN PAM
caugugacaccauagaucuc

SEQ ID NO: 5197 - RNA, 20 nt, Artificial Sequence
  targeting sequence with ATCN PAM
ucagcccaguuaagcaauaa

SEQ ID NO: 5198 - RNA, 20 nt, Artificial Sequence
  targeting sequence with ATCN PAM
caaacacaggcagcucaaaa

SEQ ID NO: 5199 - RNA, 20 nt, Artificial Sequence
  targeting sequence with ATCN PAM
ggaagaagaaaacuggaaga

SEQ ID NO: 5200 - RNA, 20 nt, Artificial Sequence
  targeting sequence with ATCN PAM
uuaguuaauuugaucuguau

SEQ ID NO: 5201 - RNA, 20 nt, Artificial Sequence
  targeting sequence with ATCN PAM
aauuaacuaaugauucuucc

SEQ ID NO: 5202 - RNA, 20 nt, Artificial Sequence
  targeting sequence with ATCN PAM
guaucauaaacaacauacug

SEQ ID NO: 5203 - RNA, 20 nt, Artificial Sequence
  targeting sequence with ATCN PAM
uaaacaacauacugauucug

SEQ ID NO: 5204 - RNA, 20 nt, Artificial Sequence
  targeting sequence with ATCN PAM
guauguuguuuaugauacag

SEQ ID NO: 5205 - RNA, 20 nt, Artificial Sequence
  targeting sequence with ATCN PAM
gaaucaguauguuguuuaug

SEQ ID NO: 5206 - RNA, 20 nt, Artificial Sequence
  targeting sequence with ATCN PAM
gaucuguuccugggcacuac

SEQ ID NO: 5207 - RNA, 20 nt, Artificial Sequence
  targeting sequence with ATCN PAM
gaucagaaucaguauguugu

SEQ ID NO: 5208 - RNA, 20 nt, Artificial Sequence
  targeting sequence with ATCN PAM
guuccugggcacuacgaccu

SEQ ID NO: 5209 - RNA, 20 nt, Artificial Sequence
  targeting sequence with ATCN PAM
auuaccaaaaauguauuucc

SEQ ID NO: 5210 - RNA, 20 nt, Artificial Sequence
  targeting sequence with ATCN PAM
ucauuucuuuuuaguucaag

SEQ ID NO: 5211 - RNA, 20 nt, Artificial Sequence
  targeting sequence with ATCN PAM
uuucuuuuuaguucaagaau

SEQ ID NO: 5212 - RNA, 20 nt, Artificial Sequence
  targeting sequence with ATCN PAM
ccauugucuuguguuuccug

SEQ ID NO: 5213 - RNA, 20 nt, Artificial Sequence
  targeting sequence with ATCN PAM
auaagaaguucuucaauagu

SEQ ID NO: 5214 - RNA, 20 nt, Artificial Sequence
  targeting sequence with ATCN PAM
cacugaacuauugaagaacu

SEQ ID NO: 5215 - RNA, 20 nt, Artificial Sequence
  targeting sequence with ATCN PAM
cuccuuaucccacugaacua

SEQ ID NO: 5216 - RNA, 20 nt, Artificial Sequence
  targeting sequence with ATCN PAM
ugaaaaguuuuuauuucuuu

SEQ ID NO: 5217 - RNA, 20 nt, Artificial Sequence
  targeting sequence with ATCN PAM
agucuuucaaaauuaccugc

SEQ ID NO: 5218 - RNA, 20 nt, Artificial Sequence
  targeting sequence with ATCN PAM
acuuugaacauugauuuuuu

SEQ ID NO: 5219 - RNA, 20 nt, Artificial Sequence
  targeting sequence with ATCN PAM
auguucaaaguagauuacuc

SEQ ID NO: 5220 - RNA, 20 nt, Artificial Sequence
  targeting sequence with ATCN PAM
aaggaaauuuugauucccua

SEQ ID NO: 5221 - RNA, 20 nt, Artificial Sequence
  targeting sequence with ATCN PAM
aaauuuccuuugauagugua

SEQ ID NO: 5222 - RNA, 20 nt, Artificial Sequence
  targeting sequence with ATCN PAM
uaaaacuagggaaucaaaau

SEQ ID NO: 5223 - RNA, 20 nt, Artificial Sequence
  targeting sequence with ATCN PAM
gaucuagaauccacauguac

SEQ ID NO: 5224 - RNA, 20 nt, Artificial Sequence
  targeting sequence with ATCN PAM
gauagggccacaacuacauc

SEQ ID NO: 5225 - RNA, 20 nt, Artificial Sequence
  targeting sequence with ATCN PAM
agaauccacauguacugauu

SEQ ID NO: 5226 - RNA, 20 nt, Artificial Sequence
  targeting sequence with ATCN PAM
acauguacugauucuccauu

SEQ ID NO: 5227 - RNA, 20 nt, Artificial Sequence
  targeting sequence with ATCN PAM
guacauguggauucuagauc

SEQ ID NO: 5228 - RNA, 20 nt, Artificial Sequence
  targeting sequence with ATCN PAM
uguuccuacuucaugcacug

SEQ ID NO: 5229 - RNA, 20 nt, Artificial Sequence
  targeting sequence with ATCN PAM
guuuuuuuaugucaccauug

SEQ ID NO: 5230 - RNA, 20 nt, Artificial Sequence
  targeting sequence with ATCN PAM
cugcaaagugaguacauugc

SEQ ID NO: 5231 - RNA, 20 nt, Artificial Sequence
  targeting sequence with ATCN PAM
uacaaacuuacccgcuccgc

SEQ ID NO: 5232 - RNA, 20 nt, Artificial Sequence
  targeting sequence with ATCN PAM
uagcagagcugguaggugca

SEQ ID NO: 5233 - RNA, 20 nt, Artificial Sequence
  targeting sequence with ATCN PAM
guuguggaugaagaccuggg

SEQ ID NO: 5234 - RNA, 20 nt, Artificial Sequence
  targeting sequence with ATCN PAM
acaacugaugcaccuaccag

SEQ ID NO: 5235 - RNA, 20 nt, Artificial Sequence
  targeting sequence with ATCN PAM
ccugaccagacuuccuguug

SEQ ID NO: 5236 - RNA, 20 nt, Artificial Sequence
  targeting sequence with ATCN PAM
acaggaagucuggucaggag

SEQ ID NO: 5237 - RNA, 20 nt, Artificial Sequence
  targeting sequence with ATCN PAM
uggguggcacucgaaucugc

SEQ ID NO: 5238 - RNA, 20 nt, Artificial Sequence
  targeting sequence with ATCN PAM
gcugcaggacacgauucaga

SEQ ID NO: 5239 - RNA, 20 nt, Artificial Sequence
  targeting sequence with ATCN PAM
uguccugcagcagauucgag

SEQ ID NO: 5240 - RNA, 20 nt, Artificial Sequence
  targeting sequence with ATCN PAM
aucucagcacaugcguucug

SEQ ID NO: 5241 - RNA, 20 nt, Artificial Sequence
  targeting sequence with ATCN PAM
cagcacaugcguucuggcuu

SEQ ID NO: 5242 - RNA, 20 nt, Artificial Sequence
  targeting sequence with ATCN PAM
ggaaagccagaacgcaugug

SEQ ID NO: 5243 - RNA, 20 nt, Artificial Sequence
  targeting sequence with ATCN PAM
auuucagguucuggaucugc

SEQ ID NO: 5244 - RNA, 20 nt, Artificial Sequence
  targeting sequence with ATCN PAM
agaaccugaaauggaucugg

SEQ ID NO: 5245 - RNA, 20 nt, Artificial Sequence
  targeting sequence with ATCN PAM
gccugaauuugcugcacauc

SEQ ID NO: 5246 - RNA, 20 nt, Artificial Sequence
  targeting sequence with ATCN PAM
uguggagacacugaugaccu

SEQ ID NO: 5247 - RNA, 20 nt, Artificial Sequence
  targeting sequence with ATCN PAM
gugucuccacaugaugugca

SEQ ID NO: 5248 - RNA, 20 nt, Artificial Sequence
  targeting sequence with ATCN PAM
cuuccagcaccagcgcagga

SEQ ID NO: 5249 - RNA, 20 nt, Artificial Sequence
  targeting sequence with ATCN PAM
cguuaauguucuccaaagca

SEQ ID NO: 5250 - RNA, 20 nt, Artificial Sequence
  targeting sequence with ATCN PAM
gaacaaaaauugucuaaaau

SEQ ID NO: 5251 - RNA, 20 nt, Artificial Sequence
  targeting sequence with ATCN PAM
ugggauuugccuccaggauc

SEQ ID NO: 5252 - RNA, 20 nt, Artificial Sequence
  targeting sequence with ATCN PAM
caagaugcagaggccagaaa

SEQ ID NO: 5253 - RNA, 20 nt, Artificial Sequence
  targeting sequence with ATCN PAM
uggaggcaaaucccaagaug

SEQ ID NO: 5254 - RNA, 20 nt, Artificial Sequence
  targeting sequence with ATCN PAM
ggguccucaaauaacuguuc

SEQ ID NO: 5255 - RNA, 20 nt, Artificial Sequence
  targeting sequence with ATCN PAM
guagacuuaauaugcuuauu

SEQ ID NO: 5256 - RNA, 20 nt, Artificial Sequence
  targeting sequence with ATCN PAM
aauguuaaaaacaaaaaaac

SEQ ID NO: 5257 - RNA, 20 nt, Artificial Sequence
  targeting sequence with ATCN PAM
aauagguuuacucuagcuga

SEQ ID NO: 5258 - RNA, 20 nt, Artificial Sequence
  targeting sequence with ATCN PAM
cucucauucauaaccacagu

SEQ ID NO: 5259 - RNA, 20 nt, Artificial Sequence
  targeting sequence with ATCN PAM
aagaacaacagugagaaaug

SEQ ID NO: 5260 - RNA, 20 nt, Artificial Sequence
  targeting sequence with ATCN PAM
auuucucacuguuguucuuu

SEQ ID NO: 5261 - RNA, 20 nt, Artificial Sequence
  targeting sequence with ATCN PAM
caaucuaacuauauguggau

SEQ ID NO: 5262 - RNA, 20 nt, Artificial Sequence
  targeting sequence with ATCN PAM
aacuauauguggauuuuaau

SEQ ID NO: 5263 - RNA, 20 nt, Artificial Sequence
  targeting sequence with ATCN PAM
acauauaguuagauugggau

SEQ ID NO: 5264 - RNA, 20 nt, Artificial Sequence
  targeting sequence with ATCN PAM
aguucacugguaacuagaga

SEQ ID NO: 5265 - RNA, 20 nt, Artificial Sequence
  targeting sequence with ATCN PAM
cuaguuaccagugaacuuga

SEQ ID NO: 5266 - RNA, 20 nt, Artificial Sequence
  targeting sequence with ATCN PAM
uguaaguugaauucucugcu

SEQ ID NO: 5267 - RNA, 20 nt, Artificial Sequence
  targeting sequence with ATCN PAM
gaaucagagacuagagcuuu

SEQ ID NO: 5268 - RNA, 20 nt, Artificial Sequence
  targeting sequence with ATCN PAM
gagacuagagcuuugcucag

SEQ ID NO: 5269 - RNA, 20 nt, Artificial Sequence
  targeting sequence with ATCN PAM
agaaaggagauucaaagaaa

SEQ ID NO: 5270 - RNA, 20 nt, Artificial Sequence
  targeting sequence with ATCN PAM
ccuuucuugauagcugguac

SEQ ID NO: 5271 - RNA, 20 nt, Artificial Sequence
  targeting sequence with ATCN PAM
cuuucucuauagugucaucc

SEQ ID NO: 5272 - RNA, 20 nt, Artificial Sequence
  targeting sequence with ATCN PAM
cugacagaagcuucccauau

SEQ ID NO: 5273 - RNA, 20 nt, Artificial Sequence
  targeting sequence with ATCN PAM
auacaaacucaaaagcaaag

SEQ ID NO: 5274 - RNA, 20 nt, Artificial Sequence
  targeting sequence with ATCN PAM
uacccaguuacuuugcuuuu

SEQ ID NO: 5275 - RNA, 20 nt, Artificial Sequence
  targeting sequence with ATCN PAM
cuuaguuucagcuuccuuuu

SEQ ID NO: 5276 - RNA, 20 nt, Artificial Sequence
  targeting sequence with ATCN PAM
acgcaacugccaugguuacu

SEQ ID NO: 5277 - RNA, 20 nt, Artificial Sequence
  targeting sequence with ATCN PAM
caugcaaaaaaaaaaaaaaa

SEQ ID NO: 5278 - RNA, 20 nt, Artificial Sequence
  targeting sequence with ATCN PAM
cccccucccuuuuuuuuuuu

SEQ ID NO: 5279 - RNA, 20 nt, Artificial Sequence
  targeting sequence with ATCN PAM
cccaucccccccucccuuuu

SEQ ID NO: 5280 - RNA, 20 nt, Artificial Sequence
  targeting sequence with ATCN PAM
ucucccaucccccccucccu

SEQ ID NO: 5281 - RNA, 20 nt, Artificial Sequence
  targeting sequence with ATCN PAM
caucaucucccauccccccc

SEQ ID NO: 5282 - RNA, 20 nt, Artificial Sequence
  targeting sequence with ATCN PAM
uauuuugcauucuguagcag

SEQ ID NO: 5283 - RNA, 20 nt, Artificial Sequence
  targeting sequence with ATCN PAM
agaaagccauaaauuagcug

SEQ ID NO: 5284 - RNA, 20 nt, Artificial Sequence
  targeting sequence with ATCN PAM
ggaacaaaacuuuagugagu

SEQ ID NO: 5285 - RNA, 20 nt, Artificial Sequence
  targeting sequence with ATCN PAM
caggcaugaaagaauaugga

SEQ ID NO: 5286 - RNA, 20 nt, Artificial Sequence
  targeting sequence with ATCN PAM
cuucauaacagaggagcaua

SEQ ID NO: 5287 - RNA, 20 nt, Artificial Sequence
  targeting sequence with ATCN PAM
cugucucccuguuuaugcuc

SEQ ID NO: 5288 - RNA, 20 nt, Artificial Sequence
  targeting sequence with ATCN PAM
agccaucccacuauggccug

SEQ ID NO: 5289 - RNA, 20 nt, Artificial Sequence
  targeting sequence with ATCN PAM
cacuauggccuguuacccuu

SEQ ID NO: 5290 - RNA, 20 nt, Artificial Sequence
  targeting sequence with ATCN PAM
ggaaaaggguaacaggccau

SEQ ID NO: 5291 - RNA, 20 nt, Artificial Sequence
  targeting sequence with ATCN PAM
uucccuuugggagaaccaag

SEQ ID NO: 5292 - RNA, 20 nt, Artificial Sequence
  targeting sequence with ATCN PAM
aauaagggcaaggguuucuu

SEQ ID NO: 5293 - RNA, 20 nt, Artificial Sequence
  targeting sequence with ATCN PAM
augacugucuuggccucugg

SEQ ID NO: 5294 - RNA, 20 nt, Artificial Sequence
  targeting sequence with ATCN PAM
ccuucuaaccaaauaugaaa

SEQ ID NO: 5295 - RNA, 20 nt, Artificial Sequence
  targeting sequence with ATCN PAM
gaguaacauuguauuaugug

SEQ ID NO: 5296 - RNA, 20 nt, Artificial Sequence
  targeting sequence with ATCN PAM
caccauuccucaugaguuug

SEQ ID NO: 5297 - RNA, 20 nt, Artificial Sequence
  targeting sequence with ATCN PAM
ccuaucaguguguaucaacu

SEQ ID NO: 5298 - RNA, 20 nt, Artificial Sequence
  targeting sequence with ATCN PAM
guguguaucaacucaucucu

SEQ ID NO: 5299 - RNA, 20 nt, Artificial Sequence
  targeting sequence with ATCN PAM
acucaucucuucuugcacug

SEQ ID NO: 5300 - RNA, 20 nt, Artificial Sequence
  targeting sequence with ATCN PAM
cuucuugcacugggcuauuu

SEQ ID NO: 5301 - RNA, 20 nt, Artificial Sequence
  targeting sequence with ATCN PAM
aaauagcccagugcaagaag

SEQ ID NO: 5302 - RNA, 20 nt, Artificial Sequence
  targeting sequence with ATCN PAM
ugagaagaugggagggugug

SEQ ID NO: 5303 - RNA, 20 nt, Artificial Sequence
  targeting sequence with ATCN PAM
ucucaggaucuaaauagccc

SEQ ID NO: 5304 - RNA, 20 nt, Artificial Sequence
  targeting sequence with ATCN PAM
guuguauuagcuaauaaugu

SEQ ID NO: 5305 - RNA, 20 nt, Artificial Sequence
  targeting sequence with ATCN PAM
caugagauuaaaagacagca

SEQ ID NO: 5306 - RNA, 20 nt, Artificial Sequence
  targeting sequence with ATCN PAM
caugggauaaacauauuuua

SEQ ID NO: 5307 - RNA, 20 nt, Artificial Sequence
  targeting sequence with ATCN PAM
uuccuuuauucuugcugucu

SEQ ID NO: 5308 - RNA, 20 nt, Artificial Sequence
  targeting sequence with ATCN PAM
ucagcuaaccuugacaucau

SEQ ID NO: 5309 - RNA, 20 nt, Artificial Sequence
  targeting sequence with ATCN PAM
uucuacuugucucauaugca

SEQ ID NO: 5310 - RNA, 20 nt, Artificial Sequence
  targeting sequence with ATCN PAM
acuuauuugggcacuauuau

SEQ ID NO: 5311 - RNA, 20 nt, Artificial Sequence
  targeting sequence with ATCN PAM
acuggucaucugguugcugc

SEQ ID NO: 5312 - RNA, 20 nt, Artificial Sequence
  targeting sequence with ATCN PAM
gguugcugccuauuuaaaaa

SEQ ID NO: 5313 - RNA, 20 nt, Artificial Sequence
  targeting sequence with ATCN PAM
gauuuucaaaggcaaaacuu

SEQ ID NO: 5314 - RNA, 20 nt, Artificial Sequence
  targeting sequence with ATCN PAM
gauaauuuauuacuguuuug

SEQ ID NO: 5315 - RNA, 20 nt, Artificial Sequence
  targeting sequence with ATCN PAM
uaccagcacauagccucacu

SEQ ID NO: 5316 - RNA, 20 nt, Artificial Sequence
  targeting sequence with ATCN PAM
aguuuuaagguaauaauuuu

SEQ ID NO: 5317 - RNA, 20 nt, Artificial Sequence
  targeting sequence with ATCN PAM
acuguacugauuauaaaacg

SEQ ID NO: 5318 - RNA, 20 nt, Artificial Sequence
  targeting sequence with ATCN PAM
guacaguagauuguuuuuca

SEQ ID NO: 5319 - RNA, 20 nt, Artificial Sequence
  targeting sequence with ATCN PAM
ucugcauaauagcagcacua

SEQ ID NO: 5320 - RNA, 20 nt, Artificial Sequence
  targeting sequence with ATCN PAM
gcauaauagcagcacuaaga

SEQ ID NO: 5321 - RNA, 20 nt, Artificial Sequence
  targeting sequence with ATCN PAM
uuaaggccaccaaagucaaa

SEQ ID NO: 5322 - RNA, 20 nt, Artificial Sequence
  targeting sequence with ATCN PAM
cuauuguugguauuuuugcc

SEQ ID NO: 5323 - RNA, 20 nt, Artificial Sequence
  targeting sequence with ATCN PAM
cagcucacugcaaccucugc

SEQ ID NO: 5324 - RNA, 20 nt, Artificial Sequence
  targeting sequence with ATCN PAM
cagcuacuugagaggcagag

SEQ ID NO: 5325 - RNA, 20 nt, Artificial Sequence
  targeting sequence with ATCN PAM
cuugaggucaggaguucgag

SEQ ID NO: 5326 - RNA, 20 nt, Artificial Sequence
  targeting sequence with ATCN PAM
acccuccucagccucccaaa

SEQ ID NO: 5327 - RNA, 20 nt, Artificial Sequence
  targeting sequence with ATCN PAM
uagcacuuugggaggcugag

SEQ ID NO: 5328 - RNA, 20 nt, Artificial Sequence
  targeting sequence with ATCN PAM
aaaauuaguuaguugggugg

SEQ ID NO: 5329 - RNA, 20 nt, Artificial Sequence
  targeting sequence with ATCN PAM
cugguuuaacacaaacgagu

SEQ ID NO: 5330 - RNA, 20 nt, Artificial Sequence
  targeting sequence with ATCN PAM
aaugcuuuuugguaagaagg

SEQ ID NO: 5331 - RNA, 20 nt, Artificial Sequence
  targeting sequence with ATCN PAM
gaaauaagugaaaaaauuau

SEQ ID NO: 5332 - RNA, 20 nt, Artificial Sequence
  targeting sequence with ATCN PAM
aucaaccauuuaggagggua

SEQ ID NO: 5333 - RNA, 20 nt, Artificial Sequence
  targeting sequence with ATCN PAM
accauuuaggaggguauucc

SEQ ID NO: 5334 - RNA, 20 nt, Artificial Sequence
  targeting sequence with ATCN PAM
cagcaaauuauauacaaauu

SEQ ID NO: 5335 - RNA, 20 nt, Artificial Sequence
  targeting sequence with ATCN PAM
aaaaacuaaaaaauuggaaa

SEQ ID NO: 5336 - RNA, 20 nt, Artificial Sequence
  targeting sequence with ATCN PAM
aacucuuuguagucagugaa

SEQ ID NO: 5337 - RNA, 20 nt, Artificial Sequence
  targeting sequence with ATCN PAM
cucuuccuuaagcacuucua

SEQ ID NO: 5338 - RNA, 20 nt, Artificial Sequence
  targeting sequence with ATCN PAM
uuuuaggaaaagcugaaaag

SEQ ID NO: 5339 - RNA, 20 nt, Artificial Sequence
  targeting sequence with ATCN PAM
aaguuucucaccuuguaauu

SEQ ID NO: 5340 - RNA, 20 nt, Artificial Sequence
  targeting sequence with ATCN PAM
guaaaagguaaguuucccca

SEQ ID NO: 5341 - RNA, 20 nt, Artificial Sequence
  targeting sequence with ATCN PAM
aacaaaauguuaauagcccu

SEQ ID NO: 5342 - RNA, 20 nt, Artificial Sequence
  targeting sequence with ATCN PAM
cucacugguagaaguagggu

SEQ ID NO: 5343 - RNA, 20 nt, Artificial Sequence
  targeting sequence with ATCN PAM
agaauaauuauaaucaagaa

SEQ ID NO: 5344 - RNA, 20 nt, Artificial Sequence
  targeting sequence with ATCN PAM
guaucugccauucucuauuc

SEQ ID NO: 5345 - RNA, 20 nt, Artificial Sequence
  targeting sequence with ATCN PAM
gccauucucuauucaaaggc

SEQ ID NO: 5346 - RNA, 20 nt, Artificial Sequence
  targeting sequence with ATCN PAM
uaucuuaggccaggcaugau

SEQ ID NO: 5347 - RNA, 20 nt, Artificial Sequence
  targeting sequence with ATCN PAM
uaggccaggcaugauggcuc

SEQ ID NO: 5348 - RNA, 20 nt, Artificial Sequence
  targeting sequence with ATCN PAM
ugccuggccuaagauaggau

SEQ ID NO: 5349 - RNA, 20 nt, Artificial Sequence
  targeting sequence with ATCN PAM
cagcacuccgaggcaggaag

SEQ ID NO: 5350 - RNA, 20 nt, Artificial Sequence
  targeting sequence with ATCN PAM
uccugccucggagugcuggg

SEQ ID NO: 5351 - RNA, 20 nt, Artificial Sequence
  targeting sequence with ATCN PAM
ucugagcccaggaauuugag

SEQ ID NO: 5352 - RNA, 20 nt, Artificial Sequence
  targeting sequence with ATCN PAM
gagcccaggaauuugagauc

SEQ ID NO: 5353 - RNA, 20 nt, Artificial Sequence
  targeting sequence with ATCN PAM
caaauuccugggcucagaug

SEQ ID NO: 5354 - RNA, 20 nt, Artificial Sequence
  targeting sequence with ATCN PAM
gccugggcaacagugacacc

SEQ ID NO: 5355 - RNA, 20 nt, Artificial Sequence
  targeting sequence with ATCN PAM
cuaaaacaauuuuuaaagau

SEQ ID NO: 5356 - RNA, 20 nt, Artificial Sequence
  targeting sequence with ATCN PAM
uuaaaaauuguuuuagagau

SEQ ID NO: 5357 - RNA, 20 nt, Artificial Sequence
  targeting sequence with ATCN PAM
aggacagaaaauaagauguc

SEQ ID NO: 5358 - RNA, 20 nt, Artificial Sequence
  targeting sequence with ATCN PAM
uauuuucuguccuagauuaa

SEQ ID NO: 5359 - RNA, 20 nt, Artificial Sequence
  targeting sequence with ATCN PAM
uccugacuuuuaaugguaau

SEQ ID NO: 5360 - RNA, 20 nt, Artificial Sequence
  targeting sequence with ATCN PAM
guuagaauuggauuuguuug

SEQ ID NO: 5361 - RNA, 20 nt, Artificial Sequence
  targeting sequence with ATCN PAM
aauucuaacugaucuuccug

SEQ ID NO: 5362 - RNA, 20 nt, Artificial Sequence
  targeting sequence with ATCN PAM
ggcuuucccaaacaaaucca

SEQ ID NO: 5363 - RNA, 20 nt, Artificial Sequence
  targeting sequence with ATCN PAM
uucagagcucaguaaaagcu

SEQ ID NO: 5364 - RNA, 20 nt, Artificial Sequence
  targeting sequence with ATCN PAM
auugucucauccuucagagc

SEQ ID NO: 5365 - RNA, 20 nt, Artificial Sequence
  targeting sequence with ATCN PAM
uucugcuuauuuauccauug

SEQ ID NO: 5366 - RNA, 20 nt, Artificial Sequence
  targeting sequence with ATCN PAM
uuaggccuaaaacaugucuu

SEQ ID NO: 5367 - RNA, 20 nt, Artificial Sequence
  targeting sequence with ATCN PAM
uguaagaugcaugagaggag

SEQ ID NO: 5368 - RNA, 20 nt, Artificial Sequence
  targeting sequence with ATCN PAM
uacaugaucauuaggccuaa

SEQ ID NO: 5369 - RNA, 20 nt, Artificial Sequence
  targeting sequence with ATCN PAM
uucccuccucucaugcaucu

SEQ ID NO: 5370 - RNA, 20 nt, Artificial Sequence
  targeting sequence with ATCN PAM
ucuuucccuccucucaugca

SEQ ID NO: 5371 - RNA, 20 nt, Artificial Sequence
  targeting sequence with ATCN PAM
gagaaauuagguaaggaacu

SEQ ID NO: 5372 - RNA, 20 nt, Artificial Sequence
  targeting sequence with ATCN PAM
uuuucuaaauuauaaguucc

SEQ ID NO: 5373 - RNA, 20 nt, Artificial Sequence
  targeting sequence with ATCN PAM
gucgcaaugguaugaggaau

SEQ ID NO: 5374 - RNA, 20 nt, Artificial Sequence
  targeting sequence with ATCN PAM
gauaaaaugaguauuuauag

SEQ ID NO: 5375 - RNA, 20 nt, Artificial Sequence
  targeting sequence with ATCN PAM
gaugcuuuuuuagcaucugu

SEQ ID NO: 5376 - RNA, 20 nt, Artificial Sequence
  targeting sequence with ATCN PAM
uccaauucauccuccugcau

SEQ ID NO: 5377 - RNA, 20 nt, Artificial Sequence
  targeting sequence with ATCN PAM
aauucauccuccugcaucuu

SEQ ID NO: 5378 - RNA, 20 nt, Artificial Sequence
  targeting sequence with ATCN PAM
uccugcaucuuauuucaaca

SEQ ID NO: 5379 - RNA, 20 nt, Artificial Sequence
  targeting sequence with ATCN PAM
uauuucaacaauuaaauguc

SEQ ID NO: 5380 - RNA, 20 nt, Artificial Sequence
  targeting sequence with ATCN PAM
auacuucauuuagccccaaa

SEQ ID NO: 5381 - RNA, 20 nt, Artificial Sequence
  targeting sequence with ATCN PAM
auuucuuuggggcuaaauga

SEQ ID NO: 5382 - RNA, 20 nt, Artificial Sequence
  targeting sequence with ATCN PAM
uaugggcucccucuagacgg

SEQ ID NO: 5383 - RNA, 20 nt, Artificial Sequence
  targeting sequence with ATCN PAM
agccuugguaagaugucucu

SEQ ID NO: 5384 - RNA, 20 nt, Artificial Sequence
  targeting sequence with ATCN PAM
uaccaaggcuggaugcaagg

SEQ ID NO: 5385 - RNA, 20 nt, Artificial Sequence
  targeting sequence with ATCN PAM
aauaauugcaaaauauacuc

SEQ ID NO: 5386 - RNA, 20 nt, Artificial Sequence
  targeting sequence with ATCN PAM
cuuucugcuugaaagaguau

SEQ ID NO: 5387 - RNA, 20 nt, Artificial Sequence
  targeting sequence with ATCN PAM
uuuacaaaaauugaccauau

SEQ ID NO: 5388 - RNA, 20 nt, Artificial Sequence
  targeting sequence with ATCN PAM
acauuguggucagagaauau

SEQ ID NO: 5389 - RNA, 20 nt, Artificial Sequence
  targeting sequence with ATCN PAM
cuuuuuccuuuuuuguuuac

SEQ ID NO: 5390 - RNA, 20 nt, Artificial Sequence
  targeting sequence with ATCN PAM
cagccuccaggcaauacaac

SEQ ID NO: 5391 - RNA, 20 nt, Artificial Sequence
  targeting sequence with ATCN PAM
cagugcagauaggaagauua

SEQ ID NO: 5392 - RNA, 20 nt, Artificial Sequence
  targeting sequence with ATCN PAM
gcacugggauucuuccaugc

SEQ ID NO: 5393 - RNA, 20 nt, Artificial Sequence
  targeting sequence with ATCN PAM
uccuaucugcacugggauuc

SEQ ID NO: 5394 - RNA, 20 nt, Artificial Sequence
  targeting sequence with ATCN PAM
gagugugaaguccucgaggg

SEQ ID NO: 5395 - RNA, 20 nt, Artificial Sequence
  targeting sequence with ATCN PAM
uaggagaguucccauccucu

SEQ ID NO: 5396 - RNA, 20 nt, Artificial Sequence
  targeting sequence with ATCN PAM
ucuugugggcuuuuccucca

SEQ ID NO: 5397 - RNA, 20 nt, Artificial Sequence
  targeting sequence with ATCN PAM
ccacccccguggagcuaaug

SEQ ID NO: 5398 - RNA, 20 nt, Artificial Sequence
  targeting sequence with ATCN PAM
cccuguggaacaaaaggcuu

SEQ ID NO: 5399 - RNA, 20 nt, Artificial Sequence
  targeting sequence with ATCN PAM
gcaaggagcaauuucuggug

SEQ ID NO: 5400 - RNA, 20 nt, Artificial Sequence
  targeting sequence with ATCN PAM
cacuacagcuggaggaagga

SEQ ID NO: 5401 - RNA, 20 nt, Artificial Sequence
  targeting sequence with ATCN PAM
aucuucacuguuucucuaaa

SEQ ID NO: 5402 - RNA, 20 nt, Artificial Sequence
  targeting sequence with ATCN PAM
ucacuguuucucuaaaacag

SEQ ID NO: 5403 - RNA, 20 nt, Artificial Sequence
  targeting sequence with ATCN PAM
ucaagcuaagguuuuuuuca

SEQ ID NO: 5404 - RNA, 20 nt, Artificial Sequence
  targeting sequence with ATCN PAM
ccauagcaguugggaaaaag

SEQ ID NO: 5405 - RNA, 20 nt, Artificial Sequence
  targeting sequence with ATCN PAM
gcauaaaucugaggcuuaac

SEQ ID NO: 5406 - RNA, 20 nt, Artificial Sequence
  targeting sequence with ATCN PAM
gaggcuuaaccagaacauca

SEQ ID NO: 5407 - RNA, 20 nt, Artificial Sequence
  targeting sequence with ATCN PAM
cagaacuccccucacccucc

SEQ ID NO: 5408 - RNA, 20 nt, Artificial Sequence
  targeting sequence with ATCN PAM
aacacagcccaaugccugaa

SEQ ID NO: 5409 - RNA, 20 nt, Artificial Sequence
  targeting sequence with ATCN PAM
guucaggcauugggcugugu

SEQ ID NO: 5410 - RNA, 20 nt, Artificial Sequence
  targeting sequence with ATCN PAM
ccacccuaaaggacuugcag

SEQ ID NO: 5411 - RNA, 20 nt, Artificial Sequence
  targeting sequence with ATCN PAM
agcauauaccucaguaucuc

SEQ ID NO: 5412 - RNA, 20 nt, Artificial Sequence
  targeting sequence with ATCN PAM
ccugucauauacagcacauu

SEQ ID NO: 5413 - RNA, 20 nt, Artificial Sequence
  targeting sequence with ATCN PAM
gagccagacccacguaugac

SEQ ID NO: 5414 - RNA, 20 nt, Artificial Sequence
  targeting sequence with ATCN PAM
cguucuaauuuacugucuug

SEQ ID NO: 5415 - RNA, 20 nt, Artificial Sequence
  targeting sequence with ATCN PAM
cauauguugucuaccucuuu

SEQ ID NO: 5416 - RNA, 20 nt, Artificial Sequence
  targeting sequence with ATCN PAM
gacagguaauuucagagaua

SEQ ID NO: 5417 - RNA, 20 nt, Artificial Sequence
  targeting sequence with ATCN PAM
cugaaauuaccugucugauc

SEQ ID NO: 5418 - RNA, 20 nt, Artificial Sequence
  targeting sequence with ATCN PAM
aguggaaaccaaauuagaaa

SEQ ID NO: 5419 - RNA, 20 nt, Artificial Sequence
  targeting sequence with ATCN PAM
aguagacuugaaacagcuga

SEQ ID NO: 5420 - RNA, 20 nt, Artificial Sequence
  targeting sequence with ATCN PAM
guaaacuugaaaauaggcua

SEQ ID NO: 5421 - RNA, 20 nt, Artificial Sequence
  targeting sequence with ATCN PAM
cuuuucucuuuauauuucag

SEQ ID NO: 5422 - RNA, 20 nt, Artificial Sequence
  targeting sequence with ATCN PAM
cuaauuucgguaaguucuug

SEQ ID NO: 5423 - RNA, 20 nt, Artificial Sequence
  targeting sequence with ATCN PAM
cagcacuuuggaaggcugag

SEQ ID NO: 5424 - RNA, 20 nt, Artificial Sequence
  targeting sequence with ATCN PAM
ucccgccucagccuuccaaa

SEQ ID NO: 5425 - RNA, 20 nt, Artificial Sequence
  targeting sequence with ATCN PAM
cuaaaaauaaacaaaaaaau

SEQ ID NO: 5426 - RNA, 20 nt, Artificial Sequence
  targeting sequence with ATCN PAM
gccgggaaugauggcacaug

SEQ ID NO: 5427 - RNA, 20 nt, Artificial Sequence
  targeting sequence with ATCN PAM
uucccggcugauuuuuuugu

SEQ ID NO: 5428 - RNA, 20 nt, Artificial Sequence
  targeting sequence with ATCN PAM
aggcuggaaugcagugggac

SEQ ID NO: 5429 - RNA, 20 nt, Artificial Sequence
  targeting sequence with ATCN PAM
cugcacuucaaccugggcaa

SEQ ID NO: 5430 - RNA, 20 nt, Artificial Sequence
  targeting sequence with ATCN PAM
aacaucaugugacauaugug

SEQ ID NO: 5431 - RNA, 20 nt, Artificial Sequence
  targeting sequence with ATCN PAM
ugugacauaugugggggcaa

SEQ ID NO: 5432 - RNA, 20 nt, Artificial Sequence
  targeting sequence with ATCN PAM
cagcacuuugggaggccaag

SEQ ID NO: 5433 - RNA, 20 nt, Artificial Sequence
  targeting sequence with ATCN PAM
gccugccuuggccucccaaa

SEQ ID NO: 5434 - RNA, 20 nt, Artificial Sequence
  targeting sequence with ATCN PAM
cuuuagcugggcauaguggc

SEQ ID NO: 5435 - RNA, 20 nt, Artificial Sequence
  targeting sequence with ATCN PAM
ucccaccucagccuccugag

SEQ ID NO: 5436 - RNA, 20 nt, Artificial Sequence
  targeting sequence with ATCN PAM
acugaacccaagagauagag

SEQ ID NO: 5437 - RNA, 20 nt, Artificial Sequence
  targeting sequence with ATCN PAM
cuuggguucaguggauccuc

SEQ ID NO: 5438 - RNA, 20 nt, Artificial Sequence
  targeting sequence with ATCN PAM
cacuacuuauagaagugaaa

SEQ ID NO: 5439 - RNA, 20 nt, Artificial Sequence
  targeting sequence with ATCN PAM
gaaaaacauggcuaagguuu

SEQ ID NO: 5440 - RNA, 20 nt, Artificial Sequence
  targeting sequence with ATCN PAM
cccauuuaugcuuucuccuu

SEQ ID NO: 5441 - RNA, 20 nt, Artificial Sequence
  targeting sequence with ATCN PAM
caaauucccuuaguaggugg

SEQ ID NO: 5442 - RNA, 20 nt, Artificial Sequence
  targeting sequence with ATCN PAM
uuuaccaaccagucauucac

SEQ ID NO: 5443 - RNA, 20 nt, Artificial Sequence
  targeting sequence with ATCN PAM
uucucuugaccuccugguuu

SEQ ID NO: 5444 - RNA, 20 nt, Artificial Sequence
  targeting sequence with ATCN PAM
aaaaauaacuuuuccugucc

SEQ ID NO: 5445 - RNA, 20 nt, Artificial Sequence
  targeting sequence with ATCN PAM
uggaguuaggugaaacaggu

SEQ ID NO: 5446 - RNA, 20 nt, Artificial Sequence
  targeting sequence with ATCN PAM
ugauccuuccaacuguccuc

SEQ ID NO: 5447 - RNA, 20 nt, Artificial Sequence
  targeting sequence with ATCN PAM
ugaugucguaaucuuggagu

SEQ ID NO: 5448 - RNA, 20 nt, Artificial Sequence
  targeting sequence with ATCN PAM
uuccaacuguccucaccuac

SEQ ID NO: 5449 - RNA, 20 nt, Artificial Sequence
  targeting sequence with ATCN PAM
uuguccaauucauccuaccu

SEQ ID NO: 5450 - RNA, 20 nt, Artificial Sequence
  targeting sequence with ATCN PAM
uaccuaugaguuaaaaaaaa

SEQ ID NO: 5451 - RNA, 20 nt, Artificial Sequence
  targeting sequence with ATCN PAM
uaaaaugaccuuacucaaaa

SEQ ID NO: 5452 - RNA, 20 nt, Artificial Sequence
  targeting sequence with ATCN PAM
uacauuuguguuucuguguu

SEQ ID NO: 5453 - RNA, 20 nt, Artificial Sequence
  targeting sequence with ATCN PAM
ccaugcuuucauccauguua

SEQ ID NO: 5454 - RNA, 20 nt, Artificial Sequence
  targeting sequence with ATCN PAM
auguuauuuuucauacuugc

SEQ ID NO: 5455 - RNA, 20 nt, Artificial Sequence
  targeting sequence with ATCN PAM
uugcaaguaugaaaaauaac

SEQ ID NO: 5456 - RNA, 20 nt, Artificial Sequence
  targeting sequence with ATCN PAM
guguucucuauuuguaaugu

SEQ ID NO: 5457 - RNA, 20 nt, Artificial Sequence
  targeting sequence with ATCN PAM
aauccuccuguaaucgcuuc

SEQ ID NO: 5458 - RNA, 20 nt, Artificial Sequence
  targeting sequence with ATCN PAM
uccuguaaucgcuucaacag

SEQ ID NO: 5459 - RNA, 20 nt, Artificial Sequence
  targeting sequence with ATCN PAM
cuucaacagucaccuauucu

SEQ ID NO: 5460 - RNA, 20 nt, Artificial Sequence
  targeting sequence with ATCN PAM
aaucuaaauuccuuaacaau

SEQ ID NO: 5461 - RNA, 20 nt, Artificial Sequence
  targeting sequence with ATCN PAM
aaauuccuuaacaauaccau

SEQ ID NO: 5462 - RNA, 20 nt, Artificial Sequence
  targeting sequence with ATCN PAM
cugaauuagcauuuauugaa

SEQ ID NO: 5463 - RNA, 20 nt, Artificial Sequence
  targeting sequence with ATCN PAM
gucucuaaauuaaaaaauua

SEQ ID NO: 5464 - RNA, 20 nt, Artificial Sequence
  targeting sequence with ATCN PAM
aguccuaaccuggugugggu

SEQ ID NO: 5465 - RNA, 20 nt, Artificial Sequence
  targeting sequence with ATCN PAM
aauguaacucuaccagagua

SEQ ID NO: 5466 - RNA, 20 nt, Artificial Sequence
  targeting sequence with ATCN PAM
uaucuggugacugcauuggc

SEQ ID NO: 5467 - RNA, 20 nt, Artificial Sequence
  targeting sequence with ATCN PAM
ggugacugcauuggcuuauu

SEQ ID NO: 5468 - RNA, 20 nt, Artificial Sequence
  targeting sequence with ATCN PAM
cuugucuuguagcucugacu

SEQ ID NO: 5469 - RNA, 20 nt, Artificial Sequence
  targeting sequence with ATCN PAM
uuagaaucacuugucuugua

SEQ ID NO: 5470 - RNA, 20 nt, Artificial Sequence
  targeting sequence with ATCN PAM
gucgucaucuuuagaaucac

SEQ ID NO: 5471 - RNA, 20 nt, Artificial Sequence
  targeting sequence with ATCN PAM
gugugaccuagagucuucau

SEQ ID NO: 5472 - RNA, 20 nt, Artificial Sequence
  targeting sequence with ATCN PAM
agauacuucccauagauguu

SEQ ID NO: 5473 - RNA, 20 nt, Artificial Sequence
  targeting sequence with ATCN PAM
ugauguacaagaauggguac

SEQ ID NO: 5474 - RNA, 20 nt, Artificial Sequence
  targeting sequence with ATCN PAM
augggaaguaucuugaugua

SEQ ID NO: 5475 - RNA, 20 nt, Artificial Sequence
  targeting sequence with ATCN PAM
cuguguuacaagaagacaac

SEQ ID NO: 5476 - RNA, 20 nt, Artificial Sequence
  targeting sequence with ATCN PAM
cuaacaaauacauuaaaaca

SEQ ID NO: 5477 - RNA, 20 nt, Artificial Sequence
  targeting sequence with ATCN PAM
cuuuauugguaaacaauagu

SEQ ID NO: 5478 - RNA, 20 nt, Artificial Sequence
  targeting sequence with ATCN PAM
guuuuugucacaucacaugc

SEQ ID NO: 5479 - RNA, 20 nt, Artificial Sequence
  targeting sequence with ATCN PAM
caugcagagccaucugagaa

SEQ ID NO: 5480 - RNA, 20 nt, Artificial Sequence
  targeting sequence with ATCN PAM
gagaauaaaugucuaagcaa

SEQ ID NO: 5481 - RNA, 20 nt, Artificial Sequence
  targeting sequence with ATCN PAM
aauuccaguauuguuucuuu

SEQ ID NO: 5482 - RNA, 20 nt, Artificial Sequence
  targeting sequence with ATCN PAM
ugcccagcuaauuuuuguau

SEQ ID NO: 5483 - RNA, 20 nt, Artificial Sequence
  targeting sequence with ATCN PAM
cuugaggucaggaguccgag

SEQ ID NO: 5484 - RNA, 20 nt, Artificial Sequence
  targeting sequence with ATCN PAM
acccaccuuggccuuccaaa

SEQ ID NO: 5485 - RNA, 20 nt, Artificial Sequence
  targeting sequence with ATCN PAM
uagcacuuuggaaggccaag

SEQ ID NO: 5486 - RNA, 20 nt, Artificial Sequence
  targeting sequence with ATCN PAM
aaggaucucaaaacaaaugu

SEQ ID NO: 5487 - RNA, 20 nt, Artificial Sequence
  targeting sequence with ATCN PAM
uuugaugaaagguuccauug

SEQ ID NO: 5488 - RNA, 20 nt, Artificial Sequence
  targeting sequence with ATCN PAM
caaaacaaauguuacugaca

SEQ ID NO: 5489 - RNA, 20 nt, Artificial Sequence
  targeting sequence with ATCN PAM
aauuggugacccuauggcua

SEQ ID NO: 5490 - RNA, 20 nt, Artificial Sequence
  targeting sequence with ATCN PAM
augaccuaaggaauucaaua

SEQ ID NO: 5491 - RNA, 20 nt, Artificial Sequence
  targeting sequence with ATCN PAM
guauugaauuccuuagguca

SEQ ID NO: 5492 - RNA, 20 nt, Artificial Sequence
  targeting sequence with ATCN PAM
aguuuuauguauaguagugu

SEQ ID NO: 5493 - RNA, 20 nt, Artificial Sequence
  targeting sequence with ATCN PAM
aggacaaagaccaaauaugu

SEQ ID NO: 5494 - RNA, 20 nt, Artificial Sequence
  targeting sequence with ATCN PAM
agaggcccaccaagagucac

SEQ ID NO: 5495 - RNA, 20 nt, Artificial Sequence
  targeting sequence with ATCN PAM
ugaagcuaucuagaggccca

SEQ ID NO: 5496 - RNA, 20 nt, Artificial Sequence
  targeting sequence with ATCN PAM
cuugguugguuccccuggca

SEQ ID NO: 5497 - RNA, 20 nt, Artificial Sequence
  targeting sequence with ATCN PAM
uuuagucaguccccaguucc

SEQ ID NO: 5498 - RNA, 20 nt, Artificial Sequence
  targeting sequence with ATCN PAM
uuccaaaccccaucauuuag

SEQ ID NO: 5499 - RNA, 20 nt, Artificial Sequence
  targeting sequence with ATCN PAM
auuuauuauaaaggguacaa

SEQ ID NO: 5500 - RNA, 20 nt, Artificial Sequence
  targeting sequence with ATCN PAM
caagcagcagcagucuuuug

SEQ ID NO: 5501 - RNA, 20 nt, Artificial Sequence
  targeting sequence with ATCN PAM
caaguuaaagggcucagucc

SEQ ID NO: 5502 - RNA, 20 nt, Artificial Sequence
  targeting sequence with ATCN PAM
gacacuaacuccagguagac

SEQ ID NO: 5503 - RNA, 20 nt, Artificial Sequence
  targeting sequence with ATCN PAM
caagaauuacuaccuauggg

SEQ ID NO: 5504 - RNA, 20 nt, Artificial Sequence
  targeting sequence with ATCN PAM
agcuuuacaaauauauccca

SEQ ID NO: 5505 - RNA, 20 nt, Artificial Sequence
  targeting sequence with ATCN PAM
ucaagcuuuacaaauauauc

SEQ ID NO: 5506 - RNA, 20 nt, Artificial Sequence
  targeting sequence with ATCN PAM
acaaauacauuuguaucauc

SEQ ID NO: 5507 - RNA, 20 nt, Artificial Sequence
  targeting sequence with ATCN PAM
agguaaguugggagguuaua

SEQ ID NO: 5508 - RNA, 20 nt, Artificial Sequence
  targeting sequence with ATCN PAM
cggcucacugcaaccucuac

SEQ ID NO: 5509 - RNA, 20 nt, Artificial Sequence
  targeting sequence with ATCN PAM
cuugaacuugggagguagag

SEQ ID NO: 5510 - RNA, 20 nt, Artificial Sequence
  targeting sequence with ATCN PAM
cagcuacuugggaggcugag

SEQ ID NO: 5511 - RNA, 20 nt, Artificial Sequence
  targeting sequence with ATCN PAM
cuacuaaaaaaaaaaguaaa

SEQ ID NO: 5512 - RNA, 20 nt, Artificial Sequence
  targeting sequence with ATCN PAM
ccugaggucaggaguucaag

SEQ ID NO: 5513 - RNA, 20 nt, Artificial Sequence
  targeting sequence with ATCN PAM
gcccgccucggccucccaaa

SEQ ID NO: 5514 - RNA, 20 nt, Artificial Sequence
  targeting sequence with ATCN PAM
cagugcuuugggaggccgag

SEQ ID NO: 5515 - RNA, 20 nt, Artificial Sequence
  targeting sequence with ATCN PAM
cuaagucuuaauaggcaugu

SEQ ID NO: 5516 - RNA, 20 nt, Artificial Sequence
  targeting sequence with ATCN PAM
caauaaaugacaacugcauu

SEQ ID NO: 5517 - RNA, 20 nt, Artificial Sequence
  targeting sequence with ATCN PAM
aaucuaucagcaaaaccugc

SEQ ID NO: 5518 - RNA, 20 nt, Artificial Sequence
  targeting sequence with ATCN PAM
aucagcaaaaccugcugacu

SEQ ID NO: 5519 - RNA, 20 nt, Artificial Sequence
  targeting sequence with ATCN PAM
gcaaaaccugcugacucuac

SEQ ID NO: 5520 - RNA, 20 nt, Artificial Sequence
  targeting sequence with ATCN PAM
agaaucagaucauguuacca

SEQ ID NO: 5521 - RNA, 20 nt, Artificial Sequence
  targeting sequence with ATCN PAM
gaucauguuaccacagucac

SEQ ID NO: 5522 - RNA, 20 nt, Artificial Sequence
  targeting sequence with ATCN PAM
gauucuggauauauuuuuca

SEQ ID NO: 5523 - RNA, 20 nt, Artificial Sequence
  targeting sequence with ATCN PAM
uguuaccacagucacugcua

SEQ ID NO: 5524 - RNA, 20 nt, Artificial Sequence
  targeting sequence with ATCN PAM
aggugagagaaaaugugguu

SEQ ID NO: 5525 - RNA, 20 nt, Artificial Sequence
  targeting sequence with ATCN PAM
accacuaucuacucagcagc

SEQ ID NO: 5526 - RNA, 20 nt, Artificial Sequence
  targeting sequence with ATCN PAM
acucagcagccaaagaaaug

SEQ ID NO: 5527 - RNA, 20 nt, Artificial Sequence
  targeting sequence with ATCN PAM
gaucaugucacccugcccaa

SEQ ID NO: 5528 - RNA, 20 nt, Artificial Sequence
  targeting sequence with ATCN PAM
gauuuauauuuugacauuuu

SEQ ID NO: 5529 - RNA, 20 nt, Artificial Sequence
  targeting sequence with ATCN PAM
ugucacccugcccaaacgcu

SEQ ID NO: 5530 - RNA, 20 nt, Artificial Sequence
  targeting sequence with ATCN PAM
caguguacauguccugagac

SEQ ID NO: 5531 - RNA, 20 nt, Artificial Sequence
  targeting sequence with ATCN PAM
guacaggaaguaaauuacag

SEQ ID NO: 5532 - RNA, 20 nt, Artificial Sequence
  targeting sequence with ATCN PAM
ccccaaacaaaaacucugaa

SEQ ID NO: 5533 - RNA, 20 nt, Artificial Sequence
  targeting sequence with ATCN PAM
cuacucuauauuuccauaau

SEQ ID NO: 5534 - RNA, 20 nt, Artificial Sequence
  targeting sequence with ATCN PAM
acaaugucauauagucauca

SEQ ID NO: 5535 - RNA, 20 nt, Artificial Sequence
  targeting sequence with ATCN PAM
cugcuuuuguucuuuuguug

SEQ ID NO: 5536 - RNA, 20 nt, Artificial Sequence
  targeting sequence with ATCN PAM
ucuugggucaaaauacccuc

SEQ ID NO: 5537 - RNA, 20 nt, Artificial Sequence
  targeting sequence with ATCN PAM
cgggcuaccacuucauuuac

SEQ ID NO: 5538 - RNA, 20 nt, Artificial Sequence
  targeting sequence with ATCN PAM
gucaggugguuuuugcaacc

SEQ ID NO: 5539 - RNA, 20 nt, Artificial Sequence
  targeting sequence with ATCN PAM
gaggcuagggugaaguuaca

SEQ ID NO: 5540 - RNA, 20 nt, Artificial Sequence
  targeting sequence with ATCN PAM
gucugauugguuguggacag

SEQ ID NO: 5541 - RNA, 20 nt, Artificial Sequence
  targeting sequence with ATCN PAM
gacugauugcagcugagucu

SEQ ID NO: 5542 - RNA, 20 nt, Artificial Sequence
  targeting sequence with ATCN PAM
gucugauugguuguggacag

SEQ ID NO: 5543 - RNA, 20 nt, Artificial Sequence
  targeting sequence with ATCN PAM
gacugauugccuguugaguc

SEQ ID NO: 5544 - RNA, 20 nt, Artificial Sequence
  targeting sequence with ATCN PAM
gcuguccagaaaaggcuggg

SEQ ID NO: 5545 - RNA, 20 nt, Artificial Sequence
  targeting sequence with ATCN PAM
uaacuuuccaugccuaagua

SEQ ID NO: 5546 - RNA, 20 nt, Artificial Sequence
  targeting sequence with ATCN PAM
cggcucacugcaaccuccgc

SEQ ID NO: 5547 - RNA, 20 nt, Artificial Sequence
  targeting sequence with ATCN PAM
cuugaaccugggaagcggag

SEQ ID NO: 5548 - RNA, 20 nt, Artificial Sequence
  targeting sequence with ATCN PAM
gggccucacucaccggacgg

SEQ ID NO: 5549 - RNA, 20 nt, Artificial Sequence
  targeting sequence with ATCN PAM
acacaguccgccugcucccc

SEQ ID NO: 5550 - RNA, 20 nt, Artificial Sequence
  targeting sequence with ATCN PAM
ccacccuggcaccccagccc

SEQ ID NO: 5551 - RNA, 20 nt, Artificial Sequence
  targeting sequence with ATCN PAM
agcaggggaggggcuggggu

SEQ ID NO: 5552 - RNA, 20 nt, Artificial Sequence
  targeting sequence with ATCN PAM
gcuuauugucuugucuccuu

SEQ ID NO: 5553 - RNA, 20 nt, Artificial Sequence
  targeting sequence with ATCN PAM
cugccuuccuaaagcucaaa

SEQ ID NO: 5554 - RNA, 20 nt, Artificial Sequence
  targeting sequence with ATCN PAM
uugucccuguccaguucacu

SEQ ID NO: 5555 - RNA, 20 nt, Artificial Sequence
  targeting sequence with GTCN PAM
cgguuuuuuuuuuuuuuuaa

SEQ ID NO: 5556 - RNA, 20 nt, Artificial Sequence
  targeting sequence with GTCN PAM
gaagauggucggcaucagug

SEQ ID NO: 5557 - RNA, 20 nt, Artificial Sequence
  targeting sequence with GTCN PAM
gcaucaguguucguuuccua

SEQ ID NO: 5558 - RNA, 20 nt, Artificial Sequence
  targeting sequence with GTCN PAM
ugcauggccaccgugcaguu

SEQ ID NO: 5559 - RNA, 20 nt, Artificial Sequence
  targeting sequence with GTCN PAM
cuaauggucguaaagcacuu

SEQ ID NO: 5560 - RNA, 20 nt, Artificial Sequence
  targeting sequence with GTCN PAM
uaaagcacuugaaaaucauc

SEQ ID NO: 5561 - RNA, 20 nt, Artificial Sequence
  targeting sequence with GTCN PAM
caucacccugaugauuuuca

SEQ ID NO: 5562 - RNA, 20 nt, Artificial Sequence
  targeting sequence with GTCN PAM
aaaaagagguuucccucacu

SEQ ID NO: 5563 - RNA, 20 nt, Artificial Sequence
  targeting sequence with GTCN PAM
ccuuuugcagaaacuucagg

SEQ ID NO: 5564 - RNA, 20 nt, Artificial Sequence
  targeting sequence with GTCN PAM
gaccuggggccugcaccagc

SEQ ID NO: 5565 - RNA, 20 nt, Artificial Sequence
  targeting sequence with GTCN PAM
gacugugcugcuugccucua

SEQ ID NO: 5566 - RNA, 20 nt, Artificial Sequence
  targeting sequence with GTCN PAM
uuggccggcgcuggugcagg

SEQ ID NO: 5567 - RNA, 20 nt, Artificial Sequence
  targeting sequence with GTCN PAM
cacagguggcagcacucgcc

SEQ ID NO: 5568 - RNA, 20 nt, Artificial Sequence
  targeting sequence with GTCN PAM
aggguucacuggcugcacgg

SEQ ID NO: 5569 - RNA, 20 nt, Artificial Sequence
  targeting sequence with GTCN PAM
cgaaaaaagaaaaagaaaag

SEQ ID NO: 5570 - RNA, 20 nt, Artificial Sequence
  targeting sequence with GTCN PAM
uguucugucgcccaggcugg

SEQ ID NO: 5571 - RNA, 20 nt, Artificial Sequence
  targeting sequence with GTCN PAM
cccaggcuggagugcagugc

SEQ ID NO: 5572 - RNA, 20 nt, Artificial Sequence
  targeting sequence with GTCN PAM
cagcuacucaggaggcugag

SEQ ID NO: 5573 - RNA, 20 nt, Artificial Sequence
  targeting sequence with GTCN PAM
gcccucucccucuguacuuu

SEQ ID NO: 5574 - RNA, 20 nt, Artificial Sequence
  targeting sequence with GTCN PAM
aucuagugagugcggggugc

SEQ ID NO: 5575 - RNA, 20 nt, Artificial Sequence
  targeting sequence with GTCN PAM
caccagauuccuuccccugg

SEQ ID NO: 5576 - RNA, 20 nt, Artificial Sequence
  targeting sequence with GTCN PAM
acacccaaaagucaaaccaa

SEQ ID NO: 5577 - RNA, 20 nt, Artificial Sequence
  targeting sequence with GTCN PAM
aaccaaaaucuuuuguguau

SEQ ID NO: 5578 - RNA, 20 nt, Artificial Sequence
  targeting sequence with GTCN PAM
uucucaaagcaccagaucuu

SEQ ID NO: 5579 - RNA, 20 nt, Artificial Sequence
  targeting sequence with GTCN PAM
uaccuggaguggaguccccu

SEQ ID NO: 5580 - RNA, 20 nt, Artificial Sequence
  targeting sequence with GTCN PAM
ccuaccucccgucuucaucc

SEQ ID NO: 5581 - RNA, 20 nt, Artificial Sequence
  targeting sequence with GTCN PAM
ucauccucacugcugcgugc

SEQ ID NO: 5582 - RNA, 20 nt, Artificial Sequence
  targeting sequence with GTCN PAM
aggggccacaaacaucagca

SEQ ID NO: 5583 - RNA, 20 nt, Artificial Sequence
  targeting sequence with GTCN PAM
cucucuggaauacccuucuu

SEQ ID NO: 5584 - RNA, 20 nt, Artificial Sequence
  targeting sequence with GTCN PAM
cauuagaugacacaagauca

SEQ ID NO: 5585 - RNA, 20 nt, Artificial Sequence
  targeting sequence with GTCN PAM
ucuaaugugaccucaaugga

SEQ ID NO: 5586 - RNA, 20 nt, Artificial Sequence
  targeting sequence with GTCN PAM
ucugggcucucuuacccucc

SEQ ID NO: 5587 - RNA, 20 nt, Artificial Sequence
  targeting sequence with GTCN PAM
cgaacuccauagagcccagg

SEQ ID NO: 5588 - RNA, 20 nt, Artificial Sequence
  targeting sequence with GTCN PAM
gcaacgccucauugaugguc

SEQ ID NO: 5589 - RNA, 20 nt, Artificial Sequence
  targeting sequence with GTCN PAM
ccuuuccuccucucacuucc

SEQ ID NO: 5590 - RNA, 20 nt, Artificial Sequence
  targeting sequence with GTCN PAM
guagcgagagcuguaacauu

SEQ ID NO: 5591 - RNA, 20 nt, Artificial Sequence
  targeting sequence with GTCN PAM
guugaaugagcucaucuacc

SEQ ID NO: 5592 - RNA, 20 nt, Artificial Sequence
  targeting sequence with GTCN PAM
guggcaaauaacuccuaggg

SEQ ID NO: 5593 - RNA, 20 nt, Artificial Sequence
  targeting sequence with GTCN PAM
cuaggaguuauuugccacug

SEQ ID NO: 5594 - RNA, 20 nt, Artificial Sequence
  targeting sequence with GTCN PAM
cuaccgggaggugcuccuua

SEQ ID NO: 5595 - RNA, 20 nt, Artificial Sequence
  targeting sequence with GTCN PAM
ucuucaucuuuauaucucug

SEQ ID NO: 5596 - RNA, 20 nt, Artificial Sequence
  targeting sequence with GTCN PAM
gcucugauccaaucauccau

SEQ ID NO: 5597 - RNA, 20 nt, Artificial Sequence
  targeting sequence with GTCN PAM
uccccguugcagcaucccca

SEQ ID NO: 5598 - RNA, 20 nt, Artificial Sequence
  targeting sequence with GTCN PAM
aggguucccagcaggggcug

SEQ ID NO: 5599 - RNA, 20 nt, Artificial Sequence
  targeting sequence with GTCN PAM
gugcuuuucaccucugugua

SEQ ID NO: 5600 - RNA, 20 nt, Artificial Sequence
  targeting sequence with GTCN PAM
agacaggaucagagcagcag

SEQ ID NO: 5601 - RNA, 20 nt, Artificial Sequence
  targeting sequence with GTCN PAM
ggacaggguuugcugguccg

SEQ ID NO: 5602 - RNA, 20 nt, Artificial Sequence
  targeting sequence with GTCN PAM
cugcugcucugauccugucu

SEQ ID NO: 5603 - RNA, 20 nt, Artificial Sequence
  targeting sequence with GTCN PAM
ccauccccucugucccugcu

SEQ ID NO: 5604 - RNA, 20 nt, Artificial Sequence
  targeting sequence with GTCN PAM
ucaggagcccacgcucaucu

SEQ ID NO: 5605 - RNA, 20 nt, Artificial Sequence
  targeting sequence with GTCN PAM
gaggagaugagcgugggcuc

SEQ ID NO: 5606 - RNA, 20 nt, Artificial Sequence
  targeting sequence with GTCN PAM
agccuguugggccccacacu

SEQ ID NO: 5607 - RNA, 20 nt, Artificial Sequence
  targeting sequence with GTCN PAM
uucccuaugucuccucccca

SEQ ID NO: 5608 - RNA, 20 nt, Artificial Sequence
  targeting sequence with GTCN PAM
ccuccccaggacuccugccc

SEQ ID NO: 5609 - RNA, 20 nt, Artificial Sequence
  targeting sequence with GTCN PAM
uggggaggagacauagggaa

SEQ ID NO: 5610 - RNA, 20 nt, Artificial Sequence
  targeting sequence with GTCN PAM
ggagccuggagucugagcuc

SEQ ID NO: 5611 - RNA, 20 nt, Artificial Sequence
  targeting sequence with GTCN PAM
gagcucuggucaccauccuu

SEQ ID NO: 5612 - RNA, 20 nt, Artificial Sequence
  targeting sequence with GTCN PAM
ccauccuuccuggccaugug

SEQ ID NO: 5613 - RNA, 20 nt, Artificial Sequence
  targeting sequence with GTCN PAM
ucaaagaaacagaaauuggc

SEQ ID NO: 5614 - RNA, 20 nt, Artificial Sequence
  targeting sequence with GTCN PAM
cacucuuccaucugcagcag

SEQ ID NO: 5615 - RNA, 20 nt, Artificial Sequence
  targeting sequence with GTCN PAM
caagaaauuaucauuucuaa

SEQ ID NO: 5616 - RNA, 20 nt, Artificial Sequence
  targeting sequence with GTCN PAM
ucauuucuaaguuagaaaug

SEQ ID NO: 5617 - RNA, 20 nt, Artificial Sequence
  targeting sequence with GTCN PAM
ggaacucuuggccucaagca

SEQ ID NO: 5618 - RNA, 20 nt, Artificial Sequence
  targeting sequence with GTCN PAM
cacuauguugccuaggccag

SEQ ID NO: 5619 - RNA, 20 nt, Artificial Sequence
  targeting sequence with GTCN PAM
accaaaaauuuuaaaaauua

SEQ ID NO: 5620 - RNA, 20 nt, Artificial Sequence
  targeting sequence with GTCN PAM
guaugucuguguggugugug

SEQ ID NO: 5621 - RNA, 20 nt, Artificial Sequence
  targeting sequence with GTCN PAM
gugugguguguguguaugug

SEQ ID NO: 5622 - RNA, 20 nt, Artificial Sequence
  targeting sequence with GTCN PAM
ugguggcuuugccuggagua

SEQ ID NO: 5623 - RNA, 20 nt, Artificial Sequence
  targeting sequence with GTCN PAM
cugggcagcuucgguugacu

SEQ ID NO: 5624 - RNA, 20 nt, Artificial Sequence
  targeting sequence with GTCN PAM
accgaagcugcccagggaca

SEQ ID NO: 5625 - RNA, 20 nt, Artificial Sequence
  targeting sequence with GTCN PAM
ucgugggcgagcaguuuccu

SEQ ID NO: 5626 - RNA, 20 nt, Artificial Sequence
  targeting sequence with GTCN PAM
ccccaggccauggggcagga

SEQ ID NO: 5627 - RNA, 20 nt, Artificial Sequence
  targeting sequence with GTCN PAM
ugugcagcagcuggccccau

SEQ ID NO: 5628 - RNA, 20 nt, Artificial Sequence
  targeting sequence with GTCN PAM
caggacuggccuuggccggu

SEQ ID NO: 5629 - RNA, 20 nt, Artificial Sequence
  targeting sequence with GTCN PAM
ugcgacccuccuucagugua

SEQ ID NO: 5630 - RNA, 20 nt, Artificial Sequence
  targeting sequence with GTCN PAM
cuggugaugcucagagcugg

SEQ ID NO: 5631 - RNA, 20 nt, Artificial Sequence
  targeting sequence with GTCN PAM
cccaguggcacaaucacggc

SEQ ID NO: 5632 - RNA, 20 nt, Artificial Sequence
  targeting sequence with GTCN PAM
aaaacacagugaucuggagc

SEQ ID NO: 5633 - RNA, 20 nt, Artificial Sequence
  targeting sequence with GTCN PAM
agguucuugguguuuugaac

SEQ ID NO: 5634 - RNA, 20 nt, Artificial Sequence
  targeting sequence with GTCN PAM
aguuuuuuguucaaaacacc

SEQ ID NO: 5635 - RNA, 20 nt, Artificial Sequence
  targeting sequence with GTCN PAM
cacccuguggcguaccuucu

SEQ ID NO: 5636 - RNA, 20 nt, Artificial Sequence
  targeting sequence with GTCN PAM
guggcuaaguaaacacugag

SEQ ID NO: 5637 - RNA, 20 nt, Artificial Sequence
  targeting sequence with GTCN PAM
cugcuuggccuguggccacu

SEQ ID NO: 5638 - RNA, 20 nt, Artificial Sequence
  targeting sequence with GTCN PAM
aagccaugguggaaggggga

SEQ ID NO: 5639 - RNA, 20 nt, Artificial Sequence
  targeting sequence with GTCN PAM
aagguuacucuuucuacaac

SEQ ID NO: 5640 - RNA, 20 nt, Artificial Sequence
  targeting sequence with GTCN PAM
ggaggcaggggcccuaaggc

SEQ ID NO: 5641 - RNA, 20 nt, Artificial Sequence
  targeting sequence with GTCN PAM
gcacaaauuggccucagauu

SEQ ID NO: 5642 - RNA, 20 nt, Artificial Sequence
  targeting sequence with GTCN PAM
ggggggaagcagggaaucug

SEQ ID NO: 5643 - RNA, 20 nt, Artificial Sequence
  targeting sequence with GTCN PAM
ggaggcaaggaacuuaaggc

SEQ ID NO: 5644 - RNA, 20 nt, Artificial Sequence
  targeting sequence with GTCN PAM
guuuugucagucuugagacc

SEQ ID NO: 5645 - RNA, 20 nt, Artificial Sequence
  targeting sequence with GTCN PAM
gucuugagaccccaguuuuc

SEQ ID NO: 5646 - RNA, 20 nt, Artificial Sequence
  targeting sequence with GTCN PAM
ugagaccccaguuuucuugu

SEQ ID NO: 5647 - RNA, 20 nt, Artificial Sequence
  targeting sequence with GTCN PAM
caagacugacaaaacagacu

SEQ ID NO: 5648 - RNA, 20 nt, Artificial Sequence
  targeting sequence with GTCN PAM
auugugucuaaacucuaaag

SEQ ID NO: 5649 - RNA, 20 nt, Artificial Sequence
  targeting sequence with GTCN PAM
aaacucuaaagggaggaggg

SEQ ID NO: 5650 - RNA, 20 nt, Artificial Sequence
  targeting sequence with GTCN PAM
gaccccuuaugcccaugaug

SEQ ID NO: 5651 - RNA, 20 nt, Artificial Sequence
  targeting sequence with GTCN PAM
gacuugccucauuuuacccu

SEQ ID NO: 5652 - RNA, 20 nt, Artificial Sequence
  targeting sequence with GTCN PAM
caucuuuuaguuuuaguauu

SEQ ID NO: 5653 - RNA, 20 nt, Artificial Sequence
  targeting sequence with GTCN PAM
uuaucuuugaaauuuccagu

SEQ ID NO: 5654 - RNA, 20 nt, Artificial Sequence
  targeting sequence with GTCN PAM
caggugacugcucuuuccug

SEQ ID NO: 5655 - RNA, 20 nt, Artificial Sequence
  targeting sequence with GTCN PAM
ccugggaccucugugcuaau

SEQ ID NO: 5656 - RNA, 20 nt, Artificial Sequence
  targeting sequence with GTCN PAM
cggccaaacucagacucguu

SEQ ID NO: 5657 - RNA, 20 nt, Artificial Sequence
  targeting sequence with GTCN PAM
gaguuuggccgggacaucuu

SEQ ID NO: 5658 - RNA, 20 nt, Artificial Sequence
  targeting sequence with GTCN PAM
ugcgggaacaagaacgaguc

SEQ ID NO: 5659 - RNA, 20 nt, Artificial Sequence
  targeting sequence with GTCN PAM
ggagggagggaaccuaaggc

SEQ ID NO: 5660 - RNA, 20 nt, Artificial Sequence
  targeting sequence with GTCN PAM
gcaugaaucggccuuagguu

SEQ ID NO: 5661 - RNA, 20 nt, Artificial Sequence
  targeting sequence with GTCN PAM
ccuccugcaaccaaucacaa

SEQ ID NO: 5662 - RNA, 20 nt, Artificial Sequence
  targeting sequence with GTCN PAM
acaaccauugugauugguug

SEQ ID NO: 5663 - RNA, 20 nt, Artificial Sequence
  targeting sequence with GTCN PAM
cucuguggaguguacuuugg

SEQ ID NO: 5664 - RNA, 20 nt, Artificial Sequence
  targeting sequence with GTCN PAM
cacgcaucuggaggcaggcu

SEQ ID NO: 5665 - RNA, 20 nt, Artificial Sequence
  targeting sequence with GTCN PAM
uuuuuucccuugaugaaauc

SEQ ID NO: 5666 - RNA, 20 nt, Artificial Sequence
  targeting sequence with GTCN PAM
gcucccauguaccaguaccu

SEQ ID NO: 5667 - RNA, 20 nt, Artificial Sequence
  targeting sequence with GTCN PAM
cagacacugauuggcgugca

SEQ ID NO: 5668 - RNA, 20 nt, Artificial Sequence
  targeting sequence with GTCN PAM
gugacacccaagcaagcaau

SEQ ID NO: 5669 - RNA, 20 nt, Artificial Sequence
  targeting sequence with GTCN PAM
uuguggggucccuuaagaag

SEQ ID NO: 5670 - RNA, 20 nt, Artificial Sequence
  targeting sequence with GTCN PAM
cuuaagaaggcagaugggga

SEQ ID NO: 5671 - RNA, 20 nt, Artificial Sequence
  targeting sequence with GTCN PAM
ccaucugccuucuuaaggga

SEQ ID NO: 5672 - RNA, 20 nt, Artificial Sequence
  targeting sequence with GTCN PAM
auggccucuccgugccaccu

SEQ ID NO: 5673 - RNA, 20 nt, Artificial Sequence
  targeting sequence with GTCN PAM
cuggaguuaggcugaccugg

SEQ ID NO: 5674 - RNA, 20 nt, Artificial Sequence
  targeting sequence with GTCN PAM
gccuaacuccagagacugcu

SEQ ID NO: 5675 - RNA, 20 nt, Artificial Sequence
  targeting sequence with GTCN PAM
ccuacccaggcccacaguga

SEQ ID NO: 5676 - RNA, 20 nt, Artificial Sequence
  targeting sequence with GTCN PAM
auagagaagcaaucuuagaa

SEQ ID NO: 5677 - RNA, 20 nt, Artificial Sequence
  targeting sequence with GTCN PAM
ucacccuacgucuauagaga

SEQ ID NO: 5678 - RNA, 20 nt, Artificial Sequence
  targeting sequence with GTCN PAM
ggcuuuacaggcauccuccc

SEQ ID NO: 5679 - RNA, 20 nt, Artificial Sequence
  targeting sequence with GTCN PAM
gauucuggcugucacucuua

SEQ ID NO: 5680 - RNA, 20 nt, Artificial Sequence
  targeting sequence with GTCN PAM
cucuuauuagcuguucucua

SEQ ID NO: 5681 - RNA, 20 nt, Artificial Sequence
  targeting sequence with GTCN PAM
ggugcuucccauagagaaca

SEQ ID NO: 5682 - RNA, 20 nt, Artificial Sequence
  targeting sequence with GTCN PAM
cuggccaugaugcugcacac

SEQ ID NO: 5683 - RNA, 20 nt, Artificial Sequence
  targeting sequence with GTCN PAM
aggucucugauucugacagc

SEQ ID NO: 5684 - RNA, 20 nt, Artificial Sequence
  targeting sequence with GTCN PAM
cugauucugacagcaaugug

SEQ ID NO: 5685 - RNA, 20 nt, Artificial Sequence
  targeting sequence with GTCN PAM
gaaucagagaccuugaccau

SEQ ID NO: 5686 - RNA, 20 nt, Artificial Sequence
  targeting sequence with GTCN PAM
augaaucccgccaugaaggu

SEQ ID NO: 5687 - RNA, 20 nt, Artificial Sequence
  targeting sequence with GTCN PAM
uuuccuggccuagucuauga

SEQ ID NO: 5688 - RNA, 20 nt, Artificial Sequence
  targeting sequence with GTCN PAM
augaaagcuagagagauggc

SEQ ID NO: 5689 - RNA, 20 nt, Artificial Sequence
  targeting sequence with GTCN PAM
gauguuuucagccaucucuc

SEQ ID NO: 5690 - RNA, 20 nt, Artificial Sequence
  targeting sequence with GTCN PAM
auuaaggagcugcucauuuu

SEQ ID NO: 5691 - RNA, 20 nt, Artificial Sequence
  targeting sequence with GTCN PAM
auauuccugggcugacauug

SEQ ID NO: 5692 - RNA, 20 nt, Artificial Sequence
  targeting sequence with GTCN PAM
gcccaggaauauggacaaaa

SEQ ID NO: 5693 - RNA, 20 nt, Artificial Sequence
  targeting sequence with GTCN PAM
cucuuugccacuccuucaau

SEQ ID NO: 5694 - RNA, 20 nt, Artificial Sequence
  targeting sequence with GTCN PAM
ugaucuaacccaaggcgggc

SEQ ID NO: 5695 - RNA, 20 nt, Artificial Sequence
  targeting sequence with GTCN PAM
ccucucuucaugccuacaag

SEQ ID NO: 5696 - RNA, 20 nt, Artificial Sequence
  targeting sequence with GTCN PAM
agucuccucucuucaugccu

SEQ ID NO: 5697 - RNA, 20 nt, Artificial Sequence
  targeting sequence with GTCN PAM
gguccagucuccucucuuca

SEQ ID NO: 5698 - RNA, 20 nt, Artificial Sequence
  targeting sequence with GTCN PAM
uggucugguccagucuccuc

SEQ ID NO: 5699 - RNA, 20 nt, Artificial Sequence
  targeting sequence with GTCN PAM
cguaaggggcucugggaccu

SEQ ID NO: 5700 - RNA, 20 nt, Artificial Sequence
  targeting sequence with GTCN PAM
cagagccccuuacgugacac

SEQ ID NO: 5701 - RNA, 20 nt, Artificial Sequence
  targeting sequence with GTCN PAM
ucccaguucugaaauggggg

SEQ ID NO: 5702 - RNA, 20 nt, Artificial Sequence
  targeting sequence with GTCN PAM
caaggcuuaacugagauguu

SEQ ID NO: 5703 - RNA, 20 nt, Artificial Sequence
  targeting sequence with GTCN PAM
ccaguguaggaaaguggaga

SEQ ID NO: 5704 - RNA, 20 nt, Artificial Sequence
  targeting sequence with GTCN PAM
ucuuccucccugcuggcauu

SEQ ID NO: 5705 - RNA, 20 nt, Artificial Sequence
  targeting sequence with GTCN PAM
ccuccuuacacccaggaacc

SEQ ID NO: 5706 - RNA, 20 nt, Artificial Sequence
  targeting sequence with GTCN PAM
aaggcacugugcuaggcagu

SEQ ID NO: 5707 - RNA, 20 nt, Artificial Sequence
  targeting sequence with GTCN PAM
cauguuguacuuaauagaua

SEQ ID NO: 5708 - RNA, 20 nt, Artificial Sequence
  targeting sequence with GTCN PAM
cggccucccaaagaacuggg

SEQ ID NO: 5709 - RNA, 20 nt, Artificial Sequence
  targeting sequence with GTCN PAM
uaaacuccuggccucaacug

SEQ ID NO: 5710 - RNA, 20 nt, Artificial Sequence
  targeting sequence with GTCN PAM
ggguuuuacuuuggccaggc

SEQ ID NO: 5711 - RNA, 20 nt, Artificial Sequence
  targeting sequence with GTCN PAM
cagcuacuugggaggcuggg

SEQ ID NO: 5712 - RNA, 20 nt, Artificial Sequence
  targeting sequence with GTCN PAM
cccugguucaagcaauucug

SEQ ID NO: 5713 - RNA, 20 nt, Artificial Sequence
  targeting sequence with GTCN PAM
ccaaggcuggaaugcagugg

SEQ ID NO: 5714 - RNA, 20 nt, Artificial Sequence
  targeting sequence with GTCN PAM
ugcugugucaccaaggcugg

SEQ ID NO: 5715 - RNA, 20 nt, Artificial Sequence
  targeting sequence with GTCN PAM
aaaacacaaaaaaaucagua

SEQ ID NO: 5716 - RNA, 20 nt, Artificial Sequence
  targeting sequence with GTCN PAM
aaaucauccagcuuuuucaa

SEQ ID NO: 5717 - RNA, 20 nt, Artificial Sequence
  targeting sequence with GTCN PAM
cagagggaaagaaagggggg

SEQ ID NO: 5718 - RNA, 20 nt, Artificial Sequence
  targeting sequence with GTCN PAM
ccagugaugguaugccaucc

SEQ ID NO: 5719 - RNA, 20 nt, Artificial Sequence
  targeting sequence with GTCN PAM
gaaggccccugaaugagcuc

SEQ ID NO: 5720 - RNA, 20 nt, Artificial Sequence
  targeting sequence with GTCN PAM
aggauuugcccacugagaaa

SEQ ID NO: 5721 - RNA, 20 nt, Artificial Sequence
  targeting sequence with GTCN PAM
gcugugcuggagucuaggau

SEQ ID NO: 5722 - RNA, 20 nt, Artificial Sequence
  targeting sequence with GTCN PAM
uuccagcucuaggucggcug

SEQ ID NO: 5723 - RNA, 20 nt, Artificial Sequence
  targeting sequence with GTCN PAM
cuagcagcccccuuuccaca

SEQ ID NO: 5724 - RNA, 20 nt, Artificial Sequence
  targeting sequence with GTCN PAM
ucgcucugagccuacuucuc

SEQ ID NO: 5725 - RNA, 20 nt, Artificial Sequence
  targeting sequence with GTCN PAM
caguccucgcucugagccua

SEQ ID NO: 5726 - RNA, 20 nt, Artificial Sequence
  targeting sequence with GTCN PAM
ucucaagguguuuuaaggaa

SEQ ID NO: 5727 - RNA, 20 nt, Artificial Sequence
  targeting sequence with GTCN PAM
gaaccuagcaaacaaguguu

SEQ ID NO: 5728 - RNA, 20 nt, Artificial Sequence
  targeting sequence with GTCN PAM
gagcaugagcagggguggga

SEQ ID NO: 5729 - RNA, 20 nt, Artificial Sequence
  targeting sequence with GTCN PAM
gagagcucuuagcucuagga

SEQ ID NO: 5730 - RNA, 20 nt, Artificial Sequence
  targeting sequence with GTCN PAM
uuaucuguuuaauuggucag

SEQ ID NO: 5731 - RNA, 20 nt, Artificial Sequence
  targeting sequence with GTCN PAM
gccuccccuguuagaaugug

SEQ ID NO: 5732 - RNA, 20 nt, Artificial Sequence
  targeting sequence with GTCN PAM
cccuccacaauucagaggcc

SEQ ID NO: 5733 - RNA, 20 nt, Artificial Sequence
  targeting sequence with GTCN PAM
cggccccugucccccuccac

SEQ ID NO: 5734 - RNA, 20 nt, Artificial Sequence
  targeting sequence with GTCN PAM
ucagucucugacaggaagcc

SEQ ID NO: 5735 - RNA, 20 nt, Artificial Sequence
  targeting sequence with GTCN PAM
cugacaggaagccugguccu

SEQ ID NO: 5736 - RNA, 20 nt, Artificial Sequence
  targeting sequence with GTCN PAM
gagacugaggacccaggaag

SEQ ID NO: 5737 - RNA, 20 nt, Artificial Sequence
  targeting sequence with GTCN PAM
ugugggaugaaaagaugaag

SEQ ID NO: 5738 - RNA, 20 nt, Artificial Sequence
  targeting sequence with GTCN PAM
ccugcaaggcagccagaggc

SEQ ID NO: 5739 - RNA, 20 nt, Artificial Sequence
  targeting sequence with GTCN PAM
ccagccucuggcugccuugc

SEQ ID NO: 5740 - RNA, 20 nt, Artificial Sequence
  targeting sequence with GTCN PAM
uuucaggagggaggaugcca

SEQ ID NO: 5741 - RNA, 20 nt, Artificial Sequence
  targeting sequence with GTCN PAM
ggauugcucugcguguucgg

SEQ ID NO: 5742 - RNA, 20 nt, Artificial Sequence
  targeting sequence with GTCN PAM
gcccauuuugaauggggcga

SEQ ID NO: 5743 - RNA, 20 nt, Artificial Sequence
  targeting sequence with GTCN PAM
ccauuuaucgccccauucaa

SEQ ID NO: 5744 - RNA, 20 nt, Artificial Sequence
  targeting sequence with GTCN PAM
ggcugcuuucagguggcuuu

SEQ ID NO: 5745 - RNA, 20 nt, Artificial Sequence
  targeting sequence with GTCN PAM
gcuuguuccucagaaacuuc

SEQ ID NO: 5746 - RNA, 20 nt, Artificial Sequence
  targeting sequence with GTCN PAM
augaguuaaagucucuggcu

SEQ ID NO: 5747 - RNA, 20 nt, Artificial Sequence
  targeting sequence with GTCN PAM
cuggcuuuacugugaguuca

SEQ ID NO: 5748 - RNA, 20 nt, Artificial Sequence
  targeting sequence with GTCN PAM
guggaaggcaaacucuuaua

SEQ ID NO: 5749 - RNA, 20 nt, Artificial Sequence
  targeting sequence with GTCN PAM
ccugugucuguggcacgacu

SEQ ID NO: 5750 - RNA, 20 nt, Artificial Sequence
  targeting sequence with GTCN PAM
guggcacgacuggguaggca

SEQ ID NO: 5751 - RNA, 20 nt, Artificial Sequence
  targeting sequence with GTCN PAM
ugccacagacacaggggacc

SEQ ID NO: 5752 - RNA, 20 nt, Artificial Sequence
  targeting sequence with GTCN PAM
ccugcauucuacccaugucg

SEQ ID NO: 5753 - RNA, 20 nt, Artificial Sequence
  targeting sequence with GTCN PAM
ccaagauguauaggcagucu

SEQ ID NO: 5754 - RNA, 20 nt, Artificial Sequence
  targeting sequence with GTCN PAM
cucaucaguccaugcaucuc

SEQ ID NO: 5755 - RNA, 20 nt, Artificial Sequence
  targeting sequence with GTCN PAM
augcaucucucucucucuug

SEQ ID NO: 5756 - RNA, 20 nt, Artificial Sequence
  targeting sequence with GTCN PAM
aacuggcuucuucuuuggcu

SEQ ID NO: 5757 - RNA, 20 nt, Artificial Sequence
  targeting sequence with GTCN PAM
cccaaggaggcaccgccaca

SEQ ID NO: 5758 - RNA, 20 nt, Artificial Sequence
  targeting sequence with GTCN PAM
guggcggugccuccuuggga

SEQ ID NO: 5759 - RNA, 20 nt, Artificial Sequence
  targeting sequence with GTCN PAM
uuuugggaucagguaaaaca

SEQ ID NO: 5760 - RNA, 20 nt, Artificial Sequence
  targeting sequence with GTCN PAM
uugcuguucuuugcaugauc

SEQ ID NO: 5761 - RNA, 20 nt, Artificial Sequence
  targeting sequence with GTCN PAM
aggugagcuugacuucccac

SEQ ID NO: 5762 - RNA, 20 nt, Artificial Sequence
  targeting sequence with GTCN PAM
agcucaccuagacagugagc

SEQ ID NO: 5763 - RNA, 20 nt, Artificial Sequence
  targeting sequence with GTCN PAM
cccacuuuugaagccaagaa

SEQ ID NO: 5764 - RNA, 20 nt, Artificial Sequence
  targeting sequence with GTCN PAM
uguacucugaugaaagccug

SEQ ID NO: 5765 - RNA, 20 nt, Artificial Sequence
  targeting sequence with GTCN PAM
agaaaguggacuugggguuc

SEQ ID NO: 5766 - RNA, 20 nt, Artificial Sequence
  targeting sequence with GTCN PAM
acuuucuugacaaguaagaa

SEQ ID NO: 5767 - RNA, 20 nt, Artificial Sequence
  targeting sequence with GTCN PAM
cacguacaucuuuuccagca

SEQ ID NO: 5768 - RNA, 20 nt, Artificial Sequence
  targeting sequence with GTCN PAM
aauuagacuugcaguuccac

SEQ ID NO: 5769 - RNA, 20 nt, Artificial Sequence
  targeting sequence with GTCN PAM
aauuagaccucuuucuuuug

SEQ ID NO: 5770 - RNA, 20 nt, Artificial Sequence
  targeting sequence with GTCN PAM
cagcuuauauggauggcagc

SEQ ID NO: 5771 - RNA, 20 nt, Artificial Sequence
  targeting sequence with GTCN PAM
cacgagaucugaugguuuua

SEQ ID NO: 5772 - RNA, 20 nt, Artificial Sequence
  targeting sequence with GTCN PAM
uucccaugcuguucucauga

SEQ ID NO: 5773 - RNA, 20 nt, Artificial Sequence
  targeting sequence with GTCN PAM
cucccacaacacaugggaau

SEQ ID NO: 5774 - RNA, 20 nt, Artificial Sequence
  targeting sequence with GTCN PAM
ccacccagaucucaucuuga

SEQ ID NO: 5775 - RNA, 20 nt, Artificial Sequence
  targeting sequence with GTCN PAM
ucagggcuuuugccugcuga

SEQ ID NO: 5776 - RNA, 20 nt, Artificial Sequence
  targeting sequence with GTCN PAM
gggcaucugggccacagccu

SEQ ID NO: 5777 - RNA, 20 nt, Artificial Sequence
  targeting sequence with GTCN PAM
ccuacuguguggccacucug

SEQ ID NO: 5778 - RNA, 20 nt, Artificial Sequence
  targeting sequence with GTCN PAM
cgugguaacugacugaggca

SEQ ID NO: 5779 - RNA, 20 nt, Artificial Sequence
  targeting sequence with GTCN PAM
guuaccacgugacagcucac

SEQ ID NO: 5780 - RNA, 20 nt, Artificial Sequence
  targeting sequence with GTCN PAM
gugaaaagggauuggaccua

SEQ ID NO: 5781 - RNA, 20 nt, Artificial Sequence
  targeting sequence with GTCN PAM
aaucccuuuucacagacaag

SEQ ID NO: 5782 - RNA, 20 nt, Artificial Sequence
  targeting sequence with GTCN PAM
caggcugcugugaggauuca

SEQ ID NO: 5783 - RNA, 20 nt, Artificial Sequence
  targeting sequence with GTCN PAM
ccauccucucagacuccagu

SEQ ID NO: 5784 - RNA, 20 nt, Artificial Sequence
  targeting sequence with GTCN PAM
gagaggauggugaccagcua

SEQ ID NO: 5785 - RNA, 20 nt, Artificial Sequence
  targeting sequence with GTCN PAM
auuucuggggaauggagcuc

SEQ ID NO: 5786 - RNA, 20 nt, Artificial Sequence
  targeting sequence with GTCN PAM
gaacugagcgccccagaguu

SEQ ID NO: 5787 - RNA, 20 nt, Artificial Sequence
  targeting sequence with GTCN PAM
uccaacccaauaggccugca

SEQ ID NO: 5788 - RNA, 20 nt, Artificial Sequence
  targeting sequence with GTCN PAM
accaccacccagcgcccagu

SEQ ID NO: 5789 - RNA, 20 nt, Artificial Sequence
  targeting sequence with GTCN PAM
ugggauggaaaugggugugg

SEQ ID NO: 5790 - RNA, 20 nt, Artificial Sequence
  targeting sequence with GTCN PAM
aaaucaaggugugugguccu

SEQ ID NO: 5791 - RNA, 20 nt, Artificial Sequence
  targeting sequence with GTCN PAM
gacuggugccggaugaauuu

SEQ ID NO: 5792 - RNA, 20 nt, Artificial Sequence
  targeting sequence with GTCN PAM
gaccgauaugucaaaaucaa

SEQ ID NO: 5793 - RNA, 20 nt, Artificial Sequence
  targeting sequence with GTCN PAM
aaaagagaaccaagaaauuc

SEQ ID NO: 5794 - RNA, 20 nt, Artificial Sequence
  targeting sequence with GTCN PAM
cugggcgggaaagccuccuu

SEQ ID NO: 5795 - RNA, 20 nt, Artificial Sequence
  targeting sequence with GTCN PAM
cagagugucuuccaaucacc

SEQ ID NO: 5796 - RNA, 20 nt, Artificial Sequence
  targeting sequence with GTCN PAM
uccaaucaccagcuacggag

SEQ ID NO: 5797 - RNA, 20 nt, Artificial Sequence
  targeting sequence with GTCN PAM
ccagaugcgaucccaggagg

SEQ ID NO: 5798 - RNA, 20 nt, Artificial Sequence
  targeting sequence with GTCN PAM
agggucaccucacccacuca

SEQ ID NO: 5799 - RNA, 20 nt, Artificial Sequence
  targeting sequence with GTCN PAM
ccucacccacucagagccca

SEQ ID NO: 5800 - RNA, 20 nt, Artificial Sequence
  targeting sequence with GTCN PAM
guuuugauuugcucagcugu

SEQ ID NO: 5801 - RNA, 20 nt, Artificial Sequence
  targeting sequence with GTCN PAM
uggggucaguuuugauuugc

SEQ ID NO: 5802 - RNA, 20 nt, Artificial Sequence
  targeting sequence with GTCN PAM
gaacccccagaugguccuuc

SEQ ID NO: 5803 - RNA, 20 nt, Artificial Sequence
  targeting sequence with GTCN PAM
uuccgguaguacuggccuug

SEQ ID NO: 5804 - RNA, 20 nt, Artificial Sequence
  targeting sequence with GTCN PAM
aggccaguacuaccggaagg

SEQ ID NO: 5805 - RNA, 20 nt, Artificial Sequence
  targeting sequence with GTCN PAM
caguuuccucaccuguaaaa

SEQ ID NO: 5806 - RNA, 20 nt, Artificial Sequence
  targeting sequence with GTCN PAM
ccauuuuacaggugaggaaa

SEQ ID NO: 5807 - RNA, 20 nt, Artificial Sequence
  targeting sequence with GTCN PAM
ucuccauuuuacaggugagg

SEQ ID NO: 5808 - RNA, 20 nt, Artificial Sequence
  targeting sequence with GTCN PAM
caggguaaauguucaauaaa

SEQ ID NO: 5809 - RNA, 20 nt, Artificial Sequence
  targeting sequence with GTCN PAM
ucugagccauucauuuauuu

SEQ ID NO: 5810 - RNA, 20 nt, Artificial Sequence
  targeting sequence with GTCN PAM
ggagcucugggaauauaaag

SEQ ID NO: 5811 - RNA, 20 nt, Artificial Sequence
  targeting sequence with GTCN PAM
gcucacucaguuguuaacag

SEQ ID NO: 5812 - RNA, 20 nt, Artificial Sequence
  targeting sequence with GTCN PAM
caccacagcagcccuagggu

SEQ ID NO: 5813 - RNA, 20 nt, Artificial Sequence
  targeting sequence with GTCN PAM
caggcuagaaggaaaggaac

SEQ ID NO: 5814 - RNA, 20 nt, Artificial Sequence
  targeting sequence with GTCN PAM
uggcaaugaaugaaugcacg

SEQ ID NO: 5815 - RNA, 20 nt, Artificial Sequence
  targeting sequence with GTCN PAM
auucaguuggguggggggcu

SEQ ID NO: 5816 - RNA, 20 nt, Artificial Sequence
  targeting sequence with GTCN PAM
aacuugccucauuaugcccu

SEQ ID NO: 5817 - RNA, 20 nt, Artificial Sequence
  targeting sequence with GTCN PAM
gcugugccugaauuccauag

SEQ ID NO: 5818 - RNA, 20 nt, Artificial Sequence
  targeting sequence with GTCN PAM
ugggaucucuuuuaaugcua

SEQ ID NO: 5819 - RNA, 20 nt, Artificial Sequence
  targeting sequence with GTCN PAM
gucuugggaucucuuuuaau

SEQ ID NO: 5820 - RNA, 20 nt, Artificial Sequence
  targeting sequence with GTCN PAM
guuuugucagucuugggauc

SEQ ID NO: 5821 - RNA, 20 nt, Artificial Sequence
  targeting sequence with GTCN PAM
uauugcuacaaagucuguuu

SEQ ID NO: 5822 - RNA, 20 nt, Artificial Sequence
  targeting sequence with GTCN PAM
gguugaaauuuggugucuua

SEQ ID NO: 5823 - RNA, 20 nt, Artificial Sequence
  targeting sequence with GTCN PAM
ugugaugcuauacuagaguc

SEQ ID NO: 5824 - RNA, 20 nt, Artificial Sequence
  targeting sequence with GTCN PAM
aagaaauauauuuuugggua

SEQ ID NO: 5825 - RNA, 20 nt, Artificial Sequence
  targeting sequence with GTCN PAM
gaauaugucaaagaaauaua

SEQ ID NO: 5826 - RNA, 20 nt, Artificial Sequence
  targeting sequence with GTCN PAM
cuuguggggacaaucuacgu

SEQ ID NO: 5827 - RNA, 20 nt, Artificial Sequence
  targeting sequence with GTCN PAM
ccacaagagacagcuuuaca

SEQ ID NO: 5828 - RNA, 20 nt, Artificial Sequence
  targeting sequence with GTCN PAM
uguagugaaucccccucccu

SEQ ID NO: 5829 - RNA, 20 nt, Artificial Sequence
  targeting sequence with GTCN PAM
ucucccugagccaggagagg

SEQ ID NO: 5830 - RNA, 20 nt, Artificial Sequence
  targeting sequence with GTCN PAM
uaguggagccucuccuggcu

SEQ ID NO: 5831 - RNA, 20 nt, Artificial Sequence
  targeting sequence with GTCN PAM
ccacaaccucuuaucugaac

SEQ ID NO: 5832 - RNA, 20 nt, Artificial Sequence
  targeting sequence with GTCN PAM
uuagacaaacucaaccaauu

SEQ ID NO: 5833 - RNA, 20 nt, Artificial Sequence
  targeting sequence with GTCN PAM
aaagacuuggaaucaacaaa

SEQ ID NO: 5834 - RNA, 20 nt, Artificial Sequence
  targeting sequence with GTCN PAM
aaucuaccaacagcccggac

SEQ ID NO: 5835 - RNA, 20 nt, Artificial Sequence
  targeting sequence with GTCN PAM
gggcuguugguagauuugac

SEQ ID NO: 5836 - RNA, 20 nt, Artificial Sequence
  targeting sequence with GTCN PAM
ugagaacaugugcccaaggu

SEQ ID NO: 5837 - RNA, 20 nt, Artificial Sequence
  targeting sequence with GTCN PAM
cgggccguggucacucauac

SEQ ID NO: 5838 - RNA, 20 nt, Artificial Sequence
  targeting sequence with GTCN PAM
cucauacuggacucagaaua

SEQ ID NO: 5839 - RNA, 20 nt, Artificial Sequence
  targeting sequence with GTCN PAM
aguaugagugaccacggccc

SEQ ID NO: 5840 - RNA, 20 nt, Artificial Sequence
  targeting sequence with GTCN PAM
uuucaaauacuuuacacagu

SEQ ID NO: 5841 - RNA, 20 nt, Artificial Sequence
  targeting sequence with GTCN PAM
aacuguguaaaguauuugaa

SEQ ID NO: 5842 - RNA, 20 nt, Artificial Sequence
  targeting sequence with GTCN PAM
auagacgcaaagcccaacca

SEQ ID NO: 5843 - RNA, 20 nt, Artificial Sequence
  targeting sequence with GTCN PAM
auugacgaaaagagucaaac

SEQ ID NO: 5844 - RNA, 20 nt, Artificial Sequence
  targeting sequence with GTCN PAM
gcuugcuggagcgcguacac

SEQ ID NO: 5845 - RNA, 20 nt, Artificial Sequence
  targeting sequence with GTCN PAM
guggguauugucggcuugcu

SEQ ID NO: 5846 - RNA, 20 nt, Artificial Sequence
  targeting sequence with GTCN PAM
ccugguaaggaggccuuccc

SEQ ID NO: 5847 - RNA, 20 nt, Artificial Sequence
  targeting sequence with GTCN PAM
uaauccguggccaucugcgu

SEQ ID NO: 5848 - RNA, 20 nt, Artificial Sequence
  targeting sequence with GTCN PAM
gccucggccuuccaaaguuc

SEQ ID NO: 5849 - RNA, 20 nt, Artificial Sequence
  targeting sequence with GTCN PAM
ggcguuccagaccagccugg

SEQ ID NO: 5850 - RNA, 20 nt, Artificial Sequence
  targeting sequence with GTCN PAM
ggaacgccugaccucaagug

SEQ ID NO: 5851 - RNA, 20 nt, Artificial Sequence
  targeting sequence with GTCN PAM
cagcuacuuggcaggcugag

SEQ ID NO: 5852 - RNA, 20 nt, Artificial Sequence
  targeting sequence with GTCN PAM
cacuuugcuucccaggcugg

SEQ ID NO: 5853 - RNA, 20 nt, Artificial Sequence
  targeting sequence with GTCN PAM
caaaaacaaacaaacaaaca

SEQ ID NO: 5854 - RNA, 20 nt, Artificial Sequence
  targeting sequence with GTCN PAM
ugacagggaaaaggcaagca

SEQ ID NO: 5855 - RNA, 20 nt, Artificial Sequence
  targeting sequence with GTCN PAM
ggacccagagguuaccuccc

SEQ ID NO: 5856 - RNA, 20 nt, Artificial Sequence
  targeting sequence with GTCN PAM
uuaaaaaaaagacaugucaa

SEQ ID NO: 5857 - RNA, 20 nt, Artificial Sequence
  targeting sequence with GTCN PAM
uuuuuuuaaggacccggagc

SEQ ID NO: 5858 - RNA, 20 nt, Artificial Sequence
  targeting sequence with GTCN PAM
aagaaagagugcugcagaaa

SEQ ID NO: 5859 - RNA, 20 nt, Artificial Sequence
  targeting sequence with GTCN PAM
caacucagaaagaauuccaa

SEQ ID NO: 5860 - RNA, 20 nt, Artificial Sequence
  targeting sequence with GTCN PAM
ggagagaucaagaccgacuu

SEQ ID NO: 5861 - RNA, 20 nt, Artificial Sequence
  targeting sequence with GTCN PAM
ugaucucuccugaccgcuag

SEQ ID NO: 5862 - RNA, 20 nt, Artificial Sequence
  targeting sequence with GTCN PAM
gucuugaucucuccugaccg

SEQ ID NO: 5863 - RNA, 20 nt, Artificial Sequence
  targeting sequence with GTCN PAM
caucacuauuuacuauguaa

SEQ ID NO: 5864 - RNA, 20 nt, Artificial Sequence
  targeting sequence with GTCN PAM
cuauuuugcauauguggaag

SEQ ID NO: 5865 - RNA, 20 nt, Artificial Sequence
  targeting sequence with GTCN PAM
aaacuaccuugcuuuguuuu

SEQ ID NO: 5866 - RNA, 20 nt, Artificial Sequence
  targeting sequence with GTCN PAM
uaagcgaucucucgccucag

SEQ ID NO: 5867 - RNA, 20 nt, Artificial Sequence
  targeting sequence with GTCN PAM
aauuuuuaagcuuguucuug

SEQ ID NO: 5868 - RNA, 20 nt, Artificial Sequence
  targeting sequence with GTCN PAM
cacucuguugcacaggcugg

SEQ ID NO: 5869 - RNA, 20 nt, Artificial Sequence
  targeting sequence with GTCN PAM
cuugaaccugggaggcagaa

SEQ ID NO: 5870 - RNA, 20 nt, Artificial Sequence
  targeting sequence with GTCN PAM
agugugguggcgcacaccug

SEQ ID NO: 5871 - RNA, 20 nt, Artificial Sequence
  targeting sequence with GTCN PAM
cuacugaaaauuaaaaaaaa

SEQ ID NO: 5872 - RNA, 20 nt, Artificial Sequence
  targeting sequence with GTCN PAM
cacuauguuggucaaccugg

SEQ ID NO: 5873 - RNA, 20 nt, Artificial Sequence
  targeting sequence with GTCN PAM
accuggucucaaacuccuga

SEQ ID NO: 5874 - RNA, 20 nt, Artificial Sequence
  targeting sequence with GTCN PAM
caaacuccugaccucaggug

SEQ ID NO: 5875 - RNA, 20 nt, Artificial Sequence
  targeting sequence with GTCN PAM
ggaguuugagaccagguuga

SEQ ID NO: 5876 - RNA, 20 nt, Artificial Sequence
  targeting sequence with GTCN PAM
cugccucucaggccagggca

SEQ ID NO: 5877 - RNA, 20 nt, Artificial Sequence
  targeting sequence with GTCN PAM
caguugucucaggcgaagcu

SEQ ID NO: 5878 - RNA, 20 nt, Artificial Sequence
  targeting sequence with GTCN PAM
caggcgaagcugccccuccu

SEQ ID NO: 5879 - RNA, 20 nt, Artificial Sequence
  targeting sequence with GTCN PAM
guggcaaucaucuaacucca

SEQ ID NO: 5880 - RNA, 20 nt, Artificial Sequence
  targeting sequence with GTCN PAM
uagcaucuucauauguaaag

SEQ ID NO: 5881 - RNA, 20 nt, Artificial Sequence
  targeting sequence with GTCN PAM
auuuaaccgaaggccugucu

SEQ ID NO: 5882 - RNA, 20 nt, Artificial Sequence
  targeting sequence with GTCN PAM
gaucucuacagggcccugcu

SEQ ID NO: 5883 - RNA, 20 nt, Artificial Sequence
  targeting sequence with GTCN PAM
cacugcaggcauucuggcca

SEQ ID NO: 5884 - RNA, 20 nt, Artificial Sequence
  targeting sequence with GTCN PAM
agaagcaggggcagguccag

SEQ ID NO: 5885 - RNA, 20 nt, Artificial Sequence
  targeting sequence with GTCN PAM
aggccccucccaccucaugg

SEQ ID NO: 5886 - RNA, 20 nt, Artificial Sequence
  targeting sequence with GTCN PAM
cccacggaugcugcccacgg

SEQ ID NO: 5887 - RNA, 20 nt, Artificial Sequence
  targeting sequence with GTCN PAM
ccugcugcuugacucaaauc

SEQ ID NO: 5888 - RNA, 20 nt, Artificial Sequence
  targeting sequence with GTCN PAM
agcagcaggugacaacccgu

SEQ ID NO: 5889 - RNA, 20 nt, Artificial Sequence
  targeting sequence with GTCN PAM
ucucuaagaaaauggccucc

SEQ ID NO: 5890 - RNA, 20 nt, Artificial Sequence
  targeting sequence with GTCN PAM
cggggaaauguucuuuuauc

SEQ ID NO: 5891 - RNA, 20 nt, Artificial Sequence
  targeting sequence with GTCN PAM
uugcugauucugguuuuaga

SEQ ID NO: 5892 - RNA, 20 nt, Artificial Sequence
  targeting sequence with GTCN PAM
guggcugcuuuccugcugca

SEQ ID NO: 5893 - RNA, 20 nt, Artificial Sequence
  targeting sequence with GTCN PAM
caacuacucagcucuguguu

SEQ ID NO: 5894 - RNA, 20 nt, Artificial Sequence
  targeting sequence with GTCN PAM
gucgcaacuacucagcucug

SEQ ID NO: 5895 - RNA, 20 nt, Artificial Sequence
  targeting sequence with GTCN PAM
ugucugucgcaacuacucag

SEQ ID NO: 5896 - RNA, 20 nt, Artificial Sequence
  targeting sequence with GTCN PAM
ugcucugccauccagguuug

SEQ ID NO: 5897 - RNA, 20 nt, Artificial Sequence
  targeting sequence with GTCN PAM
ccuuauguugccuaggcugg

SEQ ID NO: 5898 - RNA, 20 nt, Artificial Sequence
  targeting sequence with GTCN PAM
ccuuauguuggauaugugua

SEQ ID NO: 5899 - RNA, 20 nt, Artificial Sequence
  targeting sequence with GTCN PAM
aucuaucuaucuaucuaucu

SEQ ID NO: 5900 - RNA, 20 nt, Artificial Sequence
  targeting sequence with GTCN PAM
gucuaucuaucuaucuaucu

SEQ ID NO: 5901 - RNA, 20 nt, Artificial Sequence
  targeting sequence with GTCN PAM
gucugucuaucuaucuaucu

SEQ ID NO: 5902 - RNA, 20 nt, Artificial Sequence
  targeting sequence with GTCN PAM
gucagucugucuaucuaucu

SEQ ID NO: 5903 - RNA, 20 nt, Artificial Sequence
  targeting sequence with GTCN PAM
gucggucagucugucuaucu

SEQ ID NO: 5904 - RNA, 20 nt, Artificial Sequence
  targeting sequence with GTCN PAM
aaaugcugugggaagccaag

SEQ ID NO: 5905 - RNA, 20 nt, Artificial Sequence
  targeting sequence with GTCN PAM
ucucccugggcuacaaggcc

SEQ ID NO: 5906 - RNA, 20 nt, Artificial Sequence
  targeting sequence with GTCN PAM
auggcauaccauucacccuu

SEQ ID NO: 5907 - RNA, 20 nt, Artificial Sequence
  targeting sequence with GTCN PAM
ggguggcuggguggaauggg

SEQ ID NO: 5908 - RNA, 20 nt, Artificial Sequence
  targeting sequence with GTCN PAM
cuugcaagcuauccuacccc

SEQ ID NO: 5909 - RNA, 20 nt, Artificial Sequence
  targeting sequence with GTCN PAM
ugggggaagcacaaucuagg

SEQ ID NO: 5910 - RNA, 20 nt, Artificial Sequence
  targeting sequence with GTCN PAM
aucacucagaugucagcucc

SEQ ID NO: 5911 - RNA, 20 nt, Artificial Sequence
  targeting sequence with GTCN PAM
gcuccaaugucugcuucuca

SEQ ID NO: 5912 - RNA, 20 nt, Artificial Sequence
  targeting sequence with GTCN PAM
gcuucucagagaggccgucc

SEQ ID NO: 5913 - RNA, 20 nt, Artificial Sequence
  targeting sequence with GTCN PAM
cugaccaccagcccuuuagg

SEQ ID NO: 5914 - RNA, 20 nt, Artificial Sequence
  targeting sequence with GTCN PAM
gggacggccucucugagaag

SEQ ID NO: 5915 - RNA, 20 nt, Artificial Sequence
  targeting sequence with GTCN PAM
cugcccugguucagaccuuc

SEQ ID NO: 5916 - RNA, 20 nt, Artificial Sequence
  targeting sequence with GTCN PAM
gaaccagggcagggacaaug

SEQ ID NO: 5917 - RNA, 20 nt, Artificial Sequence
  targeting sequence with GTCN PAM
caagcugaaauaauauccug

SEQ ID NO: 5918 - RNA, 20 nt, Artificial Sequence
  targeting sequence with GTCN PAM
ggauauuauuucagcuugag

SEQ ID NO: 5919 - RNA, 20 nt, Artificial Sequence
  targeting sequence with GTCN PAM
ggauugcuauuccugcuuua

SEQ ID NO: 5920 - RNA, 20 nt, Artificial Sequence
  targeting sequence with GTCN PAM
gcagaggucaggauugcuau

SEQ ID NO: 5921 - RNA, 20 nt, Artificial Sequence
  targeting sequence with GTCN PAM
uggcaggggugccuucuucc

SEQ ID NO: 5922 - RNA, 20 nt, Artificial Sequence
  targeting sequence with GTCN PAM
aaagaggcaagaguuugagc

SEQ ID NO: 5923 - RNA, 20 nt, Artificial Sequence
  targeting sequence with GTCN PAM
cucacuuugucuaaagaggc

SEQ ID NO: 5924 - RNA, 20 nt, Artificial Sequence
  targeting sequence with GTCN PAM
gggugucucucacuuugucu

SEQ ID NO: 5925 - RNA, 20 nt, Artificial Sequence
  targeting sequence with GTCN PAM
ucugggacaaacaccgccac

SEQ ID NO: 5926 - RNA, 20 nt, Artificial Sequence
  targeting sequence with GTCN PAM
cagaugacggugcuccugcu

SEQ ID NO: 5927 - RNA, 20 nt, Artificial Sequence
  targeting sequence with GTCN PAM
gcucuuucuggcugcuuaua

SEQ ID NO: 5928 - RNA, 20 nt, Artificial Sequence
  targeting sequence with GTCN PAM
guguuuuacugucugcucuu

SEQ ID NO: 5929 - RNA, 20 nt, Artificial Sequence
  targeting sequence with GTCN PAM
ugucuguguuuuacugucug

SEQ ID NO: 5930 - RNA, 20 nt, Artificial Sequence
  targeting sequence with GTCN PAM
ggggaaagucucuuggguga

SEQ ID NO: 5931 - RNA, 20 nt, Artificial Sequence
  targeting sequence with GTCN PAM
cuugggugacugccaaacuu

SEQ ID NO: 5932 - RNA, 20 nt, Artificial Sequence
  targeting sequence with GTCN PAM
cccaagagacuuucccccga

SEQ ID NO: 5933 - RNA, 20 nt, Artificial Sequence
  targeting sequence with GTCN PAM
gcuuuuagcuucccuaucuu

SEQ ID NO: 5934 - RNA, 20 nt, Artificial Sequence
  targeting sequence with GTCN PAM
guuuccauacaucuuucugc

SEQ ID NO: 5935 - RNA, 20 nt, Artificial Sequence
  targeting sequence with GTCN PAM
cuuuguuguguuuaucuggg

SEQ ID NO: 5936 - RNA, 20 nt, Artificial Sequence
  targeting sequence with GTCN PAM
aagccucugauaaacucuuc

SEQ ID NO: 5937 - RNA, 20 nt, Artificial Sequence
  targeting sequence with GTCN PAM
guaagagaauguggcucuga

SEQ ID NO: 5938 - RNA, 20 nt, Artificial Sequence
  targeting sequence with GTCN PAM
gagccacauucucuuacaga

SEQ ID NO: 5939 - RNA, 20 nt, Artificial Sequence
  targeting sequence with GTCN PAM
uugacuauugagccaccuuu

SEQ ID NO: 5940 - RNA, 20 nt, Artificial Sequence
  targeting sequence with GTCN PAM
aagacagguuuauuuuagag

SEQ ID NO: 5941 - RNA, 20 nt, Artificial Sequence
  targeting sequence with GTCN PAM
accuaucuuacccacuauug

SEQ ID NO: 5942 - RNA, 20 nt, Artificial Sequence
  targeting sequence with GTCN PAM
ucacugaguucuuuuucccu

SEQ ID NO: 5943 - RNA, 20 nt, Artificial Sequence
  targeting sequence with GTCN PAM
gcugcuuggcuuuguguuua

SEQ ID NO: 5944 - RNA, 20 nt, Artificial Sequence
  targeting sequence with GTCN PAM
uguuauuucccaguaaguaa

SEQ ID NO: 5945 - RNA, 20 nt, Artificial Sequence
  targeting sequence with GTCN PAM
uugaaaugacucacagccag

SEQ ID NO: 5946 - RNA, 20 nt, Artificial Sequence
  targeting sequence with GTCN PAM
uuucaaugaccacagugugc

SEQ ID NO: 5947 - RNA, 20 nt, Artificial Sequence
  targeting sequence with GTCN PAM
ccucaaguugggcugcuuuc

SEQ ID NO: 5948 - RNA, 20 nt, Artificial Sequence
  targeting sequence with GTCN PAM
agcacauuuuuaaggucacc

SEQ ID NO: 5949 - RNA, 20 nt, Artificial Sequence
  targeting sequence with GTCN PAM
ccaccccaacaguaguaauc

SEQ ID NO: 5950 - RNA, 20 nt, Artificial Sequence
  targeting sequence with GTCN PAM
cuccugcaugugucaccacc

SEQ ID NO: 5951 - RNA, 20 nt, Artificial Sequence
  targeting sequence with GTCN PAM
cugccucucucagagcucag

SEQ ID NO: 5952 - RNA, 20 nt, Artificial Sequence
  targeting sequence with GTCN PAM
caaccagcugcccugcagag

SEQ ID NO: 5953 - RNA, 20 nt, Artificial Sequence
  targeting sequence with GTCN PAM
agucucaaccagcugcccug

SEQ ID NO: 5954 - RNA, 20 nt, Artificial Sequence
  targeting sequence with GTCN PAM
uccaggagauuuucaauguc

SEQ ID NO: 5955 - RNA, 20 nt, Artificial Sequence
  targeting sequence with GTCN PAM
ccaaaugagccacuccagug

SEQ ID NO: 5956 - RNA, 20 nt, Artificial Sequence
  targeting sequence with GTCN PAM
caccaagaggaguuacucag

SEQ ID NO: 5957 - RNA, 20 nt, Artificial Sequence
  targeting sequence with GTCN PAM
cacaggagcccuggaggagg

SEQ ID NO: 5958 - RNA, 20 nt, Artificial Sequence
  targeting sequence with GTCN PAM
ucccugagucacacaggagc

SEQ ID NO: 5959 - RNA, 20 nt, Artificial Sequence
  targeting sequence with GTCN PAM
auuucuaauuugccucugug

SEQ ID NO: 5960 - RNA, 20 nt, Artificial Sequence
  targeting sequence with GTCN PAM
ggacagauguggccccacaa

SEQ ID NO: 5961 - RNA, 20 nt, Artificial Sequence
  targeting sequence with GTCN PAM
agacaaggcacagaggcaaa

SEQ ID NO: 5962 - RNA, 20 nt, Artificial Sequence
  targeting sequence with GTCN PAM
acaguuguaaagguuguaca

SEQ ID NO: 5963 - RNA, 20 nt, Artificial Sequence
  targeting sequence with GTCN PAM
aaggccuccucacuauuaau

SEQ ID NO: 5964 - RNA, 20 nt, Artificial Sequence
  targeting sequence with GTCN PAM
cuggaaaggcuugccauuug

SEQ ID NO: 5965 - RNA, 20 nt, Artificial Sequence
  targeting sequence with GTCN PAM
guucucagccucucaggugg

SEQ ID NO: 5966 - RNA, 20 nt, Artificial Sequence
  targeting sequence with GTCN PAM
cagcccuuguucuuagagga

SEQ ID NO: 5967 - RNA, 20 nt, Artificial Sequence
  targeting sequence with GTCN PAM
uugaauggacacagugguag

SEQ ID NO: 5968 - RNA, 20 nt, Artificial Sequence
  targeting sequence with GTCN PAM
auucaaagacaaaugagucc

SEQ ID NO: 5969 - RNA, 20 nt, Artificial Sequence
  targeting sequence with GTCN PAM
gccaaaacuggggaacacac

SEQ ID NO: 5970 - RNA, 20 nt, Artificial Sequence
  targeting sequence with GTCN PAM
ugggagcaagcauggugcag

SEQ ID NO: 5971 - RNA, 20 nt, Artificial Sequence
  targeting sequence with GTCN PAM
auggcucagcaaaggagcag

SEQ ID NO: 5972 - RNA, 20 nt, Artificial Sequence
  targeting sequence with GTCN PAM
cucugaagaaccaagaggug

SEQ ID NO: 5973 - RNA, 20 nt, Artificial Sequence
  targeting sequence with GTCN PAM
gagucccucugaagaaccaa

SEQ ID NO: 5974 - RNA, 20 nt, Artificial Sequence
  targeting sequence with GTCN PAM
ucucucuccucaggucggag

SEQ ID NO: 5975 - RNA, 20 nt, Artificial Sequence
  targeting sequence with GTCN PAM
uucgugguuuuaaauuauua

SEQ ID NO: 5976 - RNA, 20 nt, Artificial Sequence
  targeting sequence with GTCN PAM
acucccuaaaguuguuuaag

SEQ ID NO: 5977 - RNA, 20 nt, Artificial Sequence
  targeting sequence with GTCN PAM
uuguuuggguuucuuuuaag

SEQ ID NO: 5978 - RNA, 20 nt, Artificial Sequence
  targeting sequence with GTCN PAM
cccaggcuggaguguagugg

SEQ ID NO: 5979 - RNA, 20 nt, Artificial Sequence
  targeting sequence with GTCN PAM
gaugggaggaucacuugagc

SEQ ID NO: 5980 - RNA, 20 nt, Artificial Sequence
  targeting sequence with GTCN PAM
cagcuacaugggagggucag

SEQ ID NO: 5981 - RNA, 20 nt, Artificial Sequence
  targeting sequence with GTCN PAM
ucccagcuacaugggagggu

SEQ ID NO: 5982 - RNA, 20 nt, Artificial Sequence
  targeting sequence with GTCN PAM
cacuguguuacccaggcuga

SEQ ID NO: 5983 - RNA, 20 nt, Artificial Sequence
  targeting sequence with GTCN PAM
ucucacuuuggccuuccaaa

SEQ ID NO: 5984 - RNA, 20 nt, Artificial Sequence
  targeting sequence with GTCN PAM
agaugaauuacguuuuuaua

SEQ ID NO: 5985 - RNA, 20 nt, Artificial Sequence
  targeting sequence with GTCN PAM
gauaaggccaggcgcagugg

SEQ ID NO: 5986 - RNA, 20 nt, Artificial Sequence
  targeting sequence with GTCN PAM
agagaucaagaccauccugg

SEQ ID NO: 5987 - RNA, 20 nt, Artificial Sequence
  targeting sequence with GTCN PAM
ugaucucuugaccuugugau

SEQ ID NO: 5988 - RNA, 20 nt, Artificial Sequence
  targeting sequence with GTCN PAM
caacuacucgggagucugag

SEQ ID NO: 5989 - RNA, 20 nt, Artificial Sequence
  targeting sequence with GTCN PAM
gaggcaggaaaauugcuuga

SEQ ID NO: 5990 - RNA, 20 nt, Artificial Sequence
  targeting sequence with GTCN PAM
ccaggcuggagugcgguggu

SEQ ID NO: 5991 - RNA, 20 nt, Artificial Sequence
  targeting sequence with GTCN PAM
cacucugucaccaggcugga

SEQ ID NO: 5992 - RNA, 20 nt, Artificial Sequence
  targeting sequence with GTCN PAM
gugucauacugcucaacucu

SEQ ID NO: 5993 - RNA, 20 nt, Artificial Sequence
  targeting sequence with GTCN PAM
uacugcucaacucugccauu

SEQ ID NO: 5994 - RNA, 20 nt, Artificial Sequence
  targeting sequence with GTCN PAM
auggcugcuuucaugcuaca

SEQ ID NO: 5995 - RNA, 20 nt, Artificial Sequence
  targeting sequence with GTCN PAM
agccugcuuccuguuuuuua

SEQ ID NO: 5996 - RNA, 20 nt, Artificial Sequence
  targeting sequence with GTCN PAM
cuugagccacaguuugcaga

SEQ ID NO: 5997 - RNA, 20 nt, Artificial Sequence
  targeting sequence with GTCN PAM
gcaaacuguggcucaagaga

SEQ ID NO: 5998 - RNA, 20 nt, Artificial Sequence
  targeting sequence with GTCN PAM
aguagaggagcuacuugcca

SEQ ID NO: 5999 - RNA, 20 nt, Artificial Sequence
  targeting sequence with GTCN PAM
cauguggcaaguagcuccuc

SEQ ID NO: 6000 - RNA, 20 nt, Artificial Sequence
  targeting sequence with GTCN PAM
uucaaucacaccagccacau

SEQ ID NO: 6001 - RNA, 20 nt, Artificial Sequence
  targeting sequence with GTCN PAM
auagaccaguacuacaggca

SEQ ID NO: 6002 - RNA, 20 nt, Artificial Sequence
  targeting sequence with GTCN PAM
auggaccacacuuuuacuuu

SEQ ID NO: 6003 - RNA, 20 nt, Artificial Sequence
  targeting sequence with GTCN PAM
ucaaaagaugcuguauuucu

SEQ ID NO: 6004 - RNA, 20 nt, Artificial Sequence
  targeting sequence with GTCN PAM
gaagcugcauuucgacagga

SEQ ID NO: 6005 - RNA, 20 nt, Artificial Sequence
  targeting sequence with GTCN PAM
aaaugcagcuucugacccag

SEQ ID NO: 6006 - RNA, 20 nt, Artificial Sequence
  targeting sequence with GTCN PAM
ugucgaaaugcagcuucuga

SEQ ID NO: 6007 - RNA, 20 nt, Artificial Sequence
  targeting sequence with GTCN PAM
cuggcauauaaguuacaugg

SEQ ID NO: 6008 - RNA, 20 nt, Artificial Sequence
  targeting sequence with GTCN PAM
ccaacugucacuggcauaua

SEQ ID NO: 6009 - RNA, 20 nt, Artificial Sequence
  targeting sequence with GTCN PAM
gcugugcaagacagggauuc

SEQ ID NO: 6010 - RNA, 20 nt, Artificial Sequence
  targeting sequence with GTCN PAM
ugcacagcagaccccaaaac

SEQ ID NO: 6011 - RNA, 20 nt, Artificial Sequence
  targeting sequence with GTCN PAM
accucauaaccagccagcua

SEQ ID NO: 6012 - RNA, 20 nt, Artificial Sequence
  targeting sequence with GTCN PAM
guggaguccaccucauaacc

SEQ ID NO: 6013 - RNA, 20 nt, Artificial Sequence
  targeting sequence with GTCN PAM
gacuggugcggggcagauau

SEQ ID NO: 6014 - RNA, 20 nt, Artificial Sequence
  targeting sequence with GTCN PAM
gaccuugaaaacccccaccu

SEQ ID NO: 6015 - RNA, 20 nt, Artificial Sequence
  targeting sequence with GTCN PAM
gccuuauuacuuauuaaggc

SEQ ID NO: 6016 - RNA, 20 nt, Artificial Sequence
  targeting sequence with GTCN PAM
acuucucaguugaaccagaa

SEQ ID NO: 6017 - RNA, 20 nt, Artificial Sequence
  targeting sequence with GTCN PAM
uguacuccuaccugcauagc

SEQ ID NO: 6018 - RNA, 20 nt, Artificial Sequence
  targeting sequence with GTCN PAM
gucauguacuccuaccugca

SEQ ID NO: 6019 - RNA, 20 nt, Artificial Sequence
  targeting sequence with GTCN PAM
cgccagauggugccccagcu

SEQ ID NO: 6020 - RNA, 20 nt, Artificial Sequence
  targeting sequence with GTCN PAM
ccuuugaacucucuccucug

SEQ ID NO: 6021 - RNA, 20 nt, Artificial Sequence
  targeting sequence with GTCN PAM
ccagaguuagggacuaagga

SEQ ID NO: 6022 - RNA, 20 nt, Artificial Sequence
  targeting sequence with GTCN PAM
cuaacucuggggacugcauc

SEQ ID NO: 6023 - RNA, 20 nt, Artificial Sequence
  targeting sequence with GTCN PAM
ucuccuuagucccuaacucu

SEQ ID NO: 6024 - RNA, 20 nt, Artificial Sequence
  targeting sequence with GTCN PAM
cccaggcauuuuguggccaa

SEQ ID NO: 6025 - RNA, 20 nt, Artificial Sequence
  targeting sequence with GTCN PAM
aaccagucaguaugcguaau

SEQ ID NO: 6026 - RNA, 20 nt, Artificial Sequence
  targeting sequence with GTCN PAM
guaugcguaaucccacuggu

SEQ ID NO: 6027 - RNA, 20 nt, Artificial Sequence
  targeting sequence with GTCN PAM
ggucucucagugcaccaaaa

SEQ ID NO: 6028 - RNA, 20 nt, Artificial Sequence
  targeting sequence with GTCN PAM
cucagugcaccaaaaccuau

SEQ ID NO: 6029 - RNA, 20 nt, Artificial Sequence
  targeting sequence with GTCN PAM
gagcugagcgccuuucgcac

SEQ ID NO: 6030 - RNA, 20 nt, Artificial Sequence
  targeting sequence with GTCN PAM
guagccacggcaacagguug

SEQ ID NO: 6031 - RNA, 20 nt, Artificial Sequence
  targeting sequence with GTCN PAM
cguguuaagagcgagcccgc

SEQ ID NO: 6032 - RNA, 20 nt, Artificial Sequence
  targeting sequence with GTCN PAM
aauaauaauuuauuuuaaaa

SEQ ID NO: 6033 - RNA, 20 nt, Artificial Sequence
  targeting sequence with GTCN PAM
aucuuaaacucugcagcuuu

SEQ ID NO: 6034 - RNA, 20 nt, Artificial Sequence
  targeting sequence with GTCN PAM
ugauauuuauuuaauuugug

SEQ ID NO: 6035 - RNA, 20 nt, Artificial Sequence
  targeting sequence with GTCN PAM
ucagggugcaccuggaagaa

SEQ ID NO: 6036 - RNA, 20 nt, Artificial Sequence
  targeting sequence with GTCN PAM
cugccucuguaucuuauguu

SEQ ID NO: 6037 - RNA, 20 nt, Artificial Sequence
  targeting sequence with GTCN PAM
ugcuucagcccuguugaaua

SEQ ID NO: 6038 - RNA, 20 nt, Artificial Sequence
  targeting sequence with GTCN PAM
ccacaaacguagucugagac

SEQ ID NO: 6039 - RNA, 20 nt, Artificial Sequence
  targeting sequence with GTCN PAM
gagaccacuaagagaaaccc

SEQ ID NO: 6040 - RNA, 20 nt, Artificial Sequence
  targeting sequence with GTCN PAM
cagacuacguuuguggugac

SEQ ID NO: 6041 - RNA, 20 nt, Artificial Sequence
  targeting sequence with GTCN PAM
aaaguacaccacuacaggaa

SEQ ID NO: 6042 - RNA, 20 nt, Artificial Sequence
  targeting sequence with GTCN PAM
ggcuuagagauagcacacaa

SEQ ID NO: 6043 - RNA, 20 nt, Artificial Sequence
  targeting sequence with GTCN PAM
uucccuauuugugugcuauc

SEQ ID NO: 6044 - RNA, 20 nt, Artificial Sequence
  targeting sequence with GTCN PAM
ccucuggcccuguuccuguc

SEQ ID NO: 6045 - RNA, 20 nt, Artificial Sequence
  targeting sequence with GTCN PAM
gaggccacgccgcuggacug

SEQ ID NO: 6046 - RNA, 20 nt, Artificial Sequence
  targeting sequence with GTCN PAM
agcggcguggccucugacuc

SEQ ID NO: 6047 - RNA, 20 nt, Artificial Sequence
  targeting sequence with GTCN PAM
uuguggacuugggagcgccu

SEQ ID NO: 6048 - RNA, 20 nt, Artificial Sequence
  targeting sequence with GTCN PAM
cugaggcaaaauaaguccac

SEQ ID NO: 6049 - RNA, 20 nt, Artificial Sequence
  targeting sequence with GTCN PAM
augaguggaagcaggugagg

SEQ ID NO: 6050 - RNA, 20 nt, Artificial Sequence
  targeting sequence with GTCN PAM
uugccauauuuaccaauccc

SEQ ID NO: 6051 - RNA, 20 nt, Artificial Sequence
  targeting sequence with GTCN PAM
gguauucaucugaagaauac

SEQ ID NO: 6052 - RNA, 20 nt, Artificial Sequence
  targeting sequence with GTCN PAM
gcuucuaaagacacccuccc

SEQ ID NO: 6053 - RNA, 20 nt, Artificial Sequence
  targeting sequence with GTCN PAM
uuagaagcugaccugauaau

SEQ ID NO: 6054 - RNA, 20 nt, Artificial Sequence
  targeting sequence with GTCN PAM
gugggagacugugguuuggg

SEQ ID NO: 6055 - RNA, 20 nt, Artificial Sequence
  targeting sequence with GTCN PAM
cccacugaccuaaacaauaa

SEQ ID NO: 6056 - RNA, 20 nt, Artificial Sequence
  targeting sequence with GTCN PAM
acuuuccccaaaccacaguc

SEQ ID NO: 6057 - RNA, 20 nt, Artificial Sequence
  targeting sequence with GTCN PAM
aguucucagguauuuuccua

SEQ ID NO: 6058 - RNA, 20 nt, Artificial Sequence
  targeting sequence with GTCN PAM
cuacgaucuucgggcaaaaa

SEQ ID NO: 6059 - RNA, 20 nt, Artificial Sequence
  targeting sequence with GTCN PAM
gaacuucuuaaaccucuugg

SEQ ID NO: 6060 - RNA, 20 nt, Artificial Sequence
  targeting sequence with GTCN PAM
gcgguucuugcuaccucagc

SEQ ID NO: 6061 - RNA, 20 nt, Artificial Sequence
  targeting sequence with GTCN PAM
uguaaucauucaguuacuuu

SEQ ID NO: 6062 - RNA, 20 nt, Artificial Sequence
  targeting sequence with GTCN PAM
guuggaugucauccagucuc

SEQ ID NO: 6063 - RNA, 20 nt, Artificial Sequence
  targeting sequence with GTCN PAM
cuacuaagacaaagaugaua

SEQ ID NO: 6064 - RNA, 20 nt, Artificial Sequence
  targeting sequence with GTCN PAM
uaguagagacagugugguag

SEQ ID NO: 6065 - RNA, 20 nt, Artificial Sequence
  targeting sequence with GTCN PAM
gauugagaaauauaguagcg

SEQ ID NO: 6066 - RNA, 20 nt, Artificial Sequence
  targeting sequence with GTCN PAM
ccuuuuaaucucguucaaga

SEQ ID NO: 6067 - RNA, 20 nt, Artificial Sequence
  targeting sequence with GTCN PAM
auuucuuaaaggcuuuacgu

SEQ ID NO: 6068 - RNA, 20 nt, Artificial Sequence
  targeting sequence with GTCN PAM
uggggggcuaagagcuaaac

SEQ ID NO: 6069 - RNA, 20 nt, Artificial Sequence
  targeting sequence with GTCN PAM
augguuuagcuuaaagcaau

SEQ ID NO: 6070 - RNA, 20 nt, Artificial Sequence
  targeting sequence with GTCN PAM
uuaguuagauuaauugggua

SEQ ID NO: 6071 - RNA, 20 nt, Artificial Sequence
  targeting sequence with GTCN PAM
uuaucuguaaaguggagaua

SEQ ID NO: 6072 - RNA, 20 nt, Artificial Sequence
  targeting sequence with GTCN PAM
uuaaaguauuuuuuagacua

SEQ ID NO: 6073 - RNA, 20 nt, Artificial Sequence
  targeting sequence with GTCN PAM
aaaaaauacuuuaaugacca

SEQ ID NO: 6074 - RNA, 20 nt, Artificial Sequence
  targeting sequence with GTCN PAM
uguuuuucacaucaaaaaua

SEQ ID NO: 6075 - RNA, 20 nt, Artificial Sequence
  targeting sequence with GTCN PAM
ggaugguuaccucuauuuua

SEQ ID NO: 6076 - RNA, 20 nt, Artificial Sequence
  targeting sequence with GTCN PAM
aucccaguaucauuuuggga

SEQ ID NO: 6077 - RNA, 20 nt, Artificial Sequence
  targeting sequence with GTCN PAM
aguucucaacaugagaugaa

SEQ ID NO: 6078 - RNA, 20 nt, Artificial Sequence
  targeting sequence with GTCN PAM
cccuuuuaucucuuauucac

SEQ ID NO: 6079 - RNA, 20 nt, Artificial Sequence
  targeting sequence with GTCN PAM
uuauaauaccucagugaaua

SEQ ID NO: 6080 - RNA, 20 nt, Artificial Sequence
  targeting sequence with GTCN PAM
uuuuuaucuucuauuuuaau

SEQ ID NO: 6081 - RNA, 20 nt, Artificial Sequence
  targeting sequence with GTCN PAM
uuccugguuggugagcaguu

SEQ ID NO: 6082 - RNA, 20 nt, Artificial Sequence
  targeting sequence with GTCN PAM
auuucagagccacguuuuaa

SEQ ID NO: 6083 - RNA, 20 nt, Artificial Sequence
  targeting sequence with GTCN PAM
guaugcaaauguucuuuccu

SEQ ID NO: 6084 - RNA, 20 nt, Artificial Sequence
  targeting sequence with GTCN PAM
uuggcugaacaaaauuuguu

SEQ ID NO: 6085 - RNA, 20 nt, Artificial Sequence
  targeting sequence with GTCN PAM
ccuuuccuuugggcuuucua

SEQ ID NO: 6086 - RNA, 20 nt, Artificial Sequence
  targeting sequence with GTCN PAM
ugagguuccaguuugaauug

SEQ ID NO: 6087 - RNA, 20 nt, Artificial Sequence
  targeting sequence with GTCN PAM
gggcugccaugcugcagucu

SEQ ID NO: 6088 - RNA, 20 nt, Artificial Sequence
  targeting sequence with GTCN PAM
agauauaaagacugcagcau

SEQ ID NO: 6089 - RNA, 20 nt, Artificial Sequence
  targeting sequence with GTCN PAM
cuccauuuuugugaagauaa

SEQ ID NO: 6090 - RNA, 20 nt, Artificial Sequence
  targeting sequence with GTCN PAM
uugugggcuagaaaaugaua

SEQ ID NO: 6091 - RNA, 20 nt, Artificial Sequence
  targeting sequence with GTCN PAM
cuucuauuuacuagcaguaa

SEQ ID NO: 6092 - RNA, 20 nt, Artificial Sequence
  targeting sequence with GTCN PAM
aguucuuuuaaaagucccuu

SEQ ID NO: 6093 - RNA, 20 nt, Artificial Sequence
  targeting sequence with GTCN PAM
uuuaaaaaugaaaaagagug

SEQ ID NO: 6094 - RNA, 20 nt, Artificial Sequence
  targeting sequence with GTCN PAM
ucccaaauaaccuuugcuuc

SEQ ID NO: 6095 - RNA, 20 nt, Artificial Sequence
  targeting sequence with GTCN PAM
cauguggaugggaaagaguu

SEQ ID NO: 6096 - RNA, 20 nt, Artificial Sequence
  targeting sequence with GTCN PAM
gucccauguggaugggaaag

SEQ ID NO: 6097 - RNA, 20 nt, Artificial Sequence
  targeting sequence with GTCN PAM
aagugauuaacuuauuuaaa

SEQ ID NO: 6098 - RNA, 20 nt, Artificial Sequence
  targeting sequence with GTCN PAM
guguggaccagucuugugcu

SEQ ID NO: 6099 - RNA, 20 nt, Artificial Sequence
  targeting sequence with GTCN PAM
acacugacuuuaaucucccu

SEQ ID NO: 6100 - RNA, 20 nt, Artificial Sequence
  targeting sequence with GTCN PAM
ugugcuaugggaguauuuuc

SEQ ID NO: 6101 - RNA, 20 nt, Artificial Sequence
  targeting sequence with GTCN PAM
uccaaaagcuucccauaucc

SEQ ID NO: 6102 - RNA, 20 nt, Artificial Sequence
  targeting sequence with GTCN PAM
agcuagaaacuuuucggauu

SEQ ID NO: 6103 - RNA, 20 nt, Artificial Sequence
  targeting sequence with GTCN PAM
ucucugcaaauaaaugaggu

SEQ ID NO: 6104 - RNA, 20 nt, Artificial Sequence
  targeting sequence with GTCN PAM
cucaauuuuaucaauaaauu

SEQ ID NO: 6105 - RNA, 20 nt, Artificial Sequence
  targeting sequence with GTCN PAM
guucugcaaguaauuuaacc

SEQ ID NO: 6106 - RNA, 20 nt, Artificial Sequence
  targeting sequence with GTCN PAM
accaaaucuuggucuaauac

SEQ ID NO: 6107 - RNA, 20 nt, Artificial Sequence
  targeting sequence with GTCN PAM
aauacuucucccccauacug

SEQ ID NO: 6108 - RNA, 20 nt, Artificial Sequence
  targeting sequence with GTCN PAM
caaacucuugggaucaggug

SEQ ID NO: 6109 - RNA, 20 nt, Artificial Sequence
  targeting sequence with GTCN PAM
uugcaaaaaaugaaaaaaaa

SEQ ID NO: 6110 - RNA, 20 nt, Artificial Sequence
  targeting sequence with GTCN PAM
cagcuacuaaggaggccggg

SEQ ID NO: 6111 - RNA, 20 nt, Artificial Sequence
  targeting sequence with GTCN PAM
uccuaccccggccuccuuag

SEQ ID NO: 6112 - RNA, 20 nt, Artificial Sequence
  targeting sequence with GTCN PAM
ggcaggucaaggcuucaggg

SEQ ID NO: 6113 - RNA, 20 nt, Artificial Sequence
  targeting sequence with GTCN PAM
aggcuucagggagcuaugau

SEQ ID NO: 6114 - RNA, 20 nt, Artificial Sequence
  targeting sequence with GTCN PAM
cccaggcuggagugcagugg

SEQ ID NO: 6115 - RNA, 20 nt, Artificial Sequence
  targeting sequence with GTCN PAM
cgcucugucacccaggcugg

SEQ ID NO: 6116 - RNA, 20 nt, Artificial Sequence
  targeting sequence with GTCN PAM
ucuaugaugaaaacauacuu

SEQ ID NO: 6117 - RNA, 20 nt, Artificial Sequence
  targeting sequence with GTCN PAM
agagagaucauuuaacccaa

SEQ ID NO: 6118 - RNA, 20 nt, Artificial Sequence
  targeting sequence with GTCN PAM
cuuaagaguuugugcugauu

SEQ ID NO: 6119 - RNA, 20 nt, Artificial Sequence
  targeting sequence with GTCN PAM
cgguaaaagacucuguaaaa

SEQ ID NO: 6120 - RNA, 20 nt, Artificial Sequence
  targeting sequence with GTCN PAM
uuuaccgagacuuugagaug

SEQ ID NO: 6121 - RNA, 20 nt, Artificial Sequence
  targeting sequence with GTCN PAM
aaugacuuccuaggauccuc

SEQ ID NO: 6122 - RNA, 20 nt, Artificial Sequence
  targeting sequence with GTCN PAM
uuagacuacgugugugauag

SEQ ID NO: 6123 - RNA, 20 nt, Artificial Sequence
  targeting sequence with GTCN PAM
ccuugggguuggaggauccu

SEQ ID NO: 6124 - RNA, 20 nt, Artificial Sequence
  targeting sequence with GTCN PAM
cccuagucaucuuagaugag

SEQ ID NO: 6125 - RNA, 20 nt, Artificial Sequence
  targeting sequence with GTCN PAM
ucuuagaugaggaagucgag

SEQ ID NO: 6126 - RNA, 20 nt, Artificial Sequence
  targeting sequence with GTCN PAM
agcgcaccccagggcugauc

SEQ ID NO: 6127 - RNA, 20 nt, Artificial Sequence
  targeting sequence with GTCN PAM
ggagcccaggugcucuuccu

SEQ ID NO: 6128 - RNA, 20 nt, Artificial Sequence
  targeting sequence with GTCN PAM
gcagaaaccucgaagcccac

SEQ ID NO: 6129 - RNA, 20 nt, Artificial Sequence
  targeting sequence with GTCN PAM
aagguuagaaaggcccacac

SEQ ID NO: 6130 - RNA, 20 nt, Artificial Sequence
  targeting sequence with GTCN PAM
acucucccgauaccauuuua

SEQ ID NO: 6131 - RNA, 20 nt, Artificial Sequence
  targeting sequence with GTCN PAM
ccuuuugggccucaguuuca

SEQ ID NO: 6132 - RNA, 20 nt, Artificial Sequence
  targeting sequence with GTCN PAM
uucggcgggucugggacuag

SEQ ID NO: 6133 - RNA, 20 nt, Artificial Sequence
  targeting sequence with GTCN PAM
gggacuaggcgcucacuaga

SEQ ID NO: 6134 - RNA, 20 nt, Artificial Sequence
  targeting sequence with GTCN PAM
cagacccgccgaaugaccuc

SEQ ID NO: 6135 - RNA, 20 nt, Artificial Sequence
  targeting sequence with GTCN PAM
ccucuagugagcgccuaguc

SEQ ID NO: 6136 - RNA, 20 nt, Artificial Sequence
  targeting sequence with GTCN PAM
cccagacucagacucuccag

SEQ ID NO: 6137 - RNA, 20 nt, Artificial Sequence
  targeting sequence with GTCN PAM
gggggaccgcggagcugccc

SEQ ID NO: 6138 - RNA, 20 nt, Artificial Sequence
  targeting sequence with GTCN PAM
gagucugggggaccgcggag

SEQ ID NO: 6139 - RNA, 20 nt, Artificial Sequence
  targeting sequence with GTCN PAM
ugcccaucgagcaggguccg

SEQ ID NO: 6140 - RNA, 20 nt, Artificial Sequence
  targeting sequence with GTCN PAM
ggcugcagcaacgagcccag

SEQ ID NO: 6141 - RNA, 20 nt, Artificial Sequence
  targeting sequence with GTCN PAM
gaauguugcgaaagcgcccc

SEQ ID NO: 6142 - RNA, 20 nt, Artificial Sequence
  targeting sequence with GTCN PAM
ggggcgcuuucgcaacauuc

SEQ ID NO: 6143 - RNA, 20 nt, Artificial Sequence
  targeting sequence with GTCN PAM
uccucgagaauggauuugau

SEQ ID NO: 6144 - RNA, 20 nt, Artificial Sequence
  targeting sequence with GTCN PAM
gggcgugugggggcggugcg

SEQ ID NO: 6145 - RNA, 20 nt, Artificial Sequence
  targeting sequence with GTCN PAM
gaaagggaaagccagaaaag

SEQ ID NO: 6146 - RNA, 20 nt, Artificial Sequence
  targeting sequence with GTCN PAM
ccacuccacaagccacuuug

SEQ ID NO: 6147 - RNA, 20 nt, Artificial Sequence
  targeting sequence with GTCN PAM
cagcaaccgccucacuaacg

SEQ ID NO: 6148 - RNA, 20 nt, Artificial Sequence
  targeting sequence with GTCN PAM
gucucagcaaccgccucacu

SEQ ID NO: 6149 - RNA, 20 nt, Artificial Sequence
  targeting sequence with GTCN PAM
acacggcccucaucacggcu

SEQ ID NO: 6150 - RNA, 20 nt, Artificial Sequence
  targeting sequence with GTCN PAM
aguccucgcggggagugcgc

SEQ ID NO: 6151 - RNA, 20 nt, Artificial Sequence
  targeting sequence with GTCN PAM
ucgcggggagugcgcgagcc

SEQ ID NO: 6152 - RNA, 20 nt, Artificial Sequence
  targeting sequence with GTCN PAM
cccaggccgggguucagugc

SEQ ID NO: 6153 - RNA, 20 nt, Artificial Sequence
  targeting sequence with GTCN PAM
cccucccgccccuuggcggu

SEQ ID NO: 6154 - RNA, 20 nt, Artificial Sequence
  targeting sequence with GTCN PAM
ggcccugucgcugccuugga

SEQ ID NO: 6155 - RNA, 20 nt, Artificial Sequence
  targeting sequence with GTCN PAM
cugccuuggauucaucucac

SEQ ID NO: 6156 - RNA, 20 nt, Artificial Sequence
  targeting sequence with GTCN PAM
cgugggugugagaugaaucc

SEQ ID NO: 6157 - RNA, 20 nt, Artificial Sequence
  targeting sequence with GTCN PAM
agaaaacaagaguaugggua

SEQ ID NO: 6158 - RNA, 20 nt, Artificial Sequence
  targeting sequence with GTCN PAM
cauuuauuuuaauuaugauu

SEQ ID NO: 6159 - RNA, 20 nt, Artificial Sequence
  targeting sequence with GTCN PAM
cuugcucuaaauguuaagau

SEQ ID NO: 6160 - RNA, 20 nt, Artificial Sequence
  targeting sequence with GTCN PAM
cuugcucuaaguguaaaagu

SEQ ID NO: 6161 - RNA, 20 nt, Artificial Sequence
  targeting sequence with GTCN PAM
gaaaaagaacugaaggggaa

SEQ ID NO: 6162 - RNA, 20 nt, Artificial Sequence
  targeting sequence with GTCN PAM
uuccccuucaguucuuuuuc

SEQ ID NO: 6163 - RNA, 20 nt, Artificial Sequence
  targeting sequence with GTCN PAM
ccuuuugauucaguuauuua

SEQ ID NO: 6164 - RNA, 20 nt, Artificial Sequence
  targeting sequence with GTCN PAM
uauuccauuguuaucgccua

SEQ ID NO: 6165 - RNA, 20 nt, Artificial Sequence
  targeting sequence with GTCN PAM
guuuugucauauucuuacuu

SEQ ID NO: 6166 - RNA, 20 nt, Artificial Sequence
  targeting sequence with GTCN PAM
uauucuuacuuaugggauag

SEQ ID NO: 6167 - RNA, 20 nt, Artificial Sequence
  targeting sequence with GTCN PAM
uggccugacuuugaaaauca

SEQ ID NO: 6168 - RNA, 20 nt, Artificial Sequence
  targeting sequence with GTCN PAM
ggccaagaccuaucccauaa

SEQ ID NO: 6169 - RNA, 20 nt, Artificial Sequence
  targeting sequence with GTCN PAM
uugguucugucccuucugag

SEQ ID NO: 6170 - RNA, 20 nt, Artificial Sequence
  targeting sequence with GTCN PAM
cuucugagaucuuucucugu

SEQ ID NO: 6171 - RNA, 20 nt, Artificial Sequence
  targeting sequence with GTCN PAM
cuccucaucucacacggaaa

SEQ ID NO: 6172 - RNA, 20 nt, Artificial Sequence
  targeting sequence with GTCN PAM
ccaacgugagccuugaagga

SEQ ID NO: 6173 - RNA, 20 nt, Artificial Sequence
  targeting sequence with GTCN PAM
ucucuuuuguguucggcacu

SEQ ID NO: 6174 - RNA, 20 nt, Artificial Sequence
  targeting sequence with GTCN PAM
gcuaccacuagugccgaaca

SEQ ID NO: 6175 - RNA, 20 nt, Artificial Sequence
  targeting sequence with GTCN PAM
ucaccacucucuaagguagg

SEQ ID NO: 6176 - RNA, 20 nt, Artificial Sequence
  targeting sequence with GTCN PAM
cacagugagggguggaacca

SEQ ID NO: 6177 - RNA, 20 nt, Artificial Sequence
  targeting sequence with GTCN PAM
uccucacuccaacgucaacg

SEQ ID NO: 6178 - RNA, 20 nt, Artificial Sequence
  targeting sequence with GTCN PAM
acgcucucagccacuacauu

SEQ ID NO: 6179 - RNA, 20 nt, Artificial Sequence
  targeting sequence with GTCN PAM
guaacauaaggaaaaauuaa

SEQ ID NO: 6180 - RNA, 20 nt, Artificial Sequence
  targeting sequence with GTCN PAM
gcaggagacaggcagguaac

SEQ ID NO: 6181 - RNA, 20 nt, Artificial Sequence
  targeting sequence with GTCN PAM
ccugcagacauuugaguuug

SEQ ID NO: 6182 - RNA, 20 nt, Artificial Sequence
  targeting sequence with GTCN PAM
uguauucuguaccccauuuu

SEQ ID NO: 6183 - RNA, 20 nt, Artificial Sequence
  targeting sequence with GTCN PAM
gaguaauagaguguggcaaa

SEQ ID NO: 6184 - RNA, 20 nt, Artificial Sequence
  targeting sequence with GTCN PAM
guugagcauaagaguuaauu

SEQ ID NO: 6185 - RNA, 20 nt, Artificial Sequence
  targeting sequence with GTCN PAM
aauaaacccguuaaaggcaa

SEQ ID NO: 6186 - RNA, 20 nt, Artificial Sequence
  targeting sequence with GTCN PAM
uacucguuuccaaauuauuc

SEQ ID NO: 6187 - RNA, 20 nt, Artificial Sequence
  targeting sequence with GTCN PAM
cuagaauaauuuggaaacga

SEQ ID NO: 6188 - RNA, 20 nt, Artificial Sequence
  targeting sequence with GTCN PAM
gugguuguuguuacuaugga

SEQ ID NO: 6189 - RNA, 20 nt, Artificial Sequence
  targeting sequence with GTCN PAM
caaaucuguaaugggccaaa

SEQ ID NO: 6190 - RNA, 20 nt, Artificial Sequence
  targeting sequence with GTCN PAM
auagaaccccuacaucccuu

SEQ ID NO: 6191 - RNA, 20 nt, Artificial Sequence
  targeting sequence with GTCN PAM
uuuuuuuuuuuguuuaguuu

SEQ ID NO: 6192 - RNA, 20 nt, Artificial Sequence
  targeting sequence with GTCN PAM
aagauuaguccuccacaucc

SEQ ID NO: 6193 - RNA, 20 nt, Artificial Sequence
  targeting sequence with GTCN PAM
uccacauccaaaucagccau

SEQ ID NO: 6194 - RNA, 20 nt, Artificial Sequence
  targeting sequence with GTCN PAM
cccggucugcuccuuugcuu

SEQ ID NO: 6195 - RNA, 20 nt, Artificial Sequence
  targeting sequence with GTCN PAM
gcuccuuugcuucuauuuua

SEQ ID NO: 6196 - RNA, 20 nt, Artificial Sequence
  targeting sequence with GTCN PAM
uaaaaaaacagaguuccugc

SEQ ID NO: 6197 - RNA, 20 nt, Artificial Sequence
  targeting sequence with GTCN PAM
agucgugcauuuugcuagag

SEQ ID NO: 6198 - RNA, 20 nt, Artificial Sequence
  targeting sequence with GTCN PAM
ugcauuuugcuagagggucc

SEQ ID NO: 6199 - RNA, 20 nt, Artificial Sequence
  targeting sequence with GTCN PAM
uccugacccuccuccccauc

SEQ ID NO: 6200 - RNA, 20 nt, Artificial Sequence
  targeting sequence with GTCN PAM
ggaggacccucuagcaaaau

SEQ ID NO: 6201 - RNA, 20 nt, Artificial Sequence
  targeting sequence with GTCN PAM
uauuaggcuagcccacugua

SEQ ID NO: 6202 - RNA, 20 nt, Artificial Sequence
  targeting sequence with GTCN PAM
ccucauuaaaucucaauuuc

SEQ ID NO: 6203 - RNA, 20 nt, Artificial Sequence
  targeting sequence with GTCN PAM
cacagugccucuccaauucc

SEQ ID NO: 6204 - RNA, 20 nt, Artificial Sequence
  targeting sequence with GTCN PAM
gaggacaauuugcaggauuc

SEQ ID NO: 6205 - RNA, 20 nt, Artificial Sequence
  targeting sequence with GTCN PAM
ucugacaacccugcacccac

SEQ ID NO: 6206 - RNA, 20 nt, Artificial Sequence
  targeting sequence with GTCN PAM
agaguccuuuccaauucuga

SEQ ID NO: 6207 - RNA, 20 nt, Artificial Sequence
  targeting sequence with GTCN PAM
uuuccaauucugaguuucug

SEQ ID NO: 6208 - RNA, 20 nt, Artificial Sequence
  targeting sequence with GTCN PAM
aggacagugccaugcacugu

SEQ ID NO: 6209 - RNA, 20 nt, Artificial Sequence
  targeting sequence with GTCN PAM
uagacauguaauaaauauaa

SEQ ID NO: 6210 - RNA, 20 nt, Artificial Sequence
  targeting sequence with GTCN PAM
gauuugccccaaucuaaacu

SEQ ID NO: 6211 - RNA, 20 nt, Artificial Sequence
  targeting sequence with GTCN PAM
cauuugagccaagccugaac

SEQ ID NO: 6212 - RNA, 20 nt, Artificial Sequence
  targeting sequence with GTCN PAM
uuuuggguugaauuaucaca

SEQ ID NO: 6213 - RNA, 20 nt, Artificial Sequence
  targeting sequence with GTCN PAM
cacaggaaucacuuugauga

SEQ ID NO: 6214 - RNA, 20 nt, Artificial Sequence
  targeting sequence with GTCN PAM
uccuugguauguggcuuccu

SEQ ID NO: 6215 - RNA, 20 nt, Artificial Sequence
  targeting sequence with GTCN PAM
gcaccucucaucuaaaguca

SEQ ID NO: 6216 - RNA, 20 nt, Artificial Sequence
  targeting sequence with GTCN PAM
ggcgcuuuggauagacuggc

SEQ ID NO: 6217 - RNA, 20 nt, Artificial Sequence
  targeting sequence with GTCN PAM
auccaaagcgccugacacuu

SEQ ID NO: 6218 - RNA, 20 nt, Artificial Sequence
  targeting sequence with GTCN PAM
ccccuacuuuuuauuccgcc

SEQ ID NO: 6219 - RNA, 20 nt, Artificial Sequence
  targeting sequence with GTCN PAM
guuaccacauaauggugagg

SEQ ID NO: 6220 - RNA, 20 nt, Artificial Sequence
  targeting sequence with GTCN PAM
cagagcuggcugauaaagaa

SEQ ID NO: 6221 - RNA, 20 nt, Artificial Sequence
  targeting sequence with GTCN PAM
ugucuacuacauuauguuuu

SEQ ID NO: 6222 - RNA, 20 nt, Artificial Sequence
  targeting sequence with GTCN PAM
acuacauuauguuuucguaa

SEQ ID NO: 6223 - RNA, 20 nt, Artificial Sequence
  targeting sequence with GTCN PAM
caaaaaaaaaaaagagugua

SEQ ID NO: 6224 - RNA, 20 nt, Artificial Sequence
  targeting sequence with GTCN PAM
cgcucuguugccaggcugga

SEQ ID NO: 6225 - RNA, 20 nt, Artificial Sequence
  targeting sequence with GTCN PAM
caccuacucgggaggcugag

SEQ ID NO: 6226 - RNA, 20 nt, Artificial Sequence
  targeting sequence with GTCN PAM
ggucaacagagccauauuaa

SEQ ID NO: 6227 - RNA, 20 nt, Artificial Sequence
  targeting sequence with GTCN PAM
acagagccauauuaaaagcu

SEQ ID NO: 6228 - RNA, 20 nt, Artificial Sequence
  targeting sequence with GTCN PAM
aaucuguuauccuucauacu

SEQ ID NO: 6229 - RNA, 20 nt, Artificial Sequence
  targeting sequence with GTCN PAM
gugcuuguaauuaacgcgcu

SEQ ID NO: 6230 - RNA, 20 nt, Artificial Sequence
  targeting sequence with GTCN PAM
ggaauaagaguucgaaguac

SEQ ID NO: 6231 - RNA, 20 nt, Artificial Sequence
  targeting sequence with GTCN PAM
uugagaguguacuuccaagu

SEQ ID NO: 6232 - RNA, 20 nt, Artificial Sequence
  targeting sequence with GTCN PAM
guaacuuggaaguacacucu

SEQ ID NO: 6233 - RNA, 20 nt, Artificial Sequence
  targeting sequence with GTCN PAM
cucagguuaaauuuuaaaag

SEQ ID NO: 6234 - RNA, 20 nt, Artificial Sequence
  targeting sequence with GTCN PAM
aacaugccucaguauaccuc

SEQ ID NO: 6235 - RNA, 20 nt, Artificial Sequence
  targeting sequence with GTCN PAM
guguugauguuaaugccaga

SEQ ID NO: 6236 - RNA, 20 nt, Artificial Sequence
  targeting sequence with GTCN PAM
cagaaaaaaaaaaaacaaaa

SEQ ID NO: 6237 - RNA, 20 nt, Artificial Sequence
  targeting sequence with GTCN PAM
cacucugucgcccaggcugg

SEQ ID NO: 6238 - RNA, 20 nt, Artificial Sequence
  targeting sequence with GTCN PAM
cccaggcuggaguguagugg

SEQ ID NO: 6239 - RNA, 20 nt, Artificial Sequence
  targeting sequence with GTCN PAM
cagcuacacgggaggaugag

SEQ ID NO: 6240 - RNA, 20 nt, Artificial Sequence
  targeting sequence with GTCN PAM
cuacaaaaaauuagccaagc

SEQ ID NO: 6241 - RNA, 20 nt, Artificial Sequence
  targeting sequence with GTCN PAM
cagucuccugaccucaugau

SEQ ID NO: 6242 - RNA, 20 nt, Artificial Sequence
  targeting sequence with GTCN PAM
ccugaccucaugauccaccc

SEQ ID NO: 6243 - RNA, 20 nt, Artificial Sequence
  targeting sequence with GTCN PAM
ggagacugagaccauccugg

SEQ ID NO: 6244 - RNA, 20 nt, Artificial Sequence
  targeting sequence with GTCN PAM
gccgggcgcgguggcucaug

SEQ ID NO: 6245 - RNA, 20 nt, Artificial Sequence
  targeting sequence with GTCN PAM
uuagauaagcucaaccaauu

SEQ ID NO: 6246 - RNA, 20 nt, Artificial Sequence
  targeting sequence with GTCN PAM
gaaaaauuuuaaaucaaccu

SEQ ID NO: 6247 - RNA, 20 nt, Artificial Sequence
  targeting sequence with GTCN PAM
agaaagauggaacaacuuga

SEQ ID NO: 6248 - RNA, 20 nt, Artificial Sequence
  targeting sequence with GTCN PAM
cauguuucacuaaaaugugu

SEQ ID NO: 6249 - RNA, 20 nt, Artificial Sequence
  targeting sequence with GTCN PAM
aaccgagcugcacccugacc

SEQ ID NO: 6250 - RNA, 20 nt, Artificial Sequence
  targeting sequence with GTCN PAM
gggugcagcucgguuugaca

SEQ ID NO: 6251 - RNA, 20 nt, Artificial Sequence
  targeting sequence with GTCN PAM
ugagaacaugugcccaaggu

SEQ ID NO: 6252 - RNA, 20 nt, Artificial Sequence
  targeting sequence with GTCN PAM
ugggcuguggucacucauau

SEQ ID NO: 6253 - RNA, 20 nt, Artificial Sequence
  targeting sequence with GTCN PAM
cucauauuuggcucagaaua

SEQ ID NO: 6254 - RNA, 20 nt, Artificial Sequence
  targeting sequence with GTCN PAM
aauuaaauuauuuugauuac

SEQ ID NO: 6255 - RNA, 20 nt, Artificial Sequence
  targeting sequence with GTCN PAM
aacugcaaaauauuuuaaga

SEQ ID NO: 6256 - RNA, 20 nt, Artificial Sequence
  targeting sequence with GTCN PAM
cucauauuaggcucagaaua

SEQ ID NO: 6257 - RNA, 20 nt, Artificial Sequence
  targeting sequence with GTCN PAM
cuggcuguggucacucauau

SEQ ID NO: 6258 - RNA, 20 nt, Artificial Sequence
  targeting sequence with GTCN PAM
acagaacaugugcccacggu

SEQ ID NO: 6259 - RNA, 20 nt, Artificial Sequence
  targeting sequence with GTCN PAM
caugccuccccaaacugcac

SEQ ID NO: 6260 - RNA, 20 nt, Artificial Sequence
  targeting sequence with GTCN PAM
ugccuuucuggaucaaacca

SEQ ID NO: 6261 - RNA, 20 nt, Artificial Sequence
  targeting sequence with GTCN PAM
gccagaaaauguuuaaauuu

SEQ ID NO: 6262 - RNA, 20 nt, Artificial Sequence
  targeting sequence with GTCN PAM
uuaaacaaacucagccaauu

SEQ ID NO: 6263 - RNA, 20 nt, Artificial Sequence
  targeting sequence with GTCN PAM
ggguuaagauaaaggauugu

SEQ ID NO: 6264 - RNA, 20 nt, Artificial Sequence
  targeting sequence with GTCN PAM
ccacaauccuuuaucuuaac

SEQ ID NO: 6265 - RNA, 20 nt, Artificial Sequence
  targeting sequence with GTCN PAM
ugcugucacccaggcuggag

SEQ ID NO: 6266 - RNA, 20 nt, Artificial Sequence
  targeting sequence with GTCN PAM
cccaggcuggagugcagugg

SEQ ID NO: 6267 - RNA, 20 nt, Artificial Sequence
  targeting sequence with GTCN PAM
cccggguucaagcaauucuc

SEQ ID NO: 6268 - RNA, 20 nt, Artificial Sequence
  targeting sequence with GTCN PAM
caacuaaaaauacaaaaauu

SEQ ID NO: 6269 - RNA, 20 nt, Artificial Sequence
  targeting sequence with GTCN PAM
ggcuggccucaaacuccuga

SEQ ID NO: 6270 - RNA, 20 nt, Artificial Sequence
  targeting sequence with GTCN PAM
ggaguuugaggccagccuga

SEQ ID NO: 6271 - RNA, 20 nt, Artificial Sequence
  targeting sequence with GTCN PAM
guguugauauuaaugccgga

SEQ ID NO: 6272 - RNA, 20 nt, Artificial Sequence
  targeting sequence with GTCN PAM
gaggcccacuucccgucaug

SEQ ID NO: 6273 - RNA, 20 nt, Artificial Sequence
  targeting sequence with GTCN PAM
uggccugaaacagucucuca

SEQ ID NO: 6274 - RNA, 20 nt, Artificial Sequence
  targeting sequence with GTCN PAM
cucagguuaaauuuuaaaag

SEQ ID NO: 6275 - RNA, 20 nt, Artificial Sequence
  targeting sequence with GTCN PAM
auucagacgguugggggggc

SEQ ID NO: 6276 - RNA, 20 nt, Artificial Sequence
  targeting sequence with GTCN PAM
gaauggacuuccuccucaac

SEQ ID NO: 6277 - RNA, 20 nt, Artificial Sequence
  targeting sequence with GTCN PAM
uugcuuguuuuauuuucuuu

SEQ ID NO: 6278 - RNA, 20 nt, Artificial Sequence
  targeting sequence with GTCN PAM
uuuacccaguguccuccucc

SEQ ID NO: 6279 - RNA, 20 nt, Artificial Sequence
  targeting sequence with GTCN PAM
uccuccauguuucaaaagcc

SEQ ID NO: 6280 - RNA, 20 nt, Artificial Sequence
  targeting sequence with GTCN PAM
uugucugggguaaauauccg

SEQ ID NO: 6281 - RNA, 20 nt, Artificial Sequence
  targeting sequence with GTCN PAM
gggguaaauauccgagauuu

SEQ ID NO: 6282 - RNA, 20 nt, Artificial Sequence
  targeting sequence with GTCN PAM
caacagcaauggaaaacuag

SEQ ID NO: 6283 - RNA, 20 nt, Artificial Sequence
  targeting sequence with GTCN PAM
guauccuaguuuuccauugc

SEQ ID NO: 6284 - RNA, 20 nt, Artificial Sequence
  targeting sequence with GTCN PAM
gcugcagugagcucuucucu

SEQ ID NO: 6285 - RNA, 20 nt, Artificial Sequence
  targeting sequence with GTCN PAM
gauuuacauagggcacaaaa

SEQ ID NO: 6286 - RNA, 20 nt, Artificial Sequence
  targeting sequence with GTCN PAM
uuugcauugggugcgaaaag

SEQ ID NO: 6287 - RNA, 20 nt, Artificial Sequence
  targeting sequence with GTCN PAM
ccacguguacaguaaagaaa

SEQ ID NO: 6288 - RNA, 20 nt, Artificial Sequence
  targeting sequence with GTCN PAM
ucccuuuaauuugucaccac

SEQ ID NO: 6289 - RNA, 20 nt, Artificial Sequence
  targeting sequence with GTCN PAM
caaaaaaaaaaaauaaauaa

SEQ ID NO: 6290 - RNA, 20 nt, Artificial Sequence
  targeting sequence with GTCN PAM
uccuccgucgcccagacugg

SEQ ID NO: 6291 - RNA, 20 nt, Artificial Sequence
  targeting sequence with GTCN PAM
cccagacuggagugcagugg

SEQ ID NO: 6292 - RNA, 20 nt, Artificial Sequence
  targeting sequence with GTCN PAM
gggcgacggaggaagacucc

SEQ ID NO: 6293 - RNA, 20 nt, Artificial Sequence
  targeting sequence with GTCN PAM
cuaccaaaaauacaaaaauu

SEQ ID NO: 6294 - RNA, 20 nt, Artificial Sequence
  targeting sequence with GTCN PAM
cgaacuccugaccucaaguc

SEQ ID NO: 6295 - RNA, 20 nt, Artificial Sequence
  targeting sequence with GTCN PAM
ggaguucgagaccagccugg

SEQ ID NO: 6296 - RNA, 20 nt, Artificial Sequence
  targeting sequence with GTCN PAM
uccuccugccuuggccuccc

SEQ ID NO: 6297 - RNA, 20 nt, Artificial Sequence
  targeting sequence with GTCN PAM
ucggcagaacuucccuuuua

SEQ ID NO: 6298 - RNA, 20 nt, Artificial Sequence
  targeting sequence with GTCN PAM
uccuccuucgaauccuguuu

SEQ ID NO: 6299 - RNA, 20 nt, Artificial Sequence
  targeting sequence with GTCN PAM
cuuaaagccuuuaucagagu

SEQ ID NO: 6300 - RNA, 20 nt, Artificial Sequence
  targeting sequence with GTCN PAM
uugauuauaaaauaccauug

SEQ ID NO: 6301 - RNA, 20 nt, Artificial Sequence
  targeting sequence with GTCN PAM
uauaauugaugauguuucag

SEQ ID NO: 6302 - RNA, 20 nt, Artificial Sequence
  targeting sequence with GTCN PAM
ucaauucuaaagcuuacauu

SEQ ID NO: 6303 - RNA, 20 nt, Artificial Sequence
  targeting sequence with GTCN PAM
guuucacaccuucucacugg

SEQ ID NO: 6304 - RNA, 20 nt, Artificial Sequence
  targeting sequence with GTCN PAM
cucuuaggugccaggcacca

SEQ ID NO: 6305 - RNA, 20 nt, Artificial Sequence
  targeting sequence with GTCN PAM
agccuuuaugauauuauuag

SEQ ID NO: 6306 - RNA, 20 nt, Artificial Sequence
  targeting sequence with GTCN PAM
acuguugaggguauuaacuc

SEQ ID NO: 6307 - RNA, 20 nt, Artificial Sequence
  targeting sequence with GTCN PAM
ggcuucuggacaagaggaaa

SEQ ID NO: 6308 - RNA, 20 nt, Artificial Sequence
  targeting sequence with GTCN PAM
agaagccagacacaagaaau

SEQ ID NO: 6309 - RNA, 20 nt, Artificial Sequence
  targeting sequence with GTCN PAM
ugauuuccucuuguccagaa

SEQ ID NO: 6310 - RNA, 20 nt, Artificial Sequence
  targeting sequence with GTCN PAM
gcuaauggccaggaaaguaa

SEQ ID NO: 6311 - RNA, 20 nt, Artificial Sequence
  targeting sequence with GTCN PAM
uuuucccuugucuucuguuc

SEQ ID NO: 6312 - RNA, 20 nt, Artificial Sequence
  targeting sequence with GTCN PAM
ucuguucaguauaaaugaca

SEQ ID NO: 6313 - RNA, 20 nt, Artificial Sequence
  targeting sequence with GTCN PAM
uuuauacugaacagaagaca

SEQ ID NO: 6314 - RNA, 20 nt, Artificial Sequence
  targeting sequence with GTCN PAM
uaguuuccucuuaaagugcu

SEQ ID NO: 6315 - RNA, 20 nt, Artificial Sequence
  targeting sequence with GTCN PAM
aauuucagaguacucacaag

SEQ ID NO: 6316 - RNA, 20 nt, Artificial Sequence
  targeting sequence with GTCN PAM
uucaucuuucccuuuuuacu

SEQ ID NO: 6317 - RNA, 20 nt, Artificial Sequence
  targeting sequence with GTCN PAM
caaaguaaaaagggaaagau

SEQ ID NO: 6318 - RNA, 20 nt, Artificial Sequence
  targeting sequence with GTCN PAM
aguuucaaaggcauugugau

SEQ ID NO: 6319 - RNA, 20 nt, Artificial Sequence
  targeting sequence with GTCN PAM
guuuacauuuugucccccag

SEQ ID NO: 6320 - RNA, 20 nt, Artificial Sequence
  targeting sequence with GTCN PAM
cccagaaaaauucaagcaac

SEQ ID NO: 6321 - RNA, 20 nt, Artificial Sequence
  targeting sequence with GTCN PAM
uguugcuugaauuuuucugg

SEQ ID NO: 6322 - RNA, 20 nt, Artificial Sequence
  targeting sequence with GTCN PAM
guccuguugcuugaauuuuu

SEQ ID NO: 6323 - RNA, 20 nt, Artificial Sequence
  targeting sequence with GTCN PAM
augaaaagucagauagccug

SEQ ID NO: 6324 - RNA, 20 nt, Artificial Sequence
  targeting sequence with GTCN PAM
gauagccugaccccaacuuu

SEQ ID NO: 6325 - RNA, 20 nt, Artificial Sequence
  targeting sequence with GTCN PAM
ggcuaucugacuuuucaugg

SEQ ID NO: 6326 - RNA, 20 nt, Artificial Sequence
  targeting sequence with GTCN PAM
uauuuuucauauuuucaaau

SEQ ID NO: 6327 - RNA, 20 nt, Artificial Sequence
  targeting sequence with GTCN PAM
aacauaagggguucucugaa

SEQ ID NO: 6328 - RNA, 20 nt, Artificial Sequence
  targeting sequence with GTCN PAM
aagucuacuuccucuucucu

SEQ ID NO: 6329 - RNA, 20 nt, Artificial Sequence
  targeting sequence with GTCN PAM
acuuccucuucucuguuguc

SEQ ID NO: 6330 - RNA, 20 nt, Artificial Sequence
  targeting sequence with GTCN PAM
cuagauacgcagacugauua

SEQ ID NO: 6331 - RNA, 20 nt, Artificial Sequence
  targeting sequence with GTCN PAM
gcguaucuagagacaacaga

SEQ ID NO: 6332 - RNA, 20 nt, Artificial Sequence
  targeting sequence with GTCN PAM
gcagaacaauuuaaccaugu

SEQ ID NO: 6333 - RNA, 20 nt, Artificial Sequence
  targeting sequence with GTCN PAM
ccaaaaaaaaaaaaaaaaaa

SEQ ID NO: 6334 - RNA, 20 nt, Artificial Sequence
  targeting sequence with GTCN PAM
ggcucugucgcccaggcugg

SEQ ID NO: 6335 - RNA, 20 nt, Artificial Sequence
  targeting sequence with GTCN PAM
cccaggcuggagugcaguga

SEQ ID NO: 6336 - RNA, 20 nt, Artificial Sequence
  targeting sequence with GTCN PAM
cugcacuccagccugggcga

SEQ ID NO: 6337 - RNA, 20 nt, Artificial Sequence
  targeting sequence with GTCN PAM
cagcuacucaggaggcugag

SEQ ID NO: 6338 - RNA, 20 nt, Artificial Sequence
  targeting sequence with GTCN PAM
cuacuaaaaauacaaaaaau

SEQ ID NO: 6339 - RNA, 20 nt, Artificial Sequence
  targeting sequence with GTCN PAM
cgaucuccugaccucguaau

SEQ ID NO: 6340 - RNA, 20 nt, Artificial Sequence
  targeting sequence with GTCN PAM
ggagaucgagaccauccugg

SEQ ID NO: 6341 - RNA, 20 nt, Artificial Sequence
  targeting sequence with GTCN PAM
cauggcuaucaaauaccuaa

SEQ ID NO: 6342 - RNA, 20 nt, Artificial Sequence
  targeting sequence with GTCN PAM
cuaagaaauaaaauaaaacc

SEQ ID NO: 6343 - RNA, 20 nt, Artificial Sequence
  targeting sequence with GTCN PAM
uagaucacugcagccucaaa

SEQ ID NO: 6344 - RNA, 20 nt, Artificial Sequence
  targeting sequence with GTCN PAM
uagcuacucgggaggcugag

SEQ ID NO: 6345 - RNA, 20 nt, Artificial Sequence
  targeting sequence with GTCN PAM
acaguccuagcuacucggga

SEQ ID NO: 6346 - RNA, 20 nt, Artificial Sequence
  targeting sequence with GTCN PAM
accuaauuuuuauuuuuuuu

SEQ ID NO: 6347 - RNA, 20 nt, Artificial Sequence
  targeting sequence with GTCN PAM
cauaguacauagaccugggu

SEQ ID NO: 6348 - RNA, 20 nt, Artificial Sequence
  targeting sequence with GTCN PAM
auguacuaugugaccaggaa

SEQ ID NO: 6349 - RNA, 20 nt, Artificial Sequence
  targeting sequence with GTCN PAM
ucuacuucuugguuacccaa

SEQ ID NO: 6350 - RNA, 20 nt, Artificial Sequence
  targeting sequence with GTCN PAM
cguuguuuuugguuuugcag

SEQ ID NO: 6351 - RNA, 20 nt, Artificial Sequence
  targeting sequence with GTCN PAM
auauucuaaaucuguagcca

SEQ ID NO: 6352 - RNA, 20 nt, Artificial Sequence
  targeting sequence with GTCN PAM
gaauuccugcaggguugcua

SEQ ID NO: 6353 - RNA, 20 nt, Artificial Sequence
  targeting sequence with GTCN PAM
cuuuugccagguuuaugaca

SEQ ID NO: 6354 - RNA, 20 nt, Artificial Sequence
  targeting sequence with GTCN PAM
uaaaccuggcaaaagagaca

SEQ ID NO: 6355 - RNA, 20 nt, Artificial Sequence
  targeting sequence with GTCN PAM
cuugaggggcugaaguaagg

SEQ ID NO: 6356 - RNA, 20 nt, Artificial Sequence
  targeting sequence with GTCN PAM
uugugucccuugaggggcug

SEQ ID NO: 6357 - RNA, 20 nt, Artificial Sequence
  targeting sequence with GTCN PAM
ucaucucaaugagcccaccc

SEQ ID NO: 6358 - RNA, 20 nt, Artificial Sequence
  targeting sequence with GTCN PAM
uuuuccucaccuguccucau

SEQ ID NO: 6359 - RNA, 20 nt, Artificial Sequence
  targeting sequence with GTCN PAM
ggaggcaaugagauugugcc

SEQ ID NO: 6360 - RNA, 20 nt, Artificial Sequence
  targeting sequence with GTCN PAM
aaauggaacuacugaaaggu

SEQ ID NO: 6361 - RNA, 20 nt, Artificial Sequence
  targeting sequence with GTCN PAM
ucagcagaggagggaucuga

SEQ ID NO: 6362 - RNA, 20 nt, Artificial Sequence
  targeting sequence with GTCN PAM
cugccucagagaaugggaca

SEQ ID NO: 6363 - RNA, 20 nt, Artificial Sequence
  targeting sequence with GTCN PAM
cauucucugaggcagugacu

SEQ ID NO: 6364 - RNA, 20 nt, Artificial Sequence
  targeting sequence with GTCN PAM
cacagcauaggauuaguggg

SEQ ID NO: 6365 - RNA, 20 nt, Artificial Sequence
  targeting sequence with GTCN PAM
gagcugguuauugagucuga

SEQ ID NO: 6366 - RNA, 20 nt, Artificial Sequence
  targeting sequence with GTCN PAM
gagucacgauuucuucaugu

SEQ ID NO: 6367 - RNA, 20 nt, Artificial Sequence
  targeting sequence with GTCN PAM
cgauuucuucauguaucaaa

SEQ ID NO: 6368 - RNA, 20 nt, Artificial Sequence
  targeting sequence with GTCN PAM
aaagcuuccaucugauuauc

SEQ ID NO: 6369 - RNA, 20 nt, Artificial Sequence
  targeting sequence with GTCN PAM
gauuaguccagucucuucac

SEQ ID NO: 6370 - RNA, 20 nt, Artificial Sequence
  targeting sequence with GTCN PAM
agucucuucacuuuaguccu

SEQ ID NO: 6371 - RNA, 20 nt, Artificial Sequence
  targeting sequence with GTCN PAM
cuucacuuuaguccugcaua

SEQ ID NO: 6372 - RNA, 20 nt, Artificial Sequence
  targeting sequence with GTCN PAM
ugcauaaagacauaaacaau

SEQ ID NO: 6373 - RNA, 20 nt, Artificial Sequence
  targeting sequence with GTCN PAM
uuaugcaggacuaaagugaa

SEQ ID NO: 6374 - RNA, 20 nt, Artificial Sequence
  targeting sequence with GTCN PAM
caaacuccugccuuaagcaa

SEQ ID NO: 6375 - RNA, 20 nt, Artificial Sequence
  targeting sequence with GTCN PAM
cacuauguugcccaggcugg

SEQ ID NO: 6376 - RNA, 20 nt, Artificial Sequence
  targeting sequence with GTCN PAM
cccaggccagauuuuaggga

SEQ ID NO: 6377 - RNA, 20 nt, Artificial Sequence
  targeting sequence with GTCN PAM
agcucugucacccaggccag

SEQ ID NO: 6378 - RNA, 20 nt, Artificial Sequence
  targeting sequence with GTCN PAM
cuuaaaaaaaaaaaaaaaag

SEQ ID NO: 6379 - RNA, 20 nt, Artificial Sequence
  targeting sequence with GTCN PAM
uuuuuuuuuuuuuuuaagag

SEQ ID NO: 6380 - RNA, 20 nt, Artificial Sequence
  targeting sequence with GTCN PAM
ugugacuugccaaggccaug

SEQ ID NO: 6381 - RNA, 20 nt, Artificial Sequence
  targeting sequence with GTCN PAM
caugacuugucuuuuuuuuu

SEQ ID NO: 6382 - RNA, 20 nt, Artificial Sequence
  targeting sequence with GTCN PAM
uugggccaaucugcugcaug

SEQ ID NO: 6383 - RNA, 20 nt, Artificial Sequence
  targeting sequence with GTCN PAM
ggugugcuguaccaugguag

SEQ ID NO: 6384 - RNA, 20 nt, Artificial Sequence
  targeting sequence with GTCN PAM
uauuugugugugugugugug

SEQ ID NO: 6385 - RNA, 20 nt, Artificial Sequence
  targeting sequence with GTCN PAM
cccuaaaacauuauucugaa

SEQ ID NO: 6386 - RNA, 20 nt, Artificial Sequence
  targeting sequence with GTCN PAM
cauccuaguggcuguugagg

SEQ ID NO: 6387 - RNA, 20 nt, Artificial Sequence
  targeting sequence with GTCN PAM
guccagggcccaguauaagg

SEQ ID NO: 6388 - RNA, 20 nt, Artificial Sequence
  targeting sequence with GTCN PAM
agggcccaguauaaggccca

SEQ ID NO: 6389 - RNA, 20 nt, Artificial Sequence
  targeting sequence with GTCN PAM
aagagcccugcuaugcuuau

SEQ ID NO: 6390 - RNA, 20 nt, Artificial Sequence
  targeting sequence with GTCN PAM
gagugugacccaucaguagu

SEQ ID NO: 6391 - RNA, 20 nt, Artificial Sequence
  targeting sequence with GTCN PAM
cacucugacauccucaagug

SEQ ID NO: 6392 - RNA, 20 nt, Artificial Sequence
  targeting sequence with GTCN PAM
ugucacacacaucucacuug

SEQ ID NO: 6393 - RNA, 20 nt, Artificial Sequence
  targeting sequence with GTCN PAM
cacacaucucacuugaugcu

SEQ ID NO: 6394 - RNA, 20 nt, Artificial Sequence
  targeting sequence with GTCN PAM
ccuugcugccugcuucagag

SEQ ID NO: 6395 - RNA, 20 nt, Artificial Sequence
  targeting sequence with GTCN PAM
guuuucucaucuuugagcgg

SEQ ID NO: 6396 - RNA, 20 nt, Artificial Sequence
  targeting sequence with GTCN PAM
gagaaccuggguuaggccug

SEQ ID NO: 6397 - RNA, 20 nt, Artificial Sequence
  targeting sequence with GTCN PAM
uuguucuuucuaguguauca

SEQ ID NO: 6398 - RNA, 20 nt, Artificial Sequence
  targeting sequence with GTCN PAM
acaguaggcuauuaauagua

SEQ ID NO: 6399 - RNA, 20 nt, Artificial Sequence
  targeting sequence with GTCN PAM
ucaucuucauugucuucagg

SEQ ID NO: 6400 - RNA, 20 nt, Artificial Sequence
  targeting sequence with GTCN PAM
ucagguugaauaggcugagg

SEQ ID NO: 6401 - RNA, 20 nt, Artificial Sequence
  targeting sequence with GTCN PAM
cccuggcacagcaucaccaa

SEQ ID NO: 6402 - RNA, 20 nt, Artificial Sequence
  targeting sequence with GTCN PAM
acuuuuacaugugaauuuuc

SEQ ID NO: 6403 - RNA, 20 nt, Artificial Sequence
  targeting sequence with GTCN PAM
acuguauguacacauguaca

SEQ ID NO: 6404 - RNA, 20 nt, Artificial Sequence
  targeting sequence with GTCN PAM
ugcagcuggucagugagauc

SEQ ID NO: 6405 - RNA, 20 nt, Artificial Sequence
  targeting sequence with GTCN PAM
gaauuccuagagaucucacu

SEQ ID NO: 6406 - RNA, 20 nt, Artificial Sequence
  targeting sequence with GTCN PAM
cugggucagaauuccuagag

SEQ ID NO: 6407 - RNA, 20 nt, Artificial Sequence
  targeting sequence with GTCN PAM
cacucuguugcccaggcuau

SEQ ID NO: 6408 - RNA, 20 nt, Artificial Sequence
  targeting sequence with GTCN PAM
caaaaaaaagguacuuuaca

SEQ ID NO: 6409 - RNA, 20 nt, Artificial Sequence
  targeting sequence with GTCN PAM
acuaagauaguaucuguaaa

SEQ ID NO: 6410 - RNA, 20 nt, Artificial Sequence
  targeting sequence with GTCN PAM
uuuuaugggagucaacuaag

SEQ ID NO: 6411 - RNA, 20 nt, Artificial Sequence
  targeting sequence with GTCN PAM
cuguucucugagccucaaug

SEQ ID NO: 6412 - RNA, 20 nt, Artificial Sequence
  targeting sequence with GTCN PAM
ccuuccacuugcccugugaa

SEQ ID NO: 6413 - RNA, 20 nt, Artificial Sequence
  targeting sequence with GTCN PAM
aaaaguccuuaagauguaca

SEQ ID NO: 6414 - RNA, 20 nt, Artificial Sequence
  targeting sequence with GTCN PAM
uuaagauguacagaaugugg

SEQ ID NO: 6415 - RNA, 20 nt, Artificial Sequence
  targeting sequence with GTCN PAM
guuccuucauaaagcccaag

SEQ ID NO: 6416 - RNA, 20 nt, Artificial Sequence
  targeting sequence with GTCN PAM
cugaggucccaagagauccu

SEQ ID NO: 6417 - RNA, 20 nt, Artificial Sequence
  targeting sequence with GTCN PAM
gagggaaugagcggagucau

SEQ ID NO: 6418 - RNA, 20 nt, Artificial Sequence
  targeting sequence with GTCN PAM
gucuccucucuacaucuggc

SEQ ID NO: 6419 - RNA, 20 nt, Artificial Sequence
  targeting sequence with GTCN PAM
ccucucuacaucuggcuaag

SEQ ID NO: 6420 - RNA, 20 nt, Artificial Sequence
  targeting sequence with GTCN PAM
ccacugaaggaucucauccu

SEQ ID NO: 6421 - RNA, 20 nt, Artificial Sequence
  targeting sequence with GTCN PAM
cccaggagauguugaccaaa

SEQ ID NO: 6422 - RNA, 20 nt, Artificial Sequence
  targeting sequence with GTCN PAM
acaucuccugggggaccuaa

SEQ ID NO: 6423 - RNA, 20 nt, Artificial Sequence
  targeting sequence with GTCN PAM
gacaaaaggaguacauuuuu

SEQ ID NO: 6424 - RNA, 20 nt, Artificial Sequence
  targeting sequence with GTCN PAM
gacugaaacuacccuuuggu

SEQ ID NO: 6425 - RNA, 20 nt, Artificial Sequence
  targeting sequence with GTCN PAM
uaccauguuguauuuguguu

SEQ ID NO: 6426 - RNA, 20 nt, Artificial Sequence
  targeting sequence with GTCN PAM
uacauuuaucuuaaaccagc

SEQ ID NO: 6427 - RNA, 20 nt, Artificial Sequence
  targeting sequence with GTCN PAM
gcugauccagaagcaaagcg

SEQ ID NO: 6428 - RNA, 20 nt, Artificial Sequence
  targeting sequence with GTCN PAM
agauaauaacgcuuuuguca

SEQ ID NO: 6429 - RNA, 20 nt, Artificial Sequence
  targeting sequence with GTCN PAM
gaugaacugagaugagcuac

SEQ ID NO: 6430 - RNA, 20 nt, Artificial Sequence
  targeting sequence with GTCN PAM
acaaugucagaugaacugag

SEQ ID NO: 6431 - RNA, 20 nt, Artificial Sequence
  targeting sequence with GTCN PAM
ucuuccagugucccugucuc

SEQ ID NO: 6432 - RNA, 20 nt, Artificial Sequence
  targeting sequence with GTCN PAM
cugucucagagaauggccuu

SEQ ID NO: 6433 - RNA, 20 nt, Artificial Sequence
  targeting sequence with GTCN PAM
cagagaauggccuuauaucc

SEQ ID NO: 6434 - RNA, 20 nt, Artificial Sequence
  targeting sequence with GTCN PAM
aaugucagaaacuugggguc

SEQ ID NO: 6435 - RNA, 20 nt, Artificial Sequence
  targeting sequence with GTCN PAM
gaaacuuggggucagugugc

SEQ ID NO: 6436 - RNA, 20 nt, Artificial Sequence
  targeting sequence with GTCN PAM
caaaacaaaacaaaacaaaa

SEQ ID NO: 6437 - RNA, 20 nt, Artificial Sequence
  targeting sequence with GTCN PAM
ugcucuguugcccaggcugg

SEQ ID NO: 6438 - RNA, 20 nt, Artificial Sequence
  targeting sequence with GTCN PAM
ugcucugucucccaggcuac

SEQ ID NO: 6439 - RNA, 20 nt, Artificial Sequence
  targeting sequence with GTCN PAM
cccaggcuacagugcagugg

SEQ ID NO: 6440 - RNA, 20 nt, Artificial Sequence
  targeting sequence with GTCN PAM
cuaccaagaaaaaaaaaaau

SEQ ID NO: 6441 - RNA, 20 nt, Artificial Sequence
  targeting sequence with GTCN PAM
ugaacuccugggcucaagca

SEQ ID NO: 6442 - RNA, 20 nt, Artificial Sequence
  targeting sequence with GTCN PAM
ucucaaaguacugggauuac

SEQ ID NO: 6443 - RNA, 20 nt, Artificial Sequence
  targeting sequence with GTCN PAM
gaauuuacuuucuguguugu

SEQ ID NO: 6444 - RNA, 20 nt, Artificial Sequence
  targeting sequence with GTCN PAM
gaauuuacuuccuuuuuuuu

SEQ ID NO: 6445 - RNA, 20 nt, Artificial Sequence
  targeting sequence with GTCN PAM
ucauaaaaaaaaauaauaau

SEQ ID NO: 6446 - RNA, 20 nt, Artificial Sequence
  targeting sequence with GTCN PAM
cacuaugacuccugagcuca

SEQ ID NO: 6447 - RNA, 20 nt, Artificial Sequence
  targeting sequence with GTCN PAM
uagugagaccucgucuucau

SEQ ID NO: 6448 - RNA, 20 nt, Artificial Sequence
  targeting sequence with GTCN PAM
gaauauuauuccauuguaua

SEQ ID NO: 6449 - RNA, 20 nt, Artificial Sequence
  targeting sequence with GTCN PAM
auauauacaauggaauaaua

SEQ ID NO: 6450 - RNA, 20 nt, Artificial Sequence
  targeting sequence with GTCN PAM
aucaacagaugaauggauaa

SEQ ID NO: 6451 - RNA, 20 nt, Artificial Sequence
  targeting sequence with GTCN PAM
uucacuuguggguaauacuu

SEQ ID NO: 6452 - RNA, 20 nt, Artificial Sequence
  targeting sequence with GTCN PAM
caacccguuuuaguccuuca

SEQ ID NO: 6453 - RNA, 20 nt, Artificial Sequence
  targeting sequence with GTCN PAM
aaggauuugucauguuucca

SEQ ID NO: 6454 - RNA, 20 nt, Artificial Sequence
  targeting sequence with GTCN PAM
uguuuccagaucuuggucug

SEQ ID NO: 6455 - RNA, 20 nt, Artificial Sequence
  targeting sequence with GTCN PAM
gugaugucuucauugcaccu

SEQ ID NO: 6456 - RNA, 20 nt, Artificial Sequence
  targeting sequence with GTCN PAM
ucauugcaccuccaucuucc

SEQ ID NO: 6457 - RNA, 20 nt, Artificial Sequence
  targeting sequence with GTCN PAM
ccaucucuacaaauaagaaa

SEQ ID NO: 6458 - RNA, 20 nt, Artificial Sequence
  targeting sequence with GTCN PAM
cuugcagaagagcauguggu

SEQ ID NO: 6459 - RNA, 20 nt, Artificial Sequence
  targeting sequence with GTCN PAM
aaagucagaggcugugggcu

SEQ ID NO: 6460 - RNA, 20 nt, Artificial Sequence
  targeting sequence with GTCN PAM
gaggcugugggcucauuauu

SEQ ID NO: 6461 - RNA, 20 nt, Artificial Sequence
  targeting sequence with GTCN PAM
ccuacaauccuauuacucau

SEQ ID NO: 6462 - RNA, 20 nt, Artificial Sequence
  targeting sequence with GTCN PAM
cuggaggaacaagaugccag

SEQ ID NO: 6463 - RNA, 20 nt, Artificial Sequence
  targeting sequence with GTCN PAM
uguccuggaauaacugaaaa

SEQ ID NO: 6464 - RNA, 20 nt, Artificial Sequence
  targeting sequence with GTCN PAM
uggaauaacugaaaaucugg

SEQ ID NO: 6465 - RNA, 20 nt, Artificial Sequence
  targeting sequence with GTCN PAM
gccuccccucagccauugaa

SEQ ID NO: 6466 - RNA, 20 nt, Artificial Sequence
  targeting sequence with GTCN PAM
ugguuuccacacaauuuaaa

SEQ ID NO: 6467 - RNA, 20 nt, Artificial Sequence
  targeting sequence with GTCN PAM
ccauucacugucuugguuuc

SEQ ID NO: 6468 - RNA, 20 nt, Artificial Sequence
  targeting sequence with GTCN PAM
uaccagaguaaaggucacca

SEQ ID NO: 6469 - RNA, 20 nt, Artificial Sequence
  targeting sequence with GTCN PAM
cugaugucuuaccagaguaa

SEQ ID NO: 6470 - RNA, 20 nt, Artificial Sequence
  targeting sequence with GTCN PAM
gggaaggcuucccagaggca

SEQ ID NO: 6471 - RNA, 20 nt, Artificial Sequence
  targeting sequence with GTCN PAM
cugccagggugagucaggga

SEQ ID NO: 6472 - RNA, 20 nt, Artificial Sequence
  targeting sequence with GTCN PAM
ucaccuuuguauugacccac

SEQ ID NO: 6473 - RNA, 20 nt, Artificial Sequence
  targeting sequence with GTCN PAM
auacaaaggugaggacaacu

SEQ ID NO: 6474 - RNA, 20 nt, Artificial Sequence
  targeting sequence with GTCN PAM
ucauuacugguuuagguggc

SEQ ID NO: 6475 - RNA, 20 nt, Artificial Sequence
  targeting sequence with GTCN PAM
uuacugguuuagguggcugu

SEQ ID NO: 6476 - RNA, 20 nt, Artificial Sequence
  targeting sequence with GTCN PAM
ucccugaggggcugaacacc

SEQ ID NO: 6477 - RNA, 20 nt, Artificial Sequence
  targeting sequence with GTCN PAM
cgugccagcauuacagcacu

SEQ ID NO: 6478 - RNA, 20 nt, Artificial Sequence
  targeting sequence with GTCN PAM
guaaaaugucuguggaggga

SEQ ID NO: 6479 - RNA, 20 nt, Artificial Sequence
  targeting sequence with GTCN PAM
guggagggaggaagggagug

SEQ ID NO: 6480 - RNA, 20 nt, Artificial Sequence
  targeting sequence with GTCN PAM
guguucguugcuaguggaua

SEQ ID NO: 6481 - RNA, 20 nt, Artificial Sequence
  targeting sequence with GTCN PAM
cuagaugaggagucagaggc

SEQ ID NO: 6482 - RNA, 20 nt, Artificial Sequence
  targeting sequence with GTCN PAM
gaggccuaaucccucucagu

SEQ ID NO: 6483 - RNA, 20 nt, Artificial Sequence
  targeting sequence with GTCN PAM
cacugauacgguucugguuc

SEQ ID NO: 6484 - RNA, 20 nt, Artificial Sequence
  targeting sequence with GTCN PAM
uuuguuuaacauauuuuaua

SEQ ID NO: 6485 - RNA, 20 nt, Artificial Sequence
  targeting sequence with GTCN PAM
gugugcuuacacuggaauau

SEQ ID NO: 6486 - RNA, 20 nt, Artificial Sequence
  targeting sequence with GTCN PAM
uaggagaaggugggauuaaa

SEQ ID NO: 6487 - RNA, 20 nt, Artificial Sequence
  targeting sequence with GTCN PAM
uaaagcucaaauagaaauuc

SEQ ID NO: 6488 - RNA, 20 nt, Artificial Sequence
  targeting sequence with GTCN PAM
gguauuauucucauucccac

SEQ ID NO: 6489 - RNA, 20 nt, Artificial Sequence
  targeting sequence with GTCN PAM
cuuagcuaguaaguggagga

SEQ ID NO: 6490 - RNA, 20 nt, Artificial Sequence
  targeting sequence with GTCN PAM
aagcccugguuccuccacuu

SEQ ID NO: 6491 - RNA, 20 nt, Artificial Sequence
  targeting sequence with GTCN PAM
aaaguccaagcccugguucc

SEQ ID NO: 6492 - RNA, 20 nt, Artificial Sequence
  targeting sequence with GTCN PAM
aaauguuuggaggaagcguu

SEQ ID NO: 6493 - RNA, 20 nt, Artificial Sequence
  targeting sequence with GTCN PAM
agaacgcuuccuccaaacau

SEQ ID NO: 6494 - RNA, 20 nt, Artificial Sequence
  targeting sequence with GTCN PAM
agacauacacuugcuaugag

SEQ ID NO: 6495 - RNA, 20 nt, Artificial Sequence
  targeting sequence with GTCN PAM
agacaacauaagcaaauucu

SEQ ID NO: 6496 - RNA, 20 nt, Artificial Sequence
  targeting sequence with GTCN PAM
cagaugcccuggcucagugc

SEQ ID NO: 6497 - RNA, 20 nt, Artificial Sequence
  targeting sequence with GTCN PAM
ccuaaggcuugcuccccccu

SEQ ID NO: 6498 - RNA, 20 nt, Artificial Sequence
  targeting sequence with GTCN PAM
uguguugugauugagaccua

SEQ ID NO: 6499 - RNA, 20 nt, Artificial Sequence
  targeting sequence with GTCN PAM
caaucacaacacaugacucu

SEQ ID NO: 6500 - RNA, 20 nt, Artificial Sequence
  targeting sequence with GTCN PAM
aaguuauaaacaaugaaacu

SEQ ID NO: 6501 - RNA, 20 nt, Artificial Sequence
  targeting sequence with GTCN PAM
uuucuuugagagucaaaucc

SEQ ID NO: 6502 - RNA, 20 nt, Artificial Sequence
  targeting sequence with GTCN PAM
aaucccugaaaaguuggcua

SEQ ID NO: 6503 - RNA, 20 nt, Artificial Sequence
  targeting sequence with GTCN PAM
auguacuuuucauccaguuu

SEQ ID NO: 6504 - RNA, 20 nt, Artificial Sequence
  targeting sequence with GTCN PAM
ugauauuguauaauaguuac

SEQ ID NO: 6505 - RNA, 20 nt, Artificial Sequence
  targeting sequence with GTCN PAM
caguuuccuggucuugauau

SEQ ID NO: 6506 - RNA, 20 nt, Artificial Sequence
  targeting sequence with GTCN PAM
cgcugauggcaaucuacaca

SEQ ID NO: 6507 - RNA, 20 nt, Artificial Sequence
  targeting sequence with GTCN PAM
uaucuacucaccuuaccucc

SEQ ID NO: 6508 - RNA, 20 nt, Artificial Sequence
  targeting sequence with GTCN PAM
uucaagaauguuauauaaau

SEQ ID NO: 6509 - RNA, 20 nt, Artificial Sequence
  targeting sequence with GTCN PAM
uauacuguacgauuccauuu

SEQ ID NO: 6510 - RNA, 20 nt, Artificial Sequence
  targeting sequence with GTCN PAM
ccugaacagaagucugucuc

SEQ ID NO: 6511 - RNA, 20 nt, Artificial Sequence
  targeting sequence with GTCN PAM
gucuccaaacacaaaucaag

SEQ ID NO: 6512 - RNA, 20 nt, Artificial Sequence
  targeting sequence with GTCN PAM
ccaaacacaaaucaagcagc

SEQ ID NO: 6513 - RNA, 20 nt, Artificial Sequence
  targeting sequence with GTCN PAM
gagcugcacuuaccugcagc

SEQ ID NO: 6514 - RNA, 20 nt, Artificial Sequence
  targeting sequence with GTCN PAM
guguggaagaugaaggaaca

SEQ ID NO: 6515 - RNA, 20 nt, Artificial Sequence
  targeting sequence with GTCN PAM
uguguuagguaguugguuua

SEQ ID NO: 6516 - RNA, 20 nt, Artificial Sequence
  targeting sequence with GTCN PAM
ccucgaugggaaagacuugu

SEQ ID NO: 6517 - RNA, 20 nt, Artificial Sequence
  targeting sequence with GTCN PAM
uucccaucgaggagacgaag

SEQ ID NO: 6518 - RNA, 20 nt, Artificial Sequence
  targeting sequence with GTCN PAM
uuguccaggcagcaugugug

SEQ ID NO: 6519 - RNA, 20 nt, Artificial Sequence
  targeting sequence with GTCN PAM
aggcagcauguguggggaag

SEQ ID NO: 6520 - RNA, 20 nt, Artificial Sequence
  targeting sequence with GTCN PAM
agcaucaaagugugggaggg

SEQ ID NO: 6521 - RNA, 20 nt, Artificial Sequence
  targeting sequence with GTCN PAM
augagagauucuggauucua

SEQ ID NO: 6522 - RNA, 20 nt, Artificial Sequence
  targeting sequence with GTCN PAM
cauggccugucaaugagaga

SEQ ID NO: 6523 - RNA, 20 nt, Artificial Sequence
  targeting sequence with GTCN PAM
gaugaggaacguaaagcucc

SEQ ID NO: 6524 - RNA, 20 nt, Artificial Sequence
  targeting sequence with GTCN PAM
guauuuuuaucccuaucugu

SEQ ID NO: 6525 - RNA, 20 nt, Artificial Sequence
  targeting sequence with GTCN PAM
agucaguauuuuuaucccua

SEQ ID NO: 6526 - RNA, 20 nt, Artificial Sequence
  targeting sequence with GTCN PAM
ugcacgcuuuacacucauga

SEQ ID NO: 6527 - RNA, 20 nt, Artificial Sequence
  targeting sequence with GTCN PAM
acuguacaccagguacuguc

SEQ ID NO: 6528 - RNA, 20 nt, Artificial Sequence
  targeting sequence with GTCN PAM
uccaaccccuagaacagugc

SEQ ID NO: 6529 - RNA, 20 nt, Artificial Sequence
  targeting sequence with GTCN PAM
guucuuaaggugcucuuuaa

SEQ ID NO: 6530 - RNA, 20 nt, Artificial Sequence
  targeting sequence with GTCN PAM
uagagguauguacagagggc

SEQ ID NO: 6531 - RNA, 20 nt, Artificial Sequence
  targeting sequence with GTCN PAM
agcuguguacacaaccaaca

SEQ ID NO: 6532 - RNA, 20 nt, Artificial Sequence
  targeting sequence with GTCN PAM
guaccuggcgcuggggaugu

SEQ ID NO: 6533 - RNA, 20 nt, Artificial Sequence
  targeting sequence with GTCN PAM
aucugcuggaacccuucaag

SEQ ID NO: 6534 - RNA, 20 nt, Artificial Sequence
  targeting sequence with GTCN PAM
uccuucuagaacaaacacca

SEQ ID NO: 6535 - RNA, 20 nt, Artificial Sequence
  targeting sequence with GTCN PAM
cgcuaccugagaauguaugg

SEQ ID NO: 6536 - RNA, 20 nt, Artificial Sequence
  targeting sequence with GTCN PAM
aggauucauuccuaaacuca

SEQ ID NO: 6537 - RNA, 20 nt, Artificial Sequence
  targeting sequence with GTCN PAM
uaaauagcucaucugcuuug

SEQ ID NO: 6538 - RNA, 20 nt, Artificial Sequence
  targeting sequence with GTCN PAM
gcgcacaugugcaugcacac

SEQ ID NO: 6539 - RNA, 20 nt, Artificial Sequence
  targeting sequence with GTCN PAM
gaaagucaaaauuaagucua

SEQ ID NO: 6540 - RNA, 20 nt, Artificial Sequence
  targeting sequence with GTCN PAM
aaauuaagucuacagacguc

SEQ ID NO: 6541 - RNA, 20 nt, Artificial Sequence
  targeting sequence with GTCN PAM
acagacgucccuaaagccua

SEQ ID NO: 6542 - RNA, 20 nt, Artificial Sequence
  targeting sequence with GTCN PAM
guagacuuaauuuugacuuu

SEQ ID NO: 6543 - RNA, 20 nt, Artificial Sequence
  targeting sequence with GTCN PAM
cuaaagccuagagauacaca

SEQ ID NO: 6544 - RNA, 20 nt, Artificial Sequence
  targeting sequence with GTCN PAM
augugacuuugagaguaaac

SEQ ID NO: 6545 - RNA, 20 nt, Artificial Sequence
  targeting sequence with GTCN PAM
cauggacauagaaagcaaag

SEQ ID NO: 6546 - RNA, 20 nt, Artificial Sequence
  targeting sequence with GTCN PAM
ucugaggguaaacgaaaggu

SEQ ID NO: 6547 - RNA, 20 nt, Artificial Sequence
  targeting sequence with GTCN PAM
uacuuguuuaccagcucaau

SEQ ID NO: 6548 - RNA, 20 nt, Artificial Sequence
  targeting sequence with GTCN PAM
uuuuacagaugguugccuac

SEQ ID NO: 6549 - RNA, 20 nt, Artificial Sequence
  targeting sequence with GTCN PAM
aaugcugucaaaggccauua

SEQ ID NO: 6550 - RNA, 20 nt, Artificial Sequence
  targeting sequence with GTCN PAM
aaggccauuagccugcccca

SEQ ID NO: 6551 - RNA, 20 nt, Artificial Sequence
  targeting sequence with GTCN PAM
ucugcagccacaaaucaaac

SEQ ID NO: 6552 - RNA, 20 nt, Artificial Sequence
  targeting sequence with GTCN PAM
uccuccagguaggguucaga

SEQ ID NO: 6553 - RNA, 20 nt, Artificial Sequence
  targeting sequence with GTCN PAM
aauuuuuuguauuuuuggua

SEQ ID NO: 6554 - RNA, 20 nt, Artificial Sequence
  targeting sequence with GTCN PAM
cuaccaaaaauacaaaaaau

SEQ ID NO: 6555 - RNA, 20 nt, Artificial Sequence
  targeting sequence with GTCN PAM
ugaacuccugaucucgagcg

SEQ ID NO: 6556 - RNA, 20 nt, Artificial Sequence
  targeting sequence with GTCN PAM
cugcaccuggcccccagggg

SEQ ID NO: 6557 - RNA, 20 nt, Artificial Sequence
  targeting sequence with GTCN PAM
acagccgaugggagaguuuc

SEQ ID NO: 6558 - RNA, 20 nt, Artificial Sequence
  targeting sequence with GTCN PAM
uugucaacagauauauucag

SEQ ID NO: 6559 - RNA, 20 nt, Artificial Sequence
  targeting sequence with GTCN PAM
acagauauauucaggaaauc

SEQ ID NO: 6560 - RNA, 20 nt, Artificial Sequence
  targeting sequence with GTCN PAM
gcaguguacaguagucaggg

SEQ ID NO: 6561 - RNA, 20 nt, Artificial Sequence
  targeting sequence with GTCN PAM
ggguagugaggcagaggagg

SEQ ID NO: 6562 - RNA, 20 nt, Artificial Sequence
  targeting sequence with GTCN PAM
ucuuccucugguucuuccuc

SEQ ID NO: 6563 - RNA, 20 nt, Artificial Sequence
  targeting sequence with GTCN PAM
uccucuuccucugguucuuc

SEQ ID NO: 6564 - RNA, 20 nt, Artificial Sequence
  targeting sequence with GTCN PAM
cagggacgacaacuugugag

SEQ ID NO: 6565 - RNA, 20 nt, Artificial Sequence
  targeting sequence with GTCN PAM
cugggacugucguccucuuc

SEQ ID NO: 6566 - RNA, 20 nt, Artificial Sequence
  targeting sequence with GTCN PAM
ucccugggacugucguccuc

SEQ ID NO: 6567 - RNA, 20 nt, Artificial Sequence
  targeting sequence with GTCN PAM
cagugagugggaacccuucu

SEQ ID NO: 6568 - RNA, 20 nt, Artificial Sequence
  targeting sequence with GTCN PAM
uuucaguauuuccuauaguu

SEQ ID NO: 6569 - RNA, 20 nt, Artificial Sequence
  targeting sequence with GTCN PAM
uucuucucuucaguugagau

SEQ ID NO: 6570 - RNA, 20 nt, Artificial Sequence
  targeting sequence with GTCN PAM
caagcuagaucucuacugcc

SEQ ID NO: 6571 - RNA, 20 nt, Artificial Sequence
  targeting sequence with GTCN PAM
ugggggcugggaagugggga

SEQ ID NO: 6572 - RNA, 20 nt, Artificial Sequence
  targeting sequence with GTCN PAM
ccacuucccagcccccauga

SEQ ID NO: 6573 - RNA, 20 nt, Artificial Sequence
  targeting sequence with GTCN PAM
ccaucucagugccuuugauu

SEQ ID NO: 6574 - RNA, 20 nt, Artificial Sequence
  targeting sequence with GTCN PAM
cugugagauggaucagugau

SEQ ID NO: 6575 - RNA, 20 nt, Artificial Sequence
  targeting sequence with GTCN PAM
aaacacaauccaggagccca

SEQ ID NO: 6576 - RNA, 20 nt, Artificial Sequence
  targeting sequence with GTCN PAM
aaaguccaaacacaauccag

SEQ ID NO: 6577 - RNA, 20 nt, Artificial Sequence
  targeting sequence with GTCN PAM
cacaaaggucaucugcaggc

SEQ ID NO: 6578 - RNA, 20 nt, Artificial Sequence
  targeting sequence with GTCN PAM
ucugcaggcucccucauuaa

SEQ ID NO: 6579 - RNA, 20 nt, Artificial Sequence
  targeting sequence with GTCN PAM
uugucucuuuucccuuaguu

SEQ ID NO: 6580 - RNA, 20 nt, Artificial Sequence
  targeting sequence with GTCN PAM
cuuuucccuuaguuuugggu

SEQ ID NO: 6581 - RNA, 20 nt, Artificial Sequence
  targeting sequence with GTCN PAM
uaggcacuaacccaaaacua

SEQ ID NO: 6582 - RNA, 20 nt, Artificial Sequence
  targeting sequence with GTCN PAM
ugugguaaccugguagcacc

SEQ ID NO: 6583 - RNA, 20 nt, Artificial Sequence
  targeting sequence with GTCN PAM
uaauccaccuaauguugccu

SEQ ID NO: 6584 - RNA, 20 nt, Artificial Sequence
  targeting sequence with GTCN PAM
caaaaaaaaaaaagaaaagc

SEQ ID NO: 6585 - RNA, 20 nt, Artificial Sequence
  targeting sequence with GTCN PAM
ggcucugucaccugggcugg

SEQ ID NO: 6586 - RNA, 20 nt, Artificial Sequence
  targeting sequence with GTCN PAM
ccugggcuggagugcagugg

SEQ ID NO: 6587 - RNA, 20 nt, Artificial Sequence
  targeting sequence with GTCN PAM
guaaucccagcuauuccaga

SEQ ID NO: 6588 - RNA, 20 nt, Artificial Sequence
  targeting sequence with GTCN PAM
cgugucuguaaucccagcua

SEQ ID NO: 6589 - RNA, 20 nt, Artificial Sequence
  targeting sequence with GTCN PAM
agaacuccugaccucaggug

SEQ ID NO: 6590 - RNA, 20 nt, Artificial Sequence
  targeting sequence with GTCN PAM
ggaguucuagaccagccugg

SEQ ID NO: 6591 - RNA, 20 nt, Artificial Sequence
  targeting sequence with GTCN PAM
uacagucccagccccacagc

SEQ ID NO: 6592 - RNA, 20 nt, Artificial Sequence
  targeting sequence with GTCN PAM
cagccccacagcacugaucc

SEQ ID NO: 6593 - RNA, 20 nt, Artificial Sequence
  targeting sequence with GTCN PAM
uugaaacugagaaccuaugg

SEQ ID NO: 6594 - RNA, 20 nt, Artificial Sequence
  targeting sequence with GTCN PAM
gaaaccauuucaccugugca

SEQ ID NO: 6595 - RNA, 20 nt, Artificial Sequence
  targeting sequence with GTCN PAM
uugcacaggugaaaugguuu

SEQ ID NO: 6596 - RNA, 20 nt, Artificial Sequence
  targeting sequence with GTCN PAM
uugugcugcaagagauguuu

SEQ ID NO: 6597 - RNA, 20 nt, Artificial Sequence
  targeting sequence with GTCN PAM
caauauugcagccuugccua

SEQ ID NO: 6598 - RNA, 20 nt, Artificial Sequence
  targeting sequence with GTCN PAM
ccagcaccauaaggucauag

SEQ ID NO: 6599 - RNA, 20 nt, Artificial Sequence
  targeting sequence with GTCN PAM
uagcaggggacucagugaaa

SEQ ID NO: 6600 - RNA, 20 nt, Artificial Sequence
  targeting sequence with GTCN PAM
ccugcuaugaccuuauggug

SEQ ID NO: 6601 - RNA, 20 nt, Artificial Sequence
  targeting sequence with GTCN PAM
uacgggaugaagcagaguug

SEQ ID NO: 6602 - RNA, 20 nt, Artificial Sequence
  targeting sequence with GTCN PAM
uggccucagguugccaaaug

SEQ ID NO: 6603 - RNA, 20 nt, Artificial Sequence
  targeting sequence with GTCN PAM
uuacguuccucucuaaucaa

SEQ ID NO: 6604 - RNA, 20 nt, Artificial Sequence
  targeting sequence with GTCN PAM
gccacagccaggaugucauu

SEQ ID NO: 6605 - RNA, 20 nt, Artificial Sequence
  targeting sequence with GTCN PAM
ccagucagccacagccagga

SEQ ID NO: 6606 - RNA, 20 nt, Artificial Sequence
  targeting sequence with GTCN PAM
ugccuguuauauuuucauuu

SEQ ID NO: 6607 - RNA, 20 nt, Artificial Sequence
  targeting sequence with GTCN PAM
uuagccuaacucaaagaugg

SEQ ID NO: 6608 - RNA, 20 nt, Artificial Sequence
  targeting sequence with GTCN PAM
uauauuuucauuccuuccug

SEQ ID NO: 6609 - RNA, 20 nt, Artificial Sequence
  targeting sequence with GTCN PAM
cccuguacaacucaccauuc

SEQ ID NO: 6610 - RNA, 20 nt, Artificial Sequence
  targeting sequence with GTCN PAM
caaacucugagaugcaguca

SEQ ID NO: 6611 - RNA, 20 nt, Artificial Sequence
  targeting sequence with GTCN PAM
uuuauaaucacaucuccagc

SEQ ID NO: 6612 - RNA, 20 nt, Artificial Sequence
  targeting sequence with GTCN PAM
uccuacuaccaugcucucua

SEQ ID NO: 6613 - RNA, 20 nt, Artificial Sequence
  targeting sequence with GTCN PAM
uuucuuuuguauucgaguaa

SEQ ID NO: 6614 - RNA, 20 nt, Artificial Sequence
  targeting sequence with GTCN PAM
ucccuucccaaucuaggaag

SEQ ID NO: 6615 - RNA, 20 nt, Artificial Sequence
  targeting sequence with GTCN PAM
gagguauaauuuguguauuu

SEQ ID NO: 6616 - RNA, 20 nt, Artificial Sequence
  targeting sequence with GTCN PAM
uuugaaguguuaguaauacu

SEQ ID NO: 6617 - RNA, 20 nt, Artificial Sequence
  targeting sequence with GTCN PAM
acccugcugaaacccaggca

SEQ ID NO: 6618 - RNA, 20 nt, Artificial Sequence
  targeting sequence with GTCN PAM
aucagauuagucuugcaaug

SEQ ID NO: 6619 - RNA, 20 nt, Artificial Sequence
  targeting sequence with GTCN PAM
ugcaaugaccauucaaaagu

SEQ ID NO: 6620 - RNA, 20 nt, Artificial Sequence
  targeting sequence with GTCN PAM
uugcaagacuaaucugauag

SEQ ID NO: 6621 - RNA, 20 nt, Artificial Sequence
  targeting sequence with GTCN PAM
uucaccaaaugugaaaacau

SEQ ID NO: 6622 - RNA, 20 nt, Artificial Sequence
  targeting sequence with GTCN PAM
caguuuauaguucaaggguu

SEQ ID NO: 6623 - RNA, 20 nt, Artificial Sequence
  targeting sequence with GTCN PAM
cauuuaaaacuuaguuaaau

SEQ ID NO: 6624 - RNA, 20 nt, Artificial Sequence
  targeting sequence with GTCN PAM
aagucaauuggcuguucacu

SEQ ID NO: 6625 - RNA, 20 nt, Artificial Sequence
  targeting sequence with GTCN PAM
auuggcuguucacuuuaacu

SEQ ID NO: 6626 - RNA, 20 nt, Artificial Sequence
  targeting sequence with GTCN PAM
uuuuauucacaaaagacacc

SEQ ID NO: 6627 - RNA, 20 nt, Artificial Sequence
  targeting sequence with GTCN PAM
uuugugaauaaaaagacgau

SEQ ID NO: 6628 - RNA, 20 nt, Artificial Sequence
  targeting sequence with GTCN PAM
cagcuacuggggguggugag

SEQ ID NO: 6629 - RNA, 20 nt, Artificial Sequence
  targeting sequence with GTCN PAM
uaugaucauaacucaaugca

SEQ ID NO: 6630 - RNA, 20 nt, Artificial Sequence
  targeting sequence with GTCN PAM
cacucuguggcuuaggcugg

SEQ ID NO: 6631 - RNA, 20 nt, Artificial Sequence
  targeting sequence with GTCN PAM
uagcuccuggccuauauuuu

SEQ ID NO: 6632 - RNA, 20 nt, Artificial Sequence
  targeting sequence with GTCN PAM
caaacuccugagcucagaug

SEQ ID NO: 6633 - RNA, 20 nt, Artificial Sequence
  targeting sequence with GTCN PAM
cggcuagucucaaacuccug

SEQ ID NO: 6634 - RNA, 20 nt, Artificial Sequence
  targeting sequence with GTCN PAM
cugcaaaaaauacaaaaauu

SEQ ID NO: 6635 - RNA, 20 nt, Artificial Sequence
  targeting sequence with GTCN PAM
cagcuacuugggaggcugag

SEQ ID NO: 6636 - RNA, 20 nt, Artificial Sequence
  targeting sequence with GTCN PAM
aggaguugaaggcugcagug

SEQ ID NO: 6637 - RNA, 20 nt, Artificial Sequence
  targeting sequence with GTCN PAM
cccaggcuggagugcagugg

SEQ ID NO: 6638 - RNA, 20 nt, Artificial Sequence
  targeting sequence with GTCN PAM
cacucugucacccaggcugg

SEQ ID NO: 6639 - RNA, 20 nt, Artificial Sequence
  targeting sequence with GTCN PAM
uuuauucugcaacuacaccc

SEQ ID NO: 6640 - RNA, 20 nt, Artificial Sequence
  targeting sequence with GTCN PAM
uuaaacugaauaaacucagc

SEQ ID NO: 6641 - RNA, 20 nt, Artificial Sequence
  targeting sequence with GTCN PAM
aaguucagugcccgauccuu

SEQ ID NO: 6642 - RNA, 20 nt, Artificial Sequence
  targeting sequence with GTCN PAM
gaaccccccagcaaaaugua

SEQ ID NO: 6643 - RNA, 20 nt, Artificial Sequence
  targeting sequence with GTCN PAM
caagccgcacuccauccuug

SEQ ID NO: 6644 - RNA, 20 nt, Artificial Sequence
  targeting sequence with GTCN PAM
acacccaggaguucugcucc

SEQ ID NO: 6645 - RNA, 20 nt, Artificial Sequence
  targeting sequence with GTCN PAM
agcgaaaccggauuccaacu

SEQ ID NO: 6646 - RNA, 20 nt, Artificial Sequence
  targeting sequence with GTCN PAM
auucccagcucucuggagaa

SEQ ID NO: 6647 - RNA, 20 nt, Artificial Sequence
  targeting sequence with GTCN PAM
gcugccaggacggcaccauu

SEQ ID NO: 6648 - RNA, 20 nt, Artificial Sequence
  targeting sequence with GTCN PAM
uggcagccgaccaccugcgg

SEQ ID NO: 6649 - RNA, 20 nt, Artificial Sequence
  targeting sequence with GTCN PAM
augggcuuuacaaggaccgc

SEQ ID NO: 6650 - RNA, 20 nt, Artificial Sequence
  targeting sequence with GTCN PAM
uuguaaagcccauggacugu

SEQ ID NO: 6651 - RNA, 20 nt, Artificial Sequence
  targeting sequence with GTCN PAM
ugcuaucccuguaggcauag

SEQ ID NO: 6652 - RNA, 20 nt, Artificial Sequence
  targeting sequence with GTCN PAM
gucaugcuaucccuguaggc

SEQ ID NO: 6653 - RNA, 20 nt, Artificial Sequence
  targeting sequence with GTCN PAM
uugugcagcaccugaucacu

SEQ ID NO: 6654 - RNA, 20 nt, Artificial Sequence
  targeting sequence with GTCN PAM
agaccuugggaagagggaca

SEQ ID NO: 6655 - RNA, 20 nt, Artificial Sequence
  targeting sequence with GTCN PAM
ggaccugccucuuaccuuuc

SEQ ID NO: 6656 - RNA, 20 nt, Artificial Sequence
  targeting sequence with GTCN PAM
cucuucccaaggucuggacc

SEQ ID NO: 6657 - RNA, 20 nt, Artificial Sequence
  targeting sequence with GTCN PAM
cucccucuguccacuuaagu

SEQ ID NO: 6658 - RNA, 20 nt, Artificial Sequence
  targeting sequence with GTCN PAM
acuuaaguugcugugcuggu

SEQ ID NO: 6659 - RNA, 20 nt, Artificial Sequence
  targeting sequence with GTCN PAM
auuuaaccagcacagcaacu

SEQ ID NO: 6660 - RNA, 20 nt, Artificial Sequence
  targeting sequence with GTCN PAM
guuacuuaggcaggcuucug

SEQ ID NO: 6661 - RNA, 20 nt, Artificial Sequence
  targeting sequence with GTCN PAM
uauaggacacaaucuucaug

SEQ ID NO: 6662 - RNA, 20 nt, Artificial Sequence
  targeting sequence with GTCN PAM
aagaaaaaaauaucuaguuc

SEQ ID NO: 6663 - RNA, 20 nt, Artificial Sequence
  targeting sequence with GTCN PAM
agaagauugccaucuacaga

SEQ ID NO: 6664 - RNA, 20 nt, Artificial Sequence
  targeting sequence with GTCN PAM
ucugaauacaacucauagau

SEQ ID NO: 6665 - RNA, 20 nt, Artificial Sequence
  targeting sequence with GTCN PAM
gauaaguccucugaauacaa

SEQ ID NO: 6666 - RNA, 20 nt, Artificial Sequence
  targeting sequence with GTCN PAM
ugagccauaaacuggagaau

SEQ ID NO: 6667 - RNA, 20 nt, Artificial Sequence
  targeting sequence with GTCN PAM
caaacuccuggguucaagca

SEQ ID NO: 6668 - RNA, 20 nt, Artificial Sequence
  targeting sequence with GTCN PAM
agcuuccuaaaguacuggga

SEQ ID NO: 6669 - RNA, 20 nt, Artificial Sequence
  targeting sequence with GTCN PAM
agccaagaauaccuuguucu

SEQ ID NO: 6670 - RNA, 20 nt, Artificial Sequence
  targeting sequence with GTCN PAM
uuaaaguauaucuaauccca

SEQ ID NO: 6671 - RNA, 20 nt, Artificial Sequence
  targeting sequence with GTCN PAM
aggaaguuuuaauuccugaa

SEQ ID NO: 6672 - RNA, 20 nt, Artificial Sequence
  targeting sequence with GTCN PAM
aagucaaugccaagagaagu

SEQ ID NO: 6673 - RNA, 20 nt, Artificial Sequence
  targeting sequence with GTCN PAM
augccaagagaaguuuggaa

SEQ ID NO: 6674 - RNA, 20 nt, Artificial Sequence
  targeting sequence with GTCN PAM
uuccaaacuucucuuggcau

SEQ ID NO: 6675 - RNA, 20 nt, Artificial Sequence
  targeting sequence with GTCN PAM
uggauuaacgaugccaaucg

SEQ ID NO: 6676 - RNA, 20 nt, Artificial Sequence
  targeting sequence with GTCN PAM
acauuggguuagauagaugg

SEQ ID NO: 6677 - RNA, 20 nt, Artificial Sequence
  targeting sequence with GTCN PAM
cuaaggggagaaaauaccua

SEQ ID NO: 6678 - RNA, 20 nt, Artificial Sequence
  targeting sequence with GTCN PAM
gggggcacuuauucuguuga

SEQ ID NO: 6679 - RNA, 20 nt, Artificial Sequence
  targeting sequence with GTCN PAM
uucagcggagugaaggagcg

SEQ ID NO: 6680 - RNA, 20 nt, Artificial Sequence
  targeting sequence with GTCN PAM
cucauucguuacaucaaggu

SEQ ID NO: 6681 - RNA, 20 nt, Artificial Sequence
  targeting sequence with GTCN PAM
auucuucagccccacuaaga

SEQ ID NO: 6682 - RNA, 20 nt, Artificial Sequence
  targeting sequence with GTCN PAM
ccugucaggcugauaaucug

SEQ ID NO: 6683 - RNA, 20 nt, Artificial Sequence
  targeting sequence with GTCN PAM
ggcugauaaucugcaugcac

SEQ ID NO: 6684 - RNA, 20 nt, Artificial Sequence
  targeting sequence with GTCN PAM
cccacgugugcaugcagauu

SEQ ID NO: 6685 - RNA, 20 nt, Artificial Sequence
  targeting sequence with GTCN PAM
agcaaugacucugagcuggg

SEQ ID NO: 6686 - RNA, 20 nt, Artificial Sequence
  targeting sequence with GTCN PAM
uugcuagacgggucacccac

SEQ ID NO: 6687 - RNA, 20 nt, Artificial Sequence
  targeting sequence with GTCN PAM
ucaaaaaacugaacucaggc

SEQ ID NO: 6688 - RNA, 20 nt, Artificial Sequence
  targeting sequence with GTCN PAM
ccagaaggugggagauuugu

SEQ ID NO: 6689 - RNA, 20 nt, Artificial Sequence
  targeting sequence with GTCN PAM
gcuccugauuagggcagcga

SEQ ID NO: 6690 - RNA, 20 nt, Artificial Sequence
  targeting sequence with GTCN PAM
uaaagaaugcuggguccuca

SEQ ID NO: 6691 - RNA, 20 nt, Artificial Sequence
  targeting sequence with GTCN PAM
ucaagauacugauagauguc

SEQ ID NO: 6692 - RNA, 20 nt, Artificial Sequence
  targeting sequence with GTCN PAM
uaagcaaaaugggcccuuug

SEQ ID NO: 6693 - RNA, 20 nt, Artificial Sequence
  targeting sequence with GTCN PAM
cuuucaaaguuccauguagc

SEQ ID NO: 6694 - RNA, 20 nt, Artificial Sequence
  targeting sequence with GTCN PAM
ggcuaaugcagcuacauugu

SEQ ID NO: 6695 - RNA, 20 nt, Artificial Sequence
  targeting sequence with GTCN PAM
ggucuuugcuggggauggaa

SEQ ID NO: 6696 - RNA, 20 nt, Artificial Sequence
  targeting sequence with GTCN PAM
uugcuggggauggaagucac

SEQ ID NO: 6697 - RNA, 20 nt, Artificial Sequence
  targeting sequence with GTCN PAM
cagggcaugagagcaguggg

SEQ ID NO: 6698 - RNA, 20 nt, Artificial Sequence
  targeting sequence with GTCN PAM
agcagcaaugccaaggggag

SEQ ID NO: 6699 - RNA, 20 nt, Artificial Sequence
  targeting sequence with GTCN PAM
uccugggcaggucacuuuac

SEQ ID NO: 6700 - RNA, 20 nt, Artificial Sequence
  targeting sequence with GTCN PAM
cuuuaccucugugaggcugg

SEQ ID NO: 6701 - RNA, 20 nt, Artificial Sequence
  targeting sequence with GTCN PAM
ugcuauguugcccaggcuga

SEQ ID NO: 6702 - RNA, 20 nt, Artificial Sequence
  targeting sequence with GTCN PAM
ugucaguguucauaguagcu

SEQ ID NO: 6703 - RNA, 20 nt, Artificial Sequence
  targeting sequence with GTCN PAM
guguucauaguagcuuuuuc

SEQ ID NO: 6704 - RNA, 20 nt, Artificial Sequence
  targeting sequence with GTCN PAM
cgaacuaacacaggaaaaag

SEQ ID NO: 6705 - RNA, 20 nt, Artificial Sequence
  targeting sequence with GTCN PAM
ucaacaaauccccaguccga

SEQ ID NO: 6706 - RNA, 20 nt, Artificial Sequence
  targeting sequence with GTCN PAM
gaacagacacugaagugagc

SEQ ID NO: 6707 - RNA, 20 nt, Artificial Sequence
  targeting sequence with GTCN PAM
guucggacuggggauuuguu

SEQ ID NO: 6708 - RNA, 20 nt, Artificial Sequence
  targeting sequence with GTCN PAM
cagggcugucauuacuucug

SEQ ID NO: 6709 - RNA, 20 nt, Artificial Sequence
  targeting sequence with GTCN PAM
uuacuucugcagccucugau

SEQ ID NO: 6710 - RNA, 20 nt, Artificial Sequence
  targeting sequence with GTCN PAM
uuuucccugcacagagcuuc

SEQ ID NO: 6711 - RNA, 20 nt, Artificial Sequence
  targeting sequence with GTCN PAM
ccauggcaacaagauccugg

SEQ ID NO: 6712 - RNA, 20 nt, Artificial Sequence
  targeting sequence with GTCN PAM
gucaccauggcaacaagauc

SEQ ID NO: 6713 - RNA, 20 nt, Artificial Sequence
  targeting sequence with GTCN PAM
acgaagaucuucaggaucug

SEQ ID NO: 6714 - RNA, 20 nt, Artificial Sequence
  targeting sequence with GTCN PAM
ugcugaagcaggccacagcu

SEQ ID NO: 6715 - RNA, 20 nt, Artificial Sequence
  targeting sequence with GTCN PAM
aagcagcgcacagcuguggc

SEQ ID NO: 6716 - RNA, 20 nt, Artificial Sequence
  targeting sequence with GTCN PAM
uuuucaucuaccacggccag

SEQ ID NO: 6717 - RNA, 20 nt, Artificial Sequence
  targeting sequence with GTCN PAM
uacaccaggcaagugucauu

SEQ ID NO: 6718 - RNA, 20 nt, Artificial Sequence
  targeting sequence with GTCN PAM
augucauacaccaggcaagu

SEQ ID NO: 6719 - RNA, 20 nt, Artificial Sequence
  targeting sequence with GTCN PAM
cugagggggcccagggacau

SEQ ID NO: 6720 - RNA, 20 nt, Artificial Sequence
  targeting sequence with GTCN PAM
cugggcccccucagggacuu

SEQ ID NO: 6721 - RNA, 20 nt, Artificial Sequence
  targeting sequence with GTCN PAM
cuaaucaaaggaugaugucc

SEQ ID NO: 6722 - RNA, 20 nt, Artificial Sequence
  targeting sequence with GTCN PAM
cugcaggaggcucuccugcu

SEQ ID NO: 6723 - RNA, 20 nt, Artificial Sequence
  targeting sequence with GTCN PAM
cugggaggggcaggggccaa

SEQ ID NO: 6724 - RNA, 20 nt, Artificial Sequence
  targeting sequence with GTCN PAM
cagaggcccugggccacaac

SEQ ID NO: 6725 - RNA, 20 nt, Artificial Sequence
  targeting sequence with GTCN PAM
aggcccugcggcuugugccu

SEQ ID NO: 6726 - RNA, 20 nt, Artificial Sequence
  targeting sequence with GTCN PAM
uugccccauuucuuguucau

SEQ ID NO: 6727 - RNA, 20 nt, Artificial Sequence
  targeting sequence with GTCN PAM
caccccucucagagucauug

SEQ ID NO: 6728 - RNA, 20 nt, Artificial Sequence
  targeting sequence with GTCN PAM
gugucucaccugcugcaggc

SEQ ID NO: 6729 - RNA, 20 nt, Artificial Sequence
  targeting sequence with GTCN PAM
caccugcugcaggccugccu

SEQ ID NO: 6730 - RNA, 20 nt, Artificial Sequence
  targeting sequence with GTCN PAM
augcgcaccuacagcguggg

SEQ ID NO: 6731 - RNA, 20 nt, Artificial Sequence
  targeting sequence with GTCN PAM
ucugaaagggggaaggggau

SEQ ID NO: 6732 - RNA, 20 nt, Artificial Sequence
  targeting sequence with GTCN PAM
uccagcccuguggccugagg

SEQ ID NO: 6733 - RNA, 20 nt, Artificial Sequence
  targeting sequence with GTCN PAM
ccagagaagacagcccggca

SEQ ID NO: 6734 - RNA, 20 nt, Artificial Sequence
  targeting sequence with GTCN PAM
ucucuggugacacacuuccu

SEQ ID NO: 6735 - RNA, 20 nt, Artificial Sequence
  targeting sequence with GTCN PAM
uuguagguggucaggacugg

SEQ ID NO: 6736 - RNA, 20 nt, Artificial Sequence
  targeting sequence with GTCN PAM
ggacugguuuuccagaguga

SEQ ID NO: 6737 - RNA, 20 nt, Artificial Sequence
  targeting sequence with GTCN PAM
ugaccaccuacaaagaccua

SEQ ID NO: 6738 - RNA, 20 nt, Artificial Sequence
  targeting sequence with GTCN PAM
ggaggggcuccagcuuuggg

SEQ ID NO: 6739 - RNA, 20 nt, Artificial Sequence
  targeting sequence with GTCN PAM
ccuuaccaggcuccuccuug

SEQ ID NO: 6740 - RNA, 20 nt, Artificial Sequence
  targeting sequence with GTCN PAM
ggaguggggagcagccucag

SEQ ID NO: 6741 - RNA, 20 nt, Artificial Sequence
  targeting sequence with GTCN PAM
auuagaaggaguuaccuggc

SEQ ID NO: 6742 - RNA, 20 nt, Artificial Sequence
  targeting sequence with GTCN PAM
gucucaacucacucaugucc

SEQ ID NO: 6743 - RNA, 20 nt, Artificial Sequence
  targeting sequence with GTCN PAM
caacucacucauguccuuga

SEQ ID NO: 6744 - RNA, 20 nt, Artificial Sequence
  targeting sequence with GTCN PAM
uugagagaguagaaugguuu

SEQ ID NO: 6745 - RNA, 20 nt, Artificial Sequence
  targeting sequence with GTCN PAM
gcuugaaggcuaugcccucu

SEQ ID NO: 6746 - RNA, 20 nt, Artificial Sequence
  targeting sequence with GTCN PAM
ugccugcaucccuuacugug

SEQ ID NO: 6747 - RNA, 20 nt, Artificial Sequence
  targeting sequence with GTCN PAM
ccuggcagggcugagaauca

SEQ ID NO: 6748 - RNA, 20 nt, Artificial Sequence
  targeting sequence with GTCN PAM
cuguuccccaggaaccaaac

SEQ ID NO: 6749 - RNA, 20 nt, Artificial Sequence
  targeting sequence with GTCN PAM
ucacacuggguguuccaagc

SEQ ID NO: 6750 - RNA, 20 nt, Artificial Sequence
  targeting sequence with GTCN PAM
gcuacaauggcuccaagauc

SEQ ID NO: 6751 - RNA, 20 nt, Artificial Sequence
  targeting sequence with GTCN PAM
ucuccauuucugccguggag

SEQ ID NO: 6752 - RNA, 20 nt, Artificial Sequence
  targeting sequence with GTCN PAM
acucuuagcacuggcaaggc

SEQ ID NO: 6753 - RNA, 20 nt, Artificial Sequence
  targeting sequence with GTCN PAM
uguuuacaggccaggcucag

SEQ ID NO: 6754 - RNA, 20 nt, Artificial Sequence
  targeting sequence with GTCN PAM
augaagugcuggcuguacac

SEQ ID NO: 6755 - RNA, 20 nt, Artificial Sequence
  targeting sequence with GTCN PAM
ucuggccuuuucacucaaca

SEQ ID NO: 6756 - RNA, 20 nt, Artificial Sequence
  targeting sequence with GTCN PAM
guaaaugguaaauguucuua

SEQ ID NO: 6757 - RNA, 20 nt, Artificial Sequence
  targeting sequence with GTCN PAM
acaauuacccuaaauuuugc

SEQ ID NO: 6758 - RNA, 20 nt, Artificial Sequence
  targeting sequence with GTCN PAM
uggcacugaacacugccacc

SEQ ID NO: 6759 - RNA, 20 nt, Artificial Sequence
  targeting sequence with GTCN PAM
cugguguugugcuuuuuaca

SEQ ID NO: 6760 - RNA, 20 nt, Artificial Sequence
  targeting sequence with GTCN PAM
ccaccugccuuguauuuaca

SEQ ID NO: 6761 - RNA, 20 nt, Artificial Sequence
  targeting sequence with GTCN PAM
uguggauguuccacagcuuu

SEQ ID NO: 6762 - RNA, 20 nt, Artificial Sequence
  targeting sequence with GTCN PAM
uacuggacauguuugcugcu

SEQ ID NO: 6763 - RNA, 20 nt, Artificial Sequence
  targeting sequence with GTCN PAM
aguaggacugguaaagaaag

SEQ ID NO: 6764 - RNA, 20 nt, Artificial Sequence
  targeting sequence with GTCN PAM
uugcaccugucccaacuugg

SEQ ID NO: 6765 - RNA, 20 nt, Artificial Sequence
  targeting sequence with GTCN PAM
caacuuggcgccuuggcaua

SEQ ID NO: 6766 - RNA, 20 nt, Artificial Sequence
  targeting sequence with GTCN PAM
aagcacguguaccuuugaaa

SEQ ID NO: 6767 - RNA, 20 nt, Artificial Sequence
  targeting sequence with GTCN PAM
uucaaagguacacgugcuuu

SEQ ID NO: 6768 - RNA, 20 nt, Artificial Sequence
  targeting sequence with GTCN PAM
gucuguuuuccccauacaac

SEQ ID NO: 6769 - RNA, 20 nt, Artificial Sequence
  targeting sequence with GTCN PAM
guuuuccccauacaacucag

SEQ ID NO: 6770 - RNA, 20 nt, Artificial Sequence
  targeting sequence with GTCN PAM
ugaguuucgaggguaucauc

SEQ ID NO: 6771 - RNA, 20 nt, Artificial Sequence
  targeting sequence with GTCN PAM
ugcagucaugaguuucgagg

SEQ ID NO: 6772 - RNA, 20 nt, Artificial Sequence
  targeting sequence with GTCN PAM
ggcauggaugaugggcauuu

SEQ ID NO: 6773 - RNA, 20 nt, Artificial Sequence
  targeting sequence with GTCN PAM
uuuuccucagaucugaauuc

SEQ ID NO: 6774 - RNA, 20 nt, Artificial Sequence
  targeting sequence with GTCN PAM
ugcugccacuuccacccacc

SEQ ID NO: 6775 - RNA, 20 nt, Artificial Sequence
  targeting sequence with GTCN PAM
aggagaagcuguucgugccc

SEQ ID NO: 6776 - RNA, 20 nt, Artificial Sequence
  targeting sequence with GTCN PAM
ucgucauccuugucugcccc

SEQ ID NO: 6777 - RNA, 20 nt, Artificial Sequence
  targeting sequence with GTCN PAM
uccuugucugccccauuaca

SEQ ID NO: 6778 - RNA, 20 nt, Artificial Sequence
  targeting sequence with GTCN PAM
gccccauuacaaacccacgc

SEQ ID NO: 6779 - RNA, 20 nt, Artificial Sequence
  targeting sequence with GTCN PAM
ggauggcaaucuugggagaa

SEQ ID NO: 6780 - RNA, 20 nt, Artificial Sequence
  targeting sequence with GTCN PAM
gagagcagcaaacugcauuu

SEQ ID NO: 6781 - RNA, 20 nt, Artificial Sequence
  targeting sequence with GTCN PAM
uggcagaggaagccccaggc

SEQ ID NO: 6782 - RNA, 20 nt, Artificial Sequence
  targeting sequence with GTCN PAM
ugcugacugcaccaaggcca

SEQ ID NO: 6783 - RNA, 20 nt, Artificial Sequence
  targeting sequence with GTCN PAM
gcaagacuuugcugcugaau

SEQ ID NO: 6784 - RNA, 20 nt, Artificial Sequence
  targeting sequence with GTCN PAM
gcaggauggccuuggugcag

SEQ ID NO: 6785 - RNA, 20 nt, Artificial Sequence
  targeting sequence with GTCN PAM
ggacugccaaggguuaggaa

SEQ ID NO: 6786 - RNA, 20 nt, Artificial Sequence
  targeting sequence with GTCN PAM
ugacccgcugcgucagcagg

SEQ ID NO: 6787 - RNA, 20 nt, Artificial Sequence
  targeting sequence with GTCN PAM
ugagaauguguuuccuaacc

SEQ ID NO: 6788 - RNA, 20 nt, Artificial Sequence
  targeting sequence with GTCN PAM
ccucugccuccggccauccu

SEQ ID NO: 6789 - RNA, 20 nt, Artificial Sequence
  targeting sequence with GTCN PAM
gaugcuuucucccuccucuc

SEQ ID NO: 6790 - RNA, 20 nt, Artificial Sequence
  targeting sequence with GTCN PAM
uggaauuuuugguugccuuu

SEQ ID NO: 6791 - RNA, 20 nt, Artificial Sequence
  targeting sequence with GTCN PAM
ugugcaagaacugguuuguc

SEQ ID NO: 6792 - RNA, 20 nt, Artificial Sequence
  targeting sequence with GTCN PAM
gggcugccaaguaggacaac

SEQ ID NO: 6793 - RNA, 20 nt, Artificial Sequence
  targeting sequence with GTCN PAM
uacuuggcagcccugacaaa

SEQ ID NO: 6794 - RNA, 20 nt, Artificial Sequence
  targeting sequence with GTCN PAM
ccaccgccuugagaagcccu

SEQ ID NO: 6795 - RNA, 20 nt, Artificial Sequence
  targeting sequence with GTCN PAM
auuuuuaaaacuccacucaa

SEQ ID NO: 6796 - RNA, 20 nt, Artificial Sequence
  targeting sequence with GTCN PAM
aaguguuagccauccaucau

SEQ ID NO: 6797 - RNA, 20 nt, Artificial Sequence
  targeting sequence with GTCN PAM
cacucacggggcagucagca

SEQ ID NO: 6798 - RNA, 20 nt, Artificial Sequence
  targeting sequence with GTCN PAM
gcauggcaagcaguuggugu

SEQ ID NO: 6799 - RNA, 20 nt, Artificial Sequence
  targeting sequence with GTCN PAM
ugacucugccaucucaagca

SEQ ID NO: 6800 - RNA, 20 nt, Artificial Sequence
  targeting sequence with GTCN PAM
ggacugaaagcuggugcucc

SEQ ID NO: 6801 - RNA, 20 nt, Artificial Sequence
  targeting sequence with GTCN PAM
agccaaauuucuauuauuau

SEQ ID NO: 6802 - RNA, 20 nt, Artificial Sequence
  targeting sequence with GTCN PAM
guaauaaggagaaauaauaa

SEQ ID NO: 6803 - RNA, 20 nt, Artificial Sequence
  targeting sequence with GTCN PAM
guaaguacagccuguugcaa

SEQ ID NO: 6804 - RNA, 20 nt, Artificial Sequence
  targeting sequence with GTCN PAM
gucaguaaguacagccuguu

SEQ ID NO: 6805 - RNA, 20 nt, Artificial Sequence
  targeting sequence with GTCN PAM
ggaaaggaagaguggagcag

SEQ ID NO: 6806 - RNA, 20 nt, Artificial Sequence
  targeting sequence with GTCN PAM
uguuccuacccccaccuuuc

SEQ ID NO: 6807 - RNA, 20 nt, Artificial Sequence
  targeting sequence with GTCN PAM
ugcccagcucaggcuaccau

SEQ ID NO: 6808 - RNA, 20 nt, Artificial Sequence
  targeting sequence with GTCN PAM
ccagccuaggauguggcuga

SEQ ID NO: 6809 - RNA, 20 nt, Artificial Sequence
  targeting sequence with GTCN PAM
ccugcuccguagccuaugcc

SEQ ID NO: 6810 - RNA, 20 nt, Artificial Sequence
  targeting sequence with GTCN PAM
acucucagagcaaaacaugg

SEQ ID NO: 6811 - RNA, 20 nt, Artificial Sequence
  targeting sequence with GTCN PAM
gucuacucucagagcaaaac

SEQ ID NO: 6812 - RNA, 20 nt, Artificial Sequence
  targeting sequence with GTCN PAM
cauuuuuuagcuuuagaauu

SEQ ID NO: 6813 - RNA, 20 nt, Artificial Sequence
  targeting sequence with GTCN PAM
uugaaauuuccagucccauu

SEQ ID NO: 6814 - RNA, 20 nt, Artificial Sequence
  targeting sequence with GTCN PAM
gucuuugaaauuuccagucc

SEQ ID NO: 6815 - RNA, 20 nt, Artificial Sequence
  targeting sequence with GTCN PAM
uggcugauuucucuucccug

SEQ ID NO: 6816 - RNA, 20 nt, Artificial Sequence
  targeting sequence with GTCN PAM
uggcccaacucaagacucau

SEQ ID NO: 6817 - RNA, 20 nt, Artificial Sequence
  targeting sequence with GTCN PAM
ugaguugggccaugacaucu

SEQ ID NO: 6818 - RNA, 20 nt, Artificial Sequence
  targeting sequence with GTCN PAM
agucaccucuggcuauugcc

SEQ ID NO: 6819 - RNA, 20 nt, Artificial Sequence
  targeting sequence with GTCN PAM
ccucuggcuauugccagcua

SEQ ID NO: 6820 - RNA, 20 nt, Artificial Sequence
  targeting sequence with GTCN PAM
cagcaaauagcuggcaauag

SEQ ID NO: 6821 - RNA, 20 nt, Artificial Sequence
  targeting sequence with GTCN PAM
uuuguccucucugagucucg

SEQ ID NO: 6822 - RNA, 20 nt, Artificial Sequence
  targeting sequence with GTCN PAM
ucucugagucucggucuccu

SEQ ID NO: 6823 - RNA, 20 nt, Artificial Sequence
  targeting sequence with GTCN PAM
cggucuccugggcuguagcc

SEQ ID NO: 6824 - RNA, 20 nt, Artificial Sequence
  targeting sequence with GTCN PAM
ccugggcuguagccagggag

SEQ ID NO: 6825 - RNA, 20 nt, Artificial Sequence
  targeting sequence with GTCN PAM
ugugcaguagguauuauuuc

SEQ ID NO: 6826 - RNA, 20 nt, Artificial Sequence
  targeting sequence with GTCN PAM
ccacaguccugugcaguagg

SEQ ID NO: 6827 - RNA, 20 nt, Artificial Sequence
  targeting sequence with GTCN PAM
uuaggaacuauucaugggca

SEQ ID NO: 6828 - RNA, 20 nt, Artificial Sequence
  targeting sequence with GTCN PAM
ccagggcagggaucaggaga

SEQ ID NO: 6829 - RNA, 20 nt, Artificial Sequence
  targeting sequence with GTCN PAM
aagaaagguaagugauuugc

SEQ ID NO: 6830 - RNA, 20 nt, Artificial Sequence
  targeting sequence with GTCN PAM
cuggaagaagaggccauucc

SEQ ID NO: 6831 - RNA, 20 nt, Artificial Sequence
  targeting sequence with GTCN PAM
ggaauggccucuucuuccag

SEQ ID NO: 6832 - RNA, 20 nt, Artificial Sequence
  targeting sequence with GTCN PAM
gcaaacguagacugggguuc

SEQ ID NO: 6833 - RNA, 20 nt, Artificial Sequence
  targeting sequence with GTCN PAM
acguuugcugacacaaugaa

SEQ ID NO: 6834 - RNA, 20 nt, Artificial Sequence
  targeting sequence with GTCN PAM
agaucgcagguugugccgca

SEQ ID NO: 6835 - RNA, 20 nt, Artificial Sequence
  targeting sequence with GTCN PAM
cagcuuccucugcccuuugu

SEQ ID NO: 6836 - RNA, 20 nt, Artificial Sequence
  targeting sequence with GTCN PAM
ucccaagccccucaagcccc

SEQ ID NO: 6837 - RNA, 20 nt, Artificial Sequence
  targeting sequence with GTCN PAM
ccucuucugcagaguccucc

SEQ ID NO: 6838 - RNA, 20 nt, Artificial Sequence
  targeting sequence with GTCN PAM
cccucaccuggaaugccuuu

SEQ ID NO: 6839 - RNA, 20 nt, Artificial Sequence
  targeting sequence with GTCN PAM
ugagagaggugcaggaugga

SEQ ID NO: 6840 - RNA, 20 nt, Artificial Sequence
  targeting sequence with GTCN PAM
ucuuuuuuucccuugaugaa

SEQ ID NO: 6841 - RNA, 20 nt, Artificial Sequence
  targeting sequence with GTCN PAM
gcucccauguaccaguaccu

SEQ ID NO: 6842 - RNA, 20 nt, Artificial Sequence
  targeting sequence with GTCN PAM
cagacacugauuggcgugaa

SEQ ID NO: 6843 - RNA, 20 nt, Artificial Sequence
  targeting sequence with GTCN PAM
gugacacccaagcaagcaau

SEQ ID NO: 6844 - RNA, 20 nt, Artificial Sequence
  targeting sequence with GTCN PAM
uuguggggucccuuaagaag

SEQ ID NO: 6845 - RNA, 20 nt, Artificial Sequence
  targeting sequence with GTCN PAM
cuuaagaaggcagaugggga

SEQ ID NO: 6846 - RNA, 20 nt, Artificial Sequence
  targeting sequence with GTCN PAM
augaaucccgccaugaaggu

SEQ ID NO: 6847 - RNA, 20 nt, Artificial Sequence
  targeting sequence with GTCN PAM
uuuccuggccuagucuauga

SEQ ID NO: 6848 - RNA, 20 nt, Artificial Sequence
  targeting sequence with GTCN PAM
augaaagcuagagagauggc

SEQ ID NO: 6849 - RNA, 20 nt, Artificial Sequence
  targeting sequence with GTCN PAM
auuaaugagcugcucauuuu

SEQ ID NO: 6850 - RNA, 20 nt, Artificial Sequence
  targeting sequence with GTCN PAM
auauucccgggcugacauug

SEQ ID NO: 6851 - RNA, 20 nt, Artificial Sequence
  targeting sequence with GTCN PAM
gcccgggaauauggacaaaa

SEQ ID NO: 6852 - RNA, 20 nt, Artificial Sequence
  targeting sequence with GTCN PAM
cucuuugccacuccuucaau

SEQ ID NO: 6853 - RNA, 20 nt, Artificial Sequence
  targeting sequence with GTCN PAM
ugaucuaacccaaggcgggc

SEQ ID NO: 6854 - RNA, 20 nt, Artificial Sequence
  targeting sequence with GTCN PAM
ccucucuucaugccuacaag

SEQ ID NO: 6855 - RNA, 20 nt, Artificial Sequence
  targeting sequence with GTCN PAM
agucuccucucuucaugccu

SEQ ID NO: 6856 - RNA, 20 nt, Artificial Sequence
  targeting sequence with GTCN PAM
gguccagucuccucucuuca

SEQ ID NO: 6857 - RNA, 20 nt, Artificial Sequence
  targeting sequence with GTCN PAM
uggucugguccagucuccuc

SEQ ID NO: 6858 - RNA, 20 nt, Artificial Sequence
  targeting sequence with GTCN PAM
cauaaggggcucugggaccu

SEQ ID NO: 6859 - RNA, 20 nt, Artificial Sequence
  targeting sequence with GTCN PAM
cagagccccuuaugugacac

SEQ ID NO: 6860 - RNA, 20 nt, Artificial Sequence
  targeting sequence with GTCN PAM
ucccaguucugaaauggggg

SEQ ID NO: 6861 - RNA, 20 nt, Artificial Sequence
  targeting sequence with GTCN PAM
ugaggcuuaacugagauguu

SEQ ID NO: 6862 - RNA, 20 nt, Artificial Sequence
  targeting sequence with GTCN PAM
ucaguguaggaaaguggaga

SEQ ID NO: 6863 - RNA, 20 nt, Artificial Sequence
  targeting sequence with GTCN PAM
ugcucuauggcccaggcugg

SEQ ID NO: 6864 - RNA, 20 nt, Artificial Sequence
  targeting sequence with GTCN PAM
gagucuugcucuauggccca

SEQ ID NO: 6865 - RNA, 20 nt, Artificial Sequence
  targeting sequence with GTCN PAM
cccucccugcuggcauuucu

SEQ ID NO: 6866 - RNA, 20 nt, Artificial Sequence
  targeting sequence with GTCN PAM
ucucccucccugcuggcauu

SEQ ID NO: 6867 - RNA, 20 nt, Artificial Sequence
  targeting sequence with GTCN PAM
caauauuuaaacaaauauau

SEQ ID NO: 6868 - RNA, 20 nt, Artificial Sequence
  targeting sequence with GTCN PAM
ccgucucaauauuuaaacaa

SEQ ID NO: 6869 - RNA, 20 nt, Artificial Sequence
  targeting sequence with GTCN PAM
ugaacuccugggcucaagca

SEQ ID NO: 6870 - RNA, 20 nt, Artificial Sequence
  targeting sequence with GTCN PAM
ucuugccucagccucccaaa

SEQ ID NO: 6871 - RNA, 20 nt, Artificial Sequence
  targeting sequence with GTCN PAM
aucucuaggaaccacuauau

SEQ ID NO: 6872 - RNA, 20 nt, Artificial Sequence
  targeting sequence with GTCN PAM
ggcgggagcucagcagcucu

SEQ ID NO: 6873 - RNA, 20 nt, Artificial Sequence
  targeting sequence with GTCN PAM
caaggccccugaaugagcuc

SEQ ID NO: 6874 - RNA, 20 nt, Artificial Sequence
  targeting sequence with GTCN PAM
gagucacaaggccccugaau

SEQ ID NO: 6875 - RNA, 20 nt, Artificial Sequence
  targeting sequence with GTCN PAM
gggugccuggucagagucac

SEQ ID NO: 6876 - RNA, 20 nt, Artificial Sequence
  targeting sequence with GTCN PAM
gguugaaggaacucggaaac

SEQ ID NO: 6877 - RNA, 20 nt, Artificial Sequence
  targeting sequence with GTCN PAM
aggauuugcccauuaauaaa

SEQ ID NO: 6878 - RNA, 20 nt, Artificial Sequence
  targeting sequence with GTCN PAM
uucuagcuguagcucagcug

SEQ ID NO: 6879 - RNA, 20 nt, Artificial Sequence
  targeting sequence with GTCN PAM
guagcaggccccuuuccaca

SEQ ID NO: 6880 - RNA, 20 nt, Artificial Sequence
  targeting sequence with GTCN PAM
ucgcucugagccuacuucuc

SEQ ID NO: 6881 - RNA, 20 nt, Artificial Sequence
  targeting sequence with GTCN PAM
gaguccucgcucugagccua

SEQ ID NO: 6882 - RNA, 20 nt, Artificial Sequence
  targeting sequence with GTCN PAM
uacacaucacccucuagauc

SEQ ID NO: 6883 - RNA, 20 nt, Artificial Sequence
  targeting sequence with GTCN PAM
caagcuguaggucuuacaca

SEQ ID NO: 6884 - RNA, 20 nt, Artificial Sequence
  targeting sequence with GTCN PAM
uagcccuguguuccuuggcc

SEQ ID NO: 6885 - RNA, 20 nt, Artificial Sequence
  targeting sequence with GTCN PAM
gaaccuggcaaacaaguguu

SEQ ID NO: 6886 - RNA, 20 nt, Artificial Sequence
  targeting sequence with GTCN PAM
gagcaugagcagggguggga

SEQ ID NO: 6887 - RNA, 20 nt, Artificial Sequence
  targeting sequence with GTCN PAM
ugaucuguuuaauugaccag

SEQ ID NO: 6888 - RNA, 20 nt, Artificial Sequence
  targeting sequence with GTCN PAM
auuaaacagaucaugacacc

SEQ ID NO: 6889 - RNA, 20 nt, Artificial Sequence
  targeting sequence with GTCN PAM
acauucuaacagggaaagcu

SEQ ID NO: 6890 - RNA, 20 nt, Artificial Sequence
  targeting sequence with GTCN PAM
cccuccacaauucagagguc

SEQ ID NO: 6891 - RNA, 20 nt, Artificial Sequence
  targeting sequence with GTCN PAM
cggccccugucccccuccac

SEQ ID NO: 6892 - RNA, 20 nt, Artificial Sequence
  targeting sequence with GTCN PAM
ucagucucuugacaggaagc

SEQ ID NO: 6893 - RNA, 20 nt, Artificial Sequence
  targeting sequence with GTCN PAM
cuugacaggaagccuggucc

SEQ ID NO: 6894 - RNA, 20 nt, Artificial Sequence
  targeting sequence with GTCN PAM
agagacugaggacccaggga

SEQ ID NO: 6895 - RNA, 20 nt, Artificial Sequence
  targeting sequence with GTCN PAM
ugugggaugaaaagauaaag

SEQ ID NO: 6896 - RNA, 20 nt, Artificial Sequence
  targeting sequence with GTCN PAM
ccugcaaggcaggccgggga

SEQ ID NO: 6897 - RNA, 20 nt, Artificial Sequence
  targeting sequence with GTCN PAM
ccggccugccuugcagguga

SEQ ID NO: 6898 - RNA, 20 nt, Artificial Sequence
  targeting sequence with GTCN PAM
uuucaggagggaggaugcca

SEQ ID NO: 6899 - RNA, 20 nt, Artificial Sequence
  targeting sequence with GTCN PAM
ggauugcucugcguguucag

SEQ ID NO: 6900 - RNA, 20 nt, Artificial Sequence
  targeting sequence with GTCN PAM
gcccauuuugaauggggcaa

SEQ ID NO: 6901 - RNA, 20 nt, Artificial Sequence
  targeting sequence with GTCN PAM
ccauuuauugccccauucaa

SEQ ID NO: 6902 - RNA, 20 nt, Artificial Sequence
  targeting sequence with GTCN PAM
ggcugcuuucagguggcuuu

SEQ ID NO: 6903 - RNA, 20 nt, Artificial Sequence
  targeting sequence with GTCN PAM
gcuuguuccucagaaacuuc

SEQ ID NO: 6904 - RNA, 20 nt, Artificial Sequence
  targeting sequence with GTCN PAM
augaguuaaagucucuggcu

SEQ ID NO: 6905 - RNA, 20 nt, Artificial Sequence
  targeting sequence with GTCN PAM
cuggcuuuacugugaguuca

SEQ ID NO: 6906 - RNA, 20 nt, Artificial Sequence
  targeting sequence with GTCN PAM
guggaaggcaaacucuuuau

SEQ ID NO: 6907 - RNA, 20 nt, Artificial Sequence
  targeting sequence with GTCN PAM
uuauacccucucagcuuucc

SEQ ID NO: 6908 - RNA, 20 nt, Artificial Sequence
  targeting sequence with GTCN PAM
ccugugucuguggcaccacu

SEQ ID NO: 6909 - RNA, 20 nt, Artificial Sequence
  targeting sequence with GTCN PAM
guggcaccacuggguaggca

SEQ ID NO: 6910 - RNA, 20 nt, Artificial Sequence
  targeting sequence with GTCN PAM
ccugcauucuacccauguug

SEQ ID NO: 6911 - RNA, 20 nt, Artificial Sequence
  targeting sequence with GTCN PAM
cucaucaguccaugcaucuc

SEQ ID NO: 6912 - RNA, 20 nt, Artificial Sequence
  targeting sequence with GTCN PAM
augcaucucauccucuccug

SEQ ID NO: 6913 - RNA, 20 nt, Artificial Sequence
  targeting sequence with GTCN PAM
cgcagcaucacagcaggaga

SEQ ID NO: 6914 - RNA, 20 nt, Artificial Sequence
  targeting sequence with GTCN PAM
gaccggcuuguucuucuuug

SEQ ID NO: 6915 - RNA, 20 nt, Artificial Sequence
  targeting sequence with GTCN PAM
gacccucuggggggucacgc

SEQ ID NO: 6916 - RNA, 20 nt, Artificial Sequence
  targeting sequence with GTCN PAM
agagucucccaaggaggcac

SEQ ID NO: 6917 - RNA, 20 nt, Artificial Sequence
  targeting sequence with GTCN PAM
cccaaggaggcaccgccaca

SEQ ID NO: 6918 - RNA, 20 nt, Artificial Sequence
  targeting sequence with GTCN PAM
guggcggugccuccuuggga

SEQ ID NO: 6919 - RNA, 20 nt, Artificial Sequence
  targeting sequence with GTCN PAM
uuuugagaucagguaaaaca

SEQ ID NO: 6920 - RNA, 20 nt, Artificial Sequence
  targeting sequence with GTCN PAM
uugcuguucuuuacaugguc

SEQ ID NO: 6921 - RNA, 20 nt, Artificial Sequence
  targeting sequence with GTCN PAM
aaucccauggauaaagccau

SEQ ID NO: 6922 - RNA, 20 nt, Artificial Sequence
  targeting sequence with GTCN PAM
agauagagcuugacuuccca

SEQ ID NO: 6923 - RNA, 20 nt, Artificial Sequence
  targeting sequence with GTCN PAM
agcucuaucuagacagugag

SEQ ID NO: 6924 - RNA, 20 nt, Artificial Sequence
  targeting sequence with GTCN PAM
ucuuggcuucaaaagugggu

SEQ ID NO: 6925 - RNA, 20 nt, Artificial Sequence
  targeting sequence with GTCN PAM
uguacucugaugaaggccug

SEQ ID NO: 6926 - RNA, 20 nt, Artificial Sequence
  targeting sequence with GTCN PAM
ucaaggcucuugccuguuag

SEQ ID NO: 6927 - RNA, 20 nt, Artificial Sequence
  targeting sequence with GTCN PAM
gggcaucugggccacagccu

SEQ ID NO: 6928 - RNA, 20 nt, Artificial Sequence
  targeting sequence with GTCN PAM
cccccaguguggccacucug

SEQ ID NO: 6929 - RNA, 20 nt, Artificial Sequence
  targeting sequence with GTCN PAM
gugaaaagggauuggaccua

SEQ ID NO: 6930 - RNA, 20 nt, Artificial Sequence
  targeting sequence with GTCN PAM
aaucccuuuucacagacuag

SEQ ID NO: 6931 - RNA, 20 nt, Artificial Sequence
  targeting sequence with GTCN PAM
auuucuggggaauggagcuc

SEQ ID NO: 6932 - RNA, 20 nt, Artificial Sequence
  targeting sequence with GTCN PAM
gaacugagcgccccagaguu

SEQ ID NO: 6933 - RNA, 20 nt, Artificial Sequence
  targeting sequence with GTCN PAM
auauucucagccagaaacag

SEQ ID NO: 6934 - RNA, 20 nt, Artificial Sequence
  targeting sequence with GTCN PAM
uccaaacccaauaggccugc

SEQ ID NO: 6935 - RNA, 20 nt, Artificial Sequence
  targeting sequence with GTCN PAM
acacuaugcuuuuuuuuucu

SEQ ID NO: 6936 - RNA, 20 nt, Artificial Sequence
  targeting sequence with GTCN PAM
auaaugcuagcacuuuggga

SEQ ID NO: 6937 - RNA, 20 nt, Artificial Sequence
  targeting sequence with GTCN PAM
aagggccgggcaugguagcu

SEQ ID NO: 6938 - RNA, 20 nt, Artificial Sequence
  targeting sequence with GTCN PAM
ggcugucuguuaaaaggcau

SEQ ID NO: 6939 - RNA, 20 nt, Artificial Sequence
  targeting sequence with GTCN PAM
guuaaaaggcauauacauuu

SEQ ID NO: 6940 - RNA, 20 nt, Artificial Sequence
  targeting sequence with GTCN PAM
ugucccucucauucauuucc

SEQ ID NO: 6941 - RNA, 20 nt, Artificial Sequence
  targeting sequence with GTCN PAM
cucucauucauuuccccaua

SEQ ID NO: 6942 - RNA, 20 nt, Artificial Sequence
  targeting sequence with GTCN PAM
ugggccagcccuugugccga

SEQ ID NO: 6943 - RNA, 20 nt, Artificial Sequence
  targeting sequence with GTCN PAM
ugcugagccuuaauuuccuc

SEQ ID NO: 6944 - RNA, 20 nt, Artificial Sequence
  targeting sequence with GTCN PAM
auagccaaaaacuuggugga

SEQ ID NO: 6945 - RNA, 20 nt, Artificial Sequence
  targeting sequence with GTCN PAM
auuuccuaagcucaugcucu

SEQ ID NO: 6946 - RNA, 20 nt, Artificial Sequence
  targeting sequence with GTCN PAM
gcagcacugggcauuuugag

SEQ ID NO: 6947 - RNA, 20 nt, Artificial Sequence
  targeting sequence with GTCN PAM
ucaccugaagccaaggagca

SEQ ID NO: 6948 - RNA, 20 nt, Artificial Sequence
  targeting sequence with GTCN PAM
aacuauuacuugucacaucu

SEQ ID NO: 6949 - RNA, 20 nt, Artificial Sequence
  targeting sequence with GTCN PAM
caucuuacuggggucaaaau

SEQ ID NO: 6950 - RNA, 20 nt, Artificial Sequence
  targeting sequence with GTCN PAM
aaauguaguccucuccucgu

SEQ ID NO: 6951 - RNA, 20 nt, Artificial Sequence
  targeting sequence with GTCN PAM
ucuccucguaugcuaugagc

SEQ ID NO: 6952 - RNA, 20 nt, Artificial Sequence
  targeting sequence with GTCN PAM
cuugaaaaaaaguaaagugc

SEQ ID NO: 6953 - RNA, 20 nt, Artificial Sequence
  targeting sequence with GTCN PAM
auauagagcacacucaaagg

SEQ ID NO: 6954 - RNA, 20 nt, Artificial Sequence
  targeting sequence with GTCN PAM
gcaggcagucgauauagagc

SEQ ID NO: 6955 - RNA, 20 nt, Artificial Sequence
  targeting sequence with GTCN PAM
ugcugacggggggaaagaac

SEQ ID NO: 6956 - RNA, 20 nt, Artificial Sequence
  targeting sequence with GTCN PAM
gcaggacaagaacaucuccc

SEQ ID NO: 6957 - RNA, 20 nt, Artificial Sequence
  targeting sequence with GTCN PAM
acaugggcagguucuuuccc

SEQ ID NO: 6958 - RNA, 20 nt, Artificial Sequence
  targeting sequence with GTCN PAM
uggugauauccuggggccua

SEQ ID NO: 6959 - RNA, 20 nt, Artificial Sequence
  targeting sequence with GTCN PAM
aguaaaaccuuuuuuguuug

SEQ ID NO: 6960 - RNA, 20 nt, Artificial Sequence
  targeting sequence with GTCN PAM
ggcuauauugaccaggcugg

SEQ ID NO: 6961 - RNA, 20 nt, Artificial Sequence
  targeting sequence with GTCN PAM
auauagccagacucuaucuc

SEQ ID NO: 6962 - RNA, 20 nt, Artificial Sequence
  targeting sequence with GTCN PAM
aaagaggaggaucacuugag

SEQ ID NO: 6963 - RNA, 20 nt, Artificial Sequence
  targeting sequence with GTCN PAM
agccaaaaucaaucuuuuau

SEQ ID NO: 6964 - RNA, 20 nt, Artificial Sequence
  targeting sequence with GTCN PAM
guauggaagcauguugccuc

SEQ ID NO: 6965 - RNA, 20 nt, Artificial Sequence
  targeting sequence with GTCN PAM
aagaguuugauucaaugucu

SEQ ID NO: 6966 - RNA, 20 nt, Artificial Sequence
  targeting sequence with GTCN PAM
uaucguccuccaauaugcug

SEQ ID NO: 6967 - RNA, 20 nt, Artificial Sequence
  targeting sequence with GTCN PAM
uccaauaugcugcucuuucu

SEQ ID NO: 6968 - RNA, 20 nt, Artificial Sequence
  targeting sequence with GTCN PAM
acagcucgaguauuuguaaa

SEQ ID NO: 6969 - RNA, 20 nt, Artificial Sequence
  targeting sequence with GTCN PAM
gggaacauucgcuugucuac

SEQ ID NO: 6970 - RNA, 20 nt, Artificial Sequence
  targeting sequence with GTCN PAM
ccaacaacacacacacacac

SEQ ID NO: 6971 - RNA, 20 nt, Artificial Sequence
  targeting sequence with GTCN PAM
uuugaagcaagugauguccc

SEQ ID NO: 6972 - RNA, 20 nt, Artificial Sequence
  targeting sequence with GTCN PAM
gacagaacugcguccaaauu

SEQ ID NO: 6973 - RNA, 20 nt, Artificial Sequence
  targeting sequence with GTCN PAM
gacuccagauauuccuugua

SEQ ID NO: 6974 - RNA, 20 nt, Artificial Sequence
  targeting sequence with GTCN PAM
aaauuccagcucugucugac

SEQ ID NO: 6975 - RNA, 20 nt, Artificial Sequence
  targeting sequence with GTCN PAM
gacccugaccuguuccucuu

SEQ ID NO: 6976 - RNA, 20 nt, Artificial Sequence
  targeting sequence with GTCN PAM
gacagagcuggaauuuggac

SEQ ID NO: 6977 - RNA, 20 nt, Artificial Sequence
  targeting sequence with GTCN PAM
gggucagacagagcuggaau

SEQ ID NO: 6978 - RNA, 20 nt, Artificial Sequence
  targeting sequence with GTCN PAM
cagcguccuucacucuaaca

SEQ ID NO: 6979 - RNA, 20 nt, Artificial Sequence
  targeting sequence with GTCN PAM
uucacucuaacacuugggua

SEQ ID NO: 6980 - RNA, 20 nt, Artificial Sequence
  targeting sequence with GTCN PAM
cacuacccaaguguuagagu

SEQ ID NO: 6981 - RNA, 20 nt, Artificial Sequence
  targeting sequence with GTCN PAM
cugagaggaauaaaggggcc

SEQ ID NO: 6982 - RNA, 20 nt, Artificial Sequence
  targeting sequence with GTCN PAM
uacgauaucccuacuucuaa

SEQ ID NO: 6983 - RNA, 20 nt, Artificial Sequence
  targeting sequence with GTCN PAM
uccuauuuuauuggucuccc

SEQ ID NO: 6984 - RNA, 20 nt, Artificial Sequence
  targeting sequence with GTCN PAM
cccucuugggcagaaacccu

SEQ ID NO: 6985 - RNA, 20 nt, Artificial Sequence
  targeting sequence with GTCN PAM
uccccaugagccacaacucu

SEQ ID NO: 6986 - RNA, 20 nt, Artificial Sequence
  targeting sequence with GTCN PAM
uggaugagucagagcacaca

SEQ ID NO: 6987 - RNA, 20 nt, Artificial Sequence
  targeting sequence with GTCN PAM
gagcacacacuauucaaacu

SEQ ID NO: 6988 - RNA, 20 nt, Artificial Sequence
  targeting sequence with GTCN PAM
uagccuuggaauacacagga

SEQ ID NO: 6989 - RNA, 20 nt, Artificial Sequence
  targeting sequence with GTCN PAM
gguaaaagccugcuuuuguu

SEQ ID NO: 6990 - RNA, 20 nt, Artificial Sequence
  targeting sequence with GTCN PAM
agccuucccagcgggaaccu

SEQ ID NO: 6991 - RNA, 20 nt, Artificial Sequence
  targeting sequence with GTCN PAM
cucuccccuagguucccgcu

SEQ ID NO: 6992 - RNA, 20 nt, Artificial Sequence
  targeting sequence with GTCN PAM
cuccccgcuucuuccucucc

SEQ ID NO: 6993 - RNA, 20 nt, Artificial Sequence
  targeting sequence with GTCN PAM
uuguuggucucuccccgcuu

SEQ ID NO: 6994 - RNA, 20 nt, Artificial Sequence
  targeting sequence with GTCN PAM
guguacauuucaagcgcgag

SEQ ID NO: 6995 - RNA, 20 nt, Artificial Sequence
  targeting sequence with GTCN PAM
caggcccaagcuccagcuug

SEQ ID NO: 6996 - RNA, 20 nt, Artificial Sequence
  targeting sequence with GTCN PAM
aaguuauuuuccccaagagu

SEQ ID NO: 6997 - RNA, 20 nt, Artificial Sequence
  targeting sequence with GTCN PAM
gcagcacucuuggggaaaau

SEQ ID NO: 6998 - RNA, 20 nt, Artificial Sequence
  targeting sequence with GTCN PAM
cagaaaggauguggggaaac

SEQ ID NO: 6999 - RNA, 20 nt, Artificial Sequence
  targeting sequence with GTCN PAM
uuuguuuaccaguuucccca

SEQ ID NO: 7000 - RNA, 20 nt, Artificial Sequence
  targeting sequence with GTCN PAM
guuuuaggugaguuucaacc

SEQ ID NO: 7001 - RNA, 20 nt, Artificial Sequence
  targeting sequence with GTCN PAM
gccuuaaaggucaguuuuag

SEQ ID NO: 7002 - RNA, 20 nt, Artificial Sequence
  targeting sequence with GTCN PAM
gcccccuuggugucagccuu

SEQ ID NO: 7003 - RNA, 20 nt, Artificial Sequence
  targeting sequence with GTCN PAM
gaacugccauagucugcccc

SEQ ID NO: 7004 - RNA, 20 nt, Artificial Sequence
  targeting sequence with GTCN PAM
cugaugaaggucugaacugc

SEQ ID NO: 7005 - RNA, 20 nt, Artificial Sequence
  targeting sequence with GTCN PAM
acaccagcacaaucccuuca

SEQ ID NO: 7006 - RNA, 20 nt, Artificial Sequence
  targeting sequence with GTCN PAM
cccacaaauccucucaaucc

SEQ ID NO: 7007 - RNA, 20 nt, Artificial Sequence
  targeting sequence with GTCN PAM
ggagccgccaagaaucggug

SEQ ID NO: 7008 - RNA, 20 nt, Artificial Sequence
  targeting sequence with GTCN PAM
ucaggcaggagccgguccug

SEQ ID NO: 7009 - RNA, 20 nt, Artificial Sequence
  targeting sequence with GTCN PAM
ugccgaucaugcaggacgac

SEQ ID NO: 7010 - RNA, 20 nt, Artificial Sequence
  targeting sequence with GTCN PAM
ugcaugaucggcaggaccgg

SEQ ID NO: 7011 - RNA, 20 nt, Artificial Sequence
  targeting sequence with GTCN PAM
uccugcaugaucggcaggac

SEQ ID NO: 7012 - RNA, 20 nt, Artificial Sequence
  targeting sequence with GTCN PAM
uggacuucucacugggcuuc

SEQ ID NO: 7013 - RNA, 20 nt, Artificial Sequence
  targeting sequence with GTCN PAM
aggacaaucagcaggugcua

SEQ ID NO: 7014 - RNA, 20 nt, Artificial Sequence
  targeting sequence with GTCN PAM
ggcagagccuccgcccuccc

SEQ ID NO: 7015 - RNA, 20 nt, Artificial Sequence
  targeting sequence with GTCN PAM
caaugcaaaagggaaucucu

SEQ ID NO: 7016 - RNA, 20 nt, Artificial Sequence
  targeting sequence with GTCN PAM
aggaagcuccucuccuacac

SEQ ID NO: 7017 - RNA, 20 nt, Artificial Sequence
  targeting sequence with GTCN PAM
agacauuugcaguucagucu

SEQ ID NO: 7018 - RNA, 20 nt, Artificial Sequence
  targeting sequence with GTCN PAM
ugacugcucugggcuccuua

SEQ ID NO: 7019 - RNA, 20 nt, Artificial Sequence
  targeting sequence with GTCN PAM
aagcaagguucaaagaggcu

SEQ ID NO: 7020 - RNA, 20 nt, Artificial Sequence
  targeting sequence with GTCN PAM
uccuuccaucaaggggcuuu

SEQ ID NO: 7021 - RNA, 20 nt, Artificial Sequence
  targeting sequence with GTCN PAM
aaaguggcucucaguauguu

SEQ ID NO: 7022 - RNA, 20 nt, Artificial Sequence
  targeting sequence with GTCN PAM
cuucauaacauacugagagc

SEQ ID NO: 7023 - RNA, 20 nt, Artificial Sequence
  targeting sequence with GTCN PAM
aacaggugguggaagagcac

SEQ ID NO: 7024 - RNA, 20 nt, Artificial Sequence
  targeting sequence with GTCN PAM
ugggcaacaucacaggccac

SEQ ID NO: 7025 - RNA, 20 nt, Artificial Sequence
  targeting sequence with GTCN PAM
ugaugaacaauagguccugg

SEQ ID NO: 7026 - RNA, 20 nt, Artificial Sequence
  targeting sequence with GTCN PAM
aaguccugaugaacaauagg

SEQ ID NO: 7027 - RNA, 20 nt, Artificial Sequence
  targeting sequence with GTCN PAM
uuucaccuuagugauuucuu

SEQ ID NO: 7028 - RNA, 20 nt, Artificial Sequence
  targeting sequence with GTCN PAM
cagguacggagugaagaaau

SEQ ID NO: 7029 - RNA, 20 nt, Artificial Sequence
  targeting sequence with GTCN PAM
ccuuuccuacccucccucag

SEQ ID NO: 7030 - RNA, 20 nt, Artificial Sequence
  targeting sequence with GTCN PAM
uugguggggccugagggagg

SEQ ID NO: 7031 - RNA, 20 nt, Artificial Sequence
  targeting sequence with GTCN PAM
gugcaucucugcuuccgggg

SEQ ID NO: 7032 - RNA, 20 nt, Artificial Sequence
  targeting sequence with GTCN PAM
ugaucccuuaaggguucauc

SEQ ID NO: 7033 - RNA, 20 nt, Artificial Sequence
  targeting sequence with GTCN PAM
ggcauuuucuacugcagcac

SEQ ID NO: 7034 - RNA, 20 nt, Artificial Sequence
  targeting sequence with GTCN PAM
agaccagccugggcaauaug

SEQ ID NO: 7035 - RNA, 20 nt, Artificial Sequence
  targeting sequence with GTCN PAM
cgaccuccugagcucaagca

SEQ ID NO: 7036 - RNA, 20 nt, Artificial Sequence
  targeting sequence with GTCN PAM
cagcuacugggaggcuaagg

SEQ ID NO: 7037 - RNA, 20 nt, Artificial Sequence
  targeting sequence with GTCN PAM
cccaggcuggaaugcagugg

SEQ ID NO: 7038 - RNA, 20 nt, Artificial Sequence
  targeting sequence with GTCN PAM
ugcucugucacccaggcugg

SEQ ID NO: 7039 - RNA, 20 nt, Artificial Sequence
  targeting sequence with GTCN PAM
aaaaaaaauaauaaaaugcc

SEQ ID NO: 7040 - RNA, 20 nt, Artificial Sequence
  targeting sequence with GTCN PAM
ucccacagaaagaaacugca

SEQ ID NO: 7041 - RNA, 20 nt, Artificial Sequence
  targeting sequence with GTCN PAM
cuauuaccaucugagaaggg

SEQ ID NO: 7042 - RNA, 20 nt, Artificial Sequence
  targeting sequence with GTCN PAM
ugagauuugcacagaauaau

SEQ ID NO: 7043 - RNA, 20 nt, Artificial Sequence
  targeting sequence with GTCN PAM
cguguggccccucucaucuu

SEQ ID NO: 7044 - RNA, 20 nt, Artificial Sequence
  targeting sequence with GTCN PAM
accacaguguaaggaggggc

SEQ ID NO: 7045 - RNA, 20 nt, Artificial Sequence
  targeting sequence with GTCN PAM
cucuaugaagguaaauacuc

SEQ ID NO: 7046 - RNA, 20 nt, Artificial Sequence
  targeting sequence with GTCN PAM
cagaguauuuaccuucauag

SEQ ID NO: 7047 - RNA, 20 nt, Artificial Sequence
  targeting sequence with GTCN PAM
gaauuugagaaauauguacc

SEQ ID NO: 7048 - RNA, 20 nt, Artificial Sequence
  targeting sequence with GTCN PAM
ugauuaacguggcauauuuu

SEQ ID NO: 7049 - RNA, 20 nt, Artificial Sequence
  targeting sequence with GTCN PAM
cuuauccagaaagcauacaa

SEQ ID NO: 7050 - RNA, 20 nt, Artificial Sequence
  targeting sequence with GTCN PAM
cauucaucacucagcacagc

SEQ ID NO: 7051 - RNA, 20 nt, Artificial Sequence
  targeting sequence with GTCN PAM
acuucagggccaagucuuug

SEQ ID NO: 7052 - RNA, 20 nt, Artificial Sequence
  targeting sequence with GTCN PAM
uugccauggccccagauaau

SEQ ID NO: 7053 - RNA, 20 nt, Artificial Sequence
  targeting sequence with GTCN PAM
aaaagcuuccuucaaggcuc

SEQ ID NO: 7054 - RNA, 20 nt, Artificial Sequence
  targeting sequence with GTCN PAM
cagcucccugagugaccagc

SEQ ID NO: 7055 - RNA, 20 nt, Artificial Sequence
  targeting sequence with GTCN PAM
cucagggagcugugacuuca

SEQ ID NO: 7056 - RNA, 20 nt, Artificial Sequence
  targeting sequence with GTCN PAM
ccccugguccccugagcacu

SEQ ID NO: 7057 - RNA, 20 nt, Artificial Sequence
  targeting sequence with GTCN PAM
ccugagcacucacugaaguc

SEQ ID NO: 7058 - RNA, 20 nt, Artificial Sequence
  targeting sequence with GTCN PAM
cuuugaaggacauuucuagu

SEQ ID NO: 7059 - RNA, 20 nt, Artificial Sequence
  targeting sequence with GTCN PAM
uucaaagggacuucagugag

SEQ ID NO: 7060 - RNA, 20 nt, Artificial Sequence
  targeting sequence with GTCN PAM
ccuaagaugccuguuuuccu

SEQ ID NO: 7061 - RNA, 20 nt, Artificial Sequence
  targeting sequence with GTCN PAM
guaaaggcccaaacuaggcg

SEQ ID NO: 7062 - RNA, 20 nt, Artificial Sequence
  targeting sequence with GTCN PAM
ccgccuaguuugggccuuua

SEQ ID NO: 7063 - RNA, 20 nt, Artificial Sequence
  targeting sequence with GTCN PAM
gcuccagggagaaccaaagg

SEQ ID NO: 7064 - RNA, 20 nt, Artificial Sequence
  targeting sequence with GTCN PAM
ucuauugggucccagcauca

SEQ ID NO: 7065 - RNA, 20 nt, Artificial Sequence
  targeting sequence with GTCN PAM
cagcaucaggguauacaaug

SEQ ID NO: 7066 - RNA, 20 nt, Artificial Sequence
  targeting sequence with GTCN PAM
gccuaauauaugauacauuu

SEQ ID NO: 7067 - RNA, 20 nt, Artificial Sequence
  targeting sequence with GTCN PAM
auguaugcuaaaaauccacu

SEQ ID NO: 7068 - RNA, 20 nt, Artificial Sequence
  targeting sequence with GTCN PAM
gaaaaguacagucaauguau

SEQ ID NO: 7069 - RNA, 20 nt, Artificial Sequence
  targeting sequence with GTCN PAM
gccucacugagaacaaaaaa

SEQ ID NO: 7070 - RNA, 20 nt, Artificial Sequence
  targeting sequence with GTCN PAM
caggaauaauguacccugug

SEQ ID NO: 7071 - RNA, 20 nt, Artificial Sequence
  targeting sequence with GTCN PAM
auguuacugguaagaagugg

SEQ ID NO: 7072 - RNA, 20 nt, Artificial Sequence
  targeting sequence with GTCN PAM
uggaggcucagagaucaggc

SEQ ID NO: 7073 - RNA, 20 nt, Artificial Sequence
  targeting sequence with GTCN PAM
ucuccugagcaccuucccug

SEQ ID NO: 7074 - RNA, 20 nt, Artificial Sequence
  targeting sequence with GTCN PAM
cacugucggaucagguucuc

SEQ ID NO: 7075 - RNA, 20 nt, Artificial Sequence
  targeting sequence with GTCN PAM
gaucagguucucaccccugc

SEQ ID NO: 7076 - RNA, 20 nt, Artificial Sequence
  targeting sequence with GTCN PAM
gcaggggugagaaccugauc

SEQ ID NO: 7077 - RNA, 20 nt, Artificial Sequence
  targeting sequence with GTCN PAM
ggucugcaggggugagaacc

SEQ ID NO: 7078 - RNA, 20 nt, Artificial Sequence
  targeting sequence with GTCN PAM
uugccccaguuacuuuccug

SEQ ID NO: 7079 - RNA, 20 nt, Artificial Sequence
  targeting sequence with GTCN PAM
ccagcaaacauucugugccc

SEQ ID NO: 7080 - RNA, 20 nt, Artificial Sequence
  targeting sequence with GTCN PAM
uuuuguuuguguaaguuuag

SEQ ID NO: 7081 - RNA, 20 nt, Artificial Sequence
  targeting sequence with GTCN PAM
ucuuauucagaucauauggg

SEQ ID NO: 7082 - RNA, 20 nt, Artificial Sequence
  targeting sequence with GTCN PAM
cgauauguggaauugugcac

SEQ ID NO: 7083 - RNA, 20 nt, Artificial Sequence
  targeting sequence with GTCN PAM
cauugcuguuuaggaacagu

SEQ ID NO: 7084 - RNA, 20 nt, Artificial Sequence
  targeting sequence with GTCN PAM
uguauugaccaaacuaugug

SEQ ID NO: 7085 - RNA, 20 nt, Artificial Sequence
  targeting sequence with GTCN PAM
auacaggacuguuccuaaac

SEQ ID NO: 7086 - RNA, 20 nt, Artificial Sequence
  targeting sequence with GTCN PAM
cucucucacauaguuugguc

SEQ ID NO: 7087 - RNA, 20 nt, Artificial Sequence
  targeting sequence with GTCN PAM
gggguucaugaucaggcugu

SEQ ID NO: 7088 - RNA, 20 nt, Artificial Sequence
  targeting sequence with GTCN PAM
gcagggucggggguucauga

SEQ ID NO: 7089 - RNA, 20 nt, Artificial Sequence
  targeting sequence with GTCN PAM
agaaaguguuguuuagccga

SEQ ID NO: 7090 - RNA, 20 nt, Artificial Sequence
  targeting sequence with GTCN PAM
cacaaaugggcauuuguuca

SEQ ID NO: 7091 - RNA, 20 nt, Artificial Sequence
  targeting sequence with GTCN PAM
cugaugcugucccaggaucc

SEQ ID NO: 7092 - RNA, 20 nt, Artificial Sequence
  targeting sequence with GTCN PAM
caggaucccccaggaacacc

SEQ ID NO: 7093 - RNA, 20 nt, Artificial Sequence
  targeting sequence with GTCN PAM
cgggaagagugaucucaggc

SEQ ID NO: 7094 - RNA, 20 nt, Artificial Sequence
  targeting sequence with GTCN PAM
caggucucgggaagagugau

SEQ ID NO: 7095 - RNA, 20 nt, Artificial Sequence
  targeting sequence with GTCN PAM
ccagauccaaggaaauccug

SEQ ID NO: 7096 - RNA, 20 nt, Artificial Sequence
  targeting sequence with GTCN PAM
gccuguuuggugauuagcau

SEQ ID NO: 7097 - RNA, 20 nt, Artificial Sequence
  targeting sequence with GTCN PAM
aggccaucgagaucuguggu

SEQ ID NO: 7098 - RNA, 20 nt, Artificial Sequence
  targeting sequence with GTCN PAM
ccacagaucucgauggccuu

SEQ ID NO: 7099 - RNA, 20 nt, Artificial Sequence
  targeting sequence with GTCN PAM
acccagccauggucaccaca

SEQ ID NO: 7100 - RNA, 20 nt, Artificial Sequence
  targeting sequence with GTCN PAM
cugccccgagaagcauuugg

SEQ ID NO: 7101 - RNA, 20 nt, Artificial Sequence
  targeting sequence with GTCN PAM
ucacaugucaccucuugacu

SEQ ID NO: 7102 - RNA, 20 nt, Artificial Sequence
  targeting sequence with GTCN PAM
ccucuugacugacaagggaa

SEQ ID NO: 7103 - RNA, 20 nt, Artificial Sequence
  targeting sequence with GTCN PAM
agaggugacaugugaugaca

SEQ ID NO: 7104 - RNA, 20 nt, Artificial Sequence
  targeting sequence with GTCN PAM
gucaagaggugacaugugau

SEQ ID NO: 7105 - RNA, 20 nt, Artificial Sequence
  targeting sequence with GTCN PAM
ccugaagaaccuagccacua

SEQ ID NO: 7106 - RNA, 20 nt, Artificial Sequence
  targeting sequence with GTCN PAM
cuaggggaagggaugguggg

SEQ ID NO: 7107 - RNA, 20 nt, Artificial Sequence
  targeting sequence with GTCN PAM
ccaccaucccuuccccuagu

SEQ ID NO: 7108 - RNA, 20 nt, Artificial Sequence
  targeting sequence with GTCN PAM
ccucuucccugguccccacc

SEQ ID NO: 7109 - RNA, 20 nt, Artificial Sequence
  targeting sequence with GTCN PAM
cggugucuccucuucccugg

SEQ ID NO: 7110 - RNA, 20 nt, Artificial Sequence
  targeting sequence with GTCN PAM
ggguuguagugagcgcucag

SEQ ID NO: 7111 - RNA, 20 nt, Artificial Sequence
  targeting sequence with GTCN PAM
ccucgcccaccuugcagaug

SEQ ID NO: 7112 - RNA, 20 nt, Artificial Sequence
  targeting sequence with GTCN PAM
cuuuagcuucuguuucauca

SEQ ID NO: 7113 - RNA, 20 nt, Artificial Sequence
  targeting sequence with GTCN PAM
agauagcuggaaaguuguag

SEQ ID NO: 7114 - RNA, 20 nt, Artificial Sequence
  targeting sequence with GTCN PAM
augccaacuacgcguguaau

SEQ ID NO: 7115 - RNA, 20 nt, Artificial Sequence
  targeting sequence with GTCN PAM
ccuaagagaagauauccaug

SEQ ID NO: 7116 - RNA, 20 nt, Artificial Sequence
  targeting sequence with GTCN PAM
cuucauggaaagagugucuc

SEQ ID NO: 7117 - RNA, 20 nt, Artificial Sequence
  targeting sequence with GTCN PAM
uuuauuccaaccagagccaa

SEQ ID NO: 7118 - RNA, 20 nt, Artificial Sequence
  targeting sequence with GTCN PAM
uucacccucccauucccaca

SEQ ID NO: 7119 - RNA, 20 nt, Artificial Sequence
  targeting sequence with GTCN PAM
cucacuauuggcaaaucuaa

SEQ ID NO: 7120 - RNA, 20 nt, Artificial Sequence
  targeting sequence with GTCN PAM
gacacccccucaggcaggca

SEQ ID NO: 7121 - RNA, 20 nt, Artificial Sequence
  targeting sequence with GTCN PAM
gacuguagguggucacucac

SEQ ID NO: 7122 - RNA, 20 nt, Artificial Sequence
  targeting sequence with GTCN PAM
ccauucuaccugccugccug

SEQ ID NO: 7123 - RNA, 20 nt, Artificial Sequence
  targeting sequence with GTCN PAM
ggcuggcuuugcucuguggc

SEQ ID NO: 7124 - RNA, 20 nt, Artificial Sequence
  targeting sequence with GTCN PAM
agguggacaacagggagagg

SEQ ID NO: 7125 - RNA, 20 nt, Artificial Sequence
  targeting sequence with GTCN PAM
accuugacgaaugguguaac

SEQ ID NO: 7126 - RNA, 20 nt, Artificial Sequence
  targeting sequence with GTCN PAM
cagugcugccccaccccaac

SEQ ID NO: 7127 - RNA, 20 nt, Artificial Sequence
  targeting sequence with GTCN PAM
caaggcugaauccauccugu

SEQ ID NO: 7128 - RNA, 20 nt, Artificial Sequence
  targeting sequence with GTCN PAM
ggugugcugagucccaaggc

SEQ ID NO: 7129 - RNA, 20 nt, Artificial Sequence
  targeting sequence with GTCN PAM
ucccagucagugagcuucag

SEQ ID NO: 7130 - RNA, 20 nt, Artificial Sequence
  targeting sequence with GTCN PAM
gugagcuucaggcucaagca

SEQ ID NO: 7131 - RNA, 20 nt, Artificial Sequence
  targeting sequence with GTCN PAM
uuugccuaccgcagcagcau

SEQ ID NO: 7132 - RNA, 20 nt, Artificial Sequence
  targeting sequence with GTCN PAM
caucguguccuuugccuacc

SEQ ID NO: 7133 - RNA, 20 nt, Artificial Sequence
  targeting sequence with GTCN PAM
uaaaggcuguugauucuucu

SEQ ID NO: 7134 - RNA, 20 nt, Artificial Sequence
  targeting sequence with GTCN PAM
acagguagcaguggcccagc

SEQ ID NO: 7135 - RNA, 20 nt, Artificial Sequence
  targeting sequence with GTCN PAM
cuuugugaggggcccacaca

SEQ ID NO: 7136 - RNA, 20 nt, Artificial Sequence
  targeting sequence with GTCN PAM
uaccaccccaucuuuuucuu

SEQ ID NO: 7137 - RNA, 20 nt, Artificial Sequence
  targeting sequence with GTCN PAM
gauaguaauuuuuuuaaaga

SEQ ID NO: 7138 - RNA, 20 nt, Artificial Sequence
  targeting sequence with GTCN PAM
uuaaaaaaauuacuaucgga

SEQ ID NO: 7139 - RNA, 20 nt, Artificial Sequence
  targeting sequence with GTCN PAM
cuuucauuuguaagugcuau

SEQ ID NO: 7140 - RNA, 20 nt, Artificial Sequence
  targeting sequence with GTCN PAM
uuccuccagggacguugggu

SEQ ID NO: 7141 - RNA, 20 nt, Artificial Sequence
  targeting sequence with GTCN PAM
cuggaggaaagacaccuuuu

SEQ ID NO: 7142 - RNA, 20 nt, Artificial Sequence
  targeting sequence with GTCN PAM
augccaccuuucccuaaaaa

SEQ ID NO: 7143 - RNA, 20 nt, Artificial Sequence
  targeting sequence with GTCN PAM
uuuuucugcugagcaguguu

SEQ ID NO: 7144 - RNA, 20 nt, Artificial Sequence
  targeting sequence with GTCN PAM
acacuuagaauaauaauggc

SEQ ID NO: 7145 - RNA, 20 nt, Artificial Sequence
  targeting sequence with GTCN PAM
gucuacacuuagaauaauaa

SEQ ID NO: 7146 - RNA, 20 nt, Artificial Sequence
  targeting sequence with GTCN PAM
ccagacagggauucguuaca

SEQ ID NO: 7147 - RNA, 20 nt, Artificial Sequence
  targeting sequence with GTCN PAM
ggagacaggcaaggcacgga

SEQ ID NO: 7148 - RNA, 20 nt, Artificial Sequence
  targeting sequence with GTCN PAM
uggugagaaaggaaggagaa

SEQ ID NO: 7149 - RNA, 20 nt, Artificial Sequence
  targeting sequence with GTCN PAM
aacuaacucucccaggagaa

SEQ ID NO: 7150 - RNA, 20 nt, Artificial Sequence
  targeting sequence with GTCN PAM
ggcuggaauuuggagucaaa

SEQ ID NO: 7151 - RNA, 20 nt, Artificial Sequence
  targeting sequence with GTCN PAM
ccaugagugaugggagggcu

SEQ ID NO: 7152 - RNA, 20 nt, Artificial Sequence
  targeting sequence with GTCN PAM
cugcagcuccucccucuuug

SEQ ID NO: 7153 - RNA, 20 nt, Artificial Sequence
  targeting sequence with GTCN PAM
gcacguuggccaggaggaca

SEQ ID NO: 7154 - RNA, 20 nt, Artificial Sequence
  targeting sequence with GTCN PAM
uccuggccaacgugcugacc

SEQ ID NO: 7155 - RNA, 20 nt, Artificial Sequence
  targeting sequence with GTCN PAM
ucccuguccuccuggccaac

SEQ ID NO: 7156 - RNA, 20 nt, Artificial Sequence
  targeting sequence with GTCN PAM
agagcucagagcaggcccca

SEQ ID NO: 7157 - RNA, 20 nt, Artificial Sequence
  targeting sequence with GTCN PAM
uugagguauucuuaugccuu

SEQ ID NO: 7158 - RNA, 20 nt, Artificial Sequence
  targeting sequence with GTCN PAM
ugggcugggugcuucaccuu

SEQ ID NO: 7159 - RNA, 20 nt, Artificial Sequence
  targeting sequence with GTCN PAM
guggggaaggugaagcaccc

SEQ ID NO: 7160 - RNA, 20 nt, Artificial Sequence
  targeting sequence with GTCN PAM
ucuggguaccugguagggga

SEQ ID NO: 7161 - RNA, 20 nt, Artificial Sequence
  targeting sequence with GTCN PAM
aucaaccuggagagggaagg

SEQ ID NO: 7162 - RNA, 20 nt, Artificial Sequence
  targeting sequence with GTCN PAM
aguuugcgggcgaugucgau

SEQ ID NO: 7163 - RNA, 20 nt, Artificial Sequence
  targeting sequence with GTCN PAM
agcuucuugagguagguagc

SEQ ID NO: 7164 - RNA, 20 nt, Artificial Sequence
  targeting sequence with GTCN PAM
cagcagcauagccagggcug

SEQ ID NO: 7165 - RNA, 20 nt, Artificial Sequence
  targeting sequence with GTCN PAM
cccaucuucagguaggucuc

SEQ ID NO: 7166 - RNA, 20 nt, Artificial Sequence
  targeting sequence with GTCN PAM
cuggugcagcugcacgugga

SEQ ID NO: 7167 - RNA, 20 nt, Artificial Sequence
  targeting sequence with GTCN PAM
ccacgugcagcugcaccagg

SEQ ID NO: 7168 - RNA, 20 nt, Artificial Sequence
  targeting sequence with GTCN PAM
cagggcucagguggggcccc

SEQ ID NO: 7169 - RNA, 20 nt, Artificial Sequence
  targeting sequence with GTCN PAM
gguaacuuaaccucgaauuc

SEQ ID NO: 7170 - RNA, 20 nt, Artificial Sequence
  targeting sequence with GTCN PAM
cuucauucagucauugagaa

SEQ ID NO: 7171 - RNA, 20 nt, Artificial Sequence
  targeting sequence with GTCN PAM
uugagaaaaucguuacugac

SEQ ID NO: 7172 - RNA, 20 nt, Artificial Sequence
  targeting sequence with GTCN PAM
guaacgauuuucucaaugac

SEQ ID NO: 7173 - RNA, 20 nt, Artificial Sequence
  targeting sequence with GTCN PAM
ccacccuggcagagcuggcu

SEQ ID NO: 7174 - RNA, 20 nt, Artificial Sequence
  targeting sequence with GTCN PAM
uguucacacuaacauccccg

SEQ ID NO: 7175 - RNA, 20 nt, Artificial Sequence
  targeting sequence with GTCN PAM
gaggcagcucagcccaacag

SEQ ID NO: 7176 - RNA, 20 nt, Artificial Sequence
  targeting sequence with GTCN PAM
gagccuguggugcuggucag

SEQ ID NO: 7177 - RNA, 20 nt, Artificial Sequence
  targeting sequence with GTCN PAM
cgcaggugcaucuccacauc

SEQ ID NO: 7178 - RNA, 20 nt, Artificial Sequence
  targeting sequence with GTCN PAM
ggaucuggaaagcacagaug

SEQ ID NO: 7179 - RNA, 20 nt, Artificial Sequence
  targeting sequence with GTCN PAM
ggggcuguaaagaauuagcc

SEQ ID NO: 7180 - RNA, 20 nt, Artificial Sequence
  targeting sequence with GTCN PAM
gcgagaaagguggccagccu

SEQ ID NO: 7181 - RNA, 20 nt, Artificial Sequence
  targeting sequence with GTCN PAM
ggggaggaucuuggcacagc

SEQ ID NO: 7182 - RNA, 20 nt, Artificial Sequence
  targeting sequence with GTCN PAM
auuuuagagugaaagcaaag

SEQ ID NO: 7183 - RNA, 20 nt, Artificial Sequence
  targeting sequence with GTCN PAM
gacuguugucugcucucuga

SEQ ID NO: 7184 - RNA, 20 nt, Artificial Sequence
  targeting sequence with GTCN PAM
gacggcuccucucagugaag

SEQ ID NO: 7185 - RNA, 20 nt, Artificial Sequence
  targeting sequence with GTCN PAM
gcucucugaacagcuccauu

SEQ ID NO: 7186 - RNA, 20 nt, Artificial Sequence
  targeting sequence with GTCN PAM
gucaugagaaaagguggggc

SEQ ID NO: 7187 - RNA, 20 nt, Artificial Sequence
  targeting sequence with GTCN PAM
ugagaaaagguggggcuagg

SEQ ID NO: 7188 - RNA, 20 nt, Artificial Sequence
  targeting sequence with GTCN PAM
cuagccccaccuuuucucau

SEQ ID NO: 7189 - RNA, 20 nt, Artificial Sequence
  targeting sequence with GTCN PAM
uucuaagaugcucuaaucua

SEQ ID NO: 7190 - RNA, 20 nt, Artificial Sequence
  targeting sequence with GTCN PAM
gagucauucuaagaugcucu

SEQ ID NO: 7191 - RNA, 20 nt, Artificial Sequence
  targeting sequence with GTCN PAM
gccugaugcacagcgagguc

SEQ ID NO: 7192 - RNA, 20 nt, Artificial Sequence
  targeting sequence with GTCN PAM
gguucuccuggccugacagg

SEQ ID NO: 7193 - RNA, 20 nt, Artificial Sequence
  targeting sequence with GTCN PAM
ggccaggagaaccggacaug

SEQ ID NO: 7194 - RNA, 20 nt, Artificial Sequence
  targeting sequence with GTCN PAM
guggguccauacagcacgaa

SEQ ID NO: 7195 - RNA, 20 nt, Artificial Sequence
  targeting sequence with GTCN PAM
auacagcacgaagcccacag

SEQ ID NO: 7196 - RNA, 20 nt, Artificial Sequence
  targeting sequence with GTCN PAM
ucuuugacaacugauaagaa

SEQ ID NO: 7197 - RNA, 20 nt, Artificial Sequence
  targeting sequence with GTCN PAM
aagaugacugugggcuucgu

SEQ ID NO: 7198 - RNA, 20 nt, Artificial Sequence
  targeting sequence with GTCN PAM
auucuguuuccuuagguguc

SEQ ID NO: 7199 - RNA, 20 nt, Artificial Sequence
  targeting sequence with GTCN PAM
cccgcaauuaaaagaaaucu

SEQ ID NO: 7200 - RNA, 20 nt, Artificial Sequence
  targeting sequence with GTCN PAM
agaaacagacuguguuguua

SEQ ID NO: 7201 - RNA, 20 nt, Artificial Sequence
  targeting sequence with GTCN PAM
guuucuggaccacagaagcg

SEQ ID NO: 7202 - RNA, 20 nt, Artificial Sequence
  targeting sequence with GTCN PAM
cuugcauauugcuguuaauu

SEQ ID NO: 7203 - RNA, 20 nt, Artificial Sequence
  targeting sequence with GTCN PAM
ggcuggcaaaauaugauguc

SEQ ID NO: 7204 - RNA, 20 nt, Artificial Sequence
  targeting sequence with GTCN PAM
cuaauggauucagccaagua

SEQ ID NO: 7205 - RNA, 20 nt, Artificial Sequence
  targeting sequence with GTCN PAM
uaauaaagcugccccugcag

SEQ ID NO: 7206 - RNA, 20 nt, Artificial Sequence
  targeting sequence with GTCN PAM
uccuuaaacucaggaugcuu

SEQ ID NO: 7207 - RNA, 20 nt, Artificial Sequence
  targeting sequence with GTCN PAM
guguugccuaccuuucuggg

SEQ ID NO: 7208 - RNA, 20 nt, Artificial Sequence
  targeting sequence with GTCN PAM
ccuucuagaaggagcaggag

SEQ ID NO: 7209 - RNA, 20 nt, Artificial Sequence
  targeting sequence with GTCN PAM
uuccaugcuccacagucuuu

SEQ ID NO: 7210 - RNA, 20 nt, Artificial Sequence
  targeting sequence with GTCN PAM
cacccuccugggccacacuc

SEQ ID NO: 7211 - RNA, 20 nt, Artificial Sequence
  targeting sequence with GTCN PAM
ucaugguacccuggcucaca

SEQ ID NO: 7212 - RNA, 20 nt, Artificial Sequence
  targeting sequence with GTCN PAM
cuacugagaauagaaacuca

SEQ ID NO: 7213 - RNA, 20 nt, Artificial Sequence
  targeting sequence with GTCN PAM
cccguuuaucugagccagaa

SEQ ID NO: 7214 - RNA, 20 nt, Artificial Sequence
  targeting sequence with GTCN PAM
acuuuaaaaaauaugauuaa

SEQ ID NO: 7215 - RNA, 20 nt, Artificial Sequence
  targeting sequence with GTCN PAM
ggcccuggcugagcacuuaa

SEQ ID NO: 7216 - RNA, 20 nt, Artificial Sequence
  targeting sequence with GTCN PAM
uugcacagcuguuggcaaga

SEQ ID NO: 7217 - RNA, 20 nt, Artificial Sequence
  targeting sequence with GTCN PAM
caaaucuagucagcagcaga

SEQ ID NO: 7218 - RNA, 20 nt, Artificial Sequence
  targeting sequence with GTCN PAM
gcagcagagccagaauugga

SEQ ID NO: 7219 - RNA, 20 nt, Artificial Sequence
  targeting sequence with GTCN PAM
aauucuggcucugcugcuga

SEQ ID NO: 7220 - RNA, 20 nt, Artificial Sequence
  targeting sequence with GTCN PAM
gagagguacugguccaauuc

SEQ ID NO: 7221 - RNA, 20 nt, Artificial Sequence
  targeting sequence with GTCN PAM
agagagggcaacgguuacca

SEQ ID NO: 7222 - RNA, 20 nt, Artificial Sequence
  targeting sequence with GTCN PAM
cccuguuggagccccucaac

SEQ ID NO: 7223 - RNA, 20 nt, Artificial Sequence
  targeting sequence with GTCN PAM
gugucugcccuuccaagaau

SEQ ID NO: 7224 - RNA, 20 nt, Artificial Sequence
  targeting sequence with GTCN PAM
gcccuuccaagaauccauca

SEQ ID NO: 7225 - RNA, 20 nt, Artificial Sequence
  targeting sequence with GTCN PAM
gaguaccaaguuacuauggu

SEQ ID NO: 7226 - RNA, 20 nt, Artificial Sequence
  targeting sequence with GTCN PAM
ggccuuuguuccguucucau

SEQ ID NO: 7227 - RNA, 20 nt, Artificial Sequence
  targeting sequence with GTCN PAM
uggcuacaagugcuucacug

SEQ ID NO: 7228 - RNA, 20 nt, Artificial Sequence
  targeting sequence with GTCN PAM
uugaaaagcagucauuugaa

SEQ ID NO: 7229 - RNA, 20 nt, Artificial Sequence
  targeting sequence with GTCN PAM
uuugaagacaaacugaggac

SEQ ID NO: 7230 - RNA, 20 nt, Artificial Sequence
  targeting sequence with GTCN PAM
ucaaaugacugcuuuucaau

SEQ ID NO: 7231 - RNA, 20 nt, Artificial Sequence
  targeting sequence with GTCN PAM
ucaguuugucuucaaaugac

SEQ ID NO: 7232 - RNA, 20 nt, Artificial Sequence
  targeting sequence with GTCN PAM
cagaaccaagcccaacucaa

SEQ ID NO: 7233 - RNA, 20 nt, Artificial Sequence
  targeting sequence with GTCN PAM
cacccaaggucccagaacca

SEQ ID NO: 7234 - RNA, 20 nt, Artificial Sequence
  targeting sequence with GTCN PAM
guggugaggauccagugagg

SEQ ID NO: 7235 - RNA, 20 nt, Artificial Sequence
  targeting sequence with GTCN PAM
uguuucuaucaccuuaggag

SEQ ID NO: 7236 - RNA, 20 nt, Artificial Sequence
  targeting sequence with GTCN PAM
caaaacuuugcccuggaaug

SEQ ID NO: 7237 - RNA, 20 nt, Artificial Sequence
  targeting sequence with GTCN PAM
aagagugaaacuugcucauc

SEQ ID NO: 7238 - RNA, 20 nt, Artificial Sequence
  targeting sequence with GTCN PAM
gucgccuuuucccagccaaa

SEQ ID NO: 7239 - RNA, 20 nt, Artificial Sequence
  targeting sequence with GTCN PAM
ccuuuucccagccaaaaagg

SEQ ID NO: 7240 - RNA, 20 nt, Artificial Sequence
  targeting sequence with GTCN PAM
uacuuccaaagcagcccugu

SEQ ID NO: 7241 - RNA, 20 nt, Artificial Sequence
  targeting sequence with GTCN PAM
cccagccuuguggaacgcug

SEQ ID NO: 7242 - RNA, 20 nt, Artificial Sequence
  targeting sequence with GTCN PAM
aggugcuggagcagcucaca

SEQ ID NO: 7243 - RNA, 20 nt, Artificial Sequence
  targeting sequence with GTCN PAM
augcagugccucgauauagc

SEQ ID NO: 7244 - RNA, 20 nt, Artificial Sequence
  targeting sequence with GTCN PAM
ggcugauguuuacacaccuu

SEQ ID NO: 7245 - RNA, 20 nt, Artificial Sequence
  targeting sequence with GTCN PAM
gaguggggcuugggaaaaca

SEQ ID NO: 7246 - RNA, 20 nt, Artificial Sequence
  targeting sequence with GTCN PAM
cagcucuucugauguuuauc

SEQ ID NO: 7247 - RNA, 20 nt, Artificial Sequence
  targeting sequence with GTCN PAM
auaagccugccuugcagugg

SEQ ID NO: 7248 - RNA, 20 nt, Artificial Sequence
  targeting sequence with GTCN PAM
ucauaccauucugaugggca

SEQ ID NO: 7249 - RNA, 20 nt, Artificial Sequence
  targeting sequence with GTCN PAM
ugggguuaugguuggcaggu

SEQ ID NO: 7250 - RNA, 20 nt, Artificial Sequence
  targeting sequence with GTCN PAM
agcccugcauugcuaauuca

SEQ ID NO: 7251 - RNA, 20 nt, Artificial Sequence
  targeting sequence with GTCN PAM
agcuaugggcucccagguag

SEQ ID NO: 7252 - RNA, 20 nt, Artificial Sequence
  targeting sequence with GTCN PAM
ugugaaagaaagcaauauug

SEQ ID NO: 7253 - RNA, 20 nt, Artificial Sequence
  targeting sequence with GTCN PAM
cuuccacuuccacuacuccu

SEQ ID NO: 7254 - RNA, 20 nt, Artificial Sequence
  targeting sequence with GTCN PAM
aguggagaagaacaucuccu

SEQ ID NO: 7255 - RNA, 20 nt, Artificial Sequence
  targeting sequence with GTCN PAM
ccugcagcuuccaugccagu

SEQ ID NO: 7256 - RNA, 20 nt, Artificial Sequence
  targeting sequence with GTCN PAM
caauccuuccugagcucugc

SEQ ID NO: 7257 - RNA, 20 nt, Artificial Sequence
  targeting sequence with GTCN PAM
ugugggagucccuuguccug

SEQ ID NO: 7258 - RNA, 20 nt, Artificial Sequence
  targeting sequence with GTCN PAM
cuuguccuggucccuuuggu

SEQ ID NO: 7259 - RNA, 20 nt, Artificial Sequence
  targeting sequence with GTCN PAM
uggucccuuugguugcuggg

SEQ ID NO: 7260 - RNA, 20 nt, Artificial Sequence
  targeting sequence with GTCN PAM
cuuugguugcugggagccuc

SEQ ID NO: 7261 - RNA, 20 nt, Artificial Sequence
  targeting sequence with GTCN PAM
ugcuuacaguuugaaaauug

SEQ ID NO: 7262 - RNA, 20 nt, Artificial Sequence
  targeting sequence with GTCN PAM
agccuagguguaaggucgca

SEQ ID NO: 7263 - RNA, 20 nt, Artificial Sequence
  targeting sequence with GTCN PAM
cauuuuucuguuugggccag

SEQ ID NO: 7264 - RNA, 20 nt, Artificial Sequence
  targeting sequence with GTCN PAM
gccugccuuugucccagcag

SEQ ID NO: 7265 - RNA, 20 nt, Artificial Sequence
  targeting sequence with GTCN PAM
cagcaggcucuuccgacaca

SEQ ID NO: 7266 - RNA, 20 nt, Artificial Sequence
  targeting sequence with GTCN PAM
gaagagccugcugggacaaa

SEQ ID NO: 7267 - RNA, 20 nt, Artificial Sequence
  targeting sequence with GTCN PAM
ugcugcagcugucgcucccc

SEQ ID NO: 7268 - RNA, 20 nt, Artificial Sequence
  targeting sequence with GTCN PAM
cucccccaggggaauaaucu

SEQ ID NO: 7269 - RNA, 20 nt, Artificial Sequence
  targeting sequence with GTCN PAM
accuaagaauucaccauccu

SEQ ID NO: 7270 - RNA, 20 nt, Artificial Sequence
  targeting sequence with GTCN PAM
cucacccuggcacagacacu

SEQ ID NO: 7271 - RNA, 20 nt, Artificial Sequence
  targeting sequence with GTCN PAM
gugccagggugagggacaaa

SEQ ID NO: 7272 - RNA, 20 nt, Artificial Sequence
  targeting sequence with GTCN PAM
guggcugccaacuggcccca

SEQ ID NO: 7273 - RNA, 20 nt, Artificial Sequence
  targeting sequence with GTCN PAM
aacagugucuguggcugcca

SEQ ID NO: 7274 - RNA, 20 nt, Artificial Sequence
  targeting sequence with GTCN PAM
uucugggcaggaucugcugu

SEQ ID NO: 7275 - RNA, 20 nt, Artificial Sequence
  targeting sequence with GTCN PAM
ccagcaccugaggguaccau

SEQ ID NO: 7276 - RNA, 20 nt, Artificial Sequence
  targeting sequence with GTCN PAM
cgggcauaucuaaagagcag

SEQ ID NO: 7277 - RNA, 20 nt, Artificial Sequence
  targeting sequence with GTCN PAM
gcugcucuuuagauaugccc

SEQ ID NO: 7278 - RNA, 20 nt, Artificial Sequence
  targeting sequence with GTCN PAM
cagugaacugcugaggaauc

SEQ ID NO: 7279 - RNA, 20 nt, Artificial Sequence
  targeting sequence with GTCN PAM
ccucugggaagaaaaaguuu

SEQ ID NO: 7280 - RNA, 20 nt, Artificial Sequence
  targeting sequence with GTCN PAM
aucaaagaaacucaaacuuu

SEQ ID NO: 7281 - RNA, 20 nt, Artificial Sequence
  targeting sequence with GTCN PAM
gccaugcaucaagcaguggg

SEQ ID NO: 7282 - RNA, 20 nt, Artificial Sequence
  targeting sequence with GTCN PAM
ucaaagccugcacugaggaa

SEQ ID NO: 7283 - RNA, 20 nt, Artificial Sequence
  targeting sequence with GTCN PAM
gugauuuguguguucuucag

SEQ ID NO: 7284 - RNA, 20 nt, Artificial Sequence
  targeting sequence with GTCN PAM
cucaguuuccuucucuguga

SEQ ID NO: 7285 - RNA, 20 nt, Artificial Sequence
  targeting sequence with GTCN PAM
ccagaaacccaaguaguucu

SEQ ID NO: 7286 - RNA, 20 nt, Artificial Sequence
  targeting sequence with GTCN PAM
guuuauuucuguagcauaaa

SEQ ID NO: 7287 - RNA, 20 nt, Artificial Sequence
  targeting sequence with GTCN PAM
aaucccaaaguauggauuuu

SEQ ID NO: 7288 - RNA, 20 nt, Artificial Sequence
  targeting sequence with GTCN PAM
ggugaauauugcgaugaggc

SEQ ID NO: 7289 - RNA, 20 nt, Artificial Sequence
  targeting sequence with GTCN PAM
gguggguggagaagaauugg

SEQ ID NO: 7290 - RNA, 20 nt, Artificial Sequence
  targeting sequence with GTCN PAM
gauccuggugaaaugauuac

SEQ ID NO: 7291 - RNA, 20 nt, Artificial Sequence
  targeting sequence with GTCN PAM
gauccacuacaguugucuga

SEQ ID NO: 7292 - RNA, 20 nt, Artificial Sequence
  targeting sequence with GTCN PAM
gcugcuggucugauccacua

SEQ ID NO: 7293 - RNA, 20 nt, Artificial Sequence
  targeting sequence with GTCN PAM
ugaucacuguuugguggucu

SEQ ID NO: 7294 - RNA, 20 nt, Artificial Sequence
  targeting sequence with GTCN PAM
agccguggagcuggucauca

SEQ ID NO: 7295 - RNA, 20 nt, Artificial Sequence
  targeting sequence with GTCN PAM
ucacgguugucauguaaagu

SEQ ID NO: 7296 - RNA, 20 nt, Artificial Sequence
  targeting sequence with GTCN PAM
uguaaaguccacuuuuuguc

SEQ ID NO: 7297 - RNA, 20 nt, Artificial Sequence
  targeting sequence with GTCN PAM
acuuuuugucacaccucaca

SEQ ID NO: 7298 - RNA, 20 nt, Artificial Sequence
  targeting sequence with GTCN PAM
caccucacaucugauugaga

SEQ ID NO: 7299 - RNA, 20 nt, Artificial Sequence
  targeting sequence with GTCN PAM
uuucuuauucuaugcaacaa

SEQ ID NO: 7300 - RNA, 20 nt, Artificial Sequence
  targeting sequence with GTCN PAM
uuuugaaguguugucuuuuc

SEQ ID NO: 7301 - RNA, 20 nt, Artificial Sequence
  targeting sequence with GTCN PAM
accauucuacgguuguuugg

SEQ ID NO: 7302 - RNA, 20 nt, Artificial Sequence
  targeting sequence with GTCN PAM
acuuccaguggccggccacu

SEQ ID NO: 7303 - RNA, 20 nt, Artificial Sequence
  targeting sequence with GTCN PAM
auguuacgaguugucucugu

SEQ ID NO: 7304 - RNA, 20 nt, Artificial Sequence
  targeting sequence with GTCN PAM
cuguugcuuuaugacccauu

SEQ ID NO: 7305 - RNA, 20 nt, Artificial Sequence
  targeting sequence with GTCN PAM
uaaagcaacagagacaacuc

SEQ ID NO: 7306 - RNA, 20 nt, Artificial Sequence
  targeting sequence with GTCN PAM
aacaucauuugcauagucua

SEQ ID NO: 7307 - RNA, 20 nt, Artificial Sequence
  targeting sequence with GTCN PAM
aaaauaaacaguaaguaaua

SEQ ID NO: 7308 - RNA, 20 nt, Artificial Sequence
  targeting sequence with GTCN PAM
caguagucuggcacuggagc

SEQ ID NO: 7309 - RNA, 20 nt, Artificial Sequence
  targeting sequence with GTCN PAM
ggcacuggagccuguguucc

SEQ ID NO: 7310 - RNA, 20 nt, Artificial Sequence
  targeting sequence with GTCN PAM
ccuuuuagagaaagcaggcu

SEQ ID NO: 7311 - RNA, 20 nt, Artificial Sequence
  targeting sequence with GTCN PAM
ucacacacaaaugacacugu

SEQ ID NO: 7312 - RNA, 20 nt, Artificial Sequence
  targeting sequence with GTCN PAM
uuugugugugaggacucucg

SEQ ID NO: 7313 - RNA, 20 nt, Artificial Sequence
  targeting sequence with GTCN PAM
aauccucaaaacaaucccau

SEQ ID NO: 7314 - RNA, 20 nt, Artificial Sequence
  targeting sequence with GTCN PAM
cucugugcuagguacucuuc

SEQ ID NO: 7315 - RNA, 20 nt, Artificial Sequence
  targeting sequence with GTCN PAM
gggaaagcuggcgugaagcc

SEQ ID NO: 7316 - RNA, 20 nt, Artificial Sequence
  targeting sequence with GTCN PAM
cugucgcccaagguggagug

SEQ ID NO: 7317 - RNA, 20 nt, Artificial Sequence
  targeting sequence with GTCN PAM
cccaagguggagugcagugu

SEQ ID NO: 7318 - RNA, 20 nt, Artificial Sequence
  targeting sequence with GTCN PAM
ugaucauagcucauggcagc

SEQ ID NO: 7319 - RNA, 20 nt, Artificial Sequence
  targeting sequence with GTCN PAM
agcaguuugaggcugccaug

SEQ ID NO: 7320 - RNA, 20 nt, Artificial Sequence
  targeting sequence with GTCN PAM
aagaacggcgggaaggcugg

SEQ ID NO: 7321 - RNA, 20 nt, Artificial Sequence
  targeting sequence with GTCN PAM
gcacagauuagagggaaaga

SEQ ID NO: 7322 - RNA, 20 nt, Artificial Sequence
  targeting sequence with GTCN PAM
ggcaagaaggacuccugaca

SEQ ID NO: 7323 - RNA, 20 nt, Artificial Sequence
  targeting sequence with GTCN PAM
uucuugccagacuuucccaa

SEQ ID NO: 7324 - RNA, 20 nt, Artificial Sequence
  targeting sequence with GTCN PAM
ggaguccuucuugccagacu

SEQ ID NO: 7325 - RNA, 20 nt, Artificial Sequence
  targeting sequence with GTCN PAM
gucuaguguuacaucucuuc

SEQ ID NO: 7326 - RNA, 20 nt, Artificial Sequence
  targeting sequence with GTCN PAM
aguguuacaucucuucccac

SEQ ID NO: 7327 - RNA, 20 nt, Artificial Sequence
  targeting sequence with GTCN PAM
guggucucaagggaccucau

SEQ ID NO: 7328 - RNA, 20 nt, Artificial Sequence
  targeting sequence with GTCN PAM
caagggaccucaucuucccu

SEQ ID NO: 7329 - RNA, 20 nt, Artificial Sequence
  targeting sequence with GTCN PAM
cuugagaccacugacccugc

SEQ ID NO: 7330 - RNA, 20 nt, Artificial Sequence
  targeting sequence with GTCN PAM
uuggcuuuccugaaacgaga

SEQ ID NO: 7331 - RNA, 20 nt, Artificial Sequence
  targeting sequence with GTCN PAM
cguuucaggaaagccaaaga

SEQ ID NO: 7332 - RNA, 20 nt, Artificial Sequence
  targeting sequence with GTCN PAM
cucaucuuuaucaggugcuc

SEQ ID NO: 7333 - RNA, 20 nt, Artificial Sequence
  targeting sequence with GTCN PAM
gggcuccuuuuguggugguu

SEQ ID NO: 7334 - RNA, 20 nt, Artificial Sequence
  targeting sequence with GTCN PAM
gggcccagcucagccucacu

SEQ ID NO: 7335 - RNA, 20 nt, Artificial Sequence
  targeting sequence with GTCN PAM
gagggaaggagcugagagcc

SEQ ID NO: 7336 - RNA, 20 nt, Artificial Sequence
  targeting sequence with GTCN PAM
ucuuccucaccuggggcaug

SEQ ID NO: 7337 - RNA, 20 nt, Artificial Sequence
  targeting sequence with GTCN PAM
cuaacagcugagcucugcuc

SEQ ID NO: 7338 - RNA, 20 nt, Artificial Sequence
  targeting sequence with GTCN PAM
uggagcagagcucagcuguu

SEQ ID NO: 7339 - RNA, 20 nt, Artificial Sequence
  targeting sequence with GTCN PAM
cauguagguccuggagcaga

SEQ ID NO: 7340 - RNA, 20 nt, Artificial Sequence
  targeting sequence with GTCN PAM
gaggccccuuagcuccuagu

SEQ ID NO: 7341 - RNA, 20 nt, Artificial Sequence
  targeting sequence with GTCN PAM
cguaguaggcauuuauugaa

SEQ ID NO: 7342 - RNA, 20 nt, Artificial Sequence
  targeting sequence with GTCN PAM
gucacguaguaggcauuuau

SEQ ID NO: 7343 - RNA, 20 nt, Artificial Sequence
  targeting sequence with GTCN PAM
caucacagggucugucacgu

SEQ ID NO: 7344 - RNA, 20 nt, Artificial Sequence
  targeting sequence with GTCN PAM
ccaggucucaucacaggguc

SEQ ID NO: 7345 - RNA, 20 nt, Artificial Sequence
  targeting sequence with GTCN PAM
cugcagucagucccagucua

SEQ ID NO: 7346 - RNA, 20 nt, Artificial Sequence
  targeting sequence with GTCN PAM
gucccagucuagcaaacagg

SEQ ID NO: 7347 - RNA, 20 nt, Artificial Sequence
  targeting sequence with GTCN PAM
cagucuagcaaacaggacaa

SEQ ID NO: 7348 - RNA, 20 nt, Artificial Sequence
  targeting sequence with GTCN PAM
agcaaacaggacaaucccuc

SEQ ID NO: 7349 - RNA, 20 nt, Artificial Sequence
  targeting sequence with GTCN PAM
uguuugcuagacugggacug

SEQ ID NO: 7350 - RNA, 20 nt, Artificial Sequence
  targeting sequence with GTCN PAM
cuucacaggccucuaaacgu

SEQ ID NO: 7351 - RNA, 20 nt, Artificial Sequence
  targeting sequence with GTCN PAM
ucucagccagaaggagggag

SEQ ID NO: 7352 - RNA, 20 nt, Artificial Sequence
  targeting sequence with GTCN PAM
cagccugugcaaaggccugg

SEQ ID NO: 7353 - RNA, 20 nt, Artificial Sequence
  targeting sequence with GTCN PAM
ugcccugaaucagugcugcu

SEQ ID NO: 7354 - RNA, 20 nt, Artificial Sequence
  targeting sequence with GTCN PAM
uuccuggauacauggcaucu

SEQ ID NO: 7355 - RNA, 20 nt, Artificial Sequence
  targeting sequence with GTCN PAM
uuuccucugggaaagaugcc

SEQ ID NO: 7356 - RNA, 20 nt, Artificial Sequence
  targeting sequence with GTCN PAM
cagagagaauagguagcagg

SEQ ID NO: 7357 - RNA, 20 nt, Artificial Sequence
  targeting sequence with GTCN PAM
cagguuuucuuggguucuug

SEQ ID NO: 7358 - RNA, 20 nt, Artificial Sequence
  targeting sequence with GTCN PAM
ucaggaguucagaccaauua

SEQ ID NO: 7359 - RNA, 20 nt, Artificial Sequence
  targeting sequence with GTCN PAM
gaacuccugaggacucacuu

SEQ ID NO: 7360 - RNA, 20 nt, Artificial Sequence
  targeting sequence with GTCN PAM
ugugaggcccuacucaucac

SEQ ID NO: 7361 - RNA, 20 nt, Artificial Sequence
  targeting sequence with GTCN PAM
acaaaagguuaagaauaccu

SEQ ID NO: 7362 - RNA, 20 nt, Artificial Sequence
  targeting sequence with GTCN PAM
gcugagcuucuggcagccuc

SEQ ID NO: 7363 - RNA, 20 nt, Artificial Sequence
  targeting sequence with GTCN PAM
ucguaccuagaggcugccag

SEQ ID NO: 7364 - RNA, 20 nt, Artificial Sequence
  targeting sequence with GTCN PAM
gcaguugaggaacuccgcau

SEQ ID NO: 7365 - RNA, 20 nt, Artificial Sequence
  targeting sequence with GTCN PAM
agcugcuguuggaaagcaca

SEQ ID NO: 7366 - RNA, 20 nt, Artificial Sequence
  targeting sequence with GTCN PAM
uucaacagaggcauuuagcc

SEQ ID NO: 7367 - RNA, 20 nt, Artificial Sequence
  targeting sequence with GTCN PAM
uaagcugcauagaaggucuu

SEQ ID NO: 7368 - RNA, 20 nt, Artificial Sequence
  targeting sequence with GTCN PAM
ucucuuuuagagcuaauugg

SEQ ID NO: 7369 - RNA, 20 nt, Artificial Sequence
  targeting sequence with GTCN PAM
ccaauuagcucuaaaagaga

SEQ ID NO: 7370 - RNA, 20 nt, Artificial Sequence
  targeting sequence with GTCN PAM
uucuuccaagcuguacugcc

SEQ ID NO: 7371 - RNA, 20 nt, Artificial Sequence
  targeting sequence with GTCN PAM
gauuccaaagcccaagaaug

SEQ ID NO: 7372 - RNA, 20 nt, Artificial Sequence
  targeting sequence with GTCN PAM
ccaacuagaacagagcugag

SEQ ID NO: 7373 - RNA, 20 nt, Artificial Sequence
  targeting sequence with GTCN PAM
guuuccucaucaguacugug

SEQ ID NO: 7374 - RNA, 20 nt, Artificial Sequence
  targeting sequence with GTCN PAM
uuaacauaauaaccuugugg

SEQ ID NO: 7375 - RNA, 20 nt, Artificial Sequence
  targeting sequence with GTCN PAM
caucuggucuuuaacauaau

SEQ ID NO: 7376 - RNA, 20 nt, Artificial Sequence
  targeting sequence with GTCN PAM
cucagaauuauuggugucug

SEQ ID NO: 7377 - RNA, 20 nt, Artificial Sequence
  targeting sequence with GTCN PAM
gccuuuuggccuggcccagc

SEQ ID NO: 7378 - RNA, 20 nt, Artificial Sequence
  targeting sequence with GTCN PAM
aucguccugaaacucuuuuc

SEQ ID NO: 7379 - RNA, 20 nt, Artificial Sequence
  targeting sequence with GTCN PAM
ugaaacucuuuucaacaucu

SEQ ID NO: 7380 - RNA, 20 nt, Artificial Sequence
  targeting sequence with GTCN PAM
uugggcaggcugugcagcag

SEQ ID NO: 7381 - RNA, 20 nt, Artificial Sequence
  targeting sequence with GTCN PAM
caccaccguucuugucuaau

SEQ ID NO: 7382 - RNA, 20 nt, Artificial Sequence
  targeting sequence with GTCN PAM
aauggccccaagaaauuccu

SEQ ID NO: 7383 - RNA, 20 nt, Artificial Sequence
  targeting sequence with GTCN PAM
ucccugaggguugcugagag

SEQ ID NO: 7384 - RNA, 20 nt, Artificial Sequence
  targeting sequence with GTCN PAM
cuggccaacacacuguccca

SEQ ID NO: 7385 - RNA, 20 nt, Artificial Sequence
  targeting sequence with GTCN PAM
caaucccuccuagaacccac

SEQ ID NO: 7386 - RNA, 20 nt, Artificial Sequence
  targeting sequence with GTCN PAM
cacccucaucuguggguucu

SEQ ID NO: 7387 - RNA, 20 nt, Artificial Sequence
  targeting sequence with GTCN PAM
ggagaagugcccaagguucc

SEQ ID NO: 7388 - RNA, 20 nt, Artificial Sequence
  targeting sequence with GTCN PAM
caaguuagggucugguuugg

SEQ ID NO: 7389 - RNA, 20 nt, Artificial Sequence
  targeting sequence with GTCN PAM
gguuugguggaugugugcug

SEQ ID NO: 7390 - RNA, 20 nt, Artificial Sequence
  targeting sequence with GTCN PAM
gaggguggaaugaagcugag

SEQ ID NO: 7391 - RNA, 20 nt, Artificial Sequence
  targeting sequence with GTCN PAM
gggccauggucagggaaguu

SEQ ID NO: 7392 - RNA, 20 nt, Artificial Sequence
  targeting sequence with GTCN PAM
gggaaguuuaccuggaggag

SEQ ID NO: 7393 - RNA, 20 nt, Artificial Sequence
  targeting sequence with GTCN PAM
aucaugcaagcugaggcagc

SEQ ID NO: 7394 - RNA, 20 nt, Artificial Sequence
  targeting sequence with GTCN PAM
uccccuggaacauccacuug

SEQ ID NO: 7395 - RNA, 20 nt, Artificial Sequence
  targeting sequence with GTCN PAM
ccucacccucucccacaugc

SEQ ID NO: 7396 - RNA, 20 nt, Artificial Sequence
  targeting sequence with GTCN PAM
ugcugccucuccggccccuc

SEQ ID NO: 7397 - RNA, 20 nt, Artificial Sequence
  targeting sequence with GTCN PAM
uggaugucaggagacauaau

SEQ ID NO: 7398 - RNA, 20 nt, Artificial Sequence
  targeting sequence with GTCN PAM
ggagacauaauugucccugu

SEQ ID NO: 7399 - RNA, 20 nt, Artificial Sequence
  targeting sequence with GTCN PAM
ccugacauccaagaccuuaa

SEQ ID NO: 7400 - RNA, 20 nt, Artificial Sequence
  targeting sequence with GTCN PAM
cuguucuuuucuaaaucuca

SEQ ID NO: 7401 - RNA, 20 nt, Artificial Sequence
  targeting sequence with GTCN PAM
ucuccaguggaguggguuuu

SEQ ID NO: 7402 - RNA, 20 nt, Artificial Sequence
  targeting sequence with GTCN PAM
gaccucugcugcaugcgucu

SEQ ID NO: 7403 - RNA, 20 nt, Artificial Sequence
  targeting sequence with GTCN PAM
gacuccaggaaggcaccccu

SEQ ID NO: 7404 - RNA, 20 nt, Artificial Sequence
  targeting sequence with GTCN PAM
ccgucuuuccccguaggagc

SEQ ID NO: 7405 - RNA, 20 nt, Artificial Sequence
  targeting sequence with GTCN PAM
uuccccguaggagcagucag

SEQ ID NO: 7406 - RNA, 20 nt, Artificial Sequence
  targeting sequence with GTCN PAM
gggcuaugccugugggggcu

SEQ ID NO: 7407 - RNA, 20 nt, Artificial Sequence
  targeting sequence with GTCN PAM
acagcuugauagaaccucua

SEQ ID NO: 7408 - RNA, 20 nt, Artificial Sequence
  targeting sequence with GTCN PAM
ccaggggauggcacagggua

SEQ ID NO: 7409 - RNA, 20 nt, Artificial Sequence
  targeting sequence with GTCN PAM
ggagccauuuccaggucccc

SEQ ID NO: 7410 - RNA, 20 nt, Artificial Sequence
  targeting sequence with GTCN PAM
cugacuuugaggagucaugc

SEQ ID NO: 7411 - RNA, 20 nt, Artificial Sequence
  targeting sequence with GTCN PAM
gggacugucaggagccauuu

SEQ ID NO: 7412 - RNA, 20 nt, Artificial Sequence
  targeting sequence with GTCN PAM
ugcuggagacacagaaggaa

SEQ ID NO: 7413 - RNA, 20 nt, Artificial Sequence
  targeting sequence with GTCN PAM
ccagcaugacuccucaaagu

SEQ ID NO: 7414 - RNA, 20 nt, Artificial Sequence
  targeting sequence with GTCN PAM
acuucagcaguucuguggag

SEQ ID NO: 7415 - RNA, 20 nt, Artificial Sequence
  targeting sequence with GTCN PAM
gcagugcagccccguccacu

SEQ ID NO: 7416 - RNA, 20 nt, Artificial Sequence
  targeting sequence with GTCN PAM
ccuccgauguuggcugcccc

SEQ ID NO: 7417 - RNA, 20 nt, Artificial Sequence
  targeting sequence with GTCN PAM
gccucuggcugaggagcuuc

SEQ ID NO: 7418 - RNA, 20 nt, Artificial Sequence
  targeting sequence with GTCN PAM
gcacacccuuccccgagggc

SEQ ID NO: 7419 - RNA, 20 nt, Artificial Sequence
  targeting sequence with GTCN PAM
ggaccaggccccaccuggca

SEQ ID NO: 7420 - RNA, 20 nt, Artificial Sequence
  targeting sequence with GTCN PAM
agacucccuggggagccacc

SEQ ID NO: 7421 - RNA, 20 nt, Artificial Sequence
  targeting sequence with GTCN PAM
ggguauaagaugagccauca

SEQ ID NO: 7422 - RNA, 20 nt, Artificial Sequence
  targeting sequence with GTCN PAM
uuccucugccuucccggcac

SEQ ID NO: 7423 - RNA, 20 nt, Artificial Sequence
  targeting sequence with GTCN PAM
uuggagugagccccaggcug

SEQ ID NO: 7424 - RNA, 20 nt, Artificial Sequence
  targeting sequence with GTCN PAM
uuaacccuguucacggcagg

SEQ ID NO: 7425 - RNA, 20 nt, Artificial Sequence
  targeting sequence with GTCN PAM
uaggcgugccgggccagccu

SEQ ID NO: 7426 - RNA, 20 nt, Artificial Sequence
  targeting sequence with GTCN PAM
auugagcuggguacccugac

SEQ ID NO: 7427 - RNA, 20 nt, Artificial Sequence
  targeting sequence with GTCN PAM
ggguacccagcucaauggac

SEQ ID NO: 7428 - RNA, 20 nt, Artificial Sequence
  targeting sequence with GTCN PAM
uggaagggcuuggcgcggau

SEQ ID NO: 7429 - RNA, 20 nt, Artificial Sequence
  targeting sequence with GTCN PAM
cucuucaaacggaacccagg

SEQ ID NO: 7430 - RNA, 20 nt, Artificial Sequence
  targeting sequence with GTCN PAM
accuccuguucuccccgcag

SEQ ID NO: 7431 - RNA, 20 nt, Artificial Sequence
  targeting sequence with GTCN PAM
accuggcgcccgcucacagc

SEQ ID NO: 7432 - RNA, 20 nt, Artificial Sequence
  targeting sequence with GTCN PAM
gcucuggggccaggccuggg

SEQ ID NO: 7433 - RNA, 20 nt, Artificial Sequence
  targeting sequence with GTCN PAM
uugcucugagcuugagggag

SEQ ID NO: 7434 - RNA, 20 nt, Artificial Sequence
  targeting sequence with GTCN PAM
gaaccaaguccuugcucuga

SEQ ID NO: 7435 - RNA, 20 nt, Artificial Sequence
  targeting sequence with GTCN PAM
gucugaaccaaguccuugcu

SEQ ID NO: 7436 - RNA, 20 nt, Artificial Sequence
  targeting sequence with GTCN PAM
ccaucuuucugcaccuuggg

SEQ ID NO: 7437 - RNA, 20 nt, Artificial Sequence
  targeting sequence with GTCN PAM
acgugcuccgcacggugccc

SEQ ID NO: 7438 - RNA, 20 nt, Artificial Sequence
  targeting sequence with GTCN PAM
uuccugccaggggaaaagug

SEQ ID NO: 7439 - RNA, 20 nt, Artificial Sequence
  targeting sequence with GTCN PAM
ugggcacggggacccaagug

SEQ ID NO: 7440 - RNA, 20 nt, Artificial Sequence
  targeting sequence with GTCN PAM
ccgugcccaagacaccugca

SEQ ID NO: 7441 - RNA, 20 nt, Artificial Sequence
  targeting sequence with GTCN PAM
cuuggguccccgugcccaag

SEQ ID NO: 7442 - RNA, 20 nt, Artificial Sequence
  targeting sequence with GTCN PAM
agggggaggaggacacgugc

SEQ ID NO: 7443 - RNA, 20 nt, Artificial Sequence
  targeting sequence with GTCN PAM
uccucccccuggacucuggc

SEQ ID NO: 7444 - RNA, 20 nt, Artificial Sequence
  targeting sequence with GTCN PAM
guggcuguuuuguaggaguu

SEQ ID NO: 7445 - RNA, 20 nt, Artificial Sequence
  targeting sequence with GTCN PAM
gcaucaacugccgccagccc

SEQ ID NO: 7446 - RNA, 20 nt, Artificial Sequence
  targeting sequence with GTCN PAM
cugcauccugagcauguggg

SEQ ID NO: 7447 - RNA, 20 nt, Artificial Sequence
  targeting sequence with GTCN PAM
cacccacaugcucaggaugc

SEQ ID NO: 7448 - RNA, 20 nt, Artificial Sequence
  targeting sequence with GTCN PAM
acaggcugucccacccacau

SEQ ID NO: 7449 - RNA, 20 nt, Artificial Sequence
  targeting sequence with GTCN PAM
ugaggccagagagcagugga

SEQ ID NO: 7450 - RNA, 20 nt, Artificial Sequence
  targeting sequence with GTCN PAM
cuguuuaugaaaugaggaca

SEQ ID NO: 7451 - RNA, 20 nt, Artificial Sequence
  targeting sequence with GTCN PAM
ucauuucauaaacagggaca

SEQ ID NO: 7452 - RNA, 20 nt, Artificial Sequence
  targeting sequence with GTCN PAM
gaguguccucauuucauaaa

SEQ ID NO: 7453 - RNA, 20 nt, Artificial Sequence
  targeting sequence with GTCN PAM
gguaggugggcgucagagug

SEQ ID NO: 7454 - RNA, 20 nt, Artificial Sequence
  targeting sequence with GTCN PAM
cugucgguguucccagagau

SEQ ID NO: 7455 - RNA, 20 nt, Artificial Sequence
  targeting sequence with GTCN PAM
guguucccagagauaggacc

SEQ ID NO: 7456 - RNA, 20 nt, Artificial Sequence
  targeting sequence with GTCN PAM
uaucucugggaacaccgaca

SEQ ID NO: 7457 - RNA, 20 nt, Artificial Sequence
  targeting sequence with GTCN PAM
gauggcuuugcauucagacc

SEQ ID NO: 7458 - RNA, 20 nt, Artificial Sequence
  targeting sequence with GTCN PAM
gaaugcaaagccaucggacu

SEQ ID NO: 7459 - RNA, 20 nt, Artificial Sequence
  targeting sequence with GTCN PAM
acaucaaaggagcugggccu

SEQ ID NO: 7460 - RNA, 20 nt, Artificial Sequence
  targeting sequence with GTCN PAM
guguguguguguggccucug

SEQ ID NO: 7461 - RNA, 20 nt, Artificial Sequence
  targeting sequence with GTCN PAM
gugugugcgugugugucugu

SEQ ID NO: 7462 - RNA, 20 nt, Artificial Sequence
  targeting sequence with GTCN PAM
gugugugugugugcaggggc

SEQ ID NO: 7463 - RNA, 20 nt, Artificial Sequence
  targeting sequence with GTCN PAM
cugaacacacacacagacug

SEQ ID NO: 7464 - RNA, 20 nt, Artificial Sequence
  targeting sequence with GTCN PAM
guguguguguucagggacag

SEQ ID NO: 7465 - RNA, 20 nt, Artificial Sequence
  targeting sequence with GTCN PAM
gugugugugugugcaggagc

SEQ ID NO: 7466 - RNA, 20 nt, Artificial Sequence
  targeting sequence with GTCN PAM
cugugugugcaggggcaguc

SEQ ID NO: 7467 - RNA, 20 nt, Artificial Sequence
  targeting sequence with GTCN PAM
cugugugugugugcaggggc

SEQ ID NO: 7468 - RNA, 20 nt, Artificial Sequence
  targeting sequence with GTCN PAM
ccgugugugugcaggggcgg

SEQ ID NO: 7469 - RNA, 20 nt, Artificial Sequence
  targeting sequence with GTCN PAM
gugugugugugcagaggcag

SEQ ID NO: 7470 - RNA, 20 nt, Artificial Sequence
  targeting sequence with GTCN PAM
gugugugcacgcaggggcag

SEQ ID NO: 7471 - RNA, 20 nt, Artificial Sequence
  targeting sequence with GTCN PAM
cugugugugugugugugugu

SEQ ID NO: 7472 - RNA, 20 nt, Artificial Sequence
  targeting sequence with GTCN PAM
cugugugugugcaggggcag

SEQ ID NO: 7473 - RNA, 20 nt, Artificial Sequence
  targeting sequence with GTCN PAM
cugugugugugugcaggggc

SEQ ID NO: 7474 - RNA, 20 nt, Artificial Sequence
  targeting sequence with GTCN PAM
cugugugugugugcaggggc

SEQ ID NO: 7475 - RNA, 20 nt, Artificial Sequence
  targeting sequence with GTCN PAM
cuguaugugugugcaggagc

SEQ ID NO: 7476 - RNA, 20 nt, Artificial Sequence
  targeting sequence with GTCN PAM
gugugugugugcaggggcag

SEQ ID NO: 7477 - RNA, 20 nt, Artificial Sequence
  targeting sequence with GTCN PAM
cugugugugugggcaggggc

SEQ ID NO: 7478 - RNA, 20 nt, Artificial Sequence
  targeting sequence with GTCN PAM
ccaugugugugugcaggggc

SEQ ID NO: 7479 - RNA, 20 nt, Artificial Sequence
  targeting sequence with GTCN PAM
ccaugugugugugcaggggc

SEQ ID NO: 7480 - RNA, 20 nt, Artificial Sequence
  targeting sequence with GTCN PAM
cugugugugcacgcaggggc

SEQ ID NO: 7481 - RNA, 20 nt, Artificial Sequence
  targeting sequence with GTCN PAM
cucugugugugugugugugc

SEQ ID NO: 7482 - RNA, 20 nt, Artificial Sequence
  targeting sequence with GTCN PAM
cugugugugugcaggggcag

SEQ ID NO: 7483 - RNA, 20 nt, Artificial Sequence
  targeting sequence with GTCN PAM
ccgugugugugugugugugc

SEQ ID NO: 7484 - RNA, 20 nt, Artificial Sequence
  targeting sequence with GTCN PAM
cucugugugugugugugugu

SEQ ID NO: 7485 - RNA, 20 nt, Artificial Sequence
  targeting sequence with GTCN PAM
gugugugugugugcaggggc

SEQ ID NO: 7486 - RNA, 20 nt, Artificial Sequence
  targeting sequence with GTCN PAM
gugugcaggggcagucugug

SEQ ID NO: 7487 - RNA, 20 nt, Artificial Sequence
  targeting sequence with GTCN PAM
cugugugucugugugcaggg

SEQ ID NO: 7488 - RNA, 20 nt, Artificial Sequence
  targeting sequence with GTCN PAM
cugugugugugcaggagcgg

SEQ ID NO: 7489 - RNA, 20 nt, Artificial Sequence
  targeting sequence with GTCN PAM
cugugugugugugcaggggc

SEQ ID NO: 7490 - RNA, 20 nt, Artificial Sequence
  targeting sequence with GTCN PAM
gugugugugcaggggcagcc

SEQ ID NO: 7491 - RNA, 20 nt, Artificial Sequence
  targeting sequence with GTCN PAM
gugugcaggagcggucugug

SEQ ID NO: 7492 - RNA, 20 nt, Artificial Sequence
  targeting sequence with GTCN PAM
cugugugucugugugcagga

SEQ ID NO: 7493 - RNA, 20 nt, Artificial Sequence
  targeting sequence with GTCN PAM
ccgugugugugcaggagcgg

SEQ ID NO: 7494 - RNA, 20 nt, Artificial Sequence
  targeting sequence with GTCN PAM
cugugugugugcaggggcag

SEQ ID NO: 7495 - RNA, 20 nt, Artificial Sequence
  targeting sequence with GTCN PAM
guguguguguguguaggggc

SEQ ID NO: 7496 - RNA, 20 nt, Artificial Sequence
  targeting sequence with GTCN PAM
gugugugugugugugugugu

SEQ ID NO: 7497 - RNA, 20 nt, Artificial Sequence
  targeting sequence with GTCN PAM
cugugugugugugcaggggc

SEQ ID NO: 7498 - RNA, 20 nt, Artificial Sequence
  targeting sequence with GTCN PAM
gugugcaggggcagucucug

SEQ ID NO: 7499 - RNA, 20 nt, Artificial Sequence
  targeting sequence with GTCN PAM
cugugugucugugugcaggg

SEQ ID NO: 7500 - RNA, 20 nt, Artificial Sequence
  targeting sequence with GTCN PAM
ccaugugugugugcaggagc

SEQ ID NO: 7501 - RNA, 20 nt, Artificial Sequence
  targeting sequence with GTCN PAM
ccgugugugugcaggggcag

SEQ ID NO: 7502 - RNA, 20 nt, Artificial Sequence
  targeting sequence with GTCN PAM
cugugugugugcagaggcag

SEQ ID NO: 7503 - RNA, 20 nt, Artificial Sequence
  targeting sequence with GTCN PAM
guguguguguguaggggcag

SEQ ID NO: 7504 - RNA, 20 nt, Artificial Sequence
  targeting sequence with GTCN PAM
cugugugugugugugugugu

SEQ ID NO: 7505 - RNA, 20 nt, Artificial Sequence
  targeting sequence with GTCN PAM
cuguaugugugugcaggagc

SEQ ID NO: 7506 - RNA, 20 nt, Artificial Sequence
  targeting sequence with GTCN PAM
ccccaccugccuggcggcaa

SEQ ID NO: 7507 - RNA, 20 nt, Artificial Sequence
  targeting sequence with GTCN PAM
uuugcaaggccuccagcccc

SEQ ID NO: 7508 - RNA, 20 nt, Artificial Sequence
  targeting sequence with GTCN PAM
ggagggcauagagaaagggc

SEQ ID NO: 7509 - RNA, 20 nt, Artificial Sequence
  targeting sequence with GTCN PAM
augagggagauggcuucuuc

SEQ ID NO: 7510 - RNA, 20 nt, Artificial Sequence
  targeting sequence with GTCN PAM
cagcaccuccaggucgauga

SEQ ID NO: 7511 - RNA, 20 nt, Artificial Sequence
  targeting sequence with GTCN PAM
ucccgcuugggucucagcac

SEQ ID NO: 7512 - RNA, 20 nt, Artificial Sequence
  targeting sequence with GTCN PAM
gucaucccgcuugggucuca

SEQ ID NO: 7513 - RNA, 20 nt, Artificial Sequence
  targeting sequence with GTCN PAM
ggggacaggcgggaaguagg

SEQ ID NO: 7514 - RNA, 20 nt, Artificial Sequence
  targeting sequence with GTCN PAM
ccagaccccucacacagccg

SEQ ID NO: 7515 - RNA, 20 nt, Artificial Sequence
  targeting sequence with GTCN PAM
caggggaucgcgggccaugc

SEQ ID NO: 7516 - RNA, 20 nt, Artificial Sequence
  targeting sequence with GTCN PAM
caugugggccucuccaaucu

SEQ ID NO: 7517 - RNA, 20 nt, Artificial Sequence
  targeting sequence with GTCN PAM
cugucccaugugggccucuc

SEQ ID NO: 7518 - RNA, 20 nt, Artificial Sequence
  targeting sequence with GTCN PAM
gcccaucucugaucccuguc

SEQ ID NO: 7519 - RNA, 20 nt, Artificial Sequence
  targeting sequence with GTCN PAM
uuaggcccuggccagcuguc

SEQ ID NO: 7520 - RNA, 20 nt, Artificial Sequence
  targeting sequence with GTCN PAM
ucccgugugggucucccacc

SEQ ID NO: 7521 - RNA, 20 nt, Artificial Sequence
  targeting sequence with GTCN PAM
cccacccuccccugaccccu

SEQ ID NO: 7522 - RNA, 20 nt, Artificial Sequence
  targeting sequence with GTCN PAM
ggggagggugggagacccac

SEQ ID NO: 7523 - RNA, 20 nt, Artificial Sequence
  targeting sequence with GTCN PAM
gugcauagcuccugcauagc

SEQ ID NO: 7524 - RNA, 20 nt, Artificial Sequence
  targeting sequence with GTCN PAM
cauguuggcuaugcaggagc

SEQ ID NO: 7525 - RNA, 20 nt, Artificial Sequence
  targeting sequence with GTCN PAM
ugaugucgguguuggccccc

SEQ ID NO: 7526 - RNA, 20 nt, Artificial Sequence
  targeting sequence with GTCN PAM
guguuggcccccagcucuuc

SEQ ID NO: 7527 - RNA, 20 nt, Artificial Sequence
  targeting sequence with GTCN PAM
cuuucgcaugcaagugacag

SEQ ID NO: 7528 - RNA, 20 nt, Artificial Sequence
  targeting sequence with GTCN PAM
cuugcaugcgaaagugacuu

SEQ ID NO: 7529 - RNA, 20 nt, Artificial Sequence
  targeting sequence with GTCN PAM
aaaacugacaagcugaacaa

SEQ ID NO: 7530 - RNA, 20 nt, Artificial Sequence
  targeting sequence with GTCN PAM
guuuuggacucugucacuug

SEQ ID NO: 7531 - RNA, 20 nt, Artificial Sequence
  targeting sequence with GTCN PAM
ggucggucacaggcuggcuc

SEQ ID NO: 7532 - RNA, 20 nt, Artificial Sequence
  targeting sequence with GTCN PAM
gucacaggcuggcucugccu

SEQ ID NO: 7533 - RNA, 20 nt, Artificial Sequence
  targeting sequence with GTCN PAM
caggcuggcucugccucucu

SEQ ID NO: 7534 - RNA, 20 nt, Artificial Sequence
  targeting sequence with GTCN PAM
ucugggcaacuucauucuuu

SEQ ID NO: 7535 - RNA, 20 nt, Artificial Sequence
  targeting sequence with GTCN PAM
ggagcagugccagccccaca

SEQ ID NO: 7536 - RNA, 20 nt, Artificial Sequence
  targeting sequence with GTCN PAM
agggcaggccacacuugcag

SEQ ID NO: 7537 - RNA, 20 nt, Artificial Sequence
  targeting sequence with GTCN PAM
agccugcaaguguggccugc

SEQ ID NO: 7538 - RNA, 20 nt, Artificial Sequence
  targeting sequence with GTCN PAM
gugcaagggagcgaggccuc

SEQ ID NO: 7539 - RNA, 20 nt, Artificial Sequence
  targeting sequence with GTCN PAM
gcaggccugggggcuguaag

SEQ ID NO: 7540 - RNA, 20 nt, Artificial Sequence
  targeting sequence with GTCN PAM
uuccuucagcaagcagcucu

SEQ ID NO: 7541 - RNA, 20 nt, Artificial Sequence
  targeting sequence with GTCN PAM
gucuuuccuucagcaagcag

SEQ ID NO: 7542 - RNA, 20 nt, Artificial Sequence
  targeting sequence with GTCN PAM
ccauguccugggccucccug

SEQ ID NO: 7543 - RNA, 20 nt, Artificial Sequence
  targeting sequence with GTCN PAM
ugggccucccugcaggaccc

SEQ ID NO: 7544 - RNA, 20 nt, Artificial Sequence
  targeting sequence with GTCN PAM
ugcagggaggcccaggacau

SEQ ID NO: 7545 - RNA, 20 nt, Artificial Sequence
  targeting sequence with GTCN PAM
cuggaaaccgccccucuccc

SEQ ID NO: 7546 - RNA, 20 nt, Artificial Sequence
  targeting sequence with GTCN PAM
gacccgcccuggggucagca

SEQ ID NO: 7547 - RNA, 20 nt, Artificial Sequence
  targeting sequence with GTCN PAM
gacucaccuggaggucccug

SEQ ID NO: 7548 - RNA, 20 nt, Artificial Sequence
  targeting sequence with GTCN PAM
gcagggacucucgccccugu

SEQ ID NO: 7549 - RNA, 20 nt, Artificial Sequence
  targeting sequence with GTCN PAM
cugcugaccccagggcgggu

SEQ ID NO: 7550 - RNA, 20 nt, Artificial Sequence
  targeting sequence with GTCN PAM
gcuccaucacaagugcccgc

SEQ ID NO: 7551 - RNA, 20 nt, Artificial Sequence
  targeting sequence with GTCN PAM
gcgggcacuugugauggagc

SEQ ID NO: 7552 - RNA, 20 nt, Artificial Sequence
  targeting sequence with GTCN PAM
cuuccuucugauuccuuggc

SEQ ID NO: 7553 - RNA, 20 nt, Artificial Sequence
  targeting sequence with GTCN PAM
ggcugcccuugagucuucuc

SEQ ID NO: 7554 - RNA, 20 nt, Artificial Sequence
  targeting sequence with GTCN PAM
ucucacagggguguagggug

SEQ ID NO: 7555 - RNA, 20 nt, Artificial Sequence
  targeting sequence with GTCN PAM
gucuccaucucugcuucuga

SEQ ID NO: 7556 - RNA, 20 nt, Artificial Sequence
  targeting sequence with GTCN PAM
ccaucucugcuucugauucc

SEQ ID NO: 7557 - RNA, 20 nt, Artificial Sequence
  targeting sequence with GTCN PAM
aggauggaaucagaagcaga

SEQ ID NO: 7558 - RNA, 20 nt, Artificial Sequence
  targeting sequence with GTCN PAM
ccacuagccgcagaaucugg

SEQ ID NO: 7559 - RNA, 20 nt, Artificial Sequence
  targeting sequence with GTCN PAM
uuggucuccacuagccgcag

SEQ ID NO: 7560 - RNA, 20 nt, Artificial Sequence
  targeting sequence with GTCN PAM
ucaucuccgauggaguccuu

SEQ ID NO: 7561 - RNA, 20 nt, Artificial Sequence
  targeting sequence with GTCN PAM
cccagagaggcacccucacc

SEQ ID NO: 7562 - RNA, 20 nt, Artificial Sequence
  targeting sequence with GTCN PAM
ccaugugcacaggagaaggg

SEQ ID NO: 7563 - RNA, 20 nt, Artificial Sequence
  targeting sequence with GTCN PAM
ugccccuccuucgugccacc

SEQ ID NO: 7564 - RNA, 20 nt, Artificial Sequence
  targeting sequence with GTCN PAM
cucgggggcagccauggcuc

SEQ ID NO: 7565 - RNA, 20 nt, Artificial Sequence
  targeting sequence with GTCN PAM
guggacagggaggcagcuuc

SEQ ID NO: 7566 - RNA, 20 nt, Artificial Sequence
  targeting sequence with GTCN PAM
acagaccugcgcccuuggcc

SEQ ID NO: 7567 - RNA, 20 nt, Artificial Sequence
  targeting sequence with GTCN PAM
ccuggguuuaggaagcaggu

SEQ ID NO: 7568 - RNA, 20 nt, Artificial Sequence
  targeting sequence with GTCN PAM
ucucucaccacugccaaaga

SEQ ID NO: 7569 - RNA, 20 nt, Artificial Sequence
  targeting sequence with GTCN PAM
cacuguggcugagugaggac

SEQ ID NO: 7570 - RNA, 20 nt, Artificial Sequence
  targeting sequence with GTCN PAM
ucacucagccacagugagac

SEQ ID NO: 7571 - RNA, 20 nt, Artificial Sequence
  targeting sequence with GTCN PAM
ucaucaagcgauggccccca

SEQ ID NO: 7572 - RNA, 20 nt, Artificial Sequence
  targeting sequence with GTCN PAM
ggcagcagugagcggaagua

SEQ ID NO: 7573 - RNA, 20 nt, Artificial Sequence
  targeting sequence with GTCN PAM
cucugggaggcguggccccu

SEQ ID NO: 7574 - RNA, 20 nt, Artificial Sequence
  targeting sequence with GTCN PAM
caacuuggagccauggaugu

SEQ ID NO: 7575 - RNA, 20 nt, Artificial Sequence
  targeting sequence with GTCN PAM
guccucuccccugcuugcau

SEQ ID NO: 7576 - RNA, 20 nt, Artificial Sequence
  targeting sequence with GTCN PAM
ucuccccugcuugcauucca

SEQ ID NO: 7577 - RNA, 20 nt, Artificial Sequence
  targeting sequence with GTCN PAM
acuuuagaugcacauggaau

SEQ ID NO: 7578 - RNA, 20 nt, Artificial Sequence
  targeting sequence with GTCN PAM
acauccuccccaaauccugg

SEQ ID NO: 7579 - RNA, 20 nt, Artificial Sequence
  targeting sequence with GTCN PAM
agggcacaucacgcuugcug

SEQ ID NO: 7580 - RNA, 20 nt, Artificial Sequence
  targeting sequence with GTCN PAM
guguccagcccugaccacug

SEQ ID NO: 7581 - RNA, 20 nt, Artificial Sequence
  targeting sequence with GTCN PAM
agcccugaccacugccaagc

SEQ ID NO: 7582 - RNA, 20 nt, Artificial Sequence
  targeting sequence with GTCN PAM
gggcuggacacagaccugca

SEQ ID NO: 7583 - RNA, 20 nt, Artificial Sequence
  targeting sequence with GTCN PAM
uggccccaggcguagggcug

SEQ ID NO: 7584 - RNA, 20 nt, Artificial Sequence
  targeting sequence with GTCN PAM
uacagcugucuucccuuaga

SEQ ID NO: 7585 - RNA, 20 nt, Artificial Sequence
  targeting sequence with GTCN PAM
ucccuuagauguuccauucu

SEQ ID NO: 7586 - RNA, 20 nt, Artificial Sequence
  targeting sequence with GTCN PAM
ucagaauggaacaucuaagg

SEQ ID NO: 7587 - RNA, 20 nt, Artificial Sequence
  targeting sequence with GTCN PAM
uccuugcaccugcggcagua

SEQ ID NO: 7588 - RNA, 20 nt, Artificial Sequence
  targeting sequence with GTCN PAM
ugggccagggucauccuugc

SEQ ID NO: 7589 - RNA, 20 nt, Artificial Sequence
  targeting sequence with GTCN PAM
ccaggaugcuggucaugggc

SEQ ID NO: 7590 - RNA, 20 nt, Artificial Sequence
  targeting sequence with GTCN PAM
gcugggcugugaaggagaau

SEQ ID NO: 7591 - RNA, 20 nt, Artificial Sequence
  targeting sequence with GTCN PAM
gaauguguuucuugcccaga

SEQ ID NO: 7592 - RNA, 20 nt, Artificial Sequence
  targeting sequence with GTCN PAM
gccgaucugucagaccguua

SEQ ID NO: 7593 - RNA, 20 nt, Artificial Sequence
  targeting sequence with GTCN PAM
gaccguuagcauguacauuu

SEQ ID NO: 7594 - RNA, 20 nt, Artificial Sequence
  targeting sequence with GTCN PAM
gacagaucggcggacuccag

SEQ ID NO: 7595 - RNA, 20 nt, Artificial Sequence
  targeting sequence with GTCN PAM
uuauugaggcaaucuguugg

SEQ ID NO: 7596 - RNA, 20 nt, Artificial Sequence
  targeting sequence with GTCN PAM
gcaacuuaauuuccguaugc

SEQ ID NO: 7597 - RNA, 20 nt, Artificial Sequence
  targeting sequence with GTCN PAM
agauggauccccauuaaauc

SEQ ID NO: 7598 - RNA, 20 nt, Artificial Sequence
  targeting sequence with GTCN PAM
aaagaagauggcaggaguuu

SEQ ID NO: 7599 - RNA, 20 nt, Artificial Sequence
  targeting sequence with GTCN PAM
aggcuccuguccaggcucug

SEQ ID NO: 7600 - RNA, 20 nt, Artificial Sequence
  targeting sequence with GTCN PAM
aggcucuggagccgcccucu

SEQ ID NO: 7601 - RNA, 20 nt, Artificial Sequence
  targeting sequence with GTCN PAM
ccauugggcuggggcugcuc

SEQ ID NO: 7602 - RNA, 20 nt, Artificial Sequence
  targeting sequence with GTCN PAM
ggaaucucaaacggaaaccc

SEQ ID NO: 7603 - RNA, 20 nt, Artificial Sequence
  targeting sequence with GTCN PAM
guucccucaggcaucacugg

SEQ ID NO: 7604 - RNA, 20 nt, Artificial Sequence
  targeting sequence with GTCN PAM
aguccaacagcuugagggca

SEQ ID NO: 7605 - RNA, 20 nt, Artificial Sequence
  targeting sequence with GTCN PAM
aacagcuugagggcauggaa

SEQ ID NO: 7606 - RNA, 20 nt, Artificial Sequence
  targeting sequence with GTCN PAM
cccauacaugugaguucucc

SEQ ID NO: 7607 - RNA, 20 nt, Artificial Sequence
  targeting sequence with GTCN PAM
caggccucucagcagcccug

SEQ ID NO: 7608 - RNA, 20 nt, Artificial Sequence
  targeting sequence with GTCN PAM
agccccaaggcccugccccu

SEQ ID NO: 7609 - RNA, 20 nt, Artificial Sequence
  targeting sequence with GTCN PAM
accugccagagguggcaaug

SEQ ID NO: 7610 - RNA, 20 nt, Artificial Sequence
  targeting sequence with GTCN PAM
ugccaugccgaaacgcaccc

SEQ ID NO: 7611 - RNA, 20 nt, Artificial Sequence
  targeting sequence with GTCN PAM
gggcagggcaaauaugccca

SEQ ID NO: 7612 - RNA, 20 nt, Artificial Sequence
  targeting sequence with GTCN PAM
cuccagugggcauauuugcc

SEQ ID NO: 7613 - RNA, 20 nt, Artificial Sequence
  targeting sequence with GTCN PAM
gcgucccuccagugggcaua

SEQ ID NO: 7614 - RNA, 20 nt, Artificial Sequence
  targeting sequence with GTCN PAM
cagugucugcgucccuccag

SEQ ID NO: 7615 - RNA, 20 nt, Artificial Sequence
  targeting sequence with GTCN PAM
gagcuagagccccaucccag

SEQ ID NO: 7616 - RNA, 20 nt, Artificial Sequence
  targeting sequence with GTCN PAM
gggguggggcaagggcucug

SEQ ID NO: 7617 - RNA, 20 nt, Artificial Sequence
  targeting sequence with GTCN PAM
ggcucccuuucuuuauuuuc

SEQ ID NO: 7618 - RNA, 20 nt, Artificial Sequence
  targeting sequence with GTCN PAM
agugucuaauuacuuaccau

SEQ ID NO: 7619 - RNA, 20 nt, Artificial Sequence
  targeting sequence with GTCN PAM
aauuacuuaccaucaugcau

SEQ ID NO: 7620 - RNA, 20 nt, Artificial Sequence
  targeting sequence with GTCN PAM
ugcgcuaauggaaauccuaa

SEQ ID NO: 7621 - RNA, 20 nt, Artificial Sequence
  targeting sequence with GTCN PAM
aucacagugacagaucagau

SEQ ID NO: 7622 - RNA, 20 nt, Artificial Sequence
  targeting sequence with GTCN PAM
cugugauugacugcugggua

SEQ ID NO: 7623 - RNA, 20 nt, Artificial Sequence
  targeting sequence with GTCN PAM
cuggcuggaggcaggggagg

SEQ ID NO: 7624 - RNA, 20 nt, Artificial Sequence
  targeting sequence with GTCN PAM
cggcuggaacccuccccugc

SEQ ID NO: 7625 - RNA, 20 nt, Artificial Sequence
  targeting sequence with GTCN PAM
uacucaggccucuagagcug

SEQ ID NO: 7626 - RNA, 20 nt, Artificial Sequence
  targeting sequence with GTCN PAM
ucaccuguguaauaggcagc

SEQ ID NO: 7627 - RNA, 20 nt, Artificial Sequence
  targeting sequence with GTCN PAM
uguuauuuuucauucagcaa

SEQ ID NO: 7628 - RNA, 20 nt, Artificial Sequence
  targeting sequence with GTCN PAM
caccugggugcaaccuuugu

SEQ ID NO: 7629 - RNA, 20 nt, Artificial Sequence
  targeting sequence with GTCN PAM
ggcugcuuuucucucucagc

SEQ ID NO: 7630 - RNA, 20 nt, Artificial Sequence
  targeting sequence with GTCN PAM
gaaccaaguccagucuuuuc

SEQ ID NO: 7631 - RNA, 20 nt, Artificial Sequence
  targeting sequence with GTCN PAM
agucuuuucuccaaggcugu

SEQ ID NO: 7632 - RNA, 20 nt, Artificial Sequence
  targeting sequence with GTCN PAM
uuucuccaaggcuguuuccc

SEQ ID NO: 7633 - RNA, 20 nt, Artificial Sequence
  targeting sequence with GTCN PAM
gagcuggagggggcccuuuu

SEQ ID NO: 7634 - RNA, 20 nt, Artificial Sequence
  targeting sequence with GTCN PAM
gcgucugugaacagcgcugg

SEQ ID NO: 7635 - RNA, 20 nt, Artificial Sequence
  targeting sequence with GTCN PAM
gugaacagcgcuggaugaug

SEQ ID NO: 7636 - RNA, 20 nt, Artificial Sequence
  targeting sequence with GTCN PAM
acaggaucaucauccagcgc

SEQ ID NO: 7637 - RNA, 20 nt, Artificial Sequence
  targeting sequence with GTCN PAM
caggcacuugaggggucaac

SEQ ID NO: 7638 - RNA, 20 nt, Artificial Sequence
  targeting sequence with GTCN PAM
cuguggugccuuccuuguca

SEQ ID NO: 7639 - RNA, 20 nt, Artificial Sequence
  targeting sequence with GTCN PAM
ucuuaguucaaugggcauca

SEQ ID NO: 7640 - RNA, 20 nt, Artificial Sequence
  targeting sequence with GTCN PAM
caacuacucaggaggcugag

SEQ ID NO: 7641 - RNA, 20 nt, Artificial Sequence
  targeting sequence with GTCN PAM
uuggcucaauugauccuucc

SEQ ID NO: 7642 - RNA, 20 nt, Artificial Sequence
  targeting sequence with GTCN PAM
ucuuaaaacaauuuuuaaau

SEQ ID NO: 7643 - RNA, 20 nt, Artificial Sequence
  targeting sequence with GTCN PAM
cucacaccuguaaucucagc

SEQ ID NO: 7644 - RNA, 20 nt, Artificial Sequence
  targeting sequence with GTCN PAM
cuaacucccggcucaagcga

SEQ ID NO: 7645 - RNA, 20 nt, Artificial Sequence
  targeting sequence with GTCN PAM
gagcuggucucuaacucccg

SEQ ID NO: 7646 - RNA, 20 nt, Artificial Sequence
  targeting sequence with GTCN PAM
cccuauauugucugagcugg

SEQ ID NO: 7647 - RNA, 20 nt, Artificial Sequence
  targeting sequence with GTCN PAM
gauggggucucccuauauug

SEQ ID NO: 7648 - RNA, 20 nt, Artificial Sequence
  targeting sequence with GTCN PAM
cagucagauggggucucccu

SEQ ID NO: 7649 - RNA, 20 nt, Artificial Sequence
  targeting sequence with GTCN PAM
ugaucucucaucuccaagug

SEQ ID NO: 7650 - RNA, 20 nt, Artificial Sequence
  targeting sequence with GTCN PAM
accucucccuuacuuccucc

SEQ ID NO: 7651 - RNA, 20 nt, Artificial Sequence
  targeting sequence with GTCN PAM
accugaggcugcucagucua

SEQ ID NO: 7652 - RNA, 20 nt, Artificial Sequence
  targeting sequence with GTCN PAM
gguccaccugaggcugcuca

SEQ ID NO: 7653 - RNA, 20 nt, Artificial Sequence
  targeting sequence with GTCN PAM
ccagucagguccaccugagg

SEQ ID NO: 7654 - RNA, 20 nt, Artificial Sequence
  targeting sequence with GTCN PAM
ccgggccuugguuucccauc

SEQ ID NO: 7655 - RNA, 20 nt, Artificial Sequence
  targeting sequence with GTCN PAM
ccagcaaggcugugaagcua

SEQ ID NO: 7656 - RNA, 20 nt, Artificial Sequence
  targeting sequence with GTCN PAM
cacaggugggcagaggcccc

SEQ ID NO: 7657 - RNA, 20 nt, Artificial Sequence
  targeting sequence with GTCN PAM
cucugugucucuucccuggc

SEQ ID NO: 7658 - RNA, 20 nt, Artificial Sequence
  targeting sequence with GTCN PAM
cuucccuggcuuggagucug

SEQ ID NO: 7659 - RNA, 20 nt, Artificial Sequence
  targeting sequence with GTCN PAM
gugugcccacagcagaggcc

SEQ ID NO: 7660 - RNA, 20 nt, Artificial Sequence
  targeting sequence with GTCN PAM
ccauaccaggccaguguucu

SEQ ID NO: 7661 - RNA, 20 nt, Artificial Sequence
  targeting sequence with GTCN PAM
uggcccucccugcuugccac

SEQ ID NO: 7662 - RNA, 20 nt, Artificial Sequence
  targeting sequence with GTCN PAM
ggguguuggcugaauugcau

SEQ ID NO: 7663 - RNA, 20 nt, Artificial Sequence
  targeting sequence with GTCN PAM
cccaagcagggcagguaggg

SEQ ID NO: 7664 - RNA, 20 nt, Artificial Sequence
  targeting sequence with GTCN PAM
aaagagucucccaagcaggg

SEQ ID NO: 7665 - RNA, 20 nt, Artificial Sequence
  targeting sequence with GTCN PAM
accuuuugcuccucugggcu

SEQ ID NO: 7666 - RNA, 20 nt, Artificial Sequence
  targeting sequence with GTCN PAM
cagugcugugggagcccaga

SEQ ID NO: 7667 - RNA, 20 nt, Artificial Sequence
  targeting sequence with GTCN PAM
caggggguacugaucggaaa

SEQ ID NO: 7668 - RNA, 20 nt, Artificial Sequence
  targeting sequence with GTCN PAM
ccagggccuggcgcauauaa

SEQ ID NO: 7669 - RNA, 20 nt, Artificial Sequence
  targeting sequence with GTCN PAM
uucucccucccuuauucccc

SEQ ID NO: 7670 - RNA, 20 nt, Artificial Sequence
  targeting sequence with GTCN PAM
ccaaggcuacaugaggccuu

SEQ ID NO: 7671 - RNA, 20 nt, Artificial Sequence
  targeting sequence with GTCN PAM
cccacauggcucagccccac

SEQ ID NO: 7672 - RNA, 20 nt, Artificial Sequence
  targeting sequence with GTCN PAM
gcauccuucuccuccuucuc

SEQ ID NO: 7673 - RNA, 20 nt, Artificial Sequence
  targeting sequence with GTCN PAM
cagcccucgggagcccggcu

SEQ ID NO: 7674 - RNA, 20 nt, Artificial Sequence
  targeting sequence with GTCN PAM
agagaaacccaugguguggg

SEQ ID NO: 7675 - RNA, 20 nt, Artificial Sequence
  targeting sequence with GTCN PAM
ggcaguccagagaaacccau

SEQ ID NO: 7676 - RNA, 20 nt, Artificial Sequence
  targeting sequence with GTCN PAM
aaguuccucugcagagcugg

SEQ ID NO: 7677 - RNA, 20 nt, Artificial Sequence
  targeting sequence with GTCN PAM
guggggaguuagacccucuu

SEQ ID NO: 7678 - RNA, 20 nt, Artificial Sequence
  targeting sequence with GTCN PAM
aacuccccacugaccacuga

SEQ ID NO: 7679 - RNA, 20 nt, Artificial Sequence
  targeting sequence with GTCN PAM
ugcauucuagaaauagaugg

SEQ ID NO: 7680 - RNA, 20 nt, Artificial Sequence
  targeting sequence with GTCN PAM
gucaauaaguagacaaauga

SEQ ID NO: 7681 - RNA, 20 nt, Artificial Sequence
  targeting sequence with GTCN PAM
auaaguagacaaaugaggcc

SEQ ID NO: 7682 - RNA, 20 nt, Artificial Sequence
  targeting sequence with GTCN PAM
acuuauugacugacuuccca

SEQ ID NO: 7683 - RNA, 20 nt, Artificial Sequence
  targeting sequence with GTCN PAM
acaggcaugccaccacaccu

SEQ ID NO: 7684 - RNA, 20 nt, Artificial Sequence
  targeting sequence with GTCN PAM
uaggcucaagugauccuccu

SEQ ID NO: 7685 - RNA, 20 nt, Artificial Sequence
  targeting sequence with GTCN PAM
ugcucuguugcccaggcugg

SEQ ID NO: 7686 - RNA, 20 nt, Artificial Sequence
  targeting sequence with GTCN PAM
ucuuaaaacaauuuuuaaau

SEQ ID NO: 7687 - RNA, 20 nt, Artificial Sequence
  targeting sequence with GTCN PAM
cugaugguaaugacugugua

SEQ ID NO: 7688 - RNA, 20 nt, Artificial Sequence
  targeting sequence with GTCN PAM
uuaccaucagcgacuaucuc

SEQ ID NO: 7689 - RNA, 20 nt, Artificial Sequence
  targeting sequence with GTCN PAM
aagcuguucucuaacuccca

SEQ ID NO: 7690 - RNA, 20 nt, Artificial Sequence
  targeting sequence with GTCN PAM
cagcuacucagggguugagg

SEQ ID NO: 7691 - RNA, 20 nt, Artificial Sequence
  targeting sequence with GTCN PAM
accaccucaaccccugagua

SEQ ID NO: 7692 - RNA, 20 nt, Artificial Sequence
  targeting sequence with GTCN PAM
cagagugauacccugucuca

SEQ ID NO: 7693 - RNA, 20 nt, Artificial Sequence
  targeting sequence with GTCN PAM
caaaaaacaauaggccaggu

SEQ ID NO: 7694 - RNA, 20 nt, Artificial Sequence
  targeting sequence with GTCN PAM
cuaacuccugaucucaagug

SEQ ID NO: 7695 - RNA, 20 nt, Artificial Sequence
  targeting sequence with GTCN PAM
guacuaaaaauauaaaaauu

SEQ ID NO: 7696 - RNA, 20 nt, Artificial Sequence
  targeting sequence with GTCN PAM
ugguuacuugggaggcuaag

SEQ ID NO: 7697 - RNA, 20 nt, Artificial Sequence
  targeting sequence with GTCN PAM
cccaagcuggagugcagugg

SEQ ID NO: 7698 - RNA, 20 nt, Artificial Sequence
  targeting sequence with GTCN PAM
cacucugucacccaagcugg

SEQ ID NO: 7699 - RNA, 20 nt, Artificial Sequence
  targeting sequence with GTCN PAM
caaaacagcuaaaccuggug

SEQ ID NO: 7700 - RNA, 20 nt, Artificial Sequence
  targeting sequence with GTCN PAM
gggguggucucuccaaggac

SEQ ID NO: 7701 - RNA, 20 nt, Artificial Sequence
  targeting sequence with GTCN PAM
cuccaaggacaugaguguga

SEQ ID NO: 7702 - RNA, 20 nt, Artificial Sequence
  targeting sequence with GTCN PAM
uuggagagaccaccccugac

SEQ ID NO: 7703 - RNA, 20 nt, Artificial Sequence
  targeting sequence with GTCN PAM
ccgcucacacucauguccuu

SEQ ID NO: 7704 - RNA, 20 nt, Artificial Sequence
  targeting sequence with GTCN PAM
ccuucaggucuccgcucaca

SEQ ID NO: 7705 - RNA, 20 nt, Artificial Sequence
  targeting sequence with GTCN PAM
gcaacaaauauauugaucac

SEQ ID NO: 7706 - RNA, 20 nt, Artificial Sequence
  targeting sequence with GTCN PAM
agauguaaggguggguggaa

SEQ ID NO: 7707 - RNA, 20 nt, Artificial Sequence
  targeting sequence with GTCN PAM
aaagauucacgaaccaggcu

SEQ ID NO: 7708 - RNA, 20 nt, Artificial Sequence
  targeting sequence with GTCN PAM
gagcaaacugaggcccagag

SEQ ID NO: 7709 - RNA, 20 nt, Artificial Sequence
  targeting sequence with GTCN PAM
ugcuuccuuccccucucugg

SEQ ID NO: 7710 - RNA, 20 nt, Artificial Sequence
  targeting sequence with GTCN PAM
ccaugguaguccugcuuccu

SEQ ID NO: 7711 - RNA, 20 nt, Artificial Sequence
  targeting sequence with GTCN PAM
uugagucaccaugguagucc

SEQ ID NO: 7712 - RNA, 20 nt, Artificial Sequence
  targeting sequence with GTCN PAM
cacaggccuggcguggggca

SEQ ID NO: 7713 - RNA, 20 nt, Artificial Sequence
  targeting sequence with GTCN PAM
agggccuuuccauuacccca

SEQ ID NO: 7714 - RNA, 20 nt, Artificial Sequence
  targeting sequence with GTCN PAM
uuuauaccauggugugaaug

SEQ ID NO: 7715 - RNA, 20 nt, Artificial Sequence
  targeting sequence with GTCN PAM
uuccugagagcuaucuuuga

SEQ ID NO: 7716 - RNA, 20 nt, Artificial Sequence
  targeting sequence with GTCN PAM
acugggcuuccugggguauc

SEQ ID NO: 7717 - RNA, 20 nt, Artificial Sequence
  targeting sequence with GTCN PAM
cugauuuguaacgggaccug

SEQ ID NO: 7718 - RNA, 20 nt, Artificial Sequence
  targeting sequence with GTCN PAM
cguuacaaaucagugacagc

SEQ ID NO: 7719 - RNA, 20 nt, Artificial Sequence
  targeting sequence with GTCN PAM
uuucaucugcaaaauggaua

SEQ ID NO: 7720 - RNA, 20 nt, Artificial Sequence
  targeting sequence with GTCN PAM
gaguaggugacuucgaauga

SEQ ID NO: 7721 - RNA, 20 nt, Artificial Sequence
  targeting sequence with GTCN PAM
ccuacucugaccaucucugc

SEQ ID NO: 7722 - RNA, 20 nt, Artificial Sequence
  targeting sequence with GTCN PAM
uucgaagucaccuacucuga

SEQ ID NO: 7723 - RNA, 20 nt, Artificial Sequence
  targeting sequence with GTCN PAM
guuuuccugaacaaagagca

SEQ ID NO: 7724 - RNA, 20 nt, Artificial Sequence
  targeting sequence with GTCN PAM
ggcccaagaaauuuuuuuuu

SEQ ID NO: 7725 - RNA, 20 nt, Artificial Sequence
  targeting sequence with GTCN PAM
ugaacuccuggcucaagcga

SEQ ID NO: 7726 - RNA, 20 nt, Artificial Sequence
  targeting sequence with GTCN PAM
cgcuauguugcccaggcugg

SEQ ID NO: 7727 - RNA, 20 nt, Artificial Sequence
  targeting sequence with GTCN PAM
cagcuacucaggaggcugag

SEQ ID NO: 7728 - RNA, 20 nt, Artificial Sequence
  targeting sequence with GTCN PAM
cccaggcuggagugcagugc

SEQ ID NO: 7729 - RNA, 20 nt, Artificial Sequence
  targeting sequence with GTCN PAM
cugucgcccaggcuggagug

SEQ ID NO: 7730 - RNA, 20 nt, Artificial Sequence
  targeting sequence with GTCN PAM
caaaacuuuuuuuuucuucg

SEQ ID NO: 7731 - RNA, 20 nt, Artificial Sequence
  targeting sequence with GTCN PAM
agcuuuacagaauaaagagc

SEQ ID NO: 7732 - RNA, 20 nt, Artificial Sequence
  targeting sequence with GTCN PAM
ccucagugauggcuguuagu

SEQ ID NO: 7733 - RNA, 20 nt, Artificial Sequence
  targeting sequence with GTCN PAM
cagguuccuccuuugugagu

SEQ ID NO: 7734 - RNA, 20 nt, Artificial Sequence
  targeting sequence with GTCN PAM
auucccccacucacucguuc

SEQ ID NO: 7735 - RNA, 20 nt, Artificial Sequence
  targeting sequence with GTCN PAM
ccagggccuggcaccuagaa

SEQ ID NO: 7736 - RNA, 20 nt, Artificial Sequence
  targeting sequence with GTCN PAM
guuuuguucacugauguguc

SEQ ID NO: 7737 - RNA, 20 nt, Artificial Sequence
  targeting sequence with GTCN PAM
cugggaacccuguugugagc

SEQ ID NO: 7738 - RNA, 20 nt, Artificial Sequence
  targeting sequence with GTCN PAM
ugcucacaacaggguuccca

SEQ ID NO: 7739 - RNA, 20 nt, Artificial Sequence
  targeting sequence with GTCN PAM
gucuugcucacaacaggguu

SEQ ID NO: 7740 - RNA, 20 nt, Artificial Sequence
  targeting sequence with GTCN PAM
acaaggguaagccugggucu

SEQ ID NO: 7741 - RNA, 20 nt, Artificial Sequence
  targeting sequence with GTCN PAM
cccugccuguaacaugaguc

SEQ ID NO: 7742 - RNA, 20 nt, Artificial Sequence
  targeting sequence with GTCN PAM
gaagcacuaugcaaaaagca

SEQ ID NO: 7743 - RNA, 20 nt, Artificial Sequence
  targeting sequence with GTCN PAM
gucuugacccaaggcaucca

SEQ ID NO: 7744 - RNA, 20 nt, Artificial Sequence
  targeting sequence with GTCN PAM
ugacccaaggcauccaggac

SEQ ID NO: 7745 - RNA, 20 nt, Artificial Sequence
  targeting sequence with GTCN PAM
agacugacccacaacuggcc

SEQ ID NO: 7746 - RNA, 20 nt, Artificial Sequence
  targeting sequence with GTCN PAM
uggaugccuugggucaagac

SEQ ID NO: 7747 - RNA, 20 nt, Artificial Sequence
  targeting sequence with GTCN PAM
acgucagaaucaaacccuca

SEQ ID NO: 7748 - RNA, 20 nt, Artificial Sequence
  targeting sequence with GTCN PAM
gaaucaaacccucaccuuaa

SEQ ID NO: 7749 - RNA, 20 nt, Artificial Sequence
  targeting sequence with GTCN PAM
aacagcguuuggcacacgug

SEQ ID NO: 7750 - RNA, 20 nt, Artificial Sequence
  targeting sequence with GTCN PAM
gcucagaagagugcccccuu

SEQ ID NO: 7751 - RNA, 20 nt, Artificial Sequence
  targeting sequence with GTCN PAM
cucuucccacccaggauucc

SEQ ID NO: 7752 - RNA, 20 nt, Artificial Sequence
  targeting sequence with GTCN PAM
uuccgccuggauguccuucc

SEQ ID NO: 7753 - RNA, 20 nt, Artificial Sequence
  targeting sequence with GTCN PAM
uuccccugaagcuuccuccu

SEQ ID NO: 7754 - RNA, 20 nt, Artificial Sequence
  targeting sequence with GTCN PAM
cagccacucccaacacagga

SEQ ID NO: 7755 - RNA, 20 nt, Artificial Sequence
  targeting sequence with GTCN PAM
cuacuguuauucgcucuucu

SEQ ID NO: 7756 - RNA, 20 nt, Artificial Sequence
  targeting sequence with GTCN PAM
cugugcccccucaccccaca

SEQ ID NO: 7757 - RNA, 20 nt, Artificial Sequence
  targeting sequence with GTCN PAM
ccaaggaccaagcaccuugu

SEQ ID NO: 7758 - RNA, 20 nt, Artificial Sequence
  targeting sequence with GTCN PAM
uuggggacacacaggguaca

SEQ ID NO: 7759 - RNA, 20 nt, Artificial Sequence
  targeting sequence with GTCN PAM
gggccacaguaggugcucaa

SEQ ID NO: 7760 - RNA, 20 nt, Artificial Sequence
  targeting sequence with GTCN PAM
agccaacauguguauugagc

SEQ ID NO: 7761 - RNA, 20 nt, Artificial Sequence
  targeting sequence with GTCN PAM
cugagcggccgcacgucggg

SEQ ID NO: 7762 - RNA, 20 nt, Artificial Sequence
  targeting sequence with GTCN PAM
ggcacucucagcacuugcac

SEQ ID NO: 7763 - RNA, 20 nt, Artificial Sequence
  targeting sequence with GTCN PAM
ggggcggccugugcaagugc

SEQ ID NO: 7764 - RNA, 20 nt, Artificial Sequence
  targeting sequence with GTCN PAM
ucauguugcuuggacgacgg

SEQ ID NO: 7765 - RNA, 20 nt, Artificial Sequence
  targeting sequence with GTCN PAM
aagcaacaugaugacaccuc

SEQ ID NO: 7766 - RNA, 20 nt, Artificial Sequence
  targeting sequence with GTCN PAM
uccaagcaacaugaugacac

SEQ ID NO: 7767 - RNA, 20 nt, Artificial Sequence
  targeting sequence with GTCN PAM
cccucuccccgucguccaag

SEQ ID NO: 7768 - RNA, 20 nt, Artificial Sequence
  targeting sequence with GTCN PAM
ucugcccccaaggcucugac

SEQ ID NO: 7769 - RNA, 20 nt, Artificial Sequence
  targeting sequence with GTCN PAM
gagccuugggggcagaugac

SEQ ID NO: 7770 - RNA, 20 nt, Artificial Sequence
  targeting sequence with GTCN PAM
gcugccuccagggccagccu

SEQ ID NO: 7771 - RNA, 20 nt, Artificial Sequence
  targeting sequence with GTCN PAM
gaaggggaggcuggcccugg

SEQ ID NO: 7772 - RNA, 20 nt, Artificial Sequence
  targeting sequence with GTCN PAM
ccugaaggguucugccccuc

SEQ ID NO: 7773 - RNA, 20 nt, Artificial Sequence
  targeting sequence with GTCN PAM
ccuuucuacaccagugaucu

SEQ ID NO: 7774 - RNA, 20 nt, Artificial Sequence
  targeting sequence with GTCN PAM
ugaacgcuaggccggggaac

SEQ ID NO: 7775 - RNA, 20 nt, Artificial Sequence
  targeting sequence with GTCN PAM
gggaggccauguuugggccu

SEQ ID NO: 7776 - RNA, 20 nt, Artificial Sequence
  targeting sequence with GTCN PAM
ggcccugucuccacaaccuc

SEQ ID NO: 7777 - RNA, 20 nt, Artificial Sequence
  targeting sequence with GTCN PAM
ccacaaccucacagccaccc

SEQ ID NO: 7778 - RNA, 20 nt, Artificial Sequence
  targeting sequence with GTCN PAM
aggguggcugugagguugug

SEQ ID NO: 7779 - RNA, 20 nt, Artificial Sequence
  targeting sequence with GTCN PAM
uccucagccccugagcuccu

SEQ ID NO: 7780 - RNA, 20 nt, Artificial Sequence
  targeting sequence with GTCN PAM
ggcaccagaaacggaagcug

SEQ ID NO: 7781 - RNA, 20 nt, Artificial Sequence
  targeting sequence with GTCN PAM
gaggaguguggggacuggau

SEQ ID NO: 7782 - RNA, 20 nt, Artificial Sequence
  targeting sequence with GTCN PAM
ccacacuccucugacaggag

SEQ ID NO: 7783 - RNA, 20 nt, Artificial Sequence
  targeting sequence with GTCN PAM
uccaguccccacacuccucu

SEQ ID NO: 7784 - RNA, 20 nt, Artificial Sequence
  targeting sequence with GTCN PAM
cacagccccuuaccuguucg

SEQ ID NO: 7785 - RNA, 20 nt, Artificial Sequence
  targeting sequence with GTCN PAM
cucaucucgucacacagccc

SEQ ID NO: 7786 - RNA, 20 nt, Artificial Sequence
  targeting sequence with GTCN PAM
cuagcuguccagaggacaua

SEQ ID NO: 7787 - RNA, 20 nt, Artificial Sequence
  targeting sequence with GTCN PAM
agaggacauagcacagaggc

SEQ ID NO: 7788 - RNA, 20 nt, Artificial Sequence
  targeting sequence with GTCN PAM
ucuggacagcuagagacuuu

SEQ ID NO: 7789 - RNA, 20 nt, Artificial Sequence
  targeting sequence with GTCN PAM
cuauuucaaacccaggccac

SEQ ID NO: 7790 - RNA, 20 nt, Artificial Sequence
  targeting sequence with GTCN PAM
gguggccuggguuugaaaua

SEQ ID NO: 7791 - RNA, 20 nt, Artificial Sequence
  targeting sequence with GTCN PAM
cagcucagucugguggccug

SEQ ID NO: 7792 - RNA, 20 nt, Artificial Sequence
  targeting sequence with GTCN PAM
caaggucccagcucagucug

SEQ ID NO: 7793 - RNA, 20 nt, Artificial Sequence
  targeting sequence with GTCN PAM
gucccaaggucccagcucag

SEQ ID NO: 7794 - RNA, 20 nt, Artificial Sequence
  targeting sequence with GTCN PAM
ugcagaaguuaggggaccuu

SEQ ID NO: 7795 - RNA, 20 nt, Artificial Sequence
  targeting sequence with GTCN PAM
ccuaacuucugcaugacuug

SEQ ID NO: 7796 - RNA, 20 nt, Artificial Sequence
  targeting sequence with GTCN PAM
gggaggagagguacucagga

SEQ ID NO: 7797 - RNA, 20 nt, Artificial Sequence
  targeting sequence with GTCN PAM
ccuuggccccucuuagaagc

SEQ ID NO: 7798 - RNA, 20 nt, Artificial Sequence
  targeting sequence with GTCN PAM
cuuuauaagggucugggggg

SEQ ID NO: 7799 - RNA, 20 nt, Artificial Sequence
  targeting sequence with GTCN PAM
gggggggucagaacccagag

SEQ ID NO: 7800 - RNA, 20 nt, Artificial Sequence
  targeting sequence with GTCN PAM
gaacccagagucauccagcu

SEQ ID NO: 7801 - RNA, 20 nt, Artificial Sequence
  targeting sequence with GTCN PAM
uccagcuggagcccugagug

SEQ ID NO: 7802 - RNA, 20 nt, Artificial Sequence
  targeting sequence with GTCN PAM
gccacaagggccacagccau

SEQ ID NO: 7803 - RNA, 20 nt, Artificial Sequence
  targeting sequence with GTCN PAM
cauuggagaagggcacguag

SEQ ID NO: 7804 - RNA, 20 nt, Artificial Sequence
  targeting sequence with GTCN PAM
ccguccagcacaagaagcug

SEQ ID NO: 7805 - RNA, 20 nt, Artificial Sequence
  targeting sequence with GTCN PAM
agcacaagaagcugcgcacg

SEQ ID NO: 7806 - RNA, 20 nt, Artificial Sequence
  targeting sequence with GTCN PAM
gccacggcuagguugagcag

SEQ ID NO: 7807 - RNA, 20 nt, Artificial Sequence
  targeting sequence with GTCN PAM
uagguggcuucaccagcacc

SEQ ID NO: 7808 - RNA, 20 nt, Artificial Sequence
  targeting sequence with GTCN PAM
ucgggcccacaggaugcaau

SEQ ID NO: 7809 - RNA, 20 nt, Artificial Sequence
  targeting sequence with GTCN PAM
gggagagucccgggcuuggc

SEQ ID NO: 7810 - RNA, 20 nt, Artificial Sequence
  targeting sequence with GTCN PAM
cgggcuuggcggugguggcu

SEQ ID NO: 7811 - RNA, 20 nt, Artificial Sequence
  targeting sequence with GTCN PAM
ugucaauguuauccaaagcc

SEQ ID NO: 7812 - RNA, 20 nt, Artificial Sequence
  targeting sequence with GTCN PAM
auguuauccaaagcccucau

SEQ ID NO: 7813 - RNA, 20 nt, Artificial Sequence
  targeting sequence with GTCN PAM
acaaacaccauucaugguga

SEQ ID NO: 7814 - RNA, 20 nt, Artificial Sequence
  targeting sequence with GTCN PAM
aauuucacagcaagaaaacu

SEQ ID NO: 7815 - RNA, 20 nt, Artificial Sequence
  targeting sequence with GTCN PAM
agcgcccugcuggggcguca

SEQ ID NO: 7816 - RNA, 20 nt, Artificial Sequence
  targeting sequence with GTCN PAM
cacagggacgggugcagagu

SEQ ID NO: 7817 - RNA, 20 nt, Artificial Sequence
  targeting sequence with GTCN PAM
cugugugacgccccagcagg

SEQ ID NO: 7818 - RNA, 20 nt, Artificial Sequence
  targeting sequence with GTCN PAM
gacccaggcugggcacugag

SEQ ID NO: 7819 - RNA, 20 nt, Artificial Sequence
  targeting sequence with GTCN PAM
gacucagcacagcugcucca

SEQ ID NO: 7820 - RNA, 20 nt, Artificial Sequence
  targeting sequence with GTCN PAM
ggcuugcccagcucucccuc

SEQ ID NO: 7821 - RNA, 20 nt, Artificial Sequence
  targeting sequence with GTCN PAM
uugggucuucccugugcugg

SEQ ID NO: 7822 - RNA, 20 nt, Artificial Sequence
  targeting sequence with GTCN PAM
ucccugugcugggcaauggg

SEQ ID NO: 7823 - RNA, 20 nt, Artificial Sequence
  targeting sequence with GTCN PAM
ccucuggcauccucugccuc

SEQ ID NO: 7824 - RNA, 20 nt, Artificial Sequence
  targeting sequence with GTCN PAM
ucaggugccccuccagccuc

SEQ ID NO: 7825 - RNA, 20 nt, Artificial Sequence
  targeting sequence with GTCN PAM
ccugguguugagaaccgcaa

SEQ ID NO: 7826 - RNA, 20 nt, Artificial Sequence
  targeting sequence with GTCN PAM
ugcauuuaacaggaaaacag

SEQ ID NO: 7827 - RNA, 20 nt, Artificial Sequence
  targeting sequence with GTCN PAM
cuuccccucucccugccuca

SEQ ID NO: 7828 - RNA, 20 nt, Artificial Sequence
  targeting sequence with GTCN PAM
ccuggcugugauccaggaau

SEQ ID NO: 7829 - RNA, 20 nt, Artificial Sequence
  targeting sequence with GTCN PAM
ccuccugcaucucagcagag

SEQ ID NO: 7830 - RNA, 20 nt, Artificial Sequence
  targeting sequence with GTCN PAM
cccagcuuugcaauggcugc

SEQ ID NO: 7831 - RNA, 20 nt, Artificial Sequence
  targeting sequence with GTCN PAM
cucugccagccuugcccugu

SEQ ID NO: 7832 - RNA, 20 nt, Artificial Sequence
  targeting sequence with GTCN PAM
cccccauguccaggcugcug

SEQ ID NO: 7833 - RNA, 20 nt, Artificial Sequence
  targeting sequence with GTCN PAM
aggcugcugccucgguccca

SEQ ID NO: 7834 - RNA, 20 nt, Artificial Sequence
  targeting sequence with GTCN PAM
cauucucagggaaucucugg

SEQ ID NO: 7835 - RNA, 20 nt, Artificial Sequence
  targeting sequence with GTCN PAM
gucccaguuuacaaauauug

SEQ ID NO: 7836 - RNA, 20 nt, Artificial Sequence
  targeting sequence with GTCN PAM
caguuuacaaauauuguccc

SEQ ID NO: 7837 - RNA, 20 nt, Artificial Sequence
  targeting sequence with GTCN PAM
cuuucacuguuaggaauguc

SEQ ID NO: 7838 - RNA, 20 nt, Artificial Sequence
  targeting sequence with GTCN PAM
caguuugguugauuaacuau

SEQ ID NO: 7839 - RNA, 20 nt, Artificial Sequence
  targeting sequence with GTCN PAM
ugcucaccaccccaugaagu

SEQ ID NO: 7840 - RNA, 20 nt, Artificial Sequence
  targeting sequence with GTCN PAM
gaauuccaucauuuccuucu

SEQ ID NO: 7841 - RNA, 20 nt, Artificial Sequence
  targeting sequence with GTCN PAM
ggguuauuucauuucccgag

SEQ ID NO: 7842 - RNA, 20 nt, Artificial Sequence
  targeting sequence with GTCN PAM
uuccucccucucccuucucg

SEQ ID NO: 7843 - RNA, 20 nt, Artificial Sequence
  targeting sequence with GTCN PAM
ggauugaacugggaacccgg

SEQ ID NO: 7844 - RNA, 20 nt, Artificial Sequence
  targeting sequence with GTCN PAM
cuuaugggcccagagcgcua

SEQ ID NO: 7845 - RNA, 20 nt, Artificial Sequence
  targeting sequence with GTCN PAM
cucugccccuucccccuccu

SEQ ID NO: 7846 - RNA, 20 nt, Artificial Sequence
  targeting sequence with GTCN PAM
aggggggagugcacccuccu

SEQ ID NO: 7847 - RNA, 20 nt, Artificial Sequence
  targeting sequence with GTCN PAM
gugcugaccgccugcugacu

SEQ ID NO: 7848 - RNA, 20 nt, Artificial Sequence
  targeting sequence with GTCN PAM
gcacagaccccacugccuaa

SEQ ID NO: 7849 - RNA, 20 nt, Artificial Sequence
  targeting sequence with GTCN PAM
gcaggcggucagcacagacc

SEQ ID NO: 7850 - RNA, 20 nt, Artificial Sequence
  targeting sequence with GTCN PAM
uuggugguccuggccaucga

SEQ ID NO: 7851 - RNA, 20 nt, Artificial Sequence
  targeting sequence with GTCN PAM
uggccaucgagcgguacgug

SEQ ID NO: 7852 - RNA, 20 nt, Artificial Sequence
  targeting sequence with GTCN PAM
uggcgcuggccugcgccgca

SEQ ID NO: 7853 - RNA, 20 nt, Artificial Sequence
  targeting sequence with GTCN PAM
agguaauggcacugagcaga

SEQ ID NO: 7854 - RNA, 20 nt, Artificial Sequence
  targeting sequence with GTCN PAM
uccagucaggacucaaaccc

SEQ ID NO: 7855 - RNA, 20 nt, Artificial Sequence
  targeting sequence with GTCN PAM
ggacucaaacccaguagugu

SEQ ID NO: 7856 - RNA, 20 nt, Artificial Sequence
  targeting sequence with GTCN PAM
ugacuggaggacccuacaaa

SEQ ID NO: 7857 - RNA, 20 nt, Artificial Sequence
  targeting sequence with GTCN PAM
gguuccaggcacugaccuug

SEQ ID NO: 7858 - RNA, 20 nt, Artificial Sequence
  targeting sequence with GTCN PAM
gugccuggaaccagacacua

SEQ ID NO: 7859 - RNA, 20 nt, Artificial Sequence
  targeting sequence with GTCN PAM
ccuggcccaaaugcccacuc

SEQ ID NO: 7860 - RNA, 20 nt, Artificial Sequence
  targeting sequence with GTCN PAM
guuucuucuucugcccuaca

SEQ ID NO: 7861 - RNA, 20 nt, Artificial Sequence
  targeting sequence with GTCN PAM
caucuccugagccccauguc

SEQ ID NO: 7862 - RNA, 20 nt, Artificial Sequence
  targeting sequence with GTCN PAM
aacagaauccaagacauccc

SEQ ID NO: 7863 - RNA, 20 nt, Artificial Sequence
  targeting sequence with GTCN PAM
uggauucuguuugacauggg

SEQ ID NO: 7864 - RNA, 20 nt, Artificial Sequence
  targeting sequence with GTCN PAM
aguaccccgggggcagcccc

SEQ ID NO: 7865 - RNA, 20 nt, Artificial Sequence
  targeting sequence with GTCN PAM
cacucagccucuaggcgauu

SEQ ID NO: 7866 - RNA, 20 nt, Artificial Sequence
  targeting sequence with GTCN PAM
ccuaauggggcugagaugag

SEQ ID NO: 7867 - RNA, 20 nt, Artificial Sequence
  targeting sequence with GTCN PAM
caucucagccccauuaggag

SEQ ID NO: 7868 - RNA, 20 nt, Artificial Sequence
  targeting sequence with GTCN PAM
ccacugugucucaucucagc

SEQ ID NO: 7869 - RNA, 20 nt, Artificial Sequence
  targeting sequence with GTCN PAM
aaaccacuguccccacugug

SEQ ID NO: 7870 - RNA, 20 nt, Artificial Sequence
  targeting sequence with GTCN PAM
uauuguccaaaccacugucc

SEQ ID NO: 7871 - RNA, 20 nt, Artificial Sequence
  targeting sequence with GTCN PAM
ccaguccuauuguccaaacc

SEQ ID NO: 7872 - RNA, 20 nt, Artificial Sequence
  targeting sequence with GTCN PAM
ccagaggccucaugucccuc

SEQ ID NO: 7873 - RNA, 20 nt, Artificial Sequence
  targeting sequence with GTCN PAM
cucugucuccagaaaauucc

SEQ ID NO: 7874 - RNA, 20 nt, Artificial Sequence
  targeting sequence with GTCN PAM
ccagaaaauucccacucuca

SEQ ID NO: 7875 - RNA, 20 nt, Artificial Sequence
  targeting sequence with GTCN PAM
ugcuaggguccauuucuuac

SEQ ID NO: 7876 - RNA, 20 nt, Artificial Sequence
  targeting sequence with GTCN PAM
auuucuuaccccuugcugaa

SEQ ID NO: 7877 - RNA, 20 nt, Artificial Sequence
  targeting sequence with GTCN PAM
agggggugggcucaaauuca

SEQ ID NO: 7878 - RNA, 20 nt, Artificial Sequence
  targeting sequence with GTCN PAM
agcggcucugcuuccagagg

SEQ ID NO: 7879 - RNA, 20 nt, Artificial Sequence
  targeting sequence with GTCN PAM
acugucaccaauaucaggaa

SEQ ID NO: 7880 - RNA, 20 nt, Artificial Sequence
  targeting sequence with GTCN PAM
ccaauaucaggaaccauugc

SEQ ID NO: 7881 - RNA, 20 nt, Artificial Sequence
  targeting sequence with GTCN PAM
uaaugacgugcgcuggaagc

SEQ ID NO: 7882 - RNA, 20 nt, Artificial Sequence
  targeting sequence with GTCN PAM
uuaggacguggcaaugguuc

SEQ ID NO: 7883 - RNA, 20 nt, Artificial Sequence
  targeting sequence with GTCN PAM
aucuuuggccuggaaaauac

SEQ ID NO: 7884 - RNA, 20 nt, Artificial Sequence
  targeting sequence with GTCN PAM
uccuagccccagggugagag

SEQ ID NO: 7885 - RNA, 20 nt, Artificial Sequence
  targeting sequence with GTCN PAM
ucugguaacgcagccaccaa

SEQ ID NO: 7886 - RNA, 20 nt, Artificial Sequence
  targeting sequence with GTCN PAM
cuucauuguuugguggcugc

SEQ ID NO: 7887 - RNA, 20 nt, Artificial Sequence
  targeting sequence with GTCN PAM
cccagccaugcagacguuua

SEQ ID NO: 7888 - RNA, 20 nt, Artificial Sequence
  targeting sequence with GTCN PAM
gcauggcugggugacaggau

SEQ ID NO: 7889 - RNA, 20 nt, Artificial Sequence
  targeting sequence with GTCN PAM
cucacaggcagggucucccu

SEQ ID NO: 7890 - RNA, 20 nt, Artificial Sequence
  targeting sequence with GTCN PAM
cccuaccugccuguccucag

SEQ ID NO: 7891 - RNA, 20 nt, Artificial Sequence
  targeting sequence with GTCN PAM
ucagguacauccccgagggc

SEQ ID NO: 7892 - RNA, 20 nt, Artificial Sequence
  targeting sequence with GTCN PAM
auuccacacgagcacugcag

SEQ ID NO: 7893 - RNA, 20 nt, Artificial Sequence
  targeting sequence with GTCN PAM
acaacgagucuuuugucauc

SEQ ID NO: 7894 - RNA, 20 nt, Artificial Sequence
  targeting sequence with GTCN PAM
uuugucaucuacauguucgu

SEQ ID NO: 7895 - RNA, 20 nt, Artificial Sequence
  targeting sequence with GTCN PAM
ucuacauguucgugguccac

SEQ ID NO: 7896 - RNA, 20 nt, Artificial Sequence
  targeting sequence with GTCN PAM
acuucaccauccccaugauu

SEQ ID NO: 7897 - RNA, 20 nt, Artificial Sequence
  targeting sequence with GTCN PAM
ucaccgucaaggagguacgg

SEQ ID NO: 7898 - RNA, 20 nt, Artificial Sequence
  targeting sequence with GTCN PAM
aggagguacgggccgggggg

SEQ ID NO: 7899 - RNA, 20 nt, Artificial Sequence
  targeting sequence with GTCN PAM
agcccccagcaugcaucugc

SEQ ID NO: 7900 - RNA, 20 nt, Artificial Sequence
  targeting sequence with GTCN PAM
ggacccgggucccguguccu

SEQ ID NO: 7901 - RNA, 20 nt, Artificial Sequence
  targeting sequence with GTCN PAM
agaccauggcuccuccaggg

SEQ ID NO: 7902 - RNA, 20 nt, Artificial Sequence
  targeting sequence with GTCN PAM
cguguccugcaggccgcugc

SEQ ID NO: 7903 - RNA, 20 nt, Artificial Sequence
  targeting sequence with GTCN PAM
ugcaggccgcugcccagcag

SEQ ID NO: 7904 - RNA, 20 nt, Artificial Sequence
  targeting sequence with GTCN PAM
gccaccacacagaaggcaga

SEQ ID NO: 7905 - RNA, 20 nt, Artificial Sequence
  targeting sequence with GTCN PAM
cccgcauggucaucaucaug

SEQ ID NO: 7906 - RNA, 20 nt, Artificial Sequence
  targeting sequence with GTCN PAM
ucaucauggucaucgcuuuc

SEQ ID NO: 7907 - RNA, 20 nt, Artificial Sequence
  targeting sequence with GTCN PAM
ucgcuuuccugaucugcugg

SEQ ID NO: 7908 - RNA, 20 nt, Artificial Sequence
  targeting sequence with GTCN PAM
caucuucaugaccaucccag

SEQ ID NO: 7909 - RNA, 20 nt, Artificial Sequence
  targeting sequence with GTCN PAM
ugaagaugggaccgaaguug

SEQ ID NO: 7910 - RNA, 20 nt, Artificial Sequence
  targeting sequence with GTCN PAM
ucuauaucaugaugaacaag

SEQ ID NO: 7911 - RNA, 20 nt, Artificial Sequence
  targeting sequence with GTCN PAM
uuggcaggcagcgccugugg

SEQ ID NO: 7912 - RNA, 20 nt, Artificial Sequence
  targeting sequence with GTCN PAM
ugggucagcagucccaaugg

SEQ ID NO: 7913 - RNA, 20 nt, Artificial Sequence
  targeting sequence with GTCN PAM
gcagucccaauggggagugu

SEQ ID NO: 7914 - RNA, 20 nt, Artificial Sequence
  targeting sequence with GTCN PAM
caauggggagugugugagaa

SEQ ID NO: 7915 - RNA, 20 nt, Artificial Sequence
  targeting sequence with GTCN PAM
gcuaguucuggaagcccaau

SEQ ID NO: 7916 - RNA, 20 nt, Artificial Sequence
  targeting sequence with GTCN PAM
aagucagaaggacccaaguc

SEQ ID NO: 7917 - RNA, 20 nt, Artificial Sequence
  targeting sequence with GTCN PAM
gaaggacccaagucgggaau

SEQ ID NO: 7918 - RNA, 20 nt, Artificial Sequence
  targeting sequence with GTCN PAM
uucugacuuugacauugggc

SEQ ID NO: 7919 - RNA, 20 nt, Artificial Sequence
  targeting sequence with GTCN PAM
ggaaugggaugggccagucu

SEQ ID NO: 7920 - RNA, 20 nt, Artificial Sequence
  targeting sequence with GTCN PAM
ccauaaagcugaauaaggag

SEQ ID NO: 7921 - RNA, 20 nt, Artificial Sequence
  targeting sequence with GTCN PAM
uauucugagggguaaagggg

SEQ ID NO: 7922 - RNA, 20 nt, Artificial Sequence
  targeting sequence with GTCN PAM
cugaagucagcucugccauu

SEQ ID NO: 7923 - RNA, 20 nt, Artificial Sequence
  targeting sequence with GTCN PAM
gcucugccauuuucuagcug

SEQ ID NO: 7924 - RNA, 20 nt, Artificial Sequence
  targeting sequence with GTCN PAM
auuuccuucucugugcuuug

SEQ ID NO: 7925 - RNA, 20 nt, Artificial Sequence
  targeting sequence with GTCN PAM
cgggugacacagcccccuug

SEQ ID NO: 7926 - RNA, 20 nt, Artificial Sequence
  targeting sequence with GTCN PAM
cccgugacauuucauggugc

SEQ ID NO: 7927 - RNA, 20 nt, Artificial Sequence
  targeting sequence with GTCN PAM
cuggcaucucuaggggugag

SEQ ID NO: 7928 - RNA, 20 nt, Artificial Sequence
  targeting sequence with GTCN PAM
gccuagcagguucccuccag

SEQ ID NO: 7929 - RNA, 20 nt, Artificial Sequence
  targeting sequence with GTCN PAM
gggcgaaccucacuaacgug

SEQ ID NO: 7930 - RNA, 20 nt, Artificial Sequence
  targeting sequence with GTCN PAM
gggccagggcugcccacagu

SEQ ID NO: 7931 - RNA, 20 nt, Artificial Sequence
  targeting sequence with GTCN PAM
cccaguggguucuugccgca

SEQ ID NO: 7932 - RNA, 20 nt, Artificial Sequence
  targeting sequence with GTCN PAM
aagacggagacgagccaggu

SEQ ID NO: 7933 - RNA, 20 nt, Artificial Sequence
  targeting sequence with GTCN PAM
uggacacgguagcagaggcc

SEQ ID NO: 7934 - RNA, 20 nt, Artificial Sequence
  targeting sequence with GTCN PAM
ccgucuuggacacgguagca

SEQ ID NO: 7935 - RNA, 20 nt, Artificial Sequence
  targeting sequence with GTCN PAM
uaggccggggccaccuggcu

SEQ ID NO: 7936 - RNA, 20 nt, Artificial Sequence
  targeting sequence with GTCN PAM
uaggcaggucuuaggccggg

SEQ ID NO: 7937 - RNA, 20 nt, Artificial Sequence
  targeting sequence with GTCN PAM
gccacagaguccuaggcagg

SEQ ID NO: 7938 - RNA, 20 nt, Artificial Sequence
  targeting sequence with GTCN PAM
cccauccccuacaccuuccc

SEQ ID NO: 7939 - RNA, 20 nt, Artificial Sequence
  targeting sequence with GTCN PAM
cauaggcuccuuaauuuuuu

SEQ ID NO: 7940 - RNA, 20 nt, Artificial Sequence
  targeting sequence with GTCN PAM
caggugagugaggagccuca

SEQ ID NO: 7941 - RNA, 20 nt, Artificial Sequence
  targeting sequence with GTCN PAM
cuucucaggcugucccaggu

SEQ ID NO: 7942 - RNA, 20 nt, Artificial Sequence
  targeting sequence with GTCN PAM
ugguggaugucccuucucag

SEQ ID NO: 7943 - RNA, 20 nt, Artificial Sequence
  targeting sequence with GTCN PAM
cacguuccccaaggccagcg

SEQ ID NO: 7944 - RNA, 20 nt, Artificial Sequence
  targeting sequence with GTCN PAM
cagcuuagggauaagugucu

SEQ ID NO: 7945 - RNA, 20 nt, Artificial Sequence
  targeting sequence with GTCN PAM
agcacagaauggggcacaca

SEQ ID NO: 7946 - RNA, 20 nt, Artificial Sequence
  targeting sequence with GTCN PAM
gagaggauagauauguucuc

SEQ ID NO: 7947 - RNA, 20 nt, Artificial Sequence
  targeting sequence with GTCN PAM
ugccgacacgcagcuacuga

SEQ ID NO: 7948 - RNA, 20 nt, Artificial Sequence
  targeting sequence with GTCN PAM
gcaggaccagggaucuggga

SEQ ID NO: 7949 - RNA, 20 nt, Artificial Sequence
  targeting sequence with GTCN PAM
ucucaguagcugcgugucgg

SEQ ID NO: 7950 - RNA, 20 nt, Artificial Sequence
  targeting sequence with GTCN PAM
auguguguguuucagcacuu

SEQ ID NO: 7951 - RNA, 20 nt, Artificial Sequence
  targeting sequence with GTCN PAM
ggccuugaugccuagcuaau

SEQ ID NO: 7952 - RNA, 20 nt, Artificial Sequence
  targeting sequence with GTCN PAM
cugccuacagcccaaccccc

SEQ ID NO: 7953 - RNA, 20 nt, Artificial Sequence
  targeting sequence with GTCN PAM
caggaaugcagaaugcaguc

SEQ ID NO: 7954 - RNA, 20 nt, Artificial Sequence
  targeting sequence with GTCN PAM
ucagaccugaaaaaacaaca

SEQ ID NO: 7955 - RNA, 20 nt, Artificial Sequence
  targeting sequence with GTCN PAM
gaugacugcauucugcauuc

SEQ ID NO: 7956 - RNA, 20 nt, Artificial Sequence
  targeting sequence with GTCN PAM
cccucccccaguguuguuuu

SEQ ID NO: 7957 - RNA, 20 nt, Artificial Sequence
  targeting sequence with GTCN PAM
caccccuaguguggggcccc

SEQ ID NO: 7958 - RNA, 20 nt, Artificial Sequence
  targeting sequence with GTCN PAM
cgugccuccccuucccaaug

SEQ ID NO: 7959 - RNA, 20 nt, Artificial Sequence
  targeting sequence with GTCN PAM
cuccauaggccacauuggga

SEQ ID NO: 7960 - RNA, 20 nt, Artificial Sequence
  targeting sequence with GTCN PAM
cagcaucuagagcauggagc

SEQ ID NO: 7961 - RNA, 20 nt, Artificial Sequence
  targeting sequence with GTCN PAM
cugaugucauccuuaucucg

SEQ ID NO: 7962 - RNA, 20 nt, Artificial Sequence
  targeting sequence with GTCN PAM
uccuuaucucgaagagcuua

SEQ ID NO: 7963 - RNA, 20 nt, Artificial Sequence
  targeting sequence with GTCN PAM
ggcaagggaaacuggaaacu

SEQ ID NO: 7964 - RNA, 20 nt, Artificial Sequence
  targeting sequence with GTCN PAM
auucuccauucuggagaauc

SEQ ID NO: 7965 - RNA, 20 nt, Artificial Sequence
  targeting sequence with GTCN PAM
gaauuaagcugccucaguaa

SEQ ID NO: 7966 - RNA, 20 nt, Artificial Sequence
  targeting sequence with GTCN PAM
ccaggcagagcuggguaaag

SEQ ID NO: 7967 - RNA, 20 nt, Artificial Sequence
  targeting sequence with GTCN PAM
gggaucagguggaagcuggc

SEQ ID NO: 7968 - RNA, 20 nt, Artificial Sequence
  targeting sequence with GTCN PAM
ccuggggcuagagguggagg

SEQ ID NO: 7969 - RNA, 20 nt, Artificial Sequence
  targeting sequence with GTCN PAM
ugggaaugggaaaaacccca

SEQ ID NO: 7970 - RNA, 20 nt, Artificial Sequence
  targeting sequence with GTCN PAM
uagaggcacagguaacccau

SEQ ID NO: 7971 - RNA, 20 nt, Artificial Sequence
  targeting sequence with GTCN PAM
ccucucagagcuuccuuauc

SEQ ID NO: 7972 - RNA, 20 nt, Artificial Sequence
  targeting sequence with GTCN PAM
guuuuaagauucuuuuuugc

SEQ ID NO: 7973 - RNA, 20 nt, Artificial Sequence
  targeting sequence with GTCN PAM
ggaguuugagaccagccuga

SEQ ID NO: 7974 - RNA, 20 nt, Artificial Sequence
  targeting sequence with GTCN PAM
caaacuccugaccucgugau

SEQ ID NO: 7975 - RNA, 20 nt, Artificial Sequence
  targeting sequence with GTCN PAM
ggcuggucucaaacuccuga

SEQ ID NO: 7976 - RNA, 20 nt, Artificial Sequence
  targeting sequence with GTCN PAM
cuacuaaaaauacaaaaauc

SEQ ID NO: 7977 - RNA, 20 nt, Artificial Sequence
  targeting sequence with GTCN PAM
cucuguugcucaggcuggag

SEQ ID NO: 7978 - RNA, 20 nt, Artificial Sequence
  targeting sequence with GTCN PAM
gucuccaaacaaaacaaaac

SEQ ID NO: 7979 - RNA, 20 nt, Artificial Sequence
  targeting sequence with GTCN PAM
ccaaacaaaacaaaacaaac

SEQ ID NO: 7980 - RNA, 20 nt, Artificial Sequence
  targeting sequence with GTCN PAM
caucuaauccccuuaggauc

SEQ ID NO: 7981 - RNA, 20 nt, Artificial Sequence
  targeting sequence with GTCN PAM
acagucgcaucuaauccccu

SEQ ID NO: 7982 - RNA, 20 nt, Artificial Sequence
  targeting sequence with GTCN PAM
caucugcugcaugccaggca

SEQ ID NO: 7983 - RNA, 20 nt, Artificial Sequence
  targeting sequence with GTCN PAM
cuaguaaggccagcucugag

SEQ ID NO: 7984 - RNA, 20 nt, Artificial Sequence
  targeting sequence with GTCN PAM
caaaggggaaaaggauggag

SEQ ID NO: 7985 - RNA, 20 nt, Artificial Sequence
  targeting sequence with GTCN PAM
cccccuccuccgaggugaga

SEQ ID NO: 7986 - RNA, 20 nt, Artificial Sequence
  targeting sequence with GTCN PAM
cucuuuacugugacucacua

SEQ ID NO: 7987 - RNA, 20 nt, Artificial Sequence
  targeting sequence with GTCN PAM
caguaaagagggacaaugau

SEQ ID NO: 7988 - RNA, 20 nt, Artificial Sequence
  targeting sequence with GTCN PAM
ggauacuuuuggucacaagu

SEQ ID NO: 7989 - RNA, 20 nt, Artificial Sequence
  targeting sequence with GTCN PAM
caagugauaggaaauccaac

SEQ ID NO: 7990 - RNA, 20 nt, Artificial Sequence
  targeting sequence with GTCN PAM
cuuuugcuucagcccaaaug

SEQ ID NO: 7991 - RNA, 20 nt, Artificial Sequence
  targeting sequence with GTCN PAM
uggugauacccugugccuga

SEQ ID NO: 7992 - RNA, 20 nt, Artificial Sequence
  targeting sequence with GTCN PAM
aggucaccugaucauacgua

SEQ ID NO: 7993 - RNA, 20 nt, Artificial Sequence
  targeting sequence with GTCN PAM
ccugaucauacguaacucau

SEQ ID NO: 7994 - RNA, 20 nt, Artificial Sequence
  targeting sequence with GTCN PAM
gauugcaaaaauccaaaaaa

SEQ ID NO: 7995 - RNA, 20 nt, Artificial Sequence
  targeting sequence with GTCN PAM
ucgccaaggucugauugcaa

SEQ ID NO: 7996 - RNA, 20 nt, Artificial Sequence
  targeting sequence with GTCN PAM
aacugcaucaccauggcugg

SEQ ID NO: 7997 - RNA, 20 nt, Artificial Sequence
  targeting sequence with GTCN PAM
gaccuaggucacaugcucac

SEQ ID NO: 7998 - RNA, 20 nt, Artificial Sequence
  targeting sequence with GTCN PAM
gaccaaucagaggaugaauc

SEQ ID NO: 7999 - RNA, 20 nt, Artificial Sequence
  targeting sequence with GTCN PAM
caugcucacccugcagccca

SEQ ID NO: 8000 - RNA, 20 nt, Artificial Sequence
  targeting sequence with GTCN PAM
agccacgugcccagaaaaca

SEQ ID NO: 8001 - RNA, 20 nt, Artificial Sequence
  targeting sequence with GTCN PAM
cugagaugaugagggaggga

SEQ ID NO: 8002 - RNA, 20 nt, Artificial Sequence
  targeting sequence with GTCN PAM
cgaaggucucacccuuuguu

SEQ ID NO: 8003 - RNA, 20 nt, Artificial Sequence
  targeting sequence with GTCN PAM
cacccuuuguuuuggaugcu

SEQ ID NO: 8004 - RNA, 20 nt, Artificial Sequence
  targeting sequence with GTCN PAM
cacccacugccacccuggcc

SEQ ID NO: 8005 - RNA, 20 nt, Artificial Sequence
  targeting sequence with GTCN PAM
gggcagcuaagaugccacug

SEQ ID NO: 8006 - RNA, 20 nt, Artificial Sequence
  targeting sequence with GTCN PAM
agaggaaaauuuuacucuaa

SEQ ID NO: 8007 - RNA, 20 nt, Artificial Sequence
  targeting sequence with GTCN PAM
ugauagacaagaaagccucc

SEQ ID NO: 8008 - RNA, 20 nt, Artificial Sequence
  targeting sequence with GTCN PAM
aucaggacaaaccagagaau

SEQ ID NO: 8009 - RNA, 20 nt, Artificial Sequence
  targeting sequence with GTCN PAM
uuuguaaauuaaggaggugg

SEQ ID NO: 8010 - RNA, 20 nt, Artificial Sequence
  targeting sequence with GTCN PAM
agucauuuguaaauuaagga

SEQ ID NO: 8011 - RNA, 20 nt, Artificial Sequence
  targeting sequence with GTCN PAM
gcuugcucagguuugguuga

SEQ ID NO: 8012 - RNA, 20 nt, Artificial Sequence
  targeting sequence with GTCN PAM
ccagugcauucuggcauggg

SEQ ID NO: 8013 - RNA, 20 nt, Artificial Sequence
  targeting sequence with GTCN PAM
cuaggcuccaauucaucucc

SEQ ID NO: 8014 - RNA, 20 nt, Artificial Sequence
  targeting sequence with GTCN PAM
cuaggcuaugaccugggcug

SEQ ID NO: 8015 - RNA, 20 nt, Artificial Sequence
  targeting sequence with GTCN PAM
uagccuagagacuuggucuc

SEQ ID NO: 8016 - RNA, 20 nt, Artificial Sequence
  targeting sequence with GTCN PAM
cgccaagggagagaugcacc

SEQ ID NO: 8017 - RNA, 20 nt, Artificial Sequence
  targeting sequence with GTCN PAM
cacuuugucacccagacugg

SEQ ID NO: 8018 - RNA, 20 nt, Artificial Sequence
  targeting sequence with GTCN PAM
cccagacuggaguacagugg

SEQ ID NO: 8019 - RNA, 20 nt, Artificial Sequence
  targeting sequence with GTCN PAM
gggugacaaagugagacccc

SEQ ID NO: 8020 - RNA, 20 nt, Artificial Sequence
  targeting sequence with GTCN PAM
aggcuacagugagcuaugag

SEQ ID NO: 8021 - RNA, 20 nt, Artificial Sequence
  targeting sequence with GTCN PAM
cagccucucaaguagccagg

SEQ ID NO: 8022 - RNA, 20 nt, Artificial Sequence
  targeting sequence with GTCN PAM
uggcuacuugagaggcugag

SEQ ID NO: 8023 - RNA, 20 nt, Artificial Sequence
  targeting sequence with GTCN PAM
cccuauguugcccaggcugg

SEQ ID NO: 8024 - RNA, 20 nt, Artificial Sequence
  targeting sequence with GTCN PAM
cagcacuuugagaggccaag

SEQ ID NO: 8025 - RNA, 20 nt, Artificial Sequence
  targeting sequence with GTCN PAM
uugaauuacuccaagacuca

SEQ ID NO: 8026 - RNA, 20 nt, Artificial Sequence
  targeting sequence with GTCN PAM
uggaguaauucaaggacuug

SEQ ID NO: 8027 - RNA, 20 nt, Artificial Sequence
  targeting sequence with GTCN PAM
auagggacuaauaagauuaa

SEQ ID NO: 8028 - RNA, 20 nt, Artificial Sequence
  targeting sequence with GTCN PAM
cuauagacaauucuaccaag

SEQ ID NO: 8029 - RNA, 20 nt, Artificial Sequence
  targeting sequence with GTCN PAM
acugugcacagcacccuuua

SEQ ID NO: 8030 - RNA, 20 nt, Artificial Sequence
  targeting sequence with GTCN PAM
cugggaagggaauucacauu

SEQ ID NO: 8031 - RNA, 20 nt, Artificial Sequence
  targeting sequence with GTCN PAM
auuucccaccacacaagcgg

SEQ ID NO: 8032 - RNA, 20 nt, Artificial Sequence
  targeting sequence with GTCN PAM
ugcaaaaguggggaagcaag

SEQ ID NO: 8033 - RNA, 20 nt, Artificial Sequence
  targeting sequence with GTCN PAM
uguguugagcaaccaggugc

SEQ ID NO: 8034 - RNA, 20 nt, Artificial Sequence
  targeting sequence with GTCN PAM
agucauuguaggguacucag

SEQ ID NO: 8035 - RNA, 20 nt, Artificial Sequence
  targeting sequence with GTCN PAM
uuguaggguacucagaaaug

SEQ ID NO: 8036 - RNA, 20 nt, Artificial Sequence
  targeting sequence with GTCN PAM
cuagguugugcauuuuggag

SEQ ID NO: 8037 - RNA, 20 nt, Artificial Sequence
  targeting sequence with GTCN PAM
ugaugacuggagcuuccgca

SEQ ID NO: 8038 - RNA, 20 nt, Artificial Sequence
  targeting sequence with GTCN PAM
ucaugacugcuuuccagcca

SEQ ID NO: 8039 - RNA, 20 nt, Artificial Sequence
  targeting sequence with GTCN PAM
ucagauucuaucucaugauc

SEQ ID NO: 8040 - RNA, 20 nt, Artificial Sequence
  targeting sequence with GTCN PAM
caccaugguucccccaugcu

SEQ ID NO: 8041 - RNA, 20 nt, Artificial Sequence
  targeting sequence with GTCN PAM
cuugugauuuuggaguuaua

SEQ ID NO: 8042 - RNA, 20 nt, Artificial Sequence
  targeting sequence with GTCN PAM
cagaaaagaaagaaggaaag

SEQ ID NO: 8043 - RNA, 20 nt, Artificial Sequence
  targeting sequence with GTCN PAM
ugcucuauugcccaggcugg

SEQ ID NO: 8044 - RNA, 20 nt, Artificial Sequence
  targeting sequence with GTCN PAM
cuacuaaaaauacaaaaaau

SEQ ID NO: 8045 - RNA, 20 nt, Artificial Sequence
  targeting sequence with GTCN PAM
ucucugaacuucagcuucuc

SEQ ID NO: 8046 - RNA, 20 nt, Artificial Sequence
  targeting sequence with GTCN PAM
aauguggcagccauuacuau

SEQ ID NO: 8047 - RNA, 20 nt, Artificial Sequence
  targeting sequence with GTCN PAM
auaaauauauaaagggcggg

SEQ ID NO: 8048 - RNA, 20 nt, Artificial Sequence
  targeting sequence with GTCN PAM
ggaaagaaaagucacaaaug

SEQ ID NO: 8049 - RNA, 20 nt, Artificial Sequence
  targeting sequence with GTCN PAM
caaauguccugauguuacag

SEQ ID NO: 8050 - RNA, 20 nt, Artificial Sequence
  targeting sequence with GTCN PAM
ugauguuacaggggcuggag

SEQ ID NO: 8051 - RNA, 20 nt, Artificial Sequence
  targeting sequence with GTCN PAM
gcuuuguguaacuccagccc

SEQ ID NO: 8052 - RNA, 20 nt, Artificial Sequence
  targeting sequence with GTCN PAM
gccuacaugugaacugcccu

SEQ ID NO: 8053 - RNA, 20 nt, Artificial Sequence
  targeting sequence with GTCN PAM
cugcagucugaugcucagaa

SEQ ID NO: 8054 - RNA, 20 nt, Artificial Sequence
  targeting sequence with GTCN PAM
gaugcucagaauuaccauuu

SEQ ID NO: 8055 - RNA, 20 nt, Artificial Sequence
  targeting sequence with GTCN PAM
cauaaaugugaucaaaauug

SEQ ID NO: 8056 - RNA, 20 nt, Artificial Sequence
  targeting sequence with GTCN PAM
ucugcuccagcauagucccg

SEQ ID NO: 8057 - RNA, 20 nt, Artificial Sequence
  targeting sequence with GTCN PAM
cggaagaggguuuucaggcc

SEQ ID NO: 8058 - RNA, 20 nt, Artificial Sequence
  targeting sequence with GTCN PAM
cagugcuggaggccugaaaa

SEQ ID NO: 8059 - RNA, 20 nt, Artificial Sequence
  targeting sequence with GTCN PAM
gugcucaguacccauuacug

SEQ ID NO: 8060 - RNA, 20 nt, Artificial Sequence
  targeting sequence with GTCN PAM
uguuccuggugguaucccug

SEQ ID NO: 8061 - RNA, 20 nt, Artificial Sequence
  targeting sequence with GTCN PAM
ccagccuuugcgcucugguu

SEQ ID NO: 8062 - RNA, 20 nt, Artificial Sequence
  targeting sequence with GTCN PAM
agagaagggggggcagugca

SEQ ID NO: 8063 - RNA, 20 nt, Artificial Sequence
  targeting sequence with GTCN PAM
auugauacacuuggccuuag

SEQ ID NO: 8064 - RNA, 20 nt, Artificial Sequence
  targeting sequence with GTCN PAM
ugccguacaagucaauugau

SEQ ID NO: 8065 - RNA, 20 nt, Artificial Sequence
  targeting sequence with GTCN PAM
gucuugccguacaagucaau

SEQ ID NO: 8066 - RNA, 20 nt, Artificial Sequence
  targeting sequence with GTCN PAM
ugaaugauaugcagcuuguu

SEQ ID NO: 8067 - RNA, 20 nt, Artificial Sequence
  targeting sequence with GTCN PAM
auuucggcuggguucauuca

SEQ ID NO: 8068 - RNA, 20 nt, Artificial Sequence
  targeting sequence with GTCN PAM
acuggaggguuggcugggga

SEQ ID NO: 8069 - RNA, 20 nt, Artificial Sequence
  targeting sequence with GTCN PAM
ccagccaacccuccaguuga

SEQ ID NO: 8070 - RNA, 20 nt, Artificial Sequence
  targeting sequence with GTCN PAM
accagccaguccccagccaa

SEQ ID NO: 8071 - RNA, 20 nt, Artificial Sequence
  targeting sequence with GTCN PAM
cauugccauguuaacuagcu

SEQ ID NO: 8072 - RNA, 20 nt, Artificial Sequence
  targeting sequence with GTCN PAM
aagcaagucauaagauuuaa

SEQ ID NO: 8073 - RNA, 20 nt, Artificial Sequence
  targeting sequence with GTCN PAM
uaagauuuaaggaauccacu

SEQ ID NO: 8074 - RNA, 20 nt, Artificial Sequence
  targeting sequence with GTCN PAM
gaguggauuccuuaaaucuu

SEQ ID NO: 8075 - RNA, 20 nt, Artificial Sequence
  targeting sequence with GTCN PAM
cuugaggccaggaguucaag

SEQ ID NO: 8076 - RNA, 20 nt, Artificial Sequence
  targeting sequence with GTCN PAM
ugaacuccuggccucaagug

SEQ ID NO: 8077 - RNA, 20 nt, Artificial Sequence
  targeting sequence with GTCN PAM
ugccauguugcccaggcugg

SEQ ID NO: 8078 - RNA, 20 nt, Artificial Sequence
  targeting sequence with GTCN PAM
uagccacuuggaagacugaa

SEQ ID NO: 8079 - RNA, 20 nt, Artificial Sequence
  targeting sequence with GTCN PAM
uccaaguggcuaggacucag

SEQ ID NO: 8080 - RNA, 20 nt, Artificial Sequence
  targeting sequence with GTCN PAM
aggcugcagugagcuaugau

SEQ ID NO: 8081 - RNA, 20 nt, Artificial Sequence
  targeting sequence with GTCN PAM
cccaggcuggagugcagugg

SEQ ID NO: 8082 - RNA, 20 nt, Artificial Sequence
  targeting sequence with GTCN PAM
caaaaaacaaacaaacaaac

SEQ ID NO: 8083 - RNA, 20 nt, Artificial Sequence
  targeting sequence with GTCN PAM
ccucuguguguguugaauug

SEQ ID NO: 8084 - RNA, 20 nt, Artificial Sequence
  targeting sequence with GTCN PAM
gacugaagagcaugaacuuu

SEQ ID NO: 8085 - RNA, 20 nt, Artificial Sequence
  targeting sequence with GTCN PAM
gacuuaaggagccuccuccc

SEQ ID NO: 8086 - RNA, 20 nt, Artificial Sequence
  targeting sequence with GTCN PAM
gauuucacucccccgcuuag

SEQ ID NO: 8087 - RNA, 20 nt, Artificial Sequence
  targeting sequence with GTCN PAM
ucaaaguguucuaaagugaa

SEQ ID NO: 8088 - RNA, 20 nt, Artificial Sequence
  targeting sequence with GTCN PAM
agaucucuggugauggagag

SEQ ID NO: 8089 - RNA, 20 nt, Artificial Sequence
  targeting sequence with GTCN PAM
cuuuauuguggaauuuuccc

SEQ ID NO: 8090 - RNA, 20 nt, Artificial Sequence
  targeting sequence with GTCN PAM
caagcaguagaaaaaaguuc

SEQ ID NO: 8091 - RNA, 20 nt, Artificial Sequence
  targeting sequence with GTCN PAM
ucucaguaguugggguguac

SEQ ID NO: 8092 - RNA, 20 nt, Artificial Sequence
  targeting sequence with GTCN PAM
cagaucuacgccuagagugg

SEQ ID NO: 8093 - RNA, 20 nt, Artificial Sequence
  targeting sequence with GTCN PAM
cuccuuaguuguaugaaaca

SEQ ID NO: 8094 - RNA, 20 nt, Artificial Sequence
  targeting sequence with GTCN PAM
cucacuauugauagacacuu

SEQ ID NO: 8095 - RNA, 20 nt, Artificial Sequence
  targeting sequence with GTCN PAM
aucaauagugagugacuagg

SEQ ID NO: 8096 - RNA, 20 nt, Artificial Sequence
  targeting sequence with GTCN PAM
uuuugcugagugugaaauac

SEQ ID NO: 8097 - RNA, 20 nt, Artificial Sequence
  targeting sequence with GTCN PAM
uacucuguagcccaggcugg

SEQ ID NO: 8098 - RNA, 20 nt, Artificial Sequence
  targeting sequence with GTCN PAM
aggcugcagggagcugugau

SEQ ID NO: 8099 - RNA, 20 nt, Artificial Sequence
  targeting sequence with GTCN PAM
cagcuaccugggaggccgag

SEQ ID NO: 8100 - RNA, 20 nt, Artificial Sequence
  targeting sequence with GTCN PAM
cuaccaaaaaauacaaaaau

SEQ ID NO: 8101 - RNA, 20 nt, Artificial Sequence
  targeting sequence with GTCN PAM
ugaacuccugggcucaagcg

SEQ ID NO: 8102 - RNA, 20 nt, Artificial Sequence
  targeting sequence with GTCN PAM
uuuuauauuauauuauauua

SEQ ID NO: 8103 - RNA, 20 nt, Artificial Sequence
  targeting sequence with GTCN PAM
caaaaauaaguaaauaaaaa

SEQ ID NO: 8104 - RNA, 20 nt, Artificial Sequence
  targeting sequence with GTCN PAM
ccagcucccagguucaagug

SEQ ID NO: 8105 - RNA, 20 nt, Artificial Sequence
  targeting sequence with GTCN PAM
cagcuacuugggaggcugag

SEQ ID NO: 8106 - RNA, 20 nt, Artificial Sequence
  targeting sequence with GTCN PAM
caaacuccugaccucaggug

SEQ ID NO: 8107 - RNA, 20 nt, Artificial Sequence
  targeting sequence with GTCN PAM
ggaguuugagaccagccugg

SEQ ID NO: 8108 - RNA, 20 nt, Artificial Sequence
  targeting sequence with GTCN PAM
uuuuagauggcugcagaaua

SEQ ID NO: 8109 - RNA, 20 nt, Artificial Sequence
  targeting sequence with GTCN PAM
gucaauuugaugggaaaaag

SEQ ID NO: 8110 - RNA, 20 nt, Artificial Sequence
  targeting sequence with GTCN PAM
auuugaugggaaaaaguagu

SEQ ID NO: 8111 - RNA, 20 nt, Artificial Sequence
  targeting sequence with GTCN PAM
auuuuccuguuucuguuccu

SEQ ID NO: 8112 - RNA, 20 nt, Artificial Sequence
  targeting sequence with GTCN PAM
auugucccaguggauguugu

SEQ ID NO: 8113 - RNA, 20 nt, Artificial Sequence
  targeting sequence with GTCN PAM
caguggauguuguccuuauc

SEQ ID NO: 8114 - RNA, 20 nt, Artificial Sequence
  targeting sequence with GTCN PAM
uuaucuaugaagacuuuugu

SEQ ID NO: 8115 - RNA, 20 nt, Artificial Sequence
  targeting sequence with GTCN PAM
ucauagauaaggacaacauc

SEQ ID NO: 8116 - RNA, 20 nt, Artificial Sequence
  targeting sequence with GTCN PAM
gggaggccgcugaggcggcc

SEQ ID NO: 8117 - RNA, 20 nt, Artificial Sequence
  targeting sequence with GTCN PAM
ccuguguugucagggaggcc

SEQ ID NO: 8118 - RNA, 20 nt, Artificial Sequence
  targeting sequence with GTCN PAM
ccauggugcaauguugggag

SEQ ID NO: 8119 - RNA, 20 nt, Artificial Sequence
  targeting sequence with GTCN PAM
caguccccauggugcaaugu

SEQ ID NO: 8120 - RNA, 20 nt, Artificial Sequence
  targeting sequence with GTCN PAM
agcgacacccccaagcuuac

SEQ ID NO: 8121 - RNA, 20 nt, Artificial Sequence
  targeting sequence with GTCN PAM
cuugacuucucugggucuca

SEQ ID NO: 8122 - RNA, 20 nt, Artificial Sequence
  targeting sequence with GTCN PAM
agcuggggcucccuacagaa

SEQ ID NO: 8123 - RNA, 20 nt, Artificial Sequence
  targeting sequence with GTCN PAM
gcagcuuggagcacucccag

SEQ ID NO: 8124 - RNA, 20 nt, Artificial Sequence
  targeting sequence with GTCN PAM
gcuggcugcaccugucgguc

SEQ ID NO: 8125 - RNA, 20 nt, Artificial Sequence
  targeting sequence with GTCN PAM
gucucauggcuccugggagc

SEQ ID NO: 8126 - RNA, 20 nt, Artificial Sequence
  targeting sequence with GTCN PAM
cauggcuccugggagcguca

SEQ ID NO: 8127 - RNA, 20 nt, Artificial Sequence
  targeting sequence with GTCN PAM
ccagcgacaucucacccucc

SEQ ID NO: 8128 - RNA, 20 nt, Artificial Sequence
  targeting sequence with GTCN PAM
cuggugacgcucccaggagc

SEQ ID NO: 8129 - RNA, 20 nt, Artificial Sequence
  targeting sequence with GTCN PAM
aggagggugagaugucgcug

SEQ ID NO: 8130 - RNA, 20 nt, Artificial Sequence
  targeting sequence with GTCN PAM
ccugaaucugaaaagccagg

SEQ ID NO: 8131 - RNA, 20 nt, Artificial Sequence
  targeting sequence with GTCN PAM
cagcaggaaacgggcuccag

SEQ ID NO: 8132 - RNA, 20 nt, Artificial Sequence
  targeting sequence with GTCN PAM
cuccaacuagcugcccacag

SEQ ID NO: 8133 - RNA, 20 nt, Artificial Sequence
  targeting sequence with GTCN PAM
agauaaacccugagguguuu

SEQ ID NO: 8134 - RNA, 20 nt, Artificial Sequence
  targeting sequence with GTCN PAM
ucgagggagugaacugggcc

SEQ ID NO: 8135 - RNA, 20 nt, Artificial Sequence
  targeting sequence with GTCN PAM
gauggggaagccuggcccau

SEQ ID NO: 8136 - RNA, 20 nt, Artificial Sequence
  targeting sequence with GTCN PAM
ucuaacccacucugggaggu

SEQ ID NO: 8137 - RNA, 20 nt, Artificial Sequence
  targeting sequence with GTCN PAM
gggaaagcuuccuagaagag

SEQ ID NO: 8138 - RNA, 20 nt, Artificial Sequence
  targeting sequence with GTCN PAM
ccucuucuaggaagcuuucc

SEQ ID NO: 8139 - RNA, 20 nt, Artificial Sequence
  targeting sequence with GTCN PAM
uggcaaauagaacacuuccc

SEQ ID NO: 8140 - RNA, 20 nt, Artificial Sequence
  targeting sequence with GTCN PAM
aggugccgagaaguaaaagg

SEQ ID NO: 8141 - RNA, 20 nt, Artificial Sequence
  targeting sequence with GTCN PAM
gagguguccaaaccaaggug

SEQ ID NO: 8142 - RNA, 20 nt, Artificial Sequence
  targeting sequence with GTCN PAM
aaaccaaggugcauuuugag

SEQ ID NO: 8143 - RNA, 20 nt, Artificial Sequence
  targeting sequence with GTCN PAM
ugcaggcugcucucacucau

SEQ ID NO: 8144 - RNA, 20 nt, Artificial Sequence
  targeting sequence with GTCN PAM
cggaagcugcaucuuccuuc

SEQ ID NO: 8145 - RNA, 20 nt, Artificial Sequence
  targeting sequence with GTCN PAM
ucaguuaggucaacuuuuau

SEQ ID NO: 8146 - RNA, 20 nt, Artificial Sequence
  targeting sequence with GTCN PAM
acuuuuaucuugaacaggga

SEQ ID NO: 8147 - RNA, 20 nt, Artificial Sequence
  targeting sequence with GTCN PAM
auggcucccuguucaagaua

SEQ ID NO: 8148 - RNA, 20 nt, Artificial Sequence
  targeting sequence with GTCN PAM
agaacagagcucagcccccc

SEQ ID NO: 8149 - RNA, 20 nt, Artificial Sequence
  targeting sequence with GTCN PAM
guucccucucaucccagccc

SEQ ID NO: 8150 - RNA, 20 nt, Artificial Sequence
  targeting sequence with GTCN PAM
ucccucaggucuguucccuc

SEQ ID NO: 8151 - RNA, 20 nt, Artificial Sequence
  targeting sequence with GTCN PAM
cagagagccacccccaggag

SEQ ID NO: 8152 - RNA, 20 nt, Artificial Sequence
  targeting sequence with GTCN PAM
gucccagagagccaccccca

SEQ ID NO: 8153 - RNA, 20 nt, Artificial Sequence
  targeting sequence with GTCN PAM
gggggaagcagaggaggggu

SEQ ID NO: 8154 - RNA, 20 nt, Artificial Sequence
  targeting sequence with GTCN PAM
ggccaagcgaagacccuugg

SEQ ID NO: 8155 - RNA, 20 nt, Artificial Sequence
  targeting sequence with GTCN PAM
ucgcuuggccugacuucacg

SEQ ID NO: 8156 - RNA, 20 nt, Artificial Sequence
  targeting sequence with GTCN PAM
gagcccucccagcugcagug

SEQ ID NO: 8157 - RNA, 20 nt, Artificial Sequence
  targeting sequence with GTCN PAM
ccacuguacggaugggaaga

SEQ ID NO: 8158 - RNA, 20 nt, Artificial Sequence
  targeting sequence with GTCN PAM
ucccauccguacagugggga

SEQ ID NO: 8159 - RNA, 20 nt, Artificial Sequence
  targeting sequence with GTCN PAM
cucccggguucucgggaguu

SEQ ID NO: 8160 - RNA, 20 nt, Artificial Sequence
  targeting sequence with GTCN PAM
ugggucacucccggguucuc

SEQ ID NO: 8161 - RNA, 20 nt, Artificial Sequence
  targeting sequence with GTCN PAM
uggccaggacccaacagggg

SEQ ID NO: 8162 - RNA, 20 nt, Artificial Sequence
  targeting sequence with GTCN PAM
uggccaugacgagcccagug

SEQ ID NO: 8163 - RNA, 20 nt, Artificial Sequence
  targeting sequence with GTCN PAM
aagugauuaggucucuuuau

SEQ ID NO: 8164 - RNA, 20 nt, Artificial Sequence
  targeting sequence with GTCN PAM
cuuuauaauuuugcucuaga

SEQ ID NO: 8165 - RNA, 20 nt, Artificial Sequence
  targeting sequence with GTCN PAM
caaaaaaaaaaaaaaaauug

SEQ ID NO: 8166 - RNA, 20 nt, Artificial Sequence
  targeting sequence with GTCN PAM
ugcuuugucacccaggcugg

SEQ ID NO: 8167 - RNA, 20 nt, Artificial Sequence
  targeting sequence with GTCN PAM
cccaggcuggagugcagugg

SEQ ID NO: 8168 - RNA, 20 nt, Artificial Sequence
  targeting sequence with GTCN PAM
ccacuucccaggcucaagca

SEQ ID NO: 8169 - RNA, 20 nt, Artificial Sequence
  targeting sequence with GTCN PAM
aggucucacgauauugccca

SEQ ID NO: 8170 - RNA, 20 nt, Artificial Sequence
  targeting sequence with GTCN PAM
cacgauauugcccagaauuu

SEQ ID NO: 8171 - RNA, 20 nt, Artificial Sequence
  targeting sequence with GTCN PAM
uuaaauucugcagauugauc

SEQ ID NO: 8172 - RNA, 20 nt, Artificial Sequence
  targeting sequence with GTCN PAM
ccaugaaaugcauaaaaggg

SEQ ID NO: 8173 - RNA, 20 nt, Artificial Sequence
  targeting sequence with GTCN PAM
gucaccaugaaaugcauaaa

SEQ ID NO: 8174 - RNA, 20 nt, Artificial Sequence
  targeting sequence with GTCN PAM
cucuccacccccacucccca

SEQ ID NO: 8175 - RNA, 20 nt, Artificial Sequence
  targeting sequence with GTCN PAM
auagaugcagaaagcagauu

SEQ ID NO: 8176 - RNA, 20 nt, Artificial Sequence
  targeting sequence with GTCN PAM
agaauaagaaguccauagau

SEQ ID NO: 8177 - RNA, 20 nt, Artificial Sequence
  targeting sequence with GTCN PAM
gauuccauuuauaugaaaug

SEQ ID NO: 8178 - RNA, 20 nt, Artificial Sequence
  targeting sequence with GTCN PAM
gaaaaagccacauacugucu

SEQ ID NO: 8179 - RNA, 20 nt, Artificial Sequence
  targeting sequence with GTCN PAM
uagccagggcuucacuccuu

SEQ ID NO: 8180 - RNA, 20 nt, Artificial Sequence
  targeting sequence with GTCN PAM
cuacccaucccguggaauau

SEQ ID NO: 8181 - RNA, 20 nt, Artificial Sequence
  targeting sequence with GTCN PAM
aucauucaucauggauguuu

SEQ ID NO: 8182 - RNA, 20 nt, Artificial Sequence
  targeting sequence with GTCN PAM
gcccaaagauggaaccagcc

SEQ ID NO: 8183 - RNA, 20 nt, Artificial Sequence
  targeting sequence with GTCN PAM
acacaaaaauguacacauga

SEQ ID NO: 8184 - RNA, 20 nt, Artificial Sequence
  targeting sequence with GTCN PAM
cccaaagugcuaggauuaca

SEQ ID NO: 8185 - RNA, 20 nt, Artificial Sequence
  targeting sequence with GTCN PAM
caaacuccugaguucaagcu

SEQ ID NO: 8186 - RNA, 20 nt, Artificial Sequence
  targeting sequence with GTCN PAM
cacuacauugcucaguuuag

SEQ ID NO: 8187 - RNA, 20 nt, Artificial Sequence
  targeting sequence with GTCN PAM
aauaacaauaacaauaauaa

SEQ ID NO: 8188 - RNA, 20 nt, Artificial Sequence
  targeting sequence with GTCN PAM
cagcuacuucggagacugag

SEQ ID NO: 8189 - RNA, 20 nt, Artificial Sequence
  targeting sequence with GTCN PAM
ccgaaguagcugggaccaca

SEQ ID NO: 8190 - RNA, 20 nt, Artificial Sequence
  targeting sequence with GTCN PAM
aggcugcagugagccaugau

SEQ ID NO: 8191 - RNA, 20 nt, Artificial Sequence
  targeting sequence with GTCN PAM
cccaagcuggagugcagugc

SEQ ID NO: 8192 - RNA, 20 nt, Artificial Sequence
  targeting sequence with GTCN PAM
caaucugucacccaagcugg

SEQ ID NO: 8193 - RNA, 20 nt, Artificial Sequence
  targeting sequence with GTCN PAM
ccauaaaacaaaacaaaaaa

SEQ ID NO: 8194 - RNA, 20 nt, Artificial Sequence
  targeting sequence with GTCN PAM
acuuuuguauccauuugaaa

SEQ ID NO: 8195 - RNA, 20 nt, Artificial Sequence
  targeting sequence with GTCN PAM
guaacucccuuccacuguac

SEQ ID NO: 8196 - RNA, 20 nt, Artificial Sequence
  targeting sequence with GTCN PAM
cccagcuccaacagucacca

SEQ ID NO: 8197 - RNA, 20 nt, Artificial Sequence
  targeting sequence with GTCN PAM
ccaucuuguggacacucuug

SEQ ID NO: 8198 - RNA, 20 nt, Artificial Sequence
  targeting sequence with GTCN PAM
acaagauggugacuguugga

SEQ ID NO: 8199 - RNA, 20 nt, Artificial Sequence
  targeting sequence with GTCN PAM
uuaggaaaccucucaaccaa

SEQ ID NO: 8200 - RNA, 20 nt, Artificial Sequence
  targeting sequence with GTCN PAM
auagggugccccucccacuu

SEQ ID NO: 8201 - RNA, 20 nt, Artificial Sequence
  targeting sequence with GTCN PAM
cucagucugggugccucuga

SEQ ID NO: 8202 - RNA, 20 nt, Artificial Sequence
  targeting sequence with GTCN PAM
gggugccucugagaaugugc

SEQ ID NO: 8203 - RNA, 20 nt, Artificial Sequence
  targeting sequence with GTCN PAM
uguaaacccacaguuacgaa

SEQ ID NO: 8204 - RNA, 20 nt, Artificial Sequence
  targeting sequence with GTCN PAM
ugaggucaggaguucaagac

SEQ ID NO: 8205 - RNA, 20 nt, Artificial Sequence
  targeting sequence with GTCN PAM
ggaguucaagaccagccugg

SEQ ID NO: 8206 - RNA, 20 nt, Artificial Sequence
  targeting sequence with GTCN PAM
ugaacuccugaccucaugac

SEQ ID NO: 8207 - RNA, 20 nt, Artificial Sequence
  targeting sequence with GTCN PAM
cuacuaaaaauacaaaaauc

SEQ ID NO: 8208 - RNA, 20 nt, Artificial Sequence
  targeting sequence with GTCN PAM
ccaggcuggagugcaauggc

SEQ ID NO: 8209 - RNA, 20 nt, Artificial Sequence
  targeting sequence with GTCN PAM
cucuauguccccaggcugga

SEQ ID NO: 8210 - RNA, 20 nt, Artificial Sequence
  targeting sequence with GTCN PAM
caaagaaaaaaagagagaga

SEQ ID NO: 8211 - RNA, 20 nt, Artificial Sequence
  targeting sequence with GTCN PAM
cucucucuuuuuuucuuuga

SEQ ID NO: 8212 - RNA, 20 nt, Artificial Sequence
  targeting sequence with GTCN PAM
ccccucaaggcucacugagu

SEQ ID NO: 8213 - RNA, 20 nt, Artificial Sequence
  targeting sequence with GTCN PAM
gugucuuggggagagggggg

SEQ ID NO: 8214 - RNA, 20 nt, Artificial Sequence
  targeting sequence with GTCN PAM
uggggagaggggggcaucug

SEQ ID NO: 8215 - RNA, 20 nt, Artificial Sequence
  targeting sequence with GTCN PAM
agcaaggaucagaugccccc

SEQ ID NO: 8216 - RNA, 20 nt, Artificial Sequence
  targeting sequence with GTCN PAM
caacucaguggcaggcauca

SEQ ID NO: 8217 - RNA, 20 nt, Artificial Sequence
  targeting sequence with GTCN PAM
caccaggaggcccgagccac

SEQ ID NO: 8218 - RNA, 20 nt, Artificial Sequence
  targeting sequence with GTCN PAM
caccgggaggcugcuguggc

SEQ ID NO: 8219 - RNA, 20 nt, Artificial Sequence
  targeting sequence with GTCN PAM
guggcagcuaucaagcucua

SEQ ID NO: 8220 - RNA, 20 nt, Artificial Sequence
  targeting sequence with GTCN PAM
acuguuggguacuugugcag

SEQ ID NO: 8221 - RNA, 20 nt, Artificial Sequence
  targeting sequence with GTCN PAM
uccgcuucaaguaccugcug

SEQ ID NO: 8222 - RNA, 20 nt, Artificial Sequence
  targeting sequence with GTCN PAM
ucccucaggggcgcuuacuu

SEQ ID NO: 8223 - RNA, 20 nt, Artificial Sequence
  targeting sequence with GTCN PAM
uggccucugugagugcugcg

SEQ ID NO: 8224 - RNA, 20 nt, Artificial Sequence
  targeting sequence with GTCN PAM
ccuguccuuguuccuccugu

SEQ ID NO: 8225 - RNA, 20 nt, Artificial Sequence
  targeting sequence with GTCN PAM
uuguuccuccuguggucuca

SEQ ID NO: 8226 - RNA, 20 nt, Artificial Sequence
  targeting sequence with GTCN PAM
cagccgagaugcccucuccu

SEQ ID NO: 8227 - RNA, 20 nt, Artificial Sequence
  targeting sequence with GTCN PAM
cccuguugguguccaggaca

SEQ ID NO: 8228 - RNA, 20 nt, Artificial Sequence
  targeting sequence with GTCN PAM
aggacaggugaacuguugca

SEQ ID NO: 8229 - RNA, 20 nt, Artificial Sequence
  targeting sequence with GTCN PAM
uggacaccaacagggugacu

SEQ ID NO: 8230 - RNA, 20 nt, Artificial Sequence
  targeting sequence with GTCN PAM
gcugugcuaacuucuggguc

SEQ ID NO: 8231 - RNA, 20 nt, Artificial Sequence
  targeting sequence with GTCN PAM
ugggcacguagccccuuccu

SEQ ID NO: 8232 - RNA, 20 nt, Artificial Sequence
  targeting sequence with GTCN PAM
uccguuucaaaggggagagu

SEQ ID NO: 8233 - RNA, 20 nt, Artificial Sequence
  targeting sequence with GTCN PAM
ccuuuuggagccuccuuaua

SEQ ID NO: 8234 - RNA, 20 nt, Artificial Sequence
  targeting sequence with GTCN PAM
cucagagcugaggcaggucu

SEQ ID NO: 8235 - RNA, 20 nt, Artificial Sequence
  targeting sequence with GTCN PAM
gggacaaaacugcaccccaa

SEQ ID NO: 8236 - RNA, 20 nt, Artificial Sequence
  targeting sequence with GTCN PAM
cagaccugccucagcucuga

SEQ ID NO: 8237 - RNA, 20 nt, Artificial Sequence
  targeting sequence with GTCN PAM
ugauguuggggugcaguuuu

SEQ ID NO: 8238 - RNA, 20 nt, Artificial Sequence
  targeting sequence with GTCN PAM
ucagccaccaggaauaccuc

SEQ ID NO: 8239 - RNA, 20 nt, Artificial Sequence
  targeting sequence with GTCN PAM
cugagguauuccugguggcu

SEQ ID NO: 8240 - RNA, 20 nt, Artificial Sequence
  targeting sequence with GTCN PAM
ggucccugagguauuccugg

SEQ ID NO: 8241 - RNA, 20 nt, Artificial Sequence
  targeting sequence with GTCN PAM
ggccgugggucuggucccug

SEQ ID NO: 8242 - RNA, 20 nt, Artificial Sequence
  targeting sequence with GTCN PAM
uugcuggguccccugcaucu

SEQ ID NO: 8243 - RNA, 20 nt, Artificial Sequence
  targeting sequence with GTCN PAM
ccugcaucuugccuaacuuc

SEQ ID NO: 8244 - RNA, 20 nt, Artificial Sequence
  targeting sequence with GTCN PAM
uggcagcugcuacaugcagg

SEQ ID NO: 8245 - RNA, 20 nt, Artificial Sequence
  targeting sequence with GTCN PAM
cugugguuaccuggugacag

SEQ ID NO: 8246 - RNA, 20 nt, Artificial Sequence
  targeting sequence with GTCN PAM
ccagguaaccacagggaccg

SEQ ID NO: 8247 - RNA, 20 nt, Artificial Sequence
  targeting sequence with GTCN PAM
cacccugguagaacuccugg

SEQ ID NO: 8248 - RNA, 20 nt, Artificial Sequence
  targeting sequence with GTCN PAM
gagccuggacuugcgucaca

SEQ ID NO: 8249 - RNA, 20 nt, Artificial Sequence
  targeting sequence with GTCN PAM
aggcucugacccacgcccag

SEQ ID NO: 8250 - RNA, 20 nt, Artificial Sequence
  targeting sequence with GTCN PAM
cagcaggaccaggcggcuaa

SEQ ID NO: 8251 - RNA, 20 nt, Artificial Sequence
  targeting sequence with GTCN PAM
ugcugugacgcaaguccagg

SEQ ID NO: 8252 - RNA, 20 nt, Artificial Sequence
  targeting sequence with GTCN PAM
ggugucugaugcggugugcu

SEQ ID NO: 8253 - RNA, 20 nt, Artificial Sequence
  targeting sequence with GTCN PAM
gaugcggugugcuggcaguu

SEQ ID NO: 8254 - RNA, 20 nt, Artificial Sequence
  targeting sequence with GTCN PAM
uggugauggggagcccugag

SEQ ID NO: 8255 - RNA, 20 nt, Artificial Sequence
  targeting sequence with GTCN PAM
cccaacccucagggcucccc

SEQ ID NO: 8256 - RNA, 20 nt, Artificial Sequence
  targeting sequence with GTCN PAM
ugcuguaaagaugagaagac

SEQ ID NO: 8257 - RNA, 20 nt, Artificial Sequence
  targeting sequence with GTCN PAM
ucucaucuuuacagcaggac

SEQ ID NO: 8258 - RNA, 20 nt, Artificial Sequence
  targeting sequence with GTCN PAM
gauggcucugggcucacagc

SEQ ID NO: 8259 - RNA, 20 nt, Artificial Sequence
  targeting sequence with GTCN PAM
aggggcgagguggugggggc

SEQ ID NO: 8260 - RNA, 20 nt, Artificial Sequence
  targeting sequence with GTCN PAM
agaggcacaaucugugggaa

SEQ ID NO: 8261 - RNA, 20 nt, Artificial Sequence
  targeting sequence with GTCN PAM
acuaugauucuaggaucuca

SEQ ID NO: 8262 - RNA, 20 nt, Artificial Sequence
  targeting sequence with GTCN PAM
uuggaggcacugucuacuau

SEQ ID NO: 8263 - RNA, 20 nt, Artificial Sequence
  targeting sequence with GTCN PAM
uacgggggguggggggcgug

SEQ ID NO: 8264 - RNA, 20 nt, Artificial Sequence
  targeting sequence with GTCN PAM
uucuccaguuaguucccaag

SEQ ID NO: 8265 - RNA, 20 nt, Artificial Sequence
  targeting sequence with GTCN PAM
cgggggccaucuuccugggc

SEQ ID NO: 8266 - RNA, 20 nt, Artificial Sequence
  targeting sequence with GTCN PAM
uccuuggccucacuugguuu

SEQ ID NO: 8267 - RNA, 20 nt, Artificial Sequence
  targeting sequence with GTCN PAM
uuggccgcgccgccuugcuu

SEQ ID NO: 8268 - RNA, 20 nt, Artificial Sequence
  targeting sequence with GTCN PAM
ggagaggcuaggaaggugcc

SEQ ID NO: 8269 - RNA, 20 nt, Artificial Sequence
  targeting sequence with GTCN PAM
ggcuuggggggcaccuuccu

SEQ ID NO: 8270 - RNA, 20 nt, Artificial Sequence
  targeting sequence with GTCN PAM
cacaacuaccuuggcugcuc

SEQ ID NO: 8271 - RNA, 20 nt, Artificial Sequence
  targeting sequence with GTCN PAM
ugacagccacuggagcgggg

SEQ ID NO: 8272 - RNA, 20 nt, Artificial Sequence
  targeting sequence with GTCN PAM
agacccccauccccacacca

SEQ ID NO: 8273 - RNA, 20 nt, Artificial Sequence
  targeting sequence with GTCN PAM
ugagugcugggcuugaccug

SEQ ID NO: 8274 - RNA, 20 nt, Artificial Sequence
  targeting sequence with GTCN PAM
agcccagcacucaggacaca

SEQ ID NO: 8275 - RNA, 20 nt, Artificial Sequence
  targeting sequence with GTCN PAM
gccuccuucccccaaccagc

SEQ ID NO: 8276 - RNA, 20 nt, Artificial Sequence
  targeting sequence with GTCN PAM
cugcuucccccuucauaacc

SEQ ID NO: 8277 - RNA, 20 nt, Artificial Sequence
  targeting sequence with GTCN PAM
ccuggucucugcuucccccu

SEQ ID NO: 8278 - RNA, 20 nt, Artificial Sequence
  targeting sequence with GTCN PAM
gucuccuggucucugcuucc

SEQ ID NO: 8279 - RNA, 20 nt, Artificial Sequence
  targeting sequence with GTCN PAM
caagcaggggaagggccugu

SEQ ID NO: 8280 - RNA, 20 nt, Artificial Sequence
  targeting sequence with GTCN PAM
ggaguuugagaccaaccugg

SEQ ID NO: 8281 - RNA, 20 nt, Artificial Sequence
  targeting sequence with GTCN PAM
caaacuccugaccucaaggg

SEQ ID NO: 8282 - RNA, 20 nt, Artificial Sequence
  targeting sequence with GTCN PAM
acauggugaacccccgucuc

SEQ ID NO: 8283 - RNA, 20 nt, Artificial Sequence
  targeting sequence with GTCN PAM
cugcuaaaaauacaaaaauu

SEQ ID NO: 8284 - RNA, 20 nt, Artificial Sequence
  targeting sequence with GTCN PAM
cccacgcuggaguacagugg

SEQ ID NO: 8285 - RNA, 20 nt, Artificial Sequence
  targeting sequence with GTCN PAM
cucugucacccacgcuggag

SEQ ID NO: 8286 - RNA, 20 nt, Artificial Sequence
  targeting sequence with GTCN PAM
caaaacaaaacacaaaaaga

SEQ ID NO: 8287 - RNA, 20 nt, Artificial Sequence
  targeting sequence with GTCN PAM
accuacaguuuuggcaagga

SEQ ID NO: 8288 - RNA, 20 nt, Artificial Sequence
  targeting sequence with GTCN PAM
uccagauaaagcccugauuc

SEQ ID NO: 8289 - RNA, 20 nt, Artificial Sequence
  targeting sequence with GTCN PAM
gaauccuuccacagcucugc

SEQ ID NO: 8290 - RNA, 20 nt, Artificial Sequence
  targeting sequence with GTCN PAM
cuaaaagagagagaggaaaa

SEQ ID NO: 8291 - RNA, 20 nt, Artificial Sequence
  targeting sequence with GTCN PAM
cacaggugagugcugagccc

SEQ ID NO: 8292 - RNA, 20 nt, Artificial Sequence
  targeting sequence with GTCN PAM
cuaauuccugggcucagcac

SEQ ID NO: 8293 - RNA, 20 nt, Artificial Sequence
  targeting sequence with GTCN PAM
aggcugcaguaaacugagau

SEQ ID NO: 8294 - RNA, 20 nt, Artificial Sequence
  targeting sequence with GTCN PAM
cugugcuggagugugguggg

SEQ ID NO: 8295 - RNA, 20 nt, Artificial Sequence
  targeting sequence with GTCN PAM
cgcucugucacugugcugga

SEQ ID NO: 8296 - RNA, 20 nt, Artificial Sequence
  targeting sequence with GTCN PAM
uaaaaguaaaaaaaaguauc

SEQ ID NO: 8297 - RNA, 20 nt, Artificial Sequence
  targeting sequence with GTCN PAM
uccaccuggcagccaggaua

SEQ ID NO: 8298 - RNA, 20 nt, Artificial Sequence
  targeting sequence with GTCN PAM
gcucgagccuuuaguuuguc

SEQ ID NO: 8299 - RNA, 20 nt, Artificial Sequence
  targeting sequence with GTCN PAM
aacgggccugucagcucgag

SEQ ID NO: 8300 - RNA, 20 nt, Artificial Sequence
  targeting sequence with GTCN PAM
ucaaacuaggucacugaggc

SEQ ID NO: 8301 - RNA, 20 nt, Artificial Sequence
  targeting sequence with GTCN PAM
cugaggcucagaguggcuaa

SEQ ID NO: 8302 - RNA, 20 nt, Artificial Sequence
  targeting sequence with GTCN PAM
cauaacugagugaagaccua

SEQ ID NO: 8303 - RNA, 20 nt, Artificial Sequence
  targeting sequence with GTCN PAM
ucacucaguuaugugacaug

SEQ ID NO: 8304 - RNA, 20 nt, Artificial Sequence
  targeting sequence with GTCN PAM
uaggucuucacucaguuaug

SEQ ID NO: 8305 - RNA, 20 nt, Artificial Sequence
  targeting sequence with GTCN PAM
uccagggauggggcucaauu

SEQ ID NO: 8306 - RNA, 20 nt, Artificial Sequence
  targeting sequence with GTCN PAM
accaccuucucucugguccc

SEQ ID NO: 8307 - RNA, 20 nt, Artificial Sequence
  targeting sequence with GTCN PAM
ccuggcacccuggggguguu

SEQ ID NO: 8308 - RNA, 20 nt, Artificial Sequence
  targeting sequence with GTCN PAM
cuuaucuguaagauggggau

SEQ ID NO: 8309 - RNA, 20 nt, Artificial Sequence
  targeting sequence with GTCN PAM
cuuugcuccugguuugcuuu

SEQ ID NO: 8310 - RNA, 20 nt, Artificial Sequence
  targeting sequence with GTCN PAM
agaauggugcugcuuccccg

SEQ ID NO: 8311 - RNA, 20 nt, Artificial Sequence
  targeting sequence with GTCN PAM
gggaagcagcaccauucuug

SEQ ID NO: 8312 - RNA, 20 nt, Artificial Sequence
  targeting sequence with GTCN PAM
aaggugguaccugcacauuu

SEQ ID NO: 8313 - RNA, 20 nt, Artificial Sequence
  targeting sequence with GTCN PAM
aggaagacagaggcccccaa

SEQ ID NO: 8314 - RNA, 20 nt, Artificial Sequence
  targeting sequence with GTCN PAM
uccuggacaaaugugcaggu

SEQ ID NO: 8315 - RNA, 20 nt, Artificial Sequence
  targeting sequence with GTCN PAM
agccagagggcugaagcuua

SEQ ID NO: 8316 - RNA, 20 nt, Artificial Sequence
  targeting sequence with GTCN PAM
cucuccgccccugccucugg

SEQ ID NO: 8317 - RNA, 20 nt, Artificial Sequence
  targeting sequence with GTCN PAM
uuauugauaaauagcuuaca

SEQ ID NO: 8318 - RNA, 20 nt, Artificial Sequence
  targeting sequence with GTCN PAM
uucaugaacauccgcugagc

SEQ ID NO: 8319 - RNA, 20 nt, Artificial Sequence
  targeting sequence with GTCN PAM
ugccucagggauacagacug

SEQ ID NO: 8320 - RNA, 20 nt, Artificial Sequence
  targeting sequence with GTCN PAM
guaucccugaggcaggaccu

SEQ ID NO: 8321 - RNA, 20 nt, Artificial Sequence
  targeting sequence with GTCN PAM
ggcagaugaggcagaggaug

SEQ ID NO: 8322 - RNA, 20 nt, Artificial Sequence
  targeting sequence with GTCN PAM
ucucagcuacucuaauccuu

SEQ ID NO: 8323 - RNA, 20 nt, Artificial Sequence
  targeting sequence with GTCN PAM
cccugucuucucagcuacuc

SEQ ID NO: 8324 - RNA, 20 nt, Artificial Sequence
  targeting sequence with GTCN PAM
cagugccuggcccaggagca

SEQ ID NO: 8325 - RNA, 20 nt, Artificial Sequence
  targeting sequence with GTCN PAM
gccugucgcagugccuggcc

SEQ ID NO: 8326 - RNA, 20 nt, Artificial Sequence
  targeting sequence with GTCN PAM
uacucugcagccagcgccug

SEQ ID NO: 8327 - RNA, 20 nt, Artificial Sequence
  targeting sequence with GTCN PAM
aaacuagcagccagcccuac

SEQ ID NO: 8328 - RNA, 20 nt, Artificial Sequence
  targeting sequence with GTCN PAM
aacccugucuaaacuagcag

SEQ ID NO: 8329 - RNA, 20 nt, Artificial Sequence
  targeting sequence with GTCN PAM
gagcaaggaucucugucugg

SEQ ID NO: 8330 - RNA, 20 nt, Artificial Sequence
  targeting sequence with GTCN PAM
ggaggggguaccauuucagc

SEQ ID NO: 8331 - RNA, 20 nt, Artificial Sequence
  targeting sequence with GTCN PAM
guguggcuagagcccaguaa

SEQ ID NO: 8332 - RNA, 20 nt, Artificial Sequence
  targeting sequence with GTCN PAM
cccaucccugugcuccucuu

SEQ ID NO: 8333 - RNA, 20 nt, Artificial Sequence
  targeting sequence with GTCN PAM
aaggugcuuuaaaaacaucu

SEQ ID NO: 8334 - RNA, 20 nt, Artificial Sequence
  targeting sequence with GTCN PAM
cuccgugugaggagugccgc

SEQ ID NO: 8335 - RNA, 20 nt, Artificial Sequence
  targeting sequence with GTCN PAM
cuaccucuugacucugggcu

SEQ ID NO: 8336 - RNA, 20 nt, Artificial Sequence
  targeting sequence with GTCN PAM
agagguagggacacagagcc

SEQ ID NO: 8337 - RNA, 20 nt, Artificial Sequence
  targeting sequence with GTCN PAM
aguaaucauggagcccagag

SEQ ID NO: 8338 - RNA, 20 nt, Artificial Sequence
  targeting sequence with GTCN PAM
ccaaauucuacuggucaagu

SEQ ID NO: 8339 - RNA, 20 nt, Artificial Sequence
  targeting sequence with GTCN PAM
uugucaccaaauucuacugg

SEQ ID NO: 8340 - RNA, 20 nt, Artificial Sequence
  targeting sequence with GTCN PAM
ucaaacacaagaaguagaag

SEQ ID NO: 8341 - RNA, 20 nt, Artificial Sequence
  targeting sequence with GTCN PAM
ucaguuccucuccacaagcu

SEQ ID NO: 8342 - RNA, 20 nt, Artificial Sequence
  targeting sequence with GTCN PAM
gagaguucagcaggagcuga

SEQ ID NO: 8343 - RNA, 20 nt, Artificial Sequence
  targeting sequence with GTCN PAM
cuguuccaccagguuucugc

SEQ ID NO: 8344 - RNA, 20 nt, Artificial Sequence
  targeting sequence with GTCN PAM
cuuauuuugcccacgaaucu

SEQ ID NO: 8345 - RNA, 20 nt, Artificial Sequence
  targeting sequence with GTCN PAM
cauagcaauauaucuuucua

SEQ ID NO: 8346 - RNA, 20 nt, Artificial Sequence
  targeting sequence with GTCN PAM
uaaggaaccauuagaggacg

SEQ ID NO: 8347 - RNA, 20 nt, Artificial Sequence
  targeting sequence with GTCN PAM
ucuaaugguuccuuaugaca

SEQ ID NO: 8348 - RNA, 20 nt, Artificial Sequence
  targeting sequence with GTCN PAM
cugcagggaugugggcgggc

SEQ ID NO: 8349 - RNA, 20 nt, Artificial Sequence
  targeting sequence with GTCN PAM
gcccgcccacaucccugcag

SEQ ID NO: 8350 - RNA, 20 nt, Artificial Sequence
  targeting sequence with GTCN PAM
ccacccccuucaucuggguu

SEQ ID NO: 8351 - RNA, 20 nt, Artificial Sequence
  targeting sequence with GTCN PAM
uggcuggucaccacccccuu

SEQ ID NO: 8352 - RNA, 20 nt, Artificial Sequence
  targeting sequence with GTCN PAM
cugaugagucaguccacaau

SEQ ID NO: 8353 - RNA, 20 nt, Artificial Sequence
  targeting sequence with GTCN PAM
guccacaauuuggggucuag

SEQ ID NO: 8354 - RNA, 20 nt, Artificial Sequence
  targeting sequence with GTCN PAM
acaauuuggggucuagauag

SEQ ID NO: 8355 - RNA, 20 nt, Artificial Sequence
  targeting sequence with GTCN PAM
agauagcuaagugacugcug

SEQ ID NO: 8356 - RNA, 20 nt, Artificial Sequence
  targeting sequence with GTCN PAM
cuuagcuaucuagaccccaa

SEQ ID NO: 8357 - RNA, 20 nt, Artificial Sequence
  targeting sequence with GTCN PAM
cccagcagucacuuagcuau

SEQ ID NO: 8358 - RNA, 20 nt, Artificial Sequence
  targeting sequence with GTCN PAM
ucaccucaggaaauggucac

SEQ ID NO: 8359 - RNA, 20 nt, Artificial Sequence
  targeting sequence with GTCN PAM
ugaugagagguggcagccua

SEQ ID NO: 8360 - RNA, 20 nt, Artificial Sequence
  targeting sequence with GTCN PAM
uccguggcuaggcugccacc

SEQ ID NO: 8361 - RNA, 20 nt, Artificial Sequence
  targeting sequence with GTCN PAM
accccuuccuucucucuguc

SEQ ID NO: 8362 - RNA, 20 nt, Artificial Sequence
  targeting sequence with GTCN PAM
gaggcaaacugcacaggacu

SEQ ID NO: 8363 - RNA, 20 nt, Artificial Sequence
  targeting sequence with GTCN PAM
ugugcaguuugccucugacu

SEQ ID NO: 8364 - RNA, 20 nt, Artificial Sequence
  targeting sequence with GTCN PAM
gcccccuucucaaguccugu

SEQ ID NO: 8365 - RNA, 20 nt, Artificial Sequence
  targeting sequence with GTCN PAM
gcacaucuaggcaaagccgg

SEQ ID NO: 8366 - RNA, 20 nt, Artificial Sequence
  targeting sequence with GTCN PAM
guaauguggcugccagcagg

SEQ ID NO: 8367 - RNA, 20 nt, Artificial Sequence
  targeting sequence with GTCN PAM
ugcuggcagccacauuacag

SEQ ID NO: 8368 - RNA, 20 nt, Artificial Sequence
  targeting sequence with GTCN PAM
gcuccugccacugcucauuc

SEQ ID NO: 8369 - RNA, 20 nt, Artificial Sequence
  targeting sequence with GTCN PAM
augagcuggggacaggggug

SEQ ID NO: 8370 - RNA, 20 nt, Artificial Sequence
  targeting sequence with GTCN PAM
ccagcucauggacgugagau

SEQ ID NO: 8371 - RNA, 20 nt, Artificial Sequence
  targeting sequence with GTCN PAM
agcauccaugaaaccuuggg

SEQ ID NO: 8372 - RNA, 20 nt, Artificial Sequence
  targeting sequence with GTCN PAM
cuagccuccuaugacccuca

SEQ ID NO: 8373 - RNA, 20 nt, Artificial Sequence
  targeting sequence with GTCN PAM
uaggaggcuagggaccccug

SEQ ID NO: 8374 - RNA, 20 nt, Artificial Sequence
  targeting sequence with GTCN PAM
ucagagccccagauaaggau

SEQ ID NO: 8375 - RNA, 20 nt, Artificial Sequence
  targeting sequence with GTCN PAM
uuucucagcgcagaaggugg

SEQ ID NO: 8376 - RNA, 20 nt, Artificial Sequence
  targeting sequence with GTCN PAM
aggaggaacugaauguuaau

SEQ ID NO: 8377 - RNA, 20 nt, Artificial Sequence
  targeting sequence with GTCN PAM
gauuaacauucaguuccucc

SEQ ID NO: 8378 - RNA, 20 nt, Artificial Sequence
  targeting sequence with GTCN PAM
uaaugucugauuaacauuca

SEQ ID NO: 8379 - RNA, 20 nt, Artificial Sequence
  targeting sequence with GTCN PAM
uuaaauauuccacagccugu

SEQ ID NO: 8380 - RNA, 20 nt, Artificial Sequence
  targeting sequence with GTCN PAM
guaacaucuuucuaugucau

SEQ ID NO: 8381 - RNA, 20 nt, Artificial Sequence
  targeting sequence with GTCN PAM
caugggggaaaaucagguug

SEQ ID NO: 8382 - RNA, 20 nt, Artificial Sequence
  targeting sequence with GTCN PAM
cugagaacgccagccgcacg

SEQ ID NO: 8383 - RNA, 20 nt, Artificial Sequence
  targeting sequence with GTCN PAM
uuaucuuucacauuuucuau

SEQ ID NO: 8384 - RNA, 20 nt, Artificial Sequence
  targeting sequence with GTCN PAM
uaguucuuacucuugauaaa

SEQ ID NO: 8385 - RNA, 20 nt, Artificial Sequence
  targeting sequence with GTCN PAM
gcaucagguucauuguucuu

SEQ ID NO: 8386 - RNA, 20 nt, Artificial Sequence
  targeting sequence with GTCN PAM
gagaaaugagcuuaaugcua

SEQ ID NO: 8387 - RNA, 20 nt, Artificial Sequence
  targeting sequence with GTCN PAM
guucccuuuccagggugguc

SEQ ID NO: 8388 - RNA, 20 nt, Artificial Sequence
  targeting sequence with GTCN PAM
ccuuuggccuccccgcccau

SEQ ID NO: 8389 - RNA, 20 nt, Artificial Sequence
  targeting sequence with GTCN PAM
ccaaaaugggcggggaggcc

SEQ ID NO: 8390 - RNA, 20 nt, Artificial Sequence
  targeting sequence with GTCN PAM
ccacagugguccccaaaaug

SEQ ID NO: 8391 - RNA, 20 nt, Artificial Sequence
  targeting sequence with GTCN PAM
uuccgggccagagucuccac

SEQ ID NO: 8392 - RNA, 20 nt, Artificial Sequence
  targeting sequence with GTCN PAM
caugguccuuccgggccaga

SEQ ID NO: 8393 - RNA, 20 nt, Artificial Sequence
  targeting sequence with GTCN PAM
uuauucugucccuuccuggu

SEQ ID NO: 8394 - RNA, 20 nt, Artificial Sequence
  targeting sequence with GTCN PAM
cuuccugguugugugaccuu

SEQ ID NO: 8395 - RNA, 20 nt, Artificial Sequence
  targeting sequence with GTCN PAM
cacaaccaggaagggacaga

SEQ ID NO: 8396 - RNA, 20 nt, Artificial Sequence
  targeting sequence with GTCN PAM
gucauacagggaugcuagca

SEQ ID NO: 8397 - RNA, 20 nt, Artificial Sequence
  targeting sequence with GTCN PAM
uacagggaugcuagcacauu

SEQ ID NO: 8398 - RNA, 20 nt, Artificial Sequence
  targeting sequence with GTCN PAM
ggaaugugcuagcaucccug

SEQ ID NO: 8399 - RNA, 20 nt, Artificial Sequence
  targeting sequence with GTCN PAM
cgggguguccucagagcuua

SEQ ID NO: 8400 - RNA, 20 nt, Artificial Sequence
  targeting sequence with GTCN PAM
ucagagcuuaaggaauggca

SEQ ID NO: 8401 - RNA, 20 nt, Artificial Sequence
  targeting sequence with GTCN PAM
cguuucaucuccuggccucu

SEQ ID NO: 8402 - RNA, 20 nt, Artificial Sequence
  targeting sequence with GTCN PAM
gaggccaggagaugaaacga

SEQ ID NO: 8403 - RNA, 20 nt, Artificial Sequence
  targeting sequence with GTCN PAM
ggugucugcccaaaccucaa

SEQ ID NO: 8404 - RNA, 20 nt, Artificial Sequence
  targeting sequence with GTCN PAM
gcccaaaccucaagagugca

SEQ ID NO: 8405 - RNA, 20 nt, Artificial Sequence
  targeting sequence with GTCN PAM
cagcugcacucuugagguuu

SEQ ID NO: 8406 - RNA, 20 nt, Artificial Sequence
  targeting sequence with GTCN PAM
cuccugucucagcugcacuc

SEQ ID NO: 8407 - RNA, 20 nt, Artificial Sequence
  targeting sequence with GTCN PAM
ugagauagccaagcgggaga

SEQ ID NO: 8408 - RNA, 20 nt, Artificial Sequence
  targeting sequence with GTCN PAM
guaaggcuuuuauuauaaag

SEQ ID NO: 8409 - RNA, 20 nt, Artificial Sequence
  targeting sequence with GTCN PAM
cagcugccccccuccagccc

SEQ ID NO: 8410 - RNA, 20 nt, Artificial Sequence
  targeting sequence with GTCN PAM
caacacuggcugaguuggcu

SEQ ID NO: 8411 - RNA, 20 nt, Artificial Sequence
  targeting sequence with GTCN PAM
uuucuggcaggaacggagug

SEQ ID NO: 8412 - RNA, 20 nt, Artificial Sequence
  targeting sequence with GTCN PAM
caggcgccaggggcgcucug

SEQ ID NO: 8413 - RNA, 20 nt, Artificial Sequence
  targeting sequence with GTCN PAM
gcccgcucucuggaacaguc

SEQ ID NO: 8414 - RNA, 20 nt, Artificial Sequence
  targeting sequence with GTCN PAM
uuuccaguguugcaugggga

SEQ ID NO: 8415 - RNA, 20 nt, Artificial Sequence
  targeting sequence with GTCN PAM
cgagaggcuccccaugcaac

SEQ ID NO: 8416 - RNA, 20 nt, Artificial Sequence
  targeting sequence with GTCN PAM
ucugcgcaagcggcagcuau

SEQ ID NO: 8417 - RNA, 20 nt, Artificial Sequence
  targeting sequence with GTCN PAM
ccaggaaaaggagagggguu

SEQ ID NO: 8418 - RNA, 20 nt, Artificial Sequence
  targeting sequence with GTCN PAM
guucaaggagggcucccugc

SEQ ID NO: 8419 - RNA, 20 nt, Artificial Sequence
  targeting sequence with GTCN PAM
ggcugcugcugggagaaaug

SEQ ID NO: 8420 - RNA, 20 nt, Artificial Sequence
  targeting sequence with GTCN PAM
caggccucacuguagcacuc

SEQ ID NO: 8421 - RNA, 20 nt, Artificial Sequence
  targeting sequence with GTCN PAM
uccaucaaagccaccaccug

SEQ ID NO: 8422 - RNA, 20 nt, Artificial Sequence
  targeting sequence with GTCN PAM
uccgggccgugggguuggcc

SEQ ID NO: 8423 - RNA, 20 nt, Artificial Sequence
  targeting sequence with GTCN PAM
gccgggccauggccgguagc

SEQ ID NO: 8424 - RNA, 20 nt, Artificial Sequence
  targeting sequence with GTCN PAM
accacgagugacauccgucc

SEQ ID NO: 8425 - RNA, 20 nt, Artificial Sequence
  targeting sequence with GTCN PAM
cucgugguagacguucaggg

SEQ ID NO: 8426 - RNA, 20 nt, Artificial Sequence
  targeting sequence with GTCN PAM
auuaggggcaagcacccuga

SEQ ID NO: 8427 - RNA, 20 nt, Artificial Sequence
  targeting sequence with GTCN PAM
uugaguaggaagcucaccua

SEQ ID NO: 8428 - RNA, 20 nt, Artificial Sequence
  targeting sequence with GTCN PAM
aagcugagccuagucccagc

SEQ ID NO: 8429 - RNA, 20 nt, Artificial Sequence
  targeting sequence with GTCN PAM
cagcaaagccagcugcuugc

SEQ ID NO: 8430 - RNA, 20 nt, Artificial Sequence
  targeting sequence with GTCN PAM
cauggacgaagacggcuucc

SEQ ID NO: 8431 - RNA, 20 nt, Artificial Sequence
  targeting sequence with GTCN PAM
augggacuugaggggccuca

SEQ ID NO: 8432 - RNA, 20 nt, Artificial Sequence
  targeting sequence with GTCN PAM
ucguccaugggacuugaggg

SEQ ID NO: 8433 - RNA, 20 nt, Artificial Sequence
  targeting sequence with GTCN PAM
gggaagccgucuucguccau

SEQ ID NO: 8434 - RNA, 20 nt, Artificial Sequence
  targeting sequence with GTCN PAM
aaucuccucuccauccagag

SEQ ID NO: 8435 - RNA, 20 nt, Artificial Sequence
  targeting sequence with GTCN PAM
ugcauuuucccagaguuuga

SEQ ID NO: 8436 - RNA, 20 nt, Artificial Sequence
  targeting sequence with GTCN PAM
ggggcugggccucaaugccu

SEQ ID NO: 8437 - RNA, 20 nt, Artificial Sequence
  targeting sequence with GTCN PAM
agggugcgguggcucggcgg

SEQ ID NO: 8438 - RNA, 20 nt, Artificial Sequence
  targeting sequence with GTCN PAM
uguccuggaucugcuuguag

SEQ ID NO: 8439 - RNA, 20 nt, Artificial Sequence
  targeting sequence with GTCN PAM
uggaucugcuuguaguagcg

SEQ ID NO: 8440 - RNA, 20 nt, Artificial Sequence
  targeting sequence with GTCN PAM
uuucuccagcagccaucuaa

SEQ ID NO: 8441 - RNA, 20 nt, Artificial Sequence
  targeting sequence with GTCN PAM
uuuucuggaugagcccucau

SEQ ID NO: 8442 - RNA, 20 nt, Artificial Sequence
  targeting sequence with GTCN PAM
cuuauguggcaggagggaug

SEQ ID NO: 8443 - RNA, 20 nt, Artificial Sequence
  targeting sequence with GTCN PAM
cacccggucacugaacgucc

SEQ ID NO: 8444 - RNA, 20 nt, Artificial Sequence
  targeting sequence with GTCN PAM
cugaacguccccgcacucag

SEQ ID NO: 8445 - RNA, 20 nt, Artificial Sequence
  targeting sequence with GTCN PAM
ccgcacucagccggccccag

SEQ ID NO: 8446 - RNA, 20 nt, Artificial Sequence
  targeting sequence with GTCN PAM
ggggccggcugagugcgggg

SEQ ID NO: 8447 - RNA, 20 nt, Artificial Sequence
  targeting sequence with GTCN PAM
gccccgccuacuuuccccag

SEQ ID NO: 8448 - RNA, 20 nt, Artificial Sequence
  targeting sequence with GTCN PAM
uggggaaaguaggcggggca

SEQ ID NO: 8449 - RNA, 20 nt, Artificial Sequence
  targeting sequence with GTCN PAM
uaacaguccuggggaaagua

SEQ ID NO: 8450 - RNA, 20 nt, Artificial Sequence
  targeting sequence with GTCN PAM
uucucagggugauaggucuu

SEQ ID NO: 8451 - RNA, 20 nt, Artificial Sequence
  targeting sequence with GTCN PAM
ugguggcuaggauuccugga

SEQ ID NO: 8452 - RNA, 20 nt, Artificial Sequence
  targeting sequence with GTCN PAM
gucacgggcacccugccuuc

SEQ ID NO: 8453 - RNA, 20 nt, Artificial Sequence
  targeting sequence with GTCN PAM
cgggcacccugccuucggag

SEQ ID NO: 8454 - RNA, 20 nt, Artificial Sequence
  targeting sequence with GTCN PAM
gucucugaaaugcgugggcu

SEQ ID NO: 8455 - RNA, 20 nt, Artificial Sequence
  targeting sequence with GTCN PAM
cugaaaugcgugggcuaaau

SEQ ID NO: 8456 - RNA, 20 nt, Artificial Sequence
  targeting sequence with GTCN PAM
cacacgaccuggaccaaucc

SEQ ID NO: 8457 - RNA, 20 nt, Artificial Sequence
  targeting sequence with GTCN PAM
ugugugacccugcauuuagc

SEQ ID NO: 8458 - RNA, 20 nt, Artificial Sequence
  targeting sequence with GTCN PAM
aggucgugugugacccugca

SEQ ID NO: 8459 - RNA, 20 nt, Artificial Sequence
  targeting sequence with GTCN PAM
uugccugcgccguucucucu

SEQ ID NO: 8460 - RNA, 20 nt, Artificial Sequence
  targeting sequence with GTCN PAM
ggcuuuagagguugaagaug

SEQ ID NO: 8461 - RNA, 20 nt, Artificial Sequence
  targeting sequence with GTCN PAM
aaagccauucaagcgagcau

SEQ ID NO: 8462 - RNA, 20 nt, Artificial Sequence
  targeting sequence with GTCN PAM
ggcacaacaucaucugaaaa

SEQ ID NO: 8463 - RNA, 20 nt, Artificial Sequence
  targeting sequence with GTCN PAM
aagcucauacuggcuuuccc

SEQ ID NO: 8464 - RNA, 20 nt, Artificial Sequence
  targeting sequence with GTCN PAM
gcagcgauacagaguuucug

SEQ ID NO: 8465 - RNA, 20 nt, Artificial Sequence
  targeting sequence with GTCN PAM
cccugucugaaugagucacu

SEQ ID NO: 8466 - RNA, 20 nt, Artificial Sequence
  targeting sequence with GTCN PAM
gaaugagucacucaucccac

SEQ ID NO: 8467 - RNA, 20 nt, Artificial Sequence
  targeting sequence with GTCN PAM
cucaucccacauccccuaga

SEQ ID NO: 8468 - RNA, 20 nt, Artificial Sequence
  targeting sequence with GTCN PAM
aggggaugugggaugaguga

SEQ ID NO: 8469 - RNA, 20 nt, Artificial Sequence
  targeting sequence with GTCN PAM
aggaggcuacccauggucgg

SEQ ID NO: 8470 - RNA, 20 nt, Artificial Sequence
  targeting sequence with GTCN PAM
gcaccccacucuggcccugu

SEQ ID NO: 8471 - RNA, 20 nt, Artificial Sequence
  targeting sequence with GTCN PAM
ugggaacagcugaccuugcc

SEQ ID NO: 8472 - RNA, 20 nt, Artificial Sequence
  targeting sequence with GTCN PAM
gcuguucccaggaccaggcc

SEQ ID NO: 8473 - RNA, 20 nt, Artificial Sequence
  targeting sequence with GTCN PAM
gagauggagcaggcgucgau

SEQ ID NO: 8474 - RNA, 20 nt, Artificial Sequence
  targeting sequence with GTCN PAM
augaaggccugcgcgaugac

SEQ ID NO: 8475 - RNA, 20 nt, Artificial Sequence
  targeting sequence with GTCN PAM
ucgcgcaggccuucaucgac

SEQ ID NO: 8476 - RNA, 20 nt, Artificial Sequence
  targeting sequence with GTCN PAM
auguggucugucuugucgau

SEQ ID NO: 8477 - RNA, 20 nt, Artificial Sequence
  targeting sequence with GTCN PAM
gucuugucgaugucaaagac

SEQ ID NO: 8478 - RNA, 20 nt, Artificial Sequence
  targeting sequence with GTCN PAM
ugucgaugucaaagacaaac

SEQ ID NO: 8479 - RNA, 20 nt, Artificial Sequence
  targeting sequence with GTCN PAM
augucaaagacaaacugggg

SEQ ID NO: 8480 - RNA, 20 nt, Artificial Sequence
  targeting sequence with GTCN PAM
aagacaaacuggggguucuu

SEQ ID NO: 8481 - RNA, 20 nt, Artificial Sequence
  targeting sequence with GTCN PAM
uugacaucgacaagacagac

SEQ ID NO: 8482 - RNA, 20 nt, Artificial Sequence
  targeting sequence with GTCN PAM
cccuaccccacagccuuccu

SEQ ID NO: 8483 - RNA, 20 nt, Artificial Sequence
  targeting sequence with GTCN PAM
uugucacccuaccccacagc

SEQ ID NO: 8484 - RNA, 20 nt, Artificial Sequence
  targeting sequence with GTCN PAM
agggacaguuguggaggaga

SEQ ID NO: 8485 - RNA, 20 nt, Artificial Sequence
  targeting sequence with GTCN PAM
cucgacugcuuccuacccca

SEQ ID NO: 8486 - RNA, 20 nt, Artificial Sequence
  targeting sequence with GTCN PAM
cucaagggccugagguugga

SEQ ID NO: 8487 - RNA, 20 nt, Artificial Sequence
  targeting sequence with GTCN PAM
caagaugugaccuuugggaa

SEQ ID NO: 8488 - RNA, 20 nt, Artificial Sequence
  targeting sequence with GTCN PAM
caucuugugacaaggcucca

SEQ ID NO: 8489 - RNA, 20 nt, Artificial Sequence
  targeting sequence with GTCN PAM
gguccugguucucauuagaa

SEQ ID NO: 8490 - RNA, 20 nt, Artificial Sequence
  targeting sequence with GTCN PAM
ugguucucauuagaaccagg

SEQ ID NO: 8491 - RNA, 20 nt, Artificial Sequence
  targeting sequence with GTCN PAM
gacauuagcagagcagcugu

SEQ ID NO: 8492 - RNA, 20 nt, Artificial Sequence
  targeting sequence with GTCN PAM
gacuuccugcugccugcaag

SEQ ID NO: 8493 - RNA, 20 nt, Artificial Sequence
  targeting sequence with GTCN PAM
ucaagaggccagagagggug

SEQ ID NO: 8494 - RNA, 20 nt, Artificial Sequence
  targeting sequence with GTCN PAM
cuggguggccugaggugggg

SEQ ID NO: 8495 - RNA, 20 nt, Artificial Sequence
  targeting sequence with GTCN PAM
ggcuggguuuccagcaacuu

SEQ ID NO: 8496 - RNA, 20 nt, Artificial Sequence
  targeting sequence with GTCN PAM
ugcacccccacaagaaguug

SEQ ID NO: 8497 - RNA, 20 nt, Artificial Sequence
  targeting sequence with GTCN PAM
gggucaugcacccccacaag

SEQ ID NO: 8498 - RNA, 20 nt, Artificial Sequence
  targeting sequence with GTCN PAM
caggcuguguggucuugagc

SEQ ID NO: 8499 - RNA, 20 nt, Artificial Sequence
  targeting sequence with GTCN PAM
ugagcaggugcugcuucucc

SEQ ID NO: 8500 - RNA, 20 nt, Artificial Sequence
  targeting sequence with GTCN PAM
agguguugcccuuacuauca

SEQ ID NO: 8501 - RNA, 20 nt, Artificial Sequence
  targeting sequence with GTCN PAM
cauuuuacaguggaggggaa

SEQ ID NO: 8502 - RNA, 20 nt, Artificial Sequence
  targeting sequence with GTCN PAM
cucauccgagaacacacagc

SEQ ID NO: 8503 - RNA, 20 nt, Artificial Sequence
  targeting sequence with GTCN PAM
agcccuccucugccauuucc

SEQ ID NO: 8504 - RNA, 20 nt, Artificial Sequence
  targeting sequence with GTCN PAM
ucuggccucgccugcuuggg

SEQ ID NO: 8505 - RNA, 20 nt, Artificial Sequence
  targeting sequence with GTCN PAM
agucuucuggccucgccugc

SEQ ID NO: 8506 - RNA, 20 nt, Artificial Sequence
  targeting sequence with GTCN PAM
acacggcccccccacccgcc

SEQ ID NO: 8507 - RNA, 20 nt, Artificial Sequence
  targeting sequence with GTCN PAM
uccagauguguagggugucg

SEQ ID NO: 8508 - RNA, 20 nt, Artificial Sequence
  targeting sequence with GTCN PAM
gggucggagauuccccucuu

SEQ ID NO: 8509 - RNA, 20 nt, Artificial Sequence
  targeting sequence with GTCN PAM
gagauuccccucuucucagc

SEQ ID NO: 8510 - RNA, 20 nt, Artificial Sequence
  targeting sequence with GTCN PAM
aaaaaguacuugacagccag

SEQ ID NO: 8511 - RNA, 20 nt, Artificial Sequence
  targeting sequence with GTCN PAM
aguacuuuuucgacuuccug

SEQ ID NO: 8512 - RNA, 20 nt, Artificial Sequence
  targeting sequence with GTCN PAM
ucacggauacucagaauggc

SEQ ID NO: 8513 - RNA, 20 nt, Artificial Sequence
  targeting sequence with GTCN PAM
uccagaaacuucugcaacgu

SEQ ID NO: 8514 - RNA, 20 nt, Artificial Sequence
  targeting sequence with GTCN PAM
gccccgggccacgugcagag

SEQ ID NO: 8515 - RNA, 20 nt, Artificial Sequence
  targeting sequence with GTCN PAM
ccgagccucucuggcucacu

SEQ ID NO: 8516 - RNA, 20 nt, Artificial Sequence
  targeting sequence with GTCN PAM
uuucaacgccucugggaggc

SEQ ID NO: 8517 - RNA, 20 nt, Artificial Sequence
  targeting sequence with GTCN PAM
agaacuggaagugccagagu

SEQ ID NO: 8518 - RNA, 20 nt, Artificial Sequence
  targeting sequence with GTCN PAM
ccaaggccacguggcucagu

SEQ ID NO: 8519 - RNA, 20 nt, Artificial Sequence
  targeting sequence with GTCN PAM
cugucaggcauuuuuccugg

SEQ ID NO: 8520 - RNA, 20 nt, Artificial Sequence
  targeting sequence with GTCN PAM
ggcauuuuuccuggcuguga

SEQ ID NO: 8521 - RNA, 20 nt, Artificial Sequence
  targeting sequence with GTCN PAM
cacuugaggaggcauuucuc

SEQ ID NO: 8522 - RNA, 20 nt, Artificial Sequence
  targeting sequence with GTCN PAM
uugcucagggccagcugugc

SEQ ID NO: 8523 - RNA, 20 nt, Artificial Sequence
  targeting sequence with GTCN PAM
ccccucugugcaguggguac

SEQ ID NO: 8524 - RNA, 20 nt, Artificial Sequence
  targeting sequence with GTCN PAM
ggccucagucuccccucugu

SEQ ID NO: 8525 - RNA, 20 nt, Artificial Sequence
  targeting sequence with GTCN PAM
gguagauuuccgggagcacc

SEQ ID NO: 8526 - RNA, 20 nt, Artificial Sequence
  targeting sequence with GTCN PAM
caccggcagagccaucgcaa

SEQ ID NO: 8527 - RNA, 20 nt, Artificial Sequence
  targeting sequence with GTCN PAM
guaggcagcaccugggaggc

SEQ ID NO: 8528 - RNA, 20 nt, Artificial Sequence
  targeting sequence with GTCN PAM
guguccgcaccaggccccau

SEQ ID NO: 8529 - RNA, 20 nt, Artificial Sequence
  targeting sequence with GTCN PAM
gcaccaggccccauccucgg

SEQ ID NO: 8530 - RNA, 20 nt, Artificial Sequence
  targeting sequence with GTCN PAM
ggcucugccaugcuucuuag

SEQ ID NO: 8531 - RNA, 20 nt, Artificial Sequence
  targeting sequence with GTCN PAM
aagucuuucacugugagagg

SEQ ID NO: 8532 - RNA, 20 nt, Artificial Sequence
  targeting sequence with GTCN PAM
uucacugugagaggaaaaac

SEQ ID NO: 8533 - RNA, 20 nt, Artificial Sequence
  targeting sequence with GTCN PAM
ucauuucuguuucucuccuc

SEQ ID NO: 8534 - RNA, 20 nt, Artificial Sequence
  targeting sequence with GTCN PAM
uguuucuguuucucacucca

SEQ ID NO: 8535 - RNA, 20 nt, Artificial Sequence
  targeting sequence with GTCN PAM
cugcuucuguuucucucccc

SEQ ID NO: 8536 - RNA, 20 nt, Artificial Sequence
  targeting sequence with GTCN PAM
ccguuucuguuucucucucc

SEQ ID NO: 8537 - RNA, 20 nt, Artificial Sequence
  targeting sequence with GTCN PAM
cuuuggaucucugucuccgu

SEQ ID NO: 8538 - RNA, 20 nt, Artificial Sequence
  targeting sequence with GTCN PAM
gagagaaugagacagagaug

SEQ ID NO: 8539 - RNA, 20 nt, Artificial Sequence
  targeting sequence with GTCN PAM
cauucucucugacugucucu

SEQ ID NO: 8540 - RNA, 20 nt, Artificial Sequence
  targeting sequence with GTCN PAM
cugcaucucugucucauucu

SEQ ID NO: 8541 - RNA, 20 nt, Artificial Sequence
  targeting sequence with GTCN PAM
ccccaugcgucucugcaucu

SEQ ID NO: 8542 - RNA, 20 nt, Artificial Sequence
  targeting sequence with GTCN PAM
gggagagacggagagagaga

SEQ ID NO: 8543 - RNA, 20 nt, Artificial Sequence
  targeting sequence with GTCN PAM
cucccagacucagucucccc

SEQ ID NO: 8544 - RNA, 20 nt, Artificial Sequence
  targeting sequence with GTCN PAM
cuggaucucacuuaucucuc

SEQ ID NO: 8545 - RNA, 20 nt, Artificial Sequence
  targeting sequence with GTCN PAM
cgcucgcugugugucucugg

SEQ ID NO: 8546 - RNA, 20 nt, Artificial Sequence
  targeting sequence with GTCN PAM
uucucucucugccucacucu

SEQ ID NO: 8547 - RNA, 20 nt, Artificial Sequence
  targeting sequence with GTCN PAM
cugugugugugucuuucucu

SEQ ID NO: 8548 - RNA, 20 nt, Artificial Sequence
  targeting sequence with GTCN PAM
cuccaucccgggucacugug

SEQ ID NO: 8549 - RNA, 20 nt, Artificial Sequence
  targeting sequence with GTCN PAM
cuccuuccaagucccuccau

SEQ ID NO: 8550 - RNA, 20 nt, Artificial Sequence
  targeting sequence with GTCN PAM
cucccagcagccugggaauc

SEQ ID NO: 8551 - RNA, 20 nt, Artificial Sequence
  targeting sequence with GTCN PAM
cagucucucccagcagccug

SEQ ID NO: 8552 - RNA, 20 nt, Artificial Sequence
  targeting sequence with GTCN PAM
ccuucuaagguugagagcag

SEQ ID NO: 8553 - RNA, 20 nt, Artificial Sequence
  targeting sequence with GTCN PAM
cgggguccccuucuaagguu

SEQ ID NO: 8554 - RNA, 20 nt, Artificial Sequence
  targeting sequence with GTCN PAM
gaggguguggagggggcacu

SEQ ID NO: 8555 - RNA, 20 nt, Artificial Sequence
  targeting sequence with GTCN PAM
cugccucaagugcccccucc

SEQ ID NO: 8556 - RNA, 20 nt, Artificial Sequence
  targeting sequence with GTCN PAM
cagccuugggccaugucccu

SEQ ID NO: 8557 - RNA, 20 nt, Artificial Sequence
  targeting sequence with GTCN PAM
gggcagcagccaggccagaa

SEQ ID NO: 8558 - RNA, 20 nt, Artificial Sequence
  targeting sequence with GTCN PAM
gaggaggcuggccccgccca

SEQ ID NO: 8559 - RNA, 20 nt, Artificial Sequence
  targeting sequence with GTCN PAM
acacgcagccugggcucccu

SEQ ID NO: 8560 - RNA, 20 nt, Artificial Sequence
  targeting sequence with GTCN PAM
uucuugucuaugagacucau

SEQ ID NO: 8561 - RNA, 20 nt, Artificial Sequence
  targeting sequence with GTCN PAM
augagacucauggccaggga

SEQ ID NO: 8562 - RNA, 20 nt, Artificial Sequence
  targeting sequence with GTCN PAM
cauagacaagaaggacaaca

SEQ ID NO: 8563 - RNA, 20 nt, Artificial Sequence
  targeting sequence with GTCN PAM
gaggccggagguuggggugg

SEQ ID NO: 8564 - RNA, 20 nt, Artificial Sequence
  targeting sequence with GTCN PAM
uccaccacugaggugucguc

SEQ ID NO: 8565 - RNA, 20 nt, Artificial Sequence
  targeting sequence with GTCN PAM
uccaggucccgaaggaugua

SEQ ID NO: 8566 - RNA, 20 nt, Artificial Sequence
  targeting sequence with GTCN PAM
aggucccgaaggauguagcu

SEQ ID NO: 8567 - RNA, 20 nt, Artificial Sequence
  targeting sequence with GTCN PAM
cgaaggauguagcucugugu

SEQ ID NO: 8568 - RNA, 20 nt, Artificial Sequence
  targeting sequence with GTCN PAM
cccagagugguucgccucca

SEQ ID NO: 8569 - RNA, 20 nt, Artificial Sequence
  targeting sequence with GTCN PAM
cuugucccccagagugguuc

SEQ ID NO: 8570 - RNA, 20 nt, Artificial Sequence
  targeting sequence with GTCN PAM
gggcagggagcugggccuga

SEQ ID NO: 8571 - RNA, 20 nt, Artificial Sequence
  targeting sequence with GTCN PAM
gcaaggcuguucauguuaca

SEQ ID NO: 8572 - RNA, 20 nt, Artificial Sequence
  targeting sequence with GTCN PAM
ugguuaggccaaggguuuca

SEQ ID NO: 8573 - RNA, 20 nt, Artificial Sequence
  targeting sequence with GTCN PAM
ugaacuccugggcucaagcg

SEQ ID NO: 8574 - RNA, 20 nt, Artificial Sequence
  targeting sequence with GTCN PAM
ugcugugcugcccaggcugg

SEQ ID NO: 8575 - RNA, 20 nt, Artificial Sequence
  targeting sequence with GTCN PAM
cagcuacucaggaggcugaa

SEQ ID NO: 8576 - RNA, 20 nt, Artificial Sequence
  targeting sequence with GTCN PAM
aggcugcagugagcugagau

SEQ ID NO: 8577 - RNA, 20 nt, Artificial Sequence
  targeting sequence with GTCN PAM
cccaggcuggagugcagugg

SEQ ID NO: 8578 - RNA, 20 nt, Artificial Sequence
  targeting sequence with GTCN PAM
caaaaacaaacaaacaaacc

SEQ ID NO: 8579 - RNA, 20 nt, Artificial Sequence
  targeting sequence with GTCN PAM
guaguucacucacacugcag

SEQ ID NO: 8580 - RNA, 20 nt, Artificial Sequence
  targeting sequence with GTCN PAM
ugcagugugagugaacuacg

SEQ ID NO: 8581 - RNA, 20 nt, Artificial Sequence
  targeting sequence with GTCN PAM
ccuacagaguaagagcuucu

SEQ ID NO: 8582 - RNA, 20 nt, Artificial Sequence
  targeting sequence with GTCN PAM
ccacauucaugcacccaugc

SEQ ID NO: 8583 - RNA, 20 nt, Artificial Sequence
  targeting sequence with GTCN PAM
aggcaggggccagccccggc

SEQ ID NO: 8584 - RNA, 20 nt, Artificial Sequence
  targeting sequence with GTCN PAM
ggcgcuucagccggggcugg

SEQ ID NO: 8585 - RNA, 20 nt, Artificial Sequence
  targeting sequence with GTCN PAM
cugcccccauucccacccac

SEQ ID NO: 8586 - RNA, 20 nt, Artificial Sequence
  targeting sequence with GTCN PAM
acguccucugcacgcggcca

SEQ ID NO: 8587 - RNA, 20 nt, Artificial Sequence
  targeting sequence with GTCN PAM
accuuggugggugggaaugg

SEQ ID NO: 8588 - RNA, 20 nt, Artificial Sequence
  targeting sequence with GTCN PAM
ucugcacgcggccacuggga

SEQ ID NO: 8589 - RNA, 20 nt, Artificial Sequence
  targeting sequence with GTCN PAM
aggagaagauccuggaggcc

SEQ ID NO: 8590 - RNA, 20 nt, Artificial Sequence
  targeting sequence with GTCN PAM
gcgugucgguguccauggcc

SEQ ID NO: 8591 - RNA, 20 nt, Artificial Sequence
  targeting sequence with GTCN PAM
guguccauggcccgcacgcu

SEQ ID NO: 8592 - RNA, 20 nt, Artificial Sequence
  targeting sequence with GTCN PAM
auggcccgcacgcucagcga

SEQ ID NO: 8593 - RNA, 20 nt, Artificial Sequence
  targeting sequence with GTCN PAM
augccacagcccuggaagga

SEQ ID NO: 8594 - RNA, 20 nt, Artificial Sequence
  targeting sequence with GTCN PAM
uuccagggcuguggcaugga

SEQ ID NO: 8595 - RNA, 20 nt, Artificial Sequence
  targeting sequence with GTCN PAM
gugaguugcugccaucacua

SEQ ID NO: 8596 - RNA, 20 nt, Artificial Sequence
  targeting sequence with GTCN PAM
gugcccaggcagcaaggccc

SEQ ID NO: 8597 - RNA, 20 nt, Artificial Sequence
  targeting sequence with GTCN PAM
cagggcugcugugucgccgc

SEQ ID NO: 8598 - RNA, 20 nt, Artificial Sequence
  targeting sequence with GTCN PAM
gcagggcggggaggguccca

SEQ ID NO: 8599 - RNA, 20 nt, Artificial Sequence
  targeting sequence with GTCN PAM
auggagcccuuguugauuug

SEQ ID NO: 8600 - RNA, 20 nt, Artificial Sequence
  targeting sequence with GTCN PAM
ccugaggggcacggggguau

SEQ ID NO: 8601 - RNA, 20 nt, Artificial Sequence
  targeting sequence with GTCN PAM
cuugcccucucugagccucg

SEQ ID NO: 8602 - RNA, 20 nt, Artificial Sequence
  targeting sequence with GTCN PAM
gccgagccagguccgauucc

SEQ ID NO: 8603 - RNA, 20 nt, Artificial Sequence
  targeting sequence with GTCN PAM
caggcuugggagucagccga

SEQ ID NO: 8604 - RNA, 20 nt, Artificial Sequence
  targeting sequence with GTCN PAM
accuaaacucacacuugggg

SEQ ID NO: 8605 - RNA, 20 nt, Artificial Sequence
  targeting sequence with GTCN PAM
aggccacaucgguguuucgg

SEQ ID NO: 8606 - RNA, 20 nt, Artificial Sequence
  targeting sequence with GTCN PAM
ucagccugcaaguggggucg

SEQ ID NO: 8607 - RNA, 20 nt, Artificial Sequence
  targeting sequence with GTCN PAM
caggaggaauggggcucaau

SEQ ID NO: 8608 - RNA, 20 nt, Artificial Sequence
  targeting sequence with GTCN PAM
cugcucuugcccaucuccaa

SEQ ID NO: 8609 - RNA, 20 nt, Artificial Sequence
  targeting sequence with GTCN PAM
agcagagccacugccuggag

SEQ ID NO: 8610 - RNA, 20 nt, Artificial Sequence
  targeting sequence with GTCN PAM
cuugcugggcaauggccuug

SEQ ID NO: 8611 - RNA, 20 nt, Artificial Sequence
  targeting sequence with GTCN PAM
ugguccaauucuccaggucu

SEQ ID NO: 8612 - RNA, 20 nt, Artificial Sequence
  targeting sequence with GTCN PAM
aauucuccaggucuggggcg

SEQ ID NO: 8613 - RNA, 20 nt, Artificial Sequence
  targeting sequence with GTCN PAM
ggggcgugggaggcacugau

SEQ ID NO: 8614 - RNA, 20 nt, Artificial Sequence
  targeting sequence with GTCN PAM
aggguccacaguggcccuug

SEQ ID NO: 8615 - RNA, 20 nt, Artificial Sequence
  targeting sequence with GTCN PAM
acaguggcccuugugguucc

SEQ ID NO: 8616 - RNA, 20 nt, Artificial Sequence
  targeting sequence with GTCN PAM
aauggggccucugccccuga

SEQ ID NO: 8617 - RNA, 20 nt, Artificial Sequence
  targeting sequence with GTCN PAM
cacagcugggcugugccaaa

SEQ ID NO: 8618 - RNA, 20 nt, Artificial Sequence
  targeting sequence with GTCN PAM
aaucuuuggcacagcccagc

SEQ ID NO: 8619 - RNA, 20 nt, Artificial Sequence
  targeting sequence with GTCN PAM
ugggcuugaguccaaucuuu

SEQ ID NO: 8620 - RNA, 20 nt, Artificial Sequence
  targeting sequence with GTCN PAM
caaacuccugagcucaagca

SEQ ID NO: 8621 - RNA, 20 nt, Artificial Sequence
  targeting sequence with GTCN PAM
ugcuuuguugcacaggcugg

SEQ ID NO: 8622 - RNA, 20 nt, Artificial Sequence
  targeting sequence with GTCN PAM
agcugcccuaugguggcaga

SEQ ID NO: 8623 - RNA, 20 nt, Artificial Sequence
  targeting sequence with GTCN PAM
cacuguccagcugcccuaug

SEQ ID NO: 8624 - RNA, 20 nt, Artificial Sequence
  targeting sequence with GTCN PAM
ugucccacuguccagcugcc

SEQ ID NO: 8625 - RNA, 20 nt, Artificial Sequence
  targeting sequence with GTCN PAM
uucuggcagagugcaggagg

SEQ ID NO: 8626 - RNA, 20 nt, Artificial Sequence
  targeting sequence with GTCN PAM
cagcacaggguugccugcuc

SEQ ID NO: 8627 - RNA, 20 nt, Artificial Sequence
  targeting sequence with GTCN PAM
gaaggcuucaagguggcuuc

SEQ ID NO: 8628 - RNA, 20 nt, Artificial Sequence
  targeting sequence with GTCN PAM
cgccuagccuagggcuggga

SEQ ID NO: 8629 - RNA, 20 nt, Artificial Sequence
  targeting sequence with GTCN PAM
uccacccuucccugcucugg

SEQ ID NO: 8630 - RNA, 20 nt, Artificial Sequence
  targeting sequence with GTCN PAM
caucugugguuuucucaguc

SEQ ID NO: 8631 - RNA, 20 nt, Artificial Sequence
  targeting sequence with GTCN PAM
ggggccuugucccaucugug

SEQ ID NO: 8632 - RNA, 20 nt, Artificial Sequence
  targeting sequence with GTCN PAM
uacgggccuggccugucuca

SEQ ID NO: 8633 - RNA, 20 nt, Artificial Sequence
  targeting sequence with GTCN PAM
caugcaacacucccuccugg

SEQ ID NO: 8634 - RNA, 20 nt, Artificial Sequence
  targeting sequence with GTCN PAM
cugccgcugagucccugcca

SEQ ID NO: 8635 - RNA, 20 nt, Artificial Sequence
  targeting sequence with GTCN PAM
cugccacgucccccgccugg

SEQ ID NO: 8636 - RNA, 20 nt, Artificial Sequence
  targeting sequence with GTCN PAM
cccgccugggcucugucugu

SEQ ID NO: 8637 - RNA, 20 nt, Artificial Sequence
  targeting sequence with GTCN PAM
guccccaggcagccucaccc

SEQ ID NO: 8638 - RNA, 20 nt, Artificial Sequence
  targeting sequence with GTCN PAM
ccaggcagccucacccgcag

SEQ ID NO: 8639 - RNA, 20 nt, Artificial Sequence
  targeting sequence with GTCN PAM
gcgggugaggcugccugggg

SEQ ID NO: 8640 - RNA, 20 nt, Artificial Sequence
  targeting sequence with GTCN PAM
aucugcauguacagcugucu

SEQ ID NO: 8641 - RNA, 20 nt, Artificial Sequence
  targeting sequence with GTCN PAM
gugguggagaagaugcucac

SEQ ID NO: 8642 - RNA, 20 nt, Artificial Sequence
  targeting sequence with GTCN PAM
augagguccaccagcagcuc

SEQ ID NO: 8643 - RNA, 20 nt, Artificial Sequence
  targeting sequence with GTCN PAM
accagcagcuccuucaugau

SEQ ID NO: 8644 - RNA, 20 nt, Artificial Sequence
  targeting sequence with GTCN PAM
gcagcgaggccaggcugcac

SEQ ID NO: 8645 - RNA, 20 nt, Artificial Sequence
  targeting sequence with GTCN PAM
acugcaccuugaggcccuag

SEQ ID NO: 8646 - RNA, 20 nt, Artificial Sequence
  targeting sequence with GTCN PAM
cagggucucagugccgccuc

SEQ ID NO: 8647 - RNA, 20 nt, Artificial Sequence
  targeting sequence with GTCN PAM
gucacagccugaccugucgc

SEQ ID NO: 8648 - RNA, 20 nt, Artificial Sequence
  targeting sequence with GTCN PAM
cagccugaccugucgcgcac

SEQ ID NO: 8649 - RNA, 20 nt, Artificial Sequence
  targeting sequence with GTCN PAM
ggcugugacagacuggggug

SEQ ID NO: 8650 - RNA, 20 nt, Artificial Sequence
  targeting sequence with GTCN PAM
cgcaccgcaaaguccuucug

SEQ ID NO: 8651 - RNA, 20 nt, Artificial Sequence
  targeting sequence with GTCN PAM
uucugcugcuccagcgcgug

SEQ ID NO: 8652 - RNA, 20 nt, Artificial Sequence
  targeting sequence with GTCN PAM
acgcgcuggagcagcagaag

SEQ ID NO: 8653 - RNA, 20 nt, Artificial Sequence
  targeting sequence with GTCN PAM
uuguccacgcgcuggagcag

SEQ ID NO: 8654 - RNA, 20 nt, Artificial Sequence
  targeting sequence with GTCN PAM
agaggggcccagugucccug

SEQ ID NO: 8655 - RNA, 20 nt, Artificial Sequence
  targeting sequence with GTCN PAM
uaagcacuggcuguuaggcu

SEQ ID NO: 8656 - RNA, 20 nt, Artificial Sequence
  targeting sequence with GTCN PAM
ugggguacucaccuuccacu

SEQ ID NO: 8657 - RNA, 20 nt, Artificial Sequence
  targeting sequence with GTCN PAM
gggagggcagcacguaacgc

SEQ ID NO: 8658 - RNA, 20 nt, Artificial Sequence
  targeting sequence with GTCN PAM
gccucugcaguguuccuccc

SEQ ID NO: 8659 - RNA, 20 nt, Artificial Sequence
  targeting sequence with GTCN PAM
agccccgcugagaugcuggg

SEQ ID NO: 8660 - RNA, 20 nt, Artificial Sequence
  targeting sequence with GTCN PAM
cucacacagaaaggggcacu

SEQ ID NO: 8661 - RNA, 20 nt, Artificial Sequence
  targeting sequence with GTCN PAM
uuuauggggagcuaauuccg

SEQ ID NO: 8662 - RNA, 20 nt, Artificial Sequence
  targeting sequence with GTCN PAM
uguguggccacaccccugga

SEQ ID NO: 8663 - RNA, 20 nt, Artificial Sequence
  targeting sequence with GTCN PAM
ugugcugucuuguguggcca

SEQ ID NO: 8664 - RNA, 20 nt, Artificial Sequence
  targeting sequence with GTCN PAM
gagcuuuagccugaggcugg

SEQ ID NO: 8665 - RNA, 20 nt, Artificial Sequence
  targeting sequence with GTCN PAM
aacaugggcuugcuuuggcc

SEQ ID NO: 8666 - RNA, 20 nt, Artificial Sequence
  targeting sequence with GTCN PAM
acaccauuccccacacagug

SEQ ID NO: 8667 - RNA, 20 nt, Artificial Sequence
  targeting sequence with GTCN PAM
acuacccucacucuaccucc

SEQ ID NO: 8668 - RNA, 20 nt, Artificial Sequence
  targeting sequence with GTCN PAM
aguggacaggaggagggagu

SEQ ID NO: 8669 - RNA, 20 nt, Artificial Sequence
  targeting sequence with GTCN PAM
acuggacuccugccccaucc

SEQ ID NO: 8670 - RNA, 20 nt, Artificial Sequence
  targeting sequence with GTCN PAM
cuacacucccuccuccuguc

SEQ ID NO: 8671 - RNA, 20 nt, Artificial Sequence
  targeting sequence with GTCN PAM
caggccagccucucuccuuc

SEQ ID NO: 8672 - RNA, 20 nt, Artificial Sequence
  targeting sequence with GTCN PAM
uggccagcugggccugccuc

SEQ ID NO: 8673 - RNA, 20 nt, Artificial Sequence
  targeting sequence with GTCN PAM
auauggaagccagcugcagc

SEQ ID NO: 8674 - RNA, 20 nt, Artificial Sequence
  targeting sequence with GTCN PAM
uucucugcucacuugauguu

SEQ ID NO: 8675 - RNA, 20 nt, Artificial Sequence
  targeting sequence with GTCN PAM
uggccacuugcccuggccug

SEQ ID NO: 8676 - RNA, 20 nt, Artificial Sequence
  targeting sequence with GTCN PAM
gcagccguccuggccacuug

SEQ ID NO: 8677 - RNA, 20 nt, Artificial Sequence
  targeting sequence with GTCN PAM
cuugagcagugccaaaccug

SEQ ID NO: 8678 - RNA, 20 nt, Artificial Sequence
  targeting sequence with GTCN PAM
aguugccuugagguggcugg

SEQ ID NO: 8679 - RNA, 20 nt, Artificial Sequence
  targeting sequence with GTCN PAM
gcccgagccugagccugccc

SEQ ID NO: 8680 - RNA, 20 nt, Artificial Sequence
  targeting sequence with GTCN PAM
cgaagugcuuauacuccagg

SEQ ID NO: 8681 - RNA, 20 nt, Artificial Sequence
  targeting sequence with GTCN PAM
ugucugucugcagcucagcg

SEQ ID NO: 8682 - RNA, 20 nt, Artificial Sequence
  targeting sequence with GTCN PAM
gucugcagcucagcgaagcc

SEQ ID NO: 8683 - RNA, 20 nt, Artificial Sequence
  targeting sequence with GTCN PAM
gcagcucagcgaagccuggc

SEQ ID NO: 8684 - RNA, 20 nt, Artificial Sequence
  targeting sequence with GTCN PAM
gccaggcuucgcugagcugc

SEQ ID NO: 8685 - RNA, 20 nt, Artificial Sequence
  targeting sequence with GTCN PAM
guguguccgccaggcuucgc

SEQ ID NO: 8686 - RNA, 20 nt, Artificial Sequence
  targeting sequence with GTCN PAM
ccgcccacuaccuuugcgga

SEQ ID NO: 8687 - RNA, 20 nt, Artificial Sequence
  targeting sequence with GTCN PAM
ucugccaguaacgcucagca

SEQ ID NO: 8688 - RNA, 20 nt, Artificial Sequence
  targeting sequence with GTCN PAM
gcucuugguacagaagacga

SEQ ID NO: 8689 - RNA, 20 nt, Artificial Sequence
  targeting sequence with GTCN PAM
ucuguaccaagagccgacgu

SEQ ID NO: 8690 - RNA, 20 nt, Artificial Sequence
  targeting sequence with GTCN PAM
ggccucuggugcccuuugga

SEQ ID NO: 8691 - RNA, 20 nt, Artificial Sequence
  targeting sequence with GTCN PAM
ucccuccugggcaggguugg

SEQ ID NO: 8692 - RNA, 20 nt, Artificial Sequence
  targeting sequence with GTCN PAM
acgggagagcuccccgcaac

SEQ ID NO: 8693 - RNA, 20 nt, Artificial Sequence
  targeting sequence with GTCN PAM
ucaggcauugcuuugcuggc

SEQ ID NO: 8694 - RNA, 20 nt, Artificial Sequence
  targeting sequence with GTCN PAM
uuagaaaaagaaguguguag

SEQ ID NO: 8695 - RNA, 20 nt, Artificial Sequence
  targeting sequence with GTCN PAM
agccccguuaaaaaaaaaaa

SEQ ID NO: 8696 - RNA, 20 nt, Artificial Sequence
  targeting sequence with GTCN PAM
cccagaauccucccacccag

SEQ ID NO: 8697 - RNA, 20 nt, Artificial Sequence
  targeting sequence with GTCN PAM
uuguagaaggaauagaaaau

SEQ ID NO: 8698 - RNA, 20 nt, Artificial Sequence
  targeting sequence with GTCN PAM
cagcacuuugggaggccaag

SEQ ID NO: 8699 - RNA, 20 nt, Artificial Sequence
  targeting sequence with GTCN PAM
ucuuggggcagcaaaaaugc

SEQ ID NO: 8700 - RNA, 20 nt, Artificial Sequence
  targeting sequence with GTCN PAM
cuccccauucguguucuccc

SEQ ID NO: 8701 - RNA, 20 nt, Artificial Sequence
  targeting sequence with GTCN PAM
cuggcaaucaccauucagcu

SEQ ID NO: 8702 - RNA, 20 nt, Artificial Sequence
  targeting sequence with GTCN PAM
cuaugaauuucccuauucua

SEQ ID NO: 8703 - RNA, 20 nt, Artificial Sequence
  targeting sequence with GTCN PAM
ggugggcuauaccacuguua

SEQ ID NO: 8704 - RNA, 20 nt, Artificial Sequence
  targeting sequence with GTCN PAM
auagagagcuacugaaggua

SEQ ID NO: 8705 - RNA, 20 nt, Artificial Sequence
  targeting sequence with GTCN PAM
cugaaucucaagcagagaaa

SEQ ID NO: 8706 - RNA, 20 nt, Artificial Sequence
  targeting sequence with GTCN PAM
ugaggguggggcuccuuacc

SEQ ID NO: 8707 - RNA, 20 nt, Artificial Sequence
  targeting sequence with GTCN PAM
ugcugcugcucuccguggug

SEQ ID NO: 8708 - RNA, 20 nt, Artificial Sequence
  targeting sequence with GTCN PAM
ucugcagcguccugcugcug

SEQ ID NO: 8709 - RNA, 20 nt, Artificial Sequence
  targeting sequence with GTCN PAM
aucgucaucugcagcguccu

SEQ ID NO: 8710 - RNA, 20 nt, Artificial Sequence
  targeting sequence with GTCN PAM
cgcugccccccagcugcagu

SEQ ID NO: 8711 - RNA, 20 nt, Artificial Sequence
  targeting sequence with GTCN PAM
gguugaaguucccuaccugg

SEQ ID NO: 8712 - RNA, 20 nt, Artificial Sequence
  targeting sequence with GTCN PAM
aggaaagcuacaacccccuu

SEQ ID NO: 8713 - RNA, 20 nt, Artificial Sequence
  targeting sequence with GTCN PAM
accuccuggggacacuggga

SEQ ID NO: 8714 - RNA, 20 nt, Artificial Sequence
  targeting sequence with GTCN PAM
ccaggagguggacauuguua

SEQ ID NO: 8715 - RNA, 20 nt, Artificial Sequence
  targeting sequence with GTCN PAM
agcccuugguccugggccug

SEQ ID NO: 8716 - RNA, 20 nt, Artificial Sequence
  targeting sequence with GTCN PAM
ugggccuggcacagaggugg

SEQ ID NO: 8717 - RNA, 20 nt, Artificial Sequence
  targeting sequence with GTCN PAM
ccaaguaucugcaaggcugc

SEQ ID NO: 8718 - RNA, 20 nt, Artificial Sequence
  targeting sequence with GTCN PAM
cagggcagccuugcagauac

SEQ ID NO: 8719 - RNA, 20 nt, Artificial Sequence
  targeting sequence with GTCN PAM
ucauaccucaccuacccccu

SEQ ID NO: 8720 - RNA, 20 nt, Artificial Sequence
  targeting sequence with GTCN PAM
ugcacucugaguccucauac

SEQ ID NO: 8721 - RNA, 20 nt, Artificial Sequence
  targeting sequence with GTCN PAM
caguccugcacucugagucc

SEQ ID NO: 8722 - RNA, 20 nt, Artificial Sequence
  targeting sequence with GTCN PAM
gagccauccugggguggcac

SEQ ID NO: 8723 - RNA, 20 nt, Artificial Sequence
  targeting sequence with GTCN PAM
ccugggauggggagcucacu

SEQ ID NO: 8724 - RNA, 20 nt, Artificial Sequence
  targeting sequence with GTCN PAM
auccuagagccugggcugcc

SEQ ID NO: 8725 - RNA, 20 nt, Artificial Sequence
  targeting sequence with GTCN PAM
cccuuggcgucuauccuaga

SEQ ID NO: 8726 - RNA, 20 nt, Artificial Sequence
  targeting sequence with GTCN PAM
cugucccccuuggcgucuau

SEQ ID NO: 8727 - RNA, 20 nt, Artificial Sequence
  targeting sequence with GTCN PAM
agguccagauggggcccauc

SEQ ID NO: 8728 - RNA, 20 nt, Artificial Sequence
  targeting sequence with GTCN PAM
agauggggcccaucacugac

SEQ ID NO: 8729 - RNA, 20 nt, Artificial Sequence
  targeting sequence with GTCN PAM
gugaugggccccaucuggac

SEQ ID NO: 8730 - RNA, 20 nt, Artificial Sequence
  targeting sequence with GTCN PAM
cuaaguucuugggccucagu

SEQ ID NO: 8731 - RNA, 20 nt, Artificial Sequence
  targeting sequence with GTCN PAM
aguggggauguaaagcucug

SEQ ID NO: 8732 - RNA, 20 nt, Artificial Sequence
  targeting sequence with GTCN PAM
agcaaagcagagcuuuacau

SEQ ID NO: 8733 - RNA, 20 nt, Artificial Sequence
  targeting sequence with GTCN PAM
gcccugcuccggcgccccau

SEQ ID NO: 8734 - RNA, 20 nt, Artificial Sequence
  targeting sequence with GTCN PAM
cugggcgcggccguggggca

SEQ ID NO: 8735 - RNA, 20 nt, Artificial Sequence
  targeting sequence with GTCN PAM
acgagucccugggcgcggcc

SEQ ID NO: 8736 - RNA, 20 nt, Artificial Sequence
  targeting sequence with GTCN PAM
gagacaaucuggaugucgca

SEQ ID NO: 8737 - RNA, 20 nt, Artificial Sequence
  targeting sequence with GTCN PAM
cugacagaaucauccacugc

SEQ ID NO: 8738 - RNA, 20 nt, Artificial Sequence
  targeting sequence with GTCN PAM
cagcuuacuuggccuaucuu

SEQ ID NO: 8739 - RNA, 20 nt, Artificial Sequence
  targeting sequence with GTCN PAM
agauaggccaaguaagcugc

SEQ ID NO: 8740 - RNA, 20 nt, Artificial Sequence
  targeting sequence with GTCN PAM
cgaguaccgggucaagauag

SEQ ID NO: 8741 - RNA, 20 nt, Artificial Sequence
  targeting sequence with GTCN PAM
ugcuccuucugugggugcaa

SEQ ID NO: 8742 - RNA, 20 nt, Artificial Sequence
  targeting sequence with GTCN PAM
aggcggaaccugcugccccg

SEQ ID NO: 8743 - RNA, 20 nt, Artificial Sequence
  targeting sequence with GTCN PAM
aguagcuccucagccacagc

SEQ ID NO: 8744 - RNA, 20 nt, Artificial Sequence
  targeting sequence with GTCN PAM
gcguaggcccgcccauugau

SEQ ID NO: 8745 - RNA, 20 nt, Artificial Sequence
  targeting sequence with GTCN PAM
acuggcgcugaugcguugcu

SEQ ID NO: 8746 - RNA, 20 nt, Artificial Sequence
  targeting sequence with GTCN PAM
cccggggcccugagcaacgc

SEQ ID NO: 8747 - RNA, 20 nt, Artificial Sequence
  targeting sequence with GTCN PAM
auccugcaucccggccuggg

SEQ ID NO: 8748 - RNA, 20 nt, Artificial Sequence
  targeting sequence with GTCN PAM
ccucaaaccccacuccccac

SEQ ID NO: 8749 - RNA, 20 nt, Artificial Sequence
  targeting sequence with GTCN PAM
ccucuuccucccucugccuc

SEQ ID NO: 8750 - RNA, 20 nt, Artificial Sequence
  targeting sequence with GTCN PAM
guuagggcccuggcugugcc

SEQ ID NO: 8751 - RNA, 20 nt, Artificial Sequence
  targeting sequence with GTCN PAM
accacauuggccgggagccc

SEQ ID NO: 8752 - RNA, 20 nt, Artificial Sequence
  targeting sequence with GTCN PAM
auggccguccaccacauugg

SEQ ID NO: 8753 - RNA, 20 nt, Artificial Sequence
  targeting sequence with GTCN PAM
ugccgccacugcgggggaca

SEQ ID NO: 8754 - RNA, 20 nt, Artificial Sequence
  targeting sequence with GTCN PAM
cccgcaguggcggcaggacc

SEQ ID NO: 8755 - RNA, 20 nt, Artificial Sequence
  targeting sequence with GTCN PAM
caccugacagggcugcggcg

SEQ ID NO: 8756 - RNA, 20 nt, Artificial Sequence
  targeting sequence with GTCN PAM
ggugagacuggcaccccgcc

SEQ ID NO: 8757 - RNA, 20 nt, Artificial Sequence
  targeting sequence with GTCN PAM
ccgccgcagcccugucaggu

SEQ ID NO: 8758 - RNA, 20 nt, Artificial Sequence
  targeting sequence with GTCN PAM
ucacggccaucaguccccgc

SEQ ID NO: 8759 - RNA, 20 nt, Artificial Sequence
  targeting sequence with GTCN PAM
gggcugcgugcacggcaacc

SEQ ID NO: 8760 - RNA, 20 nt, Artificial Sequence
  targeting sequence with GTCN PAM
caggggcauuggcggugggu

SEQ ID NO: 8761 - RNA, 20 nt, Artificial Sequence
  targeting sequence with GTCN PAM
acgcacuuggccugggguuc

SEQ ID NO: 8762 - RNA, 20 nt, Artificial Sequence
  targeting sequence with GTCN PAM
aggaggccuugaaccccagg

SEQ ID NO: 8763 - RNA, 20 nt, Artificial Sequence
  targeting sequence with GTCN PAM
caacucaucuucugcccagu

SEQ ID NO: 8764 - RNA, 20 nt, Artificial Sequence
  targeting sequence with GTCN PAM
ucucucccgccuccaacccu

SEQ ID NO: 8765 - RNA, 20 nt, Artificial Sequence
  targeting sequence with GTCN PAM
cucuccccagaucccugaag

SEQ ID NO: 8766 - RNA, 20 nt, Artificial Sequence
  targeting sequence with GTCN PAM
gugccuucagggaucugggg

SEQ ID NO: 8767 - RNA, 20 nt, Artificial Sequence
  targeting sequence with GTCN PAM
gcccuucccuugaggucuau

SEQ ID NO: 8768 - RNA, 20 nt, Artificial Sequence
  targeting sequence with GTCN PAM
auguugugcuccucuuggug

SEQ ID NO: 8769 - RNA, 20 nt, Artificial Sequence
  targeting sequence with GTCN PAM
cagcaaugcccauuaguggg

SEQ ID NO: 8770 - RNA, 20 nt, Artificial Sequence
  targeting sequence with GTCN PAM
gguacacaauaagugcauaa

SEQ ID NO: 8771 - RNA, 20 nt, Artificial Sequence
  targeting sequence with GTCN PAM
uuauuaugcacuuauugugu

SEQ ID NO: 8772 - RNA, 20 nt, Artificial Sequence
  targeting sequence with GTCN PAM
guuggcgaaacaccuuuguc

SEQ ID NO: 8773 - RNA, 20 nt, Artificial Sequence
  targeting sequence with GTCN PAM
ccuaagccaagccccuucuc

SEQ ID NO: 8774 - RNA, 20 nt, Artificial Sequence
  targeting sequence with GTCN PAM
ucauuggcuguguccccuaa

SEQ ID NO: 8775 - RNA, 20 nt, Artificial Sequence
  targeting sequence with GTCN PAM
ccuccagcccgccagccccc

SEQ ID NO: 8776 - RNA, 20 nt, Artificial Sequence
  targeting sequence with GTCN PAM
gugucguucaccaggaccug

SEQ ID NO: 8777 - RNA, 20 nt, Artificial Sequence
  targeting sequence with GTCN PAM
uucaccaggaccuggagcuc

SEQ ID NO: 8778 - RNA, 20 nt, Artificial Sequence
  targeting sequence with GTCN PAM
uggugaacgacacagacccc

SEQ ID NO: 8779 - RNA, 20 nt, Artificial Sequence
  targeting sequence with GTCN PAM
uucccauggauggugauccu

SEQ ID NO: 8780 - RNA, 20 nt, Artificial Sequence
  targeting sequence with GTCN PAM
acucccuggagccuaccaug

SEQ ID NO: 8781 - RNA, 20 nt, Artificial Sequence
  targeting sequence with GTCN PAM
ggcccgcccagcacgcacac

SEQ ID NO: 8782 - RNA, 20 nt, Artificial Sequence
  targeting sequence with GTCN PAM
cgggacuugcccuccuuaga

SEQ ID NO: 8783 - RNA, 20 nt, Artificial Sequence
  targeting sequence with GTCN PAM
cgggaccgcuucuccuacgu

SEQ ID NO: 8784 - RNA, 20 nt, Artificial Sequence
  targeting sequence with GTCN PAM
ccacaccugagagugguccu

SEQ ID NO: 8785 - RNA, 20 nt, Artificial Sequence
  targeting sequence with GTCN PAM
uggggcuggcccugugacac

SEQ ID NO: 8786 - RNA, 20 nt, Artificial Sequence
  targeting sequence with GTCN PAM
cagggccagccccaggacca

SEQ ID NO: 8787 - RNA, 20 nt, Artificial Sequence
  targeting sequence with GTCN PAM
gccagcgguccuuggccccc

SEQ ID NO: 8788 - RNA, 20 nt, Artificial Sequence
  targeting sequence with GTCN PAM
uuggcccccacggccacccu

SEQ ID NO: 8789 - RNA, 20 nt, Artificial Sequence
  targeting sequence with GTCN PAM
uauaguugcagaacuguggg

SEQ ID NO: 8790 - RNA, 20 nt, Artificial Sequence
  targeting sequence with GTCN PAM
cacccccgugucuuauaguu

SEQ ID NO: 8791 - RNA, 20 nt, Artificial Sequence
  targeting sequence with GTCN PAM
cugaucaugagaacgucugc

SEQ ID NO: 8792 - RNA, 20 nt, Artificial Sequence
  targeting sequence with GTCN PAM
gcugggcugguagaugacgg

SEQ ID NO: 8793 - RNA, 20 nt, Artificial Sequence
  targeting sequence with GTCN PAM
ucuaccagcccagcagacgu

SEQ ID NO: 8794 - RNA, 20 nt, Artificial Sequence
  targeting sequence with GTCN PAM
cugcucacgcguauuuccua

SEQ ID NO: 8795 - RNA, 20 nt, Artificial Sequence
  targeting sequence with GTCN PAM
cagaucucuaaaccaugcca

SEQ ID NO: 8796 - RNA, 20 nt, Artificial Sequence
  targeting sequence with GTCN PAM
uccagaaagcagcagaguga

SEQ ID NO: 8797 - RNA, 20 nt, Artificial Sequence
  targeting sequence with GTCN PAM
ucacucugcugcuuucugga

SEQ ID NO: 8798 - RNA, 20 nt, Artificial Sequence
  targeting sequence with GTCN PAM
uccucacuccucccucccca

SEQ ID NO: 8799 - RNA, 20 nt, Artificial Sequence
  targeting sequence with GTCN PAM
gaggagugaguagccacggu

SEQ ID NO: 8800 - RNA, 20 nt, Artificial Sequence
  targeting sequence with GTCN PAM
ggcaguggcucacaggccac

SEQ ID NO: 8801 - RNA, 20 nt, Artificial Sequence
  targeting sequence with GTCN PAM
cugagccgccggcccagguu

SEQ ID NO: 8802 - RNA, 20 nt, Artificial Sequence
  targeting sequence with GTCN PAM
gcagggucccaccguccaac

SEQ ID NO: 8803 - RNA, 20 nt, Artificial Sequence
  targeting sequence with GTCN PAM
caccguccaacgggccacuc

SEQ ID NO: 8804 - RNA, 20 nt, Artificial Sequence
  targeting sequence with GTCN PAM
aacgggccacucaggggcuc

SEQ ID NO: 8805 - RNA, 20 nt, Artificial Sequence
  targeting sequence with GTCN PAM
ccuggcagauugagccccug

SEQ ID NO: 8806 - RNA, 20 nt, Artificial Sequence
  targeting sequence with GTCN PAM
caggcacccagcagggcaca

SEQ ID NO: 8807 - RNA, 20 nt, Artificial Sequence
  targeting sequence with GTCN PAM
gcacggcugugcccugcugg

SEQ ID NO: 8808 - RNA, 20 nt, Artificial Sequence
  targeting sequence with GTCN PAM
ggaggcucagguggggcugg

SEQ ID NO: 8809 - RNA, 20 nt, Artificial Sequence
  targeting sequence with GTCN PAM
cagccccaccugagccucca

SEQ ID NO: 8810 - RNA, 20 nt, Artificial Sequence
  targeting sequence with GTCN PAM
cugugcuggcaaggaggaug

SEQ ID NO: 8811 - RNA, 20 nt, Artificial Sequence
  targeting sequence with GTCN PAM
ccaggcccacgugggcucag

SEQ ID NO: 8812 - RNA, 20 nt, Artificial Sequence
  targeting sequence with GTCN PAM
ccuggaggaugcugagguca

SEQ ID NO: 8813 - RNA, 20 nt, Artificial Sequence
  targeting sequence with GTCN PAM
gcuuccaggagcaauguuug

SEQ ID NO: 8814 - RNA, 20 nt, Artificial Sequence
  targeting sequence with GTCN PAM
uugguggcuuuagugaucau

SEQ ID NO: 8815 - RNA, 20 nt, Artificial Sequence
  targeting sequence with GTCN PAM
ccugugcauguggagugaug

SEQ ID NO: 8816 - RNA, 20 nt, Artificial Sequence
  targeting sequence with GTCN PAM
ucgcggcccaggcacuggga

SEQ ID NO: 8817 - RNA, 20 nt, Artificial Sequence
  targeting sequence with GTCN PAM
gggcugcccauggcacaguu

SEQ ID NO: 8818 - RNA, 20 nt, Artificial Sequence
  targeting sequence with GTCN PAM
auaacugugccaugggcagc

SEQ ID NO: 8819 - RNA, 20 nt, Artificial Sequence
  targeting sequence with GTCN PAM
uggucuauaacugugccaug

SEQ ID NO: 8820 - RNA, 20 nt, Artificial Sequence
  targeting sequence with GTCN PAM
ccccagucauggucuauaac

SEQ ID NO: 8821 - RNA, 20 nt, Artificial Sequence
  targeting sequence with GTCN PAM
gccccgcucugcggugcaug

SEQ ID NO: 8822 - RNA, 20 nt, Artificial Sequence
  targeting sequence with GTCN PAM
ugggcucagggcuguccagg

SEQ ID NO: 8823 - RNA, 20 nt, Artificial Sequence
  targeting sequence with GTCN PAM
aggaaucgggcuggccgccc

SEQ ID NO: 8824 - RNA, 20 nt, Artificial Sequence
  targeting sequence with GTCN PAM
ugugcagcugcaaaagggca

SEQ ID NO: 8825 - RNA, 20 nt, Artificial Sequence
  targeting sequence with GTCN PAM
ccccacucaccaccaccugg

SEQ ID NO: 8826 - RNA, 20 nt, Artificial Sequence
  targeting sequence with GTCN PAM
cagcguacaacagacucauu

SEQ ID NO: 8827 - RNA, 20 nt, Artificial Sequence
  targeting sequence with GTCN PAM
guuguacgcugugaccaggu

SEQ ID NO: 8828 - RNA, 20 nt, Artificial Sequence
  targeting sequence with GTCN PAM
guuuacucagcaaauaugua

SEQ ID NO: 8829 - RNA, 20 nt, Artificial Sequence
  targeting sequence with GTCN PAM
cuguggcuggcagaugugac

SEQ ID NO: 8830 - RNA, 20 nt, Artificial Sequence
  targeting sequence with GTCN PAM
caucugccagccacagggac

SEQ ID NO: 8831 - RNA, 20 nt, Artificial Sequence
  targeting sequence with GTCN PAM
ggaagccucguggcaggggc

SEQ ID NO: 8832 - RNA, 20 nt, Artificial Sequence
  targeting sequence with GTCN PAM
cacgugguggccacgugccg

SEQ ID NO: 8833 - RNA, 20 nt, Artificial Sequence
  targeting sequence with GTCN PAM
uggaggcgugccagccaccc

SEQ ID NO: 8834 - RNA, 20 nt, Artificial Sequence
  targeting sequence with GTCN PAM
acgcuucccacccaggacgc

SEQ ID NO: 8835 - RNA, 20 nt, Artificial Sequence
  targeting sequence with GTCN PAM
ugggugggaagcguugacga

SEQ ID NO: 8836 - RNA, 20 nt, Artificial Sequence
  targeting sequence with GTCN PAM
agaaaggagcugcgucccca

SEQ ID NO: 8837 - RNA, 20 nt, Artificial Sequence
  targeting sequence with GTCN PAM
uugcaacuagccccgccccc

SEQ ID NO: 8838 - RNA, 20 nt, Artificial Sequence
  targeting sequence with GTCN PAM
agagcuaagcacaaguccag

SEQ ID NO: 8839 - RNA, 20 nt, Artificial Sequence
  targeting sequence with GTCN PAM
agcccuguguugugugaucu

SEQ ID NO: 8840 - RNA, 20 nt, Artificial Sequence
  targeting sequence with GTCN PAM
gggggcaguccugagggcuc

SEQ ID NO: 8841 - RNA, 20 nt, Artificial Sequence
  targeting sequence with GTCN PAM
ugagggcucugcagaggaaa

SEQ ID NO: 8842 - RNA, 20 nt, Artificial Sequence
  targeting sequence with GTCN PAM
cccucuccuucuguuuccuc

SEQ ID NO: 8843 - RNA, 20 nt, Artificial Sequence
  targeting sequence with GTCN PAM
cugggccucaccuuucccaa

SEQ ID NO: 8844 - RNA, 20 nt, Artificial Sequence
  targeting sequence with GTCN PAM
cugccccucccccaggccuc

SEQ ID NO: 8845 - RNA, 20 nt, Artificial Sequence
  targeting sequence with GTCN PAM
accuuagugaucgcucugag

SEQ ID NO: 8846 - RNA, 20 nt, Artificial Sequence
  targeting sequence with GTCN PAM
auaccucccagcucagagcg

SEQ ID NO: 8847 - RNA, 20 nt, Artificial Sequence
  targeting sequence with GTCN PAM
cauauuuugucccaaggccu

SEQ ID NO: 8848 - RNA, 20 nt, Artificial Sequence
  targeting sequence with GTCN PAM
ugcucucaucugguguagaa

SEQ ID NO: 8849 - RNA, 20 nt, Artificial Sequence
  targeting sequence with GTCN PAM
cuguccugcucucaucuggu

SEQ ID NO: 8850 - RNA, 20 nt, Artificial Sequence
  targeting sequence with GTCN PAM
cugaggggaaucagucccug

SEQ ID NO: 8851 - RNA, 20 nt, Artificial Sequence
  targeting sequence with GTCN PAM
agaccauuugcugaccacga

SEQ ID NO: 8852 - RNA, 20 nt, Artificial Sequence
  targeting sequence with GTCN PAM
ggacaacuggagccuuccug

SEQ ID NO: 8853 - RNA, 20 nt, Artificial Sequence
  targeting sequence with GTCN PAM
gcaaauggucuggacaacug

SEQ ID NO: 8854 - RNA, 20 nt, Artificial Sequence
  targeting sequence with GTCN PAM
gcuuugcggcuggcuggggc

SEQ ID NO: 8855 - RNA, 20 nt, Artificial Sequence
  targeting sequence with GTCN PAM
uccuggccccagcccacccg

SEQ ID NO: 8856 - RNA, 20 nt, Artificial Sequence
  targeting sequence with GTCN PAM
cugugugaacagcaggcagc

SEQ ID NO: 8857 - RNA, 20 nt, Artificial Sequence
  targeting sequence with GTCN PAM
uaguggugccguggucucug

SEQ ID NO: 8858 - RNA, 20 nt, Artificial Sequence
  targeting sequence with GTCN PAM
gagaauuacaguaacuagcc

SEQ ID NO: 8859 - RNA, 20 nt, Artificial Sequence
  targeting sequence with GTCN PAM
cauuuuauagauggggaaac

SEQ ID NO: 8860 - RNA, 20 nt, Artificial Sequence
  targeting sequence with GTCN PAM
cggugcgaggccucaccaaa

SEQ ID NO: 8861 - RNA, 20 nt, Artificial Sequence
  targeting sequence with GTCN PAM
gcacaguggcccuguuucug

SEQ ID NO: 8862 - RNA, 20 nt, Artificial Sequence
  targeting sequence with GTCN PAM
uccagcuguaccagcugccu

SEQ ID NO: 8863 - RNA, 20 nt, Artificial Sequence
  targeting sequence with GTCN PAM
uuaagguagugagcugccug

SEQ ID NO: 8864 - RNA, 20 nt, Artificial Sequence
  targeting sequence with GTCN PAM
uagauggugaaauuggccuu

SEQ ID NO: 8865 - RNA, 20 nt, Artificial Sequence
  targeting sequence with GTCN PAM
aggccaauuucaccaucuac

SEQ ID NO: 8866 - RNA, 20 nt, Artificial Sequence
  targeting sequence with GTCN PAM
augggcggaacaucgucaag

SEQ ID NO: 8867 - RNA, 20 nt, Artificial Sequence
  targeting sequence with GTCN PAM
gugagggucaaugggcggaa

SEQ ID NO: 8868 - RNA, 20 nt, Artificial Sequence
  targeting sequence with GTCN PAM
cguggucuggaauggauggg

SEQ ID NO: 8869 - RNA, 20 nt, Artificial Sequence
  targeting sequence with GTCN PAM
ggaauggaugggggagccag

SEQ ID NO: 8870 - RNA, 20 nt, Artificial Sequence
  targeting sequence with GTCN PAM
uccccuggcucccccaucca

SEQ ID NO: 8871 - RNA, 20 nt, Artificial Sequence
  targeting sequence with GTCN PAM
cucggcaggagguugcagua

SEQ ID NO: 8872 - RNA, 20 nt, Artificial Sequence
  targeting sequence with GTCN PAM
ccagauugccuacugcaacc

SEQ ID NO: 8873 - RNA, 20 nt, Artificial Sequence
  targeting sequence with GTCN PAM
caggcccugccuuuggucac

SEQ ID NO: 8874 - RNA, 20 nt, Artificial Sequence
  targeting sequence with GTCN PAM
caggccaucuccaugccacu

SEQ ID NO: 8875 - RNA, 20 nt, Artificial Sequence
  targeting sequence with GTCN PAM
aggcuaugcuccucacagcc

SEQ ID NO: 8876 - RNA, 20 nt, Artificial Sequence
  targeting sequence with GTCN PAM
cgagcugggucuugccuccc

SEQ ID NO: 8877 - RNA, 20 nt, Artificial Sequence
  targeting sequence with GTCN PAM
ugccucccccaggacucacu

SEQ ID NO: 8878 - RNA, 20 nt, Artificial Sequence
  targeting sequence with GTCN PAM
ugggggaggcaagacccagc

SEQ ID NO: 8879 - RNA, 20 nt, Artificial Sequence
  targeting sequence with GTCN PAM
ugccuuccgagaucgaugug

SEQ ID NO: 8880 - RNA, 20 nt, Artificial Sequence
  targeting sequence with GTCN PAM
uggcaggacagcggcugggg

SEQ ID NO: 8881 - RNA, 20 nt, Artificial Sequence
  targeting sequence with GTCN PAM
ugccaugaccguccugccuu

SEQ ID NO: 8882 - RNA, 20 nt, Artificial Sequence
  targeting sequence with GTCN PAM
agaaaugcugcuggcuggaa

SEQ ID NO: 8883 - RNA, 20 nt, Artificial Sequence
  targeting sequence with GTCN PAM
ugcugcaaggugcaccuggg

SEQ ID NO: 8884 - RNA, 20 nt, Artificial Sequence
  targeting sequence with GTCN PAM
ggacccaggucagcuccucc

SEQ ID NO: 8885 - RNA, 20 nt, Artificial Sequence
  targeting sequence with GTCN PAM
ugacccugcggugccacccc

SEQ ID NO: 8886 - RNA, 20 nt, Artificial Sequence
  targeting sequence with GTCN PAM
gcuccucccacccccacagc

SEQ ID NO: 8887 - RNA, 20 nt, Artificial Sequence
  targeting sequence with GTCN PAM
agcuguugcugguguccagc

SEQ ID NO: 8888 - RNA, 20 nt, Artificial Sequence
  targeting sequence with GTCN PAM
agccucaccgcgucuccagg

SEQ ID NO: 8889 - RNA, 20 nt, Artificial Sequence
  targeting sequence with GTCN PAM
ccagggcacaccagccgcag

SEQ ID NO: 8890 - RNA, 20 nt, Artificial Sequence
  targeting sequence with GTCN PAM
gccgcacccacgcagucccc

SEQ ID NO: 8891 - RNA, 20 nt, Artificial Sequence
  targeting sequence with GTCN PAM
ccacagguggagugcacguu

SEQ ID NO: 8892 - RNA, 20 nt, Artificial Sequence
  targeting sequence with GTCN PAM
ccgccugcaacgugcacucc

SEQ ID NO: 8893 - RNA, 20 nt, Artificial Sequence
  targeting sequence with GTCN PAM
cauugagcugggcccccacc

SEQ ID NO: 8894 - RNA, 20 nt, Artificial Sequence
  targeting sequence with GTCN PAM
caccaggugaggccagagcc

SEQ ID NO: 8895 - RNA, 20 nt, Artificial Sequence
  targeting sequence with GTCN PAM
ucagguaaagguaaccggag

SEQ ID NO: 8896 - RNA, 20 nt, Artificial Sequence
  targeting sequence with GTCN PAM
gcugggucaaacugcaugac

SEQ ID NO: 8897 - RNA, 20 nt, Artificial Sequence
  targeting sequence with GTCN PAM
aacugcaugacauggugcac

SEQ ID NO: 8898 - RNA, 20 nt, Artificial Sequence
  targeting sequence with GTCN PAM
ugcaguuugacccagcagac

SEQ ID NO: 8899 - RNA, 20 nt, Artificial Sequence
  targeting sequence with GTCN PAM
ccacccgccugcucaccacc

SEQ ID NO: 8900 - RNA, 20 nt, Artificial Sequence
  targeting sequence with GTCN PAM
ccuggguuuggccuccccug

SEQ ID NO: 8901 - RNA, 20 nt, Artificial Sequence
  targeting sequence with GTCN PAM
gggggcucugccuccccauc

SEQ ID NO: 8902 - RNA, 20 nt, Artificial Sequence
  targeting sequence with GTCN PAM
uggacccuucaggaggggug

SEQ ID NO: 8903 - RNA, 20 nt, Artificial Sequence
  targeting sequence with GTCN PAM
aagacaggauggggaggcag

SEQ ID NO: 8904 - RNA, 20 nt, Artificial Sequence
  targeting sequence with GTCN PAM
cgggcgugcaggggagggca

SEQ ID NO: 8905 - RNA, 20 nt, Artificial Sequence
  targeting sequence with GTCN PAM
ccaaggcaucccgcccugug

SEQ ID NO: 8906 - RNA, 20 nt, Artificial Sequence
  targeting sequence with GTCN PAM
aagccagaauccaaacccaa

SEQ ID NO: 8907 - RNA, 20 nt, Artificial Sequence
  targeting sequence with GTCN PAM
uauuuaaugcucauggcccg

SEQ ID NO: 8908 - RNA, 20 nt, Artificial Sequence
  targeting sequence with GTCN PAM
ggcccggggaagcugcuagg

SEQ ID NO: 8909 - RNA, 20 nt, Artificial Sequence
  targeting sequence with GTCN PAM
cauuccuccccccgacgccc

SEQ ID NO: 8910 - RNA, 20 nt, Artificial Sequence
  targeting sequence with GTCN PAM
gggggaggaaugagacgugc

SEQ ID NO: 8911 - RNA, 20 nt, Artificial Sequence
  targeting sequence with GTCN PAM
ggcaggccugguauugcauu

SEQ ID NO: 8912 - RNA, 20 nt, Artificial Sequence
  targeting sequence with GTCN PAM
aaggcuuaaggcuaggggug

SEQ ID NO: 8913 - RNA, 20 nt, Artificial Sequence
  targeting sequence with GTCN PAM
uccuccucccugcaccuugg

SEQ ID NO: 8914 - RNA, 20 nt, Artificial Sequence
  targeting sequence with GTCN PAM
cucagagccagagaagcuuc

SEQ ID NO: 8915 - RNA, 20 nt, Artificial Sequence
  targeting sequence with GTCN PAM
uccugaggaugacaauaccg

SEQ ID NO: 8916 - RNA, 20 nt, Artificial Sequence
  targeting sequence with GTCN PAM
uccucaggaggacacgcaga

SEQ ID NO: 8917 - RNA, 20 nt, Artificial Sequence
  targeting sequence with GTCN PAM
gagccccaccaaacucugcu

SEQ ID NO: 8918 - RNA, 20 nt, Artificial Sequence
  targeting sequence with GTCN PAM
ugucugggcccugccaggcc

SEQ ID NO: 8919 - RNA, 20 nt, Artificial Sequence
  targeting sequence with GTCN PAM
gggcccugccaggccccagg

SEQ ID NO: 8920 - RNA, 20 nt, Artificial Sequence
  targeting sequence with GTCN PAM
ggacaccucccaggccaguu

SEQ ID NO: 8921 - RNA, 20 nt, Artificial Sequence
  targeting sequence with GTCN PAM
ggaccacuggccccaucuca

SEQ ID NO: 8922 - RNA, 20 nt, Artificial Sequence
  targeting sequence with GTCN PAM
uggugaucuaacccggacaa

SEQ ID NO: 8923 - RNA, 20 nt, Artificial Sequence
  targeting sequence with GTCN PAM
ggguuagaucaccaggaccu

SEQ ID NO: 8924 - RNA, 20 nt, Artificial Sequence
  targeting sequence with GTCN PAM
cagccugagacacuccuguc

SEQ ID NO: 8925 - RNA, 20 nt, Artificial Sequence
  targeting sequence with GTCN PAM
caggcugggacaaagcccau

SEQ ID NO: 8926 - RNA, 20 nt, Artificial Sequence
  targeting sequence with GTCN PAM
cacguggccucuuggcggag

SEQ ID NO: 8927 - RNA, 20 nt, Artificial Sequence
  targeting sequence with GTCN PAM
aggcguccaguggacacuca

SEQ ID NO: 8928 - RNA, 20 nt, Artificial Sequence
  targeting sequence with GTCN PAM
aguggacacucaagucauuu

SEQ ID NO: 8929 - RNA, 20 nt, Artificial Sequence
  targeting sequence with GTCN PAM
acuggacgccuggacauagg

SEQ ID NO: 8930 - RNA, 20 nt, Artificial Sequence
  targeting sequence with GTCN PAM
uuuccacuccuucaaucauu

SEQ ID NO: 8931 - RNA, 20 nt, Artificial Sequence
  targeting sequence with GTCN PAM
ccagccaacccugcccugcu

SEQ ID NO: 8932 - RNA, 20 nt, Artificial Sequence
  targeting sequence with GTCN PAM
cacagcaggagcuggcccau

SEQ ID NO: 8933 - RNA, 20 nt, Artificial Sequence
  targeting sequence with GTCN PAM
acccagagccuaaagggcau

SEQ ID NO: 8934 - RNA, 20 nt, Artificial Sequence
  targeting sequence with GTCN PAM
gcccaggcaguggguugggg

SEQ ID NO: 8935 - RNA, 20 nt, Artificial Sequence
  targeting sequence with GTCN PAM
cccccaacccacugccuggg

SEQ ID NO: 8936 - RNA, 20 nt, Artificial Sequence
  targeting sequence with GTCN PAM
cccaagagggagcaggagag

SEQ ID NO: 8937 - RNA, 20 nt, Artificial Sequence
  targeting sequence with GTCN PAM
agggcugcaccugggggucu

SEQ ID NO: 8938 - RNA, 20 nt, Artificial Sequence
  targeting sequence with GTCN PAM
ggcccaggcuccgccauguc

SEQ ID NO: 8939 - RNA, 20 nt, Artificial Sequence
  targeting sequence with GTCN PAM
guccugccccagagcaggga

SEQ ID NO: 8940 - RNA, 20 nt, Artificial Sequence
  targeting sequence with GTCN PAM
ugccccagagcagggaaacu

SEQ ID NO: 8941 - RNA, 20 nt, Artificial Sequence
  targeting sequence with GTCN PAM
agggcuguaagcuguugugg

SEQ ID NO: 8942 - RNA, 20 nt, Artificial Sequence
  targeting sequence with GTCN PAM
aagggccagcaaauggcaga

SEQ ID NO: 8943 - RNA, 20 nt, Artificial Sequence
  targeting sequence with GTCN PAM
ggcuggaccuguagcagccc

SEQ ID NO: 8944 - RNA, 20 nt, Artificial Sequence
  targeting sequence with GTCN PAM
agccugacccuuuguuuucu

SEQ ID NO: 8945 - RNA, 20 nt, Artificial Sequence
  targeting sequence with GTCN PAM
guacacagggcugcuacagg

SEQ ID NO: 8946 - RNA, 20 nt, Artificial Sequence
  targeting sequence with GTCN PAM
gucuguacacagggcugcua

SEQ ID NO: 8947 - RNA, 20 nt, Artificial Sequence
  targeting sequence with GTCN PAM
acgggaggcuucucaaggua

SEQ ID NO: 8948 - RNA, 20 nt, Artificial Sequence
  targeting sequence with GTCN PAM
uccugggcacggucaacggg

SEQ ID NO: 8949 - RNA, 20 nt, Artificial Sequence
  targeting sequence with GTCN PAM
acaacuacacagcggucuuc

SEQ ID NO: 8950 - RNA, 20 nt, Artificial Sequence
  targeting sequence with GTCN PAM
auccugcagccccugaaggc

SEQ ID NO: 8951 - RNA, 20 nt, Artificial Sequence
  targeting sequence with GTCN PAM
agcugcucuggcuggagcug

SEQ ID NO: 8952 - RNA, 20 nt, Artificial Sequence
  targeting sequence with GTCN PAM
gaucccagcuccagaaccuu

SEQ ID NO: 8953 - RNA, 20 nt, Artificial Sequence
  targeting sequence with GTCN PAM
uguuccuacuuuauauccuc

SEQ ID NO: 8954 - RNA, 20 nt, Artificial Sequence
  targeting sequence with GTCN PAM
cguuuguguuugggccucag

SEQ ID NO: 8955 - RNA, 20 nt, Artificial Sequence
  targeting sequence with GTCN PAM
gggcaggccugggcuugggg

SEQ ID NO: 8956 - RNA, 20 nt, Artificial Sequence
  targeting sequence with GTCN PAM
gguuugauuuuaaagagucc

SEQ ID NO: 8957 - RNA, 20 nt, Artificial Sequence
  targeting sequence with GTCN PAM
agggaggccggccaggguga

SEQ ID NO: 8958 - RNA, 20 nt, Artificial Sequence
  targeting sequence with GTCN PAM
acaccagaugaccggaggcc

SEQ ID NO: 8959 - RNA, 20 nt, Artificial Sequence
  targeting sequence with GTCN PAM
ucugguguggacuccucugc

SEQ ID NO: 8960 - RNA, 20 nt, Artificial Sequence
  targeting sequence with GTCN PAM
gccucagcuuaacccgcugg

SEQ ID NO: 8961 - RNA, 20 nt, Artificial Sequence
  targeting sequence with GTCN PAM
cucuugccucggcuguuuuc

SEQ ID NO: 8962 - RNA, 20 nt, Artificial Sequence
  targeting sequence with GTCN PAM
ccacagcaaccaugggcuuu

SEQ ID NO: 8963 - RNA, 20 nt, Artificial Sequence
  targeting sequence with GTCN PAM
gcucugacccuaggaccacc

SEQ ID NO: 8964 - RNA, 20 nt, Artificial Sequence
  targeting sequence with GTCN PAM
gagcagacacccggcaggag

SEQ ID NO: 8965 - RNA, 20 nt, Artificial Sequence
  targeting sequence with GTCN PAM
uagggucagagcagacaccc

SEQ ID NO: 8966 - RNA, 20 nt, Artificial Sequence
  targeting sequence with GTCN PAM
ugcaagcugcuggggcuuug

SEQ ID NO: 8967 - RNA, 20 nt, Artificial Sequence
  targeting sequence with GTCN PAM
cccuguaaugugggcagaug

SEQ ID NO: 8968 - RNA, 20 nt, Artificial Sequence
  targeting sequence with GTCN PAM
gaaugcacagucccaugucc

SEQ ID NO: 8969 - RNA, 20 nt, Artificial Sequence
  targeting sequence with GTCN PAM
cauguccacaacagcccagc

SEQ ID NO: 8970 - RNA, 20 nt, Artificial Sequence
  targeting sequence with GTCN PAM
acaacagcccagcaucaccc

SEQ ID NO: 8971 - RNA, 20 nt, Artificial Sequence
  targeting sequence with GTCN PAM
gggcuguucccugaacuugc

SEQ ID NO: 8972 - RNA, 20 nt, Artificial Sequence
  targeting sequence with GTCN PAM
ugguauguucaaagguuccu

SEQ ID NO: 8973 - RNA, 20 nt, Artificial Sequence
  targeting sequence with GTCN PAM
cuuccuggaggccuguuuuc

SEQ ID NO: 8974 - RNA, 20 nt, Artificial Sequence
  targeting sequence with GTCN PAM
cagggucacuuccuggaggc

SEQ ID NO: 8975 - RNA, 20 nt, Artificial Sequence
  targeting sequence with GTCN PAM
uugcggaguugcacaguuau

SEQ ID NO: 8976 - RNA, 20 nt, Artificial Sequence
  targeting sequence with GTCN PAM
ccuuuucacuccucugcacc

SEQ ID NO: 8977 - RNA, 20 nt, Artificial Sequence
  targeting sequence with GTCN PAM
gaugggacugagugcgucca

SEQ ID NO: 8978 - RNA, 20 nt, Artificial Sequence
  targeting sequence with GTCN PAM
cauccgacacaugugugugu

SEQ ID NO: 8979 - RNA, 20 nt, Artificial Sequence
  targeting sequence with GTCN PAM
aucauggcuuaucauccagg

SEQ ID NO: 8980 - RNA, 20 nt, Artificial Sequence
  targeting sequence with GTCN PAM
cugcgggaugggggcugcuc

SEQ ID NO: 8981 - RNA, 20 nt, Artificial Sequence
  targeting sequence with GTCN PAM
caggaugucaugggcccauu

SEQ ID NO: 8982 - RNA, 20 nt, Artificial Sequence
  targeting sequence with GTCN PAM
ugggcccauuuugguaaaac

SEQ ID NO: 8983 - RNA, 20 nt, Artificial Sequence
  targeting sequence with GTCN PAM
caacaguaaacauaauaaca

SEQ ID NO: 8984 - RNA, 20 nt, Artificial Sequence
  targeting sequence with GTCN PAM
guucccaguaaauguggccu

SEQ ID NO: 8985 - RNA, 20 nt, Artificial Sequence
  targeting sequence with GTCN PAM
gugcacuggccugguacagu

SEQ ID NO: 8986 - RNA, 20 nt, Artificial Sequence
  targeting sequence with GTCN PAM
uaucucacagauggggaaac

SEQ ID NO: 8987 - RNA, 20 nt, Artificial Sequence
  targeting sequence with GTCN PAM
cgcccccagggcugacccag

SEQ ID NO: 8988 - RNA, 20 nt, Artificial Sequence
  targeting sequence with GTCN PAM
gcccugggggcgugacauug

SEQ ID NO: 8989 - RNA, 20 nt, Artificial Sequence
  targeting sequence with GTCN PAM
gcuaccugggucagcccugg

SEQ ID NO: 8990 - RNA, 20 nt, Artificial Sequence
  targeting sequence with GTCN PAM
aaaugcagcugaggcauggg

SEQ ID NO: 8991 - RNA, 20 nt, Artificial Sequence
  targeting sequence with GTCN PAM
ugcucugagccucugauguc

SEQ ID NO: 8992 - RNA, 20 nt, Artificial Sequence
  targeting sequence with GTCN PAM
ccggaaggcagcauuggaac

SEQ ID NO: 8993 - RNA, 20 nt, Artificial Sequence
  targeting sequence with GTCN PAM
cccgccgucauccuccggaa

SEQ ID NO: 8994 - RNA, 20 nt, Artificial Sequence
  targeting sequence with GTCN PAM
aggaguucuaggcuguagug

SEQ ID NO: 8995 - RNA, 20 nt, Artificial Sequence
  targeting sequence with GTCN PAM
acacuaaguucagcaucaau

SEQ ID NO: 8996 - RNA, 20 nt, Artificial Sequence
  targeting sequence with GTCN PAM
ccauauugaugcugaacuua

SEQ ID NO: 8997 - RNA, 20 nt, Artificial Sequence
  targeting sequence with GTCN PAM
cccgcucccgggaggucacc

SEQ ID NO: 8998 - RNA, 20 nt, Artificial Sequence
  targeting sequence with GTCN PAM
gaaacggagcagguuaaagu

SEQ ID NO: 8999 - RNA, 20 nt, Artificial Sequence
  targeting sequence with GTCN PAM
aggaaguguuagccgauacu

SEQ ID NO: 9000 - RNA, 20 nt, Artificial Sequence
  targeting sequence with GTCN PAM
gaaacacaauaguaucggcu

SEQ ID NO: 9001 - RNA, 20 nt, Artificial Sequence
  targeting sequence with GTCN PAM
ugucugaaacacaauaguau

SEQ ID NO: 9002 - RNA, 20 nt, Artificial Sequence
  targeting sequence with GTCN PAM
aggugagaggauggcugcuc

SEQ ID NO: 9003 - RNA, 20 nt, Artificial Sequence
  targeting sequence with GTCN PAM
uggaaaaugaagagggcugg

SEQ ID NO: 9004 - RNA, 20 nt, Artificial Sequence
  targeting sequence with GTCN PAM
guguagggggcaagaguggu

SEQ ID NO: 9005 - RNA, 20 nt, Artificial Sequence
  targeting sequence with GTCN PAM
cccccgauucaagcccuccc

SEQ ID NO: 9006 - RNA, 20 nt, Artificial Sequence
  targeting sequence with GTCN PAM
uggaaaccaugggagggcuu

SEQ ID NO: 9007 - RNA, 20 nt, Artificial Sequence
  targeting sequence with GTCN PAM
ccucaucuucuaacuccauu

SEQ ID NO: 9008 - RNA, 20 nt, Artificial Sequence
  targeting sequence with GTCN PAM
ugaggcaggaacgagcuugu

SEQ ID NO: 9009 - RNA, 20 nt, Artificial Sequence
  targeting sequence with GTCN PAM
gggcuggcacugagaggagg

SEQ ID NO: 9010 - RNA, 20 nt, Artificial Sequence
  targeting sequence with GTCN PAM
gguaggucagggcuggcacu

SEQ ID NO: 9011 - RNA, 20 nt, Artificial Sequence
  targeting sequence with GTCN PAM
ccaacuguaacacacacagg

SEQ ID NO: 9012 - RNA, 20 nt, Artificial Sequence
  targeting sequence with GTCN PAM
ccccagcugccccaaccagg

SEQ ID NO: 9013 - RNA, 20 nt, Artificial Sequence
  targeting sequence with GTCN PAM
caccccucagcaauccugca

SEQ ID NO: 9014 - RNA, 20 nt, Artificial Sequence
  targeting sequence with GTCN PAM
ccuuccagaacuuauguucc

SEQ ID NO: 9015 - RNA, 20 nt, Artificial Sequence
  targeting sequence with GTCN PAM
ucuggggccucccagguguc

SEQ ID NO: 9016 - RNA, 20 nt, Artificial Sequence
  targeting sequence with GTCN PAM
ggguaugcccaaagguguca

SEQ ID NO: 9017 - RNA, 20 nt, Artificial Sequence
  targeting sequence with GTCN PAM
ugggaaaaggcggaccaggc

SEQ ID NO: 9018 - RNA, 20 nt, Artificial Sequence
  targeting sequence with GTCN PAM
gccuuuucccaggaccccac

SEQ ID NO: 9019 - RNA, 20 nt, Artificial Sequence
  targeting sequence with GTCN PAM
gcgcggggugggggaggggg

SEQ ID NO: 9020 - RNA, 20 nt, Artificial Sequence
  targeting sequence with GTCN PAM
gcugcuccgaaugaucugug

SEQ ID NO: 9021 - RNA, 20 nt, Artificial Sequence
  targeting sequence with GTCN PAM
cccucccccagccugcaucc

SEQ ID NO: 9022 - RNA, 20 nt, Artificial Sequence
  targeting sequence with GTCN PAM
cgugucccccucccccagcc

SEQ ID NO: 9023 - RNA, 20 nt, Artificial Sequence
  targeting sequence with GTCN PAM
ccgagucccgugucccccuc

SEQ ID NO: 9024 - RNA, 20 nt, Artificial Sequence
  targeting sequence with GTCN PAM
aguccccgagucccgugucc

SEQ ID NO: 9025 - RNA, 20 nt, Artificial Sequence
  targeting sequence with GTCN PAM
ugagcaugcuggccucggcu

SEQ ID NO: 9026 - RNA, 20 nt, Artificial Sequence
  targeting sequence with GTCN PAM
ccagggacaguuagccucac

SEQ ID NO: 9027 - RNA, 20 nt, Artificial Sequence
  targeting sequence with GTCN PAM
cuggagaccaaguucagccg

SEQ ID NO: 9028 - RNA, 20 nt, Artificial Sequence
  targeting sequence with GTCN PAM
ggggguauuuugggccugug

SEQ ID NO: 9029 - RNA, 20 nt, Artificial Sequence
  targeting sequence with GTCN PAM
uccuuaaaggcuaaugagca

SEQ ID NO: 9030 - RNA, 20 nt, Artificial Sequence
  targeting sequence with GTCN PAM
uucaaaacucaaguucuccu

SEQ ID NO: 9031 - RNA, 20 nt, Artificial Sequence
  targeting sequence with GTCN PAM
cagggccaucuuucucucac

SEQ ID NO: 9032 - RNA, 20 nt, Artificial Sequence
  targeting sequence with GTCN PAM
gacccucccuaccuacaacc

SEQ ID NO: 9033 - RNA, 20 nt, Artificial Sequence
  targeting sequence with GTCN PAM
gaccagcuuugugugagaga

SEQ ID NO: 9034 - RNA, 20 nt, Artificial Sequence
  targeting sequence with GTCN PAM
ucgggaucaagccccagcag

SEQ ID NO: 9035 - RNA, 20 nt, Artificial Sequence
  targeting sequence with GTCN PAM
agccucgcauucaaggccuu

SEQ ID NO: 9036 - RNA, 20 nt, Artificial Sequence
  targeting sequence with GTCN PAM
cccuccucccucugccccac

SEQ ID NO: 9037 - RNA, 20 nt, Artificial Sequence
  targeting sequence with GTCN PAM
ccacagguccuggaaugugc

SEQ ID NO: 9038 - RNA, 20 nt, Artificial Sequence
  targeting sequence with GTCN PAM
uggaaugugcccacaccuca

SEQ ID NO: 9039 - RNA, 20 nt, Artificial Sequence
  targeting sequence with GTCN PAM
cuucagcagccaaugcccau

SEQ ID NO: 9040 - RNA, 20 nt, Artificial Sequence
  targeting sequence with GTCN PAM
ggacccaugcuguucccucu

SEQ ID NO: 9041 - RNA, 20 nt, Artificial Sequence
  targeting sequence with GTCN PAM
agacaccgggggcgcugaag

SEQ ID NO: 9042 - RNA, 20 nt, Artificial Sequence
  targeting sequence with GTCN PAM
gggcaugccuggagagggaa

SEQ ID NO: 9043 - RNA, 20 nt, Artificial Sequence
  targeting sequence with GTCN PAM
cacauuucccauggcagcac

SEQ ID NO: 9044 - RNA, 20 nt, Artificial Sequence
  targeting sequence with GTCN PAM
ugcaugugcugccaugggaa

SEQ ID NO: 9045 - RNA, 20 nt, Artificial Sequence
  targeting sequence with GTCN PAM
aaauuagguuccuuucuuuu

SEQ ID NO: 9046 - RNA, 20 nt, Artificial Sequence
  targeting sequence with GTCN PAM
uucacacuuuagucaaaauu

SEQ ID NO: 9047 - RNA, 20 nt, Artificial Sequence
  targeting sequence with GTCN PAM
gcugcuuucucucuaagucg

SEQ ID NO: 9048 - RNA, 20 nt, Artificial Sequence
  targeting sequence with GTCN PAM
agugacugagagcaacacgg

SEQ ID NO: 9049 - RNA, 20 nt, Artificial Sequence
  targeting sequence with GTCN PAM
cucgacuuagagagaaagca

SEQ ID NO: 9050 - RNA, 20 nt, Artificial Sequence
  targeting sequence with GTCN PAM
gaguuuuaaugggagagugg

SEQ ID NO: 9051 - RNA, 20 nt, Artificial Sequence
  targeting sequence with GTCN PAM
acacaauuacagcugguagu

SEQ ID NO: 9052 - RNA, 20 nt, Artificial Sequence
  targeting sequence with GTCN PAM
gcggcaggaugugaggccug

SEQ ID NO: 9053 - RNA, 20 nt, Artificial Sequence
  targeting sequence with GTCN PAM
cagguacagacugcauggcu

SEQ ID NO: 9054 - RNA, 20 nt, Artificial Sequence
  targeting sequence with GTCN PAM
guaccugugacggaaccgcu

SEQ ID NO: 9055 - RNA, 20 nt, Artificial Sequence
  targeting sequence with GTCN PAM
gguuuccuugccacagagcu

SEQ ID NO: 9056 - RNA, 20 nt, Artificial Sequence
  targeting sequence with GTCN PAM
uaauaccccaaagugaucau

SEQ ID NO: 9057 - RNA, 20 nt, Artificial Sequence
  targeting sequence with GTCN PAM
accucccaaagcgcugggau

SEQ ID NO: 9058 - RNA, 20 nt, Artificial Sequence
  targeting sequence with GTCN PAM
aggcugcagugagcuauaau

SEQ ID NO: 9059 - RNA, 20 nt, Artificial Sequence
  targeting sequence with GTCN PAM
gggugacagagacccugucu

SEQ ID NO: 9060 - RNA, 20 nt, Artificial Sequence
  targeting sequence with GTCN PAM
cccagacuggagugcggugg

SEQ ID NO: 9061 - RNA, 20 nt, Artificial Sequence
  targeting sequence with GTCN PAM
cugucacccagacuggagug

SEQ ID NO: 9062 - RNA, 20 nt, Artificial Sequence
  targeting sequence with GTCN PAM
cgaaaaaauaaaaauaaaaa

SEQ ID NO: 9063 - RNA, 20 nt, Artificial Sequence
  targeting sequence with GTCN PAM
ccuugcaguuuuuuuauuuu

SEQ ID NO: 9064 - RNA, 20 nt, Artificial Sequence
  targeting sequence with GTCN PAM
ccggccaggauguagugagc

SEQ ID NO: 9065 - RNA, 20 nt, Artificial Sequence
  targeting sequence with GTCN PAM
ggaccccccagcuccuccca

SEQ ID NO: 9066 - RNA, 20 nt, Artificial Sequence
  targeting sequence with GTCN PAM
agacagcccaguccccggcc

SEQ ID NO: 9067 - RNA, 20 nt, Artificial Sequence
  targeting sequence with GTCN PAM
gcuuucuuuuccaggagccc

SEQ ID NO: 9068 - RNA, 20 nt, Artificial Sequence
  targeting sequence with GTCN PAM
ggaguuuaguugggaguaaa

SEQ ID NO: 9069 - RNA, 20 nt, Artificial Sequence
  targeting sequence with GTCN PAM
aaacuaagaagccaacauuu

SEQ ID NO: 9070 - RNA, 20 nt, Artificial Sequence
  targeting sequence with GTCN PAM
ccuaguuucucccauugcua

SEQ ID NO: 9071 - RNA, 20 nt, Artificial Sequence
  targeting sequence with GTCN PAM
guacuaucuuuguaacuuuc

SEQ ID NO: 9072 - RNA, 20 nt, Artificial Sequence
  targeting sequence with GTCN PAM
caucuccugugcagcucaac

SEQ ID NO: 9073 - RNA, 20 nt, Artificial Sequence
  targeting sequence with GTCN PAM
acacaaacccaaacuuugcu

SEQ ID NO: 9074 - RNA, 20 nt, Artificial Sequence
  targeting sequence with GTCN PAM
gggccagauugaguggggcu

SEQ ID NO: 9075 - RNA, 20 nt, Artificial Sequence
  targeting sequence with GTCN PAM
ccgccaacuccucccucagc

SEQ ID NO: 9076 - RNA, 20 nt, Artificial Sequence
  targeting sequence with GTCN PAM
aagcugagggaggaguuggc

SEQ ID NO: 9077 - RNA, 20 nt, Artificial Sequence
  targeting sequence with GTCN PAM
uccugggcuccccugagugg

SEQ ID NO: 9078 - RNA, 20 nt, Artificial Sequence
  targeting sequence with GTCN PAM
acaggccaccacugagcccg

SEQ ID NO: 9079 - RNA, 20 nt, Artificial Sequence
  targeting sequence with GTCN PAM
agucucaguccagcagccca

SEQ ID NO: 9080 - RNA, 20 nt, Artificial Sequence
  targeting sequence with GTCN PAM
caguccagcagcccagccgc

SEQ ID NO: 9081 - RNA, 20 nt, Artificial Sequence
  targeting sequence with GTCN PAM
agcagcccagccgcacacag

SEQ ID NO: 9082 - RNA, 20 nt, Artificial Sequence
  targeting sequence with GTCN PAM
cagguguggcuucauacccu

SEQ ID NO: 9083 - RNA, 20 nt, Artificial Sequence
  targeting sequence with GTCN PAM
gggagucacagguguggcuu

SEQ ID NO: 9084 - RNA, 20 nt, Artificial Sequence
  targeting sequence with GTCN PAM
gcuugcacaguguucugaga

SEQ ID NO: 9085 - RNA, 20 nt, Artificial Sequence
  targeting sequence with GTCN PAM
ugcccccucccagggcuggc

SEQ ID NO: 9086 - RNA, 20 nt, Artificial Sequence
  targeting sequence with GTCN PAM
guccugcccccucccagggc

SEQ ID NO: 9087 - RNA, 20 nt, Artificial Sequence
  targeting sequence with GTCN PAM
uggguggccucuggcagcag

SEQ ID NO: 9088 - RNA, 20 nt, Artificial Sequence
  targeting sequence with GTCN PAM
ccucccuggcaugggggcug

SEQ ID NO: 9089 - RNA, 20 nt, Artificial Sequence
  targeting sequence with GTCN PAM
ccccugaaggcgcugguauu

SEQ ID NO: 9090 - RNA, 20 nt, Artificial Sequence
  targeting sequence with GTCN PAM
ggaagccuggccuuagccac

SEQ ID NO: 9091 - RNA, 20 nt, Artificial Sequence
  targeting sequence with GTCN PAM
gaagccucugcucuucucug

SEQ ID NO: 9092 - RNA, 20 nt, Artificial Sequence
  targeting sequence with GTCN PAM
uuugccguuugucugaagcc

SEQ ID NO: 9093 - RNA, 20 nt, Artificial Sequence
  targeting sequence with GTCN PAM
gccagagcugcuguguccuu

SEQ ID NO: 9094 - RNA, 20 nt, Artificial Sequence
  targeting sequence with GTCN PAM
gggaaaccaaggcaggccuc

SEQ ID NO: 9095 - RNA, 20 nt, Artificial Sequence
  targeting sequence with GTCN PAM
cccagcuccagggcuuugag

SEQ ID NO: 9096 - RNA, 20 nt, Artificial Sequence
  targeting sequence with GTCN PAM
ggauaaccucaaagcccugg

SEQ ID NO: 9097 - RNA, 20 nt, Artificial Sequence
  targeting sequence with GTCN PAM
agcuggucuggauaaccuca

SEQ ID NO: 9098 - RNA, 20 nt, Artificial Sequence
  targeting sequence with GTCN PAM
guguguuggcccucagggcg

SEQ ID NO: 9099 - RNA, 20 nt, Artificial Sequence
  targeting sequence with GTCN PAM
uuccaggccaugccuguuug

SEQ ID NO: 9100 - RNA, 20 nt, Artificial Sequence
  targeting sequence with GTCN PAM
caagccuggcuggauuaagg

SEQ ID NO: 9101 - RNA, 20 nt, Artificial Sequence
  targeting sequence with GTCN PAM
uuaauccagccaggcuugug

SEQ ID NO: 9102 - RNA, 20 nt, Artificial Sequence
  targeting sequence with GTCN PAM
cacaguagguccuuaaucca

SEQ ID NO: 9103 - RNA, 20 nt, Artificial Sequence
  targeting sequence with GTCN PAM
ggagccucagcuuucucauc

SEQ ID NO: 9104 - RNA, 20 nt, Artificial Sequence
  targeting sequence with GTCN PAM
cacagcucuuaccucacuau

SEQ ID NO: 9105 - RNA, 20 nt, Artificial Sequence
  targeting sequence with GTCN PAM
gagguucagaggggauggug

SEQ ID NO: 9106 - RNA, 20 nt, Artificial Sequence
  targeting sequence with GTCN PAM
uauuuuacagauguggaguc

SEQ ID NO: 9107 - RNA, 20 nt, Artificial Sequence
  targeting sequence with GTCN PAM
uuccauaagcccuagguggu

SEQ ID NO: 9108 - RNA, 20 nt, Artificial Sequence
  targeting sequence with GTCN PAM
gcauagcuaauugggaacau

SEQ ID NO: 9109 - RNA, 20 nt, Artificial Sequence
  targeting sequence with GTCN PAM
ucgggagcucccgagccucu

SEQ ID NO: 9110 - RNA, 20 nt, Artificial Sequence
  targeting sequence with GTCN PAM
cuguccucgggagcucccga

SEQ ID NO: 9111 - RNA, 20 nt, Artificial Sequence
  targeting sequence with GTCN PAM
aagcauccgaggcuggaugg

SEQ ID NO: 9112 - RNA, 20 nt, Artificial Sequence
  targeting sequence with GTCN PAM
uuggugagggcgguguagcc

SEQ ID NO: 9113 - RNA, 20 nt, Artificial Sequence
  targeting sequence with GTCN PAM
cugacucaagcagccauugu

SEQ ID NO: 9114 - RNA, 20 nt, Artificial Sequence
  targeting sequence with GTCN PAM
gcgacuguggcggugguucc

SEQ ID NO: 9115 - RNA, 20 nt, Artificial Sequence
  targeting sequence with GTCN PAM
agcuaacuaaacaauggcug

SEQ ID NO: 9116 - RNA, 20 nt, Artificial Sequence
  targeting sequence with GTCN PAM
aggggcugcguccagcuaac

SEQ ID NO: 9117 - RNA, 20 nt, Artificial Sequence
  targeting sequence with GTCN PAM
cagaggagcacaguguggga

SEQ ID NO: 9118 - RNA, 20 nt, Artificial Sequence
  targeting sequence with GTCN PAM
uuccaagcccuggaacaguu

SEQ ID NO: 9119 - RNA, 20 nt, Artificial Sequence
  targeting sequence with GTCN PAM
cuucaggggaggaagcuggg

SEQ ID NO: 9120 - RNA, 20 nt, Artificial Sequence
  targeting sequence with GTCN PAM
ccccagccccaggagggaac

SEQ ID NO: 9121 - RNA, 20 nt, Artificial Sequence
  targeting sequence with GTCN PAM
ccucgggguccagcccauau

SEQ ID NO: 9122 - RNA, 20 nt, Artificial Sequence
  targeting sequence with GTCN PAM
agcccauaugccuggccgca

SEQ ID NO: 9123 - RNA, 20 nt, Artificial Sequence
  targeting sequence with GTCN PAM
ugcugcagagcacagccugc

SEQ ID NO: 9124 - RNA, 20 nt, Artificial Sequence
  targeting sequence with GTCN PAM
cagagucaucgcacgaccgc

SEQ ID NO: 9125 - RNA, 20 nt, Artificial Sequence
  targeting sequence with GTCN PAM
ucgcacgaccgcuguggaca

SEQ ID NO: 9126 - RNA, 20 nt, Artificial Sequence
  targeting sequence with GTCN PAM
ugcgaugacucugggaccag

SEQ ID NO: 9127 - RNA, 20 nt, Artificial Sequence
  targeting sequence with GTCN PAM
acagcggucgugcgaugacu

SEQ ID NO: 9128 - RNA, 20 nt, Artificial Sequence
  targeting sequence with GTCN PAM
ucuuggcuguguccacagcg

SEQ ID NO: 9129 - RNA, 20 nt, Artificial Sequence
  targeting sequence with GTCN PAM
ccagcucauggaauccagcc

SEQ ID NO: 9130 - RNA, 20 nt, Artificial Sequence
  targeting sequence with GTCN PAM
ccucuguguccccagcucau

SEQ ID NO: 9131 - RNA, 20 nt, Artificial Sequence
  targeting sequence with GTCN PAM
cucuaccgaacuguuacuau

SEQ ID NO: 9132 - RNA, 20 nt, Artificial Sequence
  targeting sequence with GTCN PAM
gcuuugugcugagaccucuu

SEQ ID NO: 9133 - RNA, 20 nt, Artificial Sequence
  targeting sequence with GTCN PAM
cagcacaaagcagacugcac

SEQ ID NO: 9134 - RNA, 20 nt, Artificial Sequence
  targeting sequence with GTCN PAM
ccucaaacaaagauagcggg

SEQ ID NO: 9135 - RNA, 20 nt, Artificial Sequence
  targeting sequence with GTCN PAM
cggcaaggccccaguggggc

SEQ ID NO: 9136 - RNA, 20 nt, Artificial Sequence
  targeting sequence with GTCN PAM
uuuacccugaaacuugauaa

SEQ ID NO: 9137 - RNA, 20 nt, Artificial Sequence
  targeting sequence with GTCN PAM
accguccuuuacccugaaac

SEQ ID NO: 9138 - RNA, 20 nt, Artificial Sequence
  targeting sequence with GTCN PAM
agaucugggggccagcgcca

SEQ ID NO: 9139 - RNA, 20 nt, Artificial Sequence
  targeting sequence with GTCN PAM
gggcggucuguuugguucgg

SEQ ID NO: 9140 - RNA, 20 nt, Artificial Sequence
  targeting sequence with GTCN PAM
guuugguucggcccuggcuc

SEQ ID NO: 9141 - RNA, 20 nt, Artificial Sequence
  targeting sequence with GTCN PAM
gagccagggccgaaccaaac

SEQ ID NO: 9142 - RNA, 20 nt, Artificial Sequence
  targeting sequence with GTCN PAM
acguggcuggcacucagaga

SEQ ID NO: 9143 - RNA, 20 nt, Artificial Sequence
  targeting sequence with GTCN PAM
cugagugccagccacgugga

SEQ ID NO: 9144 - RNA, 20 nt, Artificial Sequence
  targeting sequence with GTCN PAM
ccacucgggaaccggcuggu

SEQ ID NO: 9145 - RNA, 20 nt, Artificial Sequence
  targeting sequence with GTCN PAM
gagcuggagaggcccucggg

SEQ ID NO: 9146 - RNA, 20 nt, Artificial Sequence
  targeting sequence with GTCN PAM
agccacagugggggcuccgg

SEQ ID NO: 9147 - RNA, 20 nt, Artificial Sequence
  targeting sequence with GTCN PAM
guauuggcccugccaggugc

SEQ ID NO: 9148 - RNA, 20 nt, Artificial Sequence
  targeting sequence with GTCN PAM
cuuccggaaccagaucagcc

SEQ ID NO: 9149 - RNA, 20 nt, Artificial Sequence
  targeting sequence with GTCN PAM
cuccuuuccccaaagcccug

SEQ ID NO: 9150 - RNA, 20 nt, Artificial Sequence
  targeting sequence with GTCN PAM
ugugggcugcggggagccag

SEQ ID NO: 9151 - RNA, 20 nt, Artificial Sequence
  targeting sequence with GTCN PAM
uuagccugcaggcaaggccc

SEQ ID NO: 9152 - RNA, 20 nt, Artificial Sequence
  targeting sequence with GTCN PAM
agugcugcuccaaccucccc

SEQ ID NO: 9153 - RNA, 20 nt, Artificial Sequence
  targeting sequence with GTCN PAM
gaugucaugaccuccucccu

SEQ ID NO: 9154 - RNA, 20 nt, Artificial Sequence
  targeting sequence with GTCN PAM
ugaccuccucccucaccauu

SEQ ID NO: 9155 - RNA, 20 nt, Artificial Sequence
  targeting sequence with GTCN PAM
ugacaucagacagaugccac

SEQ ID NO: 9156 - RNA, 20 nt, Artificial Sequence
  targeting sequence with GTCN PAM
aauuugucucucuugggggc

SEQ ID NO: 9157 - RNA, 20 nt, Artificial Sequence
  targeting sequence with GTCN PAM
cucuugggggcuguccugua

SEQ ID NO: 9158 - RNA, 20 nt, Artificial Sequence
  targeting sequence with GTCN PAM
uguagcaagcugagccuccu

SEQ ID NO: 9159 - RNA, 20 nt, Artificial Sequence
  targeting sequence with GTCN PAM
aagcucuggguggggagcuc

SEQ ID NO: 9160 - RNA, 20 nt, Artificial Sequence
  targeting sequence with GTCN PAM
ccacccacacauaccagagg

SEQ ID NO: 9161 - RNA, 20 nt, Artificial Sequence
  targeting sequence with GTCN PAM
acaccagggggucauccuaa

SEQ ID NO: 9162 - RNA, 20 nt, Artificial Sequence
  targeting sequence with GTCN PAM
uccuaaccccagcccgcgac

SEQ ID NO: 9163 - RNA, 20 nt, Artificial Sequence
  targeting sequence with GTCN PAM
cgggcugggguuaggaugac

SEQ ID NO: 9164 - RNA, 20 nt, Artificial Sequence
  targeting sequence with GTCN PAM
gccgaggccccugugagaag

SEQ ID NO: 9165 - RNA, 20 nt, Artificial Sequence
  targeting sequence with GTCN PAM
caguuuccucaccuuuaaaa

SEQ ID NO: 9166 - RNA, 20 nt, Artificial Sequence
  targeting sequence with GTCN PAM
gaaggggugaaugggcccau

SEQ ID NO: 9167 - RNA, 20 nt, Artificial Sequence
  targeting sequence with GTCN PAM
aagauuuuggaggaaugagg

SEQ ID NO: 9168 - RNA, 20 nt, Artificial Sequence
  targeting sequence with GTCN PAM
caggcgcuacagccagaagc

SEQ ID NO: 9169 - RNA, 20 nt, Artificial Sequence
  targeting sequence with GTCN PAM
cacaccacggugugaccuca

SEQ ID NO: 9170 - RNA, 20 nt, Artificial Sequence
  targeting sequence with GTCN PAM
caccguggugugugacugug

SEQ ID NO: 9171 - RNA, 20 nt, Artificial Sequence
  targeting sequence with GTCN PAM
agaaggguuaagcaucuugc

SEQ ID NO: 9172 - RNA, 20 nt, Artificial Sequence
  targeting sequence with GTCN PAM
auggaaggggaaacagaggu

SEQ ID NO: 9173 - RNA, 20 nt, Artificial Sequence
  targeting sequence with GTCN PAM
ugucauucagguucugggga

SEQ ID NO: 9174 - RNA, 20 nt, Artificial Sequence
  targeting sequence with GTCN PAM
uucagguucuggggagauua

SEQ ID NO: 9175 - RNA, 20 nt, Artificial Sequence
  targeting sequence with GTCN PAM
uaauuacugugguuguugcu

SEQ ID NO: 9176 - RNA, 20 nt, Artificial Sequence
  targeting sequence with GTCN PAM
gagggaaggcuuccuugcca

SEQ ID NO: 9177 - RNA, 20 nt, Artificial Sequence
  targeting sequence with GTCN PAM
gagaacggaggcccagguag

SEQ ID NO: 9178 - RNA, 20 nt, Artificial Sequence
  targeting sequence with GTCN PAM
caguacacgccacgcgucuu

SEQ ID NO: 9179 - RNA, 20 nt, Artificial Sequence
  targeting sequence with GTCN PAM
uuguucacggcagcaaccag

SEQ ID NO: 9180 - RNA, 20 nt, Artificial Sequence
  targeting sequence with GTCN PAM
ugguugcugccgugaacaaa

SEQ ID NO: 9181 - RNA, 20 nt, Artificial Sequence
  targeting sequence with GTCN PAM
ccauggagauuaaggaaacc

SEQ ID NO: 9182 - RNA, 20 nt, Artificial Sequence
  targeting sequence with GTCN PAM
caggcgggugaaucggacuu

SEQ ID NO: 9183 - RNA, 20 nt, Artificial Sequence
  targeting sequence with GTCN PAM
gauucacccgccugugacuc

SEQ ID NO: 9184 - RNA, 20 nt, Artificial Sequence
  targeting sequence with GTCN PAM
ucccugcgcucagcccacuu

SEQ ID NO: 9185 - RNA, 20 nt, Artificial Sequence
  targeting sequence with GTCN PAM
cauccguucuuggagccucc

SEQ ID NO: 9186 - RNA, 20 nt, Artificial Sequence
  targeting sequence with GTCN PAM
ugcacucaccuagcgaugug

SEQ ID NO: 9187 - RNA, 20 nt, Artificial Sequence
  targeting sequence with GTCN PAM
gcgcccuggauacgcccaca

SEQ ID NO: 9188 - RNA, 20 nt, Artificial Sequence
  targeting sequence with GTCN PAM
acccaggagggugagugggg

SEQ ID NO: 9189 - RNA, 20 nt, Artificial Sequence
  targeting sequence with GTCN PAM
gugugaaugaugguccaccc

SEQ ID NO: 9190 - RNA, 20 nt, Artificial Sequence
  targeting sequence with GTCN PAM
gaaaaugcgaucaucagccu

SEQ ID NO: 9191 - RNA, 20 nt, Artificial Sequence
  targeting sequence with GTCN PAM
ggggaggcaaggaacuucua

SEQ ID NO: 9192 - RNA, 20 nt, Artificial Sequence
  targeting sequence with GTCN PAM
gcccccaucccccagcaugu

SEQ ID NO: 9193 - RNA, 20 nt, Artificial Sequence
  targeting sequence with GTCN PAM
cugcuaucacaaugggcccu

SEQ ID NO: 9194 - RNA, 20 nt, Artificial Sequence
  targeting sequence with GTCN PAM
ucuuccugguggcuggugag

SEQ ID NO: 9195 - RNA, 20 nt, Artificial Sequence
  targeting sequence with GTCN PAM
ggauccgcagauagaagcag

SEQ ID NO: 9196 - RNA, 20 nt, Artificial Sequence
  targeting sequence with GTCN PAM
cuuccccucucuuggccuca

SEQ ID NO: 9197 - RNA, 20 nt, Artificial Sequence
  targeting sequence with GTCN PAM
ucaucauccccagcuuacag

SEQ ID NO: 9198 - RNA, 20 nt, Artificial Sequence
  targeting sequence with GTCN PAM
gccugaccaggggaggggca

SEQ ID NO: 9199 - RNA, 20 nt, Artificial Sequence
  targeting sequence with GTCN PAM
ggcagacagugcgucaucau

SEQ ID NO: 9200 - RNA, 20 nt, Artificial Sequence
  targeting sequence with GTCN PAM
accauguaggugcuuauaaa

SEQ ID NO: 9201 - RNA, 20 nt, Artificial Sequence
  targeting sequence with GTCN PAM
ccgagcucgcgcucugcagg

SEQ ID NO: 9202 - RNA, 20 nt, Artificial Sequence
  targeting sequence with GTCN PAM
ugaaggcaagaggccugugg

SEQ ID NO: 9203 - RNA, 20 nt, Artificial Sequence
  targeting sequence with GTCN PAM
agggcagcacugucuugaag

SEQ ID NO: 9204 - RNA, 20 nt, Artificial Sequence
  targeting sequence with GTCN PAM
cuagugcccgggcugaggag

SEQ ID NO: 9205 - RNA, 20 nt, Artificial Sequence
  targeting sequence with GTCN PAM
cugugcuggggcugggacag

SEQ ID NO: 9206 - RNA, 20 nt, Artificial Sequence
  targeting sequence with GTCN PAM
cagccccagcacagagacug

SEQ ID NO: 9207 - RNA, 20 nt, Artificial Sequence
  targeting sequence with GTCN PAM
cacccaccccugccugccuu

SEQ ID NO: 9208 - RNA, 20 nt, Artificial Sequence
  targeting sequence with GTCN PAM
gggccuuggaggagaugaga

SEQ ID NO: 9209 - RNA, 20 nt, Artificial Sequence
  targeting sequence with GTCN PAM
acugaggccaguuuuuucug

SEQ ID NO: 9210 - RNA, 20 nt, Artificial Sequence
  targeting sequence with GTCN PAM
uuucucccucuugauacuaa

SEQ ID NO: 9211 - RNA, 20 nt, Artificial Sequence
  targeting sequence with GTCN PAM
cucucagccuacucuggcuu

SEQ ID NO: 9212 - RNA, 20 nt, Artificial Sequence
  targeting sequence with GTCN PAM
uaugccucccuccuaggaug

SEQ ID NO: 9213 - RNA, 20 nt, Artificial Sequence
  targeting sequence with GTCN PAM
uuuacccucucugggccuca

SEQ ID NO: 9214 - RNA, 20 nt, Artificial Sequence
  targeting sequence with GTCN PAM
cagggccagucauuuacccu

SEQ ID NO: 9215 - RNA, 20 nt, Artificial Sequence
  targeting sequence with GTCN PAM
auaagcugugugucccaggg

SEQ ID NO: 9216 - RNA, 20 nt, Artificial Sequence
  targeting sequence with GTCN PAM
agacauucucagggcuggga

SEQ ID NO: 9217 - RNA, 20 nt, Artificial Sequence
  targeting sequence with GTCN PAM
cgacccccagguacaugggc

SEQ ID NO: 9218 - RNA, 20 nt, Artificial Sequence
  targeting sequence with GTCN PAM
ccugguccaagcccuaucug

SEQ ID NO: 9219 - RNA, 20 nt, Artificial Sequence
  targeting sequence with GTCN PAM
aagcccuaucuguuucucca

SEQ ID NO: 9220 - RNA, 20 nt, Artificial Sequence
  targeting sequence with GTCN PAM
ucucagccaauccuccuaga

SEQ ID NO: 9221 - RNA, 20 nt, Artificial Sequence
  targeting sequence with GTCN PAM
cugcuugcacccuucgucac

SEQ ID NO: 9222 - RNA, 20 nt, Artificial Sequence
  targeting sequence with GTCN PAM
cugggagaucacucccagcc

SEQ ID NO: 9223 - RNA, 20 nt, Artificial Sequence
  targeting sequence with GTCN PAM
ucuugacgacgugcacccac

SEQ ID NO: 9224 - RNA, 20 nt, Artificial Sequence
  targeting sequence with GTCN PAM
agaagacauuuuuuugcacc

SEQ ID NO: 9225 - RNA, 20 nt, Artificial Sequence
  targeting sequence with GTCN PAM
ucaagaagacauuuuuuugc

SEQ ID NO: 9226 - RNA, 20 nt, Artificial Sequence
  targeting sequence with GTCN PAM
uuuuauaguaaagguggaaa

SEQ ID NO: 9227 - RNA, 20 nt, Artificial Sequence
  targeting sequence with GTCN PAM
gugcagcauuuucaaggugu

SEQ ID NO: 9228 - RNA, 20 nt, Artificial Sequence
  targeting sequence with GTCN PAM
guauuccuuuuguuuuaaaa

SEQ ID NO: 9229 - RNA, 20 nt, Artificial Sequence
  targeting sequence with GTCN PAM
uucauagguuggggagaaag

SEQ ID NO: 9230 - RNA, 20 nt, Artificial Sequence
  targeting sequence with GTCN PAM
uucuccccaaccuaugaaug

SEQ ID NO: 9231 - RNA, 20 nt, Artificial Sequence
  targeting sequence with GTCN PAM
accuuccuuccccaagucuu

SEQ ID NO: 9232 - RNA, 20 nt, Artificial Sequence
  targeting sequence with GTCN PAM
gccccaccuuguugggugau

SEQ ID NO: 9233 - RNA, 20 nt, Artificial Sequence
  targeting sequence with GTCN PAM
cugauuguuuucaacguauu

SEQ ID NO: 9234 - RNA, 20 nt, Artificial Sequence
  targeting sequence with GTCN PAM
ccaaauuugucccugauugu

SEQ ID NO: 9235 - RNA, 20 nt, Artificial Sequence
  targeting sequence with GTCN PAM
ccgcagcccucagaaguccc

SEQ ID NO: 9236 - RNA, 20 nt, Artificial Sequence
  targeting sequence with GTCN PAM
ugucagcugggaacccggaa

SEQ ID NO: 9237 - RNA, 20 nt, Artificial Sequence
  targeting sequence with GTCN PAM
gcugggaacccggaaugucg

SEQ ID NO: 9238 - RNA, 20 nt, Artificial Sequence
  targeting sequence with GTCN PAM
ggaggccauccugacccagg

SEQ ID NO: 9239 - RNA, 20 nt, Artificial Sequence
  targeting sequence with GTCN PAM
ggauggccucccgacauucc

SEQ ID NO: 9240 - RNA, 20 nt, Artificial Sequence
  targeting sequence with GTCN PAM
cacgaagaacccugggcccu

SEQ ID NO: 9241 - RNA, 20 nt, Artificial Sequence
  targeting sequence with GTCN PAM
uucggcccugggguccugcc

SEQ ID NO: 9242 - RNA, 20 nt, Artificial Sequence
  targeting sequence with GTCN PAM
ugccccaugugcagccccac

SEQ ID NO: 9243 - RNA, 20 nt, Artificial Sequence
  targeting sequence with GTCN PAM
cuggcacuggguggccuggg

SEQ ID NO: 9244 - RNA, 20 nt, Artificial Sequence
  targeting sequence with GTCN PAM
caucuggcuggauuucucug

SEQ ID NO: 9245 - RNA, 20 nt, Artificial Sequence
  targeting sequence with GTCN PAM
ggggagaaccaggagccuag

SEQ ID NO: 9246 - RNA, 20 nt, Artificial Sequence
  targeting sequence with GTCN PAM
ggcucagcaacaggauagau

SEQ ID NO: 9247 - RNA, 20 nt, Artificial Sequence
  targeting sequence with GTCN PAM
agagcccaccugccacccuc

SEQ ID NO: 9248 - RNA, 20 nt, Artificial Sequence
  targeting sequence with GTCN PAM
gcagcagugcugagggcuug

SEQ ID NO: 9249 - RNA, 20 nt, Artificial Sequence
  targeting sequence with GTCN PAM
ccagagaacaaggccggccc

SEQ ID NO: 9250 - RNA, 20 nt, Artificial Sequence
  targeting sequence with GTCN PAM
caaauauaucuugagcacuu

SEQ ID NO: 9251 - RNA, 20 nt, Artificial Sequence
  targeting sequence with GTCN PAM
uugcaaacaggcgccaggua

SEQ ID NO: 9252 - RNA, 20 nt, Artificial Sequence
  targeting sequence with GTCN PAM
ccccgcugcagaaggggaau

SEQ ID NO: 9253 - RNA, 20 nt, Artificial Sequence
  targeting sequence with GTCN PAM
cagcaggcaccugagucucc

SEQ ID NO: 9254 - RNA, 20 nt, Artificial Sequence
  targeting sequence with GTCN PAM
ugggagccaugaaggguuuu

SEQ ID NO: 9255 - RNA, 20 nt, Artificial Sequence
  targeting sequence with GTCN PAM
agacucccaaggacggucuc

SEQ ID NO: 9256 - RNA, 20 nt, Artificial Sequence
  targeting sequence with GTCN PAM
ggacuuuauccugggguccu

SEQ ID NO: 9257 - RNA, 20 nt, Artificial Sequence
  targeting sequence with GTCN PAM
uugggagucuggacuuuauc

SEQ ID NO: 9258 - RNA, 20 nt, Artificial Sequence
  targeting sequence with GTCN PAM
ccccaggccucccuggcccu

SEQ ID NO: 9259 - RNA, 20 nt, Artificial Sequence
  targeting sequence with GTCN PAM
ugugcuucccacucuacucg

SEQ ID NO: 9260 - RNA, 20 nt, Artificial Sequence
  targeting sequence with GTCN PAM
gcguggccaggcgaguagag

SEQ ID NO: 9261 - RNA, 20 nt, Artificial Sequence
  targeting sequence with GTCN PAM
cacauccguccucggcucac

SEQ ID NO: 9262 - RNA, 20 nt, Artificial Sequence
  targeting sequence with GTCN PAM
ucggcucaccugcccagccc

SEQ ID NO: 9263 - RNA, 20 nt, Artificial Sequence
  targeting sequence with GTCN PAM
caugcugugcccuggggagc

SEQ ID NO: 9264 - RNA, 20 nt, Artificial Sequence
  targeting sequence with GTCN PAM
cuauugugagcccaguccca

SEQ ID NO: 9265 - RNA, 20 nt, Artificial Sequence
  targeting sequence with GTCN PAM
auggaggugucaucuggggc

SEQ ID NO: 9266 - RNA, 20 nt, Artificial Sequence
  targeting sequence with GTCN PAM
ucuggggcuagaaguaggag

SEQ ID NO: 9267 - RNA, 20 nt, Artificial Sequence
  targeting sequence with GTCN PAM
uggagagcaguugccuaauc

SEQ ID NO: 9268 - RNA, 20 nt, Artificial Sequence
  targeting sequence with GTCN PAM
cugcuugguccuggagagca

SEQ ID NO: 9269 - RNA, 20 nt, Artificial Sequence
  targeting sequence with GTCN PAM
cuuagaguaauaacaagaag

SEQ ID NO: 9270 - RNA, 20 nt, Artificial Sequence
  targeting sequence with GTCN PAM
uuaaaacaaugcuuugggau

SEQ ID NO: 9271 - RNA, 20 nt, Artificial Sequence
  targeting sequence with GTCN PAM
ccacuucacagaugaagaaa

SEQ ID NO: 9272 - RNA, 20 nt, Artificial Sequence
  targeting sequence with GTCN PAM
cacagcugggaagugacaaa

SEQ ID NO: 9273 - RNA, 20 nt, Artificial Sequence
  targeting sequence with GTCN PAM
cuucccagcugugugaccuu

SEQ ID NO: 9274 - RNA, 20 nt, Artificial Sequence
  targeting sequence with GTCN PAM
cacuuugucacuucccagcu

SEQ ID NO: 9275 - RNA, 20 nt, Artificial Sequence
  targeting sequence with GTCN PAM
agguucugaaucugucgcug

SEQ ID NO: 9276 - RNA, 20 nt, Artificial Sequence
  targeting sequence with GTCN PAM
cugcauagcuggcaacagcc

SEQ ID NO: 9277 - RNA, 20 nt, Artificial Sequence
  targeting sequence with GTCN PAM
gggccucuagcaugggcagg

SEQ ID NO: 9278 - RNA, 20 nt, Artificial Sequence
  targeting sequence with GTCN PAM
ccggucugggccucuagcau

SEQ ID NO: 9279 - RNA, 20 nt, Artificial Sequence
  targeting sequence with GTCN PAM
cccucccuguguuuuccaca

SEQ ID NO: 9280 - RNA, 20 nt, Artificial Sequence
  targeting sequence with GTCN PAM
uggggcugugucccuggaga

SEQ ID NO: 9281 - RNA, 20 nt, Artificial Sequence
  targeting sequence with GTCN PAM
cuggagaggcccuguccccu

SEQ ID NO: 9282 - RNA, 20 nt, Artificial Sequence
  targeting sequence with GTCN PAM
ccuuagguagagaagcucca

SEQ ID NO: 9283 - RNA, 20 nt, Artificial Sequence
  targeting sequence with GTCN PAM
cugcaccgagggagcggacc

SEQ ID NO: 9284 - RNA, 20 nt, Artificial Sequence
  targeting sequence with GTCN PAM
gcucccucggugcagugacu

SEQ ID NO: 9285 - RNA, 20 nt, Artificial Sequence
  targeting sequence with GTCN PAM
cggcccuuugguguaagcug

SEQ ID NO: 9286 - RNA, 20 nt, Artificial Sequence
  targeting sequence with GTCN PAM
acaggacacuucucuccauu

SEQ ID NO: 9287 - RNA, 20 nt, Artificial Sequence
  targeting sequence with GTCN PAM
uguggacugagggccuuccu

SEQ ID NO: 9288 - RNA, 20 nt, Artificial Sequence
  targeting sequence with GTCN PAM
cugaauggagagaagugucc

SEQ ID NO: 9289 - RNA, 20 nt, Artificial Sequence
  targeting sequence with GTCN PAM
caguggggagucgcugaaug

SEQ ID NO: 9290 - RNA, 20 nt, Artificial Sequence
  targeting sequence with GTCN PAM
aaagggugguggggcugcuu

SEQ ID NO: 9291 - RNA, 20 nt, Artificial Sequence
  targeting sequence with GTCN PAM
gcccugcucacccaccguga

SEQ ID NO: 9292 - RNA, 20 nt, Artificial Sequence
  targeting sequence with GTCN PAM
cggugggugagcagggcaga

SEQ ID NO: 9293 - RNA, 20 nt, Artificial Sequence
  targeting sequence with GTCN PAM
ugggagaccgaccucgaccu

SEQ ID NO: 9294 - RNA, 20 nt, Artificial Sequence
  targeting sequence with GTCN PAM
cccacgacugcccaccaucu

SEQ ID NO: 9295 - RNA, 20 nt, Artificial Sequence
  targeting sequence with GTCN PAM
gucucccacgacugcccacc

SEQ ID NO: 9296 - RNA, 20 nt, Artificial Sequence
  targeting sequence with GTCN PAM
aggucggucucccacgacug

SEQ ID NO: 9297 - RNA, 20 nt, Artificial Sequence
  targeting sequence with GTCN PAM
cagccauggagaagggacag

SEQ ID NO: 9298 - RNA, 20 nt, Artificial Sequence
  targeting sequence with GTCN PAM
cuucuccauggcugugacaa

SEQ ID NO: 9299 - RNA, 20 nt, Artificial Sequence
  targeting sequence with GTCN PAM
ccacaagaaggcugaguucu

SEQ ID NO: 9300 - RNA, 20 nt, Artificial Sequence
  targeting sequence with GTCN PAM
ggcgagcccacuucagcucc

SEQ ID NO: 9301 - RNA, 20 nt, Artificial Sequence
  targeting sequence with GTCN PAM
uucuggggccucauuccuca

SEQ ID NO: 9302 - RNA, 20 nt, Artificial Sequence
  targeting sequence with GTCN PAM
guugauccccauaguucacc

SEQ ID NO: 9303 - RNA, 20 nt, Artificial Sequence
  targeting sequence with GTCN PAM
ccucccgcacccuugucaug

SEQ ID NO: 9304 - RNA, 20 nt, Artificial Sequence
  targeting sequence with GTCN PAM
ugucaacacacaugcugauu

SEQ ID NO: 9305 - RNA, 20 nt, Artificial Sequence
  targeting sequence with GTCN PAM
acacacaugcugauuccguc

SEQ ID NO: 9306 - RNA, 20 nt, Artificial Sequence
  targeting sequence with GTCN PAM
accuggccccccuugcuacu

SEQ ID NO: 9307 - RNA, 20 nt, Artificial Sequence
  targeting sequence with GTCN PAM
gaggcuggguugggcaguag

SEQ ID NO: 9308 - RNA, 20 nt, Artificial Sequence
  targeting sequence with GTCN PAM
caggcagcuggggugggcag

SEQ ID NO: 9309 - RNA, 20 nt, Artificial Sequence
  targeting sequence with GTCN PAM
agaaggcagcaaaggcuggg

SEQ ID NO: 9310 - RNA, 20 nt, Artificial Sequence
  targeting sequence with GTCN PAM
ggccucagcaucuguguuuu

SEQ ID NO: 9311 - RNA, 20 nt, Artificial Sequence
  targeting sequence with GTCN PAM
caauucccaguucucagaac

SEQ ID NO: 9312 - RNA, 20 nt, Artificial Sequence
  targeting sequence with GTCN PAM
gggguaaacaauagcacuug

SEQ ID NO: 9313 - RNA, 20 nt, Artificial Sequence
  targeting sequence with GTCN PAM
guacucugaggaggcugcau

SEQ ID NO: 9314 - RNA, 20 nt, Artificial Sequence
  targeting sequence with GTCN PAM
ccugccacgcacaucccacu

SEQ ID NO: 9315 - RNA, 20 nt, Artificial Sequence
  targeting sequence with GTCN PAM
cguuguaccagugucugugc

SEQ ID NO: 9316 - RNA, 20 nt, Artificial Sequence
  targeting sequence with GTCN PAM
gugcaguacaccugucugcc

SEQ ID NO: 9317 - RNA, 20 nt, Artificial Sequence
  targeting sequence with GTCN PAM
gcccugugcgucuucaggcc

SEQ ID NO: 9318 - RNA, 20 nt, Artificial Sequence
  targeting sequence with GTCN PAM
ucaggccccagcuugcuggc

SEQ ID NO: 9319 - RNA, 20 nt, Artificial Sequence
  targeting sequence with GTCN PAM
augcagacaucugcagggcc

SEQ ID NO: 9320 - RNA, 20 nt, Artificial Sequence
  targeting sequence with GTCN PAM
gcauggacuugugugccagc

SEQ ID NO: 9321 - RNA, 20 nt, Artificial Sequence
  targeting sequence with GTCN PAM
gaguuaccauugcacguugg

SEQ ID NO: 9322 - RNA, 20 nt, Artificial Sequence
  targeting sequence with GTCN PAM
ggcaugcagucacuuacugc

SEQ ID NO: 9323 - RNA, 20 nt, Artificial Sequence
  targeting sequence with GTCN PAM
cuuacugcgcccucagcaug

SEQ ID NO: 9324 - RNA, 20 nt, Artificial Sequence
  targeting sequence with GTCN PAM
caggugcaugcugagggcgc

SEQ ID NO: 9325 - RNA, 20 nt, Artificial Sequence
  targeting sequence with GTCN PAM
aaguugccacagguacccag

SEQ ID NO: 9326 - RNA, 20 nt, Artificial Sequence
  targeting sequence with GTCN PAM
cugcacaugcccaccugggc

SEQ ID NO: 9327 - RNA, 20 nt, Artificial Sequence
  targeting sequence with GTCN PAM
cccgagggguacuacuggcg

SEQ ID NO: 9328 - RNA, 20 nt, Artificial Sequence
  targeting sequence with GTCN PAM
caggugggagcgcgcagaga

SEQ ID NO: 9329 - RNA, 20 nt, Artificial Sequence
  targeting sequence with GTCN PAM
ugagcugagugggucacagg

SEQ ID NO: 9330 - RNA, 20 nt, Artificial Sequence
  targeting sequence with GTCN PAM
cgugcccugcaccacgcugu

SEQ ID NO: 9331 - RNA, 20 nt, Artificial Sequence
  targeting sequence with GTCN PAM
agcaccgccaccacgucggg

SEQ ID NO: 9332 - RNA, 20 nt, Artificial Sequence
  targeting sequence with GTCN PAM
ggcgccgguuccacgaagca

SEQ ID NO: 9333 - RNA, 20 nt, Artificial Sequence
  targeting sequence with GTCN PAM
gcgaagcggaaggcgcagag

SEQ ID NO: 9334 - RNA, 20 nt, Artificial Sequence
  targeting sequence with GTCN PAM
cccgcggcccgcgcugcucc

SEQ ID NO: 9335 - RNA, 20 nt, Artificial Sequence
  targeting sequence with GTCN PAM
ucgagcggccccaggggucc

SEQ ID NO: 9336 - RNA, 20 nt, Artificial Sequence
  targeting sequence with GTCN PAM
ucccagcccgggagcggcuc

SEQ ID NO: 9337 - RNA, 20 nt, Artificial Sequence
  targeting sequence with GTCN PAM
gucuucccagcccgggagcg

SEQ ID NO: 9338 - RNA, 20 nt, Artificial Sequence
  targeting sequence with GTCN PAM
ccgcggcccgcgccgcccgc

SEQ ID NO: 9339 - RNA, 20 nt, Artificial Sequence
  targeting sequence with GTCN PAM
uacauccaguugggcuugca

SEQ ID NO: 9340 - RNA, 20 nt, Artificial Sequence
  targeting sequence with GTCN PAM
ccgccggcgccguggggcag

SEQ ID NO: 9341 - RNA, 20 nt, Artificial Sequence
  targeting sequence with GTCN PAM
cccgcgcgcgccucgcuguu

SEQ ID NO: 9342 - RNA, 20 nt, Artificial Sequence
  targeting sequence with GTCN PAM
uacgcguaccuggcgcucaa

SEQ ID NO: 9343 - RNA, 20 nt, Artificial Sequence
  targeting sequence with GTCN PAM
gacgggugcaggaaggcgcu

SEQ ID NO: 9344 - RNA, 20 nt, Artificial Sequence
  targeting sequence with GTCN PAM
gacccgccgccgggugcaca

SEQ ID NO: 9345 - RNA, 20 nt, Artificial Sequence
  targeting sequence with GTCN PAM
ucggagggguugaggucgaa

SEQ ID NO: 9346 - RNA, 20 nt, Artificial Sequence
  targeting sequence with GTCN PAM
gagggguugaggucgaaggu

SEQ ID NO: 9347 - RNA, 20 nt, Artificial Sequence
  targeting sequence with GTCN PAM
aaggugaagagcuuggccag

SEQ ID NO: 9348 - RNA, 20 nt, Artificial Sequence
  targeting sequence with GTCN PAM
ccgcgcguguccagggagcg

SEQ ID NO: 9349 - RNA, 20 nt, Artificial Sequence
  targeting sequence with GTCN PAM
agggagcggauggcgaucuc

SEQ ID NO: 9350 - RNA, 20 nt, Artificial Sequence
  targeting sequence with GTCN PAM
uccaggcugcgguugcgcgg

SEQ ID NO: 9351 - RNA, 20 nt, Artificial Sequence
  targeting sequence with GTCN PAM
accguggggcuaguucugcc

SEQ ID NO: 9352 - RNA, 20 nt, Artificial Sequence
  targeting sequence with GTCN PAM
cgguguuccccagcaugcug

SEQ ID NO: 9353 - RNA, 20 nt, Artificial Sequence
  targeting sequence with GTCN PAM
aucuaccagggcuucugcca

SEQ ID NO: 9354 - RNA, 20 nt, Artificial Sequence
  targeting sequence with GTCN PAM
ugugcggguccaucuaccag

SEQ ID NO: 9355 - RNA, 20 nt, Artificial Sequence
  targeting sequence with GTCN PAM
agcugcaggaucuuguugua

SEQ ID NO: 9356 - RNA, 20 nt, Artificial Sequence
  targeting sequence with GTCN PAM
gugaggcgccgcgggugcuc

SEQ ID NO: 9357 - RNA, 20 nt, Artificial Sequence
  targeting sequence with GTCN PAM
cgcuccgcagcugccgcagg

SEQ ID NO: 9358 - RNA, 20 nt, Artificial Sequence
  targeting sequence with GTCN PAM
ggcaccgggcccacggccgc

SEQ ID NO: 9359 - RNA, 20 nt, Artificial Sequence
  targeting sequence with GTCN PAM
ggcgccaaccugagccugga

SEQ ID NO: 9360 - RNA, 20 nt, Artificial Sequence
  targeting sequence with GTCN PAM
accgccucuaucagcugucg

SEQ ID NO: 9361 - RNA, 20 nt, Artificial Sequence
  targeting sequence with GTCN PAM
ccgccgcgccguccagggcg

SEQ ID NO: 9362 - RNA, 20 nt, Artificial Sequence
  targeting sequence with GTCN PAM
agggcgaaguuguugguggg

SEQ ID NO: 9363 - RNA, 20 nt, Artificial Sequence
  targeting sequence with GTCN PAM
guuccccucgcccacgccca

SEQ ID NO: 9364 - RNA, 20 nt, Artificial Sequence
  targeting sequence with GTCN PAM
ggaacggcggggggcuggcg

SEQ ID NO: 9365 - RNA, 20 nt, Artificial Sequence
  targeting sequence with GTCN PAM
ggggcggcuggcgcgggcag

SEQ ID NO: 9366 - RNA, 20 nt, Artificial Sequence
  targeting sequence with GTCN PAM
gccucgccgcgcagcccggg

SEQ ID NO: 9367 - RNA, 20 nt, Artificial Sequence
  targeting sequence with GTCN PAM
gcagcggagccgcccccgcc

SEQ ID NO: 9368 - RNA, 20 nt, Artificial Sequence
  targeting sequence with GTCN PAM
cgggggcgggcggggccggg

SEQ ID NO: 9369 - RNA, 20 nt, Artificial Sequence
  targeting sequence with GTCN PAM
gcgggucccgccgcccgcgc

SEQ ID NO: 9370 - RNA, 20 nt, Artificial Sequence
  targeting sequence with GTCN PAM
cgccgcccgcgcccuccagg

SEQ ID NO: 9371 - RNA, 20 nt, Artificial Sequence
  targeting sequence with GTCN PAM
uggagggcgcgggcggcggg

SEQ ID NO: 9372 - RNA, 20 nt, Artificial Sequence
  targeting sequence with GTCN PAM
cuccccguagccgccgccgc

SEQ ID NO: 9373 - RNA, 20 nt, Artificial Sequence
  targeting sequence with GTCN PAM
cucgcucuccucgcucuuuc

SEQ ID NO: 9374 - RNA, 20 nt, Artificial Sequence
  targeting sequence with GTCN PAM
cucccucucucugcgucucu

SEQ ID NO: 9375 - RNA, 20 nt, Artificial Sequence
  targeting sequence with GTCN PAM
cucggucucugcgucucucc

SEQ ID NO: 9376 - RNA, 20 nt, Artificial Sequence
  targeting sequence with GTCN PAM
cugcgucucuccgucucugu

SEQ ID NO: 9377 - RNA, 20 nt, Artificial Sequence
  targeting sequence with GTCN PAM
cuccgucucuguccccaccc

SEQ ID NO: 9378 - RNA, 20 nt, Artificial Sequence
  targeting sequence with GTCN PAM
cuguccccaccccaaacucc

SEQ ID NO: 9379 - RNA, 20 nt, Artificial Sequence
  targeting sequence with GTCN PAM
ccaccccaaacuccgcgcgu

SEQ ID NO: 9380 - RNA, 20 nt, Artificial Sequence
  targeting sequence with GTCN PAM
gagggagaaggagaagcaga

SEQ ID NO: 9381 - RNA, 20 nt, Artificial Sequence
  targeting sequence with GTCN PAM
cuggcagccccgcccccggc

SEQ ID NO: 9382 - RNA, 20 nt, Artificial Sequence
  targeting sequence with GTCN PAM
ccuucucucuccugcuccgu

SEQ ID NO: 9383 - RNA, 20 nt, Artificial Sequence
  targeting sequence with GTCN PAM
cugacgcucgcucccucucu

SEQ ID NO: 9384 - RNA, 20 nt, Artificial Sequence
  targeting sequence with GTCN PAM
gggacggaaaaacggagcag

SEQ ID NO: 9385 - RNA, 20 nt, Artificial Sequence
  targeting sequence with GTCN PAM
gagggggaggcagagggagc

SEQ ID NO: 9386 - RNA, 20 nt, Artificial Sequence
  targeting sequence with GTCN PAM
cucucucggucccucugagc

SEQ ID NO: 9387 - RNA, 20 nt, Artificial Sequence
  targeting sequence with GTCN PAM
cucugagcuccccuuuccuu

SEQ ID NO: 9388 - RNA, 20 nt, Artificial Sequence
  targeting sequence with GTCN PAM
ccccuccacacucagccucc

SEQ ID NO: 9389 - RNA, 20 nt, Artificial Sequence
  targeting sequence with GTCN PAM
aggccuucgcucccccggug

SEQ ID NO: 9390 - RNA, 20 nt, Artificial Sequence
  targeting sequence with GTCN PAM
ggccccccagaccccauaau

SEQ ID NO: 9391 - RNA, 20 nt, Artificial Sequence
  targeting sequence with GTCN PAM
ggggggcccgacuggccggc

SEQ ID NO: 9392 - RNA, 20 nt, Artificial Sequence
  targeting sequence with GTCN PAM
cccaaaccccagacccauaa

SEQ ID NO: 9393 - RNA, 20 nt, Artificial Sequence
  targeting sequence with GTCN PAM
gggguuugggggacagauua

SEQ ID NO: 9394 - RNA, 20 nt, Artificial Sequence
  targeting sequence with GTCN PAM
cucuggcccugccacuugua

SEQ ID NO: 9395 - RNA, 20 nt, Artificial Sequence
  targeting sequence with GTCN PAM
gauauauaaaugaggaaaac

SEQ ID NO: 9396 - RNA, 20 nt, Artificial Sequence
  targeting sequence with GTCN PAM
uggagcccacaguugccucc

SEQ ID NO: 9397 - RNA, 20 nt, Artificial Sequence
  targeting sequence with GTCN PAM
ccacaggaggcaacuguggg

SEQ ID NO: 9398 - RNA, 20 nt, Artificial Sequence
  targeting sequence with GTCN PAM
gggaaagugccuggcggggg

SEQ ID NO: 9399 - RNA, 20 nt, Artificial Sequence
  targeting sequence with GTCN PAM
cacaaaagccggcacugggc

SEQ ID NO: 9400 - RNA, 20 nt, Artificial Sequence
  targeting sequence with GTCN PAM
cagcccugugaggaccaugc

SEQ ID NO: 9401 - RNA, 20 nt, Artificial Sequence
  targeting sequence with GTCN PAM
ucacagggcugugaccuugg

SEQ ID NO: 9402 - RNA, 20 nt, Artificial Sequence
  targeting sequence with GTCN PAM
ggcacgggcuagcccugugu

SEQ ID NO: 9403 - RNA, 20 nt, Artificial Sequence
  targeting sequence with GTCN PAM
cuuccccucagccuugguuu

SEQ ID NO: 9404 - RNA, 20 nt, Artificial Sequence
  targeting sequence with GTCN PAM
gagcugaagggcuuuugcuu

SEQ ID NO: 9405 - RNA, 20 nt, Artificial Sequence
  targeting sequence with GTCN PAM
gaugggaggccccguucuga

SEQ ID NO: 9406 - RNA, 20 nt, Artificial Sequence
  targeting sequence with GTCN PAM
cgcuacucucagagugaggc

SEQ ID NO: 9407 - RNA, 20 nt, Artificial Sequence
  targeting sequence with GTCN PAM
gugcaccauggggccggcag

SEQ ID NO: 9408 - RNA, 20 nt, Artificial Sequence
  targeting sequence with GTCN PAM
ggaacaaggcgggcaggaug

SEQ ID NO: 9409 - RNA, 20 nt, Artificial Sequence
  targeting sequence with GTCN PAM
ggccacugcuuugauggccg

SEQ ID NO: 9410 - RNA, 20 nt, Artificial Sequence
  targeting sequence with GTCN PAM
ccugaguggcucuugguggg

SEQ ID NO: 9411 - RNA, 20 nt, Artificial Sequence
  targeting sequence with GTCN PAM
cacgggcaguccccugagug

SEQ ID NO: 9412 - RNA, 20 nt, Artificial Sequence
  targeting sequence with GTCN PAM
cugucuuccucucuggaugg

SEQ ID NO: 9413 - RNA, 20 nt, Artificial Sequence
  targeting sequence with GTCN PAM
uccucucuggauggagaagg

SEQ ID NO: 9414 - RNA, 20 nt, Artificial Sequence
  targeting sequence with GTCN PAM
auccgcuggucucucugucu

SEQ ID NO: 9415 - RNA, 20 nt, Artificial Sequence
  targeting sequence with GTCN PAM
cucugucuuaucucucucuc

SEQ ID NO: 9416 - RNA, 20 nt, Artificial Sequence
  targeting sequence with GTCN PAM
uaucucucucucuccugccc

SEQ ID NO: 9417 - RNA, 20 nt, Artificial Sequence
  targeting sequence with GTCN PAM
ugcuccucccguucacucuc

SEQ ID NO: 9418 - RNA, 20 nt, Artificial Sequence
  targeting sequence with GTCN PAM
cuccuucucucagugucuug

SEQ ID NO: 9419 - RNA, 20 nt, Artificial Sequence
  targeting sequence with GTCN PAM
ugcccccuucccuuuccacu

SEQ ID NO: 9420 - RNA, 20 nt, Artificial Sequence
  targeting sequence with GTCN PAM
cucugugucucuaucucugu

SEQ ID NO: 9421 - RNA, 20 nt, Artificial Sequence
  targeting sequence with GTCN PAM
cuaucucugucucucucucu

SEQ ID NO: 9422 - RNA, 20 nt, Artificial Sequence
  targeting sequence with GTCN PAM
cucucucugucucccucccu

SEQ ID NO: 9423 - RNA, 20 nt, Artificial Sequence
  targeting sequence with GTCN PAM
cccucccuaucccucacccc

SEQ ID NO: 9424 - RNA, 20 nt, Artificial Sequence
  targeting sequence with GTCN PAM
cccgcucaucugguucaucu

SEQ ID NO: 9425 - RNA, 20 nt, Artificial Sequence
  targeting sequence with GTCN PAM
uagaccagccuguggugaug

SEQ ID NO: 9426 - RNA, 20 nt, Artificial Sequence
  targeting sequence with GTCN PAM
aagacaacacugagcauuau

SEQ ID NO: 9427 - RNA, 20 nt, Artificial Sequence
  targeting sequence with GTCN PAM
caagugcccaggaucaucac

SEQ ID NO: 9428 - RNA, 20 nt, Artificial Sequence
  targeting sequence with GTCN PAM
gaguauccucacaucaacug

SEQ ID NO: 9429 - RNA, 20 nt, Artificial Sequence
  targeting sequence with GTCN PAM
ugugcaaggcacucacccuc

SEQ ID NO: 9430 - RNA, 20 nt, Artificial Sequence
  targeting sequence with GTCN PAM
ucauuuuacaguugaggaaa

SEQ ID NO: 9431 - RNA, 20 nt, Artificial Sequence
  targeting sequence with GTCN PAM
agcacaacaaggcucuuagc

SEQ ID NO: 9432 - RNA, 20 nt, Artificial Sequence
  targeting sequence with GTCN PAM
ugguucacugccacaaggcg

SEQ ID NO: 9433 - RNA, 20 nt, Artificial Sequence
  targeting sequence with GTCN PAM
uuaguugcaaugccccccac

SEQ ID NO: 9434 - RNA, 20 nt, Artificial Sequence
  targeting sequence with GTCN PAM
ugagccccaauguggcuagc

SEQ ID NO: 9435 - RNA, 20 nt, Artificial Sequence
  targeting sequence with GTCN PAM
gguggcucugcuagccacau

SEQ ID NO: 9436 - RNA, 20 nt, Artificial Sequence
  targeting sequence with GTCN PAM
gcuggcugcaaggauggugu

SEQ ID NO: 9437 - RNA, 20 nt, Artificial Sequence
  targeting sequence with GTCN PAM
gcaaacccauuucacagaug

SEQ ID NO: 9438 - RNA, 20 nt, Artificial Sequence
  targeting sequence with GTCN PAM
gcaccuccucugcccagcca

SEQ ID NO: 9439 - RNA, 20 nt, Artificial Sequence
  targeting sequence with GTCN PAM
caccuaauccccacuccuga

SEQ ID NO: 9440 - RNA, 20 nt, Artificial Sequence
  targeting sequence with GTCN PAM
ggcuauucuggguuaguuca

SEQ ID NO: 9441 - RNA, 20 nt, Artificial Sequence
  targeting sequence with GTCN PAM
gauuauaucaaggaaaaggu

SEQ ID NO: 9442 - RNA, 20 nt, Artificial Sequence
  targeting sequence with GTCN PAM
ugguuugaggcuaacauguc

SEQ ID NO: 9443 - RNA, 20 nt, Artificial Sequence
  targeting sequence with GTCN PAM
uuaaugacuguaacauuugu

SEQ ID NO: 9444 - RNA, 20 nt, Artificial Sequence
  targeting sequence with GTCN PAM
uuaaagacauguuagccuca

SEQ ID NO: 9445 - RNA, 20 nt, Artificial Sequence
  targeting sequence with GTCN PAM
cugucucuuuuuaauagaga

SEQ ID NO: 9446 - RNA, 20 nt, Artificial Sequence
  targeting sequence with GTCN PAM
cuuuuuaauagagagaaggu

SEQ ID NO: 9447 - RNA, 20 nt, Artificial Sequence
  targeting sequence with GTCN PAM
caaacucagggcuguugaca

SEQ ID NO: 9448 - RNA, 20 nt, Artificial Sequence
  targeting sequence with GTCN PAM
acagcccugaguuugagacc

SEQ ID NO: 9449 - RNA, 20 nt, Artificial Sequence
  targeting sequence with GTCN PAM
uuuaaaagugaguuaaagac

SEQ ID NO: 9450 - RNA, 20 nt, Artificial Sequence
  targeting sequence with GTCN PAM
uuaacucacuuuuaaaggac

SEQ ID NO: 9451 - RNA, 20 nt, Artificial Sequence
  targeting sequence with GTCN PAM
agcagugccuuugaagacga

SEQ ID NO: 9452 - RNA, 20 nt, Artificial Sequence
  targeting sequence with GTCN PAM
ucaaaggcacugcuggacau

SEQ ID NO: 9453 - RNA, 20 nt, Artificial Sequence
  targeting sequence with GTCN PAM
ucgucuucaaaggcacugcu

SEQ ID NO: 9454 - RNA, 20 nt, Artificial Sequence
  targeting sequence with GTCN PAM
gggcagucuugcuuggggca

SEQ ID NO: 9455 - RNA, 20 nt, Artificial Sequence
  targeting sequence with GTCN PAM
ugcuuggggcacggugguca

SEQ ID NO: 9456 - RNA, 20 nt, Artificial Sequence
  targeting sequence with GTCN PAM
acggcuaugcuggcucggag

SEQ ID NO: 9457 - RNA, 20 nt, Artificial Sequence
  targeting sequence with GTCN PAM
uguccauucucaccucugac

SEQ ID NO: 9458 - RNA, 20 nt, Artificial Sequence
  targeting sequence with GTCN PAM
auucucaccucugacugccc

SEQ ID NO: 9459 - RNA, 20 nt, Artificial Sequence
  targeting sequence with GTCN PAM
gaggugagaauggacaggac

SEQ ID NO: 9460 - RNA, 20 nt, Artificial Sequence
  targeting sequence with GTCN PAM
ccucacagcucugcccuggg

SEQ ID NO: 9461 - RNA, 20 nt, Artificial Sequence
  targeting sequence with GTCN PAM
cuugggccuggccucugaga

SEQ ID NO: 9462 - RNA, 20 nt, Artificial Sequence
  targeting sequence with GTCN PAM
uagggacggcuuggcaaucc

SEQ ID NO: 9463 - RNA, 20 nt, Artificial Sequence
  targeting sequence with GTCN PAM
cuaggacucuuguuuccagc

SEQ ID NO: 9464 - RNA, 20 nt, Artificial Sequence
  targeting sequence with GTCN PAM
agcccccgagaagcagcagu

SEQ ID NO: 9465 - RNA, 20 nt, Artificial Sequence
  targeting sequence with GTCN PAM
cauuuccccgugggagcaac

SEQ ID NO: 9466 - RNA, 20 nt, Artificial Sequence
  targeting sequence with GTCN PAM
uagcaaccccccuuuuuuuu

SEQ ID NO: 9467 - RNA, 20 nt, Artificial Sequence
  targeting sequence with GTCN PAM
uugcgauaguuugcucagaa

SEQ ID NO: 9468 - RNA, 20 nt, Artificial Sequence
  targeting sequence with GTCN PAM
cuacaaaggacaugaacuca

SEQ ID NO: 9469 - RNA, 20 nt, Artificial Sequence
  targeting sequence with GTCN PAM
uuuguagggacauggaugaa

SEQ ID NO: 9470 - RNA, 20 nt, Artificial Sequence
  targeting sequence with GTCN PAM
aucauugauggaccuuugau

SEQ ID NO: 9471 - RNA, 20 nt, Artificial Sequence
  targeting sequence with GTCN PAM
aucaaugauagacuggauua

SEQ ID NO: 9472 - RNA, 20 nt, Artificial Sequence
  targeting sequence with GTCN PAM
gugcucaggaggagagggga

SEQ ID NO: 9473 - RNA, 20 nt, Artificial Sequence
  targeting sequence with GTCN PAM
cacagcaaacagguggcaaa

SEQ ID NO: 9474 - RNA, 20 nt, Artificial Sequence
  targeting sequence with GTCN PAM
ccguggggcuggaggaaaug

SEQ ID NO: 9475 - RNA, 20 nt, Artificial Sequence
  targeting sequence with GTCN PAM
uucacaugcaggaaugagaa

SEQ ID NO: 9476 - RNA, 20 nt, Artificial Sequence
  targeting sequence with GTCN PAM
ggagagggcgucguucacau

SEQ ID NO: 9477 - RNA, 20 nt, Artificial Sequence
  targeting sequence with GTCN PAM
uugcccucugugcucagggg

SEQ ID NO: 9478 - RNA, 20 nt, Artificial Sequence
  targeting sequence with GTCN PAM
ccugagcacagagggcaagg

SEQ ID NO: 9479 - RNA, 20 nt, Artificial Sequence
  targeting sequence with GTCN PAM
ccaccccggcccaugagucc

SEQ ID NO: 9480 - RNA, 20 nt, Artificial Sequence
  targeting sequence with GTCN PAM
gagaaugccgcccauuaucc

SEQ ID NO: 9481 - RNA, 20 nt, Artificial Sequence
  targeting sequence with GTCN PAM
agucaugggucugggcccgu

SEQ ID NO: 9482 - RNA, 20 nt, Artificial Sequence
  targeting sequence with GTCN PAM
ugggucugggcccgugaaag

SEQ ID NO: 9483 - RNA, 20 nt, Artificial Sequence
  targeting sequence with GTCN PAM
gggcccgugaaaggacccgg

SEQ ID NO: 9484 - RNA, 20 nt, Artificial Sequence
  targeting sequence with GTCN PAM
uuucacgggcccagacccau

SEQ ID NO: 9485 - RNA, 20 nt, Artificial Sequence
  targeting sequence with GTCN PAM
agcagaagccucagaggggc

SEQ ID NO: 9486 - RNA, 20 nt, Artificial Sequence
  targeting sequence with GTCN PAM
ccuggagauggcagccaggg

SEQ ID NO: 9487 - RNA, 20 nt, Artificial Sequence
  targeting sequence with GTCN PAM
gcagcacagcuguuugaugg

SEQ ID NO: 9488 - RNA, 20 nt, Artificial Sequence
  targeting sequence with GTCN PAM
uggauuugaaccggugucug

SEQ ID NO: 9489 - RNA, 20 nt, Artificial Sequence
  targeting sequence with GTCN PAM
ccucaccuccugccucaguu

SEQ ID NO: 9490 - RNA, 20 nt, Artificial Sequence
  targeting sequence with GTCN PAM
ccagcuaguacgugguagaa

SEQ ID NO: 9491 - RNA, 20 nt, Artificial Sequence
  targeting sequence with GTCN PAM
uguucuuaaugaacuugagu

SEQ ID NO: 9492 - RNA, 20 nt, Artificial Sequence
  targeting sequence with GTCN PAM
ccauggccccaggccccagu

SEQ ID NO: 9493 - RNA, 20 nt, Artificial Sequence
  targeting sequence with GTCN PAM
ugagggauacaaaaaguuca

SEQ ID NO: 9494 - RNA, 20 nt, Artificial Sequence
  targeting sequence with GTCN PAM
uuccuagugaacuccuaggc

SEQ ID NO: 9495 - RNA, 20 nt, Artificial Sequence
  targeting sequence with GTCN PAM
ugagggaggccuaggaguuc

SEQ ID NO: 9496 - RNA, 20 nt, Artificial Sequence
  targeting sequence with GTCN PAM
aaagaccuucugagaagacu

SEQ ID NO: 9497 - RNA, 20 nt, Artificial Sequence
  targeting sequence with GTCN PAM
uuagacuaggucuugaggga

SEQ ID NO: 9498 - RNA, 20 nt, Artificial Sequence
  targeting sequence with GTCN PAM
ucucagaaggucuuuagacu

SEQ ID NO: 9499 - RNA, 20 nt, Artificial Sequence
  targeting sequence with GTCN PAM
cgcccuguagugagcuucuu

SEQ ID NO: 9500 - RNA, 20 nt, Artificial Sequence
  targeting sequence with GTCN PAM
ucucugcggaggaacuuggg

SEQ ID NO: 9501 - RNA, 20 nt, Artificial Sequence
  targeting sequence with GTCN PAM
caaguuccuccgcagagagg

SEQ ID NO: 9502 - RNA, 20 nt, Artificial Sequence
  targeting sequence with GTCN PAM
cccaaaacucccuaaagaac

SEQ ID NO: 9503 - RNA, 20 nt, Artificial Sequence
  targeting sequence with GTCN PAM
uucucguaaggcugcucuug

SEQ ID NO: 9504 - RNA, 20 nt, Artificial Sequence
  targeting sequence with GTCN PAM
caggggaagccacaggggaa

SEQ ID NO: 9505 - RNA, 20 nt, Artificial Sequence
  targeting sequence with GTCN PAM
ccaagauuuggaucuggcug

SEQ ID NO: 9506 - RNA, 20 nt, Artificial Sequence
  targeting sequence with GTCN PAM
augcagcuaaugcuuccuga

SEQ ID NO: 9507 - RNA, 20 nt, Artificial Sequence
  targeting sequence with GTCN PAM
ucacaguggccucaggaagc

SEQ ID NO: 9508 - RNA, 20 nt, Artificial Sequence
  targeting sequence with GTCN PAM
ggguccucacaguggccuca

SEQ ID NO: 9509 - RNA, 20 nt, Artificial Sequence
  targeting sequence with GTCN PAM
cuuccucccaccuguccaga

SEQ ID NO: 9510 - RNA, 20 nt, Artificial Sequence
  targeting sequence with GTCN PAM
agagguugcuucccaaucac

SEQ ID NO: 9511 - RNA, 20 nt, Artificial Sequence
  targeting sequence with GTCN PAM
caccauccaggggaggcuau

SEQ ID NO: 9512 - RNA, 20 nt, Artificial Sequence
  targeting sequence with GTCN PAM
gaacaggggcaggcggccgc

SEQ ID NO: 9513 - RNA, 20 nt, Artificial Sequence
  targeting sequence with GTCN PAM
cgcccauagugccggcggcc

SEQ ID NO: 9514 - RNA, 20 nt, Artificial Sequence
  targeting sequence with GTCN PAM
cagccgucucgcccauagug

SEQ ID NO: 9515 - RNA, 20 nt, Artificial Sequence
  targeting sequence with GTCN PAM
agccuucugugcaggucuca

SEQ ID NO: 9516 - RNA, 20 nt, Artificial Sequence
  targeting sequence with GTCN PAM
ucccuccuauccucuuccuc

SEQ ID NO: 9517 - RNA, 20 nt, Artificial Sequence
  targeting sequence with GTCN PAM
gcacagaugcagccaccagg

SEQ ID NO: 9518 - RNA, 20 nt, Artificial Sequence
  targeting sequence with GTCN PAM
ugccacaccuggggcccacc

SEQ ID NO: 9519 - RNA, 20 nt, Artificial Sequence
  targeting sequence with GTCN PAM
gcccagccaagccucucgag

SEQ ID NO: 9520 - RNA, 20 nt, Artificial Sequence
  targeting sequence with GTCN PAM
aagccaggggcugccugggc

SEQ ID NO: 9521 - RNA, 20 nt, Artificial Sequence
  targeting sequence with GTCN PAM
gaauuuucuaaguuuuccuc

SEQ ID NO: 9522 - RNA, 20 nt, Artificial Sequence
  targeting sequence with GTCN PAM
gaauccccacugcccauaau

SEQ ID NO: 9523 - RNA, 20 nt, Artificial Sequence
  targeting sequence with GTCN PAM
cacaaauggaagugaauuau

SEQ ID NO: 9524 - RNA, 20 nt, Artificial Sequence
  targeting sequence with GTCN PAM
cguggcugggagggucuagg

SEQ ID NO: 9525 - RNA, 20 nt, Artificial Sequence
  targeting sequence with GTCN PAM
cggcgugaggccuggcgggc

SEQ ID NO: 9526 - RNA, 20 nt, Artificial Sequence
  targeting sequence with GTCN PAM
guuuugccgggcguugcugu

SEQ ID NO: 9527 - RNA, 20 nt, Artificial Sequence
  targeting sequence with GTCN PAM
gccucaauuuccuucucuga

SEQ ID NO: 9528 - RNA, 20 nt, Artificial Sequence
  targeting sequence with GTCN PAM
agcccugugggcugucccac

SEQ ID NO: 9529 - RNA, 20 nt, Artificial Sequence
  targeting sequence with GTCN PAM
cacccacacuccuucugugc

SEQ ID NO: 9530 - RNA, 20 nt, Artificial Sequence
  targeting sequence with GTCN PAM
cccacccccuggcccuccug

SEQ ID NO: 9531 - RNA, 20 nt, Artificial Sequence
  targeting sequence with GTCN PAM
aacuuacacaggagggccag

SEQ ID NO: 9532 - RNA, 20 nt, Artificial Sequence
  targeting sequence with GTCN PAM
ccaucugggggugggaggug

SEQ ID NO: 9533 - RNA, 20 nt, Artificial Sequence
  targeting sequence with GTCN PAM
ucacugccugcucaggaguc

SEQ ID NO: 9534 - RNA, 20 nt, Artificial Sequence
  targeting sequence with GTCN PAM
ucacacuagcgucccuuucc

SEQ ID NO: 9535 - RNA, 20 nt, Artificial Sequence
  targeting sequence with GTCN PAM
cuuuccaugcucggcucagc

SEQ ID NO: 9536 - RNA, 20 nt, Artificial Sequence
  targeting sequence with GTCN PAM
acuaagggccgucuucagcc

SEQ ID NO: 9537 - RNA, 20 nt, Artificial Sequence
  targeting sequence with GTCN PAM
ucagcccggugcugggugcu

SEQ ID NO: 9538 - RNA, 20 nt, Artificial Sequence
  targeting sequence with GTCN PAM
gagagggcuuccuggaggag

SEQ ID NO: 9539 - RNA, 20 nt, Artificial Sequence
  targeting sequence with GTCN PAM
uugcacaugcuguuuccucc

SEQ ID NO: 9540 - RNA, 20 nt, Artificial Sequence
  targeting sequence with GTCN PAM
uucgcuacugcuggcccugc

SEQ ID NO: 9541 - RNA, 20 nt, Artificial Sequence
  targeting sequence with GTCN PAM
ggcaaggcagggccagcagu

SEQ ID NO: 9542 - RNA, 20 nt, Artificial Sequence
  targeting sequence with GTCN PAM
gggagggcacggauggggag

SEQ ID NO: 9543 - RNA, 20 nt, Artificial Sequence
  targeting sequence with GTCN PAM
gcagaggagccggcaggaga

SEQ ID NO: 9544 - RNA, 20 nt, Artificial Sequence
  targeting sequence with GTCN PAM
cacagcucucaaugaagaga

SEQ ID NO: 9545 - RNA, 20 nt, Artificial Sequence
  targeting sequence with GTCN PAM
ccacucccagauccugccug

SEQ ID NO: 9546 - RNA, 20 nt, Artificial Sequence
  targeting sequence with GTCN PAM
accguucaaucccccuccuu

SEQ ID NO: 9547 - RNA, 20 nt, Artificial Sequence
  targeting sequence with GTCN PAM
gggccuguguccaccguuca

SEQ ID NO: 9548 - RNA, 20 nt, Artificial Sequence
  targeting sequence with GTCN PAM
cugcugcugcugggguggga

SEQ ID NO: 9549 - RNA, 20 nt, Artificial Sequence
  targeting sequence with GTCN PAM
caccccagcagcagcagcga

SEQ ID NO: 9550 - RNA, 20 nt, Artificial Sequence
  targeting sequence with GTCN PAM
gcaccgcugucccaccccag

SEQ ID NO: 9551 - RNA, 20 nt, Artificial Sequence
  targeting sequence with GTCN PAM
ggaguccucagucacacagc

SEQ ID NO: 9552 - RNA, 20 nt, Artificial Sequence
  targeting sequence with GTCN PAM
ucagucacacagcagagcug

SEQ ID NO: 9553 - RNA, 20 nt, Artificial Sequence
  targeting sequence with GTCN PAM
cacagcagagcugggaugug

SEQ ID NO: 9554 - RNA, 20 nt, Artificial Sequence
  targeting sequence with GTCN PAM
ggcagggccacuccuucccc

SEQ ID NO: 9555 - RNA, 20 nt, Artificial Sequence
  targeting sequence with GTCN PAM
gcucacacuuccagggacag

SEQ ID NO: 9556 - RNA, 20 nt, Artificial Sequence
  targeting sequence with GTCN PAM
cuggaagugugagcagacgu

SEQ ID NO: 9557 - RNA, 20 nt, Artificial Sequence
  targeting sequence with GTCN PAM
gccucacacauauguccccu

SEQ ID NO: 9558 - RNA, 20 nt, Artificial Sequence
  targeting sequence with GTCN PAM
ccuugcuggaaauguccacu

SEQ ID NO: 9559 - RNA, 20 nt, Artificial Sequence
  targeting sequence with GTCN PAM
acucccacccccaccccggc

SEQ ID NO: 9560 - RNA, 20 nt, Artificial Sequence
  targeting sequence with GTCN PAM
gugauuaggaaccuggccgg

SEQ ID NO: 9561 - RNA, 20 nt, Artificial Sequence
  targeting sequence with GTCN PAM
cccggucagugauuaggaac

SEQ ID NO: 9562 - RNA, 20 nt, Artificial Sequence
  targeting sequence with GTCN PAM
ugccccaccauucuagagcc

SEQ ID NO: 9563 - RNA, 20 nt, Artificial Sequence
  targeting sequence with GTCN PAM
ucaccuccaguccugcccca

SEQ ID NO: 9564 - RNA, 20 nt, Artificial Sequence
  targeting sequence with GTCN PAM
uugcccagugcuggcucccu

SEQ ID NO: 9565 - RNA, 20 nt, Artificial Sequence
  targeting sequence with GTCN PAM
caagcccaggccaagggagc

SEQ ID NO: 9566 - RNA, 20 nt, Artificial Sequence
  targeting sequence with GTCN PAM
ggucccaagcccaggccaag

SEQ ID NO: 9567 - RNA, 20 nt, Artificial Sequence
  targeting sequence with GTCN PAM
ccuucguggauacugaucuc

SEQ ID NO: 9568 - RNA, 20 nt, Artificial Sequence
  targeting sequence with GTCN PAM
gcagagccagcagaugaggu

SEQ ID NO: 9569 - RNA, 20 nt, Artificial Sequence
  targeting sequence with GTCN PAM
ccauagugcugucggcagag

SEQ ID NO: 9570 - RNA, 20 nt, Artificial Sequence
  targeting sequence with GTCN PAM
ucacaguccccauagugcug

SEQ ID NO: 9571 - RNA, 20 nt, Artificial Sequence
  targeting sequence with GTCN PAM
uguucuccuuccccuucucc

SEQ ID NO: 9572 - RNA, 20 nt, Artificial Sequence
  targeting sequence with GTCN PAM
ggccccuuccagcacuaagg

SEQ ID NO: 9573 - RNA, 20 nt, Artificial Sequence
  targeting sequence with GTCN PAM
ccagggcaccuuagugcugg

SEQ ID NO: 9574 - RNA, 20 nt, Artificial Sequence
  targeting sequence with GTCN PAM
cuuggggugccuacuggacc

SEQ ID NO: 9575 - RNA, 20 nt, Artificial Sequence
  targeting sequence with GTCN PAM
aguaggcaccccaagggacu

SEQ ID NO: 9576 - RNA, 20 nt, Artificial Sequence
  targeting sequence with GTCN PAM
uuggugccaggcccaggcag

SEQ ID NO: 9577 - RNA, 20 nt, Artificial Sequence
  targeting sequence with GTCN PAM
uccagaggguguaauuaggc

SEQ ID NO: 9578 - RNA, 20 nt, Artificial Sequence
  targeting sequence with GTCN PAM
ccaggccagguccggcugac

SEQ ID NO: 9579 - RNA, 20 nt, Artificial Sequence
  targeting sequence with GTCN PAM
ggcugaccccuacguaggga

SEQ ID NO: 9580 - RNA, 20 nt, Artificial Sequence
  targeting sequence with GTCN PAM
gccggaccuggccuggggac

SEQ ID NO: 9581 - RNA, 20 nt, Artificial Sequence
  targeting sequence with GTCN PAM
cuacguaggggucagccgga

SEQ ID NO: 9582 - RNA, 20 nt, Artificial Sequence
  targeting sequence with GTCN PAM
acccuggagggaaguggaag

SEQ ID NO: 9583 - RNA, 20 nt, Artificial Sequence
  targeting sequence with GTCN PAM
cgaguguuuguucaggcugg

SEQ ID NO: 9584 - RNA, 20 nt, Artificial Sequence
  targeting sequence with GTCN PAM
aagggggucaggcuccccca

SEQ ID NO: 9585 - RNA, 20 nt, Artificial Sequence
  targeting sequence with GTCN PAM
ggcucccccaccgggaggaa

SEQ ID NO: 9586 - RNA, 20 nt, Artificial Sequence
  targeting sequence with GTCN PAM
gcucucccagccagguucuc

SEQ ID NO: 9587 - RNA, 20 nt, Artificial Sequence
  targeting sequence with GTCN PAM
uaguccaaacugugugcccc

SEQ ID NO: 9588 - RNA, 20 nt, Artificial Sequence
  targeting sequence with GTCN PAM
aaacugugugcccccgacaa

SEQ ID NO: 9589 - RNA, 20 nt, Artificial Sequence
  targeting sequence with GTCN PAM
ggggcacacaguuuggacua

SEQ ID NO: 9590 - RNA, 20 nt, Artificial Sequence
  targeting sequence with GTCN PAM
cauccugagguauugggggu

SEQ ID NO: 9591 - RNA, 20 nt, Artificial Sequence
  targeting sequence with GTCN PAM
ccagauacagucucauccug

SEQ ID NO: 9592 - RNA, 20 nt, Artificial Sequence
  targeting sequence with GTCN PAM
cgaacuccugggcucaagcg

SEQ ID NO: 9593 - RNA, 20 nt, Artificial Sequence
  targeting sequence with GTCN PAM
cacuguguugccuaggcugg

SEQ ID NO: 9594 - RNA, 20 nt, Artificial Sequence
  targeting sequence with GTCN PAM
cagcuacuuagaggaccgag

SEQ ID NO: 9595 - RNA, 20 nt, Artificial Sequence
  targeting sequence with GTCN PAM
ucuaaguagcugagacuacg

SEQ ID NO: 9596 - RNA, 20 nt, Artificial Sequence
  targeting sequence with GTCN PAM
aggcugcagugagcuguggc

SEQ ID NO: 9597 - RNA, 20 nt, Artificial Sequence
  targeting sequence with GTCN PAM
guggccucuuguuacggcag

SEQ ID NO: 9598 - RNA, 20 nt, Artificial Sequence
  targeting sequence with GTCN PAM
cggggccagggggagguuug

SEQ ID NO: 9599 - RNA, 20 nt, Artificial Sequence
  targeting sequence with GTCN PAM
aagaccaaggagucugcagg

SEQ ID NO: 9600 - RNA, 20 nt, Artificial Sequence
  targeting sequence with GTCN PAM
uggacuuggccuugcagccu

SEQ ID NO: 9601 - RNA, 20 nt, Artificial Sequence
  targeting sequence with GTCN PAM
gcaggguuggugucugcugc

SEQ ID NO: 9602 - RNA, 20 nt, Artificial Sequence
  targeting sequence with GTCN PAM
gcugcagccucucuccuugg

SEQ ID NO: 9603 - RNA, 20 nt, Artificial Sequence
  targeting sequence with GTCN PAM
ucacaugaucuucccucacu

SEQ ID NO: 9604 - RNA, 20 nt, Artificial Sequence
  targeting sequence with GTCN PAM
caaaaaaaaaaaaauaaaga

SEQ ID NO: 9605 - RNA, 20 nt, Artificial Sequence
  targeting sequence with GTCN PAM
gacucugucacccaggcugg

SEQ ID NO: 9606 - RNA, 20 nt, Artificial Sequence
  targeting sequence with GTCN PAM
gacccugucucaaaaaaaaa

SEQ ID NO: 9607 - RNA, 20 nt, Artificial Sequence
  targeting sequence with GTCN PAM
cccaggcuggagugcagugu

SEQ ID NO: 9608 - RNA, 20 nt, Artificial Sequence
  targeting sequence with GTCN PAM
aggcugcagugagcugagau

SEQ ID NO: 9609 - RNA, 20 nt, Artificial Sequence
  targeting sequence with GTCN PAM
cagcuacucaggaggcugag

SEQ ID NO: 9610 - RNA, 20 nt, Artificial Sequence
  targeting sequence with GTCN PAM
aggacggugcuuuugcugug

SEQ ID NO: 9611 - RNA, 20 nt, Artificial Sequence
  targeting sequence with GTCN PAM
uggaccaagcucagugagga

SEQ ID NO: 9612 - RNA, 20 nt, Artificial Sequence
  targeting sequence with GTCN PAM
ugcccuuuccagaucucccc

SEQ ID NO: 9613 - RNA, 20 nt, Artificial Sequence
  targeting sequence with GTCN PAM
gggagggccucuuuggaggg

SEQ ID NO: 9614 - RNA, 20 nt, Artificial Sequence
  targeting sequence with GTCN PAM
auccagugagagagauggau

SEQ ID NO: 9615 - RNA, 20 nt, Artificial Sequence
  targeting sequence with GTCN PAM
ccagggccacagcagggccc

SEQ ID NO: 9616 - RNA, 20 nt, Artificial Sequence
  targeting sequence with GTCN PAM
ggcucaccuugguacugcca

SEQ ID NO: 9617 - RNA, 20 nt, Artificial Sequence
  targeting sequence with GTCN PAM
cagggucucagaggcagagc

SEQ ID NO: 9618 - RNA, 20 nt, Artificial Sequence
  targeting sequence with GTCN PAM
cagaggcagagcagggccuc

SEQ ID NO: 9619 - RNA, 20 nt, Artificial Sequence
  targeting sequence with GTCN PAM
aaccaugaggacugccuacc

SEQ ID NO: 9620 - RNA, 20 nt, Artificial Sequence
  targeting sequence with GTCN PAM
ucaugguuggaccacccaca

SEQ ID NO: 9621 - RNA, 20 nt, Artificial Sequence
  targeting sequence with GTCN PAM
uccagugauuccuccagagg

SEQ ID NO: 9622 - RNA, 20 nt, Artificial Sequence
  targeting sequence with GTCN PAM
uaccugcuuagccaucuagc

SEQ ID NO: 9623 - RNA, 20 nt, Artificial Sequence
  targeting sequence with GTCN PAM
aaagugaugggcuguguuuc

SEQ ID NO: 9624 - RNA, 20 nt, Artificial Sequence
  targeting sequence with GTCN PAM
ccaaguccaaagugaugggc

SEQ ID NO: 9625 - RNA, 20 nt, Artificial Sequence
  targeting sequence with GTCN PAM
gaggaggacuugagcauagg

SEQ ID NO: 9626 - RNA, 20 nt, Artificial Sequence
  targeting sequence with GTCN PAM
uccucagacacuggagcagg

SEQ ID NO: 9627 - RNA, 20 nt, Artificial Sequence
  targeting sequence with GTCN PAM
ugggacucgugggguggagc

SEQ ID NO: 9628 - RNA, 20 nt, Artificial Sequence
  targeting sequence with GTCN PAM
caggacugagcaggcacgca

SEQ ID NO: 9629 - RNA, 20 nt, Artificial Sequence
  targeting sequence with GTCN PAM
ccaggugaaugcuccacccc

SEQ ID NO: 9630 - RNA, 20 nt, Artificial Sequence
  targeting sequence with GTCN PAM
cagccccagcucuaccccac

SEQ ID NO: 9631 - RNA, 20 nt, Artificial Sequence
  targeting sequence with GTCN PAM
acccugucuugagacagccc

SEQ ID NO: 9632 - RNA, 20 nt, Artificial Sequence
  targeting sequence with GTCN PAM
ugagacagcccuacucccac

SEQ ID NO: 9633 - RNA, 20 nt, Artificial Sequence
  targeting sequence with GTCN PAM
caagacaggguugacugagc

SEQ ID NO: 9634 - RNA, 20 nt, Artificial Sequence
  targeting sequence with GTCN PAM
cagccuuucaagugggagua

SEQ ID NO: 9635 - RNA, 20 nt, Artificial Sequence
  targeting sequence with GTCN PAM
uuucugucucagccuuucaa

SEQ ID NO: 9636 - RNA, 20 nt, Artificial Sequence
  targeting sequence with GTCN PAM
gucuuuucugucucagccuu

SEQ ID NO: 9637 - RNA, 20 nt, Artificial Sequence
  targeting sequence with GTCN PAM
aauguggcuggacgcggugg

SEQ ID NO: 9638 - RNA, 20 nt, Artificial Sequence
  targeting sequence with GTCN PAM
agccacauuugacuuuuuuu

SEQ ID NO: 9639 - RNA, 20 nt, Artificial Sequence
  targeting sequence with GTCN PAM
ggagauagagaccagccugg

SEQ ID NO: 9640 - RNA, 20 nt, Artificial Sequence
  targeting sequence with GTCN PAM
cuaucuccugaccucgugau

SEQ ID NO: 9641 - RNA, 20 nt, Artificial Sequence
  targeting sequence with GTCN PAM
acuaaaaauacaaaaaaaau

SEQ ID NO: 9642 - RNA, 20 nt, Artificial Sequence
  targeting sequence with GTCN PAM
caggagugcaguggcgcaau

SEQ ID NO: 9643 - RNA, 20 nt, Artificial Sequence
  targeting sequence with GTCN PAM
gucccaggagugcaguggcg

SEQ ID NO: 9644 - RNA, 20 nt, Artificial Sequence
  targeting sequence with GTCN PAM
cacucugucugucccaggag

SEQ ID NO: 9645 - RNA, 20 nt, Artificial Sequence
  targeting sequence with GTCN PAM
caaaaaaaaaaaaaaaaaaa

SEQ ID NO: 9646 - RNA, 20 nt, Artificial Sequence
  targeting sequence with GTCN PAM
aauguagacacgugcauccu

SEQ ID NO: 9647 - RNA, 20 nt, Artificial Sequence
  targeting sequence with GTCN PAM
acauuugacuuuuuuuuuuu

SEQ ID NO: 9648 - RNA, 20 nt, Artificial Sequence
  targeting sequence with GTCN PAM
agauauuggaauaaaauuaa

SEQ ID NO: 9649 - RNA, 20 nt, Artificial Sequence
  targeting sequence with GTCN PAM
auaaaaaccuguacagaugc

SEQ ID NO: 9650 - RNA, 20 nt, Artificial Sequence
  targeting sequence with GTCN PAM
cagcuccauugauaauuucu

SEQ ID NO: 9651 - RNA, 20 nt, Artificial Sequence
  targeting sequence with GTCN PAM
cugggcuggugaagagguaa

SEQ ID NO: 9652 - RNA, 20 nt, Artificial Sequence
  targeting sequence with GTCN PAM
gaguaucaagaggcuguucc

SEQ ID NO: 9653 - RNA, 20 nt, Artificial Sequence
  targeting sequence with GTCN PAM
uguggccuggccuuuuccaa

SEQ ID NO: 9654 - RNA, 20 nt, Artificial Sequence
  targeting sequence with GTCN PAM
cguccuguggccuggccuuu

SEQ ID NO: 9655 - RNA, 20 nt, Artificial Sequence
  targeting sequence with GTCN PAM
cuccccccagccccagcccu

SEQ ID NO: 9656 - RNA, 20 nt, Artificial Sequence
  targeting sequence with GTCN PAM
gucccuccccccagccccag

SEQ ID NO: 9657 - RNA, 20 nt, Artificial Sequence
  targeting sequence with GTCN PAM
uguucagagcauuuacaggg

SEQ ID NO: 9658 - RNA, 20 nt, Artificial Sequence
  targeting sequence with GTCN PAM
gguaaacuuugcacguuuau

SEQ ID NO: 9659 - RNA, 20 nt, Artificial Sequence
  targeting sequence with GTCN PAM
ccaggcuaagaaccuggcac

SEQ ID NO: 9660 - RNA, 20 nt, Artificial Sequence
  targeting sequence with GTCN PAM
cugcuuucugaccggcaggg

SEQ ID NO: 9661 - RNA, 20 nt, Artificial Sequence
  targeting sequence with GTCN PAM
gaaagcagggacccgccccg

SEQ ID NO: 9662 - RNA, 20 nt, Artificial Sequence
  targeting sequence with GTCN PAM
gcgcuuccguuccggcuccg

SEQ ID NO: 9663 - RNA, 20 nt, Artificial Sequence
  targeting sequence with GTCN PAM
ucccgcggccagaggugcga

SEQ ID NO: 9664 - RNA, 20 nt, Artificial Sequence
  targeting sequence with GTCN PAM
caccucuggccgcgggagga

SEQ ID NO: 9665 - RNA, 20 nt, Artificial Sequence
  targeting sequence with GTCN PAM
cgcagcccgugcucgucccg

SEQ ID NO: 9666 - RNA, 20 nt, Artificial Sequence
  targeting sequence with GTCN PAM
cgccucgcuuggagggagca

SEQ ID NO: 9667 - RNA, 20 nt, Artificial Sequence
  targeting sequence with GTCN PAM
ugugccuccgcuuccccggc

SEQ ID NO: 9668 - RNA, 20 nt, Artificial Sequence
  targeting sequence with GTCN PAM
ccgcaacuucuggguggagc

SEQ ID NO: 9669 - RNA, 20 nt, Artificial Sequence
  targeting sequence with GTCN PAM
ucugggggcagcaugcugcg

SEQ ID NO: 9670 - RNA, 20 nt, Artificial Sequence
  targeting sequence with GTCN PAM
cccacaccucauucaccccc

SEQ ID NO: 9671 - RNA, 20 nt, Artificial Sequence
  targeting sequence with GTCN PAM
uagaagccgcagaugccaag

SEQ ID NO: 9672 - RNA, 20 nt, Artificial Sequence
  targeting sequence with GTCN PAM
ccuccuuggcaucugcggcu

SEQ ID NO: 9673 - RNA, 20 nt, Artificial Sequence
  targeting sequence with GTCN PAM
cuugggagcaaagcugggga

SEQ ID NO: 9674 - RNA, 20 nt, Artificial Sequence
  targeting sequence with GTCN PAM
ccagcuuugcucccaaguga

SEQ ID NO: 9675 - RNA, 20 nt, Artificial Sequence
  targeting sequence with GTCN PAM
cugguuccuuuaguccccag

SEQ ID NO: 9676 - RNA, 20 nt, Artificial Sequence
  targeting sequence with GTCN PAM
ucagugccuggcccagagcg

SEQ ID NO: 9677 - RNA, 20 nt, Artificial Sequence
  targeting sequence with GTCN PAM
uguccucagggcccuguccg

SEQ ID NO: 9678 - RNA, 20 nt, Artificial Sequence
  targeting sequence with GTCN PAM
ucagggcccuguccggaaga

SEQ ID NO: 9679 - RNA, 20 nt, Artificial Sequence
  targeting sequence with GTCN PAM
ggaagaggacugggcagccu

SEQ ID NO: 9680 - RNA, 20 nt, Artificial Sequence
  targeting sequence with GTCN PAM
ucuuccggacagggcccuga

SEQ ID NO: 9681 - RNA, 20 nt, Artificial Sequence
  targeting sequence with GTCN PAM
gcggcaaugaaugaauguuc

SEQ ID NO: 9682 - RNA, 20 nt, Artificial Sequence
  targeting sequence with GTCN PAM
cuugggcggucauuggaggc

SEQ ID NO: 9683 - RNA, 20 nt, Artificial Sequence
  targeting sequence with GTCN PAM
uuggaggcucugggaggcua

SEQ ID NO: 9684 - RNA, 20 nt, Artificial Sequence
  targeting sequence with GTCN PAM
gcgagggccgcguggaugug

SEQ ID NO: 9685 - RNA, 20 nt, Artificial Sequence
  targeting sequence with GTCN PAM
cccacucucacgccccucca

SEQ ID NO: 9686 - RNA, 20 nt, Artificial Sequence
  targeting sequence with GTCN PAM
ggucucccacucucacgccc

SEQ ID NO: 9687 - RNA, 20 nt, Artificial Sequence
  targeting sequence with GTCN PAM
caacuccagccacuccccuc

SEQ ID NO: 9688 - RNA, 20 nt, Artificial Sequence
  targeting sequence with GTCN PAM
aagccccaccguuuccuucu

SEQ ID NO: 9689 - RNA, 20 nt, Artificial Sequence
  targeting sequence with GTCN PAM
ggaaggcuuuagaucuaguc

SEQ ID NO: 9690 - RNA, 20 nt, Artificial Sequence
  targeting sequence with GTCN PAM
cgcuuggucacuuccgucuc

SEQ ID NO: 9691 - RNA, 20 nt, Artificial Sequence
  targeting sequence with GTCN PAM
cuuccgucuccgggccucag

SEQ ID NO: 9692 - RNA, 20 nt, Artificial Sequence
  targeting sequence with GTCN PAM
ccgggccucagcuucccagg

SEQ ID NO: 9693 - RNA, 20 nt, Artificial Sequence
  targeting sequence with GTCN PAM
uacuaaucuuggcuugagag

SEQ ID NO: 9694 - RNA, 20 nt, Artificial Sequence
  targeting sequence with GTCN PAM
cucugccucugcgaaccgcu

SEQ ID NO: 9695 - RNA, 20 nt, Artificial Sequence
  targeting sequence with GTCN PAM
ggagcccagaccccaggcag

SEQ ID NO: 9696 - RNA, 20 nt, Artificial Sequence
  targeting sequence with GTCN PAM
gggcucccgacguuccugcc

SEQ ID NO: 9697 - RNA, 20 nt, Artificial Sequence
  targeting sequence with GTCN PAM
uggacacagagggugcgcuc

SEQ ID NO: 9698 - RNA, 20 nt, Artificial Sequence
  targeting sequence with GTCN PAM
aagaccuuaaacucccugcc

SEQ ID NO: 9699 - RNA, 20 nt, Artificial Sequence
  targeting sequence with GTCN PAM
ccgcuuuguggcugcuucga

SEQ ID NO: 9700 - RNA, 20 nt, Artificial Sequence
  targeting sequence with GTCN PAM
cugucaccgcuuuguggcug

SEQ ID NO: 9701 - RNA, 20 nt, Artificial Sequence
  targeting sequence with GTCN PAM
uccaauguguauugcccaag

SEQ ID NO: 9702 - RNA, 20 nt, Artificial Sequence
  targeting sequence with GTCN PAM
uuguucuugggcaauacaca

SEQ ID NO: 9703 - RNA, 20 nt, Artificial Sequence
  targeting sequence with GTCN PAM
caacgaggucuuuuauagca

SEQ ID NO: 9704 - RNA, 20 nt, Artificial Sequence
  targeting sequence with GTCN PAM
uuuauagcacauccccuucc

SEQ ID NO: 9705 - RNA, 20 nt, Artificial Sequence
  targeting sequence with GTCN PAM
uaaauaauaauaauuaaauu

SEQ ID NO: 9706 - RNA, 20 nt, Artificial Sequence
  targeting sequence with GTCN PAM
cgcucugucgcccaggcugg

SEQ ID NO: 9707 - RNA, 20 nt, Artificial Sequence
  targeting sequence with GTCN PAM
cccaggcuggagugcagugg

SEQ ID NO: 9708 - RNA, 20 nt, Artificial Sequence
  targeting sequence with GTCN PAM
cagcuacucgggaggcugag

SEQ ID NO: 9709 - RNA, 20 nt, Artificial Sequence
  targeting sequence with GTCN PAM
cuacuaaaaauacaaaaaau

SEQ ID NO: 9710 - RNA, 20 nt, Artificial Sequence
  targeting sequence with GTCN PAM
ggucucgaucuccugaccuc

SEQ ID NO: 9711 - RNA, 20 nt, Artificial Sequence
  targeting sequence with GTCN PAM
cgaucuccugaccucgugau

SEQ ID NO: 9712 - RNA, 20 nt, Artificial Sequence
  targeting sequence with GTCN PAM
ggagaucgagaccagacugg

SEQ ID NO: 9713 - RNA, 20 nt, Artificial Sequence
  targeting sequence with GTCN PAM
caguggcucacgccuguaau

SEQ ID NO: 9714 - RNA, 20 nt, Artificial Sequence
  targeting sequence with GTCN PAM
caaaacaaacaaacgaaaua

SEQ ID NO: 9715 - RNA, 20 nt, Artificial Sequence
  targeting sequence with GTCN PAM
uccaggcuggagugcagugg

SEQ ID NO: 9716 - RNA, 20 nt, Artificial Sequence
  targeting sequence with GTCN PAM
gcagaguagcugggacuaug

SEQ ID NO: 9717 - RNA, 20 nt, Artificial Sequence
  targeting sequence with GTCN PAM
cagcuacucugcagacugag

SEQ ID NO: 9718 - RNA, 20 nt, Artificial Sequence
  targeting sequence with GTCN PAM
caggauggggaguauguucc

SEQ ID NO: 9719 - RNA, 20 nt, Artificial Sequence
  targeting sequence with GTCN PAM
gucucaggauggggaguaug

SEQ ID NO: 9720 - RNA, 20 nt, Artificial Sequence
  targeting sequence with GTCN PAM
acuaauagagguuaaaaaua

SEQ ID NO: 9721 - RNA, 20 nt, Artificial Sequence
  targeting sequence with GTCN PAM
cauaaauaagcaaagggaaa

SEQ ID NO: 9722 - RNA, 20 nt, Artificial Sequence
  targeting sequence with GTCN PAM
ugucacauaaauaagcaaag

SEQ ID NO: 9723 - RNA, 20 nt, Artificial Sequence
  targeting sequence with GTCN PAM
cuuccaauuucucauuuuua

SEQ ID NO: 9724 - RNA, 20 nt, Artificial Sequence
  targeting sequence with GTCN PAM
gaagucccagcuacuggaga

SEQ ID NO: 9725 - RNA, 20 nt, Artificial Sequence
  targeting sequence with GTCN PAM
cagcuacuggagaggcugag

SEQ ID NO: 9726 - RNA, 20 nt, Artificial Sequence
  targeting sequence with GTCN PAM
caagugauccuccugccuca

SEQ ID NO: 9727 - RNA, 20 nt, Artificial Sequence
  targeting sequence with GTCN PAM
aggaugcagugagcugugau

SEQ ID NO: 9728 - RNA, 20 nt, Artificial Sequence
  targeting sequence with GTCN PAM
cacugucacccaggcugggg

SEQ ID NO: 9729 - RNA, 20 nt, Artificial Sequence
  targeting sequence with GTCN PAM
cccaggcuggggugcagugg

SEQ ID NO: 9730 - RNA, 20 nt, Artificial Sequence
  targeting sequence with GTCN PAM
ggaguucgagaccagccugg

SEQ ID NO: 9731 - RNA, 20 nt, Artificial Sequence
  targeting sequence with GTCN PAM
cgaacuccugaccucaggug

SEQ ID NO: 9732 - RNA, 20 nt, Artificial Sequence
  targeting sequence with GTCN PAM
guguuggccuagcgcagugg

SEQ ID NO: 9733 - RNA, 20 nt, Artificial Sequence
  targeting sequence with GTCN PAM
uaaacucaaaugauccuccu

SEQ ID NO: 9734 - RNA, 20 nt, Artificial Sequence
  targeting sequence with GTCN PAM
cacucuaucucccaggcugg

SEQ ID NO: 9735 - RNA, 20 nt, Artificial Sequence
  targeting sequence with GTCN PAM
cuaaaaugaauaaauaaaua

SEQ ID NO: 9736 - RNA, 20 nt, Artificial Sequence
  targeting sequence with GTCN PAM
gcuggagggcagccuauggc

SEQ ID NO: 9737 - RNA, 20 nt, Artificial Sequence
  targeting sequence with GTCN PAM
ucuccugaugcaugagauua

SEQ ID NO: 9738 - RNA, 20 nt, Artificial Sequence
  targeting sequence with GTCN PAM
gggauuggggccgcugccuc

SEQ ID NO: 9739 - RNA, 20 nt, Artificial Sequence
  targeting sequence with GTCN PAM
guggcuggggagggugggcu

SEQ ID NO: 9740 - RNA, 20 nt, Artificial Sequence
  targeting sequence with GTCN PAM
caggggcuguucagcagggg

SEQ ID NO: 9741 - RNA, 20 nt, Artificial Sequence
  targeting sequence with GTCN PAM
ucaagcacagacaccgcuca

SEQ ID NO: 9742 - RNA, 20 nt, Artificial Sequence
  targeting sequence with GTCN PAM
gugcuugaggaccagcucca

SEQ ID NO: 9743 - RNA, 20 nt, Artificial Sequence
  targeting sequence with GTCN PAM
aagcccaaggcccugcagag

SEQ ID NO: 9744 - RNA, 20 nt, Artificial Sequence
  targeting sequence with GTCN PAM
acccagcuggaugauaagca

SEQ ID NO: 9745 - RNA, 20 nt, Artificial Sequence
  targeting sequence with GTCN PAM
acacuucuguccacccagcu

SEQ ID NO: 9746 - RNA, 20 nt, Artificial Sequence
  targeting sequence with GTCN PAM
ccaggcuugggcagaaggcu

SEQ ID NO: 9747 - RNA, 20 nt, Artificial Sequence
  targeting sequence with GTCN PAM
gggcuuugccugccucccuu

SEQ ID NO: 9748 - RNA, 20 nt, Artificial Sequence
  targeting sequence with GTCN PAM
caagggaggcaggcaaagcc

SEQ ID NO: 9749 - RNA, 20 nt, Artificial Sequence
  targeting sequence with GTCN PAM
auccagacugugcucuggca

SEQ ID NO: 9750 - RNA, 20 nt, Artificial Sequence
  targeting sequence with GTCN PAM
ggccaacuggagucgauccu

SEQ ID NO: 9751 - RNA, 20 nt, Artificial Sequence
  targeting sequence with GTCN PAM
aucccuugagccagagguca

SEQ ID NO: 9752 - RNA, 20 nt, Artificial Sequence
  targeting sequence with GTCN PAM
ggugggaauuaguuucaugu

SEQ ID NO: 9753 - RNA, 20 nt, Artificial Sequence
  targeting sequence with GTCN PAM
agagauggagaccauucugg

SEQ ID NO: 9754 - RNA, 20 nt, Artificial Sequence
  targeting sequence with GTCN PAM
uuugccuauugauccuguaa

SEQ ID NO: 9755 - RNA, 20 nt, Artificial Sequence
  targeting sequence with GTCN PAM
aagguauuuggucuuuugcc

SEQ ID NO: 9756 - RNA, 20 nt, Artificial Sequence
  targeting sequence with GTCN PAM
ucccaaucaguuggguguuu

SEQ ID NO: 9757 - RNA, 20 nt, Artificial Sequence
  targeting sequence with GTCN PAM
ccuuucaacaccuguaaugg

SEQ ID NO: 9758 - RNA, 20 nt, Artificial Sequence
  targeting sequence with GTCN PAM
caagguaaaccuuuagcgug

SEQ ID NO: 9759 - RNA, 20 nt, Artificial Sequence
  targeting sequence with GTCN PAM
cuuaaggcuccuuauccauu

SEQ ID NO: 9760 - RNA, 20 nt, Artificial Sequence
  targeting sequence with GTCN PAM
agauaccauggccuccuccg

SEQ ID NO: 9761 - RNA, 20 nt, Artificial Sequence
  targeting sequence with GTCN PAM
ucugccucuuuaccacaugu

SEQ ID NO: 9762 - RNA, 20 nt, Artificial Sequence
  targeting sequence with GTCN PAM
uguauagaguggcucuuaag

SEQ ID NO: 9763 - RNA, 20 nt, Artificial Sequence
  targeting sequence with GTCN PAM
ccucugcacgugcuccuccu

SEQ ID NO: 9764 - RNA, 20 nt, Artificial Sequence
  targeting sequence with GTCN PAM
cgcugccagaagcccugcgg

SEQ ID NO: 9765 - RNA, 20 nt, Artificial Sequence
  targeting sequence with GTCN PAM
cauagaugucccgcugccag

SEQ ID NO: 9766 - RNA, 20 nt, Artificial Sequence
  targeting sequence with GTCN PAM
agagcccccucuaaggcaau

SEQ ID NO: 9767 - RNA, 20 nt, Artificial Sequence
  targeting sequence with GTCN PAM
aguaugaucugucauuagga

SEQ ID NO: 9768 - RNA, 20 nt, Artificial Sequence
  targeting sequence with GTCN PAM
uuaggaacacuaucaauucu

SEQ ID NO: 9769 - RNA, 20 nt, Artificial Sequence
  targeting sequence with GTCN PAM
agugagaagugaaaaaagaa

SEQ ID NO: 9770 - RNA, 20 nt, Artificial Sequence
  targeting sequence with GTCN PAM
cccauuuauguugagaauau

SEQ ID NO: 9771 - RNA, 20 nt, Artificial Sequence
  targeting sequence with GTCN PAM
uuuuucuuuucuuuuuuuuu

SEQ ID NO: 9772 - RNA, 20 nt, Artificial Sequence
  targeting sequence with GTCN PAM
caaaaaaaaaaaaagaaaag

SEQ ID NO: 9773 - RNA, 20 nt, Artificial Sequence
  targeting sequence with GTCN PAM
cgcucugucgcccuggcugc

SEQ ID NO: 9774 - RNA, 20 nt, Artificial Sequence
  targeting sequence with GTCN PAM
cccuggcugcuggagugcag

SEQ ID NO: 9775 - RNA, 20 nt, Artificial Sequence
  targeting sequence with GTCN PAM
cugcacuccagcagccaggg

SEQ ID NO: 9776 - RNA, 20 nt, Artificial Sequence
  targeting sequence with GTCN PAM
cagcuacucgggaggcugag

SEQ ID NO: 9777 - RNA, 20 nt, Artificial Sequence
  targeting sequence with GTCN PAM
gaugaaaaugcugaguucug

SEQ ID NO: 9778 - RNA, 20 nt, Artificial Sequence
  targeting sequence with GTCN PAM
ucacugcauuugguuuuguu

SEQ ID NO: 9779 - RNA, 20 nt, Artificial Sequence
  targeting sequence with GTCN PAM
aaauaaugagcguauuuuca

SEQ ID NO: 9780 - RNA, 20 nt, Artificial Sequence
  targeting sequence with GTCN PAM
uggcaucagacuuuuacucc

SEQ ID NO: 9781 - RNA, 20 nt, Artificial Sequence
  targeting sequence with GTCN PAM
gaugccaagacaaauauugg

SEQ ID NO: 9782 - RNA, 20 nt, Artificial Sequence
  targeting sequence with GTCN PAM
ucucucuccccuguucugaa

SEQ ID NO: 9783 - RNA, 20 nt, Artificial Sequence
  targeting sequence with GTCN PAM
gugaaguauaaaauuuaacc

SEQ ID NO: 9784 - RNA, 20 nt, Artificial Sequence
  targeting sequence with GTCN PAM
uaguaaggaaggcuuuccac

SEQ ID NO: 9785 - RNA, 20 nt, Artificial Sequence
  targeting sequence with GTCN PAM
gcuccaauuuccauuccuug

SEQ ID NO: 9786 - RNA, 20 nt, Artificial Sequence
  targeting sequence with GTCN PAM
augccucuagccugggugag

SEQ ID NO: 9787 - RNA, 20 nt, Artificial Sequence
  targeting sequence with GTCN PAM
ccucauuugaaugcuccucu

SEQ ID NO: 9788 - RNA, 20 nt, Artificial Sequence
  targeting sequence with GTCN PAM
gagcucuucuauaaccucgc

SEQ ID NO: 9789 - RNA, 20 nt, Artificial Sequence
  targeting sequence with GTCN PAM
ugucagagcucuucuauaac

SEQ ID NO: 9790 - RNA, 20 nt, Artificial Sequence
  targeting sequence with GTCN PAM
ggugaauaauuaagggacaa

SEQ ID NO: 9791 - RNA, 20 nt, Artificial Sequence
  targeting sequence with GTCN PAM
cuuaauuauucaccagaccc

SEQ ID NO: 9792 - RNA, 20 nt, Artificial Sequence
  targeting sequence with GTCN PAM
uuccuaagacaguuugagaa

SEQ ID NO: 9793 - RNA, 20 nt, Artificial Sequence
  targeting sequence with GTCN PAM
uaggaaggaccuucagugca

SEQ ID NO: 9794 - RNA, 20 nt, Artificial Sequence
  targeting sequence with GTCN PAM
gcaugggacuauuuggcugg

SEQ ID NO: 9795 - RNA, 20 nt, Artificial Sequence
  targeting sequence with GTCN PAM
caugcugacuuucuaucuuc

SEQ ID NO: 9796 - RNA, 20 nt, Artificial Sequence
  targeting sequence with GTCN PAM
cagggcaaauaggaacaguu

SEQ ID NO: 9797 - RNA, 20 nt, Artificial Sequence
  targeting sequence with GTCN PAM
cuuugauagauggauugaaa

SEQ ID NO: 9798 - RNA, 20 nt, Artificial Sequence
  targeting sequence with GTCN PAM
ucaggcaguuugggggacuc

SEQ ID NO: 9799 - RNA, 20 nt, Artificial Sequence
  targeting sequence with GTCN PAM
cccaaacugccugaagacuu

SEQ ID NO: 9800 - RNA, 20 nt, Artificial Sequence
  targeting sequence with GTCN PAM
guucaaaaaguucauagugu

SEQ ID NO: 9801 - RNA, 20 nt, Artificial Sequence
  targeting sequence with GTCN PAM
uuuggcacuccugccuaaaa

SEQ ID NO: 9802 - RNA, 20 nt, Artificial Sequence
  targeting sequence with GTCN PAM
cugcaauauuuuuaggcaaa

SEQ ID NO: 9803 - RNA, 20 nt, Artificial Sequence
  targeting sequence with GTCN PAM
ccaagccuauauguauuaaa

SEQ ID NO: 9804 - RNA, 20 nt, Artificial Sequence
  targeting sequence with GTCN PAM
ucaccccaaccucagcugau

SEQ ID NO: 9805 - RNA, 20 nt, Artificial Sequence
  targeting sequence with GTCN PAM
uuucagacaggcagggcaau

SEQ ID NO: 9806 - RNA, 20 nt, Artificial Sequence
  targeting sequence with GTCN PAM
gaaaggacaguuuaccuaau

SEQ ID NO: 9807 - RNA, 20 nt, Artificial Sequence
  targeting sequence with GTCN PAM
caaaugcuguucccucuuag

SEQ ID NO: 9808 - RNA, 20 nt, Artificial Sequence
  targeting sequence with GTCN PAM
cauaaccaguuccaucaucc

SEQ ID NO: 9809 - RNA, 20 nt, Artificial Sequence
  targeting sequence with GTCN PAM
acugagcauaauuagguuag

SEQ ID NO: 9810 - RNA, 20 nt, Artificial Sequence
  targeting sequence with GTCN PAM
guuuacauuauaggaagcug

SEQ ID NO: 9811 - RNA, 20 nt, Artificial Sequence
  targeting sequence with GTCN PAM
ugcuaaccugacauuuccuu

SEQ ID NO: 9812 - RNA, 20 nt, Artificial Sequence
  targeting sequence with GTCN PAM
gguuagcaggacccaaguuu

SEQ ID NO: 9813 - RNA, 20 nt, Artificial Sequence
  targeting sequence with GTCN PAM
gccuaagagaaucaaccaaa

SEQ ID NO: 9814 - RNA, 20 nt, Artificial Sequence
  targeting sequence with GTCN PAM
ucauuuuggccccagcauuc

SEQ ID NO: 9815 - RNA, 20 nt, Artificial Sequence
  targeting sequence with GTCN PAM
ucugucuucauuuuggcccc

SEQ ID NO: 9816 - RNA, 20 nt, Artificial Sequence
  targeting sequence with GTCN PAM
uuguguuuccuuaauuuauu

SEQ ID NO: 9817 - RNA, 20 nt, Artificial Sequence
  targeting sequence with GTCN PAM
uaaauaaguccuuguguuuc

SEQ ID NO: 9818 - RNA, 20 nt, Artificial Sequence
  targeting sequence with GTCN PAM
caacuuuuccuaaagacaac

SEQ ID NO: 9819 - RNA, 20 nt, Artificial Sequence
  targeting sequence with GTCN PAM
uuaggaaaaguugagacuau

SEQ ID NO: 9820 - RNA, 20 nt, Artificial Sequence
  targeting sequence with GTCN PAM
ggacaccaaaaagcagcagc

SEQ ID NO: 9821 - RNA, 20 nt, Artificial Sequence
  targeting sequence with GTCN PAM
cgacauaccuacgcccccgu

SEQ ID NO: 9822 - RNA, 20 nt, Artificial Sequence
  targeting sequence with GTCN PAM
ugcuguaaaugcugcccucu

SEQ ID NO: 9823 - RNA, 20 nt, Artificial Sequence
  targeting sequence with GTCN PAM
ugaaacaguuugaguaagaa

SEQ ID NO: 9824 - RNA, 20 nt, Artificial Sequence
  targeting sequence with GTCN PAM
uuuauuuuuccuuugaaaua

SEQ ID NO: 9825 - RNA, 20 nt, Artificial Sequence
  targeting sequence with GTCN PAM
aaaaaaacccaauaauaaua

SEQ ID NO: 9826 - RNA, 20 nt, Artificial Sequence
  targeting sequence with GTCN PAM
uacuacaguauuuuuaagua

SEQ ID NO: 9827 - RNA, 20 nt, Artificial Sequence
  targeting sequence with GTCN PAM
agguuaaggggcagguucaa

SEQ ID NO: 9828 - RNA, 20 nt, Artificial Sequence
  targeting sequence with GTCN PAM
guggaagaacacauggaucu

SEQ ID NO: 9829 - RNA, 20 nt, Artificial Sequence
  targeting sequence with GTCN PAM
gaauuuuuggauucggggug

SEQ ID NO: 9830 - RNA, 20 nt, Artificial Sequence
  targeting sequence with GTCN PAM
gggauagggagaggugauga

SEQ ID NO: 9831 - RNA, 20 nt, Artificial Sequence
  targeting sequence with GTCN PAM
gggcucaucaccucucccua

SEQ ID NO: 9832 - RNA, 20 nt, Artificial Sequence
  targeting sequence with GTCN PAM
uucaagccacaauuuagauu

SEQ ID NO: 9833 - RNA, 20 nt, Artificial Sequence
  targeting sequence with GTCN PAM
uuuaauaugaaccaacaauc

SEQ ID NO: 9834 - RNA, 20 nt, Artificial Sequence
  targeting sequence with GTCN PAM
cuugaagaaaaaaacauuau

SEQ ID NO: 9835 - RNA, 20 nt, Artificial Sequence
  targeting sequence with GTCN PAM
aacucucugcugcaugcacu

SEQ ID NO: 9836 - RNA, 20 nt, Artificial Sequence
  targeting sequence with GTCN PAM
cagugcuuccagagaaaggc

SEQ ID NO: 9837 - RNA, 20 nt, Artificial Sequence
  targeting sequence with GTCN PAM
uguugcgagucuucaugagg

SEQ ID NO: 9838 - RNA, 20 nt, Artificial Sequence
  targeting sequence with GTCN PAM
ucaugagggggaccacacag

SEQ ID NO: 9839 - RNA, 20 nt, Artificial Sequence
  targeting sequence with GTCN PAM
cccucaugaagacucgcaac

SEQ ID NO: 9840 - RNA, 20 nt, Artificial Sequence
  targeting sequence with GTCN PAM
ccacuguagccaacugugug

SEQ ID NO: 9841 - RNA, 20 nt, Artificial Sequence
  targeting sequence with GTCN PAM
uugucuccacuguagccaac

SEQ ID NO: 9842 - RNA, 20 nt, Artificial Sequence
  targeting sequence with GTCN PAM
uuuuggucuuugucuccacu

SEQ ID NO: 9843 - RNA, 20 nt, Artificial Sequence
  targeting sequence with GTCN PAM
uggcaguccuuuuggucuuu

SEQ ID NO: 9844 - RNA, 20 nt, Artificial Sequence
  targeting sequence with GTCN PAM
ggcaugccuccagggccucc

SEQ ID NO: 9845 - RNA, 20 nt, Artificial Sequence
  targeting sequence with GTCN PAM
gcaucucagaauacuuguga

SEQ ID NO: 9846 - RNA, 20 nt, Artificial Sequence
  targeting sequence with GTCN PAM
caggaagcaguggccacacu

SEQ ID NO: 9847 - RNA, 20 nt, Artificial Sequence
  targeting sequence with GTCN PAM
agaacauuuuaaugacaaga

SEQ ID NO: 9848 - RNA, 20 nt, Artificial Sequence
  targeting sequence with GTCN PAM
uuaaaauguucuagacuaaa

SEQ ID NO: 9849 - RNA, 20 nt, Artificial Sequence
  targeting sequence with GTCN PAM
ugucauuaaaauguucuaga

SEQ ID NO: 9850 - RNA, 20 nt, Artificial Sequence
  targeting sequence with GTCN PAM
cucuugacauuuccuucaau

SEQ ID NO: 9851 - RNA, 20 nt, Artificial Sequence
  targeting sequence with GTCN PAM
agagagacuauccuauuuga

SEQ ID NO: 9852 - RNA, 20 nt, Artificial Sequence
  targeting sequence with GTCN PAM
cugaggcaguacuguuugug

SEQ ID NO: 9853 - RNA, 20 nt, Artificial Sequence
  targeting sequence with GTCN PAM
aggaaaauauacggaauuau

SEQ ID NO: 9854 - RNA, 20 nt, Artificial Sequence
  targeting sequence with GTCN PAM
uaggauuuuauuuuuaguuu

SEQ ID NO: 9855 - RNA, 20 nt, Artificial Sequence
  targeting sequence with GTCN PAM
guucauuuggcugggggucu

SEQ ID NO: 9856 - RNA, 20 nt, Artificial Sequence
  targeting sequence with GTCN PAM
acuuuggccaagagggaguc

SEQ ID NO: 9857 - RNA, 20 nt, Artificial Sequence
  targeting sequence with GTCN PAM
agccucuuucccaucauugc

SEQ ID NO: 9858 - RNA, 20 nt, Artificial Sequence
  targeting sequence with GTCN PAM
uuugugccacaacucaaaaa

SEQ ID NO: 9859 - RNA, 20 nt, Artificial Sequence
  targeting sequence with GTCN PAM
uaugaucucuauuuucacau

SEQ ID NO: 9860 - RNA, 20 nt, Artificial Sequence
  targeting sequence with GTCN PAM
gucuuaugaucucuauuuuc

SEQ ID NO: 9861 - RNA, 20 nt, Artificial Sequence
  targeting sequence with GTCN PAM
auucugucagucuuaugauc

SEQ ID NO: 9862 - RNA, 20 nt, Artificial Sequence
  targeting sequence with GTCN PAM
uacugccacaaagaguccau

SEQ ID NO: 9863 - RNA, 20 nt, Artificial Sequence
  targeting sequence with GTCN PAM
uguuuauaauuugaugucuu

SEQ ID NO: 9864 - RNA, 20 nt, Artificial Sequence
  targeting sequence with GTCN PAM
ggcauggccuuaggucuugu

SEQ ID NO: 9865 - RNA, 20 nt, Artificial Sequence
  targeting sequence with GTCN PAM
gguuggaaagaaagccacau

SEQ ID NO: 9866 - RNA, 20 nt, Artificial Sequence
  targeting sequence with GTCN PAM
ugugaugcuauaccugaguc

SEQ ID NO: 9867 - RNA, 20 nt, Artificial Sequence
  targeting sequence with GTCN PAM
gucaugugaugcuauaccug

SEQ ID NO: 9868 - RNA, 20 nt, Artificial Sequence
  targeting sequence with GTCN PAM
guugucugucaugugaugcu

SEQ ID NO: 9869 - RNA, 20 nt, Artificial Sequence
  targeting sequence with GTCN PAM
uuacacaaagcuuaacucuu

SEQ ID NO: 9870 - RNA, 20 nt, Artificial Sequence
  targeting sequence with GTCN PAM
guugaaagaguuaagcuuug

SEQ ID NO: 9871 - RNA, 20 nt, Artificial Sequence
  targeting sequence with GTCN PAM
uagugggcuuuaggaauuuu

SEQ ID NO: 9872 - RNA, 20 nt, Artificial Sequence
  targeting sequence with GTCN PAM
cccugaaauguauaaagcca

SEQ ID NO: 9873 - RNA, 20 nt, Artificial Sequence
  targeting sequence with GTCN PAM
ugagaaaauaugccugaagc

SEQ ID NO: 9874 - RNA, 20 nt, Artificial Sequence
  targeting sequence with GTCN PAM
gaagagguccugagaaaaua

SEQ ID NO: 9875 - RNA, 20 nt, Artificial Sequence
  targeting sequence with GTCN PAM
uggugaucucuccaugucaa

SEQ ID NO: 9876 - RNA, 20 nt, Artificial Sequence
  targeting sequence with GTCN PAM
auacacagaaucuaccucau

SEQ ID NO: 9877 - RNA, 20 nt, Artificial Sequence
  targeting sequence with GTCN PAM
agucaaucccugacaucagu

SEQ ID NO: 9878 - RNA, 20 nt, Artificial Sequence
  targeting sequence with GTCN PAM
aucccugacaucaguggaaa

SEQ ID NO: 9879 - RNA, 20 nt, Artificial Sequence
  targeting sequence with GTCN PAM
gggauugacuugacuuagaa

SEQ ID NO: 9880 - RNA, 20 nt, Artificial Sequence
  targeting sequence with GTCN PAM
ucuuuacagaggaucaaacu

SEQ ID NO: 9881 - RNA, 20 nt, Artificial Sequence
  targeting sequence with GTCN PAM
agugugugggcauagugucc

SEQ ID NO: 9882 - RNA, 20 nt, Artificial Sequence
  targeting sequence with GTCN PAM
auucuugcuauuuuuuugag

SEQ ID NO: 9883 - RNA, 20 nt, Artificial Sequence
  targeting sequence with GTCN PAM
caaaaaaauagcaagaauag

SEQ ID NO: 9884 - RNA, 20 nt, Artificial Sequence
  targeting sequence with GTCN PAM
cgcucugucacccaggcuag

SEQ ID NO: 9885 - RNA, 20 nt, Artificial Sequence
  targeting sequence with GTCN PAM
cccaggcuagagugcagcgg

SEQ ID NO: 9886 - RNA, 20 nt, Artificial Sequence
  targeting sequence with GTCN PAM
cagcuacucaggaggcugag

SEQ ID NO: 9887 - RNA, 20 nt, Artificial Sequence
  targeting sequence with GTCN PAM
ugaucuccugaccuugugau

SEQ ID NO: 9888 - RNA, 20 nt, Artificial Sequence
  targeting sequence with GTCN PAM
ggagaucaagaccauccuaa

SEQ ID NO: 9889 - RNA, 20 nt, Artificial Sequence
  targeting sequence with GTCN PAM
auauuaccaagaccugauug

SEQ ID NO: 9890 - RNA, 20 nt, Artificial Sequence
  targeting sequence with GTCN PAM
ugguaauauagacuuuuaaa

SEQ ID NO: 9891 - RNA, 20 nt, Artificial Sequence
  targeting sequence with GTCN PAM
cuaaugcauuacuaauguuu

SEQ ID NO: 9892 - RNA, 20 nt, Artificial Sequence
  targeting sequence with GTCN PAM
aauguuuagaauuaccagua

SEQ ID NO: 9893 - RNA, 20 nt, Artificial Sequence
  targeting sequence with GTCN PAM
uauaacauaugcaauuagaa

SEQ ID NO: 9894 - RNA, 20 nt, Artificial Sequence
  targeting sequence with GTCN PAM
guucuccucaaggucauagc

SEQ ID NO: 9895 - RNA, 20 nt, Artificial Sequence
  targeting sequence with GTCN PAM
uagccuucacucaugaguuu

SEQ ID NO: 9896 - RNA, 20 nt, Artificial Sequence
  targeting sequence with GTCN PAM
gauauccuccaaaguugguc

SEQ ID NO: 9897 - RNA, 20 nt, Artificial Sequence
  targeting sequence with GTCN PAM
gagccuugaguuuuucuggu

SEQ ID NO: 9898 - RNA, 20 nt, Artificial Sequence
  targeting sequence with GTCN PAM
ugguuuccugggauuugagg

SEQ ID NO: 9899 - RNA, 20 nt, Artificial Sequence
  targeting sequence with GTCN PAM
gaaguugcccaagccuuacc

SEQ ID NO: 9900 - RNA, 20 nt, Artificial Sequence
  targeting sequence with GTCN PAM
gucugaaguugcccaagccu

SEQ ID NO: 9901 - RNA, 20 nt, Artificial Sequence
  targeting sequence with GTCN PAM
auaguuggcgucagucugaa

SEQ ID NO: 9902 - RNA, 20 nt, Artificial Sequence
  targeting sequence with GTCN PAM
gucuauaguuggcgucaguc

SEQ ID NO: 9903 - RNA, 20 nt, Artificial Sequence
  targeting sequence with GTCN PAM
aguccagaaggaucuuagga

SEQ ID NO: 9904 - RNA, 20 nt, Artificial Sequence
  targeting sequence with GTCN PAM
agaaggaucuuaggaaaaaa

SEQ ID NO: 9905 - RNA, 20 nt, Artificial Sequence
  targeting sequence with GTCN PAM
agaucauuuacccagaugcc

SEQ ID NO: 9906 - RNA, 20 nt, Artificial Sequence
  targeting sequence with GTCN PAM
cagagaagggaagugggcca

SEQ ID NO: 9907 - RNA, 20 nt, Artificial Sequence
  targeting sequence with GTCN PAM
uucaaaaugcuuucauauga

SEQ ID NO: 9908 - RNA, 20 nt, Artificial Sequence
  targeting sequence with GTCN PAM
ggcaaugugccuauaugaga

SEQ ID NO: 9909 - RNA, 20 nt, Artificial Sequence
  targeting sequence with GTCN PAM
ucuccuucugugggaaaggg

SEQ ID NO: 9910 - RNA, 20 nt, Artificial Sequence
  targeting sequence with GTCN PAM
uugucuucuccuucuguggg

SEQ ID NO: 9911 - RNA, 20 nt, Artificial Sequence
  targeting sequence with GTCN PAM
gagcugcuuuugaagcagua

SEQ ID NO: 9912 - RNA, 20 nt, Artificial Sequence
  targeting sequence with GTCN PAM
auuacugcuucaaaagcagc

SEQ ID NO: 9913 - RNA, 20 nt, Artificial Sequence
  targeting sequence with GTCN PAM
gcuugguacuugggaaaugu

SEQ ID NO: 9914 - RNA, 20 nt, Artificial Sequence
  targeting sequence with GTCN PAM
cgggcccguucauaggacug

SEQ ID NO: 9915 - RNA, 20 nt, Artificial Sequence
  targeting sequence with GTCN PAM
uaugaacgggcccgggacau

SEQ ID NO: 9916 - RNA, 20 nt, Artificial Sequence
  targeting sequence with GTCN PAM
uuuagcuguucuuccaaucg

SEQ ID NO: 9917 - RNA, 20 nt, Artificial Sequence
  targeting sequence with GTCN PAM
cuggaaaagauagcuugucu

SEQ ID NO: 9918 - RNA, 20 nt, Artificial Sequence
  targeting sequence with GTCN PAM
caaggccaaaucacguggca

SEQ ID NO: 9919 - RNA, 20 nt, Artificial Sequence
  targeting sequence with GTCN PAM
uaauauuaugguuaugcuca

SEQ ID NO: 9920 - RNA, 20 nt, Artificial Sequence
  targeting sequence with GTCN PAM
uuaggcuccucugaacaaca

SEQ ID NO: 9921 - RNA, 20 nt, Artificial Sequence
  targeting sequence with GTCN PAM
ccaguagcuuauuccagaac

SEQ ID NO: 9922 - RNA, 20 nt, Artificial Sequence
  targeting sequence with GTCN PAM
aucauccccauggccaaaca

SEQ ID NO: 9923 - RNA, 20 nt, Artificial Sequence
  targeting sequence with GTCN PAM
gggacacuucugucaacaaa

SEQ ID NO: 9924 - RNA, 20 nt, Artificial Sequence
  targeting sequence with GTCN PAM
cagacacuuguguuuggcca

SEQ ID NO: 9925 - RNA, 20 nt, Artificial Sequence
  targeting sequence with GTCN PAM
acaaauauuuacugagagcc

SEQ ID NO: 9926 - RNA, 20 nt, Artificial Sequence
  targeting sequence with GTCN PAM
ugcuuaccacaauauuccca

SEQ ID NO: 9927 - RNA, 20 nt, Artificial Sequence
  targeting sequence with GTCN PAM
uauaccucuacugaucuucu

SEQ ID NO: 9928 - RNA, 20 nt, Artificial Sequence
  targeting sequence with GTCN PAM
cccaaagugcugggauuaca

SEQ ID NO: 9929 - RNA, 20 nt, Artificial Sequence
  targeting sequence with GTCN PAM
ucuuugggcucauuuaauau

SEQ ID NO: 9930 - RNA, 20 nt, Artificial Sequence
  targeting sequence with GTCN PAM
caugaugaauauguguuuuu

SEQ ID NO: 9931 - RNA, 20 nt, Artificial Sequence
  targeting sequence with GTCN PAM
ucucauaguggugaagaaga

SEQ ID NO: 9932 - RNA, 20 nt, Artificial Sequence
  targeting sequence with GTCN PAM
ucuucaccacuaugagaaga

SEQ ID NO: 9933 - RNA, 20 nt, Artificial Sequence
  targeting sequence with GTCN PAM
gucuucuucaccacuaugag

SEQ ID NO: 9934 - RNA, 20 nt, Artificial Sequence
  targeting sequence with GTCN PAM
caggaacuaaagagcuaagu

SEQ ID NO: 9935 - RNA, 20 nt, Artificial Sequence
  targeting sequence with GTCN PAM
ucaaccuuucuccuaucuac

SEQ ID NO: 9936 - RNA, 20 nt, Artificial Sequence
  targeting sequence with GTCN PAM
agcuucuggugccuagaaug

SEQ ID NO: 9937 - RNA, 20 nt, Artificial Sequence
  targeting sequence with GTCN PAM
ggcagagggcagauggguag

SEQ ID NO: 9938 - RNA, 20 nt, Artificial Sequence
  targeting sequence with GTCN PAM
caagggacuucauacuaaaa

SEQ ID NO: 9939 - RNA, 20 nt, Artificial Sequence
  targeting sequence with GTCN PAM
cuugagacucacaugcuggu

SEQ ID NO: 9940 - RNA, 20 nt, Artificial Sequence
  targeting sequence with GTCN PAM
uacccuuuuuacgauguuac

SEQ ID NO: 9941 - RNA, 20 nt, Artificial Sequence
  targeting sequence with GTCN PAM
cuauacugccuucuuuuaug

SEQ ID NO: 9942 - RNA, 20 nt, Artificial Sequence
  targeting sequence with GTCN PAM
cuucaauaacaggaagaguu

SEQ ID NO: 9943 - RNA, 20 nt, Artificial Sequence
  targeting sequence with GTCN PAM
uacuuuugauggauaacuag

SEQ ID NO: 9944 - RNA, 20 nt, Artificial Sequence
  targeting sequence with GTCN PAM
aaguucucugugacucugcc

SEQ ID NO: 9945 - RNA, 20 nt, Artificial Sequence
  targeting sequence with GTCN PAM
cagagaacuuugacccuagu

SEQ ID NO: 9946 - RNA, 20 nt, Artificial Sequence
  targeting sequence with GTCN PAM
caucccuagaauugauuuuc

SEQ ID NO: 9947 - RNA, 20 nt, Artificial Sequence
  targeting sequence with GTCN PAM
uuucgugacuguccuauguu

SEQ ID NO: 9948 - RNA, 20 nt, Artificial Sequence
  targeting sequence with GTCN PAM
cgaaaagacauuauguuaac

SEQ ID NO: 9949 - RNA, 20 nt, Artificial Sequence
  targeting sequence with GTCN PAM
uauguuagcccacucuucug

SEQ ID NO: 9950 - RNA, 20 nt, Artificial Sequence
  targeting sequence with GTCN PAM
cuggccccucucugguaaag

SEQ ID NO: 9951 - RNA, 20 nt, Artificial Sequence
  targeting sequence with GTCN PAM
cuugggauuuaagggaaagg

SEQ ID NO: 9952 - RNA, 20 nt, Artificial Sequence
  targeting sequence with GTCN PAM
uuaguugaggagaguaauuu

SEQ ID NO: 9953 - RNA, 20 nt, Artificial Sequence
  targeting sequence with GTCN PAM
ccagccuacaucuugauaaa

SEQ ID NO: 9954 - RNA, 20 nt, Artificial Sequence
  targeting sequence with GTCN PAM
gcuuuuaucaagauguaggc

SEQ ID NO: 9955 - RNA, 20 nt, Artificial Sequence
  targeting sequence with GTCN PAM
cacaggcuaccacacaaccu

SEQ ID NO: 9956 - RNA, 20 nt, Artificial Sequence
  targeting sequence with GTCN PAM
aaacuggauucaaauccuug

SEQ ID NO: 9957 - RNA, 20 nt, Artificial Sequence
  targeting sequence with GTCN PAM
gagugcuagcgauccaaauc

SEQ ID NO: 9958 - RNA, 20 nt, Artificial Sequence
  targeting sequence with GTCN PAM
gaugucaaaguggaguugau

SEQ ID NO: 9959 - RNA, 20 nt, Artificial Sequence
  targeting sequence with GTCN PAM
aaguggaguugaugggagaa

SEQ ID NO: 9960 - RNA, 20 nt, Artificial Sequence
  targeting sequence with GTCN PAM
uaagguaacuguuaacuuuu

SEQ ID NO: 9961 - RNA, 20 nt, Artificial Sequence
  targeting sequence with GTCN PAM
aguaucaauauuuuguaucc

SEQ ID NO: 9962 - RNA, 20 nt, Artificial Sequence
  targeting sequence with GTCN PAM
uuugccaccuggcaaguuuc

SEQ ID NO: 9963 - RNA, 20 nt, Artificial Sequence
  targeting sequence with GTCN PAM
gccuauuuuguaguuuugcc

SEQ ID NO: 9964 - RNA, 20 nt, Artificial Sequence
  targeting sequence with GTCN PAM
auguugugggagugaaggca

SEQ ID NO: 9965 - RNA, 20 nt, Artificial Sequence
  targeting sequence with GTCN PAM
ggugagaagaugaggaaagg

SEQ ID NO: 9966 - RNA, 20 nt, Artificial Sequence
  targeting sequence with GTCN PAM
guauauuaugaaaggucagg

SEQ ID NO: 9967 - RNA, 20 nt, Artificial Sequence
  targeting sequence with GTCN PAM
aagagugucuguauauuaug

SEQ ID NO: 9968 - RNA, 20 nt, Artificial Sequence
  targeting sequence with GTCN PAM
cuggcuaacaaugguuugau

SEQ ID NO: 9969 - RNA, 20 nt, Artificial Sequence
  targeting sequence with GTCN PAM
guacaacaacauguauguca

SEQ ID NO: 9970 - RNA, 20 nt, Artificial Sequence
  targeting sequence with GTCN PAM
cucuagcaagaauaauuccc

SEQ ID NO: 9971 - RNA, 20 nt, Artificial Sequence
  targeting sequence with GTCN PAM
ugggaauuauucuugcuaga

SEQ ID NO: 9972 - RNA, 20 nt, Artificial Sequence
  targeting sequence with GTCN PAM
gagcccacaggcugcugcua

SEQ ID NO: 9973 - RNA, 20 nt, Artificial Sequence
  targeting sequence with GTCN PAM
aagccgagucagagcccaca

SEQ ID NO: 9974 - RNA, 20 nt, Artificial Sequence
  targeting sequence with GTCN PAM
gaacaaaaaaggccaggcag

SEQ ID NO: 9975 - RNA, 20 nt, Artificial Sequence
  targeting sequence with GTCN PAM
ucauacugggucugaacaaa

SEQ ID NO: 9976 - RNA, 20 nt, Artificial Sequence
  targeting sequence with GTCN PAM
gcuguuucaccucuuucuug

SEQ ID NO: 9977 - RNA, 20 nt, Artificial Sequence
  targeting sequence with GTCN PAM
auaucauuuugaauucaguc

SEQ ID NO: 9978 - RNA, 20 nt, Artificial Sequence
  targeting sequence with GTCN PAM
uggcugcacuugaaucuguc

SEQ ID NO: 9979 - RNA, 20 nt, Artificial Sequence
  targeting sequence with GTCN PAM
uacaaauaguuuggucuuua

SEQ ID NO: 9980 - RNA, 20 nt, Artificial Sequence
  targeting sequence with GTCN PAM
uuaguucaauuuuagaaaga

SEQ ID NO: 9981 - RNA, 20 nt, Artificial Sequence
  targeting sequence with GTCN PAM
aacaaugaaaaaaacuaucu

SEQ ID NO: 9982 - RNA, 20 nt, Artificial Sequence
  targeting sequence with GTCN PAM
cauuuucuaagauaguuuuu

SEQ ID NO: 9983 - RNA, 20 nt, Artificial Sequence
  targeting sequence with GTCN PAM
gggauguugcagaaauaaau

SEQ ID NO: 9984 - RNA, 20 nt, Artificial Sequence
  targeting sequence with GTCN PAM
aguuaaaucucuuucaauag

SEQ ID NO: 9985 - RNA, 20 nt, Artificial Sequence
  targeting sequence with GTCN PAM
gggaaccuguuuuccuuuuu

SEQ ID NO: 9986 - RNA, 20 nt, Artificial Sequence
  targeting sequence with GTCN PAM
ugcucugucacccagggugg

SEQ ID NO: 9987 - RNA, 20 nt, Artificial Sequence
  targeting sequence with GTCN PAM
cccaggguggagugcagugg

SEQ ID NO: 9988 - RNA, 20 nt, Artificial Sequence
  targeting sequence with GTCN PAM
cagcuacucagaaggcugag

SEQ ID NO: 9989 - RNA, 20 nt, Artificial Sequence
  targeting sequence with GTCN PAM
guagucccagcuacucagaa

SEQ ID NO: 9990 - RNA, 20 nt, Artificial Sequence
  targeting sequence with GTCN PAM
cugaaaaaaaaaaauagcca

SEQ ID NO: 9991 - RNA, 20 nt, Artificial Sequence
  targeting sequence with GTCN PAM
cacuauguugcccaggcugg

SEQ ID NO: 9992 - RNA, 20 nt, Artificial Sequence
  targeting sequence with GTCN PAM
ugaacuccugagcucaagca

SEQ ID NO: 9993 - RNA, 20 nt, Artificial Sequence
  targeting sequence with GTCN PAM
cagcacuuugggaagcugag

SEQ ID NO: 9994 - RNA, 20 nt, Artificial Sequence
  targeting sequence with GTCN PAM
ucagcacuuauucccaacac

SEQ ID NO: 9995 - RNA, 20 nt, Artificial Sequence
  targeting sequence with GTCN PAM
aagguucuggaagucauuuu

SEQ ID NO: 9996 - RNA, 20 nt, Artificial Sequence
  targeting sequence with GTCN PAM
uuuucaaacuagauuuuggu

SEQ ID NO: 9997 - RNA, 20 nt, Artificial Sequence
  targeting sequence with GTCN PAM
agaggugcuccaucuucacu

SEQ ID NO: 9998 - RNA, 20 nt, Artificial Sequence
  targeting sequence with GTCN PAM
agguuuuggauuaaaauccc

SEQ ID NO: 9999 - RNA, 20 nt, Artificial Sequence
  targeting sequence with GTCN PAM
ucuccuuuaaucuuugcaau

SEQ ID NO: 10000 - RNA, 20 nt, Artificial Sequence
  targeting sequence with GTCN PAM
gucuucuccuuuaaucuuug

SEQ ID NO: 10001 - RNA, 20 nt, Artificial Sequence
  targeting sequence with GTCN PAM
cacagagcaccucuugugug

SEQ ID NO: 10002 - RNA, 20 nt, Artificial Sequence
  targeting sequence with GTCN PAM
cccagguuggagugcagugg

SEQ ID NO: 10003 - RNA, 20 nt, Artificial Sequence
  targeting sequence with GTCN PAM
caaucuccuaggcucuagug

SEQ ID NO: 10004 - RNA, 20 nt, Artificial Sequence
  targeting sequence with GTCN PAM
cuagagccuaggagauugag

SEQ ID NO: 10005 - RNA, 20 nt, Artificial Sequence
  targeting sequence with GTCN PAM
cagcugcuugggaggcugag

SEQ ID NO: 10006 - RNA, 20 nt, Artificial Sequence
  targeting sequence with GTCN PAM
cuacagaaaauacaaaaaca

SEQ ID NO: 10007 - RNA, 20 nt, Artificial Sequence
  targeting sequence with GTCN PAM
ugaauuccuggauugaagug

SEQ ID NO: 10008 - RNA, 20 nt, Artificial Sequence
  targeting sequence with GTCN PAM
auggccuuaagucuucauuu

SEQ ID NO: 10009 - RNA, 20 nt, Artificial Sequence
  targeting sequence with GTCN PAM
ucauuucuuuauguccacuu

SEQ ID NO: 10010 - RNA, 20 nt, Artificial Sequence
  targeting sequence with GTCN PAM
acuuucccaauuuuauauau

SEQ ID NO: 10011 - RNA, 20 nt, Artificial Sequence
  targeting sequence with GTCN PAM
aaauauauaaaauugggaaa

SEQ ID NO: 10012 - RNA, 20 nt, Artificial Sequence
  targeting sequence with GTCN PAM
uaggaaaaacaucauaaaua

SEQ ID NO: 10013 - RNA, 20 nt, Artificial Sequence
  targeting sequence with GTCN PAM
caaguaauuuuuauuuuuuu

SEQ ID NO: 10014 - RNA, 20 nt, Artificial Sequence
  targeting sequence with GTCN PAM
cuaaaauaaaaaaauaaaaa

SEQ ID NO: 10015 - RNA, 20 nt, Artificial Sequence
  targeting sequence with GTCN PAM
cacuauguuguccaugcugg

SEQ ID NO: 10016 - RNA, 20 nt, Artificial Sequence
  targeting sequence with GTCN PAM
augcuggaguacagugguua

SEQ ID NO: 10017 - RNA, 20 nt, Artificial Sequence
  targeting sequence with GTCN PAM
cagcuacucaggaggcugag

SEQ ID NO: 10018 - RNA, 20 nt, Artificial Sequence
  targeting sequence with GTCN PAM
guagucccagcuacucagga

SEQ ID NO: 10019 - RNA, 20 nt, Artificial Sequence
  targeting sequence with GTCN PAM
uuuagagguugaacaauuua

SEQ ID NO: 10020 - RNA, 20 nt, Artificial Sequence
  targeting sequence with GTCN PAM
ucccaaauaagaaaauguaa

SEQ ID NO: 10021 - RNA, 20 nt, Artificial Sequence
  targeting sequence with GTCN PAM
guuucaucugcugagaucau

SEQ ID NO: 10022 - RNA, 20 nt, Artificial Sequence
  targeting sequence with GTCN PAM
ccauguuugucuguuucauc

SEQ ID NO: 10023 - RNA, 20 nt, Artificial Sequence
  targeting sequence with GTCN PAM
uuacaaaaaauacaaaaauu

SEQ ID NO: 10024 - RNA, 20 nt, Artificial Sequence
  targeting sequence with GTCN PAM
cagcuacucaggaggcugag

SEQ ID NO: 10025 - RNA, 20 nt, Artificial Sequence
  targeting sequence with GTCN PAM
aggcugcagugagccgagac

SEQ ID NO: 10026 - RNA, 20 nt, Artificial Sequence
  targeting sequence with GTCN PAM
cggcucacugcagccuugac

SEQ ID NO: 10027 - RNA, 20 nt, Artificial Sequence
  targeting sequence with GTCN PAM
cuacccuccagucuggguga

SEQ ID NO: 10028 - RNA, 20 nt, Artificial Sequence
  targeting sequence with GTCN PAM
gggugacagagcaagaaccu

SEQ ID NO: 10029 - RNA, 20 nt, Artificial Sequence
  targeting sequence with GTCN PAM
cccagacuggaggguaguga

SEQ ID NO: 10030 - RNA, 20 nt, Artificial Sequence
  targeting sequence with GTCN PAM
caaacaaacagaaaaaccca

SEQ ID NO: 10031 - RNA, 20 nt, Artificial Sequence
  targeting sequence with GTCN PAM
cagaaggaugcagugacucc

SEQ ID NO: 10032 - RNA, 20 nt, Artificial Sequence
  targeting sequence with GTCN PAM
cugcauccuucugggacucc

SEQ ID NO: 10033 - RNA, 20 nt, Artificial Sequence
  targeting sequence with GTCN PAM
uuuuaaaaacuuuuugacug

SEQ ID NO: 10034 - RNA, 20 nt, Artificial Sequence
  targeting sequence with GTCN PAM
aaaaguuuuuaaaaagacaa

SEQ ID NO: 10035 - RNA, 20 nt, Artificial Sequence
  targeting sequence with GTCN PAM
agcaauuugcccagucaaaa

SEQ ID NO: 10036 - RNA, 20 nt, Artificial Sequence
  targeting sequence with GTCN PAM
gaaacuccuggggucaagca

SEQ ID NO: 10037 - RNA, 20 nt, Artificial Sequence
  targeting sequence with GTCN PAM
cuacuaaaaauacaaaaaaa

SEQ ID NO: 10038 - RNA, 20 nt, Artificial Sequence
  targeting sequence with GTCN PAM
ucucaccucagccucccaag

SEQ ID NO: 10039 - RNA, 20 nt, Artificial Sequence
  targeting sequence with GTCN PAM
cagcucacugcaccucugcc

SEQ ID NO: 10040 - RNA, 20 nt, Artificial Sequence
  targeting sequence with GTCN PAM
cccaggcuggagugcagugg

SEQ ID NO: 10041 - RNA, 20 nt, Artificial Sequence
  targeting sequence with GTCN PAM
uacucugucacccaggcugg

SEQ ID NO: 10042 - RNA, 20 nt, Artificial Sequence
  targeting sequence with GTCN PAM
caaagagaagacaaaaaaau

SEQ ID NO: 10043 - RNA, 20 nt, Artificial Sequence
  targeting sequence with GTCN PAM
ucucuuugagacaaggucuu

SEQ ID NO: 10044 - RNA, 20 nt, Artificial Sequence
  targeting sequence with GTCN PAM
gugggaacuagaauacaggu

SEQ ID NO: 10045 - RNA, 20 nt, Artificial Sequence
  targeting sequence with GTCN PAM
aaauucuaaaauggagaaac

SEQ ID NO: 10046 - RNA, 20 nt, Artificial Sequence
  targeting sequence with GTCN PAM
auaaaacauguaucuucccu

SEQ ID NO: 10047 - RNA, 20 nt, Artificial Sequence
  targeting sequence with GTCN PAM
uggguuuuuuuuaaaccuag

SEQ ID NO: 10048 - RNA, 20 nt, Artificial Sequence
  targeting sequence with GTCN PAM
ggagaguucuauuuagcauc

SEQ ID NO: 10049 - RNA, 20 nt, Artificial Sequence
  targeting sequence with GTCN PAM
ugccucacuuaaugaugggg

SEQ ID NO: 10050 - RNA, 20 nt, Artificial Sequence
  targeting sequence with GTCN PAM
ccaucauuaagugaggcaug

SEQ ID NO: 10051 - RNA, 20 nt, Artificial Sequence
  targeting sequence with GTCN PAM
auuguuccuaggcuacaaag

SEQ ID NO: 10052 - RNA, 20 nt, Artificial Sequence
  targeting sequence with GTCN PAM
gcaguugccuaugguacagu

SEQ ID NO: 10053 - RNA, 20 nt, Artificial Sequence
  targeting sequence with GTCN PAM
agauacacaaacacuauugu

SEQ ID NO: 10054 - RNA, 20 nt, Artificial Sequence
  targeting sequence with GTCN PAM
ugccucagcuuccaagcagc

SEQ ID NO: 10055 - RNA, 20 nt, Artificial Sequence
  targeting sequence with GTCN PAM
cggcucacugaaaccucugc

SEQ ID NO: 10056 - RNA, 20 nt, Artificial Sequence
  targeting sequence with GTCN PAM
cacucuugcccaggcuggag

SEQ ID NO: 10057 - RNA, 20 nt, Artificial Sequence
  targeting sequence with GTCN PAM
uauauguuguugaucaaaau

SEQ ID NO: 10058 - RNA, 20 nt, Artificial Sequence
  targeting sequence with GTCN PAM
uuauucagcacaugacuaug

SEQ ID NO: 10059 - RNA, 20 nt, Artificial Sequence
  targeting sequence with GTCN PAM
ugugcugaauaaugacauuu

SEQ ID NO: 10060 - RNA, 20 nt, Artificial Sequence
  targeting sequence with GTCN PAM
uuccuaaauuguuacaaccc

SEQ ID NO: 10061 - RNA, 20 nt, Artificial Sequence
  targeting sequence with GTCN PAM
agguucucuuuggguuguaa

SEQ ID NO: 10062 - RNA, 20 nt, Artificial Sequence
  targeting sequence with GTCN PAM
uagguaaauaauucauaaau

SEQ ID NO: 10063 - RNA, 20 nt, Artificial Sequence
  targeting sequence with GTCN PAM
cuaggucaacacaguaguca

SEQ ID NO: 10064 - RNA, 20 nt, Artificial Sequence
  targeting sequence with GTCN PAM
acacaguagucaacuuccua

SEQ ID NO: 10065 - RNA, 20 nt, Artificial Sequence
  targeting sequence with GTCN PAM
acuuccuagaucagagauga

SEQ ID NO: 10066 - RNA, 20 nt, Artificial Sequence
  targeting sequence with GTCN PAM
aauuacugaugaaugggagc

SEQ ID NO: 10067 - RNA, 20 nt, Artificial Sequence
  targeting sequence with GTCN PAM
aagcauucccaggcugugua

SEQ ID NO: 10068 - RNA, 20 nt, Artificial Sequence
  targeting sequence with GTCN PAM
cuagcacaggauagcugaag

SEQ ID NO: 10069 - RNA, 20 nt, Artificial Sequence
  targeting sequence with GTCN PAM
caggaaaaacacccacaggc

SEQ ID NO: 10070 - RNA, 20 nt, Artificial Sequence
  targeting sequence with GTCN PAM
auucuucucccauaguugcc

SEQ ID NO: 10071 - RNA, 20 nt, Artificial Sequence
  targeting sequence with GTCN PAM
cugguaugcauuugggaaau

SEQ ID NO: 10072 - RNA, 20 nt, Artificial Sequence
  targeting sequence with GTCN PAM
aacacuggcagaagcuauuu

SEQ ID NO: 10073 - RNA, 20 nt, Artificial Sequence
  targeting sequence with GTCN PAM
cucuacucuggucaaacacu

SEQ ID NO: 10074 - RNA, 20 nt, Artificial Sequence
  targeting sequence with GTCN PAM
uacucccuaccccaacugug

SEQ ID NO: 10075 - RNA, 20 nt, Artificial Sequence
  targeting sequence with GTCN PAM
cccacaauauuucaagggua

SEQ ID NO: 10076 - RNA, 20 nt, Artificial Sequence
  targeting sequence with GTCN PAM
uuaagauaauucauugccua

SEQ ID NO: 10077 - RNA, 20 nt, Artificial Sequence
  targeting sequence with GTCN PAM
gcaaguugcccagaaagccc

SEQ ID NO: 10078 - RNA, 20 nt, Artificial Sequence
  targeting sequence with GTCN PAM
uuaccaagucugcaaguugc

SEQ ID NO: 10079 - RNA, 20 nt, Artificial Sequence
  targeting sequence with GTCN PAM
acuccaaggaauaaggguua

SEQ ID NO: 10080 - RNA, 20 nt, Artificial Sequence
  targeting sequence with GTCN PAM
uauuuccuaauugggauuuu

SEQ ID NO: 10081 - RNA, 20 nt, Artificial Sequence
  targeting sequence with GTCN PAM
aaaucuagccuacauaucgu

SEQ ID NO: 10082 - RNA, 20 nt, Artificial Sequence
  targeting sequence with GTCN PAM
ggagauucucagaucacuuu

SEQ ID NO: 10083 - RNA, 20 nt, Artificial Sequence
  targeting sequence with GTCN PAM
acugaaaagugaucugagaa

SEQ ID NO: 10084 - RNA, 20 nt, Artificial Sequence
  targeting sequence with GTCN PAM
cacacauagaauaaaggggc

SEQ ID NO: 10085 - RNA, 20 nt, Artificial Sequence
  targeting sequence with GTCN PAM
aaugauggucaaaucaacua

SEQ ID NO: 10086 - RNA, 20 nt, Artificial Sequence
  targeting sequence with GTCN PAM
aaucaacuaaaauuauauuu

SEQ ID NO: 10087 - RNA, 20 nt, Artificial Sequence
  targeting sequence with GTCN PAM
gccuaguuacuaacuguucu

SEQ ID NO: 10088 - RNA, 20 nt, Artificial Sequence
  targeting sequence with GTCN PAM
caugcaguagaacaguuagu

SEQ ID NO: 10089 - RNA, 20 nt, Artificial Sequence
  targeting sequence with GTCN PAM
cccugagcaguugucacaug

SEQ ID NO: 10090 - RNA, 20 nt, Artificial Sequence
  targeting sequence with GTCN PAM
ccuguauuuuugcucuuaug

SEQ ID NO: 10091 - RNA, 20 nt, Artificial Sequence
  targeting sequence with GTCN PAM
uaagagcaaaaauacaggag

SEQ ID NO: 10092 - RNA, 20 nt, Artificial Sequence
  targeting sequence with GTCN PAM
auuggaaaucggcuucugag

SEQ ID NO: 10093 - RNA, 20 nt, Artificial Sequence
  targeting sequence with GTCN PAM
uguagggcaggcuaaaaacc

SEQ ID NO: 10094 - RNA, 20 nt, Artificial Sequence
  targeting sequence with GTCN PAM
cacaguaaaaugguuuuaca

SEQ ID NO: 10095 - RNA, 20 nt, Artificial Sequence
  targeting sequence with GTCN PAM
cuuuaucuuucugagcuuca

SEQ ID NO: 10096 - RNA, 20 nt, Artificial Sequence
  targeting sequence with GTCN PAM
cuucuacuucugaaguacug

SEQ ID NO: 10097 - RNA, 20 nt, Artificial Sequence
  targeting sequence with GTCN PAM
aguuaguuucuucaucccau

SEQ ID NO: 10098 - RNA, 20 nt, Artificial Sequence
  targeting sequence with GTCN PAM
caucacuuaaaaaaauuucu

SEQ ID NO: 10099 - RNA, 20 nt, Artificial Sequence
  targeting sequence with GTCN PAM
ccugccuuccccaaauacau

SEQ ID NO: 10100 - RNA, 20 nt, Artificial Sequence
  targeting sequence with GTCN PAM
cuagucaaaggcugaggugg

SEQ ID NO: 10101 - RNA, 20 nt, Artificial Sequence
  targeting sequence with GTCN PAM
aaggcugagguggaguucag

SEQ ID NO: 10102 - RNA, 20 nt, Artificial Sequence
  targeting sequence with GTCN PAM
gucaugguacaauuaugugg

SEQ ID NO: 10103 - RNA, 20 nt, Artificial Sequence
  targeting sequence with GTCN PAM
ugguacaauuauguggguga

SEQ ID NO: 10104 - RNA, 20 nt, Artificial Sequence
  targeting sequence with GTCN PAM
cucucucuucacccacauaa

SEQ ID NO: 10105 - RNA, 20 nt, Artificial Sequence
  targeting sequence with GTCN PAM
ugggcaacuaucuucacuug

SEQ ID NO: 10106 - RNA, 20 nt, Artificial Sequence
  targeting sequence with GTCN PAM
acccaagugaguagcuccaa

SEQ ID NO: 10107 - RNA, 20 nt, Artificial Sequence
  targeting sequence with GTCN PAM
uucgcuuaauguguuuccau

SEQ ID NO: 10108 - RNA, 20 nt, Artificial Sequence
  targeting sequence with GTCN PAM
uuauuuccccuucucagaau

SEQ ID NO: 10109 - RNA, 20 nt, Artificial Sequence
  targeting sequence with GTCN PAM
cuguuuuuaacauauuuuau

SEQ ID NO: 10110 - RNA, 20 nt, Artificial Sequence
  targeting sequence with GTCN PAM
gacaaaacuggguuuugaau

SEQ ID NO: 10111 - RNA, 20 nt, Artificial Sequence
  targeting sequence with GTCN PAM
gacuucaaauucaguguuau

SEQ ID NO: 10112 - RNA, 20 nt, Artificial Sequence
  targeting sequence with GTCN PAM
cucaguaagugguaaagcca

SEQ ID NO: 10113 - RNA, 20 nt, Artificial Sequence
  targeting sequence with GTCN PAM
ccaucaucaucaaauaacaa

SEQ ID NO: 10114 - RNA, 20 nt, Artificial Sequence
  targeting sequence with GTCN PAM
cagaaggaucugugaagucc

SEQ ID NO: 10115 - RNA, 20 nt, Artificial Sequence
  targeting sequence with GTCN PAM
auccacagccuacuuucuuc

SEQ ID NO: 10116 - RNA, 20 nt, Artificial Sequence
  targeting sequence with GTCN PAM
gcuuuuuuuauaguuuuuuc

SEQ ID NO: 10117 - RNA, 20 nt, Artificial Sequence
  targeting sequence with GTCN PAM
auuuaugugccucuacagua

SEQ ID NO: 10118 - RNA, 20 nt, Artificial Sequence
  targeting sequence with GTCN PAM
guaaucccagcauuguggga

SEQ ID NO: 10119 - RNA, 20 nt, Artificial Sequence
  targeting sequence with GTCN PAM
ggaguucgagaccagccugg

SEQ ID NO: 10120 - RNA, 20 nt, Artificial Sequence
  targeting sequence with GTCN PAM
cgaacuccugaccucaggug

SEQ ID NO: 10121 - RNA, 20 nt, Artificial Sequence
  targeting sequence with GTCN PAM
gccaccacgcccagcuacuu

SEQ ID NO: 10122 - RNA, 20 nt, Artificial Sequence
  targeting sequence with GTCN PAM
agaucgcaccacugcacucc

SEQ ID NO: 10123 - RNA, 20 nt, Artificial Sequence
  targeting sequence with GTCN PAM
ccaaaaacaaagaacaaaaa

SEQ ID NO: 10124 - RNA, 20 nt, Artificial Sequence
  targeting sequence with GTCN PAM
cagcuacucaggaggcugag

SEQ ID NO: 10125 - RNA, 20 nt, Artificial Sequence
  targeting sequence with GTCN PAM
ugaacuccugggcucaagca

SEQ ID NO: 10126 - RNA, 20 nt, Artificial Sequence
  targeting sequence with GTCN PAM
ugcuauguugccuugcuggu

SEQ ID NO: 10127 - RNA, 20 nt, Artificial Sequence
  targeting sequence with GTCN PAM
gggucuugcuauguugccuu

SEQ ID NO: 10128 - RNA, 20 nt, Artificial Sequence
  targeting sequence with GTCN PAM
caaaaaaaaaauuaaaaaau

SEQ ID NO: 10129 - RNA, 20 nt, Artificial Sequence
  targeting sequence with GTCN PAM
cacucugucacccaggcugg

SEQ ID NO: 10130 - RNA, 20 nt, Artificial Sequence
  targeting sequence with GTCN PAM
cccaggcuggagugcagugg

SEQ ID NO: 10131 - RNA, 20 nt, Artificial Sequence
  targeting sequence with GTCN PAM
caguuacgggggaggcugag

SEQ ID NO: 10132 - RNA, 20 nt, Artificial Sequence
  targeting sequence with GTCN PAM
caaucuucugaccuugugau

SEQ ID NO: 10133 - RNA, 20 nt, Artificial Sequence
  targeting sequence with GTCN PAM
gaagauugagaccauccugg

SEQ ID NO: 10134 - RNA, 20 nt, Artificial Sequence
  targeting sequence with GTCN PAM
ugcuggccaggcgcaguggc

SEQ ID NO: 10135 - RNA, 20 nt, Artificial Sequence
  targeting sequence with GTCN PAM
gggucuugcuggccaggcgc

SEQ ID NO: 10136 - RNA, 20 nt, Artificial Sequence
  targeting sequence with GTCN PAM
guauucuccacauauccuua

SEQ ID NO: 10137 - RNA, 20 nt, Artificial Sequence
  targeting sequence with GTCN PAM
aaggauauguggagaauaca

SEQ ID NO: 10138 - RNA, 20 nt, Artificial Sequence
  targeting sequence with GTCN PAM
uaaguauaucugcccaguag

SEQ ID NO: 10139 - RNA, 20 nt, Artificial Sequence
  targeting sequence with GTCN PAM
ucuacugggcagauauacuu

SEQ ID NO: 10140 - RNA, 20 nt, Artificial Sequence
  targeting sequence with GTCN PAM
uagcuccuguguaagaguga

SEQ ID NO: 10141 - RNA, 20 nt, Artificial Sequence
  targeting sequence with GTCN PAM
ucuucauguuuguaguccua

SEQ ID NO: 10142 - RNA, 20 nt, Artificial Sequence
  targeting sequence with GTCN PAM
uuucugaagacaaauguuuu

SEQ ID NO: 10143 - RNA, 20 nt, Artificial Sequence
  targeting sequence with GTCN PAM
ucagaaaagacaaagaacuu

SEQ ID NO: 10144 - RNA, 20 nt, Artificial Sequence
  targeting sequence with GTCN PAM
ccauccuaccuuaaaaugca

SEQ ID NO: 10145 - RNA, 20 nt, Artificial Sequence
  targeting sequence with GTCN PAM
gguguucacgaccagccugg

SEQ ID NO: 10146 - RNA, 20 nt, Artificial Sequence
  targeting sequence with GTCN PAM
ugaacaccugaccucaugau

SEQ ID NO: 10147 - RNA, 20 nt, Artificial Sequence
  targeting sequence with GTCN PAM
acauggcaaaacccugucuc

SEQ ID NO: 10148 - RNA, 20 nt, Artificial Sequence
  targeting sequence with GTCN PAM
cuacuaaaaauacaaaaaac

SEQ ID NO: 10149 - RNA, 20 nt, Artificial Sequence
  targeting sequence with GTCN PAM
cagcuacuugggaggcugag

SEQ ID NO: 10150 - RNA, 20 nt, Artificial Sequence
  targeting sequence with GTCN PAM
cuguugcccaggcuagagug

SEQ ID NO: 10151 - RNA, 20 nt, Artificial Sequence
  targeting sequence with GTCN PAM
aaguaagccuaccuuuauau

SEQ ID NO: 10152 - RNA, 20 nt, Artificial Sequence
  targeting sequence with GTCN PAM
auauaaagguaggcuuacuu

SEQ ID NO: 10153 - RNA, 20 nt, Artificial Sequence
  targeting sequence with GTCN PAM
aguaaaaaauauauauauac

SEQ ID NO: 10154 - RNA, 20 nt, Artificial Sequence
  targeting sequence with GTCN PAM
gagacugugucuuauaucuu

SEQ ID NO: 10155 - RNA, 20 nt, Artificial Sequence
  targeting sequence with GTCN PAM
cagacuuaagcacucacaau

SEQ ID NO: 10156 - RNA, 20 nt, Artificial Sequence
  targeting sequence with GTCN PAM
uauaucuuauacauucuuga

SEQ ID NO: 10157 - RNA, 20 nt, Artificial Sequence
  targeting sequence with GTCN PAM
acuaaaaaguuucuguugag

SEQ ID NO: 10158 - RNA, 20 nt, Artificial Sequence
  targeting sequence with GTCN PAM
ccucaacagaaacuuuuuag

SEQ ID NO: 10159 - RNA, 20 nt, Artificial Sequence
  targeting sequence with GTCN PAM
ucuucuuauugaccuaucug

SEQ ID NO: 10160 - RNA, 20 nt, Artificial Sequence
  targeting sequence with GTCN PAM
auaagaagaggacuaagaac

SEQ ID NO: 10161 - RNA, 20 nt, Artificial Sequence
  targeting sequence with GTCN PAM
aaugcugcagauaggucaau

SEQ ID NO: 10162 - RNA, 20 nt, Artificial Sequence
  targeting sequence with GTCN PAM
aucuucuuccuuuucuucuu

SEQ ID NO: 10163 - RNA, 20 nt, Artificial Sequence
  targeting sequence with GTCN PAM
uaggauacuaaggagaaagu

SEQ ID NO: 10164 - RNA, 20 nt, Artificial Sequence
  targeting sequence with GTCN PAM
cuagacucaaaaaugucacu

SEQ ID NO: 10165 - RNA, 20 nt, Artificial Sequence
  targeting sequence with GTCN PAM
agagacucuuagagucauag

SEQ ID NO: 10166 - RNA, 20 nt, Artificial Sequence
  targeting sequence with GTCN PAM
cuuaccuauucaacauuccc

SEQ ID NO: 10167 - RNA, 20 nt, Artificial Sequence
  targeting sequence with GTCN PAM
aucagccaucuaagugggaa

SEQ ID NO: 10168 - RNA, 20 nt, Artificial Sequence
  targeting sequence with GTCN PAM
uuaacugagauguaaaugcu

SEQ ID NO: 10169 - RNA, 20 nt, Artificial Sequence
  targeting sequence with GTCN PAM
gaaccaugaucauauauugu

SEQ ID NO: 10170 - RNA, 20 nt, Artificial Sequence
  targeting sequence with GTCN PAM
gaguuacuaaaaugauuucc

SEQ ID NO: 10171 - RNA, 20 nt, Artificial Sequence
  targeting sequence with GTCN PAM
aucuugcccacauaucuguu

SEQ ID NO: 10172 - RNA, 20 nt, Artificial Sequence
  targeting sequence with GTCN PAM
aaucacaucaguccucugcu

SEQ ID NO: 10173 - RNA, 20 nt, Artificial Sequence
  targeting sequence with GTCN PAM
ucugcuuaaaauucuucaau

SEQ ID NO: 10174 - RNA, 20 nt, Artificial Sequence
  targeting sequence with GTCN PAM
acuauguauuucauaguauc

SEQ ID NO: 10175 - RNA, 20 nt, Artificial Sequence
  targeting sequence with GTCN PAM
gaacuacauggauccacuua

SEQ ID NO: 10176 - RNA, 20 nt, Artificial Sequence
  targeting sequence with GTCN PAM
gcauauguuuuaugcauuca

SEQ ID NO: 10177 - RNA, 20 nt, Artificial Sequence
  targeting sequence with GTCN PAM
agagaaauguaaacaaagau

SEQ ID NO: 10178 - RNA, 20 nt, Artificial Sequence
  targeting sequence with GTCN PAM
caugcacuuuaaguggauac

SEQ ID NO: 10179 - RNA, 20 nt, Artificial Sequence
  targeting sequence with GTCN PAM
cucaggugauuagugucaca

SEQ ID NO: 10180 - RNA, 20 nt, Artificial Sequence
  targeting sequence with GTCN PAM
caagagaucgcuuuuuacug

SEQ ID NO: 10181 - RNA, 20 nt, Artificial Sequence
  targeting sequence with GTCN PAM
cacuucuuacgcaucucaug

SEQ ID NO: 10182 - RNA, 20 nt, Artificial Sequence
  targeting sequence with GTCN PAM
cuagucucacuucuuacgca

SEQ ID NO: 10183 - RNA, 20 nt, Artificial Sequence
  targeting sequence with GTCN PAM
ugacauuacaagaaaaaguu

SEQ ID NO: 10184 - RNA, 20 nt, Artificial Sequence
  targeting sequence with GTCN PAM
ugacauuuucucugcuucuu

SEQ ID NO: 10185 - RNA, 20 nt, Artificial Sequence
  targeting sequence with GTCN PAM
gcugcugcgguugccugcca

SEQ ID NO: 10186 - RNA, 20 nt, Artificial Sequence
  targeting sequence with GTCN PAM
uguaaacauauguaaauaca

SEQ ID NO: 10187 - RNA, 20 nt, Artificial Sequence
  targeting sequence with GTCN PAM
gcaauagacuguuaguuaag

SEQ ID NO: 10188 - RNA, 20 nt, Artificial Sequence
  targeting sequence with GTCN PAM
auugcugaccagagccuuau

SEQ ID NO: 10189 - RNA, 20 nt, Artificial Sequence
  targeting sequence with GTCN PAM
gaaguuauacacggaucuuu

SEQ ID NO: 10190 - RNA, 20 nt, Artificial Sequence
  targeting sequence with GTCN PAM
agcaccccuaauccccacuu

SEQ ID NO: 10191 - RNA, 20 nt, Artificial Sequence
  targeting sequence with GTCN PAM
ucuucuccuuuuccuggcau

SEQ ID NO: 10192 - RNA, 20 nt, Artificial Sequence
  targeting sequence with GTCN PAM
ucuccuuuuccuggcauaca

SEQ ID NO: 10193 - RNA, 20 nt, Artificial Sequence
  targeting sequence with GTCN PAM
uuuuguaugcuaauaagacg

SEQ ID NO: 10194 - RNA, 20 nt, Artificial Sequence
  targeting sequence with GTCN PAM
uauuagcauacaaaaagaca

SEQ ID NO: 10195 - RNA, 20 nt, Artificial Sequence
  targeting sequence with GTCN PAM
ucagaaagaccaaggcauaa

SEQ ID NO: 10196 - RNA, 20 nt, Artificial Sequence
  targeting sequence with GTCN PAM
uucugaugaccagccucacc

SEQ ID NO: 10197 - RNA, 20 nt, Artificial Sequence
  targeting sequence with GTCN PAM
uuuuggguuuuuauggaaac

SEQ ID NO: 10198 - RNA, 20 nt, Artificial Sequence
  targeting sequence with GTCN PAM
gaagcacaagcaaaauaacc

SEQ ID NO: 10199 - RNA, 20 nt, Artificial Sequence
  targeting sequence with GTCN PAM
ugugggacccaguccucaac

SEQ ID NO: 10200 - RNA, 20 nt, Artificial Sequence
  targeting sequence with GTCN PAM
cacaagacugcaucccauuu

SEQ ID NO: 10201 - RNA, 20 nt, Artificial Sequence
  targeting sequence with GTCN PAM
ucaacuaguguaaucuaaua

SEQ ID NO: 10202 - RNA, 20 nt, Artificial Sequence
  targeting sequence with GTCN PAM
accuggagauaguauuagau

SEQ ID NO: 10203 - RNA, 20 nt, Artificial Sequence
  targeting sequence with GTCN PAM
gaauugaauugaauuaaagg

SEQ ID NO: 10204 - RNA, 20 nt, Artificial Sequence
  targeting sequence with GTCN PAM
gcugcagaauugcuugcugg

SEQ ID NO: 10205 - RNA, 20 nt, Artificial Sequence
  targeting sequence with GTCN PAM
guggagauuucuucccacca

SEQ ID NO: 10206 - RNA, 20 nt, Artificial Sequence
  targeting sequence with GTCN PAM
agagguggcuucuggccagg

SEQ ID NO: 10207 - RNA, 20 nt, Artificial Sequence
  targeting sequence with GTCN PAM
caugccuguaaucucaacau

SEQ ID NO: 10208 - RNA, 20 nt, Artificial Sequence
  targeting sequence with GTCN PAM
caaacuccugggcucaagug

SEQ ID NO: 10209 - RNA, 20 nt, Artificial Sequence
  targeting sequence with GTCN PAM
caccauguugcugaggcuug

SEQ ID NO: 10210 - RNA, 20 nt, Artificial Sequence
  targeting sequence with GTCN PAM
ccacccacuauuccuuuagg

SEQ ID NO: 10211 - RNA, 20 nt, Artificial Sequence
  targeting sequence with GTCN PAM
guuuacuuaucuauuuuauu

SEQ ID NO: 10212 - RNA, 20 nt, Artificial Sequence
  targeting sequence with GTCN PAM
gggguuuugaauccaagaua

SEQ ID NO: 10213 - RNA, 20 nt, Artificial Sequence
  targeting sequence with GTCN PAM
guacccucuuuuucuguugu

SEQ ID NO: 10214 - RNA, 20 nt, Artificial Sequence
  targeting sequence with GTCN PAM
acuaaaaaaaaugguaaaau

SEQ ID NO: 10215 - RNA, 20 nt, Artificial Sequence
  targeting sequence with GTCN PAM
ugaguacaaacuuagccuau

SEQ ID NO: 10216 - RNA, 20 nt, Artificial Sequence
  targeting sequence with GTCN PAM
uugggaaaaauacuuugaaa

SEQ ID NO: 10217 - RNA, 20 nt, Artificial Sequence
  targeting sequence with GTCN PAM
aaggcaaaugaaacucuugu

SEQ ID NO: 10218 - RNA, 20 nt, Artificial Sequence
  targeting sequence with GTCN PAM
uccucacuuucucaagcgaa

SEQ ID NO: 10219 - RNA, 20 nt, Artificial Sequence
  targeting sequence with GTCN PAM
cuuguguguaaugggcugcu

SEQ ID NO: 10220 - RNA, 20 nt, Artificial Sequence
  targeting sequence with GTCN PAM
cgucucuuguguguaauggg

SEQ ID NO: 10221 - RNA, 20 nt, Artificial Sequence
  targeting sequence with GTCN PAM
auacagcuacagagcacccu

SEQ ID NO: 10222 - RNA, 20 nt, Artificial Sequence
  targeting sequence with GTCN PAM
aaauagcuuuggguaaaaug

SEQ ID NO: 10223 - RNA, 20 nt, Artificial Sequence
  targeting sequence with GTCN PAM
guccuaaaauagcaaaugcc

SEQ ID NO: 10224 - RNA, 20 nt, Artificial Sequence
  targeting sequence with GTCN PAM
uaaaauagcaaaugccccug

SEQ ID NO: 10225 - RNA, 20 nt, Artificial Sequence
  targeting sequence with GTCN PAM
gucuauucaaccagccccca

SEQ ID NO: 10226 - RNA, 20 nt, Artificial Sequence
  targeting sequence with GTCN PAM
auucaaccagcccccacuua

SEQ ID NO: 10227 - RNA, 20 nt, Artificial Sequence
  targeting sequence with GTCN PAM
ugcagcuuuaagugggggcu

SEQ ID NO: 10228 - RNA, 20 nt, Artificial Sequence
  targeting sequence with GTCN PAM
uuuaaaaaaaaaaaaaaaaa

SEQ ID NO: 10229 - RNA, 20 nt, Artificial Sequence
  targeting sequence with GTCN PAM
gcagagacuuacuccagccc

SEQ ID NO: 10230 - RNA, 20 nt, Artificial Sequence
  targeting sequence with GTCN PAM
cugcugaccucaugccacag

SEQ ID NO: 10231 - RNA, 20 nt, Artificial Sequence
  targeting sequence with GTCN PAM
ggguagaauucagccucaca

SEQ ID NO: 10232 - RNA, 20 nt, Artificial Sequence
  targeting sequence with GTCN PAM
caugagauaaucuucagccc

SEQ ID NO: 10233 - RNA, 20 nt, Artificial Sequence
  targeting sequence with GTCN PAM
aggagaaaaguucuuuucua

SEQ ID NO: 10234 - RNA, 20 nt, Artificial Sequence
  targeting sequence with GTCN PAM
ggaggaaauaaucaggaaga

SEQ ID NO: 10235 - RNA, 20 nt, Artificial Sequence
  targeting sequence with GTCN PAM
uagugcccaggaacagauca

SEQ ID NO: 10236 - RNA, 20 nt, Artificial Sequence
  targeting sequence with GTCN PAM
cagaggugguuugggguucu

SEQ ID NO: 10237 - RNA, 20 nt, Artificial Sequence
  targeting sequence with GTCN PAM
gcauugcccuguuuucucuu

SEQ ID NO: 10238 - RNA, 20 nt, Artificial Sequence
  targeting sequence with GTCN PAM
cuuauacuaugaaaguucua

SEQ ID NO: 10239 - RNA, 20 nt, Artificial Sequence
  targeting sequence with GTCN PAM
agaauagaacuuucauagua

SEQ ID NO: 10240 - RNA, 20 nt, Artificial Sequence
  targeting sequence with GTCN PAM
cuuuuggucuagaauagaac

SEQ ID NO: 10241 - RNA, 20 nt, Artificial Sequence
  targeting sequence with GTCN PAM
uguguuuccuggcuaaauuu

SEQ ID NO: 10242 - RNA, 20 nt, Artificial Sequence
  targeting sequence with GTCN PAM
uucaaaauuaccugcuuuga

SEQ ID NO: 10243 - RNA, 20 nt, Artificial Sequence
  targeting sequence with GTCN PAM
uuuuauaagaaccucugaaa

SEQ ID NO: 10244 - RNA, 20 nt, Artificial Sequence
  targeting sequence with GTCN PAM
uaccaaucuguuuuuuuaug

SEQ ID NO: 10245 - RNA, 20 nt, Artificial Sequence
  targeting sequence with GTCN PAM
ccauuguaugaaaacaaugg

SEQ ID NO: 10246 - RNA, 20 nt, Artificial Sequence
  targeting sequence with GTCN PAM
ggagaguccuagguaugaaa

SEQ ID NO: 10247 - RNA, 20 nt, Artificial Sequence
  targeting sequence with GTCN PAM
uagguaugaaaaacaguaag

SEQ ID NO: 10248 - RNA, 20 nt, Artificial Sequence
  targeting sequence with GTCN PAM
accaggagaggagggaacug

SEQ ID NO: 10249 - RNA, 20 nt, Artificial Sequence
  targeting sequence with GTCN PAM
ucauccacaacugaugcacc

SEQ ID NO: 10250 - RNA, 20 nt, Artificial Sequence
  targeting sequence with GTCN PAM
gccugacugcauaacagcug

SEQ ID NO: 10251 - RNA, 20 nt, Artificial Sequence
  targeting sequence with GTCN PAM
ggccgacccaggucuucauc

SEQ ID NO: 10252 - RNA, 20 nt, Artificial Sequence
  targeting sequence with GTCN PAM
ucuccugaccagacuuccug

SEQ ID NO: 10253 - RNA, 20 nt, Artificial Sequence
  targeting sequence with GTCN PAM
ggagaugacagcuguuaugc

SEQ ID NO: 10254 - RNA, 20 nt, Artificial Sequence
  targeting sequence with GTCN PAM
ggucaggagaugacagcugu

SEQ ID NO: 10255 - RNA, 20 nt, Artificial Sequence
  targeting sequence with GTCN PAM
ccaaaucaacaggaagucug

SEQ ID NO: 10256 - RNA, 20 nt, Artificial Sequence
  targeting sequence with GTCN PAM
cucucuucaucuuggguggc

SEQ ID NO: 10257 - RNA, 20 nt, Artificial Sequence
  targeting sequence with GTCN PAM
ugcagcagauucgagugcca

SEQ ID NO: 10258 - RNA, 20 nt, Artificial Sequence
  targeting sequence with GTCN PAM
ccacccaccccacagcucug

SEQ ID NO: 10259 - RNA, 20 nt, Artificial Sequence
  targeting sequence with GTCN PAM
ccacaugaugugcagcaaau

SEQ ID NO: 10260 - RNA, 20 nt, Artificial Sequence
  targeting sequence with GTCN PAM
ucagugucuccacaugaugu

SEQ ID NO: 10261 - RNA, 20 nt, Artificial Sequence
  targeting sequence with GTCN PAM
uuuuagacaauuuuuguucu

SEQ ID NO: 10262 - RNA, 20 nt, Artificial Sequence
  targeting sequence with GTCN PAM
aaaaugacccacaaugcuuu

SEQ ID NO: 10263 - RNA, 20 nt, Artificial Sequence
  targeting sequence with GTCN PAM
gcuuucuggccucugcaucu

SEQ ID NO: 10264 - RNA, 20 nt, Artificial Sequence
  targeting sequence with GTCN PAM
ucaaauaacuguucacugcc

SEQ ID NO: 10265 - RNA, 20 nt, Artificial Sequence
  targeting sequence with GTCN PAM
acugauggagccuucgggca

SEQ ID NO: 10266 - RNA, 20 nt, Artificial Sequence
  targeting sequence with GTCN PAM
aauuagguaggcauuugcuu

SEQ ID NO: 10267 - RNA, 20 nt, Artificial Sequence
  targeting sequence with GTCN PAM
cuguugaagcaaaugccuac

SEQ ID NO: 10268 - RNA, 20 nt, Artificial Sequence
  targeting sequence with GTCN PAM
cacagcugcaugcguaguca

SEQ ID NO: 10269 - RNA, 20 nt, Artificial Sequence
  targeting sequence with GTCN PAM
ucucuaguuaccagugaacu

SEQ ID NO: 10270 - RNA, 20 nt, Artificial Sequence
  targeting sequence with GTCN PAM
uuugugcuucagcagagaau

SEQ ID NO: 10271 - RNA, 20 nt, Artificial Sequence
  targeting sequence with GTCN PAM
gaaccauucacucauauggu

SEQ ID NO: 10272 - RNA, 20 nt, Artificial Sequence
  targeting sequence with GTCN PAM
cugauucugauucugucuga

SEQ ID NO: 10273 - RNA, 20 nt, Artificial Sequence
  targeting sequence with GTCN PAM
ucccugacagaagcuuccca

SEQ ID NO: 10274 - RNA, 20 nt, Artificial Sequence
  targeting sequence with GTCN PAM
gggaugacacuauagagaaa

SEQ ID NO: 10275 - RNA, 20 nt, Artificial Sequence
  targeting sequence with GTCN PAM
aacagcaaacauauaccagu

SEQ ID NO: 10276 - RNA, 20 nt, Artificial Sequence
  targeting sequence with GTCN PAM
uauauauuugcacaaauaca

SEQ ID NO: 10277 - RNA, 20 nt, Artificial Sequence
  targeting sequence with GTCN PAM
uuuaaacaaaaauuuaaaga

SEQ ID NO: 10278 - RNA, 20 nt, Artificial Sequence
  targeting sequence with GTCN PAM
acauauucccagaacaggag

SEQ ID NO: 10279 - RNA, 20 nt, Artificial Sequence
  targeting sequence with GTCN PAM
ucaggaacaaaacuuuagug

SEQ ID NO: 10280 - RNA, 20 nt, Artificial Sequence
  targeting sequence with GTCN PAM
ucugagaguagucaucagga

SEQ ID NO: 10281 - RNA, 20 nt, Artificial Sequence
  targeting sequence with GTCN PAM
uuguggcuccacuguccaua

SEQ ID NO: 10282 - RNA, 20 nt, Artificial Sequence
  targeting sequence with GTCN PAM
auauucuuucaugccuguga

SEQ ID NO: 10283 - RNA, 20 nt, Artificial Sequence
  targeting sequence with GTCN PAM
cccuguuuaugcuccucugu

SEQ ID NO: 10284 - RNA, 20 nt, Artificial Sequence
  targeting sequence with GTCN PAM
uuaucccugucucccuguuu

SEQ ID NO: 10285 - RNA, 20 nt, Artificial Sequence
  targeting sequence with GTCN PAM
cucucuaguaccuuccuacu

SEQ ID NO: 10286 - RNA, 20 nt, Artificial Sequence
  targeting sequence with GTCN PAM
uugaucuaauaagggcaagg

SEQ ID NO: 10287 - RNA, 20 nt, Artificial Sequence
  targeting sequence with GTCN PAM
uggccucuggugugguuuuc

SEQ ID NO: 10288 - RNA, 20 nt, Artificial Sequence
  targeting sequence with GTCN PAM
ugcuggcuaauaguuacuga

SEQ ID NO: 10289 - RNA, 20 nt, Artificial Sequence
  targeting sequence with GTCN PAM
uuuaaucucaugggauaaac

SEQ ID NO: 10290 - RNA, 20 nt, Artificial Sequence
  targeting sequence with GTCN PAM
agguuagcugaggaucauuc

SEQ ID NO: 10291 - RNA, 20 nt, Artificial Sequence
  targeting sequence with GTCN PAM
cauaugcaaagguacuagga

SEQ ID NO: 10292 - RNA, 20 nt, Artificial Sequence
  targeting sequence with GTCN PAM
ucugguugcugccuauuuaa

SEQ ID NO: 10293 - RNA, 20 nt, Artificial Sequence
  targeting sequence with GTCN PAM
aaugcuguggcaaaaauacc

SEQ ID NO: 10294 - RNA, 20 nt, Artificial Sequence
  targeting sequence with GTCN PAM
gcaauuuuauagaguuaauu

SEQ ID NO: 10295 - RNA, 20 nt, Artificial Sequence
  targeting sequence with GTCN PAM
caaaguuguacagggacacc

SEQ ID NO: 10296 - RNA, 20 nt, Artificial Sequence
  targeting sequence with GTCN PAM
cuguacaacuuugagacuau

SEQ ID NO: 10297 - RNA, 20 nt, Artificial Sequence
  targeting sequence with GTCN PAM
uacagaggcucaaaugaaua

SEQ ID NO: 10298 - RNA, 20 nt, Artificial Sequence
  targeting sequence with GTCN PAM
cuaaauaaauaaauaguuaa

SEQ ID NO: 10299 - RNA, 20 nt, Artificial Sequence
  targeting sequence with GTCN PAM
cccccugccacccaggcugg

SEQ ID NO: 10300 - RNA, 20 nt, Artificial Sequence
  targeting sequence with GTCN PAM
acauggcgaaaccccauguu

SEQ ID NO: 10301 - RNA, 20 nt, Artificial Sequence
  targeting sequence with GTCN PAM
cgaacuccugaccucaagug

SEQ ID NO: 10302 - RNA, 20 nt, Artificial Sequence
  targeting sequence with GTCN PAM
ggaguucgagaccagccugg

SEQ ID NO: 10303 - RNA, 20 nt, Artificial Sequence
  targeting sequence with GTCN PAM
ccgcgccccacccaacuaac

SEQ ID NO: 10304 - RNA, 20 nt, Artificial Sequence
  targeting sequence with GTCN PAM
uuuugcuccuuuuucucuuu

SEQ ID NO: 10305 - RNA, 20 nt, Artificial Sequence
  targeting sequence with GTCN PAM
aaggagugaaaggggagagg

SEQ ID NO: 10306 - RNA, 20 nt, Artificial Sequence
  targeting sequence with GTCN PAM
cccuuccucaccuuuugcuc

SEQ ID NO: 10307 - RNA, 20 nt, Artificial Sequence
  targeting sequence with GTCN PAM
ggcauuucaaauaauuuggu

SEQ ID NO: 10308 - RNA, 20 nt, Artificial Sequence
  targeting sequence with GTCN PAM
ucaguaaaauugugcuagaa

SEQ ID NO: 10309 - RNA, 20 nt, Artificial Sequence
  targeting sequence with GTCN PAM
uuuuuucccuuaaguuuuuc

SEQ ID NO: 10310 - RNA, 20 nt, Artificial Sequence
  targeting sequence with GTCN PAM
ccauauuuaucaaaaaacua

SEQ ID NO: 10311 - RNA, 20 nt, Artificial Sequence
  targeting sequence with GTCN PAM
aaaccaaaaaagcuuugguc

SEQ ID NO: 10312 - RNA, 20 nt, Artificial Sequence
  targeting sequence with GTCN PAM
gugaaauuuaacuugguuca

SEQ ID NO: 10313 - RNA, 20 nt, Artificial Sequence
  targeting sequence with GTCN PAM
uuuucugcauaucuguaaaa

SEQ ID NO: 10314 - RNA, 20 nt, Artificial Sequence
  targeting sequence with GTCN PAM
cuguugcccaggcugaucuc

SEQ ID NO: 10315 - RNA, 20 nt, Artificial Sequence
  targeting sequence with GTCN PAM
uagauuaauuccucgagggc

SEQ ID NO: 10316 - RNA, 20 nt, Artificial Sequence
  targeting sequence with GTCN PAM
auacaugaaacauacagaaa

SEQ ID NO: 10317 - RNA, 20 nt, Artificial Sequence
  targeting sequence with GTCN PAM
uucuuacacacuucaccacu

SEQ ID NO: 10318 - RNA, 20 nt, Artificial Sequence
  targeting sequence with GTCN PAM
ggaagaucaguuagaauugg

SEQ ID NO: 10319 - RNA, 20 nt, Artificial Sequence
  targeting sequence with GTCN PAM
cauccuucagagcucaguaa

SEQ ID NO: 10320 - RNA, 20 nt, Artificial Sequence
  targeting sequence with GTCN PAM
ucuuuuucuaaauuauaagu

SEQ ID NO: 10321 - RNA, 20 nt, Artificial Sequence
  targeting sequence with GTCN PAM
acaggaauuccucauaccau

SEQ ID NO: 10322 - RNA, 20 nt, Artificial Sequence
  targeting sequence with GTCN PAM
caaugguaugaggaauuccu

SEQ ID NO: 10323 - RNA, 20 nt, Artificial Sequence
  targeting sequence with GTCN PAM
uccauacuucauuuagcccc

SEQ ID NO: 10324 - RNA, 20 nt, Artificial Sequence
  targeting sequence with GTCN PAM
agagggagcccauaggauuu

SEQ ID NO: 10325 - RNA, 20 nt, Artificial Sequence
  targeting sequence with GTCN PAM
cuuauuccuuuagaccugcu

SEQ ID NO: 10326 - RNA, 20 nt, Artificial Sequence
  targeting sequence with GTCN PAM
auuuuuguaaaugaucucuu

SEQ ID NO: 10327 - RNA, 20 nt, Artificial Sequence
  targeting sequence with GTCN PAM
cacaaauuuuaaaaaaacug

SEQ ID NO: 10328 - RNA, 20 nt, Artificial Sequence
  targeting sequence with GTCN PAM
gagaauauacuguguauuau

SEQ ID NO: 10329 - RNA, 20 nt, Artificial Sequence
  targeting sequence with GTCN PAM
agccuuagcuguugcuccau

SEQ ID NO: 10330 - RNA, 20 nt, Artificial Sequence
  targeting sequence with GTCN PAM
cugaccaaaggaaacagucc

SEQ ID NO: 10331 - RNA, 20 nt, Artificial Sequence
  targeting sequence with GTCN PAM
gagacaaggcuuuuaggugc

SEQ ID NO: 10332 - RNA, 20 nt, Artificial Sequence
  targeting sequence with GTCN PAM
caagagcauggaagaauccc

SEQ ID NO: 10333 - RNA, 20 nt, Artificial Sequence
  targeting sequence with GTCN PAM
gaauuuuugguuuaaucuuc

SEQ ID NO: 10334 - RNA, 20 nt, Artificial Sequence
  targeting sequence with GTCN PAM
ucagcaguuugucagaauuu

SEQ ID NO: 10335 - RNA, 20 nt, Artificial Sequence
  targeting sequence with GTCN PAM
ucgagggcugcaaucauagg

SEQ ID NO: 10336 - RNA, 20 nt, Artificial Sequence
  targeting sequence with GTCN PAM
gcuuccuuuccuuccuccag

SEQ ID NO: 10337 - RNA, 20 nt, Artificial Sequence
  targeting sequence with GTCN PAM
ucugaaggccacacccccaa

SEQ ID NO: 10338 - RNA, 20 nt, Artificial Sequence
  targeting sequence with GTCN PAM
uggggguguggccuucagaa

SEQ ID NO: 10339 - RNA, 20 nt, Artificial Sequence
  targeting sequence with GTCN PAM
guuaguggagggugagggga

SEQ ID NO: 10340 - RNA, 20 nt, Artificial Sequence
  targeting sequence with GTCN PAM
ugcagcuuucucagguguau

SEQ ID NO: 10341 - RNA, 20 nt, Artificial Sequence
  targeting sequence with GTCN PAM
gagucuugcagcuuucucag

SEQ ID NO: 10342 - RNA, 20 nt, Artificial Sequence
  targeting sequence with GTCN PAM
uccugcuuggcuuuggguuu

SEQ ID NO: 10343 - RNA, 20 nt, Artificial Sequence
  targeting sequence with GTCN PAM
acuccaguaaccauugcaau

SEQ ID NO: 10344 - RNA, 20 nt, Artificial Sequence
  targeting sequence with GTCN PAM
uuuaggguggagauuugugu

SEQ ID NO: 10345 - RNA, 20 nt, Artificial Sequence
  targeting sequence with GTCN PAM
ucaguaagcauaucaagcau

SEQ ID NO: 10346 - RNA, 20 nt, Artificial Sequence
  targeting sequence with GTCN PAM
uauacagcacauucagcuuu

SEQ ID NO: 10347 - RNA, 20 nt, Artificial Sequence
  targeting sequence with GTCN PAM
cuuugagcuguguuuuuauu

SEQ ID NO: 10348 - RNA, 20 nt, Artificial Sequence
  targeting sequence with GTCN PAM
ggcucugauaauugcuuugu

SEQ ID NO: 10349 - RNA, 20 nt, Artificial Sequence
  targeting sequence with GTCN PAM
uacgugggucuggcucugau

SEQ ID NO: 10350 - RNA, 20 nt, Artificial Sequence
  targeting sequence with GTCN PAM
uguaguuccaaaauuuaugu

SEQ ID NO: 10351 - RNA, 20 nt, Artificial Sequence
  targeting sequence with GTCN PAM
accucuuucauuagaguuuu

SEQ ID NO: 10352 - RNA, 20 nt, Artificial Sequence
  targeting sequence with GTCN PAM
gaucucauauguugucuacc

SEQ ID NO: 10353 - RNA, 20 nt, Artificial Sequence
  targeting sequence with GTCN PAM
uuauuucuaauuugguuucc

SEQ ID NO: 10354 - RNA, 20 nt, Artificial Sequence
  targeting sequence with GTCN PAM
uuacuaugucuuuauuucua

SEQ ID NO: 10355 - RNA, 20 nt, Artificial Sequence
  targeting sequence with GTCN PAM
acuugauaagccucucaaag

SEQ ID NO: 10356 - RNA, 20 nt, Artificial Sequence
  targeting sequence with GTCN PAM
agaagaagagacaacagaga

SEQ ID NO: 10357 - RNA, 20 nt, Artificial Sequence
  targeting sequence with GTCN PAM
cuucuucuggacuucugcca

SEQ ID NO: 10358 - RNA, 20 nt, Artificial Sequence
  targeting sequence with GTCN PAM
uaucacuaauuucgguaagu

SEQ ID NO: 10359 - RNA, 20 nt, Artificial Sequence
  targeting sequence with GTCN PAM
ccugggcucaagccauccuc

SEQ ID NO: 10360 - RNA, 20 nt, Artificial Sequence
  targeting sequence with GTCN PAM
cccuaugcugcccaggcugg

SEQ ID NO: 10361 - RNA, 20 nt, Artificial Sequence
  targeting sequence with GTCN PAM
cagcuacuugagaagccugg

SEQ ID NO: 10362 - RNA, 20 nt, Artificial Sequence
  targeting sequence with GTCN PAM
ucccagggcccaggcuucuc

SEQ ID NO: 10363 - RNA, 20 nt, Artificial Sequence
  targeting sequence with GTCN PAM
aggcugcaaagagccgugag

SEQ ID NO: 10364 - RNA, 20 nt, Artificial Sequence
  targeting sequence with GTCN PAM
cacugcauuccagccuggau

SEQ ID NO: 10365 - RNA, 20 nt, Artificial Sequence
  targeting sequence with GTCN PAM
uccaggcuggaaugcagugg

SEQ ID NO: 10366 - RNA, 20 nt, Artificial Sequence
  targeting sequence with GTCN PAM
ugcccugucauccaggcugg

SEQ ID NO: 10367 - RNA, 20 nt, Artificial Sequence
  targeting sequence with GTCN PAM
caaaaaauaaaagaaaaaga

SEQ ID NO: 10368 - RNA, 20 nt, Artificial Sequence
  targeting sequence with GTCN PAM
cacucuguugcccagguuga

SEQ ID NO: 10369 - RNA, 20 nt, Artificial Sequence
  targeting sequence with GTCN PAM
caaaaaaauaaaaagaaaaa

SEQ ID NO: 10370 - RNA, 20 nt, Artificial Sequence
  targeting sequence with GTCN PAM
caugauguuugauguuuuuc

SEQ ID NO: 10371 - RNA, 20 nt, Artificial Sequence
  targeting sequence with GTCN PAM
gugucucacaaauacuuuag

SEQ ID NO: 10372 - RNA, 20 nt, Artificial Sequence
  targeting sequence with GTCN PAM
cacaaauacuuuaguauuug

SEQ ID NO: 10373 - RNA, 20 nt, Artificial Sequence
  targeting sequence with GTCN PAM
ccaugcccagcccaaaagag

SEQ ID NO: 10374 - RNA, 20 nt, Artificial Sequence
  targeting sequence with GTCN PAM
cagcuucucaggaggcugag

SEQ ID NO: 10375 - RNA, 20 nt, Artificial Sequence
  targeting sequence with GTCN PAM
uuugaaaugguuucgaaggu

SEQ ID NO: 10376 - RNA, 20 nt, Artificial Sequence
  targeting sequence with GTCN PAM
uucacacucaaaacaaaucu

SEQ ID NO: 10377 - RNA, 20 nt, Artificial Sequence
  targeting sequence with GTCN PAM
uauagugagaauaaacauuu

SEQ ID NO: 10378 - RNA, 20 nt, Artificial Sequence
  targeting sequence with GTCN PAM
uaaucuuggaguuaggugaa

SEQ ID NO: 10379 - RNA, 20 nt, Artificial Sequence
  targeting sequence with GTCN PAM
ucaccuacacgagucucauc

SEQ ID NO: 10380 - RNA, 20 nt, Artificial Sequence
  targeting sequence with GTCN PAM
cauccuuguccaauucaucc

SEQ ID NO: 10381 - RNA, 20 nt, Artificial Sequence
  targeting sequence with GTCN PAM
aauucauccuaccuaugagu

SEQ ID NO: 10382 - RNA, 20 nt, Artificial Sequence
  targeting sequence with GTCN PAM
acucuucauaucuuaaaaug

SEQ ID NO: 10383 - RNA, 20 nt, Artificial Sequence
  targeting sequence with GTCN PAM
uuuuaagauaugaagagugg

SEQ ID NO: 10384 - RNA, 20 nt, Artificial Sequence
  targeting sequence with GTCN PAM
ccaaaaggucagcaaauggg

SEQ ID NO: 10385 - RNA, 20 nt, Artificial Sequence
  targeting sequence with GTCN PAM
gcaaauggguagggcgggcu

SEQ ID NO: 10386 - RNA, 20 nt, Artificial Sequence
  targeting sequence with GTCN PAM
cacaaacacagaaacacaaa

SEQ ID NO: 10387 - RNA, 20 nt, Artificial Sequence
  targeting sequence with GTCN PAM
ccuauucucuuccuucuuua

SEQ ID NO: 10388 - RNA, 20 nt, Artificial Sequence
  targeting sequence with GTCN PAM
cuaaauuaaaaaauuaucua

SEQ ID NO: 10389 - RNA, 20 nt, Artificial Sequence
  targeting sequence with GTCN PAM
uaaccugguguggguagaaa

SEQ ID NO: 10390 - RNA, 20 nt, Artificial Sequence
  targeting sequence with GTCN PAM
ccagauaggaugaacuggga

SEQ ID NO: 10391 - RNA, 20 nt, Artificial Sequence
  targeting sequence with GTCN PAM
guuucuugaaaauaagccaa

SEQ ID NO: 10392 - RNA, 20 nt, Artificial Sequence
  targeting sequence with GTCN PAM
uauuuuuuaaaaacuuauuu

SEQ ID NO: 10393 - RNA, 20 nt, Artificial Sequence
  targeting sequence with GTCN PAM
cugagucagagcuacaagac

SEQ ID NO: 10394 - RNA, 20 nt, Artificial Sequence
  targeting sequence with GTCN PAM
gagcuacaagacaagugauu

SEQ ID NO: 10395 - RNA, 20 nt, Artificial Sequence
  targeting sequence with GTCN PAM
uguagcucugacucagugac

SEQ ID NO: 10396 - RNA, 20 nt, Artificial Sequence
  targeting sequence with GTCN PAM
ucuuuagaaucacuugucuu

SEQ ID NO: 10397 - RNA, 20 nt, Artificial Sequence
  targeting sequence with GTCN PAM
ucaucuuuagaaucacuugu

SEQ ID NO: 10398 - RNA, 20 nt, Artificial Sequence
  targeting sequence with GTCN PAM
ucaucugucgucaucuuuag

SEQ ID NO: 10399 - RNA, 20 nt, Artificial Sequence
  targeting sequence with GTCN PAM
cacagauaguuuguggcaua

SEQ ID NO: 10400 - RNA, 20 nt, Artificial Sequence
  targeting sequence with GTCN PAM
aacguagugccuagcagagu

SEQ ID NO: 10401 - RNA, 20 nt, Artificial Sequence
  targeting sequence with GTCN PAM
ucuuguaacacagggauuuc

SEQ ID NO: 10402 - RNA, 20 nt, Artificial Sequence
  targeting sequence with GTCN PAM
uaaucucuuuauugguaaac

SEQ ID NO: 10403 - RNA, 20 nt, Artificial Sequence
  targeting sequence with GTCN PAM
ugaaauuuggguagaaaugc

SEQ ID NO: 10404 - RNA, 20 nt, Artificial Sequence
  targeting sequence with GTCN PAM
caucacaugcagagccaucu

SEQ ID NO: 10405 - RNA, 20 nt, Artificial Sequence
  targeting sequence with GTCN PAM
aagcaaaaaaagaaacaaua

SEQ ID NO: 10406 - RNA, 20 nt, Artificial Sequence
  targeting sequence with GTCN PAM
uuaucaaauuccaguauugu

SEQ ID NO: 10407 - RNA, 20 nt, Artificial Sequence
  targeting sequence with GTCN PAM
cuacuaaaaauacaaaaauu

SEQ ID NO: 10408 - RNA, 20 nt, Artificial Sequence
  targeting sequence with GTCN PAM
ucggacuccugaccucaagu

SEQ ID NO: 10409 - RNA, 20 nt, Artificial Sequence
  targeting sequence with GTCN PAM
gaggaccagccuggccaaca

SEQ ID NO: 10410 - RNA, 20 nt, Artificial Sequence
  targeting sequence with GTCN PAM
ggaguccgaggaccagccug

SEQ ID NO: 10411 - RNA, 20 nt, Artificial Sequence
  targeting sequence with GTCN PAM
guaacauuuguuuugagauc

SEQ ID NO: 10412 - RNA, 20 nt, Artificial Sequence
  targeting sequence with GTCN PAM
ccaauuugauuauugguaau

SEQ ID NO: 10413 - RNA, 20 nt, Artificial Sequence
  targeting sequence with GTCN PAM
uugauauauuucuuucugua

SEQ ID NO: 10414 - RNA, 20 nt, Artificial Sequence
  targeting sequence with GTCN PAM
uuguccuugauuccuggcag

SEQ ID NO: 10415 - RNA, 20 nt, Artificial Sequence
  targeting sequence with GTCN PAM
uugauuccuggcagagcucc

SEQ ID NO: 10416 - RNA, 20 nt, Artificial Sequence
  targeting sequence with GTCN PAM
ccuaauuaguauaaacucag

SEQ ID NO: 10417 - RNA, 20 nt, Artificial Sequence
  targeting sequence with GTCN PAM
uccacuccucaaccuuuggg

SEQ ID NO: 10418 - RNA, 20 nt, Artificial Sequence
  targeting sequence with GTCN PAM
ccaguuccucucucuucccc

SEQ ID NO: 10419 - RNA, 20 nt, Artificial Sequence
  targeting sequence with GTCN PAM
guccccaguuccucucucuu

SEQ ID NO: 10420 - RNA, 20 nt, Artificial Sequence
  targeting sequence with GTCN PAM
ucucugggcacaaaacccuc

SEQ ID NO: 10421 - RNA, 20 nt, Artificial Sequence
  targeting sequence with GTCN PAM
uuccagugaauuaacgaacc

SEQ ID NO: 10422 - RNA, 20 nt, Artificial Sequence
  targeting sequence with GTCN PAM
cgagaaccccugaauuugca

SEQ ID NO: 10423 - RNA, 20 nt, Artificial Sequence
  targeting sequence with GTCN PAM
ggcuuggcugcaaauucagg

SEQ ID NO: 10424 - RNA, 20 nt, Artificial Sequence
  targeting sequence with GTCN PAM
ugggccacccacacuucugu

SEQ ID NO: 10425 - RNA, 20 nt, Artificial Sequence
  targeting sequence with GTCN PAM
caagucuugggccacccaca

SEQ ID NO: 10426 - RNA, 20 nt, Artificial Sequence
  targeting sequence with GTCN PAM
uuugggacugagcccuuuaa

SEQ ID NO: 10427 - RNA, 20 nt, Artificial Sequence
  targeting sequence with GTCN PAM
caaaagacugcugcugcuug

SEQ ID NO: 10428 - RNA, 20 nt, Artificial Sequence
  targeting sequence with GTCN PAM
gaucucaaguuaaagggcuc

SEQ ID NO: 10429 - RNA, 20 nt, Artificial Sequence
  targeting sequence with GTCN PAM
accuggaguuagugucagau

SEQ ID NO: 10430 - RNA, 20 nt, Artificial Sequence
  targeting sequence with GTCN PAM
gaauugaauggaauuguuga

SEQ ID NO: 10431 - RNA, 20 nt, Artificial Sequence
  targeting sequence with GTCN PAM
uagaacugaaggugaauuag

SEQ ID NO: 10432 - RNA, 20 nt, Artificial Sequence
  targeting sequence with GTCN PAM
agaacaguugccacuaaaaa

SEQ ID NO: 10433 - RNA, 20 nt, Artificial Sequence
  targeting sequence with GTCN PAM
caaaaaaaaaauaaaaauaa

SEQ ID NO: 10434 - RNA, 20 nt, Artificial Sequence
  targeting sequence with GTCN PAM
ugaaaccccaucucuacuaa

SEQ ID NO: 10435 - RNA, 20 nt, Artificial Sequence
  targeting sequence with GTCN PAM
ugaacuccugaccucaggug

SEQ ID NO: 10436 - RNA, 20 nt, Artificial Sequence
  targeting sequence with GTCN PAM
ggaguucaagaccagccugg

SEQ ID NO: 10437 - RNA, 20 nt, Artificial Sequence
  targeting sequence with GTCN PAM
uaauaggcauguuuaauuua

SEQ ID NO: 10438 - RNA, 20 nt, Artificial Sequence
  targeting sequence with GTCN PAM
aaaacugagcuucuguuacu

SEQ ID NO: 10439 - RNA, 20 nt, Artificial Sequence
  targeting sequence with GTCN PAM
ucuccaucucaauaaaugac

SEQ ID NO: 10440 - RNA, 20 nt, Artificial Sequence
  targeting sequence with GTCN PAM
uuuauugagauggagaagac

SEQ ID NO: 10441 - RNA, 20 nt, Artificial Sequence
  targeting sequence with GTCN PAM
gcagguuuugcugauagauu

SEQ ID NO: 10442 - RNA, 20 nt, Artificial Sequence
  targeting sequence with GTCN PAM
cugcuacucucuagcacaaa

SEQ ID NO: 10443 - RNA, 20 nt, Artificial Sequence
  targeting sequence with GTCN PAM
uugcccaauccaccacuauc

SEQ ID NO: 10444 - RNA, 20 nt, Artificial Sequence
  targeting sequence with GTCN PAM
aaauauaaaucagaucaugu

SEQ ID NO: 10445 - RNA, 20 nt, Artificial Sequence
  targeting sequence with GTCN PAM
cccugcccaaacgcuccaaa

SEQ ID NO: 10446 - RNA, 20 nt, Artificial Sequence
  targeting sequence with GTCN PAM
uuggagcguuugggcagggu

SEQ ID NO: 10447 - RNA, 20 nt, Artificial Sequence
  targeting sequence with GTCN PAM
uacaaagaccagcagcagca

SEQ ID NO: 10448 - RNA, 20 nt, Artificial Sequence
  targeting sequence with GTCN PAM
uuguaggacuucagcauuua

SEQ ID NO: 10449 - RNA, 20 nt, Artificial Sequence
  targeting sequence with GTCN PAM
gggguagggccuaauucuaa

SEQ ID NO: 10450 - RNA, 20 nt, Artificial Sequence
  targeting sequence with GTCN PAM
aaauuuuaauagaaaccccc

SEQ ID NO: 10451 - RNA, 20 nt, Artificial Sequence
  targeting sequence with GTCN PAM
uuauuuuguggugcuuuaug

SEQ ID NO: 10452 - RNA, 20 nt, Artificial Sequence
  targeting sequence with GTCN PAM
caggacauguacacugugau

SEQ ID NO: 10453 - RNA, 20 nt, Artificial Sequence
  targeting sequence with GTCN PAM
ugagacagaagcuugccuga

SEQ ID NO: 10454 - RNA, 20 nt, Artificial Sequence
  targeting sequence with GTCN PAM
uugguaaccuguaauuuacu

SEQ ID NO: 10455 - RNA, 20 nt, Artificial Sequence
  targeting sequence with GTCN PAM
ucacuacucuauauuuccau

SEQ ID NO: 10456 - RNA, 20 nt, Artificial Sequence
  targeting sequence with GTCN PAM
uauagucaucacuacucuau

SEQ ID NO: 10457 - RNA, 20 nt, Artificial Sequence
  targeting sequence with GTCN PAM
cugguaaagggucgugacug

SEQ ID NO: 10458 - RNA, 20 nt, Artificial Sequence
  targeting sequence with GTCN PAM
ugacugccaauuguccaggu

SEQ ID NO: 10459 - RNA, 20 nt, Artificial Sequence
  targeting sequence with GTCN PAM
cgacccuuuaccagugacac

SEQ ID NO: 10460 - RNA, 20 nt, Artificial Sequence
  targeting sequence with GTCN PAM
agguucuugguguuuugaac

SEQ ID NO: 10461 - RNA, 20 nt, Artificial Sequence
  targeting sequence with GTCN PAM
aaauacccucuagaaguuuc

SEQ ID NO: 10462 - RNA, 20 nt, Artificial Sequence
  targeting sequence with GTCN PAM
ggugguuuuugcaaccaauc

SEQ ID NO: 10463 - RNA, 20 nt, Artificial Sequence
  targeting sequence with GTCN PAM
ucuuuugcauagaaguauaa

SEQ ID NO: 10464 - RNA, 20 nt, Artificial Sequence
  targeting sequence with GTCN PAM
gauugguuguggacagcaac

SEQ ID NO: 10465 - RNA, 20 nt, Artificial Sequence
  targeting sequence with GTCN PAM
acaaccaaucagacugauug

SEQ ID NO: 10466 - RNA, 20 nt, Artificial Sequence
  targeting sequence with GTCN PAM
uccuucgcaacuuuguaacu

SEQ ID NO: 10467 - RNA, 20 nt, Artificial Sequence
  targeting sequence with GTCN PAM
gauugguuguggacagccaa

SEQ ID NO: 10468 - RNA, 20 nt, Artificial Sequence
  targeting sequence with GTCN PAM
acaaccaaucagacugauug

SEQ ID NO: 10469 - RNA, 20 nt, Artificial Sequence
  targeting sequence with GTCN PAM
agaaaaggcuggggguuugc

SEQ ID NO: 10470 - RNA, 20 nt, Artificial Sequence
  targeting sequence with GTCN PAM
uuuuuuacuuaggcauggaa

SEQ ID NO: 10471 - RNA, 20 nt, Artificial Sequence
  targeting sequence with GTCN PAM
gagugaggcauaaggcugcc

SEQ ID NO: 10472 - RNA, 20 nt, Artificial Sequence
  targeting sequence with GTCN PAM
gcaggcagggaaccuaaggc

SEQ ID NO: 10473 - RNA, 20 nt, Artificial Sequence
  targeting sequence with GTCN PAM
caaaaaaaaaaaaaaaaaaa

SEQ ID NO: 10474 - RNA, 20 nt, Artificial Sequence
  targeting sequence with GTCN PAM
uguucugucuccaggcugga

SEQ ID NO: 10475 - RNA, 20 nt, Artificial Sequence
  targeting sequence with GTCN PAM
ccaggcuggagugcaguggc

SEQ ID NO: 10476 - RNA, 20 nt, Artificial Sequence
  targeting sequence with GTCN PAM
cucacucccucagaguaaag

SEQ ID NO: 10477 - RNA, 20 nt, Artificial Sequence
  targeting sequence with GTCN PAM
ucccaguuucaucugggccu

SEQ ID NO: 10478 - RNA, 20 nt, Artificial Sequence
  targeting sequence with GTCN PAM
ggugagugaggcccagauga

SEQ ID NO: 10479 - RNA, 20 nt, Artificial Sequence
  targeting sequence with GTCN PAM
guccggugagugaggcccag

SEQ ID NO: 10480 - RNA, 20 nt, Artificial Sequence
  targeting sequence with GTCN PAM
gaggggcagcgaggaggcag

SEQ ID NO: 10481 - RNA, 20 nt, Artificial Sequence
  targeting sequence with GTCN PAM
gccugcuccccuccuucagg

SEQ ID NO: 10482 - RNA, 20 nt, Artificial Sequence
  targeting sequence with GTCN PAM
cuauuuggugaggccuuccc

SEQ ID NO: 10483 - RNA, 20 nt, Artificial Sequence
  targeting sequence with GTCN PAM
ugucuccuuucacguaauuu

SEQ ID NO: 10484 - RNA, 20 nt, Artificial Sequence
  targeting sequence with GTCN PAM
ccuuucacguaauuugagcu

SEQ ID NO: 10485 - RNA, 20 nt, Artificial Sequence
  targeting sequence with GTCN PAM
cuguccaguucacuggcaca

SEQ ID NO: 10486 - RNA, 20 nt, Artificial Sequence
  targeting sequence with GTCN PAM
aguucacuggcacauaguag

SEQ ID NO: 10487 - RNA, 20 nt, Artificial Sequence
  targeting sequence with CTCN PAM
uuugucucgguuuuuuuuuu

SEQ ID NO: 10488 - RNA, 20 nt, Artificial Sequence
  targeting sequence with CTCN PAM
aaugaggucugaagaugguc

SEQ ID NO: 10489 - RNA, 20 nt, Artificial Sequence
  targeting sequence with CTCN PAM
uucgaguuugcucauuuguc

SEQ ID NO: 10490 - RNA, 20 nt, Artificial Sequence
  targeting sequence with CTCN PAM
ugucccaucacccugaugau

SEQ ID NO: 10491 - RNA, 20 nt, Artificial Sequence
  targeting sequence with CTCN PAM
ccugaaagccgguugccagc

SEQ ID NO: 10492 - RNA, 20 nt, Artificial Sequence
  targeting sequence with CTCN PAM
cucaccugaaagccgguugc

SEQ ID NO: 10493 - RNA, 20 nt, Artificial Sequence
  targeting sequence with CTCN PAM
uuuuggacugcgcuggcaga

SEQ ID NO: 10494 - RNA, 20 nt, Artificial Sequence
  targeting sequence with CTCN PAM
uuuugcagaaacuucaggcc

SEQ ID NO: 10495 - RNA, 20 nt, Artificial Sequence
  targeting sequence with CTCN PAM
aacaugaaaaugaaacuuua

SEQ ID NO: 10496 - RNA, 20 nt, Artificial Sequence
  targeting sequence with CTCN PAM
uuaaaaaucacauagcaaaa

SEQ ID NO: 10497 - RNA, 20 nt, Artificial Sequence
  targeting sequence with CTCN PAM
aguuuugcuaugugauuuuu

SEQ ID NO: 10498 - RNA, 20 nt, Artificial Sequence
  targeting sequence with CTCN PAM
gcuccugcccugucccacag

SEQ ID NO: 10499 - RNA, 20 nt, Artificial Sequence
  targeting sequence with CTCN PAM
ugcccugucccacagguggc

SEQ ID NO: 10500 - RNA, 20 nt, Artificial Sequence
  targeting sequence with CTCN PAM
ccgugcagccagugaacccu

SEQ ID NO: 10501 - RNA, 20 nt, Artificial Sequence
  targeting sequence with CTCN PAM
aguccaggguucacuggcug

SEQ ID NO: 10502 - RNA, 20 nt, Artificial Sequence
  targeting sequence with CTCN PAM
ggaacugaacugcucaauuu

SEQ ID NO: 10503 - RNA, 20 nt, Artificial Sequence
  targeting sequence with CTCN PAM
auuucuuuucuuuucuuuuc

SEQ ID NO: 10504 - RNA, 20 nt, Artificial Sequence
  targeting sequence with CTCN PAM
aaaaaagaaaaagaaaagaa

SEQ ID NO: 10505 - RNA, 20 nt, Artificial Sequence
  targeting sequence with CTCN PAM
guugucucgaaaaaagaaaa

SEQ ID NO: 10506 - RNA, 20 nt, Artificial Sequence
  targeting sequence with CTCN PAM
agccugggcgacagaacaag

SEQ ID NO: 10507 - RNA, 20 nt, Artificial Sequence
  targeting sequence with CTCN PAM
gcucacugcaagcuccgccu

SEQ ID NO: 10508 - RNA, 20 nt, Artificial Sequence
  targeting sequence with CTCN PAM
cugcaagcuccgccuucagg

SEQ ID NO: 10509 - RNA, 20 nt, Artificial Sequence
  targeting sequence with CTCN PAM
gccuucaggguucacgccau

SEQ ID NO: 10510 - RNA, 20 nt, Artificial Sequence
  targeting sequence with CTCN PAM
ugccucagccuccugaguag

SEQ ID NO: 10511 - RNA, 20 nt, Artificial Sequence
  targeting sequence with CTCN PAM
gccuccugaguagcugggac

SEQ ID NO: 10512 - RNA, 20 nt, Artificial Sequence
  targeting sequence with CTCN PAM
ugaguagcugggacuacagg

SEQ ID NO: 10513 - RNA, 20 nt, Artificial Sequence
  targeting sequence with CTCN PAM
ggaggcugaggcaggagaau

SEQ ID NO: 10514 - RNA, 20 nt, Artificial Sequence
  targeting sequence with CTCN PAM
cccucuguacuuucuuuucu

SEQ ID NO: 10515 - RNA, 20 nt, Artificial Sequence
  targeting sequence with CTCN PAM
cccagcaccccgcacucacu

SEQ ID NO: 10516 - RNA, 20 nt, Artificial Sequence
  targeting sequence with CTCN PAM
cuagauggacuuugccucca

SEQ ID NO: 10517 - RNA, 20 nt, Artificial Sequence
  targeting sequence with CTCN PAM
aagaucagguaucugccuau

SEQ ID NO: 10518 - RNA, 20 nt, Artificial Sequence
  targeting sequence with CTCN PAM
uaggcagauaccugaucuug

SEQ ID NO: 10519 - RNA, 20 nt, Artificial Sequence
  targeting sequence with CTCN PAM
cauaggcagauaccugaucu

SEQ ID NO: 10520 - RNA, 20 nt, Artificial Sequence
  targeting sequence with CTCN PAM
cucauaggcagauaccugau

SEQ ID NO: 10521 - RNA, 20 nt, Artificial Sequence
  targeting sequence with CTCN PAM
ccagauuccuuccccuggag

SEQ ID NO: 10522 - RNA, 20 nt, Artificial Sequence
  targeting sequence with CTCN PAM
aggggaaggaaucuggugag

SEQ ID NO: 10523 - RNA, 20 nt, Artificial Sequence
  targeting sequence with CTCN PAM
ugggaaugauacacaaaaga

SEQ ID NO: 10524 - RNA, 20 nt, Artificial Sequence
  targeting sequence with CTCN PAM
gaaguuugcuguggcaaagg

SEQ ID NO: 10525 - RNA, 20 nt, Artificial Sequence
  targeting sequence with CTCN PAM
aagcaccagaucuuuccugc

SEQ ID NO: 10526 - RNA, 20 nt, Artificial Sequence
  targeting sequence with CTCN PAM
gagcccagaggcaccaucuc

SEQ ID NO: 10527 - RNA, 20 nt, Artificial Sequence
  targeting sequence with CTCN PAM
gagugugcuguguuugccau

SEQ ID NO: 10528 - RNA, 20 nt, Artificial Sequence
  targeting sequence with CTCN PAM
gggcucugagugugcugugu

SEQ ID NO: 10529 - RNA, 20 nt, Artificial Sequence
  targeting sequence with CTCN PAM
guaugccguuaaaauacaaa

SEQ ID NO: 10530 - RNA, 20 nt, Artificial Sequence
  targeting sequence with CTCN PAM
cuuccaaggcuucauagccu

SEQ ID NO: 10531 - RNA, 20 nt, Artificial Sequence
  targeting sequence with CTCN PAM
aguguaacccucgugcuccc

SEQ ID NO: 10532 - RNA, 20 nt, Artificial Sequence
  targeting sequence with CTCN PAM
ugcuccccagcagccucucc

SEQ ID NO: 10533 - RNA, 20 nt, Artificial Sequence
  targeting sequence with CTCN PAM
ccagcagccucucccauugg

SEQ ID NO: 10534 - RNA, 20 nt, Artificial Sequence
  targeting sequence with CTCN PAM
cccauuggguccuaccugga

SEQ ID NO: 10535 - RNA, 20 nt, Artificial Sequence
  targeting sequence with CTCN PAM
cauuggguccuaccuggagu

SEQ ID NO: 10536 - RNA, 20 nt, Artificial Sequence
  targeting sequence with CTCN PAM
agguaggacccaaugggaga

SEQ ID NO: 10537 - RNA, 20 nt, Artificial Sequence
  targeting sequence with CTCN PAM
acuccagguaggacccaaug

SEQ ID NO: 10538 - RNA, 20 nt, Artificial Sequence
  targeting sequence with CTCN PAM
cgucuucauccucacugcug

SEQ ID NO: 10539 - RNA, 20 nt, Artificial Sequence
  targeting sequence with CTCN PAM
cugcugcgugcaccacaugg

SEQ ID NO: 10540 - RNA, 20 nt, Artificial Sequence
  targeting sequence with CTCN PAM
ggaauacccuucuugcugau

SEQ ID NO: 10541 - RNA, 20 nt, Artificial Sequence
  targeting sequence with CTCN PAM
cuggaauacccuucuugcug

SEQ ID NO: 10542 - RNA, 20 nt, Artificial Sequence
  targeting sequence with CTCN PAM
cccaucccuccuacuccauu

SEQ ID NO: 10543 - RNA, 20 nt, Artificial Sequence
  targeting sequence with CTCN PAM
uacuccauugaggucacauu

SEQ ID NO: 10544 - RNA, 20 nt, Artificial Sequence
  targeting sequence with CTCN PAM
auugaggucacauuagauga

SEQ ID NO: 10545 - RNA, 20 nt, Artificial Sequence
  targeting sequence with CTCN PAM
auggaguaggagggaugggu

SEQ ID NO: 10546 - RNA, 20 nt, Artificial Sequence
  targeting sequence with CTCN PAM
guccucugggcucucuuacc

SEQ ID NO: 10547 - RNA, 20 nt, Artificial Sequence
  targeting sequence with CTCN PAM
gggcucucuuacccucccug

SEQ ID NO: 10548 - RNA, 20 nt, Artificial Sequence
  targeting sequence with CTCN PAM
cuuacccucccugggcucua

SEQ ID NO: 10549 - RNA, 20 nt, Artificial Sequence
  targeting sequence with CTCN PAM
uacccucccugggcucuaug

SEQ ID NO: 10550 - RNA, 20 nt, Artificial Sequence
  targeting sequence with CTCN PAM
cugggcucuauggaguucga

SEQ ID NO: 10551 - RNA, 20 nt, Artificial Sequence
  targeting sequence with CTCN PAM
auggaguucgagaccaucaa

SEQ ID NO: 10552 - RNA, 20 nt, Artificial Sequence
  targeting sequence with CTCN PAM
auagagcccagggaggguaa

SEQ ID NO: 10553 - RNA, 20 nt, Artificial Sequence
  targeting sequence with CTCN PAM
aacuccauagagcccaggga

SEQ ID NO: 10554 - RNA, 20 nt, Artificial Sequence
  targeting sequence with CTCN PAM
uugauggucucgaacuccau

SEQ ID NO: 10555 - RNA, 20 nt, Artificial Sequence
  targeting sequence with CTCN PAM
cuugaugguuuacaauuguc

SEQ ID NO: 10556 - RNA, 20 nt, Artificial Sequence
  targeting sequence with CTCN PAM
uuuccuccucucacuucccc

SEQ ID NO: 10557 - RNA, 20 nt, Artificial Sequence
  targeting sequence with CTCN PAM
ucucacuuccccauuuuugc

SEQ ID NO: 10558 - RNA, 20 nt, Artificial Sequence
  targeting sequence with CTCN PAM
cacuuccccauuuuugcugc

SEQ ID NO: 10559 - RNA, 20 nt, Artificial Sequence
  targeting sequence with CTCN PAM
cuuccccauuuuugcugcaa

SEQ ID NO: 10560 - RNA, 20 nt, Artificial Sequence
  targeting sequence with CTCN PAM
cgcuacagacuuaccuaccu

SEQ ID NO: 10561 - RNA, 20 nt, Artificial Sequence
  targeting sequence with CTCN PAM
cuacagacuuaccuaccugg

SEQ ID NO: 10562 - RNA, 20 nt, Artificial Sequence
  targeting sequence with CTCN PAM
caauguuuccaucacgguua

SEQ ID NO: 10563 - RNA, 20 nt, Artificial Sequence
  targeting sequence with CTCN PAM
ucuaccucacaauguuucca

SEQ ID NO: 10564 - RNA, 20 nt, Artificial Sequence
  targeting sequence with CTCN PAM
uucaacagaccugggcuggg

SEQ ID NO: 10565 - RNA, 20 nt, Artificial Sequence
  targeting sequence with CTCN PAM
gaacagcuacccaaguguuc

SEQ ID NO: 10566 - RNA, 20 nt, Artificial Sequence
  targeting sequence with CTCN PAM
gcacagaacacuuggguagc

SEQ ID NO: 10567 - RNA, 20 nt, Artificial Sequence
  targeting sequence with CTCN PAM
cugugcuguugagugcuaug

SEQ ID NO: 10568 - RNA, 20 nt, Artificial Sequence
  targeting sequence with CTCN PAM
gugcuguugagugcuauggu

SEQ ID NO: 10569 - RNA, 20 nt, Artificial Sequence
  targeting sequence with CTCN PAM
acagcacagagagcauuucc

SEQ ID NO: 10570 - RNA, 20 nt, Artificial Sequence
  targeting sequence with CTCN PAM
uagggacacaugaaaugugg

SEQ ID NO: 10571 - RNA, 20 nt, Artificial Sequence
  targeting sequence with CTCN PAM
aauuaauugaauggauuaau

SEQ ID NO: 10572 - RNA, 20 nt, Artificial Sequence
  targeting sequence with CTCN PAM
uuauuacuaacuuaauuaau

SEQ ID NO: 10573 - RNA, 20 nt, Artificial Sequence
  targeting sequence with CTCN PAM
cgguagugacugccacacag

SEQ ID NO: 10574 - RNA, 20 nt, Artificial Sequence
  targeting sequence with CTCN PAM
ucuguguggcagucacuacc

SEQ ID NO: 10575 - RNA, 20 nt, Artificial Sequence
  targeting sequence with CTCN PAM
gaagcugcgcucuucugugu

SEQ ID NO: 10576 - RNA, 20 nt, Artificial Sequence
  targeting sequence with CTCN PAM
gcaaggaaacaccaggguag

SEQ ID NO: 10577 - RNA, 20 nt, Artificial Sequence
  targeting sequence with CTCN PAM
gauccaaucauccauuuaug

SEQ ID NO: 10578 - RNA, 20 nt, Artificial Sequence
  targeting sequence with CTCN PAM
cauaaauggaugauuggauc

SEQ ID NO: 10579 - RNA, 20 nt, Artificial Sequence
  targeting sequence with CTCN PAM
gugaggccuggggaugcugc

SEQ ID NO: 10580 - RNA, 20 nt, Artificial Sequence
  targeting sequence with CTCN PAM
cagagggccuggccccugua

SEQ ID NO: 10581 - RNA, 20 nt, Artificial Sequence
  targeting sequence with CTCN PAM
ccguugcagcauccccaggc

SEQ ID NO: 10582 - RNA, 20 nt, Artificial Sequence
  targeting sequence with CTCN PAM
accuggaugcuguccucccc

SEQ ID NO: 10583 - RNA, 20 nt, Artificial Sequence
  targeting sequence with CTCN PAM
guguacaagugcagccccug

SEQ ID NO: 10584 - RNA, 20 nt, Artificial Sequence
  targeting sequence with CTCN PAM
gauccugucuggacaggguu

SEQ ID NO: 10585 - RNA, 20 nt, Artificial Sequence
  targeting sequence with CTCN PAM
gucccugcugcucugauccu

SEQ ID NO: 10586 - RNA, 20 nt, Artificial Sequence
  targeting sequence with CTCN PAM
ugaagacaguaaguuguccc

SEQ ID NO: 10587 - RNA, 20 nt, Artificial Sequence
  targeting sequence with CTCN PAM
ucuccucugacccuggauca

SEQ ID NO: 10588 - RNA, 20 nt, Artificial Sequence
  targeting sequence with CTCN PAM
ucugacccuggaucagagcc

SEQ ID NO: 10589 - RNA, 20 nt, Artificial Sequence
  targeting sequence with CTCN PAM
gacccuggaucagagcccga

SEQ ID NO: 10590 - RNA, 20 nt, Artificial Sequence
  targeting sequence with CTCN PAM
gauccagggucagaggagau

SEQ ID NO: 10591 - RNA, 20 nt, Artificial Sequence
  targeting sequence with CTCN PAM
ggcucugauccagggucaga

SEQ ID NO: 10592 - RNA, 20 nt, Artificial Sequence
  targeting sequence with CTCN PAM
cccugucuagccuguugggc

SEQ ID NO: 10593 - RNA, 20 nt, Artificial Sequence
  targeting sequence with CTCN PAM
ggcauggaaggguuucaucc

SEQ ID NO: 10594 - RNA, 20 nt, Artificial Sequence
  targeting sequence with CTCN PAM
gcccagcgaugugcuuauca

SEQ ID NO: 10595 - RNA, 20 nt, Artificial Sequence
  targeting sequence with CTCN PAM
uccccaggacuccugcccag

SEQ ID NO: 10596 - RNA, 20 nt, Artificial Sequence
  targeting sequence with CTCN PAM
ccaggacuccugcccagcuu

SEQ ID NO: 10597 - RNA, 20 nt, Artificial Sequence
  targeting sequence with CTCN PAM
ugcccagcuuggaaauagca

SEQ ID NO: 10598 - RNA, 20 nt, Artificial Sequence
  targeting sequence with CTCN PAM
cgaccuucccuguguaccca

SEQ ID NO: 10599 - RNA, 20 nt, Artificial Sequence
  targeting sequence with CTCN PAM
aggcucccgaccuucccugu

SEQ ID NO: 10600 - RNA, 20 nt, Artificial Sequence
  targeting sequence with CTCN PAM
gacuccaggcucccgaccuu

SEQ ID NO: 10601 - RNA, 20 nt, Artificial Sequence
  targeting sequence with CTCN PAM
ggucaccauccuuccuggcc

SEQ ID NO: 10602 - RNA, 20 nt, Artificial Sequence
  targeting sequence with CTCN PAM
cccaaggccacauggccagg

SEQ ID NO: 10603 - RNA, 20 nt, Artificial Sequence
  targeting sequence with CTCN PAM
aagaaacagaaauuggcucc

SEQ ID NO: 10604 - RNA, 20 nt, Artificial Sequence
  targeting sequence with CTCN PAM
cauucccccugcugcagaug

SEQ ID NO: 10605 - RNA, 20 nt, Artificial Sequence
  targeting sequence with CTCN PAM
uccaucugcagcagggggaa

SEQ ID NO: 10606 - RNA, 20 nt, Artificial Sequence
  targeting sequence with CTCN PAM
cucuuccaucugcagcaggg

SEQ ID NO: 10607 - RNA, 20 nt, Artificial Sequence
  targeting sequence with CTCN PAM
cgcauuuguugugcagagua

SEQ ID NO: 10608 - RNA, 20 nt, Artificial Sequence
  targeting sequence with CTCN PAM
uguuacagcuuuccacuguu

SEQ ID NO: 10609 - RNA, 20 nt, Artificial Sequence
  targeting sequence with CTCN PAM
cccuccuacgccugugaucu

SEQ ID NO: 10610 - RNA, 20 nt, Artificial Sequence
  targeting sequence with CTCN PAM
uacgccugugaucucauugg

SEQ ID NO: 10611 - RNA, 20 nt, Artificial Sequence
  targeting sequence with CTCN PAM
uuggaucgucccaagaaauu

SEQ ID NO: 10612 - RNA, 20 nt, Artificial Sequence
  targeting sequence with CTCN PAM
uuucuaaguuagaaaugaua

SEQ ID NO: 10613 - RNA, 20 nt, Artificial Sequence
  targeting sequence with CTCN PAM
uuucuaaguguguccucauu

SEQ ID NO: 10614 - RNA, 20 nt, Artificial Sequence
  targeting sequence with CTCN PAM
ggccuauaaucccagcauug

SEQ ID NO: 10615 - RNA, 20 nt, Artificial Sequence
  targeting sequence with CTCN PAM
agcaaugcugggauuauagg

SEQ ID NO: 10616 - RNA, 20 nt, Artificial Sequence
  targeting sequence with CTCN PAM
uggccucaagcaaugcuggg

SEQ ID NO: 10617 - RNA, 20 nt, Artificial Sequence
  targeting sequence with CTCN PAM
cuauguugccuaggccaguc

SEQ ID NO: 10618 - RNA, 20 nt, Artificial Sequence
  targeting sequence with CTCN PAM
accccaucccagcugcuugc

SEQ ID NO: 10619 - RNA, 20 nt, Artificial Sequence
  targeting sequence with CTCN PAM
gcaagcagcugggauggggu

SEQ ID NO: 10620 - RNA, 20 nt, Artificial Sequence
  targeting sequence with CTCN PAM
aggcaaagccaccaggaccu

SEQ ID NO: 10621 - RNA, 20 nt, Artificial Sequence
  targeting sequence with CTCN PAM
acuccaggcaaagccaccag

SEQ ID NO: 10622 - RNA, 20 nt, Artificial Sequence
  targeting sequence with CTCN PAM
gaugggggcaggguguccuc

SEQ ID NO: 10623 - RNA, 20 nt, Artificial Sequence
  targeting sequence with CTCN PAM
ugggcgagcaguuuccuaag

SEQ ID NO: 10624 - RNA, 20 nt, Artificial Sequence
  targeting sequence with CTCN PAM
cccacgaggacacccugccc

SEQ ID NO: 10625 - RNA, 20 nt, Artificial Sequence
  targeting sequence with CTCN PAM
uucaguguacuuuucagguc

SEQ ID NO: 10626 - RNA, 20 nt, Artificial Sequence
  targeting sequence with CTCN PAM
auuccuucccaccggccaag

SEQ ID NO: 10627 - RNA, 20 nt, Artificial Sequence
  targeting sequence with CTCN PAM
ccacuugcugugcuguggcc

SEQ ID NO: 10628 - RNA, 20 nt, Artificial Sequence
  targeting sequence with CTCN PAM
gccugccacuccccacuugc

SEQ ID NO: 10629 - RNA, 20 nt, Artificial Sequence
  targeting sequence with CTCN PAM
gagcugggcugcggggaaga

SEQ ID NO: 10630 - RNA, 20 nt, Artificial Sequence
  targeting sequence with CTCN PAM
gagcaucaccagugacuccg

SEQ ID NO: 10631 - RNA, 20 nt, Artificial Sequence
  targeting sequence with CTCN PAM
cugcaaccuccgccuccugg

SEQ ID NO: 10632 - RNA, 20 nt, Artificial Sequence
  targeting sequence with CTCN PAM
gccuccuggguucaagagau

SEQ ID NO: 10633 - RNA, 20 nt, Artificial Sequence
  targeting sequence with CTCN PAM
uggguucaagagaucuuuuc

SEQ ID NO: 10634 - RNA, 20 nt, Artificial Sequence
  targeting sequence with CTCN PAM
ugaacccaggaggcggaggu

SEQ ID NO: 10635 - RNA, 20 nt, Artificial Sequence
  targeting sequence with CTCN PAM
gccuccugaguagcugggac

SEQ ID NO: 10636 - RNA, 20 nt, Artificial Sequence
  targeting sequence with CTCN PAM
cagcugcagcagggagacgu

SEQ ID NO: 10637 - RNA, 20 nt, Artificial Sequence
  targeting sequence with CTCN PAM
agaucacuguguuuuggaca

SEQ ID NO: 10638 - RNA, 20 nt, Artificial Sequence
  targeting sequence with CTCN PAM
uuccaguaacagcaauagaa

SEQ ID NO: 10639 - RNA, 20 nt, Artificial Sequence
  targeting sequence with CTCN PAM
uuuauaaaucccugauuuug

SEQ ID NO: 10640 - RNA, 20 nt, Artificial Sequence
  targeting sequence with CTCN PAM
cuuuuauaaaucccugauuu

SEQ ID NO: 10641 - RNA, 20 nt, Artificial Sequence
  targeting sequence with CTCN PAM
ggcccagucccacccugugg

SEQ ID NO: 10642 - RNA, 20 nt, Artificial Sequence
  targeting sequence with CTCN PAM
agggcccaguuacaaaguuu

SEQ ID NO: 10643 - RNA, 20 nt, Artificial Sequence
  targeting sequence with CTCN PAM
uuuugagguuccuaucaguu

SEQ ID NO: 10644 - RNA, 20 nt, Artificial Sequence
  targeting sequence with CTCN PAM
aaaggagugcuugaaaccca

SEQ ID NO: 10645 - RNA, 20 nt, Artificial Sequence
  targeting sequence with CTCN PAM
guguuuacuuagccacagac

SEQ ID NO: 10646 - RNA, 20 nt, Artificial Sequence
  targeting sequence with CTCN PAM
aagccacucucccuuuuugu

SEQ ID NO: 10647 - RNA, 20 nt, Artificial Sequence
  targeting sequence with CTCN PAM
cccuuuuugucuaagccaug

SEQ ID NO: 10648 - RNA, 20 nt, Artificial Sequence
  targeting sequence with CTCN PAM
cuuuuugucuaagccauggu

SEQ ID NO: 10649 - RNA, 20 nt, Artificial Sequence
  targeting sequence with CTCN PAM
cccuuccaccauggcuuaga

SEQ ID NO: 10650 - RNA, 20 nt, Artificial Sequence
  targeting sequence with CTCN PAM
uucuacaacccucccccuuc

SEQ ID NO: 10651 - RNA, 20 nt, Artificial Sequence
  targeting sequence with CTCN PAM
ccaugccuuaguagcaaagg

SEQ ID NO: 10652 - RNA, 20 nt, Artificial Sequence
  targeting sequence with CTCN PAM
agacccagguguuucccuuu

SEQ ID NO: 10653 - RNA, 20 nt, Artificial Sequence
  targeting sequence with CTCN PAM
gauucccugcuuccccccag

SEQ ID NO: 10654 - RNA, 20 nt, Artificial Sequence
  targeting sequence with CTCN PAM
agacuguacuauccugccuc

SEQ ID NO: 10655 - RNA, 20 nt, Artificial Sequence
  targeting sequence with CTCN PAM
uugcuacagagucuguuuug

SEQ ID NO: 10656 - RNA, 20 nt, Artificial Sequence
  targeting sequence with CTCN PAM
guagcaaugaggcaggauag

SEQ ID NO: 10657 - RNA, 20 nt, Artificial Sequence
  targeting sequence with CTCN PAM
agacugacaaaacagacucu

SEQ ID NO: 10658 - RNA, 20 nt, Artificial Sequence
  targeting sequence with CTCN PAM
aaagggaggaggguaaaaug

SEQ ID NO: 10659 - RNA, 20 nt, Artificial Sequence
  targeting sequence with CTCN PAM
cuuuagaguuuagacacaau

SEQ ID NO: 10660 - RNA, 20 nt, Artificial Sequence
  targeting sequence with CTCN PAM
ucccuuuagaguuuagacac

SEQ ID NO: 10661 - RNA, 20 nt, Artificial Sequence
  targeting sequence with CTCN PAM
uuuuacccuccucccuuuag

SEQ ID NO: 10662 - RNA, 20 nt, Artificial Sequence
  targeting sequence with CTCN PAM
aaggggagggguucauucaa

SEQ ID NO: 10663 - RNA, 20 nt, Artificial Sequence
  targeting sequence with CTCN PAM
ccuuggagaaggggaauucc

SEQ ID NO: 10664 - RNA, 20 nt, Artificial Sequence
  targeting sequence with CTCN PAM
auugaaugaaccccuccccu

SEQ ID NO: 10665 - RNA, 20 nt, Artificial Sequence
  targeting sequence with CTCN PAM
gugccuccauugaaugaacc

SEQ ID NO: 10666 - RNA, 20 nt, Artificial Sequence
  targeting sequence with CTCN PAM
aagcccucugugccuccauu

SEQ ID NO: 10667 - RNA, 20 nt, Artificial Sequence
  targeting sequence with CTCN PAM
uuaagcuuguguaaaccaaa

SEQ ID NO: 10668 - RNA, 20 nt, Artificial Sequence
  targeting sequence with CTCN PAM
guuuggggucuuuaucuuug

SEQ ID NO: 10669 - RNA, 20 nt, Artificial Sequence
  targeting sequence with CTCN PAM
gugcuaaugguucccaaaug

SEQ ID NO: 10670 - RNA, 20 nt, Artificial Sequence
  targeting sequence with CTCN PAM
uuccugcccaggaagccagg

SEQ ID NO: 10671 - RNA, 20 nt, Artificial Sequence
  targeting sequence with CTCN PAM
uggcuuccugggcaggaaag

SEQ ID NO: 10672 - RNA, 20 nt, Artificial Sequence
  targeting sequence with CTCN PAM
ccuggcuuccugggcaggaa

SEQ ID NO: 10673 - RNA, 20 nt, Artificial Sequence
  targeting sequence with CTCN PAM
gacucguucuuguucccgca

SEQ ID NO: 10674 - RNA, 20 nt, Artificial Sequence
  targeting sequence with CTCN PAM
uucuuguucccgcaugacgc

SEQ ID NO: 10675 - RNA, 20 nt, Artificial Sequence
  targeting sequence with CTCN PAM
ugcgucaugcgggaacaaga

SEQ ID NO: 10676 - RNA, 20 nt, Artificial Sequence
  targeting sequence with CTCN PAM
agacccuauucuccugcguc

SEQ ID NO: 10677 - RNA, 20 nt, Artificial Sequence
  targeting sequence with CTCN PAM
cuccagacccuauucuccug

SEQ ID NO: 10678 - RNA, 20 nt, Artificial Sequence
  targeting sequence with CTCN PAM
ccucuucacacccaaguaac

SEQ ID NO: 10679 - RNA, 20 nt, Artificial Sequence
  targeting sequence with CTCN PAM
ucacacccaaguaacaaaag

SEQ ID NO: 10680 - RNA, 20 nt, Artificial Sequence
  targeting sequence with CTCN PAM
gauccuuuuguuacuugggu

SEQ ID NO: 10681 - RNA, 20 nt, Artificial Sequence
  targeting sequence with CTCN PAM
cuuugcacuacauagcagau

SEQ ID NO: 10682 - RNA, 20 nt, Artificial Sequence
  targeting sequence with CTCN PAM
gauugguccccuccugcaac

SEQ ID NO: 10683 - RNA, 20 nt, Artificial Sequence
  targeting sequence with CTCN PAM
ugcaaccaaucacaaugguu

SEQ ID NO: 10684 - RNA, 20 nt, Artificial Sequence
  targeting sequence with CTCN PAM
ggaagguacucaaacccuag

SEQ ID NO: 10685 - RNA, 20 nt, Artificial Sequence
  targeting sequence with CTCN PAM
aacccuagaagauuuugcaa

SEQ ID NO: 10686 - RNA, 20 nt, Artificial Sequence
  targeting sequence with CTCN PAM
ugagccacuuccucaagccu

SEQ ID NO: 10687 - RNA, 20 nt, Artificial Sequence
  targeting sequence with CTCN PAM
agagcaccaguugcaaaauc

SEQ ID NO: 10688 - RNA, 20 nt, Artificial Sequence
  targeting sequence with CTCN PAM
agccugcugucacucugugg

SEQ ID NO: 10689 - RNA, 20 nt, Artificial Sequence
  targeting sequence with CTCN PAM
guggaguguacuuugguuuc

SEQ ID NO: 10690 - RNA, 20 nt, Artificial Sequence
  targeting sequence with CTCN PAM
acagagugacagcaggcuug

SEQ ID NO: 10691 - RNA, 20 nt, Artificial Sequence
  targeting sequence with CTCN PAM
ccaggcauggguaaucgucc

SEQ ID NO: 10692 - RNA, 20 nt, Artificial Sequence
  targeting sequence with CTCN PAM
agaugcgugggacgauuacc

SEQ ID NO: 10693 - RNA, 20 nt, Artificial Sequence
  targeting sequence with CTCN PAM
guaugcaucugguucuuucc

SEQ ID NO: 10694 - RNA, 20 nt, Artificial Sequence
  targeting sequence with CTCN PAM
cauguaccaguaccuggaua

SEQ ID NO: 10695 - RNA, 20 nt, Artificial Sequence
  targeting sequence with CTCN PAM
ugcuggcuagaugcuuaccu

SEQ ID NO: 10696 - RNA, 20 nt, Artificial Sequence
  targeting sequence with CTCN PAM
agcuccugcuggcuagaugc

SEQ ID NO: 10697 - RNA, 20 nt, Artificial Sequence
  targeting sequence with CTCN PAM
gugccaccugcguccccauc

SEQ ID NO: 10698 - RNA, 20 nt, Artificial Sequence
  targeting sequence with CTCN PAM
ccgugccaccugcgucccca

SEQ ID NO: 10699 - RNA, 20 nt, Artificial Sequence
  targeting sequence with CTCN PAM
ggaguuaggcugaccugggc

SEQ ID NO: 10700 - RNA, 20 nt, Artificial Sequence
  targeting sequence with CTCN PAM
agagacugcugcagucuaug

SEQ ID NO: 10701 - RNA, 20 nt, Artificial Sequence
  targeting sequence with CTCN PAM
cugugggccuggguagguga

SEQ ID NO: 10702 - RNA, 20 nt, Artificial Sequence
  targeting sequence with CTCN PAM
auagacguagggugaugaca

SEQ ID NO: 10703 - RNA, 20 nt, Artificial Sequence
  targeting sequence with CTCN PAM
caaagcugugaggaucaaau

SEQ ID NO: 10704 - RNA, 20 nt, Artificial Sequence
  targeting sequence with CTCN PAM
cagcuuugugaggauggggc

SEQ ID NO: 10705 - RNA, 20 nt, Artificial Sequence
  targeting sequence with CTCN PAM
cauuugauccucacagcuuu

SEQ ID NO: 10706 - RNA, 20 nt, Artificial Sequence
  targeting sequence with CTCN PAM
ugggucaggcuuuacaggca

SEQ ID NO: 10707 - RNA, 20 nt, Artificial Sequence
  targeting sequence with CTCN PAM
uauuagcuguucucuauggg

SEQ ID NO: 10708 - RNA, 20 nt, Artificial Sequence
  targeting sequence with CTCN PAM
augggaagcaccugacuagu

SEQ ID NO: 10709 - RNA, 20 nt, Artificial Sequence
  targeting sequence with CTCN PAM
guaaauggcggcuuuuauua

SEQ ID NO: 10710 - RNA, 20 nt, Artificial Sequence
  targeting sequence with CTCN PAM
caccuuaguuggcagaugcu

SEQ ID NO: 10711 - RNA, 20 nt, Artificial Sequence
  targeting sequence with CTCN PAM
cccaccuuaguuggcagaug

SEQ ID NO: 10712 - RNA, 20 nt, Artificial Sequence
  targeting sequence with CTCN PAM
gauucugacagcaauguggg

SEQ ID NO: 10713 - RNA, 20 nt, Artificial Sequence
  targeting sequence with CTCN PAM
agcuuucauagacuaggcca

SEQ ID NO: 10714 - RNA, 20 nt, Artificial Sequence
  targeting sequence with CTCN PAM
cuagcuuucauagacuaggc

SEQ ID NO: 10715 - RNA, 20 nt, Artificial Sequence
  targeting sequence with CTCN PAM
cugcacauaaggaaaggccc

SEQ ID NO: 10716 - RNA, 20 nt, Artificial Sequence
  targeting sequence with CTCN PAM
gcacauaaggaaaggcccag

SEQ ID NO: 10717 - RNA, 20 nt, Artificial Sequence
  targeting sequence with CTCN PAM
ggaacauaccugggccuuuc

SEQ ID NO: 10718 - RNA, 20 nt, Artificial Sequence
  targeting sequence with CTCN PAM
gauggaggaaggaauggcuu

SEQ ID NO: 10719 - RNA, 20 nt, Artificial Sequence
  targeting sequence with CTCN PAM
aucugagguucuagauggaa

SEQ ID NO: 10720 - RNA, 20 nt, Artificial Sequence
  targeting sequence with CTCN PAM
acuccccuaccccuucccuc

SEQ ID NO: 10721 - RNA, 20 nt, Artificial Sequence
  targeting sequence with CTCN PAM
ccuaccccuucccucuuuau

SEQ ID NO: 10722 - RNA, 20 nt, Artificial Sequence
  targeting sequence with CTCN PAM
uuaucuccccacagucaauu

SEQ ID NO: 10723 - RNA, 20 nt, Artificial Sequence
  targeting sequence with CTCN PAM
ccacagucaauuaaggagcu

SEQ ID NO: 10724 - RNA, 20 nt, Artificial Sequence
  targeting sequence with CTCN PAM
uuaauugacuguggggagau

SEQ ID NO: 10725 - RNA, 20 nt, Artificial Sequence
  targeting sequence with CTCN PAM
uuuuguccauauuccugggc

SEQ ID NO: 10726 - RNA, 20 nt, Artificial Sequence
  targeting sequence with CTCN PAM
uucaaugucagcccaggaau

SEQ ID NO: 10727 - RNA, 20 nt, Artificial Sequence
  targeting sequence with CTCN PAM
uugccacuccuucaauguca

SEQ ID NO: 10728 - RNA, 20 nt, Artificial Sequence
  targeting sequence with CTCN PAM
ucaugccuacaagucuugau

SEQ ID NO: 10729 - RNA, 20 nt, Artificial Sequence
  targeting sequence with CTCN PAM
cuucaugccuacaagucuug

SEQ ID NO: 10730 - RNA, 20 nt, Artificial Sequence
  targeting sequence with CTCN PAM
ucucuucaugccuacaaguc

SEQ ID NO: 10731 - RNA, 20 nt, Artificial Sequence
  targeting sequence with CTCN PAM
gaagccggcugagagccagc

SEQ ID NO: 10732 - RNA, 20 nt, Artificial Sequence
  targeting sequence with CTCN PAM
gccggcuucugaguccuggu

SEQ ID NO: 10733 - RNA, 20 nt, Artificial Sequence
  targeting sequence with CTCN PAM
cagccggcuucugaguccug

SEQ ID NO: 10734 - RNA, 20 nt, Artificial Sequence
  targeting sequence with CTCN PAM
gggaccucaggccagcggcu

SEQ ID NO: 10735 - RNA, 20 nt, Artificial Sequence
  targeting sequence with CTCN PAM
ggccagcggcuucccucaga

SEQ ID NO: 10736 - RNA, 20 nt, Artificial Sequence
  targeting sequence with CTCN PAM
gagccccgguccucccaguu

SEQ ID NO: 10737 - RNA, 20 nt, Artificial Sequence
  targeting sequence with CTCN PAM
gagggaagccgcuggccuga

SEQ ID NO: 10738 - RNA, 20 nt, Artificial Sequence
  targeting sequence with CTCN PAM
caguucugaaauggggguag

SEQ ID NO: 10739 - RNA, 20 nt, Artificial Sequence
  targeting sequence with CTCN PAM
cuacccccauuucagaacug

SEQ ID NO: 10740 - RNA, 20 nt, Artificial Sequence
  targeting sequence with CTCN PAM
guuaagccuugugacugcag

SEQ ID NO: 10741 - RNA, 20 nt, Artificial Sequence
  targeting sequence with CTCN PAM
acuuuccuacacuggggaca

SEQ ID NO: 10742 - RNA, 20 nt, Artificial Sequence
  targeting sequence with CTCN PAM
aucuccacuuuccuacacug

SEQ ID NO: 10743 - RNA, 20 nt, Artificial Sequence
  targeting sequence with CTCN PAM
gaaucuuacagcuuccucca

SEQ ID NO: 10744 - RNA, 20 nt, Artificial Sequence
  targeting sequence with CTCN PAM
ucugaaucuuacagcuuccu

SEQ ID NO: 10745 - RNA, 20 nt, Artificial Sequence
  targeting sequence with CTCN PAM
cuccucugaaucuuacagcu

SEQ ID NO: 10746 - RNA, 20 nt, Artificial Sequence
  targeting sequence with CTCN PAM
ucccuccucugaaucuuaca

SEQ ID NO: 10747 - RNA, 20 nt, Artificial Sequence
  targeting sequence with CTCN PAM
auggggaugccuccucccuc

SEQ ID NO: 10748 - RNA, 20 nt, Artificial Sequence
  targeting sequence with CTCN PAM
cuccauggggaugccuccuc

SEQ ID NO: 10749 - RNA, 20 nt, Artificial Sequence
  targeting sequence with CTCN PAM
ccugccccacccagaaaugc

SEQ ID NO: 10750 - RNA, 20 nt, Artificial Sequence
  targeting sequence with CTCN PAM
ugccccacccagaaaugcca

SEQ ID NO: 10751 - RNA, 20 nt, Artificial Sequence
  targeting sequence with CTCN PAM
cugcuggcauuucugggugg

SEQ ID NO: 10752 - RNA, 20 nt, Artificial Sequence
  targeting sequence with CTCN PAM
agauugucaccuccuuacac

SEQ ID NO: 10753 - RNA, 20 nt, Artificial Sequence
  targeting sequence with CTCN PAM
uuacacccaggaaccaaaca

SEQ ID NO: 10754 - RNA, 20 nt, Artificial Sequence
  targeting sequence with CTCN PAM
ucuuaauaacacugcacacu

SEQ ID NO: 10755 - RNA, 20 nt, Artificial Sequence
  targeting sequence with CTCN PAM
acaaauauuugaauggauaa

SEQ ID NO: 10756 - RNA, 20 nt, Artificial Sequence
  targeting sequence with CTCN PAM
ccagccuguaucaccaaaac

SEQ ID NO: 10757 - RNA, 20 nt, Artificial Sequence
  targeting sequence with CTCN PAM
cugagaauugaaagggugua

SEQ ID NO: 10758 - RNA, 20 nt, Artificial Sequence
  targeting sequence with CTCN PAM
gggaguguuuuggugauaca

SEQ ID NO: 10759 - RNA, 20 nt, Artificial Sequence
  targeting sequence with CTCN PAM
ugccuguaaucccaguucuu

SEQ ID NO: 10760 - RNA, 20 nt, Artificial Sequence
  targeting sequence with CTCN PAM
caaagaacugggauuacagg

SEQ ID NO: 10761 - RNA, 20 nt, Artificial Sequence
  targeting sequence with CTCN PAM
gccucccaaagaacugggau

SEQ ID NO: 10762 - RNA, 20 nt, Artificial Sequence
  targeting sequence with CTCN PAM
acugaucugccugucucggc

SEQ ID NO: 10763 - RNA, 20 nt, Artificial Sequence
  targeting sequence with CTCN PAM
uggccucaacugaucugccu

SEQ ID NO: 10764 - RNA, 20 nt, Artificial Sequence
  targeting sequence with CTCN PAM
acuaaaaaaauacaaaacuu

SEQ ID NO: 10765 - RNA, 20 nt, Artificial Sequence
  targeting sequence with CTCN PAM
caaguagcugggacuacagg

SEQ ID NO: 10766 - RNA, 20 nt, Artificial Sequence
  targeting sequence with CTCN PAM
cugguucaagcaauucugcc

SEQ ID NO: 10767 - RNA, 20 nt, Artificial Sequence
  targeting sequence with CTCN PAM
gucucccugguucaagcaau

SEQ ID NO: 10768 - RNA, 20 nt, Artificial Sequence
  targeting sequence with CTCN PAM
cuguagccucugucucccug

SEQ ID NO: 10769 - RNA, 20 nt, Artificial Sequence
  targeting sequence with CTCN PAM
gcucacuguagccucugucu

SEQ ID NO: 10770 - RNA, 20 nt, Artificial Sequence
  targeting sequence with CTCN PAM
gucaaaaacacaaaaaaauc

SEQ ID NO: 10771 - RNA, 20 nt, Artificial Sequence
  targeting sequence with CTCN PAM
uacccuauugucaaaaucau

SEQ ID NO: 10772 - RNA, 20 nt, Artificial Sequence
  targeting sequence with CTCN PAM
gugacaggcacucaggcuca

SEQ ID NO: 10773 - RNA, 20 nt, Artificial Sequence
  targeting sequence with CTCN PAM
ggcucaccaguuugcacagg

SEQ ID NO: 10774 - RNA, 20 nt, Artificial Sequence
  targeting sequence with CTCN PAM
ccaguuugcacagggugguc

SEQ ID NO: 10775 - RNA, 20 nt, Artificial Sequence
  targeting sequence with CTCN PAM
gccaucuaguggggauggca

SEQ ID NO: 10776 - RNA, 20 nt, Artificial Sequence
  targeting sequence with CTCN PAM
ucucugccaucuagugggga

SEQ ID NO: 10777 - RNA, 20 nt, Artificial Sequence
  targeting sequence with CTCN PAM
gcagcucuucucugccaucu

SEQ ID NO: 10778 - RNA, 20 nt, Artificial Sequence
  targeting sequence with CTCN PAM
ggccaggccaugaguagagc

SEQ ID NO: 10779 - RNA, 20 nt, Artificial Sequence
  targeting sequence with CTCN PAM
uggccuggccagagcucagc

SEQ ID NO: 10780 - RNA, 20 nt, Artificial Sequence
  targeting sequence with CTCN PAM
acucauggccuggccagagc

SEQ ID NO: 10781 - RNA, 20 nt, Artificial Sequence
  targeting sequence with CTCN PAM
cuguucccaggcuucccucu

SEQ ID NO: 10782 - RNA, 20 nt, Artificial Sequence
  targeting sequence with CTCN PAM
acugagcucauucaggggcc

SEQ ID NO: 10783 - RNA, 20 nt, Artificial Sequence
  targeting sequence with CTCN PAM
guagagggaagccugggaac

SEQ ID NO: 10784 - RNA, 20 nt, Artificial Sequence
  targeting sequence with CTCN PAM
uucaggggccuucugaccac

SEQ ID NO: 10785 - RNA, 20 nt, Artificial Sequence
  targeting sequence with CTCN PAM
gaacagcugccgugaugcug

SEQ ID NO: 10786 - RNA, 20 nt, Artificial Sequence
  targeting sequence with CTCN PAM
gugggcaaauccuagacucc

SEQ ID NO: 10787 - RNA, 20 nt, Artificial Sequence
  targeting sequence with CTCN PAM
agcacagccgaccuagagcu

SEQ ID NO: 10788 - RNA, 20 nt, Artificial Sequence
  targeting sequence with CTCN PAM
aggucggcugugcuggaguc

SEQ ID NO: 10789 - RNA, 20 nt, Artificial Sequence
  targeting sequence with CTCN PAM
agggucuuuccagcucuagg

SEQ ID NO: 10790 - RNA, 20 nt, Artificial Sequence
  targeting sequence with CTCN PAM
caagggucuuuccagcucua

SEQ ID NO: 10791 - RNA, 20 nt, Artificial Sequence
  targeting sequence with CTCN PAM
agccaucuuuguggaaaggg

SEQ ID NO: 10792 - RNA, 20 nt, Artificial Sequence
  targeting sequence with CTCN PAM
gcuucugggcuccagccauc

SEQ ID NO: 10793 - RNA, 20 nt, Artificial Sequence
  targeting sequence with CTCN PAM
gagcgaggacugagaccucg

SEQ ID NO: 10794 - RNA, 20 nt, Artificial Sequence
  targeting sequence with CTCN PAM
gagccuacuucucugcuucu

SEQ ID NO: 10795 - RNA, 20 nt, Artificial Sequence
  targeting sequence with CTCN PAM
cucugagccuacuucucugc

SEQ ID NO: 10796 - RNA, 20 nt, Artificial Sequence
  targeting sequence with CTCN PAM
guccucgcucugagccuacu

SEQ ID NO: 10797 - RNA, 20 nt, Artificial Sequence
  targeting sequence with CTCN PAM
aaugcuccuuucccucucgg

SEQ ID NO: 10798 - RNA, 20 nt, Artificial Sequence
  targeting sequence with CTCN PAM
uuucccucucggccacugug

SEQ ID NO: 10799 - RNA, 20 nt, Artificial Sequence
  targeting sequence with CTCN PAM
cggccacugugccgugcuuu

SEQ ID NO: 10800 - RNA, 20 nt, Artificial Sequence
  targeting sequence with CTCN PAM
gccacugugccgugcuuugc

SEQ ID NO: 10801 - RNA, 20 nt, Artificial Sequence
  targeting sequence with CTCN PAM
caagguguuuuaaggaaacc

SEQ ID NO: 10802 - RNA, 20 nt, Artificial Sequence
  targeting sequence with CTCN PAM
agguguuuuaaggaaaccca

SEQ ID NO: 10803 - RNA, 20 nt, Artificial Sequence
  targeting sequence with CTCN PAM
agaucuggguuuccuuaaaa

SEQ ID NO: 10804 - RNA, 20 nt, Artificial Sequence
  targeting sequence with CTCN PAM
guuccuuagcccaugugaug

SEQ ID NO: 10805 - RNA, 20 nt, Artificial Sequence
  targeting sequence with CTCN PAM
gaugccucccuuaacgcugc

SEQ ID NO: 10806 - RNA, 20 nt, Artificial Sequence
  targeting sequence with CTCN PAM
cuuaacgcugccucccaccc

SEQ ID NO: 10807 - RNA, 20 nt, Artificial Sequence
  targeting sequence with CTCN PAM
caccccugcucaugcucaga

SEQ ID NO: 10808 - RNA, 20 nt, Artificial Sequence
  targeting sequence with CTCN PAM
ugcucagaccauucauccgu

SEQ ID NO: 10809 - RNA, 20 nt, Artificial Sequence
  targeting sequence with CTCN PAM
gaccauucauccguguucuc

SEQ ID NO: 10810 - RNA, 20 nt, Artificial Sequence
  targeting sequence with CTCN PAM
aggcaucugguucauagucg

SEQ ID NO: 10811 - RNA, 20 nt, Artificial Sequence
  targeting sequence with CTCN PAM
gacuaugaaccagaugccug

SEQ ID NO: 10812 - RNA, 20 nt, Artificial Sequence
  targeting sequence with CTCN PAM
ccgacuaugaaccagaugcc

SEQ ID NO: 10813 - RNA, 20 nt, Artificial Sequence
  targeting sequence with CTCN PAM
uagcucuaggaggugucauu

SEQ ID NO: 10814 - RNA, 20 nt, Artificial Sequence
  targeting sequence with CTCN PAM
aggaggugucauuaucuguu

SEQ ID NO: 10815 - RNA, 20 nt, Artificial Sequence
  targeting sequence with CTCN PAM
uagagcuaagagcucuccga

SEQ ID NO: 10816 - RNA, 20 nt, Artificial Sequence
  targeting sequence with CTCN PAM
ccuguuagaauguggccucu

SEQ ID NO: 10817 - RNA, 20 nt, Artificial Sequence
  targeting sequence with CTCN PAM
gaauuguggagggggacagg

SEQ ID NO: 10818 - RNA, 20 nt, Artificial Sequence
  targeting sequence with CTCN PAM
acaauucagaggccacauuc

SEQ ID NO: 10819 - RNA, 20 nt, Artificial Sequence
  targeting sequence with CTCN PAM
gccccugucccccuccacaa

SEQ ID NO: 10820 - RNA, 20 nt, Artificial Sequence
  targeting sequence with CTCN PAM
gucucugacaggaagccugg

SEQ ID NO: 10821 - RNA, 20 nt, Artificial Sequence
  targeting sequence with CTCN PAM
gacaggaagccugguccugu

SEQ ID NO: 10822 - RNA, 20 nt, Artificial Sequence
  targeting sequence with CTCN PAM
ggcugccuugcaggugacca

SEQ ID NO: 10823 - RNA, 20 nt, Artificial Sequence
  targeting sequence with CTCN PAM
cucauccccugaggucuuuu

SEQ ID NO: 10824 - RNA, 20 nt, Artificial Sequence
  targeting sequence with CTCN PAM
uccccugaggucuuuucagg

SEQ ID NO: 10825 - RNA, 20 nt, Artificial Sequence
  targeting sequence with CTCN PAM
ggggaugagcgaguccccag

SEQ ID NO: 10826 - RNA, 20 nt, Artificial Sequence
  targeting sequence with CTCN PAM
ugaaaagaccucaggggaug

SEQ ID NO: 10827 - RNA, 20 nt, Artificial Sequence
  targeting sequence with CTCN PAM
cuccugaaaagaccucaggg

SEQ ID NO: 10828 - RNA, 20 nt, Artificial Sequence
  targeting sequence with CTCN PAM
gcagcauggcauccucccuc

SEQ ID NO: 10829 - RNA, 20 nt, Artificial Sequence
  targeting sequence with CTCN PAM
gcucagcagcauggcauccu

SEQ ID NO: 10830 - RNA, 20 nt, Artificial Sequence
  targeting sequence with CTCN PAM
gcguguucgguucaaagggc

SEQ ID NO: 10831 - RNA, 20 nt, Artificial Sequence
  targeting sequence with CTCN PAM
ggagcugcugccuccucuag

SEQ ID NO: 10832 - RNA, 20 nt, Artificial Sequence
  targeting sequence with CTCN PAM
agagcccuuugaaccgaaca

SEQ ID NO: 10833 - RNA, 20 nt, Artificial Sequence
  targeting sequence with CTCN PAM
ucuaggcacaggucagccca

SEQ ID NO: 10834 - RNA, 20 nt, Artificial Sequence
  targeting sequence with CTCN PAM
aggcacaggucagcccauuu

SEQ ID NO: 10835 - RNA, 20 nt, Artificial Sequence
  targeting sequence with CTCN PAM
uccaaacccugggcagaauc

SEQ ID NO: 10836 - RNA, 20 nt, Artificial Sequence
  targeting sequence with CTCN PAM
aaacccugggcagaaucuga

SEQ ID NO: 10837 - RNA, 20 nt, Artificial Sequence
  targeting sequence with CTCN PAM
gaaacuucuagagguccaug

SEQ ID NO: 10838 - RNA, 20 nt, Artificial Sequence
  targeting sequence with CTCN PAM
agaaguuucugaggaacaag

SEQ ID NO: 10839 - RNA, 20 nt, Artificial Sequence
  targeting sequence with CTCN PAM
uggaccucuagaaguuucug

SEQ ID NO: 10840 - RNA, 20 nt, Artificial Sequence
  targeting sequence with CTCN PAM
ggcuuuacugugaguucaag

SEQ ID NO: 10841 - RNA, 20 nt, Artificial Sequence
  targeting sequence with CTCN PAM
caguaaagccagagacuuua

SEQ ID NO: 10842 - RNA, 20 nt, Artificial Sequence
  targeting sequence with CTCN PAM
uauauaaauccuaaaauugc

SEQ ID NO: 10843 - RNA, 20 nt, Artificial Sequence
  targeting sequence with CTCN PAM
accuucuccaagaaucugug

SEQ ID NO: 10844 - RNA, 20 nt, Artificial Sequence
  targeting sequence with CTCN PAM
aagaaucuguguuuaugccc

SEQ ID NO: 10845 - RNA, 20 nt, Artificial Sequence
  targeting sequence with CTCN PAM
cagcuuuccccuccuccacg

SEQ ID NO: 10846 - RNA, 20 nt, Artificial Sequence
  targeting sequence with CTCN PAM
gcuuuccccuccuccacgcc

SEQ ID NO: 10847 - RNA, 20 nt, Artificial Sequence
  targeting sequence with CTCN PAM
uccacgcccucugcaguacc

SEQ ID NO: 10848 - RNA, 20 nt, Artificial Sequence
  targeting sequence with CTCN PAM
acgcccucugcaguaccagg

SEQ ID NO: 10849 - RNA, 20 nt, Artificial Sequence
  targeting sequence with CTCN PAM
gcaguaccaggugcucuggg

SEQ ID NO: 10850 - RNA, 20 nt, Artificial Sequence
  targeting sequence with CTCN PAM
ggguccccugugucuguggc

SEQ ID NO: 10851 - RNA, 20 nt, Artificial Sequence
  targeting sequence with CTCN PAM
caucaguccaugcaucucuc

SEQ ID NO: 10852 - RNA, 20 nt, Artificial Sequence
  targeting sequence with CTCN PAM
ucaguccaugcaucucucuc

SEQ ID NO: 10853 - RNA, 20 nt, Artificial Sequence
  targeting sequence with CTCN PAM
cucucucuugcugugaugcu

SEQ ID NO: 10854 - RNA, 20 nt, Artificial Sequence
  targeting sequence with CTCN PAM
cucucuugcugugaugcugc

SEQ ID NO: 10855 - RNA, 20 nt, Artificial Sequence
  targeting sequence with CTCN PAM
cucuugcugugaugcugccu

SEQ ID NO: 10856 - RNA, 20 nt, Artificial Sequence
  targeting sequence with CTCN PAM
cuugcugugaugcugccugc

SEQ ID NO: 10857 - RNA, 20 nt, Artificial Sequence
  targeting sequence with CTCN PAM
ugcugugaugcugccugccc

SEQ ID NO: 10858 - RNA, 20 nt, Artificial Sequence
  targeting sequence with CTCN PAM
gcggggggcggggggggcgg

SEQ ID NO: 10859 - RNA, 20 nt, Artificial Sequence
  targeting sequence with CTCN PAM
agagucucccaaggaggcac

SEQ ID NO: 10860 - RNA, 20 nt, Artificial Sequence
  targeting sequence with CTCN PAM
agccaaagaagaagccaguu

SEQ ID NO: 10861 - RNA, 20 nt, Artificial Sequence
  targeting sequence with CTCN PAM
cgagccaaagaagaagccag

SEQ ID NO: 10862 - RNA, 20 nt, Artificial Sequence
  targeting sequence with CTCN PAM
caaggaggcaccgccacaga

SEQ ID NO: 10863 - RNA, 20 nt, Artificial Sequence
  targeting sequence with CTCN PAM
uugggagacucucgagccaa

SEQ ID NO: 10864 - RNA, 20 nt, Artificial Sequence
  targeting sequence with CTCN PAM
cugggugguauaaccuccug

SEQ ID NO: 10865 - RNA, 20 nt, Artificial Sequence
  targeting sequence with CTCN PAM
ugcacgcacgaugauuaauu

SEQ ID NO: 10866 - RNA, 20 nt, Artificial Sequence
  targeting sequence with CTCN PAM
cuuccucuccucuguggcuc

SEQ ID NO: 10867 - RNA, 20 nt, Artificial Sequence
  targeting sequence with CTCN PAM
ccucuguggcucacugucua

SEQ ID NO: 10868 - RNA, 20 nt, Artificial Sequence
  targeting sequence with CTCN PAM
ucuguggcucacugucuagg

SEQ ID NO: 10869 - RNA, 20 nt, Artificial Sequence
  targeting sequence with CTCN PAM
guggcucacugucuagguga

SEQ ID NO: 10870 - RNA, 20 nt, Artificial Sequence
  targeting sequence with CTCN PAM
cugucuaggugagcuugacu

SEQ ID NO: 10871 - RNA, 20 nt, Artificial Sequence
  targeting sequence with CTCN PAM
ccuagacagugagccacaga

SEQ ID NO: 10872 - RNA, 20 nt, Artificial Sequence
  targeting sequence with CTCN PAM
gaugaaagccuguggggaau

SEQ ID NO: 10873 - RNA, 20 nt, Artificial Sequence
  targeting sequence with CTCN PAM
ucagcagcauugagguaaaa

SEQ ID NO: 10874 - RNA, 20 nt, Artificial Sequence
  targeting sequence with CTCN PAM
augcugcugaugaggucuug

SEQ ID NO: 10875 - RNA, 20 nt, Artificial Sequence
  targeting sequence with CTCN PAM
cguacaucuuuuccagcagc

SEQ ID NO: 10876 - RNA, 20 nt, Artificial Sequence
  targeting sequence with CTCN PAM
uucuuuuguaaauugcccag

SEQ ID NO: 10877 - RNA, 20 nt, Artificial Sequence
  targeting sequence with CTCN PAM
ugaucauggcagaaggcaag

SEQ ID NO: 10878 - RNA, 20 nt, Artificial Sequence
  targeting sequence with CTCN PAM
uccuugccuucugccaugau

SEQ ID NO: 10879 - RNA, 20 nt, Artificial Sequence
  targeting sequence with CTCN PAM
guuugccugcugccauccau

SEQ ID NO: 10880 - RNA, 20 nt, Artificial Sequence
  targeting sequence with CTCN PAM
cuguuugccugcugccaucc

SEQ ID NO: 10881 - RNA, 20 nt, Artificial Sequence
  targeting sequence with CTCN PAM
ucuuuuuaaaaccaucagau

SEQ ID NO: 10882 - RNA, 20 nt, Artificial Sequence
  targeting sequence with CTCN PAM
uuuuaaaaccaucagaucuc

SEQ ID NO: 10883 - RNA, 20 nt, Artificial Sequence
  targeting sequence with CTCN PAM
ugagacuuacuaucaugaga

SEQ ID NO: 10884 - RNA, 20 nt, Artificial Sequence
  targeting sequence with CTCN PAM
cgagaucugaugguuuuaaa

SEQ ID NO: 10885 - RNA, 20 nt, Artificial Sequence
  targeting sequence with CTCN PAM
ugauaguaagucucacgaga

SEQ ID NO: 10886 - RNA, 20 nt, Artificial Sequence
  targeting sequence with CTCN PAM
cacaacacaugggaauucaa

SEQ ID NO: 10887 - RNA, 20 nt, Artificial Sequence
  targeting sequence with CTCN PAM
ucuugaauucccauguguug

SEQ ID NO: 10888 - RNA, 20 nt, Artificial Sequence
  targeting sequence with CTCN PAM
gggcuuuugccugcugauau

SEQ ID NO: 10889 - RNA, 20 nt, Artificial Sequence
  targeting sequence with CTCN PAM
cguguccucagggcuuuugc

SEQ ID NO: 10890 - RNA, 20 nt, Artificial Sequence
  targeting sequence with CTCN PAM
gcucccguguccucagggcu

SEQ ID NO: 10891 - RNA, 20 nt, Artificial Sequence
  targeting sequence with CTCN PAM
cuggcgucugggcaucuggg

SEQ ID NO: 10892 - RNA, 20 nt, Artificial Sequence
  targeting sequence with CTCN PAM
aggggcagaguggccacaca

SEQ ID NO: 10893 - RNA, 20 nt, Artificial Sequence
  targeting sequence with CTCN PAM
gccccuggagcaaggcugug

SEQ ID NO: 10894 - RNA, 20 nt, Artificial Sequence
  targeting sequence with CTCN PAM
uacuguguggccacucugcc

SEQ ID NO: 10895 - RNA, 20 nt, Artificial Sequence
  targeting sequence with CTCN PAM
cacugcccacugcugucucc

SEQ ID NO: 10896 - RNA, 20 nt, Artificial Sequence
  targeting sequence with CTCN PAM
gucaguuaccacgugacagc

SEQ ID NO: 10897 - RNA, 20 nt, Artificial Sequence
  targeting sequence with CTCN PAM
ccaggguuggguuucuuguc

SEQ ID NO: 10898 - RNA, 20 nt, Artificial Sequence
  targeting sequence with CTCN PAM
aggguuggguuucuugucug

SEQ ID NO: 10899 - RNA, 20 nt, Artificial Sequence
  targeting sequence with CTCN PAM
cagcagccugugacguaggu

SEQ ID NO: 10900 - RNA, 20 nt, Artificial Sequence
  targeting sequence with CTCN PAM
ggaacugguuugcauccucc

SEQ ID NO: 10901 - RNA, 20 nt, Artificial Sequence
  targeting sequence with CTCN PAM
ugguggcggauagcugguca

SEQ ID NO: 10902 - RNA, 20 nt, Artificial Sequence
  targeting sequence with CTCN PAM
cagacuccaguaaucugaua

SEQ ID NO: 10903 - RNA, 20 nt, Artificial Sequence
  targeting sequence with CTCN PAM
gacuccaguaaucugauagc

SEQ ID NO: 10904 - RNA, 20 nt, Artificial Sequence
  targeting sequence with CTCN PAM
aguaaucugauagcgcugga

SEQ ID NO: 10905 - RNA, 20 nt, Artificial Sequence
  targeting sequence with CTCN PAM
agcgcuaucagauuacugga

SEQ ID NO: 10906 - RNA, 20 nt, Artificial Sequence
  targeting sequence with CTCN PAM
uccagcgcuaucagauuacu

SEQ ID NO: 10907 - RNA, 20 nt, Artificial Sequence
  targeting sequence with CTCN PAM
ugugcauuugggaaacuccu

SEQ ID NO: 10908 - RNA, 20 nt, Artificial Sequence
  targeting sequence with CTCN PAM
gcucaugugcauuugggaaa

SEQ ID NO: 10909 - RNA, 20 nt, Artificial Sequence
  targeting sequence with CTCN PAM
auuccccagaaauggaccug

SEQ ID NO: 10910 - RNA, 20 nt, Artificial Sequence
  targeting sequence with CTCN PAM
ccagguccauuucuggggaa

SEQ ID NO: 10911 - RNA, 20 nt, Artificial Sequence
  targeting sequence with CTCN PAM
guucagacugugggccuugc

SEQ ID NO: 10912 - RNA, 20 nt, Artificial Sequence
  targeting sequence with CTCN PAM
ggggcgcucaguucagacug

SEQ ID NO: 10913 - RNA, 20 nt, Artificial Sequence
  targeting sequence with CTCN PAM
agaacucuggggcgcucagu

SEQ ID NO: 10914 - RNA, 20 nt, Artificial Sequence
  targeting sequence with CTCN PAM
cagcccuacuguuccuggcu

SEQ ID NO: 10915 - RNA, 20 nt, Artificial Sequence
  targeting sequence with CTCN PAM
gccaggaacaguagggcugg

SEQ ID NO: 10916 - RNA, 20 nt, Artificial Sequence
  targeting sequence with CTCN PAM
uuucuucaccccacacccau

SEQ ID NO: 10917 - RNA, 20 nt, Artificial Sequence
  targeting sequence with CTCN PAM
uuuugacgaucuugggcuuc

SEQ ID NO: 10918 - RNA, 20 nt, Artificial Sequence
  targeting sequence with CTCN PAM
gaucccuugugaagcccaag

SEQ ID NO: 10919 - RNA, 20 nt, Artificial Sequence
  targeting sequence with CTCN PAM
ccuggggcuacuucuucccc

SEQ ID NO: 10920 - RNA, 20 nt, Artificial Sequence
  targeting sequence with CTCN PAM
uuccaggauucuuccucacc

SEQ ID NO: 10921 - RNA, 20 nt, Artificial Sequence
  targeting sequence with CTCN PAM
gcgacaguguucagucccug

SEQ ID NO: 10922 - RNA, 20 nt, Artificial Sequence
  targeting sequence with CTCN PAM
guagcuggugauuggaagac

SEQ ID NO: 10923 - RNA, 20 nt, Artificial Sequence
  targeting sequence with CTCN PAM
gccaggcuugcuuucccucc

SEQ ID NO: 10924 - RNA, 20 nt, Artificial Sequence
  targeting sequence with CTCN PAM
cuuuccgaagcuggcagaau

SEQ ID NO: 10925 - RNA, 20 nt, Artificial Sequence
  targeting sequence with CTCN PAM
agaugcgaucccaggagguc

SEQ ID NO: 10926 - RNA, 20 nt, Artificial Sequence
  targeting sequence with CTCN PAM
ugggaucgcaucuggagacu

SEQ ID NO: 10927 - RNA, 20 nt, Artificial Sequence
  targeting sequence with CTCN PAM
cccacucagagcccaaagaa

SEQ ID NO: 10928 - RNA, 20 nt, Artificial Sequence
  targeting sequence with CTCN PAM
gagcccaaagaaugccaaca

SEQ ID NO: 10929 - RNA, 20 nt, Artificial Sequence
  targeting sequence with CTCN PAM
gagugggugaggugacccuu

SEQ ID NO: 10930 - RNA, 20 nt, Artificial Sequence
  targeting sequence with CTCN PAM
gcuguuggcauucuuugggc

SEQ ID NO: 10931 - RNA, 20 nt, Artificial Sequence
  targeting sequence with CTCN PAM
caauuugcaaggggcagcaa

SEQ ID NO: 10932 - RNA, 20 nt, Artificial Sequence
  targeting sequence with CTCN PAM
auuugcaaggggcagcaaau

SEQ ID NO: 10933 - RNA, 20 nt, Artificial Sequence
  targeting sequence with CTCN PAM
aguucaaguagauggucaag

SEQ ID NO: 10934 - RNA, 20 nt, Artificial Sequence
  targeting sequence with CTCN PAM
guuuccucaccuguaaaaug

SEQ ID NO: 10935 - RNA, 20 nt, Artificial Sequence
  targeting sequence with CTCN PAM
ccuguaaaauggagacgaca

SEQ ID NO: 10936 - RNA, 20 nt, Artificial Sequence
  targeting sequence with CTCN PAM
auuuuacaggugaggaaacu

SEQ ID NO: 10937 - RNA, 20 nt, Artificial Sequence
  targeting sequence with CTCN PAM
aaggaugccucaaaccugga

SEQ ID NO: 10938 - RNA, 20 nt, Artificial Sequence
  targeting sequence with CTCN PAM
aaccuggagaucuuccauua

SEQ ID NO: 10939 - RNA, 20 nt, Artificial Sequence
  targeting sequence with CTCN PAM
agguuugaggcauccuuaga

SEQ ID NO: 10940 - RNA, 20 nt, Artificial Sequence
  targeting sequence with CTCN PAM
caacuuccucaguguggucu

SEQ ID NO: 10941 - RNA, 20 nt, Artificial Sequence
  targeting sequence with CTCN PAM
guguggucuucugagccauu

SEQ ID NO: 10942 - RNA, 20 nt, Artificial Sequence
  targeting sequence with CTCN PAM
gaagaccacacugaggaagu

SEQ ID NO: 10943 - RNA, 20 nt, Artificial Sequence
  targeting sequence with CTCN PAM
uugcagccaucaguuggcac

SEQ ID NO: 10944 - RNA, 20 nt, Artificial Sequence
  targeting sequence with CTCN PAM
gugccaacugauggcugcaa

SEQ ID NO: 10945 - RNA, 20 nt, Artificial Sequence
  targeting sequence with CTCN PAM
augaaccacguauucaaaac

SEQ ID NO: 10946 - RNA, 20 nt, Artificial Sequence
  targeting sequence with CTCN PAM
gggaauauaaagaugaaacu

SEQ ID NO: 10947 - RNA, 20 nt, Artificial Sequence
  targeting sequence with CTCN PAM
ugacgaucaaaaucucuguu

SEQ ID NO: 10948 - RNA, 20 nt, Artificial Sequence
  targeting sequence with CTCN PAM
guuaacaacugagugagcug

SEQ ID NO: 10949 - RNA, 20 nt, Artificial Sequence
  targeting sequence with CTCN PAM
guuguuaacagagauuuuga

SEQ ID NO: 10950 - RNA, 20 nt, Artificial Sequence
  targeting sequence with CTCN PAM
cucaguuguuaacagagauu

SEQ ID NO: 10951 - RNA, 20 nt, Artificial Sequence
  targeting sequence with CTCN PAM
ugcucuuggccaagggcauu

SEQ ID NO: 10952 - RNA, 20 nt, Artificial Sequence
  targeting sequence with CTCN PAM
uggccaagggcauuccaaag

SEQ ID NO: 10953 - RNA, 20 nt, Artificial Sequence
  targeting sequence with CTCN PAM
uuaugcccuucucccuaugg

SEQ ID NO: 10954 - RNA, 20 nt, Artificial Sequence
  targeting sequence with CTCN PAM
cuauggaauucaggcacagc

SEQ ID NO: 10955 - RNA, 20 nt, Artificial Sequence
  targeting sequence with CTCN PAM
uuuaaugcuaacgcugguca

SEQ ID NO: 10956 - RNA, 20 nt, Artificial Sequence
  targeting sequence with CTCN PAM
aguauagcaucacaugacag

SEQ ID NO: 10957 - RNA, 20 nt, Artificial Sequence
  targeting sequence with CTCN PAM
uguggggacaaucuacgucc

SEQ ID NO: 10958 - RNA, 20 nt, Artificial Sequence
  targeting sequence with CTCN PAM
cuuuccaggucuucucccug

SEQ ID NO: 10959 - RNA, 20 nt, Artificial Sequence
  targeting sequence with CTCN PAM
cugagccaggagaggcucca

SEQ ID NO: 10960 - RNA, 20 nt, Artificial Sequence
  targeting sequence with CTCN PAM
gggagaagaccuggaaaggg

SEQ ID NO: 10961 - RNA, 20 nt, Artificial Sequence
  targeting sequence with CTCN PAM
uggcucagggagaagaccug

SEQ ID NO: 10962 - RNA, 20 nt, Artificial Sequence
  targeting sequence with CTCN PAM
ccuggcucagggagaagacc

SEQ ID NO: 10963 - RNA, 20 nt, Artificial Sequence
  targeting sequence with CTCN PAM
acuaagacuuuggcaccuuu

SEQ ID NO: 10964 - RNA, 20 nt, Artificial Sequence
  targeting sequence with CTCN PAM
cuuugaagcccgcuaccugg

SEQ ID NO: 10965 - RNA, 20 nt, Artificial Sequence
  targeting sequence with CTCN PAM
uugaagcccgcuaccuggag

SEQ ID NO: 10966 - RNA, 20 nt, Artificial Sequence
  targeting sequence with CTCN PAM
agguagcgggcuucaaagag

SEQ ID NO: 10967 - RNA, 20 nt, Artificial Sequence
  targeting sequence with CTCN PAM
gcauaaauaagaaccuuggu

SEQ ID NO: 10968 - RNA, 20 nt, Artificial Sequence
  targeting sequence with CTCN PAM
acaaccucuuaucugaaccc

SEQ ID NO: 10969 - RNA, 20 nt, Artificial Sequence
  targeting sequence with CTCN PAM
uaucugaacccaggcauucc

SEQ ID NO: 10970 - RNA, 20 nt, Artificial Sequence
  targeting sequence with CTCN PAM
accaauugucaaaucuacca

SEQ ID NO: 10971 - RNA, 20 nt, Artificial Sequence
  targeting sequence with CTCN PAM
cuaaaauguacaaaaccaag

SEQ ID NO: 10972 - RNA, 20 nt, Artificial Sequence
  targeting sequence with CTCN PAM
ggacuuccugagggcuuugu

SEQ ID NO: 10973 - RNA, 20 nt, Artificial Sequence
  targeting sequence with CTCN PAM
ggaaguccugagaacaugug

SEQ ID NO: 10974 - RNA, 20 nt, Artificial Sequence
  targeting sequence with CTCN PAM
uacuggacucagaauaaguc

SEQ ID NO: 10975 - RNA, 20 nt, Artificial Sequence
  targeting sequence with CTCN PAM
gaauaagucuuuucaaauac

SEQ ID NO: 10976 - RNA, 20 nt, Artificial Sequence
  targeting sequence with CTCN PAM
uuucgucaauagacgcaaag

SEQ ID NO: 10977 - RNA, 20 nt, Artificial Sequence
  targeting sequence with CTCN PAM
guucguguacgcgcuccagc

SEQ ID NO: 10978 - RNA, 20 nt, Artificial Sequence
  targeting sequence with CTCN PAM
agcaagccgacaauacccac

SEQ ID NO: 10979 - RNA, 20 nt, Artificial Sequence
  targeting sequence with CTCN PAM
gugucuguggguauugucgg

SEQ ID NO: 10980 - RNA, 20 nt, Artificial Sequence
  targeting sequence with CTCN PAM
uuaccaggggaccauagggc

SEQ ID NO: 10981 - RNA, 20 nt, Artificial Sequence
  targeting sequence with CTCN PAM
cucaggccgggcgcgguggc

SEQ ID NO: 10982 - RNA, 20 nt, Artificial Sequence
  targeting sequence with CTCN PAM
ggccgggcgcgguggcucac

SEQ ID NO: 10983 - RNA, 20 nt, Artificial Sequence
  targeting sequence with CTCN PAM
cgccuguaaucccagaacuu

SEQ ID NO: 10984 - RNA, 20 nt, Artificial Sequence
  targeting sequence with CTCN PAM
gccuuccaaaguucugggau

SEQ ID NO: 10985 - RNA, 20 nt, Artificial Sequence
  targeting sequence with CTCN PAM
agugauccguccgccucggc

SEQ ID NO: 10986 - RNA, 20 nt, Artificial Sequence
  targeting sequence with CTCN PAM
cuacuaaaaauucaaaaauu

SEQ ID NO: 10987 - RNA, 20 nt, Artificial Sequence
  targeting sequence with CTCN PAM
acuaaaaauucaaaaauuag

SEQ ID NO: 10988 - RNA, 20 nt, Artificial Sequence
  targeting sequence with CTCN PAM
gccugccaaguagcugggac

SEQ ID NO: 10989 - RNA, 20 nt, Artificial Sequence
  targeting sequence with CTCN PAM
ugccucagccugccaaguag

SEQ ID NO: 10990 - RNA, 20 nt, Artificial Sequence
  targeting sequence with CTCN PAM
gcuuccgggguucaagcgau

SEQ ID NO: 10991 - RNA, 20 nt, Artificial Sequence
  targeting sequence with CTCN PAM
gcuuacugcagccuccgcuu

SEQ ID NO: 10992 - RNA, 20 nt, Artificial Sequence
  targeting sequence with CTCN PAM
agccugggaagcaaagugag

SEQ ID NO: 10993 - RNA, 20 nt, Artificial Sequence
  targeting sequence with CTCN PAM
cuuugcuucccaggcuggag

SEQ ID NO: 10994 - RNA, 20 nt, Artificial Sequence
  targeting sequence with CTCN PAM
gucucaaaaacaaacaaaca

SEQ ID NO: 10995 - RNA, 20 nt, Artificial Sequence
  targeting sequence with CTCN PAM
aaaacaaacaaacaaacaaa

SEQ ID NO: 10996 - RNA, 20 nt, Artificial Sequence
  targeting sequence with CTCN PAM
ccgagcaggaaaaagaagca

SEQ ID NO: 10997 - RNA, 20 nt, Artificial Sequence
  targeting sequence with CTCN PAM
gugaguuuguuuguuuguuu

SEQ ID NO: 10998 - RNA, 20 nt, Artificial Sequence
  targeting sequence with CTCN PAM
uccuuggugcuucuuuuucc

SEQ ID NO: 10999 - RNA, 20 nt, Artificial Sequence
  targeting sequence with CTCN PAM
cuuccuuggugcuucuuuuu

SEQ ID NO: 11000 - RNA, 20 nt, Artificial Sequence
  targeting sequence with CTCN PAM
ucccuucucucuuccuuggu

SEQ ID NO: 11001 - RNA, 20 nt, Artificial Sequence
  targeting sequence with CTCN PAM
caucccuucucucuuccuug

SEQ ID NO: 11002 - RNA, 20 nt, Artificial Sequence
  targeting sequence with CTCN PAM
cucaucccuucucucuuccu

SEQ ID NO: 11003 - RNA, 20 nt, Artificial Sequence
  targeting sequence with CTCN PAM
caucagccccggcgcucucu

SEQ ID NO: 11004 - RNA, 20 nt, Artificial Sequence
  targeting sequence with CTCN PAM
ggguccugacagggaaaagg

SEQ ID NO: 11005 - RNA, 20 nt, Artificial Sequence
  targeting sequence with CTCN PAM
ggguccuuaaaaaaaagaca

SEQ ID NO: 11006 - RNA, 20 nt, Artificial Sequence
  targeting sequence with CTCN PAM
uucuuugacaugucuuuuuu

SEQ ID NO: 11007 - RNA, 20 nt, Artificial Sequence
  targeting sequence with CTCN PAM
auuaaaacaguuaaauucgg

SEQ ID NO: 11008 - RNA, 20 nt, Artificial Sequence
  targeting sequence with CTCN PAM
cuauuaaaacaguuaaauuc

SEQ ID NO: 11009 - RNA, 20 nt, Artificial Sequence
  targeting sequence with CTCN PAM
gaaagaauuccaacuuucua

SEQ ID NO: 11010 - RNA, 20 nt, Artificial Sequence
  targeting sequence with CTCN PAM
acucagaaagaauuccaacu

SEQ ID NO: 11011 - RNA, 20 nt, Artificial Sequence
  targeting sequence with CTCN PAM
cuacaccaggucucaacuca

SEQ ID NO: 11012 - RNA, 20 nt, Artificial Sequence
  targeting sequence with CTCN PAM
acuccgaagugcgcuuccua

SEQ ID NO: 11013 - RNA, 20 nt, Artificial Sequence
  targeting sequence with CTCN PAM
gaagugcgcuuccuagcggu

SEQ ID NO: 11014 - RNA, 20 nt, Artificial Sequence
  targeting sequence with CTCN PAM
ugaccgcuaggaagcgcacu

SEQ ID NO: 11015 - RNA, 20 nt, Artificial Sequence
  targeting sequence with CTCN PAM
ccugaccgcuaggaagcgca

SEQ ID NO: 11016 - RNA, 20 nt, Artificial Sequence
  targeting sequence with CTCN PAM
cugaauuuacauaguaaaua

SEQ ID NO: 11017 - RNA, 20 nt, Artificial Sequence
  targeting sequence with CTCN PAM
ucacuauuuacuauguaaau

SEQ ID NO: 11018 - RNA, 20 nt, Artificial Sequence
  targeting sequence with CTCN PAM
auuuugcauauguggaagga

SEQ ID NO: 11019 - RNA, 20 nt, Artificial Sequence
  targeting sequence with CTCN PAM
uuccacauaugcaaaauaga

SEQ ID NO: 11020 - RNA, 20 nt, Artificial Sequence
  targeting sequence with CTCN PAM
aaaauucuccuuccacauau

SEQ ID NO: 11021 - RNA, 20 nt, Artificial Sequence
  targeting sequence with CTCN PAM
aagcuccacgcuucuaacca

SEQ ID NO: 11022 - RNA, 20 nt, Artificial Sequence
  targeting sequence with CTCN PAM
acgcuucuaaccauuagucu

SEQ ID NO: 11023 - RNA, 20 nt, Artificial Sequence
  targeting sequence with CTCN PAM
acaaaacaaccaacaaaaca

SEQ ID NO: 11024 - RNA, 20 nt, Artificial Sequence
  targeting sequence with CTCN PAM
cgccucagccuccugaguag

SEQ ID NO: 11025 - RNA, 20 nt, Artificial Sequence
  targeting sequence with CTCN PAM
ccucagccuccugaguagcg

SEQ ID NO: 11026 - RNA, 20 nt, Artificial Sequence
  targeting sequence with CTCN PAM
gccuccugaguagcggggau

SEQ ID NO: 11027 - RNA, 20 nt, Artificial Sequence
  targeting sequence with CTCN PAM
ugaguagcggggauuacaaa

SEQ ID NO: 11028 - RNA, 20 nt, Artificial Sequence
  targeting sequence with CTCN PAM
ggaggcugaggcgagagauc

SEQ ID NO: 11029 - RNA, 20 nt, Artificial Sequence
  targeting sequence with CTCN PAM
uauuuguaauccccgcuacu

SEQ ID NO: 11030 - RNA, 20 nt, Artificial Sequence
  targeting sequence with CTCN PAM
aaaaaaaaaaaaaaaaaaaa

SEQ ID NO: 11031 - RNA, 20 nt, Artificial Sequence
  targeting sequence with CTCN PAM
caaaaaaaaaaaaaaaaaaa

SEQ ID NO: 11032 - RNA, 20 nt, Artificial Sequence
  targeting sequence with CTCN PAM
cucucaaaaaaaaaaaaaaa

SEQ ID NO: 11033 - RNA, 20 nt, Artificial Sequence
  targeting sequence with CTCN PAM
cucuguugcacaggcuggag

SEQ ID NO: 11034 - RNA, 20 nt, Artificial Sequence
  targeting sequence with CTCN PAM
guugcacaggcuggagugca

SEQ ID NO: 11035 - RNA, 20 nt, Artificial Sequence
  targeting sequence with CTCN PAM
agccugugcaacagagugag

SEQ ID NO: 11036 - RNA, 20 nt, Artificial Sequence
  targeting sequence with CTCN PAM
acugcacuccagccugugca

SEQ ID NO: 11037 - RNA, 20 nt, Artificial Sequence
  targeting sequence with CTCN PAM
gcucacugcaacuucugccu

SEQ ID NO: 11038 - RNA, 20 nt, Artificial Sequence
  targeting sequence with CTCN PAM
cugcaacuucugccucccag

SEQ ID NO: 11039 - RNA, 20 nt, Artificial Sequence
  targeting sequence with CTCN PAM
cagguucaagggacaaggga

SEQ ID NO: 11040 - RNA, 20 nt, Artificial Sequence
  targeting sequence with CTCN PAM
ugccucaggcuccguaguag

SEQ ID NO: 11041 - RNA, 20 nt, Artificial Sequence
  targeting sequence with CTCN PAM
ggcuccguaguagcugggau

SEQ ID NO: 11042 - RNA, 20 nt, Artificial Sequence
  targeting sequence with CTCN PAM
guaguagcugggauuacagg

SEQ ID NO: 11043 - RNA, 20 nt, Artificial Sequence
  targeting sequence with CTCN PAM
acuaauuuuuuuuaauuuuc

SEQ ID NO: 11044 - RNA, 20 nt, Artificial Sequence
  targeting sequence with CTCN PAM
acugaaaauuaaaaaaaauu

SEQ ID NO: 11045 - RNA, 20 nt, Artificial Sequence
  targeting sequence with CTCN PAM
cuauguuggucaaccugguc

SEQ ID NO: 11046 - RNA, 20 nt, Artificial Sequence
  targeting sequence with CTCN PAM
aacuccugaccucaggugau

SEQ ID NO: 11047 - RNA, 20 nt, Artificial Sequence
  targeting sequence with CTCN PAM
ugaccucaggugaucugccc

SEQ ID NO: 11048 - RNA, 20 nt, Artificial Sequence
  targeting sequence with CTCN PAM
ggugaucugcccaccuuggc

SEQ ID NO: 11049 - RNA, 20 nt, Artificial Sequence
  targeting sequence with CTCN PAM
caaaaugcugggauuacagg

SEQ ID NO: 11050 - RNA, 20 nt, Artificial Sequence
  targeting sequence with CTCN PAM
cuguguugugucacugccuc

SEQ ID NO: 11051 - RNA, 20 nt, Artificial Sequence
  targeting sequence with CTCN PAM
guguugugucacugccucuc

SEQ ID NO: 11052 - RNA, 20 nt, Artificial Sequence
  targeting sequence with CTCN PAM
caggccagggcaccgagccc

SEQ ID NO: 11053 - RNA, 20 nt, Artificial Sequence
  targeting sequence with CTCN PAM
ggccagggcaccgagcccca

SEQ ID NO: 11054 - RNA, 20 nt, Artificial Sequence
  targeting sequence with CTCN PAM
gugcccuggccugagaggca

SEQ ID NO: 11055 - RNA, 20 nt, Artificial Sequence
  targeting sequence with CTCN PAM
uggcacaacagcuggggcuc

SEQ ID NO: 11056 - RNA, 20 nt, Artificial Sequence
  targeting sequence with CTCN PAM
gcacuccuggcacaacagcu

SEQ ID NO: 11057 - RNA, 20 nt, Artificial Sequence
  targeting sequence with CTCN PAM
ggcgaagcugccccuccucc

SEQ ID NO: 11058 - RNA, 20 nt, Artificial Sequence
  targeting sequence with CTCN PAM
ucccaccuuccuuccuugug

SEQ ID NO: 11059 - RNA, 20 nt, Artificial Sequence
  targeting sequence with CTCN PAM
caccuuccuuccuuguggag

SEQ ID NO: 11060 - RNA, 20 nt, Artificial Sequence
  targeting sequence with CTCN PAM
acaaggaaggaaggugggag

SEQ ID NO: 11061 - RNA, 20 nt, Artificial Sequence
  targeting sequence with CTCN PAM
aacuccuuaaagcgcauuuu

SEQ ID NO: 11062 - RNA, 20 nt, Artificial Sequence
  targeting sequence with CTCN PAM
uuaaagcgcauuuucuugcu

SEQ ID NO: 11063 - RNA, 20 nt, Artificial Sequence
  targeting sequence with CTCN PAM
acuaggaaaacgccaaagaa

SEQ ID NO: 11064 - RNA, 20 nt, Artificial Sequence
  targeting sequence with CTCN PAM
ucuccacuaggaaaacgcca

SEQ ID NO: 11065 - RNA, 20 nt, Artificial Sequence
  targeting sequence with CTCN PAM
cuucuccacuaggaaaacgc

SEQ ID NO: 11066 - RNA, 20 nt, Artificial Sequence
  targeting sequence with CTCN PAM
cucuucuccacuaggaaaac

SEQ ID NO: 11067 - RNA, 20 nt, Artificial Sequence
  targeting sequence with CTCN PAM
caaaaugccucucucuucuc

SEQ ID NO: 11068 - RNA, 20 nt, Artificial Sequence
  targeting sequence with CTCN PAM
ucacaaaaugccucucucuu

SEQ ID NO: 11069 - RNA, 20 nt, Artificial Sequence
  targeting sequence with CTCN PAM
ccucacaaaaugccucucuc

SEQ ID NO: 11070 - RNA, 20 nt, Artificial Sequence
  targeting sequence with CTCN PAM
uaccauacacuaugaggauc

SEQ ID NO: 11071 - RNA, 20 nt, Artificial Sequence
  targeting sequence with CTCN PAM
gagaagugccuuguccauuu

SEQ ID NO: 11072 - RNA, 20 nt, Artificial Sequence
  targeting sequence with CTCN PAM
gagucuuagcaucuucauau

SEQ ID NO: 11073 - RNA, 20 nt, Artificial Sequence
  targeting sequence with CTCN PAM
acagggcccugcuguguccc

SEQ ID NO: 11074 - RNA, 20 nt, Artificial Sequence
  targeting sequence with CTCN PAM
caccucaugguauccggcca

SEQ ID NO: 11075 - RNA, 20 nt, Artificial Sequence
  targeting sequence with CTCN PAM
ugguauccggccagcugggc

SEQ ID NO: 11076 - RNA, 20 nt, Artificial Sequence
  targeting sequence with CTCN PAM
ccuccucccaugccgcgccc

SEQ ID NO: 11077 - RNA, 20 nt, Artificial Sequence
  targeting sequence with CTCN PAM
uccucccaugccgcgccccu

SEQ ID NO: 11078 - RNA, 20 nt, Artificial Sequence
  targeting sequence with CTCN PAM
ucccaugccgcgccccugcc

SEQ ID NO: 11079 - RNA, 20 nt, Artificial Sequence
  targeting sequence with CTCN PAM
caugccgcgccccugccucu

SEQ ID NO: 11080 - RNA, 20 nt, Artificial Sequence
  targeting sequence with CTCN PAM
gcagggaugcugccuuguuc

SEQ ID NO: 11081 - RNA, 20 nt, Artificial Sequence
  targeting sequence with CTCN PAM
gcagucacccacggaugcug

SEQ ID NO: 11082 - RNA, 20 nt, Artificial Sequence
  targeting sequence with CTCN PAM
aaucuggguagcucaggcuu

SEQ ID NO: 11083 - RNA, 20 nt, Artificial Sequence
  targeting sequence with CTCN PAM
ggcuuuggaguaccaaagga

SEQ ID NO: 11084 - RNA, 20 nt, Artificial Sequence
  targeting sequence with CTCN PAM
aaagccugagcuacccagau

SEQ ID NO: 11085 - RNA, 20 nt, Artificial Sequence
  targeting sequence with CTCN PAM
uuugguacuccaaagccuga

SEQ ID NO: 11086 - RNA, 20 nt, Artificial Sequence
  targeting sequence with CTCN PAM
aagaaaauggccuccuuugg

SEQ ID NO: 11087 - RNA, 20 nt, Artificial Sequence
  targeting sequence with CTCN PAM
gguuggccucucgaaagggc

SEQ ID NO: 11088 - RNA, 20 nt, Artificial Sequence
  targeting sequence with CTCN PAM
cgaaagggcuggaggcaggu

SEQ ID NO: 11089 - RNA, 20 nt, Artificial Sequence
  targeting sequence with CTCN PAM
aaagggcuggaggcaggucc

SEQ ID NO: 11090 - RNA, 20 nt, Artificial Sequence
  targeting sequence with CTCN PAM
agcccuuucgagaggccaac

SEQ ID NO: 11091 - RNA, 20 nt, Artificial Sequence
  targeting sequence with CTCN PAM
uaugagcugcaagcccaccu

SEQ ID NO: 11092 - RNA, 20 nt, Artificial Sequence
  targeting sequence with CTCN PAM
uaggaggauaaaagaacauu

SEQ ID NO: 11093 - RNA, 20 nt, Artificial Sequence
  targeting sequence with CTCN PAM
ugggcuggucuuugcugauu

SEQ ID NO: 11094 - RNA, 20 nt, Artificial Sequence
  targeting sequence with CTCN PAM
aacaaaacuuuauaaaaaca

SEQ ID NO: 11095 - RNA, 20 nt, Artificial Sequence
  targeting sequence with CTCN PAM
uuuguuaaggugcugucugu

SEQ ID NO: 11096 - RNA, 20 nt, Artificial Sequence
  targeting sequence with CTCN PAM
guguugcagcaggaaagcag

SEQ ID NO: 11097 - RNA, 20 nt, Artificial Sequence
  targeting sequence with CTCN PAM
gcucuguguugcagcaggaa

SEQ ID NO: 11098 - RNA, 20 nt, Artificial Sequence
  targeting sequence with CTCN PAM
gccauccagguuugagugca

SEQ ID NO: 11099 - RNA, 20 nt, Artificial Sequence
  targeting sequence with CTCN PAM
auccccccccaaaaauauau

SEQ ID NO: 11100 - RNA, 20 nt, Artificial Sequence
  targeting sequence with CTCN PAM
ggaagcugaagugggaggau

SEQ ID NO: 11101 - RNA, 20 nt, Artificial Sequence
  targeting sequence with CTCN PAM
cacuucagcuuccugaguag

SEQ ID NO: 11102 - RNA, 20 nt, Artificial Sequence
  targeting sequence with CTCN PAM
aauuccugggcauaagcaau

SEQ ID NO: 11103 - RNA, 20 nt, Artificial Sequence
  targeting sequence with CTCN PAM
agccuaggcaacauaaggag

SEQ ID NO: 11104 - RNA, 20 nt, Artificial Sequence
  targeting sequence with CTCN PAM
uuauguugccuaggcuggag

SEQ ID NO: 11105 - RNA, 20 nt, Artificial Sequence
  targeting sequence with CTCN PAM
ugcaauggggucuccuuaug

SEQ ID NO: 11106 - RNA, 20 nt, Artificial Sequence
  targeting sequence with CTCN PAM
uuauguuggauauguguaga

SEQ ID NO: 11107 - RNA, 20 nt, Artificial Sequence
  targeting sequence with CTCN PAM
uucccuuggcuucccacagc

SEQ ID NO: 11108 - RNA, 20 nt, Artificial Sequence
  targeting sequence with CTCN PAM
ggguuuuggucuaaaugcug

SEQ ID NO: 11109 - RNA, 20 nt, Artificial Sequence
  targeting sequence with CTCN PAM
cccugggcuacaaggcccug

SEQ ID NO: 11110 - RNA, 20 nt, Artificial Sequence
  targeting sequence with CTCN PAM
cugggcuacaaggcccugcu

SEQ ID NO: 11111 - RNA, 20 nt, Artificial Sequence
  targeting sequence with CTCN PAM
gcugccuucccaccuggucc

SEQ ID NO: 11112 - RNA, 20 nt, Artificial Sequence
  targeting sequence with CTCN PAM
ugcaagcuauccuaccccag

SEQ ID NO: 11113 - RNA, 20 nt, Artificial Sequence
  targeting sequence with CTCN PAM
gaugucagcuccaaugucug

SEQ ID NO: 11114 - RNA, 20 nt, Artificial Sequence
  targeting sequence with CTCN PAM
aaugucugcuucucagagag

SEQ ID NO: 11115 - RNA, 20 nt, Artificial Sequence
  targeting sequence with CTCN PAM
gagaggccgucccugaccac

SEQ ID NO: 11116 - RNA, 20 nt, Artificial Sequence
  targeting sequence with CTCN PAM
gagaagcagacauuggagcu

SEQ ID NO: 11117 - RNA, 20 nt, Artificial Sequence
  targeting sequence with CTCN PAM
cugagaagcagacauuggag

SEQ ID NO: 11118 - RNA, 20 nt, Artificial Sequence
  targeting sequence with CTCN PAM
ucgaaagcuggggcuuuggc

SEQ ID NO: 11119 - RNA, 20 nt, Artificial Sequence
  targeting sequence with CTCN PAM
acaaagauuccaaugaauga

SEQ ID NO: 11120 - RNA, 20 nt, Artificial Sequence
  targeting sequence with CTCN PAM
agcugaaauaauauccugac

SEQ ID NO: 11121 - RNA, 20 nt, Artificial Sequence
  targeting sequence with CTCN PAM
auagaaggugguaaggucag

SEQ ID NO: 11122 - RNA, 20 nt, Artificial Sequence
  targeting sequence with CTCN PAM
gccucucugagcuccagcuu

SEQ ID NO: 11123 - RNA, 20 nt, Artificial Sequence
  targeting sequence with CTCN PAM
cugagcuccagcuuccuccu

SEQ ID NO: 11124 - RNA, 20 nt, Artificial Sequence
  targeting sequence with CTCN PAM
gagcuccagcuuccuccucg

SEQ ID NO: 11125 - RNA, 20 nt, Artificial Sequence
  targeting sequence with CTCN PAM
gagaggcugagccacuuguu

SEQ ID NO: 11126 - RNA, 20 nt, Artificial Sequence
  targeting sequence with CTCN PAM
agcuuccuccucguaaagca

SEQ ID NO: 11127 - RNA, 20 nt, Artificial Sequence
  targeting sequence with CTCN PAM
ucguaaagcaggaauagcaa

SEQ ID NO: 11128 - RNA, 20 nt, Artificial Sequence
  targeting sequence with CTCN PAM
uaaagcaggaauagcaaucc

SEQ ID NO: 11129 - RNA, 20 nt, Artificial Sequence
  targeting sequence with CTCN PAM
gcggacauaaaggauaaacu

SEQ ID NO: 11130 - RNA, 20 nt, Artificial Sequence
  targeting sequence with CTCN PAM
guuuauccuuuauguccgca

SEQ ID NO: 11131 - RNA, 20 nt, Artificial Sequence
  targeting sequence with CTCN PAM
ucuucauucuugcagaauga

SEQ ID NO: 11132 - RNA, 20 nt, Artificial Sequence
  targeting sequence with CTCN PAM
aacucuugccucuuuagaca

SEQ ID NO: 11133 - RNA, 20 nt, Artificial Sequence
  targeting sequence with CTCN PAM
ugccucuuuagacaaaguga

SEQ ID NO: 11134 - RNA, 20 nt, Artificial Sequence
  targeting sequence with CTCN PAM
uuagacaaagugagagacac

SEQ ID NO: 11135 - RNA, 20 nt, Artificial Sequence
  targeting sequence with CTCN PAM
cuuugucuaaagaggcaaga

SEQ ID NO: 11136 - RNA, 20 nt, Artificial Sequence
  targeting sequence with CTCN PAM
cacuuugucuaaagaggcaa

SEQ ID NO: 11137 - RNA, 20 nt, Artificial Sequence
  targeting sequence with CTCN PAM
guccgggugucucucacuuu

SEQ ID NO: 11138 - RNA, 20 nt, Artificial Sequence
  targeting sequence with CTCN PAM
ugcucuguccgggugucucu

SEQ ID NO: 11139 - RNA, 20 nt, Artificial Sequence
  targeting sequence with CTCN PAM
cuuucuagccucaugcauuu

SEQ ID NO: 11140 - RNA, 20 nt, Artificial Sequence
  targeting sequence with CTCN PAM
ugcauuucaaggaaaucacu

SEQ ID NO: 11141 - RNA, 20 nt, Artificial Sequence
  targeting sequence with CTCN PAM
ucuaacuauaagcagccaga

SEQ ID NO: 11142 - RNA, 20 nt, Artificial Sequence
  targeting sequence with CTCN PAM
uucuggcugcuuauaguuag

SEQ ID NO: 11143 - RNA, 20 nt, Artificial Sequence
  targeting sequence with CTCN PAM
ggcacagagggaggucgggg

SEQ ID NO: 11144 - RNA, 20 nt, Artificial Sequence
  targeting sequence with CTCN PAM
gugccugagcugucuugucu

SEQ ID NO: 11145 - RNA, 20 nt, Artificial Sequence
  targeting sequence with CTCN PAM
cucugugccugagcugucuu

SEQ ID NO: 11146 - RNA, 20 nt, Artificial Sequence
  targeting sequence with CTCN PAM
ugggugacugccaaacuuca

SEQ ID NO: 11147 - RNA, 20 nt, Artificial Sequence
  targeting sequence with CTCN PAM
uacaaugggccccaguaaaa

SEQ ID NO: 11148 - RNA, 20 nt, Artificial Sequence
  targeting sequence with CTCN PAM
gccucccagauaaacacaac

SEQ ID NO: 11149 - RNA, 20 nt, Artificial Sequence
  targeting sequence with CTCN PAM
cagauaaacacaacaaagag

SEQ ID NO: 11150 - RNA, 20 nt, Artificial Sequence
  targeting sequence with CTCN PAM
uuguuguguuuaucugggag

SEQ ID NO: 11151 - RNA, 20 nt, Artificial Sequence
  targeting sequence with CTCN PAM
gucucuuuguuguguuuauc

SEQ ID NO: 11152 - RNA, 20 nt, Artificial Sequence
  targeting sequence with CTCN PAM
gauaaacucuuccacuguga

SEQ ID NO: 11153 - RNA, 20 nt, Artificial Sequence
  targeting sequence with CTCN PAM
uccacugugaauccuuaaaa

SEQ ID NO: 11154 - RNA, 20 nt, Artificial Sequence
  targeting sequence with CTCN PAM
uagucuguaagagaaugugg

SEQ ID NO: 11155 - RNA, 20 nt, Artificial Sequence
  targeting sequence with CTCN PAM
uacagacuaagaguuuuuaa

SEQ ID NO: 11156 - RNA, 20 nt, Artificial Sequence
  targeting sequence with CTCN PAM
gaccuaacucagccagcagc

SEQ ID NO: 11157 - RNA, 20 nt, Artificial Sequence
  targeting sequence with CTCN PAM
gccagcagccccucucaggu

SEQ ID NO: 11158 - RNA, 20 nt, Artificial Sequence
  targeting sequence with CTCN PAM
cagguuuguuuucucuaaaa

SEQ ID NO: 11159 - RNA, 20 nt, Artificial Sequence
  targeting sequence with CTCN PAM
gguuuguuuucucuaaaaua

SEQ ID NO: 11160 - RNA, 20 nt, Artificial Sequence
  targeting sequence with CTCN PAM
aaaauaaaccugucuuugac

SEQ ID NO: 11161 - RNA, 20 nt, Artificial Sequence
  targeting sequence with CTCN PAM
auagucaaagacagguuuau

SEQ ID NO: 11162 - RNA, 20 nt, Artificial Sequence
  targeting sequence with CTCN PAM
uucuuuaauucuuacacacc

SEQ ID NO: 11163 - RNA, 20 nt, Artificial Sequence
  targeting sequence with CTCN PAM
ccagggaaaaagaacucagu

SEQ ID NO: 11164 - RNA, 20 nt, Artificial Sequence
  targeting sequence with CTCN PAM
gugaugacgccaaaguagca

SEQ ID NO: 11165 - RNA, 20 nt, Artificial Sequence
  targeting sequence with CTCN PAM
uggugcuacuuuggcgucau

SEQ ID NO: 11166 - RNA, 20 nt, Artificial Sequence
  targeting sequence with CTCN PAM
cauggugcuacuuuggcguc

SEQ ID NO: 11167 - RNA, 20 nt, Artificial Sequence
  targeting sequence with CTCN PAM
gcugcgaauaugcaucacag

SEQ ID NO: 11168 - RNA, 20 nt, Artificial Sequence
  targeting sequence with CTCN PAM
cagccagcuacacagauaau

SEQ ID NO: 11169 - RNA, 20 nt, Artificial Sequence
  targeting sequence with CTCN PAM
uugugccuuuuuguuauaaa

SEQ ID NO: 11170 - RNA, 20 nt, Artificial Sequence
  targeting sequence with CTCN PAM
gauacucuuugugccuuuuu

SEQ ID NO: 11171 - RNA, 20 nt, Artificial Sequence
  targeting sequence with CTCN PAM
aguugggcugcuuucccucu

SEQ ID NO: 11172 - RNA, 20 nt, Artificial Sequence
  targeting sequence with CTCN PAM
uuuauguccagcacauuuuu

SEQ ID NO: 11173 - RNA, 20 nt, Artificial Sequence
  targeting sequence with CTCN PAM
ugcaugugucaccaccccaa

SEQ ID NO: 11174 - RNA, 20 nt, Artificial Sequence
  targeting sequence with CTCN PAM
gcaccccaacagucgcuccu

SEQ ID NO: 11175 - RNA, 20 nt, Artificial Sequence
  targeting sequence with CTCN PAM
gggaagcucagcaccccaac

SEQ ID NO: 11176 - RNA, 20 nt, Artificial Sequence
  targeting sequence with CTCN PAM
gagagaggcagagacccugc

SEQ ID NO: 11177 - RNA, 20 nt, Artificial Sequence
  targeting sequence with CTCN PAM
gagcucagggaagcucagca

SEQ ID NO: 11178 - RNA, 20 nt, Artificial Sequence
  targeting sequence with CTCN PAM
cagagcucagggaagcucag

SEQ ID NO: 11179 - RNA, 20 nt, Artificial Sequence
  targeting sequence with CTCN PAM
cucagagcucagggaagcuc

SEQ ID NO: 11180 - RNA, 20 nt, Artificial Sequence
  targeting sequence with CTCN PAM
gccucucucagagcucaggg

SEQ ID NO: 11181 - RNA, 20 nt, Artificial Sequence
  targeting sequence with CTCN PAM
caagcagggucucugccucu

SEQ ID NO: 11182 - RNA, 20 nt, Artificial Sequence
  targeting sequence with CTCN PAM
gcagggcagcugguugagac

SEQ ID NO: 11183 - RNA, 20 nt, Artificial Sequence
  targeting sequence with CTCN PAM
accagcugcccugcagagaa

SEQ ID NO: 11184 - RNA, 20 nt, Artificial Sequence
  targeting sequence with CTCN PAM
uggaggacugaggaauggau

SEQ ID NO: 11185 - RNA, 20 nt, Artificial Sequence
  targeting sequence with CTCN PAM
aggagauuuucaauguccag

SEQ ID NO: 11186 - RNA, 20 nt, Artificial Sequence
  targeting sequence with CTCN PAM
guccuccaggagauuuucaa

SEQ ID NO: 11187 - RNA, 20 nt, Artificial Sequence
  targeting sequence with CTCN PAM
gagcugccugcuguccccaa

SEQ ID NO: 11188 - RNA, 20 nt, Artificial Sequence
  targeting sequence with CTCN PAM
gagcauccauuccucagucc

SEQ ID NO: 11189 - RNA, 20 nt, Artificial Sequence
  targeting sequence with CTCN PAM
uuuggggacagcaggcagcu

SEQ ID NO: 11190 - RNA, 20 nt, Artificial Sequence
  targeting sequence with CTCN PAM
agugaggaugcugaguaacu

SEQ ID NO: 11191 - RNA, 20 nt, Artificial Sequence
  targeting sequence with CTCN PAM
cuggaguggcucauuugggg

SEQ ID NO: 11192 - RNA, 20 nt, Artificial Sequence
  targeting sequence with CTCN PAM
gcauccucacuggaguggcu

SEQ ID NO: 11193 - RNA, 20 nt, Artificial Sequence
  targeting sequence with CTCN PAM
ucuuggugugacuguaaacu

SEQ ID NO: 11194 - RNA, 20 nt, Artificial Sequence
  targeting sequence with CTCN PAM
uggugugacuguaaacucca

SEQ ID NO: 11195 - RNA, 20 nt, Artificial Sequence
  targeting sequence with CTCN PAM
aacggccucaccccagaucu

SEQ ID NO: 11196 - RNA, 20 nt, Artificial Sequence
  targeting sequence with CTCN PAM
ccccagaucuuuaccauugu

SEQ ID NO: 11197 - RNA, 20 nt, Artificial Sequence
  targeting sequence with CTCN PAM
acugccuccuccagggcucc

SEQ ID NO: 11198 - RNA, 20 nt, Artificial Sequence
  targeting sequence with CTCN PAM
uccagggcuccugugugacu

SEQ ID NO: 11199 - RNA, 20 nt, Artificial Sequence
  targeting sequence with CTCN PAM
agggcuccugugugacucag

SEQ ID NO: 11200 - RNA, 20 nt, Artificial Sequence
  targeting sequence with CTCN PAM
ugugugacucagggaggaca

SEQ ID NO: 11201 - RNA, 20 nt, Artificial Sequence
  targeting sequence with CTCN PAM
gggaggacaaggaagcccca

SEQ ID NO: 11202 - RNA, 20 nt, Artificial Sequence
  targeting sequence with CTCN PAM
cugagucacacaggagcccu

SEQ ID NO: 11203 - RNA, 20 nt, Artificial Sequence
  targeting sequence with CTCN PAM
ugcauguuuggggcuuccuu

SEQ ID NO: 11204 - RNA, 20 nt, Artificial Sequence
  targeting sequence with CTCN PAM
guucccaucuaccagguugg

SEQ ID NO: 11205 - RNA, 20 nt, Artificial Sequence
  targeting sequence with CTCN PAM
acaacacaaaggugcauugu

SEQ ID NO: 11206 - RNA, 20 nt, Artificial Sequence
  targeting sequence with CTCN PAM
ggcugugaauuuacucuaca

SEQ ID NO: 11207 - RNA, 20 nt, Artificial Sequence
  targeting sequence with CTCN PAM
gugccuugucuggacagaug

SEQ ID NO: 11208 - RNA, 20 nt, Artificial Sequence
  targeting sequence with CTCN PAM
aguuccaucugccaagcaau

SEQ ID NO: 11209 - RNA, 20 nt, Artificial Sequence
  targeting sequence with CTCN PAM
cuauuaauccauagcuuauu

SEQ ID NO: 11210 - RNA, 20 nt, Artificial Sequence
  targeting sequence with CTCN PAM
ucacuauuaauccauagcuu

SEQ ID NO: 11211 - RNA, 20 nt, Artificial Sequence
  targeting sequence with CTCN PAM
ggaaaggcuugccauuuggg

SEQ ID NO: 11212 - RNA, 20 nt, Artificial Sequence
  targeting sequence with CTCN PAM
gccucucaggugggcucugg

SEQ ID NO: 11213 - RNA, 20 nt, Artificial Sequence
  targeting sequence with CTCN PAM
caggugggcucuggugggcu

SEQ ID NO: 11214 - RNA, 20 nt, Artificial Sequence
  targeting sequence with CTCN PAM
ggugggcucuggugggcuga

SEQ ID NO: 11215 - RNA, 20 nt, Artificial Sequence
  targeting sequence with CTCN PAM
ggugggcugaguauccuccu

SEQ ID NO: 11216 - RNA, 20 nt, Artificial Sequence
  targeting sequence with CTCN PAM
gcccaccagagcccaccuga

SEQ ID NO: 11217 - RNA, 20 nt, Artificial Sequence
  targeting sequence with CTCN PAM
ucuaagaacaagggcuggga

SEQ ID NO: 11218 - RNA, 20 nt, Artificial Sequence
  targeting sequence with CTCN PAM
aagaacaagggcugggacuc

SEQ ID NO: 11219 - RNA, 20 nt, Artificial Sequence
  targeting sequence with CTCN PAM
uuugucuuugaauggacaca

SEQ ID NO: 11220 - RNA, 20 nt, Artificial Sequence
  targeting sequence with CTCN PAM
agggaauaucuacuccuuag

SEQ ID NO: 11221 - RNA, 20 nt, Artificial Sequence
  targeting sequence with CTCN PAM
uuaguuaaucucugggccug

SEQ ID NO: 11222 - RNA, 20 nt, Artificial Sequence
  targeting sequence with CTCN PAM
gggccugaaaauuuccagag

SEQ ID NO: 11223 - RNA, 20 nt, Artificial Sequence
  targeting sequence with CTCN PAM
ggaaauuuucaggcccagag

SEQ ID NO: 11224 - RNA, 20 nt, Artificial Sequence
  targeting sequence with CTCN PAM
guguguuccccaguuuuggc

SEQ ID NO: 11225 - RNA, 20 nt, Artificial Sequence
  targeting sequence with CTCN PAM
cuuccucaguguguucccca

SEQ ID NO: 11226 - RNA, 20 nt, Artificial Sequence
  targeting sequence with CTCN PAM
aaacucacuuccucagugug

SEQ ID NO: 11227 - RNA, 20 nt, Artificial Sequence
  targeting sequence with CTCN PAM
uccaaacucacuuccucagu

SEQ ID NO: 11228 - RNA, 20 nt, Artificial Sequence
  targeting sequence with CTCN PAM
ccuccaaacucacuuccuca

SEQ ID NO: 11229 - RNA, 20 nt, Artificial Sequence
  targeting sequence with CTCN PAM
caggacggggagguggaggc

SEQ ID NO: 11230 - RNA, 20 nt, Artificial Sequence
  targeting sequence with CTCN PAM
ccguccugggagcaagcaug

SEQ ID NO: 11231 - RNA, 20 nt, Artificial Sequence
  targeting sequence with CTCN PAM
accuccccguccugggagca

SEQ ID NO: 11232 - RNA, 20 nt, Artificial Sequence
  targeting sequence with CTCN PAM
ccauccugugccuccaccuc

SEQ ID NO: 11233 - RNA, 20 nt, Artificial Sequence
  targeting sequence with CTCN PAM
cuugcaguggccaggcugcu

SEQ ID NO: 11234 - RNA, 20 nt, Artificial Sequence
  targeting sequence with CTCN PAM
uuugcugagccauagaccac

SEQ ID NO: 11235 - RNA, 20 nt, Artificial Sequence
  targeting sequence with CTCN PAM
gcaaaggagcagccuggcca

SEQ ID NO: 11236 - RNA, 20 nt, Artificial Sequence
  targeting sequence with CTCN PAM
ugggaagcacaacaccauca

SEQ ID NO: 11237 - RNA, 20 nt, Artificial Sequence
  targeting sequence with CTCN PAM
cuugggaagcacaacaccau

SEQ ID NO: 11238 - RNA, 20 nt, Artificial Sequence
  targeting sequence with CTCN PAM
gcucucuugggaagcacaac

SEQ ID NO: 11239 - RNA, 20 nt, Artificial Sequence
  targeting sequence with CTCN PAM
accucuugguucuucagagg

SEQ ID NO: 11240 - RNA, 20 nt, Artificial Sequence
  targeting sequence with CTCN PAM
ugguucuucagagggacucc

SEQ ID NO: 11241 - RNA, 20 nt, Artificial Sequence
  targeting sequence with CTCN PAM
gaagaaccaagagguggagg

SEQ ID NO: 11242 - RNA, 20 nt, Artificial Sequence
  targeting sequence with CTCN PAM
gaccugaggagagagaagac

SEQ ID NO: 11243 - RNA, 20 nt, Artificial Sequence
  targeting sequence with CTCN PAM
ggucggagucccucugaaga

SEQ ID NO: 11244 - RNA, 20 nt, Artificial Sequence
  targeting sequence with CTCN PAM
ucaggucggagucccucuga

SEQ ID NO: 11245 - RNA, 20 nt, Artificial Sequence
  targeting sequence with CTCN PAM
ccucaggucggagucccucu

SEQ ID NO: 11246 - RNA, 20 nt, Artificial Sequence
  targeting sequence with CTCN PAM
cuccucaggucggagucccu

SEQ ID NO: 11247 - RNA, 20 nt, Artificial Sequence
  targeting sequence with CTCN PAM
cuaaaguuguuuaagguauu

SEQ ID NO: 11248 - RNA, 20 nt, Artificial Sequence
  targeting sequence with CTCN PAM
acuuaaaagaaacccaaaca

SEQ ID NO: 11249 - RNA, 20 nt, Artificial Sequence
  targeting sequence with CTCN PAM
gucacccaggcuggagugua

SEQ ID NO: 11250 - RNA, 20 nt, Artificial Sequence
  targeting sequence with CTCN PAM
agccugggugacagagcaag

SEQ ID NO: 11251 - RNA, 20 nt, Artificial Sequence
  targeting sequence with CTCN PAM
cugcagccucuaacucccgg

SEQ ID NO: 11252 - RNA, 20 nt, Artificial Sequence
  targeting sequence with CTCN PAM
aacucccgggcucaagugau

SEQ ID NO: 11253 - RNA, 20 nt, Artificial Sequence
  targeting sequence with CTCN PAM
cgggcucaagugauccuccc

SEQ ID NO: 11254 - RNA, 20 nt, Artificial Sequence
  targeting sequence with CTCN PAM
agugauccucccaucugacc

SEQ ID NO: 11255 - RNA, 20 nt, Artificial Sequence
  targeting sequence with CTCN PAM
caucugacccucccauguag

SEQ ID NO: 11256 - RNA, 20 nt, Artificial Sequence
  targeting sequence with CTCN PAM
cauguagcugggacgacagg

SEQ ID NO: 11257 - RNA, 20 nt, Artificial Sequence
  targeting sequence with CTCN PAM
acaaaaaauuaaaaaacuua

SEQ ID NO: 11258 - RNA, 20 nt, Artificial Sequence
  targeting sequence with CTCN PAM
cuguguuacccaggcugauc

SEQ ID NO: 11259 - RNA, 20 nt, Artificial Sequence
  targeting sequence with CTCN PAM
agcucuuggccucaagcagu

SEQ ID NO: 11260 - RNA, 20 nt, Artificial Sequence
  targeting sequence with CTCN PAM
uggccucaagcagucuucuc

SEQ ID NO: 11261 - RNA, 20 nt, Artificial Sequence
  targeting sequence with CTCN PAM
agcagucuucucacuuuggc

SEQ ID NO: 11262 - RNA, 20 nt, Artificial Sequence
  targeting sequence with CTCN PAM
cuuuggccuuccaaaguguu

SEQ ID NO: 11263 - RNA, 20 nt, Artificial Sequence
  targeting sequence with CTCN PAM
ugccuguaaucccccaacac

SEQ ID NO: 11264 - RNA, 20 nt, Artificial Sequence
  targeting sequence with CTCN PAM
ugccuguaaucccagcacuu

SEQ ID NO: 11265 - RNA, 20 nt, Artificial Sequence
  targeting sequence with CTCN PAM
caaagugcugggauuacagg

SEQ ID NO: 11266 - RNA, 20 nt, Artificial Sequence
  targeting sequence with CTCN PAM
gccucccaaagugcugggau

SEQ ID NO: 11267 - RNA, 20 nt, Artificial Sequence
  targeting sequence with CTCN PAM
ugaccuugugauccaccugc

SEQ ID NO: 11268 - RNA, 20 nt, Artificial Sequence
  targeting sequence with CTCN PAM
acuaaaaauacaaaaauuag

SEQ ID NO: 11269 - RNA, 20 nt, Artificial Sequence
  targeting sequence with CTCN PAM
ggagucugaggcaggaaaau

SEQ ID NO: 11270 - RNA, 20 nt, Artificial Sequence
  targeting sequence with CTCN PAM
cgaguaguugggacuauagg

SEQ ID NO: 11271 - RNA, 20 nt, Artificial Sequence
  targeting sequence with CTCN PAM
gacucccgaguaguugggac

SEQ ID NO: 11272 - RNA, 20 nt, Artificial Sequence
  targeting sequence with CTCN PAM
cagguucaagcaauuuuccu

SEQ ID NO: 11273 - RNA, 20 nt, Artificial Sequence
  targeting sequence with CTCN PAM
gccucccagguucaagcaau

SEQ ID NO: 11274 - RNA, 20 nt, Artificial Sequence
  targeting sequence with CTCN PAM
cugcaaccuccgccucccag

SEQ ID NO: 11275 - RNA, 20 nt, Artificial Sequence
  targeting sequence with CTCN PAM
agccuggugacagagugaga

SEQ ID NO: 11276 - RNA, 20 nt, Artificial Sequence
  targeting sequence with CTCN PAM
gucaccaggcuggagugcgg

SEQ ID NO: 11277 - RNA, 20 nt, Artificial Sequence
  targeting sequence with CTCN PAM
cucugucaccaggcuggagu

SEQ ID NO: 11278 - RNA, 20 nt, Artificial Sequence
  targeting sequence with CTCN PAM
gccucaaaaaaaaaaaaaaa

SEQ ID NO: 11279 - RNA, 20 nt, Artificial Sequence
  targeting sequence with CTCN PAM
aaaaaaaaaaaaaaaccaaa

SEQ ID NO: 11280 - RNA, 20 nt, Artificial Sequence
  targeting sequence with CTCN PAM
gauaguaaauauuuuagguu

SEQ ID NO: 11281 - RNA, 20 nt, Artificial Sequence
  targeting sequence with CTCN PAM
acucugccauuguagcauga

SEQ ID NO: 11282 - RNA, 20 nt, Artificial Sequence
  targeting sequence with CTCN PAM
gccauuguagcaugaaagca

SEQ ID NO: 11283 - RNA, 20 nt, Artificial Sequence
  targeting sequence with CTCN PAM
uucauccuugaauugucuau

SEQ ID NO: 11284 - RNA, 20 nt, Artificial Sequence
  targeting sequence with CTCN PAM
auuuaaaaaacaggaagcag

SEQ ID NO: 11285 - RNA, 20 nt, Artificial Sequence
  targeting sequence with CTCN PAM
ugagccacaguuugcagacc

SEQ ID NO: 11286 - RNA, 20 nt, Artificial Sequence
  targeting sequence with CTCN PAM
agagacaaguccagccugcu

SEQ ID NO: 11287 - RNA, 20 nt, Artificial Sequence
  targeting sequence with CTCN PAM
gcuaggccgauacaacuuuc

SEQ ID NO: 11288 - RNA, 20 nt, Artificial Sequence
  targeting sequence with CTCN PAM
acuggacugcacagaugugg

SEQ ID NO: 11289 - RNA, 20 nt, Artificial Sequence
  targeting sequence with CTCN PAM
ucuacuggacugcacagaug

SEQ ID NO: 11290 - RNA, 20 nt, Artificial Sequence
  targeting sequence with CTCN PAM
guagucacauguggcaagua

SEQ ID NO: 11291 - RNA, 20 nt, Artificial Sequence
  targeting sequence with CTCN PAM
aaauauguggcuggugugau

SEQ ID NO: 11292 - RNA, 20 nt, Artificial Sequence
  targeting sequence with CTCN PAM
uggugaugccuguaguacug

SEQ ID NO: 11293 - RNA, 20 nt, Artificial Sequence
  targeting sequence with CTCN PAM
uuagaaauacagcaucuuuu

SEQ ID NO: 11294 - RNA, 20 nt, Artificial Sequence
  targeting sequence with CTCN PAM
aacugucacuggcauauaag

SEQ ID NO: 11295 - RNA, 20 nt, Artificial Sequence
  targeting sequence with CTCN PAM
accagcuuucucugaucuua

SEQ ID NO: 11296 - RNA, 20 nt, Artificial Sequence
  targeting sequence with CTCN PAM
gaucuuaguuuuggggucug

SEQ ID NO: 11297 - RNA, 20 nt, Artificial Sequence
  targeting sequence with CTCN PAM
aagguagcuggcugguuaug

SEQ ID NO: 11298 - RNA, 20 nt, Artificial Sequence
  targeting sequence with CTCN PAM
uaaccagccagcuaccuugg

SEQ ID NO: 11299 - RNA, 20 nt, Artificial Sequence
  targeting sequence with CTCN PAM
acagacuuuccacucaggug

SEQ ID NO: 11300 - RNA, 20 nt, Artificial Sequence
  targeting sequence with CTCN PAM
gguggggguuuucaagguca

SEQ ID NO: 11301 - RNA, 20 nt, Artificial Sequence
  targeting sequence with CTCN PAM
auaucugccccgcaccaguc

SEQ ID NO: 11302 - RNA, 20 nt, Artificial Sequence
  targeting sequence with CTCN PAM
uugugucuacuucucaguug

SEQ ID NO: 11303 - RNA, 20 nt, Artificial Sequence
  targeting sequence with CTCN PAM
guugaaccagaacccagcau

SEQ ID NO: 11304 - RNA, 20 nt, Artificial Sequence
  targeting sequence with CTCN PAM
cccgccaugcuggguucugg

SEQ ID NO: 11305 - RNA, 20 nt, Artificial Sequence
  targeting sequence with CTCN PAM
uugccacccccgccccuccc

SEQ ID NO: 11306 - RNA, 20 nt, Artificial Sequence
  targeting sequence with CTCN PAM
cucuuugccacccccgcccc

SEQ ID NO: 11307 - RNA, 20 nt, Artificial Sequence
  targeting sequence with CTCN PAM
ggaugggccuaagugggcag

SEQ ID NO: 11308 - RNA, 20 nt, Artificial Sequence
  targeting sequence with CTCN PAM
ucccuggugauucucugguu

SEQ ID NO: 11309 - RNA, 20 nt, Artificial Sequence
  targeting sequence with CTCN PAM
cuggugauucucugguucuc

SEQ ID NO: 11310 - RNA, 20 nt, Artificial Sequence
  targeting sequence with CTCN PAM
gguucucacccuggcccacc

SEQ ID NO: 11311 - RNA, 20 nt, Artificial Sequence
  targeting sequence with CTCN PAM
cccuggcccaccuugugaaa

SEQ ID NO: 11312 - RNA, 20 nt, Artificial Sequence
  targeting sequence with CTCN PAM
aggaucuugaucuugcggcu

SEQ ID NO: 11313 - RNA, 20 nt, Artificial Sequence
  targeting sequence with CTCN PAM
uaccugcauagccgcaagau

SEQ ID NO: 11314 - RNA, 20 nt, Artificial Sequence
  targeting sequence with CTCN PAM
ggcagcuggagcuggggcac

SEQ ID NO: 11315 - RNA, 20 nt, Artificial Sequence
  targeting sequence with CTCN PAM
agcugcccgagcccccugcc

SEQ ID NO: 11316 - RNA, 20 nt, Artificial Sequence
  targeting sequence with CTCN PAM
cggcugucccgccagauggu

SEQ ID NO: 11317 - RNA, 20 nt, Artificial Sequence
  targeting sequence with CTCN PAM
cccggcugucccgccagaug

SEQ ID NO: 11318 - RNA, 20 nt, Artificial Sequence
  targeting sequence with CTCN PAM
uccagaagaaagcccccagg

SEQ ID NO: 11319 - RNA, 20 nt, Artificial Sequence
  targeting sequence with CTCN PAM
ccucuuccagaagaaagccc

SEQ ID NO: 11320 - RNA, 20 nt, Artificial Sequence
  targeting sequence with CTCN PAM
caccucuuccagaagaaagc

SEQ ID NO: 11321 - RNA, 20 nt, Artificial Sequence
  targeting sequence with CTCN PAM
gcccuacccucucaccucuu

SEQ ID NO: 11322 - RNA, 20 nt, Artificial Sequence
  targeting sequence with CTCN PAM
ucugcccuacccucucaccu

SEQ ID NO: 11323 - RNA, 20 nt, Artificial Sequence
  targeting sequence with CTCN PAM
ccucugcccuacccucucac

SEQ ID NO: 11324 - RNA, 20 nt, Artificial Sequence
  targeting sequence with CTCN PAM
cuccucugcccuacccucuc

SEQ ID NO: 11325 - RNA, 20 nt, Artificial Sequence
  targeting sequence with CTCN PAM
uuugaacucucuccucugcc

SEQ ID NO: 11326 - RNA, 20 nt, Artificial Sequence
  targeting sequence with CTCN PAM
ggggacugcauccgccuggc

SEQ ID NO: 11327 - RNA, 20 nt, Artificial Sequence
  targeting sequence with CTCN PAM
uuagucccuaacucugggga

SEQ ID NO: 11328 - RNA, 20 nt, Artificial Sequence
  targeting sequence with CTCN PAM
ccuuagucccuaacucuggg

SEQ ID NO: 11329 - RNA, 20 nt, Artificial Sequence
  targeting sequence with CTCN PAM
uccucuccuuagucccuaac

SEQ ID NO: 11330 - RNA, 20 nt, Artificial Sequence
  targeting sequence with CTCN PAM
aaauagcaggauagaguaca

SEQ ID NO: 11331 - RNA, 20 nt, Artificial Sequence
  targeting sequence with CTCN PAM
auccugcuauuuagagcugc

SEQ ID NO: 11332 - RNA, 20 nt, Artificial Sequence
  targeting sequence with CTCN PAM
caggcauuuuguggccaaac

SEQ ID NO: 11333 - RNA, 20 nt, Artificial Sequence
  targeting sequence with CTCN PAM
gagccuugguuuucucaucu

SEQ ID NO: 11334 - RNA, 20 nt, Artificial Sequence
  targeting sequence with CTCN PAM
gagaagcaaagucucccagg

SEQ ID NO: 11335 - RNA, 20 nt, Artificial Sequence
  targeting sequence with CTCN PAM
ucugaaaaacacaaggcuug

SEQ ID NO: 11336 - RNA, 20 nt, Artificial Sequence
  targeting sequence with CTCN PAM
ccugucaaaccagucaguau

SEQ ID NO: 11337 - RNA, 20 nt, Artificial Sequence
  targeting sequence with CTCN PAM
ugucaaaccagucaguaugc

SEQ ID NO: 11338 - RNA, 20 nt, Artificial Sequence
  targeting sequence with CTCN PAM
cagugcaccaaaaccuauac

SEQ ID NO: 11339 - RNA, 20 nt, Artificial Sequence
  targeting sequence with CTCN PAM
gugcaccaaaaccuauaccc

SEQ ID NO: 11340 - RNA, 20 nt, Artificial Sequence
  targeting sequence with CTCN PAM
agggaaggguauagguuuug

SEQ ID NO: 11341 - RNA, 20 nt, Artificial Sequence
  targeting sequence with CTCN PAM
accuggcuccagggaagggu

SEQ ID NO: 11342 - RNA, 20 nt, Artificial Sequence
  targeting sequence with CTCN PAM
gcucagacugcagaagcaac

SEQ ID NO: 11343 - RNA, 20 nt, Artificial Sequence
  targeting sequence with CTCN PAM
gacugcagaagcaaccuguu

SEQ ID NO: 11344 - RNA, 20 nt, Artificial Sequence
  targeting sequence with CTCN PAM
gccaauuggcgcggggcguc

SEQ ID NO: 11345 - RNA, 20 nt, Artificial Sequence
  targeting sequence with CTCN PAM
uaacacgugacagcgcucag

SEQ ID NO: 11346 - RNA, 20 nt, Artificial Sequence
  targeting sequence with CTCN PAM
cucuuaacacgugacagcgc

SEQ ID NO: 11347 - RNA, 20 nt, Artificial Sequence
  targeting sequence with CTCN PAM
cucuuuuaccuuggucccuu

SEQ ID NO: 11348 - RNA, 20 nt, Artificial Sequence
  targeting sequence with CTCN PAM
cucacucuuuuaccuugguc

SEQ ID NO: 11349 - RNA, 20 nt, Artificial Sequence
  targeting sequence with CTCN PAM
auuucagcucacucacucuu

SEQ ID NO: 11350 - RNA, 20 nt, Artificial Sequence
  targeting sequence with CTCN PAM
aaacauguucaaacacauuc

SEQ ID NO: 11351 - RNA, 20 nt, Artificial Sequence
  targeting sequence with CTCN PAM
ucuguuaugcauagcuuugc

SEQ ID NO: 11352 - RNA, 20 nt, Artificial Sequence
  targeting sequence with CTCN PAM
gcagcuuucaagcucaucug

SEQ ID NO: 11353 - RNA, 20 nt, Artificial Sequence
  targeting sequence with CTCN PAM
guaucuuauguuucuuccag

SEQ ID NO: 11354 - RNA, 20 nt, Artificial Sequence
  targeting sequence with CTCN PAM
gccucuguaucuuauguuuc

SEQ ID NO: 11355 - RNA, 20 nt, Artificial Sequence
  targeting sequence with CTCN PAM
gacuacguuuguggugacug

SEQ ID NO: 11356 - RNA, 20 nt, Artificial Sequence
  targeting sequence with CTCN PAM
uaguggucucagacuacguu

SEQ ID NO: 11357 - RNA, 20 nt, Artificial Sequence
  targeting sequence with CTCN PAM
ugucaaaaguacaccacuac

SEQ ID NO: 11358 - RNA, 20 nt, Artificial Sequence
  targeting sequence with CTCN PAM
aagccugacgugguuuuccu

SEQ ID NO: 11359 - RNA, 20 nt, Artificial Sequence
  targeting sequence with CTCN PAM
ggcccuguuccugucauucc

SEQ ID NO: 11360 - RNA, 20 nt, Artificial Sequence
  targeting sequence with CTCN PAM
agugguuugucaccucuggc

SEQ ID NO: 11361 - RNA, 20 nt, Artificial Sequence
  targeting sequence with CTCN PAM
ucuccagugguuugucaccu

SEQ ID NO: 11362 - RNA, 20 nt, Artificial Sequence
  targeting sequence with CTCN PAM
gacucaucuccagugguuug

SEQ ID NO: 11363 - RNA, 20 nt, Artificial Sequence
  targeting sequence with CTCN PAM
cauccauaauucagcacauu

SEQ ID NO: 11364 - RNA, 20 nt, Artificial Sequence
  targeting sequence with CTCN PAM
cucccauccauaauucagca

SEQ ID NO: 11365 - RNA, 20 nt, Artificial Sequence
  targeting sequence with CTCN PAM
ccugcuuccacucauugaca

SEQ ID NO: 11366 - RNA, 20 nt, Artificial Sequence
  targeting sequence with CTCN PAM
uugacacaaaaaauucggua

SEQ ID NO: 11367 - RNA, 20 nt, Artificial Sequence
  targeting sequence with CTCN PAM
uaccgaauuuuuugugucaa

SEQ ID NO: 11368 - RNA, 20 nt, Artificial Sequence
  targeting sequence with CTCN PAM
auuggauacuuccacugcuu

SEQ ID NO: 11369 - RNA, 20 nt, Artificial Sequence
  targeting sequence with CTCN PAM
cacugaccuaaacaauaaau

SEQ ID NO: 11370 - RNA, 20 nt, Artificial Sequence
  targeting sequence with CTCN PAM
agcacccaaggcauuuaaaa

SEQ ID NO: 11371 - RNA, 20 nt, Artificial Sequence
  targeting sequence with CTCN PAM
gguauuuuccuauacaccca

SEQ ID NO: 11372 - RNA, 20 nt, Artificial Sequence
  targeting sequence with CTCN PAM
acgaucuucgggcaaaaacc

SEQ ID NO: 11373 - RNA, 20 nt, Artificial Sequence
  targeting sequence with CTCN PAM
uggucucuacgaucuucggg

SEQ ID NO: 11374 - RNA, 20 nt, Artificial Sequence
  targeting sequence with CTCN PAM
ccagucugcgguucuugcua

SEQ ID NO: 11375 - RNA, 20 nt, Artificial Sequence
  targeting sequence with CTCN PAM
agucugcgguucuugcuacc

SEQ ID NO: 11376 - RNA, 20 nt, Artificial Sequence
  targeting sequence with CTCN PAM
gcugaaggauacuucuccag

SEQ ID NO: 11377 - RNA, 20 nt, Artificial Sequence
  targeting sequence with CTCN PAM
agaaacuuccaaagcacagg

SEQ ID NO: 11378 - RNA, 20 nt, Artificial Sequence
  targeting sequence with CTCN PAM
aggugggcugauuucauguu

SEQ ID NO: 11379 - RNA, 20 nt, Artificial Sequence
  targeting sequence with CTCN PAM
uuaucugcugaucugaucau

SEQ ID NO: 11380 - RNA, 20 nt, Artificial Sequence
  targeting sequence with CTCN PAM
cauuaucugcugaucugauc

SEQ ID NO: 11381 - RNA, 20 nt, Artificial Sequence
  targeting sequence with CTCN PAM
uuauucuaaaaggucuguug

SEQ ID NO: 11382 - RNA, 20 nt, Artificial Sequence
  targeting sequence with CTCN PAM
acuaagacaaagaugauaau

SEQ ID NO: 11383 - RNA, 20 nt, Artificial Sequence
  targeting sequence with CTCN PAM
gguuuggggauuauuaucau

SEQ ID NO: 11384 - RNA, 20 nt, Artificial Sequence
  targeting sequence with CTCN PAM
aucggaccucagguuugggg

SEQ ID NO: 11385 - RNA, 20 nt, Artificial Sequence
  targeting sequence with CTCN PAM
ucgcuacuauauuucucaau

SEQ ID NO: 11386 - RNA, 20 nt, Artificial Sequence
  targeting sequence with CTCN PAM
uucaagaaacacuuuuucau

SEQ ID NO: 11387 - RNA, 20 nt, Artificial Sequence
  targeting sequence with CTCN PAM
gucaccuuuuaaucucguuc

SEQ ID NO: 11388 - RNA, 20 nt, Artificial Sequence
  targeting sequence with CTCN PAM
ucggucaccuuuuaaucucg

SEQ ID NO: 11389 - RNA, 20 nt, Artificial Sequence
  targeting sequence with CTCN PAM
uagccccccacgacguaaag

SEQ ID NO: 11390 - RNA, 20 nt, Artificial Sequence
  targeting sequence with CTCN PAM
auaaaguguuuacuuuuccu

SEQ ID NO: 11391 - RNA, 20 nt, Artificial Sequence
  targeting sequence with CTCN PAM
acuuuacagauaaggacauu

SEQ ID NO: 11392 - RNA, 20 nt, Artificial Sequence
  targeting sequence with CTCN PAM
auguccuuaucuguaaagug

SEQ ID NO: 11393 - RNA, 20 nt, Artificial Sequence
  targeting sequence with CTCN PAM
gugccucaauguccuuaucu

SEQ ID NO: 11394 - RNA, 20 nt, Artificial Sequence
  targeting sequence with CTCN PAM
agaucacacagauacuaagu

SEQ ID NO: 11395 - RNA, 20 nt, Artificial Sequence
  targeting sequence with CTCN PAM
uuaaccauacccucgcaauu

SEQ ID NO: 11396 - RNA, 20 nt, Artificial Sequence
  targeting sequence with CTCN PAM
caauuugaauaucaguuaau

SEQ ID NO: 11397 - RNA, 20 nt, Artificial Sequence
  targeting sequence with CTCN PAM
uuuuacaauauuuuugaugu

SEQ ID NO: 11398 - RNA, 20 nt, Artificial Sequence
  targeting sequence with CTCN PAM
auuuuacagaugaagaaagu

SEQ ID NO: 11399 - RNA, 20 nt, Artificial Sequence
  targeting sequence with CTCN PAM
uguugagaacuagacucuua

SEQ ID NO: 11400 - RNA, 20 nt, Artificial Sequence
  targeting sequence with CTCN PAM
acaugagaugaaguacucuu

SEQ ID NO: 11401 - RNA, 20 nt, Artificial Sequence
  targeting sequence with CTCN PAM
uaccacaaaaaaaaguuuuu

SEQ ID NO: 11402 - RNA, 20 nt, Artificial Sequence
  targeting sequence with CTCN PAM
aagcuuucuucaagaagcuc

SEQ ID NO: 11403 - RNA, 20 nt, Artificial Sequence
  targeting sequence with CTCN PAM
aggcuguuuccccacaggag

SEQ ID NO: 11404 - RNA, 20 nt, Artificial Sequence
  targeting sequence with CTCN PAM
uguggggaaacagccuggag

SEQ ID NO: 11405 - RNA, 20 nt, Artificial Sequence
  targeting sequence with CTCN PAM
uuuaaagaauaauaauuuua

SEQ ID NO: 11406 - RNA, 20 nt, Artificial Sequence
  targeting sequence with CTCN PAM
aaaggucucccuuuuaucuc

SEQ ID NO: 11407 - RNA, 20 nt, Artificial Sequence
  targeting sequence with CTCN PAM
cuuuuaucucuuauucacug

SEQ ID NO: 11408 - RNA, 20 nt, Artificial Sequence
  targeting sequence with CTCN PAM
uauucacugagguauuauaa

SEQ ID NO: 11409 - RNA, 20 nt, Artificial Sequence
  targeting sequence with CTCN PAM
gugaauaagagauaaaaggg

SEQ ID NO: 11410 - RNA, 20 nt, Artificial Sequence
  targeting sequence with CTCN PAM
uaauacagaauucagaacuu

SEQ ID NO: 11411 - RNA, 20 nt, Artificial Sequence
  targeting sequence with CTCN PAM
aaauaauucaaaaguauaau

SEQ ID NO: 11412 - RNA, 20 nt, Artificial Sequence
  targeting sequence with CTCN PAM
aaagcauuuuagagaagcau

SEQ ID NO: 11413 - RNA, 20 nt, Artificial Sequence
  targeting sequence with CTCN PAM
aaaaugcuuuagagcucuaa

SEQ ID NO: 11414 - RNA, 20 nt, Artificial Sequence
  targeting sequence with CTCN PAM
ccagugaagucuuuccuggu

SEQ ID NO: 11415 - RNA, 20 nt, Artificial Sequence
  targeting sequence with CTCN PAM
ccaaccaggaaagacuucac

SEQ ID NO: 11416 - RNA, 20 nt, Artificial Sequence
  targeting sequence with CTCN PAM
gaaauggacaacaacugcuc

SEQ ID NO: 11417 - RNA, 20 nt, Artificial Sequence
  targeting sequence with CTCN PAM
uacuucucguuguguucuga

SEQ ID NO: 11418 - RNA, 20 nt, Artificial Sequence
  targeting sequence with CTCN PAM
uuguguucugagucuuuggc

SEQ ID NO: 11419 - RNA, 20 nt, Artificial Sequence
  targeting sequence with CTCN PAM
gaacacaacgagaaguauga

SEQ ID NO: 11420 - RNA, 20 nt, Artificial Sequence
  targeting sequence with CTCN PAM
augaucuuucuuuuuuuuuu

SEQ ID NO: 11421 - RNA, 20 nt, Artificial Sequence
  targeting sequence with CTCN PAM
uccuacauccuuuuuuaguu

SEQ ID NO: 11422 - RNA, 20 nt, Artificial Sequence
  targeting sequence with CTCN PAM
ucuucuuucaaaagcaaaug

SEQ ID NO: 11423 - RNA, 20 nt, Artificial Sequence
  targeting sequence with CTCN PAM
uuugcuuuugaaagaagaug

SEQ ID NO: 11424 - RNA, 20 nt, Artificial Sequence
  targeting sequence with CTCN PAM
aacuuuacuuccacucauuu

SEQ ID NO: 11425 - RNA, 20 nt, Artificial Sequence
  targeting sequence with CTCN PAM
ggacccgaagcaagugcaaa

SEQ ID NO: 11426 - RNA, 20 nt, Artificial Sequence
  targeting sequence with CTCN PAM
uaagccagaagauuuugauu

SEQ ID NO: 11427 - RNA, 20 nt, Artificial Sequence
  targeting sequence with CTCN PAM
ccauuuuugugaagauaauu

SEQ ID NO: 11428 - RNA, 20 nt, Artificial Sequence
  targeting sequence with CTCN PAM
auuuuugugaagauaauuag

SEQ ID NO: 11429 - RNA, 20 nt, Artificial Sequence
  targeting sequence with CTCN PAM
uuuucauuuuuaaaugacag

SEQ ID NO: 11430 - RNA, 20 nt, Artificial Sequence
  targeting sequence with CTCN PAM
uucccauccacaugggacag

SEQ ID NO: 11431 - RNA, 20 nt, Artificial Sequence
  targeting sequence with CTCN PAM
ucuucucccacucuuuccaa

SEQ ID NO: 11432 - RNA, 20 nt, Artificial Sequence
  targeting sequence with CTCN PAM
cacucuuuccaauuccauag

SEQ ID NO: 11433 - RNA, 20 nt, Artificial Sequence
  targeting sequence with CTCN PAM
uuccaauuccauagcaacau

SEQ ID NO: 11434 - RNA, 20 nt, Artificial Sequence
  targeting sequence with CTCN PAM
uuuuaauauggauaaucuau

SEQ ID NO: 11435 - RNA, 20 nt, Artificial Sequence
  targeting sequence with CTCN PAM
cucauuuuaauauggauaau

SEQ ID NO: 11436 - RNA, 20 nt, Artificial Sequence
  targeting sequence with CTCN PAM
cauagcacaagacuggucca

SEQ ID NO: 11437 - RNA, 20 nt, Artificial Sequence
  targeting sequence with CTCN PAM
gcacaacaaaaaagucaagc

SEQ ID NO: 11438 - RNA, 20 nt, Artificial Sequence
  targeting sequence with CTCN PAM
gugauuaauccgaaaaguuu

SEQ ID NO: 11439 - RNA, 20 nt, Artificial Sequence
  targeting sequence with CTCN PAM
aauuuaugguaagugccccc

SEQ ID NO: 11440 - RNA, 20 nt, Artificial Sequence
  targeting sequence with CTCN PAM
uaagcaccagaaaaugcuua

SEQ ID NO: 11441 - RNA, 20 nt, Artificial Sequence
  targeting sequence with CTCN PAM
cugauuuauuuaagcauuuu

SEQ ID NO: 11442 - RNA, 20 nt, Artificial Sequence
  targeting sequence with CTCN PAM
gcaaauaaaugagguaaaag

SEQ ID NO: 11443 - RNA, 20 nt, Artificial Sequence
  targeting sequence with CTCN PAM
uuuauuugcagagaagacag

SEQ ID NO: 11444 - RNA, 20 nt, Artificial Sequence
  targeting sequence with CTCN PAM
cagaaauuuuacauuaugua

SEQ ID NO: 11445 - RNA, 20 nt, Artificial Sequence
  targeting sequence with CTCN PAM
cccagaaauuuuacauuaug

SEQ ID NO: 11446 - RNA, 20 nt, Artificial Sequence
  targeting sequence with CTCN PAM
cucccagaaauuuuacauua

SEQ ID NO: 11447 - RNA, 20 nt, Artificial Sequence
  targeting sequence with CTCN PAM
agaagguaaauaauuugaua

SEQ ID NO: 11448 - RNA, 20 nt, Artificial Sequence
  targeting sequence with CTCN PAM
ugguaaccuuguagguacaa

SEQ ID NO: 11449 - RNA, 20 nt, Artificial Sequence
  targeting sequence with CTCN PAM
caauuuauugauaaaauuga

SEQ ID NO: 11450 - RNA, 20 nt, Artificial Sequence
  targeting sequence with CTCN PAM
auuuauugauaaaauugagu

SEQ ID NO: 11451 - RNA, 20 nt, Artificial Sequence
  targeting sequence with CTCN PAM
auuuuaucaauaaauugaga

SEQ ID NO: 11452 - RNA, 20 nt, Artificial Sequence
  targeting sequence with CTCN PAM
ugucuguucugcaaguaauu

SEQ ID NO: 11453 - RNA, 20 nt, Artificial Sequence
  targeting sequence with CTCN PAM
cccauacuguuauugaaaaa

SEQ ID NO: 11454 - RNA, 20 nt, Artificial Sequence
  targeting sequence with CTCN PAM
uuccuguaaugcuagcacuu

SEQ ID NO: 11455 - RNA, 20 nt, Artificial Sequence
  targeting sequence with CTCN PAM
caaagugcuagcauuacagg

SEQ ID NO: 11456 - RNA, 20 nt, Artificial Sequence
  targeting sequence with CTCN PAM
ucccaaagugcuagcauuac

SEQ ID NO: 11457 - RNA, 20 nt, Artificial Sequence
  targeting sequence with CTCN PAM
ugggaucaggugaucuuccc

SEQ ID NO: 11458 - RNA, 20 nt, Artificial Sequence
  targeting sequence with CTCN PAM
aacucuugggaucaggugau

SEQ ID NO: 11459 - RNA, 20 nt, Artificial Sequence
  targeting sequence with CTCN PAM
aggcuggucucaaacucuug

SEQ ID NO: 11460 - RNA, 20 nt, Artificial Sequence
  targeting sequence with CTCN PAM
ccaggcuggucucaaacucu

SEQ ID NO: 11461 - RNA, 20 nt, Artificial Sequence
  targeting sequence with CTCN PAM
cugugcucuccaggcugguc

SEQ ID NO: 11462 - RNA, 20 nt, Artificial Sequence
  targeting sequence with CTCN PAM
ucuuugcaaaaaaugaaaaa

SEQ ID NO: 11463 - RNA, 20 nt, Artificial Sequence
  targeting sequence with CTCN PAM
accacgcccgguugcuuguu

SEQ ID NO: 11464 - RNA, 20 nt, Artificial Sequence
  targeting sequence with CTCN PAM
uuaguagcugggaccacagg

SEQ ID NO: 11465 - RNA, 20 nt, Artificial Sequence
  targeting sequence with CTCN PAM
uaccccggccuccuuaguag

SEQ ID NO: 11466 - RNA, 20 nt, Artificial Sequence
  targeting sequence with CTCN PAM
cugaagccuugaccugccgg

SEQ ID NO: 11467 - RNA, 20 nt, Artificial Sequence
  targeting sequence with CTCN PAM
agccugggugacagagcgag

SEQ ID NO: 11468 - RNA, 20 nt, Artificial Sequence
  targeting sequence with CTCN PAM
gucacccaggcuggagugca

SEQ ID NO: 11469 - RNA, 20 nt, Artificial Sequence
  targeting sequence with CTCN PAM
cucugucacccaggcuggag

SEQ ID NO: 11470 - RNA, 20 nt, Artificial Sequence
  targeting sequence with CTCN PAM
ucucaaaaaaaaacccacua

SEQ ID NO: 11471 - RNA, 20 nt, Artificial Sequence
  targeting sequence with CTCN PAM
aaaaaaaacccacuaaacua

SEQ ID NO: 11472 - RNA, 20 nt, Artificial Sequence
  targeting sequence with CTCN PAM
agacccauccaccuuuuaca

SEQ ID NO: 11473 - RNA, 20 nt, Artificial Sequence
  targeting sequence with CTCN PAM
cuagacccauccaccuuuua

SEQ ID NO: 11474 - RNA, 20 nt, Artificial Sequence
  targeting sequence with CTCN PAM
aaauuauuuuaccccaaauu

SEQ ID NO: 11475 - RNA, 20 nt, Artificial Sequence
  targeting sequence with CTCN PAM
ucaaaauuauuuuaccccaa

SEQ ID NO: 11476 - RNA, 20 nt, Artificial Sequence
  targeting sequence with CTCN PAM
aaaauuguaaacaauaucau

SEQ ID NO: 11477 - RNA, 20 nt, Artificial Sequence
  targeting sequence with CTCN PAM
uaagagacuggggcucaaau

SEQ ID NO: 11478 - RNA, 20 nt, Artificial Sequence
  targeting sequence with CTCN PAM
uaagaguuugugcugauucc

SEQ ID NO: 11479 - RNA, 20 nt, Artificial Sequence
  targeting sequence with CTCN PAM
aauuccagcucuaccagcug

SEQ ID NO: 11480 - RNA, 20 nt, Artificial Sequence
  targeting sequence with CTCN PAM
accagcuguaaguuuagcag

SEQ ID NO: 11481 - RNA, 20 nt, Artificial Sequence
  targeting sequence with CTCN PAM
aagucucgguaaaagacucu

SEQ ID NO: 11482 - RNA, 20 nt, Artificial Sequence
  targeting sequence with CTCN PAM
guaaaagacucuguaaaaag

SEQ ID NO: 11483 - RNA, 20 nt, Artificial Sequence
  targeting sequence with CTCN PAM
guaaaaagaaggugaugccu

SEQ ID NO: 11484 - RNA, 20 nt, Artificial Sequence
  targeting sequence with CTCN PAM
uucaaaguaguucuuaguau

SEQ ID NO: 11485 - RNA, 20 nt, Artificial Sequence
  targeting sequence with CTCN PAM
uaucacacacguagucuaau

SEQ ID NO: 11486 - RNA, 20 nt, Artificial Sequence
  targeting sequence with CTCN PAM
aaccccaaggggaccucuuu

SEQ ID NO: 11487 - RNA, 20 nt, Artificial Sequence
  targeting sequence with CTCN PAM
uucacaaaaccucccggcuc

SEQ ID NO: 11488 - RNA, 20 nt, Artificial Sequence
  targeting sequence with CTCN PAM
cggcucccccccagucuccc

SEQ ID NO: 11489 - RNA, 20 nt, Artificial Sequence
  targeting sequence with CTCN PAM
cccccagucucccuagucau

SEQ ID NO: 11490 - RNA, 20 nt, Artificial Sequence
  targeting sequence with CTCN PAM
cuagucaucuuagaugagga

SEQ ID NO: 11491 - RNA, 20 nt, Artificial Sequence
  targeting sequence with CTCN PAM
ucuaagaugacuagggagac

SEQ ID NO: 11492 - RNA, 20 nt, Artificial Sequence
  targeting sequence with CTCN PAM
acuuccucaucuaagaugac

SEQ ID NO: 11493 - RNA, 20 nt, Artificial Sequence
  targeting sequence with CTCN PAM
uccugugcgaucagcccugg

SEQ ID NO: 11494 - RNA, 20 nt, Artificial Sequence
  targeting sequence with CTCN PAM
agacccuaguaacuaaaccc

SEQ ID NO: 11495 - RNA, 20 nt, Artificial Sequence
  targeting sequence with CTCN PAM
aagcccacggguuuaguuac

SEQ ID NO: 11496 - RNA, 20 nt, Artificial Sequence
  targeting sequence with CTCN PAM
gucaaagguuagaaaggccc

SEQ ID NO: 11497 - RNA, 20 nt, Artificial Sequence
  targeting sequence with CTCN PAM
cccgauaccauuuuacaggu

SEQ ID NO: 11498 - RNA, 20 nt, Artificial Sequence
  targeting sequence with CTCN PAM
cgauaccauuuuacaggugg

SEQ ID NO: 11499 - RNA, 20 nt, Artificial Sequence
  targeting sequence with CTCN PAM
guuucaccaccuguaaaaug

SEQ ID NO: 11500 - RNA, 20 nt, Artificial Sequence
  targeting sequence with CTCN PAM
gguaaguuacuguccccuuu

SEQ ID NO: 11501 - RNA, 20 nt, Artificial Sequence
  targeting sequence with CTCN PAM
cuagaggugacggugggggc

SEQ ID NO: 11502 - RNA, 20 nt, Artificial Sequence
  targeting sequence with CTCN PAM
agugagcgccuagucccaga

SEQ ID NO: 11503 - RNA, 20 nt, Artificial Sequence
  targeting sequence with CTCN PAM
gcggucccccagacucagac

SEQ ID NO: 11504 - RNA, 20 nt, Artificial Sequence
  targeting sequence with CTCN PAM
gacucuccagcccagucgug

SEQ ID NO: 11505 - RNA, 20 nt, Artificial Sequence
  targeting sequence with CTCN PAM
ccagcccagucgugcccauc

SEQ ID NO: 11506 - RNA, 20 nt, Artificial Sequence
  targeting sequence with CTCN PAM
agcccagucgugcccaucga

SEQ ID NO: 11507 - RNA, 20 nt, Artificial Sequence
  targeting sequence with CTCN PAM
augggcacgacugggcugga

SEQ ID NO: 11508 - RNA, 20 nt, Artificial Sequence
  targeting sequence with CTCN PAM
uugcugcagccggacccugc

SEQ ID NO: 11509 - RNA, 20 nt, Artificial Sequence
  targeting sequence with CTCN PAM
gccccacacccugggcguug

SEQ ID NO: 11510 - RNA, 20 nt, Artificial Sequence
  targeting sequence with CTCN PAM
ucagcucacggcaccgggcu

SEQ ID NO: 11511 - RNA, 20 nt, Artificial Sequence
  targeting sequence with CTCN PAM
cggcaccgggcugcaaccga

SEQ ID NO: 11512 - RNA, 20 nt, Artificial Sequence
  targeting sequence with CTCN PAM
guugcagcccggugccguga

SEQ ID NO: 11513 - RNA, 20 nt, Artificial Sequence
  targeting sequence with CTCN PAM
gcuacagccgccauuuccac

SEQ ID NO: 11514 - RNA, 20 nt, Artificial Sequence
  targeting sequence with CTCN PAM
accaaucaaauccauucucg

SEQ ID NO: 11515 - RNA, 20 nt, Artificial Sequence
  targeting sequence with CTCN PAM
aggaagacgcaccgccccca

SEQ ID NO: 11516 - RNA, 20 nt, Artificial Sequence
  targeting sequence with CTCN PAM
agaauggauuugauuggugg

SEQ ID NO: 11517 - RNA, 20 nt, Artificial Sequence
  targeting sequence with CTCN PAM
cgcucugguugcgcuggcgc

SEQ ID NO: 11518 - RNA, 20 nt, Artificial Sequence
  targeting sequence with CTCN PAM
gguugcgcuggcgccuuagg

SEQ ID NO: 11519 - RNA, 20 nt, Artificial Sequence
  targeting sequence with CTCN PAM
agugccaccauugcuuuugc

SEQ ID NO: 11520 - RNA, 20 nt, Artificial Sequence
  targeting sequence with CTCN PAM
gagcaaggcgcccucgcacu

SEQ ID NO: 11521 - RNA, 20 nt, Artificial Sequence
  targeting sequence with CTCN PAM
gagcgcgcauguccgaaagg

SEQ ID NO: 11522 - RNA, 20 nt, Artificial Sequence
  targeting sequence with CTCN PAM
cacucagcuuaccgcgcaug

SEQ ID NO: 11523 - RNA, 20 nt, Artificial Sequence
  targeting sequence with CTCN PAM
gcuuaccgcgcauguacguu

SEQ ID NO: 11524 - RNA, 20 nt, Artificial Sequence
  targeting sequence with CTCN PAM
acaagccacuuuggcuaccu

SEQ ID NO: 11525 - RNA, 20 nt, Artificial Sequence
  targeting sequence with CTCN PAM
cuaacggucgccacuccaca

SEQ ID NO: 11526 - RNA, 20 nt, Artificial Sequence
  targeting sequence with CTCN PAM
gcaaccgccucacuaacggu

SEQ ID NO: 11527 - RNA, 20 nt, Artificial Sequence
  targeting sequence with CTCN PAM
gcgucugucucagcaaccgc

SEQ ID NO: 11528 - RNA, 20 nt, Artificial Sequence
  targeting sequence with CTCN PAM
uacccgccucagcgucuguc

SEQ ID NO: 11529 - RNA, 20 nt, Artificial Sequence
  targeting sequence with CTCN PAM
uccuacccgccucagcgucu

SEQ ID NO: 11530 - RNA, 20 nt, Artificial Sequence
  targeting sequence with CTCN PAM
ggcuccuccuacccgccuca

SEQ ID NO: 11531 - RNA, 20 nt, Artificial Sequence
  targeting sequence with CTCN PAM
ucacggcuucccuuacggcu

SEQ ID NO: 11532 - RNA, 20 nt, Artificial Sequence
  targeting sequence with CTCN PAM
acgucaacacggcccucauc

SEQ ID NO: 11533 - RNA, 20 nt, Artificial Sequence
  targeting sequence with CTCN PAM
ccacgucaacacggcccuca

SEQ ID NO: 11534 - RNA, 20 nt, Artificial Sequence
  targeting sequence with CTCN PAM
gcuuuaucucuccacgucaa

SEQ ID NO: 11535 - RNA, 20 nt, Artificial Sequence
  targeting sequence with CTCN PAM
ccagugcucggcuuuaucuc

SEQ ID NO: 11536 - RNA, 20 nt, Artificial Sequence
  targeting sequence with CTCN PAM
ucaccagugcucggcuuuau

SEQ ID NO: 11537 - RNA, 20 nt, Artificial Sequence
  targeting sequence with CTCN PAM
ucgcgaaccgccccgcuccu

SEQ ID NO: 11538 - RNA, 20 nt, Artificial Sequence
  targeting sequence with CTCN PAM
ugcucuucgcgaaccgcccc

SEQ ID NO: 11539 - RNA, 20 nt, Artificial Sequence
  targeting sequence with CTCN PAM
accuccugcucuucgcgaac

SEQ ID NO: 11540 - RNA, 20 nt, Artificial Sequence
  targeting sequence with CTCN PAM
cggggagugcgcgagccgcu

SEQ ID NO: 11541 - RNA, 20 nt, Artificial Sequence
  targeting sequence with CTCN PAM
ccgcgaggacucgaccuccu

SEQ ID NO: 11542 - RNA, 20 nt, Artificial Sequence
  targeting sequence with CTCN PAM
cgcacuccccgcgaggacuc

SEQ ID NO: 11543 - RNA, 20 nt, Artificial Sequence
  targeting sequence with CTCN PAM
aacacgcugcagcggcucgc

SEQ ID NO: 11544 - RNA, 20 nt, Artificial Sequence
  targeting sequence with CTCN PAM
gcccaggcagcaagcccgcu

SEQ ID NO: 11545 - RNA, 20 nt, Artificial Sequence
  targeting sequence with CTCN PAM
caggccgggguucagugccc

SEQ ID NO: 11546 - RNA, 20 nt, Artificial Sequence
  targeting sequence with CTCN PAM
cgccccuuggcgguuggaga

SEQ ID NO: 11547 - RNA, 20 nt, Artificial Sequence
  targeting sequence with CTCN PAM
aaccgccaaggggcgggagg

SEQ ID NO: 11548 - RNA, 20 nt, Artificial Sequence
  targeting sequence with CTCN PAM
cgaggguuggagagcggcaa

SEQ ID NO: 11549 - RNA, 20 nt, Artificial Sequence
  targeting sequence with CTCN PAM
ggaguuucuccaaccgccaa

SEQ ID NO: 11550 - RNA, 20 nt, Artificial Sequence
  targeting sequence with CTCN PAM
aacccucgggaguuucucca

SEQ ID NO: 11551 - RNA, 20 nt, Artificial Sequence
  targeting sequence with CTCN PAM
ccaacccucgggaguuucuc

SEQ ID NO: 11552 - RNA, 20 nt, Artificial Sequence
  targeting sequence with CTCN PAM
cuuugccgcucuccaacccu

SEQ ID NO: 11553 - RNA, 20 nt, Artificial Sequence
  targeting sequence with CTCN PAM
ggcgcggcaccucccuuugc

SEQ ID NO: 11554 - RNA, 20 nt, Artificial Sequence
  targeting sequence with CTCN PAM
acccgccaccaccucaggcg

SEQ ID NO: 11555 - RNA, 20 nt, Artificial Sequence
  targeting sequence with CTCN PAM
ucccucacggucuggcccug

SEQ ID NO: 11556 - RNA, 20 nt, Artificial Sequence
  targeting sequence with CTCN PAM
cggucuggcccugucgcugc

SEQ ID NO: 11557 - RNA, 20 nt, Artificial Sequence
  targeting sequence with CTCN PAM
cacccacgagacagcacgaa

SEQ ID NO: 11558 - RNA, 20 nt, Artificial Sequence
  targeting sequence with CTCN PAM
ugggugugagaugaauccaa

SEQ ID NO: 11559 - RNA, 20 nt, Artificial Sequence
  targeting sequence with CTCN PAM
agcuucacaguucuugccac

SEQ ID NO: 11560 - RNA, 20 nt, Artificial Sequence
  targeting sequence with CTCN PAM
uguuuucuugacguuuuucu

SEQ ID NO: 11561 - RNA, 20 nt, Artificial Sequence
  targeting sequence with CTCN PAM
aaauugucucauuuauuuua

SEQ ID NO: 11562 - RNA, 20 nt, Artificial Sequence
  targeting sequence with CTCN PAM
uuuauuuuaauuaugauuuc

SEQ ID NO: 11563 - RNA, 20 nt, Artificial Sequence
  targeting sequence with CTCN PAM
auuuaugaaaaccaguguca

SEQ ID NO: 11564 - RNA, 20 nt, Artificial Sequence
  targeting sequence with CTCN PAM
aaauguuaagauaaaaucag

SEQ ID NO: 11565 - RNA, 20 nt, Artificial Sequence
  targeting sequence with CTCN PAM
aaguguaaaaguaaaacuua

SEQ ID NO: 11566 - RNA, 20 nt, Artificial Sequence
  targeting sequence with CTCN PAM
cuacuuuaaguuuuacuuuu

SEQ ID NO: 11567 - RNA, 20 nt, Artificial Sequence
  targeting sequence with CTCN PAM
cuagcaacaauagcuagcua

SEQ ID NO: 11568 - RNA, 20 nt, Artificial Sequence
  targeting sequence with CTCN PAM
gguuuaaaggcucccuagca

SEQ ID NO: 11569 - RNA, 20 nt, Artificial Sequence
  targeting sequence with CTCN PAM
uuucucuaaaacuggagaug

SEQ ID NO: 11570 - RNA, 20 nt, Artificial Sequence
  targeting sequence with CTCN PAM
aaaacuggagaugggcaggu

SEQ ID NO: 11571 - RNA, 20 nt, Artificial Sequence
  targeting sequence with CTCN PAM
aguuuuagagaaacgagauc

SEQ ID NO: 11572 - RNA, 20 nt, Artificial Sequence
  targeting sequence with CTCN PAM
aaaugagcaccaaacacaag

SEQ ID NO: 11573 - RNA, 20 nt, Artificial Sequence
  targeting sequence with CTCN PAM
uuuugagcaccuuucugauc

SEQ ID NO: 11574 - RNA, 20 nt, Artificial Sequence
  targeting sequence with CTCN PAM
ccuaauugggaagucugaaa

SEQ ID NO: 11575 - RNA, 20 nt, Artificial Sequence
  targeting sequence with CTCN PAM
uaauugggaagucugaaaaa

SEQ ID NO: 11576 - RNA, 20 nt, Artificial Sequence
  targeting sequence with CTCN PAM
guucuggccacuggagcagg

SEQ ID NO: 11577 - RNA, 20 nt, Artificial Sequence
  targeting sequence with CTCN PAM
aguggccagaacagaggcuu

SEQ ID NO: 11578 - RNA, 20 nt, Artificial Sequence
  targeting sequence with CTCN PAM
gaagggacagaaccaaagac

SEQ ID NO: 11579 - RNA, 20 nt, Artificial Sequence
  targeting sequence with CTCN PAM
guguaaagcaugccgucucu

SEQ ID NO: 11580 - RNA, 20 nt, Artificial Sequence
  targeting sequence with CTCN PAM
ccucaucucacacggaaauc

SEQ ID NO: 11581 - RNA, 20 nt, Artificial Sequence
  targeting sequence with CTCN PAM
ucaucucacacggaaauccu

SEQ ID NO: 11582 - RNA, 20 nt, Artificial Sequence
  targeting sequence with CTCN PAM
ucucacacggaaauccugaa

SEQ ID NO: 11583 - RNA, 20 nt, Artificial Sequence
  targeting sequence with CTCN PAM
cacggaaauccugaacaucc

SEQ ID NO: 11584 - RNA, 20 nt, Artificial Sequence
  targeting sequence with CTCN PAM
cguuggagacggguccucuc

SEQ ID NO: 11585 - RNA, 20 nt, Artificial Sequence
  targeting sequence with CTCN PAM
aacgugagccuugaaggaug

SEQ ID NO: 11586 - RNA, 20 nt, Artificial Sequence
  targeting sequence with CTCN PAM
cuuuuguguucggcacuagu

SEQ ID NO: 11587 - RNA, 20 nt, Artificial Sequence
  targeting sequence with CTCN PAM
uuuguguucggcacuagugg

SEQ ID NO: 11588 - RNA, 20 nt, Artificial Sequence
  targeting sequence with CTCN PAM
uugugucuucaccacucucu

SEQ ID NO: 11589 - RNA, 20 nt, Artificial Sequence
  targeting sequence with CTCN PAM
cuaagguagguacuauaauu

SEQ ID NO: 11590 - RNA, 20 nt, Artificial Sequence
  targeting sequence with CTCN PAM
aagguagguacuauaauuuc

SEQ ID NO: 11591 - RNA, 20 nt, Artificial Sequence
  targeting sequence with CTCN PAM
auuuuauguaugaggaaacu

SEQ ID NO: 11592 - RNA, 20 nt, Artificial Sequence
  targeting sequence with CTCN PAM
uacauaaaauagaggaaauu

SEQ ID NO: 11593 - RNA, 20 nt, Artificial Sequence
  targeting sequence with CTCN PAM
gggcuucaguuuccucauac

SEQ ID NO: 11594 - RNA, 20 nt, Artificial Sequence
  targeting sequence with CTCN PAM
cugggcuucaguuuccucau

SEQ ID NO: 11595 - RNA, 20 nt, Artificial Sequence
  targeting sequence with CTCN PAM
cugugugacgcuggcaaauu

SEQ ID NO: 11596 - RNA, 20 nt, Artificial Sequence
  targeting sequence with CTCN PAM
ggucuuccucacuccaacgu

SEQ ID NO: 11597 - RNA, 20 nt, Artificial Sequence
  targeting sequence with CTCN PAM
cuccaacgucaacgcucuca

SEQ ID NO: 11598 - RNA, 20 nt, Artificial Sequence
  targeting sequence with CTCN PAM
aacgucaacgcucucagcca

SEQ ID NO: 11599 - RNA, 20 nt, Artificial Sequence
  targeting sequence with CTCN PAM
cagccacuacauuaauuuuu

SEQ ID NO: 11600 - RNA, 20 nt, Artificial Sequence
  targeting sequence with CTCN PAM
gccacuacauuaauuuuucc

SEQ ID NO: 11601 - RNA, 20 nt, Artificial Sequence
  targeting sequence with CTCN PAM
aaugucugcaggagacaggc

SEQ ID NO: 11602 - RNA, 20 nt, Artificial Sequence
  targeting sequence with CTCN PAM
ugcagacauuugaguuugcc

SEQ ID NO: 11603 - RNA, 20 nt, Artificial Sequence
  targeting sequence with CTCN PAM
cauuuauguuaccugccugu

SEQ ID NO: 11604 - RNA, 20 nt, Artificial Sequence
  targeting sequence with CTCN PAM
auuaaaaguacaaaugaaag

SEQ ID NO: 11605 - RNA, 20 nt, Artificial Sequence
  targeting sequence with CTCN PAM
aaucucuauuaaaaguacaa

SEQ ID NO: 11606 - RNA, 20 nt, Artificial Sequence
  targeting sequence with CTCN PAM
gacauugaagccaaauguuc

SEQ ID NO: 11607 - RNA, 20 nt, Artificial Sequence
  targeting sequence with CTCN PAM
auuacucugacauugaagcc

SEQ ID NO: 11608 - RNA, 20 nt, Artificial Sequence
  targeting sequence with CTCN PAM
gcaguuugccacacucuauu

SEQ ID NO: 11609 - RNA, 20 nt, Artificial Sequence
  targeting sequence with CTCN PAM
ugcucggccuaaaaggggca

SEQ ID NO: 11610 - RNA, 20 nt, Artificial Sequence
  targeting sequence with CTCN PAM
gccuaaaaggggcagcugcu

SEQ ID NO: 11611 - RNA, 20 nt, Artificial Sequence
  targeting sequence with CTCN PAM
gcuccugccaauuaccacca

SEQ ID NO: 11612 - RNA, 20 nt, Artificial Sequence
  targeting sequence with CTCN PAM
ugccaauuaccaccaugcag

SEQ ID NO: 11613 - RNA, 20 nt, Artificial Sequence
  targeting sequence with CTCN PAM
gcucuuccuguuuuuaccag

SEQ ID NO: 11614 - RNA, 20 nt, Artificial Sequence
  targeting sequence with CTCN PAM
uccuguuuuuaccagaagcu

SEQ ID NO: 11615 - RNA, 20 nt, Artificial Sequence
  targeting sequence with CTCN PAM
gaaaaaaaaacaaaacaccg

SEQ ID NO: 11616 - RNA, 20 nt, Artificial Sequence
  targeting sequence with CTCN PAM
guuuucaaccccuggcacag

SEQ ID NO: 11617 - RNA, 20 nt, Artificial Sequence
  targeting sequence with CTCN PAM
cuugugguacuuccagaguc

SEQ ID NO: 11618 - RNA, 20 nt, Artificial Sequence
  targeting sequence with CTCN PAM
ugugguacuuccagagucug

SEQ ID NO: 11619 - RNA, 20 nt, Artificial Sequence
  targeting sequence with CTCN PAM
ggaaguaccacaagagagaa

SEQ ID NO: 11620 - RNA, 20 nt, Artificial Sequence
  targeting sequence with CTCN PAM
acagacucuggaaguaccac

SEQ ID NO: 11621 - RNA, 20 nt, Artificial Sequence
  targeting sequence with CTCN PAM
uaugcucaacagacucugga

SEQ ID NO: 11622 - RNA, 20 nt, Artificial Sequence
  targeting sequence with CTCN PAM
uuuccaaauuauucuagaga

SEQ ID NO: 11623 - RNA, 20 nt, Artificial Sequence
  targeting sequence with CTCN PAM
agaauaauuuggaaacgagu

SEQ ID NO: 11624 - RNA, 20 nt, Artificial Sequence
  targeting sequence with CTCN PAM
aaucuguaaugggccaaaaa

SEQ ID NO: 11625 - RNA, 20 nt, Artificial Sequence
  targeting sequence with CTCN PAM
acauccaaaucagccauugu

SEQ ID NO: 11626 - RNA, 20 nt, Artificial Sequence
  targeting sequence with CTCN PAM
cggucugcuccuuugcuucu

SEQ ID NO: 11627 - RNA, 20 nt, Artificial Sequence
  targeting sequence with CTCN PAM
uuugcuucuauuuuaaccuu

SEQ ID NO: 11628 - RNA, 20 nt, Artificial Sequence
  targeting sequence with CTCN PAM
guuuuuuuaagaccugcugc

SEQ ID NO: 11629 - RNA, 20 nt, Artificial Sequence
  targeting sequence with CTCN PAM
acuucucauaaaccuagagu

SEQ ID NO: 11630 - RNA, 20 nt, Artificial Sequence
  targeting sequence with CTCN PAM
uaaaccuagagugauuccca

SEQ ID NO: 11631 - RNA, 20 nt, Artificial Sequence
  targeting sequence with CTCN PAM
agguuuaugagaaguagagu

SEQ ID NO: 11632 - RNA, 20 nt, Artificial Sequence
  targeting sequence with CTCN PAM
agcaaaaugcacgacuugac

SEQ ID NO: 11633 - RNA, 20 nt, Artificial Sequence
  targeting sequence with CTCN PAM
ugacccuccuccccaucagg

SEQ ID NO: 11634 - RNA, 20 nt, Artificial Sequence
  targeting sequence with CTCN PAM
uccccaucaggcuugcaaca

SEQ ID NO: 11635 - RNA, 20 nt, Artificial Sequence
  targeting sequence with CTCN PAM
ccaucaggcuugcaacauuu

SEQ ID NO: 11636 - RNA, 20 nt, Artificial Sequence
  targeting sequence with CTCN PAM
accuaaaaguauaaauuuaa

SEQ ID NO: 11637 - RNA, 20 nt, Artificial Sequence
  targeting sequence with CTCN PAM
auuuuucuacccgaagaucc

SEQ ID NO: 11638 - RNA, 20 nt, Artificial Sequence
  targeting sequence with CTCN PAM
cuuauucuaugaacucccua

SEQ ID NO: 11639 - RNA, 20 nt, Artificial Sequence
  targeting sequence with CTCN PAM
cuaguuuucuccuuuaaaug

SEQ ID NO: 11640 - RNA, 20 nt, Artificial Sequence
  targeting sequence with CTCN PAM
uuuaaaugcacagcuccagg

SEQ ID NO: 11641 - RNA, 20 nt, Artificial Sequence
  targeting sequence with CTCN PAM
agguucaucucaaccaggau

SEQ ID NO: 11642 - RNA, 20 nt, Artificial Sequence
  targeting sequence with CTCN PAM
accaggaugucuuauuaggc

SEQ ID NO: 11643 - RNA, 20 nt, Artificial Sequence
  targeting sequence with CTCN PAM
cauguuguagagauuaaaca

SEQ ID NO: 11644 - RNA, 20 nt, Artificial Sequence
  targeting sequence with CTCN PAM
uuuaaagaugaagaaauuga

SEQ ID NO: 11645 - RNA, 20 nt, Artificial Sequence
  targeting sequence with CTCN PAM
auuucuucaucuuuaaauga

SEQ ID NO: 11646 - RNA, 20 nt, Artificial Sequence
  targeting sequence with CTCN PAM
uuaaaucucaauuucuucau

SEQ ID NO: 11647 - RNA, 20 nt, Artificial Sequence
  targeting sequence with CTCN PAM
cuguaaaccaaugucccaca

SEQ ID NO: 11648 - RNA, 20 nt, Artificial Sequence
  targeting sequence with CTCN PAM
gacaacccugcacccaccuc

SEQ ID NO: 11649 - RNA, 20 nt, Artificial Sequence
  targeting sequence with CTCN PAM
guaucucugcaauggaaucu

SEQ ID NO: 11650 - RNA, 20 nt, Artificial Sequence
  targeting sequence with CTCN PAM
gcaauggaaucugacagugu

SEQ ID NO: 11651 - RNA, 20 nt, Artificial Sequence
  targeting sequence with CTCN PAM
agaccuugucaugcagucca

SEQ ID NO: 11652 - RNA, 20 nt, Artificial Sequence
  targeting sequence with CTCN PAM
gaauuggaaaggacucuaga

SEQ ID NO: 11653 - RNA, 20 nt, Artificial Sequence
  targeting sequence with CTCN PAM
gaauaucuugaaauuugccu

SEQ ID NO: 11654 - RNA, 20 nt, Artificial Sequence
  targeting sequence with CTCN PAM
uagauauaaaaauucauuuu

SEQ ID NO: 11655 - RNA, 20 nt, Artificial Sequence
  targeting sequence with CTCN PAM
aaugagacauucagaaauga

SEQ ID NO: 11656 - RNA, 20 nt, Artificial Sequence
  targeting sequence with CTCN PAM
uuugagccaagccugaacau

SEQ ID NO: 11657 - RNA, 20 nt, Artificial Sequence
  targeting sequence with CTCN PAM
ucuucauaagggucauuuug

SEQ ID NO: 11658 - RNA, 20 nt, Artificial Sequence
  targeting sequence with CTCN PAM
ucaaagugauuccuguguga

SEQ ID NO: 11659 - RNA, 20 nt, Artificial Sequence
  targeting sequence with CTCN PAM
uauguguacaaggcagaaag

SEQ ID NO: 11660 - RNA, 20 nt, Artificial Sequence
  targeting sequence with CTCN PAM
ucuaaagucauccuugguau

SEQ ID NO: 11661 - RNA, 20 nt, Artificial Sequence
  targeting sequence with CTCN PAM
caucuaaagucauccuuggu

SEQ ID NO: 11662 - RNA, 20 nt, Artificial Sequence
  targeting sequence with CTCN PAM
aacaucuaauaauccaccau

SEQ ID NO: 11663 - RNA, 20 nt, Artificial Sequence
  targeting sequence with CTCN PAM
cggggugcacaagccagucu

SEQ ID NO: 11664 - RNA, 20 nt, Artificial Sequence
  targeting sequence with CTCN PAM
uacucacggggugcacaagc

SEQ ID NO: 11665 - RNA, 20 nt, Artificial Sequence
  targeting sequence with CTCN PAM
cuauccuuguuuuguaggug

SEQ ID NO: 11666 - RNA, 20 nt, Artificial Sequence
  targeting sequence with CTCN PAM
auccuuguuuuguaggugag

SEQ ID NO: 11667 - RNA, 20 nt, Artificial Sequence
  targeting sequence with CTCN PAM
ccuacaaaacaaggauagag

SEQ ID NO: 11668 - RNA, 20 nt, Artificial Sequence
  targeting sequence with CTCN PAM
gauaggagaucagcuuuucu

SEQ ID NO: 11669 - RNA, 20 nt, Artificial Sequence
  targeting sequence with CTCN PAM
uaucugagcuuucauucuca

SEQ ID NO: 11670 - RNA, 20 nt, Artificial Sequence
  targeting sequence with CTCN PAM
aaaugugaaaugugccaagg

SEQ ID NO: 11671 - RNA, 20 nt, Artificial Sequence
  targeting sequence with CTCN PAM
gaggaagaaagcguaagaaa

SEQ ID NO: 11672 - RNA, 20 nt, Artificial Sequence
  targeting sequence with CTCN PAM
gagccuuggcacauuucaca

SEQ ID NO: 11673 - RNA, 20 nt, Artificial Sequence
  targeting sequence with CTCN PAM
ccauuaugugguaacagacc

SEQ ID NO: 11674 - RNA, 20 nt, Artificial Sequence
  targeting sequence with CTCN PAM
gggcuucaguuugcccagcu

SEQ ID NO: 11675 - RNA, 20 nt, Artificial Sequence
  targeting sequence with CTCN PAM
uuccagcugggcaaacugaa

SEQ ID NO: 11676 - RNA, 20 nt, Artificial Sequence
  targeting sequence with CTCN PAM
gugacuaggagcaaacaacu

SEQ ID NO: 11677 - RNA, 20 nt, Artificial Sequence
  targeting sequence with CTCN PAM
uagucacagagcuggcugau

SEQ ID NO: 11678 - RNA, 20 nt, Artificial Sequence
  targeting sequence with CTCN PAM
cuguacuuuaguuuccucau

SEQ ID NO: 11679 - RNA, 20 nt, Artificial Sequence
  targeting sequence with CTCN PAM
guacuuuaguuuccucauug

SEQ ID NO: 11680 - RNA, 20 nt, Artificial Sequence
  targeting sequence with CTCN PAM
uugguaaaaucggggcagug

SEQ ID NO: 11681 - RNA, 20 nt, Artificial Sequence
  targeting sequence with CTCN PAM
uuuuuuuuuuugagacagag

SEQ ID NO: 11682 - RNA, 20 nt, Artificial Sequence
  targeting sequence with CTCN PAM
aaaaaaaaaaagaguguaaa

SEQ ID NO: 11683 - RNA, 20 nt, Artificial Sequence
  targeting sequence with CTCN PAM
gucucaaaaaaaaaaaagag

SEQ ID NO: 11684 - RNA, 20 nt, Artificial Sequence
  targeting sequence with CTCN PAM
gccucccagguucaagccau

SEQ ID NO: 11685 - RNA, 20 nt, Artificial Sequence
  targeting sequence with CTCN PAM
cagguucaagccauucuccu

SEQ ID NO: 11686 - RNA, 20 nt, Artificial Sequence
  targeting sequence with CTCN PAM
ugccucagccucccgaguag

SEQ ID NO: 11687 - RNA, 20 nt, Artificial Sequence
  targeting sequence with CTCN PAM
gccucccgaguaggugggac

SEQ ID NO: 11688 - RNA, 20 nt, Artificial Sequence
  targeting sequence with CTCN PAM
cgaguaggugggacuacagg

SEQ ID NO: 11689 - RNA, 20 nt, Artificial Sequence
  targeting sequence with CTCN PAM
ggaggcugaggcaggagaau

SEQ ID NO: 11690 - RNA, 20 nt, Artificial Sequence
  targeting sequence with CTCN PAM
uuaacaauucuuaaauauug

SEQ ID NO: 11691 - RNA, 20 nt, Artificial Sequence
  targeting sequence with CTCN PAM
ucacaguuauucaauauuua

SEQ ID NO: 11692 - RNA, 20 nt, Artificial Sequence
  targeting sequence with CTCN PAM
guugaccugacgcuuccuuu

SEQ ID NO: 11693 - RNA, 20 nt, Artificial Sequence
  targeting sequence with CTCN PAM
guaccauaguuuucucaucu

SEQ ID NO: 11694 - RNA, 20 nt, Artificial Sequence
  targeting sequence with CTCN PAM
ucugugaaacagguauacag

SEQ ID NO: 11695 - RNA, 20 nt, Artificial Sequence
  targeting sequence with CTCN PAM
cuugaauuacugccaaguau

SEQ ID NO: 11696 - RNA, 20 nt, Artificial Sequence
  targeting sequence with CTCN PAM
agagucagaccugaguugaa

SEQ ID NO: 11697 - RNA, 20 nt, Artificial Sequence
  targeting sequence with CTCN PAM
agagucugugcuuguaauua

SEQ ID NO: 11698 - RNA, 20 nt, Artificial Sequence
  targeting sequence with CTCN PAM
uaaaaugcauuauuuuauuu

SEQ ID NO: 11699 - RNA, 20 nt, Artificial Sequence
  targeting sequence with CTCN PAM
gcaggugcugucuggaauaa

SEQ ID NO: 11700 - RNA, 20 nt, Artificial Sequence
  targeting sequence with CTCN PAM
uauuccagacagcaccugcu

SEQ ID NO: 11701 - RNA, 20 nt, Artificial Sequence
  targeting sequence with CTCN PAM
augacaguacuucgaacucu

SEQ ID NO: 11702 - RNA, 20 nt, Artificial Sequence
  targeting sequence with CTCN PAM
caaugacaguacuucgaacu

SEQ ID NO: 11703 - RNA, 20 nt, Artificial Sequence
  targeting sequence with CTCN PAM
gaauuuuauuuuugguuuau

SEQ ID NO: 11704 - RNA, 20 nt, Artificial Sequence
  targeting sequence with CTCN PAM
accagggcucuuuuaaaauu

SEQ ID NO: 11705 - RNA, 20 nt, Artificial Sequence
  targeting sequence with CTCN PAM
uuuaaaauuuaaccugagag

SEQ ID NO: 11706 - RNA, 20 nt, Artificial Sequence
  targeting sequence with CTCN PAM
gguuaaauuuuaaaagagcc

SEQ ID NO: 11707 - RNA, 20 nt, Artificial Sequence
  targeting sequence with CTCN PAM
cagguuaaauuuuaaaagag

SEQ ID NO: 11708 - RNA, 20 nt, Artificial Sequence
  targeting sequence with CTCN PAM
guauaccucucuggcauuaa

SEQ ID NO: 11709 - RNA, 20 nt, Artificial Sequence
  targeting sequence with CTCN PAM
cuggcauuaacaucaacaca

SEQ ID NO: 11710 - RNA, 20 nt, Artificial Sequence
  targeting sequence with CTCN PAM
ggcauuaacaucaacacaga

SEQ ID NO: 11711 - RNA, 20 nt, Artificial Sequence
  targeting sequence with CTCN PAM
ccucucuaaagccuaguacc

SEQ ID NO: 11712 - RNA, 20 nt, Artificial Sequence
  targeting sequence with CTCN PAM
ucucuaaagccuaguaccuc

SEQ ID NO: 11713 - RNA, 20 nt, Artificial Sequence
  targeting sequence with CTCN PAM
cuaaagccuaguaccucaag

SEQ ID NO: 11714 - RNA, 20 nt, Artificial Sequence
  targeting sequence with CTCN PAM
aaagccuaguaccucaaggc

SEQ ID NO: 11715 - RNA, 20 nt, Artificial Sequence
  targeting sequence with CTCN PAM
aggcuuccucugcaaacagu

SEQ ID NO: 11716 - RNA, 20 nt, Artificial Sequence
  targeting sequence with CTCN PAM
gcaaacaguaacuuggguug

SEQ ID NO: 11717 - RNA, 20 nt, Artificial Sequence
  targeting sequence with CTCN PAM
gaaaaaaaaaaaacaaaaaa

SEQ ID NO: 11718 - RNA, 20 nt, Artificial Sequence
  targeting sequence with CTCN PAM
gucucagaaaaaaaaaaaac

SEQ ID NO: 11719 - RNA, 20 nt, Artificial Sequence
  targeting sequence with CTCN PAM
cucugucgcccaggcuggag

SEQ ID NO: 11720 - RNA, 20 nt, Artificial Sequence
  targeting sequence with CTCN PAM
gucgcccaggcuggagugua

SEQ ID NO: 11721 - RNA, 20 nt, Artificial Sequence
  targeting sequence with CTCN PAM
agccugggcgacagagugag

SEQ ID NO: 11722 - RNA, 20 nt, Artificial Sequence
  targeting sequence with CTCN PAM
gcucacugcaagcuccaccu

SEQ ID NO: 11723 - RNA, 20 nt, Artificial Sequence
  targeting sequence with CTCN PAM
cugcaagcuccaccuuccgg

SEQ ID NO: 11724 - RNA, 20 nt, Artificial Sequence
  targeting sequence with CTCN PAM
accuuccggguucacgccau

SEQ ID NO: 11725 - RNA, 20 nt, Artificial Sequence
  targeting sequence with CTCN PAM
ugccucauccucccguguag

SEQ ID NO: 11726 - RNA, 20 nt, Artificial Sequence
  targeting sequence with CTCN PAM
uccucccguguagcugggac

SEQ ID NO: 11727 - RNA, 20 nt, Artificial Sequence
  targeting sequence with CTCN PAM
cguguagcugggacuauagg

SEQ ID NO: 11728 - RNA, 20 nt, Artificial Sequence
  targeting sequence with CTCN PAM
acaaaaaauuagccaagcau

SEQ ID NO: 11729 - RNA, 20 nt, Artificial Sequence
  targeting sequence with CTCN PAM
gucuccugaccucaugaucc

SEQ ID NO: 11730 - RNA, 20 nt, Artificial Sequence
  targeting sequence with CTCN PAM
ugaccucaugauccacccac

SEQ ID NO: 11731 - RNA, 20 nt, Artificial Sequence
  targeting sequence with CTCN PAM
ugauccacccaccucggccu

SEQ ID NO: 11732 - RNA, 20 nt, Artificial Sequence
  targeting sequence with CTCN PAM
gccucccaaagugcugggau

SEQ ID NO: 11733 - RNA, 20 nt, Artificial Sequence
  targeting sequence with CTCN PAM
caaagugcugggauuacagg

SEQ ID NO: 11734 - RNA, 20 nt, Artificial Sequence
  targeting sequence with CTCN PAM
ugccuguaaucccagcacuu

SEQ ID NO: 11735 - RNA, 20 nt, Artificial Sequence
  targeting sequence with CTCN PAM
accaauugucagaaaaauuu

SEQ ID NO: 11736 - RNA, 20 nt, Artificial Sequence
  targeting sequence with CTCN PAM
uguuucacuaaaauguguca

SEQ ID NO: 11737 - RNA, 20 nt, Artificial Sequence
  targeting sequence with CTCN PAM
guuugacacauuuuagugaa

SEQ ID NO: 11738 - RNA, 20 nt, Artificial Sequence
  targeting sequence with CTCN PAM
ggaccaccugagggcugugu

SEQ ID NO: 11739 - RNA, 20 nt, Artificial Sequence
  targeting sequence with CTCN PAM
ggugguccugagaacaugug

SEQ ID NO: 11740 - RNA, 20 nt, Artificial Sequence
  targeting sequence with CTCN PAM
uauuuggcucagaauaaauc

SEQ ID NO: 11741 - RNA, 20 nt, Artificial Sequence
  targeting sequence with CTCN PAM
gaauaaaucucuucagauau

SEQ ID NO: 11742 - RNA, 20 nt, Artificial Sequence
  targeting sequence with CTCN PAM
ucagauauuuuacagaguuu

SEQ ID NO: 11743 - RNA, 20 nt, Artificial Sequence
  targeting sequence with CTCN PAM
guaaaauaucugaagagauu

SEQ ID NO: 11744 - RNA, 20 nt, Artificial Sequence
  targeting sequence with CTCN PAM
ucuugccaacacaaguaauc

SEQ ID NO: 11745 - RNA, 20 nt, Artificial Sequence
  targeting sequence with CTCN PAM
uaaaauauuuugcaguuuga

SEQ ID NO: 11746 - RNA, 20 nt, Artificial Sequence
  targeting sequence with CTCN PAM
gaauaaaucucuuaaaauau

SEQ ID NO: 11747 - RNA, 20 nt, Artificial Sequence
  targeting sequence with CTCN PAM
uauuaggcucagaauaaauc

SEQ ID NO: 11748 - RNA, 20 nt, Artificial Sequence
  targeting sequence with CTCN PAM
ggagguccacagaacaugug

SEQ ID NO: 11749 - RNA, 20 nt, Artificial Sequence
  targeting sequence with CTCN PAM
ugagggcugugucacuggcu

SEQ ID NO: 11750 - RNA, 20 nt, Artificial Sequence
  targeting sequence with CTCN PAM
ccaaacugcaccccaaccac

SEQ ID NO: 11751 - RNA, 20 nt, Artificial Sequence
  targeting sequence with CTCN PAM
ugccuccccaaacugcaccc

SEQ ID NO: 11752 - RNA, 20 nt, Artificial Sequence
  targeting sequence with CTCN PAM
aagugagggcuuccaggcua

SEQ ID NO: 11753 - RNA, 20 nt, Artificial Sequence
  targeting sequence with CTCN PAM
cuuugaguuguccugccuuu

SEQ ID NO: 11754 - RNA, 20 nt, Artificial Sequence
  targeting sequence with CTCN PAM
gccaauugucagccagaaaa

SEQ ID NO: 11755 - RNA, 20 nt, Artificial Sequence
  targeting sequence with CTCN PAM
acaauccuuuaucuuaaccc

SEQ ID NO: 11756 - RNA, 20 nt, Artificial Sequence
  targeting sequence with CTCN PAM
gcaaauaagaacaugggucu

SEQ ID NO: 11757 - RNA, 20 nt, Artificial Sequence
  targeting sequence with CTCN PAM
cccugcaaaacagagucuug

SEQ ID NO: 11758 - RNA, 20 nt, Artificial Sequence
  targeting sequence with CTCN PAM
guuuugcagggugagaagaa

SEQ ID NO: 11759 - RNA, 20 nt, Artificial Sequence
  targeting sequence with CTCN PAM
agccugggugacagcaagac

SEQ ID NO: 11760 - RNA, 20 nt, Artificial Sequence
  targeting sequence with CTCN PAM
gcucacugcaaccucugucu

SEQ ID NO: 11761 - RNA, 20 nt, Artificial Sequence
  targeting sequence with CTCN PAM
cugcaaccucugucucccgg

SEQ ID NO: 11762 - RNA, 20 nt, Artificial Sequence
  targeting sequence with CTCN PAM
gucucccggguucaagcaau

SEQ ID NO: 11763 - RNA, 20 nt, Artificial Sequence
  targeting sequence with CTCN PAM
cggguucaagcaauucuccu

SEQ ID NO: 11764 - RNA, 20 nt, Artificial Sequence
  targeting sequence with CTCN PAM
ugccucagccucccuaguag

SEQ ID NO: 11765 - RNA, 20 nt, Artificial Sequence
  targeting sequence with CTCN PAM
gccucccuaguagcugggau

SEQ ID NO: 11766 - RNA, 20 nt, Artificial Sequence
  targeting sequence with CTCN PAM
cuaguagcugggauuacagg

SEQ ID NO: 11767 - RNA, 20 nt, Artificial Sequence
  targeting sequence with CTCN PAM
acuaaaaauacaaaaauuag

SEQ ID NO: 11768 - RNA, 20 nt, Artificial Sequence
  targeting sequence with CTCN PAM
aacuccugaccucgugaucc

SEQ ID NO: 11769 - RNA, 20 nt, Artificial Sequence
  targeting sequence with CTCN PAM
ugaccucgugauccgcccgc

SEQ ID NO: 11770 - RNA, 20 nt, Artificial Sequence
  targeting sequence with CTCN PAM
ugauccgcccgccucggccu

SEQ ID NO: 11771 - RNA, 20 nt, Artificial Sequence
  targeting sequence with CTCN PAM
gccucccaaaacgcugggau

SEQ ID NO: 11772 - RNA, 20 nt, Artificial Sequence
  targeting sequence with CTCN PAM
caaaacgcugggauuacagg

SEQ ID NO: 11773 - RNA, 20 nt, Artificial Sequence
  targeting sequence with CTCN PAM
ugccuguaaucccagcguuu

SEQ ID NO: 11774 - RNA, 20 nt, Artificial Sequence
  targeting sequence with CTCN PAM
ggcauuaauaucaacacaga

SEQ ID NO: 11775 - RNA, 20 nt, Artificial Sequence
  targeting sequence with CTCN PAM
ccggcauuaauaucaacaca

SEQ ID NO: 11776 - RNA, 20 nt, Artificial Sequence
  targeting sequence with CTCN PAM
uuguaccucuccggcauuaa

SEQ ID NO: 11777 - RNA, 20 nt, Artificial Sequence
  targeting sequence with CTCN PAM
gacaugccucauuguaccuc

SEQ ID NO: 11778 - RNA, 20 nt, Artificial Sequence
  targeting sequence with CTCN PAM
cagguuaaauuuuaaaagag

SEQ ID NO: 11779 - RNA, 20 nt, Artificial Sequence
  targeting sequence with CTCN PAM
gguuaaauuuuaaaagagcc

SEQ ID NO: 11780 - RNA, 20 nt, Artificial Sequence
  targeting sequence with CTCN PAM
uuuaaaauuuaaccugagag

SEQ ID NO: 11781 - RNA, 20 nt, Artificial Sequence
  targeting sequence with CTCN PAM
accagggcucuuuuaaaauu

SEQ ID NO: 11782 - RNA, 20 nt, Artificial Sequence
  targeting sequence with CTCN PAM
ucaaccagggcucuuuuaaa

SEQ ID NO: 11783 - RNA, 20 nt, Artificial Sequence
  targeting sequence with CTCN PAM
cuuucaugucuuugcuuguu

SEQ ID NO: 11784 - RNA, 20 nt, Artificial Sequence
  targeting sequence with CTCN PAM
uccauguuucaaaagcccua

SEQ ID NO: 11785 - RNA, 20 nt, Artificial Sequence
  targeting sequence with CTCN PAM
auguuucaaaagcccuaccu

SEQ ID NO: 11786 - RNA, 20 nt, Artificial Sequence
  targeting sequence with CTCN PAM
ccuugaauuaaaaugcuguu

SEQ ID NO: 11787 - RNA, 20 nt, Artificial Sequence
  targeting sequence with CTCN PAM
uugaauuaaaaugcuguuga

SEQ ID NO: 11788 - RNA, 20 nt, Artificial Sequence
  targeting sequence with CTCN PAM
gauauuuaccccagacaaug

SEQ ID NO: 11789 - RNA, 20 nt, Artificial Sequence
  targeting sequence with CTCN PAM
acagcaauggaaaacuagga

SEQ ID NO: 11790 - RNA, 20 nt, Artificial Sequence
  targeting sequence with CTCN PAM
gguguguccguauccuaguu

SEQ ID NO: 11791 - RNA, 20 nt, Artificial Sequence
  targeting sequence with CTCN PAM
cucugguguguccguauccu

SEQ ID NO: 11792 - RNA, 20 nt, Artificial Sequence
  targeting sequence with CTCN PAM
uaaccucacucugguguguc

SEQ ID NO: 11793 - RNA, 20 nt, Artificial Sequence
  targeting sequence with CTCN PAM
uucuuucgccuguuaaacuu

SEQ ID NO: 11794 - RNA, 20 nt, Artificial Sequence
  targeting sequence with CTCN PAM
ucucuuucuuucgccuguua

SEQ ID NO: 11795 - RNA, 20 nt, Artificial Sequence
  targeting sequence with CTCN PAM
cugcagcugacagcguucuc

SEQ ID NO: 11796 - RNA, 20 nt, Artificial Sequence
  targeting sequence with CTCN PAM
aaaaaaugaguugccaccuc

SEQ ID NO: 11797 - RNA, 20 nt, Artificial Sequence
  targeting sequence with CTCN PAM
uuuuuucgagaacgcuguca

SEQ ID NO: 11798 - RNA, 20 nt, Artificial Sequence
  targeting sequence with CTCN PAM
guggugaaaugcagguuuua

SEQ ID NO: 11799 - RNA, 20 nt, Artificial Sequence
  targeting sequence with CTCN PAM
agcuuaucuauaaaaccugc

SEQ ID NO: 11800 - RNA, 20 nt, Artificial Sequence
  targeting sequence with CTCN PAM
ucaagcuuaucuauaaaacc

SEQ ID NO: 11801 - RNA, 20 nt, Artificial Sequence
  targeting sequence with CTCN PAM
cuuuaauuugucaccacgug

SEQ ID NO: 11802 - RNA, 20 nt, Artificial Sequence
  targeting sequence with CTCN PAM
auguugaacauacuuggccc

SEQ ID NO: 11803 - RNA, 20 nt, Artificial Sequence
  targeting sequence with CTCN PAM
aaaaaaaaaaauaaauaaau

SEQ ID NO: 11804 - RNA, 20 nt, Artificial Sequence
  targeting sequence with CTCN PAM
gucucaaaaaaaaaaaauaa

SEQ ID NO: 11805 - RNA, 20 nt, Artificial Sequence
  targeting sequence with CTCN PAM
gucgcccagacuggagugca

SEQ ID NO: 11806 - RNA, 20 nt, Artificial Sequence
  targeting sequence with CTCN PAM
agucugggcgacggaggaag

SEQ ID NO: 11807 - RNA, 20 nt, Artificial Sequence
  targeting sequence with CTCN PAM
cugcaaccucugccucccag

SEQ ID NO: 11808 - RNA, 20 nt, Artificial Sequence
  targeting sequence with CTCN PAM
gccucccagguucuagugau

SEQ ID NO: 11809 - RNA, 20 nt, Artificial Sequence
  targeting sequence with CTCN PAM
cagguucuagugauucuccu

SEQ ID NO: 11810 - RNA, 20 nt, Artificial Sequence
  targeting sequence with CTCN PAM
ugccucagccucucgaguag

SEQ ID NO: 11811 - RNA, 20 nt, Artificial Sequence
  targeting sequence with CTCN PAM
gccucucgaguagcugggau

SEQ ID NO: 11812 - RNA, 20 nt, Artificial Sequence
  targeting sequence with CTCN PAM
cgaguagcugggauuacagg

SEQ ID NO: 11813 - RNA, 20 nt, Artificial Sequence
  targeting sequence with CTCN PAM
aguagcugggauuacaggcg

SEQ ID NO: 11814 - RNA, 20 nt, Artificial Sequence
  targeting sequence with CTCN PAM
agaggcugaggcaggagaau

SEQ ID NO: 11815 - RNA, 20 nt, Artificial Sequence
  targeting sequence with CTCN PAM
ccacccaccaccaugcccag

SEQ ID NO: 11816 - RNA, 20 nt, Artificial Sequence
  targeting sequence with CTCN PAM
accaaaaauacaaaaauuag

SEQ ID NO: 11817 - RNA, 20 nt, Artificial Sequence
  targeting sequence with CTCN PAM
aacuccugaccucaagucuu

SEQ ID NO: 11818 - RNA, 20 nt, Artificial Sequence
  targeting sequence with CTCN PAM
ugaccucaagucuuccuccu

SEQ ID NO: 11819 - RNA, 20 nt, Artificial Sequence
  targeting sequence with CTCN PAM
agucuuccuccugccuuggc

SEQ ID NO: 11820 - RNA, 20 nt, Artificial Sequence
  targeting sequence with CTCN PAM
ugccuuggccucccagagug

SEQ ID NO: 11821 - RNA, 20 nt, Artificial Sequence
  targeting sequence with CTCN PAM
cagagugcugggauuacagg

SEQ ID NO: 11822 - RNA, 20 nt, Artificial Sequence
  targeting sequence with CTCN PAM
gggaggccaaggcaggagga

SEQ ID NO: 11823 - RNA, 20 nt, Artificial Sequence
  targeting sequence with CTCN PAM
ugccuguaaucccagcacuc

SEQ ID NO: 11824 - RNA, 20 nt, Artificial Sequence
  targeting sequence with CTCN PAM
gcuugccuaucuauguuugc

SEQ ID NO: 11825 - RNA, 20 nt, Artificial Sequence
  targeting sequence with CTCN PAM
auuuuucaggcugcucuuug

SEQ ID NO: 11826 - RNA, 20 nt, Artificial Sequence
  targeting sequence with CTCN PAM
uuguuagaaaaaaauaauuu

SEQ ID NO: 11827 - RNA, 20 nt, Artificial Sequence
  targeting sequence with CTCN PAM
uuuaccuucacuaucuggcu

SEQ ID NO: 11828 - RNA, 20 nt, Artificial Sequence
  targeting sequence with CTCN PAM
uguaucacugcgucuuccuc

SEQ ID NO: 11829 - RNA, 20 nt, Artificial Sequence
  targeting sequence with CTCN PAM
uucgaauccuguuuucaugu

SEQ ID NO: 11830 - RNA, 20 nt, Artificial Sequence
  targeting sequence with CTCN PAM
uaaagccuuuaucagaguac

SEQ ID NO: 11831 - RNA, 20 nt, Artificial Sequence
  targeting sequence with CTCN PAM
gauaaaggcuuuaagagaca

SEQ ID NO: 11832 - RNA, 20 nt, Artificial Sequence
  targeting sequence with CTCN PAM
aagguugugucuuauaauug

SEQ ID NO: 11833 - RNA, 20 nt, Artificial Sequence
  targeting sequence with CTCN PAM
ccucuaagguugugucuuau

SEQ ID NO: 11834 - RNA, 20 nt, Artificial Sequence
  targeting sequence with CTCN PAM
cuggauaguaauuucccuga

SEQ ID NO: 11835 - RNA, 20 nt, Artificial Sequence
  targeting sequence with CTCN PAM
gggaaauuacuauccaguga

SEQ ID NO: 11836 - RNA, 20 nt, Artificial Sequence
  targeting sequence with CTCN PAM
ccucagggaaauuacuaucc

SEQ ID NO: 11837 - RNA, 20 nt, Artificial Sequence
  targeting sequence with CTCN PAM
cuccccucagggaaauuacu

SEQ ID NO: 11838 - RNA, 20 nt, Artificial Sequence
  targeting sequence with CTCN PAM
uaggugccaggcaccaacag

SEQ ID NO: 11839 - RNA, 20 nt, Artificial Sequence
  targeting sequence with CTCN PAM
guaaguaucuguggauuuac

SEQ ID NO: 11840 - RNA, 20 nt, Artificial Sequence
  targeting sequence with CTCN PAM
cauguugucuagccuuuaug

SEQ ID NO: 11841 - RNA, 20 nt, Artificial Sequence
  targeting sequence with CTCN PAM
uguugucuagccuuuaugau

SEQ ID NO: 11842 - RNA, 20 nt, Artificial Sequence
  targeting sequence with CTCN PAM
ucuaauaauaucauaaaggc

SEQ ID NO: 11843 - RNA, 20 nt, Artificial Sequence
  targeting sequence with CTCN PAM
acaguugacccuuugaauaa

SEQ ID NO: 11844 - RNA, 20 nt, Artificial Sequence
  targeting sequence with CTCN PAM
uguccagaagccagacacaa

SEQ ID NO: 11845 - RNA, 20 nt, Artificial Sequence
  targeting sequence with CTCN PAM
uuguccugauuuccucuugu

SEQ ID NO: 11846 - RNA, 20 nt, Artificial Sequence
  targeting sequence with CTCN PAM
guaguuagcucuuuguccug

SEQ ID NO: 11847 - RNA, 20 nt, Artificial Sequence
  targeting sequence with CTCN PAM
ucaguacacacacaguguuu

SEQ ID NO: 11848 - RNA, 20 nt, Artificial Sequence
  targeting sequence with CTCN PAM
guacacacacaguguuucuu

SEQ ID NO: 11849 - RNA, 20 nt, Artificial Sequence
  targeting sequence with CTCN PAM
acugauuuuggcugccggaa

SEQ ID NO: 11850 - RNA, 20 nt, Artificial Sequence
  targeting sequence with CTCN PAM
uaaagugcuucccuaaccuc

SEQ ID NO: 11851 - RNA, 20 nt, Artificial Sequence
  targeting sequence with CTCN PAM
cucuugugaguacucugaaa

SEQ ID NO: 11852 - RNA, 20 nt, Artificial Sequence
  targeting sequence with CTCN PAM
ugugaguacucugaaauuug

SEQ ID NO: 11853 - RNA, 20 nt, Artificial Sequence
  targeting sequence with CTCN PAM
caagagggagguuagggaag

SEQ ID NO: 11854 - RNA, 20 nt, Artificial Sequence
  targeting sequence with CTCN PAM
gaaauuugacccuuuuuuuu

SEQ ID NO: 11855 - RNA, 20 nt, Artificial Sequence
  targeting sequence with CTCN PAM
aaaaaaaaaaaaaaggguca

SEQ ID NO: 11856 - RNA, 20 nt, Artificial Sequence
  targeting sequence with CTCN PAM
aaguaaaaagggaaagauga

SEQ ID NO: 11857 - RNA, 20 nt, Artificial Sequence
  targeting sequence with CTCN PAM
uucaugggugucucaaagua

SEQ ID NO: 11858 - RNA, 20 nt, Artificial Sequence
  targeting sequence with CTCN PAM
cucuggaaccuauccaggua

SEQ ID NO: 11859 - RNA, 20 nt, Artificial Sequence
  targeting sequence with CTCN PAM
ggaaccuauccagguauaua

SEQ ID NO: 11860 - RNA, 20 nt, Artificial Sequence
  targeting sequence with CTCN PAM
gaaaauuacuuuuauauacc

SEQ ID NO: 11861 - RNA, 20 nt, Artificial Sequence
  targeting sequence with CTCN PAM
cuuucugucuaagucuacuu

SEQ ID NO: 11862 - RNA, 20 nt, Artificial Sequence
  targeting sequence with CTCN PAM
uucugucuaagucuacuucc

SEQ ID NO: 11863 - RNA, 20 nt, Artificial Sequence
  targeting sequence with CTCN PAM
ucucuguugucucuagauac

SEQ ID NO: 11864 - RNA, 20 nt, Artificial Sequence
  targeting sequence with CTCN PAM
guugucucuagauacgcaga

SEQ ID NO: 11865 - RNA, 20 nt, Artificial Sequence
  targeting sequence with CTCN PAM
agauacgcagacugauuaau

SEQ ID NO: 11866 - RNA, 20 nt, Artificial Sequence
  targeting sequence with CTCN PAM
auucuuuguaugguuaacua

SEQ ID NO: 11867 - RNA, 20 nt, Artificial Sequence
  targeting sequence with CTCN PAM
ccaguguaaacaauccaaac

SEQ ID NO: 11868 - RNA, 20 nt, Artificial Sequence
  targeting sequence with CTCN PAM
aguguaaacaauccaaacuc

SEQ ID NO: 11869 - RNA, 20 nt, Artificial Sequence
  targeting sequence with CTCN PAM
auuaguuuuucuacauaggu

SEQ ID NO: 11870 - RNA, 20 nt, Artificial Sequence
  targeting sequence with CTCN PAM
aaccauuucagaaaguuucc

SEQ ID NO: 11871 - RNA, 20 nt, Artificial Sequence
  targeting sequence with CTCN PAM
gauggugugugugugugugu

SEQ ID NO: 11872 - RNA, 20 nt, Artificial Sequence
  targeting sequence with CTCN PAM
aaaaaaaaaaaaaaaaaaaa

SEQ ID NO: 11873 - RNA, 20 nt, Artificial Sequence
  targeting sequence with CTCN PAM
gucuccaaaaaaaaaaaaaa

SEQ ID NO: 11874 - RNA, 20 nt, Artificial Sequence
  targeting sequence with CTCN PAM
gucgcccaggcuggagugca

SEQ ID NO: 11875 - RNA, 20 nt, Artificial Sequence
  targeting sequence with CTCN PAM
agccugggcgacagagccag

SEQ ID NO: 11876 - RNA, 20 nt, Artificial Sequence
  targeting sequence with CTCN PAM
gcuuacugcaagcuccaccu

SEQ ID NO: 11877 - RNA, 20 nt, Artificial Sequence
  targeting sequence with CTCN PAM
accucccggguucacaccau

SEQ ID NO: 11878 - RNA, 20 nt, Artificial Sequence
  targeting sequence with CTCN PAM
cggguucacaccauucuccu

SEQ ID NO: 11879 - RNA, 20 nt, Artificial Sequence
  targeting sequence with CTCN PAM
ugccucagccuccugaguag

SEQ ID NO: 11880 - RNA, 20 nt, Artificial Sequence
  targeting sequence with CTCN PAM
gccuccugaguagcugggac

SEQ ID NO: 11881 - RNA, 20 nt, Artificial Sequence
  targeting sequence with CTCN PAM
ugaguagcugggacuacagg

SEQ ID NO: 11882 - RNA, 20 nt, Artificial Sequence
  targeting sequence with CTCN PAM
ggaggcugaggcaggagaau

SEQ ID NO: 11883 - RNA, 20 nt, Artificial Sequence
  targeting sequence with CTCN PAM
gcuaauuuuuuguauuuuua

SEQ ID NO: 11884 - RNA, 20 nt, Artificial Sequence
  targeting sequence with CTCN PAM
acuaaaaauacaaaaaauua

SEQ ID NO: 11885 - RNA, 20 nt, Artificial Sequence
  targeting sequence with CTCN PAM
guguuagccaggauggucuc

SEQ ID NO: 11886 - RNA, 20 nt, Artificial Sequence
  targeting sequence with CTCN PAM
aucuccugaccucguaaucc

SEQ ID NO: 11887 - RNA, 20 nt, Artificial Sequence
  targeting sequence with CTCN PAM
ugaccucguaauccacccac

SEQ ID NO: 11888 - RNA, 20 nt, Artificial Sequence
  targeting sequence with CTCN PAM
uaauccacccaccucggccu

SEQ ID NO: 11889 - RNA, 20 nt, Artificial Sequence
  targeting sequence with CTCN PAM
gccucccaaagugcugggau

SEQ ID NO: 11890 - RNA, 20 nt, Artificial Sequence
  targeting sequence with CTCN PAM
caaagugcugggauuacaga

SEQ ID NO: 11891 - RNA, 20 nt, Artificial Sequence
  targeting sequence with CTCN PAM
guaaucccagcacuuuggga

SEQ ID NO: 11892 - RNA, 20 nt, Artificial Sequence
  targeting sequence with CTCN PAM
ccucuguaaucccagcacuu

SEQ ID NO: 11893 - RNA, 20 nt, Artificial Sequence
  targeting sequence with CTCN PAM
ccacauagugauagauguca

SEQ ID NO: 11894 - RNA, 20 nt, Artificial Sequence
  targeting sequence with CTCN PAM
acauagugauagaugucaca

SEQ ID NO: 11895 - RNA, 20 nt, Artificial Sequence
  targeting sequence with CTCN PAM
aagaaauaaaauaaaaccca

SEQ ID NO: 11896 - RNA, 20 nt, Artificial Sequence
  targeting sequence with CTCN PAM
guugcccaagcuggugugca

SEQ ID NO: 11897 - RNA, 20 nt, Artificial Sequence
  targeting sequence with CTCN PAM
aacuccugggcuuaagggau

SEQ ID NO: 11898 - RNA, 20 nt, Artificial Sequence
  targeting sequence with CTCN PAM
ugggcuuaagggaucuuccc

SEQ ID NO: 11899 - RNA, 20 nt, Artificial Sequence
  targeting sequence with CTCN PAM
gccucccgaguagcuaggac

SEQ ID NO: 11900 - RNA, 20 nt, Artificial Sequence
  targeting sequence with CTCN PAM
cgaguagcuaggacugugga

SEQ ID NO: 11901 - RNA, 20 nt, Artificial Sequence
  targeting sequence with CTCN PAM
ggaggcugaggugggaagau

SEQ ID NO: 11902 - RNA, 20 nt, Artificial Sequence
  targeting sequence with CTCN PAM
uccaccuaauuuuuauuuuu

SEQ ID NO: 11903 - RNA, 20 nt, Artificial Sequence
  targeting sequence with CTCN PAM
acuucuugguuacccaacuu

SEQ ID NO: 11904 - RNA, 20 nt, Artificial Sequence
  targeting sequence with CTCN PAM
uuugccagguuuaugacacc

SEQ ID NO: 11905 - RNA, 20 nt, Artificial Sequence
  targeting sequence with CTCN PAM
gauggcaccuuacuucagcc

SEQ ID NO: 11906 - RNA, 20 nt, Artificial Sequence
  targeting sequence with CTCN PAM
agggacacaaagacacugug

SEQ ID NO: 11907 - RNA, 20 nt, Artificial Sequence
  targeting sequence with CTCN PAM
ggguuuccauucucuauaau

SEQ ID NO: 11908 - RNA, 20 nt, Artificial Sequence
  targeting sequence with CTCN PAM
auaauagccucaucauuguu

SEQ ID NO: 11909 - RNA, 20 nt, Artificial Sequence
  targeting sequence with CTCN PAM
cuagucuaauucaauacugu

SEQ ID NO: 11910 - RNA, 20 nt, Artificial Sequence
  targeting sequence with CTCN PAM
uugagaugaggacaggugag

SEQ ID NO: 11911 - RNA, 20 nt, Artificial Sequence
  targeting sequence with CTCN PAM
augagcccacccucacuagu

SEQ ID NO: 11912 - RNA, 20 nt, Artificial Sequence
  targeting sequence with CTCN PAM
ucucaaugagcccacccuca

SEQ ID NO: 11913 - RNA, 20 nt, Artificial Sequence
  targeting sequence with CTCN PAM
ccuguccucaucucaaugag

SEQ ID NO: 11914 - RNA, 20 nt, Artificial Sequence
  targeting sequence with CTCN PAM
ugacuucaaagucuuuuucc

SEQ ID NO: 11915 - RNA, 20 nt, Artificial Sequence
  targeting sequence with CTCN PAM
uugccuccugacuucaaagu

SEQ ID NO: 11916 - RNA, 20 nt, Artificial Sequence
  targeting sequence with CTCN PAM
gucaaaauggaacuacugaa

SEQ ID NO: 11917 - RNA, 20 nt, Artificial Sequence
  targeting sequence with CTCN PAM
gcagaggagggaucugauuu

SEQ ID NO: 11918 - RNA, 20 nt, Artificial Sequence
  targeting sequence with CTCN PAM
gcugaggaccuuucaguagu

SEQ ID NO: 11919 - RNA, 20 nt, Artificial Sequence
  targeting sequence with CTCN PAM
ucugcugaggaccuuucagu

SEQ ID NO: 11920 - RNA, 20 nt, Artificial Sequence
  targeting sequence with CTCN PAM
guugcuguugcuuccuauuu

SEQ ID NO: 11921 - RNA, 20 nt, Artificial Sequence
  targeting sequence with CTCN PAM
caguugcuguugcuuccuau

SEQ ID NO: 11922 - RNA, 20 nt, Artificial Sequence
  targeting sequence with CTCN PAM
cuuccccauugccacucuca

SEQ ID NO: 11923 - RNA, 20 nt, Artificial Sequence
  targeting sequence with CTCN PAM
gaaaccucccuuccccauug

SEQ ID NO: 11924 - RNA, 20 nt, Artificial Sequence
  targeting sequence with CTCN PAM
cugaaaccucccuuccccau

SEQ ID NO: 11925 - RNA, 20 nt, Artificial Sequence
  targeting sequence with CTCN PAM
ucaacucucugaaaccuccc

SEQ ID NO: 11926 - RNA, 20 nt, Artificial Sequence
  targeting sequence with CTCN PAM
gagaaugggacagcgagugg

SEQ ID NO: 11927 - RNA, 20 nt, Artificial Sequence
  targeting sequence with CTCN PAM
gaggcagugacuuuacacuu

SEQ ID NO: 11928 - RNA, 20 nt, Artificial Sequence
  targeting sequence with CTCN PAM
aaaucgcuggagaaaaagac

SEQ ID NO: 11929 - RNA, 20 nt, Artificial Sequence
  targeting sequence with CTCN PAM
acaacuaugcagcucaaaau

SEQ ID NO: 11930 - RNA, 20 nt, Artificial Sequence
  targeting sequence with CTCN PAM
ucugccucuacaacuaugca

SEQ ID NO: 11931 - RNA, 20 nt, Artificial Sequence
  targeting sequence with CTCN PAM
gguuaaauucaccucuucug

SEQ ID NO: 11932 - RNA, 20 nt, Artificial Sequence
  targeting sequence with CTCN PAM
uacuucaucuucaaaugugc

SEQ ID NO: 11933 - RNA, 20 nt, Artificial Sequence
  targeting sequence with CTCN PAM
guuucaugcaccacuucccu

SEQ ID NO: 11934 - RNA, 20 nt, Artificial Sequence
  targeting sequence with CTCN PAM
gguguuggguugggguugga

SEQ ID NO: 11935 - RNA, 20 nt, Artificial Sequence
  targeting sequence with CTCN PAM
cagaacucugguguuggguu

SEQ ID NO: 11936 - RNA, 20 nt, Artificial Sequence
  targeting sequence with CTCN PAM
gacucacagaacucuggugu

SEQ ID NO: 11937 - RNA, 20 nt, Artificial Sequence
  targeting sequence with CTCN PAM
auaaccagcucagacucaca

SEQ ID NO: 11938 - RNA, 20 nt, Artificial Sequence
  targeting sequence with CTCN PAM
gacucaauaaccagcucaga

SEQ ID NO: 11939 - RNA, 20 nt, Artificial Sequence
  targeting sequence with CTCN PAM
auguuauccauuugauacau

SEQ ID NO: 11940 - RNA, 20 nt, Artificial Sequence
  targeting sequence with CTCN PAM
uugauaaucagauggaagcu

SEQ ID NO: 11941 - RNA, 20 nt, Artificial Sequence
  targeting sequence with CTCN PAM
ucacuuuaguccugcauaaa

SEQ ID NO: 11942 - RNA, 20 nt, Artificial Sequence
  targeting sequence with CTCN PAM
ugccuauaauccuacugaaa

SEQ ID NO: 11943 - RNA, 20 nt, Artificial Sequence
  targeting sequence with CTCN PAM
gggagccugaguugggaaga

SEQ ID NO: 11944 - RNA, 20 nt, Artificial Sequence
  targeting sequence with CTCN PAM
cagagcuuuaggauuucagu

SEQ ID NO: 11945 - RNA, 20 nt, Artificial Sequence
  targeting sequence with CTCN PAM
ggcucccagagcuuuaggau

SEQ ID NO: 11946 - RNA, 20 nt, Artificial Sequence
  targeting sequence with CTCN PAM
ugccuuaagcaaucuuccca

SEQ ID NO: 11947 - RNA, 20 nt, Artificial Sequence
  targeting sequence with CTCN PAM
aacuccugccuuaagcaauc

SEQ ID NO: 11948 - RNA, 20 nt, Artificial Sequence
  targeting sequence with CTCN PAM
cuauguugcccaggcugguc

SEQ ID NO: 11949 - RNA, 20 nt, Artificial Sequence
  targeting sequence with CTCN PAM
cuaaaaucuggccuggguga

SEQ ID NO: 11950 - RNA, 20 nt, Artificial Sequence
  targeting sequence with CTCN PAM
gucacccaggccagauuuua

SEQ ID NO: 11951 - RNA, 20 nt, Artificial Sequence
  targeting sequence with CTCN PAM
gucucuuaaaaaaaaaaaaa

SEQ ID NO: 11952 - RNA, 20 nt, Artificial Sequence
  targeting sequence with CTCN PAM
uaaaaaaaaaaaaaaaagac

SEQ ID NO: 11953 - RNA, 20 nt, Artificial Sequence
  targeting sequence with CTCN PAM
aacaugcacacacacacaca

SEQ ID NO: 11954 - RNA, 20 nt, Artificial Sequence
  targeting sequence with CTCN PAM
cuaaaacauuauucugaacu

SEQ ID NO: 11955 - RNA, 20 nt, Artificial Sequence
  targeting sequence with CTCN PAM
caggucucccuaaaacauua

SEQ ID NO: 11956 - RNA, 20 nt, Artificial Sequence
  targeting sequence with CTCN PAM
ucacaggucucccuaaaaca

SEQ ID NO: 11957 - RNA, 20 nt, Artificial Sequence
  targeting sequence with CTCN PAM
cuccucacaggucucccuaa

SEQ ID NO: 11958 - RNA, 20 nt, Artificial Sequence
  targeting sequence with CTCN PAM
aggcucccuccucacagguc

SEQ ID NO: 11959 - RNA, 20 nt, Artificial Sequence
  targeting sequence with CTCN PAM
ccaggcucccuccucacagg

SEQ ID NO: 11960 - RNA, 20 nt, Artificial Sequence
  targeting sequence with CTCN PAM
uccuaguggcuguugaggaa

SEQ ID NO: 11961 - RNA, 20 nt, Artificial Sequence
  targeting sequence with CTCN PAM
acagccacuaggaugagaca

SEQ ID NO: 11962 - RNA, 20 nt, Artificial Sequence
  targeting sequence with CTCN PAM
ucuguaccuacugggccuua

SEQ ID NO: 11963 - RNA, 20 nt, Artificial Sequence
  targeting sequence with CTCN PAM
ggugccucugguguuuauaa

SEQ ID NO: 11964 - RNA, 20 nt, Artificial Sequence
  targeting sequence with CTCN PAM
gguguuuauaagcauagcag

SEQ ID NO: 11965 - RNA, 20 nt, Artificial Sequence
  targeting sequence with CTCN PAM
uugaccugcaacaccauuag

SEQ ID NO: 11966 - RNA, 20 nt, Artificial Sequence
  targeting sequence with CTCN PAM
agugcccuaaugguguugca

SEQ ID NO: 11967 - RNA, 20 nt, Artificial Sequence
  targeting sequence with CTCN PAM
gacauccucaagugcccuaa

SEQ ID NO: 11968 - RNA, 20 nt, Artificial Sequence
  targeting sequence with CTCN PAM
gcaaagugcugugcaaaugc

SEQ ID NO: 11969 - RNA, 20 nt, Artificial Sequence
  targeting sequence with CTCN PAM
cuugaugcuuccaacaacuc

SEQ ID NO: 11970 - RNA, 20 nt, Artificial Sequence
  targeting sequence with CTCN PAM
cugaagcaggcagcaagggg

SEQ ID NO: 11971 - RNA, 20 nt, Artificial Sequence
  targeting sequence with CTCN PAM
gaagcaggcagcaaggggac

SEQ ID NO: 11972 - RNA, 20 nt, Artificial Sequence
  targeting sequence with CTCN PAM
uaucuccgcucaaagaugag

SEQ ID NO: 11973 - RNA, 20 nt, Artificial Sequence
  targeting sequence with CTCN PAM
gcucaaagaugagaaaacag

SEQ ID NO: 11974 - RNA, 20 nt, Artificial Sequence
  targeting sequence with CTCN PAM
aagaugagaaaacagacuug

SEQ ID NO: 11975 - RNA, 20 nt, Artificial Sequence
  targeting sequence with CTCN PAM
ucuuugagcggagauaagag

SEQ ID NO: 11976 - RNA, 20 nt, Artificial Sequence
  targeting sequence with CTCN PAM
aagucuguuuucucaucuuu

SEQ ID NO: 11977 - RNA, 20 nt, Artificial Sequence
  targeting sequence with CTCN PAM
gccaccaucaccuguaauug

SEQ ID NO: 11978 - RNA, 20 nt, Artificial Sequence
  targeting sequence with CTCN PAM
gacugcagagucuuuguucu

SEQ ID NO: 11979 - RNA, 20 nt, Artificial Sequence
  targeting sequence with CTCN PAM
gcagucagagaaccuggguu

SEQ ID NO: 11980 - RNA, 20 nt, Artificial Sequence
  targeting sequence with CTCN PAM
auuaacauuuuaucuagcuu

SEQ ID NO: 11981 - RNA, 20 nt, Artificial Sequence
  targeting sequence with CTCN PAM
ucauuaaauggaaguggauc

SEQ ID NO: 11982 - RNA, 20 nt, Artificial Sequence
  targeting sequence with CTCN PAM
gccuauucaaccugaagaca

SEQ ID NO: 11983 - RNA, 20 nt, Artificial Sequence
  targeting sequence with CTCN PAM
uccuccuccucagccuauuc

SEQ ID NO: 11984 - RNA, 20 nt, Artificial Sequence
  targeting sequence with CTCN PAM
uccuccuccuccucagccua

SEQ ID NO: 11985 - RNA, 20 nt, Artificial Sequence
  targeting sequence with CTCN PAM
uccuccuccuccuccucagc

SEQ ID NO: 11986 - RNA, 20 nt, Artificial Sequence
  targeting sequence with CTCN PAM
uccuccuccuccuccuccuc

SEQ ID NO: 11987 - RNA, 20 nt, Artificial Sequence
  targeting sequence with CTCN PAM
uccuccuccuccuccuccuc

SEQ ID NO: 11988 - RNA, 20 nt, Artificial Sequence
  targeting sequence with CTCN PAM
uccuccuccuccuccuccuc

SEQ ID NO: 11989 - RNA, 20 nt, Artificial Sequence
  targeting sequence with CTCN PAM
cuggcacagcaucaccaauc

SEQ ID NO: 11990 - RNA, 20 nt, Artificial Sequence
  targeting sequence with CTCN PAM
gucucccuggcacagcauca

SEQ ID NO: 11991 - RNA, 20 nt, Artificial Sequence
  targeting sequence with CTCN PAM
uguaguuaaaacucauguug

SEQ ID NO: 11992 - RNA, 20 nt, Artificial Sequence
  targeting sequence with CTCN PAM
uguuguucaggggucaacug

SEQ ID NO: 11993 - RNA, 20 nt, Artificial Sequence
  targeting sequence with CTCN PAM
uuuaaucuucacaccaacca

SEQ ID NO: 11994 - RNA, 20 nt, Artificial Sequence
  targeting sequence with CTCN PAM
ugguuggugugaagauuaaa

SEQ ID NO: 11995 - RNA, 20 nt, Artificial Sequence
  targeting sequence with CTCN PAM
ucaguagcuuguuuggguca

SEQ ID NO: 11996 - RNA, 20 nt, Artificial Sequence
  targeting sequence with CTCN PAM
gggucagaauuccuagagau

SEQ ID NO: 11997 - RNA, 20 nt, Artificial Sequence
  targeting sequence with CTCN PAM
gagcccaaagcuuaugcuuu

SEQ ID NO: 11998 - RNA, 20 nt, Artificial Sequence
  targeting sequence with CTCN PAM
gagucucugggucagaauuc

SEQ ID NO: 11999 - RNA, 20 nt, Artificial Sequence
  targeting sequence with CTCN PAM
uccugguagguagcagguga

SEQ ID NO: 12000 - RNA, 20 nt, Artificial Sequence
  targeting sequence with CTCN PAM
cucauccugguagguagcag

SEQ ID NO: 12001 - RNA, 20 nt, Artificial Sequence
  targeting sequence with CTCN PAM
ucccucauccugguagguag

SEQ ID NO: 12002 - RNA, 20 nt, Artificial Sequence
  targeting sequence with CTCN PAM
uacuauuuccaucacuccuc

SEQ ID NO: 12003 - RNA, 20 nt, Artificial Sequence
  targeting sequence with CTCN PAM
cccuaauaucuacuauuuca

SEQ ID NO: 12004 - RNA, 20 nt, Artificial Sequence
  targeting sequence with CTCN PAM
ugcuugugaucucagcacuu

SEQ ID NO: 12005 - RNA, 20 nt, Artificial Sequence
  targeting sequence with CTCN PAM
gcacuuugggaagccaaggc

SEQ ID NO: 12006 - RNA, 20 nt, Artificial Sequence
  targeting sequence with CTCN PAM
ugauccacccgccuuggcuu

SEQ ID NO: 12007 - RNA, 20 nt, Artificial Sequence
  targeting sequence with CTCN PAM
guugcccaggcuauagugca

SEQ ID NO: 12008 - RNA, 20 nt, Artificial Sequence
  targeting sequence with CTCN PAM
cucuguugcccaggcuauag

SEQ ID NO: 12009 - RNA, 20 nt, Artificial Sequence
  targeting sequence with CTCN PAM
aaaaaaagguacuuuacaga

SEQ ID NO: 12010 - RNA, 20 nt, Artificial Sequence
  targeting sequence with CTCN PAM
cauaaaaagacucugaggaa

SEQ ID NO: 12011 - RNA, 20 nt, Artificial Sequence
  targeting sequence with CTCN PAM
gaggaagauacuguuccucu

SEQ ID NO: 12012 - RNA, 20 nt, Artificial Sequence
  targeting sequence with CTCN PAM
gagucuuuuuaugggaguca

SEQ ID NO: 12013 - RNA, 20 nt, Artificial Sequence
  targeting sequence with CTCN PAM
guguuucagaugaaggcauu

SEQ ID NO: 12014 - RNA, 20 nt, Artificial Sequence
  targeting sequence with CTCN PAM
augccuucaucugaaacaca

SEQ ID NO: 12015 - RNA, 20 nt, Artificial Sequence
  targeting sequence with CTCN PAM
gagaacagugacuugcccaa

SEQ ID NO: 12016 - RNA, 20 nt, Artificial Sequence
  targeting sequence with CTCN PAM
gagccucaaugccuucaucu

SEQ ID NO: 12017 - RNA, 20 nt, Artificial Sequence
  targeting sequence with CTCN PAM
cuccagucuguuccuucaua

SEQ ID NO: 12018 - RNA, 20 nt, Artificial Sequence
  targeting sequence with CTCN PAM
ccagucuguuccuucauaaa

SEQ ID NO: 12019 - RNA, 20 nt, Artificial Sequence
  targeting sequence with CTCN PAM
agucuguuccuucauaaagc

SEQ ID NO: 12020 - RNA, 20 nt, Artificial Sequence
  targeting sequence with CTCN PAM
uugcuuaaaaccuuucuuug

SEQ ID NO: 12021 - RNA, 20 nt, Artificial Sequence
  targeting sequence with CTCN PAM
uuauccuaaagcaaugggaa

SEQ ID NO: 12022 - RNA, 20 nt, Artificial Sequence
  targeting sequence with CTCN PAM
gcugugucccugagguccca

SEQ ID NO: 12023 - RNA, 20 nt, Artificial Sequence
  targeting sequence with CTCN PAM
gacaugccaggcuuuuccug

SEQ ID NO: 12024 - RNA, 20 nt, Artificial Sequence
  targeting sequence with CTCN PAM
ucucuacaucuggcuaagcu

SEQ ID NO: 12025 - RNA, 20 nt, Artificial Sequence
  targeting sequence with CTCN PAM
cuacaucuggcuaagcucug

SEQ ID NO: 12026 - RNA, 20 nt, Artificial Sequence
  targeting sequence with CTCN PAM
acaucuggcuaagcucugcu

SEQ ID NO: 12027 - RNA, 20 nt, Artificial Sequence
  targeting sequence with CTCN PAM
gcucauccuuuaggucucca

SEQ ID NO: 12028 - RNA, 20 nt, Artificial Sequence
  targeting sequence with CTCN PAM
uccuuuaggucuccacugaa

SEQ ID NO: 12029 - RNA, 20 nt, Artificial Sequence
  targeting sequence with CTCN PAM
acugaaggaucucauccuua

SEQ ID NO: 12030 - RNA, 20 nt, Artificial Sequence
  targeting sequence with CTCN PAM
uccuuagagaaauguucccu

SEQ ID NO: 12031 - RNA, 20 nt, Artificial Sequence
  targeting sequence with CTCN PAM
aaggaugagauccuucagug

SEQ ID NO: 12032 - RNA, 20 nt, Artificial Sequence
  targeting sequence with CTCN PAM
ucuaaauuaggucccccagg

SEQ ID NO: 12033 - RNA, 20 nt, Artificial Sequence
  targeting sequence with CTCN PAM
ugggggaccuaauuuagaug

SEQ ID NO: 12034 - RNA, 20 nt, Artificial Sequence
  targeting sequence with CTCN PAM
uuuugucugacugaaacuac

SEQ ID NO: 12035 - RNA, 20 nt, Artificial Sequence
  targeting sequence with CTCN PAM
aaaauguacuccuuuugucu

SEQ ID NO: 12036 - RNA, 20 nt, Artificial Sequence
  targeting sequence with CTCN PAM
caccuguaaucccagcacuu

SEQ ID NO: 12037 - RNA, 20 nt, Artificial Sequence
  targeting sequence with CTCN PAM
cuauaaaaaaauaaguaucu

SEQ ID NO: 12038 - RNA, 20 nt, Artificial Sequence
  targeting sequence with CTCN PAM
uucauaggauccgugucuua

SEQ ID NO: 12039 - RNA, 20 nt, Artificial Sequence
  targeting sequence with CTCN PAM
cugggaaaugcugguuuaag

SEQ ID NO: 12040 - RNA, 20 nt, Artificial Sequence
  targeting sequence with CTCN PAM
gggaaaugcugguuuaagau

SEQ ID NO: 12041 - RNA, 20 nt, Artificial Sequence
  targeting sequence with CTCN PAM
uaauacuguacaccuaaguu

SEQ ID NO: 12042 - RNA, 20 nt, Artificial Sequence
  targeting sequence with CTCN PAM
accuuccuauaccaaccaca

SEQ ID NO: 12043 - RNA, 20 nt, Artificial Sequence
  targeting sequence with CTCN PAM
ucucaguucaucugacauug

SEQ ID NO: 12044 - RNA, 20 nt, Artificial Sequence
  targeting sequence with CTCN PAM
guucaucugacauuguagac

SEQ ID NO: 12045 - RNA, 20 nt, Artificial Sequence
  targeting sequence with CTCN PAM
gagaauggccuuauauccac

SEQ ID NO: 12046 - RNA, 20 nt, Artificial Sequence
  targeting sequence with CTCN PAM
gagacagggacacuggaaga

SEQ ID NO: 12047 - RNA, 20 nt, Artificial Sequence
  targeting sequence with CTCN PAM
aaacaaaacaaaacaaaaca

SEQ ID NO: 12048 - RNA, 20 nt, Artificial Sequence
  targeting sequence with CTCN PAM
gucucaaaacaaaacaaaac

SEQ ID NO: 12049 - RNA, 20 nt, Artificial Sequence
  targeting sequence with CTCN PAM
gucucccaggcuacagugca

SEQ ID NO: 12050 - RNA, 20 nt, Artificial Sequence
  targeting sequence with CTCN PAM
caggcuacagugcaguggua

SEQ ID NO: 12051 - RNA, 20 nt, Artificial Sequence
  targeting sequence with CTCN PAM
cugcaacuacaaccuuccag

SEQ ID NO: 12052 - RNA, 20 nt, Artificial Sequence
  targeting sequence with CTCN PAM
aauaauccucuuacuucagc

SEQ ID NO: 12053 - RNA, 20 nt, Artificial Sequence
  targeting sequence with CTCN PAM
uacuucagcuucccaaauag

SEQ ID NO: 12054 - RNA, 20 nt, Artificial Sequence
  targeting sequence with CTCN PAM
accaagaaaaaaaaaaauuu

SEQ ID NO: 12055 - RNA, 20 nt, Artificial Sequence
  targeting sequence with CTCN PAM
ugggcucaagcaguccucuc

SEQ ID NO: 12056 - RNA, 20 nt, Artificial Sequence
  targeting sequence with CTCN PAM
agcaguccucucaaaguacu

SEQ ID NO: 12057 - RNA, 20 nt, Artificial Sequence
  targeting sequence with CTCN PAM
caaaguacugggauuacaga

SEQ ID NO: 12058 - RNA, 20 nt, Artificial Sequence
  targeting sequence with CTCN PAM
aaguacugggauuacagaua

SEQ ID NO: 12059 - RNA, 20 nt, Artificial Sequence
  targeting sequence with CTCN PAM
ucuucauaaaaaaaaauaau

SEQ ID NO: 12060 - RNA, 20 nt, Artificial Sequence
  targeting sequence with CTCN PAM
cuaugacuccugagcucaag

SEQ ID NO: 12061 - RNA, 20 nt, Artificial Sequence
  targeting sequence with CTCN PAM
ugagcucaagcaauccuucu

SEQ ID NO: 12062 - RNA, 20 nt, Artificial Sequence
  targeting sequence with CTCN PAM
ggagucauagugagaccucg

SEQ ID NO: 12063 - RNA, 20 nt, Artificial Sequence
  targeting sequence with CTCN PAM
agcaauccuucucccuuggc

SEQ ID NO: 12064 - RNA, 20 nt, Artificial Sequence
  targeting sequence with CTCN PAM
cuuggccgcccaaacugcug

SEQ ID NO: 12065 - RNA, 20 nt, Artificial Sequence
  targeting sequence with CTCN PAM
caccuguaaucccagcaguu

SEQ ID NO: 12066 - RNA, 20 nt, Artificial Sequence
  targeting sequence with CTCN PAM
gcuuccuuccuuuuuaaguc

SEQ ID NO: 12067 - RNA, 20 nt, Artificial Sequence
  targeting sequence with CTCN PAM
uucauucauuccuucaaaaa

SEQ ID NO: 12068 - RNA, 20 nt, Artificial Sequence
  targeting sequence with CTCN PAM
acccguuuuaguccuucacu

SEQ ID NO: 12069 - RNA, 20 nt, Artificial Sequence
  targeting sequence with CTCN PAM
gcuuucauuguugucuaagg

SEQ ID NO: 12070 - RNA, 20 nt, Artificial Sequence
  targeting sequence with CTCN PAM
aucuuccauuucugggccuc

SEQ ID NO: 12071 - RNA, 20 nt, Artificial Sequence
  targeting sequence with CTCN PAM
acaaaacaguaagaguaaca

SEQ ID NO: 12072 - RNA, 20 nt, Artificial Sequence
  targeting sequence with CTCN PAM
uacuguuuuguggaggccca

SEQ ID NO: 12073 - RNA, 20 nt, Artificial Sequence
  targeting sequence with CTCN PAM
caccuuggccuuuaggugcu

SEQ ID NO: 12074 - RNA, 20 nt, Artificial Sequence
  targeting sequence with CTCN PAM
agcaaucaauccucccaccu

SEQ ID NO: 12075 - RNA, 20 nt, Artificial Sequence
  targeting sequence with CTCN PAM
cuuuuggccagguugguuuu

SEQ ID NO: 12076 - RNA, 20 nt, Artificial Sequence
  targeting sequence with CTCN PAM
acaaauaagaaaacaguggg

SEQ ID NO: 12077 - RNA, 20 nt, Artificial Sequence
  targeting sequence with CTCN PAM
cccacuguuuucuuauuugu

SEQ ID NO: 12078 - RNA, 20 nt, Artificial Sequence
  targeting sequence with CTCN PAM
ucacccacuguuuucuuauu

SEQ ID NO: 12079 - RNA, 20 nt, Artificial Sequence
  targeting sequence with CTCN PAM
uucuccucacccacuguuuu

SEQ ID NO: 12080 - RNA, 20 nt, Artificial Sequence
  targeting sequence with CTCN PAM
uaaagaauuaauucuccuuc

SEQ ID NO: 12081 - RNA, 20 nt, Artificial Sequence
  targeting sequence with CTCN PAM
uacuccuaaagaauuaauuc

SEQ ID NO: 12082 - RNA, 20 nt, Artificial Sequence
  targeting sequence with CTCN PAM
ucugcaagugaccaacaaaa

SEQ ID NO: 12083 - RNA, 20 nt, Artificial Sequence
  targeting sequence with CTCN PAM
gacuuuagaccacaugcucu

SEQ ID NO: 12084 - RNA, 20 nt, Artificial Sequence
  targeting sequence with CTCN PAM
uuauuaaaaucuucaguugu

SEQ ID NO: 12085 - RNA, 20 nt, Artificial Sequence
  targeting sequence with CTCN PAM
uacaauccuauuacucauca

SEQ ID NO: 12086 - RNA, 20 nt, Artificial Sequence
  targeting sequence with CTCN PAM
ucaacuggcaucuuguuccu

SEQ ID NO: 12087 - RNA, 20 nt, Artificial Sequence
  targeting sequence with CTCN PAM
agugacuuugguacguucug

SEQ ID NO: 12088 - RNA, 20 nt, Artificial Sequence
  targeting sequence with CTCN PAM
ggauaaaaucaccauauucu

SEQ ID NO: 12089 - RNA, 20 nt, Artificial Sequence
  targeting sequence with CTCN PAM
caggauaaaaucaccauauu

SEQ ID NO: 12090 - RNA, 20 nt, Artificial Sequence
  targeting sequence with CTCN PAM
cucaggauaaaaucaccaua

SEQ ID NO: 12091 - RNA, 20 nt, Artificial Sequence
  targeting sequence with CTCN PAM
accuucaauggcugagggga

SEQ ID NO: 12092 - RNA, 20 nt, Artificial Sequence
  targeting sequence with CTCN PAM
gccauugaagguagagaagu

SEQ ID NO: 12093 - RNA, 20 nt, Artificial Sequence
  targeting sequence with CTCN PAM
ccucagccauugaagguaga

SEQ ID NO: 12094 - RNA, 20 nt, Artificial Sequence
  targeting sequence with CTCN PAM
gguaagacaucagagacuac

SEQ ID NO: 12095 - RNA, 20 nt, Artificial Sequence
  targeting sequence with CTCN PAM
gaugucuuaccagaguaaag

SEQ ID NO: 12096 - RNA, 20 nt, Artificial Sequence
  targeting sequence with CTCN PAM
caaucuuguuaccauuuccu

SEQ ID NO: 12097 - RNA, 20 nt, Artificial Sequence
  targeting sequence with CTCN PAM
gggaagccuucccugacuca

SEQ ID NO: 12098 - RNA, 20 nt, Artificial Sequence
  targeting sequence with CTCN PAM
cccuggcagagacagugcag

SEQ ID NO: 12099 - RNA, 20 nt, Artificial Sequence
  targeting sequence with CTCN PAM
gccagggugagucagggaag

SEQ ID NO: 12100 - RNA, 20 nt, Artificial Sequence
  targeting sequence with CTCN PAM
ccuuuguauugacccacauc

SEQ ID NO: 12101 - RNA, 20 nt, Artificial Sequence
  targeting sequence with CTCN PAM
cugaggggcugaacaccuug

SEQ ID NO: 12102 - RNA, 20 nt, Artificial Sequence
  targeting sequence with CTCN PAM
gggaggacagcuacagccac

SEQ ID NO: 12103 - RNA, 20 nt, Artificial Sequence
  targeting sequence with CTCN PAM
agguguucagccccucaggg

SEQ ID NO: 12104 - RNA, 20 nt, Artificial Sequence
  targeting sequence with CTCN PAM
ucaagguguucagccccuca

SEQ ID NO: 12105 - RNA, 20 nt, Artificial Sequence
  targeting sequence with CTCN PAM
uuugugccaguacuacacca

SEQ ID NO: 12106 - RNA, 20 nt, Artificial Sequence
  targeting sequence with CTCN PAM
acagacauuuuacugacacc

SEQ ID NO: 12107 - RNA, 20 nt, Artificial Sequence
  targeting sequence with CTCN PAM
cuccacagacauuuuacuga

SEQ ID NO: 12108 - RNA, 20 nt, Artificial Sequence
  targeting sequence with CTCN PAM
cuuccucccuccacagacau

SEQ ID NO: 12109 - RNA, 20 nt, Artificial Sequence
  targeting sequence with CTCN PAM
gcccaauuucacucccuucc

SEQ ID NO: 12110 - RNA, 20 nt, Artificial Sequence
  targeting sequence with CTCN PAM
aucagucuguguucguugcu

SEQ ID NO: 12111 - RNA, 20 nt, Artificial Sequence
  targeting sequence with CTCN PAM
ucuagugacuucauuguauc

SEQ ID NO: 12112 - RNA, 20 nt, Artificial Sequence
  targeting sequence with CTCN PAM
ucaucuagugacuucauugu

SEQ ID NO: 12113 - RNA, 20 nt, Artificial Sequence
  targeting sequence with CTCN PAM
gacuccucaucuagugacuu

SEQ ID NO: 12114 - RNA, 20 nt, Artificial Sequence
  targeting sequence with CTCN PAM
caguguuccaguucccuuau

SEQ ID NO: 12115 - RNA, 20 nt, Artificial Sequence
  targeting sequence with CTCN PAM
guguuccaguucccuuaucu

SEQ ID NO: 12116 - RNA, 20 nt, Artificial Sequence
  targeting sequence with CTCN PAM
uuuuagauaagggaacugga

SEQ ID NO: 12117 - RNA, 20 nt, Artificial Sequence
  targeting sequence with CTCN PAM
cugugucucacugauacggu

SEQ ID NO: 12118 - RNA, 20 nt, Artificial Sequence
  targeting sequence with CTCN PAM
cugauacgguucugguucug

SEQ ID NO: 12119 - RNA, 20 nt, Artificial Sequence
  targeting sequence with CTCN PAM
gaaccagaaccguaucagug

SEQ ID NO: 12120 - RNA, 20 nt, Artificial Sequence
  targeting sequence with CTCN PAM
uuugaaccucagaaccagaa

SEQ ID NO: 12121 - RNA, 20 nt, Artificial Sequence
  targeting sequence with CTCN PAM
cuuuugaaccucagaaccag

SEQ ID NO: 12122 - RNA, 20 nt, Artificial Sequence
  targeting sequence with CTCN PAM
auguauuuauacaauuggcu

SEQ ID NO: 12123 - RNA, 20 nt, Artificial Sequence
  targeting sequence with CTCN PAM
aggagcuuguggucuuagga

SEQ ID NO: 12124 - RNA, 20 nt, Artificial Sequence
  targeting sequence with CTCN PAM
uugaggguagggauucuauu

SEQ ID NO: 12125 - RNA, 20 nt, Artificial Sequence
  targeting sequence with CTCN PAM
uaagaccacaagcuccuuga

SEQ ID NO: 12126 - RNA, 20 nt, Artificial Sequence
  targeting sequence with CTCN PAM
aauagaaauucauuucuaau

SEQ ID NO: 12127 - RNA, 20 nt, Artificial Sequence
  targeting sequence with CTCN PAM
ggggcugucauaaagcucaa

SEQ ID NO: 12128 - RNA, 20 nt, Artificial Sequence
  targeting sequence with CTCN PAM
uucccacccuacugaugaaa

SEQ ID NO: 12129 - RNA, 20 nt, Artificial Sequence
  targeting sequence with CTCN PAM
uuuucaucaguaggguggga

SEQ ID NO: 12130 - RNA, 20 nt, Artificial Sequence
  targeting sequence with CTCN PAM
accucuuuuucaucaguagg

SEQ ID NO: 12131 - RNA, 20 nt, Artificial Sequence
  targeting sequence with CTCN PAM
acuuacuagcuaagggaccu

SEQ ID NO: 12132 - RNA, 20 nt, Artificial Sequence
  targeting sequence with CTCN PAM
guaugcaaucaccuggucua

SEQ ID NO: 12133 - RNA, 20 nt, Artificial Sequence
  targeting sequence with CTCN PAM
gcuaagcacugcugaaggag

SEQ ID NO: 12134 - RNA, 20 nt, Artificial Sequence
  targeting sequence with CTCN PAM
uucagcagugcuuagcagag

SEQ ID NO: 12135 - RNA, 20 nt, Artificial Sequence
  targeting sequence with CTCN PAM
ugggccuccuucagcagugc

SEQ ID NO: 12136 - RNA, 20 nt, Artificial Sequence
  targeting sequence with CTCN PAM
uuccuccugggccuccuuca

SEQ ID NO: 12137 - RNA, 20 nt, Artificial Sequence
  targeting sequence with CTCN PAM
aggcaggcuuaguggaacac

SEQ ID NO: 12138 - RNA, 20 nt, Artificial Sequence
  targeting sequence with CTCN PAM
aaacauuuugacgugugcac

SEQ ID NO: 12139 - RNA, 20 nt, Artificial Sequence
  targeting sequence with CTCN PAM
agugcacaaauacauggcca

SEQ ID NO: 12140 - RNA, 20 nt, Artificial Sequence
  targeting sequence with CTCN PAM
uagcaaguguaugucuagac

SEQ ID NO: 12141 - RNA, 20 nt, Artificial Sequence
  targeting sequence with CTCN PAM
gugccucauagcaaguguau

SEQ ID NO: 12142 - RNA, 20 nt, Artificial Sequence
  targeting sequence with CTCN PAM
ccccugucccagaugcccug

SEQ ID NO: 12143 - RNA, 20 nt, Artificial Sequence
  targeting sequence with CTCN PAM
cauggcacacuggucaccua

SEQ ID NO: 12144 - RNA, 20 nt, Artificial Sequence
  targeting sequence with CTCN PAM
cccauggcacacuggucacc

SEQ ID NO: 12145 - RNA, 20 nt, Artificial Sequence
  targeting sequence with CTCN PAM
gauagagucauguguuguga

SEQ ID NO: 12146 - RNA, 20 nt, Artificial Sequence
  targeting sequence with CTCN PAM
aucugagcugugccucuccc

SEQ ID NO: 12147 - RNA, 20 nt, Artificial Sequence
  targeting sequence with CTCN PAM
aucacaacacaugacucuau

SEQ ID NO: 12148 - RNA, 20 nt, Artificial Sequence
  targeting sequence with CTCN PAM
gguugcagugucaaaguuau

SEQ ID NO: 12149 - RNA, 20 nt, Artificial Sequence
  targeting sequence with CTCN PAM
aagaaaugacaguuucauug

SEQ ID NO: 12150 - RNA, 20 nt, Artificial Sequence
  targeting sequence with CTCN PAM
caaagaaaugacaguuucau

SEQ ID NO: 12151 - RNA, 20 nt, Artificial Sequence
  targeting sequence with CTCN PAM
guuuccuggucuugauauug

SEQ ID NO: 12152 - RNA, 20 nt, Artificial Sequence
  targeting sequence with CTCN PAM
ccuuaccuccaguuaucucc

SEQ ID NO: 12153 - RNA, 20 nt, Artificial Sequence
  targeting sequence with CTCN PAM
aguuaucuccaaacccuggu

SEQ ID NO: 12154 - RNA, 20 nt, Artificial Sequence
  targeting sequence with CTCN PAM
aaacccugguaaccacaaau

SEQ ID NO: 12155 - RNA, 20 nt, Artificial Sequence
  targeting sequence with CTCN PAM
auuucuauaauuuugucauu

SEQ ID NO: 12156 - RNA, 20 nt, Artificial Sequence
  targeting sequence with CTCN PAM
aaaggucauauacuguacga

SEQ ID NO: 12157 - RNA, 20 nt, Artificial Sequence
  targeting sequence with CTCN PAM
aggauuuuaugcugaaugaa

SEQ ID NO: 12158 - RNA, 20 nt, Artificial Sequence
  targeting sequence with CTCN PAM
ugaacagaagucugucucca

SEQ ID NO: 12159 - RNA, 20 nt, Artificial Sequence
  targeting sequence with CTCN PAM
aaacacaaaucaagcagcaa

SEQ ID NO: 12160 - RNA, 20 nt, Artificial Sequence
  targeting sequence with CTCN PAM
gacgauaagauuuauguucc

SEQ ID NO: 12161 - RNA, 20 nt, Artificial Sequence
  targeting sequence with CTCN PAM
caaaauccaauuauuucaug

SEQ ID NO: 12162 - RNA, 20 nt, Artificial Sequence
  targeting sequence with CTCN PAM
aaauccaauuauuucaugca

SEQ ID NO: 12163 - RNA, 20 nt, Artificial Sequence
  targeting sequence with CTCN PAM
gcugcaugaaauaauuggau

SEQ ID NO: 12164 - RNA, 20 nt, Artificial Sequence
  targeting sequence with CTCN PAM
ucgaugggaaagacuugugc

SEQ ID NO: 12165 - RNA, 20 nt, Artificial Sequence
  targeting sequence with CTCN PAM
augggaaagacuugugccuu

SEQ ID NO: 12166 - RNA, 20 nt, Artificial Sequence
  targeting sequence with CTCN PAM
uuugcuucaugaucaaaggc

SEQ ID NO: 12167 - RNA, 20 nt, Artificial Sequence
  targeting sequence with CTCN PAM
acauccagcuauacugagug

SEQ ID NO: 12168 - RNA, 20 nt, Artificial Sequence
  targeting sequence with CTCN PAM
guauagcuggauguugaggc

SEQ ID NO: 12169 - RNA, 20 nt, Artificial Sequence
  targeting sequence with CTCN PAM
acucaguauagcuggauguu

SEQ ID NO: 12170 - RNA, 20 nt, Artificial Sequence
  targeting sequence with CTCN PAM
cauuuucaacaagccuccac

SEQ ID NO: 12171 - RNA, 20 nt, Artificial Sequence
  targeting sequence with CTCN PAM
cacacuuugaugcuagaccu

SEQ ID NO: 12172 - RNA, 20 nt, Artificial Sequence
  targeting sequence with CTCN PAM
cauugacaggccaugugacc

SEQ ID NO: 12173 - RNA, 20 nt, Artificial Sequence
  targeting sequence with CTCN PAM
uugacaggccaugugaccuc

SEQ ID NO: 12174 - RNA, 20 nt, Artificial Sequence
  targeting sequence with CTCN PAM
ggaaaguuacuaaaucuuuc

SEQ ID NO: 12175 - RNA, 20 nt, Artificial Sequence
  targeting sequence with CTCN PAM
gaaagauuuaguaacuuucc

SEQ ID NO: 12176 - RNA, 20 nt, Artificial Sequence
  targeting sequence with CTCN PAM
agcucagaaagauuuaguaa

SEQ ID NO: 12177 - RNA, 20 nt, Artificial Sequence
  targeting sequence with CTCN PAM
ucugacagauagggauaaaa

SEQ ID NO: 12178 - RNA, 20 nt, Artificial Sequence
  targeting sequence with CTCN PAM
ucaagucaguauuuuuaucc

SEQ ID NO: 12179 - RNA, 20 nt, Artificial Sequence
  targeting sequence with CTCN PAM
ugaguguaaagcgugcagga

SEQ ID NO: 12180 - RNA, 20 nt, Artificial Sequence
  targeting sequence with CTCN PAM
ugaguuugugugcauuucac

SEQ ID NO: 12181 - RNA, 20 nt, Artificial Sequence
  targeting sequence with CTCN PAM
aaaugguagcuauucuugcu

SEQ ID NO: 12182 - RNA, 20 nt, Artificial Sequence
  targeting sequence with CTCN PAM
uagaagcugaacagcaagaa

SEQ ID NO: 12183 - RNA, 20 nt, Artificial Sequence
  targeting sequence with CTCN PAM
acagaugcugaacggaaggg

SEQ ID NO: 12184 - RNA, 20 nt, Artificial Sequence
  targeting sequence with CTCN PAM
uuaagugggaggggauugag

SEQ ID NO: 12185 - RNA, 20 nt, Artificial Sequence
  targeting sequence with CTCN PAM
cacuuaaagagcaccuuaag

SEQ ID NO: 12186 - RNA, 20 nt, Artificial Sequence
  targeting sequence with CTCN PAM
auccccucccacuuaaagag

SEQ ID NO: 12187 - RNA, 20 nt, Artificial Sequence
  targeting sequence with CTCN PAM
aucucaauccccucccacuu

SEQ ID NO: 12188 - RNA, 20 nt, Artificial Sequence
  targeting sequence with CTCN PAM
ccaucucaauccccucccac

SEQ ID NO: 12189 - RNA, 20 nt, Artificial Sequence
  targeting sequence with CTCN PAM
gggccagccaccacuuccca

SEQ ID NO: 12190 - RNA, 20 nt, Artificial Sequence
  targeting sequence with CTCN PAM
augacagcccuuagcuugug

SEQ ID NO: 12191 - RNA, 20 nt, Artificial Sequence
  targeting sequence with CTCN PAM
guacauaccucuaugacagc

SEQ ID NO: 12192 - RNA, 20 nt, Artificial Sequence
  targeting sequence with CTCN PAM
cccagcccucuguacauacc

SEQ ID NO: 12193 - RNA, 20 nt, Artificial Sequence
  targeting sequence with CTCN PAM
gaaaaaggcaccaaauggug

SEQ ID NO: 12194 - RNA, 20 nt, Artificial Sequence
  targeting sequence with CTCN PAM
ccauuuuuguuccguaugcu

SEQ ID NO: 12195 - RNA, 20 nt, Artificial Sequence
  targeting sequence with CTCN PAM
ucgccauuuuuguuccguau

SEQ ID NO: 12196 - RNA, 20 nt, Artificial Sequence
  targeting sequence with CTCN PAM
aucuuuacuuucuccucgcc

SEQ ID NO: 12197 - RNA, 20 nt, Artificial Sequence
  targeting sequence with CTCN PAM
cucucgccaauaugguccau

SEQ ID NO: 12198 - RNA, 20 nt, Artificial Sequence
  targeting sequence with CTCN PAM
cgccaauaugguccaucugc

SEQ ID NO: 12199 - RNA, 20 nt, Artificial Sequence
  targeting sequence with CTCN PAM
ccaauaugguccaucugcug

SEQ ID NO: 12200 - RNA, 20 nt, Artificial Sequence
  targeting sequence with CTCN PAM
uaaaguuguccuccuucuag

SEQ ID NO: 12201 - RNA, 20 nt, Artificial Sequence
  targeting sequence with CTCN PAM
uucuagaacaaacaccauca

SEQ ID NO: 12202 - RNA, 20 nt, Artificial Sequence
  targeting sequence with CTCN PAM
gguagcgggacuauuaaaaa

SEQ ID NO: 12203 - RNA, 20 nt, Artificial Sequence
  targeting sequence with CTCN PAM
uaauaaauuccauacauucu

SEQ ID NO: 12204 - RNA, 20 nt, Artificial Sequence
  targeting sequence with CTCN PAM
ucaaaaguugaguuuaggaa

SEQ ID NO: 12205 - RNA, 20 nt, Artificial Sequence
  targeting sequence with CTCN PAM
aaaguugaguuuaggaauga

SEQ ID NO: 12206 - RNA, 20 nt, Artificial Sequence
  targeting sequence with CTCN PAM
acuuuugaggaggcucuuaa

SEQ ID NO: 12207 - RNA, 20 nt, Artificial Sequence
  targeting sequence with CTCN PAM
ucugcuuugcuaaaaugucc

SEQ ID NO: 12208 - RNA, 20 nt, Artificial Sequence
  targeting sequence with CTCN PAM
acuauugauucauaaggaaa

SEQ ID NO: 12209 - RNA, 20 nt, Artificial Sequence
  targeting sequence with CTCN PAM
uugcuguggcuuuauuuuug

SEQ ID NO: 12210 - RNA, 20 nt, Artificial Sequence
  targeting sequence with CTCN PAM
aaguuugggcagaauaugug

SEQ ID NO: 12211 - RNA, 20 nt, Artificial Sequence
  targeting sequence with CTCN PAM
ugaaaaagcuauuuauuaac

SEQ ID NO: 12212 - RNA, 20 nt, Artificial Sequence
  targeting sequence with CTCN PAM
aggcuuuagggacgucugua

SEQ ID NO: 12213 - RNA, 20 nt, Artificial Sequence
  targeting sequence with CTCN PAM
aagucacauggacauagaaa

SEQ ID NO: 12214 - RNA, 20 nt, Artificial Sequence
  targeting sequence with CTCN PAM
caaagucacauggacauaga

SEQ ID NO: 12215 - RNA, 20 nt, Artificial Sequence
  targeting sequence with CTCN PAM
uuuuuuuuuuuuuuuuuuuu

SEQ ID NO: 12216 - RNA, 20 nt, Artificial Sequence
  targeting sequence with CTCN PAM
guaaaggauacugaugguuu

SEQ ID NO: 12217 - RNA, 20 nt, Artificial Sequence
  targeting sequence with CTCN PAM
gaggguaaacgaaagguccu

SEQ ID NO: 12218 - RNA, 20 nt, Artificial Sequence
  targeting sequence with CTCN PAM
gaggacucuguaaaggauac

SEQ ID NO: 12219 - RNA, 20 nt, Artificial Sequence
  targeting sequence with CTCN PAM
augucauuuuacagaugguu

SEQ ID NO: 12220 - RNA, 20 nt, Artificial Sequence
  targeting sequence with CTCN PAM
ggggcaggcuaauggccuuu

SEQ ID NO: 12221 - RNA, 20 nt, Artificial Sequence
  targeting sequence with CTCN PAM
gcagccacaaaucaaacagc

SEQ ID NO: 12222 - RNA, 20 nt, Artificial Sequence
  targeting sequence with CTCN PAM
aggcuaccauuuuuaauuca

SEQ ID NO: 12223 - RNA, 20 nt, Artificial Sequence
  targeting sequence with CTCN PAM
ugaauuaaaaaugguagccu

SEQ ID NO: 12224 - RNA, 20 nt, Artificial Sequence
  targeting sequence with CTCN PAM
ugcuucucaugaauuaaaaa

SEQ ID NO: 12225 - RNA, 20 nt, Artificial Sequence
  targeting sequence with CTCN PAM
uccagguaggguucagaggc

SEQ ID NO: 12226 - RNA, 20 nt, Artificial Sequence
  targeting sequence with CTCN PAM
agguaggguucagaggcucc

SEQ ID NO: 12227 - RNA, 20 nt, Artificial Sequence
  targeting sequence with CTCN PAM
gaacccuaccuggaggagga

SEQ ID NO: 12228 - RNA, 20 nt, Artificial Sequence
  targeting sequence with CTCN PAM
uuuuauuuuuuauuuuuauu

SEQ ID NO: 12229 - RNA, 20 nt, Artificial Sequence
  targeting sequence with CTCN PAM
caccucagccucccaaguag

SEQ ID NO: 12230 - RNA, 20 nt, Artificial Sequence
  targeting sequence with CTCN PAM
ccucagccucccaaguagcu

SEQ ID NO: 12231 - RNA, 20 nt, Artificial Sequence
  targeting sequence with CTCN PAM
gccucccaaguagcuuggau

SEQ ID NO: 12232 - RNA, 20 nt, Artificial Sequence
  targeting sequence with CTCN PAM
caaguagcuuggaucacagg

SEQ ID NO: 12233 - RNA, 20 nt, Artificial Sequence
  targeting sequence with CTCN PAM
accaaaaauacaaaaaauua

SEQ ID NO: 12234 - RNA, 20 nt, Artificial Sequence
  targeting sequence with CTCN PAM
ugaucucgagcgauucacuu

SEQ ID NO: 12235 - RNA, 20 nt, Artificial Sequence
  targeting sequence with CTCN PAM
agcgauucacuugccucggc

SEQ ID NO: 12236 - RNA, 20 nt, Artificial Sequence
  targeting sequence with CTCN PAM
agaucaggaguucaagacca

SEQ ID NO: 12237 - RNA, 20 nt, Artificial Sequence
  targeting sequence with CTCN PAM
gccuccugaagugcugggau

SEQ ID NO: 12238 - RNA, 20 nt, Artificial Sequence
  targeting sequence with CTCN PAM
ugaagugcugggauuacagg

SEQ ID NO: 12239 - RNA, 20 nt, Artificial Sequence
  targeting sequence with CTCN PAM
cgccuguaaucccagcacuu

SEQ ID NO: 12240 - RNA, 20 nt, Artificial Sequence
  targeting sequence with CTCN PAM
uugccaggauuuuaaauuau

SEQ ID NO: 12241 - RNA, 20 nt, Artificial Sequence
  targeting sequence with CTCN PAM
caucggcuguagacaguaag

SEQ ID NO: 12242 - RNA, 20 nt, Artificial Sequence
  targeting sequence with CTCN PAM
cccaucggcuguagacagua

SEQ ID NO: 12243 - RNA, 20 nt, Artificial Sequence
  targeting sequence with CTCN PAM
guucauccagaaacucuccc

SEQ ID NO: 12244 - RNA, 20 nt, Artificial Sequence
  targeting sequence with CTCN PAM
cuguucauccagaaacucuc

SEQ ID NO: 12245 - RNA, 20 nt, Artificial Sequence
  targeting sequence with CTCN PAM
uucucucuguucauccagaa

SEQ ID NO: 12246 - RNA, 20 nt, Artificial Sequence
  targeting sequence with CTCN PAM
gcauccucauucucucuguu

SEQ ID NO: 12247 - RNA, 20 nt, Artificial Sequence
  targeting sequence with CTCN PAM
gaagucagcaguguacagua

SEQ ID NO: 12248 - RNA, 20 nt, Artificial Sequence
  targeting sequence with CTCN PAM
cuacccugacuacuguacac

SEQ ID NO: 12249 - RNA, 20 nt, Artificial Sequence
  targeting sequence with CTCN PAM
gccucacuacccugacuacu

SEQ ID NO: 12250 - RNA, 20 nt, Artificial Sequence
  targeting sequence with CTCN PAM
ucugccucacuacccugacu

SEQ ID NO: 12251 - RNA, 20 nt, Artificial Sequence
  targeting sequence with CTCN PAM
gguucuuccuccucugccuc

SEQ ID NO: 12252 - RNA, 20 nt, Artificial Sequence
  targeting sequence with CTCN PAM
uccucugguucuuccuccuc

SEQ ID NO: 12253 - RNA, 20 nt, Artificial Sequence
  targeting sequence with CTCN PAM
caaguugucgucccugggac

SEQ ID NO: 12254 - RNA, 20 nt, Artificial Sequence
  targeting sequence with CTCN PAM
cugggacacacucacaaguu

SEQ ID NO: 12255 - RNA, 20 nt, Artificial Sequence
  targeting sequence with CTCN PAM
caggaucacuuuauacccac

SEQ ID NO: 12256 - RNA, 20 nt, Artificial Sequence
  targeting sequence with CTCN PAM
uuuagucuuuucaguauuuc

SEQ ID NO: 12257 - RNA, 20 nt, Artificial Sequence
  targeting sequence with CTCN PAM
ucaguugagauugccuguag

SEQ ID NO: 12258 - RNA, 20 nt, Artificial Sequence
  targeting sequence with CTCN PAM
acugaagagaagaaugacua

SEQ ID NO: 12259 - RNA, 20 nt, Artificial Sequence
  targeting sequence with CTCN PAM
ggccugcccauguuuucccu

SEQ ID NO: 12260 - RNA, 20 nt, Artificial Sequence
  targeting sequence with CTCN PAM
guuuggcaguagagaucuag

SEQ ID NO: 12261 - RNA, 20 nt, Artificial Sequence
  targeting sequence with CTCN PAM
acugccaaacugagauaucc

SEQ ID NO: 12262 - RNA, 20 nt, Artificial Sequence
  targeting sequence with CTCN PAM
agcuagaucucuacugccaa

SEQ ID NO: 12263 - RNA, 20 nt, Artificial Sequence
  targeting sequence with CTCN PAM
gguacuauguaaaacaguuu

SEQ ID NO: 12264 - RNA, 20 nt, Artificial Sequence
  targeting sequence with CTCN PAM
gggugggauucuuccaagga

SEQ ID NO: 12265 - RNA, 20 nt, Artificial Sequence
  targeting sequence with CTCN PAM
uuuacugguccccacuuccc

SEQ ID NO: 12266 - RNA, 20 nt, Artificial Sequence
  targeting sequence with CTCN PAM
gugccuuugauuguuucaac

SEQ ID NO: 12267 - RNA, 20 nt, Artificial Sequence
  targeting sequence with CTCN PAM
uguugaaacaaucaaaggca

SEQ ID NO: 12268 - RNA, 20 nt, Artificial Sequence
  targeting sequence with CTCN PAM
uggggcaguaggauucuuua

SEQ ID NO: 12269 - RNA, 20 nt, Artificial Sequence
  targeting sequence with CTCN PAM
cagggacugagcccagccca

SEQ ID NO: 12270 - RNA, 20 nt, Artificial Sequence
  targeting sequence with CTCN PAM
gucccugugagauggaucag

SEQ ID NO: 12271 - RNA, 20 nt, Artificial Sequence
  targeting sequence with CTCN PAM
gggcugggcucagucccugu

SEQ ID NO: 12272 - RNA, 20 nt, Artificial Sequence
  targeting sequence with CTCN PAM
ccaagagggcucacuggugg

SEQ ID NO: 12273 - RNA, 20 nt, Artificial Sequence
  targeting sequence with CTCN PAM
uggggaggccacauauggcu

SEQ ID NO: 12274 - RNA, 20 nt, Artificial Sequence
  targeting sequence with CTCN PAM
cuggugggcugggcuccugg

SEQ ID NO: 12275 - RNA, 20 nt, Artificial Sequence
  targeting sequence with CTCN PAM
uggauuguguuuggacuuug

SEQ ID NO: 12276 - RNA, 20 nt, Artificial Sequence
  targeting sequence with CTCN PAM
cucauuaacaucccucucgg

SEQ ID NO: 12277 - RNA, 20 nt, Artificial Sequence
  targeting sequence with CTCN PAM
uuaacaucccucucggucuu

SEQ ID NO: 12278 - RNA, 20 nt, Artificial Sequence
  targeting sequence with CTCN PAM
cggucuuugucucuuuuccc

SEQ ID NO: 12279 - RNA, 20 nt, Artificial Sequence
  targeting sequence with CTCN PAM
gucuuugucucuuuucccuu

SEQ ID NO: 12280 - RNA, 20 nt, Artificial Sequence
  targeting sequence with CTCN PAM
uuucccuuaguuuuggguua

SEQ ID NO: 12281 - RNA, 20 nt, Artificial Sequence
  targeting sequence with CTCN PAM
uggcuggguuuuacaaacaa

SEQ ID NO: 12282 - RNA, 20 nt, Artificial Sequence
  targeting sequence with CTCN PAM
uuguuuauuaauuccagcuu

SEQ ID NO: 12283 - RNA, 20 nt, Artificial Sequence
  targeting sequence with CTCN PAM
agggcuaggaaugcuuuucu

SEQ ID NO: 12284 - RNA, 20 nt, Artificial Sequence
  targeting sequence with CTCN PAM
gucacaaaaaaaaaaaagaa

SEQ ID NO: 12285 - RNA, 20 nt, Artificial Sequence
  targeting sequence with CTCN PAM
gucaccugggcuggagugca

SEQ ID NO: 12286 - RNA, 20 nt, Artificial Sequence
  targeting sequence with CTCN PAM
agcccaggugacagagccag

SEQ ID NO: 12287 - RNA, 20 nt, Artificial Sequence
  targeting sequence with CTCN PAM
gcucacugcaacuuccgccu

SEQ ID NO: 12288 - RNA, 20 nt, Artificial Sequence
  targeting sequence with CTCN PAM
cugcaacuuccgccucccgg

SEQ ID NO: 12289 - RNA, 20 nt, Artificial Sequence
  targeting sequence with CTCN PAM
cggguucuaagcgauucuug

SEQ ID NO: 12290 - RNA, 20 nt, Artificial Sequence
  targeting sequence with CTCN PAM
gccucuggaauagcugggau

SEQ ID NO: 12291 - RNA, 20 nt, Artificial Sequence
  targeting sequence with CTCN PAM
ggaauagcugggauuacaga

SEQ ID NO: 12292 - RNA, 20 nt, Artificial Sequence
  targeting sequence with CTCN PAM
ugaccucaggugauccaccu

SEQ ID NO: 12293 - RNA, 20 nt, Artificial Sequence
  targeting sequence with CTCN PAM
ggugauccaccugccucaac

SEQ ID NO: 12294 - RNA, 20 nt, Artificial Sequence
  targeting sequence with CTCN PAM
accucccaaagugcuggaau

SEQ ID NO: 12295 - RNA, 20 nt, Artificial Sequence
  targeting sequence with CTCN PAM
caaagugcuggaauuacaag

SEQ ID NO: 12296 - RNA, 20 nt, Artificial Sequence
  targeting sequence with CTCN PAM
cgcuuguaauuccagcacuu

SEQ ID NO: 12297 - RNA, 20 nt, Artificial Sequence
  targeting sequence with CTCN PAM
ugaacuagauucccagguag

SEQ ID NO: 12298 - RNA, 20 nt, Artificial Sequence
  targeting sequence with CTCN PAM
ccagccucaggcaagggagu

SEQ ID NO: 12299 - RNA, 20 nt, Artificial Sequence
  targeting sequence with CTCN PAM
agccucaggcaagggaguuu

SEQ ID NO: 12300 - RNA, 20 nt, Artificial Sequence
  targeting sequence with CTCN PAM
ggcaagggaguuucuccugu

SEQ ID NO: 12301 - RNA, 20 nt, Artificial Sequence
  targeting sequence with CTCN PAM
cuugccugaggcuggagagc

SEQ ID NO: 12302 - RNA, 20 nt, Artificial Sequence
  targeting sequence with CTCN PAM
ugugugcugguccuacaguc

SEQ ID NO: 12303 - RNA, 20 nt, Artificial Sequence
  targeting sequence with CTCN PAM
guuucaaagacaguuguuug

SEQ ID NO: 12304 - RNA, 20 nt, Artificial Sequence
  targeting sequence with CTCN PAM
gaaaacaaacaacugucuuu

SEQ ID NO: 12305 - RNA, 20 nt, Artificial Sequence
  targeting sequence with CTCN PAM
uuuuugaaaauuagauucag

SEQ ID NO: 12306 - RNA, 20 nt, Artificial Sequence
  targeting sequence with CTCN PAM
ugcaggcggggguccuugca

SEQ ID NO: 12307 - RNA, 20 nt, Artificial Sequence
  targeting sequence with CTCN PAM
uccugaagaaagaaaauuaa

SEQ ID NO: 12308 - RNA, 20 nt, Artificial Sequence
  targeting sequence with CTCN PAM
ugcagcacaaagacauuuuu

SEQ ID NO: 12309 - RNA, 20 nt, Artificial Sequence
  targeting sequence with CTCN PAM
gccaucuccccacauuuucu

SEQ ID NO: 12310 - RNA, 20 nt, Artificial Sequence
  targeting sequence with CTCN PAM
ccacauuuucuaguauguaa

SEQ ID NO: 12311 - RNA, 20 nt, Artificial Sequence
  targeting sequence with CTCN PAM
uacauacuagaaaauguggg

SEQ ID NO: 12312 - RNA, 20 nt, Artificial Sequence
  targeting sequence with CTCN PAM
auauugcagccuugccuauc

SEQ ID NO: 12313 - RNA, 20 nt, Artificial Sequence
  targeting sequence with CTCN PAM
ccaguaagcucugaaaugag

SEQ ID NO: 12314 - RNA, 20 nt, Artificial Sequence
  targeting sequence with CTCN PAM
gaaaugagagguuuaucuuc

SEQ ID NO: 12315 - RNA, 20 nt, Artificial Sequence
  targeting sequence with CTCN PAM
uuucagagcuuacuggggag

SEQ ID NO: 12316 - RNA, 20 nt, Artificial Sequence
  targeting sequence with CTCN PAM
cauuucagagcuuacugggg

SEQ ID NO: 12317 - RNA, 20 nt, Artificial Sequence
  targeting sequence with CTCN PAM
gugaaacagcagaucccagg

SEQ ID NO: 12318 - RNA, 20 nt, Artificial Sequence
  targeting sequence with CTCN PAM
acucugcuucaucccguaag

SEQ ID NO: 12319 - RNA, 20 nt, Artificial Sequence
  targeting sequence with CTCN PAM
gcuucaucccguaagacuga

SEQ ID NO: 12320 - RNA, 20 nt, Artificial Sequence
  targeting sequence with CTCN PAM
gguugccaaauguuguacag

SEQ ID NO: 12321 - RNA, 20 nt, Artificial Sequence
  targeting sequence with CTCN PAM
aagggcuuaaacaacaggaa

SEQ ID NO: 12322 - RNA, 20 nt, Artificial Sequence
  targeting sequence with CTCN PAM
ucagcaggcuguggcccuuc

SEQ ID NO: 12323 - RNA, 20 nt, Artificial Sequence
  targeting sequence with CTCN PAM
uuuaucuucuguugauuaga

SEQ ID NO: 12324 - RNA, 20 nt, Artificial Sequence
  targeting sequence with CTCN PAM
aaucaacagaagauaaaaga

SEQ ID NO: 12325 - RNA, 20 nt, Artificial Sequence
  targeting sequence with CTCN PAM
cuaaucaacagaagauaaaa

SEQ ID NO: 12326 - RNA, 20 nt, Artificial Sequence
  targeting sequence with CTCN PAM
gcugguagaaggaaacuuuc

SEQ ID NO: 12327 - RNA, 20 nt, Artificial Sequence
  targeting sequence with CTCN PAM
gaaaaugaaaauauaacagg

SEQ ID NO: 12328 - RNA, 20 nt, Artificial Sequence
  targeting sequence with CTCN PAM
aacaagaccucccaucucua

SEQ ID NO: 12329 - RNA, 20 nt, Artificial Sequence
  targeting sequence with CTCN PAM
aagauaaccucuaacaagac

SEQ ID NO: 12330 - RNA, 20 nt, Artificial Sequence
  targeting sequence with CTCN PAM
aagauggccugcucaaagau

SEQ ID NO: 12331 - RNA, 20 nt, Artificial Sequence
  targeting sequence with CTCN PAM
gaacugucauauauuuucau

SEQ ID NO: 12332 - RNA, 20 nt, Artificial Sequence
  targeting sequence with CTCN PAM
ccauucucugaacugucaua

SEQ ID NO: 12333 - RNA, 20 nt, Artificial Sequence
  targeting sequence with CTCN PAM
gaguuugugaccugaaaaca

SEQ ID NO: 12334 - RNA, 20 nt, Artificial Sequence
  targeting sequence with CTCN PAM
gagaugcagucacccuguac

SEQ ID NO: 12335 - RNA, 20 nt, Artificial Sequence
  targeting sequence with CTCN PAM
guuuucaggucacaaacucu

SEQ ID NO: 12336 - RNA, 20 nt, Artificial Sequence
  targeting sequence with CTCN PAM
ucagcucuguuuucagguca

SEQ ID NO: 12337 - RNA, 20 nt, Artificial Sequence
  targeting sequence with CTCN PAM
ugccuguaaucccagcacuu

SEQ ID NO: 12338 - RNA, 20 nt, Artificial Sequence
  targeting sequence with CTCN PAM
agccaggcgugguggcagcu

SEQ ID NO: 12339 - RNA, 20 nt, Artificial Sequence
  targeting sequence with CTCN PAM
gguccuuuauaaucacaucu

SEQ ID NO: 12340 - RNA, 20 nt, Artificial Sequence
  targeting sequence with CTCN PAM
auggaaacaaguuauucuuc

SEQ ID NO: 12341 - RNA, 20 nt, Artificial Sequence
  targeting sequence with CTCN PAM
auauuuuaauccacccucca

SEQ ID NO: 12342 - RNA, 20 nt, Artificial Sequence
  targeting sequence with CTCN PAM
cuauauuuuaauccacccuc

SEQ ID NO: 12343 - RNA, 20 nt, Artificial Sequence
  targeting sequence with CTCN PAM
ucccucuuacaugacauguu

SEQ ID NO: 12344 - RNA, 20 nt, Artificial Sequence
  targeting sequence with CTCN PAM
cuuuaucuuuucuuuacucg

SEQ ID NO: 12345 - RNA, 20 nt, Artificial Sequence
  targeting sequence with CTCN PAM
guuucccauggcugauuucc

SEQ ID NO: 12346 - RNA, 20 nt, Artificial Sequence
  targeting sequence with CTCN PAM
cauuuuaauuaacuaucauc

SEQ ID NO: 12347 - RNA, 20 nt, Artificial Sequence
  targeting sequence with CTCN PAM
uuuuaauuaacuaucaucua

SEQ ID NO: 12348 - RNA, 20 nt, Artificial Sequence
  targeting sequence with CTCN PAM
cuauucaucugcuuaaugug

SEQ ID NO: 12349 - RNA, 20 nt, Artificial Sequence
  targeting sequence with CTCN PAM
auucaucugcuuaaugugug

SEQ ID NO: 12350 - RNA, 20 nt, Artificial Sequence
  targeting sequence with CTCN PAM
gacuaacacaaaaguauggg

SEQ ID NO: 12351 - RNA, 20 nt, Artificial Sequence
  targeting sequence with CTCN PAM
gugaacaccaagaagaaaaa

SEQ ID NO: 12352 - RNA, 20 nt, Artificial Sequence
  targeting sequence with CTCN PAM
auucuuuccuuuccucugga

SEQ ID NO: 12353 - RNA, 20 nt, Artificial Sequence
  targeting sequence with CTCN PAM
ggaacucuaauuacacuuac

SEQ ID NO: 12354 - RNA, 20 nt, Artificial Sequence
  targeting sequence with CTCN PAM
acugaauaucuggaaacccu

SEQ ID NO: 12355 - RNA, 20 nt, Artificial Sequence
  targeting sequence with CTCN PAM
uacuuugcuucucuuuucug

SEQ ID NO: 12356 - RNA, 20 nt, Artificial Sequence
  targeting sequence with CTCN PAM
uuaaguucuuaaguucaauu

SEQ ID NO: 12357 - RNA, 20 nt, Artificial Sequence
  targeting sequence with CTCN PAM
agugguaauaaggaacuugg

SEQ ID NO: 12358 - RNA, 20 nt, Artificial Sequence
  targeting sequence with CTCN PAM
aaaaaaauauauuuuuaauu

SEQ ID NO: 12359 - RNA, 20 nt, Artificial Sequence
  targeting sequence with CTCN PAM
gcuaauuaaaaauauauuuu

SEQ ID NO: 12360 - RNA, 20 nt, Artificial Sequence
  targeting sequence with CTCN PAM
agucccagcuacugggggug

SEQ ID NO: 12361 - RNA, 20 nt, Artificial Sequence
  targeting sequence with CTCN PAM
ccacccccaguagcugggac

SEQ ID NO: 12362 - RNA, 20 nt, Artificial Sequence
  targeting sequence with CTCN PAM
gccccucaccacccccagua

SEQ ID NO: 12363 - RNA, 20 nt, Artificial Sequence
  targeting sequence with CTCN PAM
gccucagccccucaccaccc

SEQ ID NO: 12364 - RNA, 20 nt, Artificial Sequence
  targeting sequence with CTCN PAM
auuccucugccucagccccu

SEQ ID NO: 12365 - RNA, 20 nt, Artificial Sequence
  targeting sequence with CTCN PAM
augcaaccuugaacuucugg

SEQ ID NO: 12366 - RNA, 20 nt, Artificial Sequence
  targeting sequence with CTCN PAM
guggcuuaggcuggaaugca

SEQ ID NO: 12367 - RNA, 20 nt, Artificial Sequence
  targeting sequence with CTCN PAM
guggccaauaagcacaugaa

SEQ ID NO: 12368 - RNA, 20 nt, Artificial Sequence
  targeting sequence with CTCN PAM
auaucauuagccaucaggaa

SEQ ID NO: 12369 - RNA, 20 nt, Artificial Sequence
  targeting sequence with CTCN PAM
uugugguuucaauuugcauu

SEQ ID NO: 12370 - RNA, 20 nt, Artificial Sequence
  targeting sequence with CTCN PAM
cuaaaauggagaaauuggaa

SEQ ID NO: 12371 - RNA, 20 nt, Artificial Sequence
  targeting sequence with CTCN PAM
auuuuagugagugcgaauua

SEQ ID NO: 12372 - RNA, 20 nt, Artificial Sequence
  targeting sequence with CTCN PAM
uacacugcuaaugcaaauau

SEQ ID NO: 12373 - RNA, 20 nt, Artificial Sequence
  targeting sequence with CTCN PAM
acguugaaccuuuuuuagga

SEQ ID NO: 12374 - RNA, 20 nt, Artificial Sequence
  targeting sequence with CTCN PAM
uggccuauauuuuuuuauuu

SEQ ID NO: 12375 - RNA, 20 nt, Artificial Sequence
  targeting sequence with CTCN PAM
cuccuguaaucccagcacuu

SEQ ID NO: 12376 - RNA, 20 nt, Artificial Sequence
  targeting sequence with CTCN PAM
uguaaucccagcacuuuggg

SEQ ID NO: 12377 - RNA, 20 nt, Artificial Sequence
  targeting sequence with CTCN PAM
caaagugcugggauuacagg

SEQ ID NO: 12378 - RNA, 20 nt, Artificial Sequence
  targeting sequence with CTCN PAM
gaugauccacccaccuuggc

SEQ ID NO: 12379 - RNA, 20 nt, Artificial Sequence
  targeting sequence with CTCN PAM
ggaguuugagacuagccggg

SEQ ID NO: 12380 - RNA, 20 nt, Artificial Sequence
  targeting sequence with CTCN PAM
ugagcucagaugauccaccc

SEQ ID NO: 12381 - RNA, 20 nt, Artificial Sequence
  targeting sequence with CTCN PAM
aacuccugagcucagaugau

SEQ ID NO: 12382 - RNA, 20 nt, Artificial Sequence
  targeting sequence with CTCN PAM
uuguugucccggcuagucuc

SEQ ID NO: 12383 - RNA, 20 nt, Artificial Sequence
  targeting sequence with CTCN PAM
gcaaaaaauacaaaaauuag

SEQ ID NO: 12384 - RNA, 20 nt, Artificial Sequence
  targeting sequence with CTCN PAM
cacaucuguagucccagcua

SEQ ID NO: 12385 - RNA, 20 nt, Artificial Sequence
  targeting sequence with CTCN PAM
caaguagcugggacuacaga

SEQ ID NO: 12386 - RNA, 20 nt, Artificial Sequence
  targeting sequence with CTCN PAM
gccucccaaguagcugggac

SEQ ID NO: 12387 - RNA, 20 nt, Artificial Sequence
  targeting sequence with CTCN PAM
uaccucagccucccaaguag

SEQ ID NO: 12388 - RNA, 20 nt, Artificial Sequence
  targeting sequence with CTCN PAM
acuucccagcuucacgugau

SEQ ID NO: 12389 - RNA, 20 nt, Artificial Sequence
  targeting sequence with CTCN PAM
agccugggcaacagagucag

SEQ ID NO: 12390 - RNA, 20 nt, Artificial Sequence
  targeting sequence with CTCN PAM
agcgaucuuccugccucagc

SEQ ID NO: 12391 - RNA, 20 nt, Artificial Sequence
  targeting sequence with CTCN PAM
uggacucaagcgaucuuccu

SEQ ID NO: 12392 - RNA, 20 nt, Artificial Sequence
  targeting sequence with CTCN PAM
cugcagccuucaacuccugg

SEQ ID NO: 12393 - RNA, 20 nt, Artificial Sequence
  targeting sequence with CTCN PAM
agccugggugacagagugag

SEQ ID NO: 12394 - RNA, 20 nt, Artificial Sequence
  targeting sequence with CTCN PAM
gucacccaggcuggagugca

SEQ ID NO: 12395 - RNA, 20 nt, Artificial Sequence
  targeting sequence with CTCN PAM
cucugucacccaggcuggag

SEQ ID NO: 12396 - RNA, 20 nt, Artificial Sequence
  targeting sequence with CTCN PAM
ucauuuuuuaauucuuguuu

SEQ ID NO: 12397 - RNA, 20 nt, Artificial Sequence
  targeting sequence with CTCN PAM
gcuuuauaaaauacuuuuuu

SEQ ID NO: 12398 - RNA, 20 nt, Artificial Sequence
  targeting sequence with CTCN PAM
ccaacuuuagagggaguugg

SEQ ID NO: 12399 - RNA, 20 nt, Artificial Sequence
  targeting sequence with CTCN PAM
gauuggaaaggaucgggcac

SEQ ID NO: 12400 - RNA, 20 nt, Artificial Sequence
  targeting sequence with CTCN PAM
ccuuuaguaaaguagcugau

SEQ ID NO: 12401 - RNA, 20 nt, Artificial Sequence
  targeting sequence with CTCN PAM
uuucaccaaggauggagugc

SEQ ID NO: 12402 - RNA, 20 nt, Artificial Sequence
  targeting sequence with CTCN PAM
auccuuggugaaaagagaua

SEQ ID NO: 12403 - RNA, 20 nt, Artificial Sequence
  targeting sequence with CTCN PAM
ccaacagucccaagccgcac

SEQ ID NO: 12404 - RNA, 20 nt, Artificial Sequence
  targeting sequence with CTCN PAM
uggguguggacgugucaagc

SEQ ID NO: 12405 - RNA, 20 nt, Artificial Sequence
  targeting sequence with CTCN PAM
ucuuaccacauaguuggaau

SEQ ID NO: 12406 - RNA, 20 nt, Artificial Sequence
  targeting sequence with CTCN PAM
ggagaaagucugcauucccc

SEQ ID NO: 12407 - RNA, 20 nt, Artificial Sequence
  targeting sequence with CTCN PAM
cuggagaaagucugcauucc

SEQ ID NO: 12408 - RNA, 20 nt, Artificial Sequence
  targeting sequence with CTCN PAM
caccccgcagguggucggcu

SEQ ID NO: 12409 - RNA, 20 nt, Artificial Sequence
  targeting sequence with CTCN PAM
ccccgcagguggucggcugc

SEQ ID NO: 12410 - RNA, 20 nt, Artificial Sequence
  targeting sequence with CTCN PAM
gugaucaggugcugcacaau

SEQ ID NO: 12411 - RNA, 20 nt, Artificial Sequence
  targeting sequence with CTCN PAM
uaccuuucugcucagugauc

SEQ ID NO: 12412 - RNA, 20 nt, Artificial Sequence
  targeting sequence with CTCN PAM
ucccaaggucuggaccugcc

SEQ ID NO: 12413 - RNA, 20 nt, Artificial Sequence
  targeting sequence with CTCN PAM
cccucuguccacuuaaguug

SEQ ID NO: 12414 - RNA, 20 nt, Artificial Sequence
  targeting sequence with CTCN PAM
cucuguccacuuaaguugcu

SEQ ID NO: 12415 - RNA, 20 nt, Artificial Sequence
  targeting sequence with CTCN PAM
guccacuuaaguugcugugc

SEQ ID NO: 12416 - RNA, 20 nt, Artificial Sequence
  targeting sequence with CTCN PAM
auccacuuacuucaggugua

SEQ ID NO: 12417 - RNA, 20 nt, Artificial Sequence
  targeting sequence with CTCN PAM
gcacagcacuaguggccccc

SEQ ID NO: 12418 - RNA, 20 nt, Artificial Sequence
  targeting sequence with CTCN PAM
ucugcacagcacuaguggcc

SEQ ID NO: 12419 - RNA, 20 nt, Artificial Sequence
  targeting sequence with CTCN PAM
gcugaacccugggauccaaa

SEQ ID NO: 12420 - RNA, 20 nt, Artificial Sequence
  targeting sequence with CTCN PAM
aaagauuuuucaaugagagu

SEQ ID NO: 12421 - RNA, 20 nt, Artificial Sequence
  targeting sequence with CTCN PAM
uugaaaaaucuuuagaguau

SEQ ID NO: 12422 - RNA, 20 nt, Artificial Sequence
  targeting sequence with CTCN PAM
cauugaaaaaucuuuagagu

SEQ ID NO: 12423 - RNA, 20 nt, Artificial Sequence
  targeting sequence with CTCN PAM
cuuuaauugccaguagcgcu

SEQ ID NO: 12424 - RNA, 20 nt, Artificial Sequence
  targeting sequence with CTCN PAM
gccuugcaccuuacauaaca

SEQ ID NO: 12425 - RNA, 20 nt, Artificial Sequence
  targeting sequence with CTCN PAM
ugcuagaacuagauauuuuu

SEQ ID NO: 12426 - RNA, 20 nt, Artificial Sequence
  targeting sequence with CTCN PAM
uugcauuuaauccgaacugu

SEQ ID NO: 12427 - RNA, 20 nt, Artificial Sequence
  targeting sequence with CTCN PAM
ggcaguuggauagccaaucg

SEQ ID NO: 12428 - RNA, 20 nt, Artificial Sequence
  targeting sequence with CTCN PAM
ucuaugaguuguauucagag

SEQ ID NO: 12429 - RNA, 20 nt, Artificial Sequence
  targeting sequence with CTCN PAM
uagaugaggauuuucucugg

SEQ ID NO: 12430 - RNA, 20 nt, Artificial Sequence
  targeting sequence with CTCN PAM
gaauacaacucauagaugag

SEQ ID NO: 12431 - RNA, 20 nt, Artificial Sequence
  targeting sequence with CTCN PAM
uuuacccgguaaugcauguc

SEQ ID NO: 12432 - RNA, 20 nt, Artificial Sequence
  targeting sequence with CTCN PAM
aacuucuugauaaucuucuc

SEQ ID NO: 12433 - RNA, 20 nt, Artificial Sequence
  targeting sequence with CTCN PAM
ugguggugugugccaaucac

SEQ ID NO: 12434 - RNA, 20 nt, Artificial Sequence
  targeting sequence with CTCN PAM
uucaacaugcugcugcccac

SEQ ID NO: 12435 - RNA, 20 nt, Artificial Sequence
  targeting sequence with CTCN PAM
ugacuugcugauagagucug

SEQ ID NO: 12436 - RNA, 20 nt, Artificial Sequence
  targeting sequence with CTCN PAM
aguuuauggcucaugacuug

SEQ ID NO: 12437 - RNA, 20 nt, Artificial Sequence
  targeting sequence with CTCN PAM
uggguucaagcauuccuccc

SEQ ID NO: 12438 - RNA, 20 nt, Artificial Sequence
  targeting sequence with CTCN PAM
aacuccuggguucaagcauu

SEQ ID NO: 12439 - RNA, 20 nt, Artificial Sequence
  targeting sequence with CTCN PAM
caccuauaaucccaguacuu

SEQ ID NO: 12440 - RNA, 20 nt, Artificial Sequence
  targeting sequence with CTCN PAM
guaauugucaaggaaguuuu

SEQ ID NO: 12441 - RNA, 20 nt, Artificial Sequence
  targeting sequence with CTCN PAM
agauucuuagagagugucua

SEQ ID NO: 12442 - RNA, 20 nt, Artificial Sequence
  targeting sequence with CTCN PAM
aagaaucuugagaaauauuu

SEQ ID NO: 12443 - RNA, 20 nt, Artificial Sequence
  targeting sequence with CTCN PAM
cuaagaaucuugagaaauau

SEQ ID NO: 12444 - RNA, 20 nt, Artificial Sequence
  targeting sequence with CTCN PAM
uggcauugacuuagacacuc

SEQ ID NO: 12445 - RNA, 20 nt, Artificial Sequence
  targeting sequence with CTCN PAM
aagucuuuccaaacuucucu

SEQ ID NO: 12446 - RNA, 20 nt, Artificial Sequence
  targeting sequence with CTCN PAM
caaagucuuuccaaacuucu

SEQ ID NO: 12447 - RNA, 20 nt, Artificial Sequence
  targeting sequence with CTCN PAM
acuuccaagaugcugggcua

SEQ ID NO: 12448 - RNA, 20 nt, Artificial Sequence
  targeting sequence with CTCN PAM
aacagaacuauguaaaacua

SEQ ID NO: 12449 - RNA, 20 nt, Artificial Sequence
  targeting sequence with CTCN PAM
aagcgguuuaggguugcuac

SEQ ID NO: 12450 - RNA, 20 nt, Artificial Sequence
  targeting sequence with CTCN PAM
aaaguacacauacuugccac

SEQ ID NO: 12451 - RNA, 20 nt, Artificial Sequence
  targeting sequence with CTCN PAM
ggccuaggcugccugggugg

SEQ ID NO: 12452 - RNA, 20 nt, Artificial Sequence
  targeting sequence with CTCN PAM
gaucuucaaugcaaaccccc

SEQ ID NO: 12453 - RNA, 20 nt, Artificial Sequence
  targeting sequence with CTCN PAM
guggggaagccuugcaugga

SEQ ID NO: 12454 - RNA, 20 nt, Artificial Sequence
  targeting sequence with CTCN PAM
augcaaggcuuccccacgga

SEQ ID NO: 12455 - RNA, 20 nt, Artificial Sequence
  targeting sequence with CTCN PAM
ccuuagggacagaaagaucu

SEQ ID NO: 12456 - RNA, 20 nt, Artificial Sequence
  targeting sequence with CTCN PAM
uuggggaggucugggggcac

SEQ ID NO: 12457 - RNA, 20 nt, Artificial Sequence
  targeting sequence with CTCN PAM
ccaaggagaucuuucugucc

SEQ ID NO: 12458 - RNA, 20 nt, Artificial Sequence
  targeting sequence with CTCN PAM
gcauggaaauucaacagaau

SEQ ID NO: 12459 - RNA, 20 nt, Artificial Sequence
  targeting sequence with CTCN PAM
uaggaagcaaacccagcucu

SEQ ID NO: 12460 - RNA, 20 nt, Artificial Sequence
  targeting sequence with CTCN PAM
gcugaaggacaggcacugca

SEQ ID NO: 12461 - RNA, 20 nt, Artificial Sequence
  targeting sequence with CTCN PAM
uucacuccgcugaaggacag

SEQ ID NO: 12462 - RNA, 20 nt, Artificial Sequence
  targeting sequence with CTCN PAM
cgcuccuucacuccgcugaa

SEQ ID NO: 12463 - RNA, 20 nt, Artificial Sequence
  targeting sequence with CTCN PAM
aucugccacucccgcuccuu

SEQ ID NO: 12464 - RNA, 20 nt, Artificial Sequence
  targeting sequence with CTCN PAM
cauucguuacaucaagguga

SEQ ID NO: 12465 - RNA, 20 nt, Artificial Sequence
  targeting sequence with CTCN PAM
uucguuacaucaaggugauc

SEQ ID NO: 12466 - RNA, 20 nt, Artificial Sequence
  targeting sequence with CTCN PAM
uggaagagaaggccucuuag

SEQ ID NO: 12467 - RNA, 20 nt, Artificial Sequence
  targeting sequence with CTCN PAM
uccaggagggccaccgauca

SEQ ID NO: 12468 - RNA, 20 nt, Artificial Sequence
  targeting sequence with CTCN PAM
uaguggggcugaagaaugga

SEQ ID NO: 12469 - RNA, 20 nt, Artificial Sequence
  targeting sequence with CTCN PAM
ccuguccauucuucagcccc

SEQ ID NO: 12470 - RNA, 20 nt, Artificial Sequence
  targeting sequence with CTCN PAM
cucacgucuccugucaggcu

SEQ ID NO: 12471 - RNA, 20 nt, Artificial Sequence
  targeting sequence with CTCN PAM
cgucuccugucaggcugaua

SEQ ID NO: 12472 - RNA, 20 nt, Artificial Sequence
  targeting sequence with CTCN PAM
ugucaggcugauaaucugca

SEQ ID NO: 12473 - RNA, 20 nt, Artificial Sequence
  targeting sequence with CTCN PAM
gagcuggguucucagggcag

SEQ ID NO: 12474 - RNA, 20 nt, Artificial Sequence
  targeting sequence with CTCN PAM
gagucauugcuagacggguc

SEQ ID NO: 12475 - RNA, 20 nt, Artificial Sequence
  targeting sequence with CTCN PAM
gggcaggaaaagggcuucuc

SEQ ID NO: 12476 - RNA, 20 nt, Artificial Sequence
  targeting sequence with CTCN PAM
ccuccaugggugaauugugg

SEQ ID NO: 12477 - RNA, 20 nt, Artificial Sequence
  targeting sequence with CTCN PAM
uccaugggugaauugugggg

SEQ ID NO: 12478 - RNA, 20 nt, Artificial Sequence
  targeting sequence with CTCN PAM
augggugaauuguggggcag

SEQ ID NO: 12479 - RNA, 20 nt, Artificial Sequence
  targeting sequence with CTCN PAM
ggcugccccacaauucaccc

SEQ ID NO: 12480 - RNA, 20 nt, Artificial Sequence
  targeting sequence with CTCN PAM
aaaaacugaacucaggcugc

SEQ ID NO: 12481 - RNA, 20 nt, Artificial Sequence
  targeting sequence with CTCN PAM
ggccaaaggugcuguggccc

SEQ ID NO: 12482 - RNA, 20 nt, Artificial Sequence
  targeting sequence with CTCN PAM
cacuccuagcaggcccacgu

SEQ ID NO: 12483 - RNA, 20 nt, Artificial Sequence
  targeting sequence with CTCN PAM
uagcaggcccacguuuuggc

SEQ ID NO: 12484 - RNA, 20 nt, Artificial Sequence
  targeting sequence with CTCN PAM
gccaaaacgugggccugcua

SEQ ID NO: 12485 - RNA, 20 nt, Artificial Sequence
  targeting sequence with CTCN PAM
acucugccaaaacgugggcc

SEQ ID NO: 12486 - RNA, 20 nt, Artificial Sequence
  targeting sequence with CTCN PAM
acauguagccaaagguuaua

SEQ ID NO: 12487 - RNA, 20 nt, Artificial Sequence
  targeting sequence with CTCN PAM
agaaggugggagauuuguua

SEQ ID NO: 12488 - RNA, 20 nt, Artificial Sequence
  targeting sequence with CTCN PAM
caccuucuggagaccuuaag

SEQ ID NO: 12489 - RNA, 20 nt, Artificial Sequence
  targeting sequence with CTCN PAM
aacaaaucucccaccuucug

SEQ ID NO: 12490 - RNA, 20 nt, Artificial Sequence
  targeting sequence with CTCN PAM
agaaauccacagaagcaaca

SEQ ID NO: 12491 - RNA, 20 nt, Artificial Sequence
  targeting sequence with CTCN PAM
cucuagaaauccacagaagc

SEQ ID NO: 12492 - RNA, 20 nt, Artificial Sequence
  targeting sequence with CTCN PAM
gccucccucuagaaauccac

SEQ ID NO: 12493 - RNA, 20 nt, Artificial Sequence
  targeting sequence with CTCN PAM
ugauuagggcagcgagugga

SEQ ID NO: 12494 - RNA, 20 nt, Artificial Sequence
  targeting sequence with CTCN PAM
cugcccuaaucaggagcuga

SEQ ID NO: 12495 - RNA, 20 nt, Artificial Sequence
  targeting sequence with CTCN PAM
agauacugauagaugucaua

SEQ ID NO: 12496 - RNA, 20 nt, Artificial Sequence
  targeting sequence with CTCN PAM
gcauaagaaaaguucuaagu

SEQ ID NO: 12497 - RNA, 20 nt, Artificial Sequence
  targeting sequence with CTCN PAM
gccauaagccaucugcugca

SEQ ID NO: 12498 - RNA, 20 nt, Artificial Sequence
  targeting sequence with CTCN PAM
ugcccugugacuuccauccc

SEQ ID NO: 12499 - RNA, 20 nt, Artificial Sequence
  targeting sequence with CTCN PAM
caugcccugugacuuccauc

SEQ ID NO: 12500 - RNA, 20 nt, Artificial Sequence
  targeting sequence with CTCN PAM
gugaggcugguuuuacauga

SEQ ID NO: 12501 - RNA, 20 nt, Artificial Sequence
  targeting sequence with CTCN PAM
cagagguaaagugaccugcc

SEQ ID NO: 12502 - RNA, 20 nt, Artificial Sequence
  targeting sequence with CTCN PAM
uguaaaaccagccucacaga

SEQ ID NO: 12503 - RNA, 20 nt, Artificial Sequence
  targeting sequence with CTCN PAM
aaaaaaaauuuuuuuuaaac

SEQ ID NO: 12504 - RNA, 20 nt, Artificial Sequence
  targeting sequence with CTCN PAM
gaucucugcuagguggcauc

SEQ ID NO: 12505 - RNA, 20 nt, Artificial Sequence
  targeting sequence with CTCN PAM
gcuagguggcaucuccuaaa

SEQ ID NO: 12506 - RNA, 20 nt, Artificial Sequence
  targeting sequence with CTCN PAM
uaaagcugcaguuuggguaa

SEQ ID NO: 12507 - RNA, 20 nt, Artificial Sequence
  targeting sequence with CTCN PAM
cuucagugucuguucggacu

SEQ ID NO: 12508 - RNA, 20 nt, Artificial Sequence
  targeting sequence with CTCN PAM
gccugucucagggcugucau

SEQ ID NO: 12509 - RNA, 20 nt, Artificial Sequence
  targeting sequence with CTCN PAM
gggcugucauuacuucugca

SEQ ID NO: 12510 - RNA, 20 nt, Artificial Sequence
  targeting sequence with CTCN PAM
gaugaaccucgcuucuggcc

SEQ ID NO: 12511 - RNA, 20 nt, Artificial Sequence
  targeting sequence with CTCN PAM
cuucuggccuccuaaggaua

SEQ ID NO: 12512 - RNA, 20 nt, Artificial Sequence
  targeting sequence with CTCN PAM
uaaggauaagccauugcccc

SEQ ID NO: 12513 - RNA, 20 nt, Artificial Sequence
  targeting sequence with CTCN PAM
uucuuuugaugaguccuuuu

SEQ ID NO: 12514 - RNA, 20 nt, Artificial Sequence
  targeting sequence with CTCN PAM
ucaaaagaaagaggggggug

SEQ ID NO: 12515 - RNA, 20 nt, Artificial Sequence
  targeting sequence with CTCN PAM
gugcagggaaaaggacucau

SEQ ID NO: 12516 - RNA, 20 nt, Artificial Sequence
  targeting sequence with CTCN PAM
caccaccuucaccagaagcu

SEQ ID NO: 12517 - RNA, 20 nt, Artificial Sequence
  targeting sequence with CTCN PAM
gcaagaacaacucccaccac

SEQ ID NO: 12518 - RNA, 20 nt, Artificial Sequence
  targeting sequence with CTCN PAM
uugcuaucguccugcugaag

SEQ ID NO: 12519 - RNA, 20 nt, Artificial Sequence
  targeting sequence with CTCN PAM
uguccaagcagcgcacagcu

SEQ ID NO: 12520 - RNA, 20 nt, Artificial Sequence
  targeting sequence with CTCN PAM
cguaagaagcuggccguggu

SEQ ID NO: 12521 - RNA, 20 nt, Artificial Sequence
  targeting sequence with CTCN PAM
uuggugucgaugucauacac

SEQ ID NO: 12522 - RNA, 20 nt, Artificial Sequence
  targeting sequence with CTCN PAM
gggacuucaccugaaaaagc

SEQ ID NO: 12523 - RNA, 20 nt, Artificial Sequence
  targeting sequence with CTCN PAM
aaucaaaggaugaugucccu

SEQ ID NO: 12524 - RNA, 20 nt, Artificial Sequence
  targeting sequence with CTCN PAM
ccucuagcuucccagucccu

SEQ ID NO: 12525 - RNA, 20 nt, Artificial Sequence
  targeting sequence with CTCN PAM
ucuagcuucccagucccugc

SEQ ID NO: 12526 - RNA, 20 nt, Artificial Sequence
  targeting sequence with CTCN PAM
agcuucccagucccugcagg

SEQ ID NO: 12527 - RNA, 20 nt, Artificial Sequence
  targeting sequence with CTCN PAM
ugcagggacugggaagcuag

SEQ ID NO: 12528 - RNA, 20 nt, Artificial Sequence
  targeting sequence with CTCN PAM
ccugcucuggcccaggcagg

SEQ ID NO: 12529 - RNA, 20 nt, Artificial Sequence
  targeting sequence with CTCN PAM
ugcucuggcccaggcagguc

SEQ ID NO: 12530 - RNA, 20 nt, Artificial Sequence
  targeting sequence with CTCN PAM
ggcccaggcaggucucuggg

SEQ ID NO: 12531 - RNA, 20 nt, Artificial Sequence
  targeting sequence with CTCN PAM
gggaggggcaggggccaagc

SEQ ID NO: 12532 - RNA, 20 nt, Artificial Sequence
  targeting sequence with CTCN PAM
cagagaccugccugggccag

SEQ ID NO: 12533 - RNA, 20 nt, Artificial Sequence
  targeting sequence with CTCN PAM
gugcaugugcuuggccccug

SEQ ID NO: 12534 - RNA, 20 nt, Artificial Sequence
  targeting sequence with CTCN PAM
gggacucugugcaugugcuu

SEQ ID NO: 12535 - RNA, 20 nt, Artificial Sequence
  targeting sequence with CTCN PAM
ucccacacaggcacaagccg

SEQ ID NO: 12536 - RNA, 20 nt, Artificial Sequence
  targeting sequence with CTCN PAM
cacacaggcacaagccgcag

SEQ ID NO: 12537 - RNA, 20 nt, Artificial Sequence
  targeting sequence with CTCN PAM
uuaacuuugguuuccuugcc

SEQ ID NO: 12538 - RNA, 20 nt, Artificial Sequence
  targeting sequence with CTCN PAM
gagccagcagagccuuucuu

SEQ ID NO: 12539 - RNA, 20 nt, Artificial Sequence
  targeting sequence with CTCN PAM
gagccuucgguuuccauugg

SEQ ID NO: 12540 - RNA, 20 nt, Artificial Sequence
  targeting sequence with CTCN PAM
gcuggcucagagccuucggu

SEQ ID NO: 12541 - RNA, 20 nt, Artificial Sequence
  targeting sequence with CTCN PAM
gagaggggugugacguuggc

SEQ ID NO: 12542 - RNA, 20 nt, Artificial Sequence
  targeting sequence with CTCN PAM
gagucauugccccauuucuu

SEQ ID NO: 12543 - RNA, 20 nt, Artificial Sequence
  targeting sequence with CTCN PAM
cagagucauugccccauuuc

SEQ ID NO: 12544 - RNA, 20 nt, Artificial Sequence
  targeting sequence with CTCN PAM
gugaauggggcgauggaugc

SEQ ID NO: 12545 - RNA, 20 nt, Artificial Sequence
  targeting sequence with CTCN PAM
ccugcugcaggccugccugu

SEQ ID NO: 12546 - RNA, 20 nt, Artificial Sequence
  targeting sequence with CTCN PAM
ucuagcauucuugugaauua

SEQ ID NO: 12547 - RNA, 20 nt, Artificial Sequence
  targeting sequence with CTCN PAM
acugaacaacgccuacaacc

SEQ ID NO: 12548 - RNA, 20 nt, Artificial Sequence
  targeting sequence with CTCN PAM
ggccacagggcuggaugacu

SEQ ID NO: 12549 - RNA, 20 nt, Artificial Sequence
  targeting sequence with CTCN PAM
ggugacacacuuccucaggc

SEQ ID NO: 12550 - RNA, 20 nt, Artificial Sequence
  targeting sequence with CTCN PAM
gugccccgggccugguuggc

SEQ ID NO: 12551 - RNA, 20 nt, Artificial Sequence
  targeting sequence with CTCN PAM
cgccauucuuucucucuuua

SEQ ID NO: 12552 - RNA, 20 nt, Artificial Sequence
  targeting sequence with CTCN PAM
cuuuaggucuuuguaggugg

SEQ ID NO: 12553 - RNA, 20 nt, Artificial Sequence
  targeting sequence with CTCN PAM
uuaggucuuuguaggugguc

SEQ ID NO: 12554 - RNA, 20 nt, Artificial Sequence
  targeting sequence with CTCN PAM
ggaaaaccaguccugaccac

SEQ ID NO: 12555 - RNA, 20 nt, Artificial Sequence
  targeting sequence with CTCN PAM
agcuuuggggggaacuucac

SEQ ID NO: 12556 - RNA, 20 nt, Artificial Sequence
  targeting sequence with CTCN PAM
ugacugguuuccucggccac

SEQ ID NO: 12557 - RNA, 20 nt, Artificial Sequence
  targeting sequence with CTCN PAM
gccacugcaggguuuccuga

SEQ ID NO: 12558 - RNA, 20 nt, Artificial Sequence
  targeting sequence with CTCN PAM
uccuuguucucagcagcaga

SEQ ID NO: 12559 - RNA, 20 nt, Artificial Sequence
  targeting sequence with CTCN PAM
uuguucucagcagcagaauc

SEQ ID NO: 12560 - RNA, 20 nt, Artificial Sequence
  targeting sequence with CTCN PAM
gcagcagaaucgauggggga

SEQ ID NO: 12561 - RNA, 20 nt, Artificial Sequence
  targeting sequence with CTCN PAM
cccaucgauucugcugcuga

SEQ ID NO: 12562 - RNA, 20 nt, Artificial Sequence
  targeting sequence with CTCN PAM
agaccccucccccaucgauu

SEQ ID NO: 12563 - RNA, 20 nt, Artificial Sequence
  targeting sequence with CTCN PAM
ccacuccagaccccuccccc

SEQ ID NO: 12564 - RNA, 20 nt, Artificial Sequence
  targeting sequence with CTCN PAM
gucaauuagaaggaguuacc

SEQ ID NO: 12565 - RNA, 20 nt, Artificial Sequence
  targeting sequence with CTCN PAM
uucuaauugacugaggcugc

SEQ ID NO: 12566 - RNA, 20 nt, Artificial Sequence
  targeting sequence with CTCN PAM
agcccagagguaacuccaug

SEQ ID NO: 12567 - RNA, 20 nt, Artificial Sequence
  targeting sequence with CTCN PAM
gggcuagagguggccaggua

SEQ ID NO: 12568 - RNA, 20 nt, Artificial Sequence
  targeting sequence with CTCN PAM
augucagucucaacucacuc

SEQ ID NO: 12569 - RNA, 20 nt, Artificial Sequence
  targeting sequence with CTCN PAM
acucacucauguccuugaga

SEQ ID NO: 12570 - RNA, 20 nt, Artificial Sequence
  targeting sequence with CTCN PAM
cucauguccuugagagagua

SEQ ID NO: 12571 - RNA, 20 nt, Artificial Sequence
  targeting sequence with CTCN PAM
uguccuugagagaguagaau

SEQ ID NO: 12572 - RNA, 20 nt, Artificial Sequence
  targeting sequence with CTCN PAM
aggacaugagugaguugaga

SEQ ID NO: 12573 - RNA, 20 nt, Artificial Sequence
  targeting sequence with CTCN PAM
caaggacaugagugaguuga

SEQ ID NO: 12574 - RNA, 20 nt, Artificial Sequence
  targeting sequence with CTCN PAM
cucaaggacaugagugaguu

SEQ ID NO: 12575 - RNA, 20 nt, Artificial Sequence
  targeting sequence with CTCN PAM
uuccccgaaaccauucuacu

SEQ ID NO: 12576 - RNA, 20 nt, Artificial Sequence
  targeting sequence with CTCN PAM
cuuuccccgaaaccauucua

SEQ ID NO: 12577 - RNA, 20 nt, Artificial Sequence
  targeting sequence with CTCN PAM
cuaacuuaagaucacacagu

SEQ ID NO: 12578 - RNA, 20 nt, Artificial Sequence
  targeting sequence with CTCN PAM
cugagccuuaauuacuuuuc

SEQ ID NO: 12579 - RNA, 20 nt, Artificial Sequence
  targeting sequence with CTCN PAM
gagccuuaauuacuuuucuc

SEQ ID NO: 12580 - RNA, 20 nt, Artificial Sequence
  targeting sequence with CTCN PAM
gagaggcucacuaacuuaag

SEQ ID NO: 12581 - RNA, 20 nt, Artificial Sequence
  targeting sequence with CTCN PAM
aaaaugaaauuaguaauugc

SEQ ID NO: 12582 - RNA, 20 nt, Artificial Sequence
  targeting sequence with CTCN PAM
guguugagcacaaaaugggg

SEQ ID NO: 12583 - RNA, 20 nt, Artificial Sequence
  targeting sequence with CTCN PAM
acacugagcuaggcacugua

SEQ ID NO: 12584 - RNA, 20 nt, Artificial Sequence
  targeting sequence with CTCN PAM
ccagccucaccucccaccua

SEQ ID NO: 12585 - RNA, 20 nt, Artificial Sequence
  targeting sequence with CTCN PAM
ccucccaccuauagggggca

SEQ ID NO: 12586 - RNA, 20 nt, Artificial Sequence
  targeting sequence with CTCN PAM
caccuauagggggcauagcu

SEQ ID NO: 12587 - RNA, 20 nt, Artificial Sequence
  targeting sequence with CTCN PAM
ccuagccugccauagagcca

SEQ ID NO: 12588 - RNA, 20 nt, Artificial Sequence
  targeting sequence with CTCN PAM
gcccugccaggagacaucag

SEQ ID NO: 12589 - RNA, 20 nt, Artificial Sequence
  targeting sequence with CTCN PAM
uggcagggcugagaaucacc

SEQ ID NO: 12590 - RNA, 20 nt, Artificial Sequence
  targeting sequence with CTCN PAM
uaccuuucugccuaggaucu

SEQ ID NO: 12591 - RNA, 20 nt, Artificial Sequence
  targeting sequence with CTCN PAM
ugaaauaugcucauaccuuu

SEQ ID NO: 12592 - RNA, 20 nt, Artificial Sequence
  targeting sequence with CTCN PAM
aaaauuccaacaacacgcag

SEQ ID NO: 12593 - RNA, 20 nt, Artificial Sequence
  targeting sequence with CTCN PAM
caggauccccacugucccug

SEQ ID NO: 12594 - RNA, 20 nt, Artificial Sequence
  targeting sequence with CTCN PAM
cacuggguguuccaagcuac

SEQ ID NO: 12595 - RNA, 20 nt, Artificial Sequence
  targeting sequence with CTCN PAM
gcuucucgggaggaggcuac

SEQ ID NO: 12596 - RNA, 20 nt, Artificial Sequence
  targeting sequence with CTCN PAM
ggaggaggcuaccucaacau

SEQ ID NO: 12597 - RNA, 20 nt, Artificial Sequence
  targeting sequence with CTCN PAM
cgagaagcagagcauguccu

SEQ ID NO: 12598 - RNA, 20 nt, Artificial Sequence
  targeting sequence with CTCN PAM
ucccgagaagcagagcaugu

SEQ ID NO: 12599 - RNA, 20 nt, Artificial Sequence
  targeting sequence with CTCN PAM
acaucaaagccagcaccuuc

SEQ ID NO: 12600 - RNA, 20 nt, Artificial Sequence
  targeting sequence with CTCN PAM
aagaucuucugccuccaugu

SEQ ID NO: 12601 - RNA, 20 nt, Artificial Sequence
  targeting sequence with CTCN PAM
augucuucuccauuucugcc

SEQ ID NO: 12602 - RNA, 20 nt, Artificial Sequence
  targeting sequence with CTCN PAM
auuucugccguggaggugcc

SEQ ID NO: 12603 - RNA, 20 nt, Artificial Sequence
  targeting sequence with CTCN PAM
acggcagaaauggagaagac

SEQ ID NO: 12604 - RNA, 20 nt, Artificial Sequence
  targeting sequence with CTCN PAM
uagcacuggcaaggcugaca

SEQ ID NO: 12605 - RNA, 20 nt, Artificial Sequence
  targeting sequence with CTCN PAM
ucccuuccuuuauggcuauc

SEQ ID NO: 12606 - RNA, 20 nt, Artificial Sequence
  targeting sequence with CTCN PAM
uuucaccucacauucgguua

SEQ ID NO: 12607 - RNA, 20 nt, Artificial Sequence
  targeting sequence with CTCN PAM
cauucgguuauggcagcccc

SEQ ID NO: 12608 - RNA, 20 nt, Artificial Sequence
  targeting sequence with CTCN PAM
acaaucuccuaaagcaucgu

SEQ ID NO: 12609 - RNA, 20 nt, Artificial Sequence
  targeting sequence with CTCN PAM
uaaagcaucguucuguguca

SEQ ID NO: 12610 - RNA, 20 nt, Artificial Sequence
  targeting sequence with CTCN PAM
cauaaauuguaggaaauaau

SEQ ID NO: 12611 - RNA, 20 nt, Artificial Sequence
  targeting sequence with CTCN PAM
guauuauuuccuacaauuua

SEQ ID NO: 12612 - RNA, 20 nt, Artificial Sequence
  targeting sequence with CTCN PAM
agagugaucuucccacccau

SEQ ID NO: 12613 - RNA, 20 nt, Artificial Sequence
  targeting sequence with CTCN PAM
agagcuaugcacacuguuac

SEQ ID NO: 12614 - RNA, 20 nt, Artificial Sequence
  targeting sequence with CTCN PAM
caccacagucauggcacuga

SEQ ID NO: 12615 - RNA, 20 nt, Artificial Sequence
  targeting sequence with CTCN PAM
cuccugccugguccccaccu

SEQ ID NO: 12616 - RNA, 20 nt, Artificial Sequence
  targeting sequence with CTCN PAM
ugccugguccccaccugccu

SEQ ID NO: 12617 - RNA, 20 nt, Artificial Sequence
  targeting sequence with CTCN PAM
gucagucuguuuuccccaua

SEQ ID NO: 12618 - RNA, 20 nt, Artificial Sequence
  targeting sequence with CTCN PAM
gcuucaggcuagagcccacu

SEQ ID NO: 12619 - RNA, 20 nt, Artificial Sequence
  targeting sequence with CTCN PAM
agccugaagcugaguuguau

SEQ ID NO: 12620 - RNA, 20 nt, Artificial Sequence
  targeting sequence with CTCN PAM
aaacucaugacugcaagacu

SEQ ID NO: 12621 - RNA, 20 nt, Artificial Sequence
  targeting sequence with CTCN PAM
ugacugcaagacuuacuggg

SEQ ID NO: 12622 - RNA, 20 nt, Artificial Sequence
  targeting sequence with CTCN PAM
gaucugaauuccacuaacau

SEQ ID NO: 12623 - RNA, 20 nt, Artificial Sequence
  targeting sequence with CTCN PAM
ugcuuucuggucuuuuuccu

SEQ ID NO: 12624 - RNA, 20 nt, Artificial Sequence
  targeting sequence with CTCN PAM
uucccuucuuccucuugcuu

SEQ ID NO: 12625 - RNA, 20 nt, Artificial Sequence
  targeting sequence with CTCN PAM
uccugcugccacuuccaccc

SEQ ID NO: 12626 - RNA, 20 nt, Artificial Sequence
  targeting sequence with CTCN PAM
uggacuguguccucgucauc

SEQ ID NO: 12627 - RNA, 20 nt, Artificial Sequence
  targeting sequence with CTCN PAM
ucauccuugucugccccauu

SEQ ID NO: 12628 - RNA, 20 nt, Artificial Sequence
  targeting sequence with CTCN PAM
ucucccucaauugccccaaa

SEQ ID NO: 12629 - RNA, 20 nt, Artificial Sequence
  targeting sequence with CTCN PAM
cucaauugccccaaacuagc

SEQ ID NO: 12630 - RNA, 20 nt, Artificial Sequence
  targeting sequence with CTCN PAM
auugccccaaacuagcucug

SEQ ID NO: 12631 - RNA, 20 nt, Artificial Sequence
  targeting sequence with CTCN PAM
gcuuauuuuauuaaaagguu

SEQ ID NO: 12632 - RNA, 20 nt, Artificial Sequence
  targeting sequence with CTCN PAM
caagauugccauccugaccu

SEQ ID NO: 12633 - RNA, 20 nt, Artificial Sequence
  targeting sequence with CTCN PAM
aaaauaaaugcaguuugcug

SEQ ID NO: 12634 - RNA, 20 nt, Artificial Sequence
  targeting sequence with CTCN PAM
cugacuguggccggccaaga

SEQ ID NO: 12635 - RNA, 20 nt, Artificial Sequence
  targeting sequence with CTCN PAM
gacuguggccggccaagagg

SEQ ID NO: 12636 - RNA, 20 nt, Artificial Sequence
  targeting sequence with CTCN PAM
uggccggccacagucagaga

SEQ ID NO: 12637 - RNA, 20 nt, Artificial Sequence
  targeting sequence with CTCN PAM
ucuuggccggccacagucag

SEQ ID NO: 12638 - RNA, 20 nt, Artificial Sequence
  targeting sequence with CTCN PAM
ggcuccucuuggccggccac

SEQ ID NO: 12639 - RNA, 20 nt, Artificial Sequence
  targeting sequence with CTCN PAM
gccaggacuuuaagauucag

SEQ ID NO: 12640 - RNA, 20 nt, Artificial Sequence
  targeting sequence with CTCN PAM
agacaaaggcuguucaucug

SEQ ID NO: 12641 - RNA, 20 nt, Artificial Sequence
  targeting sequence with CTCN PAM
gccuccggccauccuguggu

SEQ ID NO: 12642 - RNA, 20 nt, Artificial Sequence
  targeting sequence with CTCN PAM
ggccauccugugguuuuggc

SEQ ID NO: 12643 - RNA, 20 nt, Artificial Sequence
  targeting sequence with CTCN PAM
gggccaaaaccacaggaugg

SEQ ID NO: 12644 - RNA, 20 nt, Artificial Sequence
  targeting sequence with CTCN PAM
cugggccaaaaccacaggau

SEQ ID NO: 12645 - RNA, 20 nt, Artificial Sequence
  targeting sequence with CTCN PAM
ucucugggccaaaaccacag

SEQ ID NO: 12646 - RNA, 20 nt, Artificial Sequence
  targeting sequence with CTCN PAM
cuccucucugggccaaaacc

SEQ ID NO: 12647 - RNA, 20 nt, Artificial Sequence
  targeting sequence with CTCN PAM
uuguccuacuuggcagcccu

SEQ ID NO: 12648 - RNA, 20 nt, Artificial Sequence
  targeting sequence with CTCN PAM
uagggcucguuguccuacuu

SEQ ID NO: 12649 - RNA, 20 nt, Artificial Sequence
  targeting sequence with CTCN PAM
aggcgguggugacuucaugu

SEQ ID NO: 12650 - RNA, 20 nt, Artificial Sequence
  targeting sequence with CTCN PAM
gagaguauuuguucaguggg

SEQ ID NO: 12651 - RNA, 20 nt, Artificial Sequence
  targeting sequence with CTCN PAM
gagcuauacuuuaucuugcu

SEQ ID NO: 12652 - RNA, 20 nt, Artificial Sequence
  targeting sequence with CTCN PAM
cugagcuauacuuuaucuug

SEQ ID NO: 12653 - RNA, 20 nt, Artificial Sequence
  targeting sequence with CTCN PAM
acucaaauugugccucccaa

SEQ ID NO: 12654 - RNA, 20 nt, Artificial Sequence
  targeting sequence with CTCN PAM
aauugugccucccaaguaag

SEQ ID NO: 12655 - RNA, 20 nt, Artificial Sequence
  targeting sequence with CTCN PAM
caaguaaguccaaguguuag

SEQ ID NO: 12656 - RNA, 20 nt, Artificial Sequence
  targeting sequence with CTCN PAM
gcugugauaugccugccuga

SEQ ID NO: 12657 - RNA, 20 nt, Artificial Sequence
  targeting sequence with CTCN PAM
ggcaggcauaucacagcuga

SEQ ID NO: 12658 - RNA, 20 nt, Artificial Sequence
  targeting sequence with CTCN PAM
cggggcagucagcauggcaa

SEQ ID NO: 12659 - RNA, 20 nt, Artificial Sequence
  targeting sequence with CTCN PAM
uuccccgaaccacaccaacu

SEQ ID NO: 12660 - RNA, 20 nt, Artificial Sequence
  targeting sequence with CTCN PAM
gccaucucaagcagcuguaa

SEQ ID NO: 12661 - RNA, 20 nt, Artificial Sequence
  targeting sequence with CTCN PAM
agcagcuguaacuagagcaa

SEQ ID NO: 12662 - RNA, 20 nt, Artificial Sequence
  targeting sequence with CTCN PAM
aguuacagcugcuugagaug

SEQ ID NO: 12663 - RNA, 20 nt, Artificial Sequence
  targeting sequence with CTCN PAM
uuucacucuuuggggccuca

SEQ ID NO: 12664 - RNA, 20 nt, Artificial Sequence
  targeting sequence with CTCN PAM
uuggggccucauuucuuuuc

SEQ ID NO: 12665 - RNA, 20 nt, Artificial Sequence
  targeting sequence with CTCN PAM
uuucuuuucugugaaauggg

SEQ ID NO: 12666 - RNA, 20 nt, Artificial Sequence
  targeting sequence with CTCN PAM
uuauuacugacucauaaaau

SEQ ID NO: 12667 - RNA, 20 nt, Artificial Sequence
  targeting sequence with CTCN PAM
uaaaauagcaaaaaccacaa

SEQ ID NO: 12668 - RNA, 20 nt, Artificial Sequence
  targeting sequence with CTCN PAM
uugugugcuuuaagaaaagc

SEQ ID NO: 12669 - RNA, 20 nt, Artificial Sequence
  targeting sequence with CTCN PAM
ugaaagcuuuucuuaaagca

SEQ ID NO: 12670 - RNA, 20 nt, Artificial Sequence
  targeting sequence with CTCN PAM
aacuccugaaagcuuuucuu

SEQ ID NO: 12671 - RNA, 20 nt, Artificial Sequence
  targeting sequence with CTCN PAM
uggaagcuuucucaaacucc

SEQ ID NO: 12672 - RNA, 20 nt, Artificial Sequence
  targeting sequence with CTCN PAM
gaucaaguuucaccaucucc

SEQ ID NO: 12673 - RNA, 20 nt, Artificial Sequence
  targeting sequence with CTCN PAM
gggcucagaucaaguuucac

SEQ ID NO: 12674 - RNA, 20 nt, Artificial Sequence
  targeting sequence with CTCN PAM
cagggcucagaucaaguuuc

SEQ ID NO: 12675 - RNA, 20 nt, Artificial Sequence
  targeting sequence with CTCN PAM
uccuuuccagaccucucagg

SEQ ID NO: 12676 - RNA, 20 nt, Artificial Sequence
  targeting sequence with CTCN PAM
acucuuccuuuccagaccuc

SEQ ID NO: 12677 - RNA, 20 nt, Artificial Sequence
  targeting sequence with CTCN PAM
agucuuguuccuacccccac

SEQ ID NO: 12678 - RNA, 20 nt, Artificial Sequence
  targeting sequence with CTCN PAM
ccagucuuguuccuaccccc

SEQ ID NO: 12679 - RNA, 20 nt, Artificial Sequence
  targeting sequence with CTCN PAM
caggcucuccagucuuguuc

SEQ ID NO: 12680 - RNA, 20 nt, Artificial Sequence
  targeting sequence with CTCN PAM
ccaucucccaggcucuccag

SEQ ID NO: 12681 - RNA, 20 nt, Artificial Sequence
  targeting sequence with CTCN PAM
ucaccaucucccaggcucuc

SEQ ID NO: 12682 - RNA, 20 nt, Artificial Sequence
  targeting sequence with CTCN PAM
gcaccagcuccucaccaucu

SEQ ID NO: 12683 - RNA, 20 nt, Artificial Sequence
  targeting sequence with CTCN PAM
aaaaauaaugaagcacuggg

SEQ ID NO: 12684 - RNA, 20 nt, Artificial Sequence
  targeting sequence with CTCN PAM
ccuuugcccaugguagccug

SEQ ID NO: 12685 - RNA, 20 nt, Artificial Sequence
  targeting sequence with CTCN PAM
uuugcccaugguagccugag

SEQ ID NO: 12686 - RNA, 20 nt, Artificial Sequence
  targeting sequence with CTCN PAM
ggcuaccaugggcaaaggag

SEQ ID NO: 12687 - RNA, 20 nt, Artificial Sequence
  targeting sequence with CTCN PAM
gccacauccuaggcugguga

SEQ ID NO: 12688 - RNA, 20 nt, Artificial Sequence
  targeting sequence with CTCN PAM
guagccuaugccugcugccc

SEQ ID NO: 12689 - RNA, 20 nt, Artificial Sequence
  targeting sequence with CTCN PAM
cuuuagcggggcagcaggca

SEQ ID NO: 12690 - RNA, 20 nt, Artificial Sequence
  targeting sequence with CTCN PAM
uuggcacauuaaaugcuccc

SEQ ID NO: 12691 - RNA, 20 nt, Artificial Sequence
  targeting sequence with CTCN PAM
ucauuggcacauuaaaugcu

SEQ ID NO: 12692 - RNA, 20 nt, Artificial Sequence
  targeting sequence with CTCN PAM
ccucauuggcacauuaaaug

SEQ ID NO: 12693 - RNA, 20 nt, Artificial Sequence
  targeting sequence with CTCN PAM
gagaguagacagacucaaaa

SEQ ID NO: 12694 - RNA, 20 nt, Artificial Sequence
  targeting sequence with CTCN PAM
gagcaaaacauggcugcuuc

SEQ ID NO: 12695 - RNA, 20 nt, Artificial Sequence
  targeting sequence with CTCN PAM
cagagcaaaacauggcugcu

SEQ ID NO: 12696 - RNA, 20 nt, Artificial Sequence
  targeting sequence with CTCN PAM
aaauaaaaaaaauuccuuca

SEQ ID NO: 12697 - RNA, 20 nt, Artificial Sequence
  targeting sequence with CTCN PAM
auuuggggcuuuugucuguc

SEQ ID NO: 12698 - RNA, 20 nt, Artificial Sequence
  targeting sequence with CTCN PAM
acauuugggaaccauuagca

SEQ ID NO: 12699 - RNA, 20 nt, Artificial Sequence
  targeting sequence with CTCN PAM
gugcuaaugguucccaaaug

SEQ ID NO: 12700 - RNA, 20 nt, Artificial Sequence
  targeting sequence with CTCN PAM
ucccugcccaggaagccagg

SEQ ID NO: 12701 - RNA, 20 nt, Artificial Sequence
  targeting sequence with CTCN PAM
uggcuuccugggcagggaag

SEQ ID NO: 12702 - RNA, 20 nt, Artificial Sequence
  targeting sequence with CTCN PAM
ccuggcuuccugggcaggga

SEQ ID NO: 12703 - RNA, 20 nt, Artificial Sequence
  targeting sequence with CTCN PAM
agacucauucucaggccugc

SEQ ID NO: 12704 - RNA, 20 nt, Artificial Sequence
  targeting sequence with CTCN PAM
uucucaggccugcacgcaca

SEQ ID NO: 12705 - RNA, 20 nt, Artificial Sequence
  targeting sequence with CTCN PAM
ggccugcacgcacauaugca

SEQ ID NO: 12706 - RNA, 20 nt, Artificial Sequence
  targeting sequence with CTCN PAM
agguucugugccccuuccug

SEQ ID NO: 12707 - RNA, 20 nt, Artificial Sequence
  targeting sequence with CTCN PAM
ggcuauugccagcuauuugc

SEQ ID NO: 12708 - RNA, 20 nt, Artificial Sequence
  targeting sequence with CTCN PAM
cugagucucggucuccuggg

SEQ ID NO: 12709 - RNA, 20 nt, Artificial Sequence
  targeting sequence with CTCN PAM
gagucucggucuccugggcu

SEQ ID NO: 12710 - RNA, 20 nt, Artificial Sequence
  targeting sequence with CTCN PAM
gagaggacaaaugaccuguc

SEQ ID NO: 12711 - RNA, 20 nt, Artificial Sequence
  targeting sequence with CTCN PAM
gucuccugggcuguagccag

SEQ ID NO: 12712 - RNA, 20 nt, Artificial Sequence
  targeting sequence with CTCN PAM
ugggcuguagccagggagaa

SEQ ID NO: 12713 - RNA, 20 nt, Artificial Sequence
  targeting sequence with CTCN PAM
cuggcuacagcccaggagac

SEQ ID NO: 12714 - RNA, 20 nt, Artificial Sequence
  targeting sequence with CTCN PAM
uucuuagguuuauaaaaggc

SEQ ID NO: 12715 - RNA, 20 nt, Artificial Sequence
  targeting sequence with CTCN PAM
cagcaaggcaaccccaucuu

SEQ ID NO: 12716 - RNA, 20 nt, Artificial Sequence
  targeting sequence with CTCN PAM
uacaagaugggguugccuug

SEQ ID NO: 12717 - RNA, 20 nt, Artificial Sequence
  targeting sequence with CTCN PAM
ugaucccugcccuggggaca

SEQ ID NO: 12718 - RNA, 20 nt, Artificial Sequence
  targeting sequence with CTCN PAM
ccugaucccugcccugggga

SEQ ID NO: 12719 - RNA, 20 nt, Artificial Sequence
  targeting sequence with CTCN PAM
ggaaacagcucuccugaucc

SEQ ID NO: 12720 - RNA, 20 nt, Artificial Sequence
  targeting sequence with CTCN PAM
aaguuacccuggaagccucu

SEQ ID NO: 12721 - RNA, 20 nt, Artificial Sequence
  targeting sequence with CTCN PAM
gucccuggaagaagaggcca

SEQ ID NO: 12722 - RNA, 20 nt, Artificial Sequence
  targeting sequence with CTCN PAM
ucuuccagggacugagucca

SEQ ID NO: 12723 - RNA, 20 nt, Artificial Sequence
  targeting sequence with CTCN PAM
cacgaacucauucauugugu

SEQ ID NO: 12724 - RNA, 20 nt, Artificial Sequence
  targeting sequence with CTCN PAM
uucauugugucagcaaacgu

SEQ ID NO: 12725 - RNA, 20 nt, Artificial Sequence
  targeting sequence with CTCN PAM
gcagaaccccagucuacguu

SEQ ID NO: 12726 - RNA, 20 nt, Artificial Sequence
  targeting sequence with CTCN PAM
cucagcagaaccccagucua

SEQ ID NO: 12727 - RNA, 20 nt, Artificial Sequence
  targeting sequence with CTCN PAM
gcccuuuguccagaucgcag

SEQ ID NO: 12728 - RNA, 20 nt, Artificial Sequence
  targeting sequence with CTCN PAM
gcuuccucugcccuuugucc

SEQ ID NO: 12729 - RNA, 20 nt, Artificial Sequence
  targeting sequence with CTCN PAM
uuccccuggggugggggcuu

SEQ ID NO: 12730 - RNA, 20 nt, Artificial Sequence
  targeting sequence with CTCN PAM
agcccccaccccaggggaaa

SEQ ID NO: 12731 - RNA, 20 nt, Artificial Sequence
  targeting sequence with CTCN PAM
caagccccucaagcccccac

SEQ ID NO: 12732 - RNA, 20 nt, Artificial Sequence
  targeting sequence with CTCN PAM
gcagaagaggugacauuuca

SEQ ID NO: 12733 - RNA, 20 nt, Artificial Sequence
  targeting sequence with CTCN PAM
ucugcagaguccucccaagc

SEQ ID NO: 12734 - RNA, 20 nt, Artificial Sequence
  targeting sequence with CTCN PAM
ggaaaauaccuauuuggcuu

SEQ ID NO: 12735 - RNA, 20 nt, Artificial Sequence
  targeting sequence with CTCN PAM
gccucuggaaaauaccuauu

SEQ ID NO: 12736 - RNA, 20 nt, Artificial Sequence
  targeting sequence with CTCN PAM
ccacucugccucuggaaaau

SEQ ID NO: 12737 - RNA, 20 nt, Artificial Sequence
  targeting sequence with CTCN PAM
ccuggaaugccuuugccccu

SEQ ID NO: 12738 - RNA, 20 nt, Artificial Sequence
  targeting sequence with CTCN PAM
ccauaggaugucacccucac

SEQ ID NO: 12739 - RNA, 20 nt, Artificial Sequence
  targeting sequence with CTCN PAM
uucccaccuacaggccugcc

SEQ ID NO: 12740 - RNA, 20 nt, Artificial Sequence
  targeting sequence with CTCN PAM
ccuccuucccaccuacaggc

SEQ ID NO: 12741 - RNA, 20 nt, Artificial Sequence
  targeting sequence with CTCN PAM
gcccauccuccccuccuucc

SEQ ID NO: 12742 - RNA, 20 nt, Artificial Sequence
  targeting sequence with CTCN PAM
cugcccauccuccccuccuu

SEQ ID NO: 12743 - RNA, 20 nt, Artificial Sequence
  targeting sequence with CTCN PAM
acagcacaaacucucugccc

SEQ ID NO: 12744 - RNA, 20 nt, Artificial Sequence
  targeting sequence with CTCN PAM
ugacugggcuacugugcucc

SEQ ID NO: 12745 - RNA, 20 nt, Artificial Sequence
  targeting sequence with CTCN PAM
caugacugggcuacugugcu

SEQ ID NO: 12746 - RNA, 20 nt, Artificial Sequence
  targeting sequence with CTCN PAM
cucaugacugggcuacugug

SEQ ID NO: 12747 - RNA, 20 nt, Artificial Sequence
  targeting sequence with CTCN PAM
auccugcaccucucucauga

SEQ ID NO: 12748 - RNA, 20 nt, Artificial Sequence
  targeting sequence with CTCN PAM
ccaggcauggguaaucaucc

SEQ ID NO: 12749 - RNA, 20 nt, Artificial Sequence
  targeting sequence with CTCN PAM
agaugcgugggaugauuacc

SEQ ID NO: 12750 - RNA, 20 nt, Artificial Sequence
  targeting sequence with CTCN PAM
guaugcaucugguucuuucc

SEQ ID NO: 12751 - RNA, 20 nt, Artificial Sequence
  targeting sequence with CTCN PAM
gaaaacagucuucuuuuuuu

SEQ ID NO: 12752 - RNA, 20 nt, Artificial Sequence
  targeting sequence with CTCN PAM
cauguaccaguaccuggaua

SEQ ID NO: 12753 - RNA, 20 nt, Artificial Sequence
  targeting sequence with CTCN PAM
ugcuggcuagaugcuuaccu

SEQ ID NO: 12754 - RNA, 20 nt, Artificial Sequence
  targeting sequence with CTCN PAM
agcuccugcuggcuagaugc

SEQ ID NO: 12755 - RNA, 20 nt, Artificial Sequence
  targeting sequence with CTCN PAM
agcuuucauagacuaggcca

SEQ ID NO: 12756 - RNA, 20 nt, Artificial Sequence
  targeting sequence with CTCN PAM
cuagcuuucauagacuaggc

SEQ ID NO: 12757 - RNA, 20 nt, Artificial Sequence
  targeting sequence with CTCN PAM
gauggaggaaggaauggcuu

SEQ ID NO: 12758 - RNA, 20 nt, Artificial Sequence
  targeting sequence with CTCN PAM
aucugagguucuagauggaa

SEQ ID NO: 12759 - RNA, 20 nt, Artificial Sequence
  targeting sequence with CTCN PAM
acuccccuaccccuucccuc

SEQ ID NO: 12760 - RNA, 20 nt, Artificial Sequence
  targeting sequence with CTCN PAM
ccuaccccuucccucuuuau

SEQ ID NO: 12761 - RNA, 20 nt, Artificial Sequence
  targeting sequence with CTCN PAM
uuaucuccccacagucaauu

SEQ ID NO: 12762 - RNA, 20 nt, Artificial Sequence
  targeting sequence with CTCN PAM
ccacagucaauuaaugagcu

SEQ ID NO: 12763 - RNA, 20 nt, Artificial Sequence
  targeting sequence with CTCN PAM
uuaauugacuguggggagau

SEQ ID NO: 12764 - RNA, 20 nt, Artificial Sequence
  targeting sequence with CTCN PAM
uuuuguccauauucccgggc

SEQ ID NO: 12765 - RNA, 20 nt, Artificial Sequence
  targeting sequence with CTCN PAM
uucaaugucagcccgggaau

SEQ ID NO: 12766 - RNA, 20 nt, Artificial Sequence
  targeting sequence with CTCN PAM
uugccacuccuucaauguca

SEQ ID NO: 12767 - RNA, 20 nt, Artificial Sequence
  targeting sequence with CTCN PAM
ucaugccuacaagucuugau

SEQ ID NO: 12768 - RNA, 20 nt, Artificial Sequence
  targeting sequence with CTCN PAM
cuucaugccuacaagucuug

SEQ ID NO: 12769 - RNA, 20 nt, Artificial Sequence
  targeting sequence with CTCN PAM
ucucuucaugccuacaaguc

SEQ ID NO: 12770 - RNA, 20 nt, Artificial Sequence
  targeting sequence with CTCN PAM
gccaggcuucuuaguccugg

SEQ ID NO: 12771 - RNA, 20 nt, Artificial Sequence
  targeting sequence with CTCN PAM
uucucagccaggcuucuuag

SEQ ID NO: 12772 - RNA, 20 nt, Artificial Sequence
  targeting sequence with CTCN PAM
gggaccucaggccagccacu

SEQ ID NO: 12773 - RNA, 20 nt, Artificial Sequence
  targeting sequence with CTCN PAM
ggccagccacuuuccuugga

SEQ ID NO: 12774 - RNA, 20 nt, Artificial Sequence
  targeting sequence with CTCN PAM
aaggaaaguggcuggccuga

SEQ ID NO: 12775 - RNA, 20 nt, Artificial Sequence
  targeting sequence with CTCN PAM
caguucugaaaugggggugg

SEQ ID NO: 12776 - RNA, 20 nt, Artificial Sequence
  targeting sequence with CTCN PAM
ugacugcagcgggcauucuc

SEQ ID NO: 12777 - RNA, 20 nt, Artificial Sequence
  targeting sequence with CTCN PAM
guuaagccucaugacugcag

SEQ ID NO: 12778 - RNA, 20 nt, Artificial Sequence
  targeting sequence with CTCN PAM
guguaggaaaguggagaugg

SEQ ID NO: 12779 - RNA, 20 nt, Artificial Sequence
  targeting sequence with CTCN PAM
acuuuccuacacugaggaca

SEQ ID NO: 12780 - RNA, 20 nt, Artificial Sequence
  targeting sequence with CTCN PAM
aucuccacuuuccuacacug

SEQ ID NO: 12781 - RNA, 20 nt, Artificial Sequence
  targeting sequence with CTCN PAM
uccaucuccacuuuccuaca

SEQ ID NO: 12782 - RNA, 20 nt, Artificial Sequence
  targeting sequence with CTCN PAM
gaauucuuacagccuccucc

SEQ ID NO: 12783 - RNA, 20 nt, Artificial Sequence
  targeting sequence with CTCN PAM
ucugaauucuuacagccucc

SEQ ID NO: 12784 - RNA, 20 nt, Artificial Sequence
  targeting sequence with CTCN PAM
cgccuguaaauccuagcacu

SEQ ID NO: 12785 - RNA, 20 nt, Artificial Sequence
  targeting sequence with CTCN PAM
caaagugcuaggauuuacag

SEQ ID NO: 12786 - RNA, 20 nt, Artificial Sequence
  targeting sequence with CTCN PAM
gccucccaaagugcuaggau

SEQ ID NO: 12787 - RNA, 20 nt, Artificial Sequence
  targeting sequence with CTCN PAM
auggcccaggcuggagugca

SEQ ID NO: 12788 - RNA, 20 nt, Artificial Sequence
  targeting sequence with CTCN PAM
gacuuaaaaaaaaaaaaaaa

SEQ ID NO: 12789 - RNA, 20 nt, Artificial Sequence
  targeting sequence with CTCN PAM
gaauucuuuuuuuuuuuuuu

SEQ ID NO: 12790 - RNA, 20 nt, Artificial Sequence
  targeting sequence with CTCN PAM
ucugaauucuuuuuuuuuuu

SEQ ID NO: 12791 - RNA, 20 nt, Artificial Sequence
  targeting sequence with CTCN PAM
cuccucugaauucuuuuuuu

SEQ ID NO: 12792 - RNA, 20 nt, Artificial Sequence
  targeting sequence with CTCN PAM
ucccuccucugaauucuuuu

SEQ ID NO: 12793 - RNA, 20 nt, Artificial Sequence
  targeting sequence with CTCN PAM
auggagggagcuucccucuc

SEQ ID NO: 12794 - RNA, 20 nt, Artificial Sequence
  targeting sequence with CTCN PAM
auagagaugccuccucccuc

SEQ ID NO: 12795 - RNA, 20 nt, Artificial Sequence
  targeting sequence with CTCN PAM
cuccauagagaugccuccuc

SEQ ID NO: 12796 - RNA, 20 nt, Artificial Sequence
  targeting sequence with CTCN PAM
ccugccccacccagaaaugc

SEQ ID NO: 12797 - RNA, 20 nt, Artificial Sequence
  targeting sequence with CTCN PAM
ugccccacccagaaaugcca

SEQ ID NO: 12798 - RNA, 20 nt, Artificial Sequence
  targeting sequence with CTCN PAM
cugcuggcauuucugggugg

SEQ ID NO: 12799 - RNA, 20 nt, Artificial Sequence
  targeting sequence with CTCN PAM
cucccugcuggcauuucugg

SEQ ID NO: 12800 - RNA, 20 nt, Artificial Sequence
  targeting sequence with CTCN PAM
uauuaaaccuuguggcuuuu

SEQ ID NO: 12801 - RNA, 20 nt, Artificial Sequence
  targeting sequence with CTCN PAM
auauuuaaacaaauauauaa

SEQ ID NO: 12802 - RNA, 20 nt, Artificial Sequence
  targeting sequence with CTCN PAM
cuguguugcccaggcagguc

SEQ ID NO: 12803 - RNA, 20 nt, Artificial Sequence
  targeting sequence with CTCN PAM
ugggcucaagcagucuucuu

SEQ ID NO: 12804 - RNA, 20 nt, Artificial Sequence
  targeting sequence with CTCN PAM
agcagucuucuugccucagc

SEQ ID NO: 12805 - RNA, 20 nt, Artificial Sequence
  targeting sequence with CTCN PAM
gccucccaaagugcugggau

SEQ ID NO: 12806 - RNA, 20 nt, Artificial Sequence
  targeting sequence with CTCN PAM
caaagugcugggauuacagg

SEQ ID NO: 12807 - RNA, 20 nt, Artificial Sequence
  targeting sequence with CTCN PAM
ggauuuagaugaaauaguaa

SEQ ID NO: 12808 - RNA, 20 nt, Artificial Sequence
  targeting sequence with CTCN PAM
uuacucugugccaggcacuc

SEQ ID NO: 12809 - RNA, 20 nt, Artificial Sequence
  targeting sequence with CTCN PAM
gugccaggcacucaggcuca

SEQ ID NO: 12810 - RNA, 20 nt, Artificial Sequence
  targeting sequence with CTCN PAM
ggcucaccagcuuggauaua

SEQ ID NO: 12811 - RNA, 20 nt, Artificial Sequence
  targeting sequence with CTCN PAM
ccagcuuggauauagugguu

SEQ ID NO: 12812 - RNA, 20 nt, Artificial Sequence
  targeting sequence with CTCN PAM
aggaaccacuauauccaagc

SEQ ID NO: 12813 - RNA, 20 nt, Artificial Sequence
  targeting sequence with CTCN PAM
gccaucuaguggggauggcu

SEQ ID NO: 12814 - RNA, 20 nt, Artificial Sequence
  targeting sequence with CTCN PAM
ucucugccaucuagugggga

SEQ ID NO: 12815 - RNA, 20 nt, Artificial Sequence
  targeting sequence with CTCN PAM
gcagcucuucucugccaucu

SEQ ID NO: 12816 - RNA, 20 nt, Artificial Sequence
  targeting sequence with CTCN PAM
cgccagacccugagcagagc

SEQ ID NO: 12817 - RNA, 20 nt, Artificial Sequence
  targeting sequence with CTCN PAM
gggucuggcgggagcucagc

SEQ ID NO: 12818 - RNA, 20 nt, Artificial Sequence
  targeting sequence with CTCN PAM
gcucagggucuggcgggagc

SEQ ID NO: 12819 - RNA, 20 nt, Artificial Sequence
  targeting sequence with CTCN PAM
cuauucccaggcuucccucu

SEQ ID NO: 12820 - RNA, 20 nt, Artificial Sequence
  targeting sequence with CTCN PAM
gcugagcucauucaggggcc

SEQ ID NO: 12821 - RNA, 20 nt, Artificial Sequence
  targeting sequence with CTCN PAM
gcagagggaagccugggaau

SEQ ID NO: 12822 - RNA, 20 nt, Artificial Sequence
  targeting sequence with CTCN PAM
uucaggggccuugugacucu

SEQ ID NO: 12823 - RNA, 20 nt, Artificial Sequence
  targeting sequence with CTCN PAM
gaccaggcacccugacgcug

SEQ ID NO: 12824 - RNA, 20 nt, Artificial Sequence
  targeting sequence with CTCN PAM
gaaacagauuuauuaauggg

SEQ ID NO: 12825 - RNA, 20 nt, Artificial Sequence
  targeting sequence with CTCN PAM
gcugugcuagugucuaggau

SEQ ID NO: 12826 - RNA, 20 nt, Artificial Sequence
  targeting sequence with CTCN PAM
agggucuuucuagcuguagc

SEQ ID NO: 12827 - RNA, 20 nt, Artificial Sequence
  targeting sequence with CTCN PAM
caagggucuuucuagcugua

SEQ ID NO: 12828 - RNA, 20 nt, Artificial Sequence
  targeting sequence with CTCN PAM
aaccaucuucuuuguggaaa

SEQ ID NO: 12829 - RNA, 20 nt, Artificial Sequence
  targeting sequence with CTCN PAM
gcuucugggcuccaaccauc

SEQ ID NO: 12830 - RNA, 20 nt, Artificial Sequence
  targeting sequence with CTCN PAM
gagcgaggacucagaccucg

SEQ ID NO: 12831 - RNA, 20 nt, Artificial Sequence
  targeting sequence with CTCN PAM
gagccuacuucucugcuucu

SEQ ID NO: 12832 - RNA, 20 nt, Artificial Sequence
  targeting sequence with CTCN PAM
cucugagccuacuucucugc

SEQ ID NO: 12833 - RNA, 20 nt, Artificial Sequence
  targeting sequence with CTCN PAM
gaccucgaaugcuccuuucc

SEQ ID NO: 12834 - RNA, 20 nt, Artificial Sequence
  targeting sequence with CTCN PAM
aaugcuccuuucccucuugg

SEQ ID NO: 12835 - RNA, 20 nt, Artificial Sequence
  targeting sequence with CTCN PAM
uuucccucuuggccacugug

SEQ ID NO: 12836 - RNA, 20 nt, Artificial Sequence
  targeting sequence with CTCN PAM
uggccacugugcugggcuuu

SEQ ID NO: 12837 - RNA, 20 nt, Artificial Sequence
  targeting sequence with CTCN PAM
caaggcgcuuuaaggaaacc

SEQ ID NO: 12838 - RNA, 20 nt, Artificial Sequence
  targeting sequence with CTCN PAM
aggcgcuuuaaggaaaccca

SEQ ID NO: 12839 - RNA, 20 nt, Artificial Sequence
  targeting sequence with CTCN PAM
agaucuggguuuccuuaaag

SEQ ID NO: 12840 - RNA, 20 nt, Artificial Sequence
  targeting sequence with CTCN PAM
ucacaaacacuuguuugcca

SEQ ID NO: 12841 - RNA, 20 nt, Artificial Sequence
  targeting sequence with CTCN PAM
gaugccucccuuaacgcugc

SEQ ID NO: 12842 - RNA, 20 nt, Artificial Sequence
  targeting sequence with CTCN PAM
cuuaacgcugccucccaccc

SEQ ID NO: 12843 - RNA, 20 nt, Artificial Sequence
  targeting sequence with CTCN PAM
caccccugcucaugcucaga

SEQ ID NO: 12844 - RNA, 20 nt, Artificial Sequence
  targeting sequence with CTCN PAM
ugcucagaccauucauccgu

SEQ ID NO: 12845 - RNA, 20 nt, Artificial Sequence
  targeting sequence with CTCN PAM
gaccauucauccguguucuc

SEQ ID NO: 12846 - RNA, 20 nt, Artificial Sequence
  targeting sequence with CTCN PAM
aggcaugugguucguaguug

SEQ ID NO: 12847 - RNA, 20 nt, Artificial Sequence
  targeting sequence with CTCN PAM
aacuacgaaccacaugccug

SEQ ID NO: 12848 - RNA, 20 nt, Artificial Sequence
  targeting sequence with CTCN PAM
ccaacuacgaaccacaugcc

SEQ ID NO: 12849 - RNA, 20 nt, Artificial Sequence
  targeting sequence with CTCN PAM
uagcucugggaggugucaug

SEQ ID NO: 12850 - RNA, 20 nt, Artificial Sequence
  targeting sequence with CTCN PAM
gggaggugucaugaucuguu

SEQ ID NO: 12851 - RNA, 20 nt, Artificial Sequence
  targeting sequence with CTCN PAM
cagagcuaagagcucuccaa

SEQ ID NO: 12852 - RNA, 20 nt, Artificial Sequence
  targeting sequence with CTCN PAM
gaauuguggagggggacagg

SEQ ID NO: 12853 - RNA, 20 nt, Artificial Sequence
  targeting sequence with CTCN PAM
acaauucagagguccacauu

SEQ ID NO: 12854 - RNA, 20 nt, Artificial Sequence
  targeting sequence with CTCN PAM
gccccugucccccuccacaa

SEQ ID NO: 12855 - RNA, 20 nt, Artificial Sequence
  targeting sequence with CTCN PAM
cuggguccucagucucuuga

SEQ ID NO: 12856 - RNA, 20 nt, Artificial Sequence
  targeting sequence with CTCN PAM
gucucuugacaggaagccug

SEQ ID NO: 12857 - RNA, 20 nt, Artificial Sequence
  targeting sequence with CTCN PAM
ugacaggaagccugguccug

SEQ ID NO: 12858 - RNA, 20 nt, Artificial Sequence
  targeting sequence with CTCN PAM
ucucccgaggucuuuucagg

SEQ ID NO: 12859 - RNA, 20 nt, Artificial Sequence
  targeting sequence with CTCN PAM
cgaggucuuuucaggaggga

SEQ ID NO: 12860 - RNA, 20 nt, Artificial Sequence
  targeting sequence with CTCN PAM
ggagaugagcaaguccccgg

SEQ ID NO: 12861 - RNA, 20 nt, Artificial Sequence
  targeting sequence with CTCN PAM
ugaaaagaccucgggagaug

SEQ ID NO: 12862 - RNA, 20 nt, Artificial Sequence
  targeting sequence with CTCN PAM
cuccugaaaagaccucggga

SEQ ID NO: 12863 - RNA, 20 nt, Artificial Sequence
  targeting sequence with CTCN PAM
gcagcauggcauccucccuc

SEQ ID NO: 12864 - RNA, 20 nt, Artificial Sequence
  targeting sequence with CTCN PAM
gcucagcagcauggcauccu

SEQ ID NO: 12865 - RNA, 20 nt, Artificial Sequence
  targeting sequence with CTCN PAM
gcguguucaguucaaagggc

SEQ ID NO: 12866 - RNA, 20 nt, Artificial Sequence
  targeting sequence with CTCN PAM
ggagcugcugccuccucuag

SEQ ID NO: 12867 - RNA, 20 nt, Artificial Sequence
  targeting sequence with CTCN PAM
agagcccuuugaacugaaca

SEQ ID NO: 12868 - RNA, 20 nt, Artificial Sequence
  targeting sequence with CTCN PAM
ucuaggcacaggucagccca

SEQ ID NO: 12869 - RNA, 20 nt, Artificial Sequence
  targeting sequence with CTCN PAM
aggcacaggucagcccauuu

SEQ ID NO: 12870 - RNA, 20 nt, Artificial Sequence
  targeting sequence with CTCN PAM
uccaaacccugggcagaauc

SEQ ID NO: 12871 - RNA, 20 nt, Artificial Sequence
  targeting sequence with CTCN PAM
aaacccugggcagaaucuga

SEQ ID NO: 12872 - RNA, 20 nt, Artificial Sequence
  targeting sequence with CTCN PAM
gaaacuucuagagguccaug

SEQ ID NO: 12873 - RNA, 20 nt, Artificial Sequence
  targeting sequence with CTCN PAM
agaaguuucugaggaacaag

SEQ ID NO: 12874 - RNA, 20 nt, Artificial Sequence
  targeting sequence with CTCN PAM
uggaccucuagaaguuucug

SEQ ID NO: 12875 - RNA, 20 nt, Artificial Sequence
  targeting sequence with CTCN PAM
ggcuuuacugugaguucaag

SEQ ID NO: 12876 - RNA, 20 nt, Artificial Sequence
  targeting sequence with CTCN PAM
caguaaagccagagacuuua

SEQ ID NO: 12877 - RNA, 20 nt, Artificial Sequence
  targeting sequence with CTCN PAM
uuauguaaacccuaaaauug

SEQ ID NO: 12878 - RNA, 20 nt, Artificial Sequence
  targeting sequence with CTCN PAM
accuucuuccagaaucuguc

SEQ ID NO: 12879 - RNA, 20 nt, Artificial Sequence
  targeting sequence with CTCN PAM
cagcuuuccccuccucugcu

SEQ ID NO: 12880 - RNA, 20 nt, Artificial Sequence
  targeting sequence with CTCN PAM
gcuuuccccuccucugcucc

SEQ ID NO: 12881 - RNA, 20 nt, Artificial Sequence
  targeting sequence with CTCN PAM
ucugcucccucugugguacc

SEQ ID NO: 12882 - RNA, 20 nt, Artificial Sequence
  targeting sequence with CTCN PAM
gcucccucugugguaccagg

SEQ ID NO: 12883 - RNA, 20 nt, Artificial Sequence
  targeting sequence with CTCN PAM
cucugugguaccaggggcuc

SEQ ID NO: 12884 - RNA, 20 nt, Artificial Sequence
  targeting sequence with CTCN PAM
gugguaccaggggcucuggg

SEQ ID NO: 12885 - RNA, 20 nt, Artificial Sequence
  targeting sequence with CTCN PAM
ggguccccugugucuguggc

SEQ ID NO: 12886 - RNA, 20 nt, Artificial Sequence
  targeting sequence with CTCN PAM
caucaguccaugcaucucau

SEQ ID NO: 12887 - RNA, 20 nt, Artificial Sequence
  targeting sequence with CTCN PAM
ucaguccaugcaucucaucc

SEQ ID NO: 12888 - RNA, 20 nt, Artificial Sequence
  targeting sequence with CTCN PAM
uccucuccugcugugaugcu

SEQ ID NO: 12889 - RNA, 20 nt, Artificial Sequence
  targeting sequence with CTCN PAM
ccugcugugaugcugcguga

SEQ ID NO: 12890 - RNA, 20 nt, Artificial Sequence
  targeting sequence with CTCN PAM
ugcugugaugcugcgugacc

SEQ ID NO: 12891 - RNA, 20 nt, Artificial Sequence
  targeting sequence with CTCN PAM
ggggggucacgcagcaucac

SEQ ID NO: 12892 - RNA, 20 nt, Artificial Sequence
  targeting sequence with CTCN PAM
agacccaaagaagaacaagc

SEQ ID NO: 12893 - RNA, 20 nt, Artificial Sequence
  targeting sequence with CTCN PAM
caaggaggcaccgccacaga

SEQ ID NO: 12894 - RNA, 20 nt, Artificial Sequence
  targeting sequence with CTCN PAM
uugggagacucuagacccaa

SEQ ID NO: 12895 - RNA, 20 nt, Artificial Sequence
  targeting sequence with CTCN PAM
aaaugacugaugcaacuggg

SEQ ID NO: 12896 - RNA, 20 nt, Artificial Sequence
  targeting sequence with CTCN PAM
cugggugguauaaccuccug

SEQ ID NO: 12897 - RNA, 20 nt, Artificial Sequence
  targeting sequence with CTCN PAM
ugcacgcacgaugauuaauc

SEQ ID NO: 12898 - RNA, 20 nt, Artificial Sequence
  targeting sequence with CTCN PAM
cuuccucuccucuguggcuc

SEQ ID NO: 12899 - RNA, 20 nt, Artificial Sequence
  targeting sequence with CTCN PAM
ccucuguggcucacugucua

SEQ ID NO: 12900 - RNA, 20 nt, Artificial Sequence
  targeting sequence with CTCN PAM
ucuguggcucacugucuaga

SEQ ID NO: 12901 - RNA, 20 nt, Artificial Sequence
  targeting sequence with CTCN PAM
guggcucacugucuagauag

SEQ ID NO: 12902 - RNA, 20 nt, Artificial Sequence
  targeting sequence with CTCN PAM
cugucuagauagagcuugac

SEQ ID NO: 12903 - RNA, 20 nt, Artificial Sequence
  targeting sequence with CTCN PAM
aucuagacagugagccacag

SEQ ID NO: 12904 - RNA, 20 nt, Artificial Sequence
  targeting sequence with CTCN PAM
gaugaaggccuguggcgaag

SEQ ID NO: 12905 - RNA, 20 nt, Artificial Sequence
  targeting sequence with CTCN PAM
gauauuuagagcucaucagc

SEQ ID NO: 12906 - RNA, 20 nt, Artificial Sequence
  targeting sequence with CTCN PAM
aaauaucggaggucuuguac

SEQ ID NO: 12907 - RNA, 20 nt, Artificial Sequence
  targeting sequence with CTCN PAM
ucagcagcauugagguaaaa

SEQ ID NO: 12908 - RNA, 20 nt, Artificial Sequence
  targeting sequence with CTCN PAM
augcugcugaugagcucuaa

SEQ ID NO: 12909 - RNA, 20 nt, Artificial Sequence
  targeting sequence with CTCN PAM
agaaggcauacuugggguuc

SEQ ID NO: 12910 - RNA, 20 nt, Artificial Sequence
  targeting sequence with CTCN PAM
ugccuguuagaagggcugcc

SEQ ID NO: 12911 - RNA, 20 nt, Artificial Sequence
  targeting sequence with CTCN PAM
aggcucuugccuguuagaag

SEQ ID NO: 12912 - RNA, 20 nt, Artificial Sequence
  targeting sequence with CTCN PAM
guucccauguccucaaggcu

SEQ ID NO: 12913 - RNA, 20 nt, Artificial Sequence
  targeting sequence with CTCN PAM
cuggcgucugggcaucuggg

SEQ ID NO: 12914 - RNA, 20 nt, Artificial Sequence
  targeting sequence with CTCN PAM
gggggcagaguggccacacu

SEQ ID NO: 12915 - RNA, 20 nt, Artificial Sequence
  targeting sequence with CTCN PAM
gcccccggagcaaggcugug

SEQ ID NO: 12916 - RNA, 20 nt, Artificial Sequence
  targeting sequence with CTCN PAM
cccaguguggccacucugcc

SEQ ID NO: 12917 - RNA, 20 nt, Artificial Sequence
  targeting sequence with CTCN PAM
cacuaccugcuguugucucc

SEQ ID NO: 12918 - RNA, 20 nt, Artificial Sequence
  targeting sequence with CTCN PAM
cccagcuaucacacaacagc

SEQ ID NO: 12919 - RNA, 20 nt, Artificial Sequence
  targeting sequence with CTCN PAM
ccaggguuggguuucuaguc

SEQ ID NO: 12920 - RNA, 20 nt, Artificial Sequence
  targeting sequence with CTCN PAM
aggguuggguuucuagucug

SEQ ID NO: 12921 - RNA, 20 nt, Artificial Sequence
  targeting sequence with CTCN PAM
caggcugcugugaggauuca

SEQ ID NO: 12922 - RNA, 20 nt, Artificial Sequence
  targeting sequence with CTCN PAM
aacacuaucagauuacugga

SEQ ID NO: 12923 - RNA, 20 nt, Artificial Sequence
  targeting sequence with CTCN PAM
uccaacacuaucagauuacu

SEQ ID NO: 12924 - RNA, 20 nt, Artificial Sequence
  targeting sequence with CTCN PAM
ugugcauuugggaaacuccu

SEQ ID NO: 12925 - RNA, 20 nt, Artificial Sequence
  targeting sequence with CTCN PAM
gcucaugugcauuugggaaa

SEQ ID NO: 12926 - RNA, 20 nt, Artificial Sequence
  targeting sequence with CTCN PAM
auuccccagaaauggaccug

SEQ ID NO: 12927 - RNA, 20 nt, Artificial Sequence
  targeting sequence with CTCN PAM
ccagguccauuucuggggaa

SEQ ID NO: 12928 - RNA, 20 nt, Artificial Sequence
  targeting sequence with CTCN PAM
guucagacugugggccuugc

SEQ ID NO: 12929 - RNA, 20 nt, Artificial Sequence
  targeting sequence with CTCN PAM
ggggcgcucaguucagacug

SEQ ID NO: 12930 - RNA, 20 nt, Artificial Sequence
  targeting sequence with CTCN PAM
agaacucuggggcgcucagu

SEQ ID NO: 12931 - RNA, 20 nt, Artificial Sequence
  targeting sequence with CTCN PAM
gccagaaacaguagggcuag

SEQ ID NO: 12932 - RNA, 20 nt, Artificial Sequence
  targeting sequence with CTCN PAM
agucuauaaugcuagcacuu

SEQ ID NO: 12933 - RNA, 20 nt, Artificial Sequence
  targeting sequence with CTCN PAM
gugcugucuggcugucuguu

SEQ ID NO: 12934 - RNA, 20 nt, Artificial Sequence
  targeting sequence with CTCN PAM
ugaacauauuuauugugaag

SEQ ID NO: 12935 - RNA, 20 nt, Artificial Sequence
  targeting sequence with CTCN PAM
cauucccauaccuucacaau

SEQ ID NO: 12936 - RNA, 20 nt, Artificial Sequence
  targeting sequence with CTCN PAM
cuguuuccaacugggaauuc

SEQ ID NO: 12937 - RNA, 20 nt, Artificial Sequence
  targeting sequence with CTCN PAM
cauucauuuccccauaauaa

SEQ ID NO: 12938 - RNA, 20 nt, Artificial Sequence
  targeting sequence with CTCN PAM
uucauuuccccauaauaaac

SEQ ID NO: 12939 - RNA, 20 nt, Artificial Sequence
  targeting sequence with CTCN PAM
gcacaagggcuggcccauga

SEQ ID NO: 12940 - RNA, 20 nt, Artificial Sequence
  targeting sequence with CTCN PAM
gugggcacagagcugaggag

SEQ ID NO: 12941 - RNA, 20 nt, Artificial Sequence
  targeting sequence with CTCN PAM
gugcccacugagcucggcac

SEQ ID NO: 12942 - RNA, 20 nt, Artificial Sequence
  targeting sequence with CTCN PAM
cccuauuccaugcaggagga

SEQ ID NO: 12943 - RNA, 20 nt, Artificial Sequence
  targeting sequence with CTCN PAM
cuauuccaugcaggaggaaa

SEQ ID NO: 12944 - RNA, 20 nt, Artificial Sequence
  targeting sequence with CTCN PAM
ugcauggaauagggagagca

SEQ ID NO: 12945 - RNA, 20 nt, Artificial Sequence
  targeting sequence with CTCN PAM
gcaagacgaugccacauccc

SEQ ID NO: 12946 - RNA, 20 nt, Artificial Sequence
  targeting sequence with CTCN PAM
ugcucucucggccacauacc

SEQ ID NO: 12947 - RNA, 20 nt, Artificial Sequence
  targeting sequence with CTCN PAM
cucggccacauacccucccu

SEQ ID NO: 12948 - RNA, 20 nt, Artificial Sequence
  targeting sequence with CTCN PAM
cggccacauacccucccuac

SEQ ID NO: 12949 - RNA, 20 nt, Artificial Sequence
  targeting sequence with CTCN PAM
gccacauacccucccuaccc

SEQ ID NO: 12950 - RNA, 20 nt, Artificial Sequence
  targeting sequence with CTCN PAM
cuacccgcguguuguaaggg

SEQ ID NO: 12951 - RNA, 20 nt, Artificial Sequence
  targeting sequence with CTCN PAM
gaacaagcccuuuaccacgc

SEQ ID NO: 12952 - RNA, 20 nt, Artificial Sequence
  targeting sequence with CTCN PAM
aaaugcccagugcugcugac

SEQ ID NO: 12953 - RNA, 20 nt, Artificial Sequence
  targeting sequence with CTCN PAM
uuggcuucaggugaagaccc

SEQ ID NO: 12954 - RNA, 20 nt, Artificial Sequence
  targeting sequence with CTCN PAM
cuacaaaaguaacugcugug

SEQ ID NO: 12955 - RNA, 20 nt, Artificial Sequence
  targeting sequence with CTCN PAM
acaaaaguaacugcuguggg

SEQ ID NO: 12956 - RNA, 20 nt, Artificial Sequence
  targeting sequence with CTCN PAM
ccucguaugcuaugagcugg

SEQ ID NO: 12957 - RNA, 20 nt, Artificial Sequence
  targeting sequence with CTCN PAM
ucguaugcuaugagcuggga

SEQ ID NO: 12958 - RNA, 20 nt, Artificial Sequence
  targeting sequence with CTCN PAM
uaugcuaugagcugggaagu

SEQ ID NO: 12959 - RNA, 20 nt, Artificial Sequence
  targeting sequence with CTCN PAM
uagcauacgaggagaggacu

SEQ ID NO: 12960 - RNA, 20 nt, Artificial Sequence
  targeting sequence with CTCN PAM
uaagauugucucuugaaaaa

SEQ ID NO: 12961 - RNA, 20 nt, Artificial Sequence
  targeting sequence with CTCN PAM
ugaaaaaaaguaaagugccu

SEQ ID NO: 12962 - RNA, 20 nt, Artificial Sequence
  targeting sequence with CTCN PAM
aaggcacuuuacuuuuuuuc

SEQ ID NO: 12963 - RNA, 20 nt, Artificial Sequence
  targeting sequence with CTCN PAM
auaucgacugccugcagacu

SEQ ID NO: 12964 - RNA, 20 nt, Artificial Sequence
  targeting sequence with CTCN PAM
gcauaauuccagagaacugc

SEQ ID NO: 12965 - RNA, 20 nt, Artificial Sequence
  targeting sequence with CTCN PAM
ggaauuaugcugagcaccca

SEQ ID NO: 12966 - RNA, 20 nt, Artificial Sequence
  targeting sequence with CTCN PAM
ccuauccaaaaggcacccac

SEQ ID NO: 12967 - RNA, 20 nt, Artificial Sequence
  targeting sequence with CTCN PAM
gcaggugcaugucaacaugg

SEQ ID NO: 12968 - RNA, 20 nt, Artificial Sequence
  targeting sequence with CTCN PAM
gcaaaaaaaaaacaaacaaa

SEQ ID NO: 12969 - RNA, 20 nt, Artificial Sequence
  targeting sequence with CTCN PAM
aucucugcaaaaaaaaaaca

SEQ ID NO: 12970 - RNA, 20 nt, Artificial Sequence
  targeting sequence with CTCN PAM
ugggcucaagugauccuccu

SEQ ID NO: 12971 - RNA, 20 nt, Artificial Sequence
  targeting sequence with CTCN PAM
agugauccuccucuuuugac

SEQ ID NO: 12972 - RNA, 20 nt, Artificial Sequence
  targeting sequence with CTCN PAM
ucuuuugaccucccaaagug

SEQ ID NO: 12973 - RNA, 20 nt, Artificial Sequence
  targeting sequence with CTCN PAM
uuugaccucccaaaguguag

SEQ ID NO: 12974 - RNA, 20 nt, Artificial Sequence
  targeting sequence with CTCN PAM
caaaguguagggaucacagg

SEQ ID NO: 12975 - RNA, 20 nt, Artificial Sequence
  targeting sequence with CTCN PAM
cggcaagauuucaauucauu

SEQ ID NO: 12976 - RNA, 20 nt, Artificial Sequence
  targeting sequence with CTCN PAM
uaauaguuggaaaugaauug

SEQ ID NO: 12977 - RNA, 20 nt, Artificial Sequence
  targeting sequence with CTCN PAM
ucaaacaaacuaacuccuaa

SEQ ID NO: 12978 - RNA, 20 nt, Artificial Sequence
  targeting sequence with CTCN PAM
ggcucaucaaacaaacuaac

SEQ ID NO: 12979 - RNA, 20 nt, Artificial Sequence
  targeting sequence with CTCN PAM
agcuguuaaaacuuucacca

SEQ ID NO: 12980 - RNA, 20 nt, Artificial Sequence
  targeting sequence with CTCN PAM
uagacaagcuggugaaaguu

SEQ ID NO: 12981 - RNA, 20 nt, Artificial Sequence
  targeting sequence with CTCN PAM
aauaugcugcucuuucuaga

SEQ ID NO: 12982 - RNA, 20 nt, Artificial Sequence
  targeting sequence with CTCN PAM
uucuagaaaacaagcaaaag

SEQ ID NO: 12983 - RNA, 20 nt, Artificial Sequence
  targeting sequence with CTCN PAM
ggguuugggugcuacugagu

SEQ ID NO: 12984 - RNA, 20 nt, Artificial Sequence
  targeting sequence with CTCN PAM
guagcacccaaacccugagc

SEQ ID NO: 12985 - RNA, 20 nt, Artificial Sequence
  targeting sequence with CTCN PAM
agcuguagacaagcgaaugu

SEQ ID NO: 12986 - RNA, 20 nt, Artificial Sequence
  targeting sequence with CTCN PAM
aguauuuguaaacacucagu

SEQ ID NO: 12987 - RNA, 20 nt, Artificial Sequence
  targeting sequence with CTCN PAM
agauauuccuuguaucacac

SEQ ID NO: 12988 - RNA, 20 nt, Artificial Sequence
  targeting sequence with CTCN PAM
gucugacccugaccuguucc

SEQ ID NO: 12989 - RNA, 20 nt, Artificial Sequence
  targeting sequence with CTCN PAM
ucuugagucucagcguccuu

SEQ ID NO: 12990 - RNA, 20 nt, Artificial Sequence
  targeting sequence with CTCN PAM
agaagaggaacaggucaggg

SEQ ID NO: 12991 - RNA, 20 nt, Artificial Sequence
  targeting sequence with CTCN PAM
gcguccuucacucuaacacu

SEQ ID NO: 12992 - RNA, 20 nt, Artificial Sequence
  targeting sequence with CTCN PAM
aacacuuggguagugagacc

SEQ ID NO: 12993 - RNA, 20 nt, Artificial Sequence
  targeting sequence with CTCN PAM
cuacccaaguguuagaguga

SEQ ID NO: 12994 - RNA, 20 nt, Artificial Sequence
  targeting sequence with CTCN PAM
ggguaggucucacuacccaa

SEQ ID NO: 12995 - RNA, 20 nt, Artificial Sequence
  targeting sequence with CTCN PAM
gugacccucaggguaggucu

SEQ ID NO: 12996 - RNA, 20 nt, Artificial Sequence
  targeting sequence with CTCN PAM
cagugacccucaggguaggu

SEQ ID NO: 12997 - RNA, 20 nt, Artificial Sequence
  targeting sequence with CTCN PAM
uuagaaguagggauaucgua

SEQ ID NO: 12998 - RNA, 20 nt, Artificial Sequence
  targeting sequence with CTCN PAM
cucuugggcagaaacccuaa

SEQ ID NO: 12999 - RNA, 20 nt, Artificial Sequence
  targeting sequence with CTCN PAM
ugggcagaaacccuaaacau

SEQ ID NO: 13000 - RNA, 20 nt, Artificial Sequence
  targeting sequence with CTCN PAM
ugcucugucauccccaugag

SEQ ID NO: 13001 - RNA, 20 nt, Artificial Sequence
  targeting sequence with CTCN PAM
gucauccccaugagccacaa

SEQ ID NO: 13002 - RNA, 20 nt, Artificial Sequence
  targeting sequence with CTCN PAM
uggggaugacagagcaggag

SEQ ID NO: 13003 - RNA, 20 nt, Artificial Sequence
  targeting sequence with CTCN PAM
gccaaacggggccugcggau

SEQ ID NO: 13004 - RNA, 20 nt, Artificial Sequence
  targeting sequence with CTCN PAM
caaauccgcaggccccguuu

SEQ ID NO: 13005 - RNA, 20 nt, Artificial Sequence
  targeting sequence with CTCN PAM
caagaucucccaaauccgca

SEQ ID NO: 13006 - RNA, 20 nt, Artificial Sequence
  targeting sequence with CTCN PAM
uccaugaccccuaagcuccc

SEQ ID NO: 13007 - RNA, 20 nt, Artificial Sequence
  targeting sequence with CTCN PAM
gacucauccaugaccccuaa

SEQ ID NO: 13008 - RNA, 20 nt, Artificial Sequence
  targeting sequence with CTCN PAM
ggguugcuuuccuguguauu

SEQ ID NO: 13009 - RNA, 20 nt, Artificial Sequence
  targeting sequence with CTCN PAM
ccuagguucccgcugggaag

SEQ ID NO: 13010 - RNA, 20 nt, Artificial Sequence
  targeting sequence with CTCN PAM
ccccuagguucccgcuggga

SEQ ID NO: 13011 - RNA, 20 nt, Artificial Sequence
  targeting sequence with CTCN PAM
cuccccuagguucccgcugg

SEQ ID NO: 13012 - RNA, 20 nt, Artificial Sequence
  targeting sequence with CTCN PAM
uggcuguugucucucucccc

SEQ ID NO: 13013 - RNA, 20 nt, Artificial Sequence
  targeting sequence with CTCN PAM
cuugaaauagccacaucuaa

SEQ ID NO: 13014 - RNA, 20 nt, Artificial Sequence
  targeting sequence with CTCN PAM
gcagccaugggcaggaagca

SEQ ID NO: 13015 - RNA, 20 nt, Artificial Sequence
  targeting sequence with CTCN PAM
uggaaaaauuagaagcaaag

SEQ ID NO: 13016 - RNA, 20 nt, Artificial Sequence
  targeting sequence with CTCN PAM
ccuggaaaaauuagaagcaa

SEQ ID NO: 13017 - RNA, 20 nt, Artificial Sequence
  targeting sequence with CTCN PAM
ccgcuucuuccucuccugga

SEQ ID NO: 13018 - RNA, 20 nt, Artificial Sequence
  targeting sequence with CTCN PAM
ccccgcuucuuccucuccug

SEQ ID NO: 13019 - RNA, 20 nt, Artificial Sequence
  targeting sequence with CTCN PAM
uggaacuuccccugguagga

SEQ ID NO: 13020 - RNA, 20 nt, Artificial Sequence
  targeting sequence with CTCN PAM
uguacaguuuggcggccuca

SEQ ID NO: 13021 - RNA, 20 nt, Artificial Sequence
  targeting sequence with CTCN PAM
ucuuguacaguuuggcggcc

SEQ ID NO: 13022 - RNA, 20 nt, Artificial Sequence
  targeting sequence with CTCN PAM
ugcccacuccucuuguacag

SEQ ID NO: 13023 - RNA, 20 nt, Artificial Sequence
  targeting sequence with CTCN PAM
cgcuugaaauguacaccgac

SEQ ID NO: 13024 - RNA, 20 nt, Artificial Sequence
  targeting sequence with CTCN PAM
gcauguuugaguaugccaag

SEQ ID NO: 13025 - RNA, 20 nt, Artificial Sequence
  targeting sequence with CTCN PAM
aacaugcagaggucggugua

SEQ ID NO: 13026 - RNA, 20 nt, Artificial Sequence
  targeting sequence with CTCN PAM
agcuuggagcccacugguau

SEQ ID NO: 13027 - RNA, 20 nt, Artificial Sequence
  targeting sequence with CTCN PAM
aagcuggagcuugggccugg

SEQ ID NO: 13028 - RNA, 20 nt, Artificial Sequence
  targeting sequence with CTCN PAM
cgugcgguguccaaguuauu

SEQ ID NO: 13029 - RNA, 20 nt, Artificial Sequence
  targeting sequence with CTCN PAM
uggggaaaauaacuuggaca

SEQ ID NO: 13030 - RNA, 20 nt, Artificial Sequence
  targeting sequence with CTCN PAM
gaaaggauguggggaaacug

SEQ ID NO: 13031 - RNA, 20 nt, Artificial Sequence
  targeting sequence with CTCN PAM
ccuaaaacugaccuuuaagg

SEQ ID NO: 13032 - RNA, 20 nt, Artificial Sequence
  targeting sequence with CTCN PAM
augaagggauugugcuggug

SEQ ID NO: 13033 - RNA, 20 nt, Artificial Sequence
  targeting sequence with CTCN PAM
acucaaugaagggauugugc

SEQ ID NO: 13034 - RNA, 20 nt, Artificial Sequence
  targeting sequence with CTCN PAM
gggcuucagggcuguccccc

SEQ ID NO: 13035 - RNA, 20 nt, Artificial Sequence
  targeting sequence with CTCN PAM
caauccuugucaggagccgc

SEQ ID NO: 13036 - RNA, 20 nt, Artificial Sequence
  targeting sequence with CTCN PAM
auccuugucaggagccgcca

SEQ ID NO: 13037 - RNA, 20 nt, Artificial Sequence
  targeting sequence with CTCN PAM
ugacaaggauugagaggauu

SEQ ID NO: 13038 - RNA, 20 nt, Artificial Sequence
  targeting sequence with CTCN PAM
ugccugaagacaccgauucu

SEQ ID NO: 13039 - RNA, 20 nt, Artificial Sequence
  targeting sequence with CTCN PAM
cugggcuucugggaagucag

SEQ ID NO: 13040 - RNA, 20 nt, Artificial Sequence
  targeting sequence with CTCN PAM
gccugacuucccagaagccc

SEQ ID NO: 13041 - RNA, 20 nt, Artificial Sequence
  targeting sequence with CTCN PAM
gcccucccauguuagcgcag

SEQ ID NO: 13042 - RNA, 20 nt, Artificial Sequence
  targeting sequence with CTCN PAM
cauguuagcgcagcaugccu

SEQ ID NO: 13043 - RNA, 20 nt, Artificial Sequence
  targeting sequence with CTCN PAM
cgccugccggcugcagagug

SEQ ID NO: 13044 - RNA, 20 nt, Artificial Sequence
  targeting sequence with CTCN PAM
gcagccggcaggcgugaggc

SEQ ID NO: 13045 - RNA, 20 nt, Artificial Sequence
  targeting sequence with CTCN PAM
gccaucacccacugcaacca

SEQ ID NO: 13046 - RNA, 20 nt, Artificial Sequence
  targeting sequence with CTCN PAM
ccagcagagcugggccuuuu

SEQ ID NO: 13047 - RNA, 20 nt, Artificial Sequence
  targeting sequence with CTCN PAM
gcuggggaguaagguucaug

SEQ ID NO: 13048 - RNA, 20 nt, Artificial Sequence
  targeting sequence with CTCN PAM
uacaccugccuuaaaaggcc

SEQ ID NO: 13049 - RNA, 20 nt, Artificial Sequence
  targeting sequence with CTCN PAM
ccuacaccugccuuaaaagg

SEQ ID NO: 13050 - RNA, 20 nt, Artificial Sequence
  targeting sequence with CTCN PAM
ucuccuacaccugccuuaaa

SEQ ID NO: 13051 - RNA, 20 nt, Artificial Sequence
  targeting sequence with CTCN PAM
ugauggcuucugugggaagg

SEQ ID NO: 13052 - RNA, 20 nt, Artificial Sequence
  targeting sequence with CTCN PAM
uucccacagaagccaucagg

SEQ ID NO: 13053 - RNA, 20 nt, Artificial Sequence
  targeting sequence with CTCN PAM
uuagugcaacuccuucccac

SEQ ID NO: 13054 - RNA, 20 nt, Artificial Sequence
  targeting sequence with CTCN PAM
gggcuccuuagugcaacucc

SEQ ID NO: 13055 - RNA, 20 nt, Artificial Sequence
  targeting sequence with CTCN PAM
uugaaccuugcuuagacuga

SEQ ID NO: 13056 - RNA, 20 nt, Artificial Sequence
  targeting sequence with CTCN PAM
uugcccaguguaccgaagcc

SEQ ID NO: 13057 - RNA, 20 nt, Artificial Sequence
  targeting sequence with CTCN PAM
caguauguuaugaagugacu

SEQ ID NO: 13058 - RNA, 20 nt, Artificial Sequence
  targeting sequence with CTCN PAM
guauguuaugaagugacuca

SEQ ID NO: 13059 - RNA, 20 nt, Artificial Sequence
  targeting sequence with CTCN PAM
ucagccauaaccuauuggug

SEQ ID NO: 13060 - RNA, 20 nt, Artificial Sequence
  targeting sequence with CTCN PAM
agcucacaaguucaagaugg

SEQ ID NO: 13061 - RNA, 20 nt, Artificial Sequence
  targeting sequence with CTCN PAM
caaguucaagauggaaaauc

SEQ ID NO: 13062 - RNA, 20 nt, Artificial Sequence
  targeting sequence with CTCN PAM
uccaccaccuguucgacccu

SEQ ID NO: 13063 - RNA, 20 nt, Artificial Sequence
  targeting sequence with CTCN PAM
uccaaguccugaugaacaau

SEQ ID NO: 13064 - RNA, 20 nt, Artificial Sequence
  targeting sequence with CTCN PAM
ugggccccagccugucuuuu

SEQ ID NO: 13065 - RNA, 20 nt, Artificial Sequence
  targeting sequence with CTCN PAM
guaccugagacccagggugu

SEQ ID NO: 13066 - RNA, 20 nt, Artificial Sequence
  targeting sequence with CTCN PAM
gguacggagugaagaaauca

SEQ ID NO: 13067 - RNA, 20 nt, Artificial Sequence
  targeting sequence with CTCN PAM
cucuacuuuuuccucgucac

SEQ ID NO: 13068 - RNA, 20 nt, Artificial Sequence
  targeting sequence with CTCN PAM
acuuuuuccucgucaccuuu

SEQ ID NO: 13069 - RNA, 20 nt, Artificial Sequence
  targeting sequence with CTCN PAM
ucaccuuuccuacccucccu

SEQ ID NO: 13070 - RNA, 20 nt, Artificial Sequence
  targeting sequence with CTCN PAM
cucaggccccaccaaagaca

SEQ ID NO: 13071 - RNA, 20 nt, Artificial Sequence
  targeting sequence with CTCN PAM
ggccccaccaaagacaccua

SEQ ID NO: 13072 - RNA, 20 nt, Artificial Sequence
  targeting sequence with CTCN PAM
guaugaauguguuaugaaau

SEQ ID NO: 13073 - RNA, 20 nt, Artificial Sequence
  targeting sequence with CTCN PAM
ggugaucucaguaugaaugu

SEQ ID NO: 13074 - RNA, 20 nt, Artificial Sequence
  targeting sequence with CTCN PAM
gcuuccggggauaacaaaau

SEQ ID NO: 13075 - RNA, 20 nt, Artificial Sequence
  targeting sequence with CTCN PAM
ggaugaacccuuaagggauc

SEQ ID NO: 13076 - RNA, 20 nt, Artificial Sequence
  targeting sequence with CTCN PAM
agggucuugaucccuuaagg

SEQ ID NO: 13077 - RNA, 20 nt, Artificial Sequence
  targeting sequence with CTCN PAM
gggguucccaacccuaaauu

SEQ ID NO: 13078 - RNA, 20 nt, Artificial Sequence
  targeting sequence with CTCN PAM
ucaaggaggcagcugugcug

SEQ ID NO: 13079 - RNA, 20 nt, Artificial Sequence
  targeting sequence with CTCN PAM
aggaggcagcugugcugcag

SEQ ID NO: 13080 - RNA, 20 nt, Artificial Sequence
  targeting sequence with CTCN PAM
uugaggaggccucagggguu

SEQ ID NO: 13081 - RNA, 20 nt, Artificial Sequence
  targeting sequence with CTCN PAM
aaccuguaauacuagcacuu

SEQ ID NO: 13082 - RNA, 20 nt, Artificial Sequence
  targeting sequence with CTCN PAM
caaagugcuaguauuacagg

SEQ ID NO: 13083 - RNA, 20 nt, Artificial Sequence
  targeting sequence with CTCN PAM
agcaauccacccacuucagc

SEQ ID NO: 13084 - RNA, 20 nt, Artificial Sequence
  targeting sequence with CTCN PAM
ggaggucgagaccagccugg

SEQ ID NO: 13085 - RNA, 20 nt, Artificial Sequence
  targeting sequence with CTCN PAM
ugagcucaagcaauccaccc

SEQ ID NO: 13086 - RNA, 20 nt, Artificial Sequence
  targeting sequence with CTCN PAM
accuccugagcucaagcaau

SEQ ID NO: 13087 - RNA, 20 nt, Artificial Sequence
  targeting sequence with CTCN PAM
cucuaccaaaaaugcaaaaa

SEQ ID NO: 13088 - RNA, 20 nt, Artificial Sequence
  targeting sequence with CTCN PAM
cuaccaaaaaugcaaaaaau

SEQ ID NO: 13089 - RNA, 20 nt, Artificial Sequence
  targeting sequence with CTCN PAM
accaaaaaugcaaaaaauua

SEQ ID NO: 13090 - RNA, 20 nt, Artificial Sequence
  targeting sequence with CTCN PAM
caguagcugggacuacaggc

SEQ ID NO: 13091 - RNA, 20 nt, Artificial Sequence
  targeting sequence with CTCN PAM
agcaaucuuuccaccuuagc

SEQ ID NO: 13092 - RNA, 20 nt, Artificial Sequence
  targeting sequence with CTCN PAM
ggggcucaagcaaucuuucc

SEQ ID NO: 13093 - RNA, 20 nt, Artificial Sequence
  targeting sequence with CTCN PAM
cugcaacuuccaccucuggg

SEQ ID NO: 13094 - RNA, 20 nt, Artificial Sequence
  targeting sequence with CTCN PAM
gucacccaggcuggaaugca

SEQ ID NO: 13095 - RNA, 20 nt, Artificial Sequence
  targeting sequence with CTCN PAM
ggggcaccaaggccaggcau

SEQ ID NO: 13096 - RNA, 20 nt, Artificial Sequence
  targeting sequence with CTCN PAM
caccagcucuggggcaccaa

SEQ ID NO: 13097 - RNA, 20 nt, Artificial Sequence
  targeting sequence with CTCN PAM
ucgguuugccaaaccucccu

SEQ ID NO: 13098 - RNA, 20 nt, Artificial Sequence
  targeting sequence with CTCN PAM
cuucccuucucagaugguaa

SEQ ID NO: 13099 - RNA, 20 nt, Artificial Sequence
  targeting sequence with CTCN PAM
gaugguaauagcgacagcuc

SEQ ID NO: 13100 - RNA, 20 nt, Artificial Sequence
  targeting sequence with CTCN PAM
guuuagucaugagauuugca

SEQ ID NO: 13101 - RNA, 20 nt, Artificial Sequence
  targeting sequence with CTCN PAM
ugacuaaacugagcugucgc

SEQ ID NO: 13102 - RNA, 20 nt, Artificial Sequence
  targeting sequence with CTCN PAM
ucuuccuaaucuuucuacag

SEQ ID NO: 13103 - RNA, 20 nt, Artificial Sequence
  targeting sequence with CTCN PAM
caucuuccuaaucuuucuac

SEQ ID NO: 13104 - RNA, 20 nt, Artificial Sequence
  targeting sequence with CTCN PAM
guggucacguguggccccuc

SEQ ID NO: 13105 - RNA, 20 nt, Artificial Sequence
  targeting sequence with CTCN PAM
cucccuggcuggccccacuc

SEQ ID NO: 13106 - RNA, 20 nt, Artificial Sequence
  targeting sequence with CTCN PAM
cccuggcuggccccacuccu

SEQ ID NO: 13107 - RNA, 20 nt, Artificial Sequence
  targeting sequence with CTCN PAM
cuggcuggccccacuccugc

SEQ ID NO: 13108 - RNA, 20 nt, Artificial Sequence
  targeting sequence with CTCN PAM
ugccccugcucugaggcccc

SEQ ID NO: 13109 - RNA, 20 nt, Artificial Sequence
  targeting sequence with CTCN PAM
gaggccccuccuuacacugu

SEQ ID NO: 13110 - RNA, 20 nt, Artificial Sequence
  targeting sequence with CTCN PAM
gagcaggggcaggagugggg

SEQ ID NO: 13111 - RNA, 20 nt, Artificial Sequence
  targeting sequence with CTCN PAM
uuacacugugguggacuucg

SEQ ID NO: 13112 - RNA, 20 nt, Artificial Sequence
  targeting sequence with CTCN PAM
caccagaacugcagcccauu

SEQ ID NO: 13113 - RNA, 20 nt, Artificial Sequence
  targeting sequence with CTCN PAM
auuugcuccgucucucuaug

SEQ ID NO: 13114 - RNA, 20 nt, Artificial Sequence
  targeting sequence with CTCN PAM
gucucucuaugaagguaaau

SEQ ID NO: 13115 - RNA, 20 nt, Artificial Sequence
  targeting sequence with CTCN PAM
cuaugaagguaaauacucug

SEQ ID NO: 13116 - RNA, 20 nt, Artificial Sequence
  targeting sequence with CTCN PAM
augaagguaaauacucuggg

SEQ ID NO: 13117 - RNA, 20 nt, Artificial Sequence
  targeting sequence with CTCN PAM
gggacuuguuuuugguuuua

SEQ ID NO: 13118 - RNA, 20 nt, Artificial Sequence
  targeting sequence with CTCN PAM
uuggaauagugaucaaaaac

SEQ ID NO: 13119 - RNA, 20 nt, Artificial Sequence
  targeting sequence with CTCN PAM
aauucagacuaccagguggg

SEQ ID NO: 13120 - RNA, 20 nt, Artificial Sequence
  targeting sequence with CTCN PAM
cccaccccccacauaaugug

SEQ ID NO: 13121 - RNA, 20 nt, Artificial Sequence
  targeting sequence with CTCN PAM
uaacucuuauguaguauguu

SEQ ID NO: 13122 - RNA, 20 nt, Artificial Sequence
  targeting sequence with CTCN PAM
uauguaguauguucuuauca

SEQ ID NO: 13123 - RNA, 20 nt, Artificial Sequence
  targeting sequence with CTCN PAM
ugcuuggugauuuugauaag

SEQ ID NO: 13124 - RNA, 20 nt, Artificial Sequence
  targeting sequence with CTCN PAM
uucaucacucagcacagccu

SEQ ID NO: 13125 - RNA, 20 nt, Artificial Sequence
  targeting sequence with CTCN PAM
gcacagccucuuucugucca

SEQ ID NO: 13126 - RNA, 20 nt, Artificial Sequence
  targeting sequence with CTCN PAM
uucuguccacuucagggcca

SEQ ID NO: 13127 - RNA, 20 nt, Artificial Sequence
  targeting sequence with CTCN PAM
gcaaacuggaaauucaaagg

SEQ ID NO: 13128 - RNA, 20 nt, Artificial Sequence
  targeting sequence with CTCN PAM
cugagugaccagcuggccua

SEQ ID NO: 13129 - RNA, 20 nt, Artificial Sequence
  targeting sequence with CTCN PAM
gggagcugugacuucauuga

SEQ ID NO: 13130 - RNA, 20 nt, Artificial Sequence
  targeting sequence with CTCN PAM
cucucagccucucacccuug

SEQ ID NO: 13131 - RNA, 20 nt, Artificial Sequence
  targeting sequence with CTCN PAM
cagccucucacccuugccgu

SEQ ID NO: 13132 - RNA, 20 nt, Artificial Sequence
  targeting sequence with CTCN PAM
gccucucacccuugccgugg

SEQ ID NO: 13133 - RNA, 20 nt, Artificial Sequence
  targeting sequence with CTCN PAM
cacccuugccguggucaccc

SEQ ID NO: 13134 - RNA, 20 nt, Artificial Sequence
  targeting sequence with CTCN PAM
cccuugccguggucaccccu

SEQ ID NO: 13135 - RNA, 20 nt, Artificial Sequence
  targeting sequence with CTCN PAM
ggggaccaggggugaccacg

SEQ ID NO: 13136 - RNA, 20 nt, Artificial Sequence
  targeting sequence with CTCN PAM
cugaagucccuuugaaggac

SEQ ID NO: 13137 - RNA, 20 nt, Artificial Sequence
  targeting sequence with CTCN PAM
uaagaugccuguuuuccucc

SEQ ID NO: 13138 - RNA, 20 nt, Artificial Sequence
  targeting sequence with CTCN PAM
agcugccacccucauuucac

SEQ ID NO: 13139 - RNA, 20 nt, Artificial Sequence
  targeting sequence with CTCN PAM
uuucaccagccagguaggca

SEQ ID NO: 13140 - RNA, 20 nt, Artificial Sequence
  targeting sequence with CTCN PAM
augccagcacgaagcuggaa

SEQ ID NO: 13141 - RNA, 20 nt, Artificial Sequence
  targeting sequence with CTCN PAM
agggagaaccaaaggccagc

SEQ ID NO: 13142 - RNA, 20 nt, Artificial Sequence
  targeting sequence with CTCN PAM
cuggagcugacaaagggaag

SEQ ID NO: 13143 - RNA, 20 nt, Artificial Sequence
  targeting sequence with CTCN PAM
ccuucuuaaaauguaucaua

SEQ ID NO: 13144 - RNA, 20 nt, Artificial Sequence
  targeting sequence with CTCN PAM
gaaagcacauuuacccugaa

SEQ ID NO: 13145 - RNA, 20 nt, Artificial Sequence
  targeting sequence with CTCN PAM
uuugcuuucaggguaaaugu

SEQ ID NO: 13146 - RNA, 20 nt, Artificial Sequence
  targeting sequence with CTCN PAM
cuuuuuucccucauuugcuu

SEQ ID NO: 13147 - RNA, 20 nt, Artificial Sequence
  targeting sequence with CTCN PAM
ugugucagaaaaguacaguc

SEQ ID NO: 13148 - RNA, 20 nt, Artificial Sequence
  targeting sequence with CTCN PAM
uuuccccaugauuaacacuc

SEQ ID NO: 13149 - RNA, 20 nt, Artificial Sequence
  targeting sequence with CTCN PAM
gugaggcugacacaaaguac

SEQ ID NO: 13150 - RNA, 20 nt, Artificial Sequence
  targeting sequence with CTCN PAM
cugagaacaaaaaaagcacu

SEQ ID NO: 13151 - RNA, 20 nt, Artificial Sequence
  targeting sequence with CTCN PAM
ccacaggguacauuauuccu

SEQ ID NO: 13152 - RNA, 20 nt, Artificial Sequence
  targeting sequence with CTCN PAM
acaggguacauuauuccuga

SEQ ID NO: 13153 - RNA, 20 nt, Artificial Sequence
  targeting sequence with CTCN PAM
ggaauaauguacccugugga

SEQ ID NO: 13154 - RNA, 20 nt, Artificial Sequence
  targeting sequence with CTCN PAM
caguuucccuuuuugaaaag

SEQ ID NO: 13155 - RNA, 20 nt, Artificial Sequence
  targeting sequence with CTCN PAM
accuuuaaaagcugccucaa

SEQ ID NO: 13156 - RNA, 20 nt, Artificial Sequence
  targeting sequence with CTCN PAM
auucuggcaaacucccacgu

SEQ ID NO: 13157 - RNA, 20 nt, Artificial Sequence
  targeting sequence with CTCN PAM
cacguguguauuuuggguaa

SEQ ID NO: 13158 - RNA, 20 nt, Artificial Sequence
  targeting sequence with CTCN PAM
gaaaagaggugguguucuga

SEQ ID NO: 13159 - RNA, 20 nt, Artificial Sequence
  targeting sequence with CTCN PAM
uuucagaguaguuacccaaa

SEQ ID NO: 13160 - RNA, 20 nt, Artificial Sequence
  targeting sequence with CTCN PAM
gaacaccaccucuuuucaga

SEQ ID NO: 13161 - RNA, 20 nt, Artificial Sequence
  targeting sequence with CTCN PAM
cacauuguagggccagccca

SEQ ID NO: 13162 - RNA, 20 nt, Artificial Sequence
  targeting sequence with CTCN PAM
gggcuggcccuacaaugugu

SEQ ID NO: 13163 - RNA, 20 nt, Artificial Sequence
  targeting sequence with CTCN PAM
gaagugguaugcccagcuuc

SEQ ID NO: 13164 - RNA, 20 nt, Artificial Sequence
  targeting sequence with CTCN PAM
gcauaccucugaagugguau

SEQ ID NO: 13165 - RNA, 20 nt, Artificial Sequence
  targeting sequence with CTCN PAM
gagccuccaggaccacagcc

SEQ ID NO: 13166 - RNA, 20 nt, Artificial Sequence
  targeting sequence with CTCN PAM
gagaucaggccuagggccug

SEQ ID NO: 13167 - RNA, 20 nt, Artificial Sequence
  targeting sequence with CTCN PAM
aggaccacagccaucucuuc

SEQ ID NO: 13168 - RNA, 20 nt, Artificial Sequence
  targeting sequence with CTCN PAM
uccuucucagguccucuccu

SEQ ID NO: 13169 - RNA, 20 nt, Artificial Sequence
  targeting sequence with CTCN PAM
gguccucuccugagcaccuu

SEQ ID NO: 13170 - RNA, 20 nt, Artificial Sequence
  targeting sequence with CTCN PAM
ccugagcaccuucccugccu

SEQ ID NO: 13171 - RNA, 20 nt, Artificial Sequence
  targeting sequence with CTCN PAM
ugagcaccuucccugccuca

SEQ ID NO: 13172 - RNA, 20 nt, Artificial Sequence
  targeting sequence with CTCN PAM
ggagaggaccugagaaggaa

SEQ ID NO: 13173 - RNA, 20 nt, Artificial Sequence
  targeting sequence with CTCN PAM
gauucccccauggccuccug

SEQ ID NO: 13174 - RNA, 20 nt, Artificial Sequence
  targeting sequence with CTCN PAM
ugcugucccacugucggauc

SEQ ID NO: 13175 - RNA, 20 nt, Artificial Sequence
  targeting sequence with CTCN PAM
ccccugcagaccugaccuca

SEQ ID NO: 13176 - RNA, 20 nt, Artificial Sequence
  targeting sequence with CTCN PAM
gcacaggaucccuaaccauu

SEQ ID NO: 13177 - RNA, 20 nt, Artificial Sequence
  targeting sequence with CTCN PAM
gcugaaugguuagggauccu

SEQ ID NO: 13178 - RNA, 20 nt, Artificial Sequence
  targeting sequence with CTCN PAM
gguuaguugcuucucagcug

SEQ ID NO: 13179 - RNA, 20 nt, Artificial Sequence
  targeting sequence with CTCN PAM
cugguuaguugcuucucagc

SEQ ID NO: 13180 - RNA, 20 nt, Artificial Sequence
  targeting sequence with CTCN PAM
aguucagggcacagaauguu

SEQ ID NO: 13181 - RNA, 20 nt, Artificial Sequence
  targeting sequence with CTCN PAM
gagagggcauggagggcacg

SEQ ID NO: 13182 - RNA, 20 nt, Artificial Sequence
  targeting sequence with CTCN PAM
gagucaccagcaaacauucu

SEQ ID NO: 13183 - RNA, 20 nt, Artificial Sequence
  targeting sequence with CTCN PAM
cugagucaccagcaaacauu

SEQ ID NO: 13184 - RNA, 20 nt, Artificial Sequence
  targeting sequence with CTCN PAM
augcccucucugagucacca

SEQ ID NO: 13185 - RNA, 20 nt, Artificial Sequence
  targeting sequence with CTCN PAM
gugcccuccaugcccucucu

SEQ ID NO: 13186 - RNA, 20 nt, Artificial Sequence
  targeting sequence with CTCN PAM
gccucacucugaagcaugug

SEQ ID NO: 13187 - RNA, 20 nt, Artificial Sequence
  targeting sequence with CTCN PAM
cucugaagcaugugguauca

SEQ ID NO: 13188 - RNA, 20 nt, Artificial Sequence
  targeting sequence with CTCN PAM
gaagcaugugguaucaccca

SEQ ID NO: 13189 - RNA, 20 nt, Artificial Sequence
  targeting sequence with CTCN PAM
auauguggaauugugcacca

SEQ ID NO: 13190 - RNA, 20 nt, Artificial Sequence
  targeting sequence with CTCN PAM
uugcuguuuaggaacagucc

SEQ ID NO: 13191 - RNA, 20 nt, Artificial Sequence
  targeting sequence with CTCN PAM
cauaguuuggucaauacagg

SEQ ID NO: 13192 - RNA, 20 nt, Artificial Sequence
  targeting sequence with CTCN PAM
cacauaguuuggucaauaca

SEQ ID NO: 13193 - RNA, 20 nt, Artificial Sequence
  targeting sequence with CTCN PAM
cucacauaguuuggucaaua

SEQ ID NO: 13194 - RNA, 20 nt, Artificial Sequence
  targeting sequence with CTCN PAM
cucucacauaguuuggucaa

SEQ ID NO: 13195 - RNA, 20 nt, Artificial Sequence
  targeting sequence with CTCN PAM
caaaugggcauuuguucauc

SEQ ID NO: 13196 - RNA, 20 nt, Artificial Sequence
  targeting sequence with CTCN PAM
ggcugcccugcagguguucc

SEQ ID NO: 13197 - RNA, 20 nt, Artificial Sequence
  targeting sequence with CTCN PAM
ucccgagaccugggacuccc

SEQ ID NO: 13198 - RNA, 20 nt, Artificial Sequence
  targeting sequence with CTCN PAM
ggaagagugaucucaggcug

SEQ ID NO: 13199 - RNA, 20 nt, Artificial Sequence
  targeting sequence with CTCN PAM
cccaacucagccccucaggg

SEQ ID NO: 13200 - RNA, 20 nt, Artificial Sequence
  targeting sequence with CTCN PAM
gccccucagggccgggcccu

SEQ ID NO: 13201 - RNA, 20 nt, Artificial Sequence
  targeting sequence with CTCN PAM
gggccgggcccugccuaccu

SEQ ID NO: 13202 - RNA, 20 nt, Artificial Sequence
  targeting sequence with CTCN PAM
ugguugccugcuucagccau

SEQ ID NO: 13203 - RNA, 20 nt, Artificial Sequence
  targeting sequence with CTCN PAM
acauggcugaagcaggcaac

SEQ ID NO: 13204 - RNA, 20 nt, Artificial Sequence
  targeting sequence with CTCN PAM
ggaucagaacuuccugugcc

SEQ ID NO: 13205 - RNA, 20 nt, Artificial Sequence
  targeting sequence with CTCN PAM
ggauuuccuuggaucuggag

SEQ ID NO: 13206 - RNA, 20 nt, Artificial Sequence
  targeting sequence with CTCN PAM
agauccaaggaaauccugag

SEQ ID NO: 13207 - RNA, 20 nt, Artificial Sequence
  targeting sequence with CTCN PAM
uugauauuucuggcccaguc

SEQ ID NO: 13208 - RNA, 20 nt, Artificial Sequence
  targeting sequence with CTCN PAM
acggcggcuuugggcuccuu

SEQ ID NO: 13209 - RNA, 20 nt, Artificial Sequence
  targeting sequence with CTCN PAM
gcaggagagcacgucaaggc

SEQ ID NO: 13210 - RNA, 20 nt, Artificial Sequence
  targeting sequence with CTCN PAM
ugcugagauguacaucucca

SEQ ID NO: 13211 - RNA, 20 nt, Artificial Sequence
  targeting sequence with CTCN PAM
ccugcugagauguacaucuc

SEQ ID NO: 13212 - RNA, 20 nt, Artificial Sequence
  targeting sequence with CTCN PAM
auggccuugacgugcucucc

SEQ ID NO: 13213 - RNA, 20 nt, Artificial Sequence
  targeting sequence with CTCN PAM
gggcagggaccaaaaccuac

SEQ ID NO: 13214 - RNA, 20 nt, Artificial Sequence
  targeting sequence with CTCN PAM
ugacugacaagggaaccaau

SEQ ID NO: 13215 - RNA, 20 nt, Artificial Sequence
  targeting sequence with CTCN PAM
ugaagaaccuagccacuauc

SEQ ID NO: 13216 - RNA, 20 nt, Artificial Sequence
  targeting sequence with CTCN PAM
gugucuccugaagaaccuag

SEQ ID NO: 13217 - RNA, 20 nt, Artificial Sequence
  targeting sequence with CTCN PAM
uggaaggcagccacugccuu

SEQ ID NO: 13218 - RNA, 20 nt, Artificial Sequence
  targeting sequence with CTCN PAM
acaagcuccuggaaggcagc

SEQ ID NO: 13219 - RNA, 20 nt, Artificial Sequence
  targeting sequence with CTCN PAM
ucccugguccccaccauccc

SEQ ID NO: 13220 - RNA, 20 nt, Artificial Sequence
  targeting sequence with CTCN PAM
ucuucccugguccccaccau

SEQ ID NO: 13221 - RNA, 20 nt, Artificial Sequence
  targeting sequence with CTCN PAM
gcaaauggcagcugugaugu

SEQ ID NO: 13222 - RNA, 20 nt, Artificial Sequence
  targeting sequence with CTCN PAM
cuacaacccagacgcuguga

SEQ ID NO: 13223 - RNA, 20 nt, Artificial Sequence
  targeting sequence with CTCN PAM
ucgcccaccuugcagaugau

SEQ ID NO: 13224 - RNA, 20 nt, Artificial Sequence
  targeting sequence with CTCN PAM
cccaccuugcagaugaugaa

SEQ ID NO: 13225 - RNA, 20 nt, Artificial Sequence
  targeting sequence with CTCN PAM
acaacuuuccagcuaucugg

SEQ ID NO: 13226 - RNA, 20 nt, Artificial Sequence
  targeting sequence with CTCN PAM
gcucuacaacuuuccagcua

SEQ ID NO: 13227 - RNA, 20 nt, Artificial Sequence
  targeting sequence with CTCN PAM
gaucugcuggaugucgaugc

SEQ ID NO: 13228 - RNA, 20 nt, Artificial Sequence
  targeting sequence with CTCN PAM
cauaagaauucuucccugau

SEQ ID NO: 13229 - RNA, 20 nt, Artificial Sequence
  targeting sequence with CTCN PAM
uaggagacacucuuuccaug

SEQ ID NO: 13230 - RNA, 20 nt, Artificial Sequence
  targeting sequence with CTCN PAM
uaagagaagauauccauggu

SEQ ID NO: 13231 - RNA, 20 nt, Artificial Sequence
  targeting sequence with CTCN PAM
uuccaugaagggaccuuaaa

SEQ ID NO: 13232 - RNA, 20 nt, Artificial Sequence
  targeting sequence with CTCN PAM
uggaauucuuuaaggucccu

SEQ ID NO: 13233 - RNA, 20 nt, Artificial Sequence
  targeting sequence with CTCN PAM
auuuaccucuuggaauucuu

SEQ ID NO: 13234 - RNA, 20 nt, Artificial Sequence
  targeting sequence with CTCN PAM
cuguguuucugcuguacuuc

SEQ ID NO: 13235 - RNA, 20 nt, Artificial Sequence
  targeting sequence with CTCN PAM
gguuggaauaaaagacgugu

SEQ ID NO: 13236 - RNA, 20 nt, Artificial Sequence
  targeting sequence with CTCN PAM
cauucccacacgucuuuuau

SEQ ID NO: 13237 - RNA, 20 nt, Artificial Sequence
  targeting sequence with CTCN PAM
gaugccaaacggaggugcuu

SEQ ID NO: 13238 - RNA, 20 nt, Artificial Sequence
  targeting sequence with CTCN PAM
guuuggcaucggaggcccuu

SEQ ID NO: 13239 - RNA, 20 nt, Artificial Sequence
  targeting sequence with CTCN PAM
cuauuggcaaaucuaagcac

SEQ ID NO: 13240 - RNA, 20 nt, Artificial Sequence
  targeting sequence with CTCN PAM
ggcaggcagguagaauggag

SEQ ID NO: 13241 - RNA, 20 nt, Artificial Sequence
  targeting sequence with CTCN PAM
auucuaccugccugccugag

SEQ ID NO: 13242 - RNA, 20 nt, Artificial Sequence
  targeting sequence with CTCN PAM
acugcacuagccaguuaucu

SEQ ID NO: 13243 - RNA, 20 nt, Artificial Sequence
  targeting sequence with CTCN PAM
ugcucuacugcacuagccag

SEQ ID NO: 13244 - RNA, 20 nt, Artificial Sequence
  targeting sequence with CTCN PAM
gcuaccaaguucccuccugc

SEQ ID NO: 13245 - RNA, 20 nt, Artificial Sequence
  targeting sequence with CTCN PAM
ugcccucagcuaccaaguuc

SEQ ID NO: 13246 - RNA, 20 nt, Artificial Sequence
  targeting sequence with CTCN PAM
caugcccucagcuaccaagu

SEQ ID NO: 13247 - RNA, 20 nt, Artificial Sequence
  targeting sequence with CTCN PAM
cucaugcccucagcuaccaa

SEQ ID NO: 13248 - RNA, 20 nt, Artificial Sequence
  targeting sequence with CTCN PAM
ccacugccccaacacccugg

SEQ ID NO: 13249 - RNA, 20 nt, Artificial Sequence
  targeting sequence with CTCN PAM
guggcugcugguggguuaca

SEQ ID NO: 13250 - RNA, 20 nt, Artificial Sequence
  targeting sequence with CTCN PAM
cuguuguccaccuugacgaa

SEQ ID NO: 13251 - RNA, 20 nt, Artificial Sequence
  targeting sequence with CTCN PAM
cccuguuguccaccuugacg

SEQ ID NO: 13252 - RNA, 20 nt, Artificial Sequence
  targeting sequence with CTCN PAM
ucucccuguuguccaccuug

SEQ ID NO: 13253 - RNA, 20 nt, Artificial Sequence
  targeting sequence with CTCN PAM
gugcugccccaccccaaccc

SEQ ID NO: 13254 - RNA, 20 nt, Artificial Sequence
  targeting sequence with CTCN PAM
gcacaccggaccuugagggg

SEQ ID NO: 13255 - RNA, 20 nt, Artificial Sequence
  targeting sequence with CTCN PAM
agguccggugugcugagucc

SEQ ID NO: 13256 - RNA, 20 nt, Artificial Sequence
  targeting sequence with CTCN PAM
cagucagugagcuucaggcu

SEQ ID NO: 13257 - RNA, 20 nt, Artificial Sequence
  targeting sequence with CTCN PAM
cugacugggaggacaaagcc

SEQ ID NO: 13258 - RNA, 20 nt, Artificial Sequence
  targeting sequence with CTCN PAM
agcaugugcacacacacgug

SEQ ID NO: 13259 - RNA, 20 nt, Artificial Sequence
  targeting sequence with CTCN PAM
ugaggguggcucaggcuggg

SEQ ID NO: 13260 - RNA, 20 nt, Artificial Sequence
  targeting sequence with CTCN PAM
ggagcuugucccaucguguc

SEQ ID NO: 13261 - RNA, 20 nt, Artificial Sequence
  targeting sequence with CTCN PAM
ggcuggguccuaaaggcugu

SEQ ID NO: 13262 - RNA, 20 nt, Artificial Sequence
  targeting sequence with CTCN PAM
uccauauccccaaauccugg

SEQ ID NO: 13263 - RNA, 20 nt, Artificial Sequence
  targeting sequence with CTCN PAM
caaagggaccuugauggaug

SEQ ID NO: 13264 - RNA, 20 nt, Artificial Sequence
  targeting sequence with CTCN PAM
gucuuuaaaaaaauuacuau

SEQ ID NO: 13265 - RNA, 20 nt, Artificial Sequence
  targeting sequence with CTCN PAM
ucuauaugaaccccuucauu

SEQ ID NO: 13266 - RNA, 20 nt, Artificial Sequence
  targeting sequence with CTCN PAM
cuucuauaugaaccccuuca

SEQ ID NO: 13267 - RNA, 20 nt, Artificial Sequence
  targeting sequence with CTCN PAM
guucucucuucugguuuuuc

SEQ ID NO: 13268 - RNA, 20 nt, Artificial Sequence
  targeting sequence with CTCN PAM
cuucugguuuuucuugucac

SEQ ID NO: 13269 - RNA, 20 nt, Artificial Sequence
  targeting sequence with CTCN PAM
ucugguuuuucuugucacuu

SEQ ID NO: 13270 - RNA, 20 nt, Artificial Sequence
  targeting sequence with CTCN PAM
ggguaaccugauacuauagc

SEQ ID NO: 13271 - RNA, 20 nt, Artificial Sequence
  targeting sequence with CTCN PAM
aguacccucaggguaaccug

SEQ ID NO: 13272 - RNA, 20 nt, Artificial Sequence
  targeting sequence with CTCN PAM
agggacguugggugugaugg

SEQ ID NO: 13273 - RNA, 20 nt, Artificial Sequence
  targeting sequence with CTCN PAM
gcagaaaaaggacacguuuu

SEQ ID NO: 13274 - RNA, 20 nt, Artificial Sequence
  targeting sequence with CTCN PAM
gugccuugccugucuccaga

SEQ ID NO: 13275 - RNA, 20 nt, Artificial Sequence
  targeting sequence with CTCN PAM
agacagggauucguuacagc

SEQ ID NO: 13276 - RNA, 20 nt, Artificial Sequence
  targeting sequence with CTCN PAM
uuccuuucucaccaagacua

SEQ ID NO: 13277 - RNA, 20 nt, Artificial Sequence
  targeting sequence with CTCN PAM
ccaagacuagccuggguaga

SEQ ID NO: 13278 - RNA, 20 nt, Artificial Sequence
  targeting sequence with CTCN PAM
ugggagaguuaguuugacuc

SEQ ID NO: 13279 - RNA, 20 nt, Artificial Sequence
  targeting sequence with CTCN PAM
caggagaaaggguucuaccc

SEQ ID NO: 13280 - RNA, 20 nt, Artificial Sequence
  targeting sequence with CTCN PAM
cccaggagaaaggguucuac

SEQ ID NO: 13281 - RNA, 20 nt, Artificial Sequence
  targeting sequence with CTCN PAM
aaauuccagccugaccagag

SEQ ID NO: 13282 - RNA, 20 nt, Artificial Sequence
  targeting sequence with CTCN PAM
ggucaggcuggaauuuggag

SEQ ID NO: 13283 - RNA, 20 nt, Artificial Sequence
  targeting sequence with CTCN PAM
cuggucaggcuggaauuugg

SEQ ID NO: 13284 - RNA, 20 nt, Artificial Sequence
  targeting sequence with CTCN PAM
uguccccaugagugauggga

SEQ ID NO: 13285 - RNA, 20 nt, Artificial Sequence
  targeting sequence with CTCN PAM
uggggacaugaggccuggau

SEQ ID NO: 13286 - RNA, 20 nt, Artificial Sequence
  targeting sequence with CTCN PAM
caucacucauggggacauga

SEQ ID NO: 13287 - RNA, 20 nt, Artificial Sequence
  targeting sequence with CTCN PAM
ccauggggaagcagugguga

SEQ ID NO: 13288 - RNA, 20 nt, Artificial Sequence
  targeting sequence with CTCN PAM
ccacugcuuccccaugguga

SEQ ID NO: 13289 - RNA, 20 nt, Artificial Sequence
  targeting sequence with CTCN PAM
ucccucuuuggucagcacgu

SEQ ID NO: 13290 - RNA, 20 nt, Artificial Sequence
  targeting sequence with CTCN PAM
cucuuuggucagcacguugg

SEQ ID NO: 13291 - RNA, 20 nt, Artificial Sequence
  targeting sequence with CTCN PAM
uuggucagcacguuggccag

SEQ ID NO: 13292 - RNA, 20 nt, Artificial Sequence
  targeting sequence with CTCN PAM
uggccaacgugcugaccaaa

SEQ ID NO: 13293 - RNA, 20 nt, Artificial Sequence
  targeting sequence with CTCN PAM
ggacaaaggccugcaggaag

SEQ ID NO: 13294 - RNA, 20 nt, Artificial Sequence
  targeting sequence with CTCN PAM
gagcaggccccacacucacc

SEQ ID NO: 13295 - RNA, 20 nt, Artificial Sequence
  targeting sequence with CTCN PAM
gagcucuggacaaaggccug

SEQ ID NO: 13296 - RNA, 20 nt, Artificial Sequence
  targeting sequence with CTCN PAM
ccucuuccuuuagagggcag

SEQ ID NO: 13297 - RNA, 20 nt, Artificial Sequence
  targeting sequence with CTCN PAM
uccuuuagagggcagucauu

SEQ ID NO: 13298 - RNA, 20 nt, Artificial Sequence
  targeting sequence with CTCN PAM
aaaggaagaggugagugugg

SEQ ID NO: 13299 - RNA, 20 nt, Artificial Sequence
  targeting sequence with CTCN PAM
augacugcccucuaaaggaa

SEQ ID NO: 13300 - RNA, 20 nt, Artificial Sequence
  targeting sequence with CTCN PAM
cggaaaaguggaugccaagg

SEQ ID NO: 13301 - RNA, 20 nt, Artificial Sequence
  targeting sequence with CTCN PAM
uuccaccacgggugcaggaa

SEQ ID NO: 13302 - RNA, 20 nt, Artificial Sequence
  targeting sequence with CTCN PAM
ucugagagauggaaauaauc

SEQ ID NO: 13303 - RNA, 20 nt, Artificial Sequence
  targeting sequence with CTCN PAM
gaugagaagaauaaagucug

SEQ ID NO: 13304 - RNA, 20 nt, Artificial Sequence
  targeting sequence with CTCN PAM
cagaugagaagaauaaaguc

SEQ ID NO: 13305 - RNA, 20 nt, Artificial Sequence
  targeting sequence with CTCN PAM
uaggguggugaagauucuga

SEQ ID NO: 13306 - RNA, 20 nt, Artificial Sequence
  targeting sequence with CTCN PAM
uggcgucaucuggguaccug

SEQ ID NO: 13307 - RNA, 20 nt, Artificial Sequence
  targeting sequence with CTCN PAM
gggucuugucaacggcaagc

SEQ ID NO: 13308 - RNA, 20 nt, Artificial Sequence
  targeting sequence with CTCN PAM
uaccugccccuucccucucc

SEQ ID NO: 13309 - RNA, 20 nt, Artificial Sequence
  targeting sequence with CTCN PAM
ccagguugaucgacaucgcc

SEQ ID NO: 13310 - RNA, 20 nt, Artificial Sequence
  targeting sequence with CTCN PAM
agguugaucgacaucgcccg

SEQ ID NO: 13311 - RNA, 20 nt, Artificial Sequence
  targeting sequence with CTCN PAM
gccuuguccaguuugcgggc

SEQ ID NO: 13312 - RNA, 20 nt, Artificial Sequence
  targeting sequence with CTCN PAM
cgcucagccuuguccaguuu

SEQ ID NO: 13313 - RNA, 20 nt, Artificial Sequence
  targeting sequence with CTCN PAM
agaagcuggacagcccuggc

SEQ ID NO: 13314 - RNA, 20 nt, Artificial Sequence
  targeting sequence with CTCN PAM
gcagcauagccagggcuguc

SEQ ID NO: 13315 - RNA, 20 nt, Artificial Sequence
  targeting sequence with CTCN PAM
agucccuggugcagcugcac

SEQ ID NO: 13316 - RNA, 20 nt, Artificial Sequence
  targeting sequence with CTCN PAM
acgugcagcugcaccaggga

SEQ ID NO: 13317 - RNA, 20 nt, Artificial Sequence
  targeting sequence with CTCN PAM
ucccagcgcugggucuccac

SEQ ID NO: 13318 - RNA, 20 nt, Artificial Sequence
  targeting sequence with CTCN PAM
ccucaucccagcgcuggguc

SEQ ID NO: 13319 - RNA, 20 nt, Artificial Sequence
  targeting sequence with CTCN PAM
ugggcuggggccccaccuga

SEQ ID NO: 13320 - RNA, 20 nt, Artificial Sequence
  targeting sequence with CTCN PAM
gguggggccccagcccauga

SEQ ID NO: 13321 - RNA, 20 nt, Artificial Sequence
  targeting sequence with CTCN PAM
aucugaaccccaaagggccc

SEQ ID NO: 13322 - RNA, 20 nt, Artificial Sequence
  targeting sequence with CTCN PAM
ccaucugaaccccaaagggc

SEQ ID NO: 13323 - RNA, 20 nt, Artificial Sequence
  targeting sequence with CTCN PAM
ugauggaaggaacauugggc

SEQ ID NO: 13324 - RNA, 20 nt, Artificial Sequence
  targeting sequence with CTCN PAM
aauucucugagccacagaau

SEQ ID NO: 13325 - RNA, 20 nt, Artificial Sequence
  targeting sequence with CTCN PAM
gagccacagaaucguggagg

SEQ ID NO: 13326 - RNA, 20 nt, Artificial Sequence
  targeting sequence with CTCN PAM
gagaauucgagguuaaguua

SEQ ID NO: 13327 - RNA, 20 nt, Artificial Sequence
  targeting sequence with CTCN PAM
acgauucuguggcucagaga

SEQ ID NO: 13328 - RNA, 20 nt, Artificial Sequence
  targeting sequence with CTCN PAM
augacugaaugaagggacaa

SEQ ID NO: 13329 - RNA, 20 nt, Artificial Sequence
  targeting sequence with CTCN PAM
gccaggguggugacaggcac

SEQ ID NO: 13330 - RNA, 20 nt, Artificial Sequence
  targeting sequence with CTCN PAM
agugccugcuguugggcuga

SEQ ID NO: 13331 - RNA, 20 nt, Artificial Sequence
  targeting sequence with CTCN PAM
gcccaacagcaggcacugga

SEQ ID NO: 13332 - RNA, 20 nt, Artificial Sequence
  targeting sequence with CTCN PAM
gaccagcaccacaggcucag

SEQ ID NO: 13333 - RNA, 20 nt, Artificial Sequence
  targeting sequence with CTCN PAM
gacacauggcugauguggag

SEQ ID NO: 13334 - RNA, 20 nt, Artificial Sequence
  targeting sequence with CTCN PAM
acaucagccaugugucugag

SEQ ID NO: 13335 - RNA, 20 nt, Artificial Sequence
  targeting sequence with CTCN PAM
cagucuggaucuggaaagca

SEQ ID NO: 13336 - RNA, 20 nt, Artificial Sequence
  targeting sequence with CTCN PAM
cacagucuggaucuggaaag

SEQ ID NO: 13337 - RNA, 20 nt, Artificial Sequence
  targeting sequence with CTCN PAM
cuucucugcccccaccccac

SEQ ID NO: 13338 - RNA, 20 nt, Artificial Sequence
  targeting sequence with CTCN PAM
gcccccaccccacaaccacu

SEQ ID NO: 13339 - RNA, 20 nt, Artificial Sequence
  targeting sequence with CTCN PAM
cuggugucaggggcuguaaa

SEQ ID NO: 13340 - RNA, 20 nt, Artificial Sequence
  targeting sequence with CTCN PAM
ggugucaggggcuguaaaga

SEQ ID NO: 13341 - RNA, 20 nt, Artificial Sequence
  targeting sequence with CTCN PAM
cugaccuggcuaauucuuua

SEQ ID NO: 13342 - RNA, 20 nt, Artificial Sequence
  targeting sequence with CTCN PAM
ggcuggcagaagcagcugau

SEQ ID NO: 13343 - RNA, 20 nt, Artificial Sequence
  targeting sequence with CTCN PAM
acccccacccuccagcucac

SEQ ID NO: 13344 - RNA, 20 nt, Artificial Sequence
  targeting sequence with CTCN PAM
agcucacuggcucccuguuc

SEQ ID NO: 13345 - RNA, 20 nt, Artificial Sequence
  targeting sequence with CTCN PAM
cuggcucccuguucccugca

SEQ ID NO: 13346 - RNA, 20 nt, Artificial Sequence
  targeting sequence with CTCN PAM
cuguucccugcagagaaauc

SEQ ID NO: 13347 - RNA, 20 nt, Artificial Sequence
  targeting sequence with CTCN PAM
gcagggaacagggagccagu

SEQ ID NO: 13348 - RNA, 20 nt, Artificial Sequence
  targeting sequence with CTCN PAM
gggauggauuucucugcagg

SEQ ID NO: 13349 - RNA, 20 nt, Artificial Sequence
  targeting sequence with CTCN PAM
cggggauggauuucucugca

SEQ ID NO: 13350 - RNA, 20 nt, Artificial Sequence
  targeting sequence with CTCN PAM
uaauccucucggggauggau

SEQ ID NO: 13351 - RNA, 20 nt, Artificial Sequence
  targeting sequence with CTCN PAM
cccgacucacccacccaccc

SEQ ID NO: 13352 - RNA, 20 nt, Artificial Sequence
  targeting sequence with CTCN PAM
cccacccacccaucaugguc

SEQ ID NO: 13353 - RNA, 20 nt, Artificial Sequence
  targeting sequence with CTCN PAM
aaaauggaccaugaugggug

SEQ ID NO: 13354 - RNA, 20 nt, Artificial Sequence
  targeting sequence with CTCN PAM
gugaaggcuuugcuuucacu

SEQ ID NO: 13355 - RNA, 20 nt, Artificial Sequence
  targeting sequence with CTCN PAM
cagugaaggcuuugcuuuca

SEQ ID NO: 13356 - RNA, 20 nt, Artificial Sequence
  targeting sequence with CTCN PAM
ucucagugaaggcuuugcuu

SEQ ID NO: 13357 - RNA, 20 nt, Artificial Sequence
  targeting sequence with CTCN PAM
cugaacagcuccauugguga

SEQ ID NO: 13358 - RNA, 20 nt, Artificial Sequence
  targeting sequence with CTCN PAM
gaacagcuccauuggugagg

SEQ ID NO: 13359 - RNA, 20 nt, Artificial Sequence
  targeting sequence with CTCN PAM
auuggugaggugaugagguc

SEQ ID NO: 13360 - RNA, 20 nt, Artificial Sequence
  targeting sequence with CTCN PAM
ccaauggagcuguucagaga

SEQ ID NO: 13361 - RNA, 20 nt, Artificial Sequence
  targeting sequence with CTCN PAM
ucaccucaccaauggagcug

SEQ ID NO: 13362 - RNA, 20 nt, Artificial Sequence
  targeting sequence with CTCN PAM
ugacugaccucaucaccuca

SEQ ID NO: 13363 - RNA, 20 nt, Artificial Sequence
  targeting sequence with CTCN PAM
gucccuagccccaccuuuuc

SEQ ID NO: 13364 - RNA, 20 nt, Artificial Sequence
  targeting sequence with CTCN PAM
agagaaauuuauuagauuuc

SEQ ID NO: 13365 - RNA, 20 nt, Artificial Sequence
  targeting sequence with CTCN PAM
ugagaagccaccauugccuc

SEQ ID NO: 13366 - RNA, 20 nt, Artificial Sequence
  targeting sequence with CTCN PAM
aaucuaugcugcuugggaaa

SEQ ID NO: 13367 - RNA, 20 nt, Artificial Sequence
  targeting sequence with CTCN PAM
gaccucgcugugcaucaggc

SEQ ID NO: 13368 - RNA, 20 nt, Artificial Sequence
  targeting sequence with CTCN PAM
cugugcaucaggcagacuuu

SEQ ID NO: 13369 - RNA, 20 nt, Artificial Sequence
  targeting sequence with CTCN PAM
ccauggcucauguccgguuc

SEQ ID NO: 13370 - RNA, 20 nt, Artificial Sequence
  targeting sequence with CTCN PAM
uguccgguucuccuggccug

SEQ ID NO: 13371 - RNA, 20 nt, Artificial Sequence
  targeting sequence with CTCN PAM
uggccugacaggugguucug

SEQ ID NO: 13372 - RNA, 20 nt, Artificial Sequence
  targeting sequence with CTCN PAM
ccuaagccccagaaccaccu

SEQ ID NO: 13373 - RNA, 20 nt, Artificial Sequence
  targeting sequence with CTCN PAM
uguagugcugcaaacagauu

SEQ ID NO: 13374 - RNA, 20 nt, Artificial Sequence
  targeting sequence with CTCN PAM
aaauaaaauguuuccgauuc

SEQ ID NO: 13375 - RNA, 20 nt, Artificial Sequence
  targeting sequence with CTCN PAM
ucgaaaacaaaaggcaauua

SEQ ID NO: 13376 - RNA, 20 nt, Artificial Sequence
  targeting sequence with CTCN PAM
cccaaaaaacuacccacaga

SEQ ID NO: 13377 - RNA, 20 nt, Artificial Sequence
  targeting sequence with CTCN PAM
cccccucugaguugucaggc

SEQ ID NO: 13378 - RNA, 20 nt, Artificial Sequence
  targeting sequence with CTCN PAM
cccucugaguugucaggcug

SEQ ID NO: 13379 - RNA, 20 nt, Artificial Sequence
  targeting sequence with CTCN PAM
gaguugucaggcuggcaaaa

SEQ ID NO: 13380 - RNA, 20 nt, Artificial Sequence
  targeting sequence with CTCN PAM
gagggggagagugccucccc

SEQ ID NO: 13381 - RNA, 20 nt, Artificial Sequence
  targeting sequence with CTCN PAM
uucccccaggccuuugcuuu

SEQ ID NO: 13382 - RNA, 20 nt, Artificial Sequence
  targeting sequence with CTCN PAM
cccaaagcaaaggccugggg

SEQ ID NO: 13383 - RNA, 20 nt, Artificial Sequence
  targeting sequence with CTCN PAM
ggaugcuucucacccaaagc

SEQ ID NO: 13384 - RNA, 20 nt, Artificial Sequence
  targeting sequence with CTCN PAM
guggcuagcagagaacgauc

SEQ ID NO: 13385 - RNA, 20 nt, Artificial Sequence
  targeting sequence with CTCN PAM
gcuagccacugagcauacgg

SEQ ID NO: 13386 - RNA, 20 nt, Artificial Sequence
  targeting sequence with CTCN PAM
aagcgaucguucucugcuag

SEQ ID NO: 13387 - RNA, 20 nt, Artificial Sequence
  targeting sequence with CTCN PAM
uucuagaaggugacagucug

SEQ ID NO: 13388 - RNA, 20 nt, Artificial Sequence
  targeting sequence with CTCN PAM
ugcuccuucuagaaggugac

SEQ ID NO: 13389 - RNA, 20 nt, Artificial Sequence
  targeting sequence with CTCN PAM
aaggccaauggucuuuccau

SEQ ID NO: 13390 - RNA, 20 nt, Artificial Sequence
  targeting sequence with CTCN PAM
ugggccacacucacuugcca

SEQ ID NO: 13391 - RNA, 20 nt, Artificial Sequence
  targeting sequence with CTCN PAM
cuugccacaggcccuuaaga

SEQ ID NO: 13392 - RNA, 20 nt, Artificial Sequence
  targeting sequence with CTCN PAM
uaagggccuguggcaaguga

SEQ ID NO: 13393 - RNA, 20 nt, Artificial Sequence
  targeting sequence with CTCN PAM
ucuccaagccucugugguua

SEQ ID NO: 13394 - RNA, 20 nt, Artificial Sequence
  targeting sequence with CTCN PAM
ccaagccucugugguuacug

SEQ ID NO: 13395 - RNA, 20 nt, Artificial Sequence
  targeting sequence with CTCN PAM
aagccucugugguuacugag

SEQ ID NO: 13396 - RNA, 20 nt, Artificial Sequence
  targeting sequence with CTCN PAM
gugguuacugagcaaagugc

SEQ ID NO: 13397 - RNA, 20 nt, Artificial Sequence
  targeting sequence with CTCN PAM
guaaccacagaggcuuggag

SEQ ID NO: 13398 - RNA, 20 nt, Artificial Sequence
  targeting sequence with CTCN PAM
caacagcccuaugguauagc

SEQ ID NO: 13399 - RNA, 20 nt, Artificial Sequence
  targeting sequence with CTCN PAM
ucugcaaaaugggaaucaua

SEQ ID NO: 13400 - RNA, 20 nt, Artificial Sequence
  targeting sequence with CTCN PAM
uuacccuucaguuuucucau

SEQ ID NO: 13401 - RNA, 20 nt, Artificial Sequence
  targeting sequence with CTCN PAM
cugccacuuccuagcuauga

SEQ ID NO: 13402 - RNA, 20 nt, Artificial Sequence
  targeting sequence with CTCN PAM
cauuaccucccugccacuuc

SEQ ID NO: 13403 - RNA, 20 nt, Artificial Sequence
  targeting sequence with CTCN PAM
ugguacccuggcucacauua

SEQ ID NO: 13404 - RNA, 20 nt, Artificial Sequence
  targeting sequence with CTCN PAM
cuuauuguccucaugguacc

SEQ ID NO: 13405 - RNA, 20 nt, Artificial Sequence
  targeting sequence with CTCN PAM
cacuguguggcaauccuccc

SEQ ID NO: 13406 - RNA, 20 nt, Artificial Sequence
  targeting sequence with CTCN PAM
acugagaauagaaacucagc

SEQ ID NO: 13407 - RNA, 20 nt, Artificial Sequence
  targeting sequence with CTCN PAM
guagagaccaugccucacac

SEQ ID NO: 13408 - RNA, 20 nt, Artificial Sequence
  targeting sequence with CTCN PAM
gcuucuauuucuggcucaga

SEQ ID NO: 13409 - RNA, 20 nt, Artificial Sequence
  targeting sequence with CTCN PAM
gauaaacgggugacuucugc

SEQ ID NO: 13410 - RNA, 20 nt, Artificial Sequence
  targeting sequence with CTCN PAM
ucaagaauucuguugguaaa

SEQ ID NO: 13411 - RNA, 20 nt, Artificial Sequence
  targeting sequence with CTCN PAM
agaauucuguugguaaaaug

SEQ ID NO: 13412 - RNA, 20 nt, Artificial Sequence
  targeting sequence with CTCN PAM
uauuucagaugcuguuguac

SEQ ID NO: 13413 - RNA, 20 nt, Artificial Sequence
  targeting sequence with CTCN PAM
cugugucaggcccuggcuga

SEQ ID NO: 13414 - RNA, 20 nt, Artificial Sequence
  targeting sequence with CTCN PAM
gugucaggcccuggcugagc

SEQ ID NO: 13415 - RNA, 20 nt, Artificial Sequence
  targeting sequence with CTCN PAM
gccagggccugacacagaga

SEQ ID NO: 13416 - RNA, 20 nt, Artificial Sequence
  targeting sequence with CTCN PAM
ucguccuugcacagcuguug

SEQ ID NO: 13417 - RNA, 20 nt, Artificial Sequence
  targeting sequence with CTCN PAM
gcugcugacuagauuuguga

SEQ ID NO: 13418 - RNA, 20 nt, Artificial Sequence
  targeting sequence with CTCN PAM
cugacuggggaaccugauuu

SEQ ID NO: 13419 - RNA, 20 nt, Artificial Sequence
  targeting sequence with CTCN PAM
gacuggggaaccugauuuuu

SEQ ID NO: 13420 - RNA, 20 nt, Artificial Sequence
  targeting sequence with CTCN PAM
cuggacacauugcagaacaa

SEQ ID NO: 13421 - RNA, 20 nt, Artificial Sequence
  targeting sequence with CTCN PAM
ggacacauugcagaacaaau

SEQ ID NO: 13422 - RNA, 20 nt, Artificial Sequence
  targeting sequence with CTCN PAM
cuguuggagccccucaaccg

SEQ ID NO: 13423 - RNA, 20 nt, Artificial Sequence
  targeting sequence with CTCN PAM
aacagggagacauuuguucu

SEQ ID NO: 13424 - RNA, 20 nt, Artificial Sequence
  targeting sequence with CTCN PAM
accgaaagcccucauugaag

SEQ ID NO: 13425 - RNA, 20 nt, Artificial Sequence
  targeting sequence with CTCN PAM
uugaagguuagcgcauucuc

SEQ ID NO: 13426 - RNA, 20 nt, Artificial Sequence
  targeting sequence with CTCN PAM
gcugcuucagcauuuccaga

SEQ ID NO: 13427 - RNA, 20 nt, Artificial Sequence
  targeting sequence with CTCN PAM
ggaaaugcugaagcagcaga

SEQ ID NO: 13428 - RNA, 20 nt, Artificial Sequence
  targeting sequence with CTCN PAM
gacaagagguuguagaugag

SEQ ID NO: 13429 - RNA, 20 nt, Artificial Sequence
  targeting sequence with CTCN PAM
ugucugaguaccaaguuacu

SEQ ID NO: 13430 - RNA, 20 nt, Artificial Sequence
  targeting sequence with CTCN PAM
ucuacaaccucuugucugag

SEQ ID NO: 13431 - RNA, 20 nt, Artificial Sequence
  targeting sequence with CTCN PAM
uucucugaaggcggaggauu

SEQ ID NO: 13432 - RNA, 20 nt, Artificial Sequence
  targeting sequence with CTCN PAM
gaaggcggaggauuaggauc

SEQ ID NO: 13433 - RNA, 20 nt, Artificial Sequence
  targeting sequence with CTCN PAM
gccuucagagaaggagaagg

SEQ ID NO: 13434 - RNA, 20 nt, Artificial Sequence
  targeting sequence with CTCN PAM
aaugauccuaauccuccgcc

SEQ ID NO: 13435 - RNA, 20 nt, Artificial Sequence
  targeting sequence with CTCN PAM
cauauggcaagugucauggc

SEQ ID NO: 13436 - RNA, 20 nt, Artificial Sequence
  targeting sequence with CTCN PAM
uauggcaagugucauggcua

SEQ ID NO: 13437 - RNA, 20 nt, Artificial Sequence
  targeting sequence with CTCN PAM
aggggcuggccacguaguag

SEQ ID NO: 13438 - RNA, 20 nt, Artificial Sequence
  targeting sequence with CTCN PAM
gaaaauaucuguuaaacagu

SEQ ID NO: 13439 - RNA, 20 nt, Artificial Sequence
  targeting sequence with CTCN PAM
aucguuccuauacuguuuaa

SEQ ID NO: 13440 - RNA, 20 nt, Artificial Sequence
  targeting sequence with CTCN PAM
caaucguuccuauacuguuu

SEQ ID NO: 13441 - RNA, 20 nt, Artificial Sequence
  targeting sequence with CTCN PAM
guuaucacaaccauuuguga

SEQ ID NO: 13442 - RNA, 20 nt, Artificial Sequence
  targeting sequence with CTCN PAM
guuugucuucaaaugacugc

SEQ ID NO: 13443 - RNA, 20 nt, Artificial Sequence
  targeting sequence with CTCN PAM
aguccucaguuugucuucaa

SEQ ID NO: 13444 - RNA, 20 nt, Artificial Sequence
  targeting sequence with CTCN PAM
auuuugcaaagcccauuuca

SEQ ID NO: 13445 - RNA, 20 nt, Artificial Sequence
  targeting sequence with CTCN PAM
uaaaaagggggauaauuuuc

SEQ ID NO: 13446 - RNA, 20 nt, Artificial Sequence
  targeting sequence with CTCN PAM
ccacagacuuaugaagaagg

SEQ ID NO: 13447 - RNA, 20 nt, Artificial Sequence
  targeting sequence with CTCN PAM
cuggauccucaccacagacu

SEQ ID NO: 13448 - RNA, 20 nt, Artificial Sequence
  targeting sequence with CTCN PAM
aagugcaguaaaguggcagg

SEQ ID NO: 13449 - RNA, 20 nt, Artificial Sequence
  targeting sequence with CTCN PAM
uaaggugauagaaacaggac

SEQ ID NO: 13450 - RNA, 20 nt, Artificial Sequence
  targeting sequence with CTCN PAM
uuccagggcaaaguuuugug

SEQ ID NO: 13451 - RNA, 20 nt, Artificial Sequence
  targeting sequence with CTCN PAM
cugaagaugagcaaguuuca

SEQ ID NO: 13452 - RNA, 20 nt, Artificial Sequence
  targeting sequence with CTCN PAM
ucuucagugagguucugccc

SEQ ID NO: 13453 - RNA, 20 nt, Artificial Sequence
  targeting sequence with CTCN PAM
uagacuuugcccuggaauuu

SEQ ID NO: 13454 - RNA, 20 nt, Artificial Sequence
  targeting sequence with CTCN PAM
aguuuuuccuuucugcaugc

SEQ ID NO: 13455 - RNA, 20 nt, Artificial Sequence
  targeting sequence with CTCN PAM
cuguacuuuuuccaggaugu

SEQ ID NO: 13456 - RNA, 20 nt, Artificial Sequence
  targeting sequence with CTCN PAM
aaauaaccaaggcuacaucc

SEQ ID NO: 13457 - RNA, 20 nt, Artificial Sequence
  targeting sequence with CTCN PAM
aaugaguguccuacuuccaa

SEQ ID NO: 13458 - RNA, 20 nt, Artificial Sequence
  targeting sequence with CTCN PAM
uuggagcaucugcagugcuu

SEQ ID NO: 13459 - RNA, 20 nt, Artificial Sequence
  targeting sequence with CTCN PAM
guggggcuugcacagggcug

SEQ ID NO: 13460 - RNA, 20 nt, Artificial Sequence
  targeting sequence with CTCN PAM
cuccaccacuccuacagcgu

SEQ ID NO: 13461 - RNA, 20 nt, Artificial Sequence
  targeting sequence with CTCN PAM
accacuccuacagcguucca

SEQ ID NO: 13462 - RNA, 20 nt, Artificial Sequence
  targeting sequence with CTCN PAM
uacagcguuccacaaggcug

SEQ ID NO: 13463 - RNA, 20 nt, Artificial Sequence
  targeting sequence with CTCN PAM
gucgcccagccuuguggaac

SEQ ID NO: 13464 - RNA, 20 nt, Artificial Sequence
  targeting sequence with CTCN PAM
cugucgcccagccuugugga

SEQ ID NO: 13465 - RNA, 20 nt, Artificial Sequence
  targeting sequence with CTCN PAM
agcaccuggaccgcuucucu

SEQ ID NO: 13466 - RNA, 20 nt, Artificial Sequence
  targeting sequence with CTCN PAM
caaacaaugccguggcggag

SEQ ID NO: 13467 - RNA, 20 nt, Artificial Sequence
  targeting sequence with CTCN PAM
gccacggcauuguuugugag

SEQ ID NO: 13468 - RNA, 20 nt, Artificial Sequence
  targeting sequence with CTCN PAM
ccgccacggcauuguuugug

SEQ ID NO: 13469 - RNA, 20 nt, Artificial Sequence
  targeting sequence with CTCN PAM
auauagcucaagguguguaa

SEQ ID NO: 13470 - RNA, 20 nt, Artificial Sequence
  targeting sequence with CTCN PAM
agguguguaaacaucagcca

SEQ ID NO: 13471 - RNA, 20 nt, Artificial Sequence
  targeting sequence with CTCN PAM
gacaccaagauaaacaucag

SEQ ID NO: 13472 - RNA, 20 nt, Artificial Sequence
  targeting sequence with CTCN PAM
ucugauguuuaucuuggugu

SEQ ID NO: 13473 - RNA, 20 nt, Artificial Sequence
  targeting sequence with CTCN PAM
uaccauucugaugggcaaac

SEQ ID NO: 13474 - RNA, 20 nt, Artificial Sequence
  targeting sequence with CTCN PAM
gaauuagcaaugcagggcug

SEQ ID NO: 13475 - RNA, 20 nt, Artificial Sequence
  targeting sequence with CTCN PAM
ccccugcuaccugggagccc

SEQ ID NO: 13476 - RNA, 20 nt, Artificial Sequence
  targeting sequence with CTCN PAM
ccugcuaccugggagcccau

SEQ ID NO: 13477 - RNA, 20 nt, Artificial Sequence
  targeting sequence with CTCN PAM
cagguagcaggggagagaua

SEQ ID NO: 13478 - RNA, 20 nt, Artificial Sequence
  targeting sequence with CTCN PAM
cccagguccagcuaugggcu

SEQ ID NO: 13479 - RNA, 20 nt, Artificial Sequence
  targeting sequence with CTCN PAM
uuuaauuaaaaaaauuuaaa

SEQ ID NO: 13480 - RNA, 20 nt, Artificial Sequence
  targeting sequence with CTCN PAM
uucaucuucucauuuaauua

SEQ ID NO: 13481 - RNA, 20 nt, Artificial Sequence
  targeting sequence with CTCN PAM
cguucaucuucucauuuaau

SEQ ID NO: 13482 - RNA, 20 nt, Artificial Sequence
  targeting sequence with CTCN PAM
agauucuuacucaucccagc

SEQ ID NO: 13483 - RNA, 20 nt, Artificial Sequence
  targeting sequence with CTCN PAM
ucccagccaggaaaacaguu

SEQ ID NO: 13484 - RNA, 20 nt, Artificial Sequence
  targeting sequence with CTCN PAM
uucaguacaucaugggaagu

SEQ ID NO: 13485 - RNA, 20 nt, Artificial Sequence
  targeting sequence with CTCN PAM
uccacuuccacuacuccuuc

SEQ ID NO: 13486 - RNA, 20 nt, Artificial Sequence
  targeting sequence with CTCN PAM
uugucucuuccacuuccacu

SEQ ID NO: 13487 - RNA, 20 nt, Artificial Sequence
  targeting sequence with CTCN PAM
acuggacaaggccacaugca

SEQ ID NO: 13488 - RNA, 20 nt, Artificial Sequence
  targeting sequence with CTCN PAM
ggaaggauugugacuugcua

SEQ ID NO: 13489 - RNA, 20 nt, Artificial Sequence
  targeting sequence with CTCN PAM
gcaugcccaucuguccugug

SEQ ID NO: 13490 - RNA, 20 nt, Artificial Sequence
  targeting sequence with CTCN PAM
cacaggacagaugggcaugc

SEQ ID NO: 13491 - RNA, 20 nt, Artificial Sequence
  targeting sequence with CTCN PAM
cagcaaccaaagggaccagg

SEQ ID NO: 13492 - RNA, 20 nt, Artificial Sequence
  targeting sequence with CTCN PAM
cagagucaugcuuacaguuu

SEQ ID NO: 13493 - RNA, 20 nt, Artificial Sequence
  targeting sequence with CTCN PAM
gugaggcucccagcaaccaa

SEQ ID NO: 13494 - RNA, 20 nt, Artificial Sequence
  targeting sequence with CTCN PAM
uaucagaagcauaaggcacu

SEQ ID NO: 13495 - RNA, 20 nt, Artificial Sequence
  targeting sequence with CTCN PAM
gcugcuccuaucagaagcau

SEQ ID NO: 13496 - RNA, 20 nt, Artificial Sequence
  targeting sequence with CTCN PAM
ucccucugcugcuccuauca

SEQ ID NO: 13497 - RNA, 20 nt, Artificial Sequence
  targeting sequence with CTCN PAM
ucuuaugccucuucccucug

SEQ ID NO: 13498 - RNA, 20 nt, Artificial Sequence
  targeting sequence with CTCN PAM
uccgacacaucuugggucuu

SEQ ID NO: 13499 - RNA, 20 nt, Artificial Sequence
  targeting sequence with CTCN PAM
cccaggggaauaaucuggga

SEQ ID NO: 13500 - RNA, 20 nt, Artificial Sequence
  targeting sequence with CTCN PAM
cagauuauuccccuggggga

SEQ ID NO: 13501 - RNA, 20 nt, Artificial Sequence
  targeting sequence with CTCN PAM
cugcacccucccagauuauu

SEQ ID NO: 13502 - RNA, 20 nt, Artificial Sequence
  targeting sequence with CTCN PAM
cacugcacccucccagauua

SEQ ID NO: 13503 - RNA, 20 nt, Artificial Sequence
  targeting sequence with CTCN PAM
aacucccuggccuuaugccc

SEQ ID NO: 13504 - RNA, 20 nt, Artificial Sequence
  targeting sequence with CTCN PAM
cuggccuuaugcccugucca

SEQ ID NO: 13505 - RNA, 20 nt, Artificial Sequence
  targeting sequence with CTCN PAM
aggauggugaauucuuaggu

SEQ ID NO: 13506 - RNA, 20 nt, Artificial Sequence
  targeting sequence with CTCN PAM
uaagcagaguggcuuucccc

SEQ ID NO: 13507 - RNA, 20 nt, Artificial Sequence
  targeting sequence with CTCN PAM
gcuuaggaguagggccacuc

SEQ ID NO: 13508 - RNA, 20 nt, Artificial Sequence
  targeting sequence with CTCN PAM
cuacacuuugucccucaccc

SEQ ID NO: 13509 - RNA, 20 nt, Artificial Sequence
  targeting sequence with CTCN PAM
cccuggcacagacacugugu

SEQ ID NO: 13510 - RNA, 20 nt, Artificial Sequence
  targeting sequence with CTCN PAM
caccacacagugucugugcc

SEQ ID NO: 13511 - RNA, 20 nt, Artificial Sequence
  targeting sequence with CTCN PAM
uccuggggccaguuggcagc

SEQ ID NO: 13512 - RNA, 20 nt, Artificial Sequence
  targeting sequence with CTCN PAM
uggggccaguuggcagccac

SEQ ID NO: 13513 - RNA, 20 nt, Artificial Sequence
  targeting sequence with CTCN PAM
cacccgcugcacacagcaga

SEQ ID NO: 13514 - RNA, 20 nt, Artificial Sequence
  targeting sequence with CTCN PAM
gccaaacgcuggaaguggua

SEQ ID NO: 13515 - RNA, 20 nt, Artificial Sequence
  targeting sequence with CTCN PAM
ggugcuggugacccagccac

SEQ ID NO: 13516 - RNA, 20 nt, Artificial Sequence
  targeting sequence with CTCN PAM
ugagcuaggggucccgggca

SEQ ID NO: 13517 - RNA, 20 nt, Artificial Sequence
  targeting sequence with CTCN PAM
ggagaugguacccucaggug

SEQ ID NO: 13518 - RNA, 20 nt, Artificial Sequence
  targeting sequence with CTCN PAM
uuagauaugcccgggacccc

SEQ ID NO: 13519 - RNA, 20 nt, Artificial Sequence
  targeting sequence with CTCN PAM
gcaguucacugugaccagug

SEQ ID NO: 13520 - RNA, 20 nt, Artificial Sequence
  targeting sequence with CTCN PAM
ucugggaagaaaaaguuuga

SEQ ID NO: 13521 - RNA, 20 nt, Artificial Sequence
  targeting sequence with CTCN PAM
gggaagaaaaaguuugaguu

SEQ ID NO: 13522 - RNA, 20 nt, Artificial Sequence
  targeting sequence with CTCN PAM
aacuuuuucuucccagagga

SEQ ID NO: 13523 - RNA, 20 nt, Artificial Sequence
  targeting sequence with CTCN PAM
ugaauugugauccagagcug

SEQ ID NO: 13524 - RNA, 20 nt, Artificial Sequence
  targeting sequence with CTCN PAM
ggaucacaauucaggagccc

SEQ ID NO: 13525 - RNA, 20 nt, Artificial Sequence
  targeting sequence with CTCN PAM
gugcaggcuuugaugacuca

SEQ ID NO: 13526 - RNA, 20 nt, Artificial Sequence
  targeting sequence with CTCN PAM
gggaaacucugcauuaacca

SEQ ID NO: 13527 - RNA, 20 nt, Artificial Sequence
  targeting sequence with CTCN PAM
gcauuaaccagcaagagggg

SEQ ID NO: 13528 - RNA, 20 nt, Artificial Sequence
  targeting sequence with CTCN PAM
ugcugguuaaugcagaguuu

SEQ ID NO: 13529 - RNA, 20 nt, Artificial Sequence
  targeting sequence with CTCN PAM
caccccucuugcugguuaau

SEQ ID NO: 13530 - RNA, 20 nt, Artificial Sequence
  targeting sequence with CTCN PAM
uggaacucccaccccucuug

SEQ ID NO: 13531 - RNA, 20 nt, Artificial Sequence
  targeting sequence with CTCN PAM
ccuucaguagggcgaaggcc

SEQ ID NO: 13532 - RNA, 20 nt, Artificial Sequence
  targeting sequence with CTCN PAM
uucaguagggcgaaggccca

SEQ ID NO: 13533 - RNA, 20 nt, Artificial Sequence
  targeting sequence with CTCN PAM
agaucccucccuggcccugu

SEQ ID NO: 13534 - RNA, 20 nt, Artificial Sequence
  targeting sequence with CTCN PAM
agccuuugguuaaucugggc

SEQ ID NO: 13535 - RNA, 20 nt, Artificial Sequence
  targeting sequence with CTCN PAM
cuggcccugucagugauuug

SEQ ID NO: 13536 - RNA, 20 nt, Artificial Sequence
  targeting sequence with CTCN PAM
cugucccucaguuuccuucu

SEQ ID NO: 13537 - RNA, 20 nt, Artificial Sequence
  targeting sequence with CTCN PAM
gucccucaguuuccuucucu

SEQ ID NO: 13538 - RNA, 20 nt, Artificial Sequence
  targeting sequence with CTCN PAM
guuuccuucucugugaaacu

SEQ ID NO: 13539 - RNA, 20 nt, Artificial Sequence
  targeting sequence with CTCN PAM
gugaaacuagaguguuggcu

SEQ ID NO: 13540 - RNA, 20 nt, Artificial Sequence
  targeting sequence with CTCN PAM
aguuucacagagaaggaaac

SEQ ID NO: 13541 - RNA, 20 nt, Artificial Sequence
  targeting sequence with CTCN PAM
agaaacccaaguaguucuuu

SEQ ID NO: 13542 - RNA, 20 nt, Artificial Sequence
  targeting sequence with CTCN PAM
uuggcaaaaauguguugauc

SEQ ID NO: 13543 - RNA, 20 nt, Artificial Sequence
  targeting sequence with CTCN PAM
uggaaagcauuuucugcauc

SEQ ID NO: 13544 - RNA, 20 nt, Artificial Sequence
  targeting sequence with CTCN PAM
acaacuuuuugcagggaaaa

SEQ ID NO: 13545 - RNA, 20 nt, Artificial Sequence
  targeting sequence with CTCN PAM
ugcuaaccaacuaccacuuc

SEQ ID NO: 13546 - RNA, 20 nt, Artificial Sequence
  targeting sequence with CTCN PAM
ucgcaauauucaccugaccu

SEQ ID NO: 13547 - RNA, 20 nt, Artificial Sequence
  targeting sequence with CTCN PAM
acccaccugacugcacauca

SEQ ID NO: 13548 - RNA, 20 nt, Artificial Sequence
  targeting sequence with CTCN PAM
ucgauuugcugagcauacuu

SEQ ID NO: 13549 - RNA, 20 nt, Artificial Sequence
  targeting sequence with CTCN PAM
auuugcugagcauacuucuc

SEQ ID NO: 13550 - RNA, 20 nt, Artificial Sequence
  targeting sequence with CTCN PAM
gcaaaucgaggagaugcacc

SEQ ID NO: 13551 - RNA, 20 nt, Artificial Sequence
  targeting sequence with CTCN PAM
aauguaaucauuucaccagg

SEQ ID NO: 13552 - RNA, 20 nt, Artificial Sequence
  targeting sequence with CTCN PAM
aaagcaguucccaaagccaa

SEQ ID NO: 13553 - RNA, 20 nt, Artificial Sequence
  targeting sequence with CTCN PAM
guccagccguggagcugguc

SEQ ID NO: 13554 - RNA, 20 nt, Artificial Sequence
  targeting sequence with CTCN PAM
acggcuggacugagaaaaag

SEQ ID NO: 13555 - RNA, 20 nt, Artificial Sequence
  targeting sequence with CTCN PAM
caucugauugagaaauguuu

SEQ ID NO: 13556 - RNA, 20 nt, Artificial Sequence
  targeting sequence with CTCN PAM
aucagaugugaggugugaca

SEQ ID NO: 13557 - RNA, 20 nt, Artificial Sequence
  targeting sequence with CTCN PAM
ugaggcacccacuuaucaag

SEQ ID NO: 13558 - RNA, 20 nt, Artificial Sequence
  targeting sequence with CTCN PAM
ugagcugauagaaaaugaaa

SEQ ID NO: 13559 - RNA, 20 nt, Artificial Sequence
  targeting sequence with CTCN PAM
augucaaccauucuacgguu

SEQ ID NO: 13560 - RNA, 20 nt, Artificial Sequence
  targeting sequence with CTCN PAM
uguaguugugagaggaucag

SEQ ID NO: 13561 - RNA, 20 nt, Artificial Sequence
  targeting sequence with CTCN PAM
caacuacaggagaaguugcc

SEQ ID NO: 13562 - RNA, 20 nt, Artificial Sequence
  targeting sequence with CTCN PAM
cacaacuacaggagaaguug

SEQ ID NO: 13563 - RNA, 20 nt, Artificial Sequence
  targeting sequence with CTCN PAM
cgguuguugucaacuuccag

SEQ ID NO: 13564 - RNA, 20 nt, Artificial Sequence
  targeting sequence with CTCN PAM
guuguugucaacuuccagug

SEQ ID NO: 13565 - RNA, 20 nt, Artificial Sequence
  targeting sequence with CTCN PAM
ucaucuucaagccucucauc

SEQ ID NO: 13566 - RNA, 20 nt, Artificial Sequence
  targeting sequence with CTCN PAM
ucuucaagccucucaucucc

SEQ ID NO: 13567 - RNA, 20 nt, Artificial Sequence
  targeting sequence with CTCN PAM
caucuccuuugcaaaacuuc

SEQ ID NO: 13568 - RNA, 20 nt, Artificial Sequence
  targeting sequence with CTCN PAM
ucuccuuugcaaaacuucuu

SEQ ID NO: 13569 - RNA, 20 nt, Artificial Sequence
  targeting sequence with CTCN PAM
uuugcaaaacuucuugaacc

SEQ ID NO: 13570 - RNA, 20 nt, Artificial Sequence
  targeting sequence with CTCN PAM
uaacaucgacaacgcauuug

SEQ ID NO: 13571 - RNA, 20 nt, Artificial Sequence
  targeting sequence with CTCN PAM
guugcuuuaugacccauuuu

SEQ ID NO: 13572 - RNA, 20 nt, Artificial Sequence
  targeting sequence with CTCN PAM
aauaagaaaacugcuugaau

SEQ ID NO: 13573 - RNA, 20 nt, Artificial Sequence
  targeting sequence with CTCN PAM
uuagcaaaaaaacauaaagc

SEQ ID NO: 13574 - RNA, 20 nt, Artificial Sequence
  targeting sequence with CTCN PAM
cuuuauguuuuuuugcuaau

SEQ ID NO: 13575 - RNA, 20 nt, Artificial Sequence
  targeting sequence with CTCN PAM
ggaauuugcuguuugauagu

SEQ ID NO: 13576 - RNA, 20 nt, Artificial Sequence
  targeting sequence with CTCN PAM
cauauuggcucuggaauuug

SEQ ID NO: 13577 - RNA, 20 nt, Artificial Sequence
  targeting sequence with CTCN PAM
guagucuggcacuggagccu

SEQ ID NO: 13578 - RNA, 20 nt, Artificial Sequence
  targeting sequence with CTCN PAM
agugccagacuacugagacu

SEQ ID NO: 13579 - RNA, 20 nt, Artificial Sequence
  targeting sequence with CTCN PAM
cugucuccuuuuagagaaag

SEQ ID NO: 13580 - RNA, 20 nt, Artificial Sequence
  targeting sequence with CTCN PAM
uuuuagagaaagcaggcuag

SEQ ID NO: 13581 - RNA, 20 nt, Artificial Sequence
  targeting sequence with CTCN PAM
aaaaggagacagggagggaa

SEQ ID NO: 13582 - RNA, 20 nt, Artificial Sequence
  targeting sequence with CTCN PAM
agaguccucacacacaaaug

SEQ ID NO: 13583 - RNA, 20 nt, Artificial Sequence
  targeting sequence with CTCN PAM
aguuuacccacuaaaccaac

SEQ ID NO: 13584 - RNA, 20 nt, Artificial Sequence
  targeting sequence with CTCN PAM
cgaguuuacccacuaaacca

SEQ ID NO: 13585 - RNA, 20 nt, Artificial Sequence
  targeting sequence with CTCN PAM
cacacaaaugacacuguguu

SEQ ID NO: 13586 - RNA, 20 nt, Artificial Sequence
  targeting sequence with CTCN PAM
ggccuucagcuucuuucucu

SEQ ID NO: 13587 - RNA, 20 nt, Artificial Sequence
  targeting sequence with CTCN PAM
auaaaauagggauaacagca

SEQ ID NO: 13588 - RNA, 20 nt, Artificial Sequence
  targeting sequence with CTCN PAM
aaacaaucccaucaaguaca

SEQ ID NO: 13589 - RNA, 20 nt, Artificial Sequence
  targeting sequence with CTCN PAM
ucuaauccucaaaacaaucc

SEQ ID NO: 13590 - RNA, 20 nt, Artificial Sequence
  targeting sequence with CTCN PAM
uccaauauuaacucgucuaa

SEQ ID NO: 13591 - RNA, 20 nt, Artificial Sequence
  targeting sequence with CTCN PAM
gugcuagguacucuuccaau

SEQ ID NO: 13592 - RNA, 20 nt, Artificial Sequence
  targeting sequence with CTCN PAM
aggcaaggcuucacgccagc

SEQ ID NO: 13593 - RNA, 20 nt, Artificial Sequence
  targeting sequence with CTCN PAM
cuccagcugggcaucuagca

SEQ ID NO: 13594 - RNA, 20 nt, Artificial Sequence
  targeting sequence with CTCN PAM
agcugggcaucuagcauuuc

SEQ ID NO: 13595 - RNA, 20 nt, Artificial Sequence
  targeting sequence with CTCN PAM
uuuuucagagaugaggucuc

SEQ ID NO: 13596 - RNA, 20 nt, Artificial Sequence
  targeting sequence with CTCN PAM
gaaaaaagagaaaugcuaga

SEQ ID NO: 13597 - RNA, 20 nt, Artificial Sequence
  targeting sequence with CTCN PAM
ucucugaaaaaagagaaaug

SEQ ID NO: 13598 - RNA, 20 nt, Artificial Sequence
  targeting sequence with CTCN PAM
gucgcccaagguggagugca

SEQ ID NO: 13599 - RNA, 20 nt, Artificial Sequence
  targeting sequence with CTCN PAM
accuugggcgacagagaccu

SEQ ID NO: 13600 - RNA, 20 nt, Artificial Sequence
  targeting sequence with CTCN PAM
uggcagccucaaacugcugg

SEQ ID NO: 13601 - RNA, 20 nt, Artificial Sequence
  targeting sequence with CTCN PAM
aacugcuggacucaagugau

SEQ ID NO: 13602 - RNA, 20 nt, Artificial Sequence
  targeting sequence with CTCN PAM
agugauccuccugccugagc

SEQ ID NO: 13603 - RNA, 20 nt, Artificial Sequence
  targeting sequence with CTCN PAM
ugccugagccucccagagca

SEQ ID NO: 13604 - RNA, 20 nt, Artificial Sequence
  targeting sequence with CTCN PAM
ggcaggaggaucacuugagu

SEQ ID NO: 13605 - RNA, 20 nt, Artificial Sequence
  targeting sequence with CTCN PAM
cagagcacugggauuacagg

SEQ ID NO: 13606 - RNA, 20 nt, Artificial Sequence
  targeting sequence with CTCN PAM
gggaggcucaggcaggagga

SEQ ID NO: 13607 - RNA, 20 nt, Artificial Sequence
  targeting sequence with CTCN PAM
ugccuguaaucccagugcuc

SEQ ID NO: 13608 - RNA, 20 nt, Artificial Sequence
  targeting sequence with CTCN PAM
caaaugcccugccuuccacc

SEQ ID NO: 13609 - RNA, 20 nt, Artificial Sequence
  targeting sequence with CTCN PAM
aaugcccugccuuccaccuu

SEQ ID NO: 13610 - RNA, 20 nt, Artificial Sequence
  targeting sequence with CTCN PAM
aaucugugcugacuucucag

SEQ ID NO: 13611 - RNA, 20 nt, Artificial Sequence
  targeting sequence with CTCN PAM
gcacauuuuuugccucuugg

SEQ ID NO: 13612 - RNA, 20 nt, Artificial Sequence
  targeting sequence with CTCN PAM
ugggaaagucuggcaagaag

SEQ ID NO: 13613 - RNA, 20 nt, Artificial Sequence
  targeting sequence with CTCN PAM
ugacaggcucugugcaugcc

SEQ ID NO: 13614 - RNA, 20 nt, Artificial Sequence
  targeting sequence with CTCN PAM
gugcaugccgucagucuagu

SEQ ID NO: 13615 - RNA, 20 nt, Artificial Sequence
  targeting sequence with CTCN PAM
ucccacagcagggucagugg

SEQ ID NO: 13616 - RNA, 20 nt, Artificial Sequence
  targeting sequence with CTCN PAM
agggaccucaucuucccuua

SEQ ID NO: 13617 - RNA, 20 nt, Artificial Sequence
  targeting sequence with CTCN PAM
ucuucccuuacagucuuugg

SEQ ID NO: 13618 - RNA, 20 nt, Artificial Sequence
  targeting sequence with CTCN PAM
uuucaggaaagccaaagacu

SEQ ID NO: 13619 - RNA, 20 nt, Artificial Sequence
  targeting sequence with CTCN PAM
gggucccucaucuuuaucag

SEQ ID NO: 13620 - RNA, 20 nt, Artificial Sequence
  targeting sequence with CTCN PAM
ucuuuaucaggugcucaccu

SEQ ID NO: 13621 - RNA, 20 nt, Artificial Sequence
  targeting sequence with CTCN PAM
ccuggagagaaaccaccaca

SEQ ID NO: 13622 - RNA, 20 nt, Artificial Sequence
  targeting sequence with CTCN PAM
aggugagcaccugauaaaga

SEQ ID NO: 13623 - RNA, 20 nt, Artificial Sequence
  targeting sequence with CTCN PAM
ccaggugagcaccugauaaa

SEQ ID NO: 13624 - RNA, 20 nt, Artificial Sequence
  targeting sequence with CTCN PAM
uuuuguggugguuucucucc

SEQ ID NO: 13625 - RNA, 20 nt, Artificial Sequence
  targeting sequence with CTCN PAM
acuuaggcuggaagucaggg

SEQ ID NO: 13626 - RNA, 20 nt, Artificial Sequence
  targeting sequence with CTCN PAM
gccucacuuugcccaagcca

SEQ ID NO: 13627 - RNA, 20 nt, Artificial Sequence
  targeting sequence with CTCN PAM
cuuugcccaagccacuccag

SEQ ID NO: 13628 - RNA, 20 nt, Artificial Sequence
  targeting sequence with CTCN PAM
agagccuggcucucagcucc

SEQ ID NO: 13629 - RNA, 20 nt, Artificial Sequence
  targeting sequence with CTCN PAM
ggaguggcuugggcaaagug

SEQ ID NO: 13630 - RNA, 20 nt, Artificial Sequence
  targeting sequence with CTCN PAM
cagcuccuucccucagacuu

SEQ ID NO: 13631 - RNA, 20 nt, Artificial Sequence
  targeting sequence with CTCN PAM
gcuccuucccucagacuuuu

SEQ ID NO: 13632 - RNA, 20 nt, Artificial Sequence
  targeting sequence with CTCN PAM
uucccucagacuuuucucuc

SEQ ID NO: 13633 - RNA, 20 nt, Artificial Sequence
  targeting sequence with CTCN PAM
gacuuuucucucgcugcucc

SEQ ID NO: 13634 - RNA, 20 nt, Artificial Sequence
  targeting sequence with CTCN PAM
cgcugcucccuguccucuuc

SEQ ID NO: 13635 - RNA, 20 nt, Artificial Sequence
  targeting sequence with CTCN PAM
cugcucccuguccucuuccu

SEQ ID NO: 13636 - RNA, 20 nt, Artificial Sequence
  targeting sequence with CTCN PAM
cuguccucuuccucaccugg

SEQ ID NO: 13637 - RNA, 20 nt, Artificial Sequence
  targeting sequence with CTCN PAM
uccucaccuggggcaugggg

SEQ ID NO: 13638 - RNA, 20 nt, Artificial Sequence
  targeting sequence with CTCN PAM
ccuggggcauggggcugagg

SEQ ID NO: 13639 - RNA, 20 nt, Artificial Sequence
  targeting sequence with CTCN PAM
gccccaugccccaggugagg

SEQ ID NO: 13640 - RNA, 20 nt, Artificial Sequence
  targeting sequence with CTCN PAM
ugucucuaacagcugagcuc

SEQ ID NO: 13641 - RNA, 20 nt, Artificial Sequence
  targeting sequence with CTCN PAM
aacagcugagcucugcucca

SEQ ID NO: 13642 - RNA, 20 nt, Artificial Sequence
  targeting sequence with CTCN PAM
gcuguuagagacaggagccc

SEQ ID NO: 13643 - RNA, 20 nt, Artificial Sequence
  targeting sequence with CTCN PAM
gcuccaggaccuacauggga

SEQ ID NO: 13644 - RNA, 20 nt, Artificial Sequence
  targeting sequence with CTCN PAM
aggaccuacaugggacuagg

SEQ ID NO: 13645 - RNA, 20 nt, Artificial Sequence
  targeting sequence with CTCN PAM
uagucccauguagguccugg

SEQ ID NO: 13646 - RNA, 20 nt, Artificial Sequence
  targeting sequence with CTCN PAM
gaccagcuggggcccuggcu

SEQ ID NO: 13647 - RNA, 20 nt, Artificial Sequence
  targeting sequence with CTCN PAM
uaucccagcugaaucuuauu

SEQ ID NO: 13648 - RNA, 20 nt, Artificial Sequence
  targeting sequence with CTCN PAM
ucacagggucugucacguag

SEQ ID NO: 13649 - RNA, 20 nt, Artificial Sequence
  targeting sequence with CTCN PAM
ggggaaacguuuagaggccu

SEQ ID NO: 13650 - RNA, 20 nt, Artificial Sequence
  targeting sequence with CTCN PAM
aaacguuuccccugagggau

SEQ ID NO: 13651 - RNA, 20 nt, Artificial Sequence
  targeting sequence with CTCN PAM
ucacaggccucuaaacguuu

SEQ ID NO: 13652 - RNA, 20 nt, Artificial Sequence
  targeting sequence with CTCN PAM
aggaagucucuucacaggcc

SEQ ID NO: 13653 - RNA, 20 nt, Artificial Sequence
  targeting sequence with CTCN PAM
uccaggaagucucuucacag

SEQ ID NO: 13654 - RNA, 20 nt, Artificial Sequence
  targeting sequence with CTCN PAM
cagccagaaggagggagaga

SEQ ID NO: 13655 - RNA, 20 nt, Artificial Sequence
  targeting sequence with CTCN PAM
gccagaaggagggagagaau

SEQ ID NO: 13656 - RNA, 20 nt, Artificial Sequence
  targeting sequence with CTCN PAM
uucuggcugagaggacaccu

SEQ ID NO: 13657 - RNA, 20 nt, Artificial Sequence
  targeting sequence with CTCN PAM
cuccuucuggcugagaggac

SEQ ID NO: 13658 - RNA, 20 nt, Artificial Sequence
  targeting sequence with CTCN PAM
cccuccuucuggcugagagg

SEQ ID NO: 13659 - RNA, 20 nt, Artificial Sequence
  targeting sequence with CTCN PAM
acuucacuugccccauuuuu

SEQ ID NO: 13660 - RNA, 20 nt, Artificial Sequence
  targeting sequence with CTCN PAM
uccacuucacuugccccauu

SEQ ID NO: 13661 - RNA, 20 nt, Artificial Sequence
  targeting sequence with CTCN PAM
aggccuuugcacaggcugug

SEQ ID NO: 13662 - RNA, 20 nt, Artificial Sequence
  targeting sequence with CTCN PAM
ccuccaggccuuugcacagg

SEQ ID NO: 13663 - RNA, 20 nt, Artificial Sequence
  targeting sequence with CTCN PAM
gcugggcccuggaugcugaa

SEQ ID NO: 13664 - RNA, 20 nt, Artificial Sequence
  targeting sequence with CTCN PAM
gggaaagaugccauguaucc

SEQ ID NO: 13665 - RNA, 20 nt, Artificial Sequence
  targeting sequence with CTCN PAM
ccugcuaccuauucucucug

SEQ ID NO: 13666 - RNA, 20 nt, Artificial Sequence
  targeting sequence with CTCN PAM
cugggacguuacuuagcuuc

SEQ ID NO: 13667 - RNA, 20 nt, Artificial Sequence
  targeting sequence with CTCN PAM
gggacguuacuuagcuuccc

SEQ ID NO: 13668 - RNA, 20 nt, Artificial Sequence
  targeting sequence with CTCN PAM
gccugugguucuacugcacu

SEQ ID NO: 13669 - RNA, 20 nt, Artificial Sequence
  targeting sequence with CTCN PAM
gguuuucuuggguucuugga

SEQ ID NO: 13670 - RNA, 20 nt, Artificial Sequence
  targeting sequence with CTCN PAM
aagaacccaagaaaaccuga

SEQ ID NO: 13671 - RNA, 20 nt, Artificial Sequence
  targeting sequence with CTCN PAM
gaacugaagaaguguagagc

SEQ ID NO: 13672 - RNA, 20 nt, Artificial Sequence
  targeting sequence with CTCN PAM
acacuucuucaguucagagc

SEQ ID NO: 13673 - RNA, 20 nt, Artificial Sequence
  targeting sequence with CTCN PAM
cuuugcucuacacuucuuca

SEQ ID NO: 13674 - RNA, 20 nt, Artificial Sequence
  targeting sequence with CTCN PAM
ggaguucagaccaauuaggg

SEQ ID NO: 13675 - RNA, 20 nt, Artificial Sequence
  targeting sequence with CTCN PAM
ugaggacucacuuugcucua

SEQ ID NO: 13676 - RNA, 20 nt, Artificial Sequence
  targeting sequence with CTCN PAM
gugaugaguagggccucaca

SEQ ID NO: 13677 - RNA, 20 nt, Artificial Sequence
  targeting sequence with CTCN PAM
ucacugagccaccaaagcuu

SEQ ID NO: 13678 - RNA, 20 nt, Artificial Sequence
  targeting sequence with CTCN PAM
caagacccuucuuaagugcu

SEQ ID NO: 13679 - RNA, 20 nt, Artificial Sequence
  targeting sequence with CTCN PAM
caagaaagaggaguuacugg

SEQ ID NO: 13680 - RNA, 20 nt, Artificial Sequence
  targeting sequence with CTCN PAM
uucuugugagcacuuaagaa

SEQ ID NO: 13681 - RNA, 20 nt, Artificial Sequence
  targeting sequence with CTCN PAM
ucuuucuugugagcacuuaa

SEQ ID NO: 13682 - RNA, 20 nt, Artificial Sequence
  targeting sequence with CTCN PAM
ccaucuaaagcuuuauuaga

SEQ ID NO: 13683 - RNA, 20 nt, Artificial Sequence
  targeting sequence with CTCN PAM
guuuauauacagugugccag

SEQ ID NO: 13684 - RNA, 20 nt, Artificial Sequence
  targeting sequence with CTCN PAM
cacagaaaauuccuuauuug

SEQ ID NO: 13685 - RNA, 20 nt, Artificial Sequence
  targeting sequence with CTCN PAM
gcagacaaauaaggaauuuu

SEQ ID NO: 13686 - RNA, 20 nt, Artificial Sequence
  targeting sequence with CTCN PAM
agguacgaagaccaaucacu

SEQ ID NO: 13687 - RNA, 20 nt, Artificial Sequence
  targeting sequence with CTCN PAM
uguuagugccuaugccagga

SEQ ID NO: 13688 - RNA, 20 nt, Artificial Sequence
  targeting sequence with CTCN PAM
uggcauaggcacuaacagga

SEQ ID NO: 13689 - RNA, 20 nt, Artificial Sequence
  targeting sequence with CTCN PAM
acugcugacccauuucccug

SEQ ID NO: 13690 - RNA, 20 nt, Artificial Sequence
  targeting sequence with CTCN PAM
gcaugugugcucguuuggug

SEQ ID NO: 13691 - RNA, 20 nt, Artificial Sequence
  targeting sequence with CTCN PAM
uuugguggcacaucagucaa

SEQ ID NO: 13692 - RNA, 20 nt, Artificial Sequence
  targeting sequence with CTCN PAM
ucugugcuuuccaacagcag

SEQ ID NO: 13693 - RNA, 20 nt, Artificial Sequence
  targeting sequence with CTCN PAM
agcaugaacccacaugccuc

SEQ ID NO: 13694 - RNA, 20 nt, Artificial Sequence
  targeting sequence with CTCN PAM
ccagcaugaacccacaugcc

SEQ ID NO: 13695 - RNA, 20 nt, Artificial Sequence
  targeting sequence with CTCN PAM
guugaaagacaggcuuauau

SEQ ID NO: 13696 - RNA, 20 nt, Artificial Sequence
  targeting sequence with CTCN PAM
uuuagagcuaauuggagaca

SEQ ID NO: 13697 - RNA, 20 nt, Artificial Sequence
  targeting sequence with CTCN PAM
aaaagagaagaccuucuaug

SEQ ID NO: 13698 - RNA, 20 nt, Artificial Sequence
  targeting sequence with CTCN PAM
aauuagcucuaaaagagaag

SEQ ID NO: 13699 - RNA, 20 nt, Artificial Sequence
  targeting sequence with CTCN PAM
aguugucuccaauuagcucu

SEQ ID NO: 13700 - RNA, 20 nt, Artificial Sequence
  targeting sequence with CTCN PAM
gaacuacucaaguugucucc

SEQ ID NO: 13701 - RNA, 20 nt, Artificial Sequence
  targeting sequence with CTCN PAM
agaggcaguacagcuuggaa

SEQ ID NO: 13702 - RNA, 20 nt, Artificial Sequence
  targeting sequence with CTCN PAM
ggaguugguaauuauuccau

SEQ ID NO: 13703 - RNA, 20 nt, Artificial Sequence
  targeting sequence with CTCN PAM
gcucuguucuaguuggugac

SEQ ID NO: 13704 - RNA, 20 nt, Artificial Sequence
  targeting sequence with CTCN PAM
guucuaguuggugacuuggg

SEQ ID NO: 13705 - RNA, 20 nt, Artificial Sequence
  targeting sequence with CTCN PAM
ucaguacugugaggauaaaa

SEQ ID NO: 13706 - RNA, 20 nt, Artificial Sequence
  targeting sequence with CTCN PAM
caguacugaugaggaaaccg

SEQ ID NO: 13707 - RNA, 20 nt, Artificial Sequence
  targeting sequence with CTCN PAM
ucuggucuuuaacauaauaa

SEQ ID NO: 13708 - RNA, 20 nt, Artificial Sequence
  targeting sequence with CTCN PAM
gcacacaguaggaguaggug

SEQ ID NO: 13709 - RNA, 20 nt, Artificial Sequence
  targeting sequence with CTCN PAM
uacugugugcugagcgccau

SEQ ID NO: 13710 - RNA, 20 nt, Artificial Sequence
  targeting sequence with CTCN PAM
auaaucagagccgcucuugu

SEQ ID NO: 13711 - RNA, 20 nt, Artificial Sequence
  targeting sequence with CTCN PAM
gauuauugagcaccuacucc

SEQ ID NO: 13712 - RNA, 20 nt, Artificial Sequence
  targeting sequence with CTCN PAM
uguugaugucacucagaauu

SEQ ID NO: 13713 - RNA, 20 nt, Artificial Sequence
  targeting sequence with CTCN PAM
gaauuauuggugucugccuu

SEQ ID NO: 13714 - RNA, 20 nt, Artificial Sequence
  targeting sequence with CTCN PAM
ugaagaacucaaucccuguu

SEQ ID NO: 13715 - RNA, 20 nt, Artificial Sequence
  targeting sequence with CTCN PAM
aucccuguuugcuuuucucu

SEQ ID NO: 13716 - RNA, 20 nt, Artificial Sequence
  targeting sequence with CTCN PAM
cacugcaggaagauccguuc

SEQ ID NO: 13717 - RNA, 20 nt, Artificial Sequence
  targeting sequence with CTCN PAM
cugcaggaagauccguucag

SEQ ID NO: 13718 - RNA, 20 nt, Artificial Sequence
  targeting sequence with CTCN PAM
uuucaacaucuccagguucc

SEQ ID NO: 13719 - RNA, 20 nt, Artificial Sequence
  targeting sequence with CTCN PAM
agguuccugcugcacagccu

SEQ ID NO: 13720 - RNA, 20 nt, Artificial Sequence
  targeting sequence with CTCN PAM
ggcaucucuaaaguguaucc

SEQ ID NO: 13721 - RNA, 20 nt, Artificial Sequence
  targeting sequence with CTCN PAM
aaaguguauccuuucucuua

SEQ ID NO: 13722 - RNA, 20 nt, Artificial Sequence
  targeting sequence with CTCN PAM
uaucccuccuccgucccacc

SEQ ID NO: 13723 - RNA, 20 nt, Artificial Sequence
  targeting sequence with CTCN PAM
uccgucccaccaccguucuu

SEQ ID NO: 13724 - RNA, 20 nt, Artificial Sequence
  targeting sequence with CTCN PAM
gucccaccaccguucuuguc

SEQ ID NO: 13725 - RNA, 20 nt, Artificial Sequence
  targeting sequence with CTCN PAM
ggaaggaauuucuuggggcc

SEQ ID NO: 13726 - RNA, 20 nt, Artificial Sequence
  targeting sequence with CTCN PAM
cucagcaacccucagggaag

SEQ ID NO: 13727 - RNA, 20 nt, Artificial Sequence
  targeting sequence with CTCN PAM
cagcaacccucagggaagac

SEQ ID NO: 13728 - RNA, 20 nt, Artificial Sequence
  targeting sequence with CTCN PAM
gcaacccucagggaagacag

SEQ ID NO: 13729 - RNA, 20 nt, Artificial Sequence
  targeting sequence with CTCN PAM
gggaagacagagaacucacc

SEQ ID NO: 13730 - RNA, 20 nt, Artificial Sequence
  targeting sequence with CTCN PAM
gucuucccugaggguugcug

SEQ ID NO: 13731 - RNA, 20 nt, Artificial Sequence
  targeting sequence with CTCN PAM
cccucccgcugcuguuuggc

SEQ ID NO: 13732 - RNA, 20 nt, Artificial Sequence
  targeting sequence with CTCN PAM
cgcugcuguuuggcuauaga

SEQ ID NO: 13733 - RNA, 20 nt, Artificial Sequence
  targeting sequence with CTCN PAM
auagccaaacagcagcggga

SEQ ID NO: 13734 - RNA, 20 nt, Artificial Sequence
  targeting sequence with CTCN PAM
gcagggaggcccaggggccc

SEQ ID NO: 13735 - RNA, 20 nt, Artificial Sequence
  targeting sequence with CTCN PAM
cugcugagccucuauagcca

SEQ ID NO: 13736 - RNA, 20 nt, Artificial Sequence
  targeting sequence with CTCN PAM
uggccugggccccugggccu

SEQ ID NO: 13737 - RNA, 20 nt, Artificial Sequence
  targeting sequence with CTCN PAM
ucuucucuuggccugggccc

SEQ ID NO: 13738 - RNA, 20 nt, Artificial Sequence
  targeting sequence with CTCN PAM
cugagcugaacccagcagug

SEQ ID NO: 13739 - RNA, 20 nt, Artificial Sequence
  targeting sequence with CTCN PAM
gagcugaacccagcaguggg

SEQ ID NO: 13740 - RNA, 20 nt, Artificial Sequence
  targeting sequence with CTCN PAM
gagagcccugaaaacucauc

SEQ ID NO: 13741 - RNA, 20 nt, Artificial Sequence
  targeting sequence with CTCN PAM
ggccaacacacugucccaau

SEQ ID NO: 13742 - RNA, 20 nt, Artificial Sequence
  targeting sequence with CTCN PAM
uagaacccacagaugagggu

SEQ ID NO: 13743 - RNA, 20 nt, Artificial Sequence
  targeting sequence with CTCN PAM
ucuguggguucuaggaggga

SEQ ID NO: 13744 - RNA, 20 nt, Artificial Sequence
  targeting sequence with CTCN PAM
agacuggggaggagggagug

SEQ ID NO: 13745 - RNA, 20 nt, Artificial Sequence
  targeting sequence with CTCN PAM
ccagucuggagaagugccca

SEQ ID NO: 13746 - RNA, 20 nt, Artificial Sequence
  targeting sequence with CTCN PAM
uccccagucuggagaagugc

SEQ ID NO: 13747 - RNA, 20 nt, Artificial Sequence
  targeting sequence with CTCN PAM
cuccuccccagucuggagaa

SEQ ID NO: 13748 - RNA, 20 nt, Artificial Sequence
  targeting sequence with CTCN PAM
uugauggcagcuuugccacc

SEQ ID NO: 13749 - RNA, 20 nt, Artificial Sequence
  targeting sequence with CTCN PAM
cucuuugauggcagcuuugc

SEQ ID NO: 13750 - RNA, 20 nt, Artificial Sequence
  targeting sequence with CTCN PAM
gacacagcacacauccacca

SEQ ID NO: 13751 - RNA, 20 nt, Artificial Sequence
  targeting sequence with CTCN PAM
gcuucauuccacccucagac

SEQ ID NO: 13752 - RNA, 20 nt, Artificial Sequence
  targeting sequence with CTCN PAM
agguaaacuucccugaccau

SEQ ID NO: 13753 - RNA, 20 nt, Artificial Sequence
  targeting sequence with CTCN PAM
uccagguaaacuucccugac

SEQ ID NO: 13754 - RNA, 20 nt, Artificial Sequence
  targeting sequence with CTCN PAM
uccuccagguaaacuucccu

SEQ ID NO: 13755 - RNA, 20 nt, Artificial Sequence
  targeting sequence with CTCN PAM
gcuugcaugauggacaucuc

SEQ ID NO: 13756 - RNA, 20 nt, Artificial Sequence
  targeting sequence with CTCN PAM
ccuggaacauccacuuggcc

SEQ ID NO: 13757 - RNA, 20 nt, Artificial Sequence
  targeting sequence with CTCN PAM
auaugcuggguccuccccug

SEQ ID NO: 13758 - RNA, 20 nt, Artificial Sequence
  targeting sequence with CTCN PAM
ccauaugcuggguccucccc

SEQ ID NO: 13759 - RNA, 20 nt, Artificial Sequence
  targeting sequence with CTCN PAM
cacaugccuugcuugccucu

SEQ ID NO: 13760 - RNA, 20 nt, Artificial Sequence
  targeting sequence with CTCN PAM
cccacaugccuugcuugccu

SEQ ID NO: 13761 - RNA, 20 nt, Artificial Sequence
  targeting sequence with CTCN PAM
cccucucccacaugccuugc

SEQ ID NO: 13762 - RNA, 20 nt, Artificial Sequence
  targeting sequence with CTCN PAM
cacccaggguccccucaccc

SEQ ID NO: 13763 - RNA, 20 nt, Artificial Sequence
  targeting sequence with CTCN PAM
ggccccucccacccaggguc

SEQ ID NO: 13764 - RNA, 20 nt, Artificial Sequence
  targeting sequence with CTCN PAM
ccggccccucccacccaggg

SEQ ID NO: 13765 - RNA, 20 nt, Artificial Sequence
  targeting sequence with CTCN PAM
ggccuuggguccugcugccu

SEQ ID NO: 13766 - RNA, 20 nt, Artificial Sequence
  targeting sequence with CTCN PAM
caggccuuggguccugcugc

SEQ ID NO: 13767 - RNA, 20 nt, Artificial Sequence
  targeting sequence with CTCN PAM
cuucuguagccaucgagggc

SEQ ID NO: 13768 - RNA, 20 nt, Artificial Sequence
  targeting sequence with CTCN PAM
ucuguagccaucgagggcca

SEQ ID NO: 13769 - RNA, 20 nt, Artificial Sequence
  targeting sequence with CTCN PAM
auggcuacagaagagaggaa

SEQ ID NO: 13770 - RNA, 20 nt, Artificial Sequence
  targeting sequence with CTCN PAM
gcuuaugguaccacuguggc

SEQ ID NO: 13771 - RNA, 20 nt, Artificial Sequence
  targeting sequence with CTCN PAM
ugacauccaagaccuuaaaa

SEQ ID NO: 13772 - RNA, 20 nt, Artificial Sequence
  targeting sequence with CTCN PAM
cuguacucucagcuccuucc

SEQ ID NO: 13773 - RNA, 20 nt, Artificial Sequence
  targeting sequence with CTCN PAM
cagcuccuucccagccgcag

SEQ ID NO: 13774 - RNA, 20 nt, Artificial Sequence
  targeting sequence with CTCN PAM
gcuccuucccagccgcagcc

SEQ ID NO: 13775 - RNA, 20 nt, Artificial Sequence
  targeting sequence with CTCN PAM
uucccagccgcagccccacc

SEQ ID NO: 13776 - RNA, 20 nt, Artificial Sequence
  targeting sequence with CTCN PAM
guaaggaaaacccacuccac

SEQ ID NO: 13777 - RNA, 20 nt, Artificial Sequence
  targeting sequence with CTCN PAM
acuggagaagacccagagcu

SEQ ID NO: 13778 - RNA, 20 nt, Artificial Sequence
  targeting sequence with CTCN PAM
aguggaguggguuuuccuua

SEQ ID NO: 13779 - RNA, 20 nt, Artificial Sequence
  targeting sequence with CTCN PAM
gggucuucuccaguggagug

SEQ ID NO: 13780 - RNA, 20 nt, Artificial Sequence
  targeting sequence with CTCN PAM
uuguuguaagaauuggccuc

SEQ ID NO: 13781 - RNA, 20 nt, Artificial Sequence
  targeting sequence with CTCN PAM
cuagaggauuccaggcccau

SEQ ID NO: 13782 - RNA, 20 nt, Artificial Sequence
  targeting sequence with CTCN PAM
agcgaggccaauucuuacaa

SEQ ID NO: 13783 - RNA, 20 nt, Artificial Sequence
  targeting sequence with CTCN PAM
aaucaaggggugccuuccug

SEQ ID NO: 13784 - RNA, 20 nt, Artificial Sequence
  targeting sequence with CTCN PAM
aggaaggcaccccuugauuu

SEQ ID NO: 13785 - RNA, 20 nt, Artificial Sequence
  targeting sequence with CTCN PAM
gcugcaugcgucuccgucuu

SEQ ID NO: 13786 - RNA, 20 nt, Artificial Sequence
  targeting sequence with CTCN PAM
gucuuuccccguaggagcag

SEQ ID NO: 13787 - RNA, 20 nt, Artificial Sequence
  targeting sequence with CTCN PAM
uacggggaaagacggagacg

SEQ ID NO: 13788 - RNA, 20 nt, Artificial Sequence
  targeting sequence with CTCN PAM
gcccccacaggcauagcccu

SEQ ID NO: 13789 - RNA, 20 nt, Artificial Sequence
  targeting sequence with CTCN PAM
uccuuuccagcaaguucugu

SEQ ID NO: 13790 - RNA, 20 nt, Artificial Sequence
  targeting sequence with CTCN PAM
aacagaacuugcuggaaagg

SEQ ID NO: 13791 - RNA, 20 nt, Artificial Sequence
  targeting sequence with CTCN PAM
acccugagccuuacccugug

SEQ ID NO: 13792 - RNA, 20 nt, Artificial Sequence
  targeting sequence with CTCN PAM
ggguagagguucuaucaagc

SEQ ID NO: 13793 - RNA, 20 nt, Artificial Sequence
  targeting sequence with CTCN PAM
ugacagucccugacuuugag

SEQ ID NO: 13794 - RNA, 20 nt, Artificial Sequence
  targeting sequence with CTCN PAM
aagucagggacugucaggag

SEQ ID NO: 13795 - RNA, 20 nt, Artificial Sequence
  targeting sequence with CTCN PAM
ucaaagucagggacugucag

SEQ ID NO: 13796 - RNA, 20 nt, Artificial Sequence
  targeting sequence with CTCN PAM
agcaugacuccucaaaguca

SEQ ID NO: 13797 - RNA, 20 nt, Artificial Sequence
  targeting sequence with CTCN PAM
ccacagaacugcugaagugg

SEQ ID NO: 13798 - RNA, 20 nt, Artificial Sequence
  targeting sequence with CTCN PAM
acagaacugcugaaguggac

SEQ ID NO: 13799 - RNA, 20 nt, Artificial Sequence
  targeting sequence with CTCN PAM
cgccgucugcagugcagccc

SEQ ID NO: 13800 - RNA, 20 nt, Artificial Sequence
  targeting sequence with CTCN PAM
caguguuccugcucccgccg

SEQ ID NO: 13801 - RNA, 20 nt, Artificial Sequence
  targeting sequence with CTCN PAM
cccaguguuccugcucccgc

SEQ ID NO: 13802 - RNA, 20 nt, Artificial Sequence
  targeting sequence with CTCN PAM
cgcaucucucccaguguucc

SEQ ID NO: 13803 - RNA, 20 nt, Artificial Sequence
  targeting sequence with CTCN PAM
ugcccuuccucccgcaucuc

SEQ ID NO: 13804 - RNA, 20 nt, Artificial Sequence
  targeting sequence with CTCN PAM
gauguuggcugcccccaggc

SEQ ID NO: 13805 - RNA, 20 nt, Artificial Sequence
  targeting sequence with CTCN PAM
ggucaccuccgauguuggcu

SEQ ID NO: 13806 - RNA, 20 nt, Artificial Sequence
  targeting sequence with CTCN PAM
caggucaccuccgauguugg

SEQ ID NO: 13807 - RNA, 20 nt, Artificial Sequence
  targeting sequence with CTCN PAM
ucucaggucaccuccgaugu

SEQ ID NO: 13808 - RNA, 20 nt, Artificial Sequence
  targeting sequence with CTCN PAM
ccucucaggucaccuccgau

SEQ ID NO: 13809 - RNA, 20 nt, Artificial Sequence
  targeting sequence with CTCN PAM
ucagccucuggcugaggagc

SEQ ID NO: 13810 - RNA, 20 nt, Artificial Sequence
  targeting sequence with CTCN PAM
ggcugaggagcuucaagggg

SEQ ID NO: 13811 - RNA, 20 nt, Artificial Sequence
  targeting sequence with CTCN PAM
gccagaggcugacgagccuu

SEQ ID NO: 13812 - RNA, 20 nt, Artificial Sequence
  targeting sequence with CTCN PAM
ucagccagaggcugacgagc

SEQ ID NO: 13813 - RNA, 20 nt, Artificial Sequence
  targeting sequence with CTCN PAM
ggggcccccuugaagcuccu

SEQ ID NO: 13814 - RNA, 20 nt, Artificial Sequence
  targeting sequence with CTCN PAM
gaaacugcccaccaggcccu

SEQ ID NO: 13815 - RNA, 20 nt, Artificial Sequence
  targeting sequence with CTCN PAM
gggaagggugugcagacaga

SEQ ID NO: 13816 - RNA, 20 nt, Artificial Sequence
  targeting sequence with CTCN PAM
gucugcacacccuuccccga

SEQ ID NO: 13817 - RNA, 20 nt, Artificial Sequence
  targeting sequence with CTCN PAM
gagcaggguugaggguggcu

SEQ ID NO: 13818 - RNA, 20 nt, Artificial Sequence
  targeting sequence with CTCN PAM
gaggccccuggguguacccc

SEQ ID NO: 13819 - RNA, 20 nt, Artificial Sequence
  targeting sequence with CTCN PAM
acccugcucugaggccccug

SEQ ID NO: 13820 - RNA, 20 nt, Artificial Sequence
  targeting sequence with CTCN PAM
ccagggagucuggaccaggc

SEQ ID NO: 13821 - RNA, 20 nt, Artificial Sequence
  targeting sequence with CTCN PAM
cuggggagccacccucaacc

SEQ ID NO: 13822 - RNA, 20 nt, Artificial Sequence
  targeting sequence with CTCN PAM
cccugccagguggggccugg

SEQ ID NO: 13823 - RNA, 20 nt, Artificial Sequence
  targeting sequence with CTCN PAM
cacccugccagguggggccu

SEQ ID NO: 13824 - RNA, 20 nt, Artificial Sequence
  targeting sequence with CTCN PAM
gcucucacccugccaggugg

SEQ ID NO: 13825 - RNA, 20 nt, Artificial Sequence
  targeting sequence with CTCN PAM
uaggaugccuggcacaaagg

SEQ ID NO: 13826 - RNA, 20 nt, Artificial Sequence
  targeting sequence with CTCN PAM
ccaaaccugccagccaggcc

SEQ ID NO: 13827 - RNA, 20 nt, Artificial Sequence
  targeting sequence with CTCN PAM
uccugccucaccaaaccugc

SEQ ID NO: 13828 - RNA, 20 nt, Artificial Sequence
  targeting sequence with CTCN PAM
ucuuauacccugacuaggcc

SEQ ID NO: 13829 - RNA, 20 nt, Artificial Sequence
  targeting sequence with CTCN PAM
gggccugcugauggcucauc

SEQ ID NO: 13830 - RNA, 20 nt, Artificial Sequence
  targeting sequence with CTCN PAM
gauggcaaggcccaggaauu

SEQ ID NO: 13831 - RNA, 20 nt, Artificial Sequence
  targeting sequence with CTCN PAM
ccucucacaagcgcacagag

SEQ ID NO: 13832 - RNA, 20 nt, Artificial Sequence
  targeting sequence with CTCN PAM
cacaagcgcacagagccuuc

SEQ ID NO: 13833 - RNA, 20 nt, Artificial Sequence
  targeting sequence with CTCN PAM
caagcgcacagagccuuccu

SEQ ID NO: 13834 - RNA, 20 nt, Artificial Sequence
  targeting sequence with CTCN PAM
gugcgcuugugagaggugag

SEQ ID NO: 13835 - RNA, 20 nt, Artificial Sequence
  targeting sequence with CTCN PAM
cggucuuuccucugccuucc

SEQ ID NO: 13836 - RNA, 20 nt, Artificial Sequence
  targeting sequence with CTCN PAM
gccuucccggcaccagcaca

SEQ ID NO: 13837 - RNA, 20 nt, Artificial Sequence
  targeting sequence with CTCN PAM
cuccaaggacaggcagugcc

SEQ ID NO: 13838 - RNA, 20 nt, Artificial Sequence
  targeting sequence with CTCN PAM
aaggacaggcagugccagcu

SEQ ID NO: 13839 - RNA, 20 nt, Artificial Sequence
  targeting sequence with CTCN PAM
ugggccugguguugccccug

SEQ ID NO: 13840 - RNA, 20 nt, Artificial Sequence
  targeting sequence with CTCN PAM
ucaccuuggccaagcagagc

SEQ ID NO: 13841 - RNA, 20 nt, Artificial Sequence
  targeting sequence with CTCN PAM
gcuuggccaaggugaagagu

SEQ ID NO: 13842 - RNA, 20 nt, Artificial Sequence
  targeting sequence with CTCN PAM
gugccuacaggcuggcccgg

SEQ ID NO: 13843 - RNA, 20 nt, Artificial Sequence
  targeting sequence with CTCN PAM
auggacuuuuggaaucuggc

SEQ ID NO: 13844 - RNA, 20 nt, Artificial Sequence
  targeting sequence with CTCN PAM
cugucguggaagggcuuggc

SEQ ID NO: 13845 - RNA, 20 nt, Artificial Sequence
  targeting sequence with CTCN PAM
ccucacugucguggaagggc

SEQ ID NO: 13846 - RNA, 20 nt, Artificial Sequence
  targeting sequence with CTCN PAM
ucucccuugaggccaucuca

SEQ ID NO: 13847 - RNA, 20 nt, Artificial Sequence
  targeting sequence with CTCN PAM
cccuugaggccaucucaugc

SEQ ID NO: 13848 - RNA, 20 nt, Artificial Sequence
  targeting sequence with CTCN PAM
cuugaggccaucucaugccu

SEQ ID NO: 13849 - RNA, 20 nt, Artificial Sequence
  targeting sequence with CTCN PAM
agggagaggagaagccaccu

SEQ ID NO: 13850 - RNA, 20 nt, Artificial Sequence
  targeting sequence with CTCN PAM
ugccuucuugccuggccugg

SEQ ID NO: 13851 - RNA, 20 nt, Artificial Sequence
  targeting sequence with CTCN PAM
ucaaacggaacccaggccag

SEQ ID NO: 13852 - RNA, 20 nt, Artificial Sequence
  targeting sequence with CTCN PAM
cuucaaacggaacccaggcc

SEQ ID NO: 13853 - RNA, 20 nt, Artificial Sequence
  targeting sequence with CTCN PAM
cucuaggcucugugcccccu

SEQ ID NO: 13854 - RNA, 20 nt, Artificial Sequence
  targeting sequence with CTCN PAM
aggcucugugcccccugcuc

SEQ ID NO: 13855 - RNA, 20 nt, Artificial Sequence
  targeting sequence with CTCN PAM
gugcccccugcucaagccug

SEQ ID NO: 13856 - RNA, 20 nt, Artificial Sequence
  targeting sequence with CTCN PAM
agccuggccaugccagcucc

SEQ ID NO: 13857 - RNA, 20 nt, Artificial Sequence
  targeting sequence with CTCN PAM
ccugugcuucccuguccacc

SEQ ID NO: 13858 - RNA, 20 nt, Artificial Sequence
  targeting sequence with CTCN PAM
uguucuccccgcaguccacc

SEQ ID NO: 13859 - RNA, 20 nt, Artificial Sequence
  targeting sequence with CTCN PAM
ccgcaguccaccuggcgccc

SEQ ID NO: 13860 - RNA, 20 nt, Artificial Sequence
  targeting sequence with CTCN PAM
cagcccccggccccggccuc

SEQ ID NO: 13861 - RNA, 20 nt, Artificial Sequence
  targeting sequence with CTCN PAM
gcccucagccuggccucccu

SEQ ID NO: 13862 - RNA, 20 nt, Artificial Sequence
  targeting sequence with CTCN PAM
gccuggccucccuugcuccu

SEQ ID NO: 13863 - RNA, 20 nt, Artificial Sequence
  targeting sequence with CTCN PAM
cuugcuccuugcccuccccu

SEQ ID NO: 13864 - RNA, 20 nt, Artificial Sequence
  targeting sequence with CTCN PAM
uugcccuccccuaggcaagc

SEQ ID NO: 13865 - RNA, 20 nt, Artificial Sequence
  targeting sequence with CTCN PAM
ccuaggcaagccccacaccu

SEQ ID NO: 13866 - RNA, 20 nt, Artificial Sequence
  targeting sequence with CTCN PAM
gugcccagguggcucugccu

SEQ ID NO: 13867 - RNA, 20 nt, Artificial Sequence
  targeting sequence with CTCN PAM
gccuuuaccccaggccuggc

SEQ ID NO: 13868 - RNA, 20 nt, Artificial Sequence
  targeting sequence with CTCN PAM
ggggccaggccugggguaaa

SEQ ID NO: 13869 - RNA, 20 nt, Artificial Sequence
  targeting sequence with CTCN PAM
uacucuagaaaccucugccc

SEQ ID NO: 13870 - RNA, 20 nt, Artificial Sequence
  targeting sequence with CTCN PAM
agaaaccucugcccuuucug

SEQ ID NO: 13871 - RNA, 20 nt, Artificial Sequence
  targeting sequence with CTCN PAM
gcccuuucuggaaccaggcu

SEQ ID NO: 13872 - RNA, 20 nt, Artificial Sequence
  targeting sequence with CTCN PAM
agcaaaucuaccccacacuc

SEQ ID NO: 13873 - RNA, 20 nt, Artificial Sequence
  targeting sequence with CTCN PAM
caacccacauuccuucaacc

SEQ ID NO: 13874 - RNA, 20 nt, Artificial Sequence
  targeting sequence with CTCN PAM
cucaagcucagagcaaggac

SEQ ID NO: 13875 - RNA, 20 nt, Artificial Sequence
  targeting sequence with CTCN PAM
agcucagagcaaggacuugg

SEQ ID NO: 13876 - RNA, 20 nt, Artificial Sequence
  targeting sequence with CTCN PAM
gagcaaggacuugguucaga

SEQ ID NO: 13877 - RNA, 20 nt, Artificial Sequence
  targeting sequence with CTCN PAM
gagcuugagggaggaugugu

SEQ ID NO: 13878 - RNA, 20 nt, Artificial Sequence
  targeting sequence with CTCN PAM
acccucuccuagcucugucu

SEQ ID NO: 13879 - RNA, 20 nt, Artificial Sequence
  targeting sequence with CTCN PAM
ccuagcucugucuccaucuu

SEQ ID NO: 13880 - RNA, 20 nt, Artificial Sequence
  targeting sequence with CTCN PAM
uagcucugucuccaucuuuc

SEQ ID NO: 13881 - RNA, 20 nt, Artificial Sequence
  targeting sequence with CTCN PAM
gucuccaucuuucugcaccu

SEQ ID NO: 13882 - RNA, 20 nt, Artificial Sequence
  targeting sequence with CTCN PAM
aucuuucugcaccuuggguu

SEQ ID NO: 13883 - RNA, 20 nt, Artificial Sequence
  targeting sequence with CTCN PAM
caacuaccugugggaaaggg

SEQ ID NO: 13884 - RNA, 20 nt, Artificial Sequence
  targeting sequence with CTCN PAM
uuuagccucacaacuaccug

SEQ ID NO: 13885 - RNA, 20 nt, Artificial Sequence
  targeting sequence with CTCN PAM
gcacggugcccggagcaugg

SEQ ID NO: 13886 - RNA, 20 nt, Artificial Sequence
  targeting sequence with CTCN PAM
gggcaccgugcggagcacgu

SEQ ID NO: 13887 - RNA, 20 nt, Artificial Sequence
  targeting sequence with CTCN PAM
acggcacuuuuccccuggca

SEQ ID NO: 13888 - RNA, 20 nt, Artificial Sequence
  targeting sequence with CTCN PAM
augccauggggaagcaggau

SEQ ID NO: 13889 - RNA, 20 nt, Artificial Sequence
  targeting sequence with CTCN PAM
ugggcccggcgccccuuccc

SEQ ID NO: 13890 - RNA, 20 nt, Artificial Sequence
  targeting sequence with CTCN PAM
uggcagccaggccccagggg

SEQ ID NO: 13891 - RNA, 20 nt, Artificial Sequence
  targeting sequence with CTCN PAM
ggcuucaggccccuggggcc

SEQ ID NO: 13892 - RNA, 20 nt, Artificial Sequence
  targeting sequence with CTCN PAM
cccuggacucuggcuucagg

SEQ ID NO: 13893 - RNA, 20 nt, Artificial Sequence
  targeting sequence with CTCN PAM
ucccccuggacucuggcuuc

SEQ ID NO: 13894 - RNA, 20 nt, Artificial Sequence
  targeting sequence with CTCN PAM
ggaguccguggcuguuuugu

SEQ ID NO: 13895 - RNA, 20 nt, Artificial Sequence
  targeting sequence with CTCN PAM
cgaggggccggggcaggcac

SEQ ID NO: 13896 - RNA, 20 nt, Artificial Sequence
  targeting sequence with CTCN PAM
uacaaaacagccacggacuc

SEQ ID NO: 13897 - RNA, 20 nt, Artificial Sequence
  targeting sequence with CTCN PAM
accaacaacccgcugcucaa

SEQ ID NO: 13898 - RNA, 20 nt, Artificial Sequence
  targeting sequence with CTCN PAM
acaaccugggcaacgucugc

SEQ ID NO: 13899 - RNA, 20 nt, Artificial Sequence
  targeting sequence with CTCN PAM
gccucuuccuacggugaguc

SEQ ID NO: 13900 - RNA, 20 nt, Artificial Sequence
  targeting sequence with CTCN PAM
uccuacggugagucccugca

SEQ ID NO: 13901 - RNA, 20 nt, Artificial Sequence
  targeting sequence with CTCN PAM
ccguaggaagaggcggagaa

SEQ ID NO: 13902 - RNA, 20 nt, Artificial Sequence
  targeting sequence with CTCN PAM
ggaugcagggacucaccgua

SEQ ID NO: 13903 - RNA, 20 nt, Artificial Sequence
  targeting sequence with CTCN PAM
cuccacugcucucuggccuc

SEQ ID NO: 13904 - RNA, 20 nt, Artificial Sequence
  targeting sequence with CTCN PAM
acugcucucuggccucagga

SEQ ID NO: 13905 - RNA, 20 nt, Artificial Sequence
  targeting sequence with CTCN PAM
cuggccucaggacguugggc

SEQ ID NO: 13906 - RNA, 20 nt, Artificial Sequence
  targeting sequence with CTCN PAM
ggccucaggacguugggcaa

SEQ ID NO: 13907 - RNA, 20 nt, Artificial Sequence
  targeting sequence with CTCN PAM
ggacguugggcaagggccaa

SEQ ID NO: 13908 - RNA, 20 nt, Artificial Sequence
  targeting sequence with CTCN PAM
gaaugucccuguuuaugaaa

SEQ ID NO: 13909 - RNA, 20 nt, Artificial Sequence
  targeting sequence with CTCN PAM
uuucauaaacagggacauuc

SEQ ID NO: 13910 - RNA, 20 nt, Artificial Sequence
  targeting sequence with CTCN PAM
gacgcccaccuaccugacac

SEQ ID NO: 13911 - RNA, 20 nt, Artificial Sequence
  targeting sequence with CTCN PAM
uugugucagguaggugggcg

SEQ ID NO: 13912 - RNA, 20 nt, Artificial Sequence
  targeting sequence with CTCN PAM
gggaacaccgacagugacuc

SEQ ID NO: 13913 - RNA, 20 nt, Artificial Sequence
  targeting sequence with CTCN PAM
gggaaccuggcgcagggcuu

SEQ ID NO: 13914 - RNA, 20 nt, Artificial Sequence
  targeting sequence with CTCN PAM
uucuggggcauuugguuaug

SEQ ID NO: 13915 - RNA, 20 nt, Artificial Sequence
  targeting sequence with CTCN PAM
cuuucuggggcauuugguua

SEQ ID NO: 13916 - RNA, 20 nt, Artificial Sequence
  targeting sequence with CTCN PAM
uggucugaaugcaaagccau

SEQ ID NO: 13917 - RNA, 20 nt, Artificial Sequence
  targeting sequence with CTCN PAM
gccuccuggucugaaugcaa

SEQ ID NO: 13918 - RNA, 20 nt, Artificial Sequence
  targeting sequence with CTCN PAM
uuugauguugacagaggauc

SEQ ID NO: 13919 - RNA, 20 nt, Artificial Sequence
  targeting sequence with CTCN PAM
gucaacaucaaaggagcugg

SEQ ID NO: 13920 - RNA, 20 nt, Artificial Sequence
  targeting sequence with CTCN PAM
ugggaaggggcuucugaucc

SEQ ID NO: 13921 - RNA, 20 nt, Artificial Sequence
  targeting sequence with CTCN PAM
gcuccugggaaggggcuucu

SEQ ID NO: 13922 - RNA, 20 nt, Artificial Sequence
  targeting sequence with CTCN PAM
gcucagcuccugggaagggg

SEQ ID NO: 13923 - RNA, 20 nt, Artificial Sequence
  targeting sequence with CTCN PAM
ugcacacacacacacagacu

SEQ ID NO: 13924 - RNA, 20 nt, Artificial Sequence
  targeting sequence with CTCN PAM
gugugugcaggggcagucug

SEQ ID NO: 13925 - RNA, 20 nt, Artificial Sequence
  targeting sequence with CTCN PAM
gugugugugugcaggggcag

SEQ ID NO: 13926 - RNA, 20 nt, Artificial Sequence
  targeting sequence with CTCN PAM
gugugugugcaggggcgguu

SEQ ID NO: 13927 - RNA, 20 nt, Artificial Sequence
  targeting sequence with CTCN PAM
gcacacacacacagacugcc

SEQ ID NO: 13928 - RNA, 20 nt, Artificial Sequence
  targeting sequence with CTCN PAM
ugcacacacacacacacaca

SEQ ID NO: 13929 - RNA, 20 nt, Artificial Sequence
  targeting sequence with CTCN PAM
gugugugugugugugugugu

SEQ ID NO: 13930 - RNA, 20 nt, Artificial Sequence
  targeting sequence with CTCN PAM
gugugugugcaggggcaguc

SEQ ID NO: 13931 - RNA, 20 nt, Artificial Sequence
  targeting sequence with CTCN PAM
gugugugugugcaggggcag

SEQ ID NO: 13932 - RNA, 20 nt, Artificial Sequence
  targeting sequence with CTCN PAM
gugugugugugcaggggcag

SEQ ID NO: 13933 - RNA, 20 nt, Artificial Sequence
  targeting sequence with CTCN PAM
ugcacacacauacagagacu

SEQ ID NO: 13934 - RNA, 20 nt, Artificial Sequence
  targeting sequence with CTCN PAM
guaugugugugcaggagcag

SEQ ID NO: 13935 - RNA, 20 nt, Artificial Sequence
  targeting sequence with CTCN PAM
gugugugugggcaggggcag

SEQ ID NO: 13936 - RNA, 20 nt, Artificial Sequence
  targeting sequence with CTCN PAM
augugugugugcaggggcgg

SEQ ID NO: 13937 - RNA, 20 nt, Artificial Sequence
  targeting sequence with CTCN PAM
augugugugugcaggggcag

SEQ ID NO: 13938 - RNA, 20 nt, Artificial Sequence
  targeting sequence with CTCN PAM
gugugugcacgcaggggcag

SEQ ID NO: 13939 - RNA, 20 nt, Artificial Sequence
  targeting sequence with CTCN PAM
ugcacacacacacacacaga

SEQ ID NO: 13940 - RNA, 20 nt, Artificial Sequence
  targeting sequence with CTCN PAM
gugugugugugugugcagga

SEQ ID NO: 13941 - RNA, 20 nt, Artificial Sequence
  targeting sequence with CTCN PAM
cugugugugugugugugcag

SEQ ID NO: 13942 - RNA, 20 nt, Artificial Sequence
  targeting sequence with CTCN PAM
gugugugugcaggggcaguc

SEQ ID NO: 13943 - RNA, 20 nt, Artificial Sequence
  targeting sequence with CTCN PAM
gugugugugugugugugcag

SEQ ID NO: 13944 - RNA, 20 nt, Artificial Sequence
  targeting sequence with CTCN PAM
ugcacacacacacacacaca

SEQ ID NO: 13945 - RNA, 20 nt, Artificial Sequence
  targeting sequence with CTCN PAM
gugugugugugugugugugu

SEQ ID NO: 13946 - RNA, 20 nt, Artificial Sequence
  targeting sequence with CTCN PAM
cugugugugugugugugugu

SEQ ID NO: 13947 - RNA, 20 nt, Artificial Sequence
  targeting sequence with CTCN PAM
gugugucugugugcaggggc

SEQ ID NO: 13948 - RNA, 20 nt, Artificial Sequence
  targeting sequence with CTCN PAM
ugcacacacacagagacugc

SEQ ID NO: 13949 - RNA, 20 nt, Artificial Sequence
  targeting sequence with CTCN PAM
gugugugugcaggagcgguc

SEQ ID NO: 13950 - RNA, 20 nt, Artificial Sequence
  targeting sequence with CTCN PAM
gugugugugugcaggggcag

SEQ ID NO: 13951 - RNA, 20 nt, Artificial Sequence
  targeting sequence with CTCN PAM
gugugugugugugugcaggg

SEQ ID NO: 13952 - RNA, 20 nt, Artificial Sequence
  targeting sequence with CTCN PAM
ugcacacagacacacagaga

SEQ ID NO: 13953 - RNA, 20 nt, Artificial Sequence
  targeting sequence with CTCN PAM
gugugucugugugcaggagc

SEQ ID NO: 13954 - RNA, 20 nt, Artificial Sequence
  targeting sequence with CTCN PAM
ugcacacacacggagacugc

SEQ ID NO: 13955 - RNA, 20 nt, Artificial Sequence
  targeting sequence with CTCN PAM
gugugugugcaggagcgguc

SEQ ID NO: 13956 - RNA, 20 nt, Artificial Sequence
  targeting sequence with CTCN PAM
gugugugugcaggggcaguc

SEQ ID NO: 13957 - RNA, 20 nt, Artificial Sequence
  targeting sequence with CTCN PAM
ugcacacacacacacacaca

SEQ ID NO: 13958 - RNA, 20 nt, Artificial Sequence
  targeting sequence with CTCN PAM
gugugugugugcaggggcag

SEQ ID NO: 13959 - RNA, 20 nt, Artificial Sequence
  targeting sequence with CTCN PAM
gugugucugugugcaggggc

SEQ ID NO: 13960 - RNA, 20 nt, Artificial Sequence
  targeting sequence with CTCN PAM
ugcacacacacauggagacu

SEQ ID NO: 13961 - RNA, 20 nt, Artificial Sequence
  targeting sequence with CTCN PAM
augugugugugcaggagcgg

SEQ ID NO: 13962 - RNA, 20 nt, Artificial Sequence
  targeting sequence with CTCN PAM
gugugugugcaggggcaguc

SEQ ID NO: 13963 - RNA, 20 nt, Artificial Sequence
  targeting sequence with CTCN PAM
gcacacacacagagacugcc

SEQ ID NO: 13964 - RNA, 20 nt, Artificial Sequence
  targeting sequence with CTCN PAM
gugugugugcagaggcaguc

SEQ ID NO: 13965 - RNA, 20 nt, Artificial Sequence
  targeting sequence with CTCN PAM
ugcacacacacacacacaca

SEQ ID NO: 13966 - RNA, 20 nt, Artificial Sequence
  targeting sequence with CTCN PAM
gugugugugugugugugugu

SEQ ID NO: 13967 - RNA, 20 nt, Artificial Sequence
  targeting sequence with CTCN PAM
ugcacacacauacagagacu

SEQ ID NO: 13968 - RNA, 20 nt, Artificial Sequence
  targeting sequence with CTCN PAM
guaugugugugcaggagcag

SEQ ID NO: 13969 - RNA, 20 nt, Artificial Sequence
  targeting sequence with CTCN PAM
ucuugcuuuuggugaagcug

SEQ ID NO: 13970 - RNA, 20 nt, Artificial Sequence
  targeting sequence with CTCN PAM
acccacuggcagcuucacca

SEQ ID NO: 13971 - RNA, 20 nt, Artificial Sequence
  targeting sequence with CTCN PAM
guggucaccccaccugccug

SEQ ID NO: 13972 - RNA, 20 nt, Artificial Sequence
  targeting sequence with CTCN PAM
agcccccucagcccuuucuc

SEQ ID NO: 13973 - RNA, 20 nt, Artificial Sequence
  targeting sequence with CTCN PAM
gcccuuucucuaugcccucc

SEQ ID NO: 13974 - RNA, 20 nt, Artificial Sequence
  targeting sequence with CTCN PAM
augcccuccagacgugcuac

SEQ ID NO: 13975 - RNA, 20 nt, Artificial Sequence
  targeting sequence with CTCN PAM
agacgugcuacaccugguug

SEQ ID NO: 13976 - RNA, 20 nt, Artificial Sequence
  targeting sequence with CTCN PAM
accagguguagcacgucugg

SEQ ID NO: 13977 - RNA, 20 nt, Artificial Sequence
  targeting sequence with CTCN PAM
agguagaacucaaccaggug

SEQ ID NO: 13978 - RNA, 20 nt, Artificial Sequence
  targeting sequence with CTCN PAM
cucaucgaccuggaggugcu

SEQ ID NO: 13979 - RNA, 20 nt, Artificial Sequence
  targeting sequence with CTCN PAM
ucgaccuggaggugcugaga

SEQ ID NO: 13980 - RNA, 20 nt, Artificial Sequence
  targeting sequence with CTCN PAM
aggucgaugagggagauggc

SEQ ID NO: 13981 - RNA, 20 nt, Artificial Sequence
  targeting sequence with CTCN PAM
gcaccuccaggucgaugagg

SEQ ID NO: 13982 - RNA, 20 nt, Artificial Sequence
  targeting sequence with CTCN PAM
agcugucugucaucccgcuu

SEQ ID NO: 13983 - RNA, 20 nt, Artificial Sequence
  targeting sequence with CTCN PAM
ggccaagggcauggauacug

SEQ ID NO: 13984 - RNA, 20 nt, Artificial Sequence
  targeting sequence with CTCN PAM
cacagccgcacacacaggcu

SEQ ID NO: 13985 - RNA, 20 nt, Artificial Sequence
  targeting sequence with CTCN PAM
uacuucccgccuguccccag

SEQ ID NO: 13986 - RNA, 20 nt, Artificial Sequence
  targeting sequence with CTCN PAM
gcauggcccgcgauccccug

SEQ ID NO: 13987 - RNA, 20 nt, Artificial Sequence
  targeting sequence with CTCN PAM
gggaacacagggccaggcuc

SEQ ID NO: 13988 - RNA, 20 nt, Artificial Sequence
  targeting sequence with CTCN PAM
cugggaacacagggccaggc

SEQ ID NO: 13989 - RNA, 20 nt, Artificial Sequence
  targeting sequence with CTCN PAM
aaucucucugggaacacagg

SEQ ID NO: 13990 - RNA, 20 nt, Artificial Sequence
  targeting sequence with CTCN PAM
ccaaucucucugggaacaca

SEQ ID NO: 13991 - RNA, 20 nt, Artificial Sequence
  targeting sequence with CTCN PAM
gaucccugucccugucccau

SEQ ID NO: 13992 - RNA, 20 nt, Artificial Sequence
  targeting sequence with CTCN PAM
cacccuccccugaccccuaa

SEQ ID NO: 13993 - RNA, 20 nt, Artificial Sequence
  targeting sequence with CTCN PAM
ccugaccccuaaaaggcacu

SEQ ID NO: 13994 - RNA, 20 nt, Artificial Sequence
  targeting sequence with CTCN PAM
gucugugcauagcuccugca

SEQ ID NO: 13995 - RNA, 20 nt, Artificial Sequence
  targeting sequence with CTCN PAM
ugcauagccaacaugggaca

SEQ ID NO: 13996 - RNA, 20 nt, Artificial Sequence
  targeting sequence with CTCN PAM
uccacucaagucacuuucgc

SEQ ID NO: 13997 - RNA, 20 nt, Artificial Sequence
  targeting sequence with CTCN PAM
agucacuuucgcaugcaagu

SEQ ID NO: 13998 - RNA, 20 nt, Artificial Sequence
  targeting sequence with CTCN PAM
gucacuugcaugcgaaagug

SEQ ID NO: 13999 - RNA, 20 nt, Artificial Sequence
  targeting sequence with CTCN PAM
ugcuuggggcuuccuugcac

SEQ ID NO: 14000 - RNA, 20 nt, Artificial Sequence
  targeting sequence with CTCN PAM
ccugcuuggggcuuccuugc

SEQ ID NO: 14001 - RNA, 20 nt, Artificial Sequence
  targeting sequence with CTCN PAM
gucuggucggucacaggcug

SEQ ID NO: 14002 - RNA, 20 nt, Artificial Sequence
  targeting sequence with CTCN PAM
gccucucuuggccgcacugu

SEQ ID NO: 14003 - RNA, 20 nt, Artificial Sequence
  targeting sequence with CTCN PAM
cuuggccgcacuguccucug

SEQ ID NO: 14004 - RNA, 20 nt, Artificial Sequence
  targeting sequence with CTCN PAM
uggccgcacuguccucuggg

SEQ ID NO: 14005 - RNA, 20 nt, Artificial Sequence
  targeting sequence with CTCN PAM
gggcaacuucauucuuuggc

SEQ ID NO: 14006 - RNA, 20 nt, Artificial Sequence
  targeting sequence with CTCN PAM
guguuaugggggcaccacgg

SEQ ID NO: 14007 - RNA, 20 nt, Artificial Sequence
  targeting sequence with CTCN PAM
ugacaucucuguguuauggg

SEQ ID NO: 14008 - RNA, 20 nt, Artificial Sequence
  targeting sequence with CTCN PAM
gccuuauagcccccagaaac

SEQ ID NO: 14009 - RNA, 20 nt, Artificial Sequence
  targeting sequence with CTCN PAM
cagcuguggcagugaaagcc

SEQ ID NO: 14010 - RNA, 20 nt, Artificial Sequence
  targeting sequence with CTCN PAM
gcuguggcagugaaagcccc

SEQ ID NO: 14011 - RNA, 20 nt, Artificial Sequence
  targeting sequence with CTCN PAM
gccugccccuuggccaggag

SEQ ID NO: 14012 - RNA, 20 nt, Artificial Sequence
  targeting sequence with CTCN PAM
uggccaaggggcaggcugag

SEQ ID NO: 14013 - RNA, 20 nt, Artificial Sequence
  targeting sequence with CTCN PAM
cauguccagccugcaagugu

SEQ ID NO: 14014 - RNA, 20 nt, Artificial Sequence
  targeting sequence with CTCN PAM
ggccacgugugugcuguucc

SEQ ID NO: 14015 - RNA, 20 nt, Artificial Sequence
  targeting sequence with CTCN PAM
cucccuugcacugacugagu

SEQ ID NO: 14016 - RNA, 20 nt, Artificial Sequence
  targeting sequence with CTCN PAM
cuugcacugacugagucugc

SEQ ID NO: 14017 - RNA, 20 nt, Artificial Sequence
  targeting sequence with CTCN PAM
gucagugcaagggagcgagg

SEQ ID NO: 14018 - RNA, 20 nt, Artificial Sequence
  targeting sequence with CTCN PAM
caggugcugccacccccagg

SEQ ID NO: 14019 - RNA, 20 nt, Artificial Sequence
  targeting sequence with CTCN PAM
caguguggccccugggggug

SEQ ID NO: 14020 - RNA, 20 nt, Artificial Sequence
  targeting sequence with CTCN PAM
ucccaguguggccccugggg

SEQ ID NO: 14021 - RNA, 20 nt, Artificial Sequence
  targeting sequence with CTCN PAM
gagagcugcuugcugaagga

SEQ ID NO: 14022 - RNA, 20 nt, Artificial Sequence
  targeting sequence with CTCN PAM
gagcuucccuccucccagug

SEQ ID NO: 14023 - RNA, 20 nt, Artificial Sequence
  targeting sequence with CTCN PAM
cugagcuucccuccucccag

SEQ ID NO: 14024 - RNA, 20 nt, Artificial Sequence
  targeting sequence with CTCN PAM
gccacccaggcucccucagg

SEQ ID NO: 14025 - RNA, 20 nt, Artificial Sequence
  targeting sequence with CTCN PAM
cucaggugccacagaugaua

SEQ ID NO: 14026 - RNA, 20 nt, Artificial Sequence
  targeting sequence with CTCN PAM
ggugccacagaugauaugug

SEQ ID NO: 14027 - RNA, 20 nt, Artificial Sequence
  targeting sequence with CTCN PAM
aacuugguaccagcaguccc

SEQ ID NO: 14028 - RNA, 20 nt, Artificial Sequence
  targeting sequence with CTCN PAM
cugcaggaccccugcuggcc

SEQ ID NO: 14029 - RNA, 20 nt, Artificial Sequence
  targeting sequence with CTCN PAM
guuaccagccccaccacugu

SEQ ID NO: 14030 - RNA, 20 nt, Artificial Sequence
  targeting sequence with CTCN PAM
cacagugguggggcugguaa

SEQ ID NO: 14031 - RNA, 20 nt, Artificial Sequence
  targeting sequence with CTCN PAM
cccacagugguggggcuggu

SEQ ID NO: 14032 - RNA, 20 nt, Artificial Sequence
  targeting sequence with CTCN PAM
aggugagucugacccgcccu

SEQ ID NO: 14033 - RNA, 20 nt, Artificial Sequence
  targeting sequence with CTCN PAM
ccuggaggucccuggaaacc

SEQ ID NO: 14034 - RNA, 20 nt, Artificial Sequence
  targeting sequence with CTCN PAM
cgccccugucugcuccauca

SEQ ID NO: 14035 - RNA, 20 nt, Artificial Sequence
  targeting sequence with CTCN PAM
ccccugucugcuccaucaca

SEQ ID NO: 14036 - RNA, 20 nt, Artificial Sequence
  targeting sequence with CTCN PAM
aucacaagugcccgcagacc

SEQ ID NO: 14037 - RNA, 20 nt, Artificial Sequence
  targeting sequence with CTCN PAM
aggaucccugggcccauccc

SEQ ID NO: 14038 - RNA, 20 nt, Artificial Sequence
  targeting sequence with CTCN PAM
gugccuacccgcaguggcuc

SEQ ID NO: 14039 - RNA, 20 nt, Artificial Sequence
  targeting sequence with CTCN PAM
cagggcccgcaugugcuucc

SEQ ID NO: 14040 - RNA, 20 nt, Artificial Sequence
  targeting sequence with CTCN PAM
cagggccagugggaagcaca

SEQ ID NO: 14041 - RNA, 20 nt, Artificial Sequence
  targeting sequence with CTCN PAM
caggccacacacaccauagc

SEQ ID NO: 14042 - RNA, 20 nt, Artificial Sequence
  targeting sequence with CTCN PAM
cccauuccccucgcaggcca

SEQ ID NO: 14043 - RNA, 20 nt, Artificial Sequence
  targeting sequence with CTCN PAM
gcuggcccugcugcccucac

SEQ ID NO: 14044 - RNA, 20 nt, Artificial Sequence
  targeting sequence with CTCN PAM
ggccaaggaaucagaaggaa

SEQ ID NO: 14045 - RNA, 20 nt, Artificial Sequence
  targeting sequence with CTCN PAM
guuccuccaccuggaaaacu

SEQ ID NO: 14046 - RNA, 20 nt, Artificial Sequence
  targeting sequence with CTCN PAM
accuggaaaacucuuccacu

SEQ ID NO: 14047 - RNA, 20 nt, Artificial Sequence
  targeting sequence with CTCN PAM
uccacuggucuggcugcccu

SEQ ID NO: 14048 - RNA, 20 nt, Artificial Sequence
  targeting sequence with CTCN PAM
agggcagccagaccagugga

SEQ ID NO: 14049 - RNA, 20 nt, Artificial Sequence
  targeting sequence with CTCN PAM
cagggguguaggguggaggc

SEQ ID NO: 14050 - RNA, 20 nt, Artificial Sequence
  targeting sequence with CTCN PAM
acccuacaccccugugagaa

SEQ ID NO: 14051 - RNA, 20 nt, Artificial Sequence
  targeting sequence with CTCN PAM
aucucugcuucugauuccau

SEQ ID NO: 14052 - RNA, 20 nt, Artificial Sequence
  targeting sequence with CTCN PAM
gcuucugauuccauccuuga

SEQ ID NO: 14053 - RNA, 20 nt, Artificial Sequence
  targeting sequence with CTCN PAM
aggcucccagauucugcggc

SEQ ID NO: 14054 - RNA, 20 nt, Artificial Sequence
  targeting sequence with CTCN PAM
cagauucugcggcuagugga

SEQ ID NO: 14055 - RNA, 20 nt, Artificial Sequence
  targeting sequence with CTCN PAM
acuagccgcagaaucuggga

SEQ ID NO: 14056 - RNA, 20 nt, Artificial Sequence
  targeting sequence with CTCN PAM
aucggagaugaggacccguu

SEQ ID NO: 14057 - RNA, 20 nt, Artificial Sequence
  targeting sequence with CTCN PAM
gauggaguccuuggucucca

SEQ ID NO: 14058 - RNA, 20 nt, Artificial Sequence
  targeting sequence with CTCN PAM
ucuccgauggaguccuuggu

SEQ ID NO: 14059 - RNA, 20 nt, Artificial Sequence
  targeting sequence with CTCN PAM
gcuuagcugugaacgggucc

SEQ ID NO: 14060 - RNA, 20 nt, Artificial Sequence
  targeting sequence with CTCN PAM
aagcucagcuuagcugugaa

SEQ ID NO: 14061 - RNA, 20 nt, Artificial Sequence
  targeting sequence with CTCN PAM
ccucaaagcucagcuuagcu

SEQ ID NO: 14062 - RNA, 20 nt, Artificial Sequence
  targeting sequence with CTCN PAM
cugggugaccugcaggaggg

SEQ ID NO: 14063 - RNA, 20 nt, Artificial Sequence
  targeting sequence with CTCN PAM
gggugaccugcaggagggca

SEQ ID NO: 14064 - RNA, 20 nt, Artificial Sequence
  targeting sequence with CTCN PAM
ugcaggucacccagagaggc

SEQ ID NO: 14065 - RNA, 20 nt, Artificial Sequence
  targeting sequence with CTCN PAM
aucccuucuccugugcacau

SEQ ID NO: 14066 - RNA, 20 nt, Artificial Sequence
  targeting sequence with CTCN PAM
ugugcacauggggacccuca

SEQ ID NO: 14067 - RNA, 20 nt, Artificial Sequence
  targeting sequence with CTCN PAM
gcuagcgcagugguggagga

SEQ ID NO: 14068 - RNA, 20 nt, Artificial Sequence
  targeting sequence with CTCN PAM
accacugcgcuagcugaggg

SEQ ID NO: 14069 - RNA, 20 nt, Artificial Sequence
  targeting sequence with CTCN PAM
uccaccacugcgcuagcuga

SEQ ID NO: 14070 - RNA, 20 nt, Artificial Sequence
  targeting sequence with CTCN PAM
uucgugccaccacaucugga

SEQ ID NO: 14071 - RNA, 20 nt, Artificial Sequence
  targeting sequence with CTCN PAM
cacaccccacaggaaggggu

SEQ ID NO: 14072 - RNA, 20 nt, Artificial Sequence
  targeting sequence with CTCN PAM
ggggcagccauggcucccac

SEQ ID NO: 14073 - RNA, 20 nt, Artificial Sequence
  targeting sequence with CTCN PAM
cuguccacagaccugcgccc

SEQ ID NO: 14074 - RNA, 20 nt, Artificial Sequence
  targeting sequence with CTCN PAM
ggugggaggagcuugccacu

SEQ ID NO: 14075 - RNA, 20 nt, Artificial Sequence
  targeting sequence with CTCN PAM
caccagagcugaagcugccu

SEQ ID NO: 14076 - RNA, 20 nt, Artificial Sequence
  targeting sequence with CTCN PAM
ucccaccagagcugaagcug

SEQ ID NO: 14077 - RNA, 20 nt, Artificial Sequence
  targeting sequence with CTCN PAM
cucaccacugccaaagauuc

SEQ ID NO: 14078 - RNA, 20 nt, Artificial Sequence
  targeting sequence with CTCN PAM
caccacugccaaagauucca

SEQ ID NO: 14079 - RNA, 20 nt, Artificial Sequence
  targeting sequence with CTCN PAM
ccacugccaaagauuccagg

SEQ ID NO: 14080 - RNA, 20 nt, Artificial Sequence
  targeting sequence with CTCN PAM
cuguggcugagugaggacac

SEQ ID NO: 14081 - RNA, 20 nt, Artificial Sequence
  targeting sequence with CTCN PAM
gccacagugagacaucugug

SEQ ID NO: 14082 - RNA, 20 nt, Artificial Sequence
  targeting sequence with CTCN PAM
cucagccacagugagacauc

SEQ ID NO: 14083 - RNA, 20 nt, Artificial Sequence
  targeting sequence with CTCN PAM
uucccgcccacccugcagca

SEQ ID NO: 14084 - RNA, 20 nt, Artificial Sequence
  targeting sequence with CTCN PAM
gaguucgugccagugguggu

SEQ ID NO: 14085 - RNA, 20 nt, Artificial Sequence
  targeting sequence with CTCN PAM
gagccaccuugcugcagggu

SEQ ID NO: 14086 - RNA, 20 nt, Artificial Sequence
  targeting sequence with CTCN PAM
ccaccacuggcacgaacucu

SEQ ID NO: 14087 - RNA, 20 nt, Artificial Sequence
  targeting sequence with CTCN PAM
augagccgccgggauguccu

SEQ ID NO: 14088 - RNA, 20 nt, Artificial Sequence
  targeting sequence with CTCN PAM
uggagcgcagcaccagccgg

SEQ ID NO: 14089 - RNA, 20 nt, Artificial Sequence
  targeting sequence with CTCN PAM
ucaagcgauggcccccaccc

SEQ ID NO: 14090 - RNA, 20 nt, Artificial Sequence
  targeting sequence with CTCN PAM
ggggugggggccaucgcuug

SEQ ID NO: 14091 - RNA, 20 nt, Artificial Sequence
  targeting sequence with CTCN PAM
cugcugccugacgccuccau

SEQ ID NO: 14092 - RNA, 20 nt, Artificial Sequence
  targeting sequence with CTCN PAM
auuaccaugugccccuccug

SEQ ID NO: 14093 - RNA, 20 nt, Artificial Sequence
  targeting sequence with CTCN PAM
ugcuuccagguagguggcca

SEQ ID NO: 14094 - RNA, 20 nt, Artificial Sequence
  targeting sequence with CTCN PAM
caugugcuucucuuggccac

SEQ ID NO: 14095 - RNA, 20 nt, Artificial Sequence
  targeting sequence with CTCN PAM
uggccacuuuucccuugccc

SEQ ID NO: 14096 - RNA, 20 nt, Artificial Sequence
  targeting sequence with CTCN PAM
gggaggcguggccccuggga

SEQ ID NO: 14097 - RNA, 20 nt, Artificial Sequence
  targeting sequence with CTCN PAM
cagagggacauuugggcaag

SEQ ID NO: 14098 - RNA, 20 nt, Artificial Sequence
  targeting sequence with CTCN PAM
caggggccacgccucccaga

SEQ ID NO: 14099 - RNA, 20 nt, Artificial Sequence
  targeting sequence with CTCN PAM
ucccaggggccacgccuccc

SEQ ID NO: 14100 - RNA, 20 nt, Artificial Sequence
  targeting sequence with CTCN PAM
aaguugggacagaggcuugu

SEQ ID NO: 14101 - RNA, 20 nt, Artificial Sequence
  targeting sequence with CTCN PAM
gucccaacuuggagccaugg

SEQ ID NO: 14102 - RNA, 20 nt, Artificial Sequence
  targeting sequence with CTCN PAM
ccccugcuugcauuccaugu

SEQ ID NO: 14103 - RNA, 20 nt, Artificial Sequence
  targeting sequence with CTCN PAM
ccugcuugcauuccaugugc

SEQ ID NO: 14104 - RNA, 20 nt, Artificial Sequence
  targeting sequence with CTCN PAM
ccaaauccugggggcccagc

SEQ ID NO: 14105 - RNA, 20 nt, Artificial Sequence
  targeting sequence with CTCN PAM
gaaaacaagaaaccccacag

SEQ ID NO: 14106 - RNA, 20 nt, Artificial Sequence
  targeting sequence with CTCN PAM
caucuccccuuccagcccuc

SEQ ID NO: 14107 - RNA, 20 nt, Artificial Sequence
  targeting sequence with CTCN PAM
ccuuccagcccucaaacaaa

SEQ ID NO: 14108 - RNA, 20 nt, Artificial Sequence
  targeting sequence with CTCN PAM
aacaaaggugcugcaggucu

SEQ ID NO: 14109 - RNA, 20 nt, Artificial Sequence
  targeting sequence with CTCN PAM
ccuugagaggcagugcgucc

SEQ ID NO: 14110 - RNA, 20 nt, Artificial Sequence
  targeting sequence with CTCN PAM
aggggagggggcuuggcagu

SEQ ID NO: 14111 - RNA, 20 nt, Artificial Sequence
  targeting sequence with CTCN PAM
caaggggagggggcuuggca

SEQ ID NO: 14112 - RNA, 20 nt, Artificial Sequence
  targeting sequence with CTCN PAM
ucagcccuacgccuggggcc

SEQ ID NO: 14113 - RNA, 20 nt, Artificial Sequence
  targeting sequence with CTCN PAM
gaauggaacaucuaagggaa

SEQ ID NO: 14114 - RNA, 20 nt, Artificial Sequence
  targeting sequence with CTCN PAM
uaguccucagaauggaacau

SEQ ID NO: 14115 - RNA, 20 nt, Artificial Sequence
  targeting sequence with CTCN PAM
gcccgccuuggggucugcug

SEQ ID NO: 14116 - RNA, 20 nt, Artificial Sequence
  targeting sequence with CTCN PAM
uucacagcccagcagacccc

SEQ ID NO: 14117 - RNA, 20 nt, Artificial Sequence
  targeting sequence with CTCN PAM
uuauucuccuucacagccca

SEQ ID NO: 14118 - RNA, 20 nt, Artificial Sequence
  targeting sequence with CTCN PAM
uggugcuauuuacaaggcau

SEQ ID NO: 14119 - RNA, 20 nt, Artificial Sequence
  targeting sequence with CTCN PAM
ucuccuggugcuauuuacaa

SEQ ID NO: 14120 - RNA, 20 nt, Artificial Sequence
  targeting sequence with CTCN PAM
uccucaucuccuggugcuau

SEQ ID NO: 14121 - RNA, 20 nt, Artificial Sequence
  targeting sequence with CTCN PAM
gaguuguucguggcagccug

SEQ ID NO: 14122 - RNA, 20 nt, Artificial Sequence
  targeting sequence with CTCN PAM
gagccguucugaaaguaaca

SEQ ID NO: 14123 - RNA, 20 nt, Artificial Sequence
  targeting sequence with CTCN PAM
agcaggcugccacgaacaac

SEQ ID NO: 14124 - RNA, 20 nt, Artificial Sequence
  targeting sequence with CTCN PAM
auaaugacaaaagggcuccu

SEQ ID NO: 14125 - RNA, 20 nt, Artificial Sequence
  targeting sequence with CTCN PAM
uuauuuucaucagcaucuac

SEQ ID NO: 14126 - RNA, 20 nt, Artificial Sequence
  targeting sequence with CTCN PAM
uaacauuuaaucaaaauggc

SEQ ID NO: 14127 - RNA, 20 nt, Artificial Sequence
  targeting sequence with CTCN PAM
cccaccccuuucuauauugc

SEQ ID NO: 14128 - RNA, 20 nt, Artificial Sequence
  targeting sequence with CTCN PAM
ugucaagauggauccccauu

SEQ ID NO: 14129 - RNA, 20 nt, Artificial Sequence
  targeting sequence with CTCN PAM
ugccaucuucuuuggaccca

SEQ ID NO: 14130 - RNA, 20 nt, Artificial Sequence
  targeting sequence with CTCN PAM
uguuugguagcccagucaag

SEQ ID NO: 14131 - RNA, 20 nt, Artificial Sequence
  targeting sequence with CTCN PAM
uguccaggcucuggagccgc

SEQ ID NO: 14132 - RNA, 20 nt, Artificial Sequence
  targeting sequence with CTCN PAM
ggagccgcccucuuccaucc

SEQ ID NO: 14133 - RNA, 20 nt, Artificial Sequence
  targeting sequence with CTCN PAM
agagccuggacaggagccuu

SEQ ID NO: 14134 - RNA, 20 nt, Artificial Sequence
  targeting sequence with CTCN PAM
uccauccaccuuccccagcc

SEQ ID NO: 14135 - RNA, 20 nt, Artificial Sequence
  targeting sequence with CTCN PAM
guggggcuggggaaggugga

SEQ ID NO: 14136 - RNA, 20 nt, Artificial Sequence
  targeting sequence with CTCN PAM
auugggcuggggcugcucug

SEQ ID NO: 14137 - RNA, 20 nt, Artificial Sequence
  targeting sequence with CTCN PAM
ucccuuuggaacagcuccuu

SEQ ID NO: 14138 - RNA, 20 nt, Artificial Sequence
  targeting sequence with CTCN PAM
uuaagcaggggguuuccguu

SEQ ID NO: 14139 - RNA, 20 nt, Artificial Sequence
  targeting sequence with CTCN PAM
aacggaaacccccugcuuaa

SEQ ID NO: 14140 - RNA, 20 nt, Artificial Sequence
  targeting sequence with CTCN PAM
ggcaucacugguguccaguc

SEQ ID NO: 14141 - RNA, 20 nt, Artificial Sequence
  targeting sequence with CTCN PAM
agcuguuggacuggacacca

SEQ ID NO: 14142 - RNA, 20 nt, Artificial Sequence
  targeting sequence with CTCN PAM
uuagcuucugugugcuguuc

SEQ ID NO: 14143 - RNA, 20 nt, Artificial Sequence
  targeting sequence with CTCN PAM
cauguaugggggacguuuuu

SEQ ID NO: 14144 - RNA, 20 nt, Artificial Sequence
  targeting sequence with CTCN PAM
ggccucucagcagcccugug

SEQ ID NO: 14145 - RNA, 20 nt, Artificial Sequence
  targeting sequence with CTCN PAM
cagcagcccugugaaggaag

SEQ ID NO: 14146 - RNA, 20 nt, Artificial Sequence
  targeting sequence with CTCN PAM
gcagcccugugaaggaagag

SEQ ID NO: 14147 - RNA, 20 nt, Artificial Sequence
  targeting sequence with CTCN PAM
uccuucacagggcugcugag

SEQ ID NO: 14148 - RNA, 20 nt, Artificial Sequence
  targeting sequence with CTCN PAM
agcccugggaggggcggccc

SEQ ID NO: 14149 - RNA, 20 nt, Artificial Sequence
  targeting sequence with CTCN PAM
cagggcuggaggcagccccu

SEQ ID NO: 14150 - RNA, 20 nt, Artificial Sequence
  targeting sequence with CTCN PAM
ggcagguggacuggggguga

SEQ ID NO: 14151 - RNA, 20 nt, Artificial Sequence
  targeting sequence with CTCN PAM
ugccugugccagcuguucuu

SEQ ID NO: 14152 - RNA, 20 nt, Artificial Sequence
  targeting sequence with CTCN PAM
ccugccugugccagcuguuc

SEQ ID NO: 14153 - RNA, 20 nt, Artificial Sequence
  targeting sequence with CTCN PAM
cuccugccugugccagcugu

SEQ ID NO: 14154 - RNA, 20 nt, Artificial Sequence
  targeting sequence with CTCN PAM
ccucgugcugcaguauugau

SEQ ID NO: 14155 - RNA, 20 nt, Artificial Sequence
  targeting sequence with CTCN PAM
ugcugcaguauugauuccuu

SEQ ID NO: 14156 - RNA, 20 nt, Artificial Sequence
  targeting sequence with CTCN PAM
agugggcauauuugcccugc

SEQ ID NO: 14157 - RNA, 20 nt, Artificial Sequence
  targeting sequence with CTCN PAM
gugucugcgucccuccagug

SEQ ID NO: 14158 - RNA, 20 nt, Artificial Sequence
  targeting sequence with CTCN PAM
uuggggucucagugucugcg

SEQ ID NO: 14159 - RNA, 20 nt, Artificial Sequence
  targeting sequence with CTCN PAM
ccuuggggucucagugucug

SEQ ID NO: 14160 - RNA, 20 nt, Artificial Sequence
  targeting sequence with CTCN PAM
gcagccacucuccuuggggu

SEQ ID NO: 14161 - RNA, 20 nt, Artificial Sequence
  targeting sequence with CTCN PAM
gacacuucccacugggggcc

SEQ ID NO: 14162 - RNA, 20 nt, Artificial Sequence
  targeting sequence with CTCN PAM
agcuccgacacuucccacug

SEQ ID NO: 14163 - RNA, 20 nt, Artificial Sequence
  targeting sequence with CTCN PAM
gggauggggcucuagcuccg

SEQ ID NO: 14164 - RNA, 20 nt, Artificial Sequence
  targeting sequence with CTCN PAM
ucccugccucccuccgcauc

SEQ ID NO: 14165 - RNA, 20 nt, Artificial Sequence
  targeting sequence with CTCN PAM
cugccucccuccgcaucucu

SEQ ID NO: 14166 - RNA, 20 nt, Artificial Sequence
  targeting sequence with CTCN PAM
cuccgcaucucucuggagau

SEQ ID NO: 14167 - RNA, 20 nt, Artificial Sequence
  targeting sequence with CTCN PAM
gcaucucucuggagaugaug

SEQ ID NO: 14168 - RNA, 20 nt, Artificial Sequence
  targeting sequence with CTCN PAM
cuggagaugauggaggaaaa

SEQ ID NO: 14169 - RNA, 20 nt, Artificial Sequence
  targeting sequence with CTCN PAM
ggagaugauggaggaaaaua

SEQ ID NO: 14170 - RNA, 20 nt, Artificial Sequence
  targeting sequence with CTCN PAM
agagagaugcggagggaggc

SEQ ID NO: 14171 - RNA, 20 nt, Artificial Sequence
  targeting sequence with CTCN PAM
aucaucuccagagagaugcg

SEQ ID NO: 14172 - RNA, 20 nt, Artificial Sequence
  targeting sequence with CTCN PAM
cuuucuuuauuuuccuccau

SEQ ID NO: 14173 - RNA, 20 nt, Artificial Sequence
  targeting sequence with CTCN PAM
uccgucgagugucuaauuac

SEQ ID NO: 14174 - RNA, 20 nt, Artificial Sequence
  targeting sequence with CTCN PAM
gucgagugucuaauuacuua

SEQ ID NO: 14175 - RNA, 20 nt, Artificial Sequence
  targeting sequence with CTCN PAM
acggaggaguucuguuggca

SEQ ID NO: 14176 - RNA, 20 nt, Artificial Sequence
  targeting sequence with CTCN PAM
cucacuaaacauuuauuaau

SEQ ID NO: 14177 - RNA, 20 nt, Artificial Sequence
  targeting sequence with CTCN PAM
cacuaaacauuuauuaaugu

SEQ ID NO: 14178 - RNA, 20 nt, Artificial Sequence
  targeting sequence with CTCN PAM
cuaaacauuuauuaaugugu

SEQ ID NO: 14179 - RNA, 20 nt, Artificial Sequence
  targeting sequence with CTCN PAM
ccuuuuucccagccauaugc

SEQ ID NO: 14180 - RNA, 20 nt, Artificial Sequence
  targeting sequence with CTCN PAM
ccccuuuuucccagccauau

SEQ ID NO: 14181 - RNA, 20 nt, Artificial Sequence
  targeting sequence with CTCN PAM
cucuccccuuuuucccagcc

SEQ ID NO: 14182 - RNA, 20 nt, Artificial Sequence
  targeting sequence with CTCN PAM
agcuacccagcagucaauca

SEQ ID NO: 14183 - RNA, 20 nt, Artificial Sequence
  targeting sequence with CTCN PAM
agccagggaccaucugaucu

SEQ ID NO: 14184 - RNA, 20 nt, Artificial Sequence
  targeting sequence with CTCN PAM
ccugccuccagccagggacc

SEQ ID NO: 14185 - RNA, 20 nt, Artificial Sequence
  targeting sequence with CTCN PAM
gcuggaacccuccccugccu

SEQ ID NO: 14186 - RNA, 20 nt, Artificial Sequence
  targeting sequence with CTCN PAM
agcaugcauccccucagccg

SEQ ID NO: 14187 - RNA, 20 nt, Artificial Sequence
  targeting sequence with CTCN PAM
gccgaagaacacaaaaauga

SEQ ID NO: 14188 - RNA, 20 nt, Artificial Sequence
  targeting sequence with CTCN PAM
uuuuuguguucuucggcuga

SEQ ID NO: 14189 - RNA, 20 nt, Artificial Sequence
  targeting sequence with CTCN PAM
gcugccccaggaagcucagc

SEQ ID NO: 14190 - RNA, 20 nt, Artificial Sequence
  targeting sequence with CTCN PAM
gcucuagaggccugaguagg

SEQ ID NO: 14191 - RNA, 20 nt, Artificial Sequence
  targeting sequence with CTCN PAM
agaggccugaguaggacccc

SEQ ID NO: 14192 - RNA, 20 nt, Artificial Sequence
  targeting sequence with CTCN PAM
agagcugagcuuccuggggc

SEQ ID NO: 14193 - RNA, 20 nt, Artificial Sequence
  targeting sequence with CTCN PAM
ggccucuagagcugagcuuc

SEQ ID NO: 14194 - RNA, 20 nt, Artificial Sequence
  targeting sequence with CTCN PAM
gugucaucaccuguguaaua

SEQ ID NO: 14195 - RNA, 20 nt, Artificial Sequence
  targeting sequence with CTCN PAM
gucauguuauuuuucauuca

SEQ ID NO: 14196 - RNA, 20 nt, Artificial Sequence
  targeting sequence with CTCN PAM
cucagccugaucugggucug

SEQ ID NO: 14197 - RNA, 20 nt, Artificial Sequence
  targeting sequence with CTCN PAM
cagccugaucugggucugaa

SEQ ID NO: 14198 - RNA, 20 nt, Artificial Sequence
  targeting sequence with CTCN PAM
gccugaucugggucugaacc

SEQ ID NO: 14199 - RNA, 20 nt, Artificial Sequence
  targeting sequence with CTCN PAM
aaggcuguuuccccaucugc

SEQ ID NO: 14200 - RNA, 20 nt, Artificial Sequence
  targeting sequence with CTCN PAM
agcucugacucugagguucc

SEQ ID NO: 14201 - RNA, 20 nt, Artificial Sequence
  targeting sequence with CTCN PAM
gacucugagguuccagccuc

SEQ ID NO: 14202 - RNA, 20 nt, Artificial Sequence
  targeting sequence with CTCN PAM
gagguuccagccucagucug

SEQ ID NO: 14203 - RNA, 20 nt, Artificial Sequence
  targeting sequence with CTCN PAM
gagucagagcuggagggggc

SEQ ID NO: 14204 - RNA, 20 nt, Artificial Sequence
  targeting sequence with CTCN PAM
gucugcgucugugaacagcg

SEQ ID NO: 14205 - RNA, 20 nt, Artificial Sequence
  targeting sequence with CTCN PAM
agugccugugacaaggaagg

SEQ ID NO: 14206 - RNA, 20 nt, Artificial Sequence
  targeting sequence with CTCN PAM
uaguucaaugggcaucacca

SEQ ID NO: 14207 - RNA, 20 nt, Artificial Sequence
  targeting sequence with CTCN PAM
guguccucuuaguucaaugg

SEQ ID NO: 14208 - RNA, 20 nt, Artificial Sequence
  targeting sequence with CTCN PAM
ggccucaguguccucuuagu

SEQ ID NO: 14209 - RNA, 20 nt, Artificial Sequence
  targeting sequence with CTCN PAM
cuggccucaguguccucuua

SEQ ID NO: 14210 - RNA, 20 nt, Artificial Sequence
  targeting sequence with CTCN PAM
ucucuggccucaguguccuc

SEQ ID NO: 14211 - RNA, 20 nt, Artificial Sequence
  targeting sequence with CTCN PAM
ggaggcugagguggaaggau

SEQ ID NO: 14212 - RNA, 20 nt, Artificial Sequence
  targeting sequence with CTCN PAM
ugaguaguugggacuacagg

SEQ ID NO: 14213 - RNA, 20 nt, Artificial Sequence
  targeting sequence with CTCN PAM
gccuccugaguaguugggac

SEQ ID NO: 14214 - RNA, 20 nt, Artificial Sequence
  targeting sequence with CTCN PAM
auugauccuuccaccucagc

SEQ ID NO: 14215 - RNA, 20 nt, Artificial Sequence
  targeting sequence with CTCN PAM
agccugggcaacagagcaac

SEQ ID NO: 14216 - RNA, 20 nt, Artificial Sequence
  targeting sequence with CTCN PAM
guugcccaggcuggagugca

SEQ ID NO: 14217 - RNA, 20 nt, Artificial Sequence
  targeting sequence with CTCN PAM
aaacaacauuuaaaaauugu

SEQ ID NO: 14218 - RNA, 20 nt, Artificial Sequence
  targeting sequence with CTCN PAM
uuugucuucuuaaaacaauu

SEQ ID NO: 14219 - RNA, 20 nt, Artificial Sequence
  targeting sequence with CTCN PAM
caccuguaaucucagcacuu

SEQ ID NO: 14220 - RNA, 20 nt, Artificial Sequence
  targeting sequence with CTCN PAM
gcacuuugggaggccaaggc

SEQ ID NO: 14221 - RNA, 20 nt, Artificial Sequence
  targeting sequence with CTCN PAM
caaagugcugagauuacagg

SEQ ID NO: 14222 - RNA, 20 nt, Artificial Sequence
  targeting sequence with CTCN PAM
ugccuuggccucccaaagug

SEQ ID NO: 14223 - RNA, 20 nt, Artificial Sequence
  targeting sequence with CTCN PAM
agcgauccuccugccuuggc

SEQ ID NO: 14224 - RNA, 20 nt, Artificial Sequence
  targeting sequence with CTCN PAM
cggcucaagcgauccuccug

SEQ ID NO: 14225 - RNA, 20 nt, Artificial Sequence
  targeting sequence with CTCN PAM
aacucccggcucaagcgauc

SEQ ID NO: 14226 - RNA, 20 nt, Artificial Sequence
  targeting sequence with CTCN PAM
gacaauauagggagacccca

SEQ ID NO: 14227 - RNA, 20 nt, Artificial Sequence
  targeting sequence with CTCN PAM
cuauauugucugagcugguc

SEQ ID NO: 14228 - RNA, 20 nt, Artificial Sequence
  targeting sequence with CTCN PAM
caucuccaagugcucaacau

SEQ ID NO: 14229 - RNA, 20 nt, Artificial Sequence
  targeting sequence with CTCN PAM
ucuccaagugcucaacauug

SEQ ID NO: 14230 - RNA, 20 nt, Artificial Sequence
  targeting sequence with CTCN PAM
aagugcucaacauugugccc

SEQ ID NO: 14231 - RNA, 20 nt, Artificial Sequence
  targeting sequence with CTCN PAM
acauugugcccauguucuug

SEQ ID NO: 14232 - RNA, 20 nt, Artificial Sequence
  targeting sequence with CTCN PAM
uuccaagaacaugggcacaa

SEQ ID NO: 14233 - RNA, 20 nt, Artificial Sequence
  targeting sequence with CTCN PAM
cuuacuuccuccuuccaaga

SEQ ID NO: 14234 - RNA, 20 nt, Artificial Sequence
  targeting sequence with CTCN PAM
cccuuacuuccuccuuccaa

SEQ ID NO: 14235 - RNA, 20 nt, Artificial Sequence
  targeting sequence with CTCN PAM
gucuaccucucccuuacuuc

SEQ ID NO: 14236 - RNA, 20 nt, Artificial Sequence
  targeting sequence with CTCN PAM
gguggaccugacuggagacg

SEQ ID NO: 14237 - RNA, 20 nt, Artificial Sequence
  targeting sequence with CTCN PAM
agucagguccaccugaggcu

SEQ ID NO: 14238 - RNA, 20 nt, Artificial Sequence
  targeting sequence with CTCN PAM
ggcagcuggagguccccggg

SEQ ID NO: 14239 - RNA, 20 nt, Artificial Sequence
  targeting sequence with CTCN PAM
agcugccugaggugcgucuc

SEQ ID NO: 14240 - RNA, 20 nt, Artificial Sequence
  targeting sequence with CTCN PAM
uagcuucacagccuugcugg

SEQ ID NO: 14241 - RNA, 20 nt, Artificial Sequence
  targeting sequence with CTCN PAM
gcccaccugugugacagcca

SEQ ID NO: 14242 - RNA, 20 nt, Artificial Sequence
  targeting sequence with CTCN PAM
uccaaggucgcucugugucu

SEQ ID NO: 14243 - RNA, 20 nt, Artificial Sequence
  targeting sequence with CTCN PAM
aaggucgcucugugucucuu

SEQ ID NO: 14244 - RNA, 20 nt, Artificial Sequence
  targeting sequence with CTCN PAM
gugucucuucccuggcuugg

SEQ ID NO: 14245 - RNA, 20 nt, Artificial Sequence
  targeting sequence with CTCN PAM
ucccuggcuuggagucugug

SEQ ID NO: 14246 - RNA, 20 nt, Artificial Sequence
  targeting sequence with CTCN PAM
aagccagggaagagacacag

SEQ ID NO: 14247 - RNA, 20 nt, Artificial Sequence
  targeting sequence with CTCN PAM
gcugugggcacacagacucc

SEQ ID NO: 14248 - RNA, 20 nt, Artificial Sequence
  targeting sequence with CTCN PAM
ggguaagcacccugcccagu

SEQ ID NO: 14249 - RNA, 20 nt, Artificial Sequence
  targeting sequence with CTCN PAM
cugauucucccccugcagau

SEQ ID NO: 14250 - RNA, 20 nt, Artificial Sequence
  targeting sequence with CTCN PAM
cccugcagauccagaacacu

SEQ ID NO: 14251 - RNA, 20 nt, Artificial Sequence
  targeting sequence with CTCN PAM
auaccaggccaguguucugg

SEQ ID NO: 14252 - RNA, 20 nt, Artificial Sequence
  targeting sequence with CTCN PAM
ucauggcccucccugcuugc

SEQ ID NO: 14253 - RNA, 20 nt, Artificial Sequence
  targeting sequence with CTCN PAM
cugcuugccacccgcaguag

SEQ ID NO: 14254 - RNA, 20 nt, Artificial Sequence
  targeting sequence with CTCN PAM
auccccagcacgccacccug

SEQ ID NO: 14255 - RNA, 20 nt, Artificial Sequence
  targeting sequence with CTCN PAM
aggcccagcuggcccucccu

SEQ ID NO: 14256 - RNA, 20 nt, Artificial Sequence
  targeting sequence with CTCN PAM
cuaccugcccugcuugggag

SEQ ID NO: 14257 - RNA, 20 nt, Artificial Sequence
  targeting sequence with CTCN PAM
caagcagggcagguagggag

SEQ ID NO: 14258 - RNA, 20 nt, Artificial Sequence
  targeting sequence with CTCN PAM
uuugacccuccugguccacc

SEQ ID NO: 14259 - RNA, 20 nt, Artificial Sequence
  targeting sequence with CTCN PAM
ugguccaccuuuugcuccuc

SEQ ID NO: 14260 - RNA, 20 nt, Artificial Sequence
  targeting sequence with CTCN PAM
ucugggcucccacagcacug

SEQ ID NO: 14261 - RNA, 20 nt, Artificial Sequence
  targeting sequence with CTCN PAM
gggcucccacagcacuggga

SEQ ID NO: 14262 - RNA, 20 nt, Artificial Sequence
  targeting sequence with CTCN PAM
cacagcacugggacugggag

SEQ ID NO: 14263 - RNA, 20 nt, Artificial Sequence
  targeting sequence with CTCN PAM
cagucccagugcugugggag

SEQ ID NO: 14264 - RNA, 20 nt, Artificial Sequence
  targeting sequence with CTCN PAM
ucucucauguuuaguuuccg

SEQ ID NO: 14265 - RNA, 20 nt, Artificial Sequence
  targeting sequence with CTCN PAM
cauguuuaguuuccgaucag

SEQ ID NO: 14266 - RNA, 20 nt, Artificial Sequence
  targeting sequence with CTCN PAM
uguuuaguuuccgaucagua

SEQ ID NO: 14267 - RNA, 20 nt, Artificial Sequence
  targeting sequence with CTCN PAM
ggggguacugaucggaaacu

SEQ ID NO: 14268 - RNA, 20 nt, Artificial Sequence
  targeting sequence with CTCN PAM
cagucucaggggguacugau

SEQ ID NO: 14269 - RNA, 20 nt, Artificial Sequence
  targeting sequence with CTCN PAM
gcguccccagggccuggcgc

SEQ ID NO: 14270 - RNA, 20 nt, Artificial Sequence
  targeting sequence with CTCN PAM
uuauaugcgccaggcccugg

SEQ ID NO: 14271 - RNA, 20 nt, Artificial Sequence
  targeting sequence with CTCN PAM
uuucuacccuagcauuugcc

SEQ ID NO: 14272 - RNA, 20 nt, Artificial Sequence
  targeting sequence with CTCN PAM
uucucuuuucuacccuagca

SEQ ID NO: 14273 - RNA, 20 nt, Artificial Sequence
  targeting sequence with CTCN PAM
uuccucuuucucuuuucuac

SEQ ID NO: 14274 - RNA, 20 nt, Artificial Sequence
  targeting sequence with CTCN PAM
uucccuccuuccucuuucuc

SEQ ID NO: 14275 - RNA, 20 nt, Artificial Sequence
  targeting sequence with CTCN PAM
cauucccuccuuccucuuuc

SEQ ID NO: 14276 - RNA, 20 nt, Artificial Sequence
  targeting sequence with CTCN PAM
cucccuuauucccccuugau

SEQ ID NO: 14277 - RNA, 20 nt, Artificial Sequence
  targeting sequence with CTCN PAM
cuuauucccccuugaugcuc

SEQ ID NO: 14278 - RNA, 20 nt, Artificial Sequence
  targeting sequence with CTCN PAM
caguaccgcugaaggccuca

SEQ ID NO: 14279 - RNA, 20 nt, Artificial Sequence
  targeting sequence with CTCN PAM
guaccgcugaaggccucaug

SEQ ID NO: 14280 - RNA, 20 nt, Artificial Sequence
  targeting sequence with CTCN PAM
uguagccuuggugacgcagc

SEQ ID NO: 14281 - RNA, 20 nt, Artificial Sequence
  targeting sequence with CTCN PAM
gccccaccaggcugcgucac

SEQ ID NO: 14282 - RNA, 20 nt, Artificial Sequence
  targeting sequence with CTCN PAM
uggucccccacauggcucag

SEQ ID NO: 14283 - RNA, 20 nt, Artificial Sequence
  targeting sequence with CTCN PAM
uccuuggcuuucuuucuccu

SEQ ID NO: 14284 - RNA, 20 nt, Artificial Sequence
  targeting sequence with CTCN PAM
ucuuccuuggcuuucuuucu

SEQ ID NO: 14285 - RNA, 20 nt, Artificial Sequence
  targeting sequence with CTCN PAM
uccucuuccuuggcuuucuu

SEQ ID NO: 14286 - RNA, 20 nt, Artificial Sequence
  targeting sequence with CTCN PAM
uccuccucuuccuuggcuuu

SEQ ID NO: 14287 - RNA, 20 nt, Artificial Sequence
  targeting sequence with CTCN PAM
uccuccuccucuuccuuggc

SEQ ID NO: 14288 - RNA, 20 nt, Artificial Sequence
  targeting sequence with CTCN PAM
uccuccuccuccucuuccuu

SEQ ID NO: 14289 - RNA, 20 nt, Artificial Sequence
  targeting sequence with CTCN PAM
uucuccuccuccuccuccuc

SEQ ID NO: 14290 - RNA, 20 nt, Artificial Sequence
  targeting sequence with CTCN PAM
uccuucuccuccuccuccuc

SEQ ID NO: 14291 - RNA, 20 nt, Artificial Sequence
  targeting sequence with CTCN PAM
ucucacagcagcuccucucu

SEQ ID NO: 14292 - RNA, 20 nt, Artificial Sequence
  targeting sequence with CTCN PAM
cacagcagcuccucucuugc

SEQ ID NO: 14293 - RNA, 20 nt, Artificial Sequence
  targeting sequence with CTCN PAM
cagcagcuccucucuugcag

SEQ ID NO: 14294 - RNA, 20 nt, Artificial Sequence
  targeting sequence with CTCN PAM
ucucuugcagaggcugaaga

SEQ ID NO: 14295 - RNA, 20 nt, Artificial Sequence
  targeting sequence with CTCN PAM
cuugcagaggcugaagagcg

SEQ ID NO: 14296 - RNA, 20 nt, Artificial Sequence
  targeting sequence with CTCN PAM
ugcagaggcugaagagcgau

SEQ ID NO: 14297 - RNA, 20 nt, Artificial Sequence
  targeting sequence with CTCN PAM
gcaagagaggagcugcugug

SEQ ID NO: 14298 - RNA, 20 nt, Artificial Sequence
  targeting sequence with CTCN PAM
ucagccucugcaagagagga

SEQ ID NO: 14299 - RNA, 20 nt, Artificial Sequence
  targeting sequence with CTCN PAM
guggauuaggggcuuagcuu

SEQ ID NO: 14300 - RNA, 20 nt, Artificial Sequence
  targeting sequence with CTCN PAM
cgagggcugggacucgggug

SEQ ID NO: 14301 - RNA, 20 nt, Artificial Sequence
  targeting sequence with CTCN PAM
ggagcccggcuaggggcuuu

SEQ ID NO: 14302 - RNA, 20 nt, Artificial Sequence
  targeting sequence with CTCN PAM
ggugccccaagauggcugca

SEQ ID NO: 14303 - RNA, 20 nt, Artificial Sequence
  targeting sequence with CTCN PAM
ggacugcccgacacaaggug

SEQ ID NO: 14304 - RNA, 20 nt, Artificial Sequence
  targeting sequence with CTCN PAM
gcagaggaacuuugacccug

SEQ ID NO: 14305 - RNA, 20 nt, Artificial Sequence
  targeting sequence with CTCN PAM
gcagagcugggauuugaaca

SEQ ID NO: 14306 - RNA, 20 nt, Artificial Sequence
  targeting sequence with CTCN PAM
guggucaguggggaguuaga

SEQ ID NO: 14307 - RNA, 20 nt, Artificial Sequence
  targeting sequence with CTCN PAM
ccacugaccacugaggaauc

SEQ ID NO: 14308 - RNA, 20 nt, Artificial Sequence
  targeting sequence with CTCN PAM
ucauagggggcaggaggagu

SEQ ID NO: 14309 - RNA, 20 nt, Artificial Sequence
  targeting sequence with CTCN PAM
ugcccccuaugaagaggguc

SEQ ID NO: 14310 - RNA, 20 nt, Artificial Sequence
  targeting sequence with CTCN PAM
uccugcccccuaugaagagg

SEQ ID NO: 14311 - RNA, 20 nt, Artificial Sequence
  targeting sequence with CTCN PAM
uauggguugugagcucagag

SEQ ID NO: 14312 - RNA, 20 nt, Artificial Sequence
  targeting sequence with CTCN PAM
caacccauaggagguguuca

SEQ ID NO: 14313 - RNA, 20 nt, Artificial Sequence
  targeting sequence with CTCN PAM
gaggcagcgaugaacaggcc

SEQ ID NO: 14314 - RNA, 20 nt, Artificial Sequence
  targeting sequence with CTCN PAM
gagcucacaacccauaggag

SEQ ID NO: 14315 - RNA, 20 nt, Artificial Sequence
  targeting sequence with CTCN PAM
uuugucuacuuauugacuga

SEQ ID NO: 14316 - RNA, 20 nt, Artificial Sequence
  targeting sequence with CTCN PAM
ggaugcugagguaggaggau

SEQ ID NO: 14317 - RNA, 20 nt, Artificial Sequence
  targeting sequence with CTCN PAM
gcaucccgaguaacuggguc

SEQ ID NO: 14318 - RNA, 20 nt, Artificial Sequence
  targeting sequence with CTCN PAM
uaccucagcaucccgaguaa

SEQ ID NO: 14319 - RNA, 20 nt, Artificial Sequence
  targeting sequence with CTCN PAM
agugauccuccuaccucagc

SEQ ID NO: 14320 - RNA, 20 nt, Artificial Sequence
  targeting sequence with CTCN PAM
agccugggcaacagagcaag

SEQ ID NO: 14321 - RNA, 20 nt, Artificial Sequence
  targeting sequence with CTCN PAM
guugcccaggcuggagugca

SEQ ID NO: 14322 - RNA, 20 nt, Artificial Sequence
  targeting sequence with CTCN PAM
ucucuaaaaaacauuuaaaa

SEQ ID NO: 14323 - RNA, 20 nt, Artificial Sequence
  targeting sequence with CTCN PAM
aaaaaacauuuaaaaauugu

SEQ ID NO: 14324 - RNA, 20 nt, Artificial Sequence
  targeting sequence with CTCN PAM
uuugucuucuuaaaacaauu

SEQ ID NO: 14325 - RNA, 20 nt, Artificial Sequence
  targeting sequence with CTCN PAM
caccuauaaucucagcacuu

SEQ ID NO: 14326 - RNA, 20 nt, Artificial Sequence
  targeting sequence with CTCN PAM
gcacuuugggaggcugagau

SEQ ID NO: 14327 - RNA, 20 nt, Artificial Sequence
  targeting sequence with CTCN PAM
caaagugcugagauuauagg

SEQ ID NO: 14328 - RNA, 20 nt, Artificial Sequence
  targeting sequence with CTCN PAM
gccucccaaagugcugagau

SEQ ID NO: 14329 - RNA, 20 nt, Artificial Sequence
  targeting sequence with CTCN PAM
caaguggcucccaaggcagg

SEQ ID NO: 14330 - RNA, 20 nt, Artificial Sequence
  targeting sequence with CTCN PAM
caaggcaggaggaucacuug

SEQ ID NO: 14331 - RNA, 20 nt, Artificial Sequence
  targeting sequence with CTCN PAM
ugccuugggagccacuuggg

SEQ ID NO: 14332 - RNA, 20 nt, Artificial Sequence
  targeting sequence with CTCN PAM
agugauccuccugccuuggg

SEQ ID NO: 14333 - RNA, 20 nt, Artificial Sequence
  targeting sequence with CTCN PAM
caggcucaagugauccuccu

SEQ ID NO: 14334 - RNA, 20 nt, Artificial Sequence
  targeting sequence with CTCN PAM
aacucccaggcucaagugau

SEQ ID NO: 14335 - RNA, 20 nt, Artificial Sequence
  targeting sequence with CTCN PAM
cuauauuguccaagcuguuc

SEQ ID NO: 14336 - RNA, 20 nt, Artificial Sequence
  targeting sequence with CTCN PAM
cccuauauuguccaagcugu

SEQ ID NO: 14337 - RNA, 20 nt, Artificial Sequence
  targeting sequence with CTCN PAM
acaaaaaugaaaauaaauua

SEQ ID NO: 14338 - RNA, 20 nt, Artificial Sequence
  targeting sequence with CTCN PAM
gggguugaggugguggaccg

SEQ ID NO: 14339 - RNA, 20 nt, Artificial Sequence
  targeting sequence with CTCN PAM
accccugaguagcugggacc

SEQ ID NO: 14340 - RNA, 20 nt, Artificial Sequence
  targeting sequence with CTCN PAM
agcgguccaccaccucaacc

SEQ ID NO: 14341 - RNA, 20 nt, Artificial Sequence
  targeting sequence with CTCN PAM
ugggcucaagcgguccacca

SEQ ID NO: 14342 - RNA, 20 nt, Artificial Sequence
  targeting sequence with CTCN PAM
accuccugggcucaagcggu

SEQ ID NO: 14343 - RNA, 20 nt, Artificial Sequence
  targeting sequence with CTCN PAM
cugcagccucaaccuccugg

SEQ ID NO: 14344 - RNA, 20 nt, Artificial Sequence
  targeting sequence with CTCN PAM
aaccugagucacagagugau

SEQ ID NO: 14345 - RNA, 20 nt, Artificial Sequence
  targeting sequence with CTCN PAM
gguuggagugcagcggcaug

SEQ ID NO: 14346 - RNA, 20 nt, Artificial Sequence
  targeting sequence with CTCN PAM
gugacucagguuggagugca

SEQ ID NO: 14347 - RNA, 20 nt, Artificial Sequence
  targeting sequence with CTCN PAM
aaaaacaauaggccaggugu

SEQ ID NO: 14348 - RNA, 20 nt, Artificial Sequence
  targeting sequence with CTCN PAM
cgccuguaaccccagcacuu

SEQ ID NO: 14349 - RNA, 20 nt, Artificial Sequence
  targeting sequence with CTCN PAM
caaagugcugggguuacagg

SEQ ID NO: 14350 - RNA, 20 nt, Artificial Sequence
  targeting sequence with CTCN PAM
gccucccaaagugcuggggu

SEQ ID NO: 14351 - RNA, 20 nt, Artificial Sequence
  targeting sequence with CTCN PAM
agugauccauccgccucggc

SEQ ID NO: 14352 - RNA, 20 nt, Artificial Sequence
  targeting sequence with CTCN PAM
ugaucucaagugauccaucc

SEQ ID NO: 14353 - RNA, 20 nt, Artificial Sequence
  targeting sequence with CTCN PAM
aacuccugaucucaagugau

SEQ ID NO: 14354 - RNA, 20 nt, Artificial Sequence
  targeting sequence with CTCN PAM
caaguaaccaggacuacagg

SEQ ID NO: 14355 - RNA, 20 nt, Artificial Sequence
  targeting sequence with CTCN PAM
ugccuuagccucccaaguaa

SEQ ID NO: 14356 - RNA, 20 nt, Artificial Sequence
  targeting sequence with CTCN PAM
uccuggguucaagcgauucu

SEQ ID NO: 14357 - RNA, 20 nt, Artificial Sequence
  targeting sequence with CTCN PAM
ucuuccuggguucaagcgau

SEQ ID NO: 14358 - RNA, 20 nt, Artificial Sequence
  targeting sequence with CTCN PAM
cugcaaccuccucuuccugg

SEQ ID NO: 14359 - RNA, 20 nt, Artificial Sequence
  targeting sequence with CTCN PAM
agcuugggugacagagugag

SEQ ID NO: 14360 - RNA, 20 nt, Artificial Sequence
  targeting sequence with CTCN PAM
gucacccaagcuggagugca

SEQ ID NO: 14361 - RNA, 20 nt, Artificial Sequence
  targeting sequence with CTCN PAM
cucugucacccaagcuggag

SEQ ID NO: 14362 - RNA, 20 nt, Artificial Sequence
  targeting sequence with CTCN PAM
aaacagcuaaaccugguggg

SEQ ID NO: 14363 - RNA, 20 nt, Artificial Sequence
  targeting sequence with CTCN PAM
ccaaggacaugagugugagc

SEQ ID NO: 14364 - RNA, 20 nt, Artificial Sequence
  targeting sequence with CTCN PAM
aaggacaugagugugagcgg

SEQ ID NO: 14365 - RNA, 20 nt, Artificial Sequence
  targeting sequence with CTCN PAM
uguccuuggagagaccaccc

SEQ ID NO: 14366 - RNA, 20 nt, Artificial Sequence
  targeting sequence with CTCN PAM
cacucauguccuuggagaga

SEQ ID NO: 14367 - RNA, 20 nt, Artificial Sequence
  targeting sequence with CTCN PAM
gcucacacucauguccuugg

SEQ ID NO: 14368 - RNA, 20 nt, Artificial Sequence
  targeting sequence with CTCN PAM
uucaggucuccgcucacacu

SEQ ID NO: 14369 - RNA, 20 nt, Artificial Sequence
  targeting sequence with CTCN PAM
ggaagagauuaauacuguca

SEQ ID NO: 14370 - RNA, 20 nt, Artificial Sequence
  targeting sequence with CTCN PAM
uccugagucuccuucagguc

SEQ ID NO: 14371 - RNA, 20 nt, Artificial Sequence
  targeting sequence with CTCN PAM
caauaauccuauuagguagg

SEQ ID NO: 14372 - RNA, 20 nt, Artificial Sequence
  targeting sequence with CTCN PAM
guaaaaugggaaugauaaua

SEQ ID NO: 14373 - RNA, 20 nt, Artificial Sequence
  targeting sequence with CTCN PAM
acucuguaaaaugggaauga

SEQ ID NO: 14374 - RNA, 20 nt, Artificial Sequence
  targeting sequence with CTCN PAM
cgggagggcgggguagcugg

SEQ ID NO: 14375 - RNA, 20 nt, Artificial Sequence
  targeting sequence with CTCN PAM
ggagggcgggguagcuggcu

SEQ ID NO: 14376 - RNA, 20 nt, Artificial Sequence
  targeting sequence with CTCN PAM
cgagagugugcuucgguucu

SEQ ID NO: 14377 - RNA, 20 nt, Artificial Sequence
  targeting sequence with CTCN PAM
guccagauguaagggugggu

SEQ ID NO: 14378 - RNA, 20 nt, Artificial Sequence
  targeting sequence with CTCN PAM
uuuccacccacccuuacauc

SEQ ID NO: 14379 - RNA, 20 nt, Artificial Sequence
  targeting sequence with CTCN PAM
uugggcaaggcucuuuucca

SEQ ID NO: 14380 - RNA, 20 nt, Artificial Sequence
  targeting sequence with CTCN PAM
cucauugggcaaggcucuuu

SEQ ID NO: 14381 - RNA, 20 nt, Artificial Sequence
  targeting sequence with CTCN PAM
cauggagaaagcaggugagg

SEQ ID NO: 14382 - RNA, 20 nt, Artificial Sequence
  targeting sequence with CTCN PAM
uggagaaagcaggugagguu

SEQ ID NO: 14383 - RNA, 20 nt, Artificial Sequence
  targeting sequence with CTCN PAM
augagagccugguucgugaa

SEQ ID NO: 14384 - RNA, 20 nt, Artificial Sequence
  targeting sequence with CTCN PAM
ccugcuuucuccaugagagc

SEQ ID NO: 14385 - RNA, 20 nt, Artificial Sequence
  targeting sequence with CTCN PAM
gugugggguaggggcacacc

SEQ ID NO: 14386 - RNA, 20 nt, Artificial Sequence
  targeting sequence with CTCN PAM
ucugagcaaacugaggccca

SEQ ID NO: 14387 - RNA, 20 nt, Artificial Sequence
  targeting sequence with CTCN PAM
gacgaggaagccucagugug

SEQ ID NO: 14388 - RNA, 20 nt, Artificial Sequence
  targeting sequence with CTCN PAM
guuugcucagacgaggaagc

SEQ ID NO: 14389 - RNA, 20 nt, Artificial Sequence
  targeting sequence with CTCN PAM
gggccucaguuugcucagac

SEQ ID NO: 14390 - RNA, 20 nt, Artificial Sequence
  targeting sequence with CTCN PAM
cugggccucaguuugcucag

SEQ ID NO: 14391 - RNA, 20 nt, Artificial Sequence
  targeting sequence with CTCN PAM
aagaccagcuagaauccagc

SEQ ID NO: 14392 - RNA, 20 nt, Artificial Sequence
  targeting sequence with CTCN PAM
ucuccucgaggcuuccacug

SEQ ID NO: 14393 - RNA, 20 nt, Artificial Sequence
  targeting sequence with CTCN PAM
ccucgaggcuuccacugccc

SEQ ID NO: 14394 - RNA, 20 nt, Artificial Sequence
  targeting sequence with CTCN PAM
ucgaggcuuccacugcccca

SEQ ID NO: 14395 - RNA, 20 nt, Artificial Sequence
  targeting sequence with CTCN PAM
aggcuuccacugccccacgc

SEQ ID NO: 14396 - RNA, 20 nt, Artificial Sequence
  targeting sequence with CTCN PAM
aggagaggaggcuggauucu

SEQ ID NO: 14397 - RNA, 20 nt, Artificial Sequence
  targeting sequence with CTCN PAM
gucuagggccuuuccauuac

SEQ ID NO: 14398 - RNA, 20 nt, Artificial Sequence
  targeting sequence with CTCN PAM
ggaaagaccagccagccauu

SEQ ID NO: 14399 - RNA, 20 nt, Artificial Sequence
  targeting sequence with CTCN PAM
caggaaagaccagccagcca

SEQ ID NO: 14400 - RNA, 20 nt, Artificial Sequence
  targeting sequence with CTCN PAM
ucaaagauagcucucaggaa

SEQ ID NO: 14401 - RNA, 20 nt, Artificial Sequence
  targeting sequence with CTCN PAM
ccucaucaaagauagcucuc

SEQ ID NO: 14402 - RNA, 20 nt, Artificial Sequence
  targeting sequence with CTCN PAM
cuccccucaucaaagauagc

SEQ ID NO: 14403 - RNA, 20 nt, Artificial Sequence
  targeting sequence with CTCN PAM
ggucccguuacaaaucagug

SEQ ID NO: 14404 - RNA, 20 nt, Artificial Sequence
  targeting sequence with CTCN PAM
gcagagcuaggccucagucu

SEQ ID NO: 14405 - RNA, 20 nt, Artificial Sequence
  targeting sequence with CTCN PAM
gcagaguugcucaggucccg

SEQ ID NO: 14406 - RNA, 20 nt, Artificial Sequence
  targeting sequence with CTCN PAM
gucuuuucaucugcaaaaug

SEQ ID NO: 14407 - RNA, 20 nt, Artificial Sequence
  targeting sequence with CTCN PAM
gcuauauccauuuugcagau

SEQ ID NO: 14408 - RNA, 20 nt, Artificial Sequence
  targeting sequence with CTCN PAM
gaccaucucugcuauaucca

SEQ ID NO: 14409 - RNA, 20 nt, Artificial Sequence
  targeting sequence with CTCN PAM
cuaugagucuguuuuccuga

SEQ ID NO: 14410 - RNA, 20 nt, Artificial Sequence
  targeting sequence with CTCN PAM
uagugagcuggaagggucau

SEQ ID NO: 14411 - RNA, 20 nt, Artificial Sequence
  targeting sequence with CTCN PAM
uuguucaggaaaacagacuc

SEQ ID NO: 14412 - RNA, 20 nt, Artificial Sequence
  targeting sequence with CTCN PAM
uauaauccuggcacuuuggg

SEQ ID NO: 14413 - RNA, 20 nt, Artificial Sequence
  targeting sequence with CTCN PAM
caaagugccaggauuauagg

SEQ ID NO: 14414 - RNA, 20 nt, Artificial Sequence
  targeting sequence with CTCN PAM
gccucccaaagugccaggau

SEQ ID NO: 14415 - RNA, 20 nt, Artificial Sequence
  targeting sequence with CTCN PAM
ucggccucccaaagugccag

SEQ ID NO: 14416 - RNA, 20 nt, Artificial Sequence
  targeting sequence with CTCN PAM
agcgauccacccuccucggc

SEQ ID NO: 14417 - RNA, 20 nt, Artificial Sequence
  targeting sequence with CTCN PAM
uggcucaagcgauccacccu

SEQ ID NO: 14418 - RNA, 20 nt, Artificial Sequence
  targeting sequence with CTCN PAM
cuauguugcccaggcugguc

SEQ ID NO: 14419 - RNA, 20 nt, Artificial Sequence
  targeting sequence with CTCN PAM
accccuacaaaaaauacaaa

SEQ ID NO: 14420 - RNA, 20 nt, Artificial Sequence
  targeting sequence with CTCN PAM
ggaggcugaggugagaggau

SEQ ID NO: 14421 - RNA, 20 nt, Artificial Sequence
  targeting sequence with CTCN PAM
ugaguagcugggaccacaag

SEQ ID NO: 14422 - RNA, 20 nt, Artificial Sequence
  targeting sequence with CTCN PAM
gccuccugaguagcugggac

SEQ ID NO: 14423 - RNA, 20 nt, Artificial Sequence
  targeting sequence with CTCN PAM
ccucagccuccugaguagcu

SEQ ID NO: 14424 - RNA, 20 nt, Artificial Sequence
  targeting sequence with CTCN PAM
caccucagccuccugaguag

SEQ ID NO: 14425 - RNA, 20 nt, Artificial Sequence
  targeting sequence with CTCN PAM
agcgauccucucaccucagc

SEQ ID NO: 14426 - RNA, 20 nt, Artificial Sequence
  targeting sequence with CTCN PAM
ugggcucaagcgauccucuc

SEQ ID NO: 14427 - RNA, 20 nt, Artificial Sequence
  targeting sequence with CTCN PAM
gccuccugggcucaagcgau

SEQ ID NO: 14428 - RNA, 20 nt, Artificial Sequence
  targeting sequence with CTCN PAM
cuguagccucugccuccugg

SEQ ID NO: 14429 - RNA, 20 nt, Artificial Sequence
  targeting sequence with CTCN PAM
agccugggcgacagagaccu

SEQ ID NO: 14430 - RNA, 20 nt, Artificial Sequence
  targeting sequence with CTCN PAM
gucgcccaggcuggagugca

SEQ ID NO: 14431 - RNA, 20 nt, Artificial Sequence
  targeting sequence with CTCN PAM
aaacuuuuuuuuucuucguc

SEQ ID NO: 14432 - RNA, 20 nt, Artificial Sequence
  targeting sequence with CTCN PAM
uuauucuguaaagcuugacg

SEQ ID NO: 14433 - RNA, 20 nt, Artificial Sequence
  targeting sequence with CTCN PAM
gugauggcuguuaguucccc

SEQ ID NO: 14434 - RNA, 20 nt, Artificial Sequence
  targeting sequence with CTCN PAM
augagguugcaauugugaaa

SEQ ID NO: 14435 - RNA, 20 nt, Artificial Sequence
  targeting sequence with CTCN PAM
uggagcccuggugaugggga

SEQ ID NO: 14436 - RNA, 20 nt, Artificial Sequence
  targeting sequence with CTCN PAM
caaaggaggaaccugagaca

SEQ ID NO: 14437 - RNA, 20 nt, Artificial Sequence
  targeting sequence with CTCN PAM
uuugugaguuucacaauugc

SEQ ID NO: 14438 - RNA, 20 nt, Artificial Sequence
  targeting sequence with CTCN PAM
gguuccuccuuugugaguuu

SEQ ID NO: 14439 - RNA, 20 nt, Artificial Sequence
  targeting sequence with CTCN PAM
gucucagguuccuccuuugu

SEQ ID NO: 14440 - RNA, 20 nt, Artificial Sequence
  targeting sequence with CTCN PAM
cugucucagguuccuccuuu

SEQ ID NO: 14441 - RNA, 20 nt, Artificial Sequence
  targeting sequence with CTCN PAM
guacuuccccucucugucuc

SEQ ID NO: 14442 - RNA, 20 nt, Artificial Sequence
  targeting sequence with CTCN PAM
cucguucauucaacaaauau

SEQ ID NO: 14443 - RNA, 20 nt, Artificial Sequence
  targeting sequence with CTCN PAM
uucauucaacaaauauucag

SEQ ID NO: 14444 - RNA, 20 nt, Artificial Sequence
  targeting sequence with CTCN PAM
ugaauauuuguugaaugaac

SEQ ID NO: 14445 - RNA, 20 nt, Artificial Sequence
  targeting sequence with CTCN PAM
agggccuggcaccuagaagg

SEQ ID NO: 14446 - RNA, 20 nt, Artificial Sequence
  targeting sequence with CTCN PAM
uuccacuacaggccaagcac

SEQ ID NO: 14447 - RNA, 20 nt, Artificial Sequence
  targeting sequence with CTCN PAM
gggaacccuguugugagcaa

SEQ ID NO: 14448 - RNA, 20 nt, Artificial Sequence
  targeting sequence with CTCN PAM
caacaggguucccagagacc

SEQ ID NO: 14449 - RNA, 20 nt, Artificial Sequence
  targeting sequence with CTCN PAM
uguuacaggcagggagacgg

SEQ ID NO: 14450 - RNA, 20 nt, Artificial Sequence
  targeting sequence with CTCN PAM
cugccuguaacaugagucca

SEQ ID NO: 14451 - RNA, 20 nt, Artificial Sequence
  targeting sequence with CTCN PAM
gcaucuugcuuuuugcauag

SEQ ID NO: 14452 - RNA, 20 nt, Artificial Sequence
  targeting sequence with CTCN PAM
gcccggccagggaggggcca

SEQ ID NO: 14453 - RNA, 20 nt, Artificial Sequence
  targeting sequence with CTCN PAM
cuggccgggcugagccccca

SEQ ID NO: 14454 - RNA, 20 nt, Artificial Sequence
  targeting sequence with CTCN PAM
uucuggccaugaggguccac

SEQ ID NO: 14455 - RNA, 20 nt, Artificial Sequence
  targeting sequence with CTCN PAM
uggccagaaggagggugucc

SEQ ID NO: 14456 - RNA, 20 nt, Artificial Sequence
  targeting sequence with CTCN PAM
ccuuaaccucauuagcguug

SEQ ID NO: 14457 - RNA, 20 nt, Artificial Sequence
  targeting sequence with CTCN PAM
uuagcguugggcauaaucac

SEQ ID NO: 14458 - RNA, 20 nt, Artificial Sequence
  targeting sequence with CTCN PAM
uaguuuaaggcgcuuggccu

SEQ ID NO: 14459 - RNA, 20 nt, Artificial Sequence
  targeting sequence with CTCN PAM
cguaguuuaaggcgcuuggc

SEQ ID NO: 14460 - RNA, 20 nt, Artificial Sequence
  targeting sequence with CTCN PAM
agcccccuaccuggccuggg

SEQ ID NO: 14461 - RNA, 20 nt, Artificial Sequence
  targeting sequence with CTCN PAM
ucugagcagacagaucuggg

SEQ ID NO: 14462 - RNA, 20 nt, Artificial Sequence
  targeting sequence with CTCN PAM
gaagagugcccccuucccug

SEQ ID NO: 14463 - RNA, 20 nt, Artificial Sequence
  targeting sequence with CTCN PAM
ucccacccaggauucccaga

SEQ ID NO: 14464 - RNA, 20 nt, Artificial Sequence
  targeting sequence with CTCN PAM
cuucccacccaggauuccca

SEQ ID NO: 14465 - RNA, 20 nt, Artificial Sequence
  targeting sequence with CTCN PAM
cugucucucuucccacccag

SEQ ID NO: 14466 - RNA, 20 nt, Artificial Sequence
  targeting sequence with CTCN PAM
cacugucucucuucccaccc

SEQ ID NO: 14467 - RNA, 20 nt, Artificial Sequence
  targeting sequence with CTCN PAM
cucacugucucucuucccac

SEQ ID NO: 14468 - RNA, 20 nt, Artificial Sequence
  targeting sequence with CTCN PAM
cucucacugucucucuuccc

SEQ ID NO: 14469 - RNA, 20 nt, Artificial Sequence
  targeting sequence with CTCN PAM
cagggguccuuccgccugga

SEQ ID NO: 14470 - RNA, 20 nt, Artificial Sequence
  targeting sequence with CTCN PAM
gggguccuuccgccuggaug

SEQ ID NO: 14471 - RNA, 20 nt, Artificial Sequence
  targeting sequence with CTCN PAM
uguuguuccguucucagcuc

SEQ ID NO: 14472 - RNA, 20 nt, Artificial Sequence
  targeting sequence with CTCN PAM
gcucaagcuccagcuucuca

SEQ ID NO: 14473 - RNA, 20 nt, Artificial Sequence
  targeting sequence with CTCN PAM
agcuccagcuucucagagaa

SEQ ID NO: 14474 - RNA, 20 nt, Artificial Sequence
  targeting sequence with CTCN PAM
agcuucucagagaagccucc

SEQ ID NO: 14475 - RNA, 20 nt, Artificial Sequence
  targeting sequence with CTCN PAM
gagaagccuccuguguuggg

SEQ ID NO: 14476 - RNA, 20 nt, Artificial Sequence
  targeting sequence with CTCN PAM
gagaagcuggagcuugagcu

SEQ ID NO: 14477 - RNA, 20 nt, Artificial Sequence
  targeting sequence with CTCN PAM
uguguugggaguggcugcga

SEQ ID NO: 14478 - RNA, 20 nt, Artificial Sequence
  targeting sequence with CTCN PAM
caacacaggaggcuucucug

SEQ ID NO: 14479 - RNA, 20 nt, Artificial Sequence
  targeting sequence with CTCN PAM
ucuauuuguuuguggucccu

SEQ ID NO: 14480 - RNA, 20 nt, Artificial Sequence
  targeting sequence with CTCN PAM
ccccacaaaaacacuggcuu

SEQ ID NO: 14481 - RNA, 20 nt, Artificial Sequence
  targeting sequence with CTCN PAM
caagaagccaguguuuuugu

SEQ ID NO: 14482 - RNA, 20 nt, Artificial Sequence
  targeting sequence with CTCN PAM
ugcucacaagaagccagugu

SEQ ID NO: 14483 - RNA, 20 nt, Artificial Sequence
  targeting sequence with CTCN PAM
uucguguacccugugugucc

SEQ ID NO: 14484 - RNA, 20 nt, Artificial Sequence
  targeting sequence with CTCN PAM
auacacauguuggcuggaca

SEQ ID NO: 14485 - RNA, 20 nt, Artificial Sequence
  targeting sequence with CTCN PAM
gugaccacuguccagccaac

SEQ ID NO: 14486 - RNA, 20 nt, Artificial Sequence
  targeting sequence with CTCN PAM
cagcacuugcacaggccgcc

SEQ ID NO: 14487 - RNA, 20 nt, Artificial Sequence
  targeting sequence with CTCN PAM
gcacuugcacaggccgcccc

SEQ ID NO: 14488 - RNA, 20 nt, Artificial Sequence
  targeting sequence with CTCN PAM
caggaaugaagugggguguc

SEQ ID NO: 14489 - RNA, 20 nt, Artificial Sequence
  targeting sequence with CTCN PAM
ccgucguccaagcaacauga

SEQ ID NO: 14490 - RNA, 20 nt, Artificial Sequence
  targeting sequence with CTCN PAM
ccccgucguccaagcaacau

SEQ ID NO: 14491 - RNA, 20 nt, Artificial Sequence
  targeting sequence with CTCN PAM
auuuucccccagucaucugc

SEQ ID NO: 14492 - RNA, 20 nt, Artificial Sequence
  targeting sequence with CTCN PAM
gacuacuuucuuucucacgg

SEQ ID NO: 14493 - RNA, 20 nt, Artificial Sequence
  targeting sequence with CTCN PAM
cgguacauccugcuauucug

SEQ ID NO: 14494 - RNA, 20 nt, Artificial Sequence
  targeting sequence with CTCN PAM
uggggccaccugguacaugg

SEQ ID NO: 14495 - RNA, 20 nt, Artificial Sequence
  targeting sequence with CTCN PAM
aaugccauguaccagguggc

SEQ ID NO: 14496 - RNA, 20 nt, Artificial Sequence
  targeting sequence with CTCN PAM
uggcugauuaggccuccccc

SEQ ID NO: 14497 - RNA, 20 nt, Artificial Sequence
  targeting sequence with CTCN PAM
cccaacagugcccugucugc

SEQ ID NO: 14498 - RNA, 20 nt, Artificial Sequence
  targeting sequence with CTCN PAM
agggccagccuccccuucag

SEQ ID NO: 14499 - RNA, 20 nt, Artificial Sequence
  targeting sequence with CTCN PAM
ccuucagacuggaguccccu

SEQ ID NO: 14500 - RNA, 20 nt, Artificial Sequence
  targeting sequence with CTCN PAM
agucugaaggggaggcuggc

SEQ ID NO: 14501 - RNA, 20 nt, Artificial Sequence
  targeting sequence with CTCN PAM
ccugcucugguagcccccuc

SEQ ID NO: 14502 - RNA, 20 nt, Artificial Sequence
  targeting sequence with CTCN PAM
gguagcccccuccauccucc

SEQ ID NO: 14503 - RNA, 20 nt, Artificial Sequence
  targeting sequence with CTCN PAM
auccucccucccuccacucc

SEQ ID NO: 14504 - RNA, 20 nt, Artificial Sequence
  targeting sequence with CTCN PAM
cucccuccacuccaucuuug

SEQ ID NO: 14505 - RNA, 20 nt, Artificial Sequence
  targeting sequence with CTCN PAM
cuccacuccaucuuuggggg

SEQ ID NO: 14506 - RNA, 20 nt, Artificial Sequence
  targeting sequence with CTCN PAM
acuccaucuuugggggcauu

SEQ ID NO: 14507 - RNA, 20 nt, Artificial Sequence
  targeting sequence with CTCN PAM
aucuuugggggcauuugagu

SEQ ID NO: 14508 - RNA, 20 nt, Artificial Sequence
  targeting sequence with CTCN PAM
aaugcccccaaagauggagu

SEQ ID NO: 14509 - RNA, 20 nt, Artificial Sequence
  targeting sequence with CTCN PAM
cuuuccucuggauaaagcca

SEQ ID NO: 14510 - RNA, 20 nt, Artificial Sequence
  targeting sequence with CTCN PAM
ggauaaagccagguuccccg

SEQ ID NO: 14511 - RNA, 20 nt, Artificial Sequence
  targeting sequence with CTCN PAM
uucucucaaaggcccaaaca

SEQ ID NO: 14512 - RNA, 20 nt, Artificial Sequence
  targeting sequence with CTCN PAM
caaaggcccaaacauggccu

SEQ ID NO: 14513 - RNA, 20 nt, Artificial Sequence
  targeting sequence with CTCN PAM
aaggcccaaacauggccucc

SEQ ID NO: 14514 - RNA, 20 nt, Artificial Sequence
  targeting sequence with CTCN PAM
cagacugcaacccccaggca

SEQ ID NO: 14515 - RNA, 20 nt, Artificial Sequence
  targeting sequence with CTCN PAM
acaaccucacagccacccug

SEQ ID NO: 14516 - RNA, 20 nt, Artificial Sequence
  targeting sequence with CTCN PAM
cagccacccuggacggaauc

SEQ ID NO: 14517 - RNA, 20 nt, Artificial Sequence
  targeting sequence with CTCN PAM
aaugugggaagaagcagauu

SEQ ID NO: 14518 - RNA, 20 nt, Artificial Sequence
  targeting sequence with CTCN PAM
ucagccccugagcuccucug

SEQ ID NO: 14519 - RNA, 20 nt, Artificial Sequence
  targeting sequence with CTCN PAM
gccccugagcuccucugggc

SEQ ID NO: 14520 - RNA, 20 nt, Artificial Sequence
  targeting sequence with CTCN PAM
ggggcugaggaggacucaaa

SEQ ID NO: 14521 - RNA, 20 nt, Artificial Sequence
  targeting sequence with CTCN PAM
ucugggcagggcuguuucuu

SEQ ID NO: 14522 - RNA, 20 nt, Artificial Sequence
  targeting sequence with CTCN PAM
gggcagggcuguuucuuucc

SEQ ID NO: 14523 - RNA, 20 nt, Artificial Sequence
  targeting sequence with CTCN PAM
uguucguucauuaaacauuu

SEQ ID NO: 14524 - RNA, 20 nt, Artificial Sequence
  targeting sequence with CTCN PAM
cuuguucguucauuaaacau

SEQ ID NO: 14525 - RNA, 20 nt, Artificial Sequence
  targeting sequence with CTCN PAM
ugggcccuaggcuauguguc

SEQ ID NO: 14526 - RNA, 20 nt, Artificial Sequence
  targeting sequence with CTCN PAM
uggagcuccuccugucagag

SEQ ID NO: 14527 - RNA, 20 nt, Artificial Sequence
  targeting sequence with CTCN PAM
augagggcaggggcugcaac

SEQ ID NO: 14528 - RNA, 20 nt, Artificial Sequence
  targeting sequence with CTCN PAM
uccugucagaggaguguggg

SEQ ID NO: 14529 - RNA, 20 nt, Artificial Sequence
  targeting sequence with CTCN PAM
ugucagaggaguguggggac

SEQ ID NO: 14530 - RNA, 20 nt, Artificial Sequence
  targeting sequence with CTCN PAM
gacaggaggagcuccaugag

SEQ ID NO: 14531 - RNA, 20 nt, Artificial Sequence
  targeting sequence with CTCN PAM
ucugacaggaggagcuccau

SEQ ID NO: 14532 - RNA, 20 nt, Artificial Sequence
  targeting sequence with CTCN PAM
agagguaacuugugggggaa

SEQ ID NO: 14533 - RNA, 20 nt, Artificial Sequence
  targeting sequence with CTCN PAM
ggagucauccaguccccaca

SEQ ID NO: 14534 - RNA, 20 nt, Artificial Sequence
  targeting sequence with CTCN PAM
ucacacagccccuuaccugu

SEQ ID NO: 14535 - RNA, 20 nt, Artificial Sequence
  targeting sequence with CTCN PAM
ucucgucacacagccccuua

SEQ ID NO: 14536 - RNA, 20 nt, Artificial Sequence
  targeting sequence with CTCN PAM
caucucgucacacagccccu

SEQ ID NO: 14537 - RNA, 20 nt, Artificial Sequence
  targeting sequence with CTCN PAM
cagucucucaucucgucaca

SEQ ID NO: 14538 - RNA, 20 nt, Artificial Sequence
  targeting sequence with CTCN PAM
agcuguccagaggacauagc

SEQ ID NO: 14539 - RNA, 20 nt, Artificial Sequence
  targeting sequence with CTCN PAM
ggacagcuagagacuuucug

SEQ ID NO: 14540 - RNA, 20 nt, Artificial Sequence
  targeting sequence with CTCN PAM
gugcuauguccucuggacag

SEQ ID NO: 14541 - RNA, 20 nt, Artificial Sequence
  targeting sequence with CTCN PAM
gucugguggccuggguuuga

SEQ ID NO: 14542 - RNA, 20 nt, Artificial Sequence
  targeting sequence with CTCN PAM
ucccuuuuccuggauccuga

SEQ ID NO: 14543 - RNA, 20 nt, Artificial Sequence
  targeting sequence with CTCN PAM
cuuuuccuggauccugagua

SEQ ID NO: 14544 - RNA, 20 nt, Artificial Sequence
  targeting sequence with CTCN PAM
ggauccaggaaaagggagga

SEQ ID NO: 14545 - RNA, 20 nt, Artificial Sequence
  targeting sequence with CTCN PAM
ccucccugaccucaggcuuc

SEQ ID NO: 14546 - RNA, 20 nt, Artificial Sequence
  targeting sequence with CTCN PAM
ucccugaccucaggcuuccu

SEQ ID NO: 14547 - RNA, 20 nt, Artificial Sequence
  targeting sequence with CTCN PAM
cugaccucaggcuuccuccu

SEQ ID NO: 14548 - RNA, 20 nt, Artificial Sequence
  targeting sequence with CTCN PAM
ggcuuccuccuagugucacc

SEQ ID NO: 14549 - RNA, 20 nt, Artificial Sequence
  targeting sequence with CTCN PAM
uagugucaccuuggccccuc

SEQ ID NO: 14550 - RNA, 20 nt, Artificial Sequence
  targeting sequence with CTCN PAM
uagaagccaauuaggcccuc

SEQ ID NO: 14551 - RNA, 20 nt, Artificial Sequence
  targeting sequence with CTCN PAM
guuucugcagcggggauuaa

SEQ ID NO: 14552 - RNA, 20 nt, Artificial Sequence
  targeting sequence with CTCN PAM
cagaugcugauucagccagg

SEQ ID NO: 14553 - RNA, 20 nt, Artificial Sequence
  targeting sequence with CTCN PAM
uggcugaaucagcaucuggg

SEQ ID NO: 14554 - RNA, 20 nt, Artificial Sequence
  targeting sequence with CTCN PAM
uaagcuccuggcugaaucag

SEQ ID NO: 14555 - RNA, 20 nt, Artificial Sequence
  targeting sequence with CTCN PAM
cccuccuaagcuccuggcug

SEQ ID NO: 14556 - RNA, 20 nt, Artificial Sequence
  targeting sequence with CTCN PAM
ggguucugacccccccagac

SEQ ID NO: 14557 - RNA, 20 nt, Artificial Sequence
  targeting sequence with CTCN PAM
agcuggaugacucuggguuc

SEQ ID NO: 14558 - RNA, 20 nt, Artificial Sequence
  targeting sequence with CTCN PAM
gggcuccagcuggaugacuc

SEQ ID NO: 14559 - RNA, 20 nt, Artificial Sequence
  targeting sequence with CTCN PAM
gccacucagggcuccagcug

SEQ ID NO: 14560 - RNA, 20 nt, Artificial Sequence
  targeting sequence with CTCN PAM
ggccuucgcagcauucuugg

SEQ ID NO: 14561 - RNA, 20 nt, Artificial Sequence
  targeting sequence with CTCN PAM
cacccaagaaugcugcgaag

SEQ ID NO: 14562 - RNA, 20 nt, Artificial Sequence
  targeting sequence with CTCN PAM
aaugcgacgggugugguacg

SEQ ID NO: 14563 - RNA, 20 nt, Artificial Sequence
  targeting sequence with CTCN PAM
aaggggcugcguaccacacc

SEQ ID NO: 14564 - RNA, 20 nt, Artificial Sequence
  targeting sequence with CTCN PAM
gccagguaguacugugggua

SEQ ID NO: 14565 - RNA, 20 nt, Artificial Sequence
  targeting sequence with CTCN PAM
augcuggccgccuacauguu

SEQ ID NO: 14566 - RNA, 20 nt, Artificial Sequence
  targeting sequence with CTCN PAM
cgcucuacgucaccguccag

SEQ ID NO: 14567 - RNA, 20 nt, Artificial Sequence
  targeting sequence with CTCN PAM
acgucaccguccagcacaag

SEQ ID NO: 14568 - RNA, 20 nt, Artificial Sequence
  targeting sequence with CTCN PAM
caacuacauccugcucaacc

SEQ ID NO: 14569 - RNA, 20 nt, Artificial Sequence
  targeting sequence with CTCN PAM
acuacauccugcucaaccua

SEQ ID NO: 14570 - RNA, 20 nt, Artificial Sequence
  targeting sequence with CTCN PAM
accuagccguggcugaccuc

SEQ ID NO: 14571 - RNA, 20 nt, Artificial Sequence
  targeting sequence with CTCN PAM
ucaugguccuagguggcuuc

SEQ ID NO: 14572 - RNA, 20 nt, Artificial Sequence
  targeting sequence with CTCN PAM
acaccucucugcauggauac

SEQ ID NO: 14573 - RNA, 20 nt, Artificial Sequence
  targeting sequence with CTCN PAM
cugcauggauacuucgucuu

SEQ ID NO: 14574 - RNA, 20 nt, Artificial Sequence
  targeting sequence with CTCN PAM
gcauggauacuucgucuucg

SEQ ID NO: 14575 - RNA, 20 nt, Artificial Sequence
  targeting sequence with CTCN PAM
aaauugcauccugugggccc

SEQ ID NO: 14576 - RNA, 20 nt, Artificial Sequence
  targeting sequence with CTCN PAM
uaccgcccaggguggcaaag

SEQ ID NO: 14577 - RNA, 20 nt, Artificial Sequence
  targeting sequence with CTCN PAM
ugcacaccccacccacaccc

SEQ ID NO: 14578 - RNA, 20 nt, Artificial Sequence
  targeting sequence with CTCN PAM
cgggcuccugcacaccccac

SEQ ID NO: 14579 - RNA, 20 nt, Artificial Sequence
  targeting sequence with CTCN PAM
augcucccgggcuccugcac

SEQ ID NO: 14580 - RNA, 20 nt, Artificial Sequence
  targeting sequence with CTCN PAM
cagaccccuccaugcucccg

SEQ ID NO: 14581 - RNA, 20 nt, Artificial Sequence
  targeting sequence with CTCN PAM
cccagaccccuccaugcucc

SEQ ID NO: 14582 - RNA, 20 nt, Artificial Sequence
  targeting sequence with CTCN PAM
gccaccaccgccaagcccgg

SEQ ID NO: 14583 - RNA, 20 nt, Artificial Sequence
  targeting sequence with CTCN PAM
cagccaccaccgccaagccc

SEQ ID NO: 14584 - RNA, 20 nt, Artificial Sequence
  targeting sequence with CTCN PAM
cuucuccuguccugucaaug

SEQ ID NO: 14585 - RNA, 20 nt, Artificial Sequence
  targeting sequence with CTCN PAM
uguccugucaauguuaucca

SEQ ID NO: 14586 - RNA, 20 nt, Artificial Sequence
  targeting sequence with CTCN PAM
uauauucagucaacaaacac

SEQ ID NO: 14587 - RNA, 20 nt, Artificial Sequence
  targeting sequence with CTCN PAM
aaauaagaucaaggcagugu

SEQ ID NO: 14588 - RNA, 20 nt, Artificial Sequence
  targeting sequence with CTCN PAM
guuuucuugcugugaaauua

SEQ ID NO: 14589 - RNA, 20 nt, Artificial Sequence
  targeting sequence with CTCN PAM
gcucaguuuucuugcuguga

SEQ ID NO: 14590 - RNA, 20 nt, Artificial Sequence
  targeting sequence with CTCN PAM
aagaagucaagcgcccugcu

SEQ ID NO: 14591 - RNA, 20 nt, Artificial Sequence
  targeting sequence with CTCN PAM
gcacccgucccugugugacg

SEQ ID NO: 14592 - RNA, 20 nt, Artificial Sequence
  targeting sequence with CTCN PAM
acucugcacccgucccugug

SEQ ID NO: 14593 - RNA, 20 nt, Artificial Sequence
  targeting sequence with CTCN PAM
ggccauguuugcagcaccaa

SEQ ID NO: 14594 - RNA, 20 nt, Artificial Sequence
  targeting sequence with CTCN PAM
guuucccuuggagcagcugu

SEQ ID NO: 14595 - RNA, 20 nt, Artificial Sequence
  targeting sequence with CTCN PAM
aagggaaacagaggcuuggu

SEQ ID NO: 14596 - RNA, 20 nt, Artificial Sequence
  targeting sequence with CTCN PAM
gcacagcugcuccaagggaa

SEQ ID NO: 14597 - RNA, 20 nt, Artificial Sequence
  targeting sequence with CTCN PAM
gugcccagccugggucugac

SEQ ID NO: 14598 - RNA, 20 nt, Artificial Sequence
  targeting sequence with CTCN PAM
cucagugcccagccuggguc

SEQ ID NO: 14599 - RNA, 20 nt, Artificial Sequence
  targeting sequence with CTCN PAM
cccucagugcccagccuggg

SEQ ID NO: 14600 - RNA, 20 nt, Artificial Sequence
  targeting sequence with CTCN PAM
ucucugggggcccaagcuca

SEQ ID NO: 14601 - RNA, 20 nt, Artificial Sequence
  targeting sequence with CTCN PAM
cugggggcccaagcucaggg

SEQ ID NO: 14602 - RNA, 20 nt, Artificial Sequence
  targeting sequence with CTCN PAM
gggggcccaagcucagggug

SEQ ID NO: 14603 - RNA, 20 nt, Artificial Sequence
  targeting sequence with CTCN PAM
gggugggaaguggauuuucc

SEQ ID NO: 14604 - RNA, 20 nt, Artificial Sequence
  targeting sequence with CTCN PAM
agucauugggucuucccugu

SEQ ID NO: 14605 - RNA, 20 nt, Artificial Sequence
  targeting sequence with CTCN PAM
guccccucuggcauccucug

SEQ ID NO: 14606 - RNA, 20 nt, Artificial Sequence
  targeting sequence with CTCN PAM
ggcauccucugccuccccuc

SEQ ID NO: 14607 - RNA, 20 nt, Artificial Sequence
  targeting sequence with CTCN PAM
gccuccccucucagccccug

SEQ ID NO: 14608 - RNA, 20 nt, Artificial Sequence
  targeting sequence with CTCN PAM
ccucucagccccuguccuca

SEQ ID NO: 14609 - RNA, 20 nt, Artificial Sequence
  targeting sequence with CTCN PAM
cagccccuguccucaggugc

SEQ ID NO: 14610 - RNA, 20 nt, Artificial Sequence
  targeting sequence with CTCN PAM
gccccuguccucaggugccc

SEQ ID NO: 14611 - RNA, 20 nt, Artificial Sequence
  targeting sequence with CTCN PAM
ggugccccuccagccucccu

SEQ ID NO: 14612 - RNA, 20 nt, Artificial Sequence
  targeting sequence with CTCN PAM
agccucccugccgcguucca

SEQ ID NO: 14613 - RNA, 20 nt, Artificial Sequence
  targeting sequence with CTCN PAM
cugccgcguuccaagucucc

SEQ ID NO: 14614 - RNA, 20 nt, Artificial Sequence
  targeting sequence with CTCN PAM
ugguguugagaaccgcaagc

SEQ ID NO: 14615 - RNA, 20 nt, Artificial Sequence
  targeting sequence with CTCN PAM
acaccaggagacuuggaacg

SEQ ID NO: 14616 - RNA, 20 nt, Artificial Sequence
  targeting sequence with CTCN PAM
gaagcaguuccuuuuugcuu

SEQ ID NO: 14617 - RNA, 20 nt, Artificial Sequence
  targeting sequence with CTCN PAM
guuaagugggaucuguuauc

SEQ ID NO: 14618 - RNA, 20 nt, Artificial Sequence
  targeting sequence with CTCN PAM
cuguuaagugggaucuguua

SEQ ID NO: 14619 - RNA, 20 nt, Artificial Sequence
  targeting sequence with CTCN PAM
guuuuccucucuguuaagug

SEQ ID NO: 14620 - RNA, 20 nt, Artificial Sequence
  targeting sequence with CTCN PAM
cugccucaguuuuccucucu

SEQ ID NO: 14621 - RNA, 20 nt, Artificial Sequence
  targeting sequence with CTCN PAM
cccugccucaguuuuccucu

SEQ ID NO: 14622 - RNA, 20 nt, Artificial Sequence
  targeting sequence with CTCN PAM
uccccucucccugccucagu

SEQ ID NO: 14623 - RNA, 20 nt, Artificial Sequence
  targeting sequence with CTCN PAM
uuuagggauguggccaggca

SEQ ID NO: 14624 - RNA, 20 nt, Artificial Sequence
  targeting sequence with CTCN PAM
uguugcugccuggccacauc

SEQ ID NO: 14625 - RNA, 20 nt, Artificial Sequence
  targeting sequence with CTCN PAM
uggcugugauccaggaauau

SEQ ID NO: 14626 - RNA, 20 nt, Artificial Sequence
  targeting sequence with CTCN PAM
gcugagaugcaggaggagac

SEQ ID NO: 14627 - RNA, 20 nt, Artificial Sequence
  targeting sequence with CTCN PAM
gcagagauauuccuggauca

SEQ ID NO: 14628 - RNA, 20 nt, Artificial Sequence
  targeting sequence with CTCN PAM
ugcaucucagcagagauauu

SEQ ID NO: 14629 - RNA, 20 nt, Artificial Sequence
  targeting sequence with CTCN PAM
uccugcaucucagcagagau

SEQ ID NO: 14630 - RNA, 20 nt, Artificial Sequence
  targeting sequence with CTCN PAM
ccgucacccagcuuugcaau

SEQ ID NO: 14631 - RNA, 20 nt, Artificial Sequence
  targeting sequence with CTCN PAM
ccccgucacccagcuuugca

SEQ ID NO: 14632 - RNA, 20 nt, Artificial Sequence
  targeting sequence with CTCN PAM
cugccagccuugcccugucu

SEQ ID NO: 14633 - RNA, 20 nt, Artificial Sequence
  targeting sequence with CTCN PAM
gccagccuugcccugucucc

SEQ ID NO: 14634 - RNA, 20 nt, Artificial Sequence
  targeting sequence with CTCN PAM
cccauguccaggcugcugcc

SEQ ID NO: 14635 - RNA, 20 nt, Artificial Sequence
  targeting sequence with CTCN PAM
gucccauucucagggaaucu

SEQ ID NO: 14636 - RNA, 20 nt, Artificial Sequence
  targeting sequence with CTCN PAM
gggaaucucuggccauuguu

SEQ ID NO: 14637 - RNA, 20 nt, Artificial Sequence
  targeting sequence with CTCN PAM
ggccauuguuggguguuugu

SEQ ID NO: 14638 - RNA, 20 nt, Artificial Sequence
  targeting sequence with CTCN PAM
guucuggccagaaggugggu

SEQ ID NO: 14639 - RNA, 20 nt, Artificial Sequence
  targeting sequence with CTCN PAM
gcagggucagucccaguuua

SEQ ID NO: 14640 - RNA, 20 nt, Artificial Sequence
  targeting sequence with CTCN PAM
cccuauggaacuucaugggg

SEQ ID NO: 14641 - RNA, 20 nt, Artificial Sequence
  targeting sequence with CTCN PAM
cuauggaacuucauggggug

SEQ ID NO: 14642 - RNA, 20 nt, Artificial Sequence
  targeting sequence with CTCN PAM
ccaccccaugaaguuccaua

SEQ ID NO: 14643 - RNA, 20 nt, Artificial Sequence
  targeting sequence with CTCN PAM
gggcaaaacauugcacauug

SEQ ID NO: 14644 - RNA, 20 nt, Artificial Sequence
  targeting sequence with CTCN PAM
uaggagaggcccccacaugu

SEQ ID NO: 14645 - RNA, 20 nt, Artificial Sequence
  targeting sequence with CTCN PAM
uaggagccaugaagcaaugu

SEQ ID NO: 14646 - RNA, 20 nt, Artificial Sequence
  targeting sequence with CTCN PAM
ccuaggagccaugaagcaau

SEQ ID NO: 14647 - RNA, 20 nt, Artificial Sequence
  targeting sequence with CTCN PAM
ggaaaugaaauaacccggac

SEQ ID NO: 14648 - RNA, 20 nt, Artificial Sequence
  targeting sequence with CTCN PAM
cuucucgggaaaugaaauaa

SEQ ID NO: 14649 - RNA, 20 nt, Artificial Sequence
  targeting sequence with CTCN PAM
cccuucucgggaaaugaaau

SEQ ID NO: 14650 - RNA, 20 nt, Artificial Sequence
  targeting sequence with CTCN PAM
cucucccuucucgggaaaug

SEQ ID NO: 14651 - RNA, 20 nt, Artificial Sequence
  targeting sequence with CTCN PAM
gcauuccuucccaacaagga

SEQ ID NO: 14652 - RNA, 20 nt, Artificial Sequence
  targeting sequence with CTCN PAM
gccccacauuaggaugcauu

SEQ ID NO: 14653 - RNA, 20 nt, Artificial Sequence
  targeting sequence with CTCN PAM
cuaccggguucccaguucaa

SEQ ID NO: 14654 - RNA, 20 nt, Artificial Sequence
  targeting sequence with CTCN PAM
gggcccauaagggacacgaa

SEQ ID NO: 14655 - RNA, 20 nt, Artificial Sequence
  targeting sequence with CTCN PAM
ccucagcguguggucccucu

SEQ ID NO: 14656 - RNA, 20 nt, Artificial Sequence
  targeting sequence with CTCN PAM
ucagcguguggucccucugc

SEQ ID NO: 14657 - RNA, 20 nt, Artificial Sequence
  targeting sequence with CTCN PAM
gcguguggucccucugcccc

SEQ ID NO: 14658 - RNA, 20 nt, Artificial Sequence
  targeting sequence with CTCN PAM
gccccuucccccuccuccca

SEQ ID NO: 14659 - RNA, 20 nt, Artificial Sequence
  targeting sequence with CTCN PAM
ucccagcaccaagcucucuc

SEQ ID NO: 14660 - RNA, 20 nt, Artificial Sequence
  targeting sequence with CTCN PAM
cagcaccaagcucucuccuu

SEQ ID NO: 14661 - RNA, 20 nt, Artificial Sequence
  targeting sequence with CTCN PAM
cuccuuccccaaggccuccu

SEQ ID NO: 14662 - RNA, 20 nt, Artificial Sequence
  targeting sequence with CTCN PAM
ccuuccccaaggccuccuca

SEQ ID NO: 14663 - RNA, 20 nt, Artificial Sequence
  targeting sequence with CTCN PAM
uuccccaaggccuccucaaa

SEQ ID NO: 14664 - RNA, 20 nt, Artificial Sequence
  targeting sequence with CTCN PAM
ucaaaucccucucccacucc

SEQ ID NO: 14665 - RNA, 20 nt, Artificial Sequence
  targeting sequence with CTCN PAM
aaucccucucccacuccugg

SEQ ID NO: 14666 - RNA, 20 nt, Artificial Sequence
  targeting sequence with CTCN PAM
cccacuccugguugccuucc

SEQ ID NO: 14667 - RNA, 20 nt, Artificial Sequence
  targeting sequence with CTCN PAM
cacuccugguugccuuccua

SEQ ID NO: 14668 - RNA, 20 nt, Artificial Sequence
  targeting sequence with CTCN PAM
ugguugccuuccuagcuacc

SEQ ID NO: 14669 - RNA, 20 nt, Artificial Sequence
  targeting sequence with CTCN PAM
cccugucuaggggggagugc

SEQ ID NO: 14670 - RNA, 20 nt, Artificial Sequence
  targeting sequence with CTCN PAM
cugucuaggggggagugcac

SEQ ID NO: 14671 - RNA, 20 nt, Artificial Sequence
  targeting sequence with CTCN PAM
ccccuagacagggagagggu

SEQ ID NO: 14672 - RNA, 20 nt, Artificial Sequence
  targeting sequence with CTCN PAM
uuaggcaguggggucugugc

SEQ ID NO: 14673 - RNA, 20 nt, Artificial Sequence
  targeting sequence with CTCN PAM
auggccaggaccaccaagga

SEQ ID NO: 14674 - RNA, 20 nt, Artificial Sequence
  targeting sequence with CTCN PAM
ugggcuuacacaccaccacg

SEQ ID NO: 14675 - RNA, 20 nt, Artificial Sequence
  targeting sequence with CTCN PAM
ccgaagcggaaguugcucau

SEQ ID NO: 14676 - RNA, 20 nt, Artificial Sequence
  targeting sequence with CTCN PAM
ccggcugguccagguaaugg

SEQ ID NO: 14677 - RNA, 20 nt, Artificial Sequence
  targeting sequence with CTCN PAM
gugccauuaccuggaccagc

SEQ ID NO: 14678 - RNA, 20 nt, Artificial Sequence
  targeting sequence with CTCN PAM
gggggcucuuuguagggucc

SEQ ID NO: 14679 - RNA, 20 nt, Artificial Sequence
  targeting sequence with CTCN PAM
uuguaggguccuccagucag

SEQ ID NO: 14680 - RNA, 20 nt, Artificial Sequence
  targeting sequence with CTCN PAM
agucaggacucaaacccagu

SEQ ID NO: 14681 - RNA, 20 nt, Artificial Sequence
  targeting sequence with CTCN PAM
aacccaguagugucugguuc

SEQ ID NO: 14682 - RNA, 20 nt, Artificial Sequence
  targeting sequence with CTCN PAM
uggcccaaaugcccacucag

SEQ ID NO: 14683 - RNA, 20 nt, Artificial Sequence
  targeting sequence with CTCN PAM
ggguagggguguagggcaga

SEQ ID NO: 14684 - RNA, 20 nt, Artificial Sequence
  targeting sequence with CTCN PAM
aauguugcuacaagggcugg

SEQ ID NO: 14685 - RNA, 20 nt, Artificial Sequence
  targeting sequence with CTCN PAM
ugagccccaugucaaacaga

SEQ ID NO: 14686 - RNA, 20 nt, Artificial Sequence
  targeting sequence with CTCN PAM
ggagaugggaccagcccuug

SEQ ID NO: 14687 - RNA, 20 nt, Artificial Sequence
  targeting sequence with CTCN PAM
acuaagcuaggcgcaaauuc

SEQ ID NO: 14688 - RNA, 20 nt, Artificial Sequence
  targeting sequence with CTCN PAM
uuggucuaguaccccggggg

SEQ ID NO: 14689 - RNA, 20 nt, Artificial Sequence
  targeting sequence with CTCN PAM
aaccuugggccucagcagca

SEQ ID NO: 14690 - RNA, 20 nt, Artificial Sequence
  targeting sequence with CTCN PAM
gcagcaggggaggccacacc

SEQ ID NO: 14691 - RNA, 20 nt, Artificial Sequence
  targeting sequence with CTCN PAM
ccugcugcugaggcccaagg

SEQ ID NO: 14692 - RNA, 20 nt, Artificial Sequence
  targeting sequence with CTCN PAM
gccucuaggcgauugucucc

SEQ ID NO: 14693 - RNA, 20 nt, Artificial Sequence
  targeting sequence with CTCN PAM
aggcgauugucuccuaaugg

SEQ ID NO: 14694 - RNA, 20 nt, Artificial Sequence
  targeting sequence with CTCN PAM
uaauggggcugagaugagac

SEQ ID NO: 14695 - RNA, 20 nt, Artificial Sequence
  targeting sequence with CTCN PAM
gccccauuaggagacaaucg

SEQ ID NO: 14696 - RNA, 20 nt, Artificial Sequence
  targeting sequence with CTCN PAM
ucucagccccauuaggagac

SEQ ID NO: 14697 - RNA, 20 nt, Artificial Sequence
  targeting sequence with CTCN PAM
gguccccagaggccucaugu

SEQ ID NO: 14698 - RNA, 20 nt, Artificial Sequence
  targeting sequence with CTCN PAM
ggggaccagagucaccaguc

SEQ ID NO: 14699 - RNA, 20 nt, Artificial Sequence
  targeting sequence with CTCN PAM
ugucccucugucuccagaaa

SEQ ID NO: 14700 - RNA, 20 nt, Artificial Sequence
  targeting sequence with CTCN PAM
gucuccagaaaauucccacu

SEQ ID NO: 14701 - RNA, 20 nt, Artificial Sequence
  targeting sequence with CTCN PAM
agaaaauucccacucucacu

SEQ ID NO: 14702 - RNA, 20 nt, Artificial Sequence
  targeting sequence with CTCN PAM
cacuucccuuuccuccucag

SEQ ID NO: 14703 - RNA, 20 nt, Artificial Sequence
  targeting sequence with CTCN PAM
cuucccuuuccuccucaguc

SEQ ID NO: 14704 - RNA, 20 nt, Artificial Sequence
  targeting sequence with CTCN PAM
ucagucuugcuaggguccau

SEQ ID NO: 14705 - RNA, 20 nt, Artificial Sequence
  targeting sequence with CTCN PAM
gucuugcuaggguccauuuc

SEQ ID NO: 14706 - RNA, 20 nt, Artificial Sequence
  targeting sequence with CTCN PAM
aauucagcaagggguaagaa

SEQ ID NO: 14707 - RNA, 20 nt, Artificial Sequence
  targeting sequence with CTCN PAM
aaucuggccuaguucuaucc

SEQ ID NO: 14708 - RNA, 20 nt, Artificial Sequence
  targeting sequence with CTCN PAM
ggaagcagagccgcuggacg

SEQ ID NO: 14709 - RNA, 20 nt, Artificial Sequence
  targeting sequence with CTCN PAM
gcuuccagaggauagaacua

SEQ ID NO: 14710 - RNA, 20 nt, Artificial Sequence
  targeting sequence with CTCN PAM
ggguuuccugaggcccgucc

SEQ ID NO: 14711 - RNA, 20 nt, Artificial Sequence
  targeting sequence with CTCN PAM
ggaaacccagagcguccagc

SEQ ID NO: 14712 - RNA, 20 nt, Artificial Sequence
  targeting sequence with CTCN PAM
aguuuccagaagcugcacaa

SEQ ID NO: 14713 - RNA, 20 nt, Artificial Sequence
  targeting sequence with CTCN PAM
guguguccaucuuuggccug

SEQ ID NO: 14714 - RNA, 20 nt, Artificial Sequence
  targeting sequence with CTCN PAM
cacccuggggcuaggaagac

SEQ ID NO: 14715 - RNA, 20 nt, Artificial Sequence
  targeting sequence with CTCN PAM
cccuggggcuaggaagaccu

SEQ ID NO: 14716 - RNA, 20 nt, Artificial Sequence
  targeting sequence with CTCN PAM
guuuguacaaacuuccucaa

SEQ ID NO: 14717 - RNA, 20 nt, Artificial Sequence
  targeting sequence with CTCN PAM
aaugcagagccugagggcuc

SEQ ID NO: 14718 - RNA, 20 nt, Artificial Sequence
  targeting sequence with CTCN PAM
gcauuugaggaaguuuguac

SEQ ID NO: 14719 - RNA, 20 nt, Artificial Sequence
  targeting sequence with CTCN PAM
ggcucugcauuugaggaagu

SEQ ID NO: 14720 - RNA, 20 nt, Artificial Sequence
  targeting sequence with CTCN PAM
ccccaccuccucaccaaccc

SEQ ID NO: 14721 - RNA, 20 nt, Artificial Sequence
  targeting sequence with CTCN PAM
ccaccuccucaccaacccuc

SEQ ID NO: 14722 - RNA, 20 nt, Artificial Sequence
  targeting sequence with CTCN PAM
ucaccaacccucugcguggc

SEQ ID NO: 14723 - RNA, 20 nt, Artificial Sequence
  targeting sequence with CTCN PAM
ccaacccucugcguggcaua

SEQ ID NO: 14724 - RNA, 20 nt, Artificial Sequence
  targeting sequence with CTCN PAM
gcguggcauagcccuagccu

SEQ ID NO: 14725 - RNA, 20 nt, Artificial Sequence
  targeting sequence with CTCN PAM
gcgggcaguggaugcugggg

SEQ ID NO: 14726 - RNA, 20 nt, Artificial Sequence
  targeting sequence with CTCN PAM
cugcaugcccagccccagca

SEQ ID NO: 14727 - RNA, 20 nt, Artificial Sequence
  targeting sequence with CTCN PAM
cccugcaugcccagccccag

SEQ ID NO: 14728 - RNA, 20 nt, Artificial Sequence
  targeting sequence with CTCN PAM
cuggaaaaggggaucauaaa

SEQ ID NO: 14729 - RNA, 20 nt, Artificial Sequence
  targeting sequence with CTCN PAM
gcagccaccuuggcuguucc

SEQ ID NO: 14730 - RNA, 20 nt, Artificial Sequence
  targeting sequence with CTCN PAM
caggcagggucucccuaccu

SEQ ID NO: 14731 - RNA, 20 nt, Artificial Sequence
  targeting sequence with CTCN PAM
cuaccugccuguccucaggu

SEQ ID NO: 14732 - RNA, 20 nt, Artificial Sequence
  targeting sequence with CTCN PAM
gguacauccccgagggccug

SEQ ID NO: 14733 - RNA, 20 nt, Artificial Sequence
  targeting sequence with CTCN PAM
gggauguaccugaggacagg

SEQ ID NO: 14734 - RNA, 20 nt, Artificial Sequence
  targeting sequence with CTCN PAM
uguggaaucgacuacuacac

SEQ ID NO: 14735 - RNA, 20 nt, Artificial Sequence
  targeting sequence with CTCN PAM
agccggaggucaacaacgag

SEQ ID NO: 14736 - RNA, 20 nt, Artificial Sequence
  targeting sequence with CTCN PAM
ggcuugagcguguaguaguc

SEQ ID NO: 14737 - RNA, 20 nt, Artificial Sequence
  targeting sequence with CTCN PAM
uuguugaccuccggcuugag

SEQ ID NO: 14738 - RNA, 20 nt, Artificial Sequence
  targeting sequence with CTCN PAM
ucuucaccgucaaggaggua

SEQ ID NO: 14739 - RNA, 20 nt, Artificial Sequence
  targeting sequence with CTCN PAM
uugacggugaagacgagcug

SEQ ID NO: 14740 - RNA, 20 nt, Artificial Sequence
  targeting sequence with CTCN PAM
cggcucugaggguccagccc

SEQ ID NO: 14741 - RNA, 20 nt, Artificial Sequence
  targeting sequence with CTCN PAM
gaggguccagcccccagcau

SEQ ID NO: 14742 - RNA, 20 nt, Artificial Sequence
  targeting sequence with CTCN PAM
gagccgugaggccgcccacc

SEQ ID NO: 14743 - RNA, 20 nt, Artificial Sequence
  targeting sequence with CTCN PAM
ugcucccuggaggagccaug

SEQ ID NO: 14744 - RNA, 20 nt, Artificial Sequence
  targeting sequence with CTCN PAM
cuggaggagccauggucugg

SEQ ID NO: 14745 - RNA, 20 nt, Artificial Sequence
  targeting sequence with CTCN PAM
agggagcaggagccgcagau

SEQ ID NO: 14746 - RNA, 20 nt, Artificial Sequence
  targeting sequence with CTCN PAM
uccagggagcaggagccgca

SEQ ID NO: 14747 - RNA, 20 nt, Artificial Sequence
  targeting sequence with CTCN PAM
ugcugcugggcagcggccug

SEQ ID NO: 14748 - RNA, 20 nt, Artificial Sequence
  targeting sequence with CTCN PAM
gccuucugugugguggcuga

SEQ ID NO: 14749 - RNA, 20 nt, Artificial Sequence
  targeting sequence with CTCN PAM
uucucugccuucuguguggu

SEQ ID NO: 14750 - RNA, 20 nt, Artificial Sequence
  targeting sequence with CTCN PAM
aacuucggucccaucuucau

SEQ ID NO: 14751 - RNA, 20 nt, Artificial Sequence
  targeting sequence with CTCN PAM
uggcaaagaacgcugggaug

SEQ ID NO: 14752 - RNA, 20 nt, Artificial Sequence
  targeting sequence with CTCN PAM
cacccgcaguaggcaccugc

SEQ ID NO: 14753 - RNA, 20 nt, Artificial Sequence
  targeting sequence with CTCN PAM
ccugcccugggaaguagcuu

SEQ ID NO: 14754 - RNA, 20 nt, Artificial Sequence
  targeting sequence with CTCN PAM
aucaggguuacuggcagcag

SEQ ID NO: 14755 - RNA, 20 nt, Artificial Sequence
  targeting sequence with CTCN PAM
ccauugggacugcugaccca

SEQ ID NO: 14756 - RNA, 20 nt, Artificial Sequence
  targeting sequence with CTCN PAM
cacacuccccauugggacug

SEQ ID NO: 14757 - RNA, 20 nt, Artificial Sequence
  targeting sequence with CTCN PAM
gaacugcugaaucucagggu

SEQ ID NO: 14758 - RNA, 20 nt, Artificial Sequence
  targeting sequence with CTCN PAM
gggugggcccaggaaccugc

SEQ ID NO: 14759 - RNA, 20 nt, Artificial Sequence
  targeting sequence with CTCN PAM
acagguggcucagaugcuca

SEQ ID NO: 14760 - RNA, 20 nt, Artificial Sequence
  targeting sequence with CTCN PAM
gaugcucacucaggugggag

SEQ ID NO: 14761 - RNA, 20 nt, Artificial Sequence
  targeting sequence with CTCN PAM
cucaggugggagaagcucca

SEQ ID NO: 14762 - RNA, 20 nt, Artificial Sequence
  targeting sequence with CTCN PAM
ggugggagaagcuccaguca

SEQ ID NO: 14763 - RNA, 20 nt, Artificial Sequence
  targeting sequence with CTCN PAM
caccugagugagcaucugag

SEQ ID NO: 14764 - RNA, 20 nt, Artificial Sequence
  targeting sequence with CTCN PAM
agucagcuaguucuggaagc

SEQ ID NO: 14765 - RNA, 20 nt, Artificial Sequence
  targeting sequence with CTCN PAM
auaaagcugaauaaggagcu

SEQ ID NO: 14766 - RNA, 20 nt, Artificial Sequence
  targeting sequence with CTCN PAM
uuauucagcuuuauggagac

SEQ ID NO: 14767 - RNA, 20 nt, Artificial Sequence
  targeting sequence with CTCN PAM
gaauaagacuuuuuagcucc

SEQ ID NO: 14768 - RNA, 20 nt, Artificial Sequence
  targeting sequence with CTCN PAM
gagagguaccuccgaggggu

SEQ ID NO: 14769 - RNA, 20 nt, Artificial Sequence
  targeting sequence with CTCN PAM
gaggaacccuuuaccccuuu

SEQ ID NO: 14770 - RNA, 20 nt, Artificial Sequence
  targeting sequence with CTCN PAM
ccgaggaacccuuuaccccu

SEQ ID NO: 14771 - RNA, 20 nt, Artificial Sequence
  targeting sequence with CTCN PAM
gagggguaaacaguugggua

SEQ ID NO: 14772 - RNA, 20 nt, Artificial Sequence
  targeting sequence with CTCN PAM
gagguaccucuccgaggaac

SEQ ID NO: 14773 - RNA, 20 nt, Artificial Sequence
  targeting sequence with CTCN PAM
gaagucagcucugccauuuu

SEQ ID NO: 14774 - RNA, 20 nt, Artificial Sequence
  targeting sequence with CTCN PAM
gccauuuucuagcuguaugg

SEQ ID NO: 14775 - RNA, 20 nt, Artificial Sequence
  targeting sequence with CTCN PAM
gugcuuugguuuccucaucc

SEQ ID NO: 14776 - RNA, 20 nt, Artificial Sequence
  targeting sequence with CTCN PAM
uccauagaaagguagaaagg

SEQ ID NO: 14777 - RNA, 20 nt, Artificial Sequence
  targeting sequence with CTCN PAM
uggauuacaagagauaauuu

SEQ ID NO: 14778 - RNA, 20 nt, Artificial Sequence
  targeting sequence with CTCN PAM
uguaauccaagaguuuggug

SEQ ID NO: 14779 - RNA, 20 nt, Artificial Sequence
  targeting sequence with CTCN PAM
gugugccaaggguguucugu

SEQ ID NO: 14780 - RNA, 20 nt, Artificial Sequence
  targeting sequence with CTCN PAM
gucccuggcaucucuagggg

SEQ ID NO: 14781 - RNA, 20 nt, Artificial Sequence
  targeting sequence with CTCN PAM
aggggugaggagcgucugcc

SEQ ID NO: 14782 - RNA, 20 nt, Artificial Sequence
  targeting sequence with CTCN PAM
ccccuagagaugccagggac

SEQ ID NO: 14783 - RNA, 20 nt, Artificial Sequence
  targeting sequence with CTCN PAM
ucaccccuagagaugccagg

SEQ ID NO: 14784 - RNA, 20 nt, Artificial Sequence
  targeting sequence with CTCN PAM
aggaagcuggauuugagugg

SEQ ID NO: 14785 - RNA, 20 nt, Artificial Sequence
  targeting sequence with CTCN PAM
aauccagcuuccuggaggga

SEQ ID NO: 14786 - RNA, 20 nt, Artificial Sequence
  targeting sequence with CTCN PAM
cgauuccagcgccccaucca

SEQ ID NO: 14787 - RNA, 20 nt, Artificial Sequence
  targeting sequence with CTCN PAM
cuaacgugccaguuccaagc

SEQ ID NO: 14788 - RNA, 20 nt, Artificial Sequence
  targeting sequence with CTCN PAM
agccucuugccuuccaguuc

SEQ ID NO: 14789 - RNA, 20 nt, Artificial Sequence
  targeting sequence with CTCN PAM
ugccuuccaguuccggaacu

SEQ ID NO: 14790 - RNA, 20 nt, Artificial Sequence
  targeting sequence with CTCN PAM
ccaccaucugcugcggcaag

SEQ ID NO: 14791 - RNA, 20 nt, Artificial Sequence
  targeting sequence with CTCN PAM
ucgucacccaguggguucuu

SEQ ID NO: 14792 - RNA, 20 nt, Artificial Sequence
  targeting sequence with CTCN PAM
gcuaccguguccaagacgga

SEQ ID NO: 14793 - RNA, 20 nt, Artificial Sequence
  targeting sequence with CTCN PAM
gucuuggacacgguagcaga

SEQ ID NO: 14794 - RNA, 20 nt, Artificial Sequence
  targeting sequence with CTCN PAM
ucuccgucuuggacacggua

SEQ ID NO: 14795 - RNA, 20 nt, Artificial Sequence
  targeting sequence with CTCN PAM
guggccgacuauaggcgucu

SEQ ID NO: 14796 - RNA, 20 nt, Artificial Sequence
  targeting sequence with CTCN PAM
cauccccuacaccuuccccc

SEQ ID NO: 14797 - RNA, 20 nt, Artificial Sequence
  targeting sequence with CTCN PAM
uggugggauggcuguggcug

SEQ ID NO: 14798 - RNA, 20 nt, Artificial Sequence
  targeting sequence with CTCN PAM
uuaauuuuuuuuuuuuuuuu

SEQ ID NO: 14799 - RNA, 20 nt, Artificial Sequence
  targeting sequence with CTCN PAM
uuaauuauuucuuaaaaaaa

SEQ ID NO: 14800 - RNA, 20 nt, Artificial Sequence
  targeting sequence with CTCN PAM
ucacucaccugggacagccu

SEQ ID NO: 14801 - RNA, 20 nt, Artificial Sequence
  targeting sequence with CTCN PAM
cucaccugggacagccugag

SEQ ID NO: 14802 - RNA, 20 nt, Artificial Sequence
  targeting sequence with CTCN PAM
ccugggacagccugagaagg

SEQ ID NO: 14803 - RNA, 20 nt, Artificial Sequence
  targeting sequence with CTCN PAM
ggcugucccaggugagugag

SEQ ID NO: 14804 - RNA, 20 nt, Artificial Sequence
  targeting sequence with CTCN PAM
agaucaguaggucuuggugg

SEQ ID NO: 14805 - RNA, 20 nt, Artificial Sequence
  targeting sequence with CTCN PAM
uccucccaacucaucuuuca

SEQ ID NO: 14806 - RNA, 20 nt, Artificial Sequence
  targeting sequence with CTCN PAM
ucccaacucaucuuucagga

SEQ ID NO: 14807 - RNA, 20 nt, Artificial Sequence
  targeting sequence with CTCN PAM
caacucaucuuucaggaaca

SEQ ID NO: 14808 - RNA, 20 nt, Artificial Sequence
  targeting sequence with CTCN PAM
ucuuucaggaacacgaggau

SEQ ID NO: 14809 - RNA, 20 nt, Artificial Sequence
  targeting sequence with CTCN PAM
uguuccugaaagaugaguug

SEQ ID NO: 14810 - RNA, 20 nt, Artificial Sequence
  targeting sequence with CTCN PAM
auuccuuccugcauccaucc

SEQ ID NO: 14811 - RNA, 20 nt, Artificial Sequence
  targeting sequence with CTCN PAM
cuucccauucauuccuccau

SEQ ID NO: 14812 - RNA, 20 nt, Artificial Sequence
  targeting sequence with CTCN PAM
cagacccucgcagcagcagc

SEQ ID NO: 14813 - RNA, 20 nt, Artificial Sequence
  targeting sequence with CTCN PAM
gacccucgcagcagcagcaa

SEQ ID NO: 14814 - RNA, 20 nt, Artificial Sequence
  targeting sequence with CTCN PAM
cagcagcagcaacucauacu

SEQ ID NO: 14815 - RNA, 20 nt, Artificial Sequence
  targeting sequence with CTCN PAM
uacuuggcuaaugauaugga

SEQ ID NO: 14816 - RNA, 20 nt, Artificial Sequence
  targeting sequence with CTCN PAM
auaucauuagccaaguauga

SEQ ID NO: 14817 - RNA, 20 nt, Artificial Sequence
  targeting sequence with CTCN PAM
cugggccucacuuucuucuc

SEQ ID NO: 14818 - RNA, 20 nt, Artificial Sequence
  targeting sequence with CTCN PAM
cuuucuucuccuauaaaaug

SEQ ID NO: 14819 - RNA, 20 nt, Artificial Sequence
  targeting sequence with CTCN PAM
uauaaaauggaaaucccaga

SEQ ID NO: 14820 - RNA, 20 nt, Artificial Sequence
  targeting sequence with CTCN PAM
guagcugcgugucggcagga

SEQ ID NO: 14821 - RNA, 20 nt, Artificial Sequence
  targeting sequence with CTCN PAM
uuuggucuucucaguagcug

SEQ ID NO: 14822 - RNA, 20 nt, Artificial Sequence
  targeting sequence with CTCN PAM
ugauagugaacauuuugaga

SEQ ID NO: 14823 - RNA, 20 nt, Artificial Sequence
  targeting sequence with CTCN PAM
aaauguucacuaucaggagg

SEQ ID NO: 14824 - RNA, 20 nt, Artificial Sequence
  targeting sequence with CTCN PAM
cccaguguuguuuuuucagg

SEQ ID NO: 14825 - RNA, 20 nt, Artificial Sequence
  targeting sequence with CTCN PAM
uugggaacuuggccuucacc

SEQ ID NO: 14826 - RNA, 20 nt, Artificial Sequence
  targeting sequence with CTCN PAM
cccucauugggaacuuggcc

SEQ ID NO: 14827 - RNA, 20 nt, Artificial Sequence
  targeting sequence with CTCN PAM
ccccuaguguggggccccag

SEQ ID NO: 14828 - RNA, 20 nt, Artificial Sequence
  targeting sequence with CTCN PAM
ccuucccaauguggccuaug

SEQ ID NO: 14829 - RNA, 20 nt, Artificial Sequence
  targeting sequence with CTCN PAM
auaggccacauugggaaggg

SEQ ID NO: 14830 - RNA, 20 nt, Artificial Sequence
  targeting sequence with CTCN PAM
ccauaggccacauugggaag

SEQ ID NO: 14831 - RNA, 20 nt, Artificial Sequence
  targeting sequence with CTCN PAM
cagccucuggaagccaccug

SEQ ID NO: 14832 - RNA, 20 nt, Artificial Sequence
  targeting sequence with CTCN PAM
gccucuggaagccaccugcu

SEQ ID NO: 14833 - RNA, 20 nt, Artificial Sequence
  targeting sequence with CTCN PAM
ggaagccaccugcucuuuug

SEQ ID NO: 14834 - RNA, 20 nt, Artificial Sequence
  targeting sequence with CTCN PAM
uuugcucuagcaccuggguc

SEQ ID NO: 14835 - RNA, 20 nt, Artificial Sequence
  targeting sequence with CTCN PAM
agcaccugggucccagcauc

SEQ ID NO: 14836 - RNA, 20 nt, Artificial Sequence
  targeting sequence with CTCN PAM
agaugcugggacccaggugc

SEQ ID NO: 14837 - RNA, 20 nt, Artificial Sequence
  targeting sequence with CTCN PAM
augcucuagaugcugggacc

SEQ ID NO: 14838 - RNA, 20 nt, Artificial Sequence
  targeting sequence with CTCN PAM
agaagccaugcucacccgcc

SEQ ID NO: 14839 - RNA, 20 nt, Artificial Sequence
  targeting sequence with CTCN PAM
cccgcccacauuuaauuaac

SEQ ID NO: 14840 - RNA, 20 nt, Artificial Sequence
  targeting sequence with CTCN PAM
gcuguuaauuaaaugugggc

SEQ ID NO: 14841 - RNA, 20 nt, Artificial Sequence
  targeting sequence with CTCN PAM
aagagcuuagaaacaaagag

SEQ ID NO: 14842 - RNA, 20 nt, Artificial Sequence
  targeting sequence with CTCN PAM
ucgagauaaggaugacauca

SEQ ID NO: 14843 - RNA, 20 nt, Artificial Sequence
  targeting sequence with CTCN PAM
uuguuucuaagcucuucgag

SEQ ID NO: 14844 - RNA, 20 nt, Artificial Sequence
  targeting sequence with CTCN PAM
auucuggagaaucugcucca

SEQ ID NO: 14845 - RNA, 20 nt, Artificial Sequence
  targeting sequence with CTCN PAM
agaauggagaauggacuagc

SEQ ID NO: 14846 - RNA, 20 nt, Artificial Sequence
  targeting sequence with CTCN PAM
aaaaagcuggccacaucucu

SEQ ID NO: 14847 - RNA, 20 nt, Artificial Sequence
  targeting sequence with CTCN PAM
gaggugucagaauuaagcug

SEQ ID NO: 14848 - RNA, 20 nt, Artificial Sequence
  targeting sequence with CTCN PAM
gagauguggccagcuuuuug

SEQ ID NO: 14849 - RNA, 20 nt, Artificial Sequence
  targeting sequence with CTCN PAM
guaacugcucccccuucucc

SEQ ID NO: 14850 - RNA, 20 nt, Artificial Sequence
  targeting sequence with CTCN PAM
cccuucuccauauaagcaaa

SEQ ID NO: 14851 - RNA, 20 nt, Artificial Sequence
  targeting sequence with CTCN PAM
auauaagcaaagccagaagc

SEQ ID NO: 14852 - RNA, 20 nt, Artificial Sequence
  targeting sequence with CTCN PAM
agcuuuacccagcucugccu

SEQ ID NO: 14853 - RNA, 20 nt, Artificial Sequence
  targeting sequence with CTCN PAM
gccuggagacuaaggcaaau

SEQ ID NO: 14854 - RNA, 20 nt, Artificial Sequence
  targeting sequence with CTCN PAM
aggcagagcuggguaaagcu

SEQ ID NO: 14855 - RNA, 20 nt, Artificial Sequence
  targeting sequence with CTCN PAM
gcuccuauguugguauuaac

SEQ ID NO: 14856 - RNA, 20 nt, Artificial Sequence
  targeting sequence with CTCN PAM
uauguugguauuaacggugg

SEQ ID NO: 14857 - RNA, 20 nt, Artificial Sequence
  targeting sequence with CTCN PAM
auccacaggauagauugaaa

SEQ ID NO: 14858 - RNA, 20 nt, Artificial Sequence
  targeting sequence with CTCN PAM
auccagccaucccaggguca

SEQ ID NO: 14859 - RNA, 20 nt, Artificial Sequence
  targeting sequence with CTCN PAM
uugcucaauccagccauccc

SEQ ID NO: 14860 - RNA, 20 nt, Artificial Sequence
  targeting sequence with CTCN PAM
gcucauugcucaauccagcc

SEQ ID NO: 14861 - RNA, 20 nt, Artificial Sequence
  targeting sequence with CTCN PAM
gugcugcuuggcucugcuca

SEQ ID NO: 14862 - RNA, 20 nt, Artificial Sequence
  targeting sequence with CTCN PAM
agccccaggggacucugugc

SEQ ID NO: 14863 - RNA, 20 nt, Artificial Sequence
  targeting sequence with CTCN PAM
accucuagccccaggggacu

SEQ ID NO: 14864 - RNA, 20 nt, Artificial Sequence
  targeting sequence with CTCN PAM
uccaccucuagccccagggg

SEQ ID NO: 14865 - RNA, 20 nt, Artificial Sequence
  targeting sequence with CTCN PAM
augaccccaaaguugggguu

SEQ ID NO: 14866 - RNA, 20 nt, Artificial Sequence
  targeting sequence with CTCN PAM
cagagcuuccuuaucugcaa

SEQ ID NO: 14867 - RNA, 20 nt, Artificial Sequence
  targeting sequence with CTCN PAM
gagcuuccuuaucugcaaaa

SEQ ID NO: 14868 - RNA, 20 nt, Artificial Sequence
  targeting sequence with CTCN PAM
gagaggugacaaagcuuguu

SEQ ID NO: 14869 - RNA, 20 nt, Artificial Sequence
  targeting sequence with CTCN PAM
caccucuaaucccagcacuu

SEQ ID NO: 14870 - RNA, 20 nt, Artificial Sequence
  targeting sequence with CTCN PAM
aaucccagcacuuugggagg

SEQ ID NO: 14871 - RNA, 20 nt, Artificial Sequence
  targeting sequence with CTCN PAM
caaagugcugggauuagagg

SEQ ID NO: 14872 - RNA, 20 nt, Artificial Sequence
  targeting sequence with CTCN PAM
ugaucugcccaccuuggccu

SEQ ID NO: 14873 - RNA, 20 nt, Artificial Sequence
  targeting sequence with CTCN PAM
ugaccucgugaucugcccac

SEQ ID NO: 14874 - RNA, 20 nt, Artificial Sequence
  targeting sequence with CTCN PAM
aacuccugaccucgugaucu

SEQ ID NO: 14875 - RNA, 20 nt, Artificial Sequence
  targeting sequence with CTCN PAM
acuaaaaauacaaaaaucag

SEQ ID NO: 14876 - RNA, 20 nt, Artificial Sequence
  targeting sequence with CTCN PAM
gcccacugaauagcugggau

SEQ ID NO: 14877 - RNA, 20 nt, Artificial Sequence
  targeting sequence with CTCN PAM
ugccucagcccacugaauag

SEQ ID NO: 14878 - RNA, 20 nt, Artificial Sequence
  targeting sequence with CTCN PAM
cagguucaagcgauucuccu

SEQ ID NO: 14879 - RNA, 20 nt, Artificial Sequence
  targeting sequence with CTCN PAM
accucccagguucaagcgau

SEQ ID NO: 14880 - RNA, 20 nt, Artificial Sequence
  targeting sequence with CTCN PAM
cugcaaccuccaccucccag

SEQ ID NO: 14881 - RNA, 20 nt, Artificial Sequence
  targeting sequence with CTCN PAM
gcucacugcaaccuccaccu

SEQ ID NO: 14882 - RNA, 20 nt, Artificial Sequence
  targeting sequence with CTCN PAM
agccugagcaacagagggac

SEQ ID NO: 14883 - RNA, 20 nt, Artificial Sequence
  targeting sequence with CTCN PAM
ggcuggagugcaguggcgca

SEQ ID NO: 14884 - RNA, 20 nt, Artificial Sequence
  targeting sequence with CTCN PAM
guugcucaggcuggagugca

SEQ ID NO: 14885 - RNA, 20 nt, Artificial Sequence
  targeting sequence with CTCN PAM
aaacaaaacaaaacaaacaa

SEQ ID NO: 14886 - RNA, 20 nt, Artificial Sequence
  targeting sequence with CTCN PAM
ucugcugcaugccaggcagu

SEQ ID NO: 14887 - RNA, 20 nt, Artificial Sequence
  targeting sequence with CTCN PAM
gagcuggccuuacuagagac

SEQ ID NO: 14888 - RNA, 20 nt, Artificial Sequence
  targeting sequence with CTCN PAM
gagcugaagcccaguauugc

SEQ ID NO: 14889 - RNA, 20 nt, Artificial Sequence
  targeting sequence with CTCN PAM
aguaaggccagcucugagcu

SEQ ID NO: 14890 - RNA, 20 nt, Artificial Sequence
  targeting sequence with CTCN PAM
auccuuuuccccuuugggac

SEQ ID NO: 14891 - RNA, 20 nt, Artificial Sequence
  targeting sequence with CTCN PAM
cgagagucacccccuccucc

SEQ ID NO: 14892 - RNA, 20 nt, Artificial Sequence
  targeting sequence with CTCN PAM
ggagcuuuagcuccauccuu

SEQ ID NO: 14893 - RNA, 20 nt, Artificial Sequence
  targeting sequence with CTCN PAM
cgggagcuuuagcuccaucc

SEQ ID NO: 14894 - RNA, 20 nt, Artificial Sequence
  targeting sequence with CTCN PAM
uccgaggugagaaaggaggg

SEQ ID NO: 14895 - RNA, 20 nt, Artificial Sequence
  targeting sequence with CTCN PAM
gaggugagaaaggagggcag

SEQ ID NO: 14896 - RNA, 20 nt, Artificial Sequence
  targeting sequence with CTCN PAM
gaggagggggugacucucgg

SEQ ID NO: 14897 - RNA, 20 nt, Artificial Sequence
  targeting sequence with CTCN PAM
ccucggaggagggggugacu

SEQ ID NO: 14898 - RNA, 20 nt, Artificial Sequence
  targeting sequence with CTCN PAM
uuucucaccucggaggaggg

SEQ ID NO: 14899 - RNA, 20 nt, Artificial Sequence
  targeting sequence with CTCN PAM
ugcccuccuuucucaccucg

SEQ ID NO: 14900 - RNA, 20 nt, Artificial Sequence
  targeting sequence with CTCN PAM
ugcuccugcccuccuuucuc

SEQ ID NO: 14901 - RNA, 20 nt, Artificial Sequence
  targeting sequence with CTCN PAM
gugccuuggugaggcugggg

SEQ ID NO: 14902 - RNA, 20 nt, Artificial Sequence
  targeting sequence with CTCN PAM
ccaaggcaccgaggaucggc

SEQ ID NO: 14903 - RNA, 20 nt, Artificial Sequence
  targeting sequence with CTCN PAM
aucauugucccucuuuacug

SEQ ID NO: 14904 - RNA, 20 nt, Artificial Sequence
  targeting sequence with CTCN PAM
uuacugugacucacuagaua

SEQ ID NO: 14905 - RNA, 20 nt, Artificial Sequence
  targeting sequence with CTCN PAM
cuagauaauaucagucagga

SEQ ID NO: 14906 - RNA, 20 nt, Artificial Sequence
  targeting sequence with CTCN PAM
uuugggcugaagcaaaaggg

SEQ ID NO: 14907 - RNA, 20 nt, Artificial Sequence
  targeting sequence with CTCN PAM
caugaacaaaaagcccgggg

SEQ ID NO: 14908 - RNA, 20 nt, Artificial Sequence
  targeting sequence with CTCN PAM
gucauggugauacccugugc

SEQ ID NO: 14909 - RNA, 20 nt, Artificial Sequence
  targeting sequence with CTCN PAM
uuuaugccugagguugcaau

SEQ ID NO: 14910 - RNA, 20 nt, Artificial Sequence
  targeting sequence with CTCN PAM
ggcauaaaugaguuacguau

SEQ ID NO: 14911 - RNA, 20 nt, Artificial Sequence
  targeting sequence with CTCN PAM
aggucaucgccaaggucuga

SEQ ID NO: 14912 - RNA, 20 nt, Artificial Sequence
  targeting sequence with CTCN PAM
cacaugcuuagcguuccaau

SEQ ID NO: 14913 - RNA, 20 nt, Artificial Sequence
  targeting sequence with CTCN PAM
gauuggucagaccuagguca

SEQ ID NO: 14914 - RNA, 20 nt, Artificial Sequence
  targeting sequence with CTCN PAM
cccugcagcccaagcaggcu

SEQ ID NO: 14915 - RNA, 20 nt, Artificial Sequence
  targeting sequence with CTCN PAM
ccauucagccugcuugggcu

SEQ ID NO: 14916 - RNA, 20 nt, Artificial Sequence
  targeting sequence with CTCN PAM
ccccauucagccugcuuggg

SEQ ID NO: 14917 - RNA, 20 nt, Artificial Sequence
  targeting sequence with CTCN PAM
uacuucagguaacagcaccu

SEQ ID NO: 14918 - RNA, 20 nt, Artificial Sequence
  targeting sequence with CTCN PAM
ugcccuccuacuucagguaa

SEQ ID NO: 14919 - RNA, 20 nt, Artificial Sequence
  targeting sequence with CTCN PAM
cccugccuccugcccuccua

SEQ ID NO: 14920 - RNA, 20 nt, Artificial Sequence
  targeting sequence with CTCN PAM
gcucacccugccuccugccc

SEQ ID NO: 14921 - RNA, 20 nt, Artificial Sequence
  targeting sequence with CTCN PAM
ggguugauguuggcucugcu

SEQ ID NO: 14922 - RNA, 20 nt, Artificial Sequence
  targeting sequence with CTCN PAM
cucccucaucaucucaggga

SEQ ID NO: 14923 - RNA, 20 nt, Artificial Sequence
  targeting sequence with CTCN PAM
cucaucaucucagggacaug

SEQ ID NO: 14924 - RNA, 20 nt, Artificial Sequence
  targeting sequence with CTCN PAM
ucaucucagggacaugaggg

SEQ ID NO: 14925 - RNA, 20 nt, Artificial Sequence
  targeting sequence with CTCN PAM
gggacaugagggagaagauu

SEQ ID NO: 14926 - RNA, 20 nt, Artificial Sequence
  targeting sequence with CTCN PAM
ugucccugagaugaugaggg

SEQ ID NO: 14927 - RNA, 20 nt, Artificial Sequence
  targeting sequence with CTCN PAM
cucaugucccugagaugaug

SEQ ID NO: 14928 - RNA, 20 nt, Artificial Sequence
  targeting sequence with CTCN PAM
cccuuuguuuuggaugcugu

SEQ ID NO: 14929 - RNA, 20 nt, Artificial Sequence
  targeting sequence with CTCN PAM
ccgccccaaccccaacccag

SEQ ID NO: 14930 - RNA, 20 nt, Artificial Sequence
  targeting sequence with CTCN PAM
gaaaaagugggcuggguugg

SEQ ID NO: 14931 - RNA, 20 nt, Artificial Sequence
  targeting sequence with CTCN PAM
uguccagaggaaaauuuuac

SEQ ID NO: 14932 - RNA, 20 nt, Artificial Sequence
  targeting sequence with CTCN PAM
ggacaugaggcuggggcaaa

SEQ ID NO: 14933 - RNA, 20 nt, Artificial Sequence
  targeting sequence with CTCN PAM
aacaccagaacauucucugg

SEQ ID NO: 14934 - RNA, 20 nt, Artificial Sequence
  targeting sequence with CTCN PAM
gguuuguccugauagacaag

SEQ ID NO: 14935 - RNA, 20 nt, Artificial Sequence
  targeting sequence with CTCN PAM
accuccuuaauuuacaaaug

SEQ ID NO: 14936 - RNA, 20 nt, Artificial Sequence
  targeting sequence with CTCN PAM
uuaauuuacaaaugacuuga

SEQ ID NO: 14937 - RNA, 20 nt, Artificial Sequence
  targeting sequence with CTCN PAM
uuauguaugcaagugcccac

SEQ ID NO: 14938 - RNA, 20 nt, Artificial Sequence
  targeting sequence with CTCN PAM
uucucuuuauguaugcaagu

SEQ ID NO: 14939 - RNA, 20 nt, Artificial Sequence
  targeting sequence with CTCN PAM
ucuccaggcagccagcagau

SEQ ID NO: 14940 - RNA, 20 nt, Artificial Sequence
  targeting sequence with CTCN PAM
aggcagccagcagauguaca

SEQ ID NO: 14941 - RNA, 20 nt, Artificial Sequence
  targeting sequence with CTCN PAM
guacaucugcuggcugccug

SEQ ID NO: 14942 - RNA, 20 nt, Artificial Sequence
  targeting sequence with CTCN PAM
uggguacaauggcagcucca

SEQ ID NO: 14943 - RNA, 20 nt, Artificial Sequence
  targeting sequence with CTCN PAM
auucaaccaaaccugagcaa

SEQ ID NO: 14944 - RNA, 20 nt, Artificial Sequence
  targeting sequence with CTCN PAM
gguuugguugaauggagcug

SEQ ID NO: 14945 - RNA, 20 nt, Artificial Sequence
  targeting sequence with CTCN PAM
gagaugaauuggagccuaga

SEQ ID NO: 14946 - RNA, 20 nt, Artificial Sequence
  targeting sequence with CTCN PAM
gaguccccagugcauucugg

SEQ ID NO: 14947 - RNA, 20 nt, Artificial Sequence
  targeting sequence with CTCN PAM
aauucaucuccgagucccca

SEQ ID NO: 14948 - RNA, 20 nt, Artificial Sequence
  targeting sequence with CTCN PAM
aggcuccaauucaucuccga

SEQ ID NO: 14949 - RNA, 20 nt, Artificial Sequence
  targeting sequence with CTCN PAM
aggcuaugaccugggcugcc

SEQ ID NO: 14950 - RNA, 20 nt, Artificial Sequence
  targeting sequence with CTCN PAM
cggccacagagcucugucac

SEQ ID NO: 14951 - RNA, 20 nt, Artificial Sequence
  targeting sequence with CTCN PAM
guggccgugaggcagcccag

SEQ ID NO: 14952 - RNA, 20 nt, Artificial Sequence
  targeting sequence with CTCN PAM
gucacgccaagggagagaug

SEQ ID NO: 14953 - RNA, 20 nt, Artificial Sequence
  targeting sequence with CTCN PAM
cuuggcgugacagagcucug

SEQ ID NO: 14954 - RNA, 20 nt, Artificial Sequence
  targeting sequence with CTCN PAM
cccuuggcgugacagagcuc

SEQ ID NO: 14955 - RNA, 20 nt, Artificial Sequence
  targeting sequence with CTCN PAM
ggcuuucaggggugcaucuc

SEQ ID NO: 14956 - RNA, 20 nt, Artificial Sequence
  targeting sequence with CTCN PAM
uuauggggcaccucaggcuu

SEQ ID NO: 14957 - RNA, 20 nt, Artificial Sequence
  targeting sequence with CTCN PAM
ccuuauggggcaccucaggc

SEQ ID NO: 14958 - RNA, 20 nt, Artificial Sequence
  targeting sequence with CTCN PAM
cuccuuauggggcaccucag

SEQ ID NO: 14959 - RNA, 20 nt, Artificial Sequence
  targeting sequence with CTCN PAM
uucuuucuuuuucuuucuuu

SEQ ID NO: 14960 - RNA, 20 nt, Artificial Sequence
  targeting sequence with CTCN PAM
uucuuucuuucuuucuuucu

SEQ ID NO: 14961 - RNA, 20 nt, Artificial Sequence
  targeting sequence with CTCN PAM
uuccuuccuuccuugcuucu

SEQ ID NO: 14962 - RNA, 20 nt, Artificial Sequence
  targeting sequence with CTCN PAM
aaaaaaaaaaagaaaagaaa

SEQ ID NO: 14963 - RNA, 20 nt, Artificial Sequence
  targeting sequence with CTCN PAM
cuuugucacccagacuggag

SEQ ID NO: 14964 - RNA, 20 nt, Artificial Sequence
  targeting sequence with CTCN PAM
agucugggugacaaagugag

SEQ ID NO: 14965 - RNA, 20 nt, Artificial Sequence
  targeting sequence with CTCN PAM
uagcucacuguagccucgac

SEQ ID NO: 14966 - RNA, 20 nt, Artificial Sequence
  targeting sequence with CTCN PAM
cuguagccucgacuucucag

SEQ ID NO: 14967 - RNA, 20 nt, Artificial Sequence
  targeting sequence with CTCN PAM
acuucucaguuucaagcaau

SEQ ID NO: 14968 - RNA, 20 nt, Artificial Sequence
  targeting sequence with CTCN PAM
guuucaagcaauccuucugu

SEQ ID NO: 14969 - RNA, 20 nt, Artificial Sequence
  targeting sequence with CTCN PAM
gccucucaaguagccaggac

SEQ ID NO: 14970 - RNA, 20 nt, Artificial Sequence
  targeting sequence with CTCN PAM
caaguagccaggaccacagg

SEQ ID NO: 14971 - RNA, 20 nt, Artificial Sequence
  targeting sequence with CTCN PAM
aguagccaggaccacaggca

SEQ ID NO: 14972 - RNA, 20 nt, Artificial Sequence
  targeting sequence with CTCN PAM
acaaaaaauaaaaaauaagu

SEQ ID NO: 14973 - RNA, 20 nt, Artificial Sequence
  targeting sequence with CTCN PAM
aucuccacaaaaaauaaaaa

SEQ ID NO: 14974 - RNA, 20 nt, Artificial Sequence
  targeting sequence with CTCN PAM
cuauguugcccaggcugguu

SEQ ID NO: 14975 - RNA, 20 nt, Artificial Sequence
  targeting sequence with CTCN PAM
aacgauccuccugccuuggc

SEQ ID NO: 14976 - RNA, 20 nt, Artificial Sequence
  targeting sequence with CTCN PAM
ugccuuggccucucaaagug

SEQ ID NO: 14977 - RNA, 20 nt, Artificial Sequence
  targeting sequence with CTCN PAM
caaagugcugcgacuacagg

SEQ ID NO: 14978 - RNA, 20 nt, Artificial Sequence
  targeting sequence with CTCN PAM
aagugcugcgacuacaggca

SEQ ID NO: 14979 - RNA, 20 nt, Artificial Sequence
  targeting sequence with CTCN PAM
ugccuguagucgcagcacuu

SEQ ID NO: 14980 - RNA, 20 nt, Artificial Sequence
  targeting sequence with CTCN PAM
aagacucaggccccucagcu

SEQ ID NO: 14981 - RNA, 20 nt, Artificial Sequence
  targeting sequence with CTCN PAM
ggccccucagcuauaaagga

SEQ ID NO: 14982 - RNA, 20 nt, Artificial Sequence
  targeting sequence with CTCN PAM
gcuauaaaggagagaauuau

SEQ ID NO: 14983 - RNA, 20 nt, Artificial Sequence
  targeting sequence with CTCN PAM
uuuauagcugaggggccuga

SEQ ID NO: 14984 - RNA, 20 nt, Artificial Sequence
  targeting sequence with CTCN PAM
ccuuuauagcugaggggccu

SEQ ID NO: 14985 - RNA, 20 nt, Artificial Sequence
  targeting sequence with CTCN PAM
gggaagggaauucacauuua

SEQ ID NO: 14986 - RNA, 20 nt, Artificial Sequence
  targeting sequence with CTCN PAM
gaacuuaguucaugucucug

SEQ ID NO: 14987 - RNA, 20 nt, Artificial Sequence
  targeting sequence with CTCN PAM
ucugaacuuaguucaugucu

SEQ ID NO: 14988 - RNA, 20 nt, Artificial Sequence
  targeting sequence with CTCN PAM
uuacaagucaauuucccacc

SEQ ID NO: 14989 - RNA, 20 nt, Artificial Sequence
  targeting sequence with CTCN PAM
guguuaaucuccuuacaagu

SEQ ID NO: 14990 - RNA, 20 nt, Artificial Sequence
  targeting sequence with CTCN PAM
cuguguuaaucuccuuacaa

SEQ ID NO: 14991 - RNA, 20 nt, Artificial Sequence
  targeting sequence with CTCN PAM
acacaagacagcaucuuucg

SEQ ID NO: 14992 - RNA, 20 nt, Artificial Sequence
  targeting sequence with CTCN PAM
gaaaugaugugugcagucuc

SEQ ID NO: 14993 - RNA, 20 nt, Artificial Sequence
  targeting sequence with CTCN PAM
agguugugcauuuuggagaa

SEQ ID NO: 14994 - RNA, 20 nt, Artificial Sequence
  targeting sequence with CTCN PAM
aaaaugcacaaccuagagac

SEQ ID NO: 14995 - RNA, 20 nt, Artificial Sequence
  targeting sequence with CTCN PAM
uuuuccucucaucuuuucuu

SEQ ID NO: 14996 - RNA, 20 nt, Artificial Sequence
  targeting sequence with CTCN PAM
caucuuuucuuccugcuggc

SEQ ID NO: 14997 - RNA, 20 nt, Artificial Sequence
  targeting sequence with CTCN PAM
ucuuuucuuccugcuggcug

SEQ ID NO: 14998 - RNA, 20 nt, Artificial Sequence
  targeting sequence with CTCN PAM
agucaucaugacugcuuucc

SEQ ID NO: 14999 - RNA, 20 nt, Artificial Sequence
  targeting sequence with CTCN PAM
ugaucuaauaugggugcgga

SEQ ID NO: 15000 - RNA, 20 nt, Artificial Sequence
  targeting sequence with CTCN PAM
gauucuaucucaugaucuaa

SEQ ID NO: 15001 - RNA, 20 nt, Artificial Sequence
  targeting sequence with CTCN PAM
guccucagauucuaucucau

SEQ ID NO: 15002 - RNA, 20 nt, Artificial Sequence
  targeting sequence with CTCN PAM
ggugugucucaccaugguuc

SEQ ID NO: 15003 - RNA, 20 nt, Artificial Sequence
  targeting sequence with CTCN PAM
ccaugguucccccaugcugc

SEQ ID NO: 15004 - RNA, 20 nt, Artificial Sequence
  targeting sequence with CTCN PAM
uuaagcauaaguuggccagg

SEQ ID NO: 15005 - RNA, 20 nt, Artificial Sequence
  targeting sequence with CTCN PAM
ugaaacucuuuaagcauaag

SEQ ID NO: 15006 - RNA, 20 nt, Artificial Sequence
  targeting sequence with CTCN PAM
ucccucuugaaacucuuuaa

SEQ ID NO: 15007 - RNA, 20 nt, Artificial Sequence
  targeting sequence with CTCN PAM
aaaaucacaagugacuuaaa

SEQ ID NO: 15008 - RNA, 20 nt, Artificial Sequence
  targeting sequence with CTCN PAM
cucccucccucccucccucc

SEQ ID NO: 15009 - RNA, 20 nt, Artificial Sequence
  targeting sequence with CTCN PAM
cucccucccucccucccucc

SEQ ID NO: 15010 - RNA, 20 nt, Artificial Sequence
  targeting sequence with CTCN PAM
cucccucccucccucccuuc

SEQ ID NO: 15011 - RNA, 20 nt, Artificial Sequence
  targeting sequence with CTCN PAM
cucccucccucccuuccuuc

SEQ ID NO: 15012 - RNA, 20 nt, Artificial Sequence
  targeting sequence with CTCN PAM
cucccucccuuccuuccuuc

SEQ ID NO: 15013 - RNA, 20 nt, Artificial Sequence
  targeting sequence with CTCN PAM
cucccuuccuuccuuccuuc

SEQ ID NO: 15014 - RNA, 20 nt, Artificial Sequence
  targeting sequence with CTCN PAM
cuuccuuccuuccuuccuuc

SEQ ID NO: 15015 - RNA, 20 nt, Artificial Sequence
  targeting sequence with CTCN PAM
gaaaagaaagaaggaaagga

SEQ ID NO: 15016 - RNA, 20 nt, Artificial Sequence
  targeting sequence with CTCN PAM
gucucagaaaagaaagaagg

SEQ ID NO: 15017 - RNA, 20 nt, Artificial Sequence
  targeting sequence with CTCN PAM
auugcccaggcuggagugca

SEQ ID NO: 15018 - RNA, 20 nt, Artificial Sequence
  targeting sequence with CTCN PAM
agccugggcaauagagcaag

SEQ ID NO: 15019 - RNA, 20 nt, Artificial Sequence
  targeting sequence with CTCN PAM
cuacaaccucuaccuccugg

SEQ ID NO: 15020 - RNA, 20 nt, Artificial Sequence
  targeting sequence with CTCN PAM
accuccuggguucaagcaau

SEQ ID NO: 15021 - RNA, 20 nt, Artificial Sequence
  targeting sequence with CTCN PAM
uggguucaagcaauucuccu

SEQ ID NO: 15022 - RNA, 20 nt, Artificial Sequence
  targeting sequence with CTCN PAM
ugccucagccucccgaguag

SEQ ID NO: 15023 - RNA, 20 nt, Artificial Sequence
  targeting sequence with CTCN PAM
gccucccgaguagcugggau

SEQ ID NO: 15024 - RNA, 20 nt, Artificial Sequence
  targeting sequence with CTCN PAM
cgaguagcugggauuacagg

SEQ ID NO: 15025 - RNA, 20 nt, Artificial Sequence
  targeting sequence with CTCN PAM
ggaggcugaggcaggagaau

SEQ ID NO: 15026 - RNA, 20 nt, Artificial Sequence
  targeting sequence with CTCN PAM
acuaaaaauacaaaaaauua

SEQ ID NO: 15027 - RNA, 20 nt, Artificial Sequence
  targeting sequence with CTCN PAM
ugagcucaaguaauccgccu

SEQ ID NO: 15028 - RNA, 20 nt, Artificial Sequence
  targeting sequence with CTCN PAM
ggaguucaagaucagccugg

SEQ ID NO: 15029 - RNA, 20 nt, Artificial Sequence
  targeting sequence with CTCN PAM
aguaauccgccugccucagc

SEQ ID NO: 15030 - RNA, 20 nt, Artificial Sequence
  targeting sequence with CTCN PAM
gccucccaaagugcugagau

SEQ ID NO: 15031 - RNA, 20 nt, Artificial Sequence
  targeting sequence with CTCN PAM
caaagugcugagauuacagg

SEQ ID NO: 15032 - RNA, 20 nt, Artificial Sequence
  targeting sequence with CTCN PAM
gcacuuugggaggcugaggc

SEQ ID NO: 15033 - RNA, 20 nt, Artificial Sequence
  targeting sequence with CTCN PAM
ugccuguaaucucagcacuu

SEQ ID NO: 15034 - RNA, 20 nt, Artificial Sequence
  targeting sequence with CTCN PAM
ggaagaucgaagugcagguc

SEQ ID NO: 15035 - RNA, 20 nt, Artificial Sequence
  targeting sequence with CTCN PAM
cugaacuucagcuucuccau

SEQ ID NO: 15036 - RNA, 20 nt, Artificial Sequence
  targeting sequence with CTCN PAM
gaacuucagcuucuccaugu

SEQ ID NO: 15037 - RNA, 20 nt, Artificial Sequence
  targeting sequence with CTCN PAM
auguauaaauaaaauaguga

SEQ ID NO: 15038 - RNA, 20 nt, Artificial Sequence
  targeting sequence with CTCN PAM
agccccuguaacaucaggac

SEQ ID NO: 15039 - RNA, 20 nt, Artificial Sequence
  targeting sequence with CTCN PAM
gcagaaguuacauuucauac

SEQ ID NO: 15040 - RNA, 20 nt, Artificial Sequence
  targeting sequence with CTCN PAM
guaaaaaaucacagaagcuc

SEQ ID NO: 15041 - RNA, 20 nt, Artificial Sequence
  targeting sequence with CTCN PAM
ccaagcggcccguugucccu

SEQ ID NO: 15042 - RNA, 20 nt, Artificial Sequence
  targeting sequence with CTCN PAM
gaauuaccauuucccuguaa

SEQ ID NO: 15043 - RNA, 20 nt, Artificial Sequence
  targeting sequence with CTCN PAM
agaggaauuuuuagaucaug

SEQ ID NO: 15044 - RNA, 20 nt, Artificial Sequence
  targeting sequence with CTCN PAM
agaggauugccuuuuuacag

SEQ ID NO: 15045 - RNA, 20 nt, Artificial Sequence
  targeting sequence with CTCN PAM
aaaaugugcugcaugaucua

SEQ ID NO: 15046 - RNA, 20 nt, Artificial Sequence
  targeting sequence with CTCN PAM
cggcugugccaggaucaagu

SEQ ID NO: 15047 - RNA, 20 nt, Artificial Sequence
  targeting sequence with CTCN PAM
ugggaauguuucuaucacug

SEQ ID NO: 15048 - RNA, 20 nt, Artificial Sequence
  targeting sequence with CTCN PAM
gugauagaaacauucccacg

SEQ ID NO: 15049 - RNA, 20 nt, Artificial Sequence
  targeting sequence with CTCN PAM
acuucucaguucuuggaagu

SEQ ID NO: 15050 - RNA, 20 nt, Artificial Sequence
  targeting sequence with CTCN PAM
guucuuggaagugucccaua

SEQ ID NO: 15051 - RNA, 20 nt, Artificial Sequence
  targeting sequence with CTCN PAM
uugcuucgucuucugcucca

SEQ ID NO: 15052 - RNA, 20 nt, Artificial Sequence
  targeting sequence with CTCN PAM
agcauagucccggaagaggg

SEQ ID NO: 15053 - RNA, 20 nt, Artificial Sequence
  targeting sequence with CTCN PAM
uccgggacuaugcuggagca

SEQ ID NO: 15054 - RNA, 20 nt, Artificial Sequence
  targeting sequence with CTCN PAM
agcacugggaccuccaggua

SEQ ID NO: 15055 - RNA, 20 nt, Artificial Sequence
  targeting sequence with CTCN PAM
agguaucacaguaaugggua

SEQ ID NO: 15056 - RNA, 20 nt, Artificial Sequence
  targeting sequence with CTCN PAM
guacccauuacugugauacc

SEQ ID NO: 15057 - RNA, 20 nt, Artificial Sequence
  targeting sequence with CTCN PAM
ucaaccagagcgcaaaggcu

SEQ ID NO: 15058 - RNA, 20 nt, Artificial Sequence
  targeting sequence with CTCN PAM
accagagcgcaaaggcugga

SEQ ID NO: 15059 - RNA, 20 nt, Artificial Sequence
  targeting sequence with CTCN PAM
gguugaggagcagggcugua

SEQ ID NO: 15060 - RNA, 20 nt, Artificial Sequence
  targeting sequence with CTCN PAM
agccuuugcgcucugguuga

SEQ ID NO: 15061 - RNA, 20 nt, Artificial Sequence
  targeting sequence with CTCN PAM
gcuuccgugucuccagccuu

SEQ ID NO: 15062 - RNA, 20 nt, Artificial Sequence
  targeting sequence with CTCN PAM
gaaucgcagcucugcuuccg

SEQ ID NO: 15063 - RNA, 20 nt, Artificial Sequence
  targeting sequence with CTCN PAM
agcgcucugaaucgcagcuc

SEQ ID NO: 15064 - RNA, 20 nt, Artificial Sequence
  targeting sequence with CTCN PAM
ccaggagcaaggcuggggcc

SEQ ID NO: 15065 - RNA, 20 nt, Artificial Sequence
  targeting sequence with CTCN PAM
aggagcaaggcuggggccug

SEQ ID NO: 15066 - RNA, 20 nt, Artificial Sequence
  targeting sequence with CTCN PAM
uggagagccucaagcgcucu

SEQ ID NO: 15067 - RNA, 20 nt, Artificial Sequence
  targeting sequence with CTCN PAM
gccaggccccagccuugcuc

SEQ ID NO: 15068 - RNA, 20 nt, Artificial Sequence
  targeting sequence with CTCN PAM
gggcucugccaggccccagc

SEQ ID NO: 15069 - RNA, 20 nt, Artificial Sequence
  targeting sequence with CTCN PAM
ucugggcucugccaggcccc

SEQ ID NO: 15070 - RNA, 20 nt, Artificial Sequence
  targeting sequence with CTCN PAM
agaagguuaggggccccucc

SEQ ID NO: 15071 - RNA, 20 nt, Artificial Sequence
  targeting sequence with CTCN PAM
gaggccaaaagaugaguggg

SEQ ID NO: 15072 - RNA, 20 nt, Artificial Sequence
  targeting sequence with CTCN PAM
gaguagaugccgcaucuuca

SEQ ID NO: 15073 - RNA, 20 nt, Artificial Sequence
  targeting sequence with CTCN PAM
ucuuuuggccucagaguaga

SEQ ID NO: 15074 - RNA, 20 nt, Artificial Sequence
  targeting sequence with CTCN PAM
uucccacucaucuuuuggcc

SEQ ID NO: 15075 - RNA, 20 nt, Artificial Sequence
  targeting sequence with CTCN PAM
ggacucuuucccacucaucu

SEQ ID NO: 15076 - RNA, 20 nt, Artificial Sequence
  targeting sequence with CTCN PAM
guaugcacugcccccccuuc

SEQ ID NO: 15077 - RNA, 20 nt, Artificial Sequence
  targeting sequence with CTCN PAM
ggaucagccaggcagaucug

SEQ ID NO: 15078 - RNA, 20 nt, Artificial Sequence
  targeting sequence with CTCN PAM
aguugaccacagaugcuuga

SEQ ID NO: 15079 - RNA, 20 nt, Artificial Sequence
  targeting sequence with CTCN PAM
gauggcuggguaacaggggu

SEQ ID NO: 15080 - RNA, 20 nt, Artificial Sequence
  targeting sequence with CTCN PAM
gcaucuggcaggcuagcuag

SEQ ID NO: 15081 - RNA, 20 nt, Artificial Sequence
  targeting sequence with CTCN PAM
uagcuagccugccagaugcu

SEQ ID NO: 15082 - RNA, 20 nt, Artificial Sequence
  targeting sequence with CTCN PAM
gacuuaagaaaugugggagg

SEQ ID NO: 15083 - RNA, 20 nt, Artificial Sequence
  targeting sequence with CTCN PAM
cacauuucuuaagucugagu

SEQ ID NO: 15084 - RNA, 20 nt, Artificial Sequence
  targeting sequence with CTCN PAM
ugccuguaaucccuacacuu

SEQ ID NO: 15085 - RNA, 20 nt, Artificial Sequence
  targeting sequence with CTCN PAM
caaaguguagggauuacagg

SEQ ID NO: 15086 - RNA, 20 nt, Artificial Sequence
  targeting sequence with CTCN PAM
caccuggccucccaaagugu

SEQ ID NO: 15087 - RNA, 20 nt, Artificial Sequence
  targeting sequence with CTCN PAM
agugaccucccaccuggccu

SEQ ID NO: 15088 - RNA, 20 nt, Artificial Sequence
  targeting sequence with CTCN PAM
uggccucaagugaccuccca

SEQ ID NO: 15089 - RNA, 20 nt, Artificial Sequence
  targeting sequence with CTCN PAM
auuucuaauauauauacaua

SEQ ID NO: 15090 - RNA, 20 nt, Artificial Sequence
  targeting sequence with CTCN PAM
ggcacaugccacuaugccug

SEQ ID NO: 15091 - RNA, 20 nt, Artificial Sequence
  targeting sequence with CTCN PAM
uacuucagucuuccaagugg

SEQ ID NO: 15092 - RNA, 20 nt, Artificial Sequence
  targeting sequence with CTCN PAM
agugaucuccuacuucaguc

SEQ ID NO: 15093 - RNA, 20 nt, Artificial Sequence
  targeting sequence with CTCN PAM
accuucugggcucaagugau

SEQ ID NO: 15094 - RNA, 20 nt, Artificial Sequence
  targeting sequence with CTCN PAM
cugcagccucgaccuucugg

SEQ ID NO: 15095 - RNA, 20 nt, Artificial Sequence
  targeting sequence with CTCN PAM
agccugggcgacagagugga

SEQ ID NO: 15096 - RNA, 20 nt, Artificial Sequence
  targeting sequence with CTCN PAM
gucgcccaggcuggagugca

SEQ ID NO: 15097 - RNA, 20 nt, Artificial Sequence
  targeting sequence with CTCN PAM
aaaaacaaacaaacaaacaa

SEQ ID NO: 15098 - RNA, 20 nt, Artificial Sequence
  targeting sequence with CTCN PAM
cauuucuuguuuguuuguuu

SEQ ID NO: 15099 - RNA, 20 nt, Artificial Sequence
  targeting sequence with CTCN PAM
cacauuucuuguuuguuugu

SEQ ID NO: 15100 - RNA, 20 nt, Artificial Sequence
  targeting sequence with CTCN PAM
ugcccauuugcaauguaacu

SEQ ID NO: 15101 - RNA, 20 nt, Artificial Sequence
  targeting sequence with CTCN PAM
guguguguugaauugaugca

SEQ ID NO: 15102 - RNA, 20 nt, Artificial Sequence
  targeting sequence with CTCN PAM
ucuguguguguugaauugau

SEQ ID NO: 15103 - RNA, 20 nt, Artificial Sequence
  targeting sequence with CTCN PAM
uggaaugggccaugugcuga

SEQ ID NO: 15104 - RNA, 20 nt, Artificial Sequence
  targeting sequence with CTCN PAM
ccgcuugaaucccacaauuc

SEQ ID NO: 15105 - RNA, 20 nt, Artificial Sequence
  targeting sequence with CTCN PAM
uccccgcuugaaucccacaa

SEQ ID NO: 15106 - RNA, 20 nt, Artificial Sequence
  targeting sequence with CTCN PAM
uuaagucagacugaagagca

SEQ ID NO: 15107 - RNA, 20 nt, Artificial Sequence
  targeting sequence with CTCN PAM
ucagucugacuuaaggagcc

SEQ ID NO: 15108 - RNA, 20 nt, Artificial Sequence
  targeting sequence with CTCN PAM
ccacugcccgugggugaaag

SEQ ID NO: 15109 - RNA, 20 nt, Artificial Sequence
  targeting sequence with CTCN PAM
cccgcuuagcauccugcaug

SEQ ID NO: 15110 - RNA, 20 nt, Artificial Sequence
  targeting sequence with CTCN PAM
ccgaguccagaucucuggug

SEQ ID NO: 15111 - RNA, 20 nt, Artificial Sequence
  targeting sequence with CTCN PAM
gggaggcuguggucaucaaa

SEQ ID NO: 15112 - RNA, 20 nt, Artificial Sequence
  targeting sequence with CTCN PAM
ggugauggagagcccucugg

SEQ ID NO: 15113 - RNA, 20 nt, Artificial Sequence
  targeting sequence with CTCN PAM
aucaccagagaucuggacuc

SEQ ID NO: 15114 - RNA, 20 nt, Artificial Sequence
  targeting sequence with CTCN PAM
ccaucaccagagaucuggac

SEQ ID NO: 15115 - RNA, 20 nt, Artificial Sequence
  targeting sequence with CTCN PAM
gggaaaauuccacaauaaag

SEQ ID NO: 15116 - RNA, 20 nt, Artificial Sequence
  targeting sequence with CTCN PAM
uuauuguggaauuuucccag

SEQ ID NO: 15117 - RNA, 20 nt, Artificial Sequence
  targeting sequence with CTCN PAM
agguagucucuuuauugugg

SEQ ID NO: 15118 - RNA, 20 nt, Artificial Sequence
  targeting sequence with CTCN PAM
gagguaaccacuucuacuau

SEQ ID NO: 15119 - RNA, 20 nt, Artificial Sequence
  targeting sequence with CTCN PAM
gaggaagggauggguuuuaa

SEQ ID NO: 15120 - RNA, 20 nt, Artificial Sequence
  targeting sequence with CTCN PAM
guaguugggguguacucucc

SEQ ID NO: 15121 - RNA, 20 nt, Artificial Sequence
  targeting sequence with CTCN PAM
ccgauacauucugguucacu

SEQ ID NO: 15122 - RNA, 20 nt, Artificial Sequence
  targeting sequence with CTCN PAM
gauacauucugguucacucc

SEQ ID NO: 15123 - RNA, 20 nt, Artificial Sequence
  targeting sequence with CTCN PAM
uuuucacuacugcauacuac

SEQ ID NO: 15124 - RNA, 20 nt, Artificial Sequence
  targeting sequence with CTCN PAM
acugugcgaauaggccacag

SEQ ID NO: 15125 - RNA, 20 nt, Artificial Sequence
  targeting sequence with CTCN PAM
ccaccugaugggcauuuaug

SEQ ID NO: 15126 - RNA, 20 nt, Artificial Sequence
  targeting sequence with CTCN PAM
accugaugggcauuuauguu

SEQ ID NO: 15127 - RNA, 20 nt, Artificial Sequence
  targeting sequence with CTCN PAM
gaucuacgccuagaguggaa

SEQ ID NO: 15128 - RNA, 20 nt, Artificial Sequence
  targeting sequence with CTCN PAM
aggcguagaucugagacaaa

SEQ ID NO: 15129 - RNA, 20 nt, Artificial Sequence
  targeting sequence with CTCN PAM
acaacccaccuauuccacuc

SEQ ID NO: 15130 - RNA, 20 nt, Artificial Sequence
  targeting sequence with CTCN PAM
cuccacaacccaccuauucc

SEQ ID NO: 15131 - RNA, 20 nt, Artificial Sequence
  targeting sequence with CTCN PAM
uuaguuguaugaaacaucgc

SEQ ID NO: 15132 - RNA, 20 nt, Artificial Sequence
  targeting sequence with CTCN PAM
cuccccaccccccagcagcu

SEQ ID NO: 15133 - RNA, 20 nt, Artificial Sequence
  targeting sequence with CTCN PAM
ccaccccccagcagcuauac

SEQ ID NO: 15134 - RNA, 20 nt, Artificial Sequence
  targeting sequence with CTCN PAM
cuauugauagacacuuacau

SEQ ID NO: 15135 - RNA, 20 nt, Artificial Sequence
  targeting sequence with CTCN PAM
gcaaaaugacaaagauguaa

SEQ ID NO: 15136 - RNA, 20 nt, Artificial Sequence
  targeting sequence with CTCN PAM
uucuuguuuguuuucuuuuc

SEQ ID NO: 15137 - RNA, 20 nt, Artificial Sequence
  targeting sequence with CTCN PAM
cccuuuuuuuuggggggggc

SEQ ID NO: 15138 - RNA, 20 nt, Artificial Sequence
  targeting sequence with CTCN PAM
guagcccaggcuggagugca

SEQ ID NO: 15139 - RNA, 20 nt, Artificial Sequence
  targeting sequence with CTCN PAM
agccugggcuacagaguaag

SEQ ID NO: 15140 - RNA, 20 nt, Artificial Sequence
  targeting sequence with CTCN PAM
cugcagccuugaccucccag

SEQ ID NO: 15141 - RNA, 20 nt, Artificial Sequence
  targeting sequence with CTCN PAM
caggcucaagcaauccuccu

SEQ ID NO: 15142 - RNA, 20 nt, Artificial Sequence
  targeting sequence with CTCN PAM
agcaauccuccugccucggc

SEQ ID NO: 15143 - RNA, 20 nt, Artificial Sequence
  targeting sequence with CTCN PAM
ugccucggccucccagguag

SEQ ID NO: 15144 - RNA, 20 nt, Artificial Sequence
  targeting sequence with CTCN PAM
gccucccagguagcugggac

SEQ ID NO: 15145 - RNA, 20 nt, Artificial Sequence
  targeting sequence with CTCN PAM
cagguagcugggacuacagg

SEQ ID NO: 15146 - RNA, 20 nt, Artificial Sequence
  targeting sequence with CTCN PAM
accaaaaaauacaaaaauua

SEQ ID NO: 15147 - RNA, 20 nt, Artificial Sequence
  targeting sequence with CTCN PAM
ugggcucaagcgauccuccu

SEQ ID NO: 15148 - RNA, 20 nt, Artificial Sequence
  targeting sequence with CTCN PAM
agcgauccuccugccucagc

SEQ ID NO: 15149 - RNA, 20 nt, Artificial Sequence
  targeting sequence with CTCN PAM
ugccucagccucccgaaguu

SEQ ID NO: 15150 - RNA, 20 nt, Artificial Sequence
  targeting sequence with CTCN PAM
gccucccgaaguucugggau

SEQ ID NO: 15151 - RNA, 20 nt, Artificial Sequence
  targeting sequence with CTCN PAM
cgaaguucugggauuacagg

SEQ ID NO: 15152 - RNA, 20 nt, Artificial Sequence
  targeting sequence with CTCN PAM
uaccuguaaucccagaacuu

SEQ ID NO: 15153 - RNA, 20 nt, Artificial Sequence
  targeting sequence with CTCN PAM
cauccuuguuuuaauccauc

SEQ ID NO: 15154 - RNA, 20 nt, Artificial Sequence
  targeting sequence with CTCN PAM
uccuuguuuuaauccaucuu

SEQ ID NO: 15155 - RNA, 20 nt, Artificial Sequence
  targeting sequence with CTCN PAM
aaaauaaguaaauaaaaaua

SEQ ID NO: 15156 - RNA, 20 nt, Artificial Sequence
  targeting sequence with CTCN PAM
uguugcccaggcuggagugc

SEQ ID NO: 15157 - RNA, 20 nt, Artificial Sequence
  targeting sequence with CTCN PAM
agccugggcaacaagagcga

SEQ ID NO: 15158 - RNA, 20 nt, Artificial Sequence
  targeting sequence with CTCN PAM
auccugguucacugcagucu

SEQ ID NO: 15159 - RNA, 20 nt, Artificial Sequence
  targeting sequence with CTCN PAM
agcucccagguucaagugau

SEQ ID NO: 15160 - RNA, 20 nt, Artificial Sequence
  targeting sequence with CTCN PAM
cagguucaagugauucuccu

SEQ ID NO: 15161 - RNA, 20 nt, Artificial Sequence
  targeting sequence with CTCN PAM
ugccucagccucccaaguag

SEQ ID NO: 15162 - RNA, 20 nt, Artificial Sequence
  targeting sequence with CTCN PAM
gccucccaaguagcugggac

SEQ ID NO: 15163 - RNA, 20 nt, Artificial Sequence
  targeting sequence with CTCN PAM
caaguagcugggacuacagg

SEQ ID NO: 15164 - RNA, 20 nt, Artificial Sequence
  targeting sequence with CTCN PAM
acuaaaaauacaaaauuagc

SEQ ID NO: 15165 - RNA, 20 nt, Artificial Sequence
  targeting sequence with CTCN PAM
aacuccugaccucaggugau

SEQ ID NO: 15166 - RNA, 20 nt, Artificial Sequence
  targeting sequence with CTCN PAM
ugaccucaggugauccgccc

SEQ ID NO: 15167 - RNA, 20 nt, Artificial Sequence
  targeting sequence with CTCN PAM
ggugauccgcccaccucagc

SEQ ID NO: 15168 - RNA, 20 nt, Artificial Sequence
  targeting sequence with CTCN PAM
gccucccaaagugcuaggau

SEQ ID NO: 15169 - RNA, 20 nt, Artificial Sequence
  targeting sequence with CTCN PAM
caaagugcuaggauuacagg

SEQ ID NO: 15170 - RNA, 20 nt, Artificial Sequence
  targeting sequence with CTCN PAM
ggccuguaauccuagcacuu

SEQ ID NO: 15171 - RNA, 20 nt, Artificial Sequence
  targeting sequence with CTCN PAM
aaugccaaggaaguugagug

SEQ ID NO: 15172 - RNA, 20 nt, Artificial Sequence
  targeting sequence with CTCN PAM
acuuccuuggcauuugagaa

SEQ ID NO: 15173 - RNA, 20 nt, Artificial Sequence
  targeting sequence with CTCN PAM
cccuuuaggcuggugaauug

SEQ ID NO: 15174 - RNA, 20 nt, Artificial Sequence
  targeting sequence with CTCN PAM
guuauugauuuauuucuuua

SEQ ID NO: 15175 - RNA, 20 nt, Artificial Sequence
  targeting sequence with CTCN PAM
uuugguuuuguuuuuaaaga

SEQ ID NO: 15176 - RNA, 20 nt, Artificial Sequence
  targeting sequence with CTCN PAM
gggccuaugcccuccuuugg

SEQ ID NO: 15177 - RNA, 20 nt, Artificial Sequence
  targeting sequence with CTCN PAM
cugggccuaugcccuccuuu

SEQ ID NO: 15178 - RNA, 20 nt, Artificial Sequence
  targeting sequence with CTCN PAM
gaaggggcuacucugauuga

SEQ ID NO: 15179 - RNA, 20 nt, Artificial Sequence
  targeting sequence with CTCN PAM
gauugaggggcaugugcucu

SEQ ID NO: 15180 - RNA, 20 nt, Artificial Sequence
  targeting sequence with CTCN PAM
aucagaguagccccuucuga

SEQ ID NO: 15181 - RNA, 20 nt, Artificial Sequence
  targeting sequence with CTCN PAM
gggcaaaaguagcaguuggg

SEQ ID NO: 15182 - RNA, 20 nt, Artificial Sequence
  targeting sequence with CTCN PAM
aacugcuacuuuuugagaaa

SEQ ID NO: 15183 - RNA, 20 nt, Artificial Sequence
  targeting sequence with CTCN PAM
aaaaguagcaguuggaggca

SEQ ID NO: 15184 - RNA, 20 nt, Artificial Sequence
  targeting sequence with CTCN PAM
auuucucaaaaaguagcagu

SEQ ID NO: 15185 - RNA, 20 nt, Artificial Sequence
  targeting sequence with CTCN PAM
aauccuaccaggugggcaau

SEQ ID NO: 15186 - RNA, 20 nt, Artificial Sequence
  targeting sequence with CTCN PAM
gcggccucccugacaacaca

SEQ ID NO: 15187 - RNA, 20 nt, Artificial Sequence
  targeting sequence with CTCN PAM
cugacaacacaggugacccc

SEQ ID NO: 15188 - RNA, 20 nt, Artificial Sequence
  targeting sequence with CTCN PAM
ucagcaucuccagccccugg

SEQ ID NO: 15189 - RNA, 20 nt, Artificial Sequence
  targeting sequence with CTCN PAM
agccccuggugggcagaggg

SEQ ID NO: 15190 - RNA, 20 nt, Artificial Sequence
  targeting sequence with CTCN PAM
gcccaccaggggcuggagau

SEQ ID NO: 15191 - RNA, 20 nt, Artificial Sequence
  targeting sequence with CTCN PAM
ccugugcccucugcccacca

SEQ ID NO: 15192 - RNA, 20 nt, Artificial Sequence
  targeting sequence with CTCN PAM
gcucccaacauugcaccaug

SEQ ID NO: 15193 - RNA, 20 nt, Artificial Sequence
  targeting sequence with CTCN PAM
caacauugcaccauggggac

SEQ ID NO: 15194 - RNA, 20 nt, Artificial Sequence
  targeting sequence with CTCN PAM
guccccauggugcaauguug

SEQ ID NO: 15195 - RNA, 20 nt, Artificial Sequence
  targeting sequence with CTCN PAM
gggucucaguccccauggug

SEQ ID NO: 15196 - RNA, 20 nt, Artificial Sequence
  targeting sequence with CTCN PAM
uguguaagcuuggggguguc

SEQ ID NO: 15197 - RNA, 20 nt, Artificial Sequence
  targeting sequence with CTCN PAM
cuacagaaggcaggaugcug

SEQ ID NO: 15198 - RNA, 20 nt, Artificial Sequence
  targeting sequence with CTCN PAM
agccccagucagcagcuugg

SEQ ID NO: 15199 - RNA, 20 nt, Artificial Sequence
  targeting sequence with CTCN PAM
aagcugcugacuggggcugg

SEQ ID NO: 15200 - RNA, 20 nt, Artificial Sequence
  targeting sequence with CTCN PAM
cagcccaaucagggcugauu

SEQ ID NO: 15201 - RNA, 20 nt, Artificial Sequence
  targeting sequence with CTCN PAM
aaucagcccugauugggcug

SEQ ID NO: 15202 - RNA, 20 nt, Artificial Sequence
  targeting sequence with CTCN PAM
cacccgggugaggggucugc

SEQ ID NO: 15203 - RNA, 20 nt, Artificial Sequence
  targeting sequence with CTCN PAM
cccgggugugaggcugcugg

SEQ ID NO: 15204 - RNA, 20 nt, Artificial Sequence
  targeting sequence with CTCN PAM
uggcuccugggagcgucacc

SEQ ID NO: 15205 - RNA, 20 nt, Artificial Sequence
  targeting sequence with CTCN PAM
ugggagcgucaccagcgaca

SEQ ID NO: 15206 - RNA, 20 nt, Artificial Sequence
  targeting sequence with CTCN PAM
caggagccaugagaccgaca

SEQ ID NO: 15207 - RNA, 20 nt, Artificial Sequence
  targeting sequence with CTCN PAM
cccuccucgacuuccacagc

SEQ ID NO: 15208 - RNA, 20 nt, Artificial Sequence
  targeting sequence with CTCN PAM
ucgacuuccacagcaggauc

SEQ ID NO: 15209 - RNA, 20 nt, Artificial Sequence
  targeting sequence with CTCN PAM
acuuccacagcaggaucauc

SEQ ID NO: 15210 - RNA, 20 nt, Artificial Sequence
  targeting sequence with CTCN PAM
ugaaucugaaaagccaggug

SEQ ID NO: 15211 - RNA, 20 nt, Artificial Sequence
  targeting sequence with CTCN PAM
ccuggcuuuucagauucagg

SEQ ID NO: 15212 - RNA, 20 nt, Artificial Sequence
  targeting sequence with CTCN PAM
ugcucaccuggcuuuucaga

SEQ ID NO: 15213 - RNA, 20 nt, Artificial Sequence
  targeting sequence with CTCN PAM
ucuugcucaccuggcuuuuc

SEQ ID NO: 15214 - RNA, 20 nt, Artificial Sequence
  targeting sequence with CTCN PAM
ucccucaucccugcgagccc

SEQ ID NO: 15215 - RNA, 20 nt, Artificial Sequence
  targeting sequence with CTCN PAM
cucaucccugcgagcccacu

SEQ ID NO: 15216 - RNA, 20 nt, Artificial Sequence
  targeting sequence with CTCN PAM
ucccugcgagcccacucccu

SEQ ID NO: 15217 - RNA, 20 nt, Artificial Sequence
  targeting sequence with CTCN PAM
cagggaugagggaggagcug

SEQ ID NO: 15218 - RNA, 20 nt, Artificial Sequence
  targeting sequence with CTCN PAM
cuggguugccuuugaugcuc

SEQ ID NO: 15219 - RNA, 20 nt, Artificial Sequence
  targeting sequence with CTCN PAM
accccugcuucucguucuuu

SEQ ID NO: 15220 - RNA, 20 nt, Artificial Sequence
  targeting sequence with CTCN PAM
uucuuucccagccuggcccc

SEQ ID NO: 15221 - RNA, 20 nt, Artificial Sequence
  targeting sequence with CTCN PAM
cccagcacucacccagcacc

SEQ ID NO: 15222 - RNA, 20 nt, Artificial Sequence
  targeting sequence with CTCN PAM
cccagcacccacccagcacc

SEQ ID NO: 15223 - RNA, 20 nt, Artificial Sequence
  targeting sequence with CTCN PAM
gcagcuuggugcuggguggg

SEQ ID NO: 15224 - RNA, 20 nt, Artificial Sequence
  targeting sequence with CTCN PAM
acugccuuuuggcugaagag

SEQ ID NO: 15225 - RNA, 20 nt, Artificial Sequence
  targeting sequence with CTCN PAM
ucagccaaaaggcaguugag

SEQ ID NO: 15226 - RNA, 20 nt, Artificial Sequence
  targeting sequence with CTCN PAM
cucagggaagagccacaggg

SEQ ID NO: 15227 - RNA, 20 nt, Artificial Sequence
  targeting sequence with CTCN PAM
gggaagagccacagggccuu

SEQ ID NO: 15228 - RNA, 20 nt, Artificial Sequence
  targeting sequence with CTCN PAM
ucccugagcgaggccggccc

SEQ ID NO: 15229 - RNA, 20 nt, Artificial Sequence
  targeting sequence with CTCN PAM
agcuggaaggcccuguggcu

SEQ ID NO: 15230 - RNA, 20 nt, Artificial Sequence
  targeting sequence with CTCN PAM
aacuagcugcccacagcugc

SEQ ID NO: 15231 - RNA, 20 nt, Artificial Sequence
  targeting sequence with CTCN PAM
ugccccagucccuccaacua

SEQ ID NO: 15232 - RNA, 20 nt, Artificial Sequence
  targeting sequence with CTCN PAM
ggguuuaucuggacaugagg

SEQ ID NO: 15233 - RNA, 20 nt, Artificial Sequence
  targeting sequence with CTCN PAM
uguccagauaaacccugagg

SEQ ID NO: 15234 - RNA, 20 nt, Artificial Sequence
  targeting sequence with CTCN PAM
gugcacccucauguccagau

SEQ ID NO: 15235 - RNA, 20 nt, Artificial Sequence
  targeting sequence with CTCN PAM
cucgaggaccucccggucug

SEQ ID NO: 15236 - RNA, 20 nt, Artificial Sequence
  targeting sequence with CTCN PAM
aggaccucccggucugaugg

SEQ ID NO: 15237 - RNA, 20 nt, Artificial Sequence
  targeting sequence with CTCN PAM
agggagugaacugggccugg

SEQ ID NO: 15238 - RNA, 20 nt, Artificial Sequence
  targeting sequence with CTCN PAM
cggucugauggggaagccug

SEQ ID NO: 15239 - RNA, 20 nt, Artificial Sequence
  targeting sequence with CTCN PAM
ggauuaccgccacugaagca

SEQ ID NO: 15240 - RNA, 20 nt, Artificial Sequence
  targeting sequence with CTCN PAM
agcucuggauuaccgccacu

SEQ ID NO: 15241 - RNA, 20 nt, Artificial Sequence
  targeting sequence with CTCN PAM
uccagcucuggauuaccgcc

SEQ ID NO: 15242 - RNA, 20 nt, Artificial Sequence
  targeting sequence with CTCN PAM
gggcuccuccagcucuggau

SEQ ID NO: 15243 - RNA, 20 nt, Artificial Sequence
  targeting sequence with CTCN PAM
ucugggcuccuccagcucug

SEQ ID NO: 15244 - RNA, 20 nt, Artificial Sequence
  targeting sequence with CTCN PAM
aacccacucugggaggucag

SEQ ID NO: 15245 - RNA, 20 nt, Artificial Sequence
  targeting sequence with CTCN PAM
gggaggucagggaaagcuuc

SEQ ID NO: 15246 - RNA, 20 nt, Artificial Sequence
  targeting sequence with CTCN PAM
cagaguggguuagaggacuc

SEQ ID NO: 15247 - RNA, 20 nt, Artificial Sequence
  targeting sequence with CTCN PAM
ucuaggaagcuuucccugac

SEQ ID NO: 15248 - RNA, 20 nt, Artificial Sequence
  targeting sequence with CTCN PAM
gccgggggaaguguucuauu

SEQ ID NO: 15249 - RNA, 20 nt, Artificial Sequence
  targeting sequence with CTCN PAM
cuaggugucuuggcaaauag

SEQ ID NO: 15250 - RNA, 20 nt, Artificial Sequence
  targeting sequence with CTCN PAM
cuaucucccuaggugucuug

SEQ ID NO: 15251 - RNA, 20 nt, Artificial Sequence
  targeting sequence with CTCN PAM
gcaccuggacccccucccua

SEQ ID NO: 15252 - RNA, 20 nt, Artificial Sequence
  targeting sequence with CTCN PAM
gcccuuuuacuucucggcac

SEQ ID NO: 15253 - RNA, 20 nt, Artificial Sequence
  targeting sequence with CTCN PAM
gacuucccaguuaacucugc

SEQ ID NO: 15254 - RNA, 20 nt, Artificial Sequence
  targeting sequence with CTCN PAM
aaaugcaccuugguuuggac

SEQ ID NO: 15255 - RNA, 20 nt, Artificial Sequence
  targeting sequence with CTCN PAM
uccuucaaggcucaaaaugc

SEQ ID NO: 15256 - RNA, 20 nt, Artificial Sequence
  targeting sequence with CTCN PAM
cucauccuucaaggcucaaa

SEQ ID NO: 15257 - RNA, 20 nt, Artificial Sequence
  targeting sequence with CTCN PAM
cacucauccuucaaggcuca

SEQ ID NO: 15258 - RNA, 20 nt, Artificial Sequence
  targeting sequence with CTCN PAM
cggucaugcaggcugcucuc

SEQ ID NO: 15259 - RNA, 20 nt, Artificial Sequence
  targeting sequence with CTCN PAM
ucccggucaugcaggcugcu

SEQ ID NO: 15260 - RNA, 20 nt, Artificial Sequence
  targeting sequence with CTCN PAM
ccucccggucaugcaggcug

SEQ ID NO: 15261 - RNA, 20 nt, Artificial Sequence
  targeting sequence with CTCN PAM
cuccucccggucaugcaggc

SEQ ID NO: 15262 - RNA, 20 nt, Artificial Sequence
  targeting sequence with CTCN PAM
gccugggcugccucucuccu

SEQ ID NO: 15263 - RNA, 20 nt, Artificial Sequence
  targeting sequence with CTCN PAM
gggccuuagcccaugccguu

SEQ ID NO: 15264 - RNA, 20 nt, Artificial Sequence
  targeting sequence with CTCN PAM
gaagcugcaucuuccuucug

SEQ ID NO: 15265 - RNA, 20 nt, Artificial Sequence
  targeting sequence with CTCN PAM
uucccagaaggaagaugcag

SEQ ID NO: 15266 - RNA, 20 nt, Artificial Sequence
  targeting sequence with CTCN PAM
ccuagcacugccccagcacu

SEQ ID NO: 15267 - RNA, 20 nt, Artificial Sequence
  targeting sequence with CTCN PAM
cacugcuccccuagcacugc

SEQ ID NO: 15268 - RNA, 20 nt, Artificial Sequence
  targeting sequence with CTCN PAM
aaggcggucuucaguuaggu

SEQ ID NO: 15269 - RNA, 20 nt, Artificial Sequence
  targeting sequence with CTCN PAM
cuguucaagauaaaaguuga

SEQ ID NO: 15270 - RNA, 20 nt, Artificial Sequence
  targeting sequence with CTCN PAM
cugcuugaaaccguccaugg

SEQ ID NO: 15271 - RNA, 20 nt, Artificial Sequence
  targeting sequence with CTCN PAM
ccucccugcuugaaaccguc

SEQ ID NO: 15272 - RNA, 20 nt, Artificial Sequence
  targeting sequence with CTCN PAM
caccccucaccucccugcuu

SEQ ID NO: 15273 - RNA, 20 nt, Artificial Sequence
  targeting sequence with CTCN PAM
cuguaucucacaccccucac

SEQ ID NO: 15274 - RNA, 20 nt, Artificial Sequence
  targeting sequence with CTCN PAM
ucgcuguaucucacaccccu

SEQ ID NO: 15275 - RNA, 20 nt, Artificial Sequence
  targeting sequence with CTCN PAM
uccccaccgcaugcauucuc

SEQ ID NO: 15276 - RNA, 20 nt, Artificial Sequence
  targeting sequence with CTCN PAM
ccacugccucuuccccaccg

SEQ ID NO: 15277 - RNA, 20 nt, Artificial Sequence
  targeting sequence with CTCN PAM
uccccacugccucuucccca

SEQ ID NO: 15278 - RNA, 20 nt, Artificial Sequence
  targeting sequence with CTCN PAM
ccagccccagccuccucccc

SEQ ID NO: 15279 - RNA, 20 nt, Artificial Sequence
  targeting sequence with CTCN PAM
aacuccccagccccagccuc

SEQ ID NO: 15280 - RNA, 20 nt, Artificial Sequence
  targeting sequence with CTCN PAM
ccaacuccccagccccagcc

SEQ ID NO: 15281 - RNA, 20 nt, Artificial Sequence
  targeting sequence with CTCN PAM
ucuccaacuccccagcccca

SEQ ID NO: 15282 - RNA, 20 nt, Artificial Sequence
  targeting sequence with CTCN PAM
ccucuccaacuccccagccc

SEQ ID NO: 15283 - RNA, 20 nt, Artificial Sequence
  targeting sequence with CTCN PAM
auauucuggccucuccucuc

SEQ ID NO: 15284 - RNA, 20 nt, Artificial Sequence
  targeting sequence with CTCN PAM
ccauauucuggccucuccuc

SEQ ID NO: 15285 - RNA, 20 nt, Artificial Sequence
  targeting sequence with CTCN PAM
ccauaggcuuuucucuccau

SEQ ID NO: 15286 - RNA, 20 nt, Artificial Sequence
  targeting sequence with CTCN PAM
aguggguguggugaggagga

SEQ ID NO: 15287 - RNA, 20 nt, Artificial Sequence
  targeting sequence with CTCN PAM
aggccuccccauaggcuuuu

SEQ ID NO: 15288 - RNA, 20 nt, Artificial Sequence
  targeting sequence with CTCN PAM
ccacacccacucgaggccuc

SEQ ID NO: 15289 - RNA, 20 nt, Artificial Sequence
  targeting sequence with CTCN PAM
ucaccacacccacucgaggc

SEQ ID NO: 15290 - RNA, 20 nt, Artificial Sequence
  targeting sequence with CTCN PAM
uccaggaaugccccaugccc

SEQ ID NO: 15291 - RNA, 20 nt, Artificial Sequence
  targeting sequence with CTCN PAM
cuuccaggaaugccccaugc

SEQ ID NO: 15292 - RNA, 20 nt, Artificial Sequence
  targeting sequence with CTCN PAM
cucuuccaggaaugccccau

SEQ ID NO: 15293 - RNA, 20 nt, Artificial Sequence
  targeting sequence with CTCN PAM
ucucucuuccaggaaugccc

SEQ ID NO: 15294 - RNA, 20 nt, Artificial Sequence
  targeting sequence with CTCN PAM
gccccccaaaucugccccuc

SEQ ID NO: 15295 - RNA, 20 nt, Artificial Sequence
  targeting sequence with CTCN PAM
guucuggacauccugguaua

SEQ ID NO: 15296 - RNA, 20 nt, Artificial Sequence
  targeting sequence with CTCN PAM
uucggcagcuauuccaugcc

SEQ ID NO: 15297 - RNA, 20 nt, Artificial Sequence
  targeting sequence with CTCN PAM
ucccagccccucauucggca

SEQ ID NO: 15298 - RNA, 20 nt, Artificial Sequence
  targeting sequence with CTCN PAM
caucccagccccucauucgg

SEQ ID NO: 15299 - RNA, 20 nt, Artificial Sequence
  targeting sequence with CTCN PAM
ggucuguucccucucauccc

SEQ ID NO: 15300 - RNA, 20 nt, Artificial Sequence
  targeting sequence with CTCN PAM
cucaggucuguucccucuca

SEQ ID NO: 15301 - RNA, 20 nt, Artificial Sequence
  targeting sequence with CTCN PAM
uggggguggcucucugggac

SEQ ID NO: 15302 - RNA, 20 nt, Artificial Sequence
  targeting sequence with CTCN PAM
cugggacagacauggucugg

SEQ ID NO: 15303 - RNA, 20 nt, Artificial Sequence
  targeting sequence with CTCN PAM
gggacagacauggucugggg

SEQ ID NO: 15304 - RNA, 20 nt, Artificial Sequence
  targeting sequence with CTCN PAM
gcuucccccagaccaugucu

SEQ ID NO: 15305 - RNA, 20 nt, Artificial Sequence
  targeting sequence with CTCN PAM
ucugcuucccccagaccaug

SEQ ID NO: 15306 - RNA, 20 nt, Artificial Sequence
  targeting sequence with CTCN PAM
aaccccuccucugcuucccc

SEQ ID NO: 15307 - RNA, 20 nt, Artificial Sequence
  targeting sequence with CTCN PAM
ugaagucaggccaagcgaag

SEQ ID NO: 15308 - RNA, 20 nt, Artificial Sequence
  targeting sequence with CTCN PAM
cagcugcagugcuacagggc

SEQ ID NO: 15309 - RNA, 20 nt, Artificial Sequence
  targeting sequence with CTCN PAM
gaccuccuuagaggcccccg

SEQ ID NO: 15310 - RNA, 20 nt, Artificial Sequence
  targeting sequence with CTCN PAM
uuagaggcccccguccccac

SEQ ID NO: 15311 - RNA, 20 nt, Artificial Sequence
  targeting sequence with CTCN PAM
aaggaggucugagcccuccc

SEQ ID NO: 15312 - RNA, 20 nt, Artificial Sequence
  targeting sequence with CTCN PAM
gucuucccauccguacagug

SEQ ID NO: 15313 - RNA, 20 nt, Artificial Sequence
  targeting sequence with CTCN PAM
aggccucagucuucccaucc

SEQ ID NO: 15314 - RNA, 20 nt, Artificial Sequence
  targeting sequence with CTCN PAM
cgagaacccgggagugaccc

SEQ ID NO: 15315 - RNA, 20 nt, Artificial Sequence
  targeting sequence with CTCN PAM
ggaguuucauucuucccucu

SEQ ID NO: 15316 - RNA, 20 nt, Artificial Sequence
  targeting sequence with CTCN PAM
cggguucucgggaguuucau

SEQ ID NO: 15317 - RNA, 20 nt, Artificial Sequence
  targeting sequence with CTCN PAM
acgccuuuggcccccaaaug

SEQ ID NO: 15318 - RNA, 20 nt, Artificial Sequence
  targeting sequence with CTCN PAM
ucauggccaggacccaacag

SEQ ID NO: 15319 - RNA, 20 nt, Artificial Sequence
  targeting sequence with CTCN PAM
uuauaauuuugcucuagauc

SEQ ID NO: 15320 - RNA, 20 nt, Artificial Sequence
  targeting sequence with CTCN PAM
agaucuagaguuucaugguu

SEQ ID NO: 15321 - RNA, 20 nt, Artificial Sequence
  targeting sequence with CTCN PAM
agaucuagagcaaaauuaua

SEQ ID NO: 15322 - RNA, 20 nt, Artificial Sequence
  targeting sequence with CTCN PAM
aaaaaaaaaaaaaaauuggc

SEQ ID NO: 15323 - RNA, 20 nt, Artificial Sequence
  targeting sequence with CTCN PAM
agccugggugacaaagcaag

SEQ ID NO: 15324 - RNA, 20 nt, Artificial Sequence
  targeting sequence with CTCN PAM
gcucacugcagucuccacuu

SEQ ID NO: 15325 - RNA, 20 nt, Artificial Sequence
  targeting sequence with CTCN PAM
cugcagucuccacuucccag

SEQ ID NO: 15326 - RNA, 20 nt, Artificial Sequence
  targeting sequence with CTCN PAM
acuucccaggcucaagcaau

SEQ ID NO: 15327 - RNA, 20 nt, Artificial Sequence
  targeting sequence with CTCN PAM
agcaaucuucccaccucagc

SEQ ID NO: 15328 - RNA, 20 nt, Artificial Sequence
  targeting sequence with CTCN PAM
gccucccaaguagcuaggcc

SEQ ID NO: 15329 - RNA, 20 nt, Artificial Sequence
  targeting sequence with CTCN PAM
caaguagcuaggccuauagg

SEQ ID NO: 15330 - RNA, 20 nt, Artificial Sequence
  targeting sequence with CTCN PAM
gcucauuuuuaaagauuuuc

SEQ ID NO: 15331 - RNA, 20 nt, Artificial Sequence
  targeting sequence with CTCN PAM
uuuuuaaagauuuucguaga

SEQ ID NO: 15332 - RNA, 20 nt, Artificial Sequence
  targeting sequence with CTCN PAM
acgaaaaucuuuaaaaauga

SEQ ID NO: 15333 - RNA, 20 nt, Artificial Sequence
  targeting sequence with CTCN PAM
acucuacgaaaaucuuuaaa

SEQ ID NO: 15334 - RNA, 20 nt, Artificial Sequence
  targeting sequence with CTCN PAM
cgauauugcccagaauuuaa

SEQ ID NO: 15335 - RNA, 20 nt, Artificial Sequence
  targeting sequence with CTCN PAM
ugcuucccccacccuugauc

SEQ ID NO: 15336 - RNA, 20 nt, Artificial Sequence
  targeting sequence with CTCN PAM
auaagguguuauaaaauagu

SEQ ID NO: 15337 - RNA, 20 nt, Artificial Sequence
  targeting sequence with CTCN PAM
gaguuguguauccaucucua

SEQ ID NO: 15338 - RNA, 20 nt, Artificial Sequence
  targeting sequence with CTCN PAM
gaguauaccaaaagccauug

SEQ ID NO: 15339 - RNA, 20 nt, Artificial Sequence
  targeting sequence with CTCN PAM
auaaucaauuuuagaauauu

SEQ ID NO: 15340 - RNA, 20 nt, Artificial Sequence
  targeting sequence with CTCN PAM
ccacccccacuccccagccc

SEQ ID NO: 15341 - RNA, 20 nt, Artificial Sequence
  targeting sequence with CTCN PAM
acccccacuccccagcccug

SEQ ID NO: 15342 - RNA, 20 nt, Artificial Sequence
  targeting sequence with CTCN PAM
ccagcccuggcaaccaccaa

SEQ ID NO: 15343 - RNA, 20 nt, Artificial Sequence
  targeting sequence with CTCN PAM
uccaugucguagccagggcu

SEQ ID NO: 15344 - RNA, 20 nt, Artificial Sequence
  targeting sequence with CTCN PAM
augucguagccagggcuuca

SEQ ID NO: 15345 - RNA, 20 nt, Artificial Sequence
  targeting sequence with CTCN PAM
uuuguauggcuggauaauau

SEQ ID NO: 15346 - RNA, 20 nt, Artificial Sequence
  targeting sequence with CTCN PAM
gguauauaccgaagagugga

SEQ ID NO: 15347 - RNA, 20 nt, Artificial Sequence
  targeting sequence with CTCN PAM
ucgguauauaccugagggaa

SEQ ID NO: 15348 - RNA, 20 nt, Artificial Sequence
  targeting sequence with CTCN PAM
gcccugaaaguuuucauaau

SEQ ID NO: 15349 - RNA, 20 nt, Artificial Sequence
  targeting sequence with CTCN PAM
ugcuuguaauccuagcacuu

SEQ ID NO: 15350 - RNA, 20 nt, Artificial Sequence
  targeting sequence with CTCN PAM
caaagugcuaggauuacaag

SEQ ID NO: 15351 - RNA, 20 nt, Artificial Sequence
  targeting sequence with CTCN PAM
gucucccaaagugcuaggau

SEQ ID NO: 15352 - RNA, 20 nt, Artificial Sequence
  targeting sequence with CTCN PAM
ggaguuugagacuaaacuga

SEQ ID NO: 15353 - RNA, 20 nt, Artificial Sequence
  targeting sequence with CTCN PAM
ugaguucaagcuaucuuccc

SEQ ID NO: 15354 - RNA, 20 nt, Artificial Sequence
  targeting sequence with CTCN PAM
aacuccugaguucaagcuau

SEQ ID NO: 15355 - RNA, 20 nt, Artificial Sequence
  targeting sequence with CTCN PAM
guuuagucucaaacuccuga

SEQ ID NO: 15356 - RNA, 20 nt, Artificial Sequence
  targeting sequence with CTCN PAM
cuacauugcucaguuuaguc

SEQ ID NO: 15357 - RNA, 20 nt, Artificial Sequence
  targeting sequence with CTCN PAM
gaaguagcugggaccacagg

SEQ ID NO: 15358 - RNA, 20 nt, Artificial Sequence
  targeting sequence with CTCN PAM
gucuccgaaguagcugggac

SEQ ID NO: 15359 - RNA, 20 nt, Artificial Sequence
  targeting sequence with CTCN PAM
ugccucagucuccgaaguag

SEQ ID NO: 15360 - RNA, 20 nt, Artificial Sequence
  targeting sequence with CTCN PAM
agugauccucuugccucagu

SEQ ID NO: 15361 - RNA, 20 nt, Artificial Sequence
  targeting sequence with CTCN PAM
agcucaagugauccucuugc

SEQ ID NO: 15362 - RNA, 20 nt, Artificial Sequence
  targeting sequence with CTCN PAM
ccagcucaagugauccucuu

SEQ ID NO: 15363 - RNA, 20 nt, Artificial Sequence
  targeting sequence with CTCN PAM
cugcagccuugaccucucca

SEQ ID NO: 15364 - RNA, 20 nt, Artificial Sequence
  targeting sequence with CTCN PAM
agcuugggugacagauugag

SEQ ID NO: 15365 - RNA, 20 nt, Artificial Sequence
  targeting sequence with CTCN PAM
aucugucacccaagcuggag

SEQ ID NO: 15366 - RNA, 20 nt, Artificial Sequence
  targeting sequence with CTCN PAM
auaaaacaaaacaaaaaacu

SEQ ID NO: 15367 - RNA, 20 nt, Artificial Sequence
  targeting sequence with CTCN PAM
cuuccacuguacccgucacc

SEQ ID NO: 15368 - RNA, 20 nt, Artificial Sequence
  targeting sequence with CTCN PAM
aacagucaccaucuugugga

SEQ ID NO: 15369 - RNA, 20 nt, Artificial Sequence
  targeting sequence with CTCN PAM
uguuucaucugcuggguuau

SEQ ID NO: 15370 - RNA, 20 nt, Artificial Sequence
  targeting sequence with CTCN PAM
uaucuguuaaagguaaauau

SEQ ID NO: 15371 - RNA, 20 nt, Artificial Sequence
  targeting sequence with CTCN PAM
cauuuaucuguugccuuucu

SEQ ID NO: 15372 - RNA, 20 nt, Artificial Sequence
  targeting sequence with CTCN PAM
gggaaugagcauuugguuga

SEQ ID NO: 15373 - RNA, 20 nt, Artificial Sequence
  targeting sequence with CTCN PAM
uucccagagcaggauuugaa

SEQ ID NO: 15374 - RNA, 20 nt, Artificial Sequence
  targeting sequence with CTCN PAM
accaaaugcucauucccaga

SEQ ID NO: 15375 - RNA, 20 nt, Artificial Sequence
  targeting sequence with CTCN PAM
caaccaaaugcucauuccca

SEQ ID NO: 15376 - RNA, 20 nt, Artificial Sequence
  targeting sequence with CTCN PAM
cacuuuuucuuuccccccuu

SEQ ID NO: 15377 - RNA, 20 nt, Artificial Sequence
  targeting sequence with CTCN PAM
agggcacacagccggguuuc

SEQ ID NO: 15378 - RNA, 20 nt, Artificial Sequence
  targeting sequence with CTCN PAM
ccagggcacacagccggguu

SEQ ID NO: 15379 - RNA, 20 nt, Artificial Sequence
  targeting sequence with CTCN PAM
cagucugggugccucugaga

SEQ ID NO: 15380 - RNA, 20 nt, Artificial Sequence
  targeting sequence with CTCN PAM
gucugggugccucugagaau

SEQ ID NO: 15381 - RNA, 20 nt, Artificial Sequence
  targeting sequence with CTCN PAM
gagaaugugcacauagcccc

SEQ ID NO: 15382 - RNA, 20 nt, Artificial Sequence
  targeting sequence with CTCN PAM
gaggcacccagacugagaga

SEQ ID NO: 15383 - RNA, 20 nt, Artificial Sequence
  targeting sequence with CTCN PAM
gggggcuaugugcacauucu

SEQ ID NO: 15384 - RNA, 20 nt, Artificial Sequence
  targeting sequence with CTCN PAM
auucuuuaaaaagagagauu

SEQ ID NO: 15385 - RNA, 20 nt, Artificial Sequence
  targeting sequence with CTCN PAM
uuuuaaagaauggaguauuc

SEQ ID NO: 15386 - RNA, 20 nt, Artificial Sequence
  targeting sequence with CTCN PAM
cuuuuuaaagaauggaguau

SEQ ID NO: 15387 - RNA, 20 nt, Artificial Sequence
  targeting sequence with CTCN PAM
agccuguaaucccagcacuu

SEQ ID NO: 15388 - RNA, 20 nt, Artificial Sequence
  targeting sequence with CTCN PAM
caaagugcugggauuacagg

SEQ ID NO: 15389 - RNA, 20 nt, Artificial Sequence
  targeting sequence with CTCN PAM
gccucccaaagugcugggau

SEQ ID NO: 15390 - RNA, 20 nt, Artificial Sequence
  targeting sequence with CTCN PAM
ugacccacccgccucggccu

SEQ ID NO: 15391 - RNA, 20 nt, Artificial Sequence
  targeting sequence with CTCN PAM
ugaccucaugacccacccgc

SEQ ID NO: 15392 - RNA, 20 nt, Artificial Sequence
  targeting sequence with CTCN PAM
acuaaaaauacaaaaaucag

SEQ ID NO: 15393 - RNA, 20 nt, Artificial Sequence
  targeting sequence with CTCN PAM
caaguagcugggauuacagg

SEQ ID NO: 15394 - RNA, 20 nt, Artificial Sequence
  targeting sequence with CTCN PAM
gccucccaaguagcugggau

SEQ ID NO: 15395 - RNA, 20 nt, Artificial Sequence
  targeting sequence with CTCN PAM
ugccucagccucccaaguag

SEQ ID NO: 15396 - RNA, 20 nt, Artificial Sequence
  targeting sequence with CTCN PAM
uggguucaagcaguucuccu

SEQ ID NO: 15397 - RNA, 20 nt, Artificial Sequence
  targeting sequence with CTCN PAM
accuccuggguucaagcagu

SEQ ID NO: 15398 - RNA, 20 nt, Artificial Sequence
  targeting sequence with CTCN PAM
cugcaaccuccaccuccugg

SEQ ID NO: 15399 - RNA, 20 nt, Artificial Sequence
  targeting sequence with CTCN PAM
gcucacugcaaccuccaccu

SEQ ID NO: 15400 - RNA, 20 nt, Artificial Sequence
  targeting sequence with CTCN PAM
agccuggggacauagagaga

SEQ ID NO: 15401 - RNA, 20 nt, Artificial Sequence
  targeting sequence with CTCN PAM
auguccccaggcuggagugc

SEQ ID NO: 15402 - RNA, 20 nt, Artificial Sequence
  targeting sequence with CTCN PAM
cuauguccccaggcuggagu

SEQ ID NO: 15403 - RNA, 20 nt, Artificial Sequence
  targeting sequence with CTCN PAM
aagaaaaaaagagagagaga

SEQ ID NO: 15404 - RNA, 20 nt, Artificial Sequence
  targeting sequence with CTCN PAM
uuuuuucuuugagacacugu

SEQ ID NO: 15405 - RNA, 20 nt, Artificial Sequence
  targeting sequence with CTCN PAM
cuuuuuuucuuugagacacu

SEQ ID NO: 15406 - RNA, 20 nt, Artificial Sequence
  targeting sequence with CTCN PAM
cucuuuuuuucuuugagaca

SEQ ID NO: 15407 - RNA, 20 nt, Artificial Sequence
  targeting sequence with CTCN PAM
cucucuuuuuuucuuugaga

SEQ ID NO: 15408 - RNA, 20 nt, Artificial Sequence
  targeting sequence with CTCN PAM
gugagccuugaggggagacc

SEQ ID NO: 15409 - RNA, 20 nt, Artificial Sequence
  targeting sequence with CTCN PAM
cugagucucucucucuuuuu

SEQ ID NO: 15410 - RNA, 20 nt, Artificial Sequence
  targeting sequence with CTCN PAM
aggcucacugagucucucuc

SEQ ID NO: 15411 - RNA, 20 nt, Artificial Sequence
  targeting sequence with CTCN PAM
ccucaaggcucacugagucu

SEQ ID NO: 15412 - RNA, 20 nt, Artificial Sequence
  targeting sequence with CTCN PAM
cggauggucuccccucaagg

SEQ ID NO: 15413 - RNA, 20 nt, Artificial Sequence
  targeting sequence with CTCN PAM
caugccagcggucagugucu

SEQ ID NO: 15414 - RNA, 20 nt, Artificial Sequence
  targeting sequence with CTCN PAM
ccaagacacugaccgcuggc

SEQ ID NO: 15415 - RNA, 20 nt, Artificial Sequence
  targeting sequence with CTCN PAM
ccccaagacacugaccgcug

SEQ ID NO: 15416 - RNA, 20 nt, Artificial Sequence
  targeting sequence with CTCN PAM
cccaccccccacgggccagc

SEQ ID NO: 15417 - RNA, 20 nt, Artificial Sequence
  targeting sequence with CTCN PAM
guggcaggcaucagcuggcc

SEQ ID NO: 15418 - RNA, 20 nt, Artificial Sequence
  targeting sequence with CTCN PAM
ccucaggcccgagccacggc

SEQ ID NO: 15419 - RNA, 20 nt, Artificial Sequence
  targeting sequence with CTCN PAM
ucaggcccgagccacggcgg

SEQ ID NO: 15420 - RNA, 20 nt, Artificial Sequence
  targeting sequence with CTCN PAM
ggcccgagccacggcggugu

SEQ ID NO: 15421 - RNA, 20 nt, Artificial Sequence
  targeting sequence with CTCN PAM
ggccugaggagagauggcag

SEQ ID NO: 15422 - RNA, 20 nt, Artificial Sequence
  targeting sequence with CTCN PAM
uggugggacaccgccguggc

SEQ ID NO: 15423 - RNA, 20 nt, Artificial Sequence
  targeting sequence with CTCN PAM
ggccuccuggugggacaccg

SEQ ID NO: 15424 - RNA, 20 nt, Artificial Sequence
  targeting sequence with CTCN PAM
cggugggacgccgccacccc

SEQ ID NO: 15425 - RNA, 20 nt, Artificial Sequence
  targeting sequence with CTCN PAM
agcaccaugcguagcaccgg

SEQ ID NO: 15426 - RNA, 20 nt, Artificial Sequence
  targeting sequence with CTCN PAM
ccagccugcagcgccuccag

SEQ ID NO: 15427 - RNA, 20 nt, Artificial Sequence
  targeting sequence with CTCN PAM
acauccugcacaaguaccca

SEQ ID NO: 15428 - RNA, 20 nt, Artificial Sequence
  targeting sequence with CTCN PAM
gcuucaaguaccugcugaag

SEQ ID NO: 15429 - RNA, 20 nt, Artificial Sequence
  targeting sequence with CTCN PAM
ucgccaggccccucaacucc

SEQ ID NO: 15430 - RNA, 20 nt, Artificial Sequence
  targeting sequence with CTCN PAM
ccaggccccucaacuccaaa

SEQ ID NO: 15431 - RNA, 20 nt, Artificial Sequence
  targeting sequence with CTCN PAM
acuccaaagccaggggggcc

SEQ ID NO: 15432 - RNA, 20 nt, Artificial Sequence
  targeting sequence with CTCN PAM
aaagccaggggggccacugg

SEQ ID NO: 15433 - RNA, 20 nt, Artificial Sequence
  targeting sequence with CTCN PAM
ggggcgcuuacuuugaagcu

SEQ ID NO: 15434 - RNA, 20 nt, Artificial Sequence
  targeting sequence with CTCN PAM
cucaggggcgcuuacuuuga

SEQ ID NO: 15435 - RNA, 20 nt, Artificial Sequence
  targeting sequence with CTCN PAM
aacccugggcuauguccucc

SEQ ID NO: 15436 - RNA, 20 nt, Artificial Sequence
  targeting sequence with CTCN PAM
gugagugcugcggccucuac

SEQ ID NO: 15437 - RNA, 20 nt, Artificial Sequence
  targeting sequence with CTCN PAM
cagaggccaggaccauugcu

SEQ ID NO: 15438 - RNA, 20 nt, Artificial Sequence
  targeting sequence with CTCN PAM
acuggaaggccuuuccccuc

SEQ ID NO: 15439 - RNA, 20 nt, Artificial Sequence
  targeting sequence with CTCN PAM
gguccccuguccuuguuccu

SEQ ID NO: 15440 - RNA, 20 nt, Artificial Sequence
  targeting sequence with CTCN PAM
uguggucucagccgagaugc

SEQ ID NO: 15441 - RNA, 20 nt, Artificial Sequence
  targeting sequence with CTCN PAM
gccgagaugcccucuccucu

SEQ ID NO: 15442 - RNA, 20 nt, Artificial Sequence
  targeting sequence with CTCN PAM
gcugagaccacaggaggaac

SEQ ID NO: 15443 - RNA, 20 nt, Artificial Sequence
  targeting sequence with CTCN PAM
ccucuaggaaggcagguagu

SEQ ID NO: 15444 - RNA, 20 nt, Artificial Sequence
  targeting sequence with CTCN PAM
ucuaggaaggcagguagugu

SEQ ID NO: 15445 - RNA, 20 nt, Artificial Sequence
  targeting sequence with CTCN PAM
aggaaggcagguagugugcc

SEQ ID NO: 15446 - RNA, 20 nt, Artificial Sequence
  targeting sequence with CTCN PAM
cugagcucccacugcaagag

SEQ ID NO: 15447 - RNA, 20 nt, Artificial Sequence
  targeting sequence with CTCN PAM
gagcucccacugcaagaguc

SEQ ID NO: 15448 - RNA, 20 nt, Artificial Sequence
  targeting sequence with CTCN PAM
gagagggcacacuaccugcc

SEQ ID NO: 15449 - RNA, 20 nt, Artificial Sequence
  targeting sequence with CTCN PAM
cacugcaagagucacccugu

SEQ ID NO: 15450 - RNA, 20 nt, Artificial Sequence
  targeting sequence with CTCN PAM
ugcagugggagcucagagag

SEQ ID NO: 15451 - RNA, 20 nt, Artificial Sequence
  targeting sequence with CTCN PAM
ccacagcaaaggguuuuccc

SEQ ID NO: 15452 - RNA, 20 nt, Artificial Sequence
  targeting sequence with CTCN PAM
gcuggcaccucccugagcag

SEQ ID NO: 15453 - RNA, 20 nt, Artificial Sequence
  targeting sequence with CTCN PAM
cugagcagccauguccuccg

SEQ ID NO: 15454 - RNA, 20 nt, Artificial Sequence
  targeting sequence with CTCN PAM
gggaggugccagcagaggga

SEQ ID NO: 15455 - RNA, 20 nt, Artificial Sequence
  targeting sequence with CTCN PAM
guuucaaaggggagaguuuc

SEQ ID NO: 15456 - RNA, 20 nt, Artificial Sequence
  targeting sequence with CTCN PAM
ccuuugaaacggaggacaug

SEQ ID NO: 15457 - RNA, 20 nt, Artificial Sequence
  targeting sequence with CTCN PAM
ccccuuugaaacggaggaca

SEQ ID NO: 15458 - RNA, 20 nt, Artificial Sequence
  targeting sequence with CTCN PAM
uuauaaagaugaaacucucc

SEQ ID NO: 15459 - RNA, 20 nt, Artificial Sequence
  targeting sequence with CTCN PAM
aaaaggggacccaugccagg

SEQ ID NO: 15460 - RNA, 20 nt, Artificial Sequence
  targeting sequence with CTCN PAM
gagcugaggcaggucuggga

SEQ ID NO: 15461 - RNA, 20 nt, Artificial Sequence
  targeting sequence with CTCN PAM
gagugaccuggcaugggucc

SEQ ID NO: 15462 - RNA, 20 nt, Artificial Sequence
  targeting sequence with CTCN PAM
gcucugagugaccuggcaug

SEQ ID NO: 15463 - RNA, 20 nt, Artificial Sequence
  targeting sequence with CTCN PAM
gggaccagacccacggccug

SEQ ID NO: 15464 - RNA, 20 nt, Artificial Sequence
  targeting sequence with CTCN PAM
gccuaccccaagccgguccc

SEQ ID NO: 15465 - RNA, 20 nt, Artificial Sequence
  targeting sequence with CTCN PAM
ugggcgugggucagagccug

SEQ ID NO: 15466 - RNA, 20 nt, Artificial Sequence
  targeting sequence with CTCN PAM
gacccacgcccaggaguucu

SEQ ID NO: 15467 - RNA, 20 nt, Artificial Sequence
  targeting sequence with CTCN PAM
cugcuuagccgccugguccu

SEQ ID NO: 15468 - RNA, 20 nt, Artificial Sequence
  targeting sequence with CTCN PAM
ucucccugcuuagccgccug

SEQ ID NO: 15469 - RNA, 20 nt, Artificial Sequence
  targeting sequence with CTCN PAM
ggcucuucucccugcuuagc

SEQ ID NO: 15470 - RNA, 20 nt, Artificial Sequence
  targeting sequence with CTCN PAM
acugccagcacaccgcauca

SEQ ID NO: 15471 - RNA, 20 nt, Artificial Sequence
  targeting sequence with CTCN PAM
ccaucaccaagacuagaaac

SEQ ID NO: 15472 - RNA, 20 nt, Artificial Sequence
  targeting sequence with CTCN PAM
gggcuccccaucaccaagac

SEQ ID NO: 15473 - RNA, 20 nt, Artificial Sequence
  targeting sequence with CTCN PAM
uggcaagcuguuucuuuccu

SEQ ID NO: 15474 - RNA, 20 nt, Artificial Sequence
  targeting sequence with CTCN PAM
cuucccugccgcucacagcc

SEQ ID NO: 15475 - RNA, 20 nt, Artificial Sequence
  targeting sequence with CTCN PAM
cagccuuggugauuguccug

SEQ ID NO: 15476 - RNA, 20 nt, Artificial Sequence
  targeting sequence with CTCN PAM
ucuuuacagcaggacaauca

SEQ ID NO: 15477 - RNA, 20 nt, Artificial Sequence
  targeting sequence with CTCN PAM
agccguguaccacagccacg

SEQ ID NO: 15478 - RNA, 20 nt, Artificial Sequence
  targeting sequence with CTCN PAM
uccagccguguaccacagcc

SEQ ID NO: 15479 - RNA, 20 nt, Artificial Sequence
  targeting sequence with CTCN PAM
gcccuccuccagccguguac

SEQ ID NO: 15480 - RNA, 20 nt, Artificial Sequence
  targeting sequence with CTCN PAM
cagcuuccuccgcccuccuc

SEQ ID NO: 15481 - RNA, 20 nt, Artificial Sequence
  targeting sequence with CTCN PAM
gggcucacagcuuccuccgc

SEQ ID NO: 15482 - RNA, 20 nt, Artificial Sequence
  targeting sequence with CTCN PAM
gcccauguucugcugagcgu

SEQ ID NO: 15483 - RNA, 20 nt, Artificial Sequence
  targeting sequence with CTCN PAM
gcagaacaugggcugagguc

SEQ ID NO: 15484 - RNA, 20 nt, Artificial Sequence
  targeting sequence with CTCN PAM
ccccuugacgcucagcagaa

SEQ ID NO: 15485 - RNA, 20 nt, Artificial Sequence
  targeting sequence with CTCN PAM
ugccccaugcccccaccacc

SEQ ID NO: 15486 - RNA, 20 nt, Artificial Sequence
  targeting sequence with CTCN PAM
cccacuacccugaagcgcug

SEQ ID NO: 15487 - RNA, 20 nt, Artificial Sequence
  targeting sequence with CTCN PAM
ucccccacuacccugaagcg

SEQ ID NO: 15488 - RNA, 20 nt, Artificial Sequence
  targeting sequence with CTCN PAM
uccucccccacuacccugaa

SEQ ID NO: 15489 - RNA, 20 nt, Artificial Sequence
  targeting sequence with CTCN PAM
ggacuccuccucccccacua

SEQ ID NO: 15490 - RNA, 20 nt, Artificial Sequence
  targeting sequence with CTCN PAM
accaccugcccuaggccugc

SEQ ID NO: 15491 - RNA, 20 nt, Artificial Sequence
  targeting sequence with CTCN PAM
caaccaccugcccuaggccu

SEQ ID NO: 15492 - RNA, 20 nt, Artificial Sequence
  targeting sequence with CTCN PAM
ggaucucucaaccaccugcc

SEQ ID NO: 15493 - RNA, 20 nt, Artificial Sequence
  targeting sequence with CTCN PAM
aaggacaguggcuucgugcc

SEQ ID NO: 15494 - RNA, 20 nt, Artificial Sequence
  targeting sequence with CTCN PAM
cugccucucacugccugugg

SEQ ID NO: 15495 - RNA, 20 nt, Artificial Sequence
  targeting sequence with CTCN PAM
cacugccuguggagcccccc

SEQ ID NO: 15496 - RNA, 20 nt, Artificial Sequence
  targeting sequence with CTCN PAM
cugccuguggagccccccug

SEQ ID NO: 15497 - RNA, 20 nt, Artificial Sequence
  targeting sequence with CTCN PAM
acaggcagugagaggcaggg

SEQ ID NO: 15498 - RNA, 20 nt, Artificial Sequence
  targeting sequence with CTCN PAM
uuccaaacaggggggcucca

SEQ ID NO: 15499 - RNA, 20 nt, Artificial Sequence
  targeting sequence with CTCN PAM
cauucggagucuuacggggg

SEQ ID NO: 15500 - RNA, 20 nt, Artificial Sequence
  targeting sequence with CTCN PAM
gaaugggaggccucguucca

SEQ ID NO: 15501 - RNA, 20 nt, Artificial Sequence
  targeting sequence with CTCN PAM
cgccccccaccccccguaag

SEQ ID NO: 15502 - RNA, 20 nt, Artificial Sequence
  targeting sequence with CTCN PAM
ggugccucacgccccccacc

SEQ ID NO: 15503 - RNA, 20 nt, Artificial Sequence
  targeting sequence with CTCN PAM
gcuuucagccccaccccgug

SEQ ID NO: 15504 - RNA, 20 nt, Artificial Sequence
  targeting sequence with CTCN PAM
aguuaguucccaagcacaag

SEQ ID NO: 15505 - RNA, 20 nt, Artificial Sequence
  targeting sequence with CTCN PAM
caggagagcgggugaggcca

SEQ ID NO: 15506 - RNA, 20 nt, Artificial Sequence
  targeting sequence with CTCN PAM
ugggagccgucgcgggggcc

SEQ ID NO: 15507 - RNA, 20 nt, Artificial Sequence
  targeting sequence with CTCN PAM
ccugggagccgucgcggggg

SEQ ID NO: 15508 - RNA, 20 nt, Artificial Sequence
  targeting sequence with CTCN PAM
cccgcucuccugggagccgu

SEQ ID NO: 15509 - RNA, 20 nt, Artificial Sequence
  targeting sequence with CTCN PAM
cuugguuucuuggggcccuu

SEQ ID NO: 15510 - RNA, 20 nt, Artificial Sequence
  targeting sequence with CTCN PAM
uuggccucacuugguuucuu

SEQ ID NO: 15511 - RNA, 20 nt, Artificial Sequence
  targeting sequence with CTCN PAM
caacgugggcaaggugaaaa

SEQ ID NO: 15512 - RNA, 20 nt, Artificial Sequence
  targeting sequence with CTCN PAM
uggcugccuuuuucaccuug

SEQ ID NO: 15513 - RNA, 20 nt, Artificial Sequence
  targeting sequence with CTCN PAM
ucccaagccaggcgcagcca

SEQ ID NO: 15514 - RNA, 20 nt, Artificial Sequence
  targeting sequence with CTCN PAM
caagccaggcgcagccacag

SEQ ID NO: 15515 - RNA, 20 nt, Artificial Sequence
  targeting sequence with CTCN PAM
guggcugcgccuggcuuggg

SEQ ID NO: 15516 - RNA, 20 nt, Artificial Sequence
  targeting sequence with CTCN PAM
caagcaaggcggcgcggcca

SEQ ID NO: 15517 - RNA, 20 nt, Artificial Sequence
  targeting sequence with CTCN PAM
cgacugugcccugguguccu

SEQ ID NO: 15518 - RNA, 20 nt, Artificial Sequence
  targeting sequence with CTCN PAM
cccgacugugcccugguguc

SEQ ID NO: 15519 - RNA, 20 nt, Artificial Sequence
  targeting sequence with CTCN PAM
gcaggaaggcaaaggccaaa

SEQ ID NO: 15520 - RNA, 20 nt, Artificial Sequence
  targeting sequence with CTCN PAM
ugcugccuuuggccuuugcc

SEQ ID NO: 15521 - RNA, 20 nt, Artificial Sequence
  targeting sequence with CTCN PAM
aguggcugucaagaccccca

SEQ ID NO: 15522 - RNA, 20 nt, Artificial Sequence
  targeting sequence with CTCN PAM
ccgcccccgcuccaguggcu

SEQ ID NO: 15523 - RNA, 20 nt, Artificial Sequence
  targeting sequence with CTCN PAM
ggagagggguuuccuuaucu

SEQ ID NO: 15524 - RNA, 20 nt, Artificial Sequence
  targeting sequence with CTCN PAM
agagcuggcuccccgccccc

SEQ ID NO: 15525 - RNA, 20 nt, Artificial Sequence
  targeting sequence with CTCN PAM
ccagagcuggcuccccgccc

SEQ ID NO: 15526 - RNA, 20 nt, Artificial Sequence
  targeting sequence with CTCN PAM
ggacacaugcacuagauaag

SEQ ID NO: 15527 - RNA, 20 nt, Artificial Sequence
  targeting sequence with CTCN PAM
aggucaagcccagcacucag

SEQ ID NO: 15528 - RNA, 20 nt, Artificial Sequence
  targeting sequence with CTCN PAM
ccaggucaagcccagcacuc

SEQ ID NO: 15529 - RNA, 20 nt, Artificial Sequence
  targeting sequence with CTCN PAM
cuccaggucaagcccagcac

SEQ ID NO: 15530 - RNA, 20 nt, Artificial Sequence
  targeting sequence with CTCN PAM
cucuccaggucaagcccagc

SEQ ID NO: 15531 - RNA, 20 nt, Artificial Sequence
  targeting sequence with CTCN PAM
ugguagcugguugggggaag

SEQ ID NO: 15532 - RNA, 20 nt, Artificial Sequence
  targeting sequence with CTCN PAM
uucccccaaccagcuaccau

SEQ ID NO: 15533 - RNA, 20 nt, Artificial Sequence
  targeting sequence with CTCN PAM
gcuucccccuucauaacccu

SEQ ID NO: 15534 - RNA, 20 nt, Artificial Sequence
  targeting sequence with CTCN PAM
uggucucugcuucccccuuc

SEQ ID NO: 15535 - RNA, 20 nt, Artificial Sequence
  targeting sequence with CTCN PAM
uucuugaggcaguggaggaa

SEQ ID NO: 15536 - RNA, 20 nt, Artificial Sequence
  targeting sequence with CTCN PAM
agaaugagucagucuccugg

SEQ ID NO: 15537 - RNA, 20 nt, Artificial Sequence
  targeting sequence with CTCN PAM
acugccucaagaaugaguca

SEQ ID NO: 15538 - RNA, 20 nt, Artificial Sequence
  targeting sequence with CTCN PAM
agcaggggaagggccugugu

SEQ ID NO: 15539 - RNA, 20 nt, Artificial Sequence
  targeting sequence with CTCN PAM
aggccuuuacacaggcccuu

SEQ ID NO: 15540 - RNA, 20 nt, Artificial Sequence
  targeting sequence with CTCN PAM
accuucuuuaugccuccagg

SEQ ID NO: 15541 - RNA, 20 nt, Artificial Sequence
  targeting sequence with CTCN PAM
ugccuguaagccuaacacuu

SEQ ID NO: 15542 - RNA, 20 nt, Artificial Sequence
  targeting sequence with CTCN PAM
caaaguguuaggcuuacagg

SEQ ID NO: 15543 - RNA, 20 nt, Artificial Sequence
  targeting sequence with CTCN PAM
agggauccgcccgccuuggc

SEQ ID NO: 15544 - RNA, 20 nt, Artificial Sequence
  targeting sequence with CTCN PAM
ugaccucaagggauccgccc

SEQ ID NO: 15545 - RNA, 20 nt, Artificial Sequence
  targeting sequence with CTCN PAM
aacuccugaccucaagggau

SEQ ID NO: 15546 - RNA, 20 nt, Artificial Sequence
  targeting sequence with CTCN PAM
gcuaaaaauacaaaaauuag

SEQ ID NO: 15547 - RNA, 20 nt, Artificial Sequence
  targeting sequence with CTCN PAM
gccacccaaguaccugggau

SEQ ID NO: 15548 - RNA, 20 nt, Artificial Sequence
  targeting sequence with CTCN PAM
uggguucaagugauuuuccu

SEQ ID NO: 15549 - RNA, 20 nt, Artificial Sequence
  targeting sequence with CTCN PAM
cuguaacaucugccuccugg

SEQ ID NO: 15550 - RNA, 20 nt, Artificial Sequence
  targeting sequence with CTCN PAM
gcucacuguaacaucugccu

SEQ ID NO: 15551 - RNA, 20 nt, Artificial Sequence
  targeting sequence with CTCN PAM
agcgugggugacagagugac

SEQ ID NO: 15552 - RNA, 20 nt, Artificial Sequence
  targeting sequence with CTCN PAM
gucacccacgcuggaguaca

SEQ ID NO: 15553 - RNA, 20 nt, Artificial Sequence
  targeting sequence with CTCN PAM
gucucaaaacaaaacacaaa

SEQ ID NO: 15554 - RNA, 20 nt, Artificial Sequence
  targeting sequence with CTCN PAM
aaacaaaacacaaaaagaag

SEQ ID NO: 15555 - RNA, 20 nt, Artificial Sequence
  targeting sequence with CTCN PAM
accuucuuuuuguguuuugu

SEQ ID NO: 15556 - RNA, 20 nt, Artificial Sequence
  targeting sequence with CTCN PAM
aauacuccaccuucuuuuug

SEQ ID NO: 15557 - RNA, 20 nt, Artificial Sequence
  targeting sequence with CTCN PAM
uugccaaaacuguagguaga

SEQ ID NO: 15558 - RNA, 20 nt, Artificial Sequence
  targeting sequence with CTCN PAM
agauaaagcccugauuccag

SEQ ID NO: 15559 - RNA, 20 nt, Artificial Sequence
  targeting sequence with CTCN PAM
gcauuguccuccagauaaag

SEQ ID NO: 15560 - RNA, 20 nt, Artificial Sequence
  targeting sequence with CTCN PAM
agcccuagcugcuuccuguc

SEQ ID NO: 15561 - RNA, 20 nt, Artificial Sequence
  targeting sequence with CTCN PAM
cucucuuuuagagacaggcu

SEQ ID NO: 15562 - RNA, 20 nt, Artificial Sequence
  targeting sequence with CTCN PAM
cucuuuuagagacaggcucu

SEQ ID NO: 15563 - RNA, 20 nt, Artificial Sequence
  targeting sequence with CTCN PAM
cuuuuagagacaggcucuug

SEQ ID NO: 15564 - RNA, 20 nt, Artificial Sequence
  targeting sequence with CTCN PAM
uuuagagacaggcucuugcu

SEQ ID NO: 15565 - RNA, 20 nt, Artificial Sequence
  targeting sequence with CTCN PAM
aaaagagagagaggaaaaaa

SEQ ID NO: 15566 - RNA, 20 nt, Artificial Sequence
  targeting sequence with CTCN PAM
ugcucugucacacaggugag

SEQ ID NO: 15567 - RNA, 20 nt, Artificial Sequence
  targeting sequence with CTCN PAM
gucacacaggugagugcuga

SEQ ID NO: 15568 - RNA, 20 nt, Artificial Sequence
  targeting sequence with CTCN PAM
ccugugugacagagcaagag

SEQ ID NO: 15569 - RNA, 20 nt, Artificial Sequence
  targeting sequence with CTCN PAM
gcacucaccugugugacaga

SEQ ID NO: 15570 - RNA, 20 nt, Artificial Sequence
  targeting sequence with CTCN PAM
aauuccugggcucagcacuc

SEQ ID NO: 15571 - RNA, 20 nt, Artificial Sequence
  targeting sequence with CTCN PAM
gcaaaaaauaaaaauauuag

SEQ ID NO: 15572 - RNA, 20 nt, Artificial Sequence
  targeting sequence with CTCN PAM
caaguagcuggggcaacagg

SEQ ID NO: 15573 - RNA, 20 nt, Artificial Sequence
  targeting sequence with CTCN PAM
gccucccaaguagcuggggc

SEQ ID NO: 15574 - RNA, 20 nt, Artificial Sequence
  targeting sequence with CTCN PAM
ugccucagccucccaaguag

SEQ ID NO: 15575 - RNA, 20 nt, Artificial Sequence
  targeting sequence with CTCN PAM
agcgauccuccugccucagc

SEQ ID NO: 15576 - RNA, 20 nt, Artificial Sequence
  targeting sequence with CTCN PAM
caggcucaagcgauccuccu

SEQ ID NO: 15577 - RNA, 20 nt, Artificial Sequence
  targeting sequence with CTCN PAM
guuuacugcagccuugaccu

SEQ ID NO: 15578 - RNA, 20 nt, Artificial Sequence
  targeting sequence with CTCN PAM
agcacagugacagagcgaga

SEQ ID NO: 15579 - RNA, 20 nt, Artificial Sequence
  targeting sequence with CTCN PAM
gucacugugcuggagugugg

SEQ ID NO: 15580 - RNA, 20 nt, Artificial Sequence
  targeting sequence with CTCN PAM
cucugucacugugcuggagu

SEQ ID NO: 15581 - RNA, 20 nt, Artificial Sequence
  targeting sequence with CTCN PAM
agcugacaggcccguuagac

SEQ ID NO: 15582 - RNA, 20 nt, Artificial Sequence
  targeting sequence with CTCN PAM
agccuuuaguuugucuucca

SEQ ID NO: 15583 - RNA, 20 nt, Artificial Sequence
  targeting sequence with CTCN PAM
aagcccaccaaagccaacgu

SEQ ID NO: 15584 - RNA, 20 nt, Artificial Sequence
  targeting sequence with CTCN PAM
aggcaaagcacuagugcucc

SEQ ID NO: 15585 - RNA, 20 nt, Artificial Sequence
  targeting sequence with CTCN PAM
agccacucugugaggggcau

SEQ ID NO: 15586 - RNA, 20 nt, Artificial Sequence
  targeting sequence with CTCN PAM
gugaggggcaugcuauuauu

SEQ ID NO: 15587 - RNA, 20 nt, Artificial Sequence
  targeting sequence with CTCN PAM
cagaguggcuggaggguuaa

SEQ ID NO: 15588 - RNA, 20 nt, Artificial Sequence
  targeting sequence with CTCN PAM
gugaccuaguuugaagacug

SEQ ID NO: 15589 - RNA, 20 nt, Artificial Sequence
  targeting sequence with CTCN PAM
gaguggcuaaaugauuugcc

SEQ ID NO: 15590 - RNA, 20 nt, Artificial Sequence
  targeting sequence with CTCN PAM
gagccucagugaccuaguuu

SEQ ID NO: 15591 - RNA, 20 nt, Artificial Sequence
  targeting sequence with CTCN PAM
guuaugugacauggggcaaa

SEQ ID NO: 15592 - RNA, 20 nt, Artificial Sequence
  targeting sequence with CTCN PAM
uggguccuaggucuucacuc

SEQ ID NO: 15593 - RNA, 20 nt, Artificial Sequence
  targeting sequence with CTCN PAM
agaacccccauuccuccugg

SEQ ID NO: 15594 - RNA, 20 nt, Artificial Sequence
  targeting sequence with CTCN PAM
uucuuccccuauaaaaccuc

SEQ ID NO: 15595 - RNA, 20 nt, Artificial Sequence
  targeting sequence with CTCN PAM
uccaucaaauuccaggagau

SEQ ID NO: 15596 - RNA, 20 nt, Artificial Sequence
  targeting sequence with CTCN PAM
aucaaauuccaggagaugcu

SEQ ID NO: 15597 - RNA, 20 nt, Artificial Sequence
  targeting sequence with CTCN PAM
uggaauuugauggaggaggu

SEQ ID NO: 15598 - RNA, 20 nt, Artificial Sequence
  targeting sequence with CTCN PAM
gcaucuccuggaauuugaug

SEQ ID NO: 15599 - RNA, 20 nt, Artificial Sequence
  targeting sequence with CTCN PAM
gcuuugguuuuccuguaggc

SEQ ID NO: 15600 - RNA, 20 nt, Artificial Sequence
  targeting sequence with CTCN PAM
cagcuuugguuuuccuguag

SEQ ID NO: 15601 - RNA, 20 nt, Artificial Sequence
  targeting sequence with CTCN PAM
uacucucagcuuugguuuuc

SEQ ID NO: 15602 - RNA, 20 nt, Artificial Sequence
  targeting sequence with CTCN PAM
ggccuguucagggcaggcag

SEQ ID NO: 15603 - RNA, 20 nt, Artificial Sequence
  targeting sequence with CTCN PAM
gcccccggaagggucaucca

SEQ ID NO: 15604 - RNA, 20 nt, Artificial Sequence
  targeting sequence with CTCN PAM
auuucuuuuccuacaaagca

SEQ ID NO: 15605 - RNA, 20 nt, Artificial Sequence
  targeting sequence with CTCN PAM
cugguccccuggcacccugg

SEQ ID NO: 15606 - RNA, 20 nt, Artificial Sequence
  targeting sequence with CTCN PAM
gguccccuggcacccugggg

SEQ ID NO: 15607 - RNA, 20 nt, Artificial Sequence
  targeting sequence with CTCN PAM
uaucuguaagauggggaugg

SEQ ID NO: 15608 - RNA, 20 nt, Artificial Sequence
  targeting sequence with CTCN PAM
ggguacacaacaucgcccuu

SEQ ID NO: 15609 - RNA, 20 nt, Artificial Sequence
  targeting sequence with CTCN PAM
ggguggcucuggguacacaa

SEQ ID NO: 15610 - RNA, 20 nt, Artificial Sequence
  targeting sequence with CTCN PAM
uugcuccugguuugcuuucg

SEQ ID NO: 15611 - RNA, 20 nt, Artificial Sequence
  targeting sequence with CTCN PAM
ugguuugcuuucguauaggu

SEQ ID NO: 15612 - RNA, 20 nt, Artificial Sequence
  targeting sequence with CTCN PAM
ugcuaagggcagugggucca

SEQ ID NO: 15613 - RNA, 20 nt, Artificial Sequence
  targeting sequence with CTCN PAM
gucuuccuggacaaaugugc

SEQ ID NO: 15614 - RNA, 20 nt, Artificial Sequence
  targeting sequence with CTCN PAM
ucauccaaaguguccagcca

SEQ ID NO: 15615 - RNA, 20 nt, Artificial Sequence
  targeting sequence with CTCN PAM
ggcuggacacuuuggaugau

SEQ ID NO: 15616 - RNA, 20 nt, Artificial Sequence
  targeting sequence with CTCN PAM
ggcccuaagcuucagcccuc

SEQ ID NO: 15617 - RNA, 20 nt, Artificial Sequence
  targeting sequence with CTCN PAM
gccccugccucuggcccuaa

SEQ ID NO: 15618 - RNA, 20 nt, Artificial Sequence
  targeting sequence with CTCN PAM
ccgccccugccucuggcccu

SEQ ID NO: 15619 - RNA, 20 nt, Artificial Sequence
  targeting sequence with CTCN PAM
cuccgccccugccucuggcc

SEQ ID NO: 15620 - RNA, 20 nt, Artificial Sequence
  targeting sequence with CTCN PAM
gucucucuccgccccugccu

SEQ ID NO: 15621 - RNA, 20 nt, Artificial Sequence
  targeting sequence with CTCN PAM
gcccuaguuuuuauucuuca

SEQ ID NO: 15622 - RNA, 20 nt, Artificial Sequence
  targeting sequence with CTCN PAM
auuuauuucauuguaagcua

SEQ ID NO: 15623 - RNA, 20 nt, Artificial Sequence
  targeting sequence with CTCN PAM
caauugguguggguagaggc

SEQ ID NO: 15624 - RNA, 20 nt, Artificial Sequence
  targeting sequence with CTCN PAM
acccacaccaauugugagga

SEQ ID NO: 15625 - RNA, 20 nt, Artificial Sequence
  targeting sequence with CTCN PAM
gccucuacccacaccaauug

SEQ ID NO: 15626 - RNA, 20 nt, Artificial Sequence
  targeting sequence with CTCN PAM
gcggauguucaugaaggacc

SEQ ID NO: 15627 - RNA, 20 nt, Artificial Sequence
  targeting sequence with CTCN PAM
gauaggagguccugccucag

SEQ ID NO: 15628 - RNA, 20 nt, Artificial Sequence
  targeting sequence with CTCN PAM
uaucugagccccagcauugg

SEQ ID NO: 15629 - RNA, 20 nt, Artificial Sequence
  targeting sequence with CTCN PAM
gggauacagacugugugcua

SEQ ID NO: 15630 - RNA, 20 nt, Artificial Sequence
  targeting sequence with CTCN PAM
aucagccccuuugcaucccg

SEQ ID NO: 15631 - RNA, 20 nt, Artificial Sequence
  targeting sequence with CTCN PAM
cuccaucagccccuuugcau

SEQ ID NO: 15632 - RNA, 20 nt, Artificial Sequence
  targeting sequence with CTCN PAM
uccuggaagccugaucgcag

SEQ ID NO: 15633 - RNA, 20 nt, Artificial Sequence
  targeting sequence with CTCN PAM
ucugccugacaacagcuacc

SEQ ID NO: 15634 - RNA, 20 nt, Artificial Sequence
  targeting sequence with CTCN PAM
gccucaucugccugacaaca

SEQ ID NO: 15635 - RNA, 20 nt, Artificial Sequence
  targeting sequence with CTCN PAM
gauggcauccucugccucau

SEQ ID NO: 15636 - RNA, 20 nt, Artificial Sequence
  targeting sequence with CTCN PAM
uuucaucccaccccucagau

SEQ ID NO: 15637 - RNA, 20 nt, Artificial Sequence
  targeting sequence with CTCN PAM
ggcaguggaaaggaaggauu

SEQ ID NO: 15638 - RNA, 20 nt, Artificial Sequence
  targeting sequence with CTCN PAM
aauccuuccuuuccacugcc

SEQ ID NO: 15639 - RNA, 20 nt, Artificial Sequence
  targeting sequence with CTCN PAM
gcuacucuaauccuuccuuu

SEQ ID NO: 15640 - RNA, 20 nt, Artificial Sequence
  targeting sequence with CTCN PAM
cugucuucucagcuacucua

SEQ ID NO: 15641 - RNA, 20 nt, Artificial Sequence
  targeting sequence with CTCN PAM
ggaaccaguggcugaaaggu

SEQ ID NO: 15642 - RNA, 20 nt, Artificial Sequence
  targeting sequence with CTCN PAM
ugggccaggcacugcgacag

SEQ ID NO: 15643 - RNA, 20 nt, Artificial Sequence
  targeting sequence with CTCN PAM
gcagccagcgccugugcucu

SEQ ID NO: 15644 - RNA, 20 nt, Artificial Sequence
  targeting sequence with CTCN PAM
gaagaagagguggggcuggg

SEQ ID NO: 15645 - RNA, 20 nt, Artificial Sequence
  targeting sequence with CTCN PAM
ucuucagagcacaggcgcug

SEQ ID NO: 15646 - RNA, 20 nt, Artificial Sequence
  targeting sequence with CTCN PAM
agcgggguggguagggcugg

SEQ ID NO: 15647 - RNA, 20 nt, Artificial Sequence
  targeting sequence with CTCN PAM
gacagcccguccaacccugu

SEQ ID NO: 15648 - RNA, 20 nt, Artificial Sequence
  targeting sequence with CTCN PAM
gucuggaggggguaccauuu

SEQ ID NO: 15649 - RNA, 20 nt, Artificial Sequence
  targeting sequence with CTCN PAM
agacagagauccuugcucag

SEQ ID NO: 15650 - RNA, 20 nt, Artificial Sequence
  targeting sequence with CTCN PAM
uccuucugcugaaaugguac

SEQ ID NO: 15651 - RNA, 20 nt, Artificial Sequence
  targeting sequence with CTCN PAM
ucacgcugggagcugcagga

SEQ ID NO: 15652 - RNA, 20 nt, Artificial Sequence
  targeting sequence with CTCN PAM
cgcugggagcugcaggaagg

SEQ ID NO: 15653 - RNA, 20 nt, Artificial Sequence
  targeting sequence with CTCN PAM
cagcgugaggagcauguucc

SEQ ID NO: 15654 - RNA, 20 nt, Artificial Sequence
  targeting sequence with CTCN PAM
agccacacagaccuuccugc

SEQ ID NO: 15655 - RNA, 20 nt, Artificial Sequence
  targeting sequence with CTCN PAM
uuacugggcucuagccacac

SEQ ID NO: 15656 - RNA, 20 nt, Artificial Sequence
  targeting sequence with CTCN PAM
ucuuuacugggcucuagcca

SEQ ID NO: 15657 - RNA, 20 nt, Artificial Sequence
  targeting sequence with CTCN PAM
caucccugugcuccucuuua

SEQ ID NO: 15658 - RNA, 20 nt, Artificial Sequence
  targeting sequence with CTCN PAM
ucucccaucccugugcuccu

SEQ ID NO: 15659 - RNA, 20 nt, Artificial Sequence
  targeting sequence with CTCN PAM
ucacacggagagacaggcuc

SEQ ID NO: 15660 - RNA, 20 nt, Artificial Sequence
  targeting sequence with CTCN PAM
cacggagagacaggcucugu

SEQ ID NO: 15661 - RNA, 20 nt, Artificial Sequence
  targeting sequence with CTCN PAM
gugugaggagugccgcagau

SEQ ID NO: 15662 - RNA, 20 nt, Artificial Sequence
  targeting sequence with CTCN PAM
ccgugugaggagugccgcag

SEQ ID NO: 15663 - RNA, 20 nt, Artificial Sequence
  targeting sequence with CTCN PAM
gugucccuaccucuugacuc

SEQ ID NO: 15664 - RNA, 20 nt, Artificial Sequence
  targeting sequence with CTCN PAM
ugacucugggcuccaugauu

SEQ ID NO: 15665 - RNA, 20 nt, Artificial Sequence
  targeting sequence with CTCN PAM
gggcuccaugauuacuugac

SEQ ID NO: 15666 - RNA, 20 nt, Artificial Sequence
  targeting sequence with CTCN PAM
augauuacuugaccaguaga

SEQ ID NO: 15667 - RNA, 20 nt, Artificial Sequence
  targeting sequence with CTCN PAM
aacacaagaaguagaagcug

SEQ ID NO: 15668 - RNA, 20 nt, Artificial Sequence
  targeting sequence with CTCN PAM
cucuucaaacuuggccacca

SEQ ID NO: 15669 - RNA, 20 nt, Artificial Sequence
  targeting sequence with CTCN PAM
ucaaacuuggccaccacucu

SEQ ID NO: 15670 - RNA, 20 nt, Artificial Sequence
  targeting sequence with CTCN PAM
augggaaagcccaugcagcu

SEQ ID NO: 15671 - RNA, 20 nt, Artificial Sequence
  targeting sequence with CTCN PAM
acaagcugcaugggcuuucc

SEQ ID NO: 15672 - RNA, 20 nt, Artificial Sequence
  targeting sequence with CTCN PAM
ccacaagcugcaugggcuuu

SEQ ID NO: 15673 - RNA, 20 nt, Artificial Sequence
  targeting sequence with CTCN PAM
guuccucuccacaagcugca

SEQ ID NO: 15674 - RNA, 20 nt, Artificial Sequence
  targeting sequence with CTCN PAM
auuuuucagcuccugcugaa

SEQ ID NO: 15675 - RNA, 20 nt, Artificial Sequence
  targeting sequence with CTCN PAM
ugcugaacucucugaccagc

SEQ ID NO: 15676 - RNA, 20 nt, Artificial Sequence
  targeting sequence with CTCN PAM
cugaccagcugguaccacgu

SEQ ID NO: 15677 - RNA, 20 nt, Artificial Sequence
  targeting sequence with CTCN PAM
gaccagcugguaccacgugc

SEQ ID NO: 15678 - RNA, 20 nt, Artificial Sequence
  targeting sequence with CTCN PAM
auuagggcuggaagaugcag

SEQ ID NO: 15679 - RNA, 20 nt, Artificial Sequence
  targeting sequence with CTCN PAM
aaugguuccuuaugacaaag

SEQ ID NO: 15680 - RNA, 20 nt, Artificial Sequence
  targeting sequence with CTCN PAM
guugcuugccguccucuaau

SEQ ID NO: 15681 - RNA, 20 nt, Artificial Sequence
  targeting sequence with CTCN PAM
gcagggaugugggcgggcag

SEQ ID NO: 15682 - RNA, 20 nt, Artificial Sequence
  targeting sequence with CTCN PAM
caggccugucugcccgccca

SEQ ID NO: 15683 - RNA, 20 nt, Artificial Sequence
  targeting sequence with CTCN PAM
ucacaggccugucugcccgc

SEQ ID NO: 15684 - RNA, 20 nt, Artificial Sequence
  targeting sequence with CTCN PAM
ugccacaacccagaugaagg

SEQ ID NO: 15685 - RNA, 20 nt, Artificial Sequence
  targeting sequence with CTCN PAM
cagagggaggguuagaagug

SEQ ID NO: 15686 - RNA, 20 nt, Artificial Sequence
  targeting sequence with CTCN PAM
gugagcauguccuggcuggu

SEQ ID NO: 15687 - RNA, 20 nt, Artificial Sequence
  targeting sequence with CTCN PAM
cucugugagcauguccuggc

SEQ ID NO: 15688 - RNA, 20 nt, Artificial Sequence
  targeting sequence with CTCN PAM
gcugauggauuggauguagg

SEQ ID NO: 15689 - RNA, 20 nt, Artificial Sequence
  targeting sequence with CTCN PAM
ucagugacccuuccuacauc

SEQ ID NO: 15690 - RNA, 20 nt, Artificial Sequence
  targeting sequence with CTCN PAM
ggaaauggucacccagcagu

SEQ ID NO: 15691 - RNA, 20 nt, Artificial Sequence
  targeting sequence with CTCN PAM
ccucaggaaauggucaccca

SEQ ID NO: 15692 - RNA, 20 nt, Artificial Sequence
  targeting sequence with CTCN PAM
uggcacgugccaaguccuca

SEQ ID NO: 15693 - RNA, 20 nt, Artificial Sequence
  targeting sequence with CTCN PAM
gcagccuccuggcacgugcc

SEQ ID NO: 15694 - RNA, 20 nt, Artificial Sequence
  targeting sequence with CTCN PAM
ucaggaccauaucucggcag

SEQ ID NO: 15695 - RNA, 20 nt, Artificial Sequence
  targeting sequence with CTCN PAM
caucaggaccauaucucggc

SEQ ID NO: 15696 - RNA, 20 nt, Artificial Sequence
  targeting sequence with CTCN PAM
guggcuaggcugccaccucu

SEQ ID NO: 15697 - RNA, 20 nt, Artificial Sequence
  targeting sequence with CTCN PAM
guccuccguggcuaggcugc

SEQ ID NO: 15698 - RNA, 20 nt, Artificial Sequence
  targeting sequence with CTCN PAM
cuguccuccguggcuaggcu

SEQ ID NO: 15699 - RNA, 20 nt, Artificial Sequence
  targeting sequence with CTCN PAM
cuuuaguccaccccuuccuu

SEQ ID NO: 15700 - RNA, 20 nt, Artificial Sequence
  targeting sequence with CTCN PAM
gacucccuuuaguccacccc

SEQ ID NO: 15701 - RNA, 20 nt, Artificial Sequence
  targeting sequence with CTCN PAM
aguccugugcaguuugccuc

SEQ ID NO: 15702 - RNA, 20 nt, Artificial Sequence
  targeting sequence with CTCN PAM
gcauggggcaucagcugcuc

SEQ ID NO: 15703 - RNA, 20 nt, Artificial Sequence
  targeting sequence with CTCN PAM
cuuccugccccugcuccacc

SEQ ID NO: 15704 - RNA, 20 nt, Artificial Sequence
  targeting sequence with CTCN PAM
accaccccacccucuccucc

SEQ ID NO: 15705 - RNA, 20 nt, Artificial Sequence
  targeting sequence with CTCN PAM
ccuccuggaaucccggcuuu

SEQ ID NO: 15706 - RNA, 20 nt, Artificial Sequence
  targeting sequence with CTCN PAM
uccuggaaucccggcuuugc

SEQ ID NO: 15707 - RNA, 20 nt, Artificial Sequence
  targeting sequence with CTCN PAM
uggaaucccggcuuugccua

SEQ ID NO: 15708 - RNA, 20 nt, Artificial Sequence
  targeting sequence with CTCN PAM
gggugcccuucuggguccug

SEQ ID NO: 15709 - RNA, 20 nt, Artificial Sequence
  targeting sequence with CTCN PAM
ggaagcaccagcccggcccc

SEQ ID NO: 15710 - RNA, 20 nt, Artificial Sequence
  targeting sequence with CTCN PAM
ucaggaagcaccagcccggc

SEQ ID NO: 15711 - RNA, 20 nt, Artificial Sequence
  targeting sequence with CTCN PAM
ugccacugcucauucacggc

SEQ ID NO: 15712 - RNA, 20 nt, Artificial Sequence
  targeting sequence with CTCN PAM
uucacggcuuggcccagugc

SEQ ID NO: 15713 - RNA, 20 nt, Artificial Sequence
  targeting sequence with CTCN PAM
cguccaugagcuggggacag

SEQ ID NO: 15714 - RNA, 20 nt, Artificial Sequence
  targeting sequence with CTCN PAM
uggacgugagaugcccacug

SEQ ID NO: 15715 - RNA, 20 nt, Artificial Sequence
  targeting sequence with CTCN PAM
cuuagcugcaaugguuucuu

SEQ ID NO: 15716 - RNA, 20 nt, Artificial Sequence
  targeting sequence with CTCN PAM
uuugaaaaggaaagaaacca

SEQ ID NO: 15717 - RNA, 20 nt, Artificial Sequence
  targeting sequence with CTCN PAM
uaugacccucaaaggguagg

SEQ ID NO: 15718 - RNA, 20 nt, Artificial Sequence
  targeting sequence with CTCN PAM
aaggguaggaaccucccucc

SEQ ID NO: 15719 - RNA, 20 nt, Artificial Sequence
  targeting sequence with CTCN PAM
cuccugcccacagcugccag

SEQ ID NO: 15720 - RNA, 20 nt, Artificial Sequence
  targeting sequence with CTCN PAM
ugcccacagcugccaggucc

SEQ ID NO: 15721 - RNA, 20 nt, Artificial Sequence
  targeting sequence with CTCN PAM
gagccccagauaaggauuau

SEQ ID NO: 15722 - RNA, 20 nt, Artificial Sequence
  targeting sequence with CTCN PAM
gaggaccuggcagcuguggg

SEQ ID NO: 15723 - RNA, 20 nt, Artificial Sequence
  targeting sequence with CTCN PAM
gcgcagaagguggccaccuu

SEQ ID NO: 15724 - RNA, 20 nt, Artificial Sequence
  targeting sequence with CTCN PAM
ggaaacuagagauuuccucc

SEQ ID NO: 15725 - RNA, 20 nt, Artificial Sequence
  targeting sequence with CTCN PAM
aguuuccagagucguuucuc

SEQ ID NO: 15726 - RNA, 20 nt, Artificial Sequence
  targeting sequence with CTCN PAM
auuugcaaauacauuucuaa

SEQ ID NO: 15727 - RNA, 20 nt, Artificial Sequence
  targeting sequence with CTCN PAM
uugacguuuagaaauguauu

SEQ ID NO: 15728 - RNA, 20 nt, Artificial Sequence
  targeting sequence with CTCN PAM
ggaucagggugugcacacca

SEQ ID NO: 15729 - RNA, 20 nt, Artificial Sequence
  targeting sequence with CTCN PAM
ucggccccgccccauccaag

SEQ ID NO: 15730 - RNA, 20 nt, Artificial Sequence
  targeting sequence with CTCN PAM
gccccgccccauccaagcgc

SEQ ID NO: 15731 - RNA, 20 nt, Artificial Sequence
  targeting sequence with CTCN PAM
gagacgcucgccacaaacgg

SEQ ID NO: 15732 - RNA, 20 nt, Artificial Sequence
  targeting sequence with CTCN PAM
gagaacgccagccgcacggg

SEQ ID NO: 15733 - RNA, 20 nt, Artificial Sequence
  targeting sequence with CTCN PAM
ccacaaacgguuagggcagc

SEQ ID NO: 15734 - RNA, 20 nt, Artificial Sequence
  targeting sequence with CTCN PAM
gggaaccguguauucauucc

SEQ ID NO: 15735 - RNA, 20 nt, Artificial Sequence
  targeting sequence with CTCN PAM
cccucaaaaugcuaucaaau

SEQ ID NO: 15736 - RNA, 20 nt, Artificial Sequence
  targeting sequence with CTCN PAM
aaaugcuaucaaaugugcug

SEQ ID NO: 15737 - RNA, 20 nt, Artificial Sequence
  targeting sequence with CTCN PAM
gaauagaaaaugugaaagau

SEQ ID NO: 15738 - RNA, 20 nt, Artificial Sequence
  targeting sequence with CTCN PAM
ccacacagaagccacuguag

SEQ ID NO: 15739 - RNA, 20 nt, Artificial Sequence
  targeting sequence with CTCN PAM
acacagaagccacuguagga

SEQ ID NO: 15740 - RNA, 20 nt, Artificial Sequence
  targeting sequence with CTCN PAM
cuuuucuguucucauuaauu

SEQ ID NO: 15741 - RNA, 20 nt, Artificial Sequence
  targeting sequence with CTCN PAM
uuaauuuuagaacugguauu

SEQ ID NO: 15742 - RNA, 20 nt, Artificial Sequence
  targeting sequence with CTCN PAM
ugauaaauacauguguaacu

SEQ ID NO: 15743 - RNA, 20 nt, Artificial Sequence
  targeting sequence with CTCN PAM
acuuaauuucuugcuuuuuu

SEQ ID NO: 15744 - RNA, 20 nt, Artificial Sequence
  targeting sequence with CTCN PAM
aaagguacagcaacuccacu

SEQ ID NO: 15745 - RNA, 20 nt, Artificial Sequence
  targeting sequence with CTCN PAM
cgagaucuuucccugggguu

SEQ ID NO: 15746 - RNA, 20 nt, Artificial Sequence
  targeting sequence with CTCN PAM
agaucuuucccugggguugg

SEQ ID NO: 15747 - RNA, 20 nt, Artificial Sequence
  targeting sequence with CTCN PAM
agagccagcuccaaagguac

SEQ ID NO: 15748 - RNA, 20 nt, Artificial Sequence
  targeting sequence with CTCN PAM
aaccccagggaaagaucucg

SEQ ID NO: 15749 - RNA, 20 nt, Artificial Sequence
  targeting sequence with CTCN PAM
ccaaccccagggaaagaucu

SEQ ID NO: 15750 - RNA, 20 nt, Artificial Sequence
  targeting sequence with CTCN PAM
ucuccaaccccagggaaaga

SEQ ID NO: 15751 - RNA, 20 nt, Artificial Sequence
  targeting sequence with CTCN PAM
ccccugcccacaagaacaau

SEQ ID NO: 15752 - RNA, 20 nt, Artificial Sequence
  targeting sequence with CTCN PAM
gacaaggaagcaggcaguuu

SEQ ID NO: 15753 - RNA, 20 nt, Artificial Sequence
  targeting sequence with CTCN PAM
uuucucagacaaggaagcag

SEQ ID NO: 15754 - RNA, 20 nt, Artificial Sequence
  targeting sequence with CTCN PAM
ucaagcuuaaaaaauacgua

SEQ ID NO: 15755 - RNA, 20 nt, Artificial Sequence
  targeting sequence with CTCN PAM
ccgcccauuuuggggaccac

SEQ ID NO: 15756 - RNA, 20 nt, Artificial Sequence
  targeting sequence with CTCN PAM
acagugguccccaaaauggg

SEQ ID NO: 15757 - RNA, 20 nt, Artificial Sequence
  targeting sequence with CTCN PAM
ggcccggaaggaccauggga

SEQ ID NO: 15758 - RNA, 20 nt, Artificial Sequence
  targeting sequence with CTCN PAM
aggucacacaaccaggaagg

SEQ ID NO: 15759 - RNA, 20 nt, Artificial Sequence
  targeting sequence with CTCN PAM
gcacagcugaagcaauucuc

SEQ ID NO: 15760 - RNA, 20 nt, Artificial Sequence
  targeting sequence with CTCN PAM
aguugcugcgucugucauac

SEQ ID NO: 15761 - RNA, 20 nt, Artificial Sequence
  targeting sequence with CTCN PAM
aacaagcccgucaggaaugu

SEQ ID NO: 15762 - RNA, 20 nt, Artificial Sequence
  targeting sequence with CTCN PAM
ucucuaacaagcccgucagg

SEQ ID NO: 15763 - RNA, 20 nt, Artificial Sequence
  targeting sequence with CTCN PAM
uaaccucaucucuaacaagc

SEQ ID NO: 15764 - RNA, 20 nt, Artificial Sequence
  targeting sequence with CTCN PAM
aggaagauuucacagcugcu

SEQ ID NO: 15765 - RNA, 20 nt, Artificial Sequence
  targeting sequence with CTCN PAM
gagcuuaaggaauggcagcu

SEQ ID NO: 15766 - RNA, 20 nt, Artificial Sequence
  targeting sequence with CTCN PAM
gaggacaccccgggaccucc

SEQ ID NO: 15767 - RNA, 20 nt, Artificial Sequence
  targeting sequence with CTCN PAM
gggccgggcccacagcaugc

SEQ ID NO: 15768 - RNA, 20 nt, Artificial Sequence
  targeting sequence with CTCN PAM
uuucaucuccuggccucuga

SEQ ID NO: 15769 - RNA, 20 nt, Artificial Sequence
  targeting sequence with CTCN PAM
uggccucugacugccuucuc

SEQ ID NO: 15770 - RNA, 20 nt, Artificial Sequence
  targeting sequence with CTCN PAM
gacugccuucucagaagcua

SEQ ID NO: 15771 - RNA, 20 nt, Artificial Sequence
  targeting sequence with CTCN PAM
gaagcuagucaggugucugc

SEQ ID NO: 15772 - RNA, 20 nt, Artificial Sequence
  targeting sequence with CTCN PAM
agagugcagcugagacagga

SEQ ID NO: 15773 - RNA, 20 nt, Artificial Sequence
  targeting sequence with CTCN PAM
ugagguuugggcagacaccu

SEQ ID NO: 15774 - RNA, 20 nt, Artificial Sequence
  targeting sequence with CTCN PAM
gcugcacucuugagguuugg

SEQ ID NO: 15775 - RNA, 20 nt, Artificial Sequence
  targeting sequence with CTCN PAM
ugucucagcugcacucuuga

SEQ ID NO: 15776 - RNA, 20 nt, Artificial Sequence
  targeting sequence with CTCN PAM
cucccuccucucucucacaa

SEQ ID NO: 15777 - RNA, 20 nt, Artificial Sequence
  targeting sequence with CTCN PAM
cuccucucucucacaaacug

SEQ ID NO: 15778 - RNA, 20 nt, Artificial Sequence
  targeting sequence with CTCN PAM
ucucucucacaaacugguaa

SEQ ID NO: 15779 - RNA, 20 nt, Artificial Sequence
  targeting sequence with CTCN PAM
cucucacaaacugguaaaga

SEQ ID NO: 15780 - RNA, 20 nt, Artificial Sequence
  targeting sequence with CTCN PAM
cucacaaacugguaaagaaa

SEQ ID NO: 15781 - RNA, 20 nt, Artificial Sequence
  targeting sequence with CTCN PAM
cacaaacugguaaagaaacu

SEQ ID NO: 15782 - RNA, 20 nt, Artificial Sequence
  targeting sequence with CTCN PAM
caaacugguaaagaaacugc

SEQ ID NO: 15783 - RNA, 20 nt, Artificial Sequence
  targeting sequence with CTCN PAM
cgcuuggcuaucucaggaca

SEQ ID NO: 15784 - RNA, 20 nt, Artificial Sequence
  targeting sequence with CTCN PAM
ggacaaaggcuggagcccac

SEQ ID NO: 15785 - RNA, 20 nt, Artificial Sequence
  targeting sequence with CTCN PAM
agccuuuguccugagauagc

SEQ ID NO: 15786 - RNA, 20 nt, Artificial Sequence
  targeting sequence with CTCN PAM
ggaaucuucuuuauaauaaa

SEQ ID NO: 15787 - RNA, 20 nt, Artificial Sequence
  targeting sequence with CTCN PAM
agcccccaugggcucugagc

SEQ ID NO: 15788 - RNA, 20 nt, Artificial Sequence
  targeting sequence with CTCN PAM
gagccagucccaacacuggc

SEQ ID NO: 15789 - RNA, 20 nt, Artificial Sequence
  targeting sequence with CTCN PAM
gagcccaugggggcuggagg

SEQ ID NO: 15790 - RNA, 20 nt, Artificial Sequence
  targeting sequence with CTCN PAM
gccaguguugggacuggcuc

SEQ ID NO: 15791 - RNA, 20 nt, Artificial Sequence
  targeting sequence with CTCN PAM
cagccaacucagccaguguu

SEQ ID NO: 15792 - RNA, 20 nt, Artificial Sequence
  targeting sequence with CTCN PAM
guggccgaugggccaugcgg

SEQ ID NO: 15793 - RNA, 20 nt, Artificial Sequence
  targeting sequence with CTCN PAM
guuccugccagaaacgaccc

SEQ ID NO: 15794 - RNA, 20 nt, Artificial Sequence
  targeting sequence with CTCN PAM
ggcgccaggggcgcucugcc

SEQ ID NO: 15795 - RNA, 20 nt, Artificial Sequence
  targeting sequence with CTCN PAM
gccaggucugcccgcucucu

SEQ ID NO: 15796 - RNA, 20 nt, Artificial Sequence
  targeting sequence with CTCN PAM
cuggaacagucauuuccagu

SEQ ID NO: 15797 - RNA, 20 nt, Artificial Sequence
  targeting sequence with CTCN PAM
ggaacagucauuuccagugu

SEQ ID NO: 15798 - RNA, 20 nt, Artificial Sequence
  targeting sequence with CTCN PAM
ccaugcaacacuggaaauga

SEQ ID NO: 15799 - RNA, 20 nt, Artificial Sequence
  targeting sequence with CTCN PAM
cgggaccccuccccgggucc

SEQ ID NO: 15800 - RNA, 20 nt, Artificial Sequence
  targeting sequence with CTCN PAM
ggaccccuccccggguccuc

SEQ ID NO: 15801 - RNA, 20 nt, Artificial Sequence
  targeting sequence with CTCN PAM
ccggguccucugcgcaagcg

SEQ ID NO: 15802 - RNA, 20 nt, Artificial Sequence
  targeting sequence with CTCN PAM
gcgcaagcggcagcuauuca

SEQ ID NO: 15803 - RNA, 20 nt, Artificial Sequence
  targeting sequence with CTCN PAM
gugcaucuuaaccccucucc

SEQ ID NO: 15804 - RNA, 20 nt, Artificial Sequence
  targeting sequence with CTCN PAM
ccuuuuccuggagacggggc

SEQ ID NO: 15805 - RNA, 20 nt, Artificial Sequence
  targeting sequence with CTCN PAM
uuuuccuggagacggggcuc

SEQ ID NO: 15806 - RNA, 20 nt, Artificial Sequence
  targeting sequence with CTCN PAM
aggaaaaggagagggguuaa

SEQ ID NO: 15807 - RNA, 20 nt, Artificial Sequence
  targeting sequence with CTCN PAM
uugaacugaccuuugauugg

SEQ ID NO: 15808 - RNA, 20 nt, Artificial Sequence
  targeting sequence with CTCN PAM
cugcaccaguguggaugagg

SEQ ID NO: 15809 - RNA, 20 nt, Artificial Sequence
  targeting sequence with CTCN PAM
uccacacuggugcagggagc

SEQ ID NO: 15810 - RNA, 20 nt, Artificial Sequence
  targeting sequence with CTCN PAM
accucauccacacuggugca

SEQ ID NO: 15811 - RNA, 20 nt, Artificial Sequence
  targeting sequence with CTCN PAM
gggcuggcggccuccucucc

SEQ ID NO: 15812 - RNA, 20 nt, Artificial Sequence
  targeting sequence with CTCN PAM
ucucccccaguuugugcuug

SEQ ID NO: 15813 - RNA, 20 nt, Artificial Sequence
  targeting sequence with CTCN PAM
cccccaguuugugcuuggcc

SEQ ID NO: 15814 - RNA, 20 nt, Artificial Sequence
  targeting sequence with CTCN PAM
cccaguuugugcuuggccgc

SEQ ID NO: 15815 - RNA, 20 nt, Artificial Sequence
  targeting sequence with CTCN PAM
cagcagcagccugaccaacu

SEQ ID NO: 15816 - RNA, 20 nt, Artificial Sequence
  targeting sequence with CTCN PAM
ccaugugucucaggccucac

SEQ ID NO: 15817 - RNA, 20 nt, Artificial Sequence
  targeting sequence with CTCN PAM
augugucucaggccucacug

SEQ ID NO: 15818 - RNA, 20 nt, Artificial Sequence
  targeting sequence with CTCN PAM
ggccucacuguagcacucgu

SEQ ID NO: 15819 - RNA, 20 nt, Artificial Sequence
  targeting sequence with CTCN PAM
cuguagcacucguagauguu

SEQ ID NO: 15820 - RNA, 20 nt, Artificial Sequence
  targeting sequence with CTCN PAM
uagauguuguccuccaucaa

SEQ ID NO: 15821 - RNA, 20 nt, Artificial Sequence
  targeting sequence with CTCN PAM
aucaaagccaccaccugcuc

SEQ ID NO: 15822 - RNA, 20 nt, Artificial Sequence
  targeting sequence with CTCN PAM
aacuugugcugcaguugugu

SEQ ID NO: 15823 - RNA, 20 nt, Artificial Sequence
  targeting sequence with CTCN PAM
gggccgugggguuggccucc

SEQ ID NO: 15824 - RNA, 20 nt, Artificial Sequence
  targeting sequence with CTCN PAM
agcgcggccaugaucugagg

SEQ ID NO: 15825 - RNA, 20 nt, Artificial Sequence
  targeting sequence with CTCN PAM
gaucauggccgcgcuggagg

SEQ ID NO: 15826 - RNA, 20 nt, Artificial Sequence
  targeting sequence with CTCN PAM
ccucagaucauggccgcgcu

SEQ ID NO: 15827 - RNA, 20 nt, Artificial Sequence
  targeting sequence with CTCN PAM
gcugcuccccucagaucaug

SEQ ID NO: 15828 - RNA, 20 nt, Artificial Sequence
  targeting sequence with CTCN PAM
guucgugggagagaacacac

SEQ ID NO: 15829 - RNA, 20 nt, Artificial Sequence
  targeting sequence with CTCN PAM
cacgaacugaggcagggcua

SEQ ID NO: 15830 - RNA, 20 nt, Artificial Sequence
  targeting sequence with CTCN PAM
cccacgaacugaggcagggc

SEQ ID NO: 15831 - RNA, 20 nt, Artificial Sequence
  targeting sequence with CTCN PAM
ugguagacguucaggggugu

SEQ ID NO: 15832 - RNA, 20 nt, Artificial Sequence
  targeting sequence with CTCN PAM
gggugcuugccccuaaugga

SEQ ID NO: 15833 - RNA, 20 nt, Artificial Sequence
  targeting sequence with CTCN PAM
aggacacacaucucagggug

SEQ ID NO: 15834 - RNA, 20 nt, Artificial Sequence
  targeting sequence with CTCN PAM
ccuaccccgagggcaggugc

SEQ ID NO: 15835 - RNA, 20 nt, Artificial Sequence
  targeting sequence with CTCN PAM
ggguaggugagcuuccuacu

SEQ ID NO: 15836 - RNA, 20 nt, Artificial Sequence
  targeting sequence with CTCN PAM
cccuggggcacucaccugcg

SEQ ID NO: 15837 - RNA, 20 nt, Artificial Sequence
  targeting sequence with CTCN PAM
ccugcggccgauaccucuug

SEQ ID NO: 15838 - RNA, 20 nt, Artificial Sequence
  targeting sequence with CTCN PAM
uggcguacuuauaaaucucu

SEQ ID NO: 15839 - RNA, 20 nt, Artificial Sequence
  targeting sequence with CTCN PAM
gccauggccacauugguguu

SEQ ID NO: 15840 - RNA, 20 nt, Artificial Sequence
  targeting sequence with CTCN PAM
uucugguauuucuauaagga

SEQ ID NO: 15841 - RNA, 20 nt, Artificial Sequence
  targeting sequence with CTCN PAM
uuauagaaauaccagaauga

SEQ ID NO: 15842 - RNA, 20 nt, Artificial Sequence
  targeting sequence with CTCN PAM
ccauccugccuccuuauaga

SEQ ID NO: 15843 - RNA, 20 nt, Artificial Sequence
  targeting sequence with CTCN PAM
uccccauccugccuccuuau

SEQ ID NO: 15844 - RNA, 20 nt, Artificial Sequence
  targeting sequence with CTCN PAM
gcuuugaccgcugggcuaac

SEQ ID NO: 15845 - RNA, 20 nt, Artificial Sequence
  targeting sequence with CTCN PAM
ccacggcccccacagaacag

SEQ ID NO: 15846 - RNA, 20 nt, Artificial Sequence
  targeting sequence with CTCN PAM
ucgcugaacuguucuguggg

SEQ ID NO: 15847 - RNA, 20 nt, Artificial Sequence
  targeting sequence with CTCN PAM
agucccauggacgaagacgg

SEQ ID NO: 15848 - RNA, 20 nt, Artificial Sequence
  targeting sequence with CTCN PAM
ucuccauccagagggugcuc

SEQ ID NO: 15849 - RNA, 20 nt, Artificial Sequence
  targeting sequence with CTCN PAM
ccauccagagggugcucucc

SEQ ID NO: 15850 - RNA, 20 nt, Artificial Sequence
  targeting sequence with CTCN PAM
auccagagggugcucuccug

SEQ ID NO: 15851 - RNA, 20 nt, Artificial Sequence
  targeting sequence with CTCN PAM
ggauggagaggagauuggac

SEQ ID NO: 15852 - RNA, 20 nt, Artificial Sequence
  targeting sequence with CTCN PAM
ccugcccccgcuccucaaac

SEQ ID NO: 15853 - RNA, 20 nt, Artificial Sequence
  targeting sequence with CTCN PAM
ugcccccgcuccucaaacuc

SEQ ID NO: 15854 - RNA, 20 nt, Artificial Sequence
  targeting sequence with CTCN PAM
ucaaacucugggaaaaugca

SEQ ID NO: 15855 - RNA, 20 nt, Artificial Sequence
  targeting sequence with CTCN PAM
aacucugggaaaaugcauga

SEQ ID NO: 15856 - RNA, 20 nt, Artificial Sequence
  targeting sequence with CTCN PAM
gggaaaaugcaugacgaauu

SEQ ID NO: 15857 - RNA, 20 nt, Artificial Sequence
  targeting sequence with CTCN PAM
ugcuggccugcaaauucguc

SEQ ID NO: 15858 - RNA, 20 nt, Artificial Sequence
  targeting sequence with CTCN PAM
gcgcucccugcccuuacucc

SEQ ID NO: 15859 - RNA, 20 nt, Artificial Sequence
  targeting sequence with CTCN PAM
cugcccuuacuccaguggag

SEQ ID NO: 15860 - RNA, 20 nt, Artificial Sequence
  targeting sequence with CTCN PAM
aguggaggcauugaggccca

SEQ ID NO: 15861 - RNA, 20 nt, Artificial Sequence
  targeting sequence with CTCN PAM
acuggaguaagggcagggag

SEQ ID NO: 15862 - RNA, 20 nt, Artificial Sequence
  targeting sequence with CTCN PAM
augccuccacuggaguaagg

SEQ ID NO: 15863 - RNA, 20 nt, Artificial Sequence
  targeting sequence with CTCN PAM
gcucuucaggcccccauccc

SEQ ID NO: 15864 - RNA, 20 nt, Artificial Sequence
  targeting sequence with CTCN PAM
ucaggcccccaucccccgcc

SEQ ID NO: 15865 - RNA, 20 nt, Artificial Sequence
  targeting sequence with CTCN PAM
gcggcgggggaugggggccu

SEQ ID NO: 15866 - RNA, 20 nt, Artificial Sequence
  targeting sequence with CTCN PAM
acuccucggccagaugggca

SEQ ID NO: 15867 - RNA, 20 nt, Artificial Sequence
  targeting sequence with CTCN PAM
ucggccagaugggcauucau

SEQ ID NO: 15868 - RNA, 20 nt, Artificial Sequence
  targeting sequence with CTCN PAM
gccagaugggcauucaucuc

SEQ ID NO: 15869 - RNA, 20 nt, Artificial Sequence
  targeting sequence with CTCN PAM
ugcucgcugagcggcgucau

SEQ ID NO: 15870 - RNA, 20 nt, Artificial Sequence
  targeting sequence with CTCN PAM
cugagcggcgucauguccug

SEQ ID NO: 15871 - RNA, 20 nt, Artificial Sequence
  targeting sequence with CTCN PAM
gcgagcaagagaugaaugcc

SEQ ID NO: 15872 - RNA, 20 nt, Artificial Sequence
  targeting sequence with CTCN PAM
ggaaucuccuuggcguagag

SEQ ID NO: 15873 - RNA, 20 nt, Artificial Sequence
  targeting sequence with CTCN PAM
uuggcguagaggagcuuguu

SEQ ID NO: 15874 - RNA, 20 nt, Artificial Sequence
  targeting sequence with CTCN PAM
acgccaaggagauuccugag

SEQ ID NO: 15875 - RNA, 20 nt, Artificial Sequence
  targeting sequence with CTCN PAM
ucuacgccaaggagauuccu

SEQ ID NO: 15876 - RNA, 20 nt, Artificial Sequence
  targeting sequence with CTCN PAM
gcccaggauucgccaaccaa

SEQ ID NO: 15877 - RNA, 20 nt, Artificial Sequence
  targeting sequence with CTCN PAM
ucucugcccaggauucgcca

SEQ ID NO: 15878 - RNA, 20 nt, Artificial Sequence
  targeting sequence with CTCN PAM
cucuucucugcccaggauuc

SEQ ID NO: 15879 - RNA, 20 nt, Artificial Sequence
  targeting sequence with CTCN PAM
agcagccaucuaacacccuc

SEQ ID NO: 15880 - RNA, 20 nt, Artificial Sequence
  targeting sequence with CTCN PAM
uccagaaaacgaccagaucc

SEQ ID NO: 15881 - RNA, 20 nt, Artificial Sequence
  targeting sequence with CTCN PAM
ucccuccugccacauaagug

SEQ ID NO: 15882 - RNA, 20 nt, Artificial Sequence
  targeting sequence with CTCN PAM
ugccacauaagugaccuuag

SEQ ID NO: 15883 - RNA, 20 nt, Artificial Sequence
  targeting sequence with CTCN PAM
ggggccugcuaaggucacuu

SEQ ID NO: 15884 - RNA, 20 nt, Artificial Sequence
  targeting sequence with CTCN PAM
uugggccucgggggccugcu

SEQ ID NO: 15885 - RNA, 20 nt, Artificial Sequence
  targeting sequence with CTCN PAM
cccggucacugaacgucccc

SEQ ID NO: 15886 - RNA, 20 nt, Artificial Sequence
  targeting sequence with CTCN PAM
gccggccccagaccaggggc

SEQ ID NO: 15887 - RNA, 20 nt, Artificial Sequence
  targeting sequence with CTCN PAM
ucacugugcucugucugccc

SEQ ID NO: 15888 - RNA, 20 nt, Artificial Sequence
  targeting sequence with CTCN PAM
cugugcucugucugccccgc

SEQ ID NO: 15889 - RNA, 20 nt, Artificial Sequence
  targeting sequence with CTCN PAM
gucugccccgccuacuuucc

SEQ ID NO: 15890 - RNA, 20 nt, Artificial Sequence
  targeting sequence with CTCN PAM
ccacccacaucauuguccua

SEQ ID NO: 15891 - RNA, 20 nt, Artificial Sequence
  targeting sequence with CTCN PAM
ucacugcacgcagcccauuc

SEQ ID NO: 15892 - RNA, 20 nt, Artificial Sequence
  targeting sequence with CTCN PAM
gggugauaggucuugguggc

SEQ ID NO: 15893 - RNA, 20 nt, Artificial Sequence
  targeting sequence with CTCN PAM
ggcuuccaggaauccuagcc

SEQ ID NO: 15894 - RNA, 20 nt, Artificial Sequence
  targeting sequence with CTCN PAM
guggaauauuucccaccaca

SEQ ID NO: 15895 - RNA, 20 nt, Artificial Sequence
  targeting sequence with CTCN PAM
uaacgccugaaagaagugcc

SEQ ID NO: 15896 - RNA, 20 nt, Artificial Sequence
  targeting sequence with CTCN PAM
caguucuuugucagucacgg

SEQ ID NO: 15897 - RNA, 20 nt, Artificial Sequence
  targeting sequence with CTCN PAM
gaaggcagggugcccgugac

SEQ ID NO: 15898 - RNA, 20 nt, Artificial Sequence
  targeting sequence with CTCN PAM
cguacugccuccgaaggcag

SEQ ID NO: 15899 - RNA, 20 nt, Artificial Sequence
  targeting sequence with CTCN PAM
acuacuacucacguacugcc

SEQ ID NO: 15900 - RNA, 20 nt, Artificial Sequence
  targeting sequence with CTCN PAM
uucccgugguccgucucuga

SEQ ID NO: 15901 - RNA, 20 nt, Artificial Sequence
  targeting sequence with CTCN PAM
gaaaugcgugggcuaaaugc

SEQ ID NO: 15902 - RNA, 20 nt, Artificial Sequence
  targeting sequence with CTCN PAM
ucccugcucacagcaaccgg

SEQ ID NO: 15903 - RNA, 20 nt, Artificial Sequence
  targeting sequence with CTCN PAM
cagcaaccggcugcuuuccu

SEQ ID NO: 15904 - RNA, 20 nt, Artificial Sequence
  targeting sequence with CTCN PAM
cugucuuugccugcgccguu

SEQ ID NO: 15905 - RNA, 20 nt, Artificial Sequence
  targeting sequence with CTCN PAM
cugccuggaaggccauccuc

SEQ ID NO: 15906 - RNA, 20 nt, Artificial Sequence
  targeting sequence with CTCN PAM
gccuggaaggccauccucuu

SEQ ID NO: 15907 - RNA, 20 nt, Artificial Sequence
  targeting sequence with CTCN PAM
uucaucuucaaccucuaaag

SEQ ID NO: 15908 - RNA, 20 nt, Artificial Sequence
  targeting sequence with CTCN PAM
aaagccagacacagccuugu

SEQ ID NO: 15909 - RNA, 20 nt, Artificial Sequence
  targeting sequence with CTCN PAM
gagcuccuagccacccauca

SEQ ID NO: 15910 - RNA, 20 nt, Artificial Sequence
  targeting sequence with CTCN PAM
gagauucaugcgguguguug

SEQ ID NO: 15911 - RNA, 20 nt, Artificial Sequence
  targeting sequence with CTCN PAM
uagccacccaucaccccucu

SEQ ID NO: 15912 - RNA, 20 nt, Artificial Sequence
  targeting sequence with CTCN PAM
gcccaccccuucacugaaug

SEQ ID NO: 15913 - RNA, 20 nt, Artificial Sequence
  targeting sequence with CTCN PAM
cuugaauggcuuuugacuuu

SEQ ID NO: 15914 - RNA, 20 nt, Artificial Sequence
  targeting sequence with CTCN PAM
gggcaguagccccugaaagu

SEQ ID NO: 15915 - RNA, 20 nt, Artificial Sequence
  targeting sequence with CTCN PAM
uacuggcuuucccacaccgg

SEQ ID NO: 15916 - RNA, 20 nt, Artificial Sequence
  targeting sequence with CTCN PAM
ggccuguguucaaagccagu

SEQ ID NO: 15917 - RNA, 20 nt, Artificial Sequence
  targeting sequence with CTCN PAM
guaucgcugcagaccaacug

SEQ ID NO: 15918 - RNA, 20 nt, Artificial Sequence
  targeting sequence with CTCN PAM
cugucugaaugagucacuca

SEQ ID NO: 15919 - RNA, 20 nt, Artificial Sequence
  targeting sequence with CTCN PAM
uucagacagggagacaccua

SEQ ID NO: 15920 - RNA, 20 nt, Artificial Sequence
  targeting sequence with CTCN PAM
ucccacauccccuagaccug

SEQ ID NO: 15921 - RNA, 20 nt, Artificial Sequence
  targeting sequence with CTCN PAM
ggucuaggggaugugggaug

SEQ ID NO: 15922 - RNA, 20 nt, Artificial Sequence
  targeting sequence with CTCN PAM
caggaagaucucugagcuca

SEQ ID NO: 15923 - RNA, 20 nt, Artificial Sequence
  targeting sequence with CTCN PAM
gagcucagccucagagaguc

SEQ ID NO: 15924 - RNA, 20 nt, Artificial Sequence
  targeting sequence with CTCN PAM
gagaucuuccugggagggga

SEQ ID NO: 15925 - RNA, 20 nt, Artificial Sequence
  targeting sequence with CTCN PAM
gccucagagagucgaggagg

SEQ ID NO: 15926 - RNA, 20 nt, Artificial Sequence
  targeting sequence with CTCN PAM
gagagucgaggaggcuaccc

SEQ ID NO: 15927 - RNA, 20 nt, Artificial Sequence
  targeting sequence with CTCN PAM
gaggcugagcucagagaucu

SEQ ID NO: 15928 - RNA, 20 nt, Artificial Sequence
  targeting sequence with CTCN PAM
cugaggcugagcucagagau

SEQ ID NO: 15929 - RNA, 20 nt, Artificial Sequence
  targeting sequence with CTCN PAM
acucucugaggcugagcuca

SEQ ID NO: 15930 - RNA, 20 nt, Artificial Sequence
  targeting sequence with CTCN PAM
ucgacucucugaggcugagc

SEQ ID NO: 15931 - RNA, 20 nt, Artificial Sequence
  targeting sequence with CTCN PAM
ggcccugugcaugggccugg

SEQ ID NO: 15932 - RNA, 20 nt, Artificial Sequence
  targeting sequence with CTCN PAM
gaccugcagcugggcaaggu

SEQ ID NO: 15933 - RNA, 20 nt, Artificial Sequence
  targeting sequence with CTCN PAM
aucucugaccugcagcuggg

SEQ ID NO: 15934 - RNA, 20 nt, Artificial Sequence
  targeting sequence with CTCN PAM
gguucugggugaacauccug

SEQ ID NO: 15935 - RNA, 20 nt, Artificial Sequence
  targeting sequence with CTCN PAM
ccgguucugggugaacaucc

SEQ ID NO: 15936 - RNA, 20 nt, Artificial Sequence
  targeting sequence with CTCN PAM
cugucuuugucacccuaccc

SEQ ID NO: 15937 - RNA, 20 nt, Artificial Sequence
  targeting sequence with CTCN PAM
acugcuuccuaccccacccu

SEQ ID NO: 15938 - RNA, 20 nt, Artificial Sequence
  targeting sequence with CTCN PAM
acaacugucccucgacugcu

SEQ ID NO: 15939 - RNA, 20 nt, Artificial Sequence
  targeting sequence with CTCN PAM
uccacaacugucccucgacu

SEQ ID NO: 15940 - RNA, 20 nt, Artificial Sequence
  targeting sequence with CTCN PAM
ccuccacaacugucccucga

SEQ ID NO: 15941 - RNA, 20 nt, Artificial Sequence
  targeting sequence with CTCN PAM
cuccuccacaacugucccuc

SEQ ID NO: 15942 - RNA, 20 nt, Artificial Sequence
  targeting sequence with CTCN PAM
agggccugagguuggagccu

SEQ ID NO: 15943 - RNA, 20 nt, Artificial Sequence
  targeting sequence with CTCN PAM
ggcccuugagggacaaagcc

SEQ ID NO: 15944 - RNA, 20 nt, Artificial Sequence
  targeting sequence with CTCN PAM
aaccucaggcccuugaggga

SEQ ID NO: 15945 - RNA, 20 nt, Artificial Sequence
  targeting sequence with CTCN PAM
gccccacugcaccccagcug

SEQ ID NO: 15946 - RNA, 20 nt, Artificial Sequence
  targeting sequence with CTCN PAM
cagccccacugcaccccagc

SEQ ID NO: 15947 - RNA, 20 nt, Artificial Sequence
  targeting sequence with CTCN PAM
agcaggaaaccgggcucuca

SEQ ID NO: 15948 - RNA, 20 nt, Artificial Sequence
  targeting sequence with CTCN PAM
ugccuugcuccagcaggaaa

SEQ ID NO: 15949 - RNA, 20 nt, Artificial Sequence
  targeting sequence with CTCN PAM
ugagccuccagucagguccu

SEQ ID NO: 15950 - RNA, 20 nt, Artificial Sequence
  targeting sequence with CTCN PAM
ggaggggguugggggguaca

SEQ ID NO: 15951 - RNA, 20 nt, Artificial Sequence
  targeting sequence with CTCN PAM
agucagguccugguucucau

SEQ ID NO: 15952 - RNA, 20 nt, Artificial Sequence
  targeting sequence with CTCN PAM
uuagaaccaggugccggccc

SEQ ID NO: 15953 - RNA, 20 nt, Artificial Sequence
  targeting sequence with CTCN PAM
ucccugaacccuugcaggca

SEQ ID NO: 15954 - RNA, 20 nt, Artificial Sequence
  targeting sequence with CTCN PAM
cugaacccuugcaggcagca

SEQ ID NO: 15955 - RNA, 20 nt, Artificial Sequence
  targeting sequence with CTCN PAM
gcuaaugucggacuuccugc

SEQ ID NO: 15956 - RNA, 20 nt, Artificial Sequence
  targeting sequence with CTCN PAM
aggcccugccccccacagcc

SEQ ID NO: 15957 - RNA, 20 nt, Artificial Sequence
  targeting sequence with CTCN PAM
ggccuuguccucaagaggcc

SEQ ID NO: 15958 - RNA, 20 nt, Artificial Sequence
  targeting sequence with CTCN PAM
agaggccagagagggugagc

SEQ ID NO: 15959 - RNA, 20 nt, Artificial Sequence
  targeting sequence with CTCN PAM
ugaggacaaggccagagcuc

SEQ ID NO: 15960 - RNA, 20 nt, Artificial Sequence
  targeting sequence with CTCN PAM
ggccucuugaggacaaggcc

SEQ ID NO: 15961 - RNA, 20 nt, Artificial Sequence
  targeting sequence with CTCN PAM
cuggccucuugaggacaagg

SEQ ID NO: 15962 - RNA, 20 nt, Artificial Sequence
  targeting sequence with CTCN PAM
cccucucuggccucuugagg

SEQ ID NO: 15963 - RNA, 20 nt, Artificial Sequence
  targeting sequence with CTCN PAM
ggccacccagugacucagca

SEQ ID NO: 15964 - RNA, 20 nt, Artificial Sequence
  targeting sequence with CTCN PAM
gcagccugggcauguguacc

SEQ ID NO: 15965 - RNA, 20 nt, Artificial Sequence
  targeting sequence with CTCN PAM
ggggguacacaugcccaggc

SEQ ID NO: 15966 - RNA, 20 nt, Artificial Sequence
  targeting sequence with CTCN PAM
aggaagcugcugcccugcac

SEQ ID NO: 15967 - RNA, 20 nt, Artificial Sequence
  targeting sequence with CTCN PAM
gugcagggcagcagcuuccu

SEQ ID NO: 15968 - RNA, 20 nt, Artificial Sequence
  targeting sequence with CTCN PAM
ggaagaauaccaccagccca

SEQ ID NO: 15969 - RNA, 20 nt, Artificial Sequence
  targeting sequence with CTCN PAM
uagcuugucggggucaugca

SEQ ID NO: 15970 - RNA, 20 nt, Artificial Sequence
  targeting sequence with CTCN PAM
aaggagggcuaccaacuggg

SEQ ID NO: 15971 - RNA, 20 nt, Artificial Sequence
  targeting sequence with CTCN PAM
uuugaggcaccucuuagcuu

SEQ ID NO: 15972 - RNA, 20 nt, Artificial Sequence
  targeting sequence with CTCN PAM
uacccaguugguagcccucc

SEQ ID NO: 15973 - RNA, 20 nt, Artificial Sequence
  targeting sequence with CTCN PAM
gcccuacauuaucugaaucu

SEQ ID NO: 15974 - RNA, 20 nt, Artificial Sequence
  targeting sequence with CTCN PAM
acugucccaggcuguguggu

SEQ ID NO: 15975 - RNA, 20 nt, Artificial Sequence
  targeting sequence with CTCN PAM
agaccacacagccugggaca

SEQ ID NO: 15976 - RNA, 20 nt, Artificial Sequence
  targeting sequence with CTCN PAM
gagccucagugugcuuaucu

SEQ ID NO: 15977 - RNA, 20 nt, Artificial Sequence
  targeting sequence with CTCN PAM
gagaagcagcaccugcucaa

SEQ ID NO: 15978 - RNA, 20 nt, Artificial Sequence
  targeting sequence with CTCN PAM
gugugcuuaucugugaagug

SEQ ID NO: 15979 - RNA, 20 nt, Artificial Sequence
  targeting sequence with CTCN PAM
acuucacagauaagcacacu

SEQ ID NO: 15980 - RNA, 20 nt, Artificial Sequence
  targeting sequence with CTCN PAM
ggugggcaccaucagcucca

SEQ ID NO: 15981 - RNA, 20 nt, Artificial Sequence
  targeting sequence with CTCN PAM
caggugggcaccaucagcuc

SEQ ID NO: 15982 - RNA, 20 nt, Artificial Sequence
  targeting sequence with CTCN PAM
cgcaccccucucaggugggc

SEQ ID NO: 15983 - RNA, 20 nt, Artificial Sequence
  targeting sequence with CTCN PAM
ucuaguuaauucccaccauu

SEQ ID NO: 15984 - RNA, 20 nt, Artificial Sequence
  targeting sequence with CTCN PAM
acuguaaaaugcgacccaug

SEQ ID NO: 15985 - RNA, 20 nt, Artificial Sequence
  targeting sequence with CTCN PAM
gugcuucaguuuccccucca

SEQ ID NO: 15986 - RNA, 20 nt, Artificial Sequence
  targeting sequence with CTCN PAM
cugugcuucaguuuccccuc

SEQ ID NO: 15987 - RNA, 20 nt, Artificial Sequence
  targeting sequence with CTCN PAM
uccgagaacacacagcuggg

SEQ ID NO: 15988 - RNA, 20 nt, Artificial Sequence
  targeting sequence with CTCN PAM
gaugagugacuuagccucuc

SEQ ID NO: 15989 - RNA, 20 nt, Artificial Sequence
  targeting sequence with CTCN PAM
gccauuucccagcugugugu

SEQ ID NO: 15990 - RNA, 20 nt, Artificial Sequence
  targeting sequence with CTCN PAM
ucugccauuucccagcugug

SEQ ID NO: 15991 - RNA, 20 nt, Artificial Sequence
  targeting sequence with CTCN PAM
ccugcuuggggucaagcccu

SEQ ID NO: 15992 - RNA, 20 nt, Artificial Sequence
  targeting sequence with CTCN PAM
gaacccccugccacaggggc

SEQ ID NO: 15993 - RNA, 20 nt, Artificial Sequence
  targeting sequence with CTCN PAM
gaccccgacacccuacacau

SEQ ID NO: 15994 - RNA, 20 nt, Artificial Sequence
  targeting sequence with CTCN PAM
ucucagccugcuccuccagg

SEQ ID NO: 15995 - RNA, 20 nt, Artificial Sequence
  targeting sequence with CTCN PAM
gccugcuccuccaggaaguc

SEQ ID NO: 15996 - RNA, 20 nt, Artificial Sequence
  targeting sequence with CTCN PAM
uccaggaagucgaaaaagua

SEQ ID NO: 15997 - RNA, 20 nt, Artificial Sequence
  targeting sequence with CTCN PAM
aggaagucgaaaaaguacuu

SEQ ID NO: 15998 - RNA, 20 nt, Artificial Sequence
  targeting sequence with CTCN PAM
gaauggccuugaacagguca

SEQ ID NO: 15999 - RNA, 20 nt, Artificial Sequence
  targeting sequence with CTCN PAM
cccgcagggcacguugcaga

SEQ ID NO: 16000 - RNA, 20 nt, Artificial Sequence
  targeting sequence with CTCN PAM
gcacguggcccggggcugac

SEQ ID NO: 16001 - RNA, 20 nt, Artificial Sequence
  targeting sequence with CTCN PAM
gcggagcuugaaaugccagg

SEQ ID NO: 16002 - RNA, 20 nt, Artificial Sequence
  targeting sequence with CTCN PAM
gcagagccaccaagggugcc

SEQ ID NO: 16003 - RNA, 20 nt, Artificial Sequence
  targeting sequence with CTCN PAM
uucagcagccuggcauuuca

SEQ ID NO: 16004 - RNA, 20 nt, Artificial Sequence
  targeting sequence with CTCN PAM
gugaccagccugaugccaug

SEQ ID NO: 16005 - RNA, 20 nt, Artificial Sequence
  targeting sequence with CTCN PAM
cuggcucacuugccucccag

SEQ ID NO: 16006 - RNA, 20 nt, Artificial Sequence
  targeting sequence with CTCN PAM
ggcucacuugccucccagag

SEQ ID NO: 16007 - RNA, 20 nt, Artificial Sequence
  targeting sequence with CTCN PAM
cuugccucccagaggcguug

SEQ ID NO: 16008 - RNA, 20 nt, Artificial Sequence
  targeting sequence with CTCN PAM
cagaggcguugaaaggacua

SEQ ID NO: 16009 - RNA, 20 nt, Artificial Sequence
  targeting sequence with CTCN PAM
gggaggcaagugagccagag

SEQ ID NO: 16010 - RNA, 20 nt, Artificial Sequence
  targeting sequence with CTCN PAM
auuaguccuuucaacgccuc

SEQ ID NO: 16011 - RNA, 20 nt, Artificial Sequence
  targeting sequence with CTCN PAM
augugccagugccucgauua

SEQ ID NO: 16012 - RNA, 20 nt, Artificial Sequence
  targeting sequence with CTCN PAM
acuccaugugccagugccuc

SEQ ID NO: 16013 - RNA, 20 nt, Artificial Sequence
  targeting sequence with CTCN PAM
ggcacuuccaguucucgacu

SEQ ID NO: 16014 - RNA, 20 nt, Artificial Sequence
  targeting sequence with CTCN PAM
guggcagcgccggcacccca

SEQ ID NO: 16015 - RNA, 20 nt, Artificial Sequence
  targeting sequence with CTCN PAM
gggccucugcuguacccugu

SEQ ID NO: 16016 - RNA, 20 nt, Artificial Sequence
  targeting sequence with CTCN PAM
gcuguacccuguuacguggg

SEQ ID NO: 16017 - RNA, 20 nt, Artificial Sequence
  targeting sequence with CTCN PAM
gucaggcauuuuuccuggcu

SEQ ID NO: 16018 - RNA, 20 nt, Artificial Sequence
  targeting sequence with CTCN PAM
cagccaggaaaaaugccuga

SEQ ID NO: 16019 - RNA, 20 nt, Artificial Sequence
  targeting sequence with CTCN PAM
ucaagugggacccuaagccu

SEQ ID NO: 16020 - RNA, 20 nt, Artificial Sequence
  targeting sequence with CTCN PAM
agugggacccuaagccuuca

SEQ ID NO: 16021 - RNA, 20 nt, Artificial Sequence
  targeting sequence with CTCN PAM
ugccccuccagccccacagg

SEQ ID NO: 16022 - RNA, 20 nt, Artificial Sequence
  targeting sequence with CTCN PAM
agccccacaggggaaacagg

SEQ ID NO: 16023 - RNA, 20 nt, Artificial Sequence
  targeting sequence with CTCN PAM
caccccucucccagccgcgg

SEQ ID NO: 16024 - RNA, 20 nt, Artificial Sequence
  targeting sequence with CTCN PAM
cccagccgcgggugcacagc

SEQ ID NO: 16025 - RNA, 20 nt, Artificial Sequence
  targeting sequence with CTCN PAM
cagccgcgggugcacagcug

SEQ ID NO: 16026 - RNA, 20 nt, Artificial Sequence
  targeting sequence with CTCN PAM
gggccagcugugcacccgcg

SEQ ID NO: 16027 - RNA, 20 nt, Artificial Sequence
  targeting sequence with CTCN PAM
ggagcuggggcuggagccuu

SEQ ID NO: 16028 - RNA, 20 nt, Artificial Sequence
  targeting sequence with CTCN PAM
agagggucauugcucagggc

SEQ ID NO: 16029 - RNA, 20 nt, Artificial Sequence
  targeting sequence with CTCN PAM
agccccagcuccagaggguc

SEQ ID NO: 16030 - RNA, 20 nt, Artificial Sequence
  targeting sequence with CTCN PAM
gugcaguggguacaaggcuc

SEQ ID NO: 16031 - RNA, 20 nt, Artificial Sequence
  targeting sequence with CTCN PAM
ccucugugcaguggguacaa

SEQ ID NO: 16032 - RNA, 20 nt, Artificial Sequence
  targeting sequence with CTCN PAM
gucuccccucugugcagugg

SEQ ID NO: 16033 - RNA, 20 nt, Artificial Sequence
  targeting sequence with CTCN PAM
ccuugguggagagcaggcgg

SEQ ID NO: 16034 - RNA, 20 nt, Artificial Sequence
  targeting sequence with CTCN PAM
accaaggugaguccggccuc

SEQ ID NO: 16035 - RNA, 20 nt, Artificial Sequence
  targeting sequence with CTCN PAM
ccaccaaggugaguccggcc

SEQ ID NO: 16036 - RNA, 20 nt, Artificial Sequence
  targeting sequence with CTCN PAM
cggaaaucuaccugacccgc

SEQ ID NO: 16037 - RNA, 20 nt, Artificial Sequence
  targeting sequence with CTCN PAM
gccggugagacuucuugggc

SEQ ID NO: 16038 - RNA, 20 nt, Artificial Sequence
  targeting sequence with CTCN PAM
ccggcagagccaucgcaaga

SEQ ID NO: 16039 - RNA, 20 nt, Artificial Sequence
  targeting sequence with CTCN PAM
gccagcucguccguaggcag

SEQ ID NO: 16040 - RNA, 20 nt, Artificial Sequence
  targeting sequence with CTCN PAM
uccguaggcagcaccuggga

SEQ ID NO: 16041 - RNA, 20 nt, Artificial Sequence
  targeting sequence with CTCN PAM
caggugcugccuacggacga

SEQ ID NO: 16042 - RNA, 20 nt, Artificial Sequence
  targeting sequence with CTCN PAM
gccgccugugggaggucugg

SEQ ID NO: 16043 - RNA, 20 nt, Artificial Sequence
  targeting sequence with CTCN PAM
cacaggcggccgaggauggg

SEQ ID NO: 16044 - RNA, 20 nt, Artificial Sequence
  targeting sequence with CTCN PAM
gccaugcuucuuagcacaca

SEQ ID NO: 16045 - RNA, 20 nt, Artificial Sequence
  targeting sequence with CTCN PAM
ugauucugggccccaucccu

SEQ ID NO: 16046 - RNA, 20 nt, Artificial Sequence
  targeting sequence with CTCN PAM
cccaccccccagccuuucgc

SEQ ID NO: 16047 - RNA, 20 nt, Artificial Sequence
  targeting sequence with CTCN PAM
cagcccugcgaaaggcuggg

SEQ ID NO: 16048 - RNA, 20 nt, Artificial Sequence
  targeting sequence with CTCN PAM
ugggaaaagugcucccagcc

SEQ ID NO: 16049 - RNA, 20 nt, Artificial Sequence
  targeting sequence with CTCN PAM
guggguguggccuuggcuuu

SEQ ID NO: 16050 - RNA, 20 nt, Artificial Sequence
  targeting sequence with CTCN PAM
gccccgggggauccagcccc

SEQ ID NO: 16051 - RNA, 20 nt, Artificial Sequence
  targeting sequence with CTCN PAM
ccaaauggaaauacuucucu

SEQ ID NO: 16052 - RNA, 20 nt, Artificial Sequence
  targeting sequence with CTCN PAM
guguccaagucuuucacugu

SEQ ID NO: 16053 - RNA, 20 nt, Artificial Sequence
  targeting sequence with CTCN PAM
cagugaaagacuuggacaca

SEQ ID NO: 16054 - RNA, 20 nt, Artificial Sequence
  targeting sequence with CTCN PAM
cacagugaaagacuuggaca

SEQ ID NO: 16055 - RNA, 20 nt, Artificial Sequence
  targeting sequence with CTCN PAM
cguguuuauuuauuguguuu

SEQ ID NO: 16056 - RNA, 20 nt, Artificial Sequence
  targeting sequence with CTCN PAM
cccguguuuauuuauugugu

SEQ ID NO: 16057 - RNA, 20 nt, Artificial Sequence
  targeting sequence with CTCN PAM
ucucccguguuuauuuauug

SEQ ID NO: 16058 - RNA, 20 nt, Artificial Sequence
  targeting sequence with CTCN PAM
ccucucccguguuuauuuau

SEQ ID NO: 16059 - RNA, 20 nt, Artificial Sequence
  targeting sequence with CTCN PAM
ucuccucucccguguuuauu

SEQ ID NO: 16060 - RNA, 20 nt, Artificial Sequence
  targeting sequence with CTCN PAM
ccucuccucucccguguuua

SEQ ID NO: 16061 - RNA, 20 nt, Artificial Sequence
  targeting sequence with CTCN PAM
aucuuucugucuucauuucu

SEQ ID NO: 16062 - RNA, 20 nt, Artificial Sequence
  targeting sequence with CTCN PAM
cuccaucuuucugucuucau

SEQ ID NO: 16063 - RNA, 20 nt, Artificial Sequence
  targeting sequence with CTCN PAM
ccaucuuucugucuuguuuc

SEQ ID NO: 16064 - RNA, 20 nt, Artificial Sequence
  targeting sequence with CTCN PAM
ccccaucuuucugucuuguu

SEQ ID NO: 16065 - RNA, 20 nt, Artificial Sequence
  targeting sequence with CTCN PAM
gcuucuguuucucuccccau

SEQ ID NO: 16066 - RNA, 20 nt, Artificial Sequence
  targeting sequence with CTCN PAM
aucuuucugucucugcuucu

SEQ ID NO: 16067 - RNA, 20 nt, Artificial Sequence
  targeting sequence with CTCN PAM
ccaucuuucugucucugcuu

SEQ ID NO: 16068 - RNA, 20 nt, Artificial Sequence
  targeting sequence with CTCN PAM
cuccaucuuucugucucugc

SEQ ID NO: 16069 - RNA, 20 nt, Artificial Sequence
  targeting sequence with CTCN PAM
guuucuguuucucucuccau

SEQ ID NO: 16070 - RNA, 20 nt, Artificial Sequence
  targeting sequence with CTCN PAM
gucuccguuucuguuucucu

SEQ ID NO: 16071 - RNA, 20 nt, Artificial Sequence
  targeting sequence with CTCN PAM
uuggaucucugucuccguuu

SEQ ID NO: 16072 - RNA, 20 nt, Artificial Sequence
  targeting sequence with CTCN PAM
gacugucucuuuggaucucu

SEQ ID NO: 16073 - RNA, 20 nt, Artificial Sequence
  targeting sequence with CTCN PAM
cugacugucucuuuggaucu

SEQ ID NO: 16074 - RNA, 20 nt, Artificial Sequence
  targeting sequence with CTCN PAM
uucucucugacugucucuuu

SEQ ID NO: 16075 - RNA, 20 nt, Artificial Sequence
  targeting sequence with CTCN PAM
gucucauucucucugacugu

SEQ ID NO: 16076 - RNA, 20 nt, Artificial Sequence
  targeting sequence with CTCN PAM
gcaucucugucucauucucu

SEQ ID NO: 16077 - RNA, 20 nt, Artificial Sequence
  targeting sequence with CTCN PAM
ccaugcgucucugcaucucu

SEQ ID NO: 16078 - RNA, 20 nt, Artificial Sequence
  targeting sequence with CTCN PAM
gucuccccaugcgucucugc

SEQ ID NO: 16079 - RNA, 20 nt, Artificial Sequence
  targeting sequence with CTCN PAM
cagacucagucuccccaugc

SEQ ID NO: 16080 - RNA, 20 nt, Artificial Sequence
  targeting sequence with CTCN PAM
cccagacucagucuccccau

SEQ ID NO: 16081 - RNA, 20 nt, Artificial Sequence
  targeting sequence with CTCN PAM
gucucucccagacucagucu

SEQ ID NO: 16082 - RNA, 20 nt, Artificial Sequence
  targeting sequence with CTCN PAM
ccgucucucccagacucagu

SEQ ID NO: 16083 - RNA, 20 nt, Artificial Sequence
  targeting sequence with CTCN PAM
cuccgucucucccagacuca

SEQ ID NO: 16084 - RNA, 20 nt, Artificial Sequence
  targeting sequence with CTCN PAM
cucuccgucucucccagacu

SEQ ID NO: 16085 - RNA, 20 nt, Artificial Sequence
  targeting sequence with CTCN PAM
cuuaucucucucuccgucuc

SEQ ID NO: 16086 - RNA, 20 nt, Artificial Sequence
  targeting sequence with CTCN PAM
ggaucucacuuaucucucuc

SEQ ID NO: 16087 - RNA, 20 nt, Artificial Sequence
  targeting sequence with CTCN PAM
cugugugucucuggaucuca

SEQ ID NO: 16088 - RNA, 20 nt, Artificial Sequence
  targeting sequence with CTCN PAM
cucgcugugugucucuggau

SEQ ID NO: 16089 - RNA, 20 nt, Artificial Sequence
  targeting sequence with CTCN PAM
gucucgcucgcugugugucu

SEQ ID NO: 16090 - RNA, 20 nt, Artificial Sequence
  targeting sequence with CTCN PAM
cucugucucgcucgcugugu

SEQ ID NO: 16091 - RNA, 20 nt, Artificial Sequence
  targeting sequence with CTCN PAM
gccucacucugucucgcucg

SEQ ID NO: 16092 - RNA, 20 nt, Artificial Sequence
  targeting sequence with CTCN PAM
cugccucacucugucucgcu

SEQ ID NO: 16093 - RNA, 20 nt, Artificial Sequence
  targeting sequence with CTCN PAM
cucugccucacucugucucg

SEQ ID NO: 16094 - RNA, 20 nt, Artificial Sequence
  targeting sequence with CTCN PAM
aucccgggucacugugugug

SEQ ID NO: 16095 - RNA, 20 nt, Artificial Sequence
  targeting sequence with CTCN PAM
uuccaagucccuccaucccg

SEQ ID NO: 16096 - RNA, 20 nt, Artificial Sequence
  targeting sequence with CTCN PAM
accgcugucccuccuuccaa

SEQ ID NO: 16097 - RNA, 20 nt, Artificial Sequence
  targeting sequence with CTCN PAM
ccaccgcugucccuccuucc

SEQ ID NO: 16098 - RNA, 20 nt, Artificial Sequence
  targeting sequence with CTCN PAM
cccguggcugcaucuuccug

SEQ ID NO: 16099 - RNA, 20 nt, Artificial Sequence
  targeting sequence with CTCN PAM
ucccccguggcugcaucuuc

SEQ ID NO: 16100 - RNA, 20 nt, Artificial Sequence
  targeting sequence with CTCN PAM
gggguggggugggcaaaggc

SEQ ID NO: 16101 - RNA, 20 nt, Artificial Sequence
  targeting sequence with CTCN PAM
gggcucaggggugggguggg

SEQ ID NO: 16102 - RNA, 20 nt, Artificial Sequence
  targeting sequence with CTCN PAM
ugccagcccagauucccagg

SEQ ID NO: 16103 - RNA, 20 nt, Artificial Sequence
  targeting sequence with CTCN PAM
cagcagccugggaaucuggg

SEQ ID NO: 16104 - RNA, 20 nt, Artificial Sequence
  targeting sequence with CTCN PAM
cccagcagccugggaaucug

SEQ ID NO: 16105 - RNA, 20 nt, Artificial Sequence
  targeting sequence with CTCN PAM
gucucucccagcagccuggg

SEQ ID NO: 16106 - RNA, 20 nt, Artificial Sequence
  targeting sequence with CTCN PAM
gcucucaaccuuagaagggg

SEQ ID NO: 16107 - RNA, 20 nt, Artificial Sequence
  targeting sequence with CTCN PAM
caaccuuagaaggggacccc

SEQ ID NO: 16108 - RNA, 20 nt, Artificial Sequence
  targeting sequence with CTCN PAM
accuuagaaggggaccccga

SEQ ID NO: 16109 - RNA, 20 nt, Artificial Sequence
  targeting sequence with CTCN PAM
ggguccccuucuaagguuga

SEQ ID NO: 16110 - RNA, 20 nt, Artificial Sequence
  targeting sequence with CTCN PAM
gggucucgggguccccuucu

SEQ ID NO: 16111 - RNA, 20 nt, Artificial Sequence
  targeting sequence with CTCN PAM
caggccuggcagccaggagg

SEQ ID NO: 16112 - RNA, 20 nt, Artificial Sequence
  targeting sequence with CTCN PAM
uggcugccaggccugcgagc

SEQ ID NO: 16113 - RNA, 20 nt, Artificial Sequence
  targeting sequence with CTCN PAM
gacgccccaggcacagccuc

SEQ ID NO: 16114 - RNA, 20 nt, Artificial Sequence
  targeting sequence with CTCN PAM
acacccucagacgccccagg

SEQ ID NO: 16115 - RNA, 20 nt, Artificial Sequence
  targeting sequence with CTCN PAM
agugcccccuccacacccuc

SEQ ID NO: 16116 - RNA, 20 nt, Artificial Sequence
  targeting sequence with CTCN PAM
gccuugggccaugucccugc

SEQ ID NO: 16117 - RNA, 20 nt, Artificial Sequence
  targeting sequence with CTCN PAM
uggaacugcaucccgcccuc

SEQ ID NO: 16118 - RNA, 20 nt, Artificial Sequence
  targeting sequence with CTCN PAM
cggggccucucuccagcugc

SEQ ID NO: 16119 - RNA, 20 nt, Artificial Sequence
  targeting sequence with CTCN PAM
cuccagcugccgcaggaaau

SEQ ID NO: 16120 - RNA, 20 nt, Artificial Sequence
  targeting sequence with CTCN PAM
ccagcugccgcaggaaauca

SEQ ID NO: 16121 - RNA, 20 nt, Artificial Sequence
  targeting sequence with CTCN PAM
agcugccgcaggaaaucagc

SEQ ID NO: 16122 - RNA, 20 nt, Artificial Sequence
  targeting sequence with CTCN PAM
agcugauuuccugcggcagc

SEQ ID NO: 16123 - RNA, 20 nt, Artificial Sequence
  targeting sequence with CTCN PAM
ucaagcugauuuccugcggc

SEQ ID NO: 16124 - RNA, 20 nt, Artificial Sequence
  targeting sequence with CTCN PAM
gacccaguacugcuggggca

SEQ ID NO: 16125 - RNA, 20 nt, Artificial Sequence
  targeting sequence with CTCN PAM
ucugacccaguacugcuggg

SEQ ID NO: 16126 - RNA, 20 nt, Artificial Sequence
  targeting sequence with CTCN PAM
uuggugggggcugggcgggg

SEQ ID NO: 16127 - RNA, 20 nt, Artificial Sequence
  targeting sequence with CTCN PAM
gcccaggccagcccugccuc

SEQ ID NO: 16128 - RNA, 20 nt, Artificial Sequence
  targeting sequence with CTCN PAM
cggagccucagcuuccccac

SEQ ID NO: 16129 - RNA, 20 nt, Artificial Sequence
  targeting sequence with CTCN PAM
gagccucagcuuccccacug

SEQ ID NO: 16130 - RNA, 20 nt, Artificial Sequence
  targeting sequence with CTCN PAM
gagaggcagggcuggccugg

SEQ ID NO: 16131 - RNA, 20 nt, Artificial Sequence
  targeting sequence with CTCN PAM
gcuuccccacuggggcaugg

SEQ ID NO: 16132 - RNA, 20 nt, Artificial Sequence
  targeting sequence with CTCN PAM
cuucccacgugcacccgcac

SEQ ID NO: 16133 - RNA, 20 nt, Artificial Sequence
  targeting sequence with CTCN PAM
gcccaguguguuguccuucu

SEQ ID NO: 16134 - RNA, 20 nt, Artificial Sequence
  targeting sequence with CTCN PAM
uagacaagaaggacaacaca

SEQ ID NO: 16135 - RNA, 20 nt, Artificial Sequence
  targeting sequence with CTCN PAM
uggccagggaggcaccuuca

SEQ ID NO: 16136 - RNA, 20 nt, Artificial Sequence
  targeting sequence with CTCN PAM
cuggccaugagucucauaga

SEQ ID NO: 16137 - RNA, 20 nt, Artificial Sequence
  targeting sequence with CTCN PAM
caucagaucccugaaggugc

SEQ ID NO: 16138 - RNA, 20 nt, Artificial Sequence
  targeting sequence with CTCN PAM
ccucccaucagaucccugaa

SEQ ID NO: 16139 - RNA, 20 nt, Artificial Sequence
  targeting sequence with CTCN PAM
ccccucccaucagaucccug

SEQ ID NO: 16140 - RNA, 20 nt, Artificial Sequence
  targeting sequence with CTCN PAM
gccucuccccucccaucaga

SEQ ID NO: 16141 - RNA, 20 nt, Artificial Sequence
  targeting sequence with CTCN PAM
gaccucggccucuccccucc

SEQ ID NO: 16142 - RNA, 20 nt, Artificial Sequence
  targeting sequence with CTCN PAM
ggccucugaccucggccucu

SEQ ID NO: 16143 - RNA, 20 nt, Artificial Sequence
  targeting sequence with CTCN PAM
ugcccccaccccaaccuccg

SEQ ID NO: 16144 - RNA, 20 nt, Artificial Sequence
  targeting sequence with CTCN PAM
gugguggaagacggccgcaa

SEQ ID NO: 16145 - RNA, 20 nt, Artificial Sequence
  targeting sequence with CTCN PAM
gugugcuggaggcgaaccac

SEQ ID NO: 16146 - RNA, 20 nt, Artificial Sequence
  targeting sequence with CTCN PAM
agcacacagagcuacauccu

SEQ ID NO: 16147 - RNA, 20 nt, Artificial Sequence
  targeting sequence with CTCN PAM
gggggacaagggacaggcca

SEQ ID NO: 16148 - RNA, 20 nt, Artificial Sequence
  targeting sequence with CTCN PAM
cugcccggacccugauggcc

SEQ ID NO: 16149 - RNA, 20 nt, Artificial Sequence
  targeting sequence with CTCN PAM
ggcccagcucccugcccgga

SEQ ID NO: 16150 - RNA, 20 nt, Artificial Sequence
  targeting sequence with CTCN PAM
cuauguggcugggccgguac

SEQ ID NO: 16151 - RNA, 20 nt, Artificial Sequence
  targeting sequence with CTCN PAM
cccuauguggcugggccggu

SEQ ID NO: 16152 - RNA, 20 nt, Artificial Sequence
  targeting sequence with CTCN PAM
cgcucucuccauguaaacug

SEQ ID NO: 16153 - RNA, 20 nt, Artificial Sequence
  targeting sequence with CTCN PAM
cucucuccauguaaacugag

SEQ ID NO: 16154 - RNA, 20 nt, Artificial Sequence
  targeting sequence with CTCN PAM
cuccauguaaacugaggcaa

SEQ ID NO: 16155 - RNA, 20 nt, Artificial Sequence
  targeting sequence with CTCN PAM
ccauguaaacugaggcaagc

SEQ ID NO: 16156 - RNA, 20 nt, Artificial Sequence
  targeting sequence with CTCN PAM
auguaaacugaggcaagcca

SEQ ID NO: 16157 - RNA, 20 nt, Artificial Sequence
  targeting sequence with CTCN PAM
guuuacauggagagagcgag

SEQ ID NO: 16158 - RNA, 20 nt, Artificial Sequence
  targeting sequence with CTCN PAM
cucugagccuccauuuuccc

SEQ ID NO: 16159 - RNA, 20 nt, Artificial Sequence
  targeting sequence with CTCN PAM
cugagccuccauuuucccau

SEQ ID NO: 16160 - RNA, 20 nt, Artificial Sequence
  targeting sequence with CTCN PAM
gagccuccauuuucccaucu

SEQ ID NO: 16161 - RNA, 20 nt, Artificial Sequence
  targeting sequence with CTCN PAM
gagagagguauggcuugccu

SEQ ID NO: 16162 - RNA, 20 nt, Artificial Sequence
  targeting sequence with CTCN PAM
auuuucccaucuguaaaaug

SEQ ID NO: 16163 - RNA, 20 nt, Artificial Sequence
  targeting sequence with CTCN PAM
ccauuuuacagaugggaaaa

SEQ ID NO: 16164 - RNA, 20 nt, Artificial Sequence
  targeting sequence with CTCN PAM
uuccugcccuccccauuuua

SEQ ID NO: 16165 - RNA, 20 nt, Artificial Sequence
  targeting sequence with CTCN PAM
cccagcucuuuccugcccuc

SEQ ID NO: 16166 - RNA, 20 nt, Artificial Sequence
  targeting sequence with CTCN PAM
cccccagcucuuuccugccc

SEQ ID NO: 16167 - RNA, 20 nt, Artificial Sequence
  targeting sequence with CTCN PAM
cacucucccccagcucuuuc

SEQ ID NO: 16168 - RNA, 20 nt, Artificial Sequence
  targeting sequence with CTCN PAM
uuguacccucacacucuccc

SEQ ID NO: 16169 - RNA, 20 nt, Artificial Sequence
  targeting sequence with CTCN PAM
acccuggcaccuucucuuug

SEQ ID NO: 16170 - RNA, 20 nt, Artificial Sequence
  targeting sequence with CTCN PAM
gugcccuccacccuggcacc

SEQ ID NO: 16171 - RNA, 20 nt, Artificial Sequence
  targeting sequence with CTCN PAM
ucugugcccuccacccuggc

SEQ ID NO: 16172 - RNA, 20 nt, Artificial Sequence
  targeting sequence with CTCN PAM
uccucugugcccuccacccu

SEQ ID NO: 16173 - RNA, 20 nt, Artificial Sequence
  targeting sequence with CTCN PAM
ggaaauggccuugucugcaa

SEQ ID NO: 16174 - RNA, 20 nt, Artificial Sequence
  targeting sequence with CTCN PAM
uauaaaacccacuccaggcc

SEQ ID NO: 16175 - RNA, 20 nt, Artificial Sequence
  targeting sequence with CTCN PAM
aggccccgcgcgguggcuca

SEQ ID NO: 16176 - RNA, 20 nt, Artificial Sequence
  targeting sequence with CTCN PAM
caccuguaaucccagcacuu

SEQ ID NO: 16177 - RNA, 20 nt, Artificial Sequence
  targeting sequence with CTCN PAM
caaagugcugggauuacagg

SEQ ID NO: 16178 - RNA, 20 nt, Artificial Sequence
  targeting sequence with CTCN PAM
uccucccaaagugcugggau

SEQ ID NO: 16179 - RNA, 20 nt, Artificial Sequence
  targeting sequence with CTCN PAM
ugccucauccucccaaagug

SEQ ID NO: 16180 - RNA, 20 nt, Artificial Sequence
  targeting sequence with CTCN PAM
agcgauccuccugccucauc

SEQ ID NO: 16181 - RNA, 20 nt, Artificial Sequence
  targeting sequence with CTCN PAM
ugggcucaagcgauccuccu

SEQ ID NO: 16182 - RNA, 20 nt, Artificial Sequence
  targeting sequence with CTCN PAM
uguagucccagcuacucagg

SEQ ID NO: 16183 - RNA, 20 nt, Artificial Sequence
  targeting sequence with CTCN PAM
ggaggcugaaaugaggggau

SEQ ID NO: 16184 - RNA, 20 nt, Artificial Sequence
  targeting sequence with CTCN PAM
ugaguagcugggacuacagg

SEQ ID NO: 16185 - RNA, 20 nt, Artificial Sequence
  targeting sequence with CTCN PAM
uuucagccuccugaguagcu

SEQ ID NO: 16186 - RNA, 20 nt, Artificial Sequence
  targeting sequence with CTCN PAM
agugauccccucauuucagc

SEQ ID NO: 16187 - RNA, 20 nt, Artificial Sequence
  targeting sequence with CTCN PAM
ugggcucaagugauccccuc

SEQ ID NO: 16188 - RNA, 20 nt, Artificial Sequence
  targeting sequence with CTCN PAM
accuccugggcucaagugau

SEQ ID NO: 16189 - RNA, 20 nt, Artificial Sequence
  targeting sequence with CTCN PAM
cugcagccucgaccuccugg

SEQ ID NO: 16190 - RNA, 20 nt, Artificial Sequence
  targeting sequence with CTCN PAM
gcucacugcagccucgaccu

SEQ ID NO: 16191 - RNA, 20 nt, Artificial Sequence
  targeting sequence with CTCN PAM
agccugggugacagaaugag

SEQ ID NO: 16192 - RNA, 20 nt, Artificial Sequence
  targeting sequence with CTCN PAM
uucugucacccaggcuggag

SEQ ID NO: 16193 - RNA, 20 nt, Artificial Sequence
  targeting sequence with CTCN PAM
aaaacaaacaaacaaaccaa

SEQ ID NO: 16194 - RNA, 20 nt, Artificial Sequence
  targeting sequence with CTCN PAM
agcaucccuccuuuaggaau

SEQ ID NO: 16195 - RNA, 20 nt, Artificial Sequence
  targeting sequence with CTCN PAM
uuuaggaauuaggaagccuu

SEQ ID NO: 16196 - RNA, 20 nt, Artificial Sequence
  targeting sequence with CTCN PAM
cacugcaggacuugucuccu

SEQ ID NO: 16197 - RNA, 20 nt, Artificial Sequence
  targeting sequence with CTCN PAM
uacagaguaagagcuucuug

SEQ ID NO: 16198 - RNA, 20 nt, Artificial Sequence
  targeting sequence with CTCN PAM
guaggagacaaguccugcag

SEQ ID NO: 16199 - RNA, 20 nt, Artificial Sequence
  targeting sequence with CTCN PAM
uacucuguaggagacaaguc

SEQ ID NO: 16200 - RNA, 20 nt, Artificial Sequence
  targeting sequence with CTCN PAM
gcaagaagcucuuacucugu

SEQ ID NO: 16201 - RNA, 20 nt, Artificial Sequence
  targeting sequence with CTCN PAM
uuggauccucucaguguccc

SEQ ID NO: 16202 - RNA, 20 nt, Artificial Sequence
  targeting sequence with CTCN PAM
caguguccccacauucaugc

SEQ ID NO: 16203 - RNA, 20 nt, Artificial Sequence
  targeting sequence with CTCN PAM
guguccccacauucaugcac

SEQ ID NO: 16204 - RNA, 20 nt, Artificial Sequence
  targeting sequence with CTCN PAM
uuucaccuggcaugggugca

SEQ ID NO: 16205 - RNA, 20 nt, Artificial Sequence
  targeting sequence with CTCN PAM
gcccccauucccacccacca

SEQ ID NO: 16206 - RNA, 20 nt, Artificial Sequence
  targeting sequence with CTCN PAM
gcacgcggccacugggagua

SEQ ID NO: 16207 - RNA, 20 nt, Artificial Sequence
  targeting sequence with CTCN PAM
caguggccgcgugcagagga

SEQ ID NO: 16208 - RNA, 20 nt, Artificial Sequence
  targeting sequence with CTCN PAM
aggaucuucuccuugaccug

SEQ ID NO: 16209 - RNA, 20 nt, Artificial Sequence
  targeting sequence with CTCN PAM
uugaccugugucagcguguc

SEQ ID NO: 16210 - RNA, 20 nt, Artificial Sequence
  targeting sequence with CTCN PAM
gcgaguccaugccacagccc

SEQ ID NO: 16211 - RNA, 20 nt, Artificial Sequence
  targeting sequence with CTCN PAM
cugagcgugcgggccaugga

SEQ ID NO: 16212 - RNA, 20 nt, Artificial Sequence
  targeting sequence with CTCN PAM
cccugcagaaccugaacgug

SEQ ID NO: 16213 - RNA, 20 nt, Artificial Sequence
  targeting sequence with CTCN PAM
cccccugcagaaccugaacg

SEQ ID NO: 16214 - RNA, 20 nt, Artificial Sequence
  targeting sequence with CTCN PAM
cacucucccccugcagaacc

SEQ ID NO: 16215 - RNA, 20 nt, Artificial Sequence
  targeting sequence with CTCN PAM
cccacucucccccugcagaa

SEQ ID NO: 16216 - RNA, 20 nt, Artificial Sequence
  targeting sequence with CTCN PAM
cugaccuuucucucccacuc

SEQ ID NO: 16217 - RNA, 20 nt, Artificial Sequence
  targeting sequence with CTCN PAM
ccgcccugccgacuuacccg

SEQ ID NO: 16218 - RNA, 20 nt, Artificial Sequence
  targeting sequence with CTCN PAM
auguucucccgcagcagcca

SEQ ID NO: 16219 - RNA, 20 nt, Artificial Sequence
  targeting sequence with CTCN PAM
cgcagcagccacuccucacu

SEQ ID NO: 16220 - RNA, 20 nt, Artificial Sequence
  targeting sequence with CTCN PAM
ucacugaguguguagcgggc

SEQ ID NO: 16221 - RNA, 20 nt, Artificial Sequence
  targeting sequence with CTCN PAM
cugaguguguagcgggccuu

SEQ ID NO: 16222 - RNA, 20 nt, Artificial Sequence
  targeting sequence with CTCN PAM
gugaggaguggcugcugcgg

SEQ ID NO: 16223 - RNA, 20 nt, Artificial Sequence
  targeting sequence with CTCN PAM
aucgacgccaucacaggcaa

SEQ ID NO: 16224 - RNA, 20 nt, Artificial Sequence
  targeting sequence with CTCN PAM
cccaccgucuccugaggggc

SEQ ID NO: 16225 - RNA, 20 nt, Artificial Sequence
  targeting sequence with CTCN PAM
ugaggggcacggggguauca

SEQ ID NO: 16226 - RNA, 20 nt, Artificial Sequence
  targeting sequence with CTCN PAM
ggagacggugggggagccau

SEQ ID NO: 16227 - RNA, 20 nt, Artificial Sequence
  targeting sequence with CTCN PAM
guauuccagcccccaugcuu

SEQ ID NO: 16228 - RNA, 20 nt, Artificial Sequence
  targeting sequence with CTCN PAM
gcacuguuggcugcacagua

SEQ ID NO: 16229 - RNA, 20 nt, Artificial Sequence
  targeting sequence with CTCN PAM
gagagggcaagugaccugcc

SEQ ID NO: 16230 - RNA, 20 nt, Artificial Sequence
  targeting sequence with CTCN PAM
gagccucggcacuguuggcu

SEQ ID NO: 16231 - RNA, 20 nt, Artificial Sequence
  targeting sequence with CTCN PAM
cugagccucggcacuguugg

SEQ ID NO: 16232 - RNA, 20 nt, Artificial Sequence
  targeting sequence with CTCN PAM
gcugacucccaagccuguga

SEQ ID NO: 16233 - RNA, 20 nt, Artificial Sequence
  targeting sequence with CTCN PAM
caagccugugacuuucuacu

SEQ ID NO: 16234 - RNA, 20 nt, Artificial Sequence
  targeting sequence with CTCN PAM
cacuugggggccccccacuu

SEQ ID NO: 16235 - RNA, 20 nt, Artificial Sequence
  targeting sequence with CTCN PAM
accccacuugcaggcugaug

SEQ ID NO: 16236 - RNA, 20 nt, Artificial Sequence
  targeting sequence with CTCN PAM
auagucaucagccugcaagu

SEQ ID NO: 16237 - RNA, 20 nt, Artificial Sequence
  targeting sequence with CTCN PAM
ggaggaauggggcucaaugu

SEQ ID NO: 16238 - RNA, 20 nt, Artificial Sequence
  targeting sequence with CTCN PAM
ugagacuccauagucaucag

SEQ ID NO: 16239 - RNA, 20 nt, Artificial Sequence
  targeting sequence with CTCN PAM
augucccugcucuugcccau

SEQ ID NO: 16240 - RNA, 20 nt, Artificial Sequence
  targeting sequence with CTCN PAM
ugcccaucuccaaggguggc

SEQ ID NO: 16241 - RNA, 20 nt, Artificial Sequence
  targeting sequence with CTCN PAM
aaggguggcccuccaggcag

SEQ ID NO: 16242 - RNA, 20 nt, Artificial Sequence
  targeting sequence with CTCN PAM
aggcaguggcucugcuggac

SEQ ID NO: 16243 - RNA, 20 nt, Artificial Sequence
  targeting sequence with CTCN PAM
gcuggacccacagccaugag

SEQ ID NO: 16244 - RNA, 20 nt, Artificial Sequence
  targeting sequence with CTCN PAM
uggcuguggguccagcagag

SEQ ID NO: 16245 - RNA, 20 nt, Artificial Sequence
  targeting sequence with CTCN PAM
aggccauugcccagcaaggg

SEQ ID NO: 16246 - RNA, 20 nt, Artificial Sequence
  targeting sequence with CTCN PAM
aggucuggggcgugggaggc

SEQ ID NO: 16247 - RNA, 20 nt, Artificial Sequence
  targeting sequence with CTCN PAM
cacgccccagaccuggagaa

SEQ ID NO: 16248 - RNA, 20 nt, Artificial Sequence
  targeting sequence with CTCN PAM
aggaagcagggaaucagugc

SEQ ID NO: 16249 - RNA, 20 nt, Artificial Sequence
  targeting sequence with CTCN PAM
ucuaggaagcagggaaucag

SEQ ID NO: 16250 - RNA, 20 nt, Artificial Sequence
  targeting sequence with CTCN PAM
uaggggaaggccuggcugag

SEQ ID NO: 16251 - RNA, 20 nt, Artificial Sequence
  targeting sequence with CTCN PAM
gccaggccuuccccuaugag

SEQ ID NO: 16252 - RNA, 20 nt, Artificial Sequence
  targeting sequence with CTCN PAM
ccuggcuucuuucuguggcc

SEQ ID NO: 16253 - RNA, 20 nt, Artificial Sequence
  targeting sequence with CTCN PAM
cuccccuggcuucuuucugu

SEQ ID NO: 16254 - RNA, 20 nt, Artificial Sequence
  targeting sequence with CTCN PAM
cugugggccaucaggaacca

SEQ ID NO: 16255 - RNA, 20 nt, Artificial Sequence
  targeting sequence with CTCN PAM
gccuucugcgggcugccuca

SEQ ID NO: 16256 - RNA, 20 nt, Artificial Sequence
  targeting sequence with CTCN PAM
caggcccugccucugcucca

SEQ ID NO: 16257 - RNA, 20 nt, Artificial Sequence
  targeting sequence with CTCN PAM
gcuccaccccacuacccccu

SEQ ID NO: 16258 - RNA, 20 nt, Artificial Sequence
  targeting sequence with CTCN PAM
accccacuacccccuucccc

SEQ ID NO: 16259 - RNA, 20 nt, Artificial Sequence
  targeting sequence with CTCN PAM
ugggggaaggggguaguggg

SEQ ID NO: 16260 - RNA, 20 nt, Artificial Sequence
  targeting sequence with CTCN PAM
uccugggggaaggggguagu

SEQ ID NO: 16261 - RNA, 20 nt, Artificial Sequence
  targeting sequence with CTCN PAM
cccaggcuacuuggcccuca

SEQ ID NO: 16262 - RNA, 20 nt, Artificial Sequence
  targeting sequence with CTCN PAM
agccccaggcucaggggcag

SEQ ID NO: 16263 - RNA, 20 nt, Artificial Sequence
  targeting sequence with CTCN PAM
ggggcagaggccccauuuga

SEQ ID NO: 16264 - RNA, 20 nt, Artificial Sequence
  targeting sequence with CTCN PAM
gccccugagccuggggcuug

SEQ ID NO: 16265 - RNA, 20 nt, Artificial Sequence
  targeting sequence with CTCN PAM
gugggccuugguuuccuucu

SEQ ID NO: 16266 - RNA, 20 nt, Artificial Sequence
  targeting sequence with CTCN PAM
uugcccucugugggccuugg

SEQ ID NO: 16267 - RNA, 20 nt, Artificial Sequence
  targeting sequence with CTCN PAM
gggcuacucauugcccucug

SEQ ID NO: 16268 - RNA, 20 nt, Artificial Sequence
  targeting sequence with CTCN PAM
agcccaggacaucuuggcug

SEQ ID NO: 16269 - RNA, 20 nt, Artificial Sequence
  targeting sequence with CTCN PAM
ccccuguaaucccagcacuu

SEQ ID NO: 16270 - RNA, 20 nt, Artificial Sequence
  targeting sequence with CTCN PAM
caaagugcugggauuacagg

SEQ ID NO: 16271 - RNA, 20 nt, Artificial Sequence
  targeting sequence with CTCN PAM
cgcuuuggccucccaaagug

SEQ ID NO: 16272 - RNA, 20 nt, Artificial Sequence
  targeting sequence with CTCN PAM
agcaauccucccgcuuuggc

SEQ ID NO: 16273 - RNA, 20 nt, Artificial Sequence
  targeting sequence with CTCN PAM
ggaguuugggaccagccugu

SEQ ID NO: 16274 - RNA, 20 nt, Artificial Sequence
  targeting sequence with CTCN PAM
ugagcucaagcaauccuccc

SEQ ID NO: 16275 - RNA, 20 nt, Artificial Sequence
  targeting sequence with CTCN PAM
ucaaaaauuaauaacaaaaa

SEQ ID NO: 16276 - RNA, 20 nt, Artificial Sequence
  targeting sequence with CTCN PAM
gauguucuguuuuuuguuau

SEQ ID NO: 16277 - RNA, 20 nt, Artificial Sequence
  targeting sequence with CTCN PAM
aggcaggccuuugccuuucu

SEQ ID NO: 16278 - RNA, 20 nt, Artificial Sequence
  targeting sequence with CTCN PAM
cacaauccuccaggcagccc

SEQ ID NO: 16279 - RNA, 20 nt, Artificial Sequence
  targeting sequence with CTCN PAM
aggcagcccucuagccucug

SEQ ID NO: 16280 - RNA, 20 nt, Artificial Sequence
  targeting sequence with CTCN PAM
agccucugccaccauagggc

SEQ ID NO: 16281 - RNA, 20 nt, Artificial Sequence
  targeting sequence with CTCN PAM
gccaccauagggcagcugga

SEQ ID NO: 16282 - RNA, 20 nt, Artificial Sequence
  targeting sequence with CTCN PAM
uguccugucccacuguccag

SEQ ID NO: 16283 - RNA, 20 nt, Artificial Sequence
  targeting sequence with CTCN PAM
gcgaagagagcuuauggggg

SEQ ID NO: 16284 - RNA, 20 nt, Artificial Sequence
  targeting sequence with CTCN PAM
ucgcagagcaaggguugcuu

SEQ ID NO: 16285 - RNA, 20 nt, Artificial Sequence
  targeting sequence with CTCN PAM
cuucgcagagcaaggguugc

SEQ ID NO: 16286 - RNA, 20 nt, Artificial Sequence
  targeting sequence with CTCN PAM
gccagaaggacccccauaag

SEQ ID NO: 16287 - RNA, 20 nt, Artificial Sequence
  targeting sequence with CTCN PAM
ugcacucugccagaaggacc

SEQ ID NO: 16288 - RNA, 20 nt, Artificial Sequence
  targeting sequence with CTCN PAM
ucccagccuccgcucucauc

SEQ ID NO: 16289 - RNA, 20 nt, Artificial Sequence
  targeting sequence with CTCN PAM
gcucucauccagaagauucu

SEQ ID NO: 16290 - RNA, 20 nt, Artificial Sequence
  targeting sequence with CTCN PAM
cauccagaagauucuuuggc

SEQ ID NO: 16291 - RNA, 20 nt, Artificial Sequence
  targeting sequence with CTCN PAM
uccagaagauucuuuggccu

SEQ ID NO: 16292 - RNA, 20 nt, Artificial Sequence
  targeting sequence with CTCN PAM
ucccggccucugcccuugug

SEQ ID NO: 16293 - RNA, 20 nt, Artificial Sequence
  targeting sequence with CTCN PAM
cggccucugcccuugugcug

SEQ ID NO: 16294 - RNA, 20 nt, Artificial Sequence
  targeting sequence with CTCN PAM
gcccuugugcuguacccgau

SEQ ID NO: 16295 - RNA, 20 nt, Artificial Sequence
  targeting sequence with CTCN PAM
aggcaucggguacagcacaa

SEQ ID NO: 16296 - RNA, 20 nt, Artificial Sequence
  targeting sequence with CTCN PAM
ccaccacuccucgccuggcu

SEQ ID NO: 16297 - RNA, 20 nt, Artificial Sequence
  targeting sequence with CTCN PAM
ucgccuggcucacucucuua

SEQ ID NO: 16298 - RNA, 20 nt, Artificial Sequence
  targeting sequence with CTCN PAM
ccuggcucacucucuuaggu

SEQ ID NO: 16299 - RNA, 20 nt, Artificial Sequence
  targeting sequence with CTCN PAM
cucucuuaggucucagcaca

SEQ ID NO: 16300 - RNA, 20 nt, Artificial Sequence
  targeting sequence with CTCN PAM
cuuaggucucagcacagggu

SEQ ID NO: 16301 - RNA, 20 nt, Artificial Sequence
  targeting sequence with CTCN PAM
uaggucucagcacaggguug

SEQ ID NO: 16302 - RNA, 20 nt, Artificial Sequence
  targeting sequence with CTCN PAM
gcacaggguugccugcucca

SEQ ID NO: 16303 - RNA, 20 nt, Artificial Sequence
  targeting sequence with CTCN PAM
aggaagccaccuugaagccu

SEQ ID NO: 16304 - RNA, 20 nt, Artificial Sequence
  targeting sequence with CTCN PAM
gucugaaggcuucaaggugg

SEQ ID NO: 16305 - RNA, 20 nt, Artificial Sequence
  targeting sequence with CTCN PAM
cucugucugaaggcuucaag

SEQ ID NO: 16306 - RNA, 20 nt, Artificial Sequence
  targeting sequence with CTCN PAM
ugagcugagcucugcugcga

SEQ ID NO: 16307 - RNA, 20 nt, Artificial Sequence
  targeting sequence with CTCN PAM
cgaggccucccucugucuga

SEQ ID NO: 16308 - RNA, 20 nt, Artificial Sequence
  targeting sequence with CTCN PAM
gcucacgaggccucccucug

SEQ ID NO: 16309 - RNA, 20 nt, Artificial Sequence
  targeting sequence with CTCN PAM
gcugcgaggcacuggccacc

SEQ ID NO: 16310 - RNA, 20 nt, Artificial Sequence
  targeting sequence with CTCN PAM
cagcagagcucagcucacga

SEQ ID NO: 16311 - RNA, 20 nt, Artificial Sequence
  targeting sequence with CTCN PAM
ccuagccuagggcugggaga

SEQ ID NO: 16312 - RNA, 20 nt, Artificial Sequence
  targeting sequence with CTCN PAM
cagcccuaggcuaggcgaga

SEQ ID NO: 16313 - RNA, 20 nt, Artificial Sequence
  targeting sequence with CTCN PAM
cccagcccuaggcuaggcga

SEQ ID NO: 16314 - RNA, 20 nt, Artificial Sequence
  targeting sequence with CTCN PAM
agggccagccaggggcugau

SEQ ID NO: 16315 - RNA, 20 nt, Artificial Sequence
  targeting sequence with CTCN PAM
ugaauccagagcagggaagg

SEQ ID NO: 16316 - RNA, 20 nt, Artificial Sequence
  targeting sequence with CTCN PAM
ggauucaggagaugaaauca

SEQ ID NO: 16317 - RNA, 20 nt, Artificial Sequence
  targeting sequence with CTCN PAM
gucauccacccuucccugcu

SEQ ID NO: 16318 - RNA, 20 nt, Artificial Sequence
  targeting sequence with CTCN PAM
guuaugccccaagcauccgu

SEQ ID NO: 16319 - RNA, 20 nt, Artificial Sequence
  targeting sequence with CTCN PAM
acggaugcuuggggcauaac

SEQ ID NO: 16320 - RNA, 20 nt, Artificial Sequence
  targeting sequence with CTCN PAM
ccucucugcauaacaggucc

SEQ ID NO: 16321 - RNA, 20 nt, Artificial Sequence
  targeting sequence with CTCN PAM
cugcauaacagguccuacgg

SEQ ID NO: 16322 - RNA, 20 nt, Artificial Sequence
  targeting sequence with CTCN PAM
gcauaacagguccuacgggc

SEQ ID NO: 16323 - RNA, 20 nt, Artificial Sequence
  targeting sequence with CTCN PAM
ugcaacacucccuccuggca

SEQ ID NO: 16324 - RNA, 20 nt, Artificial Sequence
  targeting sequence with CTCN PAM
cuccuggcagagcuggccug

SEQ ID NO: 16325 - RNA, 20 nt, Artificial Sequence
  targeting sequence with CTCN PAM
uggcagagcuggccugaggg

SEQ ID NO: 16326 - RNA, 20 nt, Artificial Sequence
  targeting sequence with CTCN PAM
gccaggagggaguguugcau

SEQ ID NO: 16327 - RNA, 20 nt, Artificial Sequence
  targeting sequence with CTCN PAM
ggccagcucugccaggaggg

SEQ ID NO: 16328 - RNA, 20 nt, Artificial Sequence
  targeting sequence with CTCN PAM
caggccuucccuggcacccu

SEQ ID NO: 16329 - RNA, 20 nt, Artificial Sequence
  targeting sequence with CTCN PAM
gcggcagugaccccacggcc

SEQ ID NO: 16330 - RNA, 20 nt, Artificial Sequence
  targeting sequence with CTCN PAM
gucuguccccaggcagccuc

SEQ ID NO: 16331 - RNA, 20 nt, Artificial Sequence
  targeting sequence with CTCN PAM
cccgcagacagcuguacaug

SEQ ID NO: 16332 - RNA, 20 nt, Artificial Sequence
  targeting sequence with CTCN PAM
ccaacuggauguccaucugc

SEQ ID NO: 16333 - RNA, 20 nt, Artificial Sequence
  targeting sequence with CTCN PAM
accacagacucugugcgccg

SEQ ID NO: 16334 - RNA, 20 nt, Artificial Sequence
  targeting sequence with CTCN PAM
gugcgccgcagcaugagcuu

SEQ ID NO: 16335 - RNA, 20 nt, Artificial Sequence
  targeting sequence with CTCN PAM
ugcugcggcgcacagagucu

SEQ ID NO: 16336 - RNA, 20 nt, Artificial Sequence
  targeting sequence with CTCN PAM
gccgccaagaaccccaagcu

SEQ ID NO: 16337 - RNA, 20 nt, Artificial Sequence
  targeting sequence with CTCN PAM
uugacgccucggccgccaag

SEQ ID NO: 16338 - RNA, 20 nt, Artificial Sequence
  targeting sequence with CTCN PAM
uucaugaugcugguguagua

SEQ ID NO: 16339 - RNA, 20 nt, Artificial Sequence
  targeting sequence with CTCN PAM
agcuugccgugcagcgcgau

SEQ ID NO: 16340 - RNA, 20 nt, Artificial Sequence
  targeting sequence with CTCN PAM
cugcugaccaucgcgcugca

SEQ ID NO: 16341 - RNA, 20 nt, Artificial Sequence
  targeting sequence with CTCN PAM
caggugcagccuggccucgc

SEQ ID NO: 16342 - RNA, 20 nt, Artificial Sequence
  targeting sequence with CTCN PAM
cgcucacaggugcagccugg

SEQ ID NO: 16343 - RNA, 20 nt, Artificial Sequence
  targeting sequence with CTCN PAM
aggugcaguugacaccugcc

SEQ ID NO: 16344 - RNA, 20 nt, Artificial Sequence
  targeting sequence with CTCN PAM
uagggccucaaggugcaguu

SEQ ID NO: 16345 - RNA, 20 nt, Artificial Sequence
  targeting sequence with CTCN PAM
ucuucccuaccccaccccag

SEQ ID NO: 16346 - RNA, 20 nt, Artificial Sequence
  targeting sequence with CTCN PAM
ucccuaccccaccccagucu

SEQ ID NO: 16347 - RNA, 20 nt, Artificial Sequence
  targeting sequence with CTCN PAM
agcgcguggacaaagacgau

SEQ ID NO: 16348 - RNA, 20 nt, Artificial Sequence
  targeting sequence with CTCN PAM
ucgucuuuguccacgcgcug

SEQ ID NO: 16349 - RNA, 20 nt, Artificial Sequence
  targeting sequence with CTCN PAM
acaacaagcacuuccucauc

SEQ ID NO: 16350 - RNA, 20 nt, Artificial Sequence
  targeting sequence with CTCN PAM
cuacucaacaacaagcacuu

SEQ ID NO: 16351 - RNA, 20 nt, Artificial Sequence
  targeting sequence with CTCN PAM
ucacuacucaacaacaagca

SEQ ID NO: 16352 - RNA, 20 nt, Artificial Sequence
  targeting sequence with CTCN PAM
uccauguugggccggcagcu

SEQ ID NO: 16353 - RNA, 20 nt, Artificial Sequence
  targeting sequence with CTCN PAM
caggaaucuguggaagcaac

SEQ ID NO: 16354 - RNA, 20 nt, Artificial Sequence
  targeting sequence with CTCN PAM
ggaaucuguggaagcaacug

SEQ ID NO: 16355 - RNA, 20 nt, Artificial Sequence
  targeting sequence with CTCN PAM
ggacaccccaucaccaguug

SEQ ID NO: 16356 - RNA, 20 nt, Artificial Sequence
  targeting sequence with CTCN PAM
ugggauggggagcucauuac

SEQ ID NO: 16357 - RNA, 20 nt, Artificial Sequence
  targeting sequence with CTCN PAM
ccaucccaggaggcauacaa

SEQ ID NO: 16358 - RNA, 20 nt, Artificial Sequence
  targeting sequence with CTCN PAM
uuaccuuccacgguggaugc

SEQ ID NO: 16359 - RNA, 20 nt, Artificial Sequence
  targeting sequence with CTCN PAM
ccuuccacucucccagcagu

SEQ ID NO: 16360 - RNA, 20 nt, Artificial Sequence
  targeting sequence with CTCN PAM
cccagcaguggguggguuuc

SEQ ID NO: 16361 - RNA, 20 nt, Artificial Sequence
  targeting sequence with CTCN PAM
cagcaguggguggguuuccu

SEQ ID NO: 16362 - RNA, 20 nt, Artificial Sequence
  targeting sequence with CTCN PAM
caggcacaggaaacccaccc

SEQ ID NO: 16363 - RNA, 20 nt, Artificial Sequence
  targeting sequence with CTCN PAM
cagggcagcucccaggcaca

SEQ ID NO: 16364 - RNA, 20 nt, Artificial Sequence
  targeting sequence with CTCN PAM
acucccagggcagcucccag

SEQ ID NO: 16365 - RNA, 20 nt, Artificial Sequence
  targeting sequence with CTCN PAM
cagacccucaacucccaggg

SEQ ID NO: 16366 - RNA, 20 nt, Artificial Sequence
  targeting sequence with CTCN PAM
ucauaaagggaggaacacug

SEQ ID NO: 16367 - RNA, 20 nt, Artificial Sequence
  targeting sequence with CTCN PAM
cuuuaugaagagcguuacgu

SEQ ID NO: 16368 - RNA, 20 nt, Artificial Sequence
  targeting sequence with CTCN PAM
gcaguguuccucccuuuaug

SEQ ID NO: 16369 - RNA, 20 nt, Artificial Sequence
  targeting sequence with CTCN PAM
gcggggcuggacacccccug

SEQ ID NO: 16370 - RNA, 20 nt, Artificial Sequence
  targeting sequence with CTCN PAM
cacagaaaggggcacuggcu

SEQ ID NO: 16371 - RNA, 20 nt, Artificial Sequence
  targeting sequence with CTCN PAM
ccauaaaggacuaagaggca

SEQ ID NO: 16372 - RNA, 20 nt, Artificial Sequence
  targeting sequence with CTCN PAM
uaguccuuuauggggagcua

SEQ ID NO: 16373 - RNA, 20 nt, Artificial Sequence
  targeting sequence with CTCN PAM
augugcaaugggggaaacug

SEQ ID NO: 16374 - RNA, 20 nt, Artificial Sequence
  targeting sequence with CTCN PAM
guuucccccauugcacaugg

SEQ ID NO: 16375 - RNA, 20 nt, Artificial Sequence
  targeting sequence with CTCN PAM
cagccuuucugccucaguuu

SEQ ID NO: 16376 - RNA, 20 nt, Artificial Sequence
  targeting sequence with CTCN PAM
gacucccagccuuucugccu

SEQ ID NO: 16377 - RNA, 20 nt, Artificial Sequence
  targeting sequence with CTCN PAM
ggcuaaagcucagacuccca

SEQ ID NO: 16378 - RNA, 20 nt, Artificial Sequence
  targeting sequence with CTCN PAM
aguagcuuuucccagccuca

SEQ ID NO: 16379 - RNA, 20 nt, Artificial Sequence
  targeting sequence with CTCN PAM
ccuguccacaccauucccca

SEQ ID NO: 16380 - RNA, 20 nt, Artificial Sequence
  targeting sequence with CTCN PAM
ccccuguccacaccauuccc

SEQ ID NO: 16381 - RNA, 20 nt, Artificial Sequence
  targeting sequence with CTCN PAM
cuccccuguccacaccauuc

SEQ ID NO: 16382 - RNA, 20 nt, Artificial Sequence
  targeting sequence with CTCN PAM
uagugguaccacccucucuc

SEQ ID NO: 16383 - RNA, 20 nt, Artificial Sequence
  targeting sequence with CTCN PAM
accuccuagugguaccaccc

SEQ ID NO: 16384 - RNA, 20 nt, Artificial Sequence
  targeting sequence with CTCN PAM
cucuaccuccuagugguacc

SEQ ID NO: 16385 - RNA, 20 nt, Artificial Sequence
  targeting sequence with CTCN PAM
ccuugcccuuccagggucca

SEQ ID NO: 16386 - RNA, 20 nt, Artificial Sequence
  targeting sequence with CTCN PAM
ugccuccccuugcccuucca

SEQ ID NO: 16387 - RNA, 20 nt, Artificial Sequence
  targeting sequence with CTCN PAM
caugccuccccuugcccuuc

SEQ ID NO: 16388 - RNA, 20 nt, Artificial Sequence
  targeting sequence with CTCN PAM
ugccccaucccuuccaugcc

SEQ ID NO: 16389 - RNA, 20 nt, Artificial Sequence
  targeting sequence with CTCN PAM
uguccacuggacuccugccc

SEQ ID NO: 16390 - RNA, 20 nt, Artificial Sequence
  targeting sequence with CTCN PAM
uccuguccacuggacuccug

SEQ ID NO: 16391 - RNA, 20 nt, Artificial Sequence
  targeting sequence with CTCN PAM
cuccuccuguccacuggacu

SEQ ID NO: 16392 - RNA, 20 nt, Artificial Sequence
  targeting sequence with CTCN PAM
acacucccuccuccugucca

SEQ ID NO: 16393 - RNA, 20 nt, Artificial Sequence
  targeting sequence with CTCN PAM
ucccagccaggcuucccuug

SEQ ID NO: 16394 - RNA, 20 nt, Artificial Sequence
  targeting sequence with CTCN PAM
uuccugugccucuucccagc

SEQ ID NO: 16395 - RNA, 20 nt, Artificial Sequence
  targeting sequence with CTCN PAM
ccuuccugugccucuuccca

SEQ ID NO: 16396 - RNA, 20 nt, Artificial Sequence
  targeting sequence with CTCN PAM
cuccuuccugugccucuucc

SEQ ID NO: 16397 - RNA, 20 nt, Artificial Sequence
  targeting sequence with CTCN PAM
ccuuuucaagguggggcaga

SEQ ID NO: 16398 - RNA, 20 nt, Artificial Sequence
  targeting sequence with CTCN PAM
ccccuuuucaagguggggca

SEQ ID NO: 16399 - RNA, 20 nt, Artificial Sequence
  targeting sequence with CTCN PAM
cuugauguuuaacaguccau

SEQ ID NO: 16400 - RNA, 20 nt, Artificial Sequence
  targeting sequence with CTCN PAM
gcucacuugauguuuaacag

SEQ ID NO: 16401 - RNA, 20 nt, Artificial Sequence
  targeting sequence with CTCN PAM
acugucauucucugcucacu

SEQ ID NO: 16402 - RNA, 20 nt, Artificial Sequence
  targeting sequence with CTCN PAM
aacccuucuccccguggcag

SEQ ID NO: 16403 - RNA, 20 nt, Artificial Sequence
  targeting sequence with CTCN PAM
ccguggcaggccagggcaag

SEQ ID NO: 16404 - RNA, 20 nt, Artificial Sequence
  targeting sequence with CTCN PAM
agggacccuauaggcuggca

SEQ ID NO: 16405 - RNA, 20 nt, Artificial Sequence
  targeting sequence with CTCN PAM
gagaggucgaguugccuuga

SEQ ID NO: 16406 - RNA, 20 nt, Artificial Sequence
  targeting sequence with CTCN PAM
gagcccugccagccuauagg

SEQ ID NO: 16407 - RNA, 20 nt, Artificial Sequence
  targeting sequence with CTCN PAM
cugagcccugccagccuaua

SEQ ID NO: 16408 - RNA, 20 nt, Artificial Sequence
  targeting sequence with CTCN PAM
accucucugagcccugccag

SEQ ID NO: 16409 - RNA, 20 nt, Artificial Sequence
  targeting sequence with CTCN PAM
aggcaacucgaccucucuga

SEQ ID NO: 16410 - RNA, 20 nt, Artificial Sequence
  targeting sequence with CTCN PAM
ggcucgggcugaccuugggg

SEQ ID NO: 16411 - RNA, 20 nt, Artificial Sequence
  targeting sequence with CTCN PAM
ggcugaccuuggggaagaag

SEQ ID NO: 16412 - RNA, 20 nt, Artificial Sequence
  targeting sequence with CTCN PAM
aggaaggggaugcccuggcu

SEQ ID NO: 16413 - RNA, 20 nt, Artificial Sequence
  targeting sequence with CTCN PAM
uuggugagaucugucauguc

SEQ ID NO: 16414 - RNA, 20 nt, Artificial Sequence
  targeting sequence with CTCN PAM
ccaaggagcugaaccgcagc

SEQ ID NO: 16415 - RNA, 20 nt, Artificial Sequence
  targeting sequence with CTCN PAM
gcgaagccuggcggacacac

SEQ ID NO: 16416 - RNA, 20 nt, Artificial Sequence
  targeting sequence with CTCN PAM
cggcuguccguguguccgcc

SEQ ID NO: 16417 - RNA, 20 nt, Artificial Sequence
  targeting sequence with CTCN PAM
ggccgcucacggcuguccgu

SEQ ID NO: 16418 - RNA, 20 nt, Artificial Sequence
  targeting sequence with CTCN PAM
uaggggauggguucucgggc

SEQ ID NO: 16419 - RNA, 20 nt, Artificial Sequence
  targeting sequence with CTCN PAM
acuuucccuccuaggggaug

SEQ ID NO: 16420 - RNA, 20 nt, Artificial Sequence
  targeting sequence with CTCN PAM
cggaucugagauuccaucuc

SEQ ID NO: 16421 - RNA, 20 nt, Artificial Sequence
  targeting sequence with CTCN PAM
gaucugagauuccaucuccu

SEQ ID NO: 16422 - RNA, 20 nt, Artificial Sequence
  targeting sequence with CTCN PAM
gauccgagaggaaauccgca

SEQ ID NO: 16423 - RNA, 20 nt, Artificial Sequence
  targeting sequence with CTCN PAM
uccaucugcagcagcgucuu

SEQ ID NO: 16424 - RNA, 20 nt, Artificial Sequence
  targeting sequence with CTCN PAM
aucugcagcagcgucuucug

SEQ ID NO: 16425 - RNA, 20 nt, Artificial Sequence
  targeting sequence with CTCN PAM
gcacgucggcucuugguaca

SEQ ID NO: 16426 - RNA, 20 nt, Artificial Sequence
  targeting sequence with CTCN PAM
ugguacagaagacgaacagg

SEQ ID NO: 16427 - RNA, 20 nt, Artificial Sequence
  targeting sequence with CTCN PAM
acugcccgcagcccuguucg

SEQ ID NO: 16428 - RNA, 20 nt, Artificial Sequence
  targeting sequence with CTCN PAM
ccacugcccgcagcccuguu

SEQ ID NO: 16429 - RNA, 20 nt, Artificial Sequence
  targeting sequence with CTCN PAM
ggugcccuuuggaaagccuu

SEQ ID NO: 16430 - RNA, 20 nt, Artificial Sequence
  targeting sequence with CTCN PAM
gcuccagcuccucugggcag

SEQ ID NO: 16431 - RNA, 20 nt, Artificial Sequence
  targeting sequence with CTCN PAM
agcuccucugggcagggugu

SEQ ID NO: 16432 - RNA, 20 nt, Artificial Sequence
  targeting sequence with CTCN PAM
ucugggcagggugugggagg

SEQ ID NO: 16433 - RNA, 20 nt, Artificial Sequence
  targeting sequence with CTCN PAM
gggcagggugugggaggagg

SEQ ID NO: 16434 - RNA, 20 nt, Artificial Sequence
  targeting sequence with CTCN PAM
cacacccugcccagaggagc

SEQ ID NO: 16435 - RNA, 20 nt, Artificial Sequence
  targeting sequence with CTCN PAM
ucccacacccugcccagagg

SEQ ID NO: 16436 - RNA, 20 nt, Artificial Sequence
  targeting sequence with CTCN PAM
cuccugggcaggguuggggu

SEQ ID NO: 16437 - RNA, 20 nt, Artificial Sequence
  targeting sequence with CTCN PAM
ugggcaggguuggggugggg

SEQ ID NO: 16438 - RNA, 20 nt, Artificial Sequence
  targeting sequence with CTCN PAM
ccaccccccaccccaacccu

SEQ ID NO: 16439 - RNA, 20 nt, Artificial Sequence
  targeting sequence with CTCN PAM
ccgcaacuccccacccccca

SEQ ID NO: 16440 - RNA, 20 nt, Artificial Sequence
  targeting sequence with CTCN PAM
cccguggacagagggcuugg

SEQ ID NO: 16441 - RNA, 20 nt, Artificial Sequence
  targeting sequence with CTCN PAM
cguggacagagggcuugggg

SEQ ID NO: 16442 - RNA, 20 nt, Artificial Sequence
  targeting sequence with CTCN PAM
guccacgggagagcuccccg

SEQ ID NO: 16443 - RNA, 20 nt, Artificial Sequence
  targeting sequence with CTCN PAM
guuagaauuugucuagcccc

SEQ ID NO: 16444 - RNA, 20 nt, Artificial Sequence
  targeting sequence with CTCN PAM
cacccaggaaagccacuguu

SEQ ID NO: 16445 - RNA, 20 nt, Artificial Sequence
  targeting sequence with CTCN PAM
aaagcagaaaguaaaccgaa

SEQ ID NO: 16446 - RNA, 20 nt, Artificial Sequence
  targeting sequence with CTCN PAM
agugagccacccaccuuggc

SEQ ID NO: 16447 - RNA, 20 nt, Artificial Sequence
  targeting sequence with CTCN PAM
cuugagcccaggaguucaag

SEQ ID NO: 16448 - RNA, 20 nt, Artificial Sequence
  targeting sequence with CTCN PAM
caaagugcugggacuacagg

SEQ ID NO: 16449 - RNA, 20 nt, Artificial Sequence
  targeting sequence with CTCN PAM
guggcuuaugccuguagucc

SEQ ID NO: 16450 - RNA, 20 nt, Artificial Sequence
  targeting sequence with CTCN PAM
gugaauauacuagaaaccau

SEQ ID NO: 16451 - RNA, 20 nt, Artificial Sequence
  targeting sequence with CTCN PAM
aaaauuaguggugaugguug

SEQ ID NO: 16452 - RNA, 20 nt, Artificial Sequence
  targeting sequence with CTCN PAM
ccauucguguucucccuagu

SEQ ID NO: 16453 - RNA, 20 nt, Artificial Sequence
  targeting sequence with CTCN PAM
cuagucccuggcaaucacca

SEQ ID NO: 16454 - RNA, 20 nt, Artificial Sequence
  targeting sequence with CTCN PAM
augaauuucccuauucuaaa

SEQ ID NO: 16455 - RNA, 20 nt, Artificial Sequence
  targeting sequence with CTCN PAM
ggaaaaauuaaccuacaugu

SEQ ID NO: 16456 - RNA, 20 nt, Artificial Sequence
  targeting sequence with CTCN PAM
cuuaaguaccuucaguagcu

SEQ ID NO: 16457 - RNA, 20 nt, Artificial Sequence
  targeting sequence with CTCN PAM
uaaguaccuucaguagcucu

SEQ ID NO: 16458 - RNA, 20 nt, Artificial Sequence
  targeting sequence with CTCN PAM
cuauugacuggagaacaugg

SEQ ID NO: 16459 - RNA, 20 nt, Artificial Sequence
  targeting sequence with CTCN PAM
auugacuggagaacaugguu

SEQ ID NO: 16460 - RNA, 20 nt, Artificial Sequence
  targeting sequence with CTCN PAM
agucaauagagagcuacuga

SEQ ID NO: 16461 - RNA, 20 nt, Artificial Sequence
  targeting sequence with CTCN PAM
gcuugagauucagggaccug

SEQ ID NO: 16462 - RNA, 20 nt, Artificial Sequence
  targeting sequence with CTCN PAM
agcagagaaauuuggaacca

SEQ ID NO: 16463 - RNA, 20 nt, Artificial Sequence
  targeting sequence with CTCN PAM
agcaccaauggguagaagau

SEQ ID NO: 16464 - RNA, 20 nt, Artificial Sequence
  targeting sequence with CTCN PAM
cccaaccucugggugccuaa

SEQ ID NO: 16465 - RNA, 20 nt, Artificial Sequence
  targeting sequence with CTCN PAM
gggugccuaaccuguuccca

SEQ ID NO: 16466 - RNA, 20 nt, Artificial Sequence
  targeting sequence with CTCN PAM
caucugccaaucuucagagg

SEQ ID NO: 16467 - RNA, 20 nt, Artificial Sequence
  targeting sequence with CTCN PAM
gaagauuggcagaugggaga

SEQ ID NO: 16468 - RNA, 20 nt, Artificial Sequence
  targeting sequence with CTCN PAM
aagguguccugagggugggg

SEQ ID NO: 16469 - RNA, 20 nt, Artificial Sequence
  targeting sequence with CTCN PAM
ggacaccuuggagggcaggc

SEQ ID NO: 16470 - RNA, 20 nt, Artificial Sequence
  targeting sequence with CTCN PAM
uuacccaccacggagagcag

SEQ ID NO: 16471 - RNA, 20 nt, Artificial Sequence
  targeting sequence with CTCN PAM
gugguggguaaggagcccca

SEQ ID NO: 16472 - RNA, 20 nt, Artificial Sequence
  targeting sequence with CTCN PAM
ccgugguggguaaggagccc

SEQ ID NO: 16473 - RNA, 20 nt, Artificial Sequence
  targeting sequence with CTCN PAM
cugccccccagcugcagugu

SEQ ID NO: 16474 - RNA, 20 nt, Artificial Sequence
  targeting sequence with CTCN PAM
gcacagauccagguagggaa

SEQ ID NO: 16475 - RNA, 20 nt, Artificial Sequence
  targeting sequence with CTCN PAM
aguucugcuccucacuugcu

SEQ ID NO: 16476 - RNA, 20 nt, Artificial Sequence
  targeting sequence with CTCN PAM
ucacuugcuguguggcccug

SEQ ID NO: 16477 - RNA, 20 nt, Artificial Sequence
  targeting sequence with CTCN PAM
cuugcuguguggcccugggu

SEQ ID NO: 16478 - RNA, 20 nt, Artificial Sequence
  targeting sequence with CTCN PAM
cugagccucaggugccacac

SEQ ID NO: 16479 - RNA, 20 nt, Artificial Sequence
  targeting sequence with CTCN PAM
gagccucaggugccacacug

SEQ ID NO: 16480 - RNA, 20 nt, Artificial Sequence
  targeting sequence with CTCN PAM
gagagguuagguaauuuacc

SEQ ID NO: 16481 - RNA, 20 nt, Artificial Sequence
  targeting sequence with CTCN PAM
ggugccacacugauaacaua

SEQ ID NO: 16482 - RNA, 20 nt, Artificial Sequence
  targeting sequence with CTCN PAM
auguuaucaguguggcaccu

SEQ ID NO: 16483 - RNA, 20 nt, Artificial Sequence
  targeting sequence with CTCN PAM
uggggacacugggaaggcua

SEQ ID NO: 16484 - RNA, 20 nt, Artificial Sequence
  targeting sequence with CTCN PAM
uuuagccuucccaguguccc

SEQ ID NO: 16485 - RNA, 20 nt, Artificial Sequence
  targeting sequence with CTCN PAM
gugccaggcccaggaccaag

SEQ ID NO: 16486 - RNA, 20 nt, Artificial Sequence
  targeting sequence with CTCN PAM
augcagggggcugugauuau

SEQ ID NO: 16487 - RNA, 20 nt, Artificial Sequence
  targeting sequence with CTCN PAM
caggcuguaaugauaaucac

SEQ ID NO: 16488 - RNA, 20 nt, Artificial Sequence
  targeting sequence with CTCN PAM
ucccaggcuguaaugauaau

SEQ ID NO: 16489 - RNA, 20 nt, Artificial Sequence
  targeting sequence with CTCN PAM
cuacuccucccaggcuguaa

SEQ ID NO: 16490 - RNA, 20 nt, Artificial Sequence
  targeting sequence with CTCN PAM
cucacuacuccucccaggcu

SEQ ID NO: 16491 - RNA, 20 nt, Artificial Sequence
  targeting sequence with CTCN PAM
ugcucacucacuacuccucc

SEQ ID NO: 16492 - RNA, 20 nt, Artificial Sequence
  targeting sequence with CTCN PAM
ccuacccccuggucccaggg

SEQ ID NO: 16493 - RNA, 20 nt, Artificial Sequence
  targeting sequence with CTCN PAM
uaccucaccuacccccuggu

SEQ ID NO: 16494 - RNA, 20 nt, Artificial Sequence
  targeting sequence with CTCN PAM
gagugcaggacugggacuga

SEQ ID NO: 16495 - RNA, 20 nt, Artificial Sequence
  targeting sequence with CTCN PAM
gaguccucauaccucaccua

SEQ ID NO: 16496 - RNA, 20 nt, Artificial Sequence
  targeting sequence with CTCN PAM
gucccaguccugcacucuga

SEQ ID NO: 16497 - RNA, 20 nt, Artificial Sequence
  targeting sequence with CTCN PAM
gacugggaaagcuuucuuuc

SEQ ID NO: 16498 - RNA, 20 nt, Artificial Sequence
  targeting sequence with CTCN PAM
caagcagcgugugccacccc

SEQ ID NO: 16499 - RNA, 20 nt, Artificial Sequence
  targeting sequence with CTCN PAM
cccaagcagcgugugccacc

SEQ ID NO: 16500 - RNA, 20 nt, Artificial Sequence
  targeting sequence with CTCN PAM
cucccaagcagcgugugcca

SEQ ID NO: 16501 - RNA, 20 nt, Artificial Sequence
  targeting sequence with CTCN PAM
cucucucccaagcagcgugu

SEQ ID NO: 16502 - RNA, 20 nt, Artificial Sequence
  targeting sequence with CTCN PAM
ccaucccaggagacaugcaa

SEQ ID NO: 16503 - RNA, 20 nt, Artificial Sequence
  targeting sequence with CTCN PAM
ugggauggggagcucacucu

SEQ ID NO: 16504 - RNA, 20 nt, Artificial Sequence
  targeting sequence with CTCN PAM
uugcaugucuccugggaugg

SEQ ID NO: 16505 - RNA, 20 nt, Artificial Sequence
  targeting sequence with CTCN PAM
cugcuccuccugcuccccug

SEQ ID NO: 16506 - RNA, 20 nt, Artificial Sequence
  targeting sequence with CTCN PAM
gcuccuccugcuccccugcc

SEQ ID NO: 16507 - RNA, 20 nt, Artificial Sequence
  targeting sequence with CTCN PAM
uccugcuccccugccucuac

SEQ ID NO: 16508 - RNA, 20 nt, Artificial Sequence
  targeting sequence with CTCN PAM
ugcuccccugccucuacaug

SEQ ID NO: 16509 - RNA, 20 nt, Artificial Sequence
  targeting sequence with CTCN PAM
ccugccucuacauggugccu

SEQ ID NO: 16510 - RNA, 20 nt, Artificial Sequence
  targeting sequence with CTCN PAM
acauggugccuggcagccca

SEQ ID NO: 16511 - RNA, 20 nt, Artificial Sequence
  targeting sequence with CTCN PAM
aggauagacgccaaggggga

SEQ ID NO: 16512 - RNA, 20 nt, Artificial Sequence
  targeting sequence with CTCN PAM
agcaagucacuaaguucuug

SEQ ID NO: 16513 - RNA, 20 nt, Artificial Sequence
  targeting sequence with CTCN PAM
guuuccucauaugucaagug

SEQ ID NO: 16514 - RNA, 20 nt, Artificial Sequence
  targeting sequence with CTCN PAM
uaugucaaguggggauguaa

SEQ ID NO: 16515 - RNA, 20 nt, Artificial Sequence
  targeting sequence with CTCN PAM
gcuuugcuggacugagcugu

SEQ ID NO: 16516 - RNA, 20 nt, Artificial Sequence
  targeting sequence with CTCN PAM
guccagcaaagcagagcuuu

SEQ ID NO: 16517 - RNA, 20 nt, Artificial Sequence
  targeting sequence with CTCN PAM
acagcucaguccagcaaagc

SEQ ID NO: 16518 - RNA, 20 nt, Artificial Sequence
  targeting sequence with CTCN PAM
gugaauucaggugcugggug

SEQ ID NO: 16519 - RNA, 20 nt, Artificial Sequence
  targeting sequence with CTCN PAM
cccagcaccugaauucacug

SEQ ID NO: 16520 - RNA, 20 nt, Artificial Sequence
  targeting sequence with CTCN PAM
ggcgccccauccacucacug

SEQ ID NO: 16521 - RNA, 20 nt, Artificial Sequence
  targeting sequence with CTCN PAM
cugugaugggcagcugcccc

SEQ ID NO: 16522 - RNA, 20 nt, Artificial Sequence
  targeting sequence with CTCN PAM
uugaccgagcaguggaugau

SEQ ID NO: 16523 - RNA, 20 nt, Artificial Sequence
  targeting sequence with CTCN PAM
gucaacgagucccugggcgc

SEQ ID NO: 16524 - RNA, 20 nt, Artificial Sequence
  targeting sequence with CTCN PAM
gacagaaucauccacugcuc

SEQ ID NO: 16525 - RNA, 20 nt, Artificial Sequence
  targeting sequence with CTCN PAM
ugacucuggagccccaggcu

SEQ ID NO: 16526 - RNA, 20 nt, Artificial Sequence
  targeting sequence with CTCN PAM
ggagccccaggcuguccugc

SEQ ID NO: 16527 - RNA, 20 nt, Artificial Sequence
  targeting sequence with CTCN PAM
agagucacgaguaccggguc

SEQ ID NO: 16528 - RNA, 20 nt, Artificial Sequence
  targeting sequence with CTCN PAM
uucugugggugcaaaggggg

SEQ ID NO: 16529 - RNA, 20 nt, Artificial Sequence
  targeting sequence with CTCN PAM
cccuuugcacccacagaagg

SEQ ID NO: 16530 - RNA, 20 nt, Artificial Sequence
  targeting sequence with CTCN PAM
uggggaagugcucccgaggc

SEQ ID NO: 16531 - RNA, 20 nt, Artificial Sequence
  targeting sequence with CTCN PAM
cgaggcccacagcugaggcu

SEQ ID NO: 16532 - RNA, 20 nt, Artificial Sequence
  targeting sequence with CTCN PAM
ggagcacuuccccaugagca

SEQ ID NO: 16533 - RNA, 20 nt, Artificial Sequence
  targeting sequence with CTCN PAM
gcugugggccucgggagcac

SEQ ID NO: 16534 - RNA, 20 nt, Artificial Sequence
  targeting sequence with CTCN PAM
cuugcccccgccuaccccgg

SEQ ID NO: 16535 - RNA, 20 nt, Artificial Sequence
  targeting sequence with CTCN PAM
cguggauaacgagggugaga

SEQ ID NO: 16536 - RNA, 20 nt, Artificial Sequence
  targeting sequence with CTCN PAM
uuauccacgugagcaccaaa

SEQ ID NO: 16537 - RNA, 20 nt, Artificial Sequence
  targeting sequence with CTCN PAM
cccucguuauccacgugagc

SEQ ID NO: 16538 - RNA, 20 nt, Artificial Sequence
  targeting sequence with CTCN PAM
cacccucguuauccacguga

SEQ ID NO: 16539 - RNA, 20 nt, Artificial Sequence
  targeting sequence with CTCN PAM
ccgggguggugcuugaucca

SEQ ID NO: 16540 - RNA, 20 nt, Artificial Sequence
  targeting sequence with CTCN PAM
cucuuggccguagagaacug

SEQ ID NO: 16541 - RNA, 20 nt, Artificial Sequence
  targeting sequence with CTCN PAM
uggccguagagaacuguggg

SEQ ID NO: 16542 - RNA, 20 nt, Artificial Sequence
  targeting sequence with CTCN PAM
acggccaagagggagaagug

SEQ ID NO: 16543 - RNA, 20 nt, Artificial Sequence
  targeting sequence with CTCN PAM
ccaacccacaguucucuacg

SEQ ID NO: 16544 - RNA, 20 nt, Artificial Sequence
  targeting sequence with CTCN PAM
ucgggguccaguagcuccuc

SEQ ID NO: 16545 - RNA, 20 nt, Artificial Sequence
  targeting sequence with CTCN PAM
ggguccaguagcuccucagc

SEQ ID NO: 16546 - RNA, 20 nt, Artificial Sequence
  targeting sequence with CTCN PAM
ucagccacagccaccucguc

SEQ ID NO: 16547 - RNA, 20 nt, Artificial Sequence
  targeting sequence with CTCN PAM
gccacagccaccucgucugc

SEQ ID NO: 16548 - RNA, 20 nt, Artificial Sequence
  targeting sequence with CTCN PAM
ucugcguaggcccgcccauu

SEQ ID NO: 16549 - RNA, 20 nt, Artificial Sequence
  targeting sequence with CTCN PAM
gggccccgggggacgggcag

SEQ ID NO: 16550 - RNA, 20 nt, Artificial Sequence
  targeting sequence with CTCN PAM
ucaccugcccgucccccggg

SEQ ID NO: 16551 - RNA, 20 nt, Artificial Sequence
  targeting sequence with CTCN PAM
acccucaucaccugcccguc

SEQ ID NO: 16552 - RNA, 20 nt, Artificial Sequence
  targeting sequence with CTCN PAM
acuccacccucaucaccugc

SEQ ID NO: 16553 - RNA, 20 nt, Artificial Sequence
  targeting sequence with CTCN PAM
gcaagguucucaacuccacc

SEQ ID NO: 16554 - RNA, 20 nt, Artificial Sequence
  targeting sequence with CTCN PAM
ugcaccagcucugcaagguu

SEQ ID NO: 16555 - RNA, 20 nt, Artificial Sequence
  targeting sequence with CTCN PAM
ccugcaccagcucugcaagg

SEQ ID NO: 16556 - RNA, 20 nt, Artificial Sequence
  targeting sequence with CTCN PAM
augcccaucuguccauccug

SEQ ID NO: 16557 - RNA, 20 nt, Artificial Sequence
  targeting sequence with CTCN PAM
ccaccguuucuccaugccca

SEQ ID NO: 16558 - RNA, 20 nt, Artificial Sequence
  targeting sequence with CTCN PAM
aaccccacuccccaccguuu

SEQ ID NO: 16559 - RNA, 20 nt, Artificial Sequence
  targeting sequence with CTCN PAM
ucaaaccccacuccccaccg

SEQ ID NO: 16560 - RNA, 20 nt, Artificial Sequence
  targeting sequence with CTCN PAM
gugucuccucaaaccccacu

SEQ ID NO: 16561 - RNA, 20 nt, Artificial Sequence
  targeting sequence with CTCN PAM
gccucugugucuccucaaac

SEQ ID NO: 16562 - RNA, 20 nt, Artificial Sequence
  targeting sequence with CTCN PAM
cucugccucugugucuccuc

SEQ ID NO: 16563 - RNA, 20 nt, Artificial Sequence
  targeting sequence with CTCN PAM
uccucccucugccucugugu

SEQ ID NO: 16564 - RNA, 20 nt, Artificial Sequence
  targeting sequence with CTCN PAM
guccccucuuccucccucug

SEQ ID NO: 16565 - RNA, 20 nt, Artificial Sequence
  targeting sequence with CTCN PAM
cacugcaucucuguccccuc

SEQ ID NO: 16566 - RNA, 20 nt, Artificial Sequence
  targeting sequence with CTCN PAM
ucccacugcaucucuguccc

SEQ ID NO: 16567 - RNA, 20 nt, Artificial Sequence
  targeting sequence with CTCN PAM
cacccaucaggcccccgaau

SEQ ID NO: 16568 - RNA, 20 nt, Artificial Sequence
  targeting sequence with CTCN PAM
ccgugggcucccggccaaug

SEQ ID NO: 16569 - RNA, 20 nt, Artificial Sequence
  targeting sequence with CTCN PAM
cggccaaugugguggacggc

SEQ ID NO: 16570 - RNA, 20 nt, Artificial Sequence
  targeting sequence with CTCN PAM
ccagccacugugaugguccu

SEQ ID NO: 16571 - RNA, 20 nt, Artificial Sequence
  targeting sequence with CTCN PAM
ggggcugcaggugcacugau

SEQ ID NO: 16572 - RNA, 20 nt, Artificial Sequence
  targeting sequence with CTCN PAM
cuggggcugcaggugcacug

SEQ ID NO: 16573 - RNA, 20 nt, Artificial Sequence
  targeting sequence with CTCN PAM
ccugacagggcugcggcggg

SEQ ID NO: 16574 - RNA, 20 nt, Artificial Sequence
  targeting sequence with CTCN PAM
ccuucugguacaugcagaac

SEQ ID NO: 16575 - RNA, 20 nt, Artificial Sequence
  targeting sequence with CTCN PAM
aagcgcacacacacaggcac

SEQ ID NO: 16576 - RNA, 20 nt, Artificial Sequence
  targeting sequence with CTCN PAM
ggugccugugugugugcgcu

SEQ ID NO: 16577 - RNA, 20 nt, Artificial Sequence
  targeting sequence with CTCN PAM
ggcauggugcaggcgaugcu

SEQ ID NO: 16578 - RNA, 20 nt, Artificial Sequence
  targeting sequence with CTCN PAM
ccccaggcgcacagauacca

SEQ ID NO: 16579 - RNA, 20 nt, Artificial Sequence
  targeting sequence with CTCN PAM
cccaccgccaaugccccuga

SEQ ID NO: 16580 - RNA, 20 nt, Artificial Sequence
  targeting sequence with CTCN PAM
ggggcauuggcgguggguga

SEQ ID NO: 16581 - RNA, 20 nt, Artificial Sequence
  targeting sequence with CTCN PAM
uugacuggucccaacucauc

SEQ ID NO: 16582 - RNA, 20 nt, Artificial Sequence
  targeting sequence with CTCN PAM
ucuucugcccaguuagugcc

SEQ ID NO: 16583 - RNA, 20 nt, Artificial Sequence
  targeting sequence with CTCN PAM
uccaggaagccuucccaggu

SEQ ID NO: 16584 - RNA, 20 nt, Artificial Sequence
  targeting sequence with CTCN PAM
aggaagccuucccaggucuu

SEQ ID NO: 16585 - RNA, 20 nt, Artificial Sequence
  targeting sequence with CTCN PAM
cccgccuccaacccugguga

SEQ ID NO: 16586 - RNA, 20 nt, Artificial Sequence
  targeting sequence with CTCN PAM
cgccuccaacccuggugaag

SEQ ID NO: 16587 - RNA, 20 nt, Artificial Sequence
  targeting sequence with CTCN PAM
aacccuggugaagucucucu

SEQ ID NO: 16588 - RNA, 20 nt, Artificial Sequence
  targeting sequence with CTCN PAM
cuccccagaucccugaaggc

SEQ ID NO: 16589 - RNA, 20 nt, Artificial Sequence
  targeting sequence with CTCN PAM
ccccagaucccugaaggcac

SEQ ID NO: 16590 - RNA, 20 nt, Artificial Sequence
  targeting sequence with CTCN PAM
ccagaucccugaaggcacug

SEQ ID NO: 16591 - RNA, 20 nt, Artificial Sequence
  targeting sequence with CTCN PAM
caauccuagccccacuggau

SEQ ID NO: 16592 - RNA, 20 nt, Artificial Sequence
  targeting sequence with CTCN PAM
agggaagggcagacauaccc

SEQ ID NO: 16593 - RNA, 20 nt, Artificial Sequence
  targeting sequence with CTCN PAM
ucuuggugucccagcaaugc

SEQ ID NO: 16594 - RNA, 20 nt, Artificial Sequence
  targeting sequence with CTCN PAM
uggugucccagcaaugccca

SEQ ID NO: 16595 - RNA, 20 nt, Artificial Sequence
  targeting sequence with CTCN PAM
aaccacaccccugccacuca

SEQ ID NO: 16596 - RNA, 20 nt, Artificial Sequence
  targeting sequence with CTCN PAM
ccacaccccugggccagcca

SEQ ID NO: 16597 - RNA, 20 nt, Artificial Sequence
  targeting sequence with CTCN PAM
uuacagcuaucacuuaugga

SEQ ID NO: 16598 - RNA, 20 nt, Artificial Sequence
  targeting sequence with CTCN PAM
auaagugauagcuguaauga

SEQ ID NO: 16599 - RNA, 20 nt, Artificial Sequence
  targeting sequence with CTCN PAM
gcugguaagaauaguaccag

SEQ ID NO: 16600 - RNA, 20 nt, Artificial Sequence
  targeting sequence with CTCN PAM
guuuccucagcugguaagaa

SEQ ID NO: 16601 - RNA, 20 nt, Artificial Sequence
  targeting sequence with CTCN PAM
gagaggagaaggggcuuggc

SEQ ID NO: 16602 - RNA, 20 nt, Artificial Sequence
  targeting sequence with CTCN PAM
gagccucaguuuccucagcu

SEQ ID NO: 16603 - RNA, 20 nt, Artificial Sequence
  targeting sequence with CTCN PAM
cugagccucaguuuccucag

SEQ ID NO: 16604 - RNA, 20 nt, Artificial Sequence
  targeting sequence with CTCN PAM
ucucugagccucaguuuccu

SEQ ID NO: 16605 - RNA, 20 nt, Artificial Sequence
  targeting sequence with CTCN PAM
ugggucuucauuggcugugu

SEQ ID NO: 16606 - RNA, 20 nt, Artificial Sequence
  targeting sequence with CTCN PAM
cuugggucuucauuggcugu

SEQ ID NO: 16607 - RNA, 20 nt, Artificial Sequence
  targeting sequence with CTCN PAM
aggaugucaccuccagcccg

SEQ ID NO: 16608 - RNA, 20 nt, Artificial Sequence
  targeting sequence with CTCN PAM
agcccgccagcccccaagcc

SEQ ID NO: 16609 - RNA, 20 nt, Artificial Sequence
  targeting sequence with CTCN PAM
gggcuggaagggaugggcca

SEQ ID NO: 16610 - RNA, 20 nt, Artificial Sequence
  targeting sequence with CTCN PAM
gggccuggcccaucccuucc

SEQ ID NO: 16611 - RNA, 20 nt, Artificial Sequence
  targeting sequence with CTCN PAM
gugcaggggucugugucguu

SEQ ID NO: 16612 - RNA, 20 nt, Artificial Sequence
  targeting sequence with CTCN PAM
agguccuggugaacgacaca

SEQ ID NO: 16613 - RNA, 20 nt, Artificial Sequence
  targeting sequence with CTCN PAM
gagccuacauggaggucauu

SEQ ID NO: 16614 - RNA, 20 nt, Artificial Sequence
  targeting sequence with CTCN PAM
gagcuccagguccuggugaa

SEQ ID NO: 16615 - RNA, 20 nt, Artificial Sequence
  targeting sequence with CTCN PAM
auguaggcuccgagcuccag

SEQ ID NO: 16616 - RNA, 20 nt, Artificial Sequence
  targeting sequence with CTCN PAM
agggaguggaccaggggcag

SEQ ID NO: 16617 - RNA, 20 nt, Artificial Sequence
  targeting sequence with CTCN PAM
cuggagccuaccaugggccc

SEQ ID NO: 16618 - RNA, 20 nt, Artificial Sequence
  targeting sequence with CTCN PAM
cacagcugccccugguccac

SEQ ID NO: 16619 - RNA, 20 nt, Artificial Sequence
  targeting sequence with CTCN PAM
ggccagcccccgggagugug

SEQ ID NO: 16620 - RNA, 20 nt, Artificial Sequence
  targeting sequence with CTCN PAM
cgggggcuggcccgaggccc

SEQ ID NO: 16621 - RNA, 20 nt, Artificial Sequence
  targeting sequence with CTCN PAM
uacgugguaagggggggcug

SEQ ID NO: 16622 - RNA, 20 nt, Artificial Sequence
  targeting sequence with CTCN PAM
uuagaggcguucacggucac

SEQ ID NO: 16623 - RNA, 20 nt, Artificial Sequence
  targeting sequence with CTCN PAM
aaggagggcaagucccggga

SEQ ID NO: 16624 - RNA, 20 nt, Artificial Sequence
  targeting sequence with CTCN PAM
gguguggugaccgugaacgc

SEQ ID NO: 16625 - RNA, 20 nt, Artificial Sequence
  targeting sequence with CTCN PAM
cagguguggugaccgugaac

SEQ ID NO: 16626 - RNA, 20 nt, Artificial Sequence
  targeting sequence with CTCN PAM
ggaucgugugugucacaggg

SEQ ID NO: 16627 - RNA, 20 nt, Artificial Sequence
  targeting sequence with CTCN PAM
ccucaggaucguguguguca

SEQ ID NO: 16628 - RNA, 20 nt, Artificial Sequence
  targeting sequence with CTCN PAM
aggguggccgugggggccaa

SEQ ID NO: 16629 - RNA, 20 nt, Artificial Sequence
  targeting sequence with CTCN PAM
gggaucgccccauuccacgc

SEQ ID NO: 16630 - RNA, 20 nt, Artificial Sequence
  targeting sequence with CTCN PAM
gaucaugagaacgucugcug

SEQ ID NO: 16631 - RNA, 20 nt, Artificial Sequence
  targeting sequence with CTCN PAM
ugaucagagacccuuuuguc

SEQ ID NO: 16632 - RNA, 20 nt, Artificial Sequence
  targeting sequence with CTCN PAM
uccacacgccugaugcacgg

SEQ ID NO: 16633 - RNA, 20 nt, Artificial Sequence
  targeting sequence with CTCN PAM
caaaaggaaagccaguucag

SEQ ID NO: 16634 - RNA, 20 nt, Artificial Sequence
  targeting sequence with CTCN PAM
gcucacgcguauuuccuacg

SEQ ID NO: 16635 - RNA, 20 nt, Artificial Sequence
  targeting sequence with CTCN PAM
cgcguauuuccuacggcccc

SEQ ID NO: 16636 - RNA, 20 nt, Artificial Sequence
  targeting sequence with CTCN PAM
gggccagucacagaucucua

SEQ ID NO: 16637 - RNA, 20 nt, Artificial Sequence
  targeting sequence with CTCN PAM
aaaccaugccaguagcccca

SEQ ID NO: 16638 - RNA, 20 nt, Artificial Sequence
  targeting sequence with CTCN PAM
gagcaaggcuuagguggaag

SEQ ID NO: 16639 - RNA, 20 nt, Artificial Sequence
  targeting sequence with CTCN PAM
gaggaaaaucauuugcaauu

SEQ ID NO: 16640 - RNA, 20 nt, Artificial Sequence
  targeting sequence with CTCN PAM
caggcugcccuagcacagcc

SEQ ID NO: 16641 - RNA, 20 nt, Artificial Sequence
  targeting sequence with CTCN PAM
gggaagcccucacaggcugc

SEQ ID NO: 16642 - RNA, 20 nt, Artificial Sequence
  targeting sequence with CTCN PAM
ucugggaagcccucacaggc

SEQ ID NO: 16643 - RNA, 20 nt, Artificial Sequence
  targeting sequence with CTCN PAM
gaugcccacuccucugggaa

SEQ ID NO: 16644 - RNA, 20 nt, Artificial Sequence
  targeting sequence with CTCN PAM
ggcucugaugcccacuccuc

SEQ ID NO: 16645 - RNA, 20 nt, Artificial Sequence
  targeting sequence with CTCN PAM
agcucuggcucugaugccca

SEQ ID NO: 16646 - RNA, 20 nt, Artificial Sequence
  targeting sequence with CTCN PAM
aggccugugccgaagccauu

SEQ ID NO: 16647 - RNA, 20 nt, Artificial Sequence
  targeting sequence with CTCN PAM
gcugcuuucuggaagacugu

SEQ ID NO: 16648 - RNA, 20 nt, Artificial Sequence
  targeting sequence with CTCN PAM
cucugcugcuuucuggaaga

SEQ ID NO: 16649 - RNA, 20 nt, Artificial Sequence
  targeting sequence with CTCN PAM
guccucacucugcugcuuuc

SEQ ID NO: 16650 - RNA, 20 nt, Artificial Sequence
  targeting sequence with CTCN PAM
ccauccucuguccucacucu

SEQ ID NO: 16651 - RNA, 20 nt, Artificial Sequence
  targeting sequence with CTCN PAM
cuccccauccucuguccuca

SEQ ID NO: 16652 - RNA, 20 nt, Artificial Sequence
  targeting sequence with CTCN PAM
ucccuccccauccucugucc

SEQ ID NO: 16653 - RNA, 20 nt, Artificial Sequence
  targeting sequence with CTCN PAM
cuccucccuccccauccucu

SEQ ID NO: 16654 - RNA, 20 nt, Artificial Sequence
  targeting sequence with CTCN PAM
ucacuccucccuccccaucc

SEQ ID NO: 16655 - RNA, 20 nt, Artificial Sequence
  targeting sequence with CTCN PAM
guccuccucacuccucccuc

SEQ ID NO: 16656 - RNA, 20 nt, Artificial Sequence
  targeting sequence with CTCN PAM
gcucuguccuccucacuccu

SEQ ID NO: 16657 - RNA, 20 nt, Artificial Sequence
  targeting sequence with CTCN PAM
agcagugccagccucugcuc

SEQ ID NO: 16658 - RNA, 20 nt, Artificial Sequence
  targeting sequence with CTCN PAM
cuccuccgacaccguguauc

SEQ ID NO: 16659 - RNA, 20 nt, Artificial Sequence
  targeting sequence with CTCN PAM
uccgacaccguguaucuguc

SEQ ID NO: 16660 - RNA, 20 nt, Artificial Sequence
  targeting sequence with CTCN PAM
gacaccguguaucugucagg

SEQ ID NO: 16661 - RNA, 20 nt, Artificial Sequence
  targeting sequence with CTCN PAM
caggccacaccaccaaucca

SEQ ID NO: 16662 - RNA, 20 nt, Artificial Sequence
  targeting sequence with CTCN PAM
gugacguggcccacggcgug

SEQ ID NO: 16663 - RNA, 20 nt, Artificial Sequence
  targeting sequence with CTCN PAM
gauggucagcagggucccac

SEQ ID NO: 16664 - RNA, 20 nt, Artificial Sequence
  targeting sequence with CTCN PAM
ggggcucaaucugccaggug

SEQ ID NO: 16665 - RNA, 20 nt, Artificial Sequence
  targeting sequence with CTCN PAM
aucugccaggugacccgaga

SEQ ID NO: 16666 - RNA, 20 nt, Artificial Sequence
  targeting sequence with CTCN PAM
ggucaccuggcagauugagc

SEQ ID NO: 16667 - RNA, 20 nt, Artificial Sequence
  targeting sequence with CTCN PAM
cgggucaccuggcagauuga

SEQ ID NO: 16668 - RNA, 20 nt, Artificial Sequence
  targeting sequence with CTCN PAM
cucgggucaccuggcagauu

SEQ ID NO: 16669 - RNA, 20 nt, Artificial Sequence
  targeting sequence with CTCN PAM
gaucccauucgccccucucu

SEQ ID NO: 16670 - RNA, 20 nt, Artificial Sequence
  targeting sequence with CTCN PAM
aagcagugggucugcacggc

SEQ ID NO: 16671 - RNA, 20 nt, Artificial Sequence
  targeting sequence with CTCN PAM
agaccuuccucuaagcagug

SEQ ID NO: 16672 - RNA, 20 nt, Artificial Sequence
  targeting sequence with CTCN PAM
gguggggcugggacuguggc

SEQ ID NO: 16673 - RNA, 20 nt, Artificial Sequence
  targeting sequence with CTCN PAM
uugccagcacagugaccugc

SEQ ID NO: 16674 - RNA, 20 nt, Artificial Sequence
  targeting sequence with CTCN PAM
guaaugcacacccacauccu

SEQ ID NO: 16675 - RNA, 20 nt, Artificial Sequence
  targeting sequence with CTCN PAM
uggaggaugcugaggucagc

SEQ ID NO: 16676 - RNA, 20 nt, Artificial Sequence
  targeting sequence with CTCN PAM
aggagacccccuaaguagcg

SEQ ID NO: 16677 - RNA, 20 nt, Artificial Sequence
  targeting sequence with CTCN PAM
gcauccuccaggagaccccc

SEQ ID NO: 16678 - RNA, 20 nt, Artificial Sequence
  targeting sequence with CTCN PAM
uggaagcugaccucagcauc

SEQ ID NO: 16679 - RNA, 20 nt, Artificial Sequence
  targeting sequence with CTCN PAM
gugucuccuccacgccacac

SEQ ID NO: 16680 - RNA, 20 nt, Artificial Sequence
  targeting sequence with CTCN PAM
ggcacggcgcaugcgcagug

SEQ ID NO: 16681 - RNA, 20 nt, Artificial Sequence
  targeting sequence with CTCN PAM
acugggcaugcuuaccgcgu

SEQ ID NO: 16682 - RNA, 20 nt, Artificial Sequence
  targeting sequence with CTCN PAM
ggggcggggcaggugccagc

SEQ ID NO: 16683 - RNA, 20 nt, Artificial Sequence
  targeting sequence with CTCN PAM
gcagcccauggcuggcaccu

SEQ ID NO: 16684 - RNA, 20 nt, Artificial Sequence
  targeting sequence with CTCN PAM
acaugcacaggugacccagg

SEQ ID NO: 16685 - RNA, 20 nt, Artificial Sequence
  targeting sequence with CTCN PAM
ccagucauggucuauaacug

SEQ ID NO: 16686 - RNA, 20 nt, Artificial Sequence
  targeting sequence with CTCN PAM
gucagccccgcucugcggug

SEQ ID NO: 16687 - RNA, 20 nt, Artificial Sequence
  targeting sequence with CTCN PAM
gcggugcaugccccaacacc

SEQ ID NO: 16688 - RNA, 20 nt, Artificial Sequence
  targeting sequence with CTCN PAM
gggccucagugcagugggug

SEQ ID NO: 16689 - RNA, 20 nt, Artificial Sequence
  targeting sequence with CTCN PAM
gggcuguccaggaaucgggc

SEQ ID NO: 16690 - RNA, 20 nt, Artificial Sequence
  targeting sequence with CTCN PAM
aacuaaaggggcggccagcc

SEQ ID NO: 16691 - RNA, 20 nt, Artificial Sequence
  targeting sequence with CTCN PAM
gccuccaacuaaaggggcgg

SEQ ID NO: 16692 - RNA, 20 nt, Artificial Sequence
  targeting sequence with CTCN PAM
uccgggucgugugcagcugc

SEQ ID NO: 16693 - RNA, 20 nt, Artificial Sequence
  targeting sequence with CTCN PAM
uuucugcccuuuugcagcug

SEQ ID NO: 16694 - RNA, 20 nt, Artificial Sequence
  targeting sequence with CTCN PAM
gcccaugcuggagucacccc

SEQ ID NO: 16695 - RNA, 20 nt, Artificial Sequence
  targeting sequence with CTCN PAM
agcaugggcggagggcgggc

SEQ ID NO: 16696 - RNA, 20 nt, Artificial Sequence
  targeting sequence with CTCN PAM
ccaccaccuggucacagcgu

SEQ ID NO: 16697 - RNA, 20 nt, Artificial Sequence
  targeting sequence with CTCN PAM
uucacccacacagccucgaa

SEQ ID NO: 16698 - RNA, 20 nt, Artificial Sequence
  targeting sequence with CTCN PAM
aagaucuccuccagcccaaa

SEQ ID NO: 16699 - RNA, 20 nt, Artificial Sequence
  targeting sequence with CTCN PAM
uccagcccaaaacuacacuc

SEQ ID NO: 16700 - RNA, 20 nt, Artificial Sequence
  targeting sequence with CTCN PAM
agcccaaaacuacacuccag

SEQ ID NO: 16701 - RNA, 20 nt, Artificial Sequence
  targeting sequence with CTCN PAM
agggcugcacccugugggaa

SEQ ID NO: 16702 - RNA, 20 nt, Artificial Sequence
  targeting sequence with CTCN PAM
cuguuucccacagggugcag

SEQ ID NO: 16703 - RNA, 20 nt, Artificial Sequence
  targeting sequence with CTCN PAM
cacucccuguuucccacagg

SEQ ID NO: 16704 - RNA, 20 nt, Artificial Sequence
  targeting sequence with CTCN PAM
aacccgccucccacucccug

SEQ ID NO: 16705 - RNA, 20 nt, Artificial Sequence
  targeting sequence with CTCN PAM
ucaaacccgccucccacucc

SEQ ID NO: 16706 - RNA, 20 nt, Artificial Sequence
  targeting sequence with CTCN PAM
acacagccuucaggauccag

SEQ ID NO: 16707 - RNA, 20 nt, Artificial Sequence
  targeting sequence with CTCN PAM
ggagcagcaccaauacauau

SEQ ID NO: 16708 - RNA, 20 nt, Artificial Sequence
  targeting sequence with CTCN PAM
ugagaaggccagaugagccu

SEQ ID NO: 16709 - RNA, 20 nt, Artificial Sequence
  targeting sequence with CTCN PAM
gcaaauauguauuggugcug

SEQ ID NO: 16710 - RNA, 20 nt, Artificial Sequence
  targeting sequence with CTCN PAM
gguuuuguguauuacgccaa

SEQ ID NO: 16711 - RNA, 20 nt, Artificial Sequence
  targeting sequence with CTCN PAM
gccacgcagcuggcugggug

SEQ ID NO: 16712 - RNA, 20 nt, Artificial Sequence
  targeting sequence with CTCN PAM
uggcaggggcuggagcucug

SEQ ID NO: 16713 - RNA, 20 nt, Artificial Sequence
  targeting sequence with CTCN PAM
cacgggccucagcuccucca

SEQ ID NO: 16714 - RNA, 20 nt, Artificial Sequence
  targeting sequence with CTCN PAM
cgggccucagcuccuccaug

SEQ ID NO: 16715 - RNA, 20 nt, Artificial Sequence
  targeting sequence with CTCN PAM
gcuccuccauggaaguaaca

SEQ ID NO: 16716 - RNA, 20 nt, Artificial Sequence
  targeting sequence with CTCN PAM
uccauggaaguaacagaugg

SEQ ID NO: 16717 - RNA, 20 nt, Artificial Sequence
  targeting sequence with CTCN PAM
auggaaguaacagauggcga

SEQ ID NO: 16718 - RNA, 20 nt, Artificial Sequence
  targeting sequence with CTCN PAM
ccaucuguuacuuccaugga

SEQ ID NO: 16719 - RNA, 20 nt, Artificial Sequence
  targeting sequence with CTCN PAM
cuggaacucgccaucuguua

SEQ ID NO: 16720 - RNA, 20 nt, Artificial Sequence
  targeting sequence with CTCN PAM
ccaccucccuggaacucgcc

SEQ ID NO: 16721 - RNA, 20 nt, Artificial Sequence
  targeting sequence with CTCN PAM
aggacucgucaacgcuuccc

SEQ ID NO: 16722 - RNA, 20 nt, Artificial Sequence
  targeting sequence with CTCN PAM
ucaacgcuucccacccagga

SEQ ID NO: 16723 - RNA, 20 nt, Artificial Sequence
  targeting sequence with CTCN PAM
aggagggguccagaaaggag

SEQ ID NO: 16724 - RNA, 20 nt, Artificial Sequence
  targeting sequence with CTCN PAM
uggaggcgcguccugggugg

SEQ ID NO: 16725 - RNA, 20 nt, Artificial Sequence
  targeting sequence with CTCN PAM
uuucuggaccccuccuggag

SEQ ID NO: 16726 - RNA, 20 nt, Artificial Sequence
  targeting sequence with CTCN PAM
ucuuugcaacuagccccgcc

SEQ ID NO: 16727 - RNA, 20 nt, Artificial Sequence
  targeting sequence with CTCN PAM
ccaaccagugcucgucuuug

SEQ ID NO: 16728 - RNA, 20 nt, Artificial Sequence
  targeting sequence with CTCN PAM
ggacuccccaaccagugcuc

SEQ ID NO: 16729 - RNA, 20 nt, Artificial Sequence
  targeting sequence with CTCN PAM
uggccccacccggcgcuggc

SEQ ID NO: 16730 - RNA, 20 nt, Artificial Sequence
  targeting sequence with CTCN PAM
ggccaacacugccuuuuucc

SEQ ID NO: 16731 - RNA, 20 nt, Artificial Sequence
  targeting sequence with CTCN PAM
cagaacauccuggugccucu

SEQ ID NO: 16732 - RNA, 20 nt, Artificial Sequence
  targeting sequence with CTCN PAM
ccccuggcacccgugccuac

SEQ ID NO: 16733 - RNA, 20 nt, Artificial Sequence
  targeting sequence with CTCN PAM
caccccuggcacccgugccu

SEQ ID NO: 16734 - RNA, 20 nt, Artificial Sequence
  targeting sequence with CTCN PAM
ggacugcccccggacccugc

SEQ ID NO: 16735 - RNA, 20 nt, Artificial Sequence
  targeting sequence with CTCN PAM
gcagaggaaacagaaggaga

SEQ ID NO: 16736 - RNA, 20 nt, Artificial Sequence
  targeting sequence with CTCN PAM
gcagagcccucaggacugcc

SEQ ID NO: 16737 - RNA, 20 nt, Artificial Sequence
  targeting sequence with CTCN PAM
uucuguuuccucugcagagc

SEQ ID NO: 16738 - RNA, 20 nt, Artificial Sequence
  targeting sequence with CTCN PAM
ccuucuguuuccucugcaga

SEQ ID NO: 16739 - RNA, 20 nt, Artificial Sequence
  targeting sequence with CTCN PAM
aggcccagcuccucccuguc

SEQ ID NO: 16740 - RNA, 20 nt, Artificial Sequence
  targeting sequence with CTCN PAM
ucccugucucugggccucac

SEQ ID NO: 16741 - RNA, 20 nt, Artificial Sequence
  targeting sequence with CTCN PAM
cugucucugggccucaccuu

SEQ ID NO: 16742 - RNA, 20 nt, Artificial Sequence
  targeting sequence with CTCN PAM
gggccucaccuuucccaaua

SEQ ID NO: 16743 - RNA, 20 nt, Artificial Sequence
  targeting sequence with CTCN PAM
ccuuucccaauaguagaaca

SEQ ID NO: 16744 - RNA, 20 nt, Artificial Sequence
  targeting sequence with CTCN PAM
guuucuuauucuguacagug

SEQ ID NO: 16745 - RNA, 20 nt, Artificial Sequence
  targeting sequence with CTCN PAM
cccaggccucaguuucuuau

SEQ ID NO: 16746 - RNA, 20 nt, Artificial Sequence
  targeting sequence with CTCN PAM
gccccucccccaggccucag

SEQ ID NO: 16747 - RNA, 20 nt, Artificial Sequence
  targeting sequence with CTCN PAM
ggucucugccccucccccag

SEQ ID NO: 16748 - RNA, 20 nt, Artificial Sequence
  targeting sequence with CTCN PAM
gagcugggagguauggaccc

SEQ ID NO: 16749 - RNA, 20 nt, Artificial Sequence
  targeting sequence with CTCN PAM
gagcgaucacuaagguggac

SEQ ID NO: 16750 - RNA, 20 nt, Artificial Sequence
  targeting sequence with CTCN PAM
cagcucagagcgaucacuaa

SEQ ID NO: 16751 - RNA, 20 nt, Artificial Sequence
  targeting sequence with CTCN PAM
uauuuugucccaaggccuuu

SEQ ID NO: 16752 - RNA, 20 nt, Artificial Sequence
  targeting sequence with CTCN PAM
ucugguguagaauaaagaag

SEQ ID NO: 16753 - RNA, 20 nt, Artificial Sequence
  targeting sequence with CTCN PAM
caucugguguagaauaaaga

SEQ ID NO: 16754 - RNA, 20 nt, Artificial Sequence
  targeting sequence with CTCN PAM
gggaccccagcccaaaaccg

SEQ ID NO: 16755 - RNA, 20 nt, Artificial Sequence
  targeting sequence with CTCN PAM
uuccacuguaggcaaacugc

SEQ ID NO: 16756 - RNA, 20 nt, Artificial Sequence
  targeting sequence with CTCN PAM
aguuguccagaccauuugcu

SEQ ID NO: 16757 - RNA, 20 nt, Artificial Sequence
  targeting sequence with CTCN PAM
gauuccgugggguuuacaca

SEQ ID NO: 16758 - RNA, 20 nt, Artificial Sequence
  targeting sequence with CTCN PAM
ggccucgaagccacugccag

SEQ ID NO: 16759 - RNA, 20 nt, Artificial Sequence
  targeting sequence with CTCN PAM
aagccacugccaggucugcu

SEQ ID NO: 16760 - RNA, 20 nt, Artificial Sequence
  targeting sequence with CTCN PAM
guccuccuggccccagccca

SEQ ID NO: 16761 - RNA, 20 nt, Artificial Sequence
  targeting sequence with CTCN PAM
uggccccagcccacccggug

SEQ ID NO: 16762 - RNA, 20 nt, Artificial Sequence
  targeting sequence with CTCN PAM
gugugaacagcaggcagcag

SEQ ID NO: 16763 - RNA, 20 nt, Artificial Sequence
  targeting sequence with CTCN PAM
gaacugauguuuaauuuggc

SEQ ID NO: 16764 - RNA, 20 nt, Artificial Sequence
  targeting sequence with CTCN PAM
ugcacgcccggggcagagcu

SEQ ID NO: 16765 - RNA, 20 nt, Artificial Sequence
  targeting sequence with CTCN PAM
gccccgggcgugcaggaggc

SEQ ID NO: 16766 - RNA, 20 nt, Artificial Sequence
  targeting sequence with CTCN PAM
ucggcuaguuacuguaauuc

SEQ ID NO: 16767 - RNA, 20 nt, Artificial Sequence
  targeting sequence with CTCN PAM
gacaggcuuccucugugccu

SEQ ID NO: 16768 - RNA, 20 nt, Artificial Sequence
  targeting sequence with CTCN PAM
gugccuccaccccagcuccu

SEQ ID NO: 16769 - RNA, 20 nt, Artificial Sequence
  targeting sequence with CTCN PAM
accccagcuccuggccugaa

SEQ ID NO: 16770 - RNA, 20 nt, Artificial Sequence
  targeting sequence with CTCN PAM
uggccugaagaacugcagac

SEQ ID NO: 16771 - RNA, 20 nt, Artificial Sequence
  targeting sequence with CTCN PAM
guuuccccaucuauaaaaug

SEQ ID NO: 16772 - RNA, 20 nt, Artificial Sequence
  targeting sequence with CTCN PAM
gugccucuguuuccccaucu

SEQ ID NO: 16773 - RNA, 20 nt, Artificial Sequence
  targeting sequence with CTCN PAM
cugugccucuguuuccccau

SEQ ID NO: 16774 - RNA, 20 nt, Artificial Sequence
  targeting sequence with CTCN PAM
ggaaucccugaagcccuguc

SEQ ID NO: 16775 - RNA, 20 nt, Artificial Sequence
  targeting sequence with CTCN PAM
gagcucagugcaaaaaggcu

SEQ ID NO: 16776 - RNA, 20 nt, Artificial Sequence
  targeting sequence with CTCN PAM
gagaaucuucucaggaaucc

SEQ ID NO: 16777 - RNA, 20 nt, Artificial Sequence
  targeting sequence with CTCN PAM
gugcaaaaaggcuggggcug

SEQ ID NO: 16778 - RNA, 20 nt, Artificial Sequence
  targeting sequence with CTCN PAM
gcagccccagccuuuuugca

SEQ ID NO: 16779 - RNA, 20 nt, Artificial Sequence
  targeting sequence with CTCN PAM
gggcgcuggggcugcuuccc

SEQ ID NO: 16780 - RNA, 20 nt, Artificial Sequence
  targeting sequence with CTCN PAM
ucuugcucccaccccauuua

SEQ ID NO: 16781 - RNA, 20 nt, Artificial Sequence
  targeting sequence with CTCN PAM
ugcucccaccccauuuaguu

SEQ ID NO: 16782 - RNA, 20 nt, Artificial Sequence
  targeting sequence with CTCN PAM
caccccauuuaguugauuaa

SEQ ID NO: 16783 - RNA, 20 nt, Artificial Sequence
  targeting sequence with CTCN PAM
gcuguuucauuaccuuuuuu

SEQ ID NO: 16784 - RNA, 20 nt, Artificial Sequence
  targeting sequence with CTCN PAM
gccucugcuguuucauuacc

SEQ ID NO: 16785 - RNA, 20 nt, Artificial Sequence
  targeting sequence with CTCN PAM
ccaaaccccacgguaagcca

SEQ ID NO: 16786 - RNA, 20 nt, Artificial Sequence
  targeting sequence with CTCN PAM
caccgagacugguuggaaac

SEQ ID NO: 16787 - RNA, 20 nt, Artificial Sequence
  targeting sequence with CTCN PAM
gugcgaggccucaccaaacc

SEQ ID NO: 16788 - RNA, 20 nt, Artificial Sequence
  targeting sequence with CTCN PAM
uguguuuccaaccagucucg

SEQ ID NO: 16789 - RNA, 20 nt, Artificial Sequence
  targeting sequence with CTCN PAM
uugucuuccagcuguaccag

SEQ ID NO: 16790 - RNA, 20 nt, Artificial Sequence
  targeting sequence with CTCN PAM
acuccugguuccccaccccu

SEQ ID NO: 16791 - RNA, 20 nt, Artificial Sequence
  targeting sequence with CTCN PAM
ugguuccccaccccucaacu

SEQ ID NO: 16792 - RNA, 20 nt, Artificial Sequence
  targeting sequence with CTCN PAM
acucaucccugucccaggaa

SEQ ID NO: 16793 - RNA, 20 nt, Artificial Sequence
  targeting sequence with CTCN PAM
cuaccuuaaagacccaaucu

SEQ ID NO: 16794 - RNA, 20 nt, Artificial Sequence
  targeting sequence with CTCN PAM
uguuagcaggcagcucacua

SEQ ID NO: 16795 - RNA, 20 nt, Artificial Sequence
  targeting sequence with CTCN PAM
uauuuguauaccucuuguua

SEQ ID NO: 16796 - RNA, 20 nt, Artificial Sequence
  targeting sequence with CTCN PAM
cuccaccaacuggaggcaag

SEQ ID NO: 16797 - RNA, 20 nt, Artificial Sequence
  targeting sequence with CTCN PAM
accaacuggaggcaagccac

SEQ ID NO: 16798 - RNA, 20 nt, Artificial Sequence
  targeting sequence with CTCN PAM
aguugguggagggaggaacg

SEQ ID NO: 16799 - RNA, 20 nt, Artificial Sequence
  targeting sequence with CTCN PAM
cgcuguguggggguacacuu

SEQ ID NO: 16800 - RNA, 20 nt, Artificial Sequence
  targeting sequence with CTCN PAM
cagacaucucaacagucacg

SEQ ID NO: 16801 - RNA, 20 nt, Artificial Sequence
  targeting sequence with CTCN PAM
acagucacguggucuggaau

SEQ ID NO: 16802 - RNA, 20 nt, Artificial Sequence
  targeting sequence with CTCN PAM
cccauccauuccagaccacg

SEQ ID NO: 16803 - RNA, 20 nt, Artificial Sequence
  targeting sequence with CTCN PAM
ccuggcucccccauccauuc

SEQ ID NO: 16804 - RNA, 20 nt, Artificial Sequence
  targeting sequence with CTCN PAM
ggggcugugccaacagcaca

SEQ ID NO: 16805 - RNA, 20 nt, Artificial Sequence
  targeting sequence with CTCN PAM
gcaggagguugcaguaggca

SEQ ID NO: 16806 - RNA, 20 nt, Artificial Sequence
  targeting sequence with CTCN PAM
ugccgagggaccaguuuccg

SEQ ID NO: 16807 - RNA, 20 nt, Artificial Sequence
  targeting sequence with CTCN PAM
ggucccaggcccugccuuug

SEQ ID NO: 16808 - RNA, 20 nt, Artificial Sequence
  targeting sequence with CTCN PAM
augccacugaggcugggcag

SEQ ID NO: 16809 - RNA, 20 nt, Artificial Sequence
  targeting sequence with CTCN PAM
guggcauggagauggccugu

SEQ ID NO: 16810 - RNA, 20 nt, Artificial Sequence
  targeting sequence with CTCN PAM
ggcagccugcccagccucag

SEQ ID NO: 16811 - RNA, 20 nt, Artificial Sequence
  targeting sequence with CTCN PAM
uugcccccagggcaugaucc

SEQ ID NO: 16812 - RNA, 20 nt, Artificial Sequence
  targeting sequence with CTCN PAM
gcucuggggguccaggcuau

SEQ ID NO: 16813 - RNA, 20 nt, Artificial Sequence
  targeting sequence with CTCN PAM
ggggguccaggcuaugcucc

SEQ ID NO: 16814 - RNA, 20 nt, Artificial Sequence
  targeting sequence with CTCN PAM
ggacacaggggagccucccu

SEQ ID NO: 16815 - RNA, 20 nt, Artificial Sequence
  targeting sequence with CTCN PAM
cccaggacucacuggguacu

SEQ ID NO: 16816 - RNA, 20 nt, Artificial Sequence
  targeting sequence with CTCN PAM
cuggguacuccuggcgcaca

SEQ ID NO: 16817 - RNA, 20 nt, Artificial Sequence
  targeting sequence with CTCN PAM
uggcgcacaucgaucucgga

SEQ ID NO: 16818 - RNA, 20 nt, Artificial Sequence
  targeting sequence with CTCN PAM
gaaggcaggacggucauggc

SEQ ID NO: 16819 - RNA, 20 nt, Artificial Sequence
  targeting sequence with CTCN PAM
cuggcacugguccagaaaug

SEQ ID NO: 16820 - RNA, 20 nt, Artificial Sequence
  targeting sequence with CTCN PAM
ucccacccccacagcccucc

SEQ ID NO: 16821 - RNA, 20 nt, Artificial Sequence
  targeting sequence with CTCN PAM
cacccccacagcccuccugg

SEQ ID NO: 16822 - RNA, 20 nt, Artificial Sequence
  targeting sequence with CTCN PAM
ugguccagcuguugcuggug

SEQ ID NO: 16823 - RNA, 20 nt, Artificial Sequence
  targeting sequence with CTCN PAM
ccgcgucuccagggcacacc

SEQ ID NO: 16824 - RNA, 20 nt, Artificial Sequence
  targeting sequence with CTCN PAM
agggcacaccagccgcagua

SEQ ID NO: 16825 - RNA, 20 nt, Artificial Sequence
  targeting sequence with CTCN PAM
accuguggggacugcguggg

SEQ ID NO: 16826 - RNA, 20 nt, Artificial Sequence
  targeting sequence with CTCN PAM
gcccccagauggccagggug

SEQ ID NO: 16827 - RNA, 20 nt, Artificial Sequence
  targeting sequence with CTCN PAM
augggacugccagccucucc

SEQ ID NO: 16828 - RNA, 20 nt, Artificial Sequence
  targeting sequence with CTCN PAM
cccuuggggaggugguacgg

SEQ ID NO: 16829 - RNA, 20 nt, Artificial Sequence
  targeting sequence with CTCN PAM
ggccucaccuggugggacgu

SEQ ID NO: 16830 - RNA, 20 nt, Artificial Sequence
  targeting sequence with CTCN PAM
ccuggugggacgucaucagg

SEQ ID NO: 16831 - RNA, 20 nt, Artificial Sequence
  targeting sequence with CTCN PAM
gguuaccuuuaccugaugac

SEQ ID NO: 16832 - RNA, 20 nt, Artificial Sequence
  targeting sequence with CTCN PAM
ccauaggccacagucaccac

SEQ ID NO: 16833 - RNA, 20 nt, Artificial Sequence
  targeting sequence with CTCN PAM
ccaccugcaugcucucguuc

SEQ ID NO: 16834 - RNA, 20 nt, Artificial Sequence
  targeting sequence with CTCN PAM
cguucagguugaucuguggg

SEQ ID NO: 16835 - RNA, 20 nt, Artificial Sequence
  targeting sequence with CTCN PAM
uucagguugaucuguggggg

SEQ ID NO: 16836 - RNA, 20 nt, Artificial Sequence
  targeting sequence with CTCN PAM
agcacccugaugcccacuac

SEQ ID NO: 16837 - RNA, 20 nt, Artificial Sequence
  targeting sequence with CTCN PAM
ccugcuaugggcuccagcac

SEQ ID NO: 16838 - RNA, 20 nt, Artificial Sequence
  targeting sequence with CTCN PAM
gguuguccccuggguuuggc

SEQ ID NO: 16839 - RNA, 20 nt, Artificial Sequence
  targeting sequence with CTCN PAM
gccuccccauccugucuugg

SEQ ID NO: 16840 - RNA, 20 nt, Artificial Sequence
  targeting sequence with CTCN PAM
ccauccugucuuggacccuu

SEQ ID NO: 16841 - RNA, 20 nt, Artificial Sequence
  targeting sequence with CTCN PAM
ugaaggguccaagacaggau

SEQ ID NO: 16842 - RNA, 20 nt, Artificial Sequence
  targeting sequence with CTCN PAM
ccugcacgcccgugacuucc

SEQ ID NO: 16843 - RNA, 20 nt, Artificial Sequence
  targeting sequence with CTCN PAM
gcugugcccccaccaggagc

SEQ ID NO: 16844 - RNA, 20 nt, Artificial Sequence
  targeting sequence with CTCN PAM
uggugggggcacagcagagg

SEQ ID NO: 16845 - RNA, 20 nt, Artificial Sequence
  targeting sequence with CTCN PAM
uucugggcucgucuccaagg

SEQ ID NO: 16846 - RNA, 20 nt, Artificial Sequence
  targeting sequence with CTCN PAM
ucuccaaggcaucccgcccu

SEQ ID NO: 16847 - RNA, 20 nt, Artificial Sequence
  targeting sequence with CTCN PAM
aaggcaucccgcccugugaa

SEQ ID NO: 16848 - RNA, 20 nt, Artificial Sequence
  targeting sequence with CTCN PAM
gggaggcuguuaggcaccau

SEQ ID NO: 16849 - RNA, 20 nt, Artificial Sequence
  targeting sequence with CTCN PAM
cagagcacguuucguaaacu

SEQ ID NO: 16850 - RNA, 20 nt, Artificial Sequence
  targeting sequence with CTCN PAM
gugucaaagccagaauccaa

SEQ ID NO: 16851 - RNA, 20 nt, Artificial Sequence
  targeting sequence with CTCN PAM
ucagugucaaagccagaauc

SEQ ID NO: 16852 - RNA, 20 nt, Artificial Sequence
  targeting sequence with CTCN PAM
acaauguguaaguuguacaa

SEQ ID NO: 16853 - RNA, 20 nt, Artificial Sequence
  targeting sequence with CTCN PAM
ccucucugagccuguuuccu

SEQ ID NO: 16854 - RNA, 20 nt, Artificial Sequence
  targeting sequence with CTCN PAM
cugagccuguuuccugagcu

SEQ ID NO: 16855 - RNA, 20 nt, Artificial Sequence
  targeting sequence with CTCN PAM
gagccuguuuccugagcuaa

SEQ ID NO: 16856 - RNA, 20 nt, Artificial Sequence
  targeting sequence with CTCN PAM
gagaggggaggcagcuugua

SEQ ID NO: 16857 - RNA, 20 nt, Artificial Sequence
  targeting sequence with CTCN PAM
ggaaacaggcucagagaggg

SEQ ID NO: 16858 - RNA, 20 nt, Artificial Sequence
  targeting sequence with CTCN PAM
uggcccgccugccccauuag

SEQ ID NO: 16859 - RNA, 20 nt, Artificial Sequence
  targeting sequence with CTCN PAM
uuccuccccccgacgcccau

SEQ ID NO: 16860 - RNA, 20 nt, Artificial Sequence
  targeting sequence with CTCN PAM
ccccgacgcccauuucaccg

SEQ ID NO: 16861 - RNA, 20 nt, Artificial Sequence
  targeting sequence with CTCN PAM
ucggugaaaugggcgucggg

SEQ ID NO: 16862 - RNA, 20 nt, Artificial Sequence
  targeting sequence with CTCN PAM
gauuccucuucggugaaaug

SEQ ID NO: 16863 - RNA, 20 nt, Artificial Sequence
  targeting sequence with CTCN PAM
cagccucagauuccucuucg

SEQ ID NO: 16864 - RNA, 20 nt, Artificial Sequence
  targeting sequence with CTCN PAM
gccgcucccagccucagauu

SEQ ID NO: 16865 - RNA, 20 nt, Artificial Sequence
  targeting sequence with CTCN PAM
cucggccgcucccagccuca

SEQ ID NO: 16866 - RNA, 20 nt, Artificial Sequence
  targeting sequence with CTCN PAM
ugccaacucccucggccgcu

SEQ ID NO: 16867 - RNA, 20 nt, Artificial Sequence
  targeting sequence with CTCN PAM
ucacuuugugccucuugcca

SEQ ID NO: 16868 - RNA, 20 nt, Artificial Sequence
  targeting sequence with CTCN PAM
cugcaccuugguuccacacc

SEQ ID NO: 16869 - RNA, 20 nt, Artificial Sequence
  targeting sequence with CTCN PAM
ucccugcaccuugguuccac

SEQ ID NO: 16870 - RNA, 20 nt, Artificial Sequence
  targeting sequence with CTCN PAM
ggcucugagggacccucugc

SEQ ID NO: 16871 - RNA, 20 nt, Artificial Sequence
  targeting sequence with CTCN PAM
gagggacccucugcgugucc

SEQ ID NO: 16872 - RNA, 20 nt, Artificial Sequence
  targeting sequence with CTCN PAM
gagccagagaagcuuccagg

SEQ ID NO: 16873 - RNA, 20 nt, Artificial Sequence
  targeting sequence with CTCN PAM
gcguguccuccugaggauga

SEQ ID NO: 16874 - RNA, 20 nt, Artificial Sequence
  targeting sequence with CTCN PAM
ugaggaugacaauaccgguc

SEQ ID NO: 16875 - RNA, 20 nt, Artificial Sequence
  targeting sequence with CTCN PAM
ggaggacacgcagagggucc

SEQ ID NO: 16876 - RNA, 20 nt, Artificial Sequence
  targeting sequence with CTCN PAM
gaccgguauugucauccuca

SEQ ID NO: 16877 - RNA, 20 nt, Artificial Sequence
  targeting sequence with CTCN PAM
gcucuuuuuugccuggcccu

SEQ ID NO: 16878 - RNA, 20 nt, Artificial Sequence
  targeting sequence with CTCN PAM
uuuuugccuggcccugccug

SEQ ID NO: 16879 - RNA, 20 nt, Artificial Sequence
  targeting sequence with CTCN PAM
aaaugcccagccuggggccu

SEQ ID NO: 16880 - RNA, 20 nt, Artificial Sequence
  targeting sequence with CTCN PAM
caggccaguuucugccccag

SEQ ID NO: 16881 - RNA, 20 nt, Artificial Sequence
  targeting sequence with CTCN PAM
uggggcucccaaacccuuca

SEQ ID NO: 16882 - RNA, 20 nt, Artificial Sequence
  targeting sequence with CTCN PAM
caaacccuucauggcucccu

SEQ ID NO: 16883 - RNA, 20 nt, Artificial Sequence
  targeting sequence with CTCN PAM
cuucugcuuauggaaugaac

SEQ ID NO: 16884 - RNA, 20 nt, Artificial Sequence
  targeting sequence with CTCN PAM
agguccuggugaucuaaccc

SEQ ID NO: 16885 - RNA, 20 nt, Artificial Sequence
  targeting sequence with CTCN PAM
acccccucaacccugcucac

SEQ ID NO: 16886 - RNA, 20 nt, Artificial Sequence
  targeting sequence with CTCN PAM
acccugcucacacauuccag

SEQ ID NO: 16887 - RNA, 20 nt, Artificial Sequence
  targeting sequence with CTCN PAM
cacauuccagccuccaggca

SEQ ID NO: 16888 - RNA, 20 nt, Artificial Sequence
  targeting sequence with CTCN PAM
aggcauuugccuaugcugug

SEQ ID NO: 16889 - RNA, 20 nt, Artificial Sequence
  targeting sequence with CTCN PAM
ccucuggaauauuccuuccu

SEQ ID NO: 16890 - RNA, 20 nt, Artificial Sequence
  targeting sequence with CTCN PAM
ucuggaauauuccuuccugu

SEQ ID NO: 16891 - RNA, 20 nt, Artificial Sequence
  targeting sequence with CTCN PAM
ggaauauuccuuccuguucc

SEQ ID NO: 16892 - RNA, 20 nt, Artificial Sequence
  targeting sequence with CTCN PAM
ugugugcauugguagaaggg

SEQ ID NO: 16893 - RNA, 20 nt, Artificial Sequence
  targeting sequence with CTCN PAM
acacaccaacucaaaauuac

SEQ ID NO: 16894 - RNA, 20 nt, Artificial Sequence
  targeting sequence with CTCN PAM
aaauuaccuucuccccaggc

SEQ ID NO: 16895 - RNA, 20 nt, Artificial Sequence
  targeting sequence with CTCN PAM
ccaggcuuccaugggcuuug

SEQ ID NO: 16896 - RNA, 20 nt, Artificial Sequence
  targeting sequence with CTCN PAM
ggcugggacaaagcccaugg

SEQ ID NO: 16897 - RNA, 20 nt, Artificial Sequence
  targeting sequence with CTCN PAM
ugucccacguggccucuugg

SEQ ID NO: 16898 - RNA, 20 nt, Artificial Sequence
  targeting sequence with CTCN PAM
uggcggagccuugcaggggc

SEQ ID NO: 16899 - RNA, 20 nt, Artificial Sequence
  targeting sequence with CTCN PAM
gccaagaggccacgugggac

SEQ ID NO: 16900 - RNA, 20 nt, Artificial Sequence
  targeting sequence with CTCN PAM
ggccacugcccgcacccacc

SEQ ID NO: 16901 - RNA, 20 nt, Artificial Sequence
  targeting sequence with CTCN PAM
agucauuuccacuccuucaa

SEQ ID NO: 16902 - RNA, 20 nt, Artificial Sequence
  targeting sequence with CTCN PAM
uucaaucauuuauugagcaa

SEQ ID NO: 16903 - RNA, 20 nt, Artificial Sequence
  targeting sequence with CTCN PAM
auaaaugauugaaggagugg

SEQ ID NO: 16904 - RNA, 20 nt, Artificial Sequence
  targeting sequence with CTCN PAM
ggccuuaaaucgccacaccc

SEQ ID NO: 16905 - RNA, 20 nt, Artificial Sequence
  targeting sequence with CTCN PAM
agccaacccugcccugcucg

SEQ ID NO: 16906 - RNA, 20 nt, Artificial Sequence
  targeting sequence with CTCN PAM
gucuccagccaacccugccc

SEQ ID NO: 16907 - RNA, 20 nt, Artificial Sequence
  targeting sequence with CTCN PAM
ccuaccacccugcacagugu

SEQ ID NO: 16908 - RNA, 20 nt, Artificial Sequence
  targeting sequence with CTCN PAM
aggcuguggcgggguguggg

SEQ ID NO: 16909 - RNA, 20 nt, Artificial Sequence
  targeting sequence with CTCN PAM
ugcugugcgacucuggggca

SEQ ID NO: 16910 - RNA, 20 nt, Artificial Sequence
  targeting sequence with CTCN PAM
ggggcaaucauuuccccucu

SEQ ID NO: 16911 - RNA, 20 nt, Artificial Sequence
  targeting sequence with CTCN PAM
cagagccucaacguucucau

SEQ ID NO: 16912 - RNA, 20 nt, Artificial Sequence
  targeting sequence with CTCN PAM
gagccucaacguucucaucu

SEQ ID NO: 16913 - RNA, 20 nt, Artificial Sequence
  targeting sequence with CTCN PAM
gagaggggaaaugauugccc

SEQ ID NO: 16914 - RNA, 20 nt, Artificial Sequence
  targeting sequence with CTCN PAM
acguucucaucuguggcaug

SEQ ID NO: 16915 - RNA, 20 nt, Artificial Sequence
  targeting sequence with CTCN PAM
ucuguggcaugagaaucgug

SEQ ID NO: 16916 - RNA, 20 nt, Artificial Sequence
  targeting sequence with CTCN PAM
ugccacagaugagaacguug

SEQ ID NO: 16917 - RNA, 20 nt, Artificial Sequence
  targeting sequence with CTCN PAM
gccucccuugcaggggugug

SEQ ID NO: 16918 - RNA, 20 nt, Artificial Sequence
  targeting sequence with CTCN PAM
cuugcaggggugugagaauu

SEQ ID NO: 16919 - RNA, 20 nt, Artificial Sequence
  targeting sequence with CTCN PAM
caccccugcaagggaggcag

SEQ ID NO: 16920 - RNA, 20 nt, Artificial Sequence
  targeting sequence with CTCN PAM
cuuaauucucacaccccugc

SEQ ID NO: 16921 - RNA, 20 nt, Artificial Sequence
  targeting sequence with CTCN PAM
cacuuaauucucacaccccu

SEQ ID NO: 16922 - RNA, 20 nt, Artificial Sequence
  targeting sequence with CTCN PAM
ggguagacaguaggcgccua

SEQ ID NO: 16923 - RNA, 20 nt, Artificial Sequence
  targeting sequence with CTCN PAM
gaucugaucacccaaguccc

SEQ ID NO: 16924 - RNA, 20 nt, Artificial Sequence
  targeting sequence with CTCN PAM
auucaugcaccaggcccggc

SEQ ID NO: 16925 - RNA, 20 nt, Artificial Sequence
  targeting sequence with CTCN PAM
caagagggagcaggagagau

SEQ ID NO: 16926 - RNA, 20 nt, Artificial Sequence
  targeting sequence with CTCN PAM
ugggagacuaagcuaagcgc

SEQ ID NO: 16927 - RNA, 20 nt, Artificial Sequence
  targeting sequence with CTCN PAM
cucuugggagacuaagcuaa

SEQ ID NO: 16928 - RNA, 20 nt, Artificial Sequence
  targeting sequence with CTCN PAM
ugcucccucuugggagacua

SEQ ID NO: 16929 - RNA, 20 nt, Artificial Sequence
  targeting sequence with CTCN PAM
ccugcucccucuugggagac

SEQ ID NO: 16930 - RNA, 20 nt, Artificial Sequence
  targeting sequence with CTCN PAM
gccaugucuguccugcccca

SEQ ID NO: 16931 - RNA, 20 nt, Artificial Sequence
  targeting sequence with CTCN PAM
ggggcaggacagacauggcg

SEQ ID NO: 16932 - RNA, 20 nt, Artificial Sequence
  targeting sequence with CTCN PAM
ucccagcuccaggaaucucg

SEQ ID NO: 16933 - RNA, 20 nt, Artificial Sequence
  targeting sequence with CTCN PAM
cagcuccaggaaucucgggg

SEQ ID NO: 16934 - RNA, 20 nt, Artificial Sequence
  targeting sequence with CTCN PAM
aggaaucucggggccacggg

SEQ ID NO: 16935 - RNA, 20 nt, Artificial Sequence
  targeting sequence with CTCN PAM
guuucccugucaagggcugu

SEQ ID NO: 16936 - RNA, 20 nt, Artificial Sequence
  targeting sequence with CTCN PAM
aggccucaguuucccuguca

SEQ ID NO: 16937 - RNA, 20 nt, Artificial Sequence
  targeting sequence with CTCN PAM
ccaggccucaguuucccugu

SEQ ID NO: 16938 - RNA, 20 nt, Artificial Sequence
  targeting sequence with CTCN PAM
cuccaggccucaguuucccu

SEQ ID NO: 16939 - RNA, 20 nt, Artificial Sequence
  targeting sequence with CTCN PAM
cauucgccuagcacuuuaca

SEQ ID NO: 16940 - RNA, 20 nt, Artificial Sequence
  targeting sequence with CTCN PAM
gccaacucccaggggagccu

SEQ ID NO: 16941 - RNA, 20 nt, Artificial Sequence
  targeting sequence with CTCN PAM
caggggagccucccaccccc

SEQ ID NO: 16942 - RNA, 20 nt, Artificial Sequence
  targeting sequence with CTCN PAM
ccugggaguuggcugagggg

SEQ ID NO: 16943 - RNA, 20 nt, Artificial Sequence
  targeting sequence with CTCN PAM
cacccccacccccuccccac

SEQ ID NO: 16944 - RNA, 20 nt, Artificial Sequence
  targeting sequence with CTCN PAM
ccacauccccaaccauaccu

SEQ ID NO: 16945 - RNA, 20 nt, Artificial Sequence
  targeting sequence with CTCN PAM
agguagguaugguuggggau

SEQ ID NO: 16946 - RNA, 20 nt, Artificial Sequence
  targeting sequence with CTCN PAM
cguugaccgugcccaggaag

SEQ ID NO: 16947 - RNA, 20 nt, Artificial Sequence
  targeting sequence with CTCN PAM
guggccguggccagcgucaa

SEQ ID NO: 16948 - RNA, 20 nt, Artificial Sequence
  targeting sequence with CTCN PAM
ccuccguggccguggccagc

SEQ ID NO: 16949 - RNA, 20 nt, Artificial Sequence
  targeting sequence with CTCN PAM
ccugcagcacccgcugucca

SEQ ID NO: 16950 - RNA, 20 nt, Artificial Sequence
  targeting sequence with CTCN PAM
acaguccagcugcucuggcu

SEQ ID NO: 16951 - RNA, 20 nt, Artificial Sequence
  targeting sequence with CTCN PAM
ggcuggagcuggaagaggaa

SEQ ID NO: 16952 - RNA, 20 nt, Artificial Sequence
  targeting sequence with CTCN PAM
agccagagcagcuggacugu

SEQ ID NO: 16953 - RNA, 20 nt, Artificial Sequence
  targeting sequence with CTCN PAM
uccagcuccagccagagcag

SEQ ID NO: 16954 - RNA, 20 nt, Artificial Sequence
  targeting sequence with CTCN PAM
agaaccuucuccggcucccc

SEQ ID NO: 16955 - RNA, 20 nt, Artificial Sequence
  targeting sequence with CTCN PAM
ggcuccccgcccgcacagcu

SEQ ID NO: 16956 - RNA, 20 nt, Artificial Sequence
  targeting sequence with CTCN PAM
ccgcccgcacagcuggcugg

SEQ ID NO: 16957 - RNA, 20 nt, Artificial Sequence
  targeting sequence with CTCN PAM
ggcccuggcaucagagcuuu

SEQ ID NO: 16958 - RNA, 20 nt, Artificial Sequence
  targeting sequence with CTCN PAM
gaugccagggccugagaucc

SEQ ID NO: 16959 - RNA, 20 nt, Artificial Sequence
  targeting sequence with CTCN PAM
gugcucagcugaggcccaaa

SEQ ID NO: 16960 - RNA, 20 nt, Artificial Sequence
  targeting sequence with CTCN PAM
gcugaggcccaaacacaaac

SEQ ID NO: 16961 - RNA, 20 nt, Artificial Sequence
  targeting sequence with CTCN PAM
gcugagcacugaggauauaa

SEQ ID NO: 16962 - RNA, 20 nt, Artificial Sequence
  targeting sequence with CTCN PAM
guguugguuacagagcuguu

SEQ ID NO: 16963 - RNA, 20 nt, Artificial Sequence
  targeting sequence with CTCN PAM
guaaccaacacugaggucag

SEQ ID NO: 16964 - RNA, 20 nt, Artificial Sequence
  targeting sequence with CTCN PAM
uuggaacagcucuguaacca

SEQ ID NO: 16965 - RNA, 20 nt, Artificial Sequence
  targeting sequence with CTCN PAM
ccugcugguucccguguacc

SEQ ID NO: 16966 - RNA, 20 nt, Artificial Sequence
  targeting sequence with CTCN PAM
uuaaaaucaaaccugaccuu

SEQ ID NO: 16967 - RNA, 20 nt, Artificial Sequence
  targeting sequence with CTCN PAM
cuggacucuuuaaaaucaaa

SEQ ID NO: 16968 - RNA, 20 nt, Artificial Sequence
  targeting sequence with CTCN PAM
cccuggccggccucccugga

SEQ ID NO: 16969 - RNA, 20 nt, Artificial Sequence
  targeting sequence with CTCN PAM
cacccuggccggccucccug

SEQ ID NO: 16970 - RNA, 20 nt, Artificial Sequence
  targeting sequence with CTCN PAM
uggcugggcacagcugggaa

SEQ ID NO: 16971 - RNA, 20 nt, Artificial Sequence
  targeting sequence with CTCN PAM
ucccagcugugcccagccag

SEQ ID NO: 16972 - RNA, 20 nt, Artificial Sequence
  targeting sequence with CTCN PAM
gcucuucccagcugugccca

SEQ ID NO: 16973 - RNA, 20 nt, Artificial Sequence
  targeting sequence with CTCN PAM
ucugcucuucccagcugugc

SEQ ID NO: 16974 - RNA, 20 nt, Artificial Sequence
  targeting sequence with CTCN PAM
ggucaucugguguggacucc

SEQ ID NO: 16975 - RNA, 20 nt, Artificial Sequence
  targeting sequence with CTCN PAM
gcuuaacccgcuggcaccca

SEQ ID NO: 16976 - RNA, 20 nt, Artificial Sequence
  targeting sequence with CTCN PAM
ugggugccagcggguuaagc

SEQ ID NO: 16977 - RNA, 20 nt, Artificial Sequence
  targeting sequence with CTCN PAM
ugccucggcuguuuuccuac

SEQ ID NO: 16978 - RNA, 20 nt, Artificial Sequence
  targeting sequence with CTCN PAM
gcuguuuuccuacagccccg

SEQ ID NO: 16979 - RNA, 20 nt, Artificial Sequence
  targeting sequence with CTCN PAM
gcgucuccacagcaaccaug

SEQ ID NO: 16980 - RNA, 20 nt, Artificial Sequence
  targeting sequence with CTCN PAM
acagcaaccaugggcuuucc

SEQ ID NO: 16981 - RNA, 20 nt, Artificial Sequence
  targeting sequence with CTCN PAM
ugccgggugucugcucugac

SEQ ID NO: 16982 - RNA, 20 nt, Artificial Sequence
  targeting sequence with CTCN PAM
gacccuaggaccaccacccc

SEQ ID NO: 16983 - RNA, 20 nt, Artificial Sequence
  targeting sequence with CTCN PAM
agguggaggccucccuaaac

SEQ ID NO: 16984 - RNA, 20 nt, Artificial Sequence
  targeting sequence with CTCN PAM
accuggagucuugcaagcug

SEQ ID NO: 16985 - RNA, 20 nt, Artificial Sequence
  targeting sequence with CTCN PAM
cuaaaccgcagccuuucuuu

SEQ ID NO: 16986 - RNA, 20 nt, Artificial Sequence
  targeting sequence with CTCN PAM
ccaagcaccuauccccucau

SEQ ID NO: 16987 - RNA, 20 nt, Artificial Sequence
  targeting sequence with CTCN PAM
ucugcccacauuacaggggg

SEQ ID NO: 16988 - RNA, 20 nt, Artificial Sequence
  targeting sequence with CTCN PAM
agcagcaaaucagcugcggc

SEQ ID NO: 16989 - RNA, 20 nt, Artificial Sequence
  targeting sequence with CTCN PAM
cagggcagcugugagaggug

SEQ ID NO: 16990 - RNA, 20 nt, Artificial Sequence
  targeting sequence with CTCN PAM
cagcugcccugugagccgca

SEQ ID NO: 16991 - RNA, 20 nt, Artificial Sequence
  targeting sequence with CTCN PAM
cacagcugcccugugagccg

SEQ ID NO: 16992 - RNA, 20 nt, Artificial Sequence
  targeting sequence with CTCN PAM
uaccuucccucccuucuccu

SEQ ID NO: 16993 - RNA, 20 nt, Artificial Sequence
  targeting sequence with CTCN PAM
cuucuccugggucuugguau

SEQ ID NO: 16994 - RNA, 20 nt, Artificial Sequence
  targeting sequence with CTCN PAM
ugggucuugguauguucaaa

SEQ ID NO: 16995 - RNA, 20 nt, Artificial Sequence
  targeting sequence with CTCN PAM
aggaagugacccugagacaa

SEQ ID NO: 16996 - RNA, 20 nt, Artificial Sequence
  targeting sequence with CTCN PAM
gggucacuuccuggaggccu

SEQ ID NO: 16997 - RNA, 20 nt, Artificial Sequence
  targeting sequence with CTCN PAM
gcaaagacgcaggcacaagg

SEQ ID NO: 16998 - RNA, 20 nt, Artificial Sequence
  targeting sequence with CTCN PAM
gcaccacccuugugccugcg

SEQ ID NO: 16999 - RNA, 20 nt, Artificial Sequence
  targeting sequence with CTCN PAM
ucugcaccacccuugugccu

SEQ ID NO: 17000 - RNA, 20 nt, Artificial Sequence
  targeting sequence with CTCN PAM
gucccauccgacacaugugu

SEQ ID NO: 17001 - RNA, 20 nt, Artificial Sequence
  targeting sequence with CTCN PAM
uggaugauaagccaugaugg

SEQ ID NO: 17002 - RNA, 20 nt, Artificial Sequence
  targeting sequence with CTCN PAM
ccuggaugauaagccaugau

SEQ ID NO: 17003 - RNA, 20 nt, Artificial Sequence
  targeting sequence with CTCN PAM
cagaauccuggcagcccuag

SEQ ID NO: 17004 - RNA, 20 nt, Artificial Sequence
  targeting sequence with CTCN PAM
cagauggggaaacugaggcu

SEQ ID NO: 17005 - RNA, 20 nt, Artificial Sequence
  targeting sequence with CTCN PAM
guuuccccaucugugagaua

SEQ ID NO: 17006 - RNA, 20 nt, Artificial Sequence
  targeting sequence with CTCN PAM
gaggggaaaauggcuaacua

SEQ ID NO: 17007 - RNA, 20 nt, Artificial Sequence
  targeting sequence with CTCN PAM
gagccucaguuuccccaucu

SEQ ID NO: 17008 - RNA, 20 nt, Artificial Sequence
  targeting sequence with CTCN PAM
agucugcuaccugggucagc

SEQ ID NO: 17009 - RNA, 20 nt, Artificial Sequence
  targeting sequence with CTCN PAM
gcugcauuuggacaucagag

SEQ ID NO: 17010 - RNA, 20 nt, Artificial Sequence
  targeting sequence with CTCN PAM
gauguccaaaugcagcugag

SEQ ID NO: 17011 - RNA, 20 nt, Artificial Sequence
  targeting sequence with CTCN PAM
gagcaggacucagggagguc

SEQ ID NO: 17012 - RNA, 20 nt, Artificial Sequence
  targeting sequence with CTCN PAM
gagccucugauguccaaaug

SEQ ID NO: 17013 - RNA, 20 nt, Artificial Sequence
  targeting sequence with CTCN PAM
gggaggucaccggaaggcag

SEQ ID NO: 17014 - RNA, 20 nt, Artificial Sequence
  targeting sequence with CTCN PAM
cugaguccugcucugagccu

SEQ ID NO: 17015 - RNA, 20 nt, Artificial Sequence
  targeting sequence with CTCN PAM
gagccucauuuuacucaacu

SEQ ID NO: 17016 - RNA, 20 nt, Artificial Sequence
  targeting sequence with CTCN PAM
gaggcgaagugccuugccug

SEQ ID NO: 17017 - RNA, 20 nt, Artificial Sequence
  targeting sequence with CTCN PAM
uuuuacucaacuauaaaaug

SEQ ID NO: 17018 - RNA, 20 nt, Artificial Sequence
  targeting sequence with CTCN PAM
acuauaaaauggguauaucc

SEQ ID NO: 17019 - RNA, 20 nt, Artificial Sequence
  targeting sequence with CTCN PAM
augcggaaaacacuauggau

SEQ ID NO: 17020 - RNA, 20 nt, Artificial Sequence
  targeting sequence with CTCN PAM
caaguagcugggaacuacag

SEQ ID NO: 17021 - RNA, 20 nt, Artificial Sequence
  targeting sequence with CTCN PAM
gccucccaaguagcugggaa

SEQ ID NO: 17022 - RNA, 20 nt, Artificial Sequence
  targeting sequence with CTCN PAM
agccucagccucccaaguag

SEQ ID NO: 17023 - RNA, 20 nt, Artificial Sequence
  targeting sequence with CTCN PAM
agugauccuccagccucagc

SEQ ID NO: 17024 - RNA, 20 nt, Artificial Sequence
  targeting sequence with CTCN PAM
uggacucaagugauccucca

SEQ ID NO: 17025 - RNA, 20 nt, Artificial Sequence
  targeting sequence with CTCN PAM
cgggagcgggggaccaccag

SEQ ID NO: 17026 - RNA, 20 nt, Artificial Sequence
  targeting sequence with CTCN PAM
cgggaggucaccauauugau

SEQ ID NO: 17027 - RNA, 20 nt, Artificial Sequence
  targeting sequence with CTCN PAM
uuaggcaaccuggugguccc

SEQ ID NO: 17028 - RNA, 20 nt, Artificial Sequence
  targeting sequence with CTCN PAM
guuuccgaccugggccaguu

SEQ ID NO: 17029 - RNA, 20 nt, Artificial Sequence
  targeting sequence with CTCN PAM
aaagcuuuaagguaggcaug

SEQ ID NO: 17030 - RNA, 20 nt, Artificial Sequence
  targeting sequence with CTCN PAM
caccuggacagcccucccag

SEQ ID NO: 17031 - RNA, 20 nt, Artificial Sequence
  targeting sequence with CTCN PAM
ccuggacagcccucccagcc

SEQ ID NO: 17032 - RNA, 20 nt, Artificial Sequence
  targeting sequence with CTCN PAM
cagcccucuucauuuuccaa

SEQ ID NO: 17033 - RNA, 20 nt, Artificial Sequence
  targeting sequence with CTCN PAM
ucauuuuccaagaccacucu

SEQ ID NO: 17034 - RNA, 20 nt, Artificial Sequence
  targeting sequence with CTCN PAM
ugcccccuacacugacauuu

SEQ ID NO: 17035 - RNA, 20 nt, Artificial Sequence
  targeting sequence with CTCN PAM
uuuggcagcuguguuagcag

SEQ ID NO: 17036 - RNA, 20 nt, Artificial Sequence
  targeting sequence with CTCN PAM
cccgauucaagcccucccau

SEQ ID NO: 17037 - RNA, 20 nt, Artificial Sequence
  targeting sequence with CTCN PAM
caugguuuccaggacacuca

SEQ ID NO: 17038 - RNA, 20 nt, Artificial Sequence
  targeting sequence with CTCN PAM
gaauaaauccugaauccuaa

SEQ ID NO: 17039 - RNA, 20 nt, Artificial Sequence
  targeting sequence with CTCN PAM
cguggguccccucaucuucu

SEQ ID NO: 17040 - RNA, 20 nt, Artificial Sequence
  targeting sequence with CTCN PAM
ucuucuaacuccauuucaca

SEQ ID NO: 17041 - RNA, 20 nt, Artificial Sequence
  targeting sequence with CTCN PAM
auuucacaccucccuugccc

SEQ ID NO: 17042 - RNA, 20 nt, Artificial Sequence
  targeting sequence with CTCN PAM
cuugcccuugcuccuucacc

SEQ ID NO: 17043 - RNA, 20 nt, Artificial Sequence
  targeting sequence with CTCN PAM
uucaccccagccacacuggc

SEQ ID NO: 17044 - RNA, 20 nt, Artificial Sequence
  targeting sequence with CTCN PAM
uuucugugccucaaauauca

SEQ ID NO: 17045 - RNA, 20 nt, Artificial Sequence
  targeting sequence with CTCN PAM
aauaucacaagcucguuccu

SEQ ID NO: 17046 - RNA, 20 nt, Artificial Sequence
  targeting sequence with CTCN PAM
uuccugccucaggaccucug

SEQ ID NO: 17047 - RNA, 20 nt, Artificial Sequence
  targeting sequence with CTCN PAM
ggaccucuggccuggccgcu

SEQ ID NO: 17048 - RNA, 20 nt, Artificial Sequence
  targeting sequence with CTCN PAM
ggccuggccgcucccucugc

SEQ ID NO: 17049 - RNA, 20 nt, Artificial Sequence
  targeting sequence with CTCN PAM
cucugcccaggaagccauuc

SEQ ID NO: 17050 - RNA, 20 nt, Artificial Sequence
  targeting sequence with CTCN PAM
gcccaggaagccauuccccc

SEQ ID NO: 17051 - RNA, 20 nt, Artificial Sequence
  targeting sequence with CTCN PAM
ggugggggggaauggcuucc

SEQ ID NO: 17052 - RNA, 20 nt, Artificial Sequence
  targeting sequence with CTCN PAM
cgggugggggggaauggcuu

SEQ ID NO: 17053 - RNA, 20 nt, Artificial Sequence
  targeting sequence with CTCN PAM
ucucagugccagcccugacc

SEQ ID NO: 17054 - RNA, 20 nt, Artificial Sequence
  targeting sequence with CTCN PAM
cagugccagcccugaccuac

SEQ ID NO: 17055 - RNA, 20 nt, Artificial Sequence
  targeting sequence with CTCN PAM
gugccagcccugaccuaccc

SEQ ID NO: 17056 - RNA, 20 nt, Artificial Sequence
  targeting sequence with CTCN PAM
auccuguguguguuacaguu

SEQ ID NO: 17057 - RNA, 20 nt, Artificial Sequence
  targeting sequence with CTCN PAM
gcacccaccuuccagggcug

SEQ ID NO: 17058 - RNA, 20 nt, Artificial Sequence
  targeting sequence with CTCN PAM
ccagcugccccaaccaggcg

SEQ ID NO: 17059 - RNA, 20 nt, Artificial Sequence
  targeting sequence with CTCN PAM
gcaauccugcagcugcaggg

SEQ ID NO: 17060 - RNA, 20 nt, Artificial Sequence
  targeting sequence with CTCN PAM
ucccugcagcugcaggauug

SEQ ID NO: 17061 - RNA, 20 nt, Artificial Sequence
  targeting sequence with CTCN PAM
ccucuucccugcagcugcag

SEQ ID NO: 17062 - RNA, 20 nt, Artificial Sequence
  targeting sequence with CTCN PAM
ccacugcgagggaugauuuu

SEQ ID NO: 17063 - RNA, 20 nt, Artificial Sequence
  targeting sequence with CTCN PAM
caguggugaggaucccaccu

SEQ ID NO: 17064 - RNA, 20 nt, Artificial Sequence
  targeting sequence with CTCN PAM
caccaagggaacauaaguuc

SEQ ID NO: 17065 - RNA, 20 nt, Artificial Sequence
  targeting sequence with CTCN PAM
cagguguccccuuccagaac

SEQ ID NO: 17066 - RNA, 20 nt, Artificial Sequence
  targeting sequence with CTCN PAM
gggugaucugugggcuaggg

SEQ ID NO: 17067 - RNA, 20 nt, Artificial Sequence
  targeting sequence with CTCN PAM
cugcugcccuagcccacaga

SEQ ID NO: 17068 - RNA, 20 nt, Artificial Sequence
  targeting sequence with CTCN PAM
ucccugcugcccuagcccac

SEQ ID NO: 17069 - RNA, 20 nt, Artificial Sequence
  targeting sequence with CTCN PAM
ccuccucccugcugcccuag

SEQ ID NO: 17070 - RNA, 20 nt, Artificial Sequence
  targeting sequence with CTCN PAM
ugcuccccuccucccugcug

SEQ ID NO: 17071 - RNA, 20 nt, Artificial Sequence
  targeting sequence with CTCN PAM
cuccugcuccccuccucccu

SEQ ID NO: 17072 - RNA, 20 nt, Artificial Sequence
  targeting sequence with CTCN PAM
ccucccuccugcuccccucc

SEQ ID NO: 17073 - RNA, 20 nt, Artificial Sequence
  targeting sequence with CTCN PAM
cugggagcccgcuccccccu

SEQ ID NO: 17074 - RNA, 20 nt, Artificial Sequence
  targeting sequence with CTCN PAM
cagcgagcuccccucccucc

SEQ ID NO: 17075 - RNA, 20 nt, Artificial Sequence
  targeting sequence with CTCN PAM
ccccucccccaccccgcgcu

SEQ ID NO: 17076 - RNA, 20 nt, Artificial Sequence
  targeting sequence with CTCN PAM
cccaccccgcgcugacuuuc

SEQ ID NO: 17077 - RNA, 20 nt, Artificial Sequence
  targeting sequence with CTCN PAM
gaaugaucuguguuccgagg

SEQ ID NO: 17078 - RNA, 20 nt, Artificial Sequence
  targeting sequence with CTCN PAM
gaacacagaucauucggagc

SEQ ID NO: 17079 - RNA, 20 nt, Artificial Sequence
  targeting sequence with CTCN PAM
aacacggaagcccagcgugg

SEQ ID NO: 17080 - RNA, 20 nt, Artificial Sequence
  targeting sequence with CTCN PAM
cccagcaggggcggcacuuc

SEQ ID NO: 17081 - RNA, 20 nt, Artificial Sequence
  targeting sequence with CTCN PAM
cccagccugcaucccccucc

SEQ ID NO: 17082 - RNA, 20 nt, Artificial Sequence
  targeting sequence with CTCN PAM
gggacuagacguccugagca

SEQ ID NO: 17083 - RNA, 20 nt, Artificial Sequence
  targeting sequence with CTCN PAM
ggacgucuaguccccgaguc

SEQ ID NO: 17084 - RNA, 20 nt, Artificial Sequence
  targeting sequence with CTCN PAM
gcugaacuuggucuccaggg

SEQ ID NO: 17085 - RNA, 20 nt, Artificial Sequence
  targeting sequence with CTCN PAM
agggacaguuagccucacag

SEQ ID NO: 17086 - RNA, 20 nt, Artificial Sequence
  targeting sequence with CTCN PAM
caggcccaaaauacccccug

SEQ ID NO: 17087 - RNA, 20 nt, Artificial Sequence
  targeting sequence with CTCN PAM
uuaaaggcuaaugagcauga

SEQ ID NO: 17088 - RNA, 20 nt, Artificial Sequence
  targeting sequence with CTCN PAM
uuagccuuuaaggaggacgg

SEQ ID NO: 17089 - RNA, 20 nt, Artificial Sequence
  targeting sequence with CTCN PAM
ugcucauuagccuuuaagga

SEQ ID NO: 17090 - RNA, 20 nt, Artificial Sequence
  targeting sequence with CTCN PAM
aguucuccugagagcaggga

SEQ ID NO: 17091 - RNA, 20 nt, Artificial Sequence
  targeting sequence with CTCN PAM
ugagagcagggaaggcucgg

SEQ ID NO: 17092 - RNA, 20 nt, Artificial Sequence
  targeting sequence with CTCN PAM
ggagaacuugaguuuugaaa

SEQ ID NO: 17093 - RNA, 20 nt, Artificial Sequence
  targeting sequence with CTCN PAM
caggagaacuugaguuuuga

SEQ ID NO: 17094 - RNA, 20 nt, Artificial Sequence
  targeting sequence with CTCN PAM
gcuauccccgcagcgcccuc

SEQ ID NO: 17095 - RNA, 20 nt, Artificial Sequence
  targeting sequence with CTCN PAM
aagucacagggccaucuuuc

SEQ ID NO: 17096 - RNA, 20 nt, Artificial Sequence
  targeting sequence with CTCN PAM
cacacaaagcuggucagacc

SEQ ID NO: 17097 - RNA, 20 nt, Artificial Sequence
  targeting sequence with CTCN PAM
cacaaagcuggucagacccu

SEQ ID NO: 17098 - RNA, 20 nt, Artificial Sequence
  targeting sequence with CTCN PAM
cuaccuacaacccagcuccu

SEQ ID NO: 17099 - RNA, 20 nt, Artificial Sequence
  targeting sequence with CTCN PAM
uggcuguccucgggaucaag

SEQ ID NO: 17100 - RNA, 20 nt, Artificial Sequence
  targeting sequence with CTCN PAM
ggaucaagccccagcagucc

SEQ ID NO: 17101 - RNA, 20 nt, Artificial Sequence
  targeting sequence with CTCN PAM
cauucaaggccuucgugccc

SEQ ID NO: 17102 - RNA, 20 nt, Artificial Sequence
  targeting sequence with CTCN PAM
ugccagcucccaggccucca

SEQ ID NO: 17103 - RNA, 20 nt, Artificial Sequence
  targeting sequence with CTCN PAM
caggccuccagucucccucc

SEQ ID NO: 17104 - RNA, 20 nt, Artificial Sequence
  targeting sequence with CTCN PAM
agucucccuccucccucugc

SEQ ID NO: 17105 - RNA, 20 nt, Artificial Sequence
  targeting sequence with CTCN PAM
cuccucccucugccccaccc

SEQ ID NO: 17106 - RNA, 20 nt, Artificial Sequence
  targeting sequence with CTCN PAM
ucccucugccccacccgcug

SEQ ID NO: 17107 - RNA, 20 nt, Artificial Sequence
  targeting sequence with CTCN PAM
cucugccccacccgcugcgc

SEQ ID NO: 17108 - RNA, 20 nt, Artificial Sequence
  targeting sequence with CTCN PAM
gccccacccgcugcgcccac

SEQ ID NO: 17109 - RNA, 20 nt, Artificial Sequence
  targeting sequence with CTCN PAM
acagguccuggaaugugccc

SEQ ID NO: 17110 - RNA, 20 nt, Artificial Sequence
  targeting sequence with CTCN PAM
uacccggggcucuuguacca

SEQ ID NO: 17111 - RNA, 20 nt, Artificial Sequence
  targeting sequence with CTCN PAM
uguaccauuguaaauguccc

SEQ ID NO: 17112 - RNA, 20 nt, Artificial Sequence
  targeting sequence with CTCN PAM
gaggcauucguacuccccuu

SEQ ID NO: 17113 - RNA, 20 nt, Artificial Sequence
  targeting sequence with CTCN PAM
gaggcaugggaugggcauug

SEQ ID NO: 17114 - RNA, 20 nt, Artificial Sequence
  targeting sequence with CTCN PAM
ccuuggcacuucagcgcccc

SEQ ID NO: 17115 - RNA, 20 nt, Artificial Sequence
  targeting sequence with CTCN PAM
ccaggcaugcccagacggca

SEQ ID NO: 17116 - RNA, 20 nt, Artificial Sequence
  targeting sequence with CTCN PAM
aggcaugcccagacggcaag

SEQ ID NO: 17117 - RNA, 20 nt, Artificial Sequence
  targeting sequence with CTCN PAM
gccccccaacuccugugaug

SEQ ID NO: 17118 - RNA, 20 nt, Artificial Sequence
  targeting sequence with CTCN PAM
ugugauggcacugugcuggu

SEQ ID NO: 17119 - RNA, 20 nt, Artificial Sequence
  targeting sequence with CTCN PAM
agcauggagccugugcucug

SEQ ID NO: 17120 - RNA, 20 nt, Artificial Sequence
  targeting sequence with CTCN PAM
augcuggagaacgucaugca

SEQ ID NO: 17121 - RNA, 20 nt, Artificial Sequence
  targeting sequence with CTCN PAM
ggagggaauguuuacaaaag

SEQ ID NO: 17122 - RNA, 20 nt, Artificial Sequence
  targeting sequence with CTCN PAM
agagcacaggcuccaugcug

SEQ ID NO: 17123 - RNA, 20 nt, Artificial Sequence
  targeting sequence with CTCN PAM
cuaagucgagugacugagag

SEQ ID NO: 17124 - RNA, 20 nt, Artificial Sequence
  targeting sequence with CTCN PAM
aagucgagugacugagagca

SEQ ID NO: 17125 - RNA, 20 nt, Artificial Sequence
  targeting sequence with CTCN PAM
acuuagagagaaagcagcug

SEQ ID NO: 17126 - RNA, 20 nt, Artificial Sequence
  targeting sequence with CTCN PAM
gucacucgacuuagagagaa

SEQ ID NO: 17127 - RNA, 20 nt, Artificial Sequence
  targeting sequence with CTCN PAM
cagucacucgacuuagagag

SEQ ID NO: 17128 - RNA, 20 nt, Artificial Sequence
  targeting sequence with CTCN PAM
agcacccagcauggccgugu

SEQ ID NO: 17129 - RNA, 20 nt, Artificial Sequence
  targeting sequence with CTCN PAM
guucuccagcacccagcaug

SEQ ID NO: 17130 - RNA, 20 nt, Artificial Sequence
  targeting sequence with CTCN PAM
gcguguggcaacaaagggag

SEQ ID NO: 17131 - RNA, 20 nt, Artificial Sequence
  targeting sequence with CTCN PAM
cuuuguugccacacgcagag

SEQ ID NO: 17132 - RNA, 20 nt, Artificial Sequence
  targeting sequence with CTCN PAM
cuuuaucccucucucacaug

SEQ ID NO: 17133 - RNA, 20 nt, Artificial Sequence
  targeting sequence with CTCN PAM
cucacaugggaugagcaacc

SEQ ID NO: 17134 - RNA, 20 nt, Artificial Sequence
  targeting sequence with CTCN PAM
cacaugggaugagcaaccgc

SEQ ID NO: 17135 - RNA, 20 nt, Artificial Sequence
  targeting sequence with CTCN PAM
caugggaugagcaaccgccg

SEQ ID NO: 17136 - RNA, 20 nt, Artificial Sequence
  targeting sequence with CTCN PAM
ucccaugugagagagggaua

SEQ ID NO: 17137 - RNA, 20 nt, Artificial Sequence
  targeting sequence with CTCN PAM
aaacggggccgaaaccagcg

SEQ ID NO: 17138 - RNA, 20 nt, Artificial Sequence
  targeting sequence with CTCN PAM
caaaacggggccgaaaccag

SEQ ID NO: 17139 - RNA, 20 nt, Artificial Sequence
  targeting sequence with CTCN PAM
cccuccagcuggcucccucc

SEQ ID NO: 17140 - RNA, 20 nt, Artificial Sequence
  targeting sequence with CTCN PAM
agcuggcucccuccuggggc

SEQ ID NO: 17141 - RNA, 20 nt, Artificial Sequence
  targeting sequence with CTCN PAM
cuccuggggccaaagcucag

SEQ ID NO: 17142 - RNA, 20 nt, Artificial Sequence
  targeting sequence with CTCN PAM
uggggccaaagcucagcucu

SEQ ID NO: 17143 - RNA, 20 nt, Artificial Sequence
  targeting sequence with CTCN PAM
gcucugcccacucucccauu

SEQ ID NO: 17144 - RNA, 20 nt, Artificial Sequence
  targeting sequence with CTCN PAM
gcccacucucccauuaaaac

SEQ ID NO: 17145 - RNA, 20 nt, Artificial Sequence
  targeting sequence with CTCN PAM
cccauuaaaacucugacaua

SEQ ID NO: 17146 - RNA, 20 nt, Artificial Sequence
  targeting sequence with CTCN PAM
cauuaaaacucugacauauu

SEQ ID NO: 17147 - RNA, 20 nt, Artificial Sequence
  targeting sequence with CTCN PAM
gacauauugauuuuacuacc

SEQ ID NO: 17148 - RNA, 20 nt, Artificial Sequence
  targeting sequence with CTCN PAM
ccccaggaagccaguuggaa

SEQ ID NO: 17149 - RNA, 20 nt, Artificial Sequence
  targeting sequence with CTCN PAM
ccaggaagccaguuggaagg

SEQ ID NO: 17150 - RNA, 20 nt, Artificial Sequence
  targeting sequence with CTCN PAM
uuccaacuggcuuccugggg

SEQ ID NO: 17151 - RNA, 20 nt, Artificial Sequence
  targeting sequence with CTCN PAM
ugaagcgcuccuuccaacug

SEQ ID NO: 17152 - RNA, 20 nt, Artificial Sequence
  targeting sequence with CTCN PAM
ggccucacauccugccgcag

SEQ ID NO: 17153 - RNA, 20 nt, Artificial Sequence
  targeting sequence with CTCN PAM
cauccugccgcagacccacc

SEQ ID NO: 17154 - RNA, 20 nt, Artificial Sequence
  targeting sequence with CTCN PAM
gcagccggugugguagccau

SEQ ID NO: 17155 - RNA, 20 nt, Artificial Sequence
  targeting sequence with CTCN PAM
agugcaaagccuccgcagcc

SEQ ID NO: 17156 - RNA, 20 nt, Artificial Sequence
  targeting sequence with CTCN PAM
cuucucaagugcaaagccuc

SEQ ID NO: 17157 - RNA, 20 nt, Artificial Sequence
  targeting sequence with CTCN PAM
guggcaaggaaaccugacuu

SEQ ID NO: 17158 - RNA, 20 nt, Artificial Sequence
  targeting sequence with CTCN PAM
guggcaaauuucagcucugu

SEQ ID NO: 17159 - RNA, 20 nt, Artificial Sequence
  targeting sequence with CTCN PAM
cgccuguaaucccagcgcuu

SEQ ID NO: 17160 - RNA, 20 nt, Artificial Sequence
  targeting sequence with CTCN PAM
caaagcgcugggauuacagg

SEQ ID NO: 17161 - RNA, 20 nt, Artificial Sequence
  targeting sequence with CTCN PAM
aggcuucaggcgauccuucc

SEQ ID NO: 17162 - RNA, 20 nt, Artificial Sequence
  targeting sequence with CTCN PAM
cugcagccuugaccuccagg

SEQ ID NO: 17163 - RNA, 20 nt, Artificial Sequence
  targeting sequence with CTCN PAM
agucugggugacagagaccc

SEQ ID NO: 17164 - RNA, 20 nt, Artificial Sequence
  targeting sequence with CTCN PAM
gucacccagacuggagugcg

SEQ ID NO: 17165 - RNA, 20 nt, Artificial Sequence
  targeting sequence with CTCN PAM
aaaaaauaaaaauaaaaaaa

SEQ ID NO: 17166 - RNA, 20 nt, Artificial Sequence
  targeting sequence with CTCN PAM
cuacauccuggccggggacu

SEQ ID NO: 17167 - RNA, 20 nt, Artificial Sequence
  targeting sequence with CTCN PAM
ucccaaagcugggcuccuuc

SEQ ID NO: 17168 - RNA, 20 nt, Artificial Sequence
  targeting sequence with CTCN PAM
caaagcugggcuccuuccca

SEQ ID NO: 17169 - RNA, 20 nt, Artificial Sequence
  targeting sequence with CTCN PAM
uucccauucauccuucacgg

SEQ ID NO: 17170 - RNA, 20 nt, Artificial Sequence
  targeting sequence with CTCN PAM
cgugaaggaugaaugggaag

SEQ ID NO: 17171 - RNA, 20 nt, Artificial Sequence
  targeting sequence with CTCN PAM
uuggcucccgugaaggauga

SEQ ID NO: 17172 - RNA, 20 nt, Artificial Sequence
  targeting sequence with CTCN PAM
cuuuggcucccgugaaggau

SEQ ID NO: 17173 - RNA, 20 nt, Artificial Sequence
  targeting sequence with CTCN PAM
uggaaaagaaagcagacguu

SEQ ID NO: 17174 - RNA, 20 nt, Artificial Sequence
  targeting sequence with CTCN PAM
acaaacgucugcuuucuuuu

SEQ ID NO: 17175 - RNA, 20 nt, Artificial Sequence
  targeting sequence with CTCN PAM
agacugcacuccacaaacgu

SEQ ID NO: 17176 - RNA, 20 nt, Artificial Sequence
  targeting sequence with CTCN PAM
caacuaaacuccagacugca

SEQ ID NO: 17177 - RNA, 20 nt, Artificial Sequence
  targeting sequence with CTCN PAM
cauugcuaacaucuuaccgu

SEQ ID NO: 17178 - RNA, 20 nt, Artificial Sequence
  targeting sequence with CTCN PAM
ugugcagcucaacagcuucc

SEQ ID NO: 17179 - RNA, 20 nt, Artificial Sequence
  targeting sequence with CTCN PAM
acagcuucccaugguucccu

SEQ ID NO: 17180 - RNA, 20 nt, Artificial Sequence
  targeting sequence with CTCN PAM
ugggcccuugaagccccacu

SEQ ID NO: 17181 - RNA, 20 nt, Artificial Sequence
  targeting sequence with CTCN PAM
aucuggcccugaccucugug

SEQ ID NO: 17182 - RNA, 20 nt, Artificial Sequence
  targeting sequence with CTCN PAM
guggccucucucagcccccg

SEQ ID NO: 17183 - RNA, 20 nt, Artificial Sequence
  targeting sequence with CTCN PAM
cucagcccccguccccgcca

SEQ ID NO: 17184 - RNA, 20 nt, Artificial Sequence
  targeting sequence with CTCN PAM
cagcccccguccccgccaac

SEQ ID NO: 17185 - RNA, 20 nt, Artificial Sequence
  targeting sequence with CTCN PAM
gcccccguccccgccaacuc

SEQ ID NO: 17186 - RNA, 20 nt, Artificial Sequence
  targeting sequence with CTCN PAM
ucccucagcuuggacagccc

SEQ ID NO: 17187 - RNA, 20 nt, Artificial Sequence
  targeting sequence with CTCN PAM
cucagcuuggacagcccagg

SEQ ID NO: 17188 - RNA, 20 nt, Artificial Sequence
  targeting sequence with CTCN PAM
gcuuggacagcccagguagg

SEQ ID NO: 17189 - RNA, 20 nt, Artificial Sequence
  targeting sequence with CTCN PAM
ugggcuccccugaguggagc

SEQ ID NO: 17190 - RNA, 20 nt, Artificial Sequence
  targeting sequence with CTCN PAM
ccugaguggagcccaugugg

SEQ ID NO: 17191 - RNA, 20 nt, Artificial Sequence
  targeting sequence with CTCN PAM
ggggagcccaggaggacugg

SEQ ID NO: 17192 - RNA, 20 nt, Artificial Sequence
  targeting sequence with CTCN PAM
acucaggggagcccaggagg

SEQ ID NO: 17193 - RNA, 20 nt, Artificial Sequence
  targeting sequence with CTCN PAM
gugguggccuguggacugug

SEQ ID NO: 17194 - RNA, 20 nt, Artificial Sequence
  targeting sequence with CTCN PAM
guccagcagcccagccgcac

SEQ ID NO: 17195 - RNA, 20 nt, Artificial Sequence
  targeting sequence with CTCN PAM
cagaccccagcuccuuccac

SEQ ID NO: 17196 - RNA, 20 nt, Artificial Sequence
  targeting sequence with CTCN PAM
uuccacuucagcaugcacug

SEQ ID NO: 17197 - RNA, 20 nt, Artificial Sequence
  targeting sequence with CTCN PAM
cagaacacugugcaagcuga

SEQ ID NO: 17198 - RNA, 20 nt, Artificial Sequence
  targeting sequence with CTCN PAM
gaacacugugcaagcugaca

SEQ ID NO: 17199 - RNA, 20 nt, Artificial Sequence
  targeting sequence with CTCN PAM
gcugagaguaaacugaggca

SEQ ID NO: 17200 - RNA, 20 nt, Artificial Sequence
  targeting sequence with CTCN PAM
gcagaggugucagcuugcac

SEQ ID NO: 17201 - RNA, 20 nt, Artificial Sequence
  targeting sequence with CTCN PAM
cagcagaggugucagcuugc

SEQ ID NO: 17202 - RNA, 20 nt, Artificial Sequence
  targeting sequence with CTCN PAM
guuuacucucagcagaggug

SEQ ID NO: 17203 - RNA, 20 nt, Artificial Sequence
  targeting sequence with CTCN PAM
uuccuugccucaguuuacuc

SEQ ID NO: 17204 - RNA, 20 nt, Artificial Sequence
  targeting sequence with CTCN PAM
cagggcuggcacacagugug

SEQ ID NO: 17205 - RNA, 20 nt, Artificial Sequence
  targeting sequence with CTCN PAM
guccuggguggccucuggca

SEQ ID NO: 17206 - RNA, 20 nt, Artificial Sequence
  targeting sequence with CTCN PAM
ggcagcagcccccaugccag

SEQ ID NO: 17207 - RNA, 20 nt, Artificial Sequence
  targeting sequence with CTCN PAM
cuggcaugggggcugcugcc

SEQ ID NO: 17208 - RNA, 20 nt, Artificial Sequence
  targeting sequence with CTCN PAM
ucccuggcaugggggcugcu

SEQ ID NO: 17209 - RNA, 20 nt, Artificial Sequence
  targeting sequence with CTCN PAM
gcagcagguggucuccuccc

SEQ ID NO: 17210 - RNA, 20 nt, Artificial Sequence
  targeting sequence with CTCN PAM
uggucaccccugaaggcgcu

SEQ ID NO: 17211 - RNA, 20 nt, Artificial Sequence
  targeting sequence with CTCN PAM
aggaagccucuuggucaccc

SEQ ID NO: 17212 - RNA, 20 nt, Artificial Sequence
  targeting sequence with CTCN PAM
cuacagccccuccaggaagc

SEQ ID NO: 17213 - RNA, 20 nt, Artificial Sequence
  targeting sequence with CTCN PAM
guggcuaaggccaggcuucc

SEQ ID NO: 17214 - RNA, 20 nt, Artificial Sequence
  targeting sequence with CTCN PAM
aggcugcuuuuccucugugg

SEQ ID NO: 17215 - RNA, 20 nt, Artificial Sequence
  targeting sequence with CTCN PAM
uccaggcugcuuuuccucug

SEQ ID NO: 17216 - RNA, 20 nt, Artificial Sequence
  targeting sequence with CTCN PAM
aacgugcuccuccaggcugc

SEQ ID NO: 17217 - RNA, 20 nt, Artificial Sequence
  targeting sequence with CTCN PAM
gugccuugguuucuccaacg

SEQ ID NO: 17218 - RNA, 20 nt, Artificial Sequence
  targeting sequence with CTCN PAM
ucucugugccuugguuucuc

SEQ ID NO: 17219 - RNA, 20 nt, Artificial Sequence
  targeting sequence with CTCN PAM
gcucuucucugugccuuggu

SEQ ID NO: 17220 - RNA, 20 nt, Artificial Sequence
  targeting sequence with CTCN PAM
ggcagacccuucggggaggc

SEQ ID NO: 17221 - RNA, 20 nt, Artificial Sequence
  targeting sequence with CTCN PAM
ccgaagggucugccagagcu

SEQ ID NO: 17222 - RNA, 20 nt, Artificial Sequence
  targeting sequence with CTCN PAM
ggaagaggcgggucacccag

SEQ ID NO: 17223 - RNA, 20 nt, Artificial Sequence
  targeting sequence with CTCN PAM
uccagaggggucagggaaac

SEQ ID NO: 17224 - RNA, 20 nt, Artificial Sequence
  targeting sequence with CTCN PAM
agggcuuugagguuauccag

SEQ ID NO: 17225 - RNA, 20 nt, Artificial Sequence
  targeting sequence with CTCN PAM
aagcccuggagcugggugac

SEQ ID NO: 17226 - RNA, 20 nt, Artificial Sequence
  targeting sequence with CTCN PAM
gggcggccuggcuggcuggc

SEQ ID NO: 17227 - RNA, 20 nt, Artificial Sequence
  targeting sequence with CTCN PAM
ugcugcguacccauuuuaca

SEQ ID NO: 17228 - RNA, 20 nt, Artificial Sequence
  targeting sequence with CTCN PAM
ucuguaaaauggguacgcag

SEQ ID NO: 17229 - RNA, 20 nt, Artificial Sequence
  targeting sequence with CTCN PAM
gcuuucucaucuguaaaaug

SEQ ID NO: 17230 - RNA, 20 nt, Artificial Sequence
  targeting sequence with CTCN PAM
ugacuccuaagucucacagc

SEQ ID NO: 17231 - RNA, 20 nt, Artificial Sequence
  targeting sequence with CTCN PAM
uaagucucacagcucuuacc

SEQ ID NO: 17232 - RNA, 20 nt, Artificial Sequence
  targeting sequence with CTCN PAM
cagcucuuaccucacuaugg

SEQ ID NO: 17233 - RNA, 20 nt, Artificial Sequence
  targeting sequence with CTCN PAM
uaccucacuaugggaggcac

SEQ ID NO: 17234 - RNA, 20 nt, Artificial Sequence
  targeting sequence with CTCN PAM
cuaugggaggcaccaucccc

SEQ ID NO: 17235 - RNA, 20 nt, Artificial Sequence
  targeting sequence with CTCN PAM
cauagugagguaagagcugu

SEQ ID NO: 17236 - RNA, 20 nt, Artificial Sequence
  targeting sequence with CTCN PAM
gaaccucggacuccacaucu

SEQ ID NO: 17237 - RNA, 20 nt, Artificial Sequence
  targeting sequence with CTCN PAM
gacuccacaucuguaaaaua

SEQ ID NO: 17238 - RNA, 20 nt, Artificial Sequence
  targeting sequence with CTCN PAM
acaucuguaaaauaagacag

SEQ ID NO: 17239 - RNA, 20 nt, Artificial Sequence
  targeting sequence with CTCN PAM
guccuuccauaagcccuagg

SEQ ID NO: 17240 - RNA, 20 nt, Artificial Sequence
  targeting sequence with CTCN PAM
uaggagccuucagugcuaag

SEQ ID NO: 17241 - RNA, 20 nt, Artificial Sequence
  targeting sequence with CTCN PAM
uaugagcucaguccuuccau

SEQ ID NO: 17242 - RNA, 20 nt, Artificial Sequence
  targeting sequence with CTCN PAM
auaaauguucccaauuagcu

SEQ ID NO: 17243 - RNA, 20 nt, Artificial Sequence
  targeting sequence with CTCN PAM
guggucugcauagcuaauug

SEQ ID NO: 17244 - RNA, 20 nt, Artificial Sequence
  targeting sequence with CTCN PAM
gcuccguggucugcauagcu

SEQ ID NO: 17245 - RNA, 20 nt, Artificial Sequence
  targeting sequence with CTCN PAM
ggagcucccgaggacaggga

SEQ ID NO: 17246 - RNA, 20 nt, Artificial Sequence
  targeting sequence with CTCN PAM
cgagccucugcuccgugguc

SEQ ID NO: 17247 - RNA, 20 nt, Artificial Sequence
  targeting sequence with CTCN PAM
cgaggacagggacaagccac

SEQ ID NO: 17248 - RNA, 20 nt, Artificial Sequence
  targeting sequence with CTCN PAM
ggagcucccgagccucugcu

SEQ ID NO: 17249 - RNA, 20 nt, Artificial Sequence
  targeting sequence with CTCN PAM
accgcuuccugaagucaaag

SEQ ID NO: 17250 - RNA, 20 nt, Artificial Sequence
  targeting sequence with CTCN PAM
gaugcuuugacuucaggaag

SEQ ID NO: 17251 - RNA, 20 nt, Artificial Sequence
  targeting sequence with CTCN PAM
ccaaggacacaguaguggga

SEQ ID NO: 17252 - RNA, 20 nt, Artificial Sequence
  targeting sequence with CTCN PAM
cacuacuguguccuugguga

SEQ ID NO: 17253 - RNA, 20 nt, Artificial Sequence
  targeting sequence with CTCN PAM
ggccucggccugcucugccc

SEQ ID NO: 17254 - RNA, 20 nt, Artificial Sequence
  targeting sequence with CTCN PAM
gccugcucugcccuggcgcc

SEQ ID NO: 17255 - RNA, 20 nt, Artificial Sequence
  targeting sequence with CTCN PAM
gcccuggcgccugggaacca

SEQ ID NO: 17256 - RNA, 20 nt, Artificial Sequence
  targeting sequence with CTCN PAM
agcagccauuguuuaguuag

SEQ ID NO: 17257 - RNA, 20 nt, Artificial Sequence
  targeting sequence with CTCN PAM
cccuucaugaagcuguuucu

SEQ ID NO: 17258 - RNA, 20 nt, Artificial Sequence
  targeting sequence with CTCN PAM
uuccggcccggccuggcccc

SEQ ID NO: 17259 - RNA, 20 nt, Artificial Sequence
  targeting sequence with CTCN PAM
ccucccccugggucccagag

SEQ ID NO: 17260 - RNA, 20 nt, Artificial Sequence
  targeting sequence with CTCN PAM
cccugggucccagaggagca

SEQ ID NO: 17261 - RNA, 20 nt, Artificial Sequence
  targeting sequence with CTCN PAM
gggacccagggggaggggag

SEQ ID NO: 17262 - RNA, 20 nt, Artificial Sequence
  targeting sequence with CTCN PAM
ucugggacccagggggaggg

SEQ ID NO: 17263 - RNA, 20 nt, Artificial Sequence
  targeting sequence with CTCN PAM
ucccuggcccagggaaaagg

SEQ ID NO: 17264 - RNA, 20 nt, Artificial Sequence
  targeting sequence with CTCN PAM
ccccagcaggaggggcagag

SEQ ID NO: 17265 - RNA, 20 nt, Artificial Sequence
  targeting sequence with CTCN PAM
ugcuggggggagggaagccu

SEQ ID NO: 17266 - RNA, 20 nt, Artificial Sequence
  targeting sequence with CTCN PAM
gccccuccugcuggggggag

SEQ ID NO: 17267 - RNA, 20 nt, Artificial Sequence
  targeting sequence with CTCN PAM
cagcuuccuccccugaaggg

SEQ ID NO: 17268 - RNA, 20 nt, Artificial Sequence
  targeting sequence with CTCN PAM
ccugaagggacuccaggcca

SEQ ID NO: 17269 - RNA, 20 nt, Artificial Sequence
  targeting sequence with CTCN PAM
aggccaggagccgagaaaua

SEQ ID NO: 17270 - RNA, 20 nt, Artificial Sequence
  targeting sequence with CTCN PAM
uggccuggagucccuucagg

SEQ ID NO: 17271 - RNA, 20 nt, Artificial Sequence
  targeting sequence with CTCN PAM
gcuccuggccuggagucccu

SEQ ID NO: 17272 - RNA, 20 nt, Artificial Sequence
  targeting sequence with CTCN PAM
ccagggaacacuggcaguuc

SEQ ID NO: 17273 - RNA, 20 nt, Artificial Sequence
  targeting sequence with CTCN PAM
agggaacacuggcaguuccc

SEQ ID NO: 17274 - RNA, 20 nt, Artificial Sequence
  targeting sequence with CTCN PAM
uggggcuggggggacuugga

SEQ ID NO: 17275 - RNA, 20 nt, Artificial Sequence
  targeting sequence with CTCN PAM
aaguccccccagccccagga

SEQ ID NO: 17276 - RNA, 20 nt, Artificial Sequence
  targeting sequence with CTCN PAM
cacccuccuccccagccccu

SEQ ID NO: 17277 - RNA, 20 nt, Artificial Sequence
  targeting sequence with CTCN PAM
uccccagccccuggucuccu

SEQ ID NO: 17278 - RNA, 20 nt, Artificial Sequence
  targeting sequence with CTCN PAM
ccagccccuggucuccucgg

SEQ ID NO: 17279 - RNA, 20 nt, Artificial Sequence
  targeting sequence with CTCN PAM
ucgggguccagcccauaugc

SEQ ID NO: 17280 - RNA, 20 nt, Artificial Sequence
  targeting sequence with CTCN PAM
ggguccagcccauaugccug

SEQ ID NO: 17281 - RNA, 20 nt, Artificial Sequence
  targeting sequence with CTCN PAM
gcagcaggacucuaccgcug

SEQ ID NO: 17282 - RNA, 20 nt, Artificial Sequence
  targeting sequence with CTCN PAM
accgcuggucccagagucau

SEQ ID NO: 17283 - RNA, 20 nt, Artificial Sequence
  targeting sequence with CTCN PAM
gggaccagcgguagaguccu

SEQ ID NO: 17284 - RNA, 20 nt, Artificial Sequence
  targeting sequence with CTCN PAM
aagcagcccugucuucuugg

SEQ ID NO: 17285 - RNA, 20 nt, Artificial Sequence
  targeting sequence with CTCN PAM
gggcuggauuccaugagcug

SEQ ID NO: 17286 - RNA, 20 nt, Artificial Sequence
  targeting sequence with CTCN PAM
uggaauccagcccggagaug

SEQ ID NO: 17287 - RNA, 20 nt, Artificial Sequence
  targeting sequence with CTCN PAM
guguccccagcucauggaau

SEQ ID NO: 17288 - RNA, 20 nt, Artificial Sequence
  targeting sequence with CTCN PAM
cuccagcugcccacauccga

SEQ ID NO: 17289 - RNA, 20 nt, Artificial Sequence
  targeting sequence with CTCN PAM
ccagcugcccacauccgagc

SEQ ID NO: 17290 - RNA, 20 nt, Artificial Sequence
  targeting sequence with CTCN PAM
agcugcccacauccgagcuc

SEQ ID NO: 17291 - RNA, 20 nt, Artificial Sequence
  targeting sequence with CTCN PAM
gaugugggcagcuggagaga

SEQ ID NO: 17292 - RNA, 20 nt, Artificial Sequence
  targeting sequence with CTCN PAM
gaggcccagccccaggaugg

SEQ ID NO: 17293 - RNA, 20 nt, Artificial Sequence
  targeting sequence with CTCN PAM
gagcucggaugugggcagcu

SEQ ID NO: 17294 - RNA, 20 nt, Artificial Sequence
  targeting sequence with CTCN PAM
ccauccuggggcugggccuc

SEQ ID NO: 17295 - RNA, 20 nt, Artificial Sequence
  targeting sequence with CTCN PAM
uaguaacaguucgguagagu

SEQ ID NO: 17296 - RNA, 20 nt, Artificial Sequence
  targeting sequence with CTCN PAM
accgaacuguuacuaugaga

SEQ ID NO: 17297 - RNA, 20 nt, Artificial Sequence
  targeting sequence with CTCN PAM
gcacaaagcagacugcacac

SEQ ID NO: 17298 - RNA, 20 nt, Artificial Sequence
  targeting sequence with CTCN PAM
uucuguauuaucucauucaa

SEQ ID NO: 17299 - RNA, 20 nt, Artificial Sequence
  targeting sequence with CTCN PAM
uucaacccucaccacacccu

SEQ ID NO: 17300 - RNA, 20 nt, Artificial Sequence
  targeting sequence with CTCN PAM
ccacacccugaaagaguuga

SEQ ID NO: 17301 - RNA, 20 nt, Artificial Sequence
  targeting sequence with CTCN PAM
uucaggguguggugaggguu

SEQ ID NO: 17302 - RNA, 20 nt, Artificial Sequence
  targeting sequence with CTCN PAM
guuuccuuuacuguaaagca

SEQ ID NO: 17303 - RNA, 20 nt, Artificial Sequence
  targeting sequence with CTCN PAM
gugccucaguuuccuuuacu

SEQ ID NO: 17304 - RNA, 20 nt, Artificial Sequence
  targeting sequence with CTCN PAM
cugugccucaguuuccuuua

SEQ ID NO: 17305 - RNA, 20 nt, Artificial Sequence
  targeting sequence with CTCN PAM
agcgcaggccugcgggcucc

SEQ ID NO: 17306 - RNA, 20 nt, Artificial Sequence
  targeting sequence with CTCN PAM
agauccccgcccuuaaccac

SEQ ID NO: 17307 - RNA, 20 nt, Artificial Sequence
  targeting sequence with CTCN PAM
ccacccgccgcucugcuggg

SEQ ID NO: 17308 - RNA, 20 nt, Artificial Sequence
  targeting sequence with CTCN PAM
gcugggagccaccaaugguu

SEQ ID NO: 17309 - RNA, 20 nt, Artificial Sequence
  targeting sequence with CTCN PAM
cagcagagcggcgggugggg

SEQ ID NO: 17310 - RNA, 20 nt, Artificial Sequence
  targeting sequence with CTCN PAM
aagcggcugauuuccuggca

SEQ ID NO: 17311 - RNA, 20 nt, Artificial Sequence
  targeting sequence with CTCN PAM
aaacccaggguuuuuccagc

SEQ ID NO: 17312 - RNA, 20 nt, Artificial Sequence
  targeting sequence with CTCN PAM
guuuccccagcucaaaaccc

SEQ ID NO: 17313 - RNA, 20 nt, Artificial Sequence
  targeting sequence with CTCN PAM
agaagcagccaucaccuuga

SEQ ID NO: 17314 - RNA, 20 nt, Artificial Sequence
  targeting sequence with CTCN PAM
cuagaagcagccaucaccuu

SEQ ID NO: 17315 - RNA, 20 nt, Artificial Sequence
  targeting sequence with CTCN PAM
gucaccucaaacaaagauag

SEQ ID NO: 17316 - RNA, 20 nt, Artificial Sequence
  targeting sequence with CTCN PAM
aacaaagauagcgggcagag

SEQ ID NO: 17317 - RNA, 20 nt, Artificial Sequence
  targeting sequence with CTCN PAM
gcccgcuaucuuuguuugag

SEQ ID NO: 17318 - RNA, 20 nt, Artificial Sequence
  targeting sequence with CTCN PAM
agccucugcccgcuaucuuu

SEQ ID NO: 17319 - RNA, 20 nt, Artificial Sequence
  targeting sequence with CTCN PAM
acuccaaggccucugccugc

SEQ ID NO: 17320 - RNA, 20 nt, Artificial Sequence
  targeting sequence with CTCN PAM
aaggccucugccugcgggcc

SEQ ID NO: 17321 - RNA, 20 nt, Artificial Sequence
  targeting sequence with CTCN PAM
gccugcgggcccccccccau

SEQ ID NO: 17322 - RNA, 20 nt, Artificial Sequence
  targeting sequence with CTCN PAM
gaucgguaaauaaugggggg

SEQ ID NO: 17323 - RNA, 20 nt, Artificial Sequence
  targeting sequence with CTCN PAM
uaauggagcugcgagcuucc

SEQ ID NO: 17324 - RNA, 20 nt, Artificial Sequence
  targeting sequence with CTCN PAM
auuacgagucccggcaaggc

SEQ ID NO: 17325 - RNA, 20 nt, Artificial Sequence
  targeting sequence with CTCN PAM
cagcuccauuacgagucccg

SEQ ID NO: 17326 - RNA, 20 nt, Artificial Sequence
  targeting sequence with CTCN PAM
cccuccagcgcaugauuuau

SEQ ID NO: 17327 - RNA, 20 nt, Artificial Sequence
  targeting sequence with CTCN PAM
agcgcaugauuuaucaaguu

SEQ ID NO: 17328 - RNA, 20 nt, Artificial Sequence
  targeting sequence with CTCN PAM
ccgccuaguccaccguccuu

SEQ ID NO: 17329 - RNA, 20 nt, Artificial Sequence
  targeting sequence with CTCN PAM
augcagucaagaucuggggg

SEQ ID NO: 17330 - RNA, 20 nt, Artificial Sequence
  targeting sequence with CTCN PAM
gcugauacucgaugcaguca

SEQ ID NO: 17331 - RNA, 20 nt, Artificial Sequence
  targeting sequence with CTCN PAM
acccugcucggcugauacuc

SEQ ID NO: 17332 - RNA, 20 nt, Artificial Sequence
  targeting sequence with CTCN PAM
gacauggccuuuggaaagaa

SEQ ID NO: 17333 - RNA, 20 nt, Artificial Sequence
  targeting sequence with CTCN PAM
cugccccccaaguacagccg

SEQ ID NO: 17334 - RNA, 20 nt, Artificial Sequence
  targeting sequence with CTCN PAM
gagacuuucugggcuugucc

SEQ ID NO: 17335 - RNA, 20 nt, Artificial Sequence
  targeting sequence with CTCN PAM
gagugccagccacguggacu

SEQ ID NO: 17336 - RNA, 20 nt, Artificial Sequence
  targeting sequence with CTCN PAM
ggaaccggcugguuuccaug

SEQ ID NO: 17337 - RNA, 20 nt, Artificial Sequence
  targeting sequence with CTCN PAM
gacagccauguggggauugc

SEQ ID NO: 17338 - RNA, 20 nt, Artificial Sequence
  targeting sequence with CTCN PAM
agcucugacagccauguggg

SEQ ID NO: 17339 - RNA, 20 nt, Artificial Sequence
  targeting sequence with CTCN PAM
ccagcucugacagccaugug

SEQ ID NO: 17340 - RNA, 20 nt, Artificial Sequence
  targeting sequence with CTCN PAM
ggaguuaccugguccagcca

SEQ ID NO: 17341 - RNA, 20 nt, Artificial Sequence
  targeting sequence with CTCN PAM
cgagggccucuccagcucug

SEQ ID NO: 17342 - RNA, 20 nt, Artificial Sequence
  targeting sequence with CTCN PAM
gggugagcgccuccgccccu

SEQ ID NO: 17343 - RNA, 20 nt, Artificial Sequence
  targeting sequence with CTCN PAM
cccggagcccccacuguggc

SEQ ID NO: 17344 - RNA, 20 nt, Artificial Sequence
  targeting sequence with CTCN PAM
gccccuggauccugccagca

SEQ ID NO: 17345 - RNA, 20 nt, Artificial Sequence
  targeting sequence with CTCN PAM
ccuuuccccaaagcccugcu

SEQ ID NO: 17346 - RNA, 20 nt, Artificial Sequence
  targeting sequence with CTCN PAM
uuuccccaaagcccugcugg

SEQ ID NO: 17347 - RNA, 20 nt, Artificial Sequence
  targeting sequence with CTCN PAM
ccgcagcccacaugacagca

SEQ ID NO: 17348 - RNA, 20 nt, Artificial Sequence
  targeting sequence with CTCN PAM
cagcuuccccucggccugcu

SEQ ID NO: 17349 - RNA, 20 nt, Artificial Sequence
  targeting sequence with CTCN PAM
gcuuccccucggccugcuac

SEQ ID NO: 17350 - RNA, 20 nt, Artificial Sequence
  targeting sequence with CTCN PAM
gccugcuacccaagccacau

SEQ ID NO: 17351 - RNA, 20 nt, Artificial Sequence
  targeting sequence with CTCN PAM
gagccuuugccccuaucgug

SEQ ID NO: 17352 - RNA, 20 nt, Artificial Sequence
  targeting sequence with CTCN PAM
gagauguuggaauguggcuu

SEQ ID NO: 17353 - RNA, 20 nt, Artificial Sequence
  targeting sequence with CTCN PAM
gccuggaaugccuuccccag

SEQ ID NO: 17354 - RNA, 20 nt, Artificial Sequence
  targeting sequence with CTCN PAM
aaccuccccuccuccaggaa

SEQ ID NO: 17355 - RNA, 20 nt, Artificial Sequence
  targeting sequence with CTCN PAM
ccuccuccaggaagcccucc

SEQ ID NO: 17356 - RNA, 20 nt, Artificial Sequence
  targeting sequence with CTCN PAM
uccaggaagcccucccgcac

SEQ ID NO: 17357 - RNA, 20 nt, Artificial Sequence
  targeting sequence with CTCN PAM
aggaagcccucccgcacucc

SEQ ID NO: 17358 - RNA, 20 nt, Artificial Sequence
  targeting sequence with CTCN PAM
cgcacuccucugaugagcug

SEQ ID NO: 17359 - RNA, 20 nt, Artificial Sequence
  targeting sequence with CTCN PAM
ucugaugagcugguuagugu

SEQ ID NO: 17360 - RNA, 20 nt, Artificial Sequence
  targeting sequence with CTCN PAM
gaugagcugguuagugugug

SEQ ID NO: 17361 - RNA, 20 nt, Artificial Sequence
  targeting sequence with CTCN PAM
ucagaggagugcgggagggc

SEQ ID NO: 17362 - RNA, 20 nt, Artificial Sequence
  targeting sequence with CTCN PAM
ucccucaccauucugggggc

SEQ ID NO: 17363 - RNA, 20 nt, Artificial Sequence
  targeting sequence with CTCN PAM
cucaccauucugggggcucc

SEQ ID NO: 17364 - RNA, 20 nt, Artificial Sequence
  targeting sequence with CTCN PAM
ccauucugggggcuccugga

SEQ ID NO: 17365 - RNA, 20 nt, Artificial Sequence
  targeting sequence with CTCN PAM
uggagaggguccaauuuguc

SEQ ID NO: 17366 - RNA, 20 nt, Artificial Sequence
  targeting sequence with CTCN PAM
aggagcccccagaaugguga

SEQ ID NO: 17367 - RNA, 20 nt, Artificial Sequence
  targeting sequence with CTCN PAM
ccaggagcccccagaauggu

SEQ ID NO: 17368 - RNA, 20 nt, Artificial Sequence
  targeting sequence with CTCN PAM
cuugggggcuguccuguagc

SEQ ID NO: 17369 - RNA, 20 nt, Artificial Sequence
  targeting sequence with CTCN PAM
ugggggcuguccuguagcaa

SEQ ID NO: 17370 - RNA, 20 nt, Artificial Sequence
  targeting sequence with CTCN PAM
gcuugcuacaggacagcccc

SEQ ID NO: 17371 - RNA, 20 nt, Artificial Sequence
  targeting sequence with CTCN PAM
ucccauacucacauacucua

SEQ ID NO: 17372 - RNA, 20 nt, Artificial Sequence
  targeting sequence with CTCN PAM
cauacucacauacucuagag

SEQ ID NO: 17373 - RNA, 20 nt, Artificial Sequence
  targeting sequence with CTCN PAM
cauacucuagagagcucccc

SEQ ID NO: 17374 - RNA, 20 nt, Artificial Sequence
  targeting sequence with CTCN PAM
agagagcuccccacccagag

SEQ ID NO: 17375 - RNA, 20 nt, Artificial Sequence
  targeting sequence with CTCN PAM
agaguaugugaguaugggag

SEQ ID NO: 17376 - RNA, 20 nt, Artificial Sequence
  targeting sequence with CTCN PAM
cuagaguaugugaguauggg

SEQ ID NO: 17377 - RNA, 20 nt, Artificial Sequence
  targeting sequence with CTCN PAM
ccacccagagcuuggacggg

SEQ ID NO: 17378 - RNA, 20 nt, Artificial Sequence
  targeting sequence with CTCN PAM
ggguggggagcucucuagag

SEQ ID NO: 17379 - RNA, 20 nt, Artificial Sequence
  targeting sequence with CTCN PAM
uugguaacaucgcaugcccg

SEQ ID NO: 17380 - RNA, 20 nt, Artificial Sequence
  targeting sequence with CTCN PAM
gguauguguggguggagaca

SEQ ID NO: 17381 - RNA, 20 nt, Artificial Sequence
  targeting sequence with CTCN PAM
acccacacauaccagaggcc

SEQ ID NO: 17382 - RNA, 20 nt, Artificial Sequence
  targeting sequence with CTCN PAM
ugcuaccgggccuguagcug

SEQ ID NO: 17383 - RNA, 20 nt, Artificial Sequence
  targeting sequence with CTCN PAM
gcaggccacccugaaaggcc

SEQ ID NO: 17384 - RNA, 20 nt, Artificial Sequence
  targeting sequence with CTCN PAM
cugcuucucacaggggccuc

SEQ ID NO: 17385 - RNA, 20 nt, Artificial Sequence
  targeting sequence with CTCN PAM
caggggccucggcggacgca

SEQ ID NO: 17386 - RNA, 20 nt, Artificial Sequence
  targeting sequence with CTCN PAM
gcggacgcagaaguucccug

SEQ ID NO: 17387 - RNA, 20 nt, Artificial Sequence
  targeting sequence with CTCN PAM
guuuccucaccuuuaaaaug

SEQ ID NO: 17388 - RNA, 20 nt, Artificial Sequence
  targeting sequence with CTCN PAM
ccuuuaaaaugggcccauuc

SEQ ID NO: 17389 - RNA, 20 nt, Artificial Sequence
  targeting sequence with CTCN PAM
ggcucacaccccuucgguca

SEQ ID NO: 17390 - RNA, 20 nt, Artificial Sequence
  targeting sequence with CTCN PAM
caccccuucggucaaagauu

SEQ ID NO: 17391 - RNA, 20 nt, Artificial Sequence
  targeting sequence with CTCN PAM
aaaaucuuugaccgaagggg

SEQ ID NO: 17392 - RNA, 20 nt, Artificial Sequence
  targeting sequence with CTCN PAM
uuccuccaaaaucuuugacc

SEQ ID NO: 17393 - RNA, 20 nt, Artificial Sequence
  targeting sequence with CTCN PAM
accuggagcaccacagucac

SEQ ID NO: 17394 - RNA, 20 nt, Artificial Sequence
  targeting sequence with CTCN PAM
agguggagcaggcuucuggc

SEQ ID NO: 17395 - RNA, 20 nt, Artificial Sequence
  targeting sequence with CTCN PAM
ggcaagaugcuuaacccuuc

SEQ ID NO: 17396 - RNA, 20 nt, Artificial Sequence
  targeting sequence with CTCN PAM
guuuccccuuccauagacug

SEQ ID NO: 17397 - RNA, 20 nt, Artificial Sequence
  targeting sequence with CTCN PAM
ccagaaccugaaugacauga

SEQ ID NO: 17398 - RNA, 20 nt, Artificial Sequence
  targeting sequence with CTCN PAM
gcaaagggcuaacacagaga

SEQ ID NO: 17399 - RNA, 20 nt, Artificial Sequence
  targeting sequence with CTCN PAM
guguuagcccuuugcagagc

SEQ ID NO: 17400 - RNA, 20 nt, Artificial Sequence
  targeting sequence with CTCN PAM
agcaacaaccacaguaauua

SEQ ID NO: 17401 - RNA, 20 nt, Artificial Sequence
  targeting sequence with CTCN PAM
gacaccagaacugccccauc

SEQ ID NO: 17402 - RNA, 20 nt, Artificial Sequence
  targeting sequence with CTCN PAM
augggccaacuccagggucg

SEQ ID NO: 17403 - RNA, 20 nt, Artificial Sequence
  targeting sequence with CTCN PAM
agggucggagaacggaggcc

SEQ ID NO: 17404 - RNA, 20 nt, Artificial Sequence
  targeting sequence with CTCN PAM
gacccuggaguuggcccaug

SEQ ID NO: 17405 - RNA, 20 nt, Artificial Sequence
  targeting sequence with CTCN PAM
guucuccgacccuggaguug

SEQ ID NO: 17406 - RNA, 20 nt, Artificial Sequence
  targeting sequence with CTCN PAM
cucccggggcuccugcccuc

SEQ ID NO: 17407 - RNA, 20 nt, Artificial Sequence
  targeting sequence with CTCN PAM
cccggggcuccugcccuccc

SEQ ID NO: 17408 - RNA, 20 nt, Artificial Sequence
  targeting sequence with CTCN PAM
cggggcuccugcccucccgc

SEQ ID NO: 17409 - RNA, 20 nt, Artificial Sequence
  targeting sequence with CTCN PAM
ugcccucccgcuccuguccc

SEQ ID NO: 17410 - RNA, 20 nt, Artificial Sequence
  targeting sequence with CTCN PAM
cgcuccugucccaguacacg

SEQ ID NO: 17411 - RNA, 20 nt, Artificial Sequence
  targeting sequence with CTCN PAM
ugucccaguacacgccacgc

SEQ ID NO: 17412 - RNA, 20 nt, Artificial Sequence
  targeting sequence with CTCN PAM
auggagaccgggagucacag

SEQ ID NO: 17413 - RNA, 20 nt, Artificial Sequence
  targeting sequence with CTCN PAM
auggagauuaaggaaaccag

SEQ ID NO: 17414 - RNA, 20 nt, Artificial Sequence
  targeting sequence with CTCN PAM
cggucuccauggagauuaag

SEQ ID NO: 17415 - RNA, 20 nt, Artificial Sequence
  targeting sequence with CTCN PAM
gcaaaguccgauucacccgc

SEQ ID NO: 17416 - RNA, 20 nt, Artificial Sequence
  targeting sequence with CTCN PAM
agucuucccugcgcucagcc

SEQ ID NO: 17417 - RNA, 20 nt, Artificial Sequence
  targeting sequence with CTCN PAM
gcccacuuuauagaugggaa

SEQ ID NO: 17418 - RNA, 20 nt, Artificial Sequence
  targeting sequence with CTCN PAM
auuuucccaucuauaaagug

SEQ ID NO: 17419 - RNA, 20 nt, Artificial Sequence
  targeting sequence with CTCN PAM
aagaacggaugggacuuucc

SEQ ID NO: 17420 - RNA, 20 nt, Artificial Sequence
  targeting sequence with CTCN PAM
gccccuuccuagcuguggaa

SEQ ID NO: 17421 - RNA, 20 nt, Artificial Sequence
  targeting sequence with CTCN PAM
ccuagcgaugugcgccugcc

SEQ ID NO: 17422 - RNA, 20 nt, Artificial Sequence
  targeting sequence with CTCN PAM
cugugggcguauccagggcg

SEQ ID NO: 17423 - RNA, 20 nt, Artificial Sequence
  targeting sequence with CTCN PAM
cccuccuggguggaccauca

SEQ ID NO: 17424 - RNA, 20 nt, Artificial Sequence
  targeting sequence with CTCN PAM
uggguggaccaucauucaca

SEQ ID NO: 17425 - RNA, 20 nt, Artificial Sequence
  targeting sequence with CTCN PAM
cauuugcacacccaaagggc

SEQ ID NO: 17426 - RNA, 20 nt, Artificial Sequence
  targeting sequence with CTCN PAM
uuugcacacccaaagggcca

SEQ ID NO: 17427 - RNA, 20 nt, Artificial Sequence
  targeting sequence with CTCN PAM
cuccuuccagaggcugauga

SEQ ID NO: 17428 - RNA, 20 nt, Artificial Sequence
  targeting sequence with CTCN PAM
uuccagaggcugaugaucgc

SEQ ID NO: 17429 - RNA, 20 nt, Artificial Sequence
  targeting sequence with CTCN PAM
ggaaggagugagcccauggc

SEQ ID NO: 17430 - RNA, 20 nt, Artificial Sequence
  targeting sequence with CTCN PAM
ccugacuuccucaggaagcu

SEQ ID NO: 17431 - RNA, 20 nt, Artificial Sequence
  targeting sequence with CTCN PAM
ggaagcugggucagccccca

SEQ ID NO: 17432 - RNA, 20 nt, Artificial Sequence
  targeting sequence with CTCN PAM
gcagaugccccagcccgccu

SEQ ID NO: 17433 - RNA, 20 nt, Artificial Sequence
  targeting sequence with CTCN PAM
ggcgggcuggggcaucugca

SEQ ID NO: 17434 - RNA, 20 nt, Artificial Sequence
  targeting sequence with CTCN PAM
auggcccagccagaggggga

SEQ ID NO: 17435 - RNA, 20 nt, Artificial Sequence
  targeting sequence with CTCN PAM
ggcugggccauagagauuca

SEQ ID NO: 17436 - RNA, 20 nt, Artificial Sequence
  targeting sequence with CTCN PAM
gugguggggaauucugcagu

SEQ ID NO: 17437 - RNA, 20 nt, Artificial Sequence
  targeting sequence with CTCN PAM
ccgugguggggaauucugca

SEQ ID NO: 17438 - RNA, 20 nt, Artificial Sequence
  targeting sequence with CTCN PAM
cagcucaccagccaccagga

SEQ ID NO: 17439 - RNA, 20 nt, Artificial Sequence
  targeting sequence with CTCN PAM
ccagccaccaggaagaggac

SEQ ID NO: 17440 - RNA, 20 nt, Artificial Sequence
  targeting sequence with CTCN PAM
uccugguggcuggugagcug

SEQ ID NO: 17441 - RNA, 20 nt, Artificial Sequence
  targeting sequence with CTCN PAM
ugcuucuaucugcggaucca

SEQ ID NO: 17442 - RNA, 20 nt, Artificial Sequence
  targeting sequence with CTCN PAM
cuccccagcugugugagcca

SEQ ID NO: 17443 - RNA, 20 nt, Artificial Sequence
  targeting sequence with CTCN PAM
ccagcugugugagccagggc

SEQ ID NO: 17444 - RNA, 20 nt, Artificial Sequence
  targeting sequence with CTCN PAM
cacagcuggggagugagggu

SEQ ID NO: 17445 - RNA, 20 nt, Artificial Sequence
  targeting sequence with CTCN PAM
cuuggccucaguuuccccuu

SEQ ID NO: 17446 - RNA, 20 nt, Artificial Sequence
  targeting sequence with CTCN PAM
uggccucaguuuccccuucu

SEQ ID NO: 17447 - RNA, 20 nt, Artificial Sequence
  targeting sequence with CTCN PAM
guuuccccuucuguaagcug

SEQ ID NO: 17448 - RNA, 20 nt, Artificial Sequence
  targeting sequence with CTCN PAM
ccuggucaggcagacagugc

SEQ ID NO: 17449 - RNA, 20 nt, Artificial Sequence
  targeting sequence with CTCN PAM
uggcugccccuccccugguc

SEQ ID NO: 17450 - RNA, 20 nt, Artificial Sequence
  targeting sequence with CTCN PAM
gcaggccuuuuauaagcacc

SEQ ID NO: 17451 - RNA, 20 nt, Artificial Sequence
  targeting sequence with CTCN PAM
cgcucugcaggccuuuuaua

SEQ ID NO: 17452 - RNA, 20 nt, Artificial Sequence
  targeting sequence with CTCN PAM
gcgacgguuuuuauucacuc

SEQ ID NO: 17453 - RNA, 20 nt, Artificial Sequence
  targeting sequence with CTCN PAM
aaggagcccacaggccucuu

SEQ ID NO: 17454 - RNA, 20 nt, Artificial Sequence
  targeting sequence with CTCN PAM
uuggagugaauaaaaaccgu

SEQ ID NO: 17455 - RNA, 20 nt, Artificial Sequence
  targeting sequence with CTCN PAM
ugccuucaagacagugcugc

SEQ ID NO: 17456 - RNA, 20 nt, Artificial Sequence
  targeting sequence with CTCN PAM
ucagcccgggcacuagagac

SEQ ID NO: 17457 - RNA, 20 nt, Artificial Sequence
  targeting sequence with CTCN PAM
gcccgggcacuagagaccau

SEQ ID NO: 17458 - RNA, 20 nt, Artificial Sequence
  targeting sequence with CTCN PAM
agugcccgggcugaggaguc

SEQ ID NO: 17459 - RNA, 20 nt, Artificial Sequence
  targeting sequence with CTCN PAM
ccaucucagucucugugcug

SEQ ID NO: 17460 - RNA, 20 nt, Artificial Sequence
  targeting sequence with CTCN PAM
aucucagucucugugcuggg

SEQ ID NO: 17461 - RNA, 20 nt, Artificial Sequence
  targeting sequence with CTCN PAM
gucucugugcuggggcuggg

SEQ ID NO: 17462 - RNA, 20 nt, Artificial Sequence
  targeting sequence with CTCN PAM
gugcuggggcugggacagca

SEQ ID NO: 17463 - RNA, 20 nt, Artificial Sequence
  targeting sequence with CTCN PAM
cccaccccugccugccuuca

SEQ ID NO: 17464 - RNA, 20 nt, Artificial Sequence
  targeting sequence with CTCN PAM
ucuccuccaaggcccugacc

SEQ ID NO: 17465 - RNA, 20 nt, Artificial Sequence
  targeting sequence with CTCN PAM
uccaaggcccugacccuccc

SEQ ID NO: 17466 - RNA, 20 nt, Artificial Sequence
  targeting sequence with CTCN PAM
aaggcccugacccucccucc

SEQ ID NO: 17467 - RNA, 20 nt, Artificial Sequence
  targeting sequence with CTCN PAM
cuccucugagcauccccugu

SEQ ID NO: 17468 - RNA, 20 nt, Artificial Sequence
  targeting sequence with CTCN PAM
ucugagcauccccuguccac

SEQ ID NO: 17469 - RNA, 20 nt, Artificial Sequence
  targeting sequence with CTCN PAM
gagcauccccuguccacuga

SEQ ID NO: 17470 - RNA, 20 nt, Artificial Sequence
  targeting sequence with CTCN PAM
gaggagggagggucagggcc

SEQ ID NO: 17471 - RNA, 20 nt, Artificial Sequence
  targeting sequence with CTCN PAM
guggacaggggaugcucaga

SEQ ID NO: 17472 - RNA, 20 nt, Artificial Sequence
  targeting sequence with CTCN PAM
cucuugauacuaauaccugu

SEQ ID NO: 17473 - RNA, 20 nt, Artificial Sequence
  targeting sequence with CTCN PAM
ugauacuaauaccugugccu

SEQ ID NO: 17474 - RNA, 20 nt, Artificial Sequence
  targeting sequence with CTCN PAM
caugcagugcccaggaaaug

SEQ ID NO: 17475 - RNA, 20 nt, Artificial Sequence
  targeting sequence with CTCN PAM
ggcuuagggggcugcccaua

SEQ ID NO: 17476 - RNA, 20 nt, Artificial Sequence
  targeting sequence with CTCN PAM
gccuacucuggcuuaggggg

SEQ ID NO: 17477 - RNA, 20 nt, Artificial Sequence
  targeting sequence with CTCN PAM
cagccuacucuggcuuaggg

SEQ ID NO: 17478 - RNA, 20 nt, Artificial Sequence
  targeting sequence with CTCN PAM
cucagccuacucuggcuuag

SEQ ID NO: 17479 - RNA, 20 nt, Artificial Sequence
  targeting sequence with CTCN PAM
ggggugucucucucagccua

SEQ ID NO: 17480 - RNA, 20 nt, Artificial Sequence
  targeting sequence with CTCN PAM
uaggauguggguagauuaaa

SEQ ID NO: 17481 - RNA, 20 nt, Artificial Sequence
  targeting sequence with CTCN PAM
cuccuaggauguggguagau

SEQ ID NO: 17482 - RNA, 20 nt, Artificial Sequence
  targeting sequence with CTCN PAM
uuauaaaacaggucuuaugc

SEQ ID NO: 17483 - RNA, 20 nt, Artificial Sequence
  targeting sequence with CTCN PAM
uucuuucucauuauaaaaca

SEQ ID NO: 17484 - RNA, 20 nt, Artificial Sequence
  targeting sequence with CTCN PAM
gggccucauucuuucucauu

SEQ ID NO: 17485 - RNA, 20 nt, Artificial Sequence
  targeting sequence with CTCN PAM
cugggccucauucuuucuca

SEQ ID NO: 17486 - RNA, 20 nt, Artificial Sequence
  targeting sequence with CTCN PAM
acccccagguacaugggcau

SEQ ID NO: 17487 - RNA, 20 nt, Artificial Sequence
  targeting sequence with CTCN PAM
gggcugggagggaugucucc

SEQ ID NO: 17488 - RNA, 20 nt, Artificial Sequence
  targeting sequence with CTCN PAM
cagcccugagaaugucucga

SEQ ID NO: 17489 - RNA, 20 nt, Artificial Sequence
  targeting sequence with CTCN PAM
ugguccaagcccuaucuguu

SEQ ID NO: 17490 - RNA, 20 nt, Artificial Sequence
  targeting sequence with CTCN PAM
aggccagagggucaucucag

SEQ ID NO: 17491 - RNA, 20 nt, Artificial Sequence
  targeting sequence with CTCN PAM
ggccuggagaaacagauagg

SEQ ID NO: 17492 - RNA, 20 nt, Artificial Sequence
  targeting sequence with CTCN PAM
gccaauccuccuagaacccc

SEQ ID NO: 17493 - RNA, 20 nt, Artificial Sequence
  targeting sequence with CTCN PAM
uagaacccccucuccuaaau

SEQ ID NO: 17494 - RNA, 20 nt, Artificial Sequence
  targeting sequence with CTCN PAM
ccuaaauccugccaaguguc

SEQ ID NO: 17495 - RNA, 20 nt, Artificial Sequence
  targeting sequence with CTCN PAM
uaaauccugccaagugucuc

SEQ ID NO: 17496 - RNA, 20 nt, Artificial Sequence
  targeting sequence with CTCN PAM
gcuugcacccuucgucacug

SEQ ID NO: 17497 - RNA, 20 nt, Artificial Sequence
  targeting sequence with CTCN PAM
cagugacgaagggugcaagc

SEQ ID NO: 17498 - RNA, 20 nt, Artificial Sequence
  targeting sequence with CTCN PAM
cagcccccagcccaaaccca

SEQ ID NO: 17499 - RNA, 20 nt, Artificial Sequence
  targeting sequence with CTCN PAM
cucucccuccgcccccaccu

SEQ ID NO: 17500 - RNA, 20 nt, Artificial Sequence
  targeting sequence with CTCN PAM
cucccuccgcccccaccugg

SEQ ID NO: 17501 - RNA, 20 nt, Artificial Sequence
  targeting sequence with CTCN PAM
cccuccgcccccaccuggca

SEQ ID NO: 17502 - RNA, 20 nt, Artificial Sequence
  targeting sequence with CTCN PAM
cuccgcccccaccuggcauc

SEQ ID NO: 17503 - RNA, 20 nt, Artificial Sequence
  targeting sequence with CTCN PAM
gcccccaccuggcaucucag

SEQ ID NO: 17504 - RNA, 20 nt, Artificial Sequence
  targeting sequence with CTCN PAM
gccccuaaauuggugcaaaa

SEQ ID NO: 17505 - RNA, 20 nt, Artificial Sequence
  targeting sequence with CTCN PAM
ccaaccuaugaaugaccaua

SEQ ID NO: 17506 - RNA, 20 nt, Artificial Sequence
  targeting sequence with CTCN PAM
gucugccccaccuuguuggg

SEQ ID NO: 17507 - RNA, 20 nt, Artificial Sequence
  targeting sequence with CTCN PAM
guuucccccaucaguggcac

SEQ ID NO: 17508 - RNA, 20 nt, Artificial Sequence
  targeting sequence with CTCN PAM
acaacuucccaacuggcuug

SEQ ID NO: 17509 - RNA, 20 nt, Artificial Sequence
  targeting sequence with CTCN PAM
aaacagguugugauuugagg

SEQ ID NO: 17510 - RNA, 20 nt, Artificial Sequence
  targeting sequence with CTCN PAM
aaucacaaccuguuuggagu

SEQ ID NO: 17511 - RNA, 20 nt, Artificial Sequence
  targeting sequence with CTCN PAM
auugcauguagcuuggaucc

SEQ ID NO: 17512 - RNA, 20 nt, Artificial Sequence
  targeting sequence with CTCN PAM
guuucucucaaaauaucuua

SEQ ID NO: 17513 - RNA, 20 nt, Artificial Sequence
  targeting sequence with CTCN PAM
caaaauaucuuaacugcccc

SEQ ID NO: 17514 - RNA, 20 nt, Artificial Sequence
  targeting sequence with CTCN PAM
aaauaucuuaacugccccaa

SEQ ID NO: 17515 - RNA, 20 nt, Artificial Sequence
  targeting sequence with CTCN PAM
gaaguccccaaauuuguccc

SEQ ID NO: 17516 - RNA, 20 nt, Artificial Sequence
  targeting sequence with CTCN PAM
guccccgcagcccucagaag

SEQ ID NO: 17517 - RNA, 20 nt, Artificial Sequence
  targeting sequence with CTCN PAM
gccucuggccucacacuuca

SEQ ID NO: 17518 - RNA, 20 nt, Artificial Sequence
  targeting sequence with CTCN PAM
ggccucacacuucagcagcu

SEQ ID NO: 17519 - RNA, 20 nt, Artificial Sequence
  targeting sequence with CTCN PAM
cacuucagcagcuucucccu

SEQ ID NO: 17520 - RNA, 20 nt, Artificial Sequence
  targeting sequence with CTCN PAM
cuuuggguucucgggaagaa

SEQ ID NO: 17521 - RNA, 20 nt, Artificial Sequence
  targeting sequence with CTCN PAM
ggaagaagguggagggcaga

SEQ ID NO: 17522 - RNA, 20 nt, Artificial Sequence
  targeting sequence with CTCN PAM
accuucuucccgagaaccca

SEQ ID NO: 17523 - RNA, 20 nt, Artificial Sequence
  targeting sequence with CTCN PAM
gcccuccaccuucuucccga

SEQ ID NO: 17524 - RNA, 20 nt, Artificial Sequence
  targeting sequence with CTCN PAM
cgacauuccggguucccagc

SEQ ID NO: 17525 - RNA, 20 nt, Artificial Sequence
  targeting sequence with CTCN PAM
ggaguugugggcggcucaag

SEQ ID NO: 17526 - RNA, 20 nt, Artificial Sequence
  targeting sequence with CTCN PAM
agagccugggucaggauggc

SEQ ID NO: 17527 - RNA, 20 nt, Artificial Sequence
  targeting sequence with CTCN PAM
agggauuccugccagggccc

SEQ ID NO: 17528 - RNA, 20 nt, Artificial Sequence
  targeting sequence with CTCN PAM
cgaagaacccugggcccugg

SEQ ID NO: 17529 - RNA, 20 nt, Artificial Sequence
  targeting sequence with CTCN PAM
agcaggagcgagaggcuggg

SEQ ID NO: 17530 - RNA, 20 nt, Artificial Sequence
  targeting sequence with CTCN PAM
ugcuugagggucucacgaag

SEQ ID NO: 17531 - RNA, 20 nt, Artificial Sequence
  targeting sequence with CTCN PAM
cuccugcuugagggucucac

SEQ ID NO: 17532 - RNA, 20 nt, Artificial Sequence
  targeting sequence with CTCN PAM
cgcuccugcuugagggucuc

SEQ ID NO: 17533 - RNA, 20 nt, Artificial Sequence
  targeting sequence with CTCN PAM
gccaggccuuuggaaaccca

SEQ ID NO: 17534 - RNA, 20 nt, Artificial Sequence
  targeting sequence with CTCN PAM
gucacuggcacuggguggcc

SEQ ID NO: 17535 - RNA, 20 nt, Artificial Sequence
  targeting sequence with CTCN PAM
uggucccaucuggcuggauu

SEQ ID NO: 17536 - RNA, 20 nt, Artificial Sequence
  targeting sequence with CTCN PAM
ugguucuccccagaccaaac

SEQ ID NO: 17537 - RNA, 20 nt, Artificial Sequence
  targeting sequence with CTCN PAM
ccagaccaaacucauccucu

SEQ ID NO: 17538 - RNA, 20 nt, Artificial Sequence
  targeting sequence with CTCN PAM
uccucuuccccagagguacc

SEQ ID NO: 17539 - RNA, 20 nt, Artificial Sequence
  targeting sequence with CTCN PAM
uccccagagguaccccauca

SEQ ID NO: 17540 - RNA, 20 nt, Artificial Sequence
  targeting sequence with CTCN PAM
ggggaagaggaugaguuugg

SEQ ID NO: 17541 - RNA, 20 nt, Artificial Sequence
  targeting sequence with CTCN PAM
gcaacaggauagauguuggu

SEQ ID NO: 17542 - RNA, 20 nt, Artificial Sequence
  targeting sequence with CTCN PAM
gggcagcuuucugcuccucc

SEQ ID NO: 17543 - RNA, 20 nt, Artificial Sequence
  targeting sequence with CTCN PAM
uccaucccaucacuccccac

SEQ ID NO: 17544 - RNA, 20 nt, Artificial Sequence
  targeting sequence with CTCN PAM
aucccaucacuccccaccac

SEQ ID NO: 17545 - RNA, 20 nt, Artificial Sequence
  targeting sequence with CTCN PAM
ccaccacuggggcugcaucc

SEQ ID NO: 17546 - RNA, 20 nt, Artificial Sequence
  targeting sequence with CTCN PAM
ggacagauuugggggcuggg

SEQ ID NO: 17547 - RNA, 20 nt, Artificial Sequence
  targeting sequence with CTCN PAM
aagcccucagcacugcugca

SEQ ID NO: 17548 - RNA, 20 nt, Artificial Sequence
  targeting sequence with CTCN PAM
gcacugcugcagaccaggcc

SEQ ID NO: 17549 - RNA, 20 nt, Artificial Sequence
  targeting sequence with CTCN PAM
agagaacaaggccggcccca

SEQ ID NO: 17550 - RNA, 20 nt, Artificial Sequence
  targeting sequence with CTCN PAM
ggagacauggcuggccuggu

SEQ ID NO: 17551 - RNA, 20 nt, Artificial Sequence
  targeting sequence with CTCN PAM
ccacugccaucuggcaccca

SEQ ID NO: 17552 - RNA, 20 nt, Artificial Sequence
  targeting sequence with CTCN PAM
guggugggugccagauggca

SEQ ID NO: 17553 - RNA, 20 nt, Artificial Sequence
  targeting sequence with CTCN PAM
agauauauuugcgacugagu

SEQ ID NO: 17554 - RNA, 20 nt, Artificial Sequence
  targeting sequence with CTCN PAM
gucgcaaauauaucuugagc

SEQ ID NO: 17555 - RNA, 20 nt, Artificial Sequence
  targeting sequence with CTCN PAM
cgggaauagauuccuucacu

SEQ ID NO: 17556 - RNA, 20 nt, Artificial Sequence
  targeting sequence with CTCN PAM
gccucucagccacucucccu

SEQ ID NO: 17557 - RNA, 20 nt, Artificial Sequence
  targeting sequence with CTCN PAM
cagccacucucccuccucca

SEQ ID NO: 17558 - RNA, 20 nt, Artificial Sequence
  targeting sequence with CTCN PAM
gccacucucccuccuccauu

SEQ ID NO: 17559 - RNA, 20 nt, Artificial Sequence
  targeting sequence with CTCN PAM
cccuccuccauugcuccuuc

SEQ ID NO: 17560 - RNA, 20 nt, Artificial Sequence
  targeting sequence with CTCN PAM
cuccuccauugcuccuucuc

SEQ ID NO: 17561 - RNA, 20 nt, Artificial Sequence
  targeting sequence with CTCN PAM
uccauugcuccuucucacca

SEQ ID NO: 17562 - RNA, 20 nt, Artificial Sequence
  targeting sequence with CTCN PAM
auugcuccuucucaccagcu

SEQ ID NO: 17563 - RNA, 20 nt, Artificial Sequence
  targeting sequence with CTCN PAM
uucucaccagcuaccuaggg

SEQ ID NO: 17564 - RNA, 20 nt, Artificial Sequence
  targeting sequence with CTCN PAM
ccagcuaccuaggggcuuuc

SEQ ID NO: 17565 - RNA, 20 nt, Artificial Sequence
  targeting sequence with CTCN PAM
uuuaauacccccaacagccc

SEQ ID NO: 17566 - RNA, 20 nt, Artificial Sequence
  targeting sequence with CTCN PAM
uagggcuguuggggguauua

SEQ ID NO: 17567 - RNA, 20 nt, Artificial Sequence
  targeting sequence with CTCN PAM
ugaauaccugccucuuaggg

SEQ ID NO: 17568 - RNA, 20 nt, Artificial Sequence
  targeting sequence with CTCN PAM
ccgcugcagaaggggaaugc

SEQ ID NO: 17569 - RNA, 20 nt, Artificial Sequence
  targeting sequence with CTCN PAM
ggugccugcugagaccacuc

SEQ ID NO: 17570 - RNA, 20 nt, Artificial Sequence
  targeting sequence with CTCN PAM
gcaggcaccugagucucccc

SEQ ID NO: 17571 - RNA, 20 nt, Artificial Sequence
  targeting sequence with CTCN PAM
acuucucuggcuaaaacccu

SEQ ID NO: 17572 - RNA, 20 nt, Artificial Sequence
  targeting sequence with CTCN PAM
ggcuaaaacccuucauggcu

SEQ ID NO: 17573 - RNA, 20 nt, Artificial Sequence
  targeting sequence with CTCN PAM
caggaccccaggauaaaguc

SEQ ID NO: 17574 - RNA, 20 nt, Artificial Sequence
  targeting sequence with CTCN PAM
caaggacggucuccccaggc

SEQ ID NO: 17575 - RNA, 20 nt, Artificial Sequence
  targeting sequence with CTCN PAM
ccaggccucccuggcccuug

SEQ ID NO: 17576 - RNA, 20 nt, Artificial Sequence
  targeting sequence with CTCN PAM
cuggcccuugugucaugugc

SEQ ID NO: 17577 - RNA, 20 nt, Artificial Sequence
  targeting sequence with CTCN PAM
acucgccuggccacgcagac

SEQ ID NO: 17578 - RNA, 20 nt, Artificial Sequence
  targeting sequence with CTCN PAM
ccuggccacgcagacccccu

SEQ ID NO: 17579 - RNA, 20 nt, Artificial Sequence
  targeting sequence with CTCN PAM
agccugcucacagccuucgc

SEQ ID NO: 17580 - RNA, 20 nt, Artificial Sequence
  targeting sequence with CTCN PAM
agggggucugcguggccagg

SEQ ID NO: 17581 - RNA, 20 nt, Artificial Sequence
  targeting sequence with CTCN PAM
cagccuucgcacaggcugcu

SEQ ID NO: 17582 - RNA, 20 nt, Artificial Sequence
  targeting sequence with CTCN PAM
cuuugccuggaugccuuucc

SEQ ID NO: 17583 - RNA, 20 nt, Artificial Sequence
  targeting sequence with CTCN PAM
ucuccggccucaccuggcuu

SEQ ID NO: 17584 - RNA, 20 nt, Artificial Sequence
  targeting sequence with CTCN PAM
ggccucaccuggcuuccucc

SEQ ID NO: 17585 - RNA, 20 nt, Artificial Sequence
  targeting sequence with CTCN PAM
ccuggcuuccuccugcuccu

SEQ ID NO: 17586 - RNA, 20 nt, Artificial Sequence
  targeting sequence with CTCN PAM
ugcuccuccgcccccuccgc

SEQ ID NO: 17587 - RNA, 20 nt, Artificial Sequence
  targeting sequence with CTCN PAM
uccgcccccuccgcugggcu

SEQ ID NO: 17588 - RNA, 20 nt, Artificial Sequence
  targeting sequence with CTCN PAM
gcccccuccgcugggcuccc

SEQ ID NO: 17589 - RNA, 20 nt, Artificial Sequence
  targeting sequence with CTCN PAM
gcugggcucccuccacccuc

SEQ ID NO: 17590 - RNA, 20 nt, Artificial Sequence
  targeting sequence with CTCN PAM
cuccacccucauucucccuu

SEQ ID NO: 17591 - RNA, 20 nt, Artificial Sequence
  targeting sequence with CTCN PAM
acccucauucucccuuugcg

SEQ ID NO: 17592 - RNA, 20 nt, Artificial Sequence
  targeting sequence with CTCN PAM
uucucccuuugcggcacgca

SEQ ID NO: 17593 - RNA, 20 nt, Artificial Sequence
  targeting sequence with CTCN PAM
cuuugcggcacgcauugccc

SEQ ID NO: 17594 - RNA, 20 nt, Artificial Sequence
  targeting sequence with CTCN PAM
gcucaccugcccagcccaca

SEQ ID NO: 17595 - RNA, 20 nt, Artificial Sequence
  targeting sequence with CTCN PAM
ccugcccagcccacaagagu

SEQ ID NO: 17596 - RNA, 20 nt, Artificial Sequence
  targeting sequence with CTCN PAM
ugugggcugggcaggugagc

SEQ ID NO: 17597 - RNA, 20 nt, Artificial Sequence
  targeting sequence with CTCN PAM
cuuuguuucuacucuugugg

SEQ ID NO: 17598 - RNA, 20 nt, Artificial Sequence
  targeting sequence with CTCN PAM
ccagggcacagcaugggacu

SEQ ID NO: 17599 - RNA, 20 nt, Artificial Sequence
  targeting sequence with CTCN PAM
caauagggacuuaguaaaug

SEQ ID NO: 17600 - RNA, 20 nt, Artificial Sequence
  targeting sequence with CTCN PAM
auagacauuuacuaaguccc

SEQ ID NO: 17601 - RNA, 20 nt, Artificial Sequence
  targeting sequence with CTCN PAM
uacuucuagccccagaugac

SEQ ID NO: 17602 - RNA, 20 nt, Artificial Sequence
  targeting sequence with CTCN PAM
ccaggaccaagcagagaccu

SEQ ID NO: 17603 - RNA, 20 nt, Artificial Sequence
  targeting sequence with CTCN PAM
aggaccaagcagagaccugu

SEQ ID NO: 17604 - RNA, 20 nt, Artificial Sequence
  targeting sequence with CTCN PAM
gcuugguccuggagagcagu

SEQ ID NO: 17605 - RNA, 20 nt, Artificial Sequence
  targeting sequence with CTCN PAM
aagggacauuauuagcacag

SEQ ID NO: 17606 - RNA, 20 nt, Artificial Sequence
  targeting sequence with CTCN PAM
guguacccaguacacaguaa

SEQ ID NO: 17607 - RNA, 20 nt, Artificial Sequence
  targeting sequence with CTCN PAM
guuucuucaucugugaagug

SEQ ID NO: 17608 - RNA, 20 nt, Artificial Sequence
  targeting sequence with CTCN PAM
gggccucaguuucuucaucu

SEQ ID NO: 17609 - RNA, 20 nt, Artificial Sequence
  targeting sequence with CTCN PAM
cugggccucaguuucuucau

SEQ ID NO: 17610 - RNA, 20 nt, Artificial Sequence
  targeting sequence with CTCN PAM
aggcuguugccagcuaugca

SEQ ID NO: 17611 - RNA, 20 nt, Artificial Sequence
  targeting sequence with CTCN PAM
cccaccccugcccaugcuag

SEQ ID NO: 17612 - RNA, 20 nt, Artificial Sequence
  targeting sequence with CTCN PAM
agcaugggcagggguggggg

SEQ ID NO: 17613 - RNA, 20 nt, Artificial Sequence
  targeting sequence with CTCN PAM
agguccccggucugggccuc

SEQ ID NO: 17614 - RNA, 20 nt, Artificial Sequence
  targeting sequence with CTCN PAM
gggagauacugccaaguggc

SEQ ID NO: 17615 - RNA, 20 nt, Artificial Sequence
  targeting sequence with CTCN PAM
cagaggugcucaaggucccc

SEQ ID NO: 17616 - RNA, 20 nt, Artificial Sequence
  targeting sequence with CTCN PAM
ucgccgugcccgcugugggc

SEQ ID NO: 17617 - RNA, 20 nt, Artificial Sequence
  targeting sequence with CTCN PAM
ucuucgccgugcccgcugug

SEQ ID NO: 17618 - RNA, 20 nt, Artificial Sequence
  targeting sequence with CTCN PAM
cuguguuuuccacacccuuc

SEQ ID NO: 17619 - RNA, 20 nt, Artificial Sequence
  targeting sequence with CTCN PAM
uccccaccccaaggccacag

SEQ ID NO: 17620 - RNA, 20 nt, Artificial Sequence
  targeting sequence with CTCN PAM
guccuggggcugugucccug

SEQ ID NO: 17621 - RNA, 20 nt, Artificial Sequence
  targeting sequence with CTCN PAM
agggacacagccccaggaca

SEQ ID NO: 17622 - RNA, 20 nt, Artificial Sequence
  targeting sequence with CTCN PAM
ccagggacacagccccagga

SEQ ID NO: 17623 - RNA, 20 nt, Artificial Sequence
  targeting sequence with CTCN PAM
accuaaggggacagggccuc

SEQ ID NO: 17624 - RNA, 20 nt, Artificial Sequence
  targeting sequence with CTCN PAM
agccccccucagcuggguga

SEQ ID NO: 17625 - RNA, 20 nt, Artificial Sequence
  targeting sequence with CTCN PAM
gcugggugagucacugcacc

SEQ ID NO: 17626 - RNA, 20 nt, Artificial Sequence
  targeting sequence with CTCN PAM
cccagcugaggggggcugga

SEQ ID NO: 17627 - RNA, 20 nt, Artificial Sequence
  targeting sequence with CTCN PAM
gugcagugacucacccagcu

SEQ ID NO: 17628 - RNA, 20 nt, Artificial Sequence
  targeting sequence with CTCN PAM
cucggugcagugacucaccc

SEQ ID NO: 17629 - RNA, 20 nt, Artificial Sequence
  targeting sequence with CTCN PAM
ggcaagaaccauucugguuc

SEQ ID NO: 17630 - RNA, 20 nt, Artificial Sequence
  targeting sequence with CTCN PAM
cccucuggcaagaaccauuc

SEQ ID NO: 17631 - RNA, 20 nt, Artificial Sequence
  targeting sequence with CTCN PAM
gcccuuugguguaagcugau

SEQ ID NO: 17632 - RNA, 20 nt, Artificial Sequence
  targeting sequence with CTCN PAM
aguaguuucaggcccugugu

SEQ ID NO: 17633 - RNA, 20 nt, Artificial Sequence
  targeting sequence with CTCN PAM
guccacaggacacuucucuc

SEQ ID NO: 17634 - RNA, 20 nt, Artificial Sequence
  targeting sequence with CTCN PAM
ccauucagcgacuccccacu

SEQ ID NO: 17635 - RNA, 20 nt, Artificial Sequence
  targeting sequence with CTCN PAM
auucagcgacuccccacuga

SEQ ID NO: 17636 - RNA, 20 nt, Artificial Sequence
  targeting sequence with CTCN PAM
ccacugagacccccagugcc

SEQ ID NO: 17637 - RNA, 20 nt, Artificial Sequence
  targeting sequence with CTCN PAM
guggggagucgcugaaugga

SEQ ID NO: 17638 - RNA, 20 nt, Artificial Sequence
  targeting sequence with CTCN PAM
caggcaacuguguuuggcac

SEQ ID NO: 17639 - RNA, 20 nt, Artificial Sequence
  targeting sequence with CTCN PAM
gggguggagaugguggauga

SEQ ID NO: 17640 - RNA, 20 nt, Artificial Sequence
  targeting sequence with CTCN PAM
accccagagcuucaucucgc

SEQ ID NO: 17641 - RNA, 20 nt, Artificial Sequence
  targeting sequence with CTCN PAM
cccaccgugaccuuuacuuu

SEQ ID NO: 17642 - RNA, 20 nt, Artificial Sequence
  targeting sequence with CTCN PAM
cacgacugcccaccaucugg

SEQ ID NO: 17643 - RNA, 20 nt, Artificial Sequence
  targeting sequence with CTCN PAM
accuugggagaaggaaucug

SEQ ID NO: 17644 - RNA, 20 nt, Artificial Sequence
  targeting sequence with CTCN PAM
caaggucgaggucggucucc

SEQ ID NO: 17645 - RNA, 20 nt, Artificial Sequence
  targeting sequence with CTCN PAM
aagccccaguguugggcccg

SEQ ID NO: 17646 - RNA, 20 nt, Artificial Sequence
  targeting sequence with CTCN PAM
gugggcgggcccaacacugg

SEQ ID NO: 17647 - RNA, 20 nt, Artificial Sequence
  targeting sequence with CTCN PAM
ugaaauucuugucacagcca

SEQ ID NO: 17648 - RNA, 20 nt, Artificial Sequence
  targeting sequence with CTCN PAM
auggcugugacaagaauuuc

SEQ ID NO: 17649 - RNA, 20 nt, Artificial Sequence
  targeting sequence with CTCN PAM
gccuucuuguggugacccaa

SEQ ID NO: 17650 - RNA, 20 nt, Artificial Sequence
  targeting sequence with CTCN PAM
aucagcaaaaugcagaacuc

SEQ ID NO: 17651 - RNA, 20 nt, Artificial Sequence
  targeting sequence with CTCN PAM
acugccugccauucccuuag

SEQ ID NO: 17652 - RNA, 20 nt, Artificial Sequence
  targeting sequence with CTCN PAM
ccagacucagauggguggag

SEQ ID NO: 17653 - RNA, 20 nt, Artificial Sequence
  targeting sequence with CTCN PAM
gauggguggaggguguggga

SEQ ID NO: 17654 - RNA, 20 nt, Artificial Sequence
  targeting sequence with CTCN PAM
acccaucugagucuggcgag

SEQ ID NO: 17655 - RNA, 20 nt, Artificial Sequence
  targeting sequence with CTCN PAM
uuccucagggugaacuaugg

SEQ ID NO: 17656 - RNA, 20 nt, Artificial Sequence
  targeting sequence with CTCN PAM
gggugaacuauggggaucaa

SEQ ID NO: 17657 - RNA, 20 nt, Artificial Sequence
  targeting sequence with CTCN PAM
caaagccagugugaggagca

SEQ ID NO: 17658 - RNA, 20 nt, Artificial Sequence
  targeting sequence with CTCN PAM
cacuggcuuugggagcuggg

SEQ ID NO: 17659 - RNA, 20 nt, Artificial Sequence
  targeting sequence with CTCN PAM
ucacacuggcuuugggagcu

SEQ ID NO: 17660 - RNA, 20 nt, Artificial Sequence
  targeting sequence with CTCN PAM
cgcacccuugucaugucaac

SEQ ID NO: 17661 - RNA, 20 nt, Artificial Sequence
  targeting sequence with CTCN PAM
gacaccugggccccaugccu

SEQ ID NO: 17662 - RNA, 20 nt, Artificial Sequence
  targeting sequence with CTCN PAM
uccucauuccccacugagcc

SEQ ID NO: 17663 - RNA, 20 nt, Artificial Sequence
  targeting sequence with CTCN PAM
ucauuccccacugagcccca

SEQ ID NO: 17664 - RNA, 20 nt, Artificial Sequence
  targeting sequence with CTCN PAM
uuccccacugagccccacgg

SEQ ID NO: 17665 - RNA, 20 nt, Artificial Sequence
  targeting sequence with CTCN PAM
guggggaaugaggaggagua

SEQ ID NO: 17666 - RNA, 20 nt, Artificial Sequence
  targeting sequence with CTCN PAM
ccugcccccaaaacaccccu

SEQ ID NO: 17667 - RNA, 20 nt, Artificial Sequence
  targeting sequence with CTCN PAM
ugcccccaaaacaccccugu

SEQ ID NO: 17668 - RNA, 20 nt, Artificial Sequence
  targeting sequence with CTCN PAM
auucuccuggcccuggcauc

SEQ ID NO: 17669 - RNA, 20 nt, Artificial Sequence
  targeting sequence with CTCN PAM
uggcccuggcaucugcccac

SEQ ID NO: 17670 - RNA, 20 nt, Artificial Sequence
  targeting sequence with CTCN PAM
gagauccaaguccagaaggc

SEQ ID NO: 17671 - RNA, 20 nt, Artificial Sequence
  targeting sequence with CTCN PAM
gagugcguguguuuuggggg

SEQ ID NO: 17672 - RNA, 20 nt, Artificial Sequence
  targeting sequence with CTCN PAM
gcaucuguguuuuuaaugcc

SEQ ID NO: 17673 - RNA, 20 nt, Artificial Sequence
  targeting sequence with CTCN PAM
gcuagugcccaacuguguga

SEQ ID NO: 17674 - RNA, 20 nt, Artificial Sequence
  targeting sequence with CTCN PAM
gcaaguugcuuaaccucucu

SEQ ID NO: 17675 - RNA, 20 nt, Artificial Sequence
  targeting sequence with CTCN PAM
cugugccuguuucuucaucu

SEQ ID NO: 17676 - RNA, 20 nt, Artificial Sequence
  targeting sequence with CTCN PAM
gugccuguuucuucaucugu

SEQ ID NO: 17677 - RNA, 20 nt, Artificial Sequence
  targeting sequence with CTCN PAM
ucacauuuuacagaugaaga

SEQ ID NO: 17678 - RNA, 20 nt, Artificial Sequence
  targeting sequence with CTCN PAM
auucucaucacauuuuacag

SEQ ID NO: 17679 - RNA, 20 nt, Artificial Sequence
  targeting sequence with CTCN PAM
gguagccucuauucucauca

SEQ ID NO: 17680 - RNA, 20 nt, Artificial Sequence
  targeting sequence with CTCN PAM
cagguagccucuauucucau

SEQ ID NO: 17681 - RNA, 20 nt, Artificial Sequence
  targeting sequence with CTCN PAM
gaacaacccucucagguagc

SEQ ID NO: 17682 - RNA, 20 nt, Artificial Sequence
  targeting sequence with CTCN PAM
acaagugcuauuguuuaccc

SEQ ID NO: 17683 - RNA, 20 nt, Artificial Sequence
  targeting sequence with CTCN PAM
cacaccugguacauacuagg

SEQ ID NO: 17684 - RNA, 20 nt, Artificial Sequence
  targeting sequence with CTCN PAM
ggaaauauuugcagaauagg

SEQ ID NO: 17685 - RNA, 20 nt, Artificial Sequence
  targeting sequence with CTCN PAM
ggcacacaccuguuugccaa

SEQ ID NO: 17686 - RNA, 20 nt, Artificial Sequence
  targeting sequence with CTCN PAM
ucagaguaccgacucaugcc

SEQ ID NO: 17687 - RNA, 20 nt, Artificial Sequence
  targeting sequence with CTCN PAM
gaguaccgacucaugcccaa

SEQ ID NO: 17688 - RNA, 20 nt, Artificial Sequence
  targeting sequence with CTCN PAM
gaggaggcugcaugguuggc

SEQ ID NO: 17689 - RNA, 20 nt, Artificial Sequence
  targeting sequence with CTCN PAM
ugcccaaauaccugcguccc

SEQ ID NO: 17690 - RNA, 20 nt, Artificial Sequence
  targeting sequence with CTCN PAM
uugcacaccugccacaccca

SEQ ID NO: 17691 - RNA, 20 nt, Artificial Sequence
  targeting sequence with CTCN PAM
gacaggcucacgcaguggcc

SEQ ID NO: 17692 - RNA, 20 nt, Artificial Sequence
  targeting sequence with CTCN PAM
cgcaguggccccagaacaca

SEQ ID NO: 17693 - RNA, 20 nt, Artificial Sequence
  targeting sequence with CTCN PAM
gcaugcaccugugacccuca

SEQ ID NO: 17694 - RNA, 20 nt, Artificial Sequence
  targeting sequence with CTCN PAM
cgugcauaccugggcuuuau

SEQ ID NO: 17695 - RNA, 20 nt, Artificial Sequence
  targeting sequence with CTCN PAM
caguacgccuagguaugcgc

SEQ ID NO: 17696 - RNA, 20 nt, Artificial Sequence
  targeting sequence with CTCN PAM
ugggcgcgcauaccuaggcg

SEQ ID NO: 17697 - RNA, 20 nt, Artificial Sequence
  targeting sequence with CTCN PAM
cuugagucccugcacaugcc

SEQ ID NO: 17698 - RNA, 20 nt, Artificial Sequence
  targeting sequence with CTCN PAM
agugagugccggcucauggg

SEQ ID NO: 17699 - RNA, 20 nt, Artificial Sequence
  targeting sequence with CTCN PAM
ggggacaccuguauucucgc

SEQ ID NO: 17700 - RNA, 20 nt, Artificial Sequence
  targeting sequence with CTCN PAM
cgugcacaccuggguuccac

SEQ ID NO: 17701 - RNA, 20 nt, Artificial Sequence
  targeting sequence with CTCN PAM
gcgcgcucccaccugugacc

SEQ ID NO: 17702 - RNA, 20 nt, Artificial Sequence
  targeting sequence with CTCN PAM
caccugugacccacucagcu

SEQ ID NO: 17703 - RNA, 20 nt, Artificial Sequence
  targeting sequence with CTCN PAM
gcucacgacccgcucgguuc

SEQ ID NO: 17704 - RNA, 20 nt, Artificial Sequence
  targeting sequence with CTCN PAM
cgacccgcucgguucccgcc

SEQ ID NO: 17705 - RNA, 20 nt, Artificial Sequence
  targeting sequence with CTCN PAM
guucccgcccgcccccgccc

SEQ ID NO: 17706 - RNA, 20 nt, Artificial Sequence
  targeting sequence with CTCN PAM
acauccagguacacccgggc

SEQ ID NO: 17707 - RNA, 20 nt, Artificial Sequence
  targeting sequence with CTCN PAM
caggccggucccgugcccug

SEQ ID NO: 17708 - RNA, 20 nt, Artificial Sequence
  targeting sequence with CTCN PAM
acagcguggugcagggcacg

SEQ ID NO: 17709 - RNA, 20 nt, Artificial Sequence
  targeting sequence with CTCN PAM
gauggcggcucgcacgucgg

SEQ ID NO: 17710 - RNA, 20 nt, Artificial Sequence
  targeting sequence with CTCN PAM
cacgucggcgaagcggaagg

SEQ ID NO: 17711 - RNA, 20 nt, Artificial Sequence
  targeting sequence with CTCN PAM
gcgccuuccgcuucgccgac

SEQ ID NO: 17712 - RNA, 20 nt, Artificial Sequence
  targeting sequence with CTCN PAM
ggccgcacucugcgccuucc

SEQ ID NO: 17713 - RNA, 20 nt, Artificial Sequence
  targeting sequence with CTCN PAM
aagacagcaaagagccgcuc

SEQ ID NO: 17714 - RNA, 20 nt, Artificial Sequence
  targeting sequence with CTCN PAM
uugcugucuucgagcggccc

SEQ ID NO: 17715 - RNA, 20 nt, Artificial Sequence
  targeting sequence with CTCN PAM
cgggcugggaagaccgacac

SEQ ID NO: 17716 - RNA, 20 nt, Artificial Sequence
  targeting sequence with CTCN PAM
acagccgccuggugucgguc

SEQ ID NO: 17717 - RNA, 20 nt, Artificial Sequence
  targeting sequence with CTCN PAM
gugagcuucuuggcgucgcc

SEQ ID NO: 17718 - RNA, 20 nt, Artificial Sequence
  targeting sequence with CTCN PAM
ccgaguccuacauccaguug

SEQ ID NO: 17719 - RNA, 20 nt, Artificial Sequence
  targeting sequence with CTCN PAM
gcgccuggcucuccuugucg

SEQ ID NO: 17720 - RNA, 20 nt, Artificial Sequence
  targeting sequence with CTCN PAM
ccuugucgcccgcgcgcgcc

SEQ ID NO: 17721 - RNA, 20 nt, Artificial Sequence
  targeting sequence with CTCN PAM
uugucgcccgcgcgcgccuc

SEQ ID NO: 17722 - RNA, 20 nt, Artificial Sequence
  targeting sequence with CTCN PAM
cuguugagcgccagguacgc

SEQ ID NO: 17723 - RNA, 20 nt, Artificial Sequence
  targeting sequence with CTCN PAM
acagcgaggcgcgcgcgggc

SEQ ID NO: 17724 - RNA, 20 nt, Artificial Sequence
  targeting sequence with CTCN PAM
cgaagcccagcuugugcugc

SEQ ID NO: 17725 - RNA, 20 nt, Artificial Sequence
  targeting sequence with CTCN PAM
uuggcgcccugcuugaucuu

SEQ ID NO: 17726 - RNA, 20 nt, Artificial Sequence
  targeting sequence with CTCN PAM
agaucaagcagggcgccaag

SEQ ID NO: 17727 - RNA, 20 nt, Artificial Sequence
  targeting sequence with CTCN PAM
gacgacaacauccucaagau

SEQ ID NO: 17728 - RNA, 20 nt, Artificial Sequence
  targeting sequence with CTCN PAM
accccuccgacgacaacauc

SEQ ID NO: 17729 - RNA, 20 nt, Artificial Sequence
  targeting sequence with CTCN PAM
ucaccuucgaccucaacccc

SEQ ID NO: 17730 - RNA, 20 nt, Artificial Sequence
  targeting sequence with CTCN PAM
cuggacacgcgcggcgaccu

SEQ ID NO: 17731 - RNA, 20 nt, Artificial Sequence
  targeting sequence with CTCN PAM
ggcguguucucgaagcggug

SEQ ID NO: 17732 - RNA, 20 nt, Artificial Sequence
  targeting sequence with CTCN PAM
aagcggugguccuccaggcu

SEQ ID NO: 17733 - RNA, 20 nt, Artificial Sequence
  targeting sequence with CTCN PAM
aggcugcgguugcgcgggaa

SEQ ID NO: 17734 - RNA, 20 nt, Artificial Sequence
  targeting sequence with CTCN PAM
uucuucccgcgcaaccgcag

SEQ ID NO: 17735 - RNA, 20 nt, Artificial Sequence
  targeting sequence with CTCN PAM
ugggcgccacguacaccggu

SEQ ID NO: 17736 - RNA, 20 nt, Artificial Sequence
  targeting sequence with CTCN PAM
cgccgcgggcgcggggggca

SEQ ID NO: 17737 - RNA, 20 nt, Artificial Sequence
  targeting sequence with CTCN PAM
gcgggcggcgcggcgggcgg

SEQ ID NO: 17738 - RNA, 20 nt, Artificial Sequence
  targeting sequence with CTCN PAM
gccguggccgugcgcuuccc

SEQ ID NO: 17739 - RNA, 20 nt, Artificial Sequence
  targeting sequence with CTCN PAM
cggacaacuacaacaagauc

SEQ ID NO: 17740 - RNA, 20 nt, Artificial Sequence
  targeting sequence with CTCN PAM
cacgaggccugcggcagcug

SEQ ID NO: 17741 - RNA, 20 nt, Artificial Sequence
  targeting sequence with CTCN PAM
ugcgagcacccgcggcgccu

SEQ ID NO: 17742 - RNA, 20 nt, Artificial Sequence
  targeting sequence with CTCN PAM
gcagcugccgcaggccucgu

SEQ ID NO: 17743 - RNA, 20 nt, Artificial Sequence
  targeting sequence with CTCN PAM
gccuccaggcucagguuggc

SEQ ID NO: 17744 - RNA, 20 nt, Artificial Sequence
  targeting sequence with CTCN PAM
aggcucagguuggcgcccga

SEQ ID NO: 17745 - RNA, 20 nt, Artificial Sequence
  targeting sequence with CTCN PAM
gguuggcgcccgacagcuga

SEQ ID NO: 17746 - RNA, 20 nt, Artificial Sequence
  targeting sequence with CTCN PAM
aucagcugucgggcgccaac

SEQ ID NO: 17747 - RNA, 20 nt, Artificial Sequence
  targeting sequence with CTCN PAM
cccacgcccaccaacaacuu

SEQ ID NO: 17748 - RNA, 20 nt, Artificial Sequence
  targeting sequence with CTCN PAM
agggcgccggcccgcgccgc

SEQ ID NO: 17749 - RNA, 20 nt, Artificial Sequence
  targeting sequence with CTCN PAM
ugggggcggcgcgggccggc

SEQ ID NO: 17750 - RNA, 20 nt, Artificial Sequence
  targeting sequence with CTCN PAM
cgccgcgggcggcgcacccc

SEQ ID NO: 17751 - RNA, 20 nt, Artificial Sequence
  targeting sequence with CTCN PAM
ucgcgccgcgggcggcgcac

SEQ ID NO: 17752 - RNA, 20 nt, Artificial Sequence
  targeting sequence with CTCN PAM
ccgcgccgcgcagcccgcgc

SEQ ID NO: 17753 - RNA, 20 nt, Artificial Sequence
  targeting sequence with CTCN PAM
ccccaugcacucgccgcgcc

SEQ ID NO: 17754 - RNA, 20 nt, Artificial Sequence
  targeting sequence with CTCN PAM
cggccgcgccucgccccaug

SEQ ID NO: 17755 - RNA, 20 nt, Artificial Sequence
  targeting sequence with CTCN PAM
cggcucccggccgcgccucg

SEQ ID NO: 17756 - RNA, 20 nt, Artificial Sequence
  targeting sequence with CTCN PAM
gggcucccggcucccggccg

SEQ ID NO: 17757 - RNA, 20 nt, Artificial Sequence
  targeting sequence with CTCN PAM
cgccgccuccgggcucccgg

SEQ ID NO: 17758 - RNA, 20 nt, Artificial Sequence
  targeting sequence with CTCN PAM
ccgcgcagcccgggggcggg

SEQ ID NO: 17759 - RNA, 20 nt, Artificial Sequence
  targeting sequence with CTCN PAM
gcugcggacacgcccucacu

SEQ ID NO: 17760 - RNA, 20 nt, Artificial Sequence
  targeting sequence with CTCN PAM
cuccccgccccggccccgcc

SEQ ID NO: 17761 - RNA, 20 nt, Artificial Sequence
  targeting sequence with CTCN PAM
ccgccccggccccgcccgcc

SEQ ID NO: 17762 - RNA, 20 nt, Artificial Sequence
  targeting sequence with CTCN PAM
aggacccgcccgcggcccca

SEQ ID NO: 17763 - RNA, 20 nt, Artificial Sequence
  targeting sequence with CTCN PAM
ccguagccgccgccgccguc

SEQ ID NO: 17764 - RNA, 20 nt, Artificial Sequence
  targeting sequence with CTCN PAM
cucuccucgcucuuuccucc

SEQ ID NO: 17765 - RNA, 20 nt, Artificial Sequence
  targeting sequence with CTCN PAM
ccucgcucuuuccucccacu

SEQ ID NO: 17766 - RNA, 20 nt, Artificial Sequence
  targeting sequence with CTCN PAM
ucgcucuuuccucccacuug

SEQ ID NO: 17767 - RNA, 20 nt, Artificial Sequence
  targeting sequence with CTCN PAM
cucuuuccucccacuuggcc

SEQ ID NO: 17768 - RNA, 20 nt, Artificial Sequence
  targeting sequence with CTCN PAM
uuccucccacuuggccgcuu

SEQ ID NO: 17769 - RNA, 20 nt, Artificial Sequence
  targeting sequence with CTCN PAM
cacuuggccgcuuggccugc

SEQ ID NO: 17770 - RNA, 20 nt, Artificial Sequence
  targeting sequence with CTCN PAM
cucgcgccuguuuucucuuu

SEQ ID NO: 17771 - RNA, 20 nt, Artificial Sequence
  targeting sequence with CTCN PAM
cgccuguuuucucuuuuccg

SEQ ID NO: 17772 - RNA, 20 nt, Artificial Sequence
  targeting sequence with CTCN PAM
uuuccgcccucucccccacc

SEQ ID NO: 17773 - RNA, 20 nt, Artificial Sequence
  targeting sequence with CTCN PAM
cccccaccccgucucucccu

SEQ ID NO: 17774 - RNA, 20 nt, Artificial Sequence
  targeting sequence with CTCN PAM
cccaccccgucucucccucu

SEQ ID NO: 17775 - RNA, 20 nt, Artificial Sequence
  targeting sequence with CTCN PAM
cccucucucugcgucucucg

SEQ ID NO: 17776 - RNA, 20 nt, Artificial Sequence
  targeting sequence with CTCN PAM
cucucucugcgucucucggu

SEQ ID NO: 17777 - RNA, 20 nt, Artificial Sequence
  targeting sequence with CTCN PAM
cucugcgucucucggucucu

SEQ ID NO: 17778 - RNA, 20 nt, Artificial Sequence
  targeting sequence with CTCN PAM
cugcgucucucggucucugc

SEQ ID NO: 17779 - RNA, 20 nt, Artificial Sequence
  targeting sequence with CTCN PAM
gcgucucucggucucugcgu

SEQ ID NO: 17780 - RNA, 20 nt, Artificial Sequence
  targeting sequence with CTCN PAM
cggucucugcgucucuccgu

SEQ ID NO: 17781 - RNA, 20 nt, Artificial Sequence
  targeting sequence with CTCN PAM
gucucugcgucucuccgucu

SEQ ID NO: 17782 - RNA, 20 nt, Artificial Sequence
  targeting sequence with CTCN PAM
gcgucucuccgucucugucc

SEQ ID NO: 17783 - RNA, 20 nt, Artificial Sequence
  targeting sequence with CTCN PAM
ccgucucuguccccacccca

SEQ ID NO: 17784 - RNA, 20 nt, Artificial Sequence
  targeting sequence with CTCN PAM
gucucuguccccaccccaaa

SEQ ID NO: 17785 - RNA, 20 nt, Artificial Sequence
  targeting sequence with CTCN PAM
guccccaccccaaacuccgc

SEQ ID NO: 17786 - RNA, 20 nt, Artificial Sequence
  targeting sequence with CTCN PAM
gcgcguguggcgcuucuccg

SEQ ID NO: 17787 - RNA, 20 nt, Artificial Sequence
  targeting sequence with CTCN PAM
ggguucugccucugcuucuc

SEQ ID NO: 17788 - RNA, 20 nt, Artificial Sequence
  targeting sequence with CTCN PAM
gcuucuccuucucccuccga

SEQ ID NO: 17789 - RNA, 20 nt, Artificial Sequence
  targeting sequence with CTCN PAM
uucucccuccgacuccgcuu

SEQ ID NO: 17790 - RNA, 20 nt, Artificial Sequence
  targeting sequence with CTCN PAM
cuccgacuccgcuucgcucu

SEQ ID NO: 17791 - RNA, 20 nt, Artificial Sequence
  targeting sequence with CTCN PAM
gacuccgcuucgcucuccag

SEQ ID NO: 17792 - RNA, 20 nt, Artificial Sequence
  targeting sequence with CTCN PAM
gcuucgcucuccagucccug

SEQ ID NO: 17793 - RNA, 20 nt, Artificial Sequence
  targeting sequence with CTCN PAM
ccagucccuggcagccccgc

SEQ ID NO: 17794 - RNA, 20 nt, Artificial Sequence
  targeting sequence with CTCN PAM
agucccuggcagccccgccc

SEQ ID NO: 17795 - RNA, 20 nt, Artificial Sequence
  targeting sequence with CTCN PAM
uucucucuccugcuccguuu

SEQ ID NO: 17796 - RNA, 20 nt, Artificial Sequence
  targeting sequence with CTCN PAM
cuccugcuccguuuuuccgu

SEQ ID NO: 17797 - RNA, 20 nt, Artificial Sequence
  targeting sequence with CTCN PAM
ccugcuccguuuuuccgucc

SEQ ID NO: 17798 - RNA, 20 nt, Artificial Sequence
  targeting sequence with CTCN PAM
ugcuccguuuuuccgucccu

SEQ ID NO: 17799 - RNA, 20 nt, Artificial Sequence
  targeting sequence with CTCN PAM
guuuuuccgucccugacgcu

SEQ ID NO: 17800 - RNA, 20 nt, Artificial Sequence
  targeting sequence with CTCN PAM
cucccucucuccguggcucc

SEQ ID NO: 17801 - RNA, 20 nt, Artificial Sequence
  targeting sequence with CTCN PAM
cucucuccguggcucccucu

SEQ ID NO: 17802 - RNA, 20 nt, Artificial Sequence
  targeting sequence with CTCN PAM
cuccguggcucccucugccu

SEQ ID NO: 17803 - RNA, 20 nt, Artificial Sequence
  targeting sequence with CTCN PAM
ccguggcucccucugccucc

SEQ ID NO: 17804 - RNA, 20 nt, Artificial Sequence
  targeting sequence with CTCN PAM
guggcucccucugccucccc

SEQ ID NO: 17805 - RNA, 20 nt, Artificial Sequence
  targeting sequence with CTCN PAM
cucugccucccccucggacc

SEQ ID NO: 17806 - RNA, 20 nt, Artificial Sequence
  targeting sequence with CTCN PAM
gccucccccucggacccucc

SEQ ID NO: 17807 - RNA, 20 nt, Artificial Sequence
  targeting sequence with CTCN PAM
cccucggacccuccgucccu

SEQ ID NO: 17808 - RNA, 20 nt, Artificial Sequence
  targeting sequence with CTCN PAM
gacccuccgucccucucucg

SEQ ID NO: 17809 - RNA, 20 nt, Artificial Sequence
  targeting sequence with CTCN PAM
gucccucucucggucccucu

SEQ ID NO: 17810 - RNA, 20 nt, Artificial Sequence
  targeting sequence with CTCN PAM
cucggucccucugagcuccc

SEQ ID NO: 17811 - RNA, 20 nt, Artificial Sequence
  targeting sequence with CTCN PAM
cggucccucugagcuccccu

SEQ ID NO: 17812 - RNA, 20 nt, Artificial Sequence
  targeting sequence with CTCN PAM
gucccucugagcuccccuuu

SEQ ID NO: 17813 - RNA, 20 nt, Artificial Sequence
  targeting sequence with CTCN PAM
gagcuccccuuuccuucucc

SEQ ID NO: 17814 - RNA, 20 nt, Artificial Sequence
  targeting sequence with CTCN PAM
gagggaccgagagagggacg

SEQ ID NO: 17815 - RNA, 20 nt, Artificial Sequence
  targeting sequence with CTCN PAM
ccuuuccuucucccucugcc

SEQ ID NO: 17816 - RNA, 20 nt, Artificial Sequence
  targeting sequence with CTCN PAM
cucugccuucccgaacccug

SEQ ID NO: 17817 - RNA, 20 nt, Artificial Sequence
  targeting sequence with CTCN PAM
gccuucccgaacccuguguc

SEQ ID NO: 17818 - RNA, 20 nt, Artificial Sequence
  targeting sequence with CTCN PAM
ccuccacacucagccucccu

SEQ ID NO: 17819 - RNA, 20 nt, Artificial Sequence
  targeting sequence with CTCN PAM
acacucagccucccuccacc

SEQ ID NO: 17820 - RNA, 20 nt, Artificial Sequence
  targeting sequence with CTCN PAM
gccucccuccaccaccuuuc

SEQ ID NO: 17821 - RNA, 20 nt, Artificial Sequence
  targeting sequence with CTCN PAM
cuccaccaccuuucucaggc

SEQ ID NO: 17822 - RNA, 20 nt, Artificial Sequence
  targeting sequence with CTCN PAM
accaccuuucucaggcacug

SEQ ID NO: 17823 - RNA, 20 nt, Artificial Sequence
  targeting sequence with CTCN PAM
ggcacuguccaggccuucgc

SEQ ID NO: 17824 - RNA, 20 nt, Artificial Sequence
  targeting sequence with CTCN PAM
cccggugccggccagucggg

SEQ ID NO: 17825 - RNA, 20 nt, Artificial Sequence
  targeting sequence with CTCN PAM
ggcccugccacuuguaaauc

SEQ ID NO: 17826 - RNA, 20 nt, Artificial Sequence
  targeting sequence with CTCN PAM
gggucagauauauaaaugag

SEQ ID NO: 17827 - RNA, 20 nt, Artificial Sequence
  targeting sequence with CTCN PAM
uuuauauaucugacccugag

SEQ ID NO: 17828 - RNA, 20 nt, Artificial Sequence
  targeting sequence with CTCN PAM
auguuuuccucauuuauaua

SEQ ID NO: 17829 - RNA, 20 nt, Artificial Sequence
  targeting sequence with CTCN PAM
ccauguuuuccucauuuaua

SEQ ID NO: 17830 - RNA, 20 nt, Artificial Sequence
  targeting sequence with CTCN PAM
cuccauguuuuccucauuua

SEQ ID NO: 17831 - RNA, 20 nt, Artificial Sequence
  targeting sequence with CTCN PAM
ggcuaucgguugugggccac

SEQ ID NO: 17832 - RNA, 20 nt, Artificial Sequence
  targeting sequence with CTCN PAM
aggaccaaggccuugcucug

SEQ ID NO: 17833 - RNA, 20 nt, Artificial Sequence
  targeting sequence with CTCN PAM
uguggagacccagccgcacc

SEQ ID NO: 17834 - RNA, 20 nt, Artificial Sequence
  targeting sequence with CTCN PAM
acaggaggcaacugugggcu

SEQ ID NO: 17835 - RNA, 20 nt, Artificial Sequence
  targeting sequence with CTCN PAM
caggcuuaguggaagauuag

SEQ ID NO: 17836 - RNA, 20 nt, Artificial Sequence
  targeting sequence with CTCN PAM
aaagcagcguuaggggcagg

SEQ ID NO: 17837 - RNA, 20 nt, Artificial Sequence
  targeting sequence with CTCN PAM
cagggcugugaccuuggaac

SEQ ID NO: 17838 - RNA, 20 nt, Artificial Sequence
  targeting sequence with CTCN PAM
cacagggcuagcccgugcca

SEQ ID NO: 17839 - RNA, 20 nt, Artificial Sequence
  targeting sequence with CTCN PAM
cuuuuuccucacagauuccc

SEQ ID NO: 17840 - RNA, 20 nt, Artificial Sequence
  targeting sequence with CTCN PAM
uuuuccucacagauuccccc

SEQ ID NO: 17841 - RNA, 20 nt, Artificial Sequence
  targeting sequence with CTCN PAM
cagauucccccgaggcgagc

SEQ ID NO: 17842 - RNA, 20 nt, Artificial Sequence
  targeting sequence with CTCN PAM
ggggaaucugugaggaaaaa

SEQ ID NO: 17843 - RNA, 20 nt, Artificial Sequence
  targeting sequence with CTCN PAM
ccucgggggaaucugugagg

SEQ ID NO: 17844 - RNA, 20 nt, Artificial Sequence
  targeting sequence with CTCN PAM
gccuugguuuccauaucugg

SEQ ID NO: 17845 - RNA, 20 nt, Artificial Sequence
  targeting sequence with CTCN PAM
ugaggagcagagcuacagug

SEQ ID NO: 17846 - RNA, 20 nt, Artificial Sequence
  targeting sequence with CTCN PAM
ugagcugugcaucuugggcc

SEQ ID NO: 17847 - RNA, 20 nt, Artificial Sequence
  targeting sequence with CTCN PAM
ucaugagcugugcaucuugg

SEQ ID NO: 17848 - RNA, 20 nt, Artificial Sequence
  targeting sequence with CTCN PAM
gcuccucaugagcugugcau

SEQ ID NO: 17849 - RNA, 20 nt, Artificial Sequence
  targeting sequence with CTCN PAM
gaccucucagaacggggccu

SEQ ID NO: 17850 - RNA, 20 nt, Artificial Sequence
  targeting sequence with CTCN PAM
cagaacggggccucccauca

SEQ ID NO: 17851 - RNA, 20 nt, Artificial Sequence
  targeting sequence with CTCN PAM
gaacggggccucccaucaga

SEQ ID NO: 17852 - RNA, 20 nt, Artificial Sequence
  targeting sequence with CTCN PAM
caucagacccccagcuucca

SEQ ID NO: 17853 - RNA, 20 nt, Artificial Sequence
  targeting sequence with CTCN PAM
cucugagaguagcgggaccu

SEQ ID NO: 17854 - RNA, 20 nt, Artificial Sequence
  targeting sequence with CTCN PAM
gagaguagcgggaccucauu

SEQ ID NO: 17855 - RNA, 20 nt, Artificial Sequence
  targeting sequence with CTCN PAM
gagugaggcccaccgggcac

SEQ ID NO: 17856 - RNA, 20 nt, Artificial Sequence
  targeting sequence with CTCN PAM
cagagugaggcccaccgggc

SEQ ID NO: 17857 - RNA, 20 nt, Artificial Sequence
  targeting sequence with CTCN PAM
uuuuccucuuucccacccaa

SEQ ID NO: 17858 - RNA, 20 nt, Artificial Sequence
  targeting sequence with CTCN PAM
uucccacccaaccaggaagg

SEQ ID NO: 17859 - RNA, 20 nt, Artificial Sequence
  targeting sequence with CTCN PAM
acacccucgccuuccugcca

SEQ ID NO: 17860 - RNA, 20 nt, Artificial Sequence
  targeting sequence with CTCN PAM
ccuuccugccauccugcccg

SEQ ID NO: 17861 - RNA, 20 nt, Artificial Sequence
  targeting sequence with CTCN PAM
gcccuggucuggccacugcu

SEQ ID NO: 17862 - RNA, 20 nt, Artificial Sequence
  targeting sequence with CTCN PAM
cggccaucaaagcaguggcc

SEQ ID NO: 17863 - RNA, 20 nt, Artificial Sequence
  targeting sequence with CTCN PAM
acacucccggccaucaaagc

SEQ ID NO: 17864 - RNA, 20 nt, Artificial Sequence
  targeting sequence with CTCN PAM
aauuuccugcagcucaacac

SEQ ID NO: 17865 - RNA, 20 nt, Artificial Sequence
  targeting sequence with CTCN PAM
caggcccauccacccaccaa

SEQ ID NO: 17866 - RNA, 20 nt, Artificial Sequence
  targeting sequence with CTCN PAM
ugguggguggaugggccugg

SEQ ID NO: 17867 - RNA, 20 nt, Artificial Sequence
  targeting sequence with CTCN PAM
ggggacugcccgugggacug

SEQ ID NO: 17868 - RNA, 20 nt, Artificial Sequence
  targeting sequence with CTCN PAM
cuggauggagaaggcgcaca

SEQ ID NO: 17869 - RNA, 20 nt, Artificial Sequence
  targeting sequence with CTCN PAM
ggauggagaaggcgcacauc

SEQ ID NO: 17870 - RNA, 20 nt, Artificial Sequence
  targeting sequence with CTCN PAM
auccagagaggaagacaggg

SEQ ID NO: 17871 - RNA, 20 nt, Artificial Sequence
  targeting sequence with CTCN PAM
gcaguuggcccccacgggug

SEQ ID NO: 17872 - RNA, 20 nt, Artificial Sequence
  targeting sequence with CTCN PAM
augccccuccuccucacuca

SEQ ID NO: 17873 - RNA, 20 nt, Artificial Sequence
  targeting sequence with CTCN PAM
uccucacucacauccucagu

SEQ ID NO: 17874 - RNA, 20 nt, Artificial Sequence
  targeting sequence with CTCN PAM
ucacucacauccucagugcc

SEQ ID NO: 17875 - RNA, 20 nt, Artificial Sequence
  targeting sequence with CTCN PAM
cucacauccucagugccccc

SEQ ID NO: 17876 - RNA, 20 nt, Artificial Sequence
  targeting sequence with CTCN PAM
cauccucagugcccccaccc

SEQ ID NO: 17877 - RNA, 20 nt, Artificial Sequence
  targeting sequence with CTCN PAM
gugcccccaccccaguccau

SEQ ID NO: 17878 - RNA, 20 nt, Artificial Sequence
  targeting sequence with CTCN PAM
cugucuuaucucucucucuc

SEQ ID NO: 17879 - RNA, 20 nt, Artificial Sequence
  targeting sequence with CTCN PAM
gucuuaucucucucucuccu

SEQ ID NO: 17880 - RNA, 20 nt, Artificial Sequence
  targeting sequence with CTCN PAM
cucucuccugcccccaccca

SEQ ID NO: 17881 - RNA, 20 nt, Artificial Sequence
  targeting sequence with CTCN PAM
cucuccugcccccacccauc

SEQ ID NO: 17882 - RNA, 20 nt, Artificial Sequence
  targeting sequence with CTCN PAM
cuccugcccccacccaucuc

SEQ ID NO: 17883 - RNA, 20 nt, Artificial Sequence
  targeting sequence with CTCN PAM
ccugcccccacccaucucug

SEQ ID NO: 17884 - RNA, 20 nt, Artificial Sequence
  targeting sequence with CTCN PAM
ugcccccacccaucucuguu

SEQ ID NO: 17885 - RNA, 20 nt, Artificial Sequence
  targeting sequence with CTCN PAM
guuccuaucugucuugcucc

SEQ ID NO: 17886 - RNA, 20 nt, Artificial Sequence
  targeting sequence with CTCN PAM
ucccguucacucucuuuguc

SEQ ID NO: 17887 - RNA, 20 nt, Artificial Sequence
  targeting sequence with CTCN PAM
cguucacucucuuugucucu

SEQ ID NO: 17888 - RNA, 20 nt, Artificial Sequence
  targeting sequence with CTCN PAM
cuuugucucuccuucucuca

SEQ ID NO: 17889 - RNA, 20 nt, Artificial Sequence
  targeting sequence with CTCN PAM
uugucucuccuucucucagu

SEQ ID NO: 17890 - RNA, 20 nt, Artificial Sequence
  targeting sequence with CTCN PAM
ccuucucucagugucuugcc

SEQ ID NO: 17891 - RNA, 20 nt, Artificial Sequence
  targeting sequence with CTCN PAM
uucucucagugucuugcccc

SEQ ID NO: 17892 - RNA, 20 nt, Artificial Sequence
  targeting sequence with CTCN PAM
cagugucuugcccccuuccc

SEQ ID NO: 17893 - RNA, 20 nt, Artificial Sequence
  targeting sequence with CTCN PAM
gugucuugcccccuucccuu

SEQ ID NO: 17894 - RNA, 20 nt, Artificial Sequence
  targeting sequence with CTCN PAM
ucaucugucucucugugucu

SEQ ID NO: 17895 - RNA, 20 nt, Artificial Sequence
  targeting sequence with CTCN PAM
cugugucucuaucucugucu

SEQ ID NO: 17896 - RNA, 20 nt, Artificial Sequence
  targeting sequence with CTCN PAM
gugucucuaucucugucucu

SEQ ID NO: 17897 - RNA, 20 nt, Artificial Sequence
  targeting sequence with CTCN PAM
aucucugucucucucucugu

SEQ ID NO: 17898 - RNA, 20 nt, Artificial Sequence
  targeting sequence with CTCN PAM
gucucucucucugucucccu

SEQ ID NO: 17899 - RNA, 20 nt, Artificial Sequence
  targeting sequence with CTCN PAM
cucucugucucccucccuau

SEQ ID NO: 17900 - RNA, 20 nt, Artificial Sequence
  targeting sequence with CTCN PAM
cucugucucccucccuaucc

SEQ ID NO: 17901 - RNA, 20 nt, Artificial Sequence
  targeting sequence with CTCN PAM
cugucucccucccuaucccu

SEQ ID NO: 17902 - RNA, 20 nt, Artificial Sequence
  targeting sequence with CTCN PAM
gucucccucccuaucccuca

SEQ ID NO: 17903 - RNA, 20 nt, Artificial Sequence
  targeting sequence with CTCN PAM
cucccuaucccucaccccca

SEQ ID NO: 17904 - RNA, 20 nt, Artificial Sequence
  targeting sequence with CTCN PAM
cuaucccucacccccacucc

SEQ ID NO: 17905 - RNA, 20 nt, Artificial Sequence
  targeting sequence with CTCN PAM
cccccacucccucuccagcc

SEQ ID NO: 17906 - RNA, 20 nt, Artificial Sequence
  targeting sequence with CTCN PAM
cucuccagccccuccucucu

SEQ ID NO: 17907 - RNA, 20 nt, Artificial Sequence
  targeting sequence with CTCN PAM
ccagccccuccucucuuccu

SEQ ID NO: 17908 - RNA, 20 nt, Artificial Sequence
  targeting sequence with CTCN PAM
agccccuccucucuuccuuc

SEQ ID NO: 17909 - RNA, 20 nt, Artificial Sequence
  targeting sequence with CTCN PAM
ucucuuccuuccugucuccc

SEQ ID NO: 17910 - RNA, 20 nt, Artificial Sequence
  targeting sequence with CTCN PAM
cuuccuuccugucucccgcu

SEQ ID NO: 17911 - RNA, 20 nt, Artificial Sequence
  targeting sequence with CTCN PAM
uccuuccugucucccgcuca

SEQ ID NO: 17912 - RNA, 20 nt, Artificial Sequence
  targeting sequence with CTCN PAM
cgcucaucugguucaucuug

SEQ ID NO: 17913 - RNA, 20 nt, Artificial Sequence
  targeting sequence with CTCN PAM
ucugguucaucuugcugcau

SEQ ID NO: 17914 - RNA, 20 nt, Artificial Sequence
  targeting sequence with CTCN PAM
ccccacugagccgugaggau

SEQ ID NO: 17915 - RNA, 20 nt, Artificial Sequence
  targeting sequence with CTCN PAM
guggggggagcugcaggaug

SEQ ID NO: 17916 - RNA, 20 nt, Artificial Sequence
  targeting sequence with CTCN PAM
cggcucaguggggggagcug

SEQ ID NO: 17917 - RNA, 20 nt, Artificial Sequence
  targeting sequence with CTCN PAM
guguugucuuagaccagccu

SEQ ID NO: 17918 - RNA, 20 nt, Artificial Sequence
  targeting sequence with CTCN PAM
cugccaagcugagcaguggg

SEQ ID NO: 17919 - RNA, 20 nt, Artificial Sequence
  targeting sequence with CTCN PAM
gcuuggcagggagcuugugu

SEQ ID NO: 17920 - RNA, 20 nt, Artificial Sequence
  targeting sequence with CTCN PAM
uaaaccccacugcucagcuu

SEQ ID NO: 17921 - RNA, 20 nt, Artificial Sequence
  targeting sequence with CTCN PAM
cuaggugaaggguauucggg

SEQ ID NO: 17922 - RNA, 20 nt, Artificial Sequence
  targeting sequence with CTCN PAM
aggugaaggguauucggguc

SEQ ID NO: 17923 - RNA, 20 nt, Artificial Sequence
  targeting sequence with CTCN PAM
gacccgaauacccuucaccu

SEQ ID NO: 17924 - RNA, 20 nt, Artificial Sequence
  targeting sequence with CTCN PAM
caucaacuggaggugagaag

SEQ ID NO: 17925 - RNA, 20 nt, Artificial Sequence
  targeting sequence with CTCN PAM
aguugaugugaggauacuca

SEQ ID NO: 17926 - RNA, 20 nt, Artificial Sequence
  targeting sequence with CTCN PAM
ccuccaguugaugugaggau

SEQ ID NO: 17927 - RNA, 20 nt, Artificial Sequence
  targeting sequence with CTCN PAM
cccucucugagccucaguuu

SEQ ID NO: 17928 - RNA, 20 nt, Artificial Sequence
  targeting sequence with CTCN PAM
cugagccucaguuuccucaa

SEQ ID NO: 17929 - RNA, 20 nt, Artificial Sequence
  targeting sequence with CTCN PAM
gagccucaguuuccucaacu

SEQ ID NO: 17930 - RNA, 20 nt, Artificial Sequence
  targeting sequence with CTCN PAM
gagagggugagugccuugca

SEQ ID NO: 17931 - RNA, 20 nt, Artificial Sequence
  targeting sequence with CTCN PAM
guuuccucaacuguaaaaug

SEQ ID NO: 17932 - RNA, 20 nt, Artificial Sequence
  targeting sequence with CTCN PAM
acuguaaaaugaggacaauc

SEQ ID NO: 17933 - RNA, 20 nt, Artificial Sequence
  targeting sequence with CTCN PAM
uuuuacaguugaggaaacug

SEQ ID NO: 17934 - RNA, 20 nt, Artificial Sequence
  targeting sequence with CTCN PAM
caggggcagguguucugcua

SEQ ID NO: 17935 - RNA, 20 nt, Artificial Sequence
  targeting sequence with CTCN PAM
cacccucccaggggcaggug

SEQ ID NO: 17936 - RNA, 20 nt, Artificial Sequence
  targeting sequence with CTCN PAM
aucucacacccucccagggg

SEQ ID NO: 17937 - RNA, 20 nt, Artificial Sequence
  targeting sequence with CTCN PAM
uagcaaacaccaguuucucc

SEQ ID NO: 17938 - RNA, 20 nt, Artificial Sequence
  targeting sequence with CTCN PAM
ccgccuuguggcagugaacc

SEQ ID NO: 17939 - RNA, 20 nt, Artificial Sequence
  targeting sequence with CTCN PAM
aacaugggcuucagggguca

SEQ ID NO: 17940 - RNA, 20 nt, Artificial Sequence
  targeting sequence with CTCN PAM
uggcucuaacaugggcuuca

SEQ ID NO: 17941 - RNA, 20 nt, Artificial Sequence
  targeting sequence with CTCN PAM
accuccuguccugagcccca

SEQ ID NO: 17942 - RNA, 20 nt, Artificial Sequence
  targeting sequence with CTCN PAM
uguccugagccccaaugugg

SEQ ID NO: 17943 - RNA, 20 nt, Artificial Sequence
  targeting sequence with CTCN PAM
ggacaggagguggagcccug

SEQ ID NO: 17944 - RNA, 20 nt, Artificial Sequence
  targeting sequence with CTCN PAM
gcuagccacauuggggcuca

SEQ ID NO: 17945 - RNA, 20 nt, Artificial Sequence
  targeting sequence with CTCN PAM
ccgucugguggcucugcuag

SEQ ID NO: 17946 - RNA, 20 nt, Artificial Sequence
  targeting sequence with CTCN PAM
caccgucugguggcucugcu

SEQ ID NO: 17947 - RNA, 20 nt, Artificial Sequence
  targeting sequence with CTCN PAM
guuuccccaucugugaaaug

SEQ ID NO: 17948 - RNA, 20 nt, Artificial Sequence
  targeting sequence with CTCN PAM
acaucuuaugauuucucccu

SEQ ID NO: 17949 - RNA, 20 nt, Artificial Sequence
  targeting sequence with CTCN PAM
cuucuacccauuagcuggga

SEQ ID NO: 17950 - RNA, 20 nt, Artificial Sequence
  targeting sequence with CTCN PAM
cagcuaauggguagaaggga

SEQ ID NO: 17951 - RNA, 20 nt, Artificial Sequence
  targeting sequence with CTCN PAM
ugguggcagccccuauaccc

SEQ ID NO: 17952 - RNA, 20 nt, Artificial Sequence
  targeting sequence with CTCN PAM
gcccagccagggguauaggg

SEQ ID NO: 17953 - RNA, 20 nt, Artificial Sequence
  targeting sequence with CTCN PAM
ucugcccagccagggguaua

SEQ ID NO: 17954 - RNA, 20 nt, Artificial Sequence
  targeting sequence with CTCN PAM
uugcaucuuaguaaggccag

SEQ ID NO: 17955 - RNA, 20 nt, Artificial Sequence
  targeting sequence with CTCN PAM
ggaagaacaccucauugcau

SEQ ID NO: 17956 - RNA, 20 nt, Artificial Sequence
  targeting sequence with CTCN PAM
aaaauucccucuggaagaac

SEQ ID NO: 17957 - RNA, 20 nt, Artificial Sequence
  targeting sequence with CTCN PAM
ccuugguucccuccaaaauu

SEQ ID NO: 17958 - RNA, 20 nt, Artificial Sequence
  targeting sequence with CTCN PAM
ggaguggggauuagguggga

SEQ ID NO: 17959 - RNA, 20 nt, Artificial Sequence
  targeting sequence with CTCN PAM
ugaguaccuuucaucucccc

SEQ ID NO: 17960 - RNA, 20 nt, Artificial Sequence
  targeting sequence with CTCN PAM
aaccaagaccuuuuccuuga

SEQ ID NO: 17961 - RNA, 20 nt, Artificial Sequence
  targeting sequence with CTCN PAM
uuuuaauagagagaaggucu

SEQ ID NO: 17962 - RNA, 20 nt, Artificial Sequence
  targeting sequence with CTCN PAM
auuaaaaagagacagugaca

SEQ ID NO: 17963 - RNA, 20 nt, Artificial Sequence
  targeting sequence with CTCN PAM
cuauuaaaaagagacaguga

SEQ ID NO: 17964 - RNA, 20 nt, Artificial Sequence
  targeting sequence with CTCN PAM
aacucagggcuguugacauc

SEQ ID NO: 17965 - RNA, 20 nt, Artificial Sequence
  targeting sequence with CTCN PAM
gggcuguugacaucagcgug

SEQ ID NO: 17966 - RNA, 20 nt, Artificial Sequence
  targeting sequence with CTCN PAM
cuuuuaaaggacuucaauca

SEQ ID NO: 17967 - RNA, 20 nt, Artificial Sequence
  targeting sequence with CTCN PAM
ucuucaaaggcacugcugga

SEQ ID NO: 17968 - RNA, 20 nt, Artificial Sequence
  targeting sequence with CTCN PAM
gccaccagguccucgucuuc

SEQ ID NO: 17969 - RNA, 20 nt, Artificial Sequence
  targeting sequence with CTCN PAM
gagaaggcgggccugggccu

SEQ ID NO: 17970 - RNA, 20 nt, Artificial Sequence
  targeting sequence with CTCN PAM
gagccagcauagccguugac

SEQ ID NO: 17971 - RNA, 20 nt, Artificial Sequence
  targeting sequence with CTCN PAM
ccucugacugcccagggcag

SEQ ID NO: 17972 - RNA, 20 nt, Artificial Sequence
  targeting sequence with CTCN PAM
gacugcccagggcagagcug

SEQ ID NO: 17973 - RNA, 20 nt, Artificial Sequence
  targeting sequence with CTCN PAM
gcccugggcagucagaggug

SEQ ID NO: 17974 - RNA, 20 nt, Artificial Sequence
  targeting sequence with CTCN PAM
cagcucugcccugggcaguc

SEQ ID NO: 17975 - RNA, 20 nt, Artificial Sequence
  targeting sequence with CTCN PAM
ucacagcucugcccugggca

SEQ ID NO: 17976 - RNA, 20 nt, Artificial Sequence
  targeting sequence with CTCN PAM
gucuccucacagcucugccc

SEQ ID NO: 17977 - RNA, 20 nt, Artificial Sequence
  targeting sequence with CTCN PAM
cagcgcaacccuggccccac

SEQ ID NO: 17978 - RNA, 20 nt, Artificial Sequence
  targeting sequence with CTCN PAM
ucccagcgcaacccuggccc

SEQ ID NO: 17979 - RNA, 20 nt, Artificial Sequence
  targeting sequence with CTCN PAM
ugcccucccgucccuugggc

SEQ ID NO: 17980 - RNA, 20 nt, Artificial Sequence
  targeting sequence with CTCN PAM
cgucccuugggccuggccuc

SEQ ID NO: 17981 - RNA, 20 nt, Artificial Sequence
  targeting sequence with CTCN PAM
gagaacguuuccuugcagga

SEQ ID NO: 17982 - RNA, 20 nt, Artificial Sequence
  targeting sequence with CTCN PAM
gaggccaggcccaagggacg

SEQ ID NO: 17983 - RNA, 20 nt, Artificial Sequence
  targeting sequence with CTCN PAM
aaagcauuaaccuugcaggg

SEQ ID NO: 17984 - RNA, 20 nt, Artificial Sequence
  targeting sequence with CTCN PAM
gccacaggaaggugcuggaa

SEQ ID NO: 17985 - RNA, 20 nt, Artificial Sequence
  targeting sequence with CTCN PAM
uguuuccagcaccuuccugu

SEQ ID NO: 17986 - RNA, 20 nt, Artificial Sequence
  targeting sequence with CTCN PAM
cggcaccaccuaggcccaug

SEQ ID NO: 17987 - RNA, 20 nt, Artificial Sequence
  targeting sequence with CTCN PAM
ggggcuggacccgucucauu

SEQ ID NO: 17988 - RNA, 20 nt, Artificial Sequence
  targeting sequence with CTCN PAM
uuuccccgugggagcaaccc

SEQ ID NO: 17989 - RNA, 20 nt, Artificial Sequence
  targeting sequence with CTCN PAM
cacggggaaaugagacgggu

SEQ ID NO: 17990 - RNA, 20 nt, Artificial Sequence
  targeting sequence with CTCN PAM
uaggugggaacugaacaaug

SEQ ID NO: 17991 - RNA, 20 nt, Artificial Sequence
  targeting sequence with CTCN PAM
cucauaggugggaacugaac

SEQ ID NO: 17992 - RNA, 20 nt, Artificial Sequence
  targeting sequence with CTCN PAM
gaaugaugguuuccagcuuc

SEQ ID NO: 17993 - RNA, 20 nt, Artificial Sequence
  targeting sequence with CTCN PAM
uccuuuuuuauggcugcaua

SEQ ID NO: 17994 - RNA, 20 nt, Artificial Sequence
  targeting sequence with CTCN PAM
ccuccugagcacagacacuu

SEQ ID NO: 17995 - RNA, 20 nt, Artificial Sequence
  targeting sequence with CTCN PAM
uccugagcacagacacuuaa

SEQ ID NO: 17996 - RNA, 20 nt, Artificial Sequence
  targeting sequence with CTCN PAM
ugagcacagacacuuaaggc

SEQ ID NO: 17997 - RNA, 20 nt, Artificial Sequence
  targeting sequence with CTCN PAM
ggaggagaggggaaggaaug

SEQ ID NO: 17998 - RNA, 20 nt, Artificial Sequence
  targeting sequence with CTCN PAM
gagaggccuagaggcccacc

SEQ ID NO: 17999 - RNA, 20 nt, Artificial Sequence
  targeting sequence with CTCN PAM
gagccuuaagugucugugcu

SEQ ID NO: 18000 - RNA, 20 nt, Artificial Sequence
  targeting sequence with CTCN PAM
cugagccuuaagugucugug

SEQ ID NO: 18001 - RNA, 20 nt, Artificial Sequence
  targeting sequence with CTCN PAM
aggccucucugagccuuaag

SEQ ID NO: 18002 - RNA, 20 nt, Artificial Sequence
  targeting sequence with CTCN PAM
ggugggccucuaggccucuc

SEQ ID NO: 18003 - RNA, 20 nt, Artificial Sequence
  targeting sequence with CTCN PAM
cuuugccaccuguuugcugu

SEQ ID NO: 18004 - RNA, 20 nt, Artificial Sequence
  targeting sequence with CTCN PAM
caucucuguguccccguggg

SEQ ID NO: 18005 - RNA, 20 nt, Artificial Sequence
  targeting sequence with CTCN PAM
ucucuguguccccguggggc

SEQ ID NO: 18006 - RNA, 20 nt, Artificial Sequence
  targeting sequence with CTCN PAM
guguccccguggggcuggag

SEQ ID NO: 18007 - RNA, 20 nt, Artificial Sequence
  targeting sequence with CTCN PAM
agccccacggggacacagag

SEQ ID NO: 18008 - RNA, 20 nt, Artificial Sequence
  targeting sequence with CTCN PAM
uuccugcaugugaacgacgc

SEQ ID NO: 18009 - RNA, 20 nt, Artificial Sequence
  targeting sequence with CTCN PAM
cccgacucugggcagguccu

SEQ ID NO: 18010 - RNA, 20 nt, Artificial Sequence
  targeting sequence with CTCN PAM
cgacucugggcagguccuug

SEQ ID NO: 18011 - RNA, 20 nt, Artificial Sequence
  targeting sequence with CTCN PAM
gggcagguccuugcccucug

SEQ ID NO: 18012 - RNA, 20 nt, Artificial Sequence
  targeting sequence with CTCN PAM
gugcucaggggacucauggg

SEQ ID NO: 18013 - RNA, 20 nt, Artificial Sequence
  targeting sequence with CTCN PAM
ggggacucaugggccggggu

SEQ ID NO: 18014 - RNA, 20 nt, Artificial Sequence
  targeting sequence with CTCN PAM
ugggccgggguggggacccg

SEQ ID NO: 18015 - RNA, 20 nt, Artificial Sequence
  targeting sequence with CTCN PAM
ggguccccaccccggcccau

SEQ ID NO: 18016 - RNA, 20 nt, Artificial Sequence
  targeting sequence with CTCN PAM
cugggggcgccuggccugcc

SEQ ID NO: 18017 - RNA, 20 nt, Artificial Sequence
  targeting sequence with CTCN PAM
gcaggccaggcgcccccagu

SEQ ID NO: 18018 - RNA, 20 nt, Artificial Sequence
  targeting sequence with CTCN PAM
gugaguuggauaaugggcgg

SEQ ID NO: 18019 - RNA, 20 nt, Artificial Sequence
  targeting sequence with CTCN PAM
cagagcacaaaggggccaug

SEQ ID NO: 18020 - RNA, 20 nt, Artificial Sequence
  targeting sequence with CTCN PAM
gacguccagucaugggucug

SEQ ID NO: 18021 - RNA, 20 nt, Artificial Sequence
  targeting sequence with CTCN PAM
acacugaggccucuguccag

SEQ ID NO: 18022 - RNA, 20 nt, Artificial Sequence
  targeting sequence with CTCN PAM
guguggagcugcccgggucc

SEQ ID NO: 18023 - RNA, 20 nt, Artificial Sequence
  targeting sequence with CTCN PAM
guccagcagaagccucagag

SEQ ID NO: 18024 - RNA, 20 nt, Artificial Sequence
  targeting sequence with CTCN PAM
gaggggcagggccgccgcgg

SEQ ID NO: 18025 - RNA, 20 nt, Artificial Sequence
  targeting sequence with CTCN PAM
gaggcuucugcuggacagag

SEQ ID NO: 18026 - RNA, 20 nt, Artificial Sequence
  targeting sequence with CTCN PAM
aggcgacaaccgccugagug

SEQ ID NO: 18027 - RNA, 20 nt, Artificial Sequence
  targeting sequence with CTCN PAM
auuuaugcaccuaucaaaug

SEQ ID NO: 18028 - RNA, 20 nt, Artificial Sequence
  targeting sequence with CTCN PAM
ggagaugaggcccugguccu

SEQ ID NO: 18029 - RNA, 20 nt, Artificial Sequence
  targeting sequence with CTCN PAM
ugagccucaauuuaugcacc

SEQ ID NO: 18030 - RNA, 20 nt, Artificial Sequence
  targeting sequence with CTCN PAM
ucuccugagccucaauuuau

SEQ ID NO: 18031 - RNA, 20 nt, Artificial Sequence
  targeting sequence with CTCN PAM
guuucccuaccuguaaauag

SEQ ID NO: 18032 - RNA, 20 nt, Artificial Sequence
  targeting sequence with CTCN PAM
ugccucaguuucccuaccug

SEQ ID NO: 18033 - RNA, 20 nt, Artificial Sequence
  targeting sequence with CTCN PAM
ccuccugccucaguuucccu

SEQ ID NO: 18034 - RNA, 20 nt, Artificial Sequence
  targeting sequence with CTCN PAM
ggcaagucaccucaccuccu

SEQ ID NO: 18035 - RNA, 20 nt, Artificial Sequence
  targeting sequence with CTCN PAM
gcucugcaaccucugccucc

SEQ ID NO: 18036 - RNA, 20 nt, Artificial Sequence
  targeting sequence with CTCN PAM
gcaaccucugccuccugggu

SEQ ID NO: 18037 - RNA, 20 nt, Artificial Sequence
  targeting sequence with CTCN PAM
gccuccugggugcaagcgau

SEQ ID NO: 18038 - RNA, 20 nt, Artificial Sequence
  targeting sequence with CTCN PAM
ugggugcaagcgauucuccu

SEQ ID NO: 18039 - RNA, 20 nt, Artificial Sequence
  targeting sequence with CTCN PAM
ugccucagccucccgaguag

SEQ ID NO: 18040 - RNA, 20 nt, Artificial Sequence
  targeting sequence with CTCN PAM
gccucccgaguagcugggau

SEQ ID NO: 18041 - RNA, 20 nt, Artificial Sequence
  targeting sequence with CTCN PAM
cgaguagcugggauuacagg

SEQ ID NO: 18042 - RNA, 20 nt, Artificial Sequence
  targeting sequence with CTCN PAM
ggaggcugaggcaggagaau

SEQ ID NO: 18043 - RNA, 20 nt, Artificial Sequence
  targeting sequence with CTCN PAM
caccuguaaucccagcacuu

SEQ ID NO: 18044 - RNA, 20 nt, Artificial Sequence
  targeting sequence with CTCN PAM
ggccgggugcgguggcucac

SEQ ID NO: 18045 - RNA, 20 nt, Artificial Sequence
  targeting sequence with CTCN PAM
aguucauuaagaacaggacu

SEQ ID NO: 18046 - RNA, 20 nt, Artificial Sequence
  targeting sequence with CTCN PAM
auggccccaggccccagugc

SEQ ID NO: 18047 - RNA, 20 nt, Artificial Sequence
  targeting sequence with CTCN PAM
agacccaacccaauuucacc

SEQ ID NO: 18048 - RNA, 20 nt, Artificial Sequence
  targeting sequence with CTCN PAM
ggaaagucuuuccuagugaa

SEQ ID NO: 18049 - RNA, 20 nt, Artificial Sequence
  targeting sequence with CTCN PAM
uaggccucccucaagaccua

SEQ ID NO: 18050 - RNA, 20 nt, Artificial Sequence
  targeting sequence with CTCN PAM
cucaagaccuagucuaaaga

SEQ ID NO: 18051 - RNA, 20 nt, Artificial Sequence
  targeting sequence with CTCN PAM
agaccuagucuaaagaccuu

SEQ ID NO: 18052 - RNA, 20 nt, Artificial Sequence
  targeting sequence with CTCN PAM
gaaggucuuuagacuagguc

SEQ ID NO: 18053 - RNA, 20 nt, Artificial Sequence
  targeting sequence with CTCN PAM
cagccaccaagagagaggca

SEQ ID NO: 18054 - RNA, 20 nt, Artificial Sequence
  targeting sequence with CTCN PAM
ugguggcugggagcugggcc

SEQ ID NO: 18055 - RNA, 20 nt, Artificial Sequence
  targeting sequence with CTCN PAM
cuugguggcugggagcuggg

SEQ ID NO: 18056 - RNA, 20 nt, Artificial Sequence
  targeting sequence with CTCN PAM
cucuugguggcugggagcug

SEQ ID NO: 18057 - RNA, 20 nt, Artificial Sequence
  targeting sequence with CTCN PAM
ggauuucccuggccagaguc

SEQ ID NO: 18058 - RNA, 20 nt, Artificial Sequence
  targeting sequence with CTCN PAM
ggccagggaaauccagagug

SEQ ID NO: 18059 - RNA, 20 nt, Artificial Sequence
  targeting sequence with CTCN PAM
cugcggaggaacuugggacc

SEQ ID NO: 18060 - RNA, 20 nt, Artificial Sequence
  targeting sequence with CTCN PAM
gcggaggaacuugggaccag

SEQ ID NO: 18061 - RNA, 20 nt, Artificial Sequence
  targeting sequence with CTCN PAM
gcagagaggacucuggccag

SEQ ID NO: 18062 - RNA, 20 nt, Artificial Sequence
  targeting sequence with CTCN PAM
cuaaagaacuggucccaagu

SEQ ID NO: 18063 - RNA, 20 nt, Artificial Sequence
  targeting sequence with CTCN PAM
uuacucaagagcagccuuac

SEQ ID NO: 18064 - RNA, 20 nt, Artificial Sequence
  targeting sequence with CTCN PAM
agagcagccuuacgagaacg

SEQ ID NO: 18065 - RNA, 20 nt, Artificial Sequence
  targeting sequence with CTCN PAM
ugaguaaggagggaugaugu

SEQ ID NO: 18066 - RNA, 20 nt, Artificial Sequence
  targeting sequence with CTCN PAM
uaaggcugcucuugaguaag

SEQ ID NO: 18067 - RNA, 20 nt, Artificial Sequence
  targeting sequence with CTCN PAM
ggaugagccacccucuuucc

SEQ ID NO: 18068 - RNA, 20 nt, Artificial Sequence
  targeting sequence with CTCN PAM
ucccgagauacccagcuguc

SEQ ID NO: 18069 - RNA, 20 nt, Artificial Sequence
  targeting sequence with CTCN PAM
uuccccuguggcuuccccug

SEQ ID NO: 18070 - RNA, 20 nt, Artificial Sequence
  targeting sequence with CTCN PAM
aagauuuggaucuggcugcu

SEQ ID NO: 18071 - RNA, 20 nt, Artificial Sequence
  targeting sequence with CTCN PAM
ucuuccaggcagccuucuca

SEQ ID NO: 18072 - RNA, 20 nt, Artificial Sequence
  targeting sequence with CTCN PAM
uccaggcagccuucucagcu

SEQ ID NO: 18073 - RNA, 20 nt, Artificial Sequence
  targeting sequence with CTCN PAM
gcucucacaggcuggguuag

SEQ ID NO: 18074 - RNA, 20 nt, Artificial Sequence
  targeting sequence with CTCN PAM
cacaggcuggguuaggcuuc

SEQ ID NO: 18075 - RNA, 20 nt, Artificial Sequence
  targeting sequence with CTCN PAM
caggcuggguuaggcuuccu

SEQ ID NO: 18076 - RNA, 20 nt, Artificial Sequence
  targeting sequence with CTCN PAM
uccucuacccccacaguacc

SEQ ID NO: 18077 - RNA, 20 nt, Artificial Sequence
  targeting sequence with CTCN PAM
aaaaguauguuuccaccuca

SEQ ID NO: 18078 - RNA, 20 nt, Artificial Sequence
  targeting sequence with CTCN PAM
ggaagcauuagcugcauuga

SEQ ID NO: 18079 - RNA, 20 nt, Artificial Sequence
  targeting sequence with CTCN PAM
caguggccucaggaagcauu

SEQ ID NO: 18080 - RNA, 20 nt, Artificial Sequence
  targeting sequence with CTCN PAM
gugagaugggggccgaggag

SEQ ID NO: 18081 - RNA, 20 nt, Artificial Sequence
  targeting sequence with CTCN PAM
cugagggugccugucagggu

SEQ ID NO: 18082 - RNA, 20 nt, Artificial Sequence
  targeting sequence with CTCN PAM
cggguucugccuugggcagc

SEQ ID NO: 18083 - RNA, 20 nt, Artificial Sequence
  targeting sequence with CTCN PAM
caccuguccagagguugcuu

SEQ ID NO: 18084 - RNA, 20 nt, Artificial Sequence
  targeting sequence with CTCN PAM
acccccacccugugcucaca

SEQ ID NO: 18085 - RNA, 20 nt, Artificial Sequence
  targeting sequence with CTCN PAM
ccuggauggugggacaggcc

SEQ ID NO: 18086 - RNA, 20 nt, Artificial Sequence
  targeting sequence with CTCN PAM
cagaaguaggaagugaguca

SEQ ID NO: 18087 - RNA, 20 nt, Artificial Sequence
  targeting sequence with CTCN PAM
cuuccuacuucugggagcug

SEQ ID NO: 18088 - RNA, 20 nt, Artificial Sequence
  targeting sequence with CTCN PAM
cccauagugccggcggccgc

SEQ ID NO: 18089 - RNA, 20 nt, Artificial Sequence
  targeting sequence with CTCN PAM
gccgucucgcccauagugcc

SEQ ID NO: 18090 - RNA, 20 nt, Artificial Sequence
  targeting sequence with CTCN PAM
uuccugccacccuggguggu

SEQ ID NO: 18091 - RNA, 20 nt, Artificial Sequence
  targeting sequence with CTCN PAM
aggccuccuuccugccaccc

SEQ ID NO: 18092 - RNA, 20 nt, Artificial Sequence
  targeting sequence with CTCN PAM
uccucuaggccuccuuccug

SEQ ID NO: 18093 - RNA, 20 nt, Artificial Sequence
  targeting sequence with CTCN PAM
uauccucuuccucuaggccu

SEQ ID NO: 18094 - RNA, 20 nt, Artificial Sequence
  targeting sequence with CTCN PAM
ccccagcaaaacaggcagcc

SEQ ID NO: 18095 - RNA, 20 nt, Artificial Sequence
  targeting sequence with CTCN PAM
ccagcaaaacaggcagcccu

SEQ ID NO: 18096 - RNA, 20 nt, Artificial Sequence
  targeting sequence with CTCN PAM
agcccaaacccuccaaccca

SEQ ID NO: 18097 - RNA, 20 nt, Artificial Sequence
  targeting sequence with CTCN PAM
aacccaguggacacccgucc

SEQ ID NO: 18098 - RNA, 20 nt, Artificial Sequence
  targeting sequence with CTCN PAM
auuuccccauccucacucga

SEQ ID NO: 18099 - RNA, 20 nt, Artificial Sequence
  targeting sequence with CTCN PAM
cucgagaggcuuggcugggc

SEQ ID NO: 18100 - RNA, 20 nt, Artificial Sequence
  targeting sequence with CTCN PAM
agaggcuuggcugggcagac

SEQ ID NO: 18101 - RNA, 20 nt, Artificial Sequence
  targeting sequence with CTCN PAM
agugaggauggggaaauuga

SEQ ID NO: 18102 - RNA, 20 nt, Artificial Sequence
  targeting sequence with CTCN PAM
cgagugaggauggggaaauu

SEQ ID NO: 18103 - RNA, 20 nt, Artificial Sequence
  targeting sequence with CTCN PAM
gucugcccagccaagccucu

SEQ ID NO: 18104 - RNA, 20 nt, Artificial Sequence
  targeting sequence with CTCN PAM
ggcaccaaaagggaagugag

SEQ ID NO: 18105 - RNA, 20 nt, Artificial Sequence
  targeting sequence with CTCN PAM
gccucaaaaggaucugggcu

SEQ ID NO: 18106 - RNA, 20 nt, Artificial Sequence
  targeting sequence with CTCN PAM
aaaggaucugggcuuggaug

SEQ ID NO: 18107 - RNA, 20 nt, Artificial Sequence
  targeting sequence with CTCN PAM
gggugcccaucuaguugcac

SEQ ID NO: 18108 - RNA, 20 nt, Artificial Sequence
  targeting sequence with CTCN PAM
aagaauauguauuauuucug

SEQ ID NO: 18109 - RNA, 20 nt, Artificial Sequence
  targeting sequence with CTCN PAM
auguuuuuuuuaacagaaau

SEQ ID NO: 18110 - RNA, 20 nt, Artificial Sequence
  targeting sequence with CTCN PAM
uucugccuccauguuuuuuu

SEQ ID NO: 18111 - RNA, 20 nt, Artificial Sequence
  targeting sequence with CTCN PAM
ccaaggggccuggggucaca

SEQ ID NO: 18112 - RNA, 20 nt, Artificial Sequence
  targeting sequence with CTCN PAM
cagcauccuccccaaggggc

SEQ ID NO: 18113 - RNA, 20 nt, Artificial Sequence
  targeting sequence with CTCN PAM
ugccuucucccagcauccuc

SEQ ID NO: 18114 - RNA, 20 nt, Artificial Sequence
  targeting sequence with CTCN PAM
cgccgggacuggccggguca

SEQ ID NO: 18115 - RNA, 20 nt, Artificial Sequence
  targeting sequence with CTCN PAM
gauacauggggauaacagca

SEQ ID NO: 18116 - RNA, 20 nt, Artificial Sequence
  targeting sequence with CTCN PAM
auuuccuucucugauacaug

SEQ ID NO: 18117 - RNA, 20 nt, Artificial Sequence
  targeting sequence with CTCN PAM
cugcccaaggccacacagcc

SEQ ID NO: 18118 - RNA, 20 nt, Artificial Sequence
  targeting sequence with CTCN PAM
gaugauucuggcuguguggc

SEQ ID NO: 18119 - RNA, 20 nt, Artificial Sequence
  targeting sequence with CTCN PAM
uucugugccacuguccccca

SEQ ID NO: 18120 - RNA, 20 nt, Artificial Sequence
  targeting sequence with CTCN PAM
uguguaaguuugacucuccc

SEQ ID NO: 18121 - RNA, 20 nt, Artificial Sequence
  targeting sequence with CTCN PAM
ccccucugcuuucuccgcau

SEQ ID NO: 18122 - RNA, 20 nt, Artificial Sequence
  targeting sequence with CTCN PAM
ccucugcuuucuccgcaucu

SEQ ID NO: 18123 - RNA, 20 nt, Artificial Sequence
  targeting sequence with CTCN PAM
gcuuucuccgcaucugcacc

SEQ ID NO: 18124 - RNA, 20 nt, Artificial Sequence
  targeting sequence with CTCN PAM
gcaucugcaccucccacccc

SEQ ID NO: 18125 - RNA, 20 nt, Artificial Sequence
  targeting sequence with CTCN PAM
cacccccagauggagacucc

SEQ ID NO: 18126 - RNA, 20 nt, Artificial Sequence
  targeting sequence with CTCN PAM
aucugggggugggaggugca

SEQ ID NO: 18127 - RNA, 20 nt, Artificial Sequence
  targeting sequence with CTCN PAM
ugagcaggcagugaggacug

SEQ ID NO: 18128 - RNA, 20 nt, Artificial Sequence
  targeting sequence with CTCN PAM
ggagucuccaucugggggug

SEQ ID NO: 18129 - RNA, 20 nt, Artificial Sequence
  targeting sequence with CTCN PAM
cugccugcucaggagucucc

SEQ ID NO: 18130 - RNA, 20 nt, Artificial Sequence
  targeting sequence with CTCN PAM
gcaguccucacugccugcuc

SEQ ID NO: 18131 - RNA, 20 nt, Artificial Sequence
  targeting sequence with CTCN PAM
gcucagcuguccacuaaggg

SEQ ID NO: 18132 - RNA, 20 nt, Artificial Sequence
  targeting sequence with CTCN PAM
gcuguccacuaagggccguc

SEQ ID NO: 18133 - RNA, 20 nt, Artificial Sequence
  targeting sequence with CTCN PAM
gcagaggagggggccauaag

SEQ ID NO: 18134 - RNA, 20 nt, Artificial Sequence
  targeting sequence with CTCN PAM
gcugagccagcacccagcac

SEQ ID NO: 18135 - RNA, 20 nt, Artificial Sequence
  targeting sequence with CTCN PAM
ucugcugagccagcacccag

SEQ ID NO: 18136 - RNA, 20 nt, Artificial Sequence
  targeting sequence with CTCN PAM
ugaaguugcauuccaucuuc

SEQ ID NO: 18137 - RNA, 20 nt, Artificial Sequence
  targeting sequence with CTCN PAM
caugaaguugcauuccaucu

SEQ ID NO: 18138 - RNA, 20 nt, Artificial Sequence
  targeting sequence with CTCN PAM
ucuugcucucaugaaguugc

SEQ ID NO: 18139 - RNA, 20 nt, Artificial Sequence
  targeting sequence with CTCN PAM
gugcagggaggucagagagg

SEQ ID NO: 18140 - RNA, 20 nt, Artificial Sequence
  targeting sequence with CTCN PAM
cugcaccgaggcuaaacugc

SEQ ID NO: 18141 - RNA, 20 nt, Artificial Sequence
  targeting sequence with CTCN PAM
gaccucccugcaccgaggcu

SEQ ID NO: 18142 - RNA, 20 nt, Artificial Sequence
  targeting sequence with CTCN PAM
cugaccucccugcaccgagg

SEQ ID NO: 18143 - RNA, 20 nt, Artificial Sequence
  targeting sequence with CTCN PAM
aggaagcccucucugaccuc

SEQ ID NO: 18144 - RNA, 20 nt, Artificial Sequence
  targeting sequence with CTCN PAM
uccaggaagcccucucugac

SEQ ID NO: 18145 - RNA, 20 nt, Artificial Sequence
  targeting sequence with CTCN PAM
aagaggcaccggagcugcca

SEQ ID NO: 18146 - RNA, 20 nt, Artificial Sequence
  targeting sequence with CTCN PAM
uugagguuaggcaucaccuc

SEQ ID NO: 18147 - RNA, 20 nt, Artificial Sequence
  targeting sequence with CTCN PAM
ggugccucuuugagguuagg

SEQ ID NO: 18148 - RNA, 20 nt, Artificial Sequence
  targeting sequence with CTCN PAM
cugccugaacuacugcaucc

SEQ ID NO: 18149 - RNA, 20 nt, Artificial Sequence
  targeting sequence with CTCN PAM
cccugccugaacuacugcau

SEQ ID NO: 18150 - RNA, 20 nt, Artificial Sequence
  targeting sequence with CTCN PAM
ucucccugccugaacuacug

SEQ ID NO: 18151 - RNA, 20 nt, Artificial Sequence
  targeting sequence with CTCN PAM
gggucuuugcacaugcuguu

SEQ ID NO: 18152 - RNA, 20 nt, Artificial Sequence
  targeting sequence with CTCN PAM
uuccugccucugggucuuug

SEQ ID NO: 18153 - RNA, 20 nt, Artificial Sequence
  targeting sequence with CTCN PAM
ccuccccauccgugcccucc

SEQ ID NO: 18154 - RNA, 20 nt, Artificial Sequence
  targeting sequence with CTCN PAM
ccauccgugcccucccugac

SEQ ID NO: 18155 - RNA, 20 nt, Artificial Sequence
  targeting sequence with CTCN PAM
cugaccucccccacccacac

SEQ ID NO: 18156 - RNA, 20 nt, Artificial Sequence
  targeting sequence with CTCN PAM
cccacccacacccauccucu

SEQ ID NO: 18157 - RNA, 20 nt, Artificial Sequence
  targeting sequence with CTCN PAM
ccugccggcuccucugcaga

SEQ ID NO: 18158 - RNA, 20 nt, Artificial Sequence
  targeting sequence with CTCN PAM
ugccggcuccucugcagacc

SEQ ID NO: 18159 - RNA, 20 nt, Artificial Sequence
  targeting sequence with CTCN PAM
ucugcagaccggaaggcgag

SEQ ID NO: 18160 - RNA, 20 nt, Artificial Sequence
  targeting sequence with CTCN PAM
gcagaccggaaggcgaggug

SEQ ID NO: 18161 - RNA, 20 nt, Artificial Sequence
  targeting sequence with CTCN PAM
ccuuccggucugcagaggag

SEQ ID NO: 18162 - RNA, 20 nt, Artificial Sequence
  targeting sequence with CTCN PAM
caaugaagagaaacugcuug

SEQ ID NO: 18163 - RNA, 20 nt, Artificial Sequence
  targeting sequence with CTCN PAM
augaagagaaacugcuugga

SEQ ID NO: 18164 - RNA, 20 nt, Artificial Sequence
  targeting sequence with CTCN PAM
ucauugagagcugugggacu

SEQ ID NO: 18165 - RNA, 20 nt, Artificial Sequence
  targeting sequence with CTCN PAM
acucccagauccugccugaa

SEQ ID NO: 18166 - RNA, 20 nt, Artificial Sequence
  targeting sequence with CTCN PAM
cagauccugccugaaaaaca

SEQ ID NO: 18167 - RNA, 20 nt, Artificial Sequence
  targeting sequence with CTCN PAM
ccagcugggguuugauuuuu

SEQ ID NO: 18168 - RNA, 20 nt, Artificial Sequence
  targeting sequence with CTCN PAM
ccagauagccagauaaaacc

SEQ ID NO: 18169 - RNA, 20 nt, Artificial Sequence
  targeting sequence with CTCN PAM
uugaaagccucgccagauag

SEQ ID NO: 18170 - RNA, 20 nt, Artificial Sequence
  targeting sequence with CTCN PAM
accgcccacggggguccggg

SEQ ID NO: 18171 - RNA, 20 nt, Artificial Sequence
  targeting sequence with CTCN PAM
accacccagggaaaccaggc

SEQ ID NO: 18172 - RNA, 20 nt, Artificial Sequence
  targeting sequence with CTCN PAM
augcuccugccaaaucccug

SEQ ID NO: 18173 - RNA, 20 nt, Artificial Sequence
  targeting sequence with CTCN PAM
ugccaaaucccugcaugcuc

SEQ ID NO: 18174 - RNA, 20 nt, Artificial Sequence
  targeting sequence with CTCN PAM
caccuccuagcucagcaggu

SEQ ID NO: 18175 - RNA, 20 nt, Artificial Sequence
  targeting sequence with CTCN PAM
uagcucagcaggugcugggc

SEQ ID NO: 18176 - RNA, 20 nt, Artificial Sequence
  targeting sequence with CTCN PAM
gcaggugcugggcggucgcu

SEQ ID NO: 18177 - RNA, 20 nt, Artificial Sequence
  targeting sequence with CTCN PAM
ucccuaauaacuucaguuag

SEQ ID NO: 18178 - RNA, 20 nt, Artificial Sequence
  targeting sequence with CTCN PAM
agggcuggcagggaacuaac

SEQ ID NO: 18179 - RNA, 20 nt, Artificial Sequence
  targeting sequence with CTCN PAM
ugaccaggcacacccuuuga

SEQ ID NO: 18180 - RNA, 20 nt, Artificial Sequence
  targeting sequence with CTCN PAM
gucacacagcagagcuggga

SEQ ID NO: 18181 - RNA, 20 nt, Artificial Sequence
  targeting sequence with CTCN PAM
gcugugugacugaggacucc

SEQ ID NO: 18182 - RNA, 20 nt, Artificial Sequence
  targeting sequence with CTCN PAM
ggggccagaaaaccccaggu

SEQ ID NO: 18183 - RNA, 20 nt, Artificial Sequence
  targeting sequence with CTCN PAM
ugccacagugcacagggcuc

SEQ ID NO: 18184 - RNA, 20 nt, Artificial Sequence
  targeting sequence with CTCN PAM
aggggcaguuaaugaagagg

SEQ ID NO: 18185 - RNA, 20 nt, Artificial Sequence
  targeting sequence with CTCN PAM
ucauuaacugccccuagagc

SEQ ID NO: 18186 - RNA, 20 nt, Artificial Sequence
  targeting sequence with CTCN PAM
uucccccgccccacacaugc

SEQ ID NO: 18187 - RNA, 20 nt, Artificial Sequence
  targeting sequence with CTCN PAM
cacuuccagggacagggagc

SEQ ID NO: 18188 - RNA, 20 nt, Artificial Sequence
  targeting sequence with CTCN PAM
cugucccuggaagugugagc

SEQ ID NO: 18189 - RNA, 20 nt, Artificial Sequence
  targeting sequence with CTCN PAM
cuccucaccgucagccucac

SEQ ID NO: 18190 - RNA, 20 nt, Artificial Sequence
  targeting sequence with CTCN PAM
ucaccgucagccucacacau

SEQ ID NO: 18191 - RNA, 20 nt, Artificial Sequence
  targeting sequence with CTCN PAM
ccgucagccucacacauaug

SEQ ID NO: 18192 - RNA, 20 nt, Artificial Sequence
  targeting sequence with CTCN PAM
cacauauguccccuugcugg

SEQ ID NO: 18193 - RNA, 20 nt, Artificial Sequence
  targeting sequence with CTCN PAM
cacccccaccccggccaggu

SEQ ID NO: 18194 - RNA, 20 nt, Artificial Sequence
  targeting sequence with CTCN PAM
cggucagugauuaggaaccu

SEQ ID NO: 18195 - RNA, 20 nt, Artificial Sequence
  targeting sequence with CTCN PAM
uggucucccggucagugauu

SEQ ID NO: 18196 - RNA, 20 nt, Artificial Sequence
  targeting sequence with CTCN PAM
agaaugguggggcaggacug

SEQ ID NO: 18197 - RNA, 20 nt, Artificial Sequence
  targeting sequence with CTCN PAM
aguccugccccaccauucua

SEQ ID NO: 18198 - RNA, 20 nt, Artificial Sequence
  targeting sequence with CTCN PAM
uauguuccauggucuucacc

SEQ ID NO: 18199 - RNA, 20 nt, Artificial Sequence
  targeting sequence with CTCN PAM
gccuuuccuagaaagaagcu

SEQ ID NO: 18200 - RNA, 20 nt, Artificial Sequence
  targeting sequence with CTCN PAM
ugcucagccuggguggggau

SEQ ID NO: 18201 - RNA, 20 nt, Artificial Sequence
  targeting sequence with CTCN PAM
gccuggguggggaugaaggc

SEQ ID NO: 18202 - RNA, 20 nt, Artificial Sequence
  targeting sequence with CTCN PAM
ggggcaugugguuagcacac

SEQ ID NO: 18203 - RNA, 20 nt, Artificial Sequence
  targeting sequence with CTCN PAM
uccuguccuugcccagugcu

SEQ ID NO: 18204 - RNA, 20 nt, Artificial Sequence
  targeting sequence with CTCN PAM
uguccuugcccagugcuggc

SEQ ID NO: 18205 - RNA, 20 nt, Artificial Sequence
  targeting sequence with CTCN PAM
cuuggccugggcuugggacc

SEQ ID NO: 18206 - RNA, 20 nt, Artificial Sequence
  targeting sequence with CTCN PAM
gauggggaugugucgggucc

SEQ ID NO: 18207 - RNA, 20 nt, Artificial Sequence
  targeting sequence with CTCN PAM
uucguggauacugaucucag

SEQ ID NO: 18208 - RNA, 20 nt, Artificial Sequence
  targeting sequence with CTCN PAM
gugugaugcgagggccugcc

SEQ ID NO: 18209 - RNA, 20 nt, Artificial Sequence
  targeting sequence with CTCN PAM
caucacaccgagucuccuuc

SEQ ID NO: 18210 - RNA, 20 nt, Artificial Sequence
  targeting sequence with CTCN PAM
ucugcuggcucugccgacag

SEQ ID NO: 18211 - RNA, 20 nt, Artificial Sequence
  targeting sequence with CTCN PAM
gccgacagcacuauggggac

SEQ ID NO: 18212 - RNA, 20 nt, Artificial Sequence
  targeting sequence with CTCN PAM
ugucuucacaguccccauag

SEQ ID NO: 18213 - RNA, 20 nt, Artificial Sequence
  targeting sequence with CTCN PAM
cuccugucuucacagucccc

SEQ ID NO: 18214 - RNA, 20 nt, Artificial Sequence
  targeting sequence with CTCN PAM
uuccccuucucccuccuguc

SEQ ID NO: 18215 - RNA, 20 nt, Artificial Sequence
  targeting sequence with CTCN PAM
uguggccguccuguucuccu

SEQ ID NO: 18216 - RNA, 20 nt, Artificial Sequence
  targeting sequence with CTCN PAM
uucccuccuguggccguccu

SEQ ID NO: 18217 - RNA, 20 nt, Artificial Sequence
  targeting sequence with CTCN PAM
gauaaccuuacuccccaaag

SEQ ID NO: 18218 - RNA, 20 nt, Artificial Sequence
  targeting sequence with CTCN PAM
ccaaagccccucacagcccu

SEQ ID NO: 18219 - RNA, 20 nt, Artificial Sequence
  targeting sequence with CTCN PAM
cagcccugugggccauauca

SEQ ID NO: 18220 - RNA, 20 nt, Artificial Sequence
  targeting sequence with CTCN PAM
agaggguguaauuaggccca

SEQ ID NO: 18221 - RNA, 20 nt, Artificial Sequence
  targeting sequence with CTCN PAM
ggaggacuguggggcaaugg

SEQ ID NO: 18222 - RNA, 20 nt, Artificial Sequence
  targeting sequence with CTCN PAM
agugugccccaucuguaaaa

SEQ ID NO: 18223 - RNA, 20 nt, Artificial Sequence
  targeting sequence with CTCN PAM
aaaagcagcaaggggucccc

SEQ ID NO: 18224 - RNA, 20 nt, Artificial Sequence
  targeting sequence with CTCN PAM
cccuuccacuucccuccagg

SEQ ID NO: 18225 - RNA, 20 nt, Artificial Sequence
  targeting sequence with CTCN PAM
aggguugaccucagcagcuc

SEQ ID NO: 18226 - RNA, 20 nt, Artificial Sequence
  targeting sequence with CTCN PAM
gcagcuccugguugggcuuu

SEQ ID NO: 18227 - RNA, 20 nt, Artificial Sequence
  targeting sequence with CTCN PAM
ugguugggcuuuucccagag

SEQ ID NO: 18228 - RNA, 20 nt, Artificial Sequence
  targeting sequence with CTCN PAM
gggaaaagcccaaccaggag

SEQ ID NO: 18229 - RNA, 20 nt, Artificial Sequence
  targeting sequence with CTCN PAM
ugcuuccggccuuggcucug

SEQ ID NO: 18230 - RNA, 20 nt, Artificial Sequence
  targeting sequence with CTCN PAM
ggacucgugcuuccggccuu

SEQ ID NO: 18231 - RNA, 20 nt, Artificial Sequence
  targeting sequence with CTCN PAM
gggcuggcgaggcggaaaca

SEQ ID NO: 18232 - RNA, 20 nt, Artificial Sequence
  targeting sequence with CTCN PAM
ccagcccggagccccagccc

SEQ ID NO: 18233 - RNA, 20 nt, Artificial Sequence
  targeting sequence with CTCN PAM
cccaccgggaggaaggagga

SEQ ID NO: 18234 - RNA, 20 nt, Artificial Sequence
  targeting sequence with CTCN PAM
cggugggggagccugacccc

SEQ ID NO: 18235 - RNA, 20 nt, Artificial Sequence
  targeting sequence with CTCN PAM
uuccucccggugggggagcc

SEQ ID NO: 18236 - RNA, 20 nt, Artificial Sequence
  targeting sequence with CTCN PAM
uuccuccuuccucccggugg

SEQ ID NO: 18237 - RNA, 20 nt, Artificial Sequence
  targeting sequence with CTCN PAM
ggccuuuccuccuuccuccu

SEQ ID NO: 18238 - RNA, 20 nt, Artificial Sequence
  targeting sequence with CTCN PAM
uccggccuuuccuccuuccu

SEQ ID NO: 18239 - RNA, 20 nt, Artificial Sequence
  targeting sequence with CTCN PAM
ugcuccuccggccuuuccuc

SEQ ID NO: 18240 - RNA, 20 nt, Artificial Sequence
  targeting sequence with CTCN PAM
ggccuccugcuccuccggcc

SEQ ID NO: 18241 - RNA, 20 nt, Artificial Sequence
  targeting sequence with CTCN PAM
cccagccagguucucaccuc

SEQ ID NO: 18242 - RNA, 20 nt, Artificial Sequence
  targeting sequence with CTCN PAM
cagccagguucucaccucca

SEQ ID NO: 18243 - RNA, 20 nt, Artificial Sequence
  targeting sequence with CTCN PAM
ccuccagccuugccuuccuc

SEQ ID NO: 18244 - RNA, 20 nt, Artificial Sequence
  targeting sequence with CTCN PAM
agccuugccuuccucacccc

SEQ ID NO: 18245 - RNA, 20 nt, Artificial Sequence
  targeting sequence with CTCN PAM
cccccagaggcugggcugca

SEQ ID NO: 18246 - RNA, 20 nt, Artificial Sequence
  targeting sequence with CTCN PAM
gggggugaggaaggcaaggc

SEQ ID NO: 18247 - RNA, 20 nt, Artificial Sequence
  targeting sequence with CTCN PAM
guggcugaggaaggagaugu

SEQ ID NO: 18248 - RNA, 20 nt, Artificial Sequence
  targeting sequence with CTCN PAM
gccacugagcgccuacugug

SEQ ID NO: 18249 - RNA, 20 nt, Artificial Sequence
  targeting sequence with CTCN PAM
uuccucagccacugagcgcc

SEQ ID NO: 18250 - RNA, 20 nt, Artificial Sequence
  targeting sequence with CTCN PAM
ccucuccuucacucagccgg

SEQ ID NO: 18251 - RNA, 20 nt, Artificial Sequence
  targeting sequence with CTCN PAM
ucuccuucacucagccgggg

SEQ ID NO: 18252 - RNA, 20 nt, Artificial Sequence
  targeting sequence with CTCN PAM
ccuucacucagccggggcuc

SEQ ID NO: 18253 - RNA, 20 nt, Artificial Sequence
  targeting sequence with CTCN PAM
uucacucagccggggcucag

SEQ ID NO: 18254 - RNA, 20 nt, Artificial Sequence
  targeting sequence with CTCN PAM
gccggggcucaggccccaau

SEQ ID NO: 18255 - RNA, 20 nt, Artificial Sequence
  targeting sequence with CTCN PAM
ggccccaaucccaaucgccc

SEQ ID NO: 18256 - RNA, 20 nt, Artificial Sequence
  targeting sequence with CTCN PAM
ucuuccuucugucuuagucc

SEQ ID NO: 18257 - RNA, 20 nt, Artificial Sequence
  targeting sequence with CTCN PAM
uccuucugucuuaguccaaa

SEQ ID NO: 18258 - RNA, 20 nt, Artificial Sequence
  targeting sequence with CTCN PAM
ggaugagacuguaucuggag

SEQ ID NO: 18259 - RNA, 20 nt, Artificial Sequence
  targeting sequence with CTCN PAM
uccugagguauuggggguuu

SEQ ID NO: 18260 - RNA, 20 nt, Artificial Sequence
  targeting sequence with CTCN PAM
agauacagucucauccugag

SEQ ID NO: 18261 - RNA, 20 nt, Artificial Sequence
  targeting sequence with CTCN PAM
uuaaaggcugucuccagaua

SEQ ID NO: 18262 - RNA, 20 nt, Artificial Sequence
  targeting sequence with CTCN PAM
uuuuaacuuaaugaacucuu

SEQ ID NO: 18263 - RNA, 20 nt, Artificial Sequence
  targeting sequence with CTCN PAM
uaccaucucauuuuaacuua

SEQ ID NO: 18264 - RNA, 20 nt, Artificial Sequence
  targeting sequence with CTCN PAM
ucauaccaucucauuuuaac

SEQ ID NO: 18265 - RNA, 20 nt, Artificial Sequence
  targeting sequence with CTCN PAM
cgccugugauccuagcacuu

SEQ ID NO: 18266 - RNA, 20 nt, Artificial Sequence
  targeting sequence with CTCN PAM
caaagugcuaggaucacagg

SEQ ID NO: 18267 - RNA, 20 nt, Artificial Sequence
  targeting sequence with CTCN PAM
ugcaucagccucccaaagug

SEQ ID NO: 18268 - RNA, 20 nt, Artificial Sequence
  targeting sequence with CTCN PAM
agcgauccuccugcaucagc

SEQ ID NO: 18269 - RNA, 20 nt, Artificial Sequence
  targeting sequence with CTCN PAM
ugggcucaagcgauccuccu

SEQ ID NO: 18270 - RNA, 20 nt, Artificial Sequence
  targeting sequence with CTCN PAM
aacuccugggcucaagcgau

SEQ ID NO: 18271 - RNA, 20 nt, Artificial Sequence
  targeting sequence with CTCN PAM
cuguguugccuaggcugguc

SEQ ID NO: 18272 - RNA, 20 nt, Artificial Sequence
  targeting sequence with CTCN PAM
acaaaaaguuagcugggcau

SEQ ID NO: 18273 - RNA, 20 nt, Artificial Sequence
  targeting sequence with CTCN PAM
augcccagcuaacuuuuugu

SEQ ID NO: 18274 - RNA, 20 nt, Artificial Sequence
  targeting sequence with CTCN PAM
gcuacuuagaggaccgaggu

SEQ ID NO: 18275 - RNA, 20 nt, Artificial Sequence
  targeting sequence with CTCN PAM
aaguagcugagacuacgggc

SEQ ID NO: 18276 - RNA, 20 nt, Artificial Sequence
  targeting sequence with CTCN PAM
guccucuaaguagcugagac

SEQ ID NO: 18277 - RNA, 20 nt, Artificial Sequence
  targeting sequence with CTCN PAM
agccaucuucccaccucggu

SEQ ID NO: 18278 - RNA, 20 nt, Artificial Sequence
  targeting sequence with CTCN PAM
ugggcucaagccaucuuccc

SEQ ID NO: 18279 - RNA, 20 nt, Artificial Sequence
  targeting sequence with CTCN PAM
cugcagccuugaccuccugg

SEQ ID NO: 18280 - RNA, 20 nt, Artificial Sequence
  targeting sequence with CTCN PAM
agaacugagaggaaauaggu

SEQ ID NO: 18281 - RNA, 20 nt, Artificial Sequence
  targeting sequence with CTCN PAM
guucuggagggugcaagugg

SEQ ID NO: 18282 - RNA, 20 nt, Artificial Sequence
  targeting sequence with CTCN PAM
caguucuggagggugcaagu

SEQ ID NO: 18283 - RNA, 20 nt, Artificial Sequence
  targeting sequence with CTCN PAM
acaacagaaaccuauuuccu

SEQ ID NO: 18284 - RNA, 20 nt, Artificial Sequence
  targeting sequence with CTCN PAM
uguuacggcagccuagcaag

SEQ ID NO: 18285 - RNA, 20 nt, Artificial Sequence
  targeting sequence with CTCN PAM
cccuggccccgugaccucuc

SEQ ID NO: 18286 - RNA, 20 nt, Artificial Sequence
  targeting sequence with CTCN PAM
cccgcuguucuggaggcugc

SEQ ID NO: 18287 - RNA, 20 nt, Artificial Sequence
  targeting sequence with CTCN PAM
cgcuguucuggaggcugcaa

SEQ ID NO: 18288 - RNA, 20 nt, Artificial Sequence
  targeting sequence with CTCN PAM
agaacagcgggagaggucac

SEQ ID NO: 18289 - RNA, 20 nt, Artificial Sequence
  targeting sequence with CTCN PAM
uuggucuuggacuuggccuu

SEQ ID NO: 18290 - RNA, 20 nt, Artificial Sequence
  targeting sequence with CTCN PAM
cuccuuggcuugcagauggu

SEQ ID NO: 18291 - RNA, 20 nt, Artificial Sequence
  targeting sequence with CTCN PAM
ccuuggcuugcagauggugc

SEQ ID NO: 18292 - RNA, 20 nt, Artificial Sequence
  targeting sequence with CTCN PAM
uuggcuugcagauggugccu

SEQ ID NO: 18293 - RNA, 20 nt, Artificial Sequence
  targeting sequence with CTCN PAM
caugaucuucccucacuucc

SEQ ID NO: 18294 - RNA, 20 nt, Artificial Sequence
  targeting sequence with CTCN PAM
cuuccugcauaucugaaucc

SEQ ID NO: 18295 - RNA, 20 nt, Artificial Sequence
  targeting sequence with CTCN PAM
gcuccacuucuuuauuuuuu

SEQ ID NO: 18296 - RNA, 20 nt, Artificial Sequence
  targeting sequence with CTCN PAM
acuucuuuauuuuuuuuuuu

SEQ ID NO: 18297 - RNA, 20 nt, Artificial Sequence
  targeting sequence with CTCN PAM
aaaaaaaaaaaauaaagaag

SEQ ID NO: 18298 - RNA, 20 nt, Artificial Sequence
  targeting sequence with CTCN PAM
gucacccaggcuggagugca

SEQ ID NO: 18299 - RNA, 20 nt, Artificial Sequence
  targeting sequence with CTCN PAM
agccugggugacagagucag

SEQ ID NO: 18300 - RNA, 20 nt, Artificial Sequence
  targeting sequence with CTCN PAM
gcucacugcagccucgacuu

SEQ ID NO: 18301 - RNA, 20 nt, Artificial Sequence
  targeting sequence with CTCN PAM
cugcagccucgacuuccuag

SEQ ID NO: 18302 - RNA, 20 nt, Artificial Sequence
  targeting sequence with CTCN PAM
acuuccuaggcucaagccau

SEQ ID NO: 18303 - RNA, 20 nt, Artificial Sequence
  targeting sequence with CTCN PAM
agccauccuccaaccucagc

SEQ ID NO: 18304 - RNA, 20 nt, Artificial Sequence
  targeting sequence with CTCN PAM
aaccucagccuccugaguag

SEQ ID NO: 18305 - RNA, 20 nt, Artificial Sequence
  targeting sequence with CTCN PAM
gccuccugaguagcugggac

SEQ ID NO: 18306 - RNA, 20 nt, Artificial Sequence
  targeting sequence with CTCN PAM
ugaguagcugggaccccugg

SEQ ID NO: 18307 - RNA, 20 nt, Artificial Sequence
  targeting sequence with CTCN PAM
ggaggcugagguuggaggau

SEQ ID NO: 18308 - RNA, 20 nt, Artificial Sequence
  targeting sequence with CTCN PAM
gccaggggucccagcuacuc

SEQ ID NO: 18309 - RNA, 20 nt, Artificial Sequence
  targeting sequence with CTCN PAM
auggugccucugccaggggu

SEQ ID NO: 18310 - RNA, 20 nt, Artificial Sequence
  targeting sequence with CTCN PAM
ccgcuccagcagcacuggcc

SEQ ID NO: 18311 - RNA, 20 nt, Artificial Sequence
  targeting sequence with CTCN PAM
gcuccagcagcacuggccuc

SEQ ID NO: 18312 - RNA, 20 nt, Artificial Sequence
  targeting sequence with CTCN PAM
agcagcacuggccuccucac

SEQ ID NO: 18313 - RNA, 20 nt, Artificial Sequence
  targeting sequence with CTCN PAM
ucacugagcuugguccagga

SEQ ID NO: 18314 - RNA, 20 nt, Artificial Sequence
  targeting sequence with CTCN PAM
cugagcuugguccaggacgg

SEQ ID NO: 18315 - RNA, 20 nt, Artificial Sequence
  targeting sequence with CTCN PAM
gugaggaggccagugcugcu

SEQ ID NO: 18316 - RNA, 20 nt, Artificial Sequence
  targeting sequence with CTCN PAM
ccagggcugccgccuucuua

SEQ ID NO: 18317 - RNA, 20 nt, Artificial Sequence
  targeting sequence with CTCN PAM
gguuucugcucaaauauccc

SEQ ID NO: 18318 - RNA, 20 nt, Artificial Sequence
  targeting sequence with CTCN PAM
aauaucccccuccaaagagg

SEQ ID NO: 18319 - RNA, 20 nt, Artificial Sequence
  targeting sequence with CTCN PAM
aaagaggcccucccugacca

SEQ ID NO: 18320 - RNA, 20 nt, Artificial Sequence
  targeting sequence with CTCN PAM
uuggagggggauauuugagc

SEQ ID NO: 18321 - RNA, 20 nt, Artificial Sequence
  targeting sequence with CTCN PAM
cugaccaaagugccaaucag

SEQ ID NO: 18322 - RNA, 20 nt, Artificial Sequence
  targeting sequence with CTCN PAM
cucacuggauggaccuucac

SEQ ID NO: 18323 - RNA, 20 nt, Artificial Sequence
  targeting sequence with CTCN PAM
cacuggauggaccuucacca

SEQ ID NO: 18324 - RNA, 20 nt, Artificial Sequence
  targeting sequence with CTCN PAM
cuggauggaccuucaccagg

SEQ ID NO: 18325 - RNA, 20 nt, Artificial Sequence
  targeting sequence with CTCN PAM
agggccacagcagggcccgg

SEQ ID NO: 18326 - RNA, 20 nt, Artificial Sequence
  targeting sequence with CTCN PAM
ccuugguacugccaccccau

SEQ ID NO: 18327 - RNA, 20 nt, Artificial Sequence
  targeting sequence with CTCN PAM
caaaacacagggucacaggg

SEQ ID NO: 18328 - RNA, 20 nt, Artificial Sequence
  targeting sequence with CTCN PAM
gaggcagagcagggccucca

SEQ ID NO: 18329 - RNA, 20 nt, Artificial Sequence
  targeting sequence with CTCN PAM
gagacccugugacccugugu

SEQ ID NO: 18330 - RNA, 20 nt, Artificial Sequence
  targeting sequence with CTCN PAM
gccucugagacccugugacc

SEQ ID NO: 18331 - RNA, 20 nt, Artificial Sequence
  targeting sequence with CTCN PAM
aggggggcccguggaugugg

SEQ ID NO: 18332 - RNA, 20 nt, Artificial Sequence
  targeting sequence with CTCN PAM
ugguuggaccacccacaucc

SEQ ID NO: 18333 - RNA, 20 nt, Artificial Sequence
  targeting sequence with CTCN PAM
gcuucccacgcagcaccugu

SEQ ID NO: 18334 - RNA, 20 nt, Artificial Sequence
  targeting sequence with CTCN PAM
agaggcugcuuguuugggaa

SEQ ID NO: 18335 - RNA, 20 nt, Artificial Sequence
  targeting sequence with CTCN PAM
ggaggaaucacuggaagaca

SEQ ID NO: 18336 - RNA, 20 nt, Artificial Sequence
  targeting sequence with CTCN PAM
gccagugccucccugcucca

SEQ ID NO: 18337 - RNA, 20 nt, Artificial Sequence
  targeting sequence with CTCN PAM
cugcuccagugucugaggag

SEQ ID NO: 18338 - RNA, 20 nt, Artificial Sequence
  targeting sequence with CTCN PAM
agugucugaggaggacuuga

SEQ ID NO: 18339 - RNA, 20 nt, Artificial Sequence
  targeting sequence with CTCN PAM
gacacuggagcagggaggca

SEQ ID NO: 18340 - RNA, 20 nt, Artificial Sequence
  targeting sequence with CTCN PAM
ucagacacuggagcagggag

SEQ ID NO: 18341 - RNA, 20 nt, Artificial Sequence
  targeting sequence with CTCN PAM
aguccuccucagacacugga

SEQ ID NO: 18342 - RNA, 20 nt, Artificial Sequence
  targeting sequence with CTCN PAM
guccugggacucguggggug

SEQ ID NO: 18343 - RNA, 20 nt, Artificial Sequence
  targeting sequence with CTCN PAM
ugggguggagcauucaccug

SEQ ID NO: 18344 - RNA, 20 nt, Artificial Sequence
  targeting sequence with CTCN PAM
accccacgagucccaggacu

SEQ ID NO: 18345 - RNA, 20 nt, Artificial Sequence
  targeting sequence with CTCN PAM
ugggguagagcuggggcugg

SEQ ID NO: 18346 - RNA, 20 nt, Artificial Sequence
  targeting sequence with CTCN PAM
accccacgaguccccaggug

SEQ ID NO: 18347 - RNA, 20 nt, Artificial Sequence
  targeting sequence with CTCN PAM
aucugggagcaggaugaggg

SEQ ID NO: 18348 - RNA, 20 nt, Artificial Sequence
  targeting sequence with CTCN PAM
cagauggaggugcaggcagu

SEQ ID NO: 18349 - RNA, 20 nt, Artificial Sequence
  targeting sequence with CTCN PAM
uccugcucccagauggaggu

SEQ ID NO: 18350 - RNA, 20 nt, Artificial Sequence
  targeting sequence with CTCN PAM
cagugguuuccugcccuucc

SEQ ID NO: 18351 - RNA, 20 nt, Artificial Sequence
  targeting sequence with CTCN PAM
cacccagcgccucccagugg

SEQ ID NO: 18352 - RNA, 20 nt, Artificial Sequence
  targeting sequence with CTCN PAM
uugcucagucaacccugucu

SEQ ID NO: 18353 - RNA, 20 nt, Artificial Sequence
  targeting sequence with CTCN PAM
gucaacccugucuugagaca

SEQ ID NO: 18354 - RNA, 20 nt, Artificial Sequence
  targeting sequence with CTCN PAM
agacaggguugacugagcaa

SEQ ID NO: 18355 - RNA, 20 nt, Artificial Sequence
  targeting sequence with CTCN PAM
cacuugaaaggcugagacag

SEQ ID NO: 18356 - RNA, 20 nt, Artificial Sequence
  targeting sequence with CTCN PAM
gccuuucaagugggaguagg

SEQ ID NO: 18357 - RNA, 20 nt, Artificial Sequence
  targeting sequence with CTCN PAM
cccacacuugguggugucag

SEQ ID NO: 18358 - RNA, 20 nt, Artificial Sequence
  targeting sequence with CTCN PAM
acauccucacccacacuugg

SEQ ID NO: 18359 - RNA, 20 nt, Artificial Sequence
  targeting sequence with CTCN PAM
guaaaaccuuuugcuaguuu

SEQ ID NO: 18360 - RNA, 20 nt, Artificial Sequence
  targeting sequence with CTCN PAM
cgccuguaaucccagcacuu

SEQ ID NO: 18361 - RNA, 20 nt, Artificial Sequence
  targeting sequence with CTCN PAM
caaagugcugggauuacagg

SEQ ID NO: 18362 - RNA, 20 nt, Artificial Sequence
  targeting sequence with CTCN PAM
gccucccaaagugcugggau

SEQ ID NO: 18363 - RNA, 20 nt, Artificial Sequence
  targeting sequence with CTCN PAM
ugauccgcccgccucggccu

SEQ ID NO: 18364 - RNA, 20 nt, Artificial Sequence
  targeting sequence with CTCN PAM
ugaccucgugauccgcccgc

SEQ ID NO: 18365 - RNA, 20 nt, Artificial Sequence
  targeting sequence with CTCN PAM
aucuccugaccucgugaucc

SEQ ID NO: 18366 - RNA, 20 nt, Artificial Sequence
  targeting sequence with CTCN PAM
ggaggcugaggcaggagaau

SEQ ID NO: 18367 - RNA, 20 nt, Artificial Sequence
  targeting sequence with CTCN PAM
ugaguagcugggauuacagg

SEQ ID NO: 18368 - RNA, 20 nt, Artificial Sequence
  targeting sequence with CTCN PAM
gccuccugaguagcugggau

SEQ ID NO: 18369 - RNA, 20 nt, Artificial Sequence
  targeting sequence with CTCN PAM
ugccucagccuccugaguag

SEQ ID NO: 18370 - RNA, 20 nt, Artificial Sequence
  targeting sequence with CTCN PAM
cggguucaugccauucuccu

SEQ ID NO: 18371 - RNA, 20 nt, Artificial Sequence
  targeting sequence with CTCN PAM
gccucccggguucaugccau

SEQ ID NO: 18372 - RNA, 20 nt, Artificial Sequence
  targeting sequence with CTCN PAM
cugcaagcuccgccucccgg

SEQ ID NO: 18373 - RNA, 20 nt, Artificial Sequence
  targeting sequence with CTCN PAM
gcucacugcaagcuccgccu

SEQ ID NO: 18374 - RNA, 20 nt, Artificial Sequence
  targeting sequence with CTCN PAM
ugggacagacagagugagac

SEQ ID NO: 18375 - RNA, 20 nt, Artificial Sequence
  targeting sequence with CTCN PAM
gucugucccaggagugcagu

SEQ ID NO: 18376 - RNA, 20 nt, Artificial Sequence
  targeting sequence with CTCN PAM
cucugucugucccaggagug

SEQ ID NO: 18377 - RNA, 20 nt, Artificial Sequence
  targeting sequence with CTCN PAM
aaaaaaaaaaaaaaaaaaaa

SEQ ID NO: 18378 - RNA, 20 nt, Artificial Sequence
  targeting sequence with CTCN PAM
auugauaauuucugcaaucu

SEQ ID NO: 18379 - RNA, 20 nt, Artificial Sequence
  targeting sequence with CTCN PAM
ucaccagcccagggacacuu

SEQ ID NO: 18380 - RNA, 20 nt, Artificial Sequence
  targeting sequence with CTCN PAM
auguguuuaccucuucacca

SEQ ID NO: 18381 - RNA, 20 nt, Artificial Sequence
  targeting sequence with CTCN PAM
auacaauggaacgaaaagga

SEQ ID NO: 18382 - RNA, 20 nt, Artificial Sequence
  targeting sequence with CTCN PAM
ugauacuccgacacaaggau

SEQ ID NO: 18383 - RNA, 20 nt, Artificial Sequence
  targeting sequence with CTCN PAM
gacacaaggaugcaucucca

SEQ ID NO: 18384 - RNA, 20 nt, Artificial Sequence
  targeting sequence with CTCN PAM
aagccaggcuggaaaggcuc

SEQ ID NO: 18385 - RNA, 20 nt, Artificial Sequence
  targeting sequence with CTCN PAM
acgcugcaggaucccaugua

SEQ ID NO: 18386 - RNA, 20 nt, Artificial Sequence
  targeting sequence with CTCN PAM
ccccagccccagcccuagcc

SEQ ID NO: 18387 - RNA, 20 nt, Artificial Sequence
  targeting sequence with CTCN PAM
gaacaagacauggaacauuc

SEQ ID NO: 18388 - RNA, 20 nt, Artificial Sequence
  targeting sequence with CTCN PAM
aaugugaagucugguaaacu

SEQ ID NO: 18389 - RNA, 20 nt, Artificial Sequence
  targeting sequence with CTCN PAM
gaucucaaaugugaagucug

SEQ ID NO: 18390 - RNA, 20 nt, Artificial Sequence
  targeting sequence with CTCN PAM
ugauguaaauuauaacucaa

SEQ ID NO: 18391 - RNA, 20 nt, Artificial Sequence
  targeting sequence with CTCN PAM
augaauaaaaguuuuuaaaa

SEQ ID NO: 18392 - RNA, 20 nt, Artificial Sequence
  targeting sequence with CTCN PAM
ccagccugugccagguucuu

SEQ ID NO: 18393 - RNA, 20 nt, Artificial Sequence
  targeting sequence with CTCN PAM
guccccaggcuaagaaccug

SEQ ID NO: 18394 - RNA, 20 nt, Artificial Sequence
  targeting sequence with CTCN PAM
caccccugccggucagaaag

SEQ ID NO: 18395 - RNA, 20 nt, Artificial Sequence
  targeting sequence with CTCN PAM
cuggguugccuucgcagcac

SEQ ID NO: 18396 - RNA, 20 nt, Artificial Sequence
  targeting sequence with CTCN PAM
ggcgcccucccuggguugcc

SEQ ID NO: 18397 - RNA, 20 nt, Artificial Sequence
  targeting sequence with CTCN PAM
cccgugcucccgccccgcag

SEQ ID NO: 18398 - RNA, 20 nt, Artificial Sequence
  targeting sequence with CTCN PAM
cgugcucccgccccgcagag

SEQ ID NO: 18399 - RNA, 20 nt, Artificial Sequence
  targeting sequence with CTCN PAM
cgccccgcagagagaggccg

SEQ ID NO: 18400 - RNA, 20 nt, Artificial Sequence
  targeting sequence with CTCN PAM
gcggggcgggagcacgggag

SEQ ID NO: 18401 - RNA, 20 nt, Artificial Sequence
  targeting sequence with CTCN PAM
cugcggggcgggagcacggg

SEQ ID NO: 18402 - RNA, 20 nt, Artificial Sequence
  targeting sequence with CTCN PAM
cucugcggggcgggagcacg

SEQ ID NO: 18403 - RNA, 20 nt, Artificial Sequence
  targeting sequence with CTCN PAM
ggggccgcuuccggccucuc

SEQ ID NO: 18404 - RNA, 20 nt, Artificial Sequence
  targeting sequence with CTCN PAM
gccucguccucccgcggcca

SEQ ID NO: 18405 - RNA, 20 nt, Artificial Sequence
  targeting sequence with CTCN PAM
uccucccgcggccagaggug

SEQ ID NO: 18406 - RNA, 20 nt, Artificial Sequence
  targeting sequence with CTCN PAM
cgcggccagaggugcgaccu

SEQ ID NO: 18407 - RNA, 20 nt, Artificial Sequence
  targeting sequence with CTCN PAM
ggccgcgggaggacgaggcg

SEQ ID NO: 18408 - RNA, 20 nt, Artificial Sequence
  targeting sequence with CTCN PAM
gagccccuggccagcuccca

SEQ ID NO: 18409 - RNA, 20 nt, Artificial Sequence
  targeting sequence with CTCN PAM
gaggucgcaccucuggccgc

SEQ ID NO: 18410 - RNA, 20 nt, Artificial Sequence
  targeting sequence with CTCN PAM
cagccggccuaggggggcgg

SEQ ID NO: 18411 - RNA, 20 nt, Artificial Sequence
  targeting sequence with CTCN PAM
gccccgugcccccgcccccc

SEQ ID NO: 18412 - RNA, 20 nt, Artificial Sequence
  targeting sequence with CTCN PAM
ucccgccucgcuuggaggga

SEQ ID NO: 18413 - RNA, 20 nt, Artificial Sequence
  targeting sequence with CTCN PAM
cuuggagggagcaagggcuc

SEQ ID NO: 18414 - RNA, 20 nt, Artificial Sequence
  targeting sequence with CTCN PAM
aagcgaggcgggacgagcac

SEQ ID NO: 18415 - RNA, 20 nt, Artificial Sequence
  targeting sequence with CTCN PAM
cuccaagcgaggcgggacga

SEQ ID NO: 18416 - RNA, 20 nt, Artificial Sequence
  targeting sequence with CTCN PAM
gagcccugggcccagguccu

SEQ ID NO: 18417 - RNA, 20 nt, Artificial Sequence
  targeting sequence with CTCN PAM
gagcccuugcucccuccaag

SEQ ID NO: 18418 - RNA, 20 nt, Artificial Sequence
  targeting sequence with CTCN PAM
gcuuccccggcugcggguac

SEQ ID NO: 18419 - RNA, 20 nt, Artificial Sequence
  targeting sequence with CTCN PAM
ggaagcuggggguguacccg

SEQ ID NO: 18420 - RNA, 20 nt, Artificial Sequence
  targeting sequence with CTCN PAM
cugcuccacccagaaguugc

SEQ ID NO: 18421 - RNA, 20 nt, Artificial Sequence
  targeting sequence with CTCN PAM
acccagaaguugcggugacu

SEQ ID NO: 18422 - RNA, 20 nt, Artificial Sequence
  targeting sequence with CTCN PAM
gggggcagcaugcugcgcaa

SEQ ID NO: 18423 - RNA, 20 nt, Artificial Sequence
  targeting sequence with CTCN PAM
uucacccccuugggcccuug

SEQ ID NO: 18424 - RNA, 20 nt, Artificial Sequence
  targeting sequence with CTCN PAM
agggcccaagggggugaaug

SEQ ID NO: 18425 - RNA, 20 nt, Artificial Sequence
  targeting sequence with CTCN PAM
uuggcaucugcggcuucuaa

SEQ ID NO: 18426 - RNA, 20 nt, Artificial Sequence
  targeting sequence with CTCN PAM
cggauggucacuugggagca

SEQ ID NO: 18427 - RNA, 20 nt, Artificial Sequence
  targeting sequence with CTCN PAM
caagugaccauccgcgaggc

SEQ ID NO: 18428 - RNA, 20 nt, Artificial Sequence
  targeting sequence with CTCN PAM
gucccugguuccuuuagucc

SEQ ID NO: 18429 - RNA, 20 nt, Artificial Sequence
  targeting sequence with CTCN PAM
cgccaaauuggccgcucugg

SEQ ID NO: 18430 - RNA, 20 nt, Artificial Sequence
  targeting sequence with CTCN PAM
ccaaauuggccgcucugggc

SEQ ID NO: 18431 - RNA, 20 nt, Artificial Sequence
  targeting sequence with CTCN PAM
gggccaggcacugaggacac

SEQ ID NO: 18432 - RNA, 20 nt, Artificial Sequence
  targeting sequence with CTCN PAM
gugccuggcccagagcggcc

SEQ ID NO: 18433 - RNA, 20 nt, Artificial Sequence
  targeting sequence with CTCN PAM
gggcccuguccggaagagga

SEQ ID NO: 18434 - RNA, 20 nt, Artificial Sequence
  targeting sequence with CTCN PAM
uccggacagggcccugagga

SEQ ID NO: 18435 - RNA, 20 nt, Artificial Sequence
  targeting sequence with CTCN PAM
aguccgcggcaaugaaugaa

SEQ ID NO: 18436 - RNA, 20 nt, Artificial Sequence
  targeting sequence with CTCN PAM
aggcugcccaguccucuucc

SEQ ID NO: 18437 - RNA, 20 nt, Artificial Sequence
  targeting sequence with CTCN PAM
ccaucugugcaauugaacau

SEQ ID NO: 18438 - RNA, 20 nt, Artificial Sequence
  targeting sequence with CTCN PAM
uucgccuccccaucugugca

SEQ ID NO: 18439 - RNA, 20 nt, Artificial Sequence
  targeting sequence with CTCN PAM
cuccuucgccuccccaucug

SEQ ID NO: 18440 - RNA, 20 nt, Artificial Sequence
  targeting sequence with CTCN PAM
cucccuccuucgccucccca

SEQ ID NO: 18441 - RNA, 20 nt, Artificial Sequence
  targeting sequence with CTCN PAM
cucccucccuccuucgccuc

SEQ ID NO: 18442 - RNA, 20 nt, Artificial Sequence
  targeting sequence with CTCN PAM
cucccucccucccuccuucg

SEQ ID NO: 18443 - RNA, 20 nt, Artificial Sequence
  targeting sequence with CTCN PAM
aaugaccgcccaagcgacug

SEQ ID NO: 18444 - RNA, 20 nt, Artificial Sequence
  targeting sequence with CTCN PAM
gggaggcuaugcgccggcaa

SEQ ID NO: 18445 - RNA, 20 nt, Artificial Sequence
  targeting sequence with CTCN PAM
cagagccuccaaugaccgcc

SEQ ID NO: 18446 - RNA, 20 nt, Artificial Sequence
  targeting sequence with CTCN PAM
accccgcugcuucuugccgg

SEQ ID NO: 18447 - RNA, 20 nt, Artificial Sequence
  targeting sequence with CTCN PAM
cgcagggcugccuccacccc

SEQ ID NO: 18448 - RNA, 20 nt, Artificial Sequence
  targeting sequence with CTCN PAM
ccgacucccgcagggcugcc

SEQ ID NO: 18449 - RNA, 20 nt, Artificial Sequence
  targeting sequence with CTCN PAM
gugguuuugaggccaguggc

SEQ ID NO: 18450 - RNA, 20 nt, Artificial Sequence
  targeting sequence with CTCN PAM
aaaccaccgagcacauccac

SEQ ID NO: 18451 - RNA, 20 nt, Artificial Sequence
  targeting sequence with CTCN PAM
agccacuggccucaaaacca

SEQ ID NO: 18452 - RNA, 20 nt, Artificial Sequence
  targeting sequence with CTCN PAM
cgccccuccagccacuggcc

SEQ ID NO: 18453 - RNA, 20 nt, Artificial Sequence
  targeting sequence with CTCN PAM
cacgccccuccagccacugg

SEQ ID NO: 18454 - RNA, 20 nt, Artificial Sequence
  targeting sequence with CTCN PAM
cacucucacgccccuccagc

SEQ ID NO: 18455 - RNA, 20 nt, Artificial Sequence
  targeting sequence with CTCN PAM
agucuggucucccacucuca

SEQ ID NO: 18456 - RNA, 20 nt, Artificial Sequence
  targeting sequence with CTCN PAM
ccucaagucuggucucccac

SEQ ID NO: 18457 - RNA, 20 nt, Artificial Sequence
  targeting sequence with CTCN PAM
agccacuccccucaagucug

SEQ ID NO: 18458 - RNA, 20 nt, Artificial Sequence
  targeting sequence with CTCN PAM
acuccagccacuccccucaa

SEQ ID NO: 18459 - RNA, 20 nt, Artificial Sequence
  targeting sequence with CTCN PAM
aauccaagaaggaaacggug

SEQ ID NO: 18460 - RNA, 20 nt, Artificial Sequence
  targeting sequence with CTCN PAM
guaggcaagugguccaagcc

SEQ ID NO: 18461 - RNA, 20 nt, Artificial Sequence
  targeting sequence with CTCN PAM
gggccucagcuucccagguu

SEQ ID NO: 18462 - RNA, 20 nt, Artificial Sequence
  targeting sequence with CTCN PAM
gcuucccagguuguagaaag

SEQ ID NO: 18463 - RNA, 20 nt, Artificial Sequence
  targeting sequence with CTCN PAM
aacccugaugcuuucuacaa

SEQ ID NO: 18464 - RNA, 20 nt, Artificial Sequence
  targeting sequence with CTCN PAM
gaaauucuggcuccucucaa

SEQ ID NO: 18465 - RNA, 20 nt, Artificial Sequence
  targeting sequence with CTCN PAM
ucucaagccaagauuaguau

SEQ ID NO: 18466 - RNA, 20 nt, Artificial Sequence
  targeting sequence with CTCN PAM
caagccaagauuaguaugac

SEQ ID NO: 18467 - RNA, 20 nt, Artificial Sequence
  targeting sequence with CTCN PAM
agccaagauuaguaugacuu

SEQ ID NO: 18468 - RNA, 20 nt, Artificial Sequence
  targeting sequence with CTCN PAM
gcgaaccgcugcaggcccau

SEQ ID NO: 18469 - RNA, 20 nt, Artificial Sequence
  targeting sequence with CTCN PAM
gccucugcgaaccgcugcag

SEQ ID NO: 18470 - RNA, 20 nt, Artificial Sequence
  targeting sequence with CTCN PAM
cgacguuccugccuacgccg

SEQ ID NO: 18471 - RNA, 20 nt, Artificial Sequence
  targeting sequence with CTCN PAM
cugccuggggucugggcucc

SEQ ID NO: 18472 - RNA, 20 nt, Artificial Sequence
  targeting sequence with CTCN PAM
guguccaagaccuuaaacuc

SEQ ID NO: 18473 - RNA, 20 nt, Artificial Sequence
  targeting sequence with CTCN PAM
ucgaagcagccacaaagcgg

SEQ ID NO: 18474 - RNA, 20 nt, Artificial Sequence
  targeting sequence with CTCN PAM
aagcagccacaaagcgguga

SEQ ID NO: 18475 - RNA, 20 nt, Artificial Sequence
  targeting sequence with CTCN PAM
gucaccgcuuuguggcugcu

SEQ ID NO: 18476 - RNA, 20 nt, Artificial Sequence
  targeting sequence with CTCN PAM
cggcuuuucuguuacuuuga

SEQ ID NO: 18477 - RNA, 20 nt, Artificial Sequence
  targeting sequence with CTCN PAM
gaacuauucucacggcuuuu

SEQ ID NO: 18478 - RNA, 20 nt, Artificial Sequence
  targeting sequence with CTCN PAM
cuuauuaaugcagauucacc

SEQ ID NO: 18479 - RNA, 20 nt, Artificial Sequence
  targeting sequence with CTCN PAM
ccagcccuugcauauucaag

SEQ ID NO: 18480 - RNA, 20 nt, Artificial Sequence
  targeting sequence with CTCN PAM
gaugcuugcaaugggggcuu

SEQ ID NO: 18481 - RNA, 20 nt, Artificial Sequence
  targeting sequence with CTCN PAM
ccgaugcuugcaaugggggc

SEQ ID NO: 18482 - RNA, 20 nt, Artificial Sequence
  targeting sequence with CTCN PAM
aauguguauugcccaagaac

SEQ ID NO: 18483 - RNA, 20 nt, Artificial Sequence
  targeting sequence with CTCN PAM
aucuugaaaaccacuggggu

SEQ ID NO: 18484 - RNA, 20 nt, Artificial Sequence
  targeting sequence with CTCN PAM
aauaucaccaaaugucgcaa

SEQ ID NO: 18485 - RNA, 20 nt, Artificial Sequence
  targeting sequence with CTCN PAM
uugcgacauuuggugauauu

SEQ ID NO: 18486 - RNA, 20 nt, Artificial Sequence
  targeting sequence with CTCN PAM
uggauggggaugggaagggg

SEQ ID NO: 18487 - RNA, 20 nt, Artificial Sequence
  targeting sequence with CTCN PAM
ucuuaaauaauaauaauuaa

SEQ ID NO: 18488 - RNA, 20 nt, Artificial Sequence
  targeting sequence with CTCN PAM
cucugucgcccaggcuggag

SEQ ID NO: 18489 - RNA, 20 nt, Artificial Sequence
  targeting sequence with CTCN PAM
gucgcccaggcuggagugca

SEQ ID NO: 18490 - RNA, 20 nt, Artificial Sequence
  targeting sequence with CTCN PAM
agccugggcgacagagcgag

SEQ ID NO: 18491 - RNA, 20 nt, Artificial Sequence
  targeting sequence with CTCN PAM
gcucacugcaagcuccgccu

SEQ ID NO: 18492 - RNA, 20 nt, Artificial Sequence
  targeting sequence with CTCN PAM
cugcaagcuccgccucccgg

SEQ ID NO: 18493 - RNA, 20 nt, Artificial Sequence
  targeting sequence with CTCN PAM
gccucccggguucacgccau

SEQ ID NO: 18494 - RNA, 20 nt, Artificial Sequence
  targeting sequence with CTCN PAM
cggguucacgccauucuccu

SEQ ID NO: 18495 - RNA, 20 nt, Artificial Sequence
  targeting sequence with CTCN PAM
ugccucagccucccgaguag

SEQ ID NO: 18496 - RNA, 20 nt, Artificial Sequence
  targeting sequence with CTCN PAM
gccucccgaguagcugggac

SEQ ID NO: 18497 - RNA, 20 nt, Artificial Sequence
  targeting sequence with CTCN PAM
cgaguagcugggacuacagg

SEQ ID NO: 18498 - RNA, 20 nt, Artificial Sequence
  targeting sequence with CTCN PAM
ggaggcugaggcaggagaau

SEQ ID NO: 18499 - RNA, 20 nt, Artificial Sequence
  targeting sequence with CTCN PAM
acuaaaaauacaaaaaauua

SEQ ID NO: 18500 - RNA, 20 nt, Artificial Sequence
  targeting sequence with CTCN PAM
aucuccugaccucgugaucc

SEQ ID NO: 18501 - RNA, 20 nt, Artificial Sequence
  targeting sequence with CTCN PAM
ugaccucgugauccgcccgc

SEQ ID NO: 18502 - RNA, 20 nt, Artificial Sequence
  targeting sequence with CTCN PAM
ugauccgcccgccucggccu

SEQ ID NO: 18503 - RNA, 20 nt, Artificial Sequence
  targeting sequence with CTCN PAM
gccucccaaagugcugggau

SEQ ID NO: 18504 - RNA, 20 nt, Artificial Sequence
  targeting sequence with CTCN PAM
caaagugcugggauuacagg

SEQ ID NO: 18505 - RNA, 20 nt, Artificial Sequence
  targeting sequence with CTCN PAM
cgccuguaaucccagcacuu

SEQ ID NO: 18506 - RNA, 20 nt, Artificial Sequence
  targeting sequence with CTCN PAM
aaacaaacaaacgaaauaaa

SEQ ID NO: 18507 - RNA, 20 nt, Artificial Sequence
  targeting sequence with CTCN PAM
agccuggaugacacagcaag

SEQ ID NO: 18508 - RNA, 20 nt, Artificial Sequence
  targeting sequence with CTCN PAM
cugcagccuugaauuuuugg

SEQ ID NO: 18509 - RNA, 20 nt, Artificial Sequence
  targeting sequence with CTCN PAM
agggauccucuccccucagu

SEQ ID NO: 18510 - RNA, 20 nt, Artificial Sequence
  targeting sequence with CTCN PAM
ccccucagucugcagaguag

SEQ ID NO: 18511 - RNA, 20 nt, Artificial Sequence
  targeting sequence with CTCN PAM
ccucagucugcagaguagcu

SEQ ID NO: 18512 - RNA, 20 nt, Artificial Sequence
  targeting sequence with CTCN PAM
gucugcagaguagcugggac

SEQ ID NO: 18513 - RNA, 20 nt, Artificial Sequence
  targeting sequence with CTCN PAM
gcagacugaggggagaggau

SEQ ID NO: 18514 - RNA, 20 nt, Artificial Sequence
  targeting sequence with CTCN PAM
ccaaaaggcaccaacuccuu

SEQ ID NO: 18515 - RNA, 20 nt, Artificial Sequence
  targeting sequence with CTCN PAM
uugagaaggcagcuuugggg

SEQ ID NO: 18516 - RNA, 20 nt, Artificial Sequence
  targeting sequence with CTCN PAM
aggaguuggugccuuuuggg

SEQ ID NO: 18517 - RNA, 20 nt, Artificial Sequence
  targeting sequence with CTCN PAM
ccauccugagacagacaaaa

SEQ ID NO: 18518 - RNA, 20 nt, Artificial Sequence
  targeting sequence with CTCN PAM
ggauggggaguauguucccc

SEQ ID NO: 18519 - RNA, 20 nt, Artificial Sequence
  targeting sequence with CTCN PAM
auuaguugacaaguugguug

SEQ ID NO: 18520 - RNA, 20 nt, Artificial Sequence
  targeting sequence with CTCN PAM
acuuuugccuguguuuacau

SEQ ID NO: 18521 - RNA, 20 nt, Artificial Sequence
  targeting sequence with CTCN PAM
aguacucccuccuuucccuu

SEQ ID NO: 18522 - RNA, 20 nt, Artificial Sequence
  targeting sequence with CTCN PAM
cuccuuucccuuugcuuauu

SEQ ID NO: 18523 - RNA, 20 nt, Artificial Sequence
  targeting sequence with CTCN PAM
uuucccuuugcuuauuuaug

SEQ ID NO: 18524 - RNA, 20 nt, Artificial Sequence
  targeting sequence with CTCN PAM
gugcuuaccucuauaaaaau

SEQ ID NO: 18525 - RNA, 20 nt, Artificial Sequence
  targeting sequence with CTCN PAM
auaaaaaugagaaauuggaa

SEQ ID NO: 18526 - RNA, 20 nt, Artificial Sequence
  targeting sequence with CTCN PAM
uuuuuauagagguaagcacu

SEQ ID NO: 18527 - RNA, 20 nt, Artificial Sequence
  targeting sequence with CTCN PAM
uccaauuucucauuuuuaua

SEQ ID NO: 18528 - RNA, 20 nt, Artificial Sequence
  targeting sequence with CTCN PAM
aguagcugggacuucagaca

SEQ ID NO: 18529 - RNA, 20 nt, Artificial Sequence
  targeting sequence with CTCN PAM
ccaguagcugggacuucaga

SEQ ID NO: 18530 - RNA, 20 nt, Artificial Sequence
  targeting sequence with CTCN PAM
gccucuccaguagcugggac

SEQ ID NO: 18531 - RNA, 20 nt, Artificial Sequence
  targeting sequence with CTCN PAM
ugccucagccucuccaguag

SEQ ID NO: 18532 - RNA, 20 nt, Artificial Sequence
  targeting sequence with CTCN PAM
agugauccuccugccucagc

SEQ ID NO: 18533 - RNA, 20 nt, Artificial Sequence
  targeting sequence with CTCN PAM
cagucucaagugauccuccu

SEQ ID NO: 18534 - RNA, 20 nt, Artificial Sequence
  targeting sequence with CTCN PAM
cugcauccuugaccucccag

SEQ ID NO: 18535 - RNA, 20 nt, Artificial Sequence
  targeting sequence with CTCN PAM
uaaaaaaaauucugguaagu

SEQ ID NO: 18536 - RNA, 20 nt, Artificial Sequence
  targeting sequence with CTCN PAM
cugucacccaggcuggggug

SEQ ID NO: 18537 - RNA, 20 nt, Artificial Sequence
  targeting sequence with CTCN PAM
aaccccuggccucaaacuau

SEQ ID NO: 18538 - RNA, 20 nt, Artificial Sequence
  targeting sequence with CTCN PAM
aacuauccucccaugucaca

SEQ ID NO: 18539 - RNA, 20 nt, Artificial Sequence
  targeting sequence with CTCN PAM
ugccugaaaguaucuuauug

SEQ ID NO: 18540 - RNA, 20 nt, Artificial Sequence
  targeting sequence with CTCN PAM
aaguuugugggggcagugga

SEQ ID NO: 18541 - RNA, 20 nt, Artificial Sequence
  targeting sequence with CTCN PAM
uauucaauuccacugccccc

SEQ ID NO: 18542 - RNA, 20 nt, Artificial Sequence
  targeting sequence with CTCN PAM
uagaaacucguauucaauuc

SEQ ID NO: 18543 - RNA, 20 nt, Artificial Sequence
  targeting sequence with CTCN PAM
guggcucacgccuguaaucc

SEQ ID NO: 18544 - RNA, 20 nt, Artificial Sequence
  targeting sequence with CTCN PAM
caaagugcugggauuacagg

SEQ ID NO: 18545 - RNA, 20 nt, Artificial Sequence
  targeting sequence with CTCN PAM
gccucccaaagugcugggau

SEQ ID NO: 18546 - RNA, 20 nt, Artificial Sequence
  targeting sequence with CTCN PAM
ucagccucccaaagugcugg

SEQ ID NO: 18547 - RNA, 20 nt, Artificial Sequence
  targeting sequence with CTCN PAM
ggugauccacccuccucagc

SEQ ID NO: 18548 - RNA, 20 nt, Artificial Sequence
  targeting sequence with CTCN PAM
ugaccucaggugauccaccc

SEQ ID NO: 18549 - RNA, 20 nt, Artificial Sequence
  targeting sequence with CTCN PAM
aacuccugaccucaggugau

SEQ ID NO: 18550 - RNA, 20 nt, Artificial Sequence
  targeting sequence with CTCN PAM
acuaacaauacaaaaaauua

SEQ ID NO: 18551 - RNA, 20 nt, Artificial Sequence
  targeting sequence with CTCN PAM
cgcccguaagcacuuuggga

SEQ ID NO: 18552 - RNA, 20 nt, Artificial Sequence
  targeting sequence with CTCN PAM
caaagugcuuacgggcguga

SEQ ID NO: 18553 - RNA, 20 nt, Artificial Sequence
  targeting sequence with CTCN PAM
ucccaaagugcuuacgggcg

SEQ ID NO: 18554 - RNA, 20 nt, Artificial Sequence
  targeting sequence with CTCN PAM
ugccuuggcuuacuccuccc

SEQ ID NO: 18555 - RNA, 20 nt, Artificial Sequence
  targeting sequence with CTCN PAM
aaugauccuccugccuuggc

SEQ ID NO: 18556 - RNA, 20 nt, Artificial Sequence
  targeting sequence with CTCN PAM
accaacaaagaagaaauuag

SEQ ID NO: 18557 - RNA, 20 nt, Artificial Sequence
  targeting sequence with CTCN PAM
agccugggagauagagugag

SEQ ID NO: 18558 - RNA, 20 nt, Artificial Sequence
  targeting sequence with CTCN PAM
caggcuggagugcaacggca

SEQ ID NO: 18559 - RNA, 20 nt, Artificial Sequence
  targeting sequence with CTCN PAM
aucucccaggcuggagugca

SEQ ID NO: 18560 - RNA, 20 nt, Artificial Sequence
  targeting sequence with CTCN PAM
cucuaucucccaggcuggag

SEQ ID NO: 18561 - RNA, 20 nt, Artificial Sequence
  targeting sequence with CTCN PAM
aaaaugaauaaauaaauaag

SEQ ID NO: 18562 - RNA, 20 nt, Artificial Sequence
  targeting sequence with CTCN PAM
agcagacuccaguuccucua

SEQ ID NO: 18563 - RNA, 20 nt, Artificial Sequence
  targeting sequence with CTCN PAM
aguuccucuagguaccuguu

SEQ ID NO: 18564 - RNA, 20 nt, Artificial Sequence
  targeting sequence with CTCN PAM
agguaccuguucuauuuuuu

SEQ ID NO: 18565 - RNA, 20 nt, Artificial Sequence
  targeting sequence with CTCN PAM
aagaaaaaaaaaauagaaca

SEQ ID NO: 18566 - RNA, 20 nt, Artificial Sequence
  targeting sequence with CTCN PAM
ugcaucaggagaggacaggg

SEQ ID NO: 18567 - RNA, 20 nt, Artificial Sequence
  targeting sequence with CTCN PAM
ugaugcaugagauuauuuua

SEQ ID NO: 18568 - RNA, 20 nt, Artificial Sequence
  targeting sequence with CTCN PAM
ccugaugcaugagauuauuu

SEQ ID NO: 18569 - RNA, 20 nt, Artificial Sequence
  targeting sequence with CTCN PAM
auggucuguggcuggggagg

SEQ ID NO: 18570 - RNA, 20 nt, Artificial Sequence
  targeting sequence with CTCN PAM
ccagccacagaccauagagg

SEQ ID NO: 18571 - RNA, 20 nt, Artificial Sequence
  targeting sequence with CTCN PAM
gcucagggcuggagggcucu

SEQ ID NO: 18572 - RNA, 20 nt, Artificial Sequence
  targeting sequence with CTCN PAM
gggcuggagggcucuguggg

SEQ ID NO: 18573 - RNA, 20 nt, Artificial Sequence
  targeting sequence with CTCN PAM
agcccugagcggagcccacc

SEQ ID NO: 18574 - RNA, 20 nt, Artificial Sequence
  targeting sequence with CTCN PAM
gugggcuaugggggcagagg

SEQ ID NO: 18575 - RNA, 20 nt, Artificial Sequence
  targeting sequence with CTCN PAM
gcccccauagcccacagagc

SEQ ID NO: 18576 - RNA, 20 nt, Artificial Sequence
  targeting sequence with CTCN PAM
aggccccugcugaacagccc

SEQ ID NO: 18577 - RNA, 20 nt, Artificial Sequence
  targeting sequence with CTCN PAM
agcacagacaccgcucacgg

SEQ ID NO: 18578 - RNA, 20 nt, Artificial Sequence
  targeting sequence with CTCN PAM
cggcccugccgagagaggcu

SEQ ID NO: 18579 - RNA, 20 nt, Artificial Sequence
  targeting sequence with CTCN PAM
gcagggccgugagcgguguc

SEQ ID NO: 18580 - RNA, 20 nt, Artificial Sequence
  targeting sequence with CTCN PAM
cggcagggccgugagcggug

SEQ ID NO: 18581 - RNA, 20 nt, Artificial Sequence
  targeting sequence with CTCN PAM
ccaggcagccugggccuccu

SEQ ID NO: 18582 - RNA, 20 nt, Artificial Sequence
  targeting sequence with CTCN PAM
gcagggccuugggcuuugac

SEQ ID NO: 18583 - RNA, 20 nt, Artificial Sequence
  targeting sequence with CTCN PAM
uuccccuggucaaagcccaa

SEQ ID NO: 18584 - RNA, 20 nt, Artificial Sequence
  targeting sequence with CTCN PAM
ugagcucugcauucaacugc

SEQ ID NO: 18585 - RNA, 20 nt, Artificial Sequence
  targeting sequence with CTCN PAM
ggagccaugguuggggccaa

SEQ ID NO: 18586 - RNA, 20 nt, Artificial Sequence
  targeting sequence with CTCN PAM
gcauucaacugcugccccac

SEQ ID NO: 18587 - RNA, 20 nt, Artificial Sequence
  targeting sequence with CTCN PAM
ggggcugggcuucccuccuc

SEQ ID NO: 18588 - RNA, 20 nt, Artificial Sequence
  targeting sequence with CTCN PAM
ccauggagcgggugcgaagu

SEQ ID NO: 18589 - RNA, 20 nt, Artificial Sequence
  targeting sequence with CTCN PAM
auggugagcugugcugugug

SEQ ID NO: 18590 - RNA, 20 nt, Artificial Sequence
  targeting sequence with CTCN PAM
uuaaugcagcuaaaaaauug

SEQ ID NO: 18591 - RNA, 20 nt, Artificial Sequence
  targeting sequence with CTCN PAM
ggcaauccacuucacuucug

SEQ ID NO: 18592 - RNA, 20 nt, Artificial Sequence
  targeting sequence with CTCN PAM
agaauaccugcucugcccac

SEQ ID NO: 18593 - RNA, 20 nt, Artificial Sequence
  targeting sequence with CTCN PAM
gcccacuucggguaugccuc

SEQ ID NO: 18594 - RNA, 20 nt, Artificial Sequence
  targeting sequence with CTCN PAM
acucuggccucugugucugg

SEQ ID NO: 18595 - RNA, 20 nt, Artificial Sequence
  targeting sequence with CTCN PAM
ggccucugugucugggcuuu

SEQ ID NO: 18596 - RNA, 20 nt, Artificial Sequence
  targeting sequence with CTCN PAM
gugucugggcuuugccugcc

SEQ ID NO: 18597 - RNA, 20 nt, Artificial Sequence
  targeting sequence with CTCN PAM
cuugugacuucaugcucagg

SEQ ID NO: 18598 - RNA, 20 nt, Artificial Sequence
  targeting sequence with CTCN PAM
ggucuauccagacugugcuc

SEQ ID NO: 18599 - RNA, 20 nt, Artificial Sequence
  targeting sequence with CTCN PAM
agggauggacacgugaucua

SEQ ID NO: 18600 - RNA, 20 nt, Artificial Sequence
  targeting sequence with CTCN PAM
ggcucaagggauggacacgu

SEQ ID NO: 18601 - RNA, 20 nt, Artificial Sequence
  targeting sequence with CTCN PAM
aucucuugaccucgugaucc

SEQ ID NO: 18602 - RNA, 20 nt, Artificial Sequence
  targeting sequence with CTCN PAM
ugaccucgugauccgccugc

SEQ ID NO: 18603 - RNA, 20 nt, Artificial Sequence
  targeting sequence with CTCN PAM
ugauccgccugccucggccu

SEQ ID NO: 18604 - RNA, 20 nt, Artificial Sequence
  targeting sequence with CTCN PAM
gccucccaaagugcugggau

SEQ ID NO: 18605 - RNA, 20 nt, Artificial Sequence
  targeting sequence with CTCN PAM
caaagugcugggauuacagg

SEQ ID NO: 18606 - RNA, 20 nt, Artificial Sequence
  targeting sequence with CTCN PAM
cgccuguaaucccagcacuu

SEQ ID NO: 18607 - RNA, 20 nt, Artificial Sequence
  targeting sequence with CTCN PAM
gaguugccuacacccuuuuu

SEQ ID NO: 18608 - RNA, 20 nt, Artificial Sequence
  targeting sequence with CTCN PAM
gaguucaguucuuuuaaaaa

SEQ ID NO: 18609 - RNA, 20 nt, Artificial Sequence
  targeting sequence with CTCN PAM
ucacaguuuuuugauaagug

SEQ ID NO: 18610 - RNA, 20 nt, Artificial Sequence
  targeting sequence with CTCN PAM
acuuacaggaucaauaggca

SEQ ID NO: 18611 - RNA, 20 nt, Artificial Sequence
  targeting sequence with CTCN PAM
aacacccaacugauugggau

SEQ ID NO: 18612 - RNA, 20 nt, Artificial Sequence
  targeting sequence with CTCN PAM
aagggcuguaauuaaacaga

SEQ ID NO: 18613 - RNA, 20 nt, Artificial Sequence
  targeting sequence with CTCN PAM
uguagucacaagguaaaccu

SEQ ID NO: 18614 - RNA, 20 nt, Artificial Sequence
  targeting sequence with CTCN PAM
cacauucuuucaggcacccu

SEQ ID NO: 18615 - RNA, 20 nt, Artificial Sequence
  targeting sequence with CTCN PAM
uuauccauugcuugaacugc

SEQ ID NO: 18616 - RNA, 20 nt, Artificial Sequence
  targeting sequence with CTCN PAM
ccuaggccguuuucaccucu

SEQ ID NO: 18617 - RNA, 20 nt, Artificial Sequence
  targeting sequence with CTCN PAM
gugguuuugcuaauaccucc

SEQ ID NO: 18618 - RNA, 20 nt, Artificial Sequence
  targeting sequence with CTCN PAM
aauagaaaugcccccucacc

SEQ ID NO: 18619 - RNA, 20 nt, Artificial Sequence
  targeting sequence with CTCN PAM
ccuauuucugcucaucauaa

SEQ ID NO: 18620 - RNA, 20 nt, Artificial Sequence
  targeting sequence with CTCN PAM
ucauaaagccaccaucuuuc

SEQ ID NO: 18621 - RNA, 20 nt, Artificial Sequence
  targeting sequence with CTCN PAM
uccguugagccuuucccuau

SEQ ID NO: 18622 - RNA, 20 nt, Artificial Sequence
  targeting sequence with CTCN PAM
guugagccuuucccuauugc

SEQ ID NO: 18623 - RNA, 20 nt, Artificial Sequence
  targeting sequence with CTCN PAM
acggaggaggccaugguauc

SEQ ID NO: 18624 - RNA, 20 nt, Artificial Sequence
  targeting sequence with CTCN PAM
guuagaauugcuuccuccuc

SEQ ID NO: 18625 - RNA, 20 nt, Artificial Sequence
  targeting sequence with CTCN PAM
ucuuugcucccacacgucuu

SEQ ID NO: 18626 - RNA, 20 nt, Artificial Sequence
  targeting sequence with CTCN PAM
uugcucccacacgucuucug

SEQ ID NO: 18627 - RNA, 20 nt, Artificial Sequence
  targeting sequence with CTCN PAM
cacacgucuucugccucuuu

SEQ ID NO: 18628 - RNA, 20 nt, Artificial Sequence
  targeting sequence with CTCN PAM
uuaccacauguauuucauuc

SEQ ID NO: 18629 - RNA, 20 nt, Artificial Sequence
  targeting sequence with CTCN PAM
auacaagacugggcugugga

SEQ ID NO: 18630 - RNA, 20 nt, Artificial Sequence
  targeting sequence with CTCN PAM
uaagugcugcuggcuaaaua

SEQ ID NO: 18631 - RNA, 20 nt, Artificial Sequence
  targeting sequence with CTCN PAM
uauuuagccagcagcacuua

SEQ ID NO: 18632 - RNA, 20 nt, Artificial Sequence
  targeting sequence with CTCN PAM
gcacgugcuccuccuucuca

SEQ ID NO: 18633 - RNA, 20 nt, Artificial Sequence
  targeting sequence with CTCN PAM
uccuucucagcccgcagggc

SEQ ID NO: 18634 - RNA, 20 nt, Artificial Sequence
  targeting sequence with CTCN PAM
uucucagcccgcagggcuuc

SEQ ID NO: 18635 - RNA, 20 nt, Artificial Sequence
  targeting sequence with CTCN PAM
gcccgcagggcuucuggcag

SEQ ID NO: 18636 - RNA, 20 nt, Artificial Sequence
  targeting sequence with CTCN PAM
agggguggcccaaacuuggu

SEQ ID NO: 18637 - RNA, 20 nt, Artificial Sequence
  targeting sequence with CTCN PAM
agaccaaguuugggccaccc

SEQ ID NO: 18638 - RNA, 20 nt, Artificial Sequence
  targeting sequence with CTCN PAM
aaggcaaucuggaggcaaaa

SEQ ID NO: 18639 - RNA, 20 nt, Artificial Sequence
  targeting sequence with CTCN PAM
agauugccuuagagggggcu

SEQ ID NO: 18640 - RNA, 20 nt, Artificial Sequence
  targeting sequence with CTCN PAM
cuggaccuauuuuuaaguuu

SEQ ID NO: 18641 - RNA, 20 nt, Artificial Sequence
  targeting sequence with CTCN PAM
uugaagaaaauguauuugug

SEQ ID NO: 18642 - RNA, 20 nt, Artificial Sequence
  targeting sequence with CTCN PAM
cucucccuucccaaaauaac

SEQ ID NO: 18643 - RNA, 20 nt, Artificial Sequence
  targeting sequence with CTCN PAM
cccuucccaaaauaacggga

SEQ ID NO: 18644 - RNA, 20 nt, Artificial Sequence
  targeting sequence with CTCN PAM
cuucccaaaauaacgggaaa

SEQ ID NO: 18645 - RNA, 20 nt, Artificial Sequence
  targeting sequence with CTCN PAM
acauaaaugggagacaauau

SEQ ID NO: 18646 - RNA, 20 nt, Artificial Sequence
  targeting sequence with CTCN PAM
cauuuauguugagaauaugu

SEQ ID NO: 18647 - RNA, 20 nt, Artificial Sequence
  targeting sequence with CTCN PAM
uguauaaucagugcauuaag

SEQ ID NO: 18648 - RNA, 20 nt, Artificial Sequence
  targeting sequence with CTCN PAM
aaaaaaaaaaaagaaaagaa

SEQ ID NO: 18649 - RNA, 20 nt, Artificial Sequence
  targeting sequence with CTCN PAM
gucucaaaaaaaaaaaaaga

SEQ ID NO: 18650 - RNA, 20 nt, Artificial Sequence
  targeting sequence with CTCN PAM
cucugucgcccuggcugcug

SEQ ID NO: 18651 - RNA, 20 nt, Artificial Sequence
  targeting sequence with CTCN PAM
gucgcccuggcugcuggagu

SEQ ID NO: 18652 - RNA, 20 nt, Artificial Sequence
  targeting sequence with CTCN PAM
agcagccagggcgacagagc

SEQ ID NO: 18653 - RNA, 20 nt, Artificial Sequence
  targeting sequence with CTCN PAM
gcucacugcaagcuccgcuu

SEQ ID NO: 18654 - RNA, 20 nt, Artificial Sequence
  targeting sequence with CTCN PAM
cugcaagcuccgcuuccugg

SEQ ID NO: 18655 - RNA, 20 nt, Artificial Sequence
  targeting sequence with CTCN PAM
gcuuccuggguucacgccau

SEQ ID NO: 18656 - RNA, 20 nt, Artificial Sequence
  targeting sequence with CTCN PAM
ugccucagccucccgaguag

SEQ ID NO: 18657 - RNA, 20 nt, Artificial Sequence
  targeting sequence with CTCN PAM
gccucccgaguagcugggac

SEQ ID NO: 18658 - RNA, 20 nt, Artificial Sequence
  targeting sequence with CTCN PAM
cgaguagcugggacuacagg

SEQ ID NO: 18659 - RNA, 20 nt, Artificial Sequence
  targeting sequence with CTCN PAM
ggaggcugaggcaggagaau

SEQ ID NO: 18660 - RNA, 20 nt, Artificial Sequence
  targeting sequence with CTCN PAM
ucauuggaacucucucagaa

SEQ ID NO: 18661 - RNA, 20 nt, Artificial Sequence
  targeting sequence with CTCN PAM
uuggaacucucucagaacuc

SEQ ID NO: 18662 - RNA, 20 nt, Artificial Sequence
  targeting sequence with CTCN PAM
cucagaacucagcauuuuca

SEQ ID NO: 18663 - RNA, 20 nt, Artificial Sequence
  targeting sequence with CTCN PAM
cagaacucagcauuuucauc

SEQ ID NO: 18664 - RNA, 20 nt, Artificial Sequence
  targeting sequence with CTCN PAM
gaacucagcauuuucaucug

SEQ ID NO: 18665 - RNA, 20 nt, Artificial Sequence
  targeting sequence with CTCN PAM
gcauuuucaucugacuguac

SEQ ID NO: 18666 - RNA, 20 nt, Artificial Sequence
  targeting sequence with CTCN PAM
aaggaacaugaaaucagaaa

SEQ ID NO: 18667 - RNA, 20 nt, Artificial Sequence
  targeting sequence with CTCN PAM
uuauuuggacauggcuagug

SEQ ID NO: 18668 - RNA, 20 nt, Artificial Sequence
  targeting sequence with CTCN PAM
cuagccauguccaaauaaug

SEQ ID NO: 18669 - RNA, 20 nt, Artificial Sequence
  targeting sequence with CTCN PAM
cucccaauauuugucuuggc

SEQ ID NO: 18670 - RNA, 20 nt, Artificial Sequence
  targeting sequence with CTCN PAM
caauauuugucuuggcauca

SEQ ID NO: 18671 - RNA, 20 nt, Artificial Sequence
  targeting sequence with CTCN PAM
auucagaacaggggagagag

SEQ ID NO: 18672 - RNA, 20 nt, Artificial Sequence
  targeting sequence with CTCN PAM
ccuguucugaauggaguaaa

SEQ ID NO: 18673 - RNA, 20 nt, Artificial Sequence
  targeting sequence with CTCN PAM
ccccuguucugaauggagua

SEQ ID NO: 18674 - RNA, 20 nt, Artificial Sequence
  targeting sequence with CTCN PAM
cuccccuguucugaauggag

SEQ ID NO: 18675 - RNA, 20 nt, Artificial Sequence
  targeting sequence with CTCN PAM
uuaagaagcaaaaguagguu

SEQ ID NO: 18676 - RNA, 20 nt, Artificial Sequence
  targeting sequence with CTCN PAM
acuggcuccuuaagaagcaa

SEQ ID NO: 18677 - RNA, 20 nt, Artificial Sequence
  targeting sequence with CTCN PAM
guauguccuaguaaggaagg

SEQ ID NO: 18678 - RNA, 20 nt, Artificial Sequence
  targeting sequence with CTCN PAM
aauuuccauuccuugguaua

SEQ ID NO: 18679 - RNA, 20 nt, Artificial Sequence
  targeting sequence with CTCN PAM
cccaggcuagaggcauggac

SEQ ID NO: 18680 - RNA, 20 nt, Artificial Sequence
  targeting sequence with CTCN PAM
agccugggugagugaagcug

SEQ ID NO: 18681 - RNA, 20 nt, Artificial Sequence
  targeting sequence with CTCN PAM
aaaaaaaaaagaaaagaaaa

SEQ ID NO: 18682 - RNA, 20 nt, Artificial Sequence
  targeting sequence with CTCN PAM
ucuaaaaaaaaaagaaaaga

SEQ ID NO: 18683 - RNA, 20 nt, Artificial Sequence
  targeting sequence with CTCN PAM
uuugaaugcuccucuaaaaa

SEQ ID NO: 18684 - RNA, 20 nt, Artificial Sequence
  targeting sequence with CTCN PAM
aauggcuuaacaguuguucu

SEQ ID NO: 18685 - RNA, 20 nt, Artificial Sequence
  targeting sequence with CTCN PAM
cucuaauggcuuaacaguug

SEQ ID NO: 18686 - RNA, 20 nt, Artificial Sequence
  targeting sequence with CTCN PAM
ucuauaaccucgcucuaaug

SEQ ID NO: 18687 - RNA, 20 nt, Artificial Sequence
  targeting sequence with CTCN PAM
gacaagacaaaagaacccaa

SEQ ID NO: 18688 - RNA, 20 nt, Artificial Sequence
  targeting sequence with CTCN PAM
aaaguaacaggaugggcagc

SEQ ID NO: 18689 - RNA, 20 nt, Artificial Sequence
  targeting sequence with CTCN PAM
aacugucuuaggaaggaccu

SEQ ID NO: 18690 - RNA, 20 nt, Artificial Sequence
  targeting sequence with CTCN PAM
agccaaauagucccaugcug

SEQ ID NO: 18691 - RNA, 20 nt, Artificial Sequence
  targeting sequence with CTCN PAM
aagguucuagcuuagaaaaa

SEQ ID NO: 18692 - RNA, 20 nt, Artificial Sequence
  targeting sequence with CTCN PAM
cuacucugagcaauuacgcu

SEQ ID NO: 18693 - RNA, 20 nt, Artificial Sequence
  targeting sequence with CTCN PAM
acucugagcaauuacgcuaa

SEQ ID NO: 18694 - RNA, 20 nt, Artificial Sequence
  targeting sequence with CTCN PAM
gagcaauuacgcuaaagcag

SEQ ID NO: 18695 - RNA, 20 nt, Artificial Sequence
  targeting sequence with CTCN PAM
gaguagagagcccccacaaa

SEQ ID NO: 18696 - RNA, 20 nt, Artificial Sequence
  targeting sequence with CTCN PAM
uaacuuucugcuuuagcgua

SEQ ID NO: 18697 - RNA, 20 nt, Artificial Sequence
  targeting sequence with CTCN PAM
ugccuaaaaagucacugcaa

SEQ ID NO: 18698 - RNA, 20 nt, Artificial Sequence
  targeting sequence with CTCN PAM
gggugcaguuuugagggggc

SEQ ID NO: 18699 - RNA, 20 nt, Artificial Sequence
  targeting sequence with CTCN PAM
aaacugcacccagagcaggg

SEQ ID NO: 18700 - RNA, 20 nt, Artificial Sequence
  targeting sequence with CTCN PAM
guugcccccucaaaacugca

SEQ ID NO: 18701 - RNA, 20 nt, Artificial Sequence
  targeting sequence with CTCN PAM
gcugauuguaguacaccugc

SEQ ID NO: 18702 - RNA, 20 nt, Artificial Sequence
  targeting sequence with CTCN PAM
agucuucaccccaaccucag

SEQ ID NO: 18703 - RNA, 20 nt, Artificial Sequence
  targeting sequence with CTCN PAM
gguacuccagucuucacccc

SEQ ID NO: 18704 - RNA, 20 nt, Artificial Sequence
  targeting sequence with CTCN PAM
gagaaauccagcuugccaaa

SEQ ID NO: 18705 - RNA, 20 nt, Artificial Sequence
  targeting sequence with CTCN PAM
gagccagcauguuguuucca

SEQ ID NO: 18706 - RNA, 20 nt, Artificial Sequence
  targeting sequence with CTCN PAM
uuuugcuuuggcaagcugga

SEQ ID NO: 18707 - RNA, 20 nt, Artificial Sequence
  targeting sequence with CTCN PAM
uuucagggcaucuuauaugc

SEQ ID NO: 18708 - RNA, 20 nt, Artificial Sequence
  targeting sequence with CTCN PAM
uucugugcaaccaagugcau

SEQ ID NO: 18709 - RNA, 20 nt, Artificial Sequence
  targeting sequence with CTCN PAM
uagccucauucugugcaacc

SEQ ID NO: 18710 - RNA, 20 nt, Artificial Sequence
  targeting sequence with CTCN PAM
cuagauaaacucuaaauguu

SEQ ID NO: 18711 - RNA, 20 nt, Artificial Sequence
  targeting sequence with CTCN PAM
agauaaacucuaaauguuca

SEQ ID NO: 18712 - RNA, 20 nt, Artificial Sequence
  targeting sequence with CTCN PAM
aaauguucaaguuccaccag

SEQ ID NO: 18713 - RNA, 20 nt, Artificial Sequence
  targeting sequence with CTCN PAM
guucauuuuucaaaaccauc

SEQ ID NO: 18714 - RNA, 20 nt, Artificial Sequence
  targeting sequence with CTCN PAM
guggacuucuauagaugguu

SEQ ID NO: 18715 - RNA, 20 nt, Artificial Sequence
  targeting sequence with CTCN PAM
uuaggagaaucaccuuuggu

SEQ ID NO: 18716 - RNA, 20 nt, Artificial Sequence
  targeting sequence with CTCN PAM
uaaagagcagugaaggaaau

SEQ ID NO: 18717 - RNA, 20 nt, Artificial Sequence
  targeting sequence with CTCN PAM
uaggcagacagaauaaagcu

SEQ ID NO: 18718 - RNA, 20 nt, Artificial Sequence
  targeting sequence with CTCN PAM
acaucaucacuuugguugua

SEQ ID NO: 18719 - RNA, 20 nt, Artificial Sequence
  targeting sequence with CTCN PAM
uauagucucaacuuuuccua

SEQ ID NO: 18720 - RNA, 20 nt, Artificial Sequence
  targeting sequence with CTCN PAM
acuuuuccuaaagacaaccc

SEQ ID NO: 18721 - RNA, 20 nt, Artificial Sequence
  targeting sequence with CTCN PAM
ugcucuccuugcacaacccu

SEQ ID NO: 18722 - RNA, 20 nt, Artificial Sequence
  targeting sequence with CTCN PAM
ccuugcacaacccuuuccuc

SEQ ID NO: 18723 - RNA, 20 nt, Artificial Sequence
  targeting sequence with CTCN PAM
uugcacaacccuuuccucuu

SEQ ID NO: 18724 - RNA, 20 nt, Artificial Sequence
  targeting sequence with CTCN PAM
ucaacuaagccaaacccaua

SEQ ID NO: 18725 - RNA, 20 nt, Artificial Sequence
  targeting sequence with CTCN PAM
ggcugcugcugcugcuuuuu

SEQ ID NO: 18726 - RNA, 20 nt, Artificial Sequence
  targeting sequence with CTCN PAM
cucuggcugcugcugcugcu

SEQ ID NO: 18727 - RNA, 20 nt, Artificial Sequence
  targeting sequence with CTCN PAM
aaacaaaggcggcagagggc

SEQ ID NO: 18728 - RNA, 20 nt, Artificial Sequence
  targeting sequence with CTCN PAM
gccgccuuuguuuugagaug

SEQ ID NO: 18729 - RNA, 20 nt, Artificial Sequence
  targeting sequence with CTCN PAM
aacuguuucaagacaagagg

SEQ ID NO: 18730 - RNA, 20 nt, Artificial Sequence
  targeting sequence with CTCN PAM
ugucuugaaacaguuugagu

SEQ ID NO: 18731 - RNA, 20 nt, Artificial Sequence
  targeting sequence with CTCN PAM
cucuugucuugaaacaguuu

SEQ ID NO: 18732 - RNA, 20 nt, Artificial Sequence
  targeting sequence with CTCN PAM
caacccuguccaaaaaaacc

SEQ ID NO: 18733 - RNA, 20 nt, Artificial Sequence
  targeting sequence with CTCN PAM
gugcuuccuuaugguuucua

SEQ ID NO: 18734 - RNA, 20 nt, Artificial Sequence
  targeting sequence with CTCN PAM
cagugcuuccuuaugguuuc

SEQ ID NO: 18735 - RNA, 20 nt, Artificial Sequence
  targeting sequence with CTCN PAM
aacucucagugcuuccuuau

SEQ ID NO: 18736 - RNA, 20 nt, Artificial Sequence
  targeting sequence with CTCN PAM
aaauacuuaauuuuaagcaa

SEQ ID NO: 18737 - RNA, 20 nt, Artificial Sequence
  targeting sequence with CTCN PAM
ucaagguuaaggggcagguu

SEQ ID NO: 18738 - RNA, 20 nt, Artificial Sequence
  targeting sequence with CTCN PAM
cccaaguuggccacuuacgc

SEQ ID NO: 18739 - RNA, 20 nt, Artificial Sequence
  targeting sequence with CTCN PAM
ggcuuucucacccaaguugg

SEQ ID NO: 18740 - RNA, 20 nt, Artificial Sequence
  targeting sequence with CTCN PAM
cuggcuuucucacccaaguu

SEQ ID NO: 18741 - RNA, 20 nt, Artificial Sequence
  targeting sequence with CTCN PAM
cuaucccagacuaacuuuac

SEQ ID NO: 18742 - RNA, 20 nt, Artificial Sequence
  targeting sequence with CTCN PAM
cccuaucccagacuaacuuu

SEQ ID NO: 18743 - RNA, 20 nt, Artificial Sequence
  targeting sequence with CTCN PAM
ucaccucucccuaucccaga

SEQ ID NO: 18744 - RNA, 20 nt, Artificial Sequence
  targeting sequence with CTCN PAM
ucagguuuucgcaucuuuuu

SEQ ID NO: 18745 - RNA, 20 nt, Artificial Sequence
  targeting sequence with CTCN PAM
agauuguugguucauauuaa

SEQ ID NO: 18746 - RNA, 20 nt, Artificial Sequence
  targeting sequence with CTCN PAM
ugaagaaaaaaacauuauuc

SEQ ID NO: 18747 - RNA, 20 nt, Artificial Sequence
  targeting sequence with CTCN PAM
acucuuuuuuuguuguagaa

SEQ ID NO: 18748 - RNA, 20 nt, Artificial Sequence
  targeting sequence with CTCN PAM
uuuuuuguuguagaaaacuu

SEQ ID NO: 18749 - RNA, 20 nt, Artificial Sequence
  targeting sequence with CTCN PAM
gaaguuuucuacaacaaaaa

SEQ ID NO: 18750 - RNA, 20 nt, Artificial Sequence
  targeting sequence with CTCN PAM
cugcugcaugcacucgccag

SEQ ID NO: 18751 - RNA, 20 nt, Artificial Sequence
  targeting sequence with CTCN PAM
gcugcaugcacucgccagag

SEQ ID NO: 18752 - RNA, 20 nt, Artificial Sequence
  targeting sequence with CTCN PAM
ccagaggguagggaacaaug

SEQ ID NO: 18753 - RNA, 20 nt, Artificial Sequence
  targeting sequence with CTCN PAM
ggcgagugcaugcagcagag

SEQ ID NO: 18754 - RNA, 20 nt, Artificial Sequence
  targeting sequence with CTCN PAM
ucagcuauguggaacgguuc

SEQ ID NO: 18755 - RNA, 20 nt, Artificial Sequence
  targeting sequence with CTCN PAM
ggaagcacugggacgcccuc

SEQ ID NO: 18756 - RNA, 20 nt, Artificial Sequence
  targeting sequence with CTCN PAM
caacaggacguucagcacuu

SEQ ID NO: 18757 - RNA, 20 nt, Artificial Sequence
  targeting sequence with CTCN PAM
ugaagacucgcaacaggacg

SEQ ID NO: 18758 - RNA, 20 nt, Artificial Sequence
  targeting sequence with CTCN PAM
acuguagccaacuguguggu

SEQ ID NO: 18759 - RNA, 20 nt, Artificial Sequence
  targeting sequence with CTCN PAM
uggcugucauggcaguccuu

SEQ ID NO: 18760 - RNA, 20 nt, Artificial Sequence
  targeting sequence with CTCN PAM
ucaacauccuccuggcuguc

SEQ ID NO: 18761 - RNA, 20 nt, Artificial Sequence
  targeting sequence with CTCN PAM
agcccuucuagcugcaccac

SEQ ID NO: 18762 - RNA, 20 nt, Artificial Sequence
  targeting sequence with CTCN PAM
aucuuggagaugcgcgucug

SEQ ID NO: 18763 - RNA, 20 nt, Artificial Sequence
  targeting sequence with CTCN PAM
aagauggagcugcagcagca

SEQ ID NO: 18764 - RNA, 20 nt, Artificial Sequence
  targeting sequence with CTCN PAM
agggccuccugugggccaga

SEQ ID NO: 18765 - RNA, 20 nt, Artificial Sequence
  targeting sequence with CTCN PAM
ugugggccagaacagggaag

SEQ ID NO: 18766 - RNA, 20 nt, Artificial Sequence
  targeting sequence with CTCN PAM
ucccuguucuggcccacagg

SEQ ID NO: 18767 - RNA, 20 nt, Artificial Sequence
  targeting sequence with CTCN PAM
caaguauucugagaugcuga

SEQ ID NO: 18768 - RNA, 20 nt, Artificial Sequence
  targeting sequence with CTCN PAM
gaauacuugugagcagaagg

SEQ ID NO: 18769 - RNA, 20 nt, Artificial Sequence
  targeting sequence with CTCN PAM
agaugcaucuggcuugccca

SEQ ID NO: 18770 - RNA, 20 nt, Artificial Sequence
  targeting sequence with CTCN PAM
agcauauuuauaaaaucauu

SEQ ID NO: 18771 - RNA, 20 nt, Artificial Sequence
  targeting sequence with CTCN PAM
cuauucaagugauuauuauu

SEQ ID NO: 18772 - RNA, 20 nt, Artificial Sequence
  targeting sequence with CTCN PAM
acugcauuccagugggauga

SEQ ID NO: 18773 - RNA, 20 nt, Artificial Sequence
  targeting sequence with CTCN PAM
ucccacuggaaugcagugga

SEQ ID NO: 18774 - RNA, 20 nt, Artificial Sequence
  targeting sequence with CTCN PAM
uuuuucauugaaaauuaauc

SEQ ID NO: 18775 - RNA, 20 nt, Artificial Sequence
  targeting sequence with CTCN PAM
cuugacauuuccuucaauuc

SEQ ID NO: 18776 - RNA, 20 nt, Artificial Sequence
  targeting sequence with CTCN PAM
ugacauuuccuucaauucca

SEQ ID NO: 18777 - RNA, 20 nt, Artificial Sequence
  targeting sequence with CTCN PAM
gggacagggauuggaauuga

SEQ ID NO: 18778 - RNA, 20 nt, Artificial Sequence
  targeting sequence with CTCN PAM
cucuuggccaaaguggaccc

SEQ ID NO: 18779 - RNA, 20 nt, Artificial Sequence
  targeting sequence with CTCN PAM
uggccaaaguggaccccaaa

SEQ ID NO: 18780 - RNA, 20 nt, Artificial Sequence
  targeting sequence with CTCN PAM
cuuuuucagguuucuuuggg

SEQ ID NO: 18781 - RNA, 20 nt, Artificial Sequence
  targeting sequence with CTCN PAM
uucccaucauugccaagaac

SEQ ID NO: 18782 - RNA, 20 nt, Artificial Sequence
  targeting sequence with CTCN PAM
cuuuuugaguuguggcacaa

SEQ ID NO: 18783 - RNA, 20 nt, Artificial Sequence
  targeting sequence with CTCN PAM
aaaagggaggggauauaaua

SEQ ID NO: 18784 - RNA, 20 nt, Artificial Sequence
  targeting sequence with CTCN PAM
auuuucacauuaaugcuggu

SEQ ID NO: 18785 - RNA, 20 nt, Artificial Sequence
  targeting sequence with CTCN PAM
uuguggcaguaagacaucaa

SEQ ID NO: 18786 - RNA, 20 nt, Artificial Sequence
  targeting sequence with CTCN PAM
cccuauaaaccauaaaaucu

SEQ ID NO: 18787 - RNA, 20 nt, Artificial Sequence
  targeting sequence with CTCN PAM
ucaguuuuuaaaaaaauuaa

SEQ ID NO: 18788 - RNA, 20 nt, Artificial Sequence
  targeting sequence with CTCN PAM
gguauagcaucacaugacag

SEQ ID NO: 18789 - RNA, 20 nt, Artificial Sequence
  targeting sequence with CTCN PAM
guuaacuuaggcauuuuugu

SEQ ID NO: 18790 - RNA, 20 nt, Artificial Sequence
  targeting sequence with CTCN PAM
uucaaccgacugccagcuaa

SEQ ID NO: 18791 - RNA, 20 nt, Artificial Sequence
  targeting sequence with CTCN PAM
aaguaggggcuaacaaguca

SEQ ID NO: 18792 - RNA, 20 nt, Artificial Sequence
  targeting sequence with CTCN PAM
cugaaauguauaaagccaaa

SEQ ID NO: 18793 - RNA, 20 nt, Artificial Sequence
  targeting sequence with CTCN PAM
ggaccucuucagacuguguu

SEQ ID NO: 18794 - RNA, 20 nt, Artificial Sequence
  targeting sequence with CTCN PAM
ucagacuguguuccccaggc

SEQ ID NO: 18795 - RNA, 20 nt, Artificial Sequence
  targeting sequence with CTCN PAM
gaauaaaccucuuuaaaaua

SEQ ID NO: 18796 - RNA, 20 nt, Artificial Sequence
  targeting sequence with CTCN PAM
uuaaaauauuuuacaggguu

SEQ ID NO: 18797 - RNA, 20 nt, Artificial Sequence
  targeting sequence with CTCN PAM
ccaugucaauacacagaauc

SEQ ID NO: 18798 - RNA, 20 nt, Artificial Sequence
  targeting sequence with CTCN PAM
augucaauacacagaaucua

SEQ ID NO: 18799 - RNA, 20 nt, Artificial Sequence
  targeting sequence with CTCN PAM
uuuuuuuuuaacugcugccu

SEQ ID NO: 18800 - RNA, 20 nt, Artificial Sequence
  targeting sequence with CTCN PAM
gaucugccuucuuaagaagg

SEQ ID NO: 18801 - RNA, 20 nt, Artificial Sequence
  targeting sequence with CTCN PAM
ccuuuaguuugauccucugu

SEQ ID NO: 18802 - RNA, 20 nt, Artificial Sequence
  targeting sequence with CTCN PAM
uuuaguuugauccucuguaa

SEQ ID NO: 18803 - RNA, 20 nt, Artificial Sequence
  targeting sequence with CTCN PAM
guaaagaggacacuaugccc

SEQ ID NO: 18804 - RNA, 20 nt, Artificial Sequence
  targeting sequence with CTCN PAM
uuacagaggaucaaacuaaa

SEQ ID NO: 18805 - RNA, 20 nt, Artificial Sequence
  targeting sequence with CTCN PAM
aaaaaauagcaagaauagac

SEQ ID NO: 18806 - RNA, 20 nt, Artificial Sequence
  targeting sequence with CTCN PAM
gucucaaaaaaauagcaaga

SEQ ID NO: 18807 - RNA, 20 nt, Artificial Sequence
  targeting sequence with CTCN PAM
cucugucacccaggcuagag

SEQ ID NO: 18808 - RNA, 20 nt, Artificial Sequence
  targeting sequence with CTCN PAM
gucacccaggcuagagugca

SEQ ID NO: 18809 - RNA, 20 nt, Artificial Sequence
  targeting sequence with CTCN PAM
agccugggugacagagcgag

SEQ ID NO: 18810 - RNA, 20 nt, Artificial Sequence
  targeting sequence with CTCN PAM
gcucacugccagcuccaccu

SEQ ID NO: 18811 - RNA, 20 nt, Artificial Sequence
  targeting sequence with CTCN PAM
cugccagcuccaccucccag

SEQ ID NO: 18812 - RNA, 20 nt, Artificial Sequence
  targeting sequence with CTCN PAM
accucccagguucaggccau

SEQ ID NO: 18813 - RNA, 20 nt, Artificial Sequence
  targeting sequence with CTCN PAM
cagguucaggccauucuucu

SEQ ID NO: 18814 - RNA, 20 nt, Artificial Sequence
  targeting sequence with CTCN PAM
gccuccugaguagcugggac

SEQ ID NO: 18815 - RNA, 20 nt, Artificial Sequence
  targeting sequence with CTCN PAM
ugaguagcugggacuacagg

SEQ ID NO: 18816 - RNA, 20 nt, Artificial Sequence
  targeting sequence with CTCN PAM
ggaggcugaggcagaagaau

SEQ ID NO: 18817 - RNA, 20 nt, Artificial Sequence
  targeting sequence with CTCN PAM
acuaaaaauacaaaaauuag

SEQ ID NO: 18818 - RNA, 20 nt, Artificial Sequence
  targeting sequence with CTCN PAM
ugaccuugugauccgcccgc

SEQ ID NO: 18819 - RNA, 20 nt, Artificial Sequence
  targeting sequence with CTCN PAM
gccucccaaaaucccaaauc

SEQ ID NO: 18820 - RNA, 20 nt, Artificial Sequence
  targeting sequence with CTCN PAM
caaaaucccaaauccccugg

SEQ ID NO: 18821 - RNA, 20 nt, Artificial Sequence
  targeting sequence with CTCN PAM
auuacuaaaaaaacuugaaa

SEQ ID NO: 18822 - RNA, 20 nt, Artificial Sequence
  targeting sequence with CTCN PAM
uuaauguauuagcacuuuau

SEQ ID NO: 18823 - RNA, 20 nt, Artificial Sequence
  targeting sequence with CTCN PAM
ccccaacccccccaaaaaaa

SEQ ID NO: 18824 - RNA, 20 nt, Artificial Sequence
  targeting sequence with CTCN PAM
ucaaggucauagccuucacu

SEQ ID NO: 18825 - RNA, 20 nt, Artificial Sequence
  targeting sequence with CTCN PAM
aggucauagccuucacucau

SEQ ID NO: 18826 - RNA, 20 nt, Artificial Sequence
  targeting sequence with CTCN PAM
ugaguuuaaauuaauuccaa

SEQ ID NO: 18827 - RNA, 20 nt, Artificial Sequence
  targeting sequence with CTCN PAM
ugagugaaggcuaugaccuu

SEQ ID NO: 18828 - RNA, 20 nt, Artificial Sequence
  targeting sequence with CTCN PAM
aaaguuggucugagccuuga

SEQ ID NO: 18829 - RNA, 20 nt, Artificial Sequence
  targeting sequence with CTCN PAM
gaccaacuuuggaggauauc

SEQ ID NO: 18830 - RNA, 20 nt, Artificial Sequence
  targeting sequence with CTCN PAM
aggcucagaccaacuuugga

SEQ ID NO: 18831 - RNA, 20 nt, Artificial Sequence
  targeting sequence with CTCN PAM
aaucccaggaaaccaggacc

SEQ ID NO: 18832 - RNA, 20 nt, Artificial Sequence
  targeting sequence with CTCN PAM
gagacuagugucuuucaaaa

SEQ ID NO: 18833 - RNA, 20 nt, Artificial Sequence
  targeting sequence with CTCN PAM
gagaagggaagugggccaga

SEQ ID NO: 18834 - RNA, 20 nt, Artificial Sequence
  targeting sequence with CTCN PAM
auauagaaauaagaaaaaau

SEQ ID NO: 18835 - RNA, 20 nt, Artificial Sequence
  targeting sequence with CTCN PAM
cagaauaaaauagaugggcu

SEQ ID NO: 18836 - RNA, 20 nt, Artificial Sequence
  targeting sequence with CTCN PAM
cggguuauucuugcaaacug

SEQ ID NO: 18837 - RNA, 20 nt, Artificial Sequence
  targeting sequence with CTCN PAM
uauaggcacauugccugaca

SEQ ID NO: 18838 - RNA, 20 nt, Artificial Sequence
  targeting sequence with CTCN PAM
uucugugggaaagggggcuu

SEQ ID NO: 18839 - RNA, 20 nt, Artificial Sequence
  targeting sequence with CTCN PAM
gacaaguauuugggccauuu

SEQ ID NO: 18840 - RNA, 20 nt, Artificial Sequence
  targeting sequence with CTCN PAM
guguauggaaaaccacauga

SEQ ID NO: 18841 - RNA, 20 nt, Artificial Sequence
  targeting sequence with CTCN PAM
aaaguuuauaccauuuuggg

SEQ ID NO: 18842 - RNA, 20 nt, Artificial Sequence
  targeting sequence with CTCN PAM
aucauuuuaagaguagguau

SEQ ID NO: 18843 - RNA, 20 nt, Artificial Sequence
  targeting sequence with CTCN PAM
uaaaaugauugagaugcauu

SEQ ID NO: 18844 - RNA, 20 nt, Artificial Sequence
  targeting sequence with CTCN PAM
uacacaguugguauaagcuu

SEQ ID NO: 18845 - RNA, 20 nt, Artificial Sequence
  targeting sequence with CTCN PAM
accuucucaucuuuuuuccu

SEQ ID NO: 18846 - RNA, 20 nt, Artificial Sequence
  targeting sequence with CTCN PAM
ucuuuuuuccuuccgcuguu

SEQ ID NO: 18847 - RNA, 20 nt, Artificial Sequence
  targeting sequence with CTCN PAM
accagaaugaaaucuugaac

SEQ ID NO: 18848 - RNA, 20 nt, Artificial Sequence
  targeting sequence with CTCN PAM
guuaggucauuuagcuguuc

SEQ ID NO: 18849 - RNA, 20 nt, Artificial Sequence
  targeting sequence with CTCN PAM
uuagaugugaacgauuggaa

SEQ ID NO: 18850 - RNA, 20 nt, Artificial Sequence
  targeting sequence with CTCN PAM
caaaacacauucuacaaagg

SEQ ID NO: 18851 - RNA, 20 nt, Artificial Sequence
  targeting sequence with CTCN PAM
auuucuuugugcuucuauuc

SEQ ID NO: 18852 - RNA, 20 nt, Artificial Sequence
  targeting sequence with CTCN PAM
uagucucuggaaaagauagc

SEQ ID NO: 18853 - RNA, 20 nt, Artificial Sequence
  targeting sequence with CTCN PAM
ggaaaagauagcuugucuca

SEQ ID NO: 18854 - RNA, 20 nt, Artificial Sequence
  targeting sequence with CTCN PAM
aggccaaaucacguggcaac

SEQ ID NO: 18855 - RNA, 20 nt, Artificial Sequence
  targeting sequence with CTCN PAM
aagcuaaucagggcugcugg

SEQ ID NO: 18856 - RNA, 20 nt, Artificial Sequence
  targeting sequence with CTCN PAM
ucugaacaacauaugggaga

SEQ ID NO: 18857 - RNA, 20 nt, Artificial Sequence
  targeting sequence with CTCN PAM
gaacaacauaugggagaggc

SEQ ID NO: 18858 - RNA, 20 nt, Artificial Sequence
  targeting sequence with CTCN PAM
cauauguuguucagaggagc

SEQ ID NO: 18859 - RNA, 20 nt, Artificial Sequence
  targeting sequence with CTCN PAM
cccauauguuguucagagga

SEQ ID NO: 18860 - RNA, 20 nt, Artificial Sequence
  targeting sequence with CTCN PAM
ugaaaagauaacacaccaau

SEQ ID NO: 18861 - RNA, 20 nt, Artificial Sequence
  targeting sequence with CTCN PAM
cucacccggauguuugcgau

SEQ ID NO: 18862 - RNA, 20 nt, Artificial Sequence
  targeting sequence with CTCN PAM
cccggauguuugcgauucag

SEQ ID NO: 18863 - RNA, 20 nt, Artificial Sequence
  targeting sequence with CTCN PAM
gaaucgcaaacauccgggug

SEQ ID NO: 18864 - RNA, 20 nt, Artificial Sequence
  targeting sequence with CTCN PAM
ggcauucuagggcucugaau

SEQ ID NO: 18865 - RNA, 20 nt, Artificial Sequence
  targeting sequence with CTCN PAM
ggcucuggcauucuagggcu

SEQ ID NO: 18866 - RNA, 20 nt, Artificial Sequence
  targeting sequence with CTCN PAM
guaaauauuuguugacagaa

SEQ ID NO: 18867 - RNA, 20 nt, Artificial Sequence
  targeting sequence with CTCN PAM
caguaaauauuuguugacag

SEQ ID NO: 18868 - RNA, 20 nt, Artificial Sequence
  targeting sequence with CTCN PAM
gucuugcuuaccacaauauu

SEQ ID NO: 18869 - RNA, 20 nt, Artificial Sequence
  targeting sequence with CTCN PAM
ggaguuuguacucuaaggag

SEQ ID NO: 18870 - RNA, 20 nt, Artificial Sequence
  targeting sequence with CTCN PAM
ugagggcaggcacucugucu

SEQ ID NO: 18871 - RNA, 20 nt, Artificial Sequence
  targeting sequence with CTCN PAM
aaggagugggggaggcaaga

SEQ ID NO: 18872 - RNA, 20 nt, Artificial Sequence
  targeting sequence with CTCN PAM
uuagaguacaaacuccugag

SEQ ID NO: 18873 - RNA, 20 nt, Artificial Sequence
  targeting sequence with CTCN PAM
cccacuccuuagaguacaaa

SEQ ID NO: 18874 - RNA, 20 nt, Artificial Sequence
  targeting sequence with CTCN PAM
auaugggaaaucaucuugcc

SEQ ID NO: 18875 - RNA, 20 nt, Artificial Sequence
  targeting sequence with CTCN PAM
acugaucuucuuuguuuuac

SEQ ID NO: 18876 - RNA, 20 nt, Artificial Sequence
  targeting sequence with CTCN PAM
gucuuauaccucuacugauc

SEQ ID NO: 18877 - RNA, 20 nt, Artificial Sequence
  targeting sequence with CTCN PAM
caaagugcugggauuacagg

SEQ ID NO: 18878 - RNA, 20 nt, Artificial Sequence
  targeting sequence with CTCN PAM
cgccuguaaucccagcacuu

SEQ ID NO: 18879 - RNA, 20 nt, Artificial Sequence
  targeting sequence with CTCN PAM
uccuuuaaaccuuuucuagg

SEQ ID NO: 18880 - RNA, 20 nt, Artificial Sequence
  targeting sequence with CTCN PAM
gaucucauccuuuaaaccuu

SEQ ID NO: 18881 - RNA, 20 nt, Artificial Sequence
  targeting sequence with CTCN PAM
cauucauuuuuccaccuaga

SEQ ID NO: 18882 - RNA, 20 nt, Artificial Sequence
  targeting sequence with CTCN PAM
agcccuuuacucacauucau

SEQ ID NO: 18883 - RNA, 20 nt, Artificial Sequence
  targeting sequence with CTCN PAM
ccagcccuuuacucacauuc

SEQ ID NO: 18884 - RNA, 20 nt, Artificial Sequence
  targeting sequence with CTCN PAM
aacauagaugcacuauucua

SEQ ID NO: 18885 - RNA, 20 nt, Artificial Sequence
  targeting sequence with CTCN PAM
ucggaucuuccagauuuccc

SEQ ID NO: 18886 - RNA, 20 nt, Artificial Sequence
  targeting sequence with CTCN PAM
uuuaauaucaauucuagaau

SEQ ID NO: 18887 - RNA, 20 nt, Artificial Sequence
  targeting sequence with CTCN PAM
guagucuucuuugggcucau

SEQ ID NO: 18888 - RNA, 20 nt, Artificial Sequence
  targeting sequence with CTCN PAM
gcucaguagucuucuuuggg

SEQ ID NO: 18889 - RNA, 20 nt, Artificial Sequence
  targeting sequence with CTCN PAM
ucugcucaguagucuucuuu

SEQ ID NO: 18890 - RNA, 20 nt, Artificial Sequence
  targeting sequence with CTCN PAM
uuuuccuaaaaacacauauu

SEQ ID NO: 18891 - RNA, 20 nt, Artificial Sequence
  targeting sequence with CTCN PAM
uaguggugaagaagaccgac

SEQ ID NO: 18892 - RNA, 20 nt, Artificial Sequence
  targeting sequence with CTCN PAM
gucggucuucuucaccacua

SEQ ID NO: 18893 - RNA, 20 nt, Artificial Sequence
  targeting sequence with CTCN PAM
acauacaaccuaccucaguc

SEQ ID NO: 18894 - RNA, 20 nt, Artificial Sequence
  targeting sequence with CTCN PAM
uuaguuccugggacuccaca

SEQ ID NO: 18895 - RNA, 20 nt, Artificial Sequence
  targeting sequence with CTCN PAM
uaucuacuuagcucuuuagu

SEQ ID NO: 18896 - RNA, 20 nt, Artificial Sequence
  targeting sequence with CTCN PAM
acauuuaaaaaacacuagaa

SEQ ID NO: 18897 - RNA, 20 nt, Artificial Sequence
  targeting sequence with CTCN PAM
cugucaggcagagggcagau

SEQ ID NO: 18898 - RNA, 20 nt, Artificial Sequence
  targeting sequence with CTCN PAM
gucaggcagagggcagaugg

SEQ ID NO: 18899 - RNA, 20 nt, Artificial Sequence
  targeting sequence with CTCN PAM
gccugacagagagguuucca

SEQ ID NO: 18900 - RNA, 20 nt, Artificial Sequence
  targeting sequence with CTCN PAM
caucccaacagggaauguac

SEQ ID NO: 18901 - RNA, 20 nt, Artificial Sequence
  targeting sequence with CTCN PAM
ucccaacagggaauguacua

SEQ ID NO: 18902 - RNA, 20 nt, Artificial Sequence
  targeting sequence with CTCN PAM
gguagcauacauuuaacauu

SEQ ID NO: 18903 - RNA, 20 nt, Artificial Sequence
  targeting sequence with CTCN PAM
caugcugguguuaauguuaa

SEQ ID NO: 18904 - RNA, 20 nt, Artificial Sequence
  targeting sequence with CTCN PAM
agggacuucauacuaaaaga

SEQ ID NO: 18905 - RNA, 20 nt, Artificial Sequence
  targeting sequence with CTCN PAM
cacaucuaaaacuaucuccu

SEQ ID NO: 18906 - RNA, 20 nt, Artificial Sequence
  targeting sequence with CTCN PAM
uuucuuucuucuuuuuaauc

SEQ ID NO: 18907 - RNA, 20 nt, Artificial Sequence
  targeting sequence with CTCN PAM
cuuccaauaauuaugcaaua

SEQ ID NO: 18908 - RNA, 20 nt, Artificial Sequence
  targeting sequence with CTCN PAM
acugcuuuucuaagaaacaa

SEQ ID NO: 18909 - RNA, 20 nt, Artificial Sequence
  targeting sequence with CTCN PAM
auuuaguucuucuuuauccu

SEQ ID NO: 18910 - RNA, 20 nt, Artificial Sequence
  targeting sequence with CTCN PAM
uaucaaggauaaagaagaac

SEQ ID NO: 18911 - RNA, 20 nt, Artificial Sequence
  targeting sequence with CTCN PAM
auacugccuucuuuuaugcu

SEQ ID NO: 18912 - RNA, 20 nt, Artificial Sequence
  targeting sequence with CTCN PAM
uccuguuauugaagugacug

SEQ ID NO: 18913 - RNA, 20 nt, Artificial Sequence
  targeting sequence with CTCN PAM
uuagccuguucagucacuuc

SEQ ID NO: 18914 - RNA, 20 nt, Artificial Sequence
  targeting sequence with CTCN PAM
gugacucugccuuuuccuuu

SEQ ID NO: 18915 - RNA, 20 nt, Artificial Sequence
  targeting sequence with CTCN PAM
gccuuuuccuuucaucugcu

SEQ ID NO: 18916 - RNA, 20 nt, Artificial Sequence
  targeting sequence with CTCN PAM
gggcagcagaugaaaggaaa

SEQ ID NO: 18917 - RNA, 20 nt, Artificial Sequence
  targeting sequence with CTCN PAM
ucugugguguuuucgguguu

SEQ ID NO: 18918 - RNA, 20 nt, Artificial Sequence
  targeting sequence with CTCN PAM
cucuuuaccagagaggggcc

SEQ ID NO: 18919 - RNA, 20 nt, Artificial Sequence
  targeting sequence with CTCN PAM
cuuuaccagagaggggccag

SEQ ID NO: 18920 - RNA, 20 nt, Artificial Sequence
  targeting sequence with CTCN PAM
uuaccagagaggggccagag

SEQ ID NO: 18921 - RNA, 20 nt, Artificial Sequence
  targeting sequence with CTCN PAM
gguaaagagagagaaugaug

SEQ ID NO: 18922 - RNA, 20 nt, Artificial Sequence
  targeting sequence with CTCN PAM
cugguaaagagagagaauga

SEQ ID NO: 18923 - RNA, 20 nt, Artificial Sequence
  targeting sequence with CTCN PAM
ggccccucucugguaaagag

SEQ ID NO: 18924 - RNA, 20 nt, Artificial Sequence
  targeting sequence with CTCN PAM
ugggauuuaagggaaagguu

SEQ ID NO: 18925 - RNA, 20 nt, Artificial Sequence
  targeting sequence with CTCN PAM
ccucaacuaaggacuguugg

SEQ ID NO: 18926 - RNA, 20 nt, Artificial Sequence
  targeting sequence with CTCN PAM
ucaacuaaggacuguugggu

SEQ ID NO: 18927 - RNA, 20 nt, Artificial Sequence
  targeting sequence with CTCN PAM
acuaaggacuguuggguggc

SEQ ID NO: 18928 - RNA, 20 nt, Artificial Sequence
  targeting sequence with CTCN PAM
cugccacccaacaguccuua

SEQ ID NO: 18929 - RNA, 20 nt, Artificial Sequence
  targeting sequence with CTCN PAM
ccucccugccacccaacagu

SEQ ID NO: 18930 - RNA, 20 nt, Artificial Sequence
  targeting sequence with CTCN PAM
gcaugugucccacaggcuac

SEQ ID NO: 18931 - RNA, 20 nt, Artificial Sequence
  targeting sequence with CTCN PAM
uagccuacaaauuucaggcu

SEQ ID NO: 18932 - RNA, 20 nt, Artificial Sequence
  targeting sequence with CTCN PAM
uacauaccaguagaacagau

SEQ ID NO: 18933 - RNA, 20 nt, Artificial Sequence
  targeting sequence with CTCN PAM
ugggguuguugaaaugaauu

SEQ ID NO: 18934 - RNA, 20 nt, Artificial Sequence
  targeting sequence with CTCN PAM
ucuauaaaaugcagauaaua

SEQ ID NO: 18935 - RNA, 20 nt, Artificial Sequence
  targeting sequence with CTCN PAM
gagaaguucuaaagugaauu

SEQ ID NO: 18936 - RNA, 20 nt, Artificial Sequence
  targeting sequence with CTCN PAM
gagcuucuguuuccucaucu

SEQ ID NO: 18937 - RNA, 20 nt, Artificial Sequence
  targeting sequence with CTCN PAM
acaaacccagaucaacuaac

SEQ ID NO: 18938 - RNA, 20 nt, Artificial Sequence
  targeting sequence with CTCN PAM
ccucauaaguaagaaaucag

SEQ ID NO: 18939 - RNA, 20 nt, Artificial Sequence
  targeting sequence with CTCN PAM
ucauaaguaagaaaucagag

SEQ ID NO: 18940 - RNA, 20 nt, Artificial Sequence
  targeting sequence with CTCN PAM
uaaguaagaaaucagaguca

SEQ ID NO: 18941 - RNA, 20 nt, Artificial Sequence
  targeting sequence with CTCN PAM
gauuucuuacuuaugaggag

SEQ ID NO: 18942 - RNA, 20 nt, Artificial Sequence
  targeting sequence with CTCN PAM
gacucugauuucuuacuuau

SEQ ID NO: 18943 - RNA, 20 nt, Artificial Sequence
  targeting sequence with CTCN PAM
cuuuugcuaagugauuugga

SEQ ID NO: 18944 - RNA, 20 nt, Artificial Sequence
  targeting sequence with CTCN PAM
uuccagcucacuuuugcuaa

SEQ ID NO: 18945 - RNA, 20 nt, Artificial Sequence
  targeting sequence with CTCN PAM
aaaccaucacaucaguguag

SEQ ID NO: 18946 - RNA, 20 nt, Artificial Sequence
  targeting sequence with CTCN PAM
acuuugacaucagacuccaa

SEQ ID NO: 18947 - RNA, 20 nt, Artificial Sequence
  targeting sequence with CTCN PAM
caucaacuccacuuugacau

SEQ ID NO: 18948 - RNA, 20 nt, Artificial Sequence
  targeting sequence with CTCN PAM
uucucccaucaacuccacuu

SEQ ID NO: 18949 - RNA, 20 nt, Artificial Sequence
  targeting sequence with CTCN PAM
uccuucucccaucaacucca

SEQ ID NO: 18950 - RNA, 20 nt, Artificial Sequence
  targeting sequence with CTCN PAM
uaucuuuuuaauuguagguu

SEQ ID NO: 18951 - RNA, 20 nt, Artificial Sequence
  targeting sequence with CTCN PAM
ccaacucuuaucuuuuuaau

SEQ ID NO: 18952 - RNA, 20 nt, Artificial Sequence
  targeting sequence with CTCN PAM
augcccucaccaacucuuau

SEQ ID NO: 18953 - RNA, 20 nt, Artificial Sequence
  targeting sequence with CTCN PAM
uauacugcuguugggaaugg

SEQ ID NO: 18954 - RNA, 20 nt, Artificial Sequence
  targeting sequence with CTCN PAM
gcaaaacaguuuggcaccuc

SEQ ID NO: 18955 - RNA, 20 nt, Artificial Sequence
  targeting sequence with CTCN PAM
ucaaaaaguuaacaguuacc

SEQ ID NO: 18956 - RNA, 20 nt, Artificial Sequence
  targeting sequence with CTCN PAM
aaaaguuaacaguuaccuua

SEQ ID NO: 18957 - RNA, 20 nt, Artificial Sequence
  targeting sequence with CTCN PAM
gcaauucuaccccagauaua

SEQ ID NO: 18958 - RNA, 20 nt, Artificial Sequence
  targeting sequence with CTCN PAM
uauacauauggguuguuuau

SEQ ID NO: 18959 - RNA, 20 nt, Artificial Sequence
  targeting sequence with CTCN PAM
uucaaucgauggaugcucac

SEQ ID NO: 18960 - RNA, 20 nt, Artificial Sequence
  targeting sequence with CTCN PAM
cagaaacauuagaacauaaa

SEQ ID NO: 18961 - RNA, 20 nt, Artificial Sequence
  targeting sequence with CTCN PAM
ggaucuucauaugcauacau

SEQ ID NO: 18962 - RNA, 20 nt, Artificial Sequence
  targeting sequence with CTCN PAM
cacaacauggacuuccuucc

SEQ ID NO: 18963 - RNA, 20 nt, Artificial Sequence
  targeting sequence with CTCN PAM
ugugaacuguuucugcagua

SEQ ID NO: 18964 - RNA, 20 nt, Artificial Sequence
  targeting sequence with CTCN PAM
ucuucucaccugaccuuuca

SEQ ID NO: 18965 - RNA, 20 nt, Artificial Sequence
  targeting sequence with CTCN PAM
ccugaccuuucauaauauac

SEQ ID NO: 18966 - RNA, 20 nt, Artificial Sequence
  targeting sequence with CTCN PAM
uugacuuacgaugggguuac

SEQ ID NO: 18967 - RNA, 20 nt, Artificial Sequence
  targeting sequence with CTCN PAM
agcaagaauaauucccagga

SEQ ID NO: 18968 - RNA, 20 nt, Artificial Sequence
  targeting sequence with CTCN PAM
ggccccaguccugggaauua

SEQ ID NO: 18969 - RNA, 20 nt, Artificial Sequence
  targeting sequence with CTCN PAM
agcagcagccugugggcucu

SEQ ID NO: 18970 - RNA, 20 nt, Artificial Sequence
  targeting sequence with CTCN PAM
gacucggcuuugaccuuacc

SEQ ID NO: 18971 - RNA, 20 nt, Artificial Sequence
  targeting sequence with CTCN PAM
gcuuugaccuuaccugccug

SEQ ID NO: 18972 - RNA, 20 nt, Artificial Sequence
  targeting sequence with CTCN PAM
uguuauuuguaaagauaagc

SEQ ID NO: 18973 - RNA, 20 nt, Artificial Sequence
  targeting sequence with CTCN PAM
uucuugccucauguuauuug

SEQ ID NO: 18974 - RNA, 20 nt, Artificial Sequence
  targeting sequence with CTCN PAM
ugauaccugaauucagcagu

SEQ ID NO: 18975 - RNA, 20 nt, Artificial Sequence
  targeting sequence with CTCN PAM
uguaaugaggggguagcuug

SEQ ID NO: 18976 - RNA, 20 nt, Artificial Sequence
  targeting sequence with CTCN PAM
uuacaugagcucuugauacc

SEQ ID NO: 18977 - RNA, 20 nt, Artificial Sequence
  targeting sequence with CTCN PAM
acagaacuaaggaguaaguc

SEQ ID NO: 18978 - RNA, 20 nt, Artificial Sequence
  targeting sequence with CTCN PAM
uuaguucuguggaguuacaa

SEQ ID NO: 18979 - RNA, 20 nt, Artificial Sequence
  targeting sequence with CTCN PAM
uuuucuaagauaguuuuuuu

SEQ ID NO: 18980 - RNA, 20 nt, Artificial Sequence
  targeting sequence with CTCN PAM
gguagcagggucucauuuuc

SEQ ID NO: 18981 - RNA, 20 nt, Artificial Sequence
  targeting sequence with CTCN PAM
uugaauaucucugguagcag

SEQ ID NO: 18982 - RNA, 20 nt, Artificial Sequence
  targeting sequence with CTCN PAM
ccuugaauaucucugguagc

SEQ ID NO: 18983 - RNA, 20 nt, Artificial Sequence
  targeting sequence with CTCN PAM
auugaaagagauuuaacuag

SEQ ID NO: 18984 - RNA, 20 nt, Artificial Sequence
  targeting sequence with CTCN PAM
uucaauagaggauuuauuuc

SEQ ID NO: 18985 - RNA, 20 nt, Artificial Sequence
  targeting sequence with CTCN PAM
gagaucuuuucuaacaccua

SEQ ID NO: 18986 - RNA, 20 nt, Artificial Sequence
  targeting sequence with CTCN PAM
gaggucuaguuaaaucucuu

SEQ ID NO: 18987 - RNA, 20 nt, Artificial Sequence
  targeting sequence with CTCN PAM
agguguuagaaaagaucuca

SEQ ID NO: 18988 - RNA, 20 nt, Artificial Sequence
  targeting sequence with CTCN PAM
uuaaaaaaaaaaaaaaaaaa

SEQ ID NO: 18989 - RNA, 20 nt, Artificial Sequence
  targeting sequence with CTCN PAM
gucacccaggguggagugca

SEQ ID NO: 18990 - RNA, 20 nt, Artificial Sequence
  targeting sequence with CTCN PAM
acccugggugacagagcaag

SEQ ID NO: 18991 - RNA, 20 nt, Artificial Sequence
  targeting sequence with CTCN PAM
cugcagccucaaauuccaga

SEQ ID NO: 18992 - RNA, 20 nt, Artificial Sequence
  targeting sequence with CTCN PAM
aauuccagagcucaagggau

SEQ ID NO: 18993 - RNA, 20 nt, Artificial Sequence
  targeting sequence with CTCN PAM
ggaauuugaggcugcaguga

SEQ ID NO: 18994 - RNA, 20 nt, Artificial Sequence
  targeting sequence with CTCN PAM
agggauccucccaccucagc

SEQ ID NO: 18995 - RNA, 20 nt, Artificial Sequence
  targeting sequence with CTCN PAM
caccucagccuucugaguag

SEQ ID NO: 18996 - RNA, 20 nt, Artificial Sequence
  targeting sequence with CTCN PAM
gccuucugaguagcugggac

SEQ ID NO: 18997 - RNA, 20 nt, Artificial Sequence
  targeting sequence with CTCN PAM
gaaggcugaggugggaggau

SEQ ID NO: 18998 - RNA, 20 nt, Artificial Sequence
  targeting sequence with CTCN PAM
gaaaaaaaaaaauagccagg

SEQ ID NO: 18999 - RNA, 20 nt, Artificial Sequence
  targeting sequence with CTCN PAM
cuauguugcccaggcugguc

SEQ ID NO: 19000 - RNA, 20 nt, Artificial Sequence
  targeting sequence with CTCN PAM
ugagcucaagcaauccuccu

SEQ ID NO: 19001 - RNA, 20 nt, Artificial Sequence
  targeting sequence with CTCN PAM
ggaguucaagaccagccugg

SEQ ID NO: 19002 - RNA, 20 nt, Artificial Sequence
  targeting sequence with CTCN PAM
agcaauccuccugccucagc

SEQ ID NO: 19003 - RNA, 20 nt, Artificial Sequence
  targeting sequence with CTCN PAM
ugccucagcuucccaaagug

SEQ ID NO: 19004 - RNA, 20 nt, Artificial Sequence
  targeting sequence with CTCN PAM
gcuucccaaagugcugagac

SEQ ID NO: 19005 - RNA, 20 nt, Artificial Sequence
  targeting sequence with CTCN PAM
gcacuuugggaagcugaggc

SEQ ID NO: 19006 - RNA, 20 nt, Artificial Sequence
  targeting sequence with CTCN PAM
uugccccccuuuauuguugu

SEQ ID NO: 19007 - RNA, 20 nt, Artificial Sequence
  targeting sequence with CTCN PAM
cauaccaagugaaucccaau

SEQ ID NO: 19008 - RNA, 20 nt, Artificial Sequence
  targeting sequence with CTCN PAM
ccaccucacauaccaaguga

SEQ ID NO: 19009 - RNA, 20 nt, Artificial Sequence
  targeting sequence with CTCN PAM
gauucauauauauuccucac

SEQ ID NO: 19010 - RNA, 20 nt, Artificial Sequence
  targeting sequence with CTCN PAM
gcacuuauucccaacacuuu

SEQ ID NO: 19011 - RNA, 20 nt, Artificial Sequence
  targeting sequence with CTCN PAM
agacauaauaugggaugaac

SEQ ID NO: 19012 - RNA, 20 nt, Artificial Sequence
  targeting sequence with CTCN PAM
aucuucacuccugccauuuu

SEQ ID NO: 19013 - RNA, 20 nt, Artificial Sequence
  targeting sequence with CTCN PAM
ugccauuuugcaccuagaaa

SEQ ID NO: 19014 - RNA, 20 nt, Artificial Sequence
  targeting sequence with CTCN PAM
guccagguuuuggauuaaaa

SEQ ID NO: 19015 - RNA, 20 nt, Artificial Sequence
  targeting sequence with CTCN PAM
gcaacucgcuagcuugggug

SEQ ID NO: 19016 - RNA, 20 nt, Artificial Sequence
  targeting sequence with CTCN PAM
cuagcuugggugauccuuuu

SEQ ID NO: 19017 - RNA, 20 nt, Artificial Sequence
  targeting sequence with CTCN PAM
auaaagaggaaaucuaccua

SEQ ID NO: 19018 - RNA, 20 nt, Artificial Sequence
  targeting sequence with CTCN PAM
uuauagaggaugaaaaggau

SEQ ID NO: 19019 - RNA, 20 nt, Artificial Sequence
  targeting sequence with CTCN PAM
aaagggcaauugcaaagauu

SEQ ID NO: 19020 - RNA, 20 nt, Artificial Sequence
  targeting sequence with CTCN PAM
uuuaaucuuugcaauugccc

SEQ ID NO: 19021 - RNA, 20 nt, Artificial Sequence
  targeting sequence with CTCN PAM
ugugugccagguauuugaug

SEQ ID NO: 19022 - RNA, 20 nt, Artificial Sequence
  targeting sequence with CTCN PAM
gugagacagauauaucacaa

SEQ ID NO: 19023 - RNA, 20 nt, Artificial Sequence
  targeting sequence with CTCN PAM
cagagcaccucuugugugcc

SEQ ID NO: 19024 - RNA, 20 nt, Artificial Sequence
  targeting sequence with CTCN PAM
uuugugagucuccuaguucu

SEQ ID NO: 19025 - RNA, 20 nt, Artificial Sequence
  targeting sequence with CTCN PAM
gucgcccagguuggagugca

SEQ ID NO: 19026 - RNA, 20 nt, Artificial Sequence
  targeting sequence with CTCN PAM
aaccugggcgacagagaaaa

SEQ ID NO: 19027 - RNA, 20 nt, Artificial Sequence
  targeting sequence with CTCN PAM
uuguggucucaaucuccuag

SEQ ID NO: 19028 - RNA, 20 nt, Artificial Sequence
  targeting sequence with CTCN PAM
aucuccuaggcucuagugac

SEQ ID NO: 19029 - RNA, 20 nt, Artificial Sequence
  targeting sequence with CTCN PAM
uaggcucuagugacccuucc

SEQ ID NO: 19030 - RNA, 20 nt, Artificial Sequence
  targeting sequence with CTCN PAM
agugacccuuccaccucagc

SEQ ID NO: 19031 - RNA, 20 nt, Artificial Sequence
  targeting sequence with CTCN PAM
gccucccaagcagcugggac

SEQ ID NO: 19032 - RNA, 20 nt, Artificial Sequence
  targeting sequence with CTCN PAM
caagcagcugggacuacagg

SEQ ID NO: 19033 - RNA, 20 nt, Artificial Sequence
  targeting sequence with CTCN PAM
acagaaaauacaaaaacaaa

SEQ ID NO: 19034 - RNA, 20 nt, Artificial Sequence
  targeting sequence with CTCN PAM
caaagugcugggauuacagg

SEQ ID NO: 19035 - RNA, 20 nt, Artificial Sequence
  targeting sequence with CTCN PAM
ugccuguaaucccagcacuu

SEQ ID NO: 19036 - RNA, 20 nt, Artificial Sequence
  targeting sequence with CTCN PAM
auccuccucaauccuagaua

SEQ ID NO: 19037 - RNA, 20 nt, Artificial Sequence
  targeting sequence with CTCN PAM
ucaauccuagauacaagccu

SEQ ID NO: 19038 - RNA, 20 nt, Artificial Sequence
  targeting sequence with CTCN PAM
auccuagauacaagccucuu

SEQ ID NO: 19039 - RNA, 20 nt, Artificial Sequence
  targeting sequence with CTCN PAM
uuuacuucuuauuucauaca

SEQ ID NO: 19040 - RNA, 20 nt, Artificial Sequence
  targeting sequence with CTCN PAM
aguuugccagauaauucaaa

SEQ ID NO: 19041 - RNA, 20 nt, Artificial Sequence
  targeting sequence with CTCN PAM
cacacauacauagguagaua

SEQ ID NO: 19042 - RNA, 20 nt, Artificial Sequence
  targeting sequence with CTCN PAM
aguaauuuuuauuuuuuuau

SEQ ID NO: 19043 - RNA, 20 nt, Artificial Sequence
  targeting sequence with CTCN PAM
aaaauaaaaaaauaaaaauu

SEQ ID NO: 19044 - RNA, 20 nt, Artificial Sequence
  targeting sequence with CTCN PAM
gucucuaaaauaaaaaaaua

SEQ ID NO: 19045 - RNA, 20 nt, Artificial Sequence
  targeting sequence with CTCN PAM
cuauguuguccaugcuggag

SEQ ID NO: 19046 - RNA, 20 nt, Artificial Sequence
  targeting sequence with CTCN PAM
agcauggacaacauagugag

SEQ ID NO: 19047 - RNA, 20 nt, Artificial Sequence
  targeting sequence with CTCN PAM
gaauaaccacuguacuccag

SEQ ID NO: 19048 - RNA, 20 nt, Artificial Sequence
  targeting sequence with CTCN PAM
aacuccugggcucaagugau

SEQ ID NO: 19049 - RNA, 20 nt, Artificial Sequence
  targeting sequence with CTCN PAM
ugggcucaagugauccuccc

SEQ ID NO: 19050 - RNA, 20 nt, Artificial Sequence
  targeting sequence with CTCN PAM
agugauccucccaucucagc

SEQ ID NO: 19051 - RNA, 20 nt, Artificial Sequence
  targeting sequence with CTCN PAM
caucucagccuccugaguag

SEQ ID NO: 19052 - RNA, 20 nt, Artificial Sequence
  targeting sequence with CTCN PAM
gccuccugaguagcugggac

SEQ ID NO: 19053 - RNA, 20 nt, Artificial Sequence
  targeting sequence with CTCN PAM
ugaguagcugggacuacaga

SEQ ID NO: 19054 - RNA, 20 nt, Artificial Sequence
  targeting sequence with CTCN PAM
ggaggcugagaugggaggau

SEQ ID NO: 19055 - RNA, 20 nt, Artificial Sequence
  targeting sequence with CTCN PAM
aguaaauuuuaucuaauuuu

SEQ ID NO: 19056 - RNA, 20 nt, Artificial Sequence
  targeting sequence with CTCN PAM
aaaaagaguuauauagaaac

SEQ ID NO: 19057 - RNA, 20 nt, Artificial Sequence
  targeting sequence with CTCN PAM
uuuuggagauuugaaaaaau

SEQ ID NO: 19058 - RNA, 20 nt, Artificial Sequence
  targeting sequence with CTCN PAM
ccaugcucuuacagaaaaua

SEQ ID NO: 19059 - RNA, 20 nt, Artificial Sequence
  targeting sequence with CTCN PAM
uacagaaaauaaaguccuuu

SEQ ID NO: 19060 - RNA, 20 nt, Artificial Sequence
  targeting sequence with CTCN PAM
aaaggacuuuauuuucugua

SEQ ID NO: 19061 - RNA, 20 nt, Artificial Sequence
  targeting sequence with CTCN PAM
agcugagucuucccaaauaa

SEQ ID NO: 19062 - RNA, 20 nt, Artificial Sequence
  targeting sequence with CTCN PAM
gcuugagaagaacuugcugu

SEQ ID NO: 19063 - RNA, 20 nt, Artificial Sequence
  targeting sequence with CTCN PAM
gugaacaauaguuacauuuu

SEQ ID NO: 19064 - RNA, 20 nt, Artificial Sequence
  targeting sequence with CTCN PAM
gcagaugaaacagacaaaca

SEQ ID NO: 19065 - RNA, 20 nt, Artificial Sequence
  targeting sequence with CTCN PAM
auguuugucuguuucaucug

SEQ ID NO: 19066 - RNA, 20 nt, Artificial Sequence
  targeting sequence with CTCN PAM
ggaggcugaggugggaggau

SEQ ID NO: 19067 - RNA, 20 nt, Artificial Sequence
  targeting sequence with CTCN PAM
ugaguagcugggacugcagg

SEQ ID NO: 19068 - RNA, 20 nt, Artificial Sequence
  targeting sequence with CTCN PAM
gccuccugaguagcugggac

SEQ ID NO: 19069 - RNA, 20 nt, Artificial Sequence
  targeting sequence with CTCN PAM
caccucagccuccugaguag

SEQ ID NO: 19070 - RNA, 20 nt, Artificial Sequence
  targeting sequence with CTCN PAM
agugauccucccaccucagc

SEQ ID NO: 19071 - RNA, 20 nt, Artificial Sequence
  targeting sequence with CTCN PAM
ggcucaagugauccucccac

SEQ ID NO: 19072 - RNA, 20 nt, Artificial Sequence
  targeting sequence with CTCN PAM
cgggcucaagugauccuccc

SEQ ID NO: 19073 - RNA, 20 nt, Artificial Sequence
  targeting sequence with CTCN PAM
cugcagccuugaccucucgg

SEQ ID NO: 19074 - RNA, 20 nt, Artificial Sequence
  targeting sequence with CTCN PAM
gcucacugcagccuugaccu

SEQ ID NO: 19075 - RNA, 20 nt, Artificial Sequence
  targeting sequence with CTCN PAM
agucugggugacagagcaag

SEQ ID NO: 19076 - RNA, 20 nt, Artificial Sequence
  targeting sequence with CTCN PAM
gucacccagacuggagggua

SEQ ID NO: 19077 - RNA, 20 nt, Artificial Sequence
  targeting sequence with CTCN PAM
aacaaacagaaaaacccaca

SEQ ID NO: 19078 - RNA, 20 nt, Artificial Sequence
  targeting sequence with CTCN PAM
uguuuuuguuuguggguuuu

SEQ ID NO: 19079 - RNA, 20 nt, Artificial Sequence
  targeting sequence with CTCN PAM
cuaguuaguagugagguuua

SEQ ID NO: 19080 - RNA, 20 nt, Artificial Sequence
  targeting sequence with CTCN PAM
cuacuaacuagggagucacu

SEQ ID NO: 19081 - RNA, 20 nt, Artificial Sequence
  targeting sequence with CTCN PAM
uggggucaagcaauuugccc

SEQ ID NO: 19082 - RNA, 20 nt, Artificial Sequence
  targeting sequence with CTCN PAM
acuaaaaauacaaaaaaaau

SEQ ID NO: 19083 - RNA, 20 nt, Artificial Sequence
  targeting sequence with CTCN PAM
caaguagcugggauuacagg

SEQ ID NO: 19084 - RNA, 20 nt, Artificial Sequence
  targeting sequence with CTCN PAM
gccucccaaguagcugggau

SEQ ID NO: 19085 - RNA, 20 nt, Artificial Sequence
  targeting sequence with CTCN PAM
ccucagccucccaaguagcu

SEQ ID NO: 19086 - RNA, 20 nt, Artificial Sequence
  targeting sequence with CTCN PAM
caccucagccucccaaguag

SEQ ID NO: 19087 - RNA, 20 nt, Artificial Sequence
  targeting sequence with CTCN PAM
gccuuccaugcugaagcagu

SEQ ID NO: 19088 - RNA, 20 nt, Artificial Sequence
  targeting sequence with CTCN PAM
cugcaccucugccuuccaug

SEQ ID NO: 19089 - RNA, 20 nt, Artificial Sequence
  targeting sequence with CTCN PAM
gcucacugcaccucugccuu

SEQ ID NO: 19090 - RNA, 20 nt, Artificial Sequence
  targeting sequence with CTCN PAM
agccugggugacagaguaag

SEQ ID NO: 19091 - RNA, 20 nt, Artificial Sequence
  targeting sequence with CTCN PAM
gucacccaggcuggagugca

SEQ ID NO: 19092 - RNA, 20 nt, Artificial Sequence
  targeting sequence with CTCN PAM
aagagaagacaaaaaaauuc

SEQ ID NO: 19093 - RNA, 20 nt, Artificial Sequence
  targeting sequence with CTCN PAM
uugagacaaggucuuacucu

SEQ ID NO: 19094 - RNA, 20 nt, Artificial Sequence
  targeting sequence with CTCN PAM
auuuuagaauuuagacagga

SEQ ID NO: 19095 - RNA, 20 nt, Artificial Sequence
  targeting sequence with CTCN PAM
aucuucucauuaaauauuaa

SEQ ID NO: 19096 - RNA, 20 nt, Artificial Sequence
  targeting sequence with CTCN PAM
uuaaauauuaacaccaagcc

SEQ ID NO: 19097 - RNA, 20 nt, Artificial Sequence
  targeting sequence with CTCN PAM
ccuacuguuuggcuuggugu

SEQ ID NO: 19098 - RNA, 20 nt, Artificial Sequence
  targeting sequence with CTCN PAM
gcuuuaaggaauuuuaaccc

SEQ ID NO: 19099 - RNA, 20 nt, Artificial Sequence
  targeting sequence with CTCN PAM
ccagacacaaaucggggcag

SEQ ID NO: 19100 - RNA, 20 nt, Artificial Sequence
  targeting sequence with CTCN PAM
agacacaaaucggggcagag

SEQ ID NO: 19101 - RNA, 20 nt, Artificial Sequence
  targeting sequence with CTCN PAM
gccccgauuugugucuggag

SEQ ID NO: 19102 - RNA, 20 nt, Artificial Sequence
  targeting sequence with CTCN PAM
ucugccccgauuugugucug

SEQ ID NO: 19103 - RNA, 20 nt, Artificial Sequence
  targeting sequence with CTCN PAM
cacccacccaccaucuccuc

SEQ ID NO: 19104 - RNA, 20 nt, Artificial Sequence
  targeting sequence with CTCN PAM
cuuaaugauggggacacauc

SEQ ID NO: 19105 - RNA, 20 nt, Artificial Sequence
  targeting sequence with CTCN PAM
agauguguccccaucauuaa

SEQ ID NO: 19106 - RNA, 20 nt, Artificial Sequence
  targeting sequence with CTCN PAM
uuucucaagaugugucccca

SEQ ID NO: 19107 - RNA, 20 nt, Artificial Sequence
  targeting sequence with CTCN PAM
gcuuccaagcagcugggauu

SEQ ID NO: 19108 - RNA, 20 nt, Artificial Sequence
  targeting sequence with CTCN PAM
cgguuucaagcaauugucgu

SEQ ID NO: 19109 - RNA, 20 nt, Artificial Sequence
  targeting sequence with CTCN PAM
gccucacgguuucaagcaau

SEQ ID NO: 19110 - RNA, 20 nt, Artificial Sequence
  targeting sequence with CTCN PAM
cugaaaccucugccucacgg

SEQ ID NO: 19111 - RNA, 20 nt, Artificial Sequence
  targeting sequence with CTCN PAM
gcucacugaaaccucugccu

SEQ ID NO: 19112 - RNA, 20 nt, Artificial Sequence
  targeting sequence with CTCN PAM
agccugggcaagagugagac

SEQ ID NO: 19113 - RNA, 20 nt, Artificial Sequence
  targeting sequence with CTCN PAM
ugcccaggcuggagugcagu

SEQ ID NO: 19114 - RNA, 20 nt, Artificial Sequence
  targeting sequence with CTCN PAM
cucuugcccaggcuggagug

SEQ ID NO: 19115 - RNA, 20 nt, Artificial Sequence
  targeting sequence with CTCN PAM
aucucaaaaaaacaaaacaa

SEQ ID NO: 19116 - RNA, 20 nt, Artificial Sequence
  targeting sequence with CTCN PAM
aaaaaacaaaacaaaacaaa

SEQ ID NO: 19117 - RNA, 20 nt, Artificial Sequence
  targeting sequence with CTCN PAM
gcuuggauuacaaguagcau

SEQ ID NO: 19118 - RNA, 20 nt, Artificial Sequence
  targeting sequence with CTCN PAM
ugcuacuuguaauccaagcg

SEQ ID NO: 19119 - RNA, 20 nt, Artificial Sequence
  targeting sequence with CTCN PAM
agguccuuccuaaauuguua

SEQ ID NO: 19120 - RNA, 20 nt, Artificial Sequence
  targeting sequence with CTCN PAM
uuggguuguaacaauuuagg

SEQ ID NO: 19121 - RNA, 20 nt, Artificial Sequence
  targeting sequence with CTCN PAM
ugccauauuuaaguguccag

SEQ ID NO: 19122 - RNA, 20 nt, Artificial Sequence
  targeting sequence with CTCN PAM
gaucuaggaaguugacuacu

SEQ ID NO: 19123 - RNA, 20 nt, Artificial Sequence
  targeting sequence with CTCN PAM
ucucugaucuaggaaguuga

SEQ ID NO: 19124 - RNA, 20 nt, Artificial Sequence
  targeting sequence with CTCN PAM
cauucaucaguaauuugaca

SEQ ID NO: 19125 - RNA, 20 nt, Artificial Sequence
  targeting sequence with CTCN PAM
cccaggcucccauucaucag

SEQ ID NO: 19126 - RNA, 20 nt, Artificial Sequence
  targeting sequence with CTCN PAM
uuggguguggcucaaaaguu

SEQ ID NO: 19127 - RNA, 20 nt, Artificial Sequence
  targeting sequence with CTCN PAM
aaaguuuggagccaucucug

SEQ ID NO: 19128 - RNA, 20 nt, Artificial Sequence
  targeting sequence with CTCN PAM
aaacuuuugagccacaccca

SEQ ID NO: 19129 - RNA, 20 nt, Artificial Sequence
  targeting sequence with CTCN PAM
gagaaccaauggugcuuccc

SEQ ID NO: 19130 - RNA, 20 nt, Artificial Sequence
  targeting sequence with CTCN PAM
gagauggcuccaaacuuuug

SEQ ID NO: 19131 - RNA, 20 nt, Artificial Sequence
  targeting sequence with CTCN PAM
acaaguuucuucagcuaucc

SEQ ID NO: 19132 - RNA, 20 nt, Artificial Sequence
  targeting sequence with CTCN PAM
auaccugcuccacaaguuuc

SEQ ID NO: 19133 - RNA, 20 nt, Artificial Sequence
  targeting sequence with CTCN PAM
caauaccugcuccacaaguu

SEQ ID NO: 19134 - RNA, 20 nt, Artificial Sequence
  targeting sequence with CTCN PAM
cauaguugccuguggguguu

SEQ ID NO: 19135 - RNA, 20 nt, Artificial Sequence
  targeting sequence with CTCN PAM
gguaugcauuugggaaauag

SEQ ID NO: 19136 - RNA, 20 nt, Artificial Sequence
  targeting sequence with CTCN PAM
ggucaaacacuggcagaagc

SEQ ID NO: 19137 - RNA, 20 nt, Artificial Sequence
  targeting sequence with CTCN PAM
acucuggucaaacacuggca

SEQ ID NO: 19138 - RNA, 20 nt, Artificial Sequence
  targeting sequence with CTCN PAM
cuacucuggucaaacacugg

SEQ ID NO: 19139 - RNA, 20 nt, Artificial Sequence
  targeting sequence with CTCN PAM
cuaccccaacugugucucuc

SEQ ID NO: 19140 - RNA, 20 nt, Artificial Sequence
  targeting sequence with CTCN PAM
caccgcaagucauacucccu

SEQ ID NO: 19141 - RNA, 20 nt, Artificial Sequence
  targeting sequence with CTCN PAM
ccaauucagcuaggaaccua

SEQ ID NO: 19142 - RNA, 20 nt, Artificial Sequence
  targeting sequence with CTCN PAM
ccccaauucagcuaggaacc

SEQ ID NO: 19143 - RNA, 20 nt, Artificial Sequence
  targeting sequence with CTCN PAM
uuaccuuuuguuaccuuuuu

SEQ ID NO: 19144 - RNA, 20 nt, Artificial Sequence
  targeting sequence with CTCN PAM
aguuuuuauuuauuuccugu

SEQ ID NO: 19145 - RNA, 20 nt, Artificial Sequence
  targeting sequence with CTCN PAM
auuuuuucuaggggaauaca

SEQ ID NO: 19146 - RNA, 20 nt, Artificial Sequence
  targeting sequence with CTCN PAM
uccauuuuuucuaggggaau

SEQ ID NO: 19147 - RNA, 20 nt, Artificial Sequence
  targeting sequence with CTCN PAM
uccuccauuuuuucuagggg

SEQ ID NO: 19148 - RNA, 20 nt, Artificial Sequence
  targeting sequence with CTCN PAM
cuccuccuccauuuuuucua

SEQ ID NO: 19149 - RNA, 20 nt, Artificial Sequence
  targeting sequence with CTCN PAM
acaaaugcucccuccuccuc

SEQ ID NO: 19150 - RNA, 20 nt, Artificial Sequence
  targeting sequence with CTCN PAM
uacucuaaaccaaacaucac

SEQ ID NO: 19151 - RNA, 20 nt, Artificial Sequence
  targeting sequence with CTCN PAM
aaaccaaacaucacacuagg

SEQ ID NO: 19152 - RNA, 20 nt, Artificial Sequence
  targeting sequence with CTCN PAM
uuuaauaacuucaacaacca

SEQ ID NO: 19153 - RNA, 20 nt, Artificial Sequence
  targeting sequence with CTCN PAM
guaaaaauguaaugauauuu

SEQ ID NO: 19154 - RNA, 20 nt, Artificial Sequence
  targeting sequence with CTCN PAM
cucuguaaaaauguaaugau

SEQ ID NO: 19155 - RNA, 20 nt, Artificial Sequence
  targeting sequence with CTCN PAM
guuucucccucuguaaaaau

SEQ ID NO: 19156 - RNA, 20 nt, Artificial Sequence
  targeting sequence with CTCN PAM
gaugaguuauguaaucuacu

SEQ ID NO: 19157 - RNA, 20 nt, Artificial Sequence
  targeting sequence with CTCN PAM
ucugagccucaguuucuccc

SEQ ID NO: 19158 - RNA, 20 nt, Artificial Sequence
  targeting sequence with CTCN PAM
gagcuggcaagcaaauucaa

SEQ ID NO: 19159 - RNA, 20 nt, Artificial Sequence
  targeting sequence with CTCN PAM
gaguagauuacauaacucau

SEQ ID NO: 19160 - RNA, 20 nt, Artificial Sequence
  targeting sequence with CTCN PAM
aaggaauaaggguuaauuaa

SEQ ID NO: 19161 - RNA, 20 nt, Artificial Sequence
  targeting sequence with CTCN PAM
auuccucuuuagcggcuaaa

SEQ ID NO: 19162 - RNA, 20 nt, Artificial Sequence
  targeting sequence with CTCN PAM
uuagcggcuaaacgcuaaac

SEQ ID NO: 19163 - RNA, 20 nt, Artificial Sequence
  targeting sequence with CTCN PAM
ucccaguuuagcguuuagcc

SEQ ID NO: 19164 - RNA, 20 nt, Artificial Sequence
  targeting sequence with CTCN PAM
cccauaaaucucuuuuaugg

SEQ ID NO: 19165 - RNA, 20 nt, Artificial Sequence
  targeting sequence with CTCN PAM
uuuauggaagauuguauacg

SEQ ID NO: 19166 - RNA, 20 nt, Artificial Sequence
  targeting sequence with CTCN PAM
cauaaaugaagggcuaauuu

SEQ ID NO: 19167 - RNA, 20 nt, Artificial Sequence
  targeting sequence with CTCN PAM
uaaaugaagggcuaauuuga

SEQ ID NO: 19168 - RNA, 20 nt, Artificial Sequence
  targeting sequence with CTCN PAM
guuucuauuucaaacuuauu

SEQ ID NO: 19169 - RNA, 20 nt, Artificial Sequence
  targeting sequence with CTCN PAM
agacgauauguaggcuagau

SEQ ID NO: 19170 - RNA, 20 nt, Artificial Sequence
  targeting sequence with CTCN PAM
gaucacuuuucaguugacag

SEQ ID NO: 19171 - RNA, 20 nt, Artificial Sequence
  targeting sequence with CTCN PAM
cacauagaauaaaggggcua

SEQ ID NO: 19172 - RNA, 20 nt, Artificial Sequence
  targeting sequence with CTCN PAM
gagcauacaucugagcauac

SEQ ID NO: 19173 - RNA, 20 nt, Artificial Sequence
  targeting sequence with CTCN PAM
gagguaccuguuuuagcccc

SEQ ID NO: 19174 - RNA, 20 nt, Artificial Sequence
  targeting sequence with CTCN PAM
gauguaugcucagagguacc

SEQ ID NO: 19175 - RNA, 20 nt, Artificial Sequence
  targeting sequence with CTCN PAM
aacagccugugccuaauugg

SEQ ID NO: 19176 - RNA, 20 nt, Artificial Sequence
  targeting sequence with CTCN PAM
gggugacugucuccuguauu

SEQ ID NO: 19177 - RNA, 20 nt, Artificial Sequence
  targeting sequence with CTCN PAM
uguauuuuugcucuuaugac

SEQ ID NO: 19178 - RNA, 20 nt, Artificial Sequence
  targeting sequence with CTCN PAM
uaugacucagugcaauuuaa

SEQ ID NO: 19179 - RNA, 20 nt, Artificial Sequence
  targeting sequence with CTCN PAM
gugcaauuuaaaauaucccc

SEQ ID NO: 19180 - RNA, 20 nt, Artificial Sequence
  targeting sequence with CTCN PAM
gaagccgauuuccaauggac

SEQ ID NO: 19181 - RNA, 20 nt, Artificial Sequence
  targeting sequence with CTCN PAM
ucaacaccugggggguuuuu

SEQ ID NO: 19182 - RNA, 20 nt, Artificial Sequence
  targeting sequence with CTCN PAM
guaggauuccaggccagauc

SEQ ID NO: 19183 - RNA, 20 nt, Artificial Sequence
  targeting sequence with CTCN PAM
auuaauguuuuccuagcucu

SEQ ID NO: 19184 - RNA, 20 nt, Artificial Sequence
  targeting sequence with CTCN PAM
cucuuauuuucaguacauuu

SEQ ID NO: 19185 - RNA, 20 nt, Artificial Sequence
  targeting sequence with CTCN PAM
cuuauuuucaguacauuuug

SEQ ID NO: 19186 - RNA, 20 nt, Artificial Sequence
  targeting sequence with CTCN PAM
uauuuucaguacauuuugcc

SEQ ID NO: 19187 - RNA, 20 nt, Artificial Sequence
  targeting sequence with CTCN PAM
cuacaggaacaaaacuaauc

SEQ ID NO: 19188 - RNA, 20 nt, Artificial Sequence
  targeting sequence with CTCN PAM
guuucuagcagcaaauuaaa

SEQ ID NO: 19189 - RNA, 20 nt, Artificial Sequence
  targeting sequence with CTCN PAM
gaaagauaaagugacuuuug

SEQ ID NO: 19190 - RNA, 20 nt, Artificial Sequence
  targeting sequence with CTCN PAM
acuguaaauaagauuaaucu

SEQ ID NO: 19191 - RNA, 20 nt, Artificial Sequence
  targeting sequence with CTCN PAM
ucacuuaaaaaaauuucuaa

SEQ ID NO: 19192 - RNA, 20 nt, Artificial Sequence
  targeting sequence with CTCN PAM
ugccuuccccaaauacauga

SEQ ID NO: 19193 - RNA, 20 nt, Artificial Sequence
  targeting sequence with CTCN PAM
cucauagcugaaugcacaau

SEQ ID NO: 19194 - RNA, 20 nt, Artificial Sequence
  targeting sequence with CTCN PAM
uagcugaaugcacaauggua

SEQ ID NO: 19195 - RNA, 20 nt, Artificial Sequence
  targeting sequence with CTCN PAM
auaccuagucacuagucaaa

SEQ ID NO: 19196 - RNA, 20 nt, Artificial Sequence
  targeting sequence with CTCN PAM
gccuuugacuagugacuagg

SEQ ID NO: 19197 - RNA, 20 nt, Artificial Sequence
  targeting sequence with CTCN PAM
accucagccuuugacuagug

SEQ ID NO: 19198 - RNA, 20 nt, Artificial Sequence
  targeting sequence with CTCN PAM
gcuacaauggcuuccugggc

SEQ ID NO: 19199 - RNA, 20 nt, Artificial Sequence
  targeting sequence with CTCN PAM
ucacccacauaauuguacca

SEQ ID NO: 19200 - RNA, 20 nt, Artificial Sequence
  targeting sequence with CTCN PAM
cuucacccacauaauuguac

SEQ ID NO: 19201 - RNA, 20 nt, Artificial Sequence
  targeting sequence with CTCN PAM
cucuucacccacauaauugu

SEQ ID NO: 19202 - RNA, 20 nt, Artificial Sequence
  targeting sequence with CTCN PAM
cucucuucacccacauaauu

SEQ ID NO: 19203 - RNA, 20 nt, Artificial Sequence
  targeting sequence with CTCN PAM
auaggcuuuggaaugcuucu

SEQ ID NO: 19204 - RNA, 20 nt, Artificial Sequence
  targeting sequence with CTCN PAM
ggaauaaucagaagcauucc

SEQ ID NO: 19205 - RNA, 20 nt, Artificial Sequence
  targeting sequence with CTCN PAM
aagugaagauaguugcccaa

SEQ ID NO: 19206 - RNA, 20 nt, Artificial Sequence
  targeting sequence with CTCN PAM
cuuggguagacagcaaugga

SEQ ID NO: 19207 - RNA, 20 nt, Artificial Sequence
  targeting sequence with CTCN PAM
auaauguccuucgcuuaaug

SEQ ID NO: 19208 - RNA, 20 nt, Artificial Sequence
  targeting sequence with CTCN PAM
gaaucccuucucaauaaugu

SEQ ID NO: 19209 - RNA, 20 nt, Artificial Sequence
  targeting sequence with CTCN PAM
ggaaaguuuccuaggccagu

SEQ ID NO: 19210 - RNA, 20 nt, Artificial Sequence
  targeting sequence with CTCN PAM
acuuuuaguaaacauuuacu

SEQ ID NO: 19211 - RNA, 20 nt, Artificial Sequence
  targeting sequence with CTCN PAM
gaagcauuagaugcauuggc

SEQ ID NO: 19212 - RNA, 20 nt, Artificial Sequence
  targeting sequence with CTCN PAM
cugaagcauuagaugcauug

SEQ ID NO: 19213 - RNA, 20 nt, Artificial Sequence
  targeting sequence with CTCN PAM
aucccgaaaucuauaugguu

SEQ ID NO: 19214 - RNA, 20 nt, Artificial Sequence
  targeting sequence with CTCN PAM
guaagugguaaagccaggau

SEQ ID NO: 19215 - RNA, 20 nt, Artificial Sequence
  targeting sequence with CTCN PAM
ggcaacuuuuaaaaccccac

SEQ ID NO: 19216 - RNA, 20 nt, Artificial Sequence
  targeting sequence with CTCN PAM
gugggguuuuaaaaguugcc

SEQ ID NO: 19217 - RNA, 20 nt, Artificial Sequence
  targeting sequence with CTCN PAM
ucuuuaaaaugggaauaaua

SEQ ID NO: 19218 - RNA, 20 nt, Artificial Sequence
  targeting sequence with CTCN PAM
caguaggcccuacagguaaa

SEQ ID NO: 19219 - RNA, 20 nt, Artificial Sequence
  targeting sequence with CTCN PAM
ugugaugugccuagugcuag

SEQ ID NO: 19220 - RNA, 20 nt, Artificial Sequence
  targeting sequence with CTCN PAM
cucucaucaacucagauacu

SEQ ID NO: 19221 - RNA, 20 nt, Artificial Sequence
  targeting sequence with CTCN PAM
caucaacucagauacuagua

SEQ ID NO: 19222 - RNA, 20 nt, Artificial Sequence
  targeting sequence with CTCN PAM
ucaacucagauacuaguaaa

SEQ ID NO: 19223 - RNA, 20 nt, Artificial Sequence
  targeting sequence with CTCN PAM
gauacuaguaaaauaaacua

SEQ ID NO: 19224 - RNA, 20 nt, Artificial Sequence
  targeting sequence with CTCN PAM
ggauacauuuuuuuucuacg

SEQ ID NO: 19225 - RNA, 20 nt, Artificial Sequence
  targeting sequence with CTCN PAM
guuguaggcuuugcuuuuug

SEQ ID NO: 19226 - RNA, 20 nt, Artificial Sequence
  targeting sequence with CTCN PAM
uuacuaauucuacuucuacu

SEQ ID NO: 19227 - RNA, 20 nt, Artificial Sequence
  targeting sequence with CTCN PAM
cuuuacuaauucuacuucua

SEQ ID NO: 19228 - RNA, 20 nt, Artificial Sequence
  targeting sequence with CTCN PAM
cuaacaguguggagaagaaa

SEQ ID NO: 19229 - RNA, 20 nt, Artificial Sequence
  targeting sequence with CTCN PAM
acacuguuagugagcuaccc

SEQ ID NO: 19230 - RNA, 20 nt, Artificial Sequence
  targeting sequence with CTCN PAM
uuuccauuucuucuccacac

SEQ ID NO: 19231 - RNA, 20 nt, Artificial Sequence
  targeting sequence with CTCN PAM
acaguaaauggcccuaggcu

SEQ ID NO: 19232 - RNA, 20 nt, Artificial Sequence
  targeting sequence with CTCN PAM
gguuagugaagcuguccauu

SEQ ID NO: 19233 - RNA, 20 nt, Artificial Sequence
  targeting sequence with CTCN PAM
cagguuagugaagcugucca

SEQ ID NO: 19234 - RNA, 20 nt, Artificial Sequence
  targeting sequence with CTCN PAM
aagcugaauacuaccauauc

SEQ ID NO: 19235 - RNA, 20 nt, Artificial Sequence
  targeting sequence with CTCN PAM
uuccauuaaguuagauucag

SEQ ID NO: 19236 - RNA, 20 nt, Artificial Sequence
  targeting sequence with CTCN PAM
gccuucuuuuacaaaguaca

SEQ ID NO: 19237 - RNA, 20 nt, Artificial Sequence
  targeting sequence with CTCN PAM
ugucuguaaucccagcauug

SEQ ID NO: 19238 - RNA, 20 nt, Artificial Sequence
  targeting sequence with CTCN PAM
cacaaugcugggauuacaga

SEQ ID NO: 19239 - RNA, 20 nt, Artificial Sequence
  targeting sequence with CTCN PAM
gccucccacaaugcugggau

SEQ ID NO: 19240 - RNA, 20 nt, Artificial Sequence
  targeting sequence with CTCN PAM
ggugauccacccaccucagc

SEQ ID NO: 19241 - RNA, 20 nt, Artificial Sequence
  targeting sequence with CTCN PAM
ugaccucaggugauccaccc

SEQ ID NO: 19242 - RNA, 20 nt, Artificial Sequence
  targeting sequence with CTCN PAM
aacuccugaccucaggugau

SEQ ID NO: 19243 - RNA, 20 nt, Artificial Sequence
  targeting sequence with CTCN PAM
cuuaaaaauacaaaaaagua

SEQ ID NO: 19244 - RNA, 20 nt, Artificial Sequence
  targeting sequence with CTCN PAM
uaaaaauacaaaaaaguagc

SEQ ID NO: 19245 - RNA, 20 nt, Artificial Sequence
  targeting sequence with CTCN PAM
ccaguagcugggauuacagg

SEQ ID NO: 19246 - RNA, 20 nt, Artificial Sequence
  targeting sequence with CTCN PAM
ugccuuagccuccccaguag

SEQ ID NO: 19247 - RNA, 20 nt, Artificial Sequence
  targeting sequence with CTCN PAM
uggguucaagugauucuccu

SEQ ID NO: 19248 - RNA, 20 nt, Artificial Sequence
  targeting sequence with CTCN PAM
gccuccuggguucaagugau

SEQ ID NO: 19249 - RNA, 20 nt, Artificial Sequence
  targeting sequence with CTCN PAM
agccugggcaacaagaguga

SEQ ID NO: 19250 - RNA, 20 nt, Artificial Sequence
  targeting sequence with CTCN PAM
uguugcccaggcuggagugc

SEQ ID NO: 19251 - RNA, 20 nt, Artificial Sequence
  targeting sequence with CTCN PAM
gucuccaaaaacaaagaaca

SEQ ID NO: 19252 - RNA, 20 nt, Artificial Sequence
  targeting sequence with CTCN PAM
aaaaacaaagaacaaaaaaa

SEQ ID NO: 19253 - RNA, 20 nt, Artificial Sequence
  targeting sequence with CTCN PAM
ggaggcugagguggaagcac

SEQ ID NO: 19254 - RNA, 20 nt, Artificial Sequence
  targeting sequence with CTCN PAM
ugaguagcugggacugcagg

SEQ ID NO: 19255 - RNA, 20 nt, Artificial Sequence
  targeting sequence with CTCN PAM
gccuccugaguagcugggac

SEQ ID NO: 19256 - RNA, 20 nt, Artificial Sequence
  targeting sequence with CTCN PAM
agcagugcuuccaccucagc

SEQ ID NO: 19257 - RNA, 20 nt, Artificial Sequence
  targeting sequence with CTCN PAM
ugggcucaagcagugcuucc

SEQ ID NO: 19258 - RNA, 20 nt, Artificial Sequence
  targeting sequence with CTCN PAM
uuauuuuuuaauuuuuuuuu

SEQ ID NO: 19259 - RNA, 20 nt, Artificial Sequence
  targeting sequence with CTCN PAM
aaaaaaaaauuaaaaaauaa

SEQ ID NO: 19260 - RNA, 20 nt, Artificial Sequence
  targeting sequence with CTCN PAM
gucucaaaaaaaaaauuaaa

SEQ ID NO: 19261 - RNA, 20 nt, Artificial Sequence
  targeting sequence with CTCN PAM
cucugucacccaggcuggag

SEQ ID NO: 19262 - RNA, 20 nt, Artificial Sequence
  targeting sequence with CTCN PAM
gucacccaggcuggagugca

SEQ ID NO: 19263 - RNA, 20 nt, Artificial Sequence
  targeting sequence with CTCN PAM
agccugggugacagagugag

SEQ ID NO: 19264 - RNA, 20 nt, Artificial Sequence
  targeting sequence with CTCN PAM
gcucacugcaaccuccaccu

SEQ ID NO: 19265 - RNA, 20 nt, Artificial Sequence
  targeting sequence with CTCN PAM
cugcaaccuccaccucucag

SEQ ID NO: 19266 - RNA, 20 nt, Artificial Sequence
  targeting sequence with CTCN PAM
accucucagauucaagcaau

SEQ ID NO: 19267 - RNA, 20 nt, Artificial Sequence
  targeting sequence with CTCN PAM
cagauucaagcaauucuccu

SEQ ID NO: 19268 - RNA, 20 nt, Artificial Sequence
  targeting sequence with CTCN PAM
gauucaagcaauucuccugc

SEQ ID NO: 19269 - RNA, 20 nt, Artificial Sequence
  targeting sequence with CTCN PAM
ugccucagccucccccguaa

SEQ ID NO: 19270 - RNA, 20 nt, Artificial Sequence
  targeting sequence with CTCN PAM
gccucccccguaacugggac

SEQ ID NO: 19271 - RNA, 20 nt, Artificial Sequence
  targeting sequence with CTCN PAM
cccguaacugggacuacagg

SEQ ID NO: 19272 - RNA, 20 nt, Artificial Sequence
  targeting sequence with CTCN PAM
acuaaaaauacaaaaaaaau

SEQ ID NO: 19273 - RNA, 20 nt, Artificial Sequence
  targeting sequence with CTCN PAM
aucuucugaccuugugaucc

SEQ ID NO: 19274 - RNA, 20 nt, Artificial Sequence
  targeting sequence with CTCN PAM
gccucccaaagugcuacgau

SEQ ID NO: 19275 - RNA, 20 nt, Artificial Sequence
  targeting sequence with CTCN PAM
caaagugcuacgauuacagg

SEQ ID NO: 19276 - RNA, 20 nt, Artificial Sequence
  targeting sequence with CTCN PAM
cgccuguaaucguagcacuu

SEQ ID NO: 19277 - RNA, 20 nt, Artificial Sequence
  targeting sequence with CTCN PAM
uaaaaaaaaaaaaaaaaaaa

SEQ ID NO: 19278 - RNA, 20 nt, Artificial Sequence
  targeting sequence with CTCN PAM
aaaaguucuaacagaaaagg

SEQ ID NO: 19279 - RNA, 20 nt, Artificial Sequence
  targeting sequence with CTCN PAM
ugcacauuaucuguuugaaa

SEQ ID NO: 19280 - RNA, 20 nt, Artificial Sequence
  targeting sequence with CTCN PAM
uuagaaaugauucccuauaa

SEQ ID NO: 19281 - RNA, 20 nt, Artificial Sequence
  targeting sequence with CTCN PAM
acauauccuuagacuucaaa

SEQ ID NO: 19282 - RNA, 20 nt, Artificial Sequence
  targeting sequence with CTCN PAM
uaaugaaaugugaacugguu

SEQ ID NO: 19283 - RNA, 20 nt, Artificial Sequence
  targeting sequence with CTCN PAM
uuuccucuuaaugaaaugug

SEQ ID NO: 19284 - RNA, 20 nt, Artificial Sequence
  targeting sequence with CTCN PAM
guaagcccaggaaauaggau

SEQ ID NO: 19285 - RNA, 20 nt, Artificial Sequence
  targeting sequence with CTCN PAM
aaauuuuccauuuuacuuau

SEQ ID NO: 19286 - RNA, 20 nt, Artificial Sequence
  targeting sequence with CTCN PAM
gcaaacugauuuuaaaucag

SEQ ID NO: 19287 - RNA, 20 nt, Artificial Sequence
  targeting sequence with CTCN PAM
gauuuaaaaucaguuugcug

SEQ ID NO: 19288 - RNA, 20 nt, Artificial Sequence
  targeting sequence with CTCN PAM
acugggcagauauacuuagg

SEQ ID NO: 19289 - RNA, 20 nt, Artificial Sequence
  targeting sequence with CTCN PAM
cuguauuuuagguauugaag

SEQ ID NO: 19290 - RNA, 20 nt, Artificial Sequence
  targeting sequence with CTCN PAM
cacucuuccuuuuuuuucuc

SEQ ID NO: 19291 - RNA, 20 nt, Artificial Sequence
  targeting sequence with CTCN PAM
uccuuuuuuuucucacucuu

SEQ ID NO: 19292 - RNA, 20 nt, Artificial Sequence
  targeting sequence with CTCN PAM
cucuuacacaggagcuagga

SEQ ID NO: 19293 - RNA, 20 nt, Artificial Sequence
  targeting sequence with CTCN PAM
uacacaggagcuaggacuac

SEQ ID NO: 19294 - RNA, 20 nt, Artificial Sequence
  targeting sequence with CTCN PAM
uguguaagagugagaaaaaa

SEQ ID NO: 19295 - RNA, 20 nt, Artificial Sequence
  targeting sequence with CTCN PAM
guuacuguaauugucaucuu

SEQ ID NO: 19296 - RNA, 20 nt, Artificial Sequence
  targeting sequence with CTCN PAM
gaaguucuuugucuuuucug

SEQ ID NO: 19297 - RNA, 20 nt, Artificial Sequence
  targeting sequence with CTCN PAM
cuggccaggcgcgguggcuc

SEQ ID NO: 19298 - RNA, 20 nt, Artificial Sequence
  targeting sequence with CTCN PAM
ggccaggcgcgguggcucac

SEQ ID NO: 19299 - RNA, 20 nt, Artificial Sequence
  targeting sequence with CTCN PAM
cgccuguaaucccagcacuu

SEQ ID NO: 19300 - RNA, 20 nt, Artificial Sequence
  targeting sequence with CTCN PAM
caaagugcugggauuacagg

SEQ ID NO: 19301 - RNA, 20 nt, Artificial Sequence
  targeting sequence with CTCN PAM
gccucccaaagugcugggau

SEQ ID NO: 19302 - RNA, 20 nt, Artificial Sequence
  targeting sequence with CTCN PAM
ugauuccccugccucggccu

SEQ ID NO: 19303 - RNA, 20 nt, Artificial Sequence
  targeting sequence with CTCN PAM
acuaaaaauacaaaaaacac

SEQ ID NO: 19304 - RNA, 20 nt, Artificial Sequence
  targeting sequence with CTCN PAM
caaguagcugggacugcagg

SEQ ID NO: 19305 - RNA, 20 nt, Artificial Sequence
  targeting sequence with CTCN PAM
gccucccaaguagcugggac

SEQ ID NO: 19306 - RNA, 20 nt, Artificial Sequence
  targeting sequence with CTCN PAM
ugccucagccucccaaguag

SEQ ID NO: 19307 - RNA, 20 nt, Artificial Sequence
  targeting sequence with CTCN PAM
cagguucaagcgauucuccu

SEQ ID NO: 19308 - RNA, 20 nt, Artificial Sequence
  targeting sequence with CTCN PAM
agccugggcaacagagacuc

SEQ ID NO: 19309 - RNA, 20 nt, Artificial Sequence
  targeting sequence with CTCN PAM
guugcccaggcuagagugca

SEQ ID NO: 19310 - RNA, 20 nt, Artificial Sequence
  targeting sequence with CTCN PAM
aucucaaacaaacaaacaaa

SEQ ID NO: 19311 - RNA, 20 nt, Artificial Sequence
  targeting sequence with CTCN PAM
aacaaacaaacaaacaaaca

SEQ ID NO: 19312 - RNA, 20 nt, Artificial Sequence
  targeting sequence with CTCN PAM
cuaucugcucugugcuugaa

SEQ ID NO: 19313 - RNA, 20 nt, Artificial Sequence
  targeting sequence with CTCN PAM
aucugcucugugcuugaagu

SEQ ID NO: 19314 - RNA, 20 nt, Artificial Sequence
  targeting sequence with CTCN PAM
gugcuugaagugaaacguac

SEQ ID NO: 19315 - RNA, 20 nt, Artificial Sequence
  targeting sequence with CTCN PAM
uucuaguucucuguacuucu

SEQ ID NO: 19316 - RNA, 20 nt, Artificial Sequence
  targeting sequence with CTCN PAM
guacuucuaaacuuucuaau

SEQ ID NO: 19317 - RNA, 20 nt, Artificial Sequence
  targeting sequence with CTCN PAM
caaugucaaguaaaaaauau

SEQ ID NO: 19318 - RNA, 20 nt, Artificial Sequence
  targeting sequence with CTCN PAM
gacuuaagcacucacaaugu

SEQ ID NO: 19319 - RNA, 20 nt, Artificial Sequence
  targeting sequence with CTCN PAM
uuacagcacccaccauauua

SEQ ID NO: 19320 - RNA, 20 nt, Artificial Sequence
  targeting sequence with CTCN PAM
auauaaaguaauaugguggg

SEQ ID NO: 19321 - RNA, 20 nt, Artificial Sequence
  targeting sequence with CTCN PAM
acuggcuuuuaucucaucgg

SEQ ID NO: 19322 - RNA, 20 nt, Artificial Sequence
  targeting sequence with CTCN PAM
ucggucuacuaaaaaguuuc

SEQ ID NO: 19323 - RNA, 20 nt, Artificial Sequence
  targeting sequence with CTCN PAM
acagaaacuuuuuaguagac

SEQ ID NO: 19324 - RNA, 20 nt, Artificial Sequence
  targeting sequence with CTCN PAM
aaauuacuaaauccaaagag

SEQ ID NO: 19325 - RNA, 20 nt, Artificial Sequence
  targeting sequence with CTCN PAM
uuggauuuaguaauuuggag

SEQ ID NO: 19326 - RNA, 20 nt, Artificial Sequence
  targeting sequence with CTCN PAM
ucuuauugaccuaucugcag

SEQ ID NO: 19327 - RNA, 20 nt, Artificial Sequence
  targeting sequence with CTCN PAM
uaugaagaauuuccauacuu

SEQ ID NO: 19328 - RNA, 20 nt, Artificial Sequence
  targeting sequence with CTCN PAM
cuagauuuuccucuucucuc

SEQ ID NO: 19329 - RNA, 20 nt, Artificial Sequence
  targeting sequence with CTCN PAM
agauuuuccucuucucucau

SEQ ID NO: 19330 - RNA, 20 nt, Artificial Sequence
  targeting sequence with CTCN PAM
ucucucauaggucaaucuuc

SEQ ID NO: 19331 - RNA, 20 nt, Artificial Sequence
  targeting sequence with CTCN PAM
cauaggucaaucuucuuccu

SEQ ID NO: 19332 - RNA, 20 nt, Artificial Sequence
  targeting sequence with CTCN PAM
uaggucaaucuucuuccuuu

SEQ ID NO: 19333 - RNA, 20 nt, Artificial Sequence
  targeting sequence with CTCN PAM
cuaauuacauuuucugccua

SEQ ID NO: 19334 - RNA, 20 nt, Artificial Sequence
  targeting sequence with CTCN PAM
uuaguauccuaugacucuaa

SEQ ID NO: 19335 - RNA, 20 nt, Artificial Sequence
  targeting sequence with CTCN PAM
aagagucucuagacucaaaa

SEQ ID NO: 19336 - RNA, 20 nt, Artificial Sequence
  targeting sequence with CTCN PAM
uagagucauaggauacuaag

SEQ ID NO: 19337 - RNA, 20 nt, Artificial Sequence
  targeting sequence with CTCN PAM
agacucaaaaaugucacuua

SEQ ID NO: 19338 - RNA, 20 nt, Artificial Sequence
  targeting sequence with CTCN PAM
aaaaugucacuuaccuauuc

SEQ ID NO: 19339 - RNA, 20 nt, Artificial Sequence
  targeting sequence with CTCN PAM
agcacuuucccacaaaaccu

SEQ ID NO: 19340 - RNA, 20 nt, Artificial Sequence
  targeting sequence with CTCN PAM
agcagcauuuacaucucagu

SEQ ID NO: 19341 - RNA, 20 nt, Artificial Sequence
  targeting sequence with CTCN PAM
guuaaugacaaaucuauucu

SEQ ID NO: 19342 - RNA, 20 nt, Artificial Sequence
  targeting sequence with CTCN PAM
uaguuacugauuucuuucau

SEQ ID NO: 19343 - RNA, 20 nt, Artificial Sequence
  targeting sequence with CTCN PAM
gacaauauaugaucaugguu

SEQ ID NO: 19344 - RNA, 20 nt, Artificial Sequence
  targeting sequence with CTCN PAM
gcuuaaaauucuucaaugaa

SEQ ID NO: 19345 - RNA, 20 nt, Artificial Sequence
  targeting sequence with CTCN PAM
aaaauauuuuccaauauauu

SEQ ID NO: 19346 - RNA, 20 nt, Artificial Sequence
  targeting sequence with CTCN PAM
ugacugcaaauggcaccaug

SEQ ID NO: 19347 - RNA, 20 nt, Artificial Sequence
  targeting sequence with CTCN PAM
aguugcuagcagugagugaa

SEQ ID NO: 19348 - RNA, 20 nt, Artificial Sequence
  targeting sequence with CTCN PAM
cugcuagcaacuggaggugg

SEQ ID NO: 19349 - RNA, 20 nt, Artificial Sequence
  targeting sequence with CTCN PAM
ggugauuagugucacaugca

SEQ ID NO: 19350 - RNA, 20 nt, Artificial Sequence
  targeting sequence with CTCN PAM
cuccaguaaacugcauaucu

SEQ ID NO: 19351 - RNA, 20 nt, Artificial Sequence
  targeting sequence with CTCN PAM
ccaguaaacugcauaucuca

SEQ ID NO: 19352 - RNA, 20 nt, Artificial Sequence
  targeting sequence with CTCN PAM
aguaaacugcauaucucagu

SEQ ID NO: 19353 - RNA, 20 nt, Artificial Sequence
  targeting sequence with CTCN PAM
guaaaaagcgaucucuugag

SEQ ID NO: 19354 - RNA, 20 nt, Artificial Sequence
  targeting sequence with CTCN PAM
ugagacuucucuauuauuuu

SEQ ID NO: 19355 - RNA, 20 nt, Artificial Sequence
  targeting sequence with CTCN PAM
agagaucgcuuuuuacugag

SEQ ID NO: 19356 - RNA, 20 nt, Artificial Sequence
  targeting sequence with CTCN PAM
auuauuuuucacuguguuua

SEQ ID NO: 19357 - RNA, 20 nt, Artificial Sequence
  targeting sequence with CTCN PAM
aauaauaccaugagaugcgu

SEQ ID NO: 19358 - RNA, 20 nt, Artificial Sequence
  targeting sequence with CTCN PAM
ugguauuauucgagguuuac

SEQ ID NO: 19359 - RNA, 20 nt, Artificial Sequence
  targeting sequence with CTCN PAM
cuucuuacgcaucucauggu

SEQ ID NO: 19360 - RNA, 20 nt, Artificial Sequence
  targeting sequence with CTCN PAM
caagaagcagagaaaauguc

SEQ ID NO: 19361 - RNA, 20 nt, Artificial Sequence
  targeting sequence with CTCN PAM
gcuucuugggagcacuucag

SEQ ID NO: 19362 - RNA, 20 nt, Artificial Sequence
  targeting sequence with CTCN PAM
uccuuaugauuuuaguaaca

SEQ ID NO: 19363 - RNA, 20 nt, Artificial Sequence
  targeting sequence with CTCN PAM
agcuuacuguauuguaagaa

SEQ ID NO: 19364 - RNA, 20 nt, Artificial Sequence
  targeting sequence with CTCN PAM
auucuuacaauacaguaagc

SEQ ID NO: 19365 - RNA, 20 nt, Artificial Sequence
  targeting sequence with CTCN PAM
ggucagcaauagacuguuag

SEQ ID NO: 19366 - RNA, 20 nt, Artificial Sequence
  targeting sequence with CTCN PAM
cccaaagcuuaacuaacagu

SEQ ID NO: 19367 - RNA, 20 nt, Artificial Sequence
  targeting sequence with CTCN PAM
cacacaaucaaagauccgug

SEQ ID NO: 19368 - RNA, 20 nt, Artificial Sequence
  targeting sequence with CTCN PAM
ugaucaaaguggggauuagg

SEQ ID NO: 19369 - RNA, 20 nt, Artificial Sequence
  targeting sequence with CTCN PAM
uuuuccuggcauacaacuac

SEQ ID NO: 19370 - RNA, 20 nt, Artificial Sequence
  targeting sequence with CTCN PAM
aaagugaugugucuuuuugu

SEQ ID NO: 19371 - RNA, 20 nt, Artificial Sequence
  targeting sequence with CTCN PAM
cccugaagcugccaaccauc

SEQ ID NO: 19372 - RNA, 20 nt, Artificial Sequence
  targeting sequence with CTCN PAM
aauuaugccuuggucuuucu

SEQ ID NO: 19373 - RNA, 20 nt, Artificial Sequence
  targeting sequence with CTCN PAM
gggaggguaaaggaaggaga

SEQ ID NO: 19374 - RNA, 20 nt, Artificial Sequence
  targeting sequence with CTCN PAM
cagagguugggggguggggc

SEQ ID NO: 19375 - RNA, 20 nt, Artificial Sequence
  targeting sequence with CTCN PAM
uuccuuuacccucccagagg

SEQ ID NO: 19376 - RNA, 20 nt, Artificial Sequence
  targeting sequence with CTCN PAM
ccuuccuuuacccucccaga

SEQ ID NO: 19377 - RNA, 20 nt, Artificial Sequence
  targeting sequence with CTCN PAM
cuaacccuguccuuuugggu

SEQ ID NO: 19378 - RNA, 20 nt, Artificial Sequence
  targeting sequence with CTCN PAM
acauguucagcuauccagaa

SEQ ID NO: 19379 - RNA, 20 nt, Artificial Sequence
  targeting sequence with CTCN PAM
aggaaacuccacauguucag

SEQ ID NO: 19380 - RNA, 20 nt, Artificial Sequence
  targeting sequence with CTCN PAM
agcaaauuaacugaauccaa

SEQ ID NO: 19381 - RNA, 20 nt, Artificial Sequence
  targeting sequence with CTCN PAM
uuggauucaguuaauuugcu

SEQ ID NO: 19382 - RNA, 20 nt, Artificial Sequence
  targeting sequence with CTCN PAM
acuaguguaaucuaauacua

SEQ ID NO: 19383 - RNA, 20 nt, Artificial Sequence
  targeting sequence with CTCN PAM
agguagacagagucagaauu

SEQ ID NO: 19384 - RNA, 20 nt, Artificial Sequence
  targeting sequence with CTCN PAM
gucuaccuggagauaguauu

SEQ ID NO: 19385 - RNA, 20 nt, Artificial Sequence
  targeting sequence with CTCN PAM
acagaccuggcaucagaauu

SEQ ID NO: 19386 - RNA, 20 nt, Artificial Sequence
  targeting sequence with CTCN PAM
acaacacaauucugaugcca

SEQ ID NO: 19387 - RNA, 20 nt, Artificial Sequence
  targeting sequence with CTCN PAM
caacaacacaauucugaugc

SEQ ID NO: 19388 - RNA, 20 nt, Artificial Sequence
  targeting sequence with CTCN PAM
cacuauccucucaacaacac

SEQ ID NO: 19389 - RNA, 20 nt, Artificial Sequence
  targeting sequence with CTCN PAM
guuucucccacuauccucuc

SEQ ID NO: 19390 - RNA, 20 nt, Artificial Sequence
  targeting sequence with CTCN PAM
auuuccuuuacacucaaaug

SEQ ID NO: 19391 - RNA, 20 nt, Artificial Sequence
  targeting sequence with CTCN PAM
aauggccuucaaaggcacau

SEQ ID NO: 19392 - RNA, 20 nt, Artificial Sequence
  targeting sequence with CTCN PAM
uauacccuucccuuuauaau

SEQ ID NO: 19393 - RNA, 20 nt, Artificial Sequence
  targeting sequence with CTCN PAM
ugucaagagguggcuucugg

SEQ ID NO: 19394 - RNA, 20 nt, Artificial Sequence
  targeting sequence with CTCN PAM
ugacaggagugggaaaucca

SEQ ID NO: 19395 - RNA, 20 nt, Artificial Sequence
  targeting sequence with CTCN PAM
ugccuguaaucucaacauuu

SEQ ID NO: 19396 - RNA, 20 nt, Artificial Sequence
  targeting sequence with CTCN PAM
acauuuugggaggccaaaag

SEQ ID NO: 19397 - RNA, 20 nt, Artificial Sequence
  targeting sequence with CTCN PAM
caaaauguugagauuacagg

SEQ ID NO: 19398 - RNA, 20 nt, Artificial Sequence
  targeting sequence with CTCN PAM
ugccuuuuggccucccaaaa

SEQ ID NO: 19399 - RNA, 20 nt, Artificial Sequence
  targeting sequence with CTCN PAM
agugauccuccugccuuuug

SEQ ID NO: 19400 - RNA, 20 nt, Artificial Sequence
  targeting sequence with CTCN PAM
ugggcucaagugauccuccu

SEQ ID NO: 19401 - RNA, 20 nt, Artificial Sequence
  targeting sequence with CTCN PAM
aacuccugggcucaagugau

SEQ ID NO: 19402 - RNA, 20 nt, Artificial Sequence
  targeting sequence with CTCN PAM
gcaacauggugagacccuac

SEQ ID NO: 19403 - RNA, 20 nt, Artificial Sequence
  targeting sequence with CTCN PAM
ccauguugcugaggcuuggu

SEQ ID NO: 19404 - RNA, 20 nt, Artificial Sequence
  targeting sequence with CTCN PAM
acaaaaaagaaauaaauuag

SEQ ID NO: 19405 - RNA, 20 nt, Artificial Sequence
  targeting sequence with CTCN PAM
acccacuauuccuuuagggc

SEQ ID NO: 19406 - RNA, 20 nt, Artificial Sequence
  targeting sequence with CTCN PAM
ccuaugaauccuuuccuucu

SEQ ID NO: 19407 - RNA, 20 nt, Artificial Sequence
  targeting sequence with CTCN PAM
uaugaauccuuuccuucuga

SEQ ID NO: 19408 - RNA, 20 nt, Artificial Sequence
  targeting sequence with CTCN PAM
cccugggcuagcauucuuaa

SEQ ID NO: 19409 - RNA, 20 nt, Artificial Sequence
  targeting sequence with CTCN PAM
gaacaaacagagauguguca

SEQ ID NO: 19410 - RNA, 20 nt, Artificial Sequence
  targeting sequence with CTCN PAM
guuuguucugagguuauaaa

SEQ ID NO: 19411 - RNA, 20 nt, Artificial Sequence
  targeting sequence with CTCN PAM
uuuucuguuguuugcuauau

SEQ ID NO: 19412 - RNA, 20 nt, Artificial Sequence
  targeting sequence with CTCN PAM
ggucuguacccucuuuuucu

SEQ ID NO: 19413 - RNA, 20 nt, Artificial Sequence
  targeting sequence with CTCN PAM
uaugccuuaugguugauaau

SEQ ID NO: 19414 - RNA, 20 nt, Artificial Sequence
  targeting sequence with CTCN PAM
auagcaaacaauaugaaugu

SEQ ID NO: 19415 - RNA, 20 nt, Artificial Sequence
  targeting sequence with CTCN PAM
uuugcuuuaguauuuaucuc

SEQ ID NO: 19416 - RNA, 20 nt, Artificial Sequence
  targeting sequence with CTCN PAM
uagaaaauauguaucauuua

SEQ ID NO: 19417 - RNA, 20 nt, Artificial Sequence
  targeting sequence with CTCN PAM
ggacuauggaugaaauguga

SEQ ID NO: 19418 - RNA, 20 nt, Artificial Sequence
  targeting sequence with CTCN PAM
aauccaguuuuaucucagag

SEQ ID NO: 19419 - RNA, 20 nt, Artificial Sequence
  targeting sequence with CTCN PAM
gagauuuguucugcugaucu

SEQ ID NO: 19420 - RNA, 20 nt, Artificial Sequence
  targeting sequence with CTCN PAM
gagauaaaacuggauuggag

SEQ ID NO: 19421 - RNA, 20 nt, Artificial Sequence
  targeting sequence with CTCN PAM
agaucagcagaacaaaucuc

SEQ ID NO: 19422 - RNA, 20 nt, Artificial Sequence
  targeting sequence with CTCN PAM
gugugaaacuuguaucucca

SEQ ID NO: 19423 - RNA, 20 nt, Artificial Sequence
  targeting sequence with CTCN PAM
gcuacuuauuuucaaaguau

SEQ ID NO: 19424 - RNA, 20 nt, Artificial Sequence
  targeting sequence with CTCN PAM
aaaucaaauuccuauuuguu

SEQ ID NO: 19425 - RNA, 20 nt, Artificial Sequence
  targeting sequence with CTCN PAM
uguucauugaaagaaacacu

SEQ ID NO: 19426 - RNA, 20 nt, Artificial Sequence
  targeting sequence with CTCN PAM
agcgaaauaguuacuggaaa

SEQ ID NO: 19427 - RNA, 20 nt, Artificial Sequence
  targeting sequence with CTCN PAM
cuuucucaagcgaaauaguu

SEQ ID NO: 19428 - RNA, 20 nt, Artificial Sequence
  targeting sequence with CTCN PAM
gcaaugaagcagcccauuac

SEQ ID NO: 19429 - RNA, 20 nt, Artificial Sequence
  targeting sequence with CTCN PAM
uguguguaaugggcugcuuc

SEQ ID NO: 19430 - RNA, 20 nt, Artificial Sequence
  targeting sequence with CTCN PAM
aggaugaucugagcaugucc

SEQ ID NO: 19431 - RNA, 20 nt, Artificial Sequence
  targeting sequence with CTCN PAM
gaucauccuggagugucccg

SEQ ID NO: 19432 - RNA, 20 nt, Artificial Sequence
  targeting sequence with CTCN PAM
guagcuguauggacaugcuc

SEQ ID NO: 19433 - RNA, 20 nt, Artificial Sequence
  targeting sequence with CTCN PAM
acauucuguccaaauagcuu

SEQ ID NO: 19434 - RNA, 20 nt, Artificial Sequence
  targeting sequence with CTCN PAM
auuauuacaaccuuacacaa

SEQ ID NO: 19435 - RNA, 20 nt, Artificial Sequence
  targeting sequence with CTCN PAM
gccaggggcauuugcuauuu

SEQ ID NO: 19436 - RNA, 20 nt, Artificial Sequence
  targeting sequence with CTCN PAM
ggcuauuuccuuugucuguc

SEQ ID NO: 19437 - RNA, 20 nt, Artificial Sequence
  targeting sequence with CTCN PAM
uccugaauccuauaguuagu

SEQ ID NO: 19438 - RNA, 20 nt, Artificial Sequence
  targeting sequence with CTCN PAM
gaaaccguauguuguauaug

SEQ ID NO: 19439 - RNA, 20 nt, Artificial Sequence
  targeting sequence with CTCN PAM
ucggaaaccguauguuguau

SEQ ID NO: 19440 - RNA, 20 nt, Artificial Sequence
  targeting sequence with CTCN PAM
ccucggaaaccguauguugu

SEQ ID NO: 19441 - RNA, 20 nt, Artificial Sequence
  targeting sequence with CTCN PAM
cucuccucggaaaccguaug

SEQ ID NO: 19442 - RNA, 20 nt, Artificial Sequence
  targeting sequence with CTCN PAM
augcuugugagagaggagga

SEQ ID NO: 19443 - RNA, 20 nt, Artificial Sequence
  targeting sequence with CTCN PAM
caagcauggagcccucacuc

SEQ ID NO: 19444 - RNA, 20 nt, Artificial Sequence
  targeting sequence with CTCN PAM
cacaagcauggagcccucac

SEQ ID NO: 19445 - RNA, 20 nt, Artificial Sequence
  targeting sequence with CTCN PAM
cucacaagcauggagcccuc

SEQ ID NO: 19446 - RNA, 20 nt, Artificial Sequence
  targeting sequence with CTCN PAM
ucucucacaagcauggagcc

SEQ ID NO: 19447 - RNA, 20 nt, Artificial Sequence
  targeting sequence with CTCN PAM
uccucucucacaagcaugga

SEQ ID NO: 19448 - RNA, 20 nt, Artificial Sequence
  targeting sequence with CTCN PAM
uccuccucucucacaagcau

SEQ ID NO: 19449 - RNA, 20 nt, Artificial Sequence
  targeting sequence with CTCN PAM
gguuucucccagauuugaac

SEQ ID NO: 19450 - RNA, 20 nt, Artificial Sequence
  targeting sequence with CTCN PAM
cagauuugaacauguuguac

SEQ ID NO: 19451 - RNA, 20 nt, Artificial Sequence
  targeting sequence with CTCN PAM
ugccacaguacaacauguuc

SEQ ID NO: 19452 - RNA, 20 nt, Artificial Sequence
  targeting sequence with CTCN PAM
gcugaccucaugccacagua

SEQ ID NO: 19453 - RNA, 20 nt, Artificial Sequence
  targeting sequence with CTCN PAM
agcccugugaggcugaauuc

SEQ ID NO: 19454 - RNA, 20 nt, Artificial Sequence
  targeting sequence with CTCN PAM
cagggcuggaguaagucucu

SEQ ID NO: 19455 - RNA, 20 nt, Artificial Sequence
  targeting sequence with CTCN PAM
ugcuucauauuacagugaua

SEQ ID NO: 19456 - RNA, 20 nt, Artificial Sequence
  targeting sequence with CTCN PAM
uguuuuggaauugccauuac

SEQ ID NO: 19457 - RNA, 20 nt, Artificial Sequence
  targeting sequence with CTCN PAM
ugugacaccauagaucucuu

SEQ ID NO: 19458 - RNA, 20 nt, Artificial Sequence
  targeting sequence with CTCN PAM
aaaguuuaaugguagaaaag

SEQ ID NO: 19459 - RNA, 20 nt, Artificial Sequence
  targeting sequence with CTCN PAM
uugacccuauuuugugucug

SEQ ID NO: 19460 - RNA, 20 nt, Artificial Sequence
  targeting sequence with CTCN PAM
agacacaaaauagggucaag

SEQ ID NO: 19461 - RNA, 20 nt, Artificial Sequence
  targeting sequence with CTCN PAM
gugacuuuacuauggaacag

SEQ ID NO: 19462 - RNA, 20 nt, Artificial Sequence
  targeting sequence with CTCN PAM
cuguuccauaguaaagucac

SEQ ID NO: 19463 - RNA, 20 nt, Artificial Sequence
  targeting sequence with CTCN PAM
uuuuucauaugugcccaaaa

SEQ ID NO: 19464 - RNA, 20 nt, Artificial Sequence
  targeting sequence with CTCN PAM
aaagaagaggggcacuaaaa

SEQ ID NO: 19465 - RNA, 20 nt, Artificial Sequence
  targeting sequence with CTCN PAM
ucuuuggaggaagaauuucu

SEQ ID NO: 19466 - RNA, 20 nt, Artificial Sequence
  targeting sequence with CTCN PAM
uuuuuuagugccccucuucu

SEQ ID NO: 19467 - RNA, 20 nt, Artificial Sequence
  targeting sequence with CTCN PAM
ugguagaaaauucauguucu

SEQ ID NO: 19468 - RNA, 20 nt, Artificial Sequence
  targeting sequence with CTCN PAM
auugucuuguguuuccuggc

SEQ ID NO: 19469 - RNA, 20 nt, Artificial Sequence
  targeting sequence with CTCN PAM
uuaucccacugaacuauuga

SEQ ID NO: 19470 - RNA, 20 nt, Artificial Sequence
  targeting sequence with CTCN PAM
gaaagaguaaucuacuuuga

SEQ ID NO: 19471 - RNA, 20 nt, Artificial Sequence
  targeting sequence with CTCN PAM
uucagagguucuuauaaaau

SEQ ID NO: 19472 - RNA, 20 nt, Artificial Sequence
  targeting sequence with CTCN PAM
gaacuaaaaaauuuaguacg

SEQ ID NO: 19473 - RNA, 20 nt, Artificial Sequence
  targeting sequence with CTCN PAM
auuucuguucuuucuacuaa

SEQ ID NO: 19474 - RNA, 20 nt, Artificial Sequence
  targeting sequence with CTCN PAM
uacaaucuuguuccuacuuc

SEQ ID NO: 19475 - RNA, 20 nt, Artificial Sequence
  targeting sequence with CTCN PAM
ucaauuucugcaauguacuc

SEQ ID NO: 19476 - RNA, 20 nt, Artificial Sequence
  targeting sequence with CTCN PAM
cuuugcagagauguucaugg

SEQ ID NO: 19477 - RNA, 20 nt, Artificial Sequence
  targeting sequence with CTCN PAM
gcaaagugaguacauugcag

SEQ ID NO: 19478 - RNA, 20 nt, Artificial Sequence
  targeting sequence with CTCN PAM
agacuuuccuuugguaacua

SEQ ID NO: 19479 - RNA, 20 nt, Artificial Sequence
  targeting sequence with CTCN PAM
ccagacuuuccuuugguaac

SEQ ID NO: 19480 - RNA, 20 nt, Artificial Sequence
  targeting sequence with CTCN PAM
gcaguucccuccucuccugg

SEQ ID NO: 19481 - RNA, 20 nt, Artificial Sequence
  targeting sequence with CTCN PAM
ucuccugguagacaugcagc

SEQ ID NO: 19482 - RNA, 20 nt, Artificial Sequence
  targeting sequence with CTCN PAM
ccugguagacaugcagcagc

SEQ ID NO: 19483 - RNA, 20 nt, Artificial Sequence
  targeting sequence with CTCN PAM
ugguagacaugcagcagcag

SEQ ID NO: 19484 - RNA, 20 nt, Artificial Sequence
  targeting sequence with CTCN PAM
gcuaugauggaaauagcuug

SEQ ID NO: 19485 - RNA, 20 nt, Artificial Sequence
  targeting sequence with CTCN PAM
ugaccagacuuccuguugau

SEQ ID NO: 19486 - RNA, 20 nt, Artificial Sequence
  targeting sequence with CTCN PAM
ggcuugccccgccuacuaug

SEQ ID NO: 19487 - RNA, 20 nt, Artificial Sequence
  targeting sequence with CTCN PAM
cuucaucuuggguggcacuc

SEQ ID NO: 19488 - RNA, 20 nt, Artificial Sequence
  targeting sequence with CTCN PAM
ucaucuuggguggcacucga

SEQ ID NO: 19489 - RNA, 20 nt, Artificial Sequence
  targeting sequence with CTCN PAM
aaucugcugcaggacacgau

SEQ ID NO: 19490 - RNA, 20 nt, Artificial Sequence
  targeting sequence with CTCN PAM
gaaucguguccugcagcaga

SEQ ID NO: 19491 - RNA, 20 nt, Artificial Sequence
  targeting sequence with CTCN PAM
gcacaugcguucuggcuuuc

SEQ ID NO: 19492 - RNA, 20 nt, Artificial Sequence
  targeting sequence with CTCN PAM
acaugaugugcagcaaauuc

SEQ ID NO: 19493 - RNA, 20 nt, Artificial Sequence
  targeting sequence with CTCN PAM
ugcgcuggugcuggaagaga

SEQ ID NO: 19494 - RNA, 20 nt, Artificial Sequence
  targeting sequence with CTCN PAM
uccagcaccagcgcaggagg

SEQ ID NO: 19495 - RNA, 20 nt, Artificial Sequence
  targeting sequence with CTCN PAM
aaagcauugugggucauuuu

SEQ ID NO: 19496 - RNA, 20 nt, Artificial Sequence
  targeting sequence with CTCN PAM
gcaucuugggauuugccucc

SEQ ID NO: 19497 - RNA, 20 nt, Artificial Sequence
  targeting sequence with CTCN PAM
aggaucaggguccucaaaua

SEQ ID NO: 19498 - RNA, 20 nt, Artificial Sequence
  targeting sequence with CTCN PAM
aauaacuguucacugcccga

SEQ ID NO: 19499 - RNA, 20 nt, Artificial Sequence
  targeting sequence with CTCN PAM
aucaguagacuuaauaugcu

SEQ ID NO: 19500 - RNA, 20 nt, Artificial Sequence
  targeting sequence with CTCN PAM
aaaaaauuuuuuaaacacac

SEQ ID NO: 19501 - RNA, 20 nt, Artificial Sequence
  targeting sequence with CTCN PAM
ugguguguuuaaaaaauuuu

SEQ ID NO: 19502 - RNA, 20 nt, Artificial Sequence
  targeting sequence with CTCN PAM
cagcugcaugcguagucacu

SEQ ID NO: 19503 - RNA, 20 nt, Artificial Sequence
  targeting sequence with CTCN PAM
agcugaggcaauuuaauccc

SEQ ID NO: 19504 - RNA, 20 nt, Artificial Sequence
  targeting sequence with CTCN PAM
gcuagaguaaaccuauugga

SEQ ID NO: 19505 - RNA, 20 nt, Artificial Sequence
  targeting sequence with CTCN PAM
cauucauaaccacaguuaau

SEQ ID NO: 19506 - RNA, 20 nt, Artificial Sequence
  targeting sequence with CTCN PAM
uucauaaccacaguuaauua

SEQ ID NO: 19507 - RNA, 20 nt, Artificial Sequence
  targeting sequence with CTCN PAM
guauaaucaaagaacaacag

SEQ ID NO: 19508 - RNA, 20 nt, Artificial Sequence
  targeting sequence with CTCN PAM
cuguuguucuuugauuauac

SEQ ID NO: 19509 - RNA, 20 nt, Artificial Sequence
  targeting sequence with CTCN PAM
aguuaccagugaacuugaug

SEQ ID NO: 19510 - RNA, 20 nt, Artificial Sequence
  targeting sequence with CTCN PAM
uuugagaagagaauggaaau

SEQ ID NO: 19511 - RNA, 20 nt, Artificial Sequence
  targeting sequence with CTCN PAM
aaagagcaaaccugucaucu

SEQ ID NO: 19512 - RNA, 20 nt, Artificial Sequence
  targeting sequence with CTCN PAM
ucucaaaagagcaaaccugu

SEQ ID NO: 19513 - RNA, 20 nt, Artificial Sequence
  targeting sequence with CTCN PAM
gcugaagcacaaaugaccuu

SEQ ID NO: 19514 - RNA, 20 nt, Artificial Sequence
  targeting sequence with CTCN PAM
uauggugccagaaaggucau

SEQ ID NO: 19515 - RNA, 20 nt, Artificial Sequence
  targeting sequence with CTCN PAM
gauucugauucugucugaac

SEQ ID NO: 19516 - RNA, 20 nt, Artificial Sequence
  targeting sequence with CTCN PAM
agucucugauucugauucug

SEQ ID NO: 19517 - RNA, 20 nt, Artificial Sequence
  targeting sequence with CTCN PAM
guaccagcuaucaagaaagg

SEQ ID NO: 19518 - RNA, 20 nt, Artificial Sequence
  targeting sequence with CTCN PAM
uuucuugauagcugguacug

SEQ ID NO: 19519 - RNA, 20 nt, Artificial Sequence
  targeting sequence with CTCN PAM
auagugucaucccugacaga

SEQ ID NO: 19520 - RNA, 20 nt, Artificial Sequence
  targeting sequence with CTCN PAM
aaagcaaaguaacuggguag

SEQ ID NO: 19521 - RNA, 20 nt, Artificial Sequence
  targeting sequence with CTCN PAM
acuuuucuauccuacccagu

SEQ ID NO: 19522 - RNA, 20 nt, Artificial Sequence
  targeting sequence with CTCN PAM
uaguuucagcuuccuuuuaa

SEQ ID NO: 19523 - RNA, 20 nt, Artificial Sequence
  targeting sequence with CTCN PAM
cuuuuuuuuuuuuuuuuuuu

SEQ ID NO: 19524 - RNA, 20 nt, Artificial Sequence
  targeting sequence with CTCN PAM
caucccccccucccuuuuuu

SEQ ID NO: 19525 - RNA, 20 nt, Artificial Sequence
  targeting sequence with CTCN PAM
ucaucucccaucccccccuc

SEQ ID NO: 19526 - RNA, 20 nt, Artificial Sequence
  targeting sequence with CTCN PAM
uacaucauauuuugcauucu

SEQ ID NO: 19527 - RNA, 20 nt, Artificial Sequence
  targeting sequence with CTCN PAM
cuacacuaccaaguacuuca

SEQ ID NO: 19528 - RNA, 20 nt, Artificial Sequence
  targeting sequence with CTCN PAM
uguucugggaauauguggac

SEQ ID NO: 19529 - RNA, 20 nt, Artificial Sequence
  targeting sequence with CTCN PAM
uuuauucagcuaauuuaugg

SEQ ID NO: 19530 - RNA, 20 nt, Artificial Sequence
  targeting sequence with CTCN PAM
aggcuacuagaguuuagugg

SEQ ID NO: 19531 - RNA, 20 nt, Artificial Sequence
  targeting sequence with CTCN PAM
aguagccuugaguucacagg

SEQ ID NO: 19532 - RNA, 20 nt, Artificial Sequence
  targeting sequence with CTCN PAM
cuaaaguuuuguuccugaug

SEQ ID NO: 19533 - RNA, 20 nt, Artificial Sequence
  targeting sequence with CTCN PAM
cagaagacuuuuuucaaaua

SEQ ID NO: 19534 - RNA, 20 nt, Artificial Sequence
  targeting sequence with CTCN PAM
gaagacuuuuuucaaauauu

SEQ ID NO: 19535 - RNA, 20 nt, Artificial Sequence
  targeting sequence with CTCN PAM
acuguccauauucuuucaug

SEQ ID NO: 19536 - RNA, 20 nt, Artificial Sequence
  targeting sequence with CTCN PAM
ucauaacagaggagcauaaa

SEQ ID NO: 19537 - RNA, 20 nt, Artificial Sequence
  targeting sequence with CTCN PAM
guuaugaagagauuagguaa

SEQ ID NO: 19538 - RNA, 20 nt, Artificial Sequence
  targeting sequence with CTCN PAM
ucuguuaugaagagauuagg

SEQ ID NO: 19539 - RNA, 20 nt, Artificial Sequence
  targeting sequence with CTCN PAM
cuguuuaugcuccucuguua

SEQ ID NO: 19540 - RNA, 20 nt, Artificial Sequence
  targeting sequence with CTCN PAM
cucuaguaccuuccuacuuu

SEQ ID NO: 19541 - RNA, 20 nt, Artificial Sequence
  targeting sequence with CTCN PAM
cuaguaccuuccuacuuucu

SEQ ID NO: 19542 - RNA, 20 nt, Artificial Sequence
  targeting sequence with CTCN PAM
aguaccuuccuacuuucuaa

SEQ ID NO: 19543 - RNA, 20 nt, Artificial Sequence
  targeting sequence with CTCN PAM
ugguuguuauucauuugccu

SEQ ID NO: 19544 - RNA, 20 nt, Artificial Sequence
  targeting sequence with CTCN PAM
acugaaaucuagccauccca

SEQ ID NO: 19545 - RNA, 20 nt, Artificial Sequence
  targeting sequence with CTCN PAM
caaagggaaagauaugaaca

SEQ ID NO: 19546 - RNA, 20 nt, Artificial Sequence
  targeting sequence with CTCN PAM
ggugugguuuucuggugcuc

SEQ ID NO: 19547 - RNA, 20 nt, Artificial Sequence
  targeting sequence with CTCN PAM
uugugggcaaaaauuuugcc

SEQ ID NO: 19548 - RNA, 20 nt, Artificial Sequence
  targeting sequence with CTCN PAM
gauuuuuaaaaaaaauagua

SEQ ID NO: 19549 - RNA, 20 nt, Artificial Sequence
  targeting sequence with CTCN PAM
ccauuccucaugaguuuguc

SEQ ID NO: 19550 - RNA, 20 nt, Artificial Sequence
  targeting sequence with CTCN PAM
ugaguuugucuugcuggcua

SEQ ID NO: 19551 - RNA, 20 nt, Artificial Sequence
  targeting sequence with CTCN PAM
ugaggaauggugagauaauu

SEQ ID NO: 19552 - RNA, 20 nt, Artificial Sequence
  targeting sequence with CTCN PAM
auucuuucaguaacuauuag

SEQ ID NO: 19553 - RNA, 20 nt, Artificial Sequence
  targeting sequence with CTCN PAM
gaggaaaagggcuaauguaa

SEQ ID NO: 19554 - RNA, 20 nt, Artificial Sequence
  targeting sequence with CTCN PAM
gagaaacucaauucuuucag

SEQ ID NO: 19555 - RNA, 20 nt, Artificial Sequence
  targeting sequence with CTCN PAM
ucucuucuugcacugggcua

SEQ ID NO: 19556 - RNA, 20 nt, Artificial Sequence
  targeting sequence with CTCN PAM
ucuugcacugggcuauuuag

SEQ ID NO: 19557 - RNA, 20 nt, Artificial Sequence
  targeting sequence with CTCN PAM
ggaucuaaauagcccagugc

SEQ ID NO: 19558 - RNA, 20 nt, Artificial Sequence
  targeting sequence with CTCN PAM
caucuucucaggaucuaaau

SEQ ID NO: 19559 - RNA, 20 nt, Artificial Sequence
  targeting sequence with CTCN PAM
auuugcacauuauuagcuaa

SEQ ID NO: 19560 - RNA, 20 nt, Artificial Sequence
  targeting sequence with CTCN PAM
ugggauaaacauauuuuaua

SEQ ID NO: 19561 - RNA, 20 nt, Artificial Sequence
  targeting sequence with CTCN PAM
gcuaaccuugacaucauucc

SEQ ID NO: 19562 - RNA, 20 nt, Artificial Sequence
  targeting sequence with CTCN PAM
uaugcaaagguacuaggaau

SEQ ID NO: 19563 - RNA, 20 nt, Artificial Sequence
  targeting sequence with CTCN PAM
gcaaaucuacuuauuugggc

SEQ ID NO: 19564 - RNA, 20 nt, Artificial Sequence
  targeting sequence with CTCN PAM
cuuagcaugcagcccuaaag

SEQ ID NO: 19565 - RNA, 20 nt, Artificial Sequence
  targeting sequence with CTCN PAM
auuuagguuucuuuagggcu

SEQ ID NO: 19566 - RNA, 20 nt, Artificial Sequence
  targeting sequence with CTCN PAM
auaaaauugcugacaguaag

SEQ ID NO: 19567 - RNA, 20 nt, Artificial Sequence
  targeting sequence with CTCN PAM
aaguuguacagggacacccu

SEQ ID NO: 19568 - RNA, 20 nt, Artificial Sequence
  targeting sequence with CTCN PAM
guaagacauacagaagaaaa

SEQ ID NO: 19569 - RNA, 20 nt, Artificial Sequence
  targeting sequence with CTCN PAM
aaugaauaugaacaacuguu

SEQ ID NO: 19570 - RNA, 20 nt, Artificial Sequence
  targeting sequence with CTCN PAM
guuuauaaaauuccccaauu

SEQ ID NO: 19571 - RNA, 20 nt, Artificial Sequence
  targeting sequence with CTCN PAM
aaauaaauaaauaguuaauu

SEQ ID NO: 19572 - RNA, 20 nt, Artificial Sequence
  targeting sequence with CTCN PAM
cccugccacccaggcuggag

SEQ ID NO: 19573 - RNA, 20 nt, Artificial Sequence
  targeting sequence with CTCN PAM
agccuggguggcagggggag

SEQ ID NO: 19574 - RNA, 20 nt, Artificial Sequence
  targeting sequence with CTCN PAM
gcucacugcaaccucugccu

SEQ ID NO: 19575 - RNA, 20 nt, Artificial Sequence
  targeting sequence with CTCN PAM
cugcaaccucugccuucugg

SEQ ID NO: 19576 - RNA, 20 nt, Artificial Sequence
  targeting sequence with CTCN PAM
gccuucuggguucaagcaau

SEQ ID NO: 19577 - RNA, 20 nt, Artificial Sequence
  targeting sequence with CTCN PAM
uaccucugccucucaaguag

SEQ ID NO: 19578 - RNA, 20 nt, Artificial Sequence
  targeting sequence with CTCN PAM
gccucucaaguagcugggau

SEQ ID NO: 19579 - RNA, 20 nt, Artificial Sequence
  targeting sequence with CTCN PAM
caaguagcugggauuacagg

SEQ ID NO: 19580 - RNA, 20 nt, Artificial Sequence
  targeting sequence with CTCN PAM
aguagcugggauuacaggcg

SEQ ID NO: 19581 - RNA, 20 nt, Artificial Sequence
  targeting sequence with CTCN PAM
aacuccugaccucaagugau

SEQ ID NO: 19582 - RNA, 20 nt, Artificial Sequence
  targeting sequence with CTCN PAM
ugaccucaagugauccaccc

SEQ ID NO: 19583 - RNA, 20 nt, Artificial Sequence
  targeting sequence with CTCN PAM
agugauccacccuccucagc

SEQ ID NO: 19584 - RNA, 20 nt, Artificial Sequence
  targeting sequence with CTCN PAM
ucagccucccaaagugcuag

SEQ ID NO: 19585 - RNA, 20 nt, Artificial Sequence
  targeting sequence with CTCN PAM
gccucccaaagugcuaggau

SEQ ID NO: 19586 - RNA, 20 nt, Artificial Sequence
  targeting sequence with CTCN PAM
caaagugcuaggauuauagg

SEQ ID NO: 19587 - RNA, 20 nt, Artificial Sequence
  targeting sequence with CTCN PAM
ugccuauaauccuagcacuu

SEQ ID NO: 19588 - RNA, 20 nt, Artificial Sequence
  targeting sequence with CTCN PAM
uuuguguuaaaccagggauc

SEQ ID NO: 19589 - RNA, 20 nt, Artificial Sequence
  targeting sequence with CTCN PAM
uuuauucacucagcuucucu

SEQ ID NO: 19590 - RNA, 20 nt, Artificial Sequence
  targeting sequence with CTCN PAM
gcuucucugaaaaguaaagu

SEQ ID NO: 19591 - RNA, 20 nt, Artificial Sequence
  targeting sequence with CTCN PAM
gaaaaguaaaguuauuauaa

SEQ ID NO: 19592 - RNA, 20 nt, Artificial Sequence
  targeting sequence with CTCN PAM
gguuuacuuauaauaacuuu

SEQ ID NO: 19593 - RNA, 20 nt, Artificial Sequence
  targeting sequence with CTCN PAM
cucugguuuacuuauaauaa

SEQ ID NO: 19594 - RNA, 20 nt, Artificial Sequence
  targeting sequence with CTCN PAM
uucucccucugguuuacuua

SEQ ID NO: 19595 - RNA, 20 nt, Artificial Sequence
  targeting sequence with CTCN PAM
uuuuucucuuucucccucug

SEQ ID NO: 19596 - RNA, 20 nt, Artificial Sequence
  targeting sequence with CTCN PAM
ccuuuuuccuguguccuuuu

SEQ ID NO: 19597 - RNA, 20 nt, Artificial Sequence
  targeting sequence with CTCN PAM
ccccuuuuuccuguguccuu

SEQ ID NO: 19598 - RNA, 20 nt, Artificial Sequence
  targeting sequence with CTCN PAM
uucgaccucuccccuuuuuc

SEQ ID NO: 19599 - RNA, 20 nt, Artificial Sequence
  targeting sequence with CTCN PAM
ccuuucacuccuucgaccuc

SEQ ID NO: 19600 - RNA, 20 nt, Artificial Sequence
  targeting sequence with CTCN PAM
ccccuuucacuccuucgacc

SEQ ID NO: 19601 - RNA, 20 nt, Artificial Sequence
  targeting sequence with CTCN PAM
uucuaccucuccccuuucac

SEQ ID NO: 19602 - RNA, 20 nt, Artificial Sequence
  targeting sequence with CTCN PAM
ccuuuugcuccuucuaccuc

SEQ ID NO: 19603 - RNA, 20 nt, Artificial Sequence
  targeting sequence with CTCN PAM
gaauuuucaacaauuaacuu

SEQ ID NO: 19604 - RNA, 20 nt, Artificial Sequence
  targeting sequence with CTCN PAM
cacucagaaaacaaguuguu

SEQ ID NO: 19605 - RNA, 20 nt, Artificial Sequence
  targeting sequence with CTCN PAM
gaaaacaaguuguucuaaau

SEQ ID NO: 19606 - RNA, 20 nt, Artificial Sequence
  targeting sequence with CTCN PAM
uaaaugguugauagauuuua

SEQ ID NO: 19607 - RNA, 20 nt, Artificial Sequence
  targeting sequence with CTCN PAM
uuguagucagugaaauuuaa

SEQ ID NO: 19608 - RNA, 20 nt, Artificial Sequence
  targeting sequence with CTCN PAM
uccuuaagcacuucuaaggu

SEQ ID NO: 19609 - RNA, 20 nt, Artificial Sequence
  targeting sequence with CTCN PAM
ccuuguaauucuuaauauuu

SEQ ID NO: 19610 - RNA, 20 nt, Artificial Sequence
  targeting sequence with CTCN PAM
ucucucacugguagaaguag

SEQ ID NO: 19611 - RNA, 20 nt, Artificial Sequence
  targeting sequence with CTCN PAM
cacugguagaaguaggguuu

SEQ ID NO: 19612 - RNA, 20 nt, Artificial Sequence
  targeting sequence with CTCN PAM
cugguagaaguaggguuugu

SEQ ID NO: 19613 - RNA, 20 nt, Artificial Sequence
  targeting sequence with CTCN PAM
auucaaaggcaauucuaaaa

SEQ ID NO: 19614 - RNA, 20 nt, Artificial Sequence
  targeting sequence with CTCN PAM
ugccuguaaucccagcacuc

SEQ ID NO: 19615 - RNA, 20 nt, Artificial Sequence
  targeting sequence with CTCN PAM
gaggcaggaagaucaucuga

SEQ ID NO: 19616 - RNA, 20 nt, Artificial Sequence
  targeting sequence with CTCN PAM
gagugcugggauuacaggca

SEQ ID NO: 19617 - RNA, 20 nt, Artificial Sequence
  targeting sequence with CTCN PAM
gaugaucuuccugccucgga

SEQ ID NO: 19618 - RNA, 20 nt, Artificial Sequence
  targeting sequence with CTCN PAM
aauuccugggcucagaugau

SEQ ID NO: 19619 - RNA, 20 nt, Artificial Sequence
  targeting sequence with CTCN PAM
aaaacaauuuuuaaagauua

SEQ ID NO: 19620 - RNA, 20 nt, Artificial Sequence
  targeting sequence with CTCN PAM
aggaauuaaucuaggacaga

SEQ ID NO: 19621 - RNA, 20 nt, Artificial Sequence
  targeting sequence with CTCN PAM
agggcagggucauaugcuuu

SEQ ID NO: 19622 - RNA, 20 nt, Artificial Sequence
  targeting sequence with CTCN PAM
guaaaagcugcugcuuuuuu

SEQ ID NO: 19623 - RNA, 20 nt, Artificial Sequence
  targeting sequence with CTCN PAM
gaaggaugagacaauggaua

SEQ ID NO: 19624 - RNA, 20 nt, Artificial Sequence
  targeting sequence with CTCN PAM
uccuucagagcucaguaaaa

SEQ ID NO: 19625 - RNA, 20 nt, Artificial Sequence
  targeting sequence with CTCN PAM
ugcaucuuacaugaucauua

SEQ ID NO: 19626 - RNA, 20 nt, Artificial Sequence
  targeting sequence with CTCN PAM
caugcaucuuacaugaucau

SEQ ID NO: 19627 - RNA, 20 nt, Artificial Sequence
  targeting sequence with CTCN PAM
ucucaugcaucuuacaugau

SEQ ID NO: 19628 - RNA, 20 nt, Artificial Sequence
  targeting sequence with CTCN PAM
gauuaucaucuuucccuccu

SEQ ID NO: 19629 - RNA, 20 nt, Artificial Sequence
  targeting sequence with CTCN PAM
uccuugucaucuuuuucuaa

SEQ ID NO: 19630 - RNA, 20 nt, Artificial Sequence
  targeting sequence with CTCN PAM
gcucuuccuugucaucuuuu

SEQ ID NO: 19631 - RNA, 20 nt, Artificial Sequence
  targeting sequence with CTCN PAM
uuccuuuccauuaacuuuuu

SEQ ID NO: 19632 - RNA, 20 nt, Artificial Sequence
  targeting sequence with CTCN PAM
ucaguacuuugugcgcucau

SEQ ID NO: 19633 - RNA, 20 nt, Artificial Sequence
  targeting sequence with CTCN PAM
uaccauugcgacagaugcua

SEQ ID NO: 19634 - RNA, 20 nt, Artificial Sequence
  targeting sequence with CTCN PAM
uuuuaucagaugcuuuuuua

SEQ ID NO: 19635 - RNA, 20 nt, Artificial Sequence
  targeting sequence with CTCN PAM
gcuggaaacguauuacgagu

SEQ ID NO: 19636 - RNA, 20 nt, Artificial Sequence
  targeting sequence with CTCN PAM
uaauacguuuccagcugaga

SEQ ID NO: 19637 - RNA, 20 nt, Artificial Sequence
  targeting sequence with CTCN PAM
ugcaucuuauuucaacaauu

SEQ ID NO: 19638 - RNA, 20 nt, Artificial Sequence
  targeting sequence with CTCN PAM
cucuagacgguugugagagc

SEQ ID NO: 19639 - RNA, 20 nt, Artificial Sequence
  targeting sequence with CTCN PAM
agacgguugugagagcuauu

SEQ ID NO: 19640 - RNA, 20 nt, Artificial Sequence
  targeting sequence with CTCN PAM
caaccgucuagagggagccc

SEQ ID NO: 19641 - RNA, 20 nt, Artificial Sequence
  targeting sequence with CTCN PAM
cacaaccgucuagagggagc

SEQ ID NO: 19642 - RNA, 20 nt, Artificial Sequence
  targeting sequence with CTCN PAM
uauuccuuuagaccugcuua

SEQ ID NO: 19643 - RNA, 20 nt, Artificial Sequence
  targeting sequence with CTCN PAM
uucaagcagaaagagaucau

SEQ ID NO: 19644 - RNA, 20 nt, Artificial Sequence
  targeting sequence with CTCN PAM
uucugcuugaaagaguauau

SEQ ID NO: 19645 - RNA, 20 nt, Artificial Sequence
  targeting sequence with CTCN PAM
caaauuuuaaaaaaacugaa

SEQ ID NO: 19646 - RNA, 20 nt, Artificial Sequence
  targeting sequence with CTCN PAM
gaccacaauguggauuccug

SEQ ID NO: 19647 - RNA, 20 nt, Artificial Sequence
  targeting sequence with CTCN PAM
ggaauccacauuguggucag

SEQ ID NO: 19648 - RNA, 20 nt, Artificial Sequence
  targeting sequence with CTCN PAM
uuuugaaccucaggaaucca

SEQ ID NO: 19649 - RNA, 20 nt, Artificial Sequence
  targeting sequence with CTCN PAM
cagcucuuuuugaaccucag

SEQ ID NO: 19650 - RNA, 20 nt, Artificial Sequence
  targeting sequence with CTCN PAM
aggcaauacaacauuuaugg

SEQ ID NO: 19651 - RNA, 20 nt, Artificial Sequence
  targeting sequence with CTCN PAM
auaaauguuguauugccugg

SEQ ID NO: 19652 - RNA, 20 nt, Artificial Sequence
  targeting sequence with CTCN PAM
gaccaaaggaaacaguccca

SEQ ID NO: 19653 - RNA, 20 nt, Artificial Sequence
  targeting sequence with CTCN PAM
ugggacuguuuccuuugguc

SEQ ID NO: 19654 - RNA, 20 nt, Artificial Sequence
  targeting sequence with CTCN PAM
gauucuaaccuacauucagu

SEQ ID NO: 19655 - RNA, 20 nt, Artificial Sequence
  targeting sequence with CTCN PAM
agggcugcaaucauaggaga

SEQ ID NO: 19656 - RNA, 20 nt, Artificial Sequence
  targeting sequence with CTCN PAM
aggacuucacacucugauuc

SEQ ID NO: 19657 - RNA, 20 nt, Artificial Sequence
  targeting sequence with CTCN PAM
uaugauugcagcccucgagg

SEQ ID NO: 19658 - RNA, 20 nt, Artificial Sequence
  targeting sequence with CTCN PAM
ccuaugauugcagcccucga

SEQ ID NO: 19659 - RNA, 20 nt, Artificial Sequence
  targeting sequence with CTCN PAM
ugugggcuuuuccuccagga

SEQ ID NO: 19660 - RNA, 20 nt, Artificial Sequence
  targeting sequence with CTCN PAM
aggaaccucaaaaggcucuc

SEQ ID NO: 19661 - RNA, 20 nt, Artificial Sequence
  targeting sequence with CTCN PAM
aaaggcucucuaaugcaggg

SEQ ID NO: 19662 - RNA, 20 nt, Artificial Sequence
  targeting sequence with CTCN PAM
cuaaugcagggggaagcaga

SEQ ID NO: 19663 - RNA, 20 nt, Artificial Sequence
  targeting sequence with CTCN PAM
aaugcagggggaagcagaga

SEQ ID NO: 19664 - RNA, 20 nt, Artificial Sequence
  targeting sequence with CTCN PAM
gcuucccccugcauuagaga

SEQ ID NO: 19665 - RNA, 20 nt, Artificial Sequence
  targeting sequence with CTCN PAM
cugcuucccccugcauuaga

SEQ ID NO: 19666 - RNA, 20 nt, Artificial Sequence
  targeting sequence with CTCN PAM
acuuccucucugcuuccccc

SEQ ID NO: 19667 - RNA, 20 nt, Artificial Sequence
  targeting sequence with CTCN PAM
uccaucuccacccccgugga

SEQ ID NO: 19668 - RNA, 20 nt, Artificial Sequence
  targeting sequence with CTCN PAM
aucuccacccccguggagcu

SEQ ID NO: 19669 - RNA, 20 nt, Artificial Sequence
  targeting sequence with CTCN PAM
acccccguggagcuaaugag

SEQ ID NO: 19670 - RNA, 20 nt, Artificial Sequence
  targeting sequence with CTCN PAM
acggggguggagauggagga

SEQ ID NO: 19671 - RNA, 20 nt, Artificial Sequence
  targeting sequence with CTCN PAM
uuagcuccacggggguggag

SEQ ID NO: 19672 - RNA, 20 nt, Artificial Sequence
  targeting sequence with CTCN PAM
ucccucauuagcuccacggg

SEQ ID NO: 19673 - RNA, 20 nt, Artificial Sequence
  targeting sequence with CTCN PAM
cuguggaacaaaaggcuuaa

SEQ ID NO: 19674 - RNA, 20 nt, Artificial Sequence
  targeting sequence with CTCN PAM
uugcugauuaagccuuuugu

SEQ ID NO: 19675 - RNA, 20 nt, Artificial Sequence
  targeting sequence with CTCN PAM
agcuguagugggauuccacc

SEQ ID NO: 19676 - RNA, 20 nt, Artificial Sequence
  targeting sequence with CTCN PAM
aaaacagcaauagccuuaaa

SEQ ID NO: 19677 - RNA, 20 nt, Artificial Sequence
  targeting sequence with CTCN PAM
uuccgccugcauuuaaggcu

SEQ ID NO: 19678 - RNA, 20 nt, Artificial Sequence
  targeting sequence with CTCN PAM
agcuaagguuuuuuucagcu

SEQ ID NO: 19679 - RNA, 20 nt, Artificial Sequence
  targeting sequence with CTCN PAM
gauuuaugcagauaguagaa

SEQ ID NO: 19680 - RNA, 20 nt, Artificial Sequence
  targeting sequence with CTCN PAM
ccucacccuccacuaacuga

SEQ ID NO: 19681 - RNA, 20 nt, Artificial Sequence
  targeting sequence with CTCN PAM
cccuccacuaacugacaggc

SEQ ID NO: 19682 - RNA, 20 nt, Artificial Sequence
  targeting sequence with CTCN PAM
acuaacugacaggcuuugag

SEQ ID NO: 19683 - RNA, 20 nt, Artificial Sequence
  targeting sequence with CTCN PAM
aagccugucaguuaguggag

SEQ ID NO: 19684 - RNA, 20 nt, Artificial Sequence
  targeting sequence with CTCN PAM
gguguauuccauuguuuuua

SEQ ID NO: 19685 - RNA, 20 nt, Artificial Sequence
  targeting sequence with CTCN PAM
gacucucacggagaaacagc

SEQ ID NO: 19686 - RNA, 20 nt, Artificial Sequence
  targeting sequence with CTCN PAM
cacggagaaacagcacaaag

SEQ ID NO: 19687 - RNA, 20 nt, Artificial Sequence
  targeting sequence with CTCN PAM
cggagaaacagcacaaaggg

SEQ ID NO: 19688 - RNA, 20 nt, Artificial Sequence
  targeting sequence with CTCN PAM
gugagagucugagucuugca

SEQ ID NO: 19689 - RNA, 20 nt, Artificial Sequence
  targeting sequence with CTCN PAM
aguucccauggcaacaauaa

SEQ ID NO: 19690 - RNA, 20 nt, Artificial Sequence
  targeting sequence with CTCN PAM
aguaaccauugcaauaauaa

SEQ ID NO: 19691 - RNA, 20 nt, Artificial Sequence
  targeting sequence with CTCN PAM
acccuaaaggacuugcagga

SEQ ID NO: 19692 - RNA, 20 nt, Artificial Sequence
  targeting sequence with CTCN PAM
guaucuccugucauauacag

SEQ ID NO: 19693 - RNA, 20 nt, Artificial Sequence
  targeting sequence with CTCN PAM
ugucauauacagcacauuca

SEQ ID NO: 19694 - RNA, 20 nt, Artificial Sequence
  targeting sequence with CTCN PAM
aagggacaaagcaauuauca

SEQ ID NO: 19695 - RNA, 20 nt, Artificial Sequence
  targeting sequence with CTCN PAM
gauaauugcuuugucccuuu

SEQ ID NO: 19696 - RNA, 20 nt, Artificial Sequence
  targeting sequence with CTCN PAM
aaugaaagagguagacaaca

SEQ ID NO: 19697 - RNA, 20 nt, Artificial Sequence
  targeting sequence with CTCN PAM
uucauuagaguuuuuacugu

SEQ ID NO: 19698 - RNA, 20 nt, Artificial Sequence
  targeting sequence with CTCN PAM
uauguugucuaccucuuuca

SEQ ID NO: 19699 - RNA, 20 nt, Artificial Sequence
  targeting sequence with CTCN PAM
gaaauuaccugucugaucuc

SEQ ID NO: 19700 - RNA, 20 nt, Artificial Sequence
  targeting sequence with CTCN PAM
aaggcauuugucauuacuau

SEQ ID NO: 19701 - RNA, 20 nt, Artificial Sequence
  targeting sequence with CTCN PAM
caaaggcauuugucauuacu

SEQ ID NO: 19702 - RNA, 20 nt, Artificial Sequence
  targeting sequence with CTCN PAM
uuauauuucaguuuggguag

SEQ ID NO: 19703 - RNA, 20 nt, Artificial Sequence
  targeting sequence with CTCN PAM
uuucucuuuauauuucaguu

SEQ ID NO: 19704 - RNA, 20 nt, Artificial Sequence
  targeting sequence with CTCN PAM
aggugggaaaaucucuuuuc

SEQ ID NO: 19705 - RNA, 20 nt, Artificial Sequence
  targeting sequence with CTCN PAM
ucuucuggacuucugccaca

SEQ ID NO: 19706 - RNA, 20 nt, Artificial Sequence
  targeting sequence with CTCN PAM
guugucucuucuucuggacu

SEQ ID NO: 19707 - RNA, 20 nt, Artificial Sequence
  targeting sequence with CTCN PAM
guaguuuagugucuuaucac

SEQ ID NO: 19708 - RNA, 20 nt, Artificial Sequence
  targeting sequence with CTCN PAM
gaaaacaggcugggcauggu

SEQ ID NO: 19709 - RNA, 20 nt, Artificial Sequence
  targeting sequence with CTCN PAM
ugccuauaaucccagcacuu

SEQ ID NO: 19710 - RNA, 20 nt, Artificial Sequence
  targeting sequence with CTCN PAM
gccuuccaaagugcugggau

SEQ ID NO: 19711 - RNA, 20 nt, Artificial Sequence
  targeting sequence with CTCN PAM
cgccucagccuuccaaagug

SEQ ID NO: 19712 - RNA, 20 nt, Artificial Sequence
  targeting sequence with CTCN PAM
agccauccucccgccucagc

SEQ ID NO: 19713 - RNA, 20 nt, Artificial Sequence
  targeting sequence with CTCN PAM
ugggcucaagccauccuccc

SEQ ID NO: 19714 - RNA, 20 nt, Artificial Sequence
  targeting sequence with CTCN PAM
cuaugcugcccaggcugguc

SEQ ID NO: 19715 - RNA, 20 nt, Artificial Sequence
  targeting sequence with CTCN PAM
ucccuaaaaauaaacaaaaa

SEQ ID NO: 19716 - RNA, 20 nt, Artificial Sequence
  targeting sequence with CTCN PAM
aguagcugggaccacaggca

SEQ ID NO: 19717 - RNA, 20 nt, Artificial Sequence
  targeting sequence with CTCN PAM
cagggcccaggcuucucaag

SEQ ID NO: 19718 - RNA, 20 nt, Artificial Sequence
  targeting sequence with CTCN PAM
agggcccaagcaguccuccc

SEQ ID NO: 19719 - RNA, 20 nt, Artificial Sequence
  targeting sequence with CTCN PAM
accuccagggcccaagcagu

SEQ ID NO: 19720 - RNA, 20 nt, Artificial Sequence
  targeting sequence with CTCN PAM
uugcagccucgaccuccagg

SEQ ID NO: 19721 - RNA, 20 nt, Artificial Sequence
  targeting sequence with CTCN PAM
cggcucuuugcagccucgac

SEQ ID NO: 19722 - RNA, 20 nt, Artificial Sequence
  targeting sequence with CTCN PAM
aaaaauaaaagaaaaagaaa

SEQ ID NO: 19723 - RNA, 20 nt, Artificial Sequence
  targeting sequence with CTCN PAM
cugcagccuguaccucucca

SEQ ID NO: 19724 - RNA, 20 nt, Artificial Sequence
  targeting sequence with CTCN PAM
guugcccagguugaagugca

SEQ ID NO: 19725 - RNA, 20 nt, Artificial Sequence
  targeting sequence with CTCN PAM
cucuguugcccagguugaag

SEQ ID NO: 19726 - RNA, 20 nt, Artificial Sequence
  targeting sequence with CTCN PAM
gucucaaaaaaauaaaaaga

SEQ ID NO: 19727 - RNA, 20 nt, Artificial Sequence
  targeting sequence with CTCN PAM
aaaaaauaaaaagaaaaaac

SEQ ID NO: 19728 - RNA, 20 nt, Artificial Sequence
  targeting sequence with CTCN PAM
caaauacuuuaguauuuggc

SEQ ID NO: 19729 - RNA, 20 nt, Artificial Sequence
  targeting sequence with CTCN PAM
uuugggcugggcauggugac

SEQ ID NO: 19730 - RNA, 20 nt, Artificial Sequence
  targeting sequence with CTCN PAM
cuacuguaaucccagcacuu

SEQ ID NO: 19731 - RNA, 20 nt, Artificial Sequence
  targeting sequence with CTCN PAM
caaagugcugggauuacagu

SEQ ID NO: 19732 - RNA, 20 nt, Artificial Sequence
  targeting sequence with CTCN PAM
ggaggcugaggugggaggau

SEQ ID NO: 19733 - RNA, 20 nt, Artificial Sequence
  targeting sequence with CTCN PAM
ugagaagcugggacuauagg

SEQ ID NO: 19734 - RNA, 20 nt, Artificial Sequence
  targeting sequence with CTCN PAM
gccuccugagaagcugggac

SEQ ID NO: 19735 - RNA, 20 nt, Artificial Sequence
  targeting sequence with CTCN PAM
caccucagccuccugagaag

SEQ ID NO: 19736 - RNA, 20 nt, Artificial Sequence
  targeting sequence with CTCN PAM
uggguucaguggauccuccc

SEQ ID NO: 19737 - RNA, 20 nt, Artificial Sequence
  targeting sequence with CTCN PAM
aucucuuggguucaguggau

SEQ ID NO: 19738 - RNA, 20 nt, Artificial Sequence
  targeting sequence with CTCN PAM
cugcagccucuaucucuugg

SEQ ID NO: 19739 - RNA, 20 nt, Artificial Sequence
  targeting sequence with CTCN PAM
cauuuaugcuuucuccuuca

SEQ ID NO: 19740 - RNA, 20 nt, Artificial Sequence
  targeting sequence with CTCN PAM
uucacugcaggucauuugaa

SEQ ID NO: 19741 - RNA, 20 nt, Artificial Sequence
  targeting sequence with CTCN PAM
uuauaaaauagaagcacaag

SEQ ID NO: 19742 - RNA, 20 nt, Artificial Sequence
  targeting sequence with CTCN PAM
aaacaaaucuuucucuugac

SEQ ID NO: 19743 - RNA, 20 nt, Artificial Sequence
  targeting sequence with CTCN PAM
aagauuacgacaucaugauc

SEQ ID NO: 19744 - RNA, 20 nt, Artificial Sequence
  targeting sequence with CTCN PAM
ccuacacgagucucauccuu

SEQ ID NO: 19745 - RNA, 20 nt, Artificial Sequence
  targeting sequence with CTCN PAM
uguaggugaggacaguugga

SEQ ID NO: 19746 - RNA, 20 nt, Artificial Sequence
  targeting sequence with CTCN PAM
uccuuguccaauucauccua

SEQ ID NO: 19747 - RNA, 20 nt, Artificial Sequence
  targeting sequence with CTCN PAM
uagguaggaugaauuggaca

SEQ ID NO: 19748 - RNA, 20 nt, Artificial Sequence
  targeting sequence with CTCN PAM
caaaguccacucuucauauc

SEQ ID NO: 19749 - RNA, 20 nt, Artificial Sequence
  targeting sequence with CTCN PAM
aaguccacucuucauaucuu

SEQ ID NO: 19750 - RNA, 20 nt, Artificial Sequence
  targeting sequence with CTCN PAM
ucauaucuuaaaaugaccuu

SEQ ID NO: 19751 - RNA, 20 nt, Artificial Sequence
  targeting sequence with CTCN PAM
aaacuaagcuugucuccaaa

SEQ ID NO: 19752 - RNA, 20 nt, Artificial Sequence
  targeting sequence with CTCN PAM
aaaaggucagcaaaugggua

SEQ ID NO: 19753 - RNA, 20 nt, Artificial Sequence
  targeting sequence with CTCN PAM
caaacacagaaacacaaaug

SEQ ID NO: 19754 - RNA, 20 nt, Artificial Sequence
  targeting sequence with CTCN PAM
augcuuucauccauguuauu

SEQ ID NO: 19755 - RNA, 20 nt, Artificial Sequence
  targeting sequence with CTCN PAM
auuuguaauguugaagaaga

SEQ ID NO: 19756 - RNA, 20 nt, Artificial Sequence
  targeting sequence with CTCN PAM
uguaaucgcuucaacaguca

SEQ ID NO: 19757 - RNA, 20 nt, Artificial Sequence
  targeting sequence with CTCN PAM
uccuucuuuauauuuccaua

SEQ ID NO: 19758 - RNA, 20 nt, Artificial Sequence
  targeting sequence with CTCN PAM
uuccacacuggcuucuugaa

SEQ ID NO: 19759 - RNA, 20 nt, Artificial Sequence
  targeting sequence with CTCN PAM
aaauuaaaaaauuaucuagu

SEQ ID NO: 19760 - RNA, 20 nt, Artificial Sequence
  targeting sequence with CTCN PAM
accagaguaaagaaagaaca

SEQ ID NO: 19761 - RNA, 20 nt, Artificial Sequence
  targeting sequence with CTCN PAM
gguagaguuacauuagauuu

SEQ ID NO: 19762 - RNA, 20 nt, Artificial Sequence
  targeting sequence with CTCN PAM
guuuauucuggucuuauuuu

SEQ ID NO: 19763 - RNA, 20 nt, Artificial Sequence
  targeting sequence with CTCN PAM
gugacucaguuuauucuggu

SEQ ID NO: 19764 - RNA, 20 nt, Artificial Sequence
  targeting sequence with CTCN PAM
gacucagugacucaguuuau

SEQ ID NO: 19765 - RNA, 20 nt, Artificial Sequence
  targeting sequence with CTCN PAM
aggucacacagauaguuugu

SEQ ID NO: 19766 - RNA, 20 nt, Artificial Sequence
  targeting sequence with CTCN PAM
guucuagcguuuguaugcca

SEQ ID NO: 19767 - RNA, 20 nt, Artificial Sequence
  targeting sequence with CTCN PAM
ucuagaaguuagaagccucu

SEQ ID NO: 19768 - RNA, 20 nt, Artificial Sequence
  targeting sequence with CTCN PAM
gcuaggcacuacguuagacu

SEQ ID NO: 19769 - RNA, 20 nt, Artificial Sequence
  targeting sequence with CTCN PAM
cauucuaaggaaaucccugu

SEQ ID NO: 19770 - RNA, 20 nt, Artificial Sequence
  targeting sequence with CTCN PAM
aacaaauacauuaaaacagg

SEQ ID NO: 19771 - RNA, 20 nt, Artificial Sequence
  targeting sequence with CTCN PAM
gccugccuguuuuaauguau

SEQ ID NO: 19772 - RNA, 20 nt, Artificial Sequence
  targeting sequence with CTCN PAM
uccuuuucuggcuaugaaaa

SEQ ID NO: 19773 - RNA, 20 nt, Artificial Sequence
  targeting sequence with CTCN PAM
uuauugguaaacaauaguau

SEQ ID NO: 19774 - RNA, 20 nt, Artificial Sequence
  targeting sequence with CTCN PAM
gcaugugaugugacaaaaac

SEQ ID NO: 19775 - RNA, 20 nt, Artificial Sequence
  targeting sequence with CTCN PAM
gauggcucugcaugugaugu

SEQ ID NO: 19776 - RNA, 20 nt, Artificial Sequence
  targeting sequence with CTCN PAM
ucaggaauauggcauuuagc

SEQ ID NO: 19777 - RNA, 20 nt, Artificial Sequence
  targeting sequence with CTCN PAM
ggaauauggcauuuagcugu

SEQ ID NO: 19778 - RNA, 20 nt, Artificial Sequence
  targeting sequence with CTCN PAM
gacuccugaccucaagugau

SEQ ID NO: 19779 - RNA, 20 nt, Artificial Sequence
  targeting sequence with CTCN PAM
ugaccucaagugauccaccc

SEQ ID NO: 19780 - RNA, 20 nt, Artificial Sequence
  targeting sequence with CTCN PAM
agugauccacccaccuuggc

SEQ ID NO: 19781 - RNA, 20 nt, Artificial Sequence
  targeting sequence with CTCN PAM
cgccuguaauccuagcacuu

SEQ ID NO: 19782 - RNA, 20 nt, Artificial Sequence
  targeting sequence with CTCN PAM
aaacaaauguuacugacauu

SEQ ID NO: 19783 - RNA, 20 nt, Artificial Sequence
  targeting sequence with CTCN PAM
guucuaaaaacaaaaucuag

SEQ ID NO: 19784 - RNA, 20 nt, Artificial Sequence
  targeting sequence with CTCN PAM
gccaggaaucaaggacaaag

SEQ ID NO: 19785 - RNA, 20 nt, Artificial Sequence
  targeting sequence with CTCN PAM
uaaaacccuuagguuuuccu

SEQ ID NO: 19786 - RNA, 20 nt, Artificial Sequence
  targeting sequence with CTCN PAM
auaacagaagcgcuuuuugu

SEQ ID NO: 19787 - RNA, 20 nt, Artificial Sequence
  targeting sequence with CTCN PAM
ggugugguugaaaggaauac

SEQ ID NO: 19788 - RNA, 20 nt, Artificial Sequence
  targeting sequence with CTCN PAM
uggugggccucuagauagcu

SEQ ID NO: 19789 - RNA, 20 nt, Artificial Sequence
  targeting sequence with CTCN PAM
agauagcuucaggauagggc

SEQ ID NO: 19790 - RNA, 20 nt, Artificial Sequence
  targeting sequence with CTCN PAM
aaucgcuugguugguucccc

SEQ ID NO: 19791 - RNA, 20 nt, Artificial Sequence
  targeting sequence with CTCN PAM
acuccucaaccuuuggggaa

SEQ ID NO: 19792 - RNA, 20 nt, Artificial Sequence
  targeting sequence with CTCN PAM
ucaaccuuuggggaagagag

SEQ ID NO: 19793 - RNA, 20 nt, Artificial Sequence
  targeting sequence with CTCN PAM
accuuuggggaagagagagg

SEQ ID NO: 19794 - RNA, 20 nt, Artificial Sequence
  targeting sequence with CTCN PAM
uccccaaagguugaggagug

SEQ ID NO: 19795 - RNA, 20 nt, Artificial Sequence
  targeting sequence with CTCN PAM
cuuccccaaagguugaggag

SEQ ID NO: 19796 - RNA, 20 nt, Artificial Sequence
  targeting sequence with CTCN PAM
cucuuccccaaagguugagg

SEQ ID NO: 19797 - RNA, 20 nt, Artificial Sequence
  targeting sequence with CTCN PAM
auguauucacuaccugggaa

SEQ ID NO: 19798 - RNA, 20 nt, Artificial Sequence
  targeting sequence with CTCN PAM
cagcaccuccauguauucac

SEQ ID NO: 19799 - RNA, 20 nt, Artificial Sequence
  targeting sequence with CTCN PAM
gggcacaaaacccucccagc

SEQ ID NO: 19800 - RNA, 20 nt, Artificial Sequence
  targeting sequence with CTCN PAM
cugggcacaaaacccuccca

SEQ ID NO: 19801 - RNA, 20 nt, Artificial Sequence
  targeting sequence with CTCN PAM
caccccucccccauagcuug

SEQ ID NO: 19802 - RNA, 20 nt, Artificial Sequence
  targeting sequence with CTCN PAM
cccauagcuugcccuaugua

SEQ ID NO: 19803 - RNA, 20 nt, Artificial Sequence
  targeting sequence with CTCN PAM
ggaacagcuaaaugaaauaa

SEQ ID NO: 19804 - RNA, 20 nt, Artificial Sequence
  targeting sequence with CTCN PAM
ggaaaacacuuauguuuauc

SEQ ID NO: 19805 - RNA, 20 nt, Artificial Sequence
  targeting sequence with CTCN PAM
uagaacucaggaaaacacuu

SEQ ID NO: 19806 - RNA, 20 nt, Artificial Sequence
  targeting sequence with CTCN PAM
gguucguuaauucacuggaa

SEQ ID NO: 19807 - RNA, 20 nt, Artificial Sequence
  targeting sequence with CTCN PAM
ugaccccuuccucagguucg

SEQ ID NO: 19808 - RNA, 20 nt, Artificial Sequence
  targeting sequence with CTCN PAM
agcagcagcagucuuuuggg

SEQ ID NO: 19809 - RNA, 20 nt, Artificial Sequence
  targeting sequence with CTCN PAM
gucccaaaagacugcugcug

SEQ ID NO: 19810 - RNA, 20 nt, Artificial Sequence
  targeting sequence with CTCN PAM
aguuaaagggcucaguccca

SEQ ID NO: 19811 - RNA, 20 nt, Artificial Sequence
  targeting sequence with CTCN PAM
agguagacagugucagaauu

SEQ ID NO: 19812 - RNA, 20 nt, Artificial Sequence
  targeting sequence with CTCN PAM
gugucauagaacugaaggug

SEQ ID NO: 19813 - RNA, 20 nt, Artificial Sequence
  targeting sequence with CTCN PAM
caacuuaccuugaugcacau

SEQ ID NO: 19814 - RNA, 20 nt, Artificial Sequence
  targeting sequence with CTCN PAM
gucucaaaaaaaaaauaaaa

SEQ ID NO: 19815 - RNA, 20 nt, Artificial Sequence
  targeting sequence with CTCN PAM
uuuagcccaggcuggaguau

SEQ ID NO: 19816 - RNA, 20 nt, Artificial Sequence
  targeting sequence with CTCN PAM
agccugggcuaaaagagcga

SEQ ID NO: 19817 - RNA, 20 nt, Artificial Sequence
  targeting sequence with CTCN PAM
gcucacugcaaccucuaccu

SEQ ID NO: 19818 - RNA, 20 nt, Artificial Sequence
  targeting sequence with CTCN PAM
cugcaaccucuaccucccaa

SEQ ID NO: 19819 - RNA, 20 nt, Artificial Sequence
  targeting sequence with CTCN PAM
accucccaaguucaagugau

SEQ ID NO: 19820 - RNA, 20 nt, Artificial Sequence
  targeting sequence with CTCN PAM
caaguucaagugauucuccu

SEQ ID NO: 19821 - RNA, 20 nt, Artificial Sequence
  targeting sequence with CTCN PAM
ugccucagccucccaaguag

SEQ ID NO: 19822 - RNA, 20 nt, Artificial Sequence
  targeting sequence with CTCN PAM
gccucccaaguagcugggau

SEQ ID NO: 19823 - RNA, 20 nt, Artificial Sequence
  targeting sequence with CTCN PAM
caaguagcugggauuacggg

SEQ ID NO: 19824 - RNA, 20 nt, Artificial Sequence
  targeting sequence with CTCN PAM
acuaaaaaaaaaaguaaaaa

SEQ ID NO: 19825 - RNA, 20 nt, Artificial Sequence
  targeting sequence with CTCN PAM
ugaccucaggugaucugccc

SEQ ID NO: 19826 - RNA, 20 nt, Artificial Sequence
  targeting sequence with CTCN PAM
ggugaucugcccgccucggc

SEQ ID NO: 19827 - RNA, 20 nt, Artificial Sequence
  targeting sequence with CTCN PAM
gccucccaaagcacugggau

SEQ ID NO: 19828 - RNA, 20 nt, Artificial Sequence
  targeting sequence with CTCN PAM
caaagcacugggauuacagg

SEQ ID NO: 19829 - RNA, 20 nt, Artificial Sequence
  targeting sequence with CTCN PAM
cgccuguaaucccagugcuu

SEQ ID NO: 19830 - RNA, 20 nt, Artificial Sequence
  targeting sequence with CTCN PAM
aagucuuaauaggcauguuu

SEQ ID NO: 19831 - RNA, 20 nt, Artificial Sequence
  targeting sequence with CTCN PAM
guuuuagacauaaauuaaac

SEQ ID NO: 19832 - RNA, 20 nt, Artificial Sequence
  targeting sequence with CTCN PAM
ugcaaacuuguuucucuuuc

SEQ ID NO: 19833 - RNA, 20 nt, Artificial Sequence
  targeting sequence with CTCN PAM
uucuuucagucuucuccauc

SEQ ID NO: 19834 - RNA, 20 nt, Artificial Sequence
  targeting sequence with CTCN PAM
aucucaauaaaugacaacug

SEQ ID NO: 19835 - RNA, 20 nt, Artificial Sequence
  targeting sequence with CTCN PAM
auaaaugacaacugcauucu

SEQ ID NO: 19836 - RNA, 20 nt, Artificial Sequence
  targeting sequence with CTCN PAM
auacaaaaaccuuaacucuu

SEQ ID NO: 19837 - RNA, 20 nt, Artificial Sequence
  targeting sequence with CTCN PAM
uuccuuucuuucacagcaca

SEQ ID NO: 19838 - RNA, 20 nt, Artificial Sequence
  targeting sequence with CTCN PAM
acuugaaaaauauauccaga

SEQ ID NO: 19839 - RNA, 20 nt, Artificial Sequence
  targeting sequence with CTCN PAM
cuagcacaaaccacauuuuc

SEQ ID NO: 19840 - RNA, 20 nt, Artificial Sequence
  targeting sequence with CTCN PAM
agcacaaaccacauuuucuc

SEQ ID NO: 19841 - RNA, 20 nt, Artificial Sequence
  targeting sequence with CTCN PAM
caccuugauuacaguaauag

SEQ ID NO: 19842 - RNA, 20 nt, Artificial Sequence
  targeting sequence with CTCN PAM
ccuugauuacaguaauaggc

SEQ ID NO: 19843 - RNA, 20 nt, Artificial Sequence
  targeting sequence with CTCN PAM
aaacuaguauuucugcuuuu

SEQ ID NO: 19844 - RNA, 20 nt, Artificial Sequence
  targeting sequence with CTCN PAM
gcagccaaagaaaugaaaau

SEQ ID NO: 19845 - RNA, 20 nt, Artificial Sequence
  targeting sequence with CTCN PAM
aaagacuuccuauuuugcuc

SEQ ID NO: 19846 - RNA, 20 nt, Artificial Sequence
  targeting sequence with CTCN PAM
guguaaaugcugaaguccua

SEQ ID NO: 19847 - RNA, 20 nt, Artificial Sequence
  targeting sequence with CTCN PAM
caggugcugcugcugcugcu

SEQ ID NO: 19848 - RNA, 20 nt, Artificial Sequence
  targeting sequence with CTCN PAM
aauuucauaggucuggggua

SEQ ID NO: 19849 - RNA, 20 nt, Artificial Sequence
  targeting sequence with CTCN PAM
ccauuccucaggcaagcuuc

SEQ ID NO: 19850 - RNA, 20 nt, Artificial Sequence
  targeting sequence with CTCN PAM
ggcaagcuucugucucagga

SEQ ID NO: 19851 - RNA, 20 nt, Artificial Sequence
  targeting sequence with CTCN PAM
ggacauguacacugugauuc

SEQ ID NO: 19852 - RNA, 20 nt, Artificial Sequence
  targeting sequence with CTCN PAM
ucucauauauguguauggcu

SEQ ID NO: 19853 - RNA, 20 nt, Artificial Sequence
  targeting sequence with CTCN PAM
uauauguguauggcucacuc

SEQ ID NO: 19854 - RNA, 20 nt, Artificial Sequence
  targeting sequence with CTCN PAM
cuccuucacuucuuucaagc

SEQ ID NO: 19855 - RNA, 20 nt, Artificial Sequence
  targeting sequence with CTCN PAM
uucacuucuuucaagcccuu

SEQ ID NO: 19856 - RNA, 20 nt, Artificial Sequence
  targeting sequence with CTCN PAM
cuuccccccugcaguccuug

SEQ ID NO: 19857 - RNA, 20 nt, Artificial Sequence
  targeting sequence with CTCN PAM
gaacccauuaagcaauaacg

SEQ ID NO: 19858 - RNA, 20 nt, Artificial Sequence
  targeting sequence with CTCN PAM
auauuuccauaauguuucau

SEQ ID NO: 19859 - RNA, 20 nt, Artificial Sequence
  targeting sequence with CTCN PAM
gcuuugcugggcguuuuguu

SEQ ID NO: 19860 - RNA, 20 nt, Artificial Sequence
  targeting sequence with CTCN PAM
acagcgugggagcggcaaga

SEQ ID NO: 19861 - RNA, 20 nt, Artificial Sequence
  targeting sequence with CTCN PAM
cacgcuguggaguguacuuu

SEQ ID NO: 19862 - RNA, 20 nt, Artificial Sequence
  targeting sequence with CTCN PAM
ugccgcucccacgcugugga

SEQ ID NO: 19863 - RNA, 20 nt, Artificial Sequence
  targeting sequence with CTCN PAM
agggccagccauacagaauc

SEQ ID NO: 19864 - RNA, 20 nt, Artificial Sequence
  targeting sequence with CTCN PAM
agaaguuucccacugggcac

SEQ ID NO: 19865 - RNA, 20 nt, Artificial Sequence
  targeting sequence with CTCN PAM
uguaaaugaagugguagccc

SEQ ID NO: 19866 - RNA, 20 nt, Artificial Sequence
  targeting sequence with CTCN PAM
gauugguugcaaaaaccacc

SEQ ID NO: 19867 - RNA, 20 nt, Artificial Sequence
  targeting sequence with CTCN PAM
gcugcaaucagucugauugg

SEQ ID NO: 19868 - RNA, 20 nt, Artificial Sequence
  targeting sequence with CTCN PAM
gaaugguugcuguccacaac

SEQ ID NO: 19869 - RNA, 20 nt, Artificial Sequence
  targeting sequence with CTCN PAM
agccucugaaugguugcugu

SEQ ID NO: 19870 - RNA, 20 nt, Artificial Sequence
  targeting sequence with CTCN PAM
acaggcaaucagucugauug

SEQ ID NO: 19871 - RNA, 20 nt, Artificial Sequence
  targeting sequence with CTCN PAM
cuuugcaaacccccagccuu

SEQ ID NO: 19872 - RNA, 20 nt, Artificial Sequence
  targeting sequence with CTCN PAM
ggucguuuuuuacuuaggca

SEQ ID NO: 19873 - RNA, 20 nt, Artificial Sequence
  targeting sequence with CTCN PAM
gacuuccuugaacuaacuug

SEQ ID NO: 19874 - RNA, 20 nt, Artificial Sequence
  targeting sequence with CTCN PAM
cuccgacuuccuugaacuaa

SEQ ID NO: 19875 - RNA, 20 nt, Artificial Sequence
  targeting sequence with CTCN PAM
auucuccugccuccuauguu

SEQ ID NO: 19876 - RNA, 20 nt, Artificial Sequence
  targeting sequence with CTCN PAM
ugccuccuauguuuuacugc

SEQ ID NO: 19877 - RNA, 20 nt, Artificial Sequence
  targeting sequence with CTCN PAM
uauguuuuacugcaguuuuu

SEQ ID NO: 19878 - RNA, 20 nt, Artificial Sequence
  targeting sequence with CTCN PAM
aaaaaaaaaaaaaaaaaaag

SEQ ID NO: 19879 - RNA, 20 nt, Artificial Sequence
  targeting sequence with CTCN PAM
ucucaaaaaaaaaaaaaaaa

SEQ ID NO: 19880 - RNA, 20 nt, Artificial Sequence
  targeting sequence with CTCN PAM
aggcuggagugcaguggcac

SEQ ID NO: 19881 - RNA, 20 nt, Artificial Sequence
  targeting sequence with CTCN PAM
agccuggagacagaacaaga

SEQ ID NO: 19882 - RNA, 20 nt, Artificial Sequence
  targeting sequence with CTCN PAM
gcucacugcaaccuccgcuu

SEQ ID NO: 19883 - RNA, 20 nt, Artificial Sequence
  targeting sequence with CTCN PAM
cugcaaccuccgcuucccag

SEQ ID NO: 19884 - RNA, 20 nt, Artificial Sequence
  targeting sequence with CTCN PAM
gcuucccagguucaagugau

SEQ ID NO: 19885 - RNA, 20 nt, Artificial Sequence
  targeting sequence with CTCN PAM
ugccucagccucccgaguag

SEQ ID NO: 19886 - RNA, 20 nt, Artificial Sequence
  targeting sequence with CTCN PAM
gccucccgaguagcugggac

SEQ ID NO: 19887 - RNA, 20 nt, Artificial Sequence
  targeting sequence with CTCN PAM
cgaguagcugggacuacagg

SEQ ID NO: 19888 - RNA, 20 nt, Artificial Sequence
  targeting sequence with CTCN PAM
ggaggcugaggcaggagaau

SEQ ID NO: 19889 - RNA, 20 nt, Artificial Sequence
  targeting sequence with CTCN PAM
cacucccucagaguaaaggc

SEQ ID NO: 19890 - RNA, 20 nt, Artificial Sequence
  targeting sequence with CTCN PAM
cucccucagaguaaaggcca

SEQ ID NO: 19891 - RNA, 20 nt, Artificial Sequence
  targeting sequence with CTCN PAM
cucagaguaaaggccaggua

SEQ ID NO: 19892 - RNA, 20 nt, Artificial Sequence
  targeting sequence with CTCN PAM
gaguaaaggccagguagccc

SEQ ID NO: 19893 - RNA, 20 nt, Artificial Sequence
  targeting sequence with CTCN PAM
gagggagugagagacacagu

SEQ ID NO: 19894 - RNA, 20 nt, Artificial Sequence
  targeting sequence with CTCN PAM
aagccccucaacaccuggcc

SEQ ID NO: 19895 - RNA, 20 nt, Artificial Sequence
  targeting sequence with CTCN PAM
acaccuggcccauguguccu

SEQ ID NO: 19896 - RNA, 20 nt, Artificial Sequence
  targeting sequence with CTCN PAM
caguuucaucugggccucac

SEQ ID NO: 19897 - RNA, 20 nt, Artificial Sequence
  targeting sequence with CTCN PAM
cucaccggacggacgcugcc

SEQ ID NO: 19898 - RNA, 20 nt, Artificial Sequence
  targeting sequence with CTCN PAM
ccggacggacgcugccuccu

SEQ ID NO: 19899 - RNA, 20 nt, Artificial Sequence
  targeting sequence with CTCN PAM
ucgcugccccucugaccggu

SEQ ID NO: 19900 - RNA, 20 nt, Artificial Sequence
  targeting sequence with CTCN PAM
cugccccucugaccggugag

SEQ ID NO: 19901 - RNA, 20 nt, Artificial Sequence
  targeting sequence with CTCN PAM
gaccggugagcgcuugugcc

SEQ ID NO: 19902 - RNA, 20 nt, Artificial Sequence
  targeting sequence with CTCN PAM
ccggucagaggggcagcgag

SEQ ID NO: 19903 - RNA, 20 nt, Artificial Sequence
  targeting sequence with CTCN PAM
cucugcugggaacuuucucc

SEQ ID NO: 19904 - RNA, 20 nt, Artificial Sequence
  targeting sequence with CTCN PAM
gcugggaacuuucuccuccc

SEQ ID NO: 19905 - RNA, 20 nt, Artificial Sequence
  targeting sequence with CTCN PAM
ucccaauauccacacagucc

SEQ ID NO: 19906 - RNA, 20 nt, Artificial Sequence
  targeting sequence with CTCN PAM
caauauccacacaguccgcc

SEQ ID NO: 19907 - RNA, 20 nt, Artificial Sequence
  targeting sequence with CTCN PAM
ccuccuucaggccuuugcuc

SEQ ID NO: 19908 - RNA, 20 nt, Artificial Sequence
  targeting sequence with CTCN PAM
uucaggccuuugcucaaugu

SEQ ID NO: 19909 - RNA, 20 nt, Artificial Sequence
  targeting sequence with CTCN PAM
augucccuauuuggugaggc

SEQ ID NO: 19910 - RNA, 20 nt, Artificial Sequence
  targeting sequence with CTCN PAM
ccaaauagggacauugagca

SEQ ID NO: 19911 - RNA, 20 nt, Artificial Sequence
  targeting sequence with CTCN PAM
ucuccacccuggcaccccag

SEQ ID NO: 19912 - RNA, 20 nt, Artificial Sequence
  targeting sequence with CTCN PAM
acccuggcaccccagccccu

SEQ ID NO: 19913 - RNA, 20 nt, Artificial Sequence
  targeting sequence with CTCN PAM
ccugcuugauuuuucucugg

SEQ ID NO: 19914 - RNA, 20 nt, Artificial Sequence
  targeting sequence with CTCN PAM
ggcugcccucagcuacgugc

SEQ ID NO: 19915 - RNA, 20 nt, Artificial Sequence
  targeting sequence with CTCN PAM
gcuacgugcguauuuuaguu

SEQ ID NO: 19916 - RNA, 20 nt, Artificial Sequence
  targeting sequence with CTCN PAM
uuucacguaauuugagcuuu

SEQ ID NO: 19917 - RNA, 20 nt, Artificial Sequence
  targeting sequence with CTCN PAM
aauuacgugaaaggagacaa

SEQ ID NO: 19918 - RNA, 20 nt, Artificial Sequence
  targeting sequence with TTCN PAM
aguuugcucauuugucucgg

SEQ ID NO: 19919 - RNA, 20 nt, Artificial Sequence
  targeting sequence with TTCN PAM
gaccucauucgaguuugcuc

SEQ ID NO: 19920 - RNA, 20 nt, Artificial Sequence
  targeting sequence with TTCN PAM
uuuccuagcaccauaacugc

SEQ ID NO: 19921 - RNA, 20 nt, Artificial Sequence
  targeting sequence with TTCN PAM
uagcaccauaacugcacggu

SEQ ID NO: 19922 - RNA, 20 nt, Artificial Sequence
  targeting sequence with TTCN PAM
agugcuuuacgaccauuagu

SEQ ID NO: 19923 - RNA, 20 nt, Artificial Sequence
  targeting sequence with TTCN PAM
ggugagugagggaaaccucu

SEQ ID NO: 19924 - RNA, 20 nt, Artificial Sequence
  targeting sequence with TTCN PAM
cucacucaccugaaagccgg

SEQ ID NO: 19925 - RNA, 20 nt, Artificial Sequence
  targeting sequence with TTCN PAM
acaggccugaaguuucugca

SEQ ID NO: 19926 - RNA, 20 nt, Artificial Sequence
  targeting sequence with TTCN PAM
ggccuguagaaaaucugcca

SEQ ID NO: 19927 - RNA, 20 nt, Artificial Sequence
  targeting sequence with TTCN PAM
gcaaaaggagacucaaacau

SEQ ID NO: 19928 - RNA, 20 nt, Artificial Sequence
  targeting sequence with TTCN PAM
uguuugagucuccuuuugca

SEQ ID NO: 19929 - RNA, 20 nt, Artificial Sequence
  targeting sequence with TTCN PAM
uuuucauguuugagucuccu

SEQ ID NO: 19930 - RNA, 20 nt, Artificial Sequence
  targeting sequence with TTCN PAM
cuggcugcacggcgagugcu

SEQ ID NO: 19931 - RNA, 20 nt, Artificial Sequence
  targeting sequence with TTCN PAM
ugagaugcauaagccuccag

SEQ ID NO: 19932 - RNA, 20 nt, Artificial Sequence
  targeting sequence with TTCN PAM
guuccugagaugcauaagcc

SEQ ID NO: 19933 - RNA, 20 nt, Artificial Sequence
  targeting sequence with TTCN PAM
uuucuuuucuuuucuuuuuc

SEQ ID NO: 19934 - RNA, 20 nt, Artificial Sequence
  targeting sequence with TTCN PAM
uuucuuuucuuuuucuuuuu

SEQ ID NO: 19935 - RNA, 20 nt, Artificial Sequence
  targeting sequence with TTCN PAM
uuucuuuuucuuuuuucgag

SEQ ID NO: 19936 - RNA, 20 nt, Artificial Sequence
  targeting sequence with TTCN PAM
uuuucuuuuuucgagacaac

SEQ ID NO: 19937 - RNA, 20 nt, Artificial Sequence
  targeting sequence with TTCN PAM
uuuuucgagacaacggaguc

SEQ ID NO: 19938 - RNA, 20 nt, Artificial Sequence
  targeting sequence with TTCN PAM
agacaacggagucuuguucu

SEQ ID NO: 19939 - RNA, 20 nt, Artificial Sequence
  targeting sequence with TTCN PAM
gucgcccaggcuggagugca

SEQ ID NO: 19940 - RNA, 20 nt, Artificial Sequence
  targeting sequence with TTCN PAM
ggguucacgccauucuccug

SEQ ID NO: 19941 - RNA, 20 nt, Artificial Sequence
  targeting sequence with TTCN PAM
cgccauucuccugccucagc

SEQ ID NO: 19942 - RNA, 20 nt, Artificial Sequence
  targeting sequence with TTCN PAM
ccugccucagccuccugagu

SEQ ID NO: 19943 - RNA, 20 nt, Artificial Sequence
  targeting sequence with TTCN PAM
cacccagcaccccgcacuca

SEQ ID NO: 19944 - RNA, 20 nt, Artificial Sequence
  targeting sequence with TTCN PAM
uuccccuggaggucaacacc

SEQ ID NO: 19945 - RNA, 20 nt, Artificial Sequence
  targeting sequence with TTCN PAM
ccuggaggucaacacccaaa

SEQ ID NO: 19946 - RNA, 20 nt, Artificial Sequence
  targeting sequence with TTCN PAM
caagaggugaaacauaauca

SEQ ID NO: 19947 - RNA, 20 nt, Artificial Sequence
  targeting sequence with TTCN PAM
ccucuugggaaugauacaca

SEQ ID NO: 19948 - RNA, 20 nt, Artificial Sequence
  targeting sequence with TTCN PAM
gagccuuugauuauguuuca

SEQ ID NO: 19949 - RNA, 20 nt, Artificial Sequence
  targeting sequence with TTCN PAM
ugccuuugccacagcaaacu

SEQ ID NO: 19950 - RNA, 20 nt, Artificial Sequence
  targeting sequence with TTCN PAM
caaagcaccagaucuuuccu

SEQ ID NO: 19951 - RNA, 20 nt, Artificial Sequence
  targeting sequence with TTCN PAM
uuuuguauuuuaacggcaua

SEQ ID NO: 19952 - RNA, 20 nt, Artificial Sequence
  targeting sequence with TTCN PAM
gauuucacagcucccuucca

SEQ ID NO: 19953 - RNA, 20 nt, Artificial Sequence
  targeting sequence with TTCN PAM
cagcucccuuccaaggcuuc

SEQ ID NO: 19954 - RNA, 20 nt, Artificial Sequence
  targeting sequence with TTCN PAM
aaggcuucauagccucaagu

SEQ ID NO: 19955 - RNA, 20 nt, Artificial Sequence
  targeting sequence with TTCN PAM
uagccucaaguguaacccuc

SEQ ID NO: 19956 - RNA, 20 nt, Artificial Sequence
  targeting sequence with TTCN PAM
uccucacugcugcgugcacc

SEQ ID NO: 19957 - RNA, 20 nt, Artificial Sequence
  targeting sequence with TTCN PAM
ugcugauguuuguggccccu

SEQ ID NO: 19958 - RNA, 20 nt, Artificial Sequence
  targeting sequence with TTCN PAM
agagagugacucacccaucc

SEQ ID NO: 19959 - RNA, 20 nt, Artificial Sequence
  targeting sequence with TTCN PAM
cuguccucugggcucucuua

SEQ ID NO: 19960 - RNA, 20 nt, Artificial Sequence
  targeting sequence with TTCN PAM
agaccaucaaugaggcguug

SEQ ID NO: 19961 - RNA, 20 nt, Artificial Sequence
  targeting sequence with TTCN PAM
cacuugaugguuuacaauug

SEQ ID NO: 19962 - RNA, 20 nt, Artificial Sequence
  targeting sequence with TTCN PAM
uccucucacuuccccauuuu

SEQ ID NO: 19963 - RNA, 20 nt, Artificial Sequence
  targeting sequence with TTCN PAM
ccauuuuugcugcaauguua

SEQ ID NO: 19964 - RNA, 20 nt, Artificial Sequence
  targeting sequence with TTCN PAM
agguagguaagucuguagcg

SEQ ID NO: 19965 - RNA, 20 nt, Artificial Sequence
  targeting sequence with TTCN PAM
aaccgugauggaaacauugu

SEQ ID NO: 19966 - RNA, 20 nt, Artificial Sequence
  targeting sequence with TTCN PAM
aucacgguuagaauuccagg

SEQ ID NO: 19967 - RNA, 20 nt, Artificial Sequence
  targeting sequence with TTCN PAM
acagaccugggcugggcuca

SEQ ID NO: 19968 - RNA, 20 nt, Artificial Sequence
  targeting sequence with TTCN PAM
gagcccagcccaggucuguu

SEQ ID NO: 19969 - RNA, 20 nt, Artificial Sequence
  targeting sequence with TTCN PAM
gugcagagggaaaugcucuc

SEQ ID NO: 19970 - RNA, 20 nt, Artificial Sequence
  targeting sequence with TTCN PAM
cucugcacagaacacuuggg

SEQ ID NO: 19971 - RNA, 20 nt, Artificial Sequence
  targeting sequence with TTCN PAM
ugugucccuaggaguuauuu

SEQ ID NO: 19972 - RNA, 20 nt, Artificial Sequence
  targeting sequence with TTCN PAM
acagccacauuucauguguc

SEQ ID NO: 19973 - RNA, 20 nt, Artificial Sequence
  targeting sequence with TTCN PAM
ugcacucuaauuaauugaau

SEQ ID NO: 19974 - RNA, 20 nt, Artificial Sequence
  targeting sequence with TTCN PAM
auuaauuagagugcaagaaa

SEQ ID NO: 19975 - RNA, 20 nt, Artificial Sequence
  targeting sequence with TTCN PAM
guguggcagucacuaccggg

SEQ ID NO: 19976 - RNA, 20 nt, Artificial Sequence
  targeting sequence with TTCN PAM
gagauauaaagaugaagaag

SEQ ID NO: 19977 - RNA, 20 nt, Artificial Sequence
  targeting sequence with TTCN PAM
ucuuuauaucucugaagcug

SEQ ID NO: 19978 - RNA, 20 nt, Artificial Sequence
  targeting sequence with TTCN PAM
ucaucuuuauaucucugaag

SEQ ID NO: 19979 - RNA, 20 nt, Artificial Sequence
  targeting sequence with TTCN PAM
ucuacccugguguuuccuug

SEQ ID NO: 19980 - RNA, 20 nt, Artificial Sequence
  targeting sequence with TTCN PAM
acccugguguuuccuugcag

SEQ ID NO: 19981 - RNA, 20 nt, Artificial Sequence
  targeting sequence with TTCN PAM
uugcagaguaggugucugcu

SEQ ID NO: 19982 - RNA, 20 nt, Artificial Sequence
  targeting sequence with TTCN PAM
ugggcacagguacaggggcc

SEQ ID NO: 19983 - RNA, 20 nt, Artificial Sequence
  targeting sequence with TTCN PAM
cagcaggggcugcacuugua

SEQ ID NO: 19984 - RNA, 20 nt, Artificial Sequence
  targeting sequence with TTCN PAM
ccucuguguacaagugcagc

SEQ ID NO: 19985 - RNA, 20 nt, Artificial Sequence
  targeting sequence with TTCN PAM
ggagcccacgcucaucuccu

SEQ ID NO: 19986 - RNA, 20 nt, Artificial Sequence
  targeting sequence with TTCN PAM
cgggcucugauccaggguca

SEQ ID NO: 19987 - RNA, 20 nt, Artificial Sequence
  targeting sequence with TTCN PAM
uccucacccugucuagccug

SEQ ID NO: 19988 - RNA, 20 nt, Artificial Sequence
  targeting sequence with TTCN PAM
augccugagcuagaucucag

SEQ ID NO: 19989 - RNA, 20 nt, Artificial Sequence
  targeting sequence with TTCN PAM
uuuuuagagacaggucucac

SEQ ID NO: 19990 - RNA, 20 nt, Artificial Sequence
  targeting sequence with TTCN PAM
ucuuuuuuagagacaggucu

SEQ ID NO: 19991 - RNA, 20 nt, Artificial Sequence
  targeting sequence with TTCN PAM
uucuucuuuuuuagagacag

SEQ ID NO: 19992 - RNA, 20 nt, Artificial Sequence
  targeting sequence with TTCN PAM
cuaugucuccuccccaggac

SEQ ID NO: 19993 - RNA, 20 nt, Artificial Sequence
  targeting sequence with TTCN PAM
aagcugggcaggaguccugg

SEQ ID NO: 19994 - RNA, 20 nt, Artificial Sequence
  targeting sequence with TTCN PAM
ccugugccuuugugugcuau

SEQ ID NO: 19995 - RNA, 20 nt, Artificial Sequence
  targeting sequence with TTCN PAM
cuguguacccaccaguuccc

SEQ ID NO: 19996 - RNA, 20 nt, Artificial Sequence
  targeting sequence with TTCN PAM
uggccauguggccuuggggg

SEQ ID NO: 19997 - RNA, 20 nt, Artificial Sequence
  targeting sequence with TTCN PAM
guuucuuugaggaccuccca

SEQ ID NO: 19998 - RNA, 20 nt, Artificial Sequence
  targeting sequence with TTCN PAM
uugaggaccucccauucccc

SEQ ID NO: 19999 - RNA, 20 nt, Artificial Sequence
  targeting sequence with TTCN PAM
cccugcugcagauggaagag

SEQ ID NO: 20000 - RNA, 20 nt, Artificial Sequence
  targeting sequence with TTCN PAM
aucugcagcagggggaaugg

SEQ ID NO: 20001 - RNA, 20 nt, Artificial Sequence
  targeting sequence with TTCN PAM
gggcucauguuacagcuuuc

SEQ ID NO: 20002 - RNA, 20 nt, Artificial Sequence
  targeting sequence with TTCN PAM
acuguuaacucacccuccua

SEQ ID NO: 20003 - RNA, 20 nt, Artificial Sequence
  targeting sequence with TTCN PAM
ugggacgauccaaugagauc

SEQ ID NO: 20004 - RNA, 20 nt, Artificial Sequence
  targeting sequence with TTCN PAM
aacuuagaaaugaggacaca

SEQ ID NO: 20005 - RNA, 20 nt, Artificial Sequence
  targeting sequence with TTCN PAM
aaguuagaaaugauaauuuc

SEQ ID NO: 20006 - RNA, 20 nt, Artificial Sequence
  targeting sequence with TTCN PAM
aaguguguccucauuucuaa

SEQ ID NO: 20007 - RNA, 20 nt, Artificial Sequence
  targeting sequence with TTCN PAM
agacuggccuaggcaacaua

SEQ ID NO: 20008 - RNA, 20 nt, Artificial Sequence
  targeting sequence with TTCN PAM
cagaaucacgugggggcugc

SEQ ID NO: 20009 - RNA, 20 nt, Artificial Sequence
  targeting sequence with TTCN PAM
gggaaaacccacacaccaca

SEQ ID NO: 20010 - RNA, 20 nt, Artificial Sequence
  targeting sequence with TTCN PAM
ccaccccaucccagcugcuu

SEQ ID NO: 20011 - RNA, 20 nt, Artificial Sequence
  targeting sequence with TTCN PAM
cucuacuccaggcaaagcca

SEQ ID NO: 20012 - RNA, 20 nt, Artificial Sequence
  targeting sequence with TTCN PAM
guugacucagaugggggcag

SEQ ID NO: 20013 - RNA, 20 nt, Artificial Sequence
  targeting sequence with TTCN PAM
uaagggccgcaggggucacc

SEQ ID NO: 20014 - RNA, 20 nt, Artificial Sequence
  targeting sequence with TTCN PAM
ugccccauggccugggguga

SEQ ID NO: 20015 - RNA, 20 nt, Artificial Sequence
  targeting sequence with TTCN PAM
gguccugugcagcagcuggc

SEQ ID NO: 20016 - RNA, 20 nt, Artificial Sequence
  targeting sequence with TTCN PAM
guguacuuuucagguccugu

SEQ ID NO: 20017 - RNA, 20 nt, Artificial Sequence
  targeting sequence with TTCN PAM
caccggccaaggccaguccu

SEQ ID NO: 20018 - RNA, 20 nt, Artificial Sequence
  targeting sequence with TTCN PAM
uucccaccggccaaggccag

SEQ ID NO: 20019 - RNA, 20 nt, Artificial Sequence
  targeting sequence with TTCN PAM
ccgcagcccagcucugagca

SEQ ID NO: 20020 - RNA, 20 nt, Artificial Sequence
  targeting sequence with TTCN PAM
uuccuuugugucgcccagug

SEQ ID NO: 20021 - RNA, 20 nt, Artificial Sequence
  targeting sequence with TTCN PAM
uuugugucgcccaguggcac

SEQ ID NO: 20022 - RNA, 20 nt, Artificial Sequence
  targeting sequence with TTCN PAM
agagaucuuuucaccucggc

SEQ ID NO: 20023 - RNA, 20 nt, Artificial Sequence
  targeting sequence with TTCN PAM
ccucggccuccugaguagcu

SEQ ID NO: 20024 - RNA, 20 nt, Artificial Sequence
  targeting sequence with TTCN PAM
acuguagcucccagcugcag

SEQ ID NO: 20025 - RNA, 20 nt, Artificial Sequence
  targeting sequence with TTCN PAM
uuguccaaaacacagugauc

SEQ ID NO: 20026 - RNA, 20 nt, Artificial Sequence
  targeting sequence with TTCN PAM
gauauaccauugauggcagu

SEQ ID NO: 20027 - RNA, 20 nt, Artificial Sequence
  targeting sequence with TTCN PAM
acaugauucugauauaccau

SEQ ID NO: 20028 - RNA, 20 nt, Artificial Sequence
  targeting sequence with TTCN PAM
auugcuguuacuggaaggag

SEQ ID NO: 20029 - RNA, 20 nt, Artificial Sequence
  targeting sequence with TTCN PAM
aguaacagcaauagaacacc

SEQ ID NO: 20030 - RNA, 20 nt, Artificial Sequence
  targeting sequence with TTCN PAM
ugguguuuugaacaaaaaac

SEQ ID NO: 20031 - RNA, 20 nt, Artificial Sequence
  targeting sequence with TTCN PAM
aaacaccaagaaccuagaca

SEQ ID NO: 20032 - RNA, 20 nt, Artificial Sequence
  targeting sequence with TTCN PAM
uuuguuacuuagugcauuuu

SEQ ID NO: 20033 - RNA, 20 nt, Artificial Sequence
  targeting sequence with TTCN PAM
uuccuuuguuacuuagugca

SEQ ID NO: 20034 - RNA, 20 nt, Artificial Sequence
  targeting sequence with TTCN PAM
auccuguguuucauuccuuu

SEQ ID NO: 20035 - RNA, 20 nt, Artificial Sequence
  targeting sequence with TTCN PAM
cucuuuuauaaaucccugau

SEQ ID NO: 20036 - RNA, 20 nt, Artificial Sequence
  targeting sequence with TTCN PAM
ggguuucaagcacuccuuuu

SEQ ID NO: 20037 - RNA, 20 nt, Artificial Sequence
  targeting sequence with TTCN PAM
agcacuccuuuugagguucc

SEQ ID NO: 20038 - RNA, 20 nt, Artificial Sequence
  targeting sequence with TTCN PAM
uaucaguuaccccuuauaua

SEQ ID NO: 20039 - RNA, 20 nt, Artificial Sequence
  targeting sequence with TTCN PAM
acuauauaagggguaacuga

SEQ ID NO: 20040 - RNA, 20 nt, Artificial Sequence
  targeting sequence with TTCN PAM
ccucaguguuuacuuagcca

SEQ ID NO: 20041 - RNA, 20 nt, Artificial Sequence
  targeting sequence with TTCN PAM
ucugcauagggugccauuca

SEQ ID NO: 20042 - RNA, 20 nt, Artificial Sequence
  targeting sequence with TTCN PAM
accauggcuuagacaaaaag

SEQ ID NO: 20043 - RNA, 20 nt, Artificial Sequence
  targeting sequence with TTCN PAM
acaacccucccccuuccacc

SEQ ID NO: 20044 - RNA, 20 nt, Artificial Sequence
  targeting sequence with TTCN PAM
uuucgguuuagcuucaggaa

SEQ ID NO: 20045 - RNA, 20 nt, Artificial Sequence
  targeting sequence with TTCN PAM
guuuagcuucaggaaguugg

SEQ ID NO: 20046 - RNA, 20 nt, Artificial Sequence
  targeting sequence with TTCN PAM
ggaaguuggcauuaacuggc

SEQ ID NO: 20047 - RNA, 20 nt, Artificial Sequence
  targeting sequence with TTCN PAM
ugaagcuaaaccgaaaggaa

SEQ ID NO: 20048 - RNA, 20 nt, Artificial Sequence
  targeting sequence with TTCN PAM
cuuuugauccagcuuuggga

SEQ ID NO: 20049 - RNA, 20 nt, Artificial Sequence
  targeting sequence with TTCN PAM
caaagcuggaucaaaaggga

SEQ ID NO: 20050 - RNA, 20 nt, Artificial Sequence
  targeting sequence with TTCN PAM
cugcuuccccccagaccuug

SEQ ID NO: 20051 - RNA, 20 nt, Artificial Sequence
  targeting sequence with TTCN PAM
ccccagaccuugguguuuuu

SEQ ID NO: 20052 - RNA, 20 nt, Artificial Sequence
  targeting sequence with TTCN PAM
uugauucagcaugaauuggc

SEQ ID NO: 20053 - RNA, 20 nt, Artificial Sequence
  targeting sequence with TTCN PAM
gcaugaauuggccuuaaguu

SEQ ID NO: 20054 - RNA, 20 nt, Artificial Sequence
  targeting sequence with TTCN PAM
ugcugaaucaaggaaaaaca

SEQ ID NO: 20055 - RNA, 20 nt, Artificial Sequence
  targeting sequence with TTCN PAM
uugccuccagacuguacuau

SEQ ID NO: 20056 - RNA, 20 nt, Artificial Sequence
  targeting sequence with TTCN PAM
uguuaauacuggucuauugu

SEQ ID NO: 20057 - RNA, 20 nt, Artificial Sequence
  targeting sequence with TTCN PAM
aaccaucaugggcauaaggg

SEQ ID NO: 20058 - RNA, 20 nt, Artificial Sequence
  targeting sequence with TTCN PAM
aaaaaaccccuaaaaaacua

SEQ ID NO: 20059 - RNA, 20 nt, Artificial Sequence
  targeting sequence with TTCN PAM
ccuucuccaaggggaggggu

SEQ ID NO: 20060 - RNA, 20 nt, Artificial Sequence
  targeting sequence with TTCN PAM
ccaaggggagggguucauuc

SEQ ID NO: 20061 - RNA, 20 nt, Artificial Sequence
  targeting sequence with TTCN PAM
uucaauggaggcacagaggg

SEQ ID NO: 20062 - RNA, 20 nt, Artificial Sequence
  targeting sequence with TTCN PAM
auggaggcacagagggcuua

SEQ ID NO: 20063 - RNA, 20 nt, Artificial Sequence
  targeting sequence with TTCN PAM
cuuuaagcuuguguaaacca

SEQ ID NO: 20064 - RNA, 20 nt, Artificial Sequence
  targeting sequence with TTCN PAM
auacuaaaacuaaaagaugg

SEQ ID NO: 20065 - RNA, 20 nt, Artificial Sequence
  targeting sequence with TTCN PAM
agucccaucuuuuaguuuua

SEQ ID NO: 20066 - RNA, 20 nt, Artificial Sequence
  targeting sequence with TTCN PAM
aagauaaagaccccaaacag

SEQ ID NO: 20067 - RNA, 20 nt, Artificial Sequence
  targeting sequence with TTCN PAM
cuguuuggggucuuuaucuu

SEQ ID NO: 20068 - RNA, 20 nt, Artificial Sequence
  targeting sequence with TTCN PAM
acauccacauuugggaacca

SEQ ID NO: 20069 - RNA, 20 nt, Artificial Sequence
  targeting sequence with TTCN PAM
caaauguggauguggaagug

SEQ ID NO: 20070 - RNA, 20 nt, Artificial Sequence
  targeting sequence with TTCN PAM
ugcccaggaagccaggagag

SEQ ID NO: 20071 - RNA, 20 nt, Artificial Sequence
  targeting sequence with TTCN PAM
ugggcaggaaagagcaguca

SEQ ID NO: 20072 - RNA, 20 nt, Artificial Sequence
  targeting sequence with TTCN PAM
ggggccugcaucucuccugg

SEQ ID NO: 20073 - RNA, 20 nt, Artificial Sequence
  targeting sequence with TTCN PAM
uuguugaagaugucccggcc

SEQ ID NO: 20074 - RNA, 20 nt, Artificial Sequence
  targeting sequence with TTCN PAM
acaaggaaaggccuugcccu

SEQ ID NO: 20075 - RNA, 20 nt, Artificial Sequence
  targeting sequence with TTCN PAM
uguucccgcaugacgcagga

SEQ ID NO: 20076 - RNA, 20 nt, Artificial Sequence
  targeting sequence with TTCN PAM
cgcaugacgcaggagaauag

SEQ ID NO: 20077 - RNA, 20 nt, Artificial Sequence
  targeting sequence with TTCN PAM
ccugcgucaugcgggaacaa

SEQ ID NO: 20078 - RNA, 20 nt, Artificial Sequence
  targeting sequence with TTCN PAM
cucccuccagacccuauucu

SEQ ID NO: 20079 - RNA, 20 nt, Artificial Sequence
  targeting sequence with TTCN PAM
ugcugacuuccuagaacuga

SEQ ID NO: 20080 - RNA, 20 nt, Artificial Sequence
  targeting sequence with TTCN PAM
uagaacugaaucaaaaggaa

SEQ ID NO: 20081 - RNA, 20 nt, Artificial Sequence
  targeting sequence with TTCN PAM
aggaagucagcaugaaucgg

SEQ ID NO: 20082 - RNA, 20 nt, Artificial Sequence
  targeting sequence with TTCN PAM
guucuaggaagucagcauga

SEQ ID NO: 20083 - RNA, 20 nt, Artificial Sequence
  targeting sequence with TTCN PAM
uuuugauucaguucuaggaa

SEQ ID NO: 20084 - RNA, 20 nt, Artificial Sequence
  targeting sequence with TTCN PAM
cacccaaguaacaaaaggau

SEQ ID NO: 20085 - RNA, 20 nt, Artificial Sequence
  targeting sequence with TTCN PAM
uucauuuacguaggguauaa

SEQ ID NO: 20086 - RNA, 20 nt, Artificial Sequence
  targeting sequence with TTCN PAM
uuuacguaggguauaacaaa

SEQ ID NO: 20087 - RNA, 20 nt, Artificial Sequence
  targeting sequence with TTCN PAM
cauugguuacuuuguuauac

SEQ ID NO: 20088 - RNA, 20 nt, Artificial Sequence
  targeting sequence with TTCN PAM
agagguuucccauugguuac

SEQ ID NO: 20089 - RNA, 20 nt, Artificial Sequence
  targeting sequence with TTCN PAM
aggguuugaguaccuuccag

SEQ ID NO: 20090 - RNA, 20 nt, Artificial Sequence
  targeting sequence with TTCN PAM
ucaagccugcugucacucug

SEQ ID NO: 20091 - RNA, 20 nt, Artificial Sequence
  targeting sequence with TTCN PAM
auaaaucugugcuuuuguug

SEQ ID NO: 20092 - RNA, 20 nt, Artificial Sequence
  targeting sequence with TTCN PAM
uuccauggcccugaaaacag

SEQ ID NO: 20093 - RNA, 20 nt, Artificial Sequence
  targeting sequence with TTCN PAM
auggcccugaaaacagucuu

SEQ ID NO: 20094 - RNA, 20 nt, Artificial Sequence
  targeting sequence with TTCN PAM
gggccauggaaagaaccaga

SEQ ID NO: 20095 - RNA, 20 nt, Artificial Sequence
  targeting sequence with TTCN PAM
cuugaugaaauccugcaguc

SEQ ID NO: 20096 - RNA, 20 nt, Artificial Sequence
  targeting sequence with TTCN PAM
ucaagggaaaaaaagacugu

SEQ ID NO: 20097 - RNA, 20 nt, Artificial Sequence
  targeting sequence with TTCN PAM
uauccagguacugguacaug

SEQ ID NO: 20098 - RNA, 20 nt, Artificial Sequence
  targeting sequence with TTCN PAM
aggaagccuaccagauugcu

SEQ ID NO: 20099 - RNA, 20 nt, Artificial Sequence
  targeting sequence with TTCN PAM
uugaacaguuuccuauccag

SEQ ID NO: 20100 - RNA, 20 nt, Artificial Sequence
  targeting sequence with TTCN PAM
auggccagugcacgccaauc

SEQ ID NO: 20101 - RNA, 20 nt, Artificial Sequence
  targeting sequence with TTCN PAM
aaaucuaaaccuagcgcuuc

SEQ ID NO: 20102 - RNA, 20 nt, Artificial Sequence
  targeting sequence with TTCN PAM
uugcuguuucaaaaucuaaa

SEQ ID NO: 20103 - RNA, 20 nt, Artificial Sequence
  targeting sequence with TTCN PAM
uaagggaccccacaaggacc

SEQ ID NO: 20104 - RNA, 20 nt, Artificial Sequence
  targeting sequence with TTCN PAM
ucacugugggccuggguagg

SEQ ID NO: 20105 - RNA, 20 nt, Artificial Sequence
  targeting sequence with TTCN PAM
aagauugcuucucuauagac

SEQ ID NO: 20106 - RNA, 20 nt, Artificial Sequence
  targeting sequence with TTCN PAM
cuauagacguagggugauga

SEQ ID NO: 20107 - RNA, 20 nt, Artificial Sequence
  targeting sequence with TTCN PAM
ggcugucacucuuauuagcu

SEQ ID NO: 20108 - RNA, 20 nt, Artificial Sequence
  targeting sequence with TTCN PAM
cuaugggaagcaccugacua

SEQ ID NO: 20109 - RNA, 20 nt, Artificial Sequence
  targeting sequence with TTCN PAM
cauagagaacagcuaauaag

SEQ ID NO: 20110 - RNA, 20 nt, Artificial Sequence
  targeting sequence with TTCN PAM
uagcaucugccaacuaaggu

SEQ ID NO: 20111 - RNA, 20 nt, Artificial Sequence
  targeting sequence with TTCN PAM
gacagcaaugugggcacuuc

SEQ ID NO: 20112 - RNA, 20 nt, Artificial Sequence
  targeting sequence with TTCN PAM
cacguaccuucauggcggga

SEQ ID NO: 20113 - RNA, 20 nt, Artificial Sequence
  targeting sequence with TTCN PAM
uggcgggauucauggacuug

SEQ ID NO: 20114 - RNA, 20 nt, Artificial Sequence
  targeting sequence with TTCN PAM
uggacuugauucguuguguc

SEQ ID NO: 20115 - RNA, 20 nt, Artificial Sequence
  targeting sequence with TTCN PAM
uuguguccuuuccuggccua

SEQ ID NO: 20116 - RNA, 20 nt, Artificial Sequence
  targeting sequence with TTCN PAM
uggccuagucuaugaaagcu

SEQ ID NO: 20117 - RNA, 20 nt, Artificial Sequence
  targeting sequence with TTCN PAM
uagacuaggccaggaaagga

SEQ ID NO: 20118 - RNA, 20 nt, Artificial Sequence
  targeting sequence with TTCN PAM
gccaucucucuagcuuucau

SEQ ID NO: 20119 - RNA, 20 nt, Artificial Sequence
  targeting sequence with TTCN PAM
uuaugugcagagagggguca

SEQ ID NO: 20120 - RNA, 20 nt, Artificial Sequence
  targeting sequence with TTCN PAM
ugagcuguguuuccaucuag

SEQ ID NO: 20121 - RNA, 20 nt, Artificial Sequence
  targeting sequence with TTCN PAM
aucuagaaccucagauggag

SEQ ID NO: 20122 - RNA, 20 nt, Artificial Sequence
  targeting sequence with TTCN PAM
agauggaaacacagcucagg

SEQ ID NO: 20123 - RNA, 20 nt, Artificial Sequence
  targeting sequence with TTCN PAM
uccaucugagguucuagaug

SEQ ID NO: 20124 - RNA, 20 nt, Artificial Sequence
  targeting sequence with TTCN PAM
uuccuccaucugagguucua

SEQ ID NO: 20125 - RNA, 20 nt, Artificial Sequence
  targeting sequence with TTCN PAM
aaccuccacuccccuacccc

SEQ ID NO: 20126 - RNA, 20 nt, Artificial Sequence
  targeting sequence with TTCN PAM
cucuuuaucuccccacaguc

SEQ ID NO: 20127 - RNA, 20 nt, Artificial Sequence
  targeting sequence with TTCN PAM
ugggcugacauugaaggagu

SEQ ID NO: 20128 - RNA, 20 nt, Artificial Sequence
  targeting sequence with TTCN PAM
augucagcccaggaauaugg

SEQ ID NO: 20129 - RNA, 20 nt, Artificial Sequence
  targeting sequence with TTCN PAM
ugccuacaagucuugaucua

SEQ ID NO: 20130 - RNA, 20 nt, Artificial Sequence
  targeting sequence with TTCN PAM
gaguccuggucugguccagu

SEQ ID NO: 20131 - RNA, 20 nt, Artificial Sequence
  targeting sequence with TTCN PAM
cucagagccccgguccuccc

SEQ ID NO: 20132 - RNA, 20 nt, Artificial Sequence
  targeting sequence with TTCN PAM
gaaauggggguagugagaau

SEQ ID NO: 20133 - RNA, 20 nt, Artificial Sequence
  targeting sequence with TTCN PAM
gaacugggaggaccggggcu

SEQ ID NO: 20134 - RNA, 20 nt, Artificial Sequence
  targeting sequence with TTCN PAM
cacuacccccauuucagaac

SEQ ID NO: 20135 - RNA, 20 nt, Artificial Sequence
  targeting sequence with TTCN PAM
ccuuuacaacaucucaguua

SEQ ID NO: 20136 - RNA, 20 nt, Artificial Sequence
  targeting sequence with TTCN PAM
aguaauggcuagcaucugca

SEQ ID NO: 20137 - RNA, 20 nt, Artificial Sequence
  targeting sequence with TTCN PAM
uacacuggggacaucuaaaa

SEQ ID NO: 20138 - RNA, 20 nt, Artificial Sequence
  targeting sequence with TTCN PAM
uccaucuccacuuuccuaca

SEQ ID NO: 20139 - RNA, 20 nt, Artificial Sequence
  targeting sequence with TTCN PAM
gaggagggaggaggcauccc

SEQ ID NO: 20140 - RNA, 20 nt, Artificial Sequence
  targeting sequence with TTCN PAM
cucuccugccccacccagaa

SEQ ID NO: 20141 - RNA, 20 nt, Artificial Sequence
  targeting sequence with TTCN PAM
ggguggggcaggagagggaa

SEQ ID NO: 20142 - RNA, 20 nt, Artificial Sequence
  targeting sequence with TTCN PAM
ucccugcuggcauuucuggg

SEQ ID NO: 20143 - RNA, 20 nt, Artificial Sequence
  targeting sequence with TTCN PAM
ggggauuugucaucuuccuc

SEQ ID NO: 20144 - RNA, 20 nt, Artificial Sequence
  targeting sequence with TTCN PAM
gugcccaaaacaacaccuau

SEQ ID NO: 20145 - RNA, 20 nt, Artificial Sequence
  targeting sequence with TTCN PAM
uucugugcccaaaacaacac

SEQ ID NO: 20146 - RNA, 20 nt, Artificial Sequence
  targeting sequence with TTCN PAM
uaauuucauucugugcccaa

SEQ ID NO: 20147 - RNA, 20 nt, Artificial Sequence
  targeting sequence with TTCN PAM
cucuagauugucaccuccuu

SEQ ID NO: 20148 - RNA, 20 nt, Artificial Sequence
  targeting sequence with TTCN PAM
uggguguaaggaggugacaa

SEQ ID NO: 20149 - RNA, 20 nt, Artificial Sequence
  targeting sequence with TTCN PAM
aauauuuguugagcaccaac

SEQ ID NO: 20150 - RNA, 20 nt, Artificial Sequence
  targeting sequence with TTCN PAM
uucauuuauuuaacucccca

SEQ ID NO: 20151 - RNA, 20 nt, Artificial Sequence
  targeting sequence with TTCN PAM
uuuauuuaacuccccagccu

SEQ ID NO: 20152 - RNA, 20 nt, Artificial Sequence
  targeting sequence with TTCN PAM
cagggaguguuuuggugaua

SEQ ID NO: 20153 - RNA, 20 nt, Artificial Sequence
  targeting sequence with TTCN PAM
auucucagggaguguuuugg

SEQ ID NO: 20154 - RNA, 20 nt, Artificial Sequence
  targeting sequence with TTCN PAM
uugauuuauuuaaauuaaaa

SEQ ID NO: 20155 - RNA, 20 nt, Artificial Sequence
  targeting sequence with TTCN PAM
uugggaggccgagacaggca

SEQ ID NO: 20156 - RNA, 20 nt, Artificial Sequence
  targeting sequence with TTCN PAM
gccccagccucccaaguagc

SEQ ID NO: 20157 - RNA, 20 nt, Artificial Sequence
  targeting sequence with TTCN PAM
agcaauucugccccagccuc

SEQ ID NO: 20158 - RNA, 20 nt, Artificial Sequence
  targeting sequence with TTCN PAM
agccuuggugacacagcaag

SEQ ID NO: 20159 - RNA, 20 nt, Artificial Sequence
  targeting sequence with TTCN PAM
aaacaucauauuguacugau

SEQ ID NO: 20160 - RNA, 20 nt, Artificial Sequence
  targeting sequence with TTCN PAM
ucuaaauccuguaucccccc

SEQ ID NO: 20161 - RNA, 20 nt, Artificial Sequence
  targeting sequence with TTCN PAM
uucccucugugacaggcacu

SEQ ID NO: 20162 - RNA, 20 nt, Artificial Sequence
  targeting sequence with TTCN PAM
cucugugacaggcacucagg

SEQ ID NO: 20163 - RNA, 20 nt, Artificial Sequence
  targeting sequence with TTCN PAM
cugccaucuaguggggaugg

SEQ ID NO: 20164 - RNA, 20 nt, Artificial Sequence
  targeting sequence with TTCN PAM
caggcuucccucuacugagc

SEQ ID NO: 20165 - RNA, 20 nt, Artificial Sequence
  targeting sequence with TTCN PAM
cucuacugagcucauucagg

SEQ ID NO: 20166 - RNA, 20 nt, Artificial Sequence
  targeting sequence with TTCN PAM
ggggccuucugaccacucug

SEQ ID NO: 20167 - RNA, 20 nt, Artificial Sequence
  targeting sequence with TTCN PAM
gaccacucugaacagcugcc

SEQ ID NO: 20168 - RNA, 20 nt, Artificial Sequence
  targeting sequence with TTCN PAM
gaguggucagaaggccccug

SEQ ID NO: 20169 - RNA, 20 nt, Artificial Sequence
  targeting sequence with TTCN PAM
accugaugcauccugcagca

SEQ ID NO: 20170 - RNA, 20 nt, Artificial Sequence
  targeting sequence with TTCN PAM
uucaaccugaugcauccugc

SEQ ID NO: 20171 - RNA, 20 nt, Artificial Sequence
  targeting sequence with TTCN PAM
aaguuccuucaaccugaugc

SEQ ID NO: 20172 - RNA, 20 nt, Artificial Sequence
  targeting sequence with TTCN PAM
cagugggcaaauccuagacu

SEQ ID NO: 20173 - RNA, 20 nt, Artificial Sequence
  targeting sequence with TTCN PAM
agcucuaggucggcugugcu

SEQ ID NO: 20174 - RNA, 20 nt, Artificial Sequence
  targeting sequence with TTCN PAM
acaaagauggcuggagccca

SEQ ID NO: 20175 - RNA, 20 nt, Artificial Sequence
  targeting sequence with TTCN PAM
gggcuccagccaucuuugug

SEQ ID NO: 20176 - RNA, 20 nt, Artificial Sequence
  targeting sequence with TTCN PAM
cugcuucugggcuccagcca

SEQ ID NO: 20177 - RNA, 20 nt, Artificial Sequence
  targeting sequence with TTCN PAM
aggucucaguccucgcucug

SEQ ID NO: 20178 - RNA, 20 nt, Artificial Sequence
  targeting sequence with TTCN PAM
cucucggccacugugccgug

SEQ ID NO: 20179 - RNA, 20 nt, Artificial Sequence
  targeting sequence with TTCN PAM
uuaaaacaccuugagaggac

SEQ ID NO: 20180 - RNA, 20 nt, Artificial Sequence
  targeting sequence with TTCN PAM
uuagcccaugugaugcccgc

SEQ ID NO: 20181 - RNA, 20 nt, Artificial Sequence
  targeting sequence with TTCN PAM
augaauucuucuucacaaac

SEQ ID NO: 20182 - RNA, 20 nt, Artificial Sequence
  targeting sequence with TTCN PAM
uagaaaagggcaaugcgggc

SEQ ID NO: 20183 - RNA, 20 nt, Artificial Sequence
  targeting sequence with TTCN PAM
ucuucacaaacacuuguuug

SEQ ID NO: 20184 - RNA, 20 nt, Artificial Sequence
  targeting sequence with TTCN PAM
ucacaaacacuuguuugcua

SEQ ID NO: 20185 - RNA, 20 nt, Artificial Sequence
  targeting sequence with TTCN PAM
caaacacuuguuugcuaggu

SEQ ID NO: 20186 - RNA, 20 nt, Artificial Sequence
  targeting sequence with TTCN PAM
gacucugaugccucccuuaa

SEQ ID NO: 20187 - RNA, 20 nt, Artificial Sequence
  targeting sequence with TTCN PAM
uccguguucuccaggcaucu

SEQ ID NO: 20188 - RNA, 20 nt, Artificial Sequence
  targeting sequence with TTCN PAM
ccaggcaucugguucauagu

SEQ ID NO: 20189 - RNA, 20 nt, Artificial Sequence
  targeting sequence with TTCN PAM
uagucggagagcucuuagcu

SEQ ID NO: 20190 - RNA, 20 nt, Artificial Sequence
  targeting sequence with TTCN PAM
aacaggggaggcugaccaau

SEQ ID NO: 20191 - RNA, 20 nt, Artificial Sequence
  targeting sequence with TTCN PAM
gaggccacauucuaacaggg

SEQ ID NO: 20192 - RNA, 20 nt, Artificial Sequence
  targeting sequence with TTCN PAM
uccuggguccucagucucug

SEQ ID NO: 20193 - RNA, 20 nt, Artificial Sequence
  targeting sequence with TTCN PAM
uggguccucagucucugaca

SEQ ID NO: 20194 - RNA, 20 nt, Artificial Sequence
  targeting sequence with TTCN PAM
ugucagagacugaggaccca

SEQ ID NO: 20195 - RNA, 20 nt, Artificial Sequence
  targeting sequence with TTCN PAM
ucccacaggaccaggcuucc

SEQ ID NO: 20196 - RNA, 20 nt, Artificial Sequence
  targeting sequence with TTCN PAM
ucuuuucaucccacaggacc

SEQ ID NO: 20197 - RNA, 20 nt, Artificial Sequence
  targeting sequence with TTCN PAM
ggagggaggaugccaugcug

SEQ ID NO: 20198 - RNA, 20 nt, Artificial Sequence
  targeting sequence with TTCN PAM
guucaaagggcucuggagcu

SEQ ID NO: 20199 - RNA, 20 nt, Artificial Sequence
  targeting sequence with TTCN PAM
aagggcucuggagcugcugc

SEQ ID NO: 20200 - RNA, 20 nt, Artificial Sequence
  targeting sequence with TTCN PAM
aaaugggcugaccugugccu

SEQ ID NO: 20201 - RNA, 20 nt, Artificial Sequence
  targeting sequence with TTCN PAM
gguggcuuugcugucaccau

SEQ ID NO: 20202 - RNA, 20 nt, Artificial Sequence
  targeting sequence with TTCN PAM
gcccaggguuuggaggagca

SEQ ID NO: 20203 - RNA, 20 nt, Artificial Sequence
  targeting sequence with TTCN PAM
gauucugcccaggguuugga

SEQ ID NO: 20204 - RNA, 20 nt, Artificial Sequence
  targeting sequence with TTCN PAM
ucagaaacuucuagaggucc

SEQ ID NO: 20205 - RNA, 20 nt, Artificial Sequence
  targeting sequence with TTCN PAM
gaggaacaagcagacuggug

SEQ ID NO: 20206 - RNA, 20 nt, Artificial Sequence
  targeting sequence with TTCN PAM
agagguccaugaguuaaagu

SEQ ID NO: 20207 - RNA, 20 nt, Artificial Sequence
  targeting sequence with TTCN PAM
aggcaagggcugcaauuuua

SEQ ID NO: 20208 - RNA, 20 nt, Artificial Sequence
  targeting sequence with TTCN PAM
acagacuuggcgggauucau

SEQ ID NO: 20209 - RNA, 20 nt, Artificial Sequence
  targeting sequence with TTCN PAM
uucccuaccccuccaccuuc

SEQ ID NO: 20210 - RNA, 20 nt, Artificial Sequence
  targeting sequence with TTCN PAM
cuaccccuccaccuucucca

SEQ ID NO: 20211 - RNA, 20 nt, Artificial Sequence
  targeting sequence with TTCN PAM
ccaagaaucuguguuuaugc

SEQ ID NO: 20212 - RNA, 20 nt, Artificial Sequence
  targeting sequence with TTCN PAM
uggagaagguggagggguag

SEQ ID NO: 20213 - RNA, 20 nt, Artificial Sequence
  targeting sequence with TTCN PAM
ccuccuccacgcccucugca

SEQ ID NO: 20214 - RNA, 20 nt, Artificial Sequence
  targeting sequence with TTCN PAM
acccaugucgccaagaugua

SEQ ID NO: 20215 - RNA, 20 nt, Artificial Sequence
  targeting sequence with TTCN PAM
ucuuuggcucgagagucucc

SEQ ID NO: 20216 - RNA, 20 nt, Artificial Sequence
  targeting sequence with TTCN PAM
uuggcucgagagucucccaa

SEQ ID NO: 20217 - RNA, 20 nt, Artificial Sequence
  targeting sequence with TTCN PAM
uugcaugauccaauuuuggg

SEQ ID NO: 20218 - RNA, 20 nt, Artificial Sequence
  targeting sequence with TTCN PAM
ucuccucuguggcucacugu

SEQ ID NO: 20219 - RNA, 20 nt, Artificial Sequence
  targeting sequence with TTCN PAM
cacccccagccagucaccca

SEQ ID NO: 20220 - RNA, 20 nt, Artificial Sequence
  targeting sequence with TTCN PAM
aaagugggugacuggcuggg

SEQ ID NO: 20221 - RNA, 20 nt, Artificial Sequence
  targeting sequence with TTCN PAM
uggcuucaaaagugggugac

SEQ ID NO: 20222 - RNA, 20 nt, Artificial Sequence
  targeting sequence with TTCN PAM
ccacaggcuuucaucagagu

SEQ ID NO: 20223 - RNA, 20 nt, Artificial Sequence
  targeting sequence with TTCN PAM
ucagaguacaagaccucauc

SEQ ID NO: 20224 - RNA, 20 nt, Artificial Sequence
  targeting sequence with TTCN PAM
acuuuuaccucaaugcugcu

SEQ ID NO: 20225 - RNA, 20 nt, Artificial Sequence
  targeting sequence with TTCN PAM
uacuugucaagaaaguggac

SEQ ID NO: 20226 - RNA, 20 nt, Artificial Sequence
  targeting sequence with TTCN PAM
ugacaaguaagaaugcuuca

SEQ ID NO: 20227 - RNA, 20 nt, Artificial Sequence
  targeting sequence with TTCN PAM
ggguucaggggcagcccuug

SEQ ID NO: 20228 - RNA, 20 nt, Artificial Sequence
  targeting sequence with TTCN PAM
ggggcagcccuuguggcagg

SEQ ID NO: 20229 - RNA, 20 nt, Artificial Sequence
  targeting sequence with TTCN PAM
uuuucacgcugcuggaaaag

SEQ ID NO: 20230 - RNA, 20 nt, Artificial Sequence
  targeting sequence with TTCN PAM
cgcugcuggaaaagauguac

SEQ ID NO: 20231 - RNA, 20 nt, Artificial Sequence
  targeting sequence with TTCN PAM
agcagcgugaaaaugaacua

SEQ ID NO: 20232 - RNA, 20 nt, Artificial Sequence
  targeting sequence with TTCN PAM
uuuguaaauugcccagucuc

SEQ ID NO: 20233 - RNA, 20 nt, Artificial Sequence
  targeting sequence with TTCN PAM
acauggcuaaggaagccuca

SEQ ID NO: 20234 - RNA, 20 nt, Artificial Sequence
  targeting sequence with TTCN PAM
uuagccauguggaacugcaa

SEQ ID NO: 20235 - RNA, 20 nt, Artificial Sequence
  targeting sequence with TTCN PAM
gccaugaucaugaggcuucc

SEQ ID NO: 20236 - RNA, 20 nt, Artificial Sequence
  targeting sequence with TTCN PAM
uugccuucugccaugaucau

SEQ ID NO: 20237 - RNA, 20 nt, Artificial Sequence
  targeting sequence with TTCN PAM
ccugcacaagcucucuguuu

SEQ ID NO: 20238 - RNA, 20 nt, Artificial Sequence
  targeting sequence with TTCN PAM
caugauaguaagucucacga

SEQ ID NO: 20239 - RNA, 20 nt, Artificial Sequence
  targeting sequence with TTCN PAM
caugcuguucucaugauagu

SEQ ID NO: 20240 - RNA, 20 nt, Artificial Sequence
  targeting sequence with TTCN PAM
auuacccgccacgggguccc

SEQ ID NO: 20241 - RNA, 20 nt, Artificial Sequence
  targeting sequence with TTCN PAM
cauguguugugggagggacc

SEQ ID NO: 20242 - RNA, 20 nt, Artificial Sequence
  targeting sequence with TTCN PAM
agaugagaucugggugggga

SEQ ID NO: 20243 - RNA, 20 nt, Artificial Sequence
  targeting sequence with TTCN PAM
cgaucucuccaggguugggu

SEQ ID NO: 20244 - RNA, 20 nt, Artificial Sequence
  targeting sequence with TTCN PAM
ugucugugaaaagggauugg

SEQ ID NO: 20245 - RNA, 20 nt, Artificial Sequence
  targeting sequence with TTCN PAM
cagacaagaaacccaacccu

SEQ ID NO: 20246 - RNA, 20 nt, Artificial Sequence
  targeting sequence with TTCN PAM
guagguucucaggaacuggu

SEQ ID NO: 20247 - RNA, 20 nt, Artificial Sequence
  targeting sequence with TTCN PAM
caggaacugguuugcauccu

SEQ ID NO: 20248 - RNA, 20 nt, Artificial Sequence
  targeting sequence with TTCN PAM
ugagaaccuacugaauccuc

SEQ ID NO: 20249 - RNA, 20 nt, Artificial Sequence
  targeting sequence with TTCN PAM
caaaugcacaugagcugagc

SEQ ID NO: 20250 - RNA, 20 nt, Artificial Sequence
  targeting sequence with TTCN PAM
ccagaaauggaccuggggag

SEQ ID NO: 20251 - RNA, 20 nt, Artificial Sequence
  targeting sequence with TTCN PAM
ggggaauggagcucagcuca

SEQ ID NO: 20252 - RNA, 20 nt, Artificial Sequence
  targeting sequence with TTCN PAM
gacugugggccuugcucccc

SEQ ID NO: 20253 - RNA, 20 nt, Artificial Sequence
  targeting sequence with TTCN PAM
ggagcaacucccagcccuac

SEQ ID NO: 20254 - RNA, 20 nt, Artificial Sequence
  targeting sequence with TTCN PAM
uggcugagaauauucaguuu

SEQ ID NO: 20255 - RNA, 20 nt, Artificial Sequence
  targeting sequence with TTCN PAM
cagccaggaacaguagggcu

SEQ ID NO: 20256 - RNA, 20 nt, Artificial Sequence
  targeting sequence with TTCN PAM
guuugucauccaacccaaua

SEQ ID NO: 20257 - RNA, 20 nt, Artificial Sequence
  targeting sequence with TTCN PAM
uuagcccacugcaggccuau

SEQ ID NO: 20258 - RNA, 20 nt, Artificial Sequence
  targeting sequence with TTCN PAM
uuuuauucuuuuuuuuuuuu

SEQ ID NO: 20259 - RNA, 20 nt, Artificial Sequence
  targeting sequence with TTCN PAM
aacaggcugccaguucugac

SEQ ID NO: 20260 - RNA, 20 nt, Artificial Sequence
  targeting sequence with TTCN PAM
ucaccccacacccauuucca

SEQ ID NO: 20261 - RNA, 20 nt, Artificial Sequence
  targeting sequence with TTCN PAM
ccccacacccauuuccaucc

SEQ ID NO: 20262 - RNA, 20 nt, Artificial Sequence
  targeting sequence with TTCN PAM
aucccaggaccacacaccuu

SEQ ID NO: 20263 - RNA, 20 nt, Artificial Sequence
  targeting sequence with TTCN PAM
uccggcaccagucagaccga

SEQ ID NO: 20264 - RNA, 20 nt, Artificial Sequence
  targeting sequence with TTCN PAM
ugguucucuuuuugacgauc

SEQ ID NO: 20265 - RNA, 20 nt, Artificial Sequence
  targeting sequence with TTCN PAM
cuuuuugacgaucuugggcu

SEQ ID NO: 20266 - RNA, 20 nt, Artificial Sequence
  targeting sequence with TTCN PAM
caagggaucugagggcagcc

SEQ ID NO: 20267 - RNA, 20 nt, Artificial Sequence
  targeting sequence with TTCN PAM
ccaaaaggcaucauggcugc

SEQ ID NO: 20268 - RNA, 20 nt, Artificial Sequence
  targeting sequence with TTCN PAM
uccccaaaaggcaucauggc

SEQ ID NO: 20269 - RNA, 20 nt, Artificial Sequence
  targeting sequence with TTCN PAM
ucaccuggggcuacuucuuc

SEQ ID NO: 20270 - RNA, 20 nt, Artificial Sequence
  targeting sequence with TTCN PAM
uccucaccuggggcuacuuc

SEQ ID NO: 20271 - RNA, 20 nt, Artificial Sequence
  targeting sequence with TTCN PAM
aggauucuuccucaccuggg

SEQ ID NO: 20272 - RNA, 20 nt, Artificial Sequence
  targeting sequence with TTCN PAM
cgcccagggacugaacacug

SEQ ID NO: 20273 - RNA, 20 nt, Artificial Sequence
  targeting sequence with TTCN PAM
gucccugggcgggaaagccu

SEQ ID NO: 20274 - RNA, 20 nt, Artificial Sequence
  targeting sequence with TTCN PAM
aaucaccagcuacggagcaa

SEQ ID NO: 20275 - RNA, 20 nt, Artificial Sequence
  targeting sequence with TTCN PAM
cagcuugcuccguagcuggu

SEQ ID NO: 20276 - RNA, 20 nt, Artificial Sequence
  targeting sequence with TTCN PAM
auucccagcuugcuccguag

SEQ ID NO: 20277 - RNA, 20 nt, Artificial Sequence
  targeting sequence with TTCN PAM
cucccuuuccgaagcuggca

SEQ ID NO: 20278 - RNA, 20 nt, Artificial Sequence
  targeting sequence with TTCN PAM
gaagcuggcagaauacuagg

SEQ ID NO: 20279 - RNA, 20 nt, Artificial Sequence
  targeting sequence with TTCN PAM
gaaagggagggaaagcaagc

SEQ ID NO: 20280 - RNA, 20 nt, Artificial Sequence
  targeting sequence with TTCN PAM
gccagcuucggaaagggagg

SEQ ID NO: 20281 - RNA, 20 nt, Artificial Sequence
  targeting sequence with TTCN PAM
uugggcucugagugggugag

SEQ ID NO: 20282 - RNA, 20 nt, Artificial Sequence
  targeting sequence with TTCN PAM
gacacuggcagggugggauu

SEQ ID NO: 20283 - RNA, 20 nt, Artificial Sequence
  targeting sequence with TTCN PAM
gguaguacuggccuugacca

SEQ ID NO: 20284 - RNA, 20 nt, Artificial Sequence
  targeting sequence with TTCN PAM
aguagauggucaaggccagu

SEQ ID NO: 20285 - RNA, 20 nt, Artificial Sequence
  targeting sequence with TTCN PAM
ucaccuguaaaauggagacg

SEQ ID NO: 20286 - RNA, 20 nt, Artificial Sequence
  targeting sequence with TTCN PAM
gcacacaaugucgucuccau

SEQ ID NO: 20287 - RNA, 20 nt, Artificial Sequence
  targeting sequence with TTCN PAM
auaaagaaaaccuucuaauu

SEQ ID NO: 20288 - RNA, 20 nt, Artificial Sequence
  targeting sequence with TTCN PAM
uuauugaacauuuacccugu

SEQ ID NO: 20289 - RNA, 20 nt, Artificial Sequence
  targeting sequence with TTCN PAM
aauucccuagguagcagcug

SEQ ID NO: 20290 - RNA, 20 nt, Artificial Sequence
  targeting sequence with TTCN PAM
cuagguagcagcugcgcuac

SEQ ID NO: 20291 - RNA, 20 nt, Artificial Sequence
  targeting sequence with TTCN PAM
auuaucaacucacaacuucc

SEQ ID NO: 20292 - RNA, 20 nt, Artificial Sequence
  targeting sequence with TTCN PAM
ucaguguggucuucugagcc

SEQ ID NO: 20293 - RNA, 20 nt, Artificial Sequence
  targeting sequence with TTCN PAM
gagccauucauuuauuuccu

SEQ ID NO: 20294 - RNA, 20 nt, Artificial Sequence
  targeting sequence with TTCN PAM
uuuauuuccuacagcagcac

SEQ ID NO: 20295 - RNA, 20 nt, Artificial Sequence
  targeting sequence with TTCN PAM
uacagcagcaccccuucugu

SEQ ID NO: 20296 - RNA, 20 nt, Artificial Sequence
  targeting sequence with TTCN PAM
guucucuuugcagccaucag

SEQ ID NO: 20297 - RNA, 20 nt, Artificial Sequence
  targeting sequence with TTCN PAM
cuuugcagccaucaguuggc

SEQ ID NO: 20298 - RNA, 20 nt, Artificial Sequence
  targeting sequence with TTCN PAM
uugaguacccacucugugcc

SEQ ID NO: 20299 - RNA, 20 nt, Artificial Sequence
  targeting sequence with TTCN PAM
aaacaacuuugccuucuggc

SEQ ID NO: 20300 - RNA, 20 nt, Artificial Sequence
  targeting sequence with TTCN PAM
ggcccaugauauccuugaag

SEQ ID NO: 20301 - RNA, 20 nt, Artificial Sequence
  targeting sequence with TTCN PAM
aggauaucaugggccagaag

SEQ ID NO: 20302 - RNA, 20 nt, Artificial Sequence
  targeting sequence with TTCN PAM
cccuugccuucaaggauauc

SEQ ID NO: 20303 - RNA, 20 nt, Artificial Sequence
  targeting sequence with TTCN PAM
ucuuuauauucccagagcuc

SEQ ID NO: 20304 - RNA, 20 nt, Artificial Sequence
  targeting sequence with TTCN PAM
cagagcuccugacgaucaaa

SEQ ID NO: 20305 - RNA, 20 nt, Artificial Sequence
  targeting sequence with TTCN PAM
agccugugacccuagggcug

SEQ ID NO: 20306 - RNA, 20 nt, Artificial Sequence
  targeting sequence with TTCN PAM
uucuagccugugacccuagg

SEQ ID NO: 20307 - RNA, 20 nt, Artificial Sequence
  targeting sequence with TTCN PAM
uuuccuucuagccugugacc

SEQ ID NO: 20308 - RNA, 20 nt, Artificial Sequence
  targeting sequence with TTCN PAM
uugccaugaccccacguucc

SEQ ID NO: 20309 - RNA, 20 nt, Artificial Sequence
  targeting sequence with TTCN PAM
uucauugccaugaccccacg

SEQ ID NO: 20310 - RNA, 20 nt, Artificial Sequence
  targeting sequence with TTCN PAM
guuuauaccgugcuuacuga

SEQ ID NO: 20311 - RNA, 20 nt, Artificial Sequence
  targeting sequence with TTCN PAM
aagccccccacccaacugaa

SEQ ID NO: 20312 - RNA, 20 nt, Artificial Sequence
  targeting sequence with TTCN PAM
guuggguggggggcuuagaa

SEQ ID NO: 20313 - RNA, 20 nt, Artificial Sequence
  targeting sequence with TTCN PAM
aaaguuaaccugaaaaacua

SEQ ID NO: 20314 - RNA, 20 nt, Artificial Sequence
  targeting sequence with TTCN PAM
gguuaacuuuggaaugcccu

SEQ ID NO: 20315 - RNA, 20 nt, Artificial Sequence
  targeting sequence with TTCN PAM
agccauaaugggaauguggg

SEQ ID NO: 20316 - RNA, 20 nt, Artificial Sequence
  targeting sequence with TTCN PAM
cauuauggcuugaacuaguu

SEQ ID NO: 20317 - RNA, 20 nt, Artificial Sequence
  targeting sequence with TTCN PAM
accccacauucccauuaugg

SEQ ID NO: 20318 - RNA, 20 nt, Artificial Sequence
  targeting sequence with TTCN PAM
cccuauggaauucaggcaca

SEQ ID NO: 20319 - RNA, 20 nt, Artificial Sequence
  targeting sequence with TTCN PAM
auagggagaagggcauaaug

SEQ ID NO: 20320 - RNA, 20 nt, Artificial Sequence
  targeting sequence with TTCN PAM
ggcacagcugaccagcguua

SEQ ID NO: 20321 - RNA, 20 nt, Artificial Sequence
  targeting sequence with TTCN PAM
accugacucuaguauagcau

SEQ ID NO: 20322 - RNA, 20 nt, Artificial Sequence
  targeting sequence with TTCN PAM
gggccugcaaucugucaugu

SEQ ID NO: 20323 - RNA, 20 nt, Artificial Sequence
  targeting sequence with TTCN PAM
uucagggccugcaaucuguc

SEQ ID NO: 20324 - RNA, 20 nt, Artificial Sequence
  targeting sequence with TTCN PAM
guuucuuucagggccugcaa

SEQ ID NO: 20325 - RNA, 20 nt, Artificial Sequence
  targeting sequence with TTCN PAM
uugacauauucugacauggc

SEQ ID NO: 20326 - RNA, 20 nt, Artificial Sequence
  targeting sequence with TTCN PAM
gacauggcccuguaaagcug

SEQ ID NO: 20327 - RNA, 20 nt, Artificial Sequence
  targeting sequence with TTCN PAM
cuacaggacguagauugucc

SEQ ID NO: 20328 - RNA, 20 nt, Artificial Sequence
  targeting sequence with TTCN PAM
aggucuucucccugagccag

SEQ ID NO: 20329 - RNA, 20 nt, Artificial Sequence
  targeting sequence with TTCN PAM
cccugagccaggagaggcuc

SEQ ID NO: 20330 - RNA, 20 nt, Artificial Sequence
  targeting sequence with TTCN PAM
ggccugguaagaaacauuua

SEQ ID NO: 20331 - RNA, 20 nt, Artificial Sequence
  targeting sequence with TTCN PAM
uaccaggccugaaaaggugc

SEQ ID NO: 20332 - RNA, 20 nt, Artificial Sequence
  targeting sequence with TTCN PAM
aagagaguagaucguaaaug

SEQ ID NO: 20333 - RNA, 20 nt, Artificial Sequence
  targeting sequence with TTCN PAM
ucugcauaaauaagaaccuu

SEQ ID NO: 20334 - RNA, 20 nt, Artificial Sequence
  targeting sequence with TTCN PAM
uauuuaugcagaggaagccu

SEQ ID NO: 20335 - RNA, 20 nt, Artificial Sequence
  targeting sequence with TTCN PAM
gauaagagguuguggagacc

SEQ ID NO: 20336 - RNA, 20 nt, Artificial Sequence
  targeting sequence with TTCN PAM
uuuuuguugauuccaagucu

SEQ ID NO: 20337 - RNA, 20 nt, Artificial Sequence
  targeting sequence with TTCN PAM
aagucuuuagacaaacucaa

SEQ ID NO: 20338 - RNA, 20 nt, Artificial Sequence
  targeting sequence with TTCN PAM
caggacuuccugagggcuuu

SEQ ID NO: 20339 - RNA, 20 nt, Artificial Sequence
  targeting sequence with TTCN PAM
ugagggcuuugucacgggcc

SEQ ID NO: 20340 - RNA, 20 nt, Artificial Sequence
  targeting sequence with TTCN PAM
gaguccaguaugagugacca

SEQ ID NO: 20341 - RNA, 20 nt, Artificial Sequence
  targeting sequence with TTCN PAM
aauacuuuacacaguuugac

SEQ ID NO: 20342 - RNA, 20 nt, Artificial Sequence
  targeting sequence with TTCN PAM
ucaauagacgcaaagcccaa

SEQ ID NO: 20343 - RNA, 20 nt, Artificial Sequence
  targeting sequence with TTCN PAM
cucuguucguguacgcgcuc

SEQ ID NO: 20344 - RNA, 20 nt, Artificial Sequence
  targeting sequence with TTCN PAM
uguacgcgcuccagcaagcc

SEQ ID NO: 20345 - RNA, 20 nt, Artificial Sequence
  targeting sequence with TTCN PAM
cuaccacucugugucugugg

SEQ ID NO: 20346 - RNA, 20 nt, Artificial Sequence
  targeting sequence with TTCN PAM
ucuggcccuaugguccccug

SEQ ID NO: 20347 - RNA, 20 nt, Artificial Sequence
  targeting sequence with TTCN PAM
ugcaggcuucaucuggcccu

SEQ ID NO: 20348 - RNA, 20 nt, Artificial Sequence
  targeting sequence with TTCN PAM
gggauuacaggcgugagcca

SEQ ID NO: 20349 - RNA, 20 nt, Artificial Sequence
  targeting sequence with TTCN PAM
aaaguucugggauuacaggc

SEQ ID NO: 20350 - RNA, 20 nt, Artificial Sequence
  targeting sequence with TTCN PAM
agaccagccuggccaacaua

SEQ ID NO: 20351 - RNA, 20 nt, Artificial Sequence
  targeting sequence with TTCN PAM
cuauguuggccaggcugguc

SEQ ID NO: 20352 - RNA, 20 nt, Artificial Sequence
  targeting sequence with TTCN PAM
aaaauuagccaggcguggug

SEQ ID NO: 20353 - RNA, 20 nt, Artificial Sequence
  targeting sequence with TTCN PAM
ccugccucagccugccaagu

SEQ ID NO: 20354 - RNA, 20 nt, Artificial Sequence
  targeting sequence with TTCN PAM
agcgauucuccugccucagc

SEQ ID NO: 20355 - RNA, 20 nt, Artificial Sequence
  targeting sequence with TTCN PAM
gggguucaagcgauucuccu

SEQ ID NO: 20356 - RNA, 20 nt, Artificial Sequence
  targeting sequence with TTCN PAM
caggcuggagugcaguggug

SEQ ID NO: 20357 - RNA, 20 nt, Artificial Sequence
  targeting sequence with TTCN PAM
ugcucggugaguuuguuugu

SEQ ID NO: 20358 - RNA, 20 nt, Artificial Sequence
  targeting sequence with TTCN PAM
uuuuccugcucggugaguuu

SEQ ID NO: 20359 - RNA, 20 nt, Artificial Sequence
  targeting sequence with TTCN PAM
uuggugcuucuuuuuccugc

SEQ ID NO: 20360 - RNA, 20 nt, Artificial Sequence
  targeting sequence with TTCN PAM
cucuuccuuggugcuucuuu

SEQ ID NO: 20361 - RNA, 20 nt, Artificial Sequence
  targeting sequence with TTCN PAM
cugucaggacccagagguua

SEQ ID NO: 20362 - RNA, 20 nt, Artificial Sequence
  targeting sequence with TTCN PAM
ggcuccggguccuuaaaaaa

SEQ ID NO: 20363 - RNA, 20 nt, Artificial Sequence
  targeting sequence with TTCN PAM
uugacaugucuuuuuuuuaa

SEQ ID NO: 20364 - RNA, 20 nt, Artificial Sequence
  targeting sequence with TTCN PAM
gcagcacucuuucuuugaca

SEQ ID NO: 20365 - RNA, 20 nt, Artificial Sequence
  targeting sequence with TTCN PAM
gcauuucugcagcacucuuu

SEQ ID NO: 20366 - RNA, 20 nt, Artificial Sequence
  targeting sequence with TTCN PAM
uagauauuacucucuauuaa

SEQ ID NO: 20367 - RNA, 20 nt, Artificial Sequence
  targeting sequence with TTCN PAM
uuuacauucuuagauauuac

SEQ ID NO: 20368 - RNA, 20 nt, Artificial Sequence
  targeting sequence with TTCN PAM
aacuagugccaagggcaggu

SEQ ID NO: 20369 - RNA, 20 nt, Artificial Sequence
  targeting sequence with TTCN PAM
aacuuucuaacuagugccaa

SEQ ID NO: 20370 - RNA, 20 nt, Artificial Sequence
  targeting sequence with TTCN PAM
uucugaguugagaccuggug

SEQ ID NO: 20371 - RNA, 20 nt, Artificial Sequence
  targeting sequence with TTCN PAM
gaguugagaccugguguagg

SEQ ID NO: 20372 - RNA, 20 nt, Artificial Sequence
  targeting sequence with TTCN PAM
ucccuacaccaggucucaac

SEQ ID NO: 20373 - RNA, 20 nt, Artificial Sequence
  targeting sequence with TTCN PAM
gccagaaguugaagccaauc

SEQ ID NO: 20374 - RNA, 20 nt, Artificial Sequence
  targeting sequence with TTCN PAM
ggcggaaguagauuccuccc

SEQ ID NO: 20375 - RNA, 20 nt, Artificial Sequence
  targeting sequence with TTCN PAM
acuucuggcggaaguagauu

SEQ ID NO: 20376 - RNA, 20 nt, Artificial Sequence
  targeting sequence with TTCN PAM
gcccuuguuuccucuacucc

SEQ ID NO: 20377 - RNA, 20 nt, Artificial Sequence
  targeting sequence with TTCN PAM
ucuacuccgaagugcgcuuc

SEQ ID NO: 20378 - RNA, 20 nt, Artificial Sequence
  targeting sequence with TTCN PAM
gaguagaggaaacaagggcg

SEQ ID NO: 20379 - RNA, 20 nt, Artificial Sequence
  targeting sequence with TTCN PAM
uagcggucaggagagaucaa

SEQ ID NO: 20380 - RNA, 20 nt, Artificial Sequence
  targeting sequence with TTCN PAM
caaaauucccucacugaauu

SEQ ID NO: 20381 - RNA, 20 nt, Artificial Sequence
  targeting sequence with TTCN PAM
cucacugaauuuacauagua

SEQ ID NO: 20382 - RNA, 20 nt, Artificial Sequence
  targeting sequence with TTCN PAM
gugagggaauuuugggaagu

SEQ ID NO: 20383 - RNA, 20 nt, Artificial Sequence
  targeting sequence with TTCN PAM
ggucucaucacuauuuacua

SEQ ID NO: 20384 - RNA, 20 nt, Artificial Sequence
  targeting sequence with TTCN PAM
auaauguaaccuauuauugu

SEQ ID NO: 20385 - RNA, 20 nt, Artificial Sequence
  targeting sequence with TTCN PAM
acauaugcaaaauagagaca

SEQ ID NO: 20386 - RNA, 20 nt, Artificial Sequence
  targeting sequence with TTCN PAM
ccuuccacauaugcaaaaua

SEQ ID NO: 20387 - RNA, 20 nt, Artificial Sequence
  targeting sequence with TTCN PAM
aaccauuagucuaaacuacc

SEQ ID NO: 20388 - RNA, 20 nt, Artificial Sequence
  targeting sequence with TTCN PAM
cagcuacugucuaauuuuua

SEQ ID NO: 20389 - RNA, 20 nt, Artificial Sequence
  targeting sequence with TTCN PAM
ugauuugcuuagcuuuuuuu

SEQ ID NO: 20390 - RNA, 20 nt, Artificial Sequence
  targeting sequence with TTCN PAM
gccucccagguucaagggac

SEQ ID NO: 20391 - RNA, 20 nt, Artificial Sequence
  targeting sequence with TTCN PAM
agggacaagggauucuccug

SEQ ID NO: 20392 - RNA, 20 nt, Artificial Sequence
  targeting sequence with TTCN PAM
ccugccucaggcuccguagu

SEQ ID NO: 20393 - RNA, 20 nt, Artificial Sequence
  targeting sequence with TTCN PAM
guagagacaagggucucacu

SEQ ID NO: 20394 - RNA, 20 nt, Artificial Sequence
  targeting sequence with TTCN PAM
ccugagacaacugggacucu

SEQ ID NO: 20395 - RNA, 20 nt, Artificial Sequence
  targeting sequence with TTCN PAM
uuccuuguggaguuagauga

SEQ ID NO: 20396 - RNA, 20 nt, Artificial Sequence
  targeting sequence with TTCN PAM
uuguggaguuagaugauugc

SEQ ID NO: 20397 - RNA, 20 nt, Artificial Sequence
  targeting sequence with TTCN PAM
ucaaacuccuuaaagcgcau

SEQ ID NO: 20398 - RNA, 20 nt, Artificial Sequence
  targeting sequence with TTCN PAM
ugcuuuucuuuggcguuuuc

SEQ ID NO: 20399 - RNA, 20 nt, Artificial Sequence
  targeting sequence with TTCN PAM
uuggcguuuuccuaguggag

SEQ ID NO: 20400 - RNA, 20 nt, Artificial Sequence
  targeting sequence with TTCN PAM
uaguggagaagagagaggca

SEQ ID NO: 20401 - RNA, 20 nt, Artificial Sequence
  targeting sequence with TTCN PAM
ccacuaggaaaacgccaaag

SEQ ID NO: 20402 - RNA, 20 nt, Artificial Sequence
  targeting sequence with TTCN PAM
acucuccucacaaaaugccu

SEQ ID NO: 20403 - RNA, 20 nt, Artificial Sequence
  targeting sequence with TTCN PAM
uauguaaaggggccuaguag

SEQ ID NO: 20404 - RNA, 20 nt, Artificial Sequence
  targeting sequence with TTCN PAM
cugagucuuagcaucuucau

SEQ ID NO: 20405 - RNA, 20 nt, Artificial Sequence
  targeting sequence with TTCN PAM
guuaaauggacaaggcacuu

SEQ ID NO: 20406 - RNA, 20 nt, Artificial Sequence
  targeting sequence with TTCN PAM
ggccacacacccagugggca

SEQ ID NO: 20407 - RNA, 20 nt, Artificial Sequence
  targeting sequence with TTCN PAM
agaccccugccagcugccca

SEQ ID NO: 20408 - RNA, 20 nt, Artificial Sequence
  targeting sequence with TTCN PAM
ucugcagucacccacggaug

SEQ ID NO: 20409 - RNA, 20 nt, Artificial Sequence
  targeting sequence with TTCN PAM
uagagaagacucagguuggc

SEQ ID NO: 20410 - RNA, 20 nt, Artificial Sequence
  targeting sequence with TTCN PAM
cuaagaaaauggccuccuuu

SEQ ID NO: 20411 - RNA, 20 nt, Artificial Sequence
  targeting sequence with TTCN PAM
agaggccaaccugagucuuc

SEQ ID NO: 20412 - RNA, 20 nt, Artificial Sequence
  targeting sequence with TTCN PAM
ccgggaccugccuccagccc

SEQ ID NO: 20413 - RNA, 20 nt, Artificial Sequence
  targeting sequence with TTCN PAM
uuuauccuccuaugagcugc

SEQ ID NO: 20414 - RNA, 20 nt, Artificial Sequence
  targeting sequence with TTCN PAM
uuguuaaaaaacaagguggu

SEQ ID NO: 20415 - RNA, 20 nt, Artificial Sequence
  targeting sequence with TTCN PAM
aaaaccagaaucagcaaaga

SEQ ID NO: 20416 - RNA, 20 nt, Artificial Sequence
  targeting sequence with TTCN PAM
gguuuuagaagcuuuaaaag

SEQ ID NO: 20417 - RNA, 20 nt, Artificial Sequence
  targeting sequence with TTCN PAM
ugcugcaacacagagcugag

SEQ ID NO: 20418 - RNA, 20 nt, Artificial Sequence
  targeting sequence with TTCN PAM
agcuacucaggaagcugaag

SEQ ID NO: 20419 - RNA, 20 nt, Artificial Sequence
  targeting sequence with TTCN PAM
ugaguagcuagaaccacagg

SEQ ID NO: 20420 - RNA, 20 nt, Artificial Sequence
  targeting sequence with TTCN PAM
gcuuccugaguagcuagaac

SEQ ID NO: 20421 - RNA, 20 nt, Artificial Sequence
  targeting sequence with TTCN PAM
ugggcauaagcaauccuccc

SEQ ID NO: 20422 - RNA, 20 nt, Artificial Sequence
  targeting sequence with TTCN PAM
caggugugaucauagcuuac

SEQ ID NO: 20423 - RNA, 20 nt, Artificial Sequence
  targeting sequence with TTCN PAM
cuccagccuaggcaacauaa

SEQ ID NO: 20424 - RNA, 20 nt, Artificial Sequence
  targeting sequence with TTCN PAM
cuuggcuucccacagcauuu

SEQ ID NO: 20425 - RNA, 20 nt, Artificial Sequence
  targeting sequence with TTCN PAM
cacagcauuuagaccaaaac

SEQ ID NO: 20426 - RNA, 20 nt, Artificial Sequence
  targeting sequence with TTCN PAM
caccugguccauggcauacc

SEQ ID NO: 20427 - RNA, 20 nt, Artificial Sequence
  targeting sequence with TTCN PAM
cccuucacccauuccaccca

SEQ ID NO: 20428 - RNA, 20 nt, Artificial Sequence
  targeting sequence with TTCN PAM
cccauuccacccagccaccc

SEQ ID NO: 20429 - RNA, 20 nt, Artificial Sequence
  targeting sequence with TTCN PAM
acccagccacccugaccacc

SEQ ID NO: 20430 - RNA, 20 nt, Artificial Sequence
  targeting sequence with TTCN PAM
gucucuugcaagcuauccua

SEQ ID NO: 20431 - RNA, 20 nt, Artificial Sequence
  targeting sequence with TTCN PAM
caguucuaucugccuagauu

SEQ ID NO: 20432 - RNA, 20 nt, Artificial Sequence
  targeting sequence with TTCN PAM
aucugccuagauugugcuuc

SEQ ID NO: 20433 - RNA, 20 nt, Artificial Sequence
  targeting sequence with TTCN PAM
cccaagacuaguuccuguca

SEQ ID NO: 20434 - RNA, 20 nt, Artificial Sequence
  targeting sequence with TTCN PAM
ugucaaucacucagauguca

SEQ ID NO: 20435 - RNA, 20 nt, Artificial Sequence
  targeting sequence with TTCN PAM
cagagaggccgucccugacc

SEQ ID NO: 20436 - RNA, 20 nt, Artificial Sequence
  targeting sequence with TTCN PAM
augagcuugcaccuaaaggg

SEQ ID NO: 20437 - RNA, 20 nt, Artificial Sequence
  targeting sequence with TTCN PAM
caguuucuagaaguggcaca

SEQ ID NO: 20438 - RNA, 20 nt, Artificial Sequence
  targeting sequence with TTCN PAM
agaaguggcacauaguaguu

SEQ ID NO: 20439 - RNA, 20 nt, Artificial Sequence
  targeting sequence with TTCN PAM
agaaacugggaacacagcag

SEQ ID NO: 20440 - RNA, 20 nt, Artificial Sequence
  targeting sequence with TTCN PAM
aaugaaugaaagaaucccau

SEQ ID NO: 20441 - RNA, 20 nt, Artificial Sequence
  targeting sequence with TTCN PAM
uuggaaucuuuguugagcaa

SEQ ID NO: 20442 - RNA, 20 nt, Artificial Sequence
  targeting sequence with TTCN PAM
uucauuggaaucuuuguuga

SEQ ID NO: 20443 - RNA, 20 nt, Artificial Sequence
  targeting sequence with TTCN PAM
uucauucauuggaaucuuug

SEQ ID NO: 20444 - RNA, 20 nt, Artificial Sequence
  targeting sequence with TTCN PAM
gaccuucaucgucucaagcu

SEQ ID NO: 20445 - RNA, 20 nt, Artificial Sequence
  targeting sequence with TTCN PAM
ucgucucaagcugaaauaau

SEQ ID NO: 20446 - RNA, 20 nt, Artificial Sequence
  targeting sequence with TTCN PAM
gcuugagacgaugaaggucu

SEQ ID NO: 20447 - RNA, 20 nt, Artificial Sequence
  targeting sequence with TTCN PAM
auugaggcugugaacaagug

SEQ ID NO: 20448 - RNA, 20 nt, Artificial Sequence
  targeting sequence with TTCN PAM
cagccucaauagaagguggu

SEQ ID NO: 20449 - RNA, 20 nt, Artificial Sequence
  targeting sequence with TTCN PAM
uccucguaaagcaggaauag

SEQ ID NO: 20450 - RNA, 20 nt, Artificial Sequence
  targeting sequence with TTCN PAM
ugcuuuacgaggaggaagcu

SEQ ID NO: 20451 - RNA, 20 nt, Artificial Sequence
  targeting sequence with TTCN PAM
gcaagaaugaagaagagcua

SEQ ID NO: 20452 - RNA, 20 nt, Artificial Sequence
  targeting sequence with TTCN PAM
ugcagaaugaucucaguuua

SEQ ID NO: 20453 - RNA, 20 nt, Artificial Sequence
  targeting sequence with TTCN PAM
uucuugcagaaugaucucag

SEQ ID NO: 20454 - RNA, 20 nt, Artificial Sequence
  targeting sequence with TTCN PAM
ucauucuugcagaaugaucu

SEQ ID NO: 20455 - RNA, 20 nt, Artificial Sequence
  targeting sequence with TTCN PAM
ugcaguagcucuucuucauu

SEQ ID NO: 20456 - RNA, 20 nt, Artificial Sequence
  targeting sequence with TTCN PAM
ucuugcaguagcucuucuuc

SEQ ID NO: 20457 - RNA, 20 nt, Artificial Sequence
  targeting sequence with TTCN PAM
aguaguucuucuugcaguag

SEQ ID NO: 20458 - RNA, 20 nt, Artificial Sequence
  targeting sequence with TTCN PAM
uccaguaguucuucuugcag

SEQ ID NO: 20459 - RNA, 20 nt, Artificial Sequence
  targeting sequence with TTCN PAM
agcucccuuucuagccucau

SEQ ID NO: 20460 - RNA, 20 nt, Artificial Sequence
  targeting sequence with TTCN PAM
agccucaugcauuucaagga

SEQ ID NO: 20461 - RNA, 20 nt, Artificial Sequence
  targeting sequence with TTCN PAM
aggaaaucacuucucuucua

SEQ ID NO: 20462 - RNA, 20 nt, Artificial Sequence
  targeting sequence with TTCN PAM
uugaaaugcaugaggcuaga

SEQ ID NO: 20463 - RNA, 20 nt, Artificial Sequence
  targeting sequence with TTCN PAM
cuucuaacuauaagcagcca

SEQ ID NO: 20464 - RNA, 20 nt, Artificial Sequence
  targeting sequence with TTCN PAM
aacuauaagcagccagaaag

SEQ ID NO: 20465 - RNA, 20 nt, Artificial Sequence
  targeting sequence with TTCN PAM
ggcugcuuauaguuagaaga

SEQ ID NO: 20466 - RNA, 20 nt, Artificial Sequence
  targeting sequence with TTCN PAM
cccgaccucccucugugccu

SEQ ID NO: 20467 - RNA, 20 nt, Artificial Sequence
  targeting sequence with TTCN PAM
cccucauacaaugggcccca

SEQ ID NO: 20468 - RNA, 20 nt, Artificial Sequence
  targeting sequence with TTCN PAM
uuucccuucaggugcacuaa

SEQ ID NO: 20469 - RNA, 20 nt, Artificial Sequence
  targeting sequence with TTCN PAM
cuucaggugcacuaagauag

SEQ ID NO: 20470 - RNA, 20 nt, Artificial Sequence
  targeting sequence with TTCN PAM
ggugcacuaagauagggaag

SEQ ID NO: 20471 - RNA, 20 nt, Artificial Sequence
  targeting sequence with TTCN PAM
cuaucuuagugcaccugaag

SEQ ID NO: 20472 - RNA, 20 nt, Artificial Sequence
  targeting sequence with TTCN PAM
gcagcugcaggcauaucccc

SEQ ID NO: 20473 - RNA, 20 nt, Artificial Sequence
  targeting sequence with TTCN PAM
auacaucuuucugcagcugc

SEQ ID NO: 20474 - RNA, 20 nt, Artificial Sequence
  targeting sequence with TTCN PAM
cugucucuuuguuguguuua

SEQ ID NO: 20475 - RNA, 20 nt, Artificial Sequence
  targeting sequence with TTCN PAM
acugugaauccuuaaaaacu

SEQ ID NO: 20476 - RNA, 20 nt, Artificial Sequence
  targeting sequence with TTCN PAM
caguggaagaguuuaucaga

SEQ ID NO: 20477 - RNA, 20 nt, Artificial Sequence
  targeting sequence with TTCN PAM
cuuacagacuaagaguuuuu

SEQ ID NO: 20478 - RNA, 20 nt, Artificial Sequence
  targeting sequence with TTCN PAM
cuaaaauaaaccugucuuug

SEQ ID NO: 20479 - RNA, 20 nt, Artificial Sequence
  targeting sequence with TTCN PAM
uguuucuuuccucuuucuuu

SEQ ID NO: 20480 - RNA, 20 nt, Artificial Sequence
  targeting sequence with TTCN PAM
uuccucuuucuuuaauucuu

SEQ ID NO: 20481 - RNA, 20 nt, Artificial Sequence
  targeting sequence with TTCN PAM
ucuuucuuuaauucuuacac

SEQ ID NO: 20482 - RNA, 20 nt, Artificial Sequence
  targeting sequence with TTCN PAM
uuaauucuuacacaccccag

SEQ ID NO: 20483 - RNA, 20 nt, Artificial Sequence
  targeting sequence with TTCN PAM
uacacaccccagucuaccua

SEQ ID NO: 20484 - RNA, 20 nt, Artificial Sequence
  targeting sequence with TTCN PAM
cuggugagcaauagugggua

SEQ ID NO: 20485 - RNA, 20 nt, Artificial Sequence
  targeting sequence with TTCN PAM
uuuucccuggugagcaauag

SEQ ID NO: 20486 - RNA, 20 nt, Artificial Sequence
  targeting sequence with TTCN PAM
caguaaguaaacacaaagcc

SEQ ID NO: 20487 - RNA, 20 nt, Artificial Sequence
  targeting sequence with TTCN PAM
cagcagagauauuuuggguc

SEQ ID NO: 20488 - RNA, 20 nt, Artificial Sequence
  targeting sequence with TTCN PAM
augaccacagugugcuguga

SEQ ID NO: 20489 - RNA, 20 nt, Artificial Sequence
  targeting sequence with TTCN PAM
cucugauacucuuugugccu

SEQ ID NO: 20490 - RNA, 20 nt, Artificial Sequence
  targeting sequence with TTCN PAM
cugagcucugagagaggcag

SEQ ID NO: 20491 - RNA, 20 nt, Artificial Sequence
  targeting sequence with TTCN PAM
cugcagggcagcugguugag

SEQ ID NO: 20492 - RNA, 20 nt, Artificial Sequence
  targeting sequence with TTCN PAM
auguccagucucaaccagcu

SEQ ID NO: 20493 - RNA, 20 nt, Artificial Sequence
  targeting sequence with TTCN PAM
ucaguccuccaggagauuuu

SEQ ID NO: 20494 - RNA, 20 nt, Artificial Sequence
  targeting sequence with TTCN PAM
uaacaaugguaaagaucugg

SEQ ID NO: 20495 - RNA, 20 nt, Artificial Sequence
  targeting sequence with TTCN PAM
uuguccucccugagucacac

SEQ ID NO: 20496 - RNA, 20 nt, Artificial Sequence
  targeting sequence with TTCN PAM
ugccaaccugguagauggga

SEQ ID NO: 20497 - RNA, 20 nt, Artificial Sequence
  targeting sequence with TTCN PAM
caucuaccagguuggcagga

SEQ ID NO: 20498 - RNA, 20 nt, Artificial Sequence
  targeting sequence with TTCN PAM
uuuagaaaaacaaagcugug

SEQ ID NO: 20499 - RNA, 20 nt, Artificial Sequence
  targeting sequence with TTCN PAM
aaaugaaacaaaucuugcuc

SEQ ID NO: 20500 - RNA, 20 nt, Artificial Sequence
  targeting sequence with TTCN PAM
caaacauagccacagcuuug

SEQ ID NO: 20501 - RNA, 20 nt, Artificial Sequence
  targeting sequence with TTCN PAM
agcacccuucccaaacauag

SEQ ID NO: 20502 - RNA, 20 nt, Artificial Sequence
  targeting sequence with TTCN PAM
uuuuuguuuguuuguuuacu

SEQ ID NO: 20503 - RNA, 20 nt, Artificial Sequence
  targeting sequence with TTCN PAM
uguaguaaacaaacaaacaa

SEQ ID NO: 20504 - RNA, 20 nt, Artificial Sequence
  targeting sequence with TTCN PAM
uuauaucuuaguaccauucu

SEQ ID NO: 20505 - RNA, 20 nt, Artificial Sequence
  targeting sequence with TTCN PAM
cagccagagcuuuagcaagu

SEQ ID NO: 20506 - RNA, 20 nt, Artificial Sequence
  targeting sequence with TTCN PAM
aauuugccucugugccuugu

SEQ ID NO: 20507 - RNA, 20 nt, Artificial Sequence
  targeting sequence with TTCN PAM
aucugccaagcaauacauuu

SEQ ID NO: 20508 - RNA, 20 nt, Artificial Sequence
  targeting sequence with TTCN PAM
gcuaucagggguauuauggc

SEQ ID NO: 20509 - RNA, 20 nt, Artificial Sequence
  targeting sequence with TTCN PAM
aguaaacuguaaacaugugc

SEQ ID NO: 20510 - RNA, 20 nt, Artificial Sequence
  targeting sequence with TTCN PAM
gguucugaacaagaauuuua

SEQ ID NO: 20511 - RNA, 20 nt, Artificial Sequence
  targeting sequence with TTCN PAM
gaacaagaauuuuaucaaua

SEQ ID NO: 20512 - RNA, 20 nt, Artificial Sequence
  targeting sequence with TTCN PAM
gaaccagaauuagcacaugu

SEQ ID NO: 20513 - RNA, 20 nt, Artificial Sequence
  targeting sequence with TTCN PAM
uguucagaaccagaauuagc

SEQ ID NO: 20514 - RNA, 20 nt, Artificial Sequence
  targeting sequence with TTCN PAM
agagacauuuaugugugugu

SEQ ID NO: 20515 - RNA, 20 nt, Artificial Sequence
  targeting sequence with TTCN PAM
cagccucucaggugggcucu

SEQ ID NO: 20516 - RNA, 20 nt, Artificial Sequence
  targeting sequence with TTCN PAM
uagaggaggauacucagccc

SEQ ID NO: 20517 - RNA, 20 nt, Artificial Sequence
  targeting sequence with TTCN PAM
aagacaaaugagucccagcc

SEQ ID NO: 20518 - RNA, 20 nt, Artificial Sequence
  targeting sequence with TTCN PAM
cuugagugcccagcuaccac

SEQ ID NO: 20519 - RNA, 20 nt, Artificial Sequence
  targeting sequence with TTCN PAM
ggcccagagauuaacuaagg

SEQ ID NO: 20520 - RNA, 20 nt, Artificial Sequence
  targeting sequence with TTCN PAM
agaggcuuggccaaaccaca

SEQ ID NO: 20521 - RNA, 20 nt, Artificial Sequence
  targeting sequence with TTCN PAM
ccaguuuuggccgacugugg

SEQ ID NO: 20522 - RNA, 20 nt, Artificial Sequence
  targeting sequence with TTCN PAM
ucaguguguuccccaguuuu

SEQ ID NO: 20523 - RNA, 20 nt, Artificial Sequence
  targeting sequence with TTCN PAM
caagagagcugagguagauc

SEQ ID NO: 20524 - RNA, 20 nt, Artificial Sequence
  targeting sequence with TTCN PAM
ucagagggacuccgaccuga

SEQ ID NO: 20525 - RNA, 20 nt, Artificial Sequence
  targeting sequence with TTCN PAM
gagggacuccgaccugagga

SEQ ID NO: 20526 - RNA, 20 nt, Artificial Sequence
  targeting sequence with TTCN PAM
cucuccucaggucggagucc

SEQ ID NO: 20527 - RNA, 20 nt, Artificial Sequence
  targeting sequence with TTCN PAM
gacuagcaggcucccaucca

SEQ ID NO: 20528 - RNA, 20 nt, Artificial Sequence
  targeting sequence with TTCN PAM
ugguuuuaaauuauuaucag

SEQ ID NO: 20529 - RNA, 20 nt, Artificial Sequence
  targeting sequence with TTCN PAM
uuuaaguugagaucuugcuc

SEQ ID NO: 20530 - RNA, 20 nt, Artificial Sequence
  targeting sequence with TTCN PAM
cacuuuggccuuccaaagug

SEQ ID NO: 20531 - RNA, 20 nt, Artificial Sequence
  targeting sequence with TTCN PAM
aaaguguugggggauuacag

SEQ ID NO: 20532 - RNA, 20 nt, Artificial Sequence
  targeting sequence with TTCN PAM
aaauguauaaaaacguaauu

SEQ ID NO: 20533 - RNA, 20 nt, Artificial Sequence
  targeting sequence with TTCN PAM
ucuagacuaggguuagcaag

SEQ ID NO: 20534 - RNA, 20 nt, Artificial Sequence
  targeting sequence with TTCN PAM
auaaaaagucagauaaggcc

SEQ ID NO: 20535 - RNA, 20 nt, Artificial Sequence
  targeting sequence with TTCN PAM
ccauguuggccaggaugguc

SEQ ID NO: 20536 - RNA, 20 nt, Artificial Sequence
  targeting sequence with TTCN PAM
cuacuaaaaauacaaaaauu

SEQ ID NO: 20537 - RNA, 20 nt, Artificial Sequence
  targeting sequence with TTCN PAM
ugccucagacucccgaguag

SEQ ID NO: 20538 - RNA, 20 nt, Artificial Sequence
  targeting sequence with TTCN PAM
agcaauuuuccugccucaga

SEQ ID NO: 20539 - RNA, 20 nt, Artificial Sequence
  targeting sequence with TTCN PAM
ugcuacaauggcagaguuga

SEQ ID NO: 20540 - RNA, 20 nt, Artificial Sequence
  targeting sequence with TTCN PAM
aggaugaaugaguguggcug

SEQ ID NO: 20541 - RNA, 20 nt, Artificial Sequence
  targeting sequence with TTCN PAM
uccuugaauugucuauggcu

SEQ ID NO: 20542 - RNA, 20 nt, Artificial Sequence
  targeting sequence with TTCN PAM
aauaaaacucuauuuaaaaa

SEQ ID NO: 20543 - RNA, 20 nt, Artificial Sequence
  targeting sequence with TTCN PAM
uguuuuuuaaauagaguuuu

SEQ ID NO: 20544 - RNA, 20 nt, Artificial Sequence
  targeting sequence with TTCN PAM
augaugauggaaauguucca

SEQ ID NO: 20545 - RNA, 20 nt, Artificial Sequence
  targeting sequence with TTCN PAM
aucaucauggaaaguuguau

SEQ ID NO: 20546 - RNA, 20 nt, Artificial Sequence
  targeting sequence with TTCN PAM
acaucugugcaguccaguag

SEQ ID NO: 20547 - RNA, 20 nt, Artificial Sequence
  targeting sequence with TTCN PAM
aucacaccagccacauauuu

SEQ ID NO: 20548 - RNA, 20 nt, Artificial Sequence
  targeting sequence with TTCN PAM
cuggcuauuuauuaauuuaa

SEQ ID NO: 20549 - RNA, 20 nt, Artificial Sequence
  targeting sequence with TTCN PAM
aacgagcuccuggugaugcc

SEQ ID NO: 20550 - RNA, 20 nt, Artificial Sequence
  targeting sequence with TTCN PAM
gacccagcacaucugugggu

SEQ ID NO: 20551 - RNA, 20 nt, Artificial Sequence
  targeting sequence with TTCN PAM
acaggacacccauguaacuu

SEQ ID NO: 20552 - RNA, 20 nt, Artificial Sequence
  targeting sequence with TTCN PAM
cugaucuuaguuuugggguc

SEQ ID NO: 20553 - RNA, 20 nt, Artificial Sequence
  targeting sequence with TTCN PAM
ccaagguagcuggcugguua

SEQ ID NO: 20554 - RNA, 20 nt, Artificial Sequence
  targeting sequence with TTCN PAM
acucagguggggguuuucaa

SEQ ID NO: 20555 - RNA, 20 nt, Artificial Sequence
  targeting sequence with TTCN PAM
aggucagacuggugcggggc

SEQ ID NO: 20556 - RNA, 20 nt, Artificial Sequence
  targeting sequence with TTCN PAM
agccuuaauaaguaauaagg

SEQ ID NO: 20557 - RNA, 20 nt, Artificial Sequence
  targeting sequence with TTCN PAM
caguugaaccagaacccagc

SEQ ID NO: 20558 - RNA, 20 nt, Artificial Sequence
  targeting sequence with TTCN PAM
acugagaaguagacacaagg

SEQ ID NO: 20559 - RNA, 20 nt, Artificial Sequence
  targeting sequence with TTCN PAM
gguucaacugagaaguagac

SEQ ID NO: 20560 - RNA, 20 nt, Artificial Sequence
  targeting sequence with TTCN PAM
cuggaugggccuaagugggc

SEQ ID NO: 20561 - RNA, 20 nt, Artificial Sequence
  targeting sequence with TTCN PAM
ucgcggcuguaaaggcagua

SEQ ID NO: 20562 - RNA, 20 nt, Artificial Sequence
  targeting sequence with TTCN PAM
cugguucucacccuggccca

SEQ ID NO: 20563 - RNA, 20 nt, Artificial Sequence
  targeting sequence with TTCN PAM
cacccuggcccaccuuguga

SEQ ID NO: 20564 - RNA, 20 nt, Artificial Sequence
  targeting sequence with TTCN PAM
caaggugggccagggugaga

SEQ ID NO: 20565 - RNA, 20 nt, Artificial Sequence
  targeting sequence with TTCN PAM
ucuggaagaggugagagggu

SEQ ID NO: 20566 - RNA, 20 nt, Artificial Sequence
  targeting sequence with TTCN PAM
ggaagaggugagaggguagg

SEQ ID NO: 20567 - RNA, 20 nt, Artificial Sequence
  targeting sequence with TTCN PAM
agaagaaagcccccaggcuc

SEQ ID NO: 20568 - RNA, 20 nt, Artificial Sequence
  targeting sequence with TTCN PAM
aaggagacaggccaggcgga

SEQ ID NO: 20569 - RNA, 20 nt, Artificial Sequence
  targeting sequence with TTCN PAM
gggcaacuguguuuggccac

SEQ ID NO: 20570 - RNA, 20 nt, Artificial Sequence
  targeting sequence with TTCN PAM
cugagccuugguuuucucau

SEQ ID NO: 20571 - RNA, 20 nt, Artificial Sequence
  targeting sequence with TTCN PAM
caucugaaaaacacaaggcu

SEQ ID NO: 20572 - RNA, 20 nt, Artificial Sequence
  targeting sequence with TTCN PAM
gaugagaaaaccaaggcuca

SEQ ID NO: 20573 - RNA, 20 nt, Artificial Sequence
  targeting sequence with TTCN PAM
uauauugcccaagccuugug

SEQ ID NO: 20574 - RNA, 20 nt, Artificial Sequence
  targeting sequence with TTCN PAM
uucuuauccacaucucuccu

SEQ ID NO: 20575 - RNA, 20 nt, Artificial Sequence
  targeting sequence with TTCN PAM
uauccacaucucuccuguca

SEQ ID NO: 20576 - RNA, 20 nt, Artificial Sequence
  targeting sequence with TTCN PAM
cuggagccagguggagacuc

SEQ ID NO: 20577 - RNA, 20 nt, Artificial Sequence
  targeting sequence with TTCN PAM
cacgacuuggaguuacgguu

SEQ ID NO: 20578 - RNA, 20 nt, Artificial Sequence
  targeting sequence with TTCN PAM
gcagucugagcugagcgccu

SEQ ID NO: 20579 - RNA, 20 nt, Artificial Sequence
  targeting sequence with TTCN PAM
uuuauucaaucaauuuaauu

SEQ ID NO: 20580 - RNA, 20 nt, Artificial Sequence
  targeting sequence with TTCN PAM
aucaauuuaauuuucaaauu

SEQ ID NO: 20581 - RNA, 20 nt, Artificial Sequence
  targeting sequence with TTCN PAM
aauuauaccuuaaaauggua

SEQ ID NO: 20582 - RNA, 20 nt, Artificial Sequence
  targeting sequence with TTCN PAM
gcucacucacucuuuuaccu

SEQ ID NO: 20583 - RNA, 20 nt, Artificial Sequence
  targeting sequence with TTCN PAM
cauuagguuaucaaauggau

SEQ ID NO: 20584 - RNA, 20 nt, Artificial Sequence
  targeting sequence with TTCN PAM
accccaguauccauuugaua

SEQ ID NO: 20585 - RNA, 20 nt, Artificial Sequence
  targeting sequence with TTCN PAM
aucagccuugcuaaagcuag

SEQ ID NO: 20586 - RNA, 20 nt, Artificial Sequence
  targeting sequence with TTCN PAM
aaacuaucaauaauacaaag

SEQ ID NO: 20587 - RNA, 20 nt, Artificial Sequence
  targeting sequence with TTCN PAM
ucuucugauuauauuucauc

SEQ ID NO: 20588 - RNA, 20 nt, Artificial Sequence
  targeting sequence with TTCN PAM
gauuauauuucaucauugga

SEQ ID NO: 20589 - RNA, 20 nt, Artificial Sequence
  targeting sequence with TTCN PAM
ucauuggaaaagccguauuu

SEQ ID NO: 20590 - RNA, 20 nt, Artificial Sequence
  targeting sequence with TTCN PAM
aaugaugaaauauaaucaga

SEQ ID NO: 20591 - RNA, 20 nt, Artificial Sequence
  targeting sequence with TTCN PAM
aacacauucaguagcaaaga

SEQ ID NO: 20592 - RNA, 20 nt, Artificial Sequence
  targeting sequence with TTCN PAM
guagcaaagauccaccauug

SEQ ID NO: 20593 - RNA, 20 nt, Artificial Sequence
  targeting sequence with TTCN PAM
uaaugugugugccaauggug

SEQ ID NO: 20594 - RNA, 20 nt, Artificial Sequence
  targeting sequence with TTCN PAM
agcucaucuguuaugcauag

SEQ ID NO: 20595 - RNA, 20 nt, Artificial Sequence
  targeting sequence with TTCN PAM
ugauuuucccaaagccaguc

SEQ ID NO: 20596 - RNA, 20 nt, Artificial Sequence
  targeting sequence with TTCN PAM
caaagccagucaugauauuu

SEQ ID NO: 20597 - RNA, 20 nt, Artificial Sequence
  targeting sequence with TTCN PAM
gggugcaccuggaagaaaca

SEQ ID NO: 20598 - RNA, 20 nt, Artificial Sequence
  targeting sequence with TTCN PAM
aggugcacccugaagaccac

SEQ ID NO: 20599 - RNA, 20 nt, Artificial Sequence
  targeting sequence with TTCN PAM
uccaggugcacccugaagac

SEQ ID NO: 20600 - RNA, 20 nt, Artificial Sequence
  targeting sequence with TTCN PAM
gcccuguugaauaugcccag

SEQ ID NO: 20601 - RNA, 20 nt, Artificial Sequence
  targeting sequence with TTCN PAM
cuuaguggucucagacuacg

SEQ ID NO: 20602 - RNA, 20 nt, Artificial Sequence
  targeting sequence with TTCN PAM
ugcuuuccuguaguggugua

SEQ ID NO: 20603 - RNA, 20 nt, Artificial Sequence
  targeting sequence with TTCN PAM
uguagugguguacuuuugac

SEQ ID NO: 20604 - RNA, 20 nt, Artificial Sequence
  targeting sequence with TTCN PAM
uccugucaaaaguacaccac

SEQ ID NO: 20605 - RNA, 20 nt, Artificial Sequence
  targeting sequence with TTCN PAM
ugucauucccuauuugugug

SEQ ID NO: 20606 - RNA, 20 nt, Artificial Sequence
  targeting sequence with TTCN PAM
gcacauuuggucucugaggc

SEQ ID NO: 20607 - RNA, 20 nt, Artificial Sequence
  targeting sequence with TTCN PAM
acucauugacacaaaaaauu

SEQ ID NO: 20608 - RNA, 20 nt, Artificial Sequence
  targeting sequence with TTCN PAM
guaagagucguugccauauu

SEQ ID NO: 20609 - RNA, 20 nt, Artificial Sequence
  targeting sequence with TTCN PAM
ugggauugguaaauauggca

SEQ ID NO: 20610 - RNA, 20 nt, Artificial Sequence
  targeting sequence with TTCN PAM
acugcuuugucagguauuca

SEQ ID NO: 20611 - RNA, 20 nt, Artificial Sequence
  targeting sequence with TTCN PAM
ucugaagaauacaacauccc

SEQ ID NO: 20612 - RNA, 20 nt, Artificial Sequence
  targeting sequence with TTCN PAM
gaugaauaccugacaaagca

SEQ ID NO: 20613 - RNA, 20 nt, Artificial Sequence
  targeting sequence with TTCN PAM
ucagaugaauaccugacaaa

SEQ ID NO: 20614 - RNA, 20 nt, Artificial Sequence
  targeting sequence with TTCN PAM
aaagacacccucccaaaaug

SEQ ID NO: 20615 - RNA, 20 nt, Artificial Sequence
  targeting sequence with TTCN PAM
ccaaaccacagucucccacu

SEQ ID NO: 20616 - RNA, 20 nt, Artificial Sequence
  targeting sequence with TTCN PAM
uuuggguguauaggaaaaua

SEQ ID NO: 20617 - RNA, 20 nt, Artificial Sequence
  targeting sequence with TTCN PAM
uauacacccaaaggaaaaac

SEQ ID NO: 20618 - RNA, 20 nt, Artificial Sequence
  targeting sequence with TTCN PAM
cagguauuuuccuauacacc

SEQ ID NO: 20619 - RNA, 20 nt, Artificial Sequence
  targeting sequence with TTCN PAM
ggcaaaaaccauugucaagu

SEQ ID NO: 20620 - RNA, 20 nt, Artificial Sequence
  targeting sequence with TTCN PAM
uaaaccucuuggucucuacg

SEQ ID NO: 20621 - RNA, 20 nt, Artificial Sequence
  targeting sequence with TTCN PAM
gacacaucucuccagucugc

SEQ ID NO: 20622 - RNA, 20 nt, Artificial Sequence
  targeting sequence with TTCN PAM
ugcuaccucagcugaaggau

SEQ ID NO: 20623 - RNA, 20 nt, Artificial Sequence
  targeting sequence with TTCN PAM
gcugagguagcaagaaccgc

SEQ ID NO: 20624 - RNA, 20 nt, Artificial Sequence
  targeting sequence with TTCN PAM
ccagaaacuuccaaagcaca

SEQ ID NO: 20625 - RNA, 20 nt, Artificial Sequence
  targeting sequence with TTCN PAM
ggagaaguauccuucagcug

SEQ ID NO: 20626 - RNA, 20 nt, Artificial Sequence
  targeting sequence with TTCN PAM
aaagcacagguauugccauu

SEQ ID NO: 20627 - RNA, 20 nt, Artificial Sequence
  targeting sequence with TTCN PAM
caggcaaaauggcaauaccu

SEQ ID NO: 20628 - RNA, 20 nt, Artificial Sequence
  targeting sequence with TTCN PAM
guuacuuuuacuucccaggc

SEQ ID NO: 20629 - RNA, 20 nt, Artificial Sequence
  targeting sequence with TTCN PAM
uguucaaguaguuucucaua

SEQ ID NO: 20630 - RNA, 20 nt, Artificial Sequence
  targeting sequence with TTCN PAM
aguaguuucucauagaaauc

SEQ ID NO: 20631 - RNA, 20 nt, Artificial Sequence
  targeting sequence with TTCN PAM
gcauaauuuggacuauuagc

SEQ ID NO: 20632 - RNA, 20 nt, Artificial Sequence
  targeting sequence with TTCN PAM
acucucauuaucugcugauc

SEQ ID NO: 20633 - RNA, 20 nt, Artificial Sequence
  targeting sequence with TTCN PAM
cugaugaucaaaaagaauuu

SEQ ID NO: 20634 - RNA, 20 nt, Artificial Sequence
  targeting sequence with TTCN PAM
uuuugaucaucagugaaaau

SEQ ID NO: 20635 - RNA, 20 nt, Artificial Sequence
  targeting sequence with TTCN PAM
aaauucuuuuugaucaucag

SEQ ID NO: 20636 - RNA, 20 nt, Artificial Sequence
  targeting sequence with TTCN PAM
aaaaggucuguuggauguca

SEQ ID NO: 20637 - RNA, 20 nt, Artificial Sequence
  targeting sequence with TTCN PAM
caaucggaccucagguuugg

SEQ ID NO: 20638 - RNA, 20 nt, Artificial Sequence
  targeting sequence with TTCN PAM
caucgcuacuauauuucuca

SEQ ID NO: 20639 - RNA, 20 nt, Artificial Sequence
  targeting sequence with TTCN PAM
auggaucaugaaaaaguguu

SEQ ID NO: 20640 - RNA, 20 nt, Artificial Sequence
  targeting sequence with TTCN PAM
ugauccauggaagcuucuca

SEQ ID NO: 20641 - RNA, 20 nt, Artificial Sequence
  targeting sequence with TTCN PAM
ugaacgagauuaaaagguga

SEQ ID NO: 20642 - RNA, 20 nt, Artificial Sequence
  targeting sequence with TTCN PAM
agaaacacuuuuucaugauc

SEQ ID NO: 20643 - RNA, 20 nt, Artificial Sequence
  targeting sequence with TTCN PAM
uaaaggcuuuacgucguggg

SEQ ID NO: 20644 - RNA, 20 nt, Artificial Sequence
  targeting sequence with TTCN PAM
gaugcacuauguuuguuuag

SEQ ID NO: 20645 - RNA, 20 nt, Artificial Sequence
  targeting sequence with TTCN PAM
auucugaugcacuauguuug

SEQ ID NO: 20646 - RNA, 20 nt, Artificial Sequence
  targeting sequence with TTCN PAM
auuuuggguuuucaauucug

SEQ ID NO: 20647 - RNA, 20 nt, Artificial Sequence
  targeting sequence with TTCN PAM
aauuccauuuuggguuuuca

SEQ ID NO: 20648 - RNA, 20 nt, Artificial Sequence
  targeting sequence with TTCN PAM
gauugggaaagggauaccuu

SEQ ID NO: 20649 - RNA, 20 nt, Artificial Sequence
  targeting sequence with TTCN PAM
caaucagaacagcaaauucu

SEQ ID NO: 20650 - RNA, 20 nt, Artificial Sequence
  targeting sequence with TTCN PAM
uuguuauauuugcuggaaaa

SEQ ID NO: 20651 - RNA, 20 nt, Artificial Sequence
  targeting sequence with TTCN PAM
agcaaauauaacaaagaagg

SEQ ID NO: 20652 - RNA, 20 nt, Artificial Sequence
  targeting sequence with TTCN PAM
uucuuucuaucuguguucgu

SEQ ID NO: 20653 - RNA, 20 nt, Artificial Sequence
  targeting sequence with TTCN PAM
uucuaucuguguucguggga

SEQ ID NO: 20654 - RNA, 20 nt, Artificial Sequence
  targeting sequence with TTCN PAM
aucuguguucgugggauggu

SEQ ID NO: 20655 - RNA, 20 nt, Artificial Sequence
  targeting sequence with TTCN PAM
ugggaugguaucuucugaaa

SEQ ID NO: 20656 - RNA, 20 nt, Artificial Sequence
  targeting sequence with TTCN PAM
gaaaaggaaaaguaaacacu

SEQ ID NO: 20657 - RNA, 20 nt, Artificial Sequence
  targeting sequence with TTCN PAM
gaagauaccaucccacgaac

SEQ ID NO: 20658 - RNA, 20 nt, Artificial Sequence
  targeting sequence with TTCN PAM
uuuucagaagauaccauccc

SEQ ID NO: 20659 - RNA, 20 nt, Artificial Sequence
  targeting sequence with TTCN PAM
ugggucauuaguuagauuaa

SEQ ID NO: 20660 - RNA, 20 nt, Artificial Sequence
  targeting sequence with TTCN PAM
cugugccucaauguccuuau

SEQ ID NO: 20661 - RNA, 20 nt, Artificial Sequence
  targeting sequence with TTCN PAM
caauagucuaaaaaauacuu

SEQ ID NO: 20662 - RNA, 20 nt, Artificial Sequence
  targeting sequence with TTCN PAM
uauuaacuucuaaaugaaaa

SEQ ID NO: 20663 - RNA, 20 nt, Artificial Sequence
  targeting sequence with TTCN PAM
ccuuuuuuauaaaauuggga

SEQ ID NO: 20664 - RNA, 20 nt, Artificial Sequence
  targeting sequence with TTCN PAM
guauuguuauuuauauaugu

SEQ ID NO: 20665 - RNA, 20 nt, Artificial Sequence
  targeting sequence with TTCN PAM
uaacuucuguauuguuauuu

SEQ ID NO: 20666 - RNA, 20 nt, Artificial Sequence
  targeting sequence with TTCN PAM
uucuuaacuucuguauuguu

SEQ ID NO: 20667 - RNA, 20 nt, Artificial Sequence
  targeting sequence with TTCN PAM
uuccuucuuuacuuuucugu

SEQ ID NO: 20668 - RNA, 20 nt, Artificial Sequence
  targeting sequence with TTCN PAM
uucuuuacuuuucuguauuu

SEQ ID NO: 20669 - RNA, 20 nt, Artificial Sequence
  targeting sequence with TTCN PAM
uuacuuuucuguauuuucca

SEQ ID NO: 20670 - RNA, 20 nt, Artificial Sequence
  targeting sequence with TTCN PAM
guauuuuccaaaauuucugc

SEQ ID NO: 20671 - RNA, 20 nt, Artificial Sequence
  targeting sequence with TTCN PAM
aaaauuucugcagugaacac

SEQ ID NO: 20672 - RNA, 20 nt, Artificial Sequence
  targeting sequence with TTCN PAM
gcagugaacacuuacuuuua

SEQ ID NO: 20673 - RNA, 20 nt, Artificial Sequence
  targeting sequence with TTCN PAM
cugcagaaauuuuggaaaau

SEQ ID NO: 20674 - RNA, 20 nt, Artificial Sequence
  targeting sequence with TTCN PAM
aauugcgaggguaugguuaa

SEQ ID NO: 20675 - RNA, 20 nt, Artificial Sequence
  targeting sequence with TTCN PAM
cuucucauuuuacaauauuu

SEQ ID NO: 20676 - RNA, 20 nt, Artificial Sequence
  targeting sequence with TTCN PAM
cauuuuacaauauuuuugau

SEQ ID NO: 20677 - RNA, 20 nt, Artificial Sequence
  targeting sequence with TTCN PAM
caucaaaaauauuguaaaau

SEQ ID NO: 20678 - RNA, 20 nt, Artificial Sequence
  targeting sequence with TTCN PAM
ucuguaaaauagagguaacc

SEQ ID NO: 20679 - RNA, 20 nt, Artificial Sequence
  targeting sequence with TTCN PAM
ucaucuguaaaauagaggua

SEQ ID NO: 20680 - RNA, 20 nt, Artificial Sequence
  targeting sequence with TTCN PAM
cuuucuucaucuguaaaaua

SEQ ID NO: 20681 - RNA, 20 nt, Artificial Sequence
  targeting sequence with TTCN PAM
aaaugaagcaaucaucccaa

SEQ ID NO: 20682 - RNA, 20 nt, Artificial Sequence
  targeting sequence with TTCN PAM
uuuagaagcuucacuuucuu

SEQ ID NO: 20683 - RNA, 20 nt, Artificial Sequence
  targeting sequence with TTCN PAM
ucucauguugagaacuagac

SEQ ID NO: 20684 - RNA, 20 nt, Artificial Sequence
  targeting sequence with TTCN PAM
caacaugagaugaaguacuc

SEQ ID NO: 20685 - RNA, 20 nt, Artificial Sequence
  targeting sequence with TTCN PAM
caaauuucuccaggcuguuu

SEQ ID NO: 20686 - RNA, 20 nt, Artificial Sequence
  targeting sequence with TTCN PAM
ccaggcuguuuccccacagg

SEQ ID NO: 20687 - RNA, 20 nt, Artificial Sequence
  targeting sequence with TTCN PAM
ccacaggaguuuaaguaaaa

SEQ ID NO: 20688 - RNA, 20 nt, Artificial Sequence
  targeting sequence with TTCN PAM
uuaaaggaguuauucauuau

SEQ ID NO: 20689 - RNA, 20 nt, Artificial Sequence
  targeting sequence with TTCN PAM
uuauaccauaauggcauaau

SEQ ID NO: 20690 - RNA, 20 nt, Artificial Sequence
  targeting sequence with TTCN PAM
uuaugccauuaugguauaau

SEQ ID NO: 20691 - RNA, 20 nt, Artificial Sequence
  targeting sequence with TTCN PAM
cugagguauuauaaagacaa

SEQ ID NO: 20692 - RNA, 20 nt, Artificial Sequence
  targeting sequence with TTCN PAM
gaauucuguauuaagagcau

SEQ ID NO: 20693 - RNA, 20 nt, Artificial Sequence
  targeting sequence with TTCN PAM
gaacuuagcaguuuugucuu

SEQ ID NO: 20694 - RNA, 20 nt, Artificial Sequence
  targeting sequence with TTCN PAM
guauuaagagcauauuacaa

SEQ ID NO: 20695 - RNA, 20 nt, Artificial Sequence
  targeting sequence with TTCN PAM
ucuauuauuuguaauaugcu

SEQ ID NO: 20696 - RNA, 20 nt, Artificial Sequence
  targeting sequence with TTCN PAM
aaaguauaaucacauaguuc

SEQ ID NO: 20697 - RNA, 20 nt, Artificial Sequence
  targeting sequence with TTCN PAM
cuaaaaugcuuuagagcucu

SEQ ID NO: 20698 - RNA, 20 nt, Artificial Sequence
  targeting sequence with TTCN PAM
auuuuaauguaaugcuucuc

SEQ ID NO: 20699 - RNA, 20 nt, Artificial Sequence
  targeting sequence with TTCN PAM
agcacuauuaaacauuaugu

SEQ ID NO: 20700 - RNA, 20 nt, Artificial Sequence
  targeting sequence with TTCN PAM
agguauccagugcuuucaag

SEQ ID NO: 20701 - RNA, 20 nt, Artificial Sequence
  targeting sequence with TTCN PAM
caccagugaagucuuuccug

SEQ ID NO: 20702 - RNA, 20 nt, Artificial Sequence
  targeting sequence with TTCN PAM
cuggugagaaaauauuucaa

SEQ ID NO: 20703 - RNA, 20 nt, Artificial Sequence
  targeting sequence with TTCN PAM
ugguuggugagcaguuguug

SEQ ID NO: 20704 - RNA, 20 nt, Artificial Sequence
  targeting sequence with TTCN PAM
gagccacguuuuaaaauguc

SEQ ID NO: 20705 - RNA, 20 nt, Artificial Sequence
  targeting sequence with TTCN PAM
uuccuuuccacaacuucuac

SEQ ID NO: 20706 - RNA, 20 nt, Artificial Sequence
  targeting sequence with TTCN PAM
uuuccacaacuucuacuuuu

SEQ ID NO: 20707 - RNA, 20 nt, Artificial Sequence
  targeting sequence with TTCN PAM
acaacuucuacuuuuguucc

SEQ ID NO: 20708 - RNA, 20 nt, Artificial Sequence
  targeting sequence with TTCN PAM
acuuuuguuccgauuucuuc

SEQ ID NO: 20709 - RNA, 20 nt, Artificial Sequence
  targeting sequence with TTCN PAM
gauuucuucagauucuaaaa

SEQ ID NO: 20710 - RNA, 20 nt, Artificial Sequence
  targeting sequence with TTCN PAM
ucagauucuaaaaagguauc

SEQ ID NO: 20711 - RNA, 20 nt, Artificial Sequence
  targeting sequence with TTCN PAM
gauucuaaaaagguauccuc

SEQ ID NO: 20712 - RNA, 20 nt, Artificial Sequence
  targeting sequence with TTCN PAM
aaaaagguauccucauacuu

SEQ ID NO: 20713 - RNA, 20 nt, Artificial Sequence
  targeting sequence with TTCN PAM
cguuguguucugagucuuug

SEQ ID NO: 20714 - RNA, 20 nt, Artificial Sequence
  targeting sequence with TTCN PAM
gagucuuuggcugaacaaaa

SEQ ID NO: 20715 - RNA, 20 nt, Artificial Sequence
  targeting sequence with TTCN PAM
gccaaagacucagaacacaa

SEQ ID NO: 20716 - RNA, 20 nt, Artificial Sequence
  targeting sequence with TTCN PAM
ggcaucauaaacaaauuuug

SEQ ID NO: 20717 - RNA, 20 nt, Artificial Sequence
  targeting sequence with TTCN PAM
gaacaaaaauuugauccuga

SEQ ID NO: 20718 - RNA, 20 nt, Artificial Sequence
  targeting sequence with TTCN PAM
gaacaaaaaacuucuggcau

SEQ ID NO: 20719 - RNA, 20 nt, Artificial Sequence
  targeting sequence with TTCN PAM
ggaucaaauuuuuguucuga

SEQ ID NO: 20720 - RNA, 20 nt, Artificial Sequence
  targeting sequence with TTCN PAM
aagugauagcaaaagagaau

SEQ ID NO: 20721 - RNA, 20 nt, Artificial Sequence
  targeting sequence with TTCN PAM
gguuuuguucaaagugauag

SEQ ID NO: 20722 - RNA, 20 nt, Artificial Sequence
  targeting sequence with TTCN PAM
uacauccuuuuuuaguuuuc

SEQ ID NO: 20723 - RNA, 20 nt, Artificial Sequence
  targeting sequence with TTCN PAM
uaauugggauuccuuucaaa

SEQ ID NO: 20724 - RNA, 20 nt, Artificial Sequence
  targeting sequence with TTCN PAM
uuucaaaauagucaccuuuc

SEQ ID NO: 20725 - RNA, 20 nt, Artificial Sequence
  targeting sequence with TTCN PAM
aaauagucaccuuuccuuug

SEQ ID NO: 20726 - RNA, 20 nt, Artificial Sequence
  targeting sequence with TTCN PAM
uuugggcuuucuaaccuuuc

SEQ ID NO: 20727 - RNA, 20 nt, Artificial Sequence
  targeting sequence with TTCN PAM
aaccuuucugaaguuaacau

SEQ ID NO: 20728 - RNA, 20 nt, Artificial Sequence
  targeting sequence with TTCN PAM
gaaguuaacaucaucaacac

SEQ ID NO: 20729 - RNA, 20 nt, Artificial Sequence
  targeting sequence with TTCN PAM
gaaagguuagaaagcccaaa

SEQ ID NO: 20730 - RNA, 20 nt, Artificial Sequence
  targeting sequence with TTCN PAM
uucaaaagcaaaugagugga

SEQ ID NO: 20731 - RNA, 20 nt, Artificial Sequence
  targeting sequence with TTCN PAM
aaagcaaaugaguggaagua

SEQ ID NO: 20732 - RNA, 20 nt, Artificial Sequence
  targeting sequence with TTCN PAM
acucauuugcuuuugaaaga

SEQ ID NO: 20733 - RNA, 20 nt, Artificial Sequence
  targeting sequence with TTCN PAM
gguccugagguuccaguuug

SEQ ID NO: 20734 - RNA, 20 nt, Artificial Sequence
  targeting sequence with TTCN PAM
aguuugaauuguuacuuugg

SEQ ID NO: 20735 - RNA, 20 nt, Artificial Sequence
  targeting sequence with TTCN PAM
aacuggaaccucaggacccg

SEQ ID NO: 20736 - RNA, 20 nt, Artificial Sequence
  targeting sequence with TTCN PAM
aaaagggguaucaagucaag

SEQ ID NO: 20737 - RNA, 20 nt, Artificial Sequence
  targeting sequence with TTCN PAM
ggcuuaagagaagucucucc

SEQ ID NO: 20738 - RNA, 20 nt, Artificial Sequence
  targeting sequence with TTCN PAM
cuuaagccagaagauuuuga

SEQ ID NO: 20739 - RNA, 20 nt, Artificial Sequence
  targeting sequence with TTCN PAM
caaaaauggagagacuucuc

SEQ ID NO: 20740 - RNA, 20 nt, Artificial Sequence
  targeting sequence with TTCN PAM
cuugcuaauuaucuucacaa

SEQ ID NO: 20741 - RNA, 20 nt, Artificial Sequence
  targeting sequence with TTCN PAM
gauccaaaaguucacuugcu

SEQ ID NO: 20742 - RNA, 20 nt, Artificial Sequence
  targeting sequence with TTCN PAM
guccuugugggcuagaaaau

SEQ ID NO: 20743 - RNA, 20 nt, Artificial Sequence
  targeting sequence with TTCN PAM
agcccacaaggacugaaguu

SEQ ID NO: 20744 - RNA, 20 nt, Artificial Sequence
  targeting sequence with TTCN PAM
uuuaauaucauuuucuagcc

SEQ ID NO: 20745 - RNA, 20 nt, Artificial Sequence
  targeting sequence with TTCN PAM
auuuacuagcaguaaguuuc

SEQ ID NO: 20746 - RNA, 20 nt, Artificial Sequence
  targeting sequence with TTCN PAM
uuuaaaagucccuucuauuu

SEQ ID NO: 20747 - RNA, 20 nt, Artificial Sequence
  targeting sequence with TTCN PAM
gauuucuaauuaauuuccaa

SEQ ID NO: 20748 - RNA, 20 nt, Artificial Sequence
  targeting sequence with TTCN PAM
aauuaauuuccaaauguugc

SEQ ID NO: 20749 - RNA, 20 nt, Artificial Sequence
  targeting sequence with TTCN PAM
aaauguugccauagguaucu

SEQ ID NO: 20750 - RNA, 20 nt, Artificial Sequence
  targeting sequence with TTCN PAM
uuuuuaaaugacagauaccu

SEQ ID NO: 20751 - RNA, 20 nt, Artificial Sequence
  targeting sequence with TTCN PAM
ugcugucuucccaaauaacc

SEQ ID NO: 20752 - RNA, 20 nt, Artificial Sequence
  targeting sequence with TTCN PAM
caaauaaccuuugcuucaca

SEQ ID NO: 20753 - RNA, 20 nt, Artificial Sequence
  targeting sequence with TTCN PAM
caacucuuucccauccacau

SEQ ID NO: 20754 - RNA, 20 nt, Artificial Sequence
  targeting sequence with TTCN PAM
cauccacaugggacagacuu

SEQ ID NO: 20755 - RNA, 20 nt, Artificial Sequence
  targeting sequence with TTCN PAM
guuccugcaguagcaccaaa

SEQ ID NO: 20756 - RNA, 20 nt, Artificial Sequence
  targeting sequence with TTCN PAM
ugcaguagcaccaaacugag

SEQ ID NO: 20757 - RNA, 20 nt, Artificial Sequence
  targeting sequence with TTCN PAM
gcucaguuuggugcuacugc

SEQ ID NO: 20758 - RNA, 20 nt, Artificial Sequence
  targeting sequence with TTCN PAM
uguagcaagggauuacauuc

SEQ ID NO: 20759 - RNA, 20 nt, Artificial Sequence
  targeting sequence with TTCN PAM
cugcuucuuuuuaucaucau

SEQ ID NO: 20760 - RNA, 20 nt, Artificial Sequence
  targeting sequence with TTCN PAM
uuuuaucaucauuuguuccu

SEQ ID NO: 20761 - RNA, 20 nt, Artificial Sequence
  targeting sequence with TTCN PAM
ucaucuucucccacucuuuc

SEQ ID NO: 20762 - RNA, 20 nt, Artificial Sequence
  targeting sequence with TTCN PAM
cccacucuuuccaauuccau

SEQ ID NO: 20763 - RNA, 20 nt, Artificial Sequence
  targeting sequence with TTCN PAM
aauuccauagcaacaucuuc

SEQ ID NO: 20764 - RNA, 20 nt, Artificial Sequence
  targeting sequence with TTCN PAM
auagcaacaucuucuuugcu

SEQ ID NO: 20765 - RNA, 20 nt, Artificial Sequence
  targeting sequence with TTCN PAM
uugcuggaaaaacaaagucu

SEQ ID NO: 20766 - RNA, 20 nt, Artificial Sequence
  targeting sequence with TTCN PAM
agcaaagaagauguugcuau

SEQ ID NO: 20767 - RNA, 20 nt, Artificial Sequence
  targeting sequence with TTCN PAM
ugucuuccaaaagcuuccca

SEQ ID NO: 20768 - RNA, 20 nt, Artificial Sequence
  targeting sequence with TTCN PAM
aaaagcuucccauauccucu

SEQ ID NO: 20769 - RNA, 20 nt, Artificial Sequence
  targeting sequence with TTCN PAM
cauauccucuagcacagguu

SEQ ID NO: 20770 - RNA, 20 nt, Artificial Sequence
  targeting sequence with TTCN PAM
aacaccuuuuaaccugugcu

SEQ ID NO: 20771 - RNA, 20 nt, Artificial Sequence
  targeting sequence with TTCN PAM
agcuugacuuuuuuguugug

SEQ ID NO: 20772 - RNA, 20 nt, Artificial Sequence
  targeting sequence with TTCN PAM
gauuaaucacugaguagggc

SEQ ID NO: 20773 - RNA, 20 nt, Artificial Sequence
  targeting sequence with TTCN PAM
gggggcacuuaccauaaauu

SEQ ID NO: 20774 - RNA, 20 nt, Artificial Sequence
  targeting sequence with TTCN PAM
caaauuuaugguaagugccc

SEQ ID NO: 20775 - RNA, 20 nt, Artificial Sequence
  targeting sequence with TTCN PAM
uauucucaaauuuaugguaa

SEQ ID NO: 20776 - RNA, 20 nt, Artificial Sequence
  targeting sequence with TTCN PAM
ggugcuuaagagcuuagcua

SEQ ID NO: 20777 - RNA, 20 nt, Artificial Sequence
  targeting sequence with TTCN PAM
cugcaaauaaaugagguaaa

SEQ ID NO: 20778 - RNA, 20 nt, Artificial Sequence
  targeting sequence with TTCN PAM
gggagagaguguguaucacu

SEQ ID NO: 20779 - RNA, 20 nt, Artificial Sequence
  targeting sequence with TTCN PAM
ucagauguaauccuccagaa

SEQ ID NO: 20780 - RNA, 20 nt, Artificial Sequence
  targeting sequence with TTCN PAM
ggaggauuacaucugaugaa

SEQ ID NO: 20781 - RNA, 20 nt, Artificial Sequence
  targeting sequence with TTCN PAM
guaucaaauuauuuaccuuc

SEQ ID NO: 20782 - RNA, 20 nt, Artificial Sequence
  targeting sequence with TTCN PAM
aaaauucuguaucaaauuau

SEQ ID NO: 20783 - RNA, 20 nt, Artificial Sequence
  targeting sequence with TTCN PAM
ucauucuugauccucauggu

SEQ ID NO: 20784 - RNA, 20 nt, Artificial Sequence
  targeting sequence with TTCN PAM
uucuugauccucaugguaac

SEQ ID NO: 20785 - RNA, 20 nt, Artificial Sequence
  targeting sequence with TTCN PAM
ugauccucaugguaaccuug

SEQ ID NO: 20786 - RNA, 20 nt, Artificial Sequence
  targeting sequence with TTCN PAM
gcaaguaauuuaaccuguca

SEQ ID NO: 20787 - RNA, 20 nt, Artificial Sequence
  targeting sequence with TTCN PAM
cgugucuguucugcaaguaa

SEQ ID NO: 20788 - RNA, 20 nt, Artificial Sequence
  targeting sequence with TTCN PAM
cccccauacuguuauugaaa

SEQ ID NO: 20789 - RNA, 20 nt, Artificial Sequence
  targeting sequence with TTCN PAM
auaacaguaugggggagaag

SEQ ID NO: 20790 - RNA, 20 nt, Artificial Sequence
  targeting sequence with TTCN PAM
uguaaugcuagcacuuuggg

SEQ ID NO: 20791 - RNA, 20 nt, Artificial Sequence
  targeting sequence with TTCN PAM
uccucccaaagugcuagcau

SEQ ID NO: 20792 - RNA, 20 nt, Artificial Sequence
  targeting sequence with TTCN PAM
cacuuccuccucccaaagug

SEQ ID NO: 20793 - RNA, 20 nt, Artificial Sequence
  targeting sequence with TTCN PAM
uuuuuugcaaagacgaggau

SEQ ID NO: 20794 - RNA, 20 nt, Artificial Sequence
  targeting sequence with TTCN PAM
gggagcuaugauugugccac

SEQ ID NO: 20795 - RNA, 20 nt, Artificial Sequence
  targeting sequence with TTCN PAM
uuaaaguuccaaugugucuu

SEQ ID NO: 20796 - RNA, 20 nt, Artificial Sequence
  targeting sequence with TTCN PAM
aaugugucuucuaugaugaa

SEQ ID NO: 20797 - RNA, 20 nt, Artificial Sequence
  targeting sequence with TTCN PAM
augaugaaaacauacuuuua

SEQ ID NO: 20798 - RNA, 20 nt, Artificial Sequence
  targeting sequence with TTCN PAM
ucauagaagacacauuggaa

SEQ ID NO: 20799 - RNA, 20 nt, Artificial Sequence
  targeting sequence with TTCN PAM
guaaaguguauccuaaucac

SEQ ID NO: 20800 - RNA, 20 nt, Artificial Sequence
  targeting sequence with TTCN PAM
uuucuacaaauagggaaacu

SEQ ID NO: 20801 - RNA, 20 nt, Artificial Sequence
  targeting sequence with TTCN PAM
acaaauagggaaacugcaag

SEQ ID NO: 20802 - RNA, 20 nt, Artificial Sequence
  targeting sequence with TTCN PAM
cuauuuguagaaaagaacuu

SEQ ID NO: 20803 - RNA, 20 nt, Artificial Sequence
  targeting sequence with TTCN PAM
ugcaguuucccuauuuguag

SEQ ID NO: 20804 - RNA, 20 nt, Artificial Sequence
  targeting sequence with TTCN PAM
aguucuugcaguuucccuau

SEQ ID NO: 20805 - RNA, 20 nt, Artificial Sequence
  targeting sequence with TTCN PAM
aauucuaguucuugcaguuu

SEQ ID NO: 20806 - RNA, 20 nt, Artificial Sequence
  targeting sequence with TTCN PAM
gauguaauuugggguaaaau

SEQ ID NO: 20807 - RNA, 20 nt, Artificial Sequence
  targeting sequence with TTCN PAM
uaagauccauccagcuccuc

SEQ ID NO: 20808 - RNA, 20 nt, Artificial Sequence
  targeting sequence with TTCN PAM
guauuuuuaucucuaaaauu

SEQ ID NO: 20809 - RNA, 20 nt, Artificial Sequence
  targeting sequence with TTCN PAM
accaggcuucaguauuuuua

SEQ ID NO: 20810 - RNA, 20 nt, Artificial Sequence
  targeting sequence with TTCN PAM
agcucuaccagcuguaaguu

SEQ ID NO: 20811 - RNA, 20 nt, Artificial Sequence
  targeting sequence with TTCN PAM
uuuuacagagucuuuuaccg

SEQ ID NO: 20812 - RNA, 20 nt, Artificial Sequence
  targeting sequence with TTCN PAM
aaguaguucuuaguauuaaa

SEQ ID NO: 20813 - RNA, 20 nt, Artificial Sequence
  targeting sequence with TTCN PAM
uaguauuaaauuuugaaaaa

SEQ ID NO: 20814 - RNA, 20 nt, Artificial Sequence
  targeting sequence with TTCN PAM
aaauuuaauacuaagaacua

SEQ ID NO: 20815 - RNA, 20 nt, Artificial Sequence
  targeting sequence with TTCN PAM
uaggauccuccaaccccaag

SEQ ID NO: 20816 - RNA, 20 nt, Artificial Sequence
  targeting sequence with TTCN PAM
caaaaccucccggcuccccc

SEQ ID NO: 20817 - RNA, 20 nt, Artificial Sequence
  targeting sequence with TTCN PAM
ucaucuaagaugacuaggga

SEQ ID NO: 20818 - RNA, 20 nt, Artificial Sequence
  targeting sequence with TTCN PAM
ugugcgaucagcccuggggu

SEQ ID NO: 20819 - RNA, 20 nt, Artificial Sequence
  targeting sequence with TTCN PAM
agguuucugccgacccucug

SEQ ID NO: 20820 - RNA, 20 nt, Artificial Sequence
  targeting sequence with TTCN PAM
gccgacccucugucaaaggu

SEQ ID NO: 20821 - RNA, 20 nt, Artificial Sequence
  targeting sequence with TTCN PAM
aaccuuugacagagggucgg

SEQ ID NO: 20822 - RNA, 20 nt, Artificial Sequence
  targeting sequence with TTCN PAM
ccaccuguaaaaugguaucg

SEQ ID NO: 20823 - RNA, 20 nt, Artificial Sequence
  targeting sequence with TTCN PAM
gcgggucugggacuaggcgc

SEQ ID NO: 20824 - RNA, 20 nt, Artificial Sequence
  targeting sequence with TTCN PAM
caucuuacuccgccccacac

SEQ ID NO: 20825 - RNA, 20 nt, Artificial Sequence
  targeting sequence with TTCN PAM
gcucacggcaccgggcugca

SEQ ID NO: 20826 - RNA, 20 nt, Artificial Sequence
  targeting sequence with TTCN PAM
gaccucgguugcagcccggu

SEQ ID NO: 20827 - RNA, 20 nt, Artificial Sequence
  targeting sequence with TTCN PAM
caacauucagaccucgguug

SEQ ID NO: 20828 - RNA, 20 nt, Artificial Sequence
  targeting sequence with TTCN PAM
ggccgcccccucggcuacag

SEQ ID NO: 20829 - RNA, 20 nt, Artificial Sequence
  targeting sequence with TTCN PAM
acgcuccaccaaucaaaucc

SEQ ID NO: 20830 - RNA, 20 nt, Artificial Sequence
  targeting sequence with TTCN PAM
cgaggaagacgcaccgcccc

SEQ ID NO: 20831 - RNA, 20 nt, Artificial Sequence
  targeting sequence with TTCN PAM
ucgagaauggauuugauugg

SEQ ID NO: 20832 - RNA, 20 nt, Artificial Sequence
  targeting sequence with TTCN PAM
ggcuuucccuuucggacaug

SEQ ID NO: 20833 - RNA, 20 nt, Artificial Sequence
  targeting sequence with TTCN PAM
cuuucggacaugcgcgcucg

SEQ ID NO: 20834 - RNA, 20 nt, Artificial Sequence
  targeting sequence with TTCN PAM
gacaugcgcgcucggagcaa

SEQ ID NO: 20835 - RNA, 20 nt, Artificial Sequence
  targeting sequence with TTCN PAM
cuuacggcucgggcuccucc

SEQ ID NO: 20836 - RNA, 20 nt, Artificial Sequence
  targeting sequence with TTCN PAM
cgaagagcaggaggucgagu

SEQ ID NO: 20837 - RNA, 20 nt, Artificial Sequence
  targeting sequence with TTCN PAM
cgaaccgccccgcuccucac

SEQ ID NO: 20838 - RNA, 20 nt, Artificial Sequence
  targeting sequence with TTCN PAM
gugcccucggcccaggcagc

SEQ ID NO: 20839 - RNA, 20 nt, Artificial Sequence
  targeting sequence with TTCN PAM
ccaaccgccaaggggcggga

SEQ ID NO: 20840 - RNA, 20 nt, Artificial Sequence
  targeting sequence with TTCN PAM
cucacggucuggcccugucg

SEQ ID NO: 20841 - RNA, 20 nt, Artificial Sequence
  targeting sequence with TTCN PAM
ucucacacccacgagacagc

SEQ ID NO: 20842 - RNA, 20 nt, Artificial Sequence
  targeting sequence with TTCN PAM
ugcugucucgugggugugag

SEQ ID NO: 20843 - RNA, 20 nt, Artificial Sequence
  targeting sequence with TTCN PAM
caguucuugccacauccaca

SEQ ID NO: 20844 - RNA, 20 nt, Artificial Sequence
  targeting sequence with TTCN PAM
ugccacauccacauaguacc

SEQ ID NO: 20845 - RNA, 20 nt, Artificial Sequence
  targeting sequence with TTCN PAM
ugacguuuuucucuaaauug

SEQ ID NO: 20846 - RNA, 20 nt, Artificial Sequence
  targeting sequence with TTCN PAM
cuaaauugucucauuuauuu

SEQ ID NO: 20847 - RNA, 20 nt, Artificial Sequence
  targeting sequence with TTCN PAM
cauuuuacaaggaaacuuua

SEQ ID NO: 20848 - RNA, 20 nt, Artificial Sequence
  targeting sequence with TTCN PAM
uuguaaaaugugaaaucaua

SEQ ID NO: 20849 - RNA, 20 nt, Artificial Sequence
  targeting sequence with TTCN PAM
uaaauggaguaauaaaguuu

SEQ ID NO: 20850 - RNA, 20 nt, Artificial Sequence
  targeting sequence with TTCN PAM
cccuacuuuaaguuuuacuu

SEQ ID NO: 20851 - RNA, 20 nt, Artificial Sequence
  targeting sequence with TTCN PAM
guuuuguuucucccuacuuu

SEQ ID NO: 20852 - RNA, 20 nt, Artificial Sequence
  targeting sequence with TTCN PAM
cuaaaacuggagaugggcag

SEQ ID NO: 20853 - RNA, 20 nt, Artificial Sequence
  targeting sequence with TTCN PAM
gaucauaccugcccaucucc

SEQ ID NO: 20854 - RNA, 20 nt, Artificial Sequence
  targeting sequence with TTCN PAM
caauuaggagagcuuguguu

SEQ ID NO: 20855 - RNA, 20 nt, Artificial Sequence
  targeting sequence with TTCN PAM
gacuucccaauuaggagagc

SEQ ID NO: 20856 - RNA, 20 nt, Artificial Sequence
  targeting sequence with TTCN PAM
uuuucagacuucccaauuag

SEQ ID NO: 20857 - RNA, 20 nt, Artificial Sequence
  targeting sequence with TTCN PAM
guucuuuuucagacuuccca

SEQ ID NO: 20858 - RNA, 20 nt, Artificial Sequence
  targeting sequence with TTCN PAM
ccuucaguucuuuuucagac

SEQ ID NO: 20859 - RNA, 20 nt, Artificial Sequence
  targeting sequence with TTCN PAM
guuauuuaauguccuauucc

SEQ ID NO: 20860 - RNA, 20 nt, Artificial Sequence
  targeting sequence with TTCN PAM
auuguuaucgccuaaaucua

SEQ ID NO: 20861 - RNA, 20 nt, Artificial Sequence
  targeting sequence with TTCN PAM
uacuuaugggauaggucuug

SEQ ID NO: 20862 - RNA, 20 nt, Artificial Sequence
  targeting sequence with TTCN PAM
aagucaggccaagaccuauc

SEQ ID NO: 20863 - RNA, 20 nt, Artificial Sequence
  targeting sequence with TTCN PAM
gcauuguugugaagccucug

SEQ ID NO: 20864 - RNA, 20 nt, Artificial Sequence
  targeting sequence with TTCN PAM
caacaaugcugaaugauuuu

SEQ ID NO: 20865 - RNA, 20 nt, Artificial Sequence
  targeting sequence with TTCN PAM
ggccacuggagcagguuacu

SEQ ID NO: 20866 - RNA, 20 nt, Artificial Sequence
  targeting sequence with TTCN PAM
gucccuucugagaucuuucu

SEQ ID NO: 20867 - RNA, 20 nt, Artificial Sequence
  targeting sequence with TTCN PAM
gagaucuuucucuguguaaa

SEQ ID NO: 20868 - RNA, 20 nt, Artificial Sequence
  targeting sequence with TTCN PAM
cuguguaaagcaugccgucu

SEQ ID NO: 20869 - RNA, 20 nt, Artificial Sequence
  targeting sequence with TTCN PAM
gugugagaugaggagagacg

SEQ ID NO: 20870 - RNA, 20 nt, Artificial Sequence
  targeting sequence with TTCN PAM
ggauuuccgugugagaugag

SEQ ID NO: 20871 - RNA, 20 nt, Artificial Sequence
  targeting sequence with TTCN PAM
aggcucacguuggagacggg

SEQ ID NO: 20872 - RNA, 20 nt, Artificial Sequence
  targeting sequence with TTCN PAM
gcacuagugguagcugacac

SEQ ID NO: 20873 - RNA, 20 nt, Artificial Sequence
  targeting sequence with TTCN PAM
uauccuuuaucucguugugu

(The sequence listing continues in the following parts.)
